United States Patent Application Publication US 2002/0048763 A1 - sequence listing, part 8

SEQ ID NO: 25518 - DNA, 175 bp, Homo sapiens
  MAP TO AC007869.2; EXPRESSED IN PLACENTA, SIGNAL = 2.5; EXPRESSED IN BONE MARROW, SIGNAL = 3.1; EXPRESSED IN LUNG, SIGNAL =   5; EXPRESSED IN HEART, SIGNAL = 6.3; EXPRESSED IN BRAIN, SIGNAL = 3.5; EXPRESSED IN HELA, SIGNAL = 3.3; EXPRESSED IN FETAL LIVER, SIGNAL = 5.1; EXPRESSED IN ADULT LIVER, SIGNAL = 4.6; EST_HUMAN HIT: AW013847.1, EVALUE 6.00e-04; SWISSPROT HIT: O66998, EVALUE 6.70e+00; NT HIT: AB023185.1, EVALUE 1.60e+00
ttgcccaaggtcacacagggcacaagcaaccacatcgagtttggaactgggcctgactgggaagccacgttcatcccgcagaccaagggggctttagagatcgtctggggaaagccagggattccggtgatggagaagctggggatgctgggcgtgtgcttcaggcacaggctca

SEQ ID NO: 25519 - DNA, 319 bp, Homo sapiens
  MAP TO AP001255.1; EXPRESSED IN HELA, SIGNAL = 2.5; EXPRESSED IN HEART, SIGNAL =   2; EXPRESSED IN BRAIN, SIGNAL = 1.8; EXPRESSED IN PLACENTA, SIGNAL =   2; EXPRESSED IN ADULT LIVER, SIGNAL = 2.2; EXPRESSED IN BONE MARROW, SIGNAL =   2; EXPRESSED IN FETAL LIVER, SIGNAL = 2.6; SWISSPROT HIT: P35556, EVALUE 1.20e+00; EST_HUMAN HIT: AW875651.1, EVALUE 3.00e-26; NT HIT: AL163247.2, EVALUE 8.00e-07
agcatgataattagctgataacaacttcactacttgaaaacagtggggacacaggcctttgtctatctcaaggttacacttatgtttgcctgctgcattagcacatatcagcacagatagtgtgtctttggcatttttaacttctgtcagggatatctcactagctgtaatcagtgtctttctagagcaataacaccaaaacagtgatgttccatcagtattgcaactttgttctagtatcagattttcatcagtgatgatcttatcaaactcatcaatgaatttctttgttgcttcatgatcaacagatgctttatca

SEQ ID NO: 25520 - DNA, 167 bp, Homo sapiens
  MAP TO AC011609.9; EXPRESSED IN ADULT LIVER, SIGNAL = 4.2; EXPRESSED IN BONE MARROW, SIGNAL = 3.6; EXPRESSED IN FETAL LIVER, SIGNAL = 5.1; EXPRESSED IN HEART, SIGNAL = 4.9; EXPRESSED IN PLACENTA, SIGNAL = 3.5; EXPRESSED IN LUNG, SIGNAL = 3.4; EXPRESSED IN BRAIN, SIGNAL =   5; EXPRESSED IN HELA, SIGNAL = 5.7; NT HIT: gi11433673, EVALUE 2.00e-89; SWISSPROT HIT: P35331, EVALUE 1.00e-10; EST_HUMAN HIT: AW104570.1, EVALUE 1.50e-01
gggatatgcagcctactgaaagtgctgacagcttagtcgaatacggagagggagaccatggtctcttcagtgaagatggatcatttattggtgcctacgctggatctaaggagaagggatctgttgaaagcaatggaagttctacagcaacttttccccttcgggca

SEQ ID NO: 25521 - DNA, 176 bp, Homo sapiens
  MAP TO AC018558.2; EXPRESSED IN FETAL LIVER, SIGNAL = 1.6; EXPRESSED IN HEART, SIGNAL =   2; EXPRESSED IN BRAIN, SIGNAL = 2.2; SWISSPROT HIT: P87053, EVALUE 3.90e+00; NT HIT: L19439.1, EVALUE 3.00e-08; EST_HUMAN HIT: AW118799.1, EVALUE 3.00e-40
ctactgcaactgcaagctttgtacttgttcttctagccacagaacagtagtctttaacattgccacttctgtttgtatctcagtgttagttttattttgaaacatccatgcctggtcagctgtatgcatccaattttctgcatattgagctgtttgagtggagctgtccagtgcta

SEQ ID NO: 25522 - DNA, 94 bp, Homo sapiens
  MAP TO AC018790.3; EXPRESSED IN ADULT LIVER, SIGNAL = 2.2; EXPRESSED IN BONE MARROW, SIGNAL =   2; EXPRESSED IN FETAL LIVER, SIGNAL = 3.1; EXPRESSED IN HEART, SIGNAL = 2.6; EXPRESSED IN PLACENTA, SIGNAL = 1.8; EXPRESSED IN LUNG, SIGNAL = 2.6; EXPRESSED IN BRAIN, SIGNAL = 2.2; EXPRESSED IN HELA, SIGNAL = 2.7; NT HIT: D31765.1, EVALUE 3.00e-46; SWISSPROT HIT: P42858, EVALUE 5.50e+00; EST_HUMAN HIT: AW364973.1, EVALUE 5.00e-46
cgatttgacgatggagatgaacagattccggctgattgggccactttcccactccatcctaactgaagcaataaaagctgcttctgtccacact

SEQ ID NO: 25523 - DNA, 164 bp, Homo sapiens
  MAP TO AL160006.1; EXPRESSED IN BRAIN, SIGNAL = 1.9; EXPRESSED IN ADULT LIVER, SIGNAL = 2.3; EXPRESSED IN HEART, SIGNAL =   2; EXPRESSED IN PLACENTA, SIGNAL = 2.5; EXPRESSED IN LUNG, SIGNAL = 2.2; EXPRESSED IN HELA, SIGNAL = 2.2; EXPRESSED IN FETAL LIVER, SIGNAL = 1.9; EXPRESSED IN BONE MARROW, SIGNAL = 1.8; SWISSPROT HIT: P12824, EVALUE 6.00e-01; NT HIT: AF109905.1, EVALUE 2.40e-02
atgaggacgaggacgctcagagtccgtgtgagaacctgggtcatccaatcctaaagtccatgctcttcccaaggtgcccggccatggagtgtggcagacagtgtgctcaaaaggaggaggcaggagggaaggctggtgctgaggacagagccgaagaaagggca

SEQ ID NO: 25524 - DNA, 150 bp, Homo sapiens
  MAP TO AL136316.2; EXPRESSED IN BRAIN, SIGNAL = 2.1; EXPRESSED IN PLACENTA, SIGNAL = 2.3; EXPRESSED IN ADULT LIVER, SIGNAL = 1.8; EXPRESSED IN BONE MARROW, SIGNAL = 1.6; EXPRESSED IN HEART, SIGNAL = 1.7; EXPRESSED IN LUNG, SIGNAL = 2.8; EST_HUMAN HIT: BF026654.1, EVALUE 1.30e-01; NT HIT: AF283660.1, EVALUE 8.60e-02
gtggtgcataataataaagtcagcgtagtttctaacaaagagcagagaagaggatgtggtagcctcatctggctctcatgctacctcatgtgctatcacaggaaccccatacccgtcagattccaacaggaaatagatggcacatccaaa

SEQ ID NO: 25525 - DNA, 127 bp, Homo sapiens
  MAP TO AC011447.2; EXPRESSED IN HEART, SIGNAL =   2; EXPRESSED IN PLACENTA, SIGNAL = 1.8; EXPRESSED IN BRAIN, SIGNAL = 2.4; EXPRESSED IN ADULT LIVER, SIGNAL = 1.4; EXPRESSED IN BONE MARROW, SIGNAL = 1.7; EXPRESSED IN FETAL LIVER, SIGNAL = 1.8; SWISSPROT HIT: Q03938, EVALUE 1.00e-16; NT HIT: gi10567821, EVALUE 1.00e-55; EST_HUMAN HIT: BE252748.1, EVALUE 5.00e-53
ggaccattgcagtttagagacgtggccatagaattctctctggaggagtggcattgcctggacactgcacagcggaatttatatagggatgtgaagtttcagaactacagaaacttggtcttccttt

SEQ ID NO: 25526 - DNA, 339 bp, Homo sapiens
  MAP TO AC012153.10; EXPRESSED IN BRAIN, SIGNAL =   6; EXPRESSED IN ADULT LIVER, SIGNAL = 7.2; EXPRESSED IN BONE MARROW, SIGNAL = 5.7; EXPRESSED IN HELA, SIGNAL =   7; EXPRESSED IN LUNG, SIGNAL =   5; EXPRESSED IN HEART, SIGNAL = 6.1; EXPRESSED IN PLACENTA, SIGNAL = 6.9; EXPRESSED IN FETAL LIVER, SIGNAL = 6.8; NT HIT: gi11441373, EVALUE 6.00e-79; SWISSPROT HIT: Q9Z0E8, EVALUE 3.00e-05; EST_HUMAN HIT: BF196052.1, EVALUE 1.00e-89
cttggccacgattgtggaggtgaagatgctgcggtcatagacccagccatccacacacggctccgtgtcggcctcgctccagctggtggccgtggcattggggtccaagagctgccactgtggctggcggaagcggcggcactggtggggcctctggttggggcccggcgggatggaaatagccaggagggcctcaggactcaagctccctaggatgctggcctgagccgtgctgttgtccaggaggggtgcccagcagcggtggctgggcacggcggccgagaagttctccagcatgctctgggtacacagccacatgatggagaccatcagagccat

SEQ ID NO: 25527 - DNA, 309 bp, Homo sapiens
  MAP TO AL139289.4; EXPRESSED IN FETAL LIVER, SIGNAL = 3.8; EXPRESSED IN HEART, SIGNAL = 3.2; EXPRESSED IN BRAIN, SIGNAL = 2.9; EXPRESSED IN PLACENTA, SIGNAL = 2.8; EXPRESSED IN ADULT LIVER, SIGNAL =   3; EXPRESSED IN BONE MARROW, SIGNAL = 3.4; EXPRESSED IN HELA, SIGNAL = 3.7; EXPRESSED IN LUNG, SIGNAL = 3.9; EST_HUMAN HIT: AW387776.1, EVALUE 0.00e+00; SWISSPROT HIT: O08739, EVALUE 2.00e+00; NT HIT: gi9910437, EVALUE 1.00e-67
ctgccacgttcagtcctgcatcagaagcatacttcaggatccccattactttttcttcaggtctccggccgaacaagcagacctttaaccctacagacactaatgccttggtggcagctgttgcctttgggaaaggactatctaattggagaccttcaggcagcagtggtcctggccaggcaggccagccaggagctgggacgatccttgcaggaacctcaggattacagcaggtgcagatggcaggagctccaagccagcagcagccaatgctcagtggggtacaaatggctcaggcaggtcaaccag

SEQ ID NO: 25528 - DNA, 232 bp, Homo sapiens
  MAP TO AL121953.10; EXPRESSED IN BRAIN, SIGNAL = 1.6; EXPRESSED IN ADULT LIVER, SIGNAL =   2; EXPRESSED IN BONE MARROW, SIGNAL = 1.6; EXPRESSED IN FETAL LIVER, SIGNAL = 2.3; EXPRESSED IN HELA, SIGNAL = 2.2; EXPRESSED IN HEART, SIGNAL = 2.2; EXPRESSED IN PLACENTA, SIGNAL = 2.6; NT HIT: Y14755.1, EVALUE 5.50e-01; EST_HUMAN HIT: BE180422.1, EVALUE 2.10e-01; SWISSPROT HIT: Q04574, EVALUE 2.40e+00
atacgtgcctgtcagcagggtcaccgccagccaagttaaaggagcaataactgccctcccagtgatgctgaagaacctaaggcaagccagcttgcactctagggggctgattctcctgtatggaggggcacagctgcagcagtattcaccggtaattgtccacatttggcttctcagagcaaagccagcaacgagaaggatcaaggcaggaatgacaagaaaagcagaacca

SEQ ID NO: 25529 - DNA, 192 bp, Homo sapiens
  MAP TO AC024171.1; EXPRESSED IN BRAIN, SIGNAL = 2.5; EXPRESSED IN PLACENTA, SIGNAL = 2.1; EXPRESSED IN HELA, SIGNAL = 2.4; EXPRESSED IN BONE MARROW, SIGNAL = 2.1; EXPRESSED IN FETAL LIVER, SIGNAL = 2.4; EXPRESSED IN HEART, SIGNAL = 2.1; EXPRESSED IN LUNG, SIGNAL = 2.1; EXPRESSED IN ADULT LIVER, SIGNAL = 2.6; EST_HUMAN HIT: AW810934.1, EVALUE 7.00e-04; NT HIT: AJ271735.1, EVALUE 5.00e-07
atggtaaccaccatcataaaaacatgtaaaactataaaactcactggtagaactgatacacaaaaagaagaaagagaaagaatccttatcactacagaaaaccacccaactgcaaaaataaacaagaagataggacttaaggaaaaaatgatatacctaaacaaccagaaaacagtcaataaaacaccagga

SEQ ID NO: 25530 - DNA, 321 bp, Homo sapiens
  MAP TO AP001208.1; EXPRESSED IN BRAIN, SIGNAL = 1.6; EXPRESSED IN PLACENTA, SIGNAL = 2.7; EXPRESSED IN ADULT LIVER, SIGNAL = 1.9; EXPRESSED IN FETAL LIVER, SIGNAL = 2.1; EXPRESSED IN HELA, SIGNAL = 2.5; EXPRESSED IN HEART, SIGNAL = 1.8; EST_HUMAN HIT: AA935373.1, EVALUE 2.90e-01
catctggccattgcttgtctcctttcctcttctcccctctctctgcttctccttttcctcattctcttcctctttttctcctcccttctcctcctcttctttttcttcttcttcttcttcctcctcttcttcttctacgtcttcttcttcttcctcttcttcttctccttctcctcctccccttcctcctcctcctccttctccttcctgttcctcttctgtcattctctctcctttcctcccctcaaccccaccccacaccctccctgggaataggctctgattgattctctgtgggtcaaatggacatctgtagtccag

SEQ ID NO: 25531 - DNA, 184 bp, Homo sapiens
  MAP TO AC018739.2; EXPRESSED IN BRAIN, SIGNAL = 2.2; EXPRESSED IN HELA, SIGNAL = 2.6; EXPRESSED IN ADULT LIVER, SIGNAL = 2.2; EXPRESSED IN PLACENTA, SIGNAL = 1.8; EXPRESSED IN LUNG, SIGNAL = 2.2; EXPRESSED IN HEART, SIGNAL = 2.5; EXPRESSED IN FETAL LIVER, SIGNAL = 2.7; EXPRESSED IN BONE MARROW, SIGNAL = 1.8; EST_HUMAN HIT: AU136520.1, EVALUE 7.00e-81; SWISSPROT HIT: P42394, EVALUE 1.00e+00; NT HIT: gi9506634, EVALUE 5.00e-81
cttcacaattacacttttaactctgtaatttacctctaccaatgtgtctgtaaccattctgatgatctggcctcttcgccactgatttttatcttggatcttaacagcacagtgcatatcattttcccatttaacaggttcccattttgagttttcataagcagctatcatcttttcttctaaa

SEQ ID NO: 25532 - DNA, 130 bp, Homo sapiens
  MAP TO AL121975.3; EXPRESSED IN ADULT LIVER, SIGNAL = 3.7; EXPRESSED IN BONE MARROW, SIGNAL =   3; EXPRESSED IN HELA, SIGNAL = 4.7; EXPRESSED IN LUNG, SIGNAL = 4.2; EXPRESSED IN BRAIN, SIGNAL = 3.6; EXPRESSED IN PLACENTA, SIGNAL = 3.1; EXPRESSED IN FETAL LIVER, SIGNAL = 5.5; EXPRESSED IN HEART, SIGNAL = 4.5; EST_HUMAN HIT: AW583960.1, EVALUE 4.30e-01; NT HIT: AL139078.2, EVALUE 2.90e-01
atgattggcacatttatgctcaccaacacgtatccaaagtggggaaaaaaaaggaatatttgtgcctgcttcccacaaagggggagagtaacatcattaaagatcacgagcataaaaattacagatacag

SEQ ID NO: 25533 - DNA, 268 bp, Homo sapiens
  MAP TO AL121985.13; EXPRESSED IN FETAL LIVER, SIGNAL = 2.6; EXPRESSED IN BRAIN, SIGNAL = 2.6; EXPRESSED IN PLACENTA, SIGNAL = 2.5; EXPRESSED IN ADULT LIVER, SIGNAL = 2.6; EXPRESSED IN BONE MARROW, SIGNAL = 2.8; EXPRESSED IN HELA, SIGNAL = 2.4; EXPRESSED IN HEART, SIGNAL =   2; EXPRESSED IN LUNG, SIGNAL = 3.2; NT HIT: AF166127.1, EVALUE 5.00e-23; EST_HUMAN HIT: AW027554.1, EVALUE 1.00e-105; SWISSPROT HIT: P10265, EVALUE 4.00e-16
cggagcctatcccagggccacatgtcttatcgcctttgtttaaaatgatattaggtagtaaaagcagttgagcaactgactcaccagacgcaatggaaataggaaacttggcagacacaattaatttaatctcatcaacagaatcagaattaatgagaccagtatgaatggtgaatcctttagcagaggtggatgctctacctaacaccaggcccactgaaccttgaggtaaagggccagtgacccccgtggggacaatcaaaggcaa

SEQ ID NO: 25534 - DNA, 106 bp, Homo sapiens
  MAP TO AC017016.3; EXPRESSED IN BRAIN, SIGNAL = 1.8; EXPRESSED IN PLACENTA, SIGNAL = 2.1; EXPRESSED IN LUNG, SIGNAL = 2.1; EXPRESSED IN HEART, SIGNAL =   2; EXPRESSED IN HELA, SIGNAL = 1.9; EXPRESSED IN FETAL LIVER, SIGNAL =   2; EXPRESSED IN BONE MARROW, SIGNAL = 2.1; EXPRESSED IN ADULT LIVER, SIGNAL = 2.1; NT HIT: AJ297357.1, EVALUE 3.60e+00; SWISSPROT HIT: P36073, EVALUE 6.30e-01
tggccaacacctctcaattcctctctcagctacttttgttttcctttgtcctacactgtttaccaaccctttctcttcctcattttctccttctgcaaataaaaac

SEQ ID NO: 25535 - DNA, 146 bp, Homo sapiens
  MAP TO AL133257.2; EXPRESSED IN PLACENTA, SIGNAL = 3.2; EXPRESSED IN ADULT LIVER, SIGNAL = 2.2; EXPRESSED IN BRAIN, SIGNAL = 3.2; EXPRESSED IN LUNG, SIGNAL =   3; EXPRESSED IN HEART, SIGNAL = 3.4; EXPRESSED IN HELA, SIGNAL =   3; EXPRESSED IN FETAL LIVER, SIGNAL = 3.8; EXPRESSED IN BONE MARROW, SIGNAL = 2.7; SWISSPROT HIT: P10272, EVALUE 1.00e-04; NT HIT: AF149773.1, EVALUE 1.00e-34; EST_HUMAN HIT: AW846967.1, EVALUE 1.00e-44
gaagctggagtcattcactgcaaaggccatcaaaaggcatcagatcccatcactcaggacaacgcttatcctgataaggtagctaaaaaagcagccatcaaaagggctcagatcccatcgctcaggacaatgcttatgctgataag

SEQ ID NO: 25536 - DNA, 186 bp, Homo sapiens
  MAP TO AC005323.1; EXPRESSED IN BRAIN, SIGNAL =   2; EXPRESSED IN BONE MARROW, SIGNAL = 2.8; EXPRESSED IN HELA, SIGNAL = 2.3; EXPRESSED IN HEART, SIGNAL = 2.1; EXPRESSED IN PLACENTA, SIGNAL = 1.9; EXPRESSED IN LUNG, SIGNAL = 3.5; EXPRESSED IN FETAL LIVER, SIGNAL =   2; EXPRESSED IN ADULT LIVER, SIGNAL = 2.5; NT HIT: gi8923939, EVALUE 6.00e-96; EST_HUMAN HIT: AA777043.1, EVALUE 2.00e-10; SWISSPROT HIT: P13535, EVALUE 2.00e-25
caccgtcacttttcctccttctctgctctggatggtccctttgacaaaggattctttgggctccgccacaaagacagatgttttggcatcaaagggcctattctgggcctcaatgcgctccctttcagactttcggaggaaaggagcagcctccccaaaaacagccaattctgagtctgaactcat

SEQ ID NO: 25537 - DNA, 201 bp, Homo sapiens; identical to SEQ ID NO: 20140
  MAP TO AC007955.4; EXPRESSED IN BRAIN, SIGNAL =   4; EXPRESSED IN PLACENTA, SIGNAL = 3.8; EXPRESSED IN FETAL LIVER, SIGNAL = 2.7; EXPRESSED IN HELA, SIGNAL = 2.2; EXPRESSED IN BONE MARROW, SIGNAL = 2.4; EXPRESSED IN ADULT LIVER, SIGNAL = 2.8; EXPRESSED IN HEART, SIGNAL = 2.6; EXPRESSED IN LUNG, SIGNAL = 3.1; EST_HUMAN HIT: Z40561.1, EVALUE 7.00e-04; SWISSPROT HIT: P30814, EVALUE 2.90e+00; NT HIT: L35930.1, EVALUE 3.00e-02

SEQ ID NO: 25538 - DNA, 240 bp, Homo sapiens
  MAP TO AC005212.1; EXPRESSED IN ADULT LIVER, SIGNAL = 1.4; EXPRESSED IN FETAL LIVER, SIGNAL =   2; EXPRESSED IN LUNG, SIGNAL = 6.6; EXPRESSED IN PLACENTA, SIGNAL = 1.6; EXPRESSED IN BRAIN, SIGNAL =   2; EXPRESSED IN HEART, SIGNAL = 2.2; EXPRESSED IN BONE MARROW, SIGNAL = 1.8; EXPRESSED IN HELA, SIGNAL = 2.3; EST_HUMAN HIT: BF347943.1, EVALUE 1.00e-21; SWISSPROT HIT: Q99758, EVALUE 2.00e-35; NT HIT: gi4501848, EVALUE 1.00e-117
gtgctgatactggacgagcccacctcgggcatggacgccatctccaggagggccatctgggatcttcttcagcggcagaaaagtgaccgcaccatcgtgctgaccacccacttcatggacgaggctgacctgctgggagaccgcatcgccatcatggccaagggggagctgcagtgctgcgggtcctcgctgttcctcaagcagaaatacggtgagcggtggggccagcccgcgacaggg

SEQ ID NO: 25539 - DNA, 152 bp, Homo sapiens
  MAP TO AC009263.6; EXPRESSED IN FETAL LIVER, SIGNAL = 3.6; EXPRESSED IN BONE MARROW, SIGNAL = 2.3; EXPRESSED IN HELA, SIGNAL = 4.1; EXPRESSED IN HEART, SIGNAL = 3.7; EXPRESSED IN LUNG, SIGNAL = 3.4; EXPRESSED IN ADULT LIVER, SIGNAL = 3.3; EXPRESSED IN BRAIN, SIGNAL = 4.3; EXPRESSED IN PLACENTA, SIGNAL =   8; EST_HUMAN HIT: BE279449.1, EVALUE 1.30e-01; SWISSPROT HIT: Q12117, EVALUE 1.80e+00
aaaccccctgaaatccttgcccatttccatcttcaatgagtacagtaagaatccatccaacaggtatagaaaaagcacgtgttcacagacagtttctctaaggagcaagcagcaaagccctggtggattgaagctggtcgcatcctggtttg

SEQ ID NO: 25540 - DNA, 133 bp, Homo sapiens
  MAP TO AL117692.1; EXPRESSED IN BRAIN, SIGNAL = 2.6; EXPRESSED IN PLACENTA, SIGNAL = 1.7; EXPRESSED IN FETAL LIVER, SIGNAL = 2.2; EXPRESSED IN HELA, SIGNAL = 2.3; EXPRESSED IN ADULT LIVER, SIGNAL = 1.8; EXPRESSED IN LUNG, SIGNAL = 2.8; EXPRESSED IN HEART, SIGNAL = 1.8; SWISSPROT HIT: P48650, EVALUE 4.10e+00; EST_HUMAN HIT: W22424.1, EVALUE 1.70e+00
tcaggaagtctctctccaccactcatcatggcttctccctgcagcatgtcccctcgctgctgcaggcaggctttgccaggctgcagatgcatggccacaggcccctctggattcccagccttccagcaagcat

SEQ ID NO: 25541 - DNA, 134 bp, Homo sapiens
  MAP TO AC000085.5; EXPRESSED IN ADULT LIVER, SIGNAL = 1.6; EXPRESSED IN FETAL LIVER, SIGNAL = 2.2; EXPRESSED IN PLACENTA, SIGNAL = 2.4; EXPRESSED IN BRAIN, SIGNAL = 1.7; EXPRESSED IN HEART, SIGNAL = 1.8; EXPRESSED IN BONE MARROW, SIGNAL = 2.4; EXPRESSED IN HELA, SIGNAL = 2.2; EXPRESSED IN LUNG, SIGNAL = 2.1; NT HIT: gi11526319, EVALUE 7.00e-70; EST_HUMAN HIT: BF207244.1, EVALUE 1.00e-10; SWISSPROT HIT: Q61666, EVALUE 2.00e-19
ggagccaatggcggtactcgtggctggactgcagggtgagtgctgctgccacctggttctctaggtaggccagggtggtctcttgctgcaccacatgaggcacggagaagagccgggcagcctgccttcccgag

SEQ ID NO: 25542 - DNA, 102 bp, Homo sapiens
  MAP TO AC009989.6; EXPRESSED IN PLACENTA, SIGNAL = 1.6; EXPRESSED IN FETAL LIVER, SIGNAL = 2.5; EXPRESSED IN ADULT LIVER, SIGNAL = 1.9; EXPRESSED IN HEART, SIGNAL = 2.6; EXPRESSED IN BRAIN, SIGNAL = 2.3; EXPRESSED IN LUNG, SIGNAL = 2.1; EXPRESSED IN HELA, SIGNAL = 2.9; EXPRESSED IN BONE MARROW, SIGNAL = 1.5; SWISSPROT HIT: Q08279, EVALUE 3.20e+00; EST_HUMAN HIT: W04985.1, EVALUE 1.00e-09; NT HIT: AL163248.2, EVALUE 3.00e-13
tgatctgataggaggcggagctcaggtggtaatgctcacctacctgccattcacctcctgctgtgccgcccagttcctcacagaccacggaccagtactggt

SEQ ID NO: 25543 - DNA, 93 bp, Homo sapiens
  MAP TO AC004025.1; EXPRESSED IN ADULT LIVER, SIGNAL = 2.3; EXPRESSED IN BRAIN, SIGNAL = 2.4; EXPRESSED IN BONE MARROW, SIGNAL = 2.3; EXPRESSED IN FETAL LIVER, SIGNAL = 2.7; EXPRESSED IN HELA, SIGNAL = 2.8; EXPRESSED IN HEART, SIGNAL = 2.3; EXPRESSED IN LUNG, SIGNAL =   2; EXPRESSED IN PLACENTA, SIGNAL = 5.4; NT HIT: AF014115.1, EVALUE 6.50e-01; EST_HUMAN HIT: BE304894.1, EVALUE 3.10e+00
gatatagaagttgacaatgatgctaatgatggagatagagatgctgggtattgtgggtacaattacgtagaggcaacagcctttgctatccag

SEQ ID NO: 25544 - DNA, 428 bp, Homo sapiens
  MAP TO AL157789.1; EXPRESSED IN BRAIN, SIGNAL = 4.8; EXPRESSED IN ADULT LIVER, SIGNAL = 4.6; EXPRESSED IN HELA, SIGNAL = 4.3; EXPRESSED IN HEART, SIGNAL = 2.6; EXPRESSED IN PLACENTA, SIGNAL = 3.7; EXPRESSED IN LUNG, SIGNAL = 8.9; EXPRESSED IN FETAL LIVER, SIGNAL = 3.4; EXPRESSED IN BONE MARROW, SIGNAL = 4.2; NT HIT: gi11435244, EVALUE 0.00e+00; SWISSPROT HIT: Q92537, EVALUE 1.00e-78; EST_HUMAN HIT: BF128645.1, EVALUE 1.60e+00
gcgtgaccagggggtatctggggaccaggtctccatcatggtggatggagtccaggttgcactaccatcatacgaggaggctgtatatggcagttctggtcactgtgtgccacctgctgaccccagagtacagattgtgctgtcagaagggtctgggcccagtgggaggagcgtgccaagggagcaacagctgccggaccaaggggcctgctcctctgcaggtggagaagatgaggccccaggccagtctggactatgtgaagcctggggctctcgggcctcagagactgtgatggtgcatcaggcaaccacctcttcctgggtggccggctcagggaaccgccaactggcacacaaagaaactgcagattcagagaacagtgacatacaaagccttttatccctcacgtcagaggagtacacagatg

SEQ ID NO: 25545 - DNA, 100 bp, Homo sapiens
  MAP TO AL136092.7; EXPRESSED IN BONE MARROW, SIGNAL = 4.9; EXPRESSED IN FETAL LIVER, SIGNAL =  13; EXPRESSED IN LUNG, SIGNAL = 3.8; EXPRESSED IN PLACENTA, SIGNAL = 7.8; EXPRESSED IN BRAIN, SIGNAL = 6.6; EXPRESSED IN HELA, SIGNAL =  10; EXPRESSED IN ADULT LIVER, SIGNAL = 6.6; EXPRESSED IN HEART, SIGNAL =  11; NT HIT: AL163282.2, EVALUE 1.00e-18; EST_HUMAN HIT: AA583173.1, EVALUE 3.00e-26; SWISSPROT HIT: P76630, EVALUE 7.20e+00
atgtttaactggacttacagttccatatggctgggagacttcagaatcatggtgggaggtgaaaggcacttcttatatggcagcagcaagagaaaatgag

SEQ ID NO: 25546 - DNA, 82 bp, Homo sapiens
  MAP TO AL133233.2; EXPRESSED IN BONE MARROW, SIGNAL =   2; EXPRESSED IN HEART, SIGNAL = 2.6; EXPRESSED IN BRAIN, SIGNAL =   2; EXPRESSED IN PLACENTA, SIGNAL = 2.6; EXPRESSED IN FETAL LIVER, SIGNAL = 2.4; EXPRESSED IN ADULT LIVER, SIGNAL =   2; EXPRESSED IN HELA, SIGNAL = 2.8; NT HIT: X89211.1, EVALUE 4.00e-27; EST_HUMAN HIT: AA372637.1, EVALUE 2.00e-23
agcctgttgacttaaaggtagaaggagcccaaagtgtccaggtggcagtcttaacatccagtttaatggaatcattgttgtg

SEQ ID NO: 25547 - DNA, 129 bp, Homo sapiens
  MAP TO AC024019.2; EXPRESSED IN ADULT LIVER, SIGNAL = 2.4; EXPRESSED IN HEART, SIGNAL =   2; EXPRESSED IN BRAIN, SIGNAL = 2.6; EXPRESSED IN PLACENTA, SIGNAL = 1.9; EXPRESSED IN BONE MARROW, SIGNAL = 2.2; EXPRESSED IN FETAL LIVER, SIGNAL =   2; EXPRESSED IN HELA, SIGNAL = 1.9; SWISSPROT HIT: Q9Z7U0, EVALUE 9.20e+00; NT HIT: AE001044.1, EVALUE 4.50e+00
tcagaatttccatacaatactgtatttacaaactttcataaaagttttgtgtctgcatttatcagtggctggtttcacactagcatcctgatcattctccctaatgatacggtgcatttcaataatgca

SEQ ID NO: 25548 - DNA, 290 bp, Homo sapiens
  MAP TO AC002059.3; EXPRESSED IN PLACENTA, SIGNAL = 4.4; EXPRESSED IN BONE MARROW, SIGNAL =   5; EXPRESSED IN ADULT LIVER, SIGNAL = 6.4; EXPRESSED IN LUNG, SIGNAL = 5.1; EXPRESSED IN BRAIN, SIGNAL = 5.9; EXPRESSED IN HEART, SIGNAL = 5.5; EXPRESSED IN HELA, SIGNAL = 7.5; EXPRESSED IN FETAL LIVER, SIGNAL = 7.4; SWISSPROT HIT: P52303, EVALUE 7.00e-44; NT HIT: U36253.1, EVALUE 0.00e+00; EST_HUMAN HIT: AI394032.1, EVALUE 1.00e-128
catggggttagagtcggagatgaggtctttaagggtgtccaggaagccctggtcctccaccagctgggcgttgatgtcgtggagcttggccacgcacacagctgctgtcttgcgcacatatggatcctcgtccttcaggcacttccggagtggctcgcacaggtactctgtgatcttgtcaacgcggatgcagcccatggtccgcactgccagggctcggatgagggggttggggtcctcacagtcctggggggaaccagccatcggccagggcaggggtgggatgagcc

SEQ ID NO: 25549 - DNA, 218 bp, Homo sapiens
  MAP TO AC011501.2; EXPRESSED IN BRAIN, SIGNAL =   3; EXPRESSED IN PLACENTA, SIGNAL = 1.9; EXPRESSED IN BONE MARROW, SIGNAL =   2; EXPRESSED IN FETAL LIVER, SIGNAL = 2.5; EXPRESSED IN HELA, SIGNAL = 2.6; EXPRESSED IN HEART, SIGNAL = 2.3; EXPRESSED IN ADULT LIVER, SIGNAL = 2.8; EXPRESSED IN LUNG, SIGNAL = 2.3; SWISSPROT HIT: P43627, EVALUE 7.00e-03; NT HIT: AF001886.1, EVALUE 7.00e-99
cctcatttcctcactctctcctgtctcatgttctaggaaacccttcaaatagttggccttcaccactgaaccaagctccaaaaccggtgagtacagaaccctcttatatccgttttggaaccctggggaggtgggaaccttggattcaggcgttgactcagatctcacagctctgacattgtacacttgtcttccaccatctccgaactcagatactc

SEQ ID NO: 25550 - DNA, 409 bp, Homo sapiens
  MAP TO AL158219.1; EXPRESSED IN BRAIN, SIGNAL = 2.3; EXPRESSED IN PLACENTA, SIGNAL =  27; EXPRESSED IN BONE MARROW, SIGNAL =   2; EXPRESSED IN ADULT LIVER, SIGNAL = 5.5; EXPRESSED IN FETAL LIVER, SIGNAL =  13; EXPRESSED IN HELA, SIGNAL =  18; EXPRESSED IN HEART, SIGNAL =   2; EXPRESSED IN LUNG, SIGNAL =  14; NT HIT: gi11434787, EVALUE 0.00e+00; EST_HUMAN HIT: BE379254.1, EVALUE 0.00e+00; SWISSPROT HIT: P05783, EVALUE 2.00e-54
tcaatctgctgagacgagtacttgtccagctcccctagttcttctgagccaactgtcatattgggccagaatgtctgccatgatcttggtgaggtcctgagatctgggggcatctggctccacagtcaacccagagctggcagtctgggcttgcagaccttttacttcctcttcatggttcttcttcatgaaaagaagctcctccttgagagcctcaatctctgtctccagctgcagccgagtgacattagtgtcatcaatgaccctgcggagtttatggatgtcactctccacagactggtgcatggccagctctgtctcatacttgactctaaagtcatcagcagcaagacgggcattgtcgatctgcagaatgatgtgggcgttgtccacagtatttgtgaagatc

SEQ ID NO: 25551 - DNA, 130 bp, Homo sapiens
  MAP TO AP001341.1; EXPRESSED IN PLACENTA, SIGNAL = 1.5; EXPRESSED IN BRAIN, SIGNAL = 1.6; EXPRESSED IN LUNG, SIGNAL = 3.6; EXPRESSED IN HEART, SIGNAL = 1.8; EXPRESSED IN HELA, SIGNAL = 1.9; EXPRESSED IN FETAL LIVER, SIGNAL = 1.7; EXPRESSED IN BONE MARROW, SIGNAL = 2.7; EXPRESSED IN ADULT LIVER, SIGNAL = 2.8; SWISSPROT HIT: Q50618, EVALUE 4.10e+00; NT HIT: AP000006.1, EVALUE 1.80e-02; EST_HUMAN HIT: BF029753.1, EVALUE 1.10e-01
ttctacttggccatgccaagggaggttaccctatcctcagtcgtgataaagctcatcttggcaattgcattgctcttgagaataattaacctactaatagacgtgtgactttttttgctatttaaagaac

SEQ ID NO: 25552 - DNA, 217 bp, Homo sapiens
  MAP TO AC021107.2; EXPRESSED IN BRAIN, SIGNAL = 1.8; EXPRESSED IN PLACENTA, SIGNAL = 2.5; EXPRESSED IN FETAL LIVER, SIGNAL = 1.9; EXPRESSED IN BONE MARROW, SIGNAL = 1.9; EXPRESSED IN HELA, SIGNAL = 2.6; EXPRESSED IN HEART, SIGNAL = 2.3; EXPRESSED IN LUNG, SIGNAL = 1.9; NT HIT: AF224669.1, EVALUE 2.00e-28; SWISSPROT HIT: P03360, EVALUE 4.10e-01; EST_HUMAN HIT: BE064410.1, EVALUE 2.00e-13
aatttttacatttctcatggctttgcctattctgcatgcaatgcgtccacgaagactaccatcagtggactcacaaaatgctttattcatcatcatgttattccacgctgcatttcctctgaacaaggcactcactttaaagctaaagaagtgtggcagttggcttctcctcattaaattctctggtgttaccatgctttttatcatcctgaagcag

SEQ ID NO: 25553 - DNA, 234 bp, Homo sapiens
  MAP TO AC021881.2; EXPRESSED IN HEART, SIGNAL =   2; EXPRESSED IN BRAIN, SIGNAL = 1.4; SWISSPROT HIT: Q13206, EVALUE 1.00e-17; NT HIT: AB040537.1, EVALUE 1.00e-129; EST_HUMAN HIT: AU143115.1, EVALUE 1.00e-129
cttttcatagttctgcatgaggcggctgatactctcgcgctcgacctgccattcgggtttcttcagttgcttcctcaactgcttctttttgttctgcctatggctgtgttttttcttccagcgattgaagctccgcaccgggtcgggtcgggctcccgaacccggagagttggccgttttgcccattgcggcggcggcggcgacagctcggatcaaccccagacacgagacacc

SEQ ID NO: 25554 - DNA, 194 bp, Homo sapiens
  MAP TO AP001328.1; EXPRESSED IN BONE MARROW, SIGNAL = 6.3; EXPRESSED IN HEART, SIGNAL = 4.7; EXPRESSED IN LUNG, SIGNAL =  12; EXPRESSED IN BRAIN, SIGNAL = 5.9; EXPRESSED IN PLACENTA, SIGNAL =   6; EXPRESSED IN ADULT LIVER, SIGNAL =   6; EXPRESSED IN FETAL LIVER, SIGNAL = 4.2; EXPRESSED IN HELA, SIGNAL = 4.8; SWISSPROT HIT: P10407, EVALUE 2.20e+00
ctgctcccacttttgtggggtgcctgcttcctgctgcaggatagtgaggtgtgttactgcaataatatctggaatggactctggggctacaaattccagagggtataaatgatactgctgaggctgccccacaggtgtatgtttaactttctgaatctggcttacattctcccattcttcaaaaattacgtttt

SEQ ID NO: 25555 - DNA, 205 bp, Homo sapiens
  MAP TO AC004554.1; EXPRESSED IN ADULT LIVER, SIGNAL = 2.9; EXPRESSED IN BONE MARROW, SIGNAL = 2.7; EXPRESSED IN LUNG, SIGNAL = 2.8; EXPRESSED IN PLACENTA, SIGNAL = 3.3; EXPRESSED IN BRAIN, SIGNAL = 2.8; EXPRESSED IN FETAL LIVER, SIGNAL = 3.4; EXPRESSED IN HELA, SIGNAL = 3.7; EXPRESSED IN HEART, SIGNAL = 3.2; EST_HUMAN HIT: BE006225.1, EVALUE 3.00e-52; SWISSPROT HIT: P53671, EVALUE 1.00e-19; NT HIT: gi11417990, EVALUE 2.00e-52
agctccgcctgccctctgtgatggccagcatggacatgagcatgacagagtagggcagctggtcctgaatggactctgtggagagtatctcaaatatgggtgccagcaccacctcatttgtggcactttccacagtatagggtgacacgcagcaccagggcgtatgcatccccatcctcaatggtcaccttatagctcacacagg

SEQ ID NO: 25556 - DNA, 215 bp, Homo sapiens
  MAP TO AC012558.6; EXPRESSED IN FETAL LIVER, SIGNAL = 5.8; EXPRESSED IN HELA, SIGNAL = 6.3; EXPRESSED IN HEART, SIGNAL = 4.5; EXPRESSED IN LUNG, SIGNAL = 2.4; EXPRESSED IN PLACENTA, SIGNAL = 2.8; EXPRESSED IN ADULT LIVER, SIGNAL = 2.6; EXPRESSED IN BONE MARROW, SIGNAL = 3.3; EXPRESSED IN BRAIN, SIGNAL = 3.1; SWISSPROT HIT: Q60675, EVALUE 5.40e-01
ctaggatgatggtttcgtttggttccacagtcttcagtgcctctgtctgcaaaggtggtcctttggggcagaggatacagctggcctctgaacctccctcacatggtccagaggggctatgattactaatatgcattggtttctcagggcatcttagcagcaggaaacaaagcttgcatatttttgggagcaggaagtaaacagcgtaccttccc

SEQ ID NO: 25557 - DNA, 201 bp, Homo sapiens
  MAP TO AC018719.2; EXPRESSED IN BRAIN, SIGNAL = 6.6; EXPRESSED IN HELA, SIGNAL = 8.9; EXPRESSED IN BONE MARROW, SIGNAL = 5.8; EXPRESSED IN FETAL LIVER, SIGNAL = 8.7; EXPRESSED IN HEART, SIGNAL = 7.2; EXPRESSED IN LUNG, SIGNAL = 5.3; EXPRESSED IN ADULT LIVER, SIGNAL = 7.2; EXPRESSED IN PLACENTA, SIGNAL = 5.8; NT HIT: AJ229041.1, EVALUE 2.00e-03; SWISSPROT HIT: Q28661, EVALUE 2.20e+00; EST_HUMAN HIT: T07770.1, EVALUE 8.00e-07
gtaaccatcgtacaatatcaaatccaggaaactgacattggtacaatgtgtatgtataattttatgccatttatcacgtgcattgatttgtgtaacctcaccatcacaatcaagacacagaacagttccatcattaccaagatctccctcctacctatcgttcatagtcacatccattcccttcccatccaccatgcctaa

SEQ ID NO: 25558 - DNA, 200 bp, Homo sapiens
  MAP TO AC004460.1; EXPRESSED IN PLACENTA, SIGNAL = 1.9; EXPRESSED IN BRAIN, SIGNAL =   2; EXPRESSED IN HEART, SIGNAL = 2.7; EXPRESSED IN HELA, SIGNAL = 4.1; EXPRESSED IN BONE MARROW, SIGNAL = 2.6; EXPRESSED IN FETAL LIVER, SIGNAL = 2.1; EXPRESSED IN LUNG, SIGNAL = 4.5; EXPRESSED IN ADULT LIVER, SIGNAL = 1.8; SWISSPROT HIT: Q08379, EVALUE 3.00e-03; NT HIT: AF163441.1, EVALUE 1.00e-35; EST_HUMAN HIT: BF087405.1, EVALUE 1.00e-79
ctgcctccagagcccccagcagtgccctctgaggtggagccgcagcacctgaggaaggaactagatagagtggcaggagagctccaggtccaggtcaaaaacaatcagcgcataagtctcctgaactggggacaagacgagaggattcgagagcaggaagagaggcttcggaagcaggaggagaggttttaggagcagca

SEQ ID NO: 25559 - DNA, 146 bp, Homo sapiens
  MAP TO AC021036.3; EXPRESSED IN BRAIN, SIGNAL = 3.2; EXPRESSED IN PLACENTA, SIGNAL = 2.3; EXPRESSED IN FETAL LIVER, SIGNAL = 3.1; EXPRESSED IN HELA, SIGNAL = 2.6; EXPRESSED IN BONE MARROW, SIGNAL = 2.1; EXPRESSED IN HEART, SIGNAL = 2.7; EXPRESSED IN LUNG, SIGNAL = 3.5; EXPRESSED IN ADULT LIVER, SIGNAL = 5.1; SWISSPROT HIT: P26675, EVALUE 6.90e+00; EST_HUMAN HIT: AA393900.1, EVALUE 1.90e+00; NT HIT: Z98682.1, EVALUE 1.30e+00
aaaagtaggatccaacttaccttggctactaatgaggccaacattatccccaccatccaggctcaaaattcaggcggcatcatctctttccaacatctagtcacacatcggtgtcccttcttctgccgcaatacctttatcattga

SEQ ID NO: 25560 - DNA, 452 bp, Homo sapiens
  MAP TO AC016025.11; EXPRESSED IN BRAIN, SIGNAL = 3.3; EXPRESSED IN PLACENTA, SIGNAL = 2.4; EXPRESSED IN FETAL LIVER, SIGNAL = 3.9; EXPRESSED IN HELA, SIGNAL = 3.4; EXPRESSED IN BONE MARROW, SIGNAL = 3.2; EXPRESSED IN HEART, SIGNAL = 3.1; EXPRESSED IN LUNG, SIGNAL = 2.1; EXPRESSED IN ADULT LIVER, SIGNAL = 3.1; EST_HUMAN HIT: N87545.1, EVALUE 1.10e-01; NT HIT: U62749.1, EVALUE 1.80e-02; SWISSPROT HIT: P29951, EVALUE 1.20e+00
tcagtctttgagcaagatcagatggcagcagctggccctgctcctggccgcctcctcccagttcgtccatttcacagagagcctgcctgtcagcagaggcaccctgctcccctctgccacactagagtgaggaagtaagaggatactccttttcttcatccccagctcacaatttaaacgctgaacctgcaggctataaagagacggaagttcccccatccagagactagacgaagatttgtggatgtttgagaaggcagagtggccactgcacccccggggctggtcctgcagcttcaaggtcctgaaccaataggacttcctgggccgtggggccagagatgcctcaggcactcccttgcattctctgtgcccaactatgctgagcgcagccgcgcaggttccctggatggaatggcaggaatgagcgcaccacattctccagggcttcc

SEQ ID NO: 25561 - DNA, 250 bp, Homo sapiens
  MAP TO AC002401.1; EXPRESSED IN BRAIN, SIGNAL = 3.3; EXPRESSED IN PLACENTA, SIGNAL = 1.5; EXPRESSED IN BONE MARROW, SIGNAL = 2.8; EXPRESSED IN FETAL LIVER, SIGNAL = 1.9; EXPRESSED IN LUNG, SIGNAL = 4.3; EXPRESSED IN ADULT LIVER, SIGNAL = 1.6; EXPRESSED IN HEART, SIGNAL = 2.5; EXPRESSED IN HELA, SIGNAL = 1.8; NT HIT: AF027181.1, EVALUE 2.00e-93; SWISSPROT HIT: Q25457, EVALUE 2.00e-03; EST_HUMAN HIT: BE895415.1, EVALUE 1.00e-127
ctgcagagcctggagcaggagaaggggcgctggcgggtggagaaggcgcagttggagcagagtgtggaggagaacaaggagcgcatggagaaactggaaggctactggggtgaggcccagagcctgtgccaggctgtggacgagcacctgcgggagactcaggcgcagtaccaggccctggagcgcaagtacagcaaggccaagcgcctcatcaaggactaccagcagaagtacgtggctgggggctggg

SEQ ID NO: 25562 - DNA, 131 bp, Homo sapiens
  MAP TO AL158841.1; EXPRESSED IN BRAIN, SIGNAL = 3.2; EXPRESSED IN PLACENTA, SIGNAL = 1.5; EXPRESSED IN BONE MARROW, SIGNAL = 1.8; EXPRESSED IN ADULT LIVER, SIGNAL = 3.7; EXPRESSED IN HELA, SIGNAL = 1.7; EXPRESSED IN HEART, SIGNAL = 3.2; EXPRESSED IN LUNG, SIGNAL = 1.7; SWISSPROT HIT: Q27905, EVALUE 5.30e+00
agttctggagggtggatgtccaagaccagggtcctagcaagtttggattcgagtgagggctctcttcttgacttgtagacagctgtctgaaagacactatcttcctcattcgcttcacgtatttgtgtttc

SEQ ID NO: 25563 - DNA, 289 bp, Homo sapiens
  MAP TO AC022374.1; EXPRESSED IN BRAIN, SIGNAL =  18; EXPRESSED IN HELA, SIGNAL =  52; EXPRESSED IN HEART, SIGNAL = 1e+02; EXPRESSED IN ADULT LIVER, SIGNAL =  16; EXPRESSED IN FETAL LIVER, SIGNAL =  34; EXPRESSED IN BONE MARROW, SIGNAL =  68; EXPRESSED IN LUNG, SIGNAL =  72; EXPRESSED IN PLACENTA, SIGNAL =  29; NT HIT: gi11038618, EVALUE 9.00e-90; EST_HUMAN HIT: BE563833.1, EVALUE 3.00e-90; SWISSPROT HIT: P53475, EVALUE 3.00e-36
atgaagtgtgatgtggacatctgcaaagacctacatgccaacaaggtgctgtccagcggcactaccatgtacccgggcatcaccaacaggatgcagaaggcaatcactgccctggcacccagcaccatgaagatcaagatcatcgtgcccccagagcgcaagtactctgtgtggatctgcagctccatcctggcctcactgtccatcttccagcagatgtggattaacaagcaggagtacaacaagttggcccctccatcgtccaccgcaaatgcttctaaatggaccg

SEQ ID NO: 25564 - DNA, 482 bp, Homo sapiens
  MAP TO AC002400.1; EXPRESSED IN PLACENTA, SIGNAL = 2.1; EXPRESSED IN FETAL LIVER, SIGNAL = 2.5; EXPRESSED IN ADULT LIVER, SIGNAL = 2.5; EXPRESSED IN HELA, SIGNAL = 2.4; EXPRESSED IN HEART, SIGNAL = 3.3; EXPRESSED IN BRAIN, SIGNAL = 2.2; EXPRESSED IN LUNG, SIGNAL = 2.2; EXPRESSED IN BONE MARROW, SIGNAL = 2.4; NT HIT: X64557.1, EVALUE 1.00e-09; SWISSPROT HIT: O51345, EVALUE 6.00e-37; EST_HUMAN HIT: BE794758.1, EVALUE 0.00e+00
ccccatcaggtatgacaatcggtgcaggaacatgagccaggagcaggtggcccagaagctggccaaggaccccaagcctgcgatccgcttccgcctggagcaggtggtgccagccttccaggacctggtctatggctggaataggcatgaagtggccagcgtggagggagacccagtcatcatgaagagcgacggcttccccacataccacctggcctgcgtggtggacgaccaccacatgggcatcagccacgtgctgcgaggctctgagtggctcgtctccactgccaagcacctgctcctctaccaggccctgggctggcagccaccccacttcgcccacctgcccctgctcctcaacagggatggcagcaagctctccaagaggcaaggggacgttttcctggagcactttgctgctgatggcttcctgcccgattccttgttggacatcatcaccaactgtggctcaggttttgcag

SEQ ID NO: 25565 - DNA, 483 bp, Homo sapiens
  MAP TO AC024006.2; EXPRESSED IN BRAIN, SIGNAL =  45; EXPRESSED IN PLACENTA, SIGNAL =  65; EXPRESSED IN ADULT LIVER, SIGNAL =  38; EXPRESSED IN BONE MARROW, SIGNAL = 1.6e+02; EXPRESSED IN FETAL LIVER, SIGNAL = 1.2e+02; EXPRESSED IN HELA, SIGNAL =  96; EXPRESSED IN HEART, SIGNAL =  38; EXPRESSED IN LUNG, SIGNAL = 2.8e+02; EST_HUMAN HIT: BE879633.1, EVALUE 0.00e+00; NT HIT: M29548.1, EVALUE 0.00e+00; SWISSPROT HIT: P10126, EVALUE 4.00e-76
ataaactctcaacacaaatgtgcttgccaggaaccacatcaatgatggcagcatcaccagacttcaagaatttagggccatcttccagctttttaccagaacggcgatcaatcttttccttcagctcagcaaacttgcatgcaacgtgaaccatgtggctatccagtgcaggggcacagccagcgctgatttggcctggatggttcaggataatcaccggagcagtgaagccagctgcttccactggtgggtcgtttttgctatcactagcaacattgccacaacaaacgtccttgacagacacattgttgacactgaagcccacactgtccccaggaaaagcttcactcaaagcttcatggtgcattttgacagattttacttcagttgtaatattgactggagcaaaggtgaccactataccaggtttgagaacaccagtctccactcggccaacaggaacagtaccaataccaccaattt

SEQ ID NO: 25566 - DNA, 398 bp, Homo sapiens
  MAP TO AC005301.22; EXPRESSED IN HEART, SIGNAL = 2.9; EXPRESSED IN LUNG, SIGNAL =  19; EXPRESSED IN PLACENTA, SIGNAL = 1.6; EST_HUMAN HIT: AU140989.1, EVALUE 1.00e-99; SWISSPROT HIT: P04275, EVALUE 3.00e-38; NT HIT: M60676.1, EVALUE 0.00e+00
cctggcccacatccatccgctgaatcacctcctccatgaactccttgctcctgttgaagttggcttcaccaattttgtccgatccttccaggacaaatgccacatccagaaccatggagttcctcttgggccccagggtcgaaagccccaagagccccgggcccacagtgacttgtgccatgtgggggggcagagtaggaggaggggcgtcaggggcaaggtcacagaggtagctaacgatctcttccctttgctgctccagctcatccacaccgctcagcacgaaggccttgttctcaggggcctgcttctcaatgaggcggatctgcttgaggttggcatggggcccaatgcccaccgggatcacgatgaccttcttcttcttcaggccctggacg

SEQ ID NO: 25567 - DNA, 100 bp, Homo sapiens
  MAP TO AC019205.2; EXPRESSED IN PLACENTA, SIGNAL =   2; EXPRESSED IN BONE MARROW, SIGNAL = 5.5; EXPRESSED IN LUNG, SIGNAL = 4.6; EXPRESSED IN HEART, SIGNAL = 4.8; EXPRESSED IN BRAIN, SIGNAL = 2.8; EXPRESSED IN HELA, SIGNAL = 6.7; EXPRESSED IN FETAL LIVER, SIGNAL = 6.2; EXPRESSED IN ADULT LIVER, SIGNAL = 2.5; SWISSPROT HIT: Q64252, EVALUE 2.00e-11; EST_HUMAN HIT: AW515509.1, EVALUE 4.00e-47; NT HIT: gi4503520, EVALUE 3.00e-40
atttagaatcaatcttggcatccagtcttgcatttctaatcacatttacaatccacctttcagtttcatctggagtcatgttcaatttgtctgccaacat

SEQ ID NO: 25568 - DNA, 119 bp, Homo sapiens
  MAP TO AC017025.3; EXPRESSED IN BRAIN, SIGNAL = 2.2; EXPRESSED IN PLACENTA, SIGNAL = 1.6; EXPRESSED IN FETAL LIVER, SIGNAL = 2.3; EXPRESSED IN ADULT LIVER, SIGNAL = 2.2; EXPRESSED IN HELA, SIGNAL = 2.5; EXPRESSED IN HEART, SIGNAL = 2.4; NT HIT: AL161472.2, EVALUE 2.60e-01; SWISSPROT HIT: Q01768, EVALUE 6.00e-04; EST_HUMAN HIT: BF683405.1, EVALUE 1.50e+00
gttatcacactgctgcttcagatgttcatcacagttttgaagcaatgtcatggacatgaatcagtatcccttctgttcaaaatgcttagtgagttcacccataatgccctgcaggacat

SEQ ID NO: 25569 - DNA, 81 bp, Homo sapiens
  MAP TO AC021012.2; EXPRESSED IN BRAIN, SIGNAL = 3.5; EXPRESSED IN PLACENTA, SIGNAL = 2.9; EXPRESSED IN HELA, SIGNAL = 3.9; EXPRESSED IN ADULT LIVER, SIGNAL =   4; EXPRESSED IN BONE MARROW, SIGNAL = 3.7; EXPRESSED IN FETAL LIVER, SIGNAL = 3.9; EXPRESSED IN LUNG, SIGNAL =   3; EXPRESSED IN HEART, SIGNAL = 3.7; NT HIT: AF190501.1, EVALUE 2.00e-38; SWISSPROT HIT: P50264, EVALUE 7.30e+00; EST_HUMAN HIT: BF127669.1, EVALUE 9.70e-01
atgaccaggacctggatgagctccagctggagatggaggactcaaagccacaccccagtgtccagtgtagccctactccag

SEQ ID NO: 25570 - DNA, 135 bp, Homo sapiens
  MAP TO AP001331.1; EXPRESSED IN BRAIN, SIGNAL = 7.3; EXPRESSED IN PLACENTA, SIGNAL = 7.8; EXPRESSED IN BONE MARROW, SIGNAL =  12; EXPRESSED IN FETAL LIVER, SIGNAL = 7.7; EXPRESSED IN LUNG, SIGNAL =  24; EXPRESSED IN ADULT LIVER, SIGNAL =  11; EXPRESSED IN HELA, SIGNAL =  10; EXPRESSED IN HEART, SIGNAL = 5.8; SWISSPROT HIT: Q64252, EVALUE 2.00e-19; EST_HUMAN HIT: AI471682.1, EVALUE 3.00e-70; NT HIT: gi4503520, EVALUE 2.00e-70
ctctgacctgctattctgattaagtttcttctcaatattcatggccaacatctggcttctaaaggaaaggcttttggtcttttcaatcacttgctgatagggtgagactgcattgttacccataaccacatgacc

SEQ ID NO: 25571 - DNA, 98 bp, Homo sapiens
  MAP TO AL157996.1; EXPRESSED IN ADULT LIVER, SIGNAL =   4; EXPRESSED IN HEART, SIGNAL = 2.8; EXPRESSED IN BRAIN, SIGNAL = 4.6; EXPRESSED IN PLACENTA, SIGNAL = 4.7; EXPRESSED IN BONE MARROW, SIGNAL =   3; EXPRESSED IN FETAL LIVER, SIGNAL = 3.3; EXPRESSED IN HELA, SIGNAL = 3.1; NT HIT: L10127.1, EVALUE 8.20e-01; SWISSPROT HIT: Q43135, EVALUE 4.20e+00
cgccgggaccacttggccgacggcctgccgaaaggcctcttccacagcacgccgtagagctgcactttggtgctgatatccagggcgtccgagtcagc

SEQ ID NO: 25572 - DNA, 368 bp, Homo sapiens
  MAP TO AL157817.3; EXPRESSED IN BRAIN, SIGNAL = 4.3; EXPRESSED IN PLACENTA, SIGNAL = 5.6; EXPRESSED IN HELA, SIGNAL =  12; EXPRESSED IN ADULT LIVER, SIGNAL = 3.4; EXPRESSED IN BONE MARROW, SIGNAL = 9.8; EXPRESSED IN FETAL LIVER, SIGNAL =  11; EXPRESSED IN LUNG, SIGNAL =  10; EXPRESSED IN HEART, SIGNAL = 5.8; SWISSPROT HIT: P46777, EVALUE 1.00e-35; NT HIT: AF113210.1, EVALUE 7.00e-85; EST_HUMAN HIT: BE739539.1, EVALUE 1.00e-84
gtttggcatggacaagatctataaaggccaagtggaggtaaccagagatgaatacaacgtgggaagcactgatggtcagccaggtgcctttacctgctgtttggatgcaggccttgccagaaccaccactgacaataaagtttttggggctctgagagtgctgtggatggaggtttctctatccctcacagtgcctaacgattccctggttatggttctgaaatcaaggagcttaatgctgaaatgcatcagaagcacatcatgggtcagaatgttgcagattctgcaacgtgcattacctaatggaagatgcttgcaaggcaagaacctttattgtagtttccatgggaaggaatggatgaggcaag

SEQ ID NO: 25573 - DNA, 282 bp, Homo sapiens
  MAP TO AC025286.1; EXPRESSED IN ADULT LIVER, SIGNAL = 8.7; EXPRESSED IN HELA, SIGNAL =  19; EXPRESSED IN HEART, SIGNAL = 9.8; EXPRESSED IN BRAIN, SIGNAL = 9.7; EXPRESSED IN PLACENTA, SIGNAL = 7.8; EXPRESSED IN BONE MARROW, SIGNAL =  35; EXPRESSED IN FETAL LIVER, SIGNAL =  18; EXPRESSED IN LUNG, SIGNAL =  32; EST_HUMAN HIT: AV760242.1, EVALUE 2.00e-88; NT HIT: gi11418526, EVALUE 9.00e-93; SWISSPROT HIT: P52859, EVALUE 9.00e-40
atgagcagcaaagtctctcgcgacaccctgtacgaggcagtgtgggaagtcctacgtgggaaccagcacaagcaccgcaagttcctagagacagtggagtcacagatcagcttgaagaactatgacccccagaaggacaagcgcttctcaggcaccatcaggctgaagtccactccccggcccaagttctccgtgtgtgtcctggaggaccagcagcactgtgacgaggccaaggccatgggtatcccccacatggacatcacatggacatcgaggcgctga

SEQ ID NO: 25574 - DNA, 109 bp, Homo sapiens
  MAP TO AC013827.4; EXPRESSED IN PLACENTA, SIGNAL = 3.1; EXPRESSED IN BRAIN, SIGNAL = 3.8; EXPRESSED IN HELA, SIGNAL =   5; EXPRESSED IN ADULT LIVER, SIGNAL = 3.3; EXPRESSED IN FETAL LIVER, SIGNAL = 6.2; EXPRESSED IN LUNG, SIGNAL = 3.7; EXPRESSED IN BONE MARROW, SIGNAL = 3.1; EXPRESSED IN HEART, SIGNAL = 4.8; SWISSPROT HIT: P47906, EVALUE 4.20e+00; EST_HUMAN HIT: AW890941.1, EVALUE 1.00e-06; NT HIT: AJ229042.1, EVALUE 1.00e-06
atgcatattactaatttaaagagggcaaacggtaaaggctacacactacatgattccaactatatggcaacttgggaaaagcaaatctatggagacagtaaaaagatca

SEQ ID NO: 25575 - DNA, 223 bp, Homo sapiens
  MAP TO AC020558.2; EXPRESSED IN ADULT LIVER, SIGNAL = 1.9; EXPRESSED IN BONE MARROW, SIGNAL = 1.5; EXPRESSED IN FETAL LIVER, SIGNAL =   2; EXPRESSED IN HEART, SIGNAL =   2; EXPRESSED IN BRAIN, SIGNAL = 1.8; EXPRESSED IN PLACENTA, SIGNAL = 1.8; EXPRESSED IN HELA, SIGNAL = 1.9; SWISSPROT HIT: Q60429, EVALUE 2.80e+00; NT HIT: AB032968.1, EVALUE 1.00e-04; EST_HUMAN HIT: AI417905.1, EVALUE 5.10e-02
cacatgcgaggccctcaggactctgtaggacacgacgtggcttctccacagtcctggggatcggaagcagatgcagaatgtggccgagtggcccgggccagggcctgagagtctgcattctgacatgcttccccggtggtgctgctggtctgggaaccacactgggtttaagtaactgatttaagtaactgatgcgaggaggccatgctctgggggaaggcag

SEQ ID NO: 25576 - DNA, 219 bp, Homo sapiens
  MAP TO AC000134.14; EXPRESSED IN HEART, SIGNAL = 2.1; EXPRESSED IN BRAIN, SIGNAL = 1.4; EXPRESSED IN BONE MARROW, SIGNAL = 2.2; EXPRESSED IN FETAL LIVER, SIGNAL = 1.6; EST_HUMAN HIT: F00726.1, EVALUE 1.00e-105; NT HIT: U94774.1, EVALUE 1.00e-120; SWISSPROT HIT: P00489, EVALUE 2.00e-38
accttggggtccttctcatagtagtgctgctgcgtgcggatccagcgccccacgaggtggtcgcgcacggtatgggccagagcaaagtagtagtctcgtggggtggccacattgcggtcctttacgagtgtgaaatgcaggtgccggttgaagttctttttcagctcagtcacgttctccacgccggccaggccacgcacactgatttgctttcttttc

SEQ ID NO: 25577 - DNA, 334 bp, Homo sapiens
  MAP TO AL133223.1; EXPRESSED IN BRAIN, SIGNAL =  14; EXPRESSED IN FETAL LIVER, SIGNAL =  19; EXPRESSED IN HELA, SIGNAL = 9.2; EXPRESSED IN BONE MARROW, SIGNAL =  13; EXPRESSED IN HEART, SIGNAL = 6.3; EXPRESSED IN LUNG, SIGNAL =  50; EXPRESSED IN PLACENTA, SIGNAL = 7.3; EXPRESSED IN ADULT LIVER, SIGNAL = 2.7; SWISSPROT HIT: O02705, EVALUE 7.00e-59; NT HIT: AF028832.1, EVALUE 0.00e+00; EST_HUMAN HIT: BE409993.1, EVALUE 0.00e+00
gtggttgtgtcaaaccgattggtgacatctccatgctgtattgtcacaagcacatatggctggacagcaaacatggagagaatcatgaaagctcaagccctaagagacaactcaacaatgggttacatggcagcaaagaaacacctggagataaaccctgaccattccattattgagaccttaaggcaaaaggcagaggctgataagaacgacaagtctgtgaaggatctggtcatcttgctttatgaaactgcgctcctgtcttctggcttcagtctggaagatccccagacacatgctaacaggatctacaggatgatcaaacttggtctgg

SEQ ID NO: 25578 - DNA, 460 bp, Homo sapiens
  MAP TO AL035705.22; EXPRESSED IN ADULT LIVER, SIGNAL = 1.5; EXPRESSED IN HEART, SIGNAL = 1.9; EXPRESSED IN HELA, SIGNAL = 1.7; SWISSPROT HIT: Q09137, EVALUE 5.00e-88; EST_HUMAN HIT: AI732856.1, EVALUE 1.00e-106; NT HIT: gi11427345, EVALUE 0.00e+00
cataatgtcatacggtttgctctgacttcggattccaagatgccacttggcttttttcacagctaaagatttgggcttagtcgtattcagtgcatccaatggacatcttgctttggggctgtctgctataagaggtggcatcctttctggatgaggtttcaggcctgggggaatatgcatggcactatcatccataaaagaaccagatggaggactagaggcgaggtagaactcactggcttggttcattattctccgattgtcaatgataagatgataagccactgcaagctggtcttgagggtcaccactatataaactgttcattacttctgattctgtacattcaaatttttcacacacttctttcacagcctcatcatcaatgacgttagcatcataggaagggtcttcaggaaataagtaactgggcaaatcttgtttaaaccattcatgctct

SEQ ID NO: 25579 - DNA, 419 bp, Homo sapiens
  MAP TO AF223391.1; EXPRESSED IN PLACENTA, SIGNAL = 2.9; EXPRESSED IN FETAL LIVER, SIGNAL = 3.1; EXPRESSED IN HELA, SIGNAL =   3; EXPRESSED IN ADULT LIVER, SIGNAL = 2.8; EXPRESSED IN HEART, SIGNAL = 2.3; EXPRESSED IN LUNG, SIGNAL = 2.5; EXPRESSED IN BRAIN, SIGNAL = 2.7; EXPRESSED IN BONE MARROW, SIGNAL = 2.2; EST_HUMAN HIT: BF337721.1, EVALUE 6.00e-03; SWISSPROT HIT: Q15878, EVALUE 3.00e-55; NT HIT: AF223391.1, EVALUE 0.00e+00
gagggagcggaggcgccggcaccacatgtccgtgtgggagcagcgtaccagccagctgaggaagcacatgcagatgtccagccaggaggccctcaacagagaggaggcgccgaccatgaacccgctcaaccccctcaacccgctcagctccctcaacccgctcaatgcccaccccagcctttatcggcgacccagggccattgagggcctggccctgggcctggccctggagaagttcgaggaggagcgcatcagccgtggggggtccctcaagggggatggaggggaccgatccagtgccctggacaaccagaggacccctttgtccctgggccagcgggagccaccatggctggccaggccctgtcatggaaactgtgacccgactcagcaggaggcagggggaggagaggctgtgg

SEQ ID NO: 25580 - DNA, 137 bp, Homo sapiens
  MAP TO AC002087.1; EXPRESSED IN ADULT LIVER, SIGNAL = 2.1; EXPRESSED IN HEART, SIGNAL =   3; EXPRESSED IN BRAIN, SIGNAL = 1.8; NT HIT: AF029308.1, EVALUE 3.00e-07; SWISSPROT HIT: P12442, EVALUE 4.00e+00; EST_HUMAN HIT: AW937066.1, EVALUE 7.10e+00
aattcgtccacagaggattggtcagggaccaggccgtccgcgatgctgtgatagcatcccccgaagttataaataccaactgcatgatggtgctcctgtgactggttaatagtgtggtagtcattagcccatcgaca

SEQ ID NO: 25581 - DNA, 422 bp, Homo sapiens
  MAP TO AL133371.2; EXPRESSED IN BONE MARROW, SIGNAL =   4; EXPRESSED IN HEART, SIGNAL = 5.7; EXPRESSED IN LUNG, SIGNAL =  68; EXPRESSED IN BRAIN, SIGNAL = 5.6; EXPRESSED IN PLACENTA, SIGNAL =  11; NT HIT: gi4506546, EVALUE 0.00e+00; EST_HUMAN HIT: BF681641.1, EVALUE 0.00e+00; SWISSPROT HIT: P07998, EVALUE 2.00e-59
tccttcgggctggtccggtatgcacagttggggtacctggagccgtttgtcaggcggcagtctgtgatgtgcatgctggagttgctcttgtagcagttgccctgcccgttcttgcaggtgaccttttcctggaaacagacattctggacatctaccaggggctcgtgcacaaaggtgttcactggtttgcaccgcccctgtgtcatattccggcgcctcatcatttggttacagtaggtggagctgctgctgggggaactgtctgagtccatatgctgccgctggaatttcttggcccgggattccttgcccagggaaggctggacccagcccagcaccagcagtatcaggacaagcagaaggagccggacaagagacttctccagagccatggtggcctcactttcccagaaaagcctaat

SEQ ID NO: 25582 - DNA, 99 bp, Homo sapiens
  MAP TO AL049836.2; EXPRESSED IN HELA, SIGNAL = 3.6; EXPRESSED IN ADULT LIVER, SIGNAL = 3.1; EXPRESSED IN BRAIN, SIGNAL = 2.6; EXPRESSED IN PLACENTA, SIGNAL = 2.5; EXPRESSED IN LUNG, SIGNAL = 3.2; EXPRESSED IN HEART, SIGNAL = 2.7; EXPRESSED IN FETAL LIVER, SIGNAL = 3.9; EXPRESSED IN BONE MARROW, SIGNAL = 4.1; EST_HUMAN HIT: AA366556.1, EVALUE 6.00e-49; SWISSPROT HIT: P26807, EVALUE 3.20e+00
gctgtgagggatcctccacgcccagcagacgtggaaggagccgacgttcttacgggagatggacagacggtcagcatgtgaatagtcccctgcatgcag

SEQ ID NO: 25583 - DNA, 110 bp, Homo sapiens
  MAP TO AC022035.2; EXPRESSED IN PLACENTA, SIGNAL = 2.4; EXPRESSED IN FETAL LIVER, SIGNAL = 5.8; EXPRESSED IN HELA, SIGNAL =   6; EXPRESSED IN BRAIN, SIGNAL = 3.3; EXPRESSED IN LUNG, SIGNAL =   2; EXPRESSED IN HEART, SIGNAL = 5.3; EXPRESSED IN BONE MARROW, SIGNAL = 2.6; EXPRESSED IN ADULT LIVER, SIGNAL = 2.8; EST_HUMAN HIT: BE274263.1, EVALUE 8.00e-30; NT HIT: U60822.1, EVALUE 1.00e-33
aaatttgttgaatggctttgaccaaaatgctgatagtgatacggaaaatgaaatccaggctgaggtggtctcagatggagaagaggaacttgttgggaactggaataaag

SEQ ID NO: 25584 - DNA, 144 bp, Homo sapiens
  MAP TO AL049832.2; EXPRESSED IN BRAIN, SIGNAL = 2.8; EXPRESSED IN PLACENTA, SIGNAL = 2.4; EXPRESSED IN FETAL LIVER, SIGNAL = 4.5; EXPRESSED IN HELA, SIGNAL = 4.6; EXPRESSED IN BONE MARROW, SIGNAL = 2.3; EXPRESSED IN HEART, SIGNAL = 3.9; EXPRESSED IN ADULT LIVER, SIGNAL = 2.9; EST_HUMAN HIT: AW866560.1, EVALUE 8.00e-03; SWISSPROT HIT: P11369, EVALUE 5.00e-05; NT HIT: AL163301.2, EVALUE 9.00e-08
atcatacttaatggtgaaagactgaaagtgttccccaaagatcaggaaaaaggcaggaaagaccactctcaccacttcttttcaatatttcactggagggcctacctggtgcaattaggcaaaaaagaagtaaaaggcaattaa

SEQ ID NO: 25585 - DNA, 235 bp, Homo sapiens
  MAP TO AL159165.1; EXPRESSED IN FETAL LIVER, SIGNAL = 8.5; EXPRESSED IN HEART, SIGNAL =   8; EXPRESSED IN BRAIN, SIGNAL = 8.5; EXPRESSED IN PLACENTA, SIGNAL = 6.9; EXPRESSED IN BONE MARROW, SIGNAL = 8.1; EXPRESSED IN ADULT LIVER, SIGNAL = 8.2; EXPRESSED IN HELA, SIGNAL = 9.6; EXPRESSED IN LUNG, SIGNAL = 7.7; NT HIT: AL163285.2, EVALUE 1.00e-23; EST_HUMAN HIT: AA115895.1, EVALUE 7.00e-26
tatcacaagaacaacatggggaacccccacttccccgatgatccaatcacttcccaccaggtccttccctggacacgtgaggattataattcgagatgagatttgggtggagacacagagccaaaccatatcagaggcaatcctctcaaatcctgccactgctgtatcgcctaaatttatgtaatatactgatccttccattattgtcatttcatcaatgttcacagtgtcttta

SEQ ID NO: 25586 - DNA, 258 bp, Homo sapiens
  MAP TO AL135744.2; EXPRESSED IN ADULT LIVER, SIGNAL = 2.8; EXPRESSED IN FETAL LIVER, SIGNAL = 4.4; EXPRESSED IN PLACENTA, SIGNAL =   5; EXPRESSED IN BONE MARROW, SIGNAL = 4.8; EXPRESSED IN HEART, SIGNAL = 3.2; EXPRESSED IN LUNG, SIGNAL = 7.7; EXPRESSED IN BRAIN, SIGNAL = 1.4; EXPRESSED IN HELA, SIGNAL =   4; NT HIT: gi11437451, EVALUE 0.00e+00; SWISSPROT HIT: P07910, EVALUE 1.00e-39; EST_HUMAN HIT: BE903372.1, EVALUE 0.00e+00
aaacctggccagcaatcattctgccatcctctcctgctacagcagcccgggcatttctctcattaacatactgaacgaaggcaaagcccttatgaacagagcagcccacaattttgccatacttcgaaaagattgcctccacatcagatttcttgaccacaagagtgttgagattcccaatgaatacacgggagttcatggagcgaggatctgtcttgttggtaacgttgctggccatcgtgtttgatggtaaggttt

SEQ ID NO: 25587 - DNA, 130 bp, Homo sapiens
  MAP TO AL049778.2; EXPRESSED IN PLACENTA, SIGNAL = 7.4; EXPRESSED IN HELA, SIGNAL =  10; EXPRESSED IN ADULT LIVER, SIGNAL = 6.6; EXPRESSED IN HEART, SIGNAL = 7.6; EXPRESSED IN BRAIN, SIGNAL =  11; EXPRESSED IN LUNG, SIGNAL = 7.4; EXPRESSED IN FETAL LIVER, SIGNAL = 9.9; EXPRESSED IN BONE MARROW, SIGNAL =  12; NT HIT: AL163249.2, EVALUE 5.00e-40; SWISSPROT HIT: P56262, EVALUE 9.20e+00; EST_HUMAN HIT: AV710480.1, EVALUE 4.00e-41
gccccggtgcgggatccgctgggtgaagccagctgggcttctgagtctggtggggacgtggagaacctttacgtctagctcagggattgtaaatacaccaatcagcaccctgtgtctagctcggggtttg

SEQ ID NO: 25588 - DNA, 112 bp, Homo sapiens
  MAP TO AL122010.2; EXPRESSED IN BRAIN, SIGNAL = 5.2; EXPRESSED IN ADULT LIVER, SIGNAL = 5.9; EXPRESSED IN BONE MARROW, SIGNAL = 4.3; EXPRESSED IN HELA, SIGNAL = 6.7; EXPRESSED IN HEART, SIGNAL = 5.6; EXPRESSED IN PLACENTA, SIGNAL = 4.1; EXPRESSED IN LUNG, SIGNAL = 3.4; EXPRESSED IN FETAL LIVER, SIGNAL = 6.1; NT HIT: U24070.1, EVALUE 7.00e-08; EST_HUMAN HIT: BF345291.1, EVALUE 3.60e-01
ctacactttccaacttggggctgaatccacaggcctcgccagcctttgtgcctgctgcctgctggccttcaccccacctggctccaggtcctccaggtcctccaggtcctcc

SEQ ID NO: 25589 - DNA, 329 bp, Homo sapiens
  MAP TO AC024019.2; EXPRESSED IN FETAL LIVER, SIGNAL = 2.6; EXPRESSED IN HEART, SIGNAL = 2.5; EXPRESSED IN PLACENTA, SIGNAL = 1.9; EXPRESSED IN BRAIN, SIGNAL = 2.5; EXPRESSED IN BONE MARROW, SIGNAL = 1.9; EXPRESSED IN LUNG, SIGNAL = 2.2; EXPRESSED IN ADULT LIVER, SIGNAL = 2.2; EXPRESSED IN HELA, SIGNAL = 2.5; NT HIT: U19583.1, EVALUE 2.00e-01; SWISSPROT HIT: Q03052, EVALUE 7.30e-01; EST_HUMAN HIT: AW996645.1, EVALUE 7.60e-02
cctatagcttggcttgtctcggctctgacagcccaggttctttctccttccaaatgaagccccagggcaccaggcagagattgggtggtgatagtggctagcatgggcctgacaccatgtggttcccagaaacacatgcccacatgtgtggggcctgtgttccaacacagcgtggactggcccccctttcttttcactgacatggacagcatggtgtcctgccgcagggctgagggccgcacatgcagaggggtgcctgtgaagagacctttccataccacctgcccctcttgcaagtggtggggcatcattcggaagcttctgagacc

SEQ ID NO: 25590 - DNA, 175 bp, Homo sapiens
  MAP TO AC015788.3; EXPRESSED IN PLACENTA, SIGNAL = 2.1; EXPRESSED IN BRAIN, SIGNAL = 1.9; EXPRESSED IN HEART, SIGNAL = 2.3; EXPRESSED IN ADULT LIVER, SIGNAL = 2.1; EXPRESSED IN BONE MARROW, SIGNAL = 2.2; EXPRESSED IN FETAL LIVER, SIGNAL = 1.6; EXPRESSED IN LUNG, SIGNAL = 3.1; EST_HUMAN HIT: AA704729.1, EVALUE 5.00e-94; NT HIT: U26711.1, EVALUE 3.00e-94; SWISSPROT HIT: Q13191, EVALUE 4.00e-21
ggagtcgacatcccacaagctgattagtcccaaacacatcccgagggcaccatgcttcaagaggcattggcgggtctctggaaggcacgctttccacatgatggatgtgtctactcagtctattgtctggtgggattggtggaggtctttcaggtggcggtggaggaggatctct

SEQ ID NO: 25591 - DNA, 138 bp, Homo sapiens
  MAP TO AL158153.2; EXPRESSED IN BRAIN, SIGNAL = 2.2; EXPRESSED IN PLACENTA, SIGNAL = 1.7; EXPRESSED IN BONE MARROW, SIGNAL = 1.7; EXPRESSED IN LUNG, SIGNAL = 4.2; EXPRESSED IN ADULT LIVER, SIGNAL = 2.2; EXPRESSED IN HELA, SIGNAL = 3.1; EXPRESSED IN FETAL LIVER, SIGNAL = 2.5; EXPRESSED IN HEART, SIGNAL = 2.8; EST_HUMAN HIT: T81910.1, EVALUE 4.00e-72; SWISSPROT HIT: Q91641, EVALUE 7.00e-19; NT HIT: U37376.1, EVALUE 1.00e-09
ccagttcactcttgaaggtgtgatcctgtgggagaatggagtggacattccgaatacttcctcctccaacaaaccagttcacattgggattccagcggttcacaaagccacagagatgattttcttcaaagtcacatt

SEQ ID NO: 25592 - DNA, 189 bp, Homo sapiens
  MAP TO AC010931.5; EXPRESSED IN PLACENTA, SIGNAL = 2.2; EXPRESSED IN BRAIN, SIGNAL = 1.5; EXPRESSED IN HEART, SIGNAL = 1.9; EXPRESSED IN HELA, SIGNAL = 2.1; EXPRESSED IN BONE MARROW, SIGNAL =   2; EXPRESSED IN FETAL LIVER, SIGNAL = 1.6; EXPRESSED IN LUNG, SIGNAL = 2.3; EXPRESSED IN ADULT LIVER, SIGNAL = 1.8; EST_HUMAN HIT: AI219763.1, EVALUE 1.00e-57; SWISSPROT HIT: Q08379, EVALUE 1.00e-07; NT HIT: AF266285.1, EVALUE 1.00e-100
atggccacctatcagcagctgacctctgagaaggaggcgctgcacaggcagttactgctgcagacccagttcgtggaccagctgcagcagcaggaagcttggggcaaagcggtggctgagatggccggacaaaagttgcaggagacccaggggagggagttgctgaggacggggccccgagggggatga

SEQ ID NO: 25593 - DNA, 141 bp, Homo sapiens
  MAP TO AC019155.2; EXPRESSED IN BRAIN, SIGNAL = 2.2; EXPRESSED IN PLACENTA, SIGNAL =   2; EXPRESSED IN ADULT LIVER, SIGNAL = 1.6; EXPRESSED IN FETAL LIVER, SIGNAL = 1.6; EXPRESSED IN HEART, SIGNAL = 3.1; EST_HUMAN HIT: BE729518.1, EVALUE 4.70e-01; NT HIT: gi10947055, EVALUE 2.00e-02
atattgtgaagtttatgaaatgcatgtcagaacttgcaacccagaggacaacagggaagaaattttttcctgtaacttctgtcccctactcatcaaagatagcaccatcggcattgaagccccactcctagctgtctatcc

SEQ ID NO: 25594 - DNA, 80 bp, Homo sapiens
  MAP TO AL133467.1; EXPRESSED IN ADULT LIVER, SIGNAL =   2; EXPRESSED IN BONE MARROW, SIGNAL = 1.9; EXPRESSED IN BRAIN, SIGNAL =   2; EXPRESSED IN PLACENTA, SIGNAL = 2.2; EXPRESSED IN FETAL LIVER, SIGNAL = 5.9; EXPRESSED IN HELA, SIGNAL = 6.1; EXPRESSED IN HEART, SIGNAL =   5; NT HIT: AL163210.2, EVALUE 6.00e-26; SWISSPROT HIT: Q9QYA9, EVALUE 5.60e+00; EST_HUMAN HIT: AL119158.1, EVALUE 5.00e-24
ctccatctgagaccacctgagcctggaccttattgttcatatcactatcagcatttttgtctaagcaattcacgaagtct

SEQ ID NO: 25595 - DNA, 371 bp, Homo sapiens
  MAP TO AC020904.3; EXPRESSED IN PLACENTA, SIGNAL = 1.6; EXPRESSED IN HEART, SIGNAL = 6.1; EXPRESSED IN HELA, SIGNAL = 2.3; EXPRESSED IN BONE MARROW, SIGNAL = 3.5; EXPRESSED IN FETAL LIVER, SIGNAL = 1.8; EXPRESSED IN LUNG, SIGNAL =   4; NT HIT: gi4758075, EVALUE 0.00e+00; SWISSPROT HIT: O75390, EVALUE 8.00e-66; EST_HUMAN HIT: BF312552.1, EVALUE 0.00e+00
ctctgccttcccatgtggtcaccatgctggacaactttcccaccaatctacaccccatgtctcagctcagtgcagctgttacagccctcaacagtgaaagtaactttgcccaagcatatgcacggggtatcagccgaaccaagtactgggagttgatttatgaagactctgtggatctaatcacaaagctaccttgtgtcgcagcaaagatctaccgaaatctctatggagaaggcagtggtattggggccattgactctaacctggactggtctcacagtttcaccaacatgttaggctatactgatcatcagttccctgagctcatgcacctgtacctcactatccacagtgaccatgagggcggcaat

SEQ ID NO: 25596 - DNA, 295 bp, Homo sapiens
  MAP TO AC002060.3; EXPRESSED IN BONE MARROW, SIGNAL =  34; EXPRESSED IN FETAL LIVER, SIGNAL =   3; EXPRESSED IN LUNG, SIGNAL =  51; EXPRESSED IN PLACENTA, SIGNAL = 3.4; EXPRESSED IN BRAIN, SIGNAL = 2.5; EXPRESSED IN HEART, SIGNAL =   3; EXPRESSED IN ADULT LIVER, SIGNAL = 5.8; EXPRESSED IN HELA, SIGNAL = 3.1; EST_HUMAN HIT: AI089521.1, EVALUE 1.00e-110; NT HIT: X51755.1, EVALUE 0.00e+00; SWISSPROT HIT: P01842, EVALUE 3.00e-32
gtccttcacccacctgaaaactgaggccaggggctccccaggtggacaccaggactctgaccccctgcccctcatccaccccgcaggtcagcccaaggctgccccctcggtcactctgttcccgccctcctctgaggagcttcaagccaacaaggccacactggtgtgcctgatcagtgacttctacccgggagctgtaaaagtggcctggaaggcagatggcagccccgtcaacgcgggagtggagaccaccacaccctccaaacagagcaacaacaagtacgcggccagcagc

SEQ ID NO: 25597 - DNA, 90 bp, Homo sapiens
  MAP TO AC023890.3; EXPRESSED IN PLACENTA, SIGNAL = 1.8; EXPRESSED IN BONE MARROW, SIGNAL = 2.2; EXPRESSED IN FETAL LIVER, SIGNAL = 1.9; EXPRESSED IN LUNG, SIGNAL = 2.2; EXPRESSED IN HEART, SIGNAL = 5.1; EXPRESSED IN BRAIN, SIGNAL = 1.4; EXPRESSED IN HELA, SIGNAL =   2; EXPRESSED IN ADULT LIVER, SIGNAL = 1.4; EST_HUMAN HIT: AW500694.1, EVALUE 1.00e-43; SWISSPROT HIT: P42522, EVALUE 3.00e-09; NT HIT: L29139.1, EVALUE 8.00e-44
aaatcggctggagttgttgttccggacggtcttggcgttcccgaaggcctccagcagcgggttggactgcaggataatgtccttcacgtg

SEQ ID NO: 25598 - DNA, 177 bp, Homo sapiens
  MAP TO AL133368.1; EXPRESSED IN BRAIN, SIGNAL = 4.8; EXPRESSED IN FETAL LIVER, SIGNAL =  20; EXPRESSED IN BONE MARROW, SIGNAL =  20; EXPRESSED IN LUNG, SIGNAL =  31; EXPRESSED IN PLACENTA, SIGNAL = 8.8; EXPRESSED IN HEART, SIGNAL = 8.9; EXPRESSED IN HELA, SIGNAL =  27; EXPRESSED IN ADULT LIVER, SIGNAL = 8.4; NT HIT: U92700.1, EVALUE 1.00e-07; SWISSPROT HIT: O18789, EVALUE 1.00e-08; EST_HUMAN HIT: BF330676.1, EVALUE 2.00e-62
atgaagattaagtccctgaagctctatctcctctccctgcccatcaaggaggctgagatcatcgactttttcctgggggcaaccctcacgaatgagtttaagattatgccagtaaaaatggagacttgcactggccagtggtccagattcaaggcacttgttgccattggggactaa

SEQ ID NO: 25599 - DNA, 140 bp, Homo sapiens
  MAP TO AC019219.2; EXPRESSED IN PLACENTA, SIGNAL = 7.1; EXPRESSED IN BONE MARROW, SIGNAL = 7.8; EXPRESSED IN HELA, SIGNAL = 9.3; EXPRESSED IN LUNG, SIGNAL = 5.3; EXPRESSED IN HEART, SIGNAL = 7.7; EXPRESSED IN BRAIN, SIGNAL = 7.8; EXPRESSED IN FETAL LIVER, SIGNAL = 8.5; EXPRESSED IN ADULT LIVER, SIGNAL = 8.7; SWISSPROT HIT: P34484, EVALUE 5.30e+00; NT HIT: AF103957.1, EVALUE 8.00e-02; EST_HUMAN HIT: AA483216.1, EVALUE 3.00e-02
gtcataattgcgttgaagacttaggttccaagaagggacataccacaaagtgggacactacacataatagaagtaaaattgctcttctttcaaccacagaggcagagctcattaattctgactgtgaggaaggatttgag

SEQ ID NO: 25600 - DNA, 236 bp, Homo sapiens
  MAP TO AL133246.1; EXPRESSED IN BRAIN, SIGNAL = 1.8; EXPRESSED IN PLACENTA, SIGNAL = 2.2; EXPRESSED IN FETAL LIVER, SIGNAL = 4.9; EXPRESSED IN ADULT LIVER, SIGNAL =   2; EXPRESSED IN HELA, SIGNAL = 5.5; EXPRESSED IN HEART, SIGNAL = 4.6; EXPRESSED IN BONE MARROW, SIGNAL = 1.9; NT HIT: AL163227.2, EVALUE 3.00e-64; EST_HUMAN HIT: AL134347.1, EVALUE 2.00e-60; SWISSPROT HIT: Q91641, EVALUE 3.40e+00
ttattggaggggctgctgtgaagacccctttcgccctggagacattttccccattgtcttggggattaacattcggctcctggttacttatgcaaatttctgcagctggcttgaatttctcctcagaaaatgggattttcttttctatcgcattggcaggctgcaaattttccgaacttttatgctctgcttcccttataaaacggaatgcctttaacagcatccaagtcacctct

SEQ ID NO: 25601 - DNA, 116 bp, Homo sapiens
  MAP TO AC018573.2; EXPRESSED IN ADULT LIVER, SIGNAL = 2.4; EXPRESSED IN FETAL LIVER, SIGNAL = 2.9; EXPRESSED IN LUNG, SIGNAL = 3.3; EXPRESSED IN PLACENTA, SIGNAL = 2.5; EXPRESSED IN BRAIN, SIGNAL = 2.3; EXPRESSED IN HEART, SIGNAL = 2.6; EXPRESSED IN BONE MARROW, SIGNAL = 2.6; EXPRESSED IN HELA, SIGNAL = 3.1; EST_HUMAN HIT: R42550.1, EVALUE 3.80e-01
gcggctccacagtttatcaacagctgggaaatttcctgttcacaggaaaaggatgacttcttagttcacgttaaagtggaaatgacaaaaactgactgcatcacacagaaaaaaag

SEQ ID NO: 25602 - DNA, 92 bp, Homo sapiens
  MAP TO AC010931.5; EXPRESSED IN PLACENTA, SIGNAL = 2.5; EXPRESSED IN BRAIN, SIGNAL = 2.6; EXPRESSED IN HEART, SIGNAL = 2.7; EXPRESSED IN ADULT LIVER, SIGNAL = 2.7; EXPRESSED IN BONE MARROW, SIGNAL = 2.3; EXPRESSED IN HELA, SIGNAL = 2.6; EXPRESSED IN FETAL LIVER, SIGNAL = 2.5; EXPRESSED IN LUNG, SIGNAL = 3.3; SWISSPROT HIT: Q08379, EVALUE 6.00e-03; NT HIT: gi8923698, EVALUE 5.00e-45; EST_HUMAN HIT: AL040231.1, EVALUE 4.00e-19
gagatggaggacaacatctggacagtgaggaggaggaggcgcctcggcccacgccaaacatcccagaggacctggagagccgggaggccacg

SEQ ID NO: 25603 - DNA, 228 bp, Homo sapiens
  MAP TO AC018836.2; EXPRESSED IN HEART, SIGNAL =   2; SWISSPROT HIT: P23692, EVALUE 2.90e-02; NT HIT: AB014567.1, EVALUE 1.00e-125; EST_HUMAN HIT: AV733927.1, EVALUE 2.00e-47
gtcaaagctggttctgtgaagcaggagtttgaaaagcaagatgaactgaagcgctctgcaatgagggcagtggctgccctgctgaccatccccgaggtggggaaaagccccatcatggccgacttctcttcccaaatcagatccaaccctgaacttgctgccctctttgaaagcatccagaaggattccgcttcagcccccagcacagactcaatggagctcagctag

SEQ ID NO: 25604 - DNA, 160 bp, Homo sapiens
  MAP TO AC017079.2; EXPRESSED IN ADULT LIVER, SIGNAL = 3.1; EXPRESSED IN PLACENTA, SIGNAL = 3.6; EXPRESSED IN BONE MARROW, SIGNAL = 3.2; EXPRESSED IN FETAL LIVER, SIGNAL = 9.9; EXPRESSED IN HELA, SIGNAL =  11; EXPRESSED IN LUNG, SIGNAL = 3.7; EXPRESSED IN HEART, SIGNAL = 7.5; EXPRESSED IN BRAIN, SIGNAL = 3.3; NT HIT: gi4506600, EVALUE 5.00e-22; EST_HUMAN HIT: AA583540.1, EVALUE 7.00e-25; SWISSPROT HIT: P50914, EVALUE 4.00e-14
ctgagtgcaagctccaccaaccaaagccctgttctcatcaacaacatctataatcgcaaccagctttccagcatgaggtccagagatgtaagccacttggccaacctccacaaagtgcctgaacaccatgttggtggcgcccatcaagaagctaaatcgt

SEQ ID NO: 25605 - DNA, 118 bp, Homo sapiens
  MAP TO AC020741.2; EXPRESSED IN BRAIN, SIGNAL = 3.5; EXPRESSED IN ADULT LIVER, SIGNAL = 3.7; EXPRESSED IN HEART, SIGNAL = 3.1; EXPRESSED IN PLACENTA, SIGNAL = 3.1; EXPRESSED IN LUNG, SIGNAL = 4.4; EXPRESSED IN HELA, SIGNAL = 3.6; EXPRESSED IN FETAL LIVER, SIGNAL = 3.6; EXPRESSED IN BONE MARROW, SIGNAL = 3.7; NT HIT: AF111093.1, EVALUE 1.00e-27; EST_HUMAN HIT: AA972415.1, EVALUE 3.00e-26; SWISSPROT HIT: Q10647, EVALUE 2.40e+00
cgctggccgcaccttgcgctgcaatctgtgctccttgggcacctggaccgcgaactcctctggtagctccacggggcccttgtccacgatgagcagcggtgcgctctgcagctggctg

SEQ ID NO: 25606 - DNA, 176 bp, Homo sapiens
  MAP TO AC020559.2; EXPRESSED IN BRAIN, SIGNAL = 3.5; EXPRESSED IN HEART, SIGNAL = 3.2; EXPRESSED IN PLACENTA, SIGNAL = 3.7; EXPRESSED IN LUNG, SIGNAL = 3.4; EXPRESSED IN HELA, SIGNAL = 3.2; EXPRESSED IN FETAL LIVER, SIGNAL = 2.9; EXPRESSED IN BONE MARROW, SIGNAL = 2.8; EXPRESSED IN ADULT LIVER, SIGNAL = 3.4; EST_HUMAN HIT: BE315301.1, EVALUE 9.50e+00; NT HIT: AF104313.1, EVALUE 1.60e+00; SWISSPROT HIT: Q60324, EVALUE 8.80e+00
gaatcttgtcattaccactgatatcagggaagccagctccattgtagcatccttcagcatcatctttagtacacagagaatggctactgcagagttcttccaggtgctgttgccttcacctattgtgttaaaggaatgcttggttaaggaaatagccttcaggaactctcagatag

SEQ ID NO: 25607 - DNA, 188 bp, Homo sapiens
  MAP TO AL133241.2; EXPRESSED IN PLACENTA, SIGNAL = 1.4; EXPRESSED IN BRAIN, SIGNAL = 1.3; EXPRESSED IN FETAL LIVER, SIGNAL = 3.4; EXPRESSED IN HELA, SIGNAL = 3.4; EXPRESSED IN HEART, SIGNAL = 2.9; NT HIT: AL163246.2, EVALUE 9.00e-18; EST_HUMAN HIT: AU140358.1, EVALUE 9.00e-22; SWISSPROT HIT: P25558, EVALUE 2.20e+00
aaaatttgcagcctgacaatgtgatagaaaagaaaaatcaattttatggggagaaattgaagcccattgtagaaattttcataagtaatgaggagtggaatgtgaatagccaagacagtggggaaaaatgtcaccagggcatgtcagagatcttggtggccacccctcccatcacaggcccagtggcc

SEQ ID NO: 25608 - DNA, 115 bp, Homo sapiens
  MAP TO AC020647.9; EXPRESSED IN ADULT LIVER, SIGNAL =   2; EXPRESSED IN BONE MARROW, SIGNAL = 2.2; EXPRESSED IN LUNG, SIGNAL = 2.6; EXPRESSED IN PLACENTA, SIGNAL = 1.9; EXPRESSED IN BRAIN, SIGNAL = 1.5; EXPRESSED IN HEART, SIGNAL = 1.9; EXPRESSED IN FETAL LIVER, SIGNAL = 2.1; EXPRESSED IN HELA, SIGNAL = 2.1; SWISSPROT HIT: P35514, EVALUE 8.20e-01; NT HIT: U91328.1, EVALUE 6.40e-02; EST_HUMAN HIT: R18121.1, EVALUE 5.80e+00
gagtccaggtatggcattgctggattcaatgcttcagggtcttaccagtctgcaactcacatgttggctgggtctgcagtctcatcagaggctcaactgggtaagaatttgtttc

SEQ ID NO: 25609 - DNA, 188 bp, Homo sapiens
  MAP TO AC002041.1; EXPRESSED IN HEART, SIGNAL =   4; EXPRESSED IN BRAIN, SIGNAL = 3.6; EXPRESSED IN PLACENTA, SIGNAL = 2.8; EXPRESSED IN BONE MARROW, SIGNAL = 4.7; EXPRESSED IN FETAL LIVER, SIGNAL = 3.7; EXPRESSED IN HELA, SIGNAL = 4.7; EXPRESSED IN LUNG, SIGNAL = 2.9; EXPRESSED IN ADULT LIVER, SIGNAL = 2.2; SWISSPROT HIT: P53796, EVALUE 4.00e-16; EST_HUMAN HIT: AL119502.1, EVALUE 1.00e-57; NT HIT: U41302.1, EVALUE 1.00e-102
actctgccaccttggagatgtgcatgccctgctctgcagccatgaagcccaggatggagaagaccacgaagccagcaaagaagctggtcccactgttgatgacagccaggatgatggcgtcccggaggggtggaggggccagagtggatgggttaggctgctgggcagggcagggcgggacagggcac

SEQ ID NO: 25610 - DNA, 105 bp, Homo sapiens
  MAP TO AC020912.3; EXPRESSED IN PLACENTA, SIGNAL = 2.8; EXPRESSED IN BRAIN, SIGNAL = 3.6; EXPRESSED IN HEART, SIGNAL = 4.8; EXPRESSED IN ADULT LIVER, SIGNAL = 3.7; EXPRESSED IN BONE MARROW, SIGNAL =   3; EXPRESSED IN FETAL LIVER, SIGNAL = 5.7; EXPRESSED IN HELA, SIGNAL = 6.7; EXPRESSED IN LUNG, SIGNAL =   2; NT HIT: AL161592.2, EVALUE 7.60e-01; EST_HUMAN HIT: AA084551.1, EVALUE 9.10e-01
ttatttaacattattaatctcatcttcatcatatctggttgctgtctttacttcttccttctgagtaaggcttgtcttgggcttgctgtggtcccagctcatcat

SEQ ID NO: 25611 - DNA, 367 bp, Homo sapiens
  MAP TO AC022212.2; EXPRESSED IN PLACENTA, SIGNAL = 1.5; EXPRESSED IN BONE MARROW, SIGNAL = 1.7; EXPRESSED IN BRAIN, SIGNAL = 1.8; EXPRESSED IN HELA, SIGNAL = 1.6; EXPRESSED IN HEART, SIGNAL = 1.9; EXPRESSED IN ADULT LIVER, SIGNAL = 1.4; EXPRESSED IN FETAL LIVER, SIGNAL = 2.2; EXPRESSED IN LUNG, SIGNAL =   2; NT HIT: AB052890.1, EVALUE 2.30e-01; SWISSPROT HIT: P15272, EVALUE 1.70e-01
ttggtctagaaaagagcagcttatttgtccaactggcggagaaggatgcatcgactttcctggagcaccagtctgcagagaacagcagcctgtgggaactggttcctcacgttgggggcttaagtccattcccagagcagccaggccatcggcataagcagcatgaagccccccagtcaagctacccaagtgccagaggattgggctttgccttctatcatgatgatcacgtcctccccttgcacatccctctgacctctcctcagcctgctgtagcctcagtgagactctgcataggggaatcccaaggatggctgctcacacaccttctctccctgctccagaatgctcacctcagagtgggatg

SEQ ID NO: 25612 - DNA, 155 bp, Homo sapiens
  MAP TO AC008583.4; EXPRESSED IN HEART, SIGNAL = 3.3; SWISSPROT HIT: P14547, EVALUE 6.80e+00; EST_HUMAN HIT: BE277888.1, EVALUE 5.30e-01; NT HIT: AL161501.2, EVALUE 3.50e-01
tccaagtgcctagaaggagaaattctgggtggaagaatagaaaagatctattgctaaatttcccctcaagaaagaatatgccaatttatactctcccatgctccaaacctctacctattattttatctcctctacttattattattgccactttg

SEQ ID NO: 25613 - DNA, 103 bp, Homo sapiens
  MAP TO AC023075.2; EXPRESSED IN PLACENTA, SIGNAL = 2.9; EXPRESSED IN BRAIN, SIGNAL = 1.9; EXPRESSED IN HEART, SIGNAL =  10; EXPRESSED IN BONE MARROW, SIGNAL = 6.3; EXPRESSED IN FETAL LIVER, SIGNAL = 9.2; EXPRESSED IN HELA, SIGNAL = 9.9; EXPRESSED IN LUNG, SIGNAL = 1.6; EXPRESSED IN ADULT LIVER, SIGNAL = 4.6; SWISSPROT HIT: P40429, EVALUE 5.00e-09; NT HIT: gi6912633, EVALUE 7.00e-20; EST_HUMAN HIT: T71201.1, EVALUE 4.00e-16
tttcggcctgtttccgtagcctcatgagctgtttcttatggtagtggaatttggtcttctcatttctcttctcctccagggtagctgtcattgcctgatactt

SEQ ID NO: 25614 - DNA, 200 bp, Homo sapiens
  MAP TO AC017093.2; EXPRESSED IN BRAIN, SIGNAL = 4.7; EXPRESSED IN BONE MARROW, SIGNAL = 3.7; EXPRESSED IN HEART, SIGNAL = 4.8; EXPRESSED IN ADULT LIVER, SIGNAL =   4; EXPRESSED IN FETAL LIVER, SIGNAL =   5; EXPRESSED IN HELA, SIGNAL = 5.6; EXPRESSED IN LUNG, SIGNAL = 6.8; EXPRESSED IN PLACENTA, SIGNAL = 4.4; NT HIT: AF064589.1, EVALUE 8.00e-03; EST_HUMAN HIT: BE905294.1, EVALUE 1.80e-01
atgcttcactgggcaactggaaattcagtggtggctgaggcgagggagggcagactcagaaaaggagggtcagaaagggaggtggcagccttggctgctctcttcaatgaggtaatccttcctccgtgctgccctgctgtccctgtgcctgctgccagtgcccatagagctccagatgcaattgatctcattatatatca

SEQ ID NO: 25615 - DNA, 164 bp, Homo sapiens
  MAP TO AC002039.1; EXPRESSED IN FETAL LIVER, SIGNAL = 5.5; EXPRESSED IN BONE MARROW, SIGNAL = 7.3; EXPRESSED IN HELA, SIGNAL =   5; EXPRESSED IN LUNG, SIGNAL =  20; EXPRESSED IN HEART, SIGNAL = 6.5; EXPRESSED IN ADULT LIVER, SIGNAL = 3.4; EXPRESSED IN BRAIN, SIGNAL =  12; EXPRESSED IN PLACENTA, SIGNAL = 4.7; NT HIT: U24497.1, EVALUE 2.00e-80; SWISSPROT HIT: P98161, EVALUE 8.00e-28; EST_HUMAN HIT: AI937300.1, EVALUE 4.00e-82
cagcgtggcttctttgacaagcacatctggctctccatatgggaccggccacctcgtagctgtttcactcgcatccagagggccacctgctgcgttctcctcatctgcctcttcctgggcgccaacgccgtgtggtacggggctgttggtgactctgcctacag

SEQ ID NO: 25616 - DNA, 175 bp, Homo sapiens
  MAP TO AC016939.8; EXPRESSED IN PLACENTA, SIGNAL = 1.6; EXPRESSED IN BRAIN, SIGNAL = 2.1; EXPRESSED IN BONE MARROW, SIGNAL = 1.6; EXPRESSED IN HELA, SIGNAL = 2.8; EXPRESSED IN HEART, SIGNAL = 2.2; EXPRESSED IN ADULT LIVER, SIGNAL = 1.9; EXPRESSED IN FETAL LIVER, SIGNAL = 2.3; EXPRESSED IN LUNG, SIGNAL = 2.5; SWISSPROT HIT: P43358, EVALUE 7.00e-15; EST_HUMAN HIT: BE615120.1, EVALUE 4.00e-42; NT HIT: U10692.1, EVALUE 2.00e-89
tgccctgaccagagtcatcatgtcttctgagcagaggagtcagcactgcaagcctgaggatggccttgaggcccaaggacaggaggctctgggcctggtgggtgcgcaggctcccgccaccgaggagcacgaggctgcctcctccttcactctgattgaaggcaccctggaggag

SEQ ID NO: 25617 - DNA, 103 bp, Homo sapiens
  MAP TO AC010305.3; EXPRESSED IN ADULT LIVER, SIGNAL =   4; EXPRESSED IN FETAL LIVER, SIGNAL = 4.7; EXPRESSED IN PLACENTA, SIGNAL = 2.8; EXPRESSED IN BONE MARROW, SIGNAL = 3.4; EXPRESSED IN HELA, SIGNAL = 4.7; EXPRESSED IN HEART, SIGNAL = 4.8; EXPRESSED IN LUNG, SIGNAL = 2.9; EXPRESSED IN BRAIN, SIGNAL = 3.1; EST_HUMAN HIT: AA806621.1, EVALUE 3.30e-01; SWISSPROT HIT: P30120, EVALUE 9.40e+00
catagccttgcctcttgtgaacacttcagatgttctgaaaagtgatcggatgaatgatgttttgggcatcctgaaagaacatgatcgtcccaggctgggcttc

SEQ ID NO: 25618 - DNA, 117 bp, Homo sapiens
  MAP TO AC021735.4; EXPRESSED IN ADULT LIVER, SIGNAL = 1.4; EXPRESSED IN FETAL LIVER, SIGNAL = 1.8; EXPRESSED IN LUNG, SIGNAL = 1.7; EXPRESSED IN PLACENTA, SIGNAL = 2.8; EXPRESSED IN BONE MARROW, SIGNAL = 1.5; EXPRESSED IN HEART, SIGNAL = 1.8; EXPRESSED IN HELA, SIGNAL = 1.9; EST_HUMAN HIT: AA625755.1, EVALUE 9.60e-02; NT HIT: AF119922.1, EVALUE 2.60e-01
ctgtgaaataattgtgtttctccaggaagtcattggttttctcctctctgaaaggattggagtgttcagaaaaaagttcagggcccacactgactgcttgaagacttgtgtttccat

SEQ ID NO: 25619 - DNA, 288 bp, Homo sapiens
  MAP TO AF236876.1; EXPRESSED IN BRAIN, SIGNAL = 4.7; EXPRESSED IN BONE MARROW, SIGNAL = 5.3; EXPRESSED IN HEART, SIGNAL =   5; EXPRESSED IN FETAL LIVER, SIGNAL = 5.4; EXPRESSED IN HELA, SIGNAL = 5.8; EXPRESSED IN ADULT LIVER, SIGNAL = 4.9; EXPRESSED IN LUNG, SIGNAL = 5.8; EXPRESSED IN PLACENTA, SIGNAL = 4.9; SWISSPROT HIT: P08399, EVALUE 2.60e-01; EST_HUMAN HIT: BF677292.1, EVALUE 1.00e-123; NT HIT: M33196.1, EVALUE 1.80e-01
gaggtgaggatggagctggagcagaaaccaccccagtggcagagcctactaagctggtgctcccgatgaaagtcaacccatattctgtcatcgacatcacgccattccaggaggaccagccgcccacccccgtgcccagcgctgaggaggagaatgtgggtctccatgtgccctgcgggtacttggtgcctgtaccctgcggctatgcggtgccctccaacctgcccctcctgctgcccgcctactccagcccggtcatcatctgcgccacgtccctggacgaagaag

SEQ ID NO: 25620 - DNA, 172 bp, Homo sapiens
  MAP TO AC023202.2; EXPRESSED IN PLACENTA, SIGNAL = 2.4; EXPRESSED IN FETAL LIVER, SIGNAL = 3.5; EXPRESSED IN BRAIN, SIGNAL = 2.8; EXPRESSED IN LUNG, SIGNAL = 1.9; EXPRESSED IN HEART, SIGNAL = 3.2; EXPRESSED IN HELA, SIGNAL = 3.5; EXPRESSED IN BONE MARROW, SIGNAL = 1.8; EXPRESSED IN ADULT LIVER, SIGNAL = 2.5; NT HIT: L76080.1, EVALUE 4.00e-01
gtgcttgcttcctcctctctgagtctgcatgtatgtgcctcctgcatcatcatcattatcattatcatcatcatcatcaccatcaccatcatcatcatcatcatggcagctctcatttactggtccctggcaatatgccagttctggtgctaggagtttcatccatgttatt

SEQ ID NO: 25621 - DNA, 78 bp, Homo sapiens
  MAP TO AC016313.5; EXPRESSED IN PLACENTA, SIGNAL = 1.5; EXPRESSED IN BRAIN, SIGNAL = 1.8; EXPRESSED IN BONE MARROW, SIGNAL = 1.5; EXPRESSED IN HELA, SIGNAL = 2.1; EXPRESSED IN HEART, SIGNAL = 1.9; EXPRESSED IN ADULT LIVER, SIGNAL = 1.7; EXPRESSED IN FETAL LIVER, SIGNAL = 2.3; EXPRESSED IN LUNG, SIGNAL = 2.1; SWISSPROT HIT: Q9WU38, EVALUE 9.60e+00; NT HIT: AE000755.1, EVALUE 2.40e+00; EST_HUMAN HIT: BF132402.1, EVALUE 9.20e-01
ttctcttggccccagttcacttacttggaagggacttcttaggaaaacatcatgtggccattaccttttcccataagg

SEQ ID NO: 25622 - DNA, 90 bp, Homo sapiens
  MAP TO AL079304.2; EXPRESSED IN BONE MARROW, SIGNAL = 3.5; EXPRESSED IN HEART, SIGNAL = 2.6; EXPRESSED IN BRAIN, SIGNAL = 2.8; EXPRESSED IN ADULT LIVER, SIGNAL = 2.1; EXPRESSED IN FETAL LIVER, SIGNAL = 2.7; EXPRESSED IN HELA, SIGNAL = 2.8; EXPRESSED IN LUNG, SIGNAL = 3.3; EXPRESSED IN PLACENTA, SIGNAL = 2.2; NT HIT: AJ243213.1, EVALUE 1.90e-01; EST_HUMAN HIT: AA305763.1, EVALUE 2.80e-01
agcataatattttcctccttttccagattcagaacccggagctctgagagagtaagtgattttcctaaaatcatatgggtggtaagaacc

SEQ ID NO: 25623 - DNA, 323 bp, Homo sapiens
  MAP TO AC023404.2; EXPRESSED IN HEART, SIGNAL =   2; EXPRESSED IN PLACENTA, SIGNAL = 1.4; EXPRESSED IN FETAL LIVER, SIGNAL = 2.6; EXPRESSED IN HELA, SIGNAL =   2; EST_HUMAN HIT: AW055198.1, EVALUE 5.00e-43; NT HIT: gi5730038, EVALUE 3.00e-43; SWISSPROT HIT: P41997, EVALUE 4.00e-03
cgctttgggatttgacgaacacttgggaagtattttctgtgttctgcaggttgtggaagcgttttccttgcaaaaagttgtccagatacctgaagaagtggtagttggttggcaagaggtcaggtgaatgtggtggatgaggcaaaactttgtggcccaatttgtgcaacttttgaagcgttggttgtgcagtgcatggtctgtcgtcgtcgtggagaatgcagaccttactgttgaccaatgctggctgcaggcgttgcagttttcggtgcatctcatcgatttgcagagcatacttctcagatgtaatggtttcactggga

SEQ ID NO: 25624 - DNA, 389 bp, Homo sapiens
  MAP TO AC023929.2; EXPRESSED IN ADULT LIVER, SIGNAL = 2.3; EXPRESSED IN BRAIN, SIGNAL = 2.9; EXPRESSED IN PLACENTA, SIGNAL = 1.7; EXPRESSED IN BONE MARROW, SIGNAL = 4.3; EXPRESSED IN FETAL LIVER, SIGNAL = 3.3; EXPRESSED IN HELA, SIGNAL = 4.2; EXPRESSED IN LUNG, SIGNAL =   2; EXPRESSED IN HEART, SIGNAL = 2.6; EST_HUMAN HIT: BF311842.1, EVALUE 3.00e-54; NT HIT: gi7657454, EVALUE 2.00e-54
atgcagctacccctacattcttcaccctttgtgactgaggaggaaggagattacatcccatctgagaagctgaagcttctggctctgcagcggggagaggacccaggaaacttgaatgagtcagaagaggaggaggaggaagacaaccaaggtgatggtgatgaagggggagaaaatgaaggggagagtggttcggaaacggaggaaaaggcctggctggcagcaccggaggagcagagaacggaggggaagaagcccagggtgatagcaggacacgagaagctggagaagcagcagcagctggcccaggaggaggagagcgaggccaggcgcctggccactatgatgatgaagaagccggagaagtacctgtaccagaagatcatgtt

SEQ ID NO: 25625 - DNA, 336 bp, Homo sapiens
  MAP TO AL121657.2; EXPRESSED IN PLACENTA, SIGNAL = 2.4; EXPRESSED IN HEART, SIGNAL =   2; EXPRESSED IN BONE MARROW, SIGNAL = 2.4; EXPRESSED IN LUNG, SIGNAL = 1.9; SWISSPROT HIT: P13666, EVALUE 3.00e-17; EST_HUMAN HIT: BE698861.1, EVALUE 0.00e+00; NT HIT: AF181264.1, EVALUE 0.00e+00
tggacatctctgatgagttctcagaagtcatcaaagccctcaagaaccacgaggacaagatgcgagtggtgctgaacaaagctgaccagatcgagacgcagcagctgatgcgggtgtacggggccctcatgtggtccttggggaagatcgtgaacaccccagaggtgatccgggtctacatcggctccttctggtcccaccccctcctcatccctgacaaccggaagctctttgaggctgaggaacaggacctattcagggacatccagagtctgccccgaaatgctgccctgcgcaagctcaacgacctcatcaaaagggccaggctggccaagg

SEQ ID NO: 25626 - DNA, 119 bp, Homo sapiens
  MAP TO AC000003.1; EXPRESSED IN BRAIN, SIGNAL = 6.4; EXPRESSED IN PLACENTA, SIGNAL = 5.1; EXPRESSED IN ADULT LIVER, SIGNAL = 6.4; EXPRESSED IN BONE MARROW, SIGNAL = 4.8; EXPRESSED IN FETAL LIVER, SIGNAL =   8; EXPRESSED IN HELA, SIGNAL = 7.8; EXPRESSED IN HEART, SIGNAL =   6; EXPRESSED IN LUNG, SIGNAL = 2.9; SWISSPROT HIT: P10383, EVALUE 8.20e-01; NT HIT: AF109719.2, EVALUE 4.10e+00
tcatgaaggctgcctctgaacaggagaggactgagtggaccagttttgggatgggagtgggaggaccagaagaatggtaccgccagggaagagaaaatgggagggaggccatggtctaa

SEQ ID NO: 25627 - DNA, 155 bp, Homo sapiens
  MAP TO AC010745.2; EXPRESSED IN HELA, SIGNAL = 1.8; EXPRESSED IN HEART, SIGNAL = 1.9; EXPRESSED IN ADULT LIVER, SIGNAL = 1.5; EXPRESSED IN FETAL LIVER, SIGNAL = 2.1; NT HIT: AL161571.2, EVALUE 5.50e+00
gtagcagaatcttacctgactgtcatagtccagctcagatctcatcttctagaaacttccctgatctccaagatccttattgtcagtctgcataatgaattcatcatggagcctttggggtttctcttctaccattgtcttgaagtattgggaaa

SEQ ID NO: 25628 - DNA, 123 bp, Homo sapiens
  MAP TO AC023392.2; EXPRESSED IN BRAIN, SIGNAL = 3.9; EXPRESSED IN PLACENTA, SIGNAL = 4.5; EXPRESSED IN ADULT LIVER, SIGNAL = 3.9; EXPRESSED IN FETAL LIVER, SIGNAL = 5.2; EXPRESSED IN BONE MARROW, SIGNAL = 2.9; EXPRESSED IN HELA, SIGNAL =   6; EXPRESSED IN LUNG, SIGNAL = 3.1; EXPRESSED IN HEART, SIGNAL = 4.4; SWISSPROT HIT: P38016, EVALUE 3.60e-01; EST_HUMAN HIT: AW151299.1, EVALUE 2.00e-18; NT HIT: AB026898.1, EVALUE 5.00e-06
gctgatgaggacaaggaggaagaggaaagggttgtcttgctgtctcagaggtgtcagaggcagagaaaatttgtgtataagtggacccatgcagttcaaacctgtgttgttcaagggtcaact

SEQ ID NO: 25629 - DNA, 337 bp, Homo sapiens
  MAP TO AC013827.4; EXPRESSED IN BRAIN, SIGNAL =  12; EXPRESSED IN PLACENTA, SIGNAL =  61; EXPRESSED IN HEART, SIGNAL =  32; EXPRESSED IN BONE MARROW, SIGNAL =  60; EXPRESSED IN HELA, SIGNAL =  75; EXPRESSED IN FETAL LIVER, SIGNAL =  56; EXPRESSED IN LUNG, SIGNAL = 1.3e+02; EXPRESSED IN ADULT LIVER, SIGNAL =  31; NT HIT: gi11418792, EVALUE 0.00e+00; SWISSPROT HIT: Q90835, EVALUE 1.00e-53; EST_HUMAN HIT: BE297175.1, EVALUE 0.00e+00
gaaatttgagaccagtaagtactacgtgagtatcattgatgccccaggacacagagacttcatcaaaaacatgattacagggacatctcaggctgactgtgctgtcctgattgttgctgctggtgttggtgaatttgaagctggtatctccaagaatggacagacccatgagcatgcccttctggcttacacactaggtgtgaaacaactaattgttggtgttaacaaaatggattccactgagcaaccctacagccagaagacatatgaggaaatcgttaaagaagtcaacacttacattatgaaaattggctgcaaccttgacacagcagcattt

SEQ ID NO: 25630 - DNA, 75 bp, Homo sapiens
  MAP TO AC019191.2; EXPRESSED IN BRAIN, SIGNAL = 5.5; EXPRESSED IN PLACENTA, SIGNAL = 3.3; EXPRESSED IN ADULT LIVER, SIGNAL =   4; EXPRESSED IN FETAL LIVER, SIGNAL = 4.3; EXPRESSED IN BONE MARROW, SIGNAL =   4; EXPRESSED IN LUNG, SIGNAL = 3.5; EXPRESSED IN HELA, SIGNAL = 3.9; EXPRESSED IN HEART, SIGNAL = 4.2; EST_HUMAN HIT: BF107694.1, EVALUE 8.70e-01
cttatccttccagatggcacgcttcttcgtaatggttctcttaacaaacacaattccatagttttcatactctaa

SEQ ID NO: 25631 - DNA, 232 bp, Homo sapiens
  MAP TO AC024049.2; EXPRESSED IN BRAIN, SIGNAL =   6; EXPRESSED IN PLACENTA, SIGNAL =   4; EXPRESSED IN BONE MARROW, SIGNAL = 6.1; EXPRESSED IN HELA, SIGNAL = 6.7; EXPRESSED IN HEART, SIGNAL = 6.7; EXPRESSED IN ADULT LIVER, SIGNAL = 6.7; EXPRESSED IN FETAL LIVER, SIGNAL = 5.7; EXPRESSED IN LUNG, SIGNAL = 5.3; SWISSPROT HIT: P55624, EVALUE 1.30e+00; NT HIT: AJ131017.1, EVALUE 8.60e+00; EST_HUMAN HIT: H87398.1, EVALUE 8.20e-01
aatgcaggagctgatacctataaagacatttcccacccagaagccggagctccaaggctatgcagggactgcccaggtgggaggcggcgccgcccagcagacacagctgcgagcagtggtggagtttaccccatccagaagccacactgcaaaagaaacagtgactttgaccttaacaatatacttaatttcaactatttcaaccaaaatactgtcattcaacataatatgc

SEQ ID NO: 25632 - DNA, 191 bp, Homo sapiens
  MAP TO AC000065.1; EXPRESSED IN BONE MARROW, SIGNAL = 2.3; EXPRESSED IN FETAL LIVER, SIGNAL = 4.4; EXPRESSED IN PLACENTA, SIGNAL = 2.3; EXPRESSED IN BRAIN, SIGNAL = 2.4; EXPRESSED IN HELA, SIGNAL = 3.4; EXPRESSED IN ADULT LIVER, SIGNAL = 2.7; EXPRESSED IN HEART, SIGNAL = 3.4; NT HIT: D38044.1, EVALUE 1.00e-22; EST_HUMAN HIT: BE644611.1, EVALUE 1.00e-103; SWISSPROT HIT: P07897, EVALUE 2.20e+00
agtgtactactacttataaaaagaagttaactgtacaacagtctcagccaggcccttcacgaggtatcctagaagaaggcattgttatcacaggggatgacagttccatgcatgttattgcccctgaagccctcctagtgggacaagaagtggacaggcaagacagtgatattgaccatcctgattctgtg

SEQ ID NO: 25633 - DNA, 173 bp, Homo sapiens
  MAP TO AC010620.3; EXPRESSED IN HEART, SIGNAL =   2; EXPRESSED IN BONE MARROW, SIGNAL = 1.6; EXPRESSED IN PLACENTA, SIGNAL = 1.5; EXPRESSED IN BRAIN, SIGNAL = 1.7; EXPRESSED IN ADULT LIVER, SIGNAL =   2; EXPRESSED IN FETAL LIVER, SIGNAL = 2.3; EXPRESSED IN HELA, SIGNAL = 2.3; SWISSPROT HIT: P07538, EVALUE 5.90e-01; EST_HUMAN HIT: AW418960.1, EVALUE 2.00e-22
gtggtcacagagtctgttctgtttgggtttgatagggagaggtcagtgtcacccatatttccattactgtagcagaaattgctggtgtttgtggcaagggcgagcacctgaagacaaaaataaagaaacatatttttatattcatggagcagctcattgttcctgaatctctg

SEQ ID NO: 25634 - DNA, 90 bp, Homo sapiens
  MAP TO AC012558.6; EXPRESSED IN HEART, SIGNAL = 1.8; EST_HUMAN HIT: AI392964.1, EVALUE 3.00e-07; NT HIT: AJ289880.1, EVALUE 5.00e-11
ctctcctacatccccttccacctccaccacctctgcctctgtcacccaagacagcaaaaccaacccctcctcttcctcctccttctcagc

SEQ ID NO: 25635 - DNA, 292 bp, Homo sapiens
  MAP TO AC016025.11; EXPRESSED IN BRAIN, SIGNAL = 3.5; EXPRESSED IN PLACENTA, SIGNAL = 3.5; EXPRESSED IN ADULT LIVER, SIGNAL = 2.2; EXPRESSED IN FETAL LIVER, SIGNAL = 2.7; EXPRESSED IN BONE MARROW, SIGNAL = 2.6; EXPRESSED IN HELA, SIGNAL = 2.5; EXPRESSED IN LUNG, SIGNAL = 2.9; EXPRESSED IN HEART, SIGNAL = 2.8; NT HIT: gi8394421, EVALUE 1.80e-01
agttcggagcagagattttgttctgaccttcactggactcttcctcctcctcgtcatagtcctcctcctcctcctcttcatattcttcctcctcctcctcctcctcttcattcccaggcccaaagctctttgaggcctctagctcctcttcacttttccctttcagaagggcatggatccgcacggcctccttccacggaacaccacccaggtcagatgggggcaggcgaggctcctcctcctcctcctctccctcctcctccatctcagactcggaactactgtgaggaaa

SEQ ID NO: 25636 - DNA, 121 bp, Homo sapiens
  MAP TO AC010828.3; EXPRESSED IN BONE MARROW, SIGNAL = 1.6; EXPRESSED IN HEART, SIGNAL = 4.2; EXPRESSED IN PLACENTA, SIGNAL =   2; EXPRESSED IN BRAIN, SIGNAL = 1.9; EXPRESSED IN ADULT LIVER, SIGNAL = 1.7; EXPRESSED IN FETAL LIVER, SIGNAL = 4.5; EXPRESSED IN HELA, SIGNAL = 4.3; SWISSPROT HIT: P40600, EVALUE 1.80e+00; EST_HUMAN HIT: AI525119.1, EVALUE 1.00e-35; NT HIT: AL163280.2, EVALUE 1.00e-27
cttgaattgtactcccataattcccacatgttgtgggagggacccggtgggagatcatttgaatcatgggggtggtatcccccacactgttcacgtggtagtgaataactctcatgagatc

SEQ ID NO: 25637 - DNA, 170 bp, Homo sapiens
  MAP TO AC022212.2; EXPRESSED IN HEART, SIGNAL = 1.7; EXPRESSED IN BRAIN, SIGNAL = 2.6; EXPRESSED IN ADULT LIVER, SIGNAL = 1.7; EXPRESSED IN BONE MARROW, SIGNAL = 1.5; EXPRESSED IN FETAL LIVER, SIGNAL = 1.7; EXPRESSED IN HELA, SIGNAL = 2.1; EXPRESSED IN LUNG, SIGNAL = 2.7; EXPRESSED IN PLACENTA, SIGNAL = 1.9; NT HIT: AB007546.1, EVALUE 2.50e-02; SWISSPROT HIT: P34859, EVALUE 7.80e-01; EST_HUMAN HIT: AV645509.1, EVALUE 3.70e-02
aattttatgtgaatggaatttcaaaaaatttatttaagtataagatatatgcaaaaaagttcaaacataagtgtcagctcaacaatttttcacaagatgagcacacctgtgtaactagcgccttgcacccagatgaagaaaaagaacattatcatacctactactttaaa

SEQ ID NO: 25638 - DNA, 160 bp, Homo sapiens
  MAP TO AP000960.2; EXPRESSED IN BRAIN, SIGNAL = 2.9; EXPRESSED IN BONE MARROW, SIGNAL = 3.2; EXPRESSED IN HELA, SIGNAL = 3.2; EXPRESSED IN HEART, SIGNAL = 2.8; EXPRESSED IN PLACENTA, SIGNAL = 3.5; EXPRESSED IN LUNG, SIGNAL = 3.1; EXPRESSED IN FETAL LIVER, SIGNAL = 2.8; EXPRESSED IN ADULT LIVER, SIGNAL = 3.1; EST_HUMAN HIT: AV649940.1, EVALUE 2.20e+00; NT HIT: gi6677678, EVALUE 3.70e-01; SWISSPROT HIT: Q61554, EVALUE 2.30e+00
atcccatgctgagggagatctgaccacacgtgtgtcacgcaggttcttgtgcccaacatcctttacaaccttctcaaatggcttgtgtctaaggacgtggataccacaaatgggtcctctgaggagaaaagagcttcataaaaaatctgtgcaggctaca

SEQ ID NO: 25639 - DNA, 96 bp, Homo sapiens
  MAP TO AL138806.5; EXPRESSED IN BRAIN, SIGNAL = 1.9; EXPRESSED IN HEART, SIGNAL = 2.9; EXPRESSED IN LUNG, SIGNAL = 2.9; EXPRESSED IN PLACENTA, SIGNAL = 2.2; EXPRESSED IN HELA, SIGNAL =   3; EXPRESSED IN FETAL LIVER, SIGNAL = 2.9; EXPRESSED IN BONE MARROW, SIGNAL = 2.5; EXPRESSED IN ADULT LIVER, SIGNAL = 2.8; NT HIT: AJ248286.1, EVALUE 8.00e-01; SWISSPROT HIT: Q99089, EVALUE 3.20e+00; EST_HUMAN HIT: H51029.1, EVALUE 3.00e-01
atgtctgtttgcaaagcccacaccccgtgtcctggggaccacgcgaaccctctggaacattatctttatgacctcgcagtagctgagctgtgtctg

SEQ ID NO: 25640 - DNA, 328 bp, Homo sapiens
  MAP TO AC005323.1; EXPRESSED IN HEART, SIGNAL =  36; EXPRESSED IN BONE MARROW, SIGNAL = 1.8; NT HIT: gi7669505, EVALUE 0.00e+00; EST_HUMAN HIT: AL042859.1, EVALUE 1.00e-62; SWISSPROT HIT: P02565, EVALUE 8.00e-51
ctgcttccgctcccgttgccccaacaaagaggagagccagagtcttcattgcagacttctggtacagccccaccacagtctcattcagggggtccttgttcttgtcaagccagccggcaatgttgtagtccacggtgccagcatagtgaatcaaagagaagtgggcctcaggcttgcctttggcaggcttgggcttctggaagttattggattttccaagatgttgttcatacagcttgttcttgaaggaggtgtctgtcgccttggggaacatgcactcctcttccaggatggagaagatgcccataggctggaagaatgaaaagaa

SEQ ID NO: 25641 - DNA, 310 bp, Homo sapiens
  MAP TO AC005323.1; EXPRESSED IN BONE MARROW, SIGNAL = 1.7; EXPRESSED IN HEART, SIGNAL =  34; EST_HUMAN HIT: AL042859.1, EVALUE 2.00e-54; SWISSPROT HIT: P02565, EVALUE 1.00e-49; NT HIT: gi11024711, EVALUE 0.00e+00
ctgcttcagcagtttgtgccccagagaagaggaaagccagagtcttcattgcagacttctggtacagccccaccacagtctcattcagggggtccttgtttttgtccagccagccggcgatgttgtagtccacggtgccggcatagtgcaccagtgagaagtgagcctcaggcttgcctttggcaggcttgggcttctggaagttgttggattttccaagatgttgttcatacagcttgttcttgaaggaggtgtctgttgccttggggaacatgcactcctcttctaggatggagaagatgcccatagg

SEQ ID NO: 25642 - DNA, 257 bp, Homo sapiens
  MAP TO AC021863.3; EXPRESSED IN PLACENTA, SIGNAL = 1.5; EXPRESSED IN BRAIN, SIGNAL = 1.5; EXPRESSED IN HELA, SIGNAL = 1.7; EXPRESSED IN LUNG, SIGNAL = 1.7; EXPRESSED IN ADULT LIVER, SIGNAL = 1.8; EXPRESSED IN BONE MARROW, SIGNAL = 1.5; EXPRESSED IN FETAL LIVER, SIGNAL = 1.6; EXPRESSED IN HEART, SIGNAL = 1.9; SWISSPROT HIT: P08453, EVALUE 1.80e+00; NT HIT: AJ001018.1, EVALUE 4.00e-02; EST_HUMAN HIT: AW235836.1, EVALUE 2.30e-01
tggttcatagaacccggataaagaatctttttgaccagagccccttgttggcatgagctatttccacttctaggatgctctcctccattcagggaaggggaaggcaaaatctgctgagggttctgtggggtgtgttggcttcctggtcctttttcttgggggttttgattgagctgcacctcctcaatggttaccagtacctcttggactggatctgccctcagctcttgaaagaccaccagctccccttgcatgct

SEQ ID NO: 25643 - DNA, 89 bp, Homo sapiens
  MAP TO AC013707.2; EXPRESSED IN ADULT LIVER, SIGNAL = 2.6; EXPRESSED IN HEART, SIGNAL = 2.5; EXPRESSED IN BRAIN, SIGNAL = 1.7; EXPRESSED IN HELA, SIGNAL = 2.5; EXPRESSED IN FETAL LIVER, SIGNAL = 2.5; EST_HUMAN HIT: AW970361.1, EVALUE 3.00e-07; NT HIT: U66060.1, EVALUE 8.00e-13; SWISSPROT HIT: O18326, EVALUE 7.30e+00
atacaggagaggggcagggaagtgctggaaagaaaagggcagggtctctggagagggctccaccttctgggctgtgcccaccgacctag

SEQ ID NO: 25644 - DNA, 115 bp, Homo sapiens
  MAP TO AP001242.1; EXPRESSED IN BRAIN, SIGNAL = 2.1; EXPRESSED IN PLACENTA, SIGNAL = 2.1; EXPRESSED IN BONE MARROW, SIGNAL = 2.6; EXPRESSED IN HEART, SIGNAL = 3.5; EXPRESSED IN FETAL LIVER, SIGNAL = 5.4; EXPRESSED IN HELA, SIGNAL = 3.1; EXPRESSED IN ADULT LIVER, SIGNAL =   2; EXPRESSED IN LUNG, SIGNAL = 2.8; SWISSPROT HIT: Q00939, EVALUE 3.20e+00; NT HIT: X63392.1, EVALUE 1.00e-58; EST_HUMAN HIT: N89499.1, EVALUE 3.70e-01
tgagcatggccactgcacggagcatgtctctgccatgcaccatcaatgccactgtccgcttttacattttatcagtgagtggggacatcatcctgacccagacaccagcctccct

SEQ ID NO: 25645 - DNA, 166 bp, Homo sapiens
  MAP TO AL138827.2; EXPRESSED IN BRAIN, SIGNAL = 1.8; EXPRESSED IN BONE MARROW, SIGNAL = 1.8; EXPRESSED IN HEART, SIGNAL = 2.5; EXPRESSED IN ADULT LIVER, SIGNAL = 1.7; EXPRESSED IN FETAL LIVER, SIGNAL = 2.9; EXPRESSED IN HELA, SIGNAL = 3.4; SWISSPROT HIT: P07898, EVALUE 4.50e-01; EST_HUMAN HIT: AW954050.1, EVALUE 6.00e-44; NT HIT: AF029308.1, EVALUE 2.00e-40
tctttgggtccacaccaccattaagagctgtaacactcgccaccaagtccatggcttcgctcctgaagtcagcaagaccacgaacccaccagaagtaagaaactccagacacatctgaacatctgaagtaacaaactccggacacaccatctttaagaactgtaac

SEQ ID NO: 25646 - DNA, 412 bp, Homo sapiens
  MAP TO AC005323.1; EXPRESSED IN HEART, SIGNAL =  32; EXPRESSED IN BONE MARROW, SIGNAL = 2.4; EST_HUMAN HIT: F00884.1, EVALUE 0.00e+00; SWISSPROT HIT: gi127772, EVALUE 1.00e-32; NT HIT: gi8923939, EVALUE 0.00e+00
gtaccttggctttggagaccgtttctacattactagcaaggtcatcaatctccatcttcatctcactcttctccttctccagcttctgcttcactcgctgcaggttgtcaatctgctccccaagctcggccacactatctgcatgcttcttcctcagggtggccgctgtggcttcatgctgtagggtggcctcctccaggtccctgcgcattttctggaactcagcctcccgcttcttgttcatctcaatctgggctgaagtggccccaccggcttcttccagcctctcgctgatctcctccagctcccgggagaggtcagagcgctgcttctctgctttggcccgggaggcccgctctgcctcgatttcctcctccagctcctcaatgcgggcctgggaatggtggaaaat

SEQ ID NO: 25647 - DNA, 170 bp, Homo sapiens
  MAP TO AC012664.3; EXPRESSED IN PLACENTA, SIGNAL = 2.1; EXPRESSED IN ADULT LIVER, SIGNAL = 2.7; EXPRESSED IN BRAIN, SIGNAL =   3; EXPRESSED IN LUNG, SIGNAL = 2.3; EXPRESSED IN HEART, SIGNAL = 2.6; EXPRESSED IN HELA, SIGNAL = 2.9; EXPRESSED IN FETAL LIVER, SIGNAL = 2.9; EXPRESSED IN BONE MARROW, SIGNAL = 2.3; EST_HUMAN HIT: BF541987.1, EVALUE 2.30e+00; SWISSPROT HIT: Q9YEK4, EVALUE 3.00e+00
ttaggatgaagaacgtgggcagcatgctggcagctgagcatcctcagtgcatacccctctgctgagggctgctgtgagctggccaccctgatgggaagactgtctacgtctggcttcaggaactgtcccgatggacacaggattcccttgcctccgcagtgcatcttctc

SEQ ID NO: 25648 - DNA, 105 bp, Homo sapiens
  MAP TO AC019140.2; EXPRESSED IN PLACENTA, SIGNAL = 2.7; EXPRESSED IN BRAIN, SIGNAL = 2.5; EXPRESSED IN HELA, SIGNAL = 2.7; EXPRESSED IN ADULT LIVER, SIGNAL = 2.4; EXPRESSED IN FETAL LIVER, SIGNAL = 2.6; EXPRESSED IN HEART, SIGNAL = 3.5; EXPRESSED IN LUNG, SIGNAL = 2.7; EXPRESSED IN BONE MARROW, SIGNAL =   3; EST_HUMAN HIT: BF681245.1, EVALUE 5.20e+00; NT HIT: AE003944.1, EVALUE 8.90e-01
tcaatgggtttgagaactcatgattcttctatctcgttgatccaccatatttaacactgtttctatcttgtgtttgaagttggctacatcagatcctgacaccat

SEQ ID NO: 25649 - DNA, 128 bp, Homo sapiens
  MAP TO AC009575.4; EXPRESSED IN HEART, SIGNAL = 1.8; EXPRESSED IN PLACENTA, SIGNAL = 1.8; EXPRESSED IN FETAL LIVER, SIGNAL = 1.6; EXPRESSED IN HELA, SIGNAL = 2.1; EST_HUMAN HIT: AA403053.1, EVALUE 5.00e-50; NT HIT: AL163209.2, EVALUE 2.00e-42
actgggtccagtgggtccccagactcatcctgtggtcatttccccagtgccagaatgcataattggcatagacatacttagcagctggcagaacccccacattggctccctgactggtagggtgagaa

SEQ ID NO: 25650 - DNA, 308 bp, Homo sapiens
  MAP TO AC021097.3; EXPRESSED IN HEART, SIGNAL = 2.2; NT HIT: AF117679.1, EVALUE 1.20e-02; SWISSPROT HIT: Q02357, EVALUE 8.00e-06; EST_HUMAN HIT: AU122465.1, EVALUE 1.80e-02
ggcccctggccagacacggacggcgccatggttgagcagagcccgaaccacgtgctcggggctctgggccagggctgcagctgggccctgcagagcacagtgcaggggcgtgtgtcccccatagtccatggtgttggcgctgacaccacaggacaggagcagctccacgacagctgcatggccacggcggcaggccaggtgcaggggtcgctgcttgtcctggtccgcagcatcagcgtctgctccagctgaaagcagcaagctgcacagctgcaggcagcgggcggtggtggcctcggcatcggtga

SEQ ID NO: 25651 - DNA, 77 bp, Homo sapiens
  MAP TO AC021735.4; EXPRESSED IN FETAL LIVER, SIGNAL = 1.8; EXPRESSED IN HEART, SIGNAL = 1.9; EST_HUMAN HIT: AA766755.1, EVALUE 2.00e-20; NT HIT: AF114156.1, EVALUE 1.00e-14
tatatgtaagaagtacattggttccatccagaaaggtgggaacaactcaaagcaagaaggggacttccaggtcacag

SEQ ID NO: 25652 - DNA, 163 bp, Homo sapiens
  MAP TO AC011381.3; EXPRESSED IN HEART, SIGNAL = 2.1; EXPRESSED IN FETAL LIVER, SIGNAL = 2.1; EXPRESSED IN HELA, SIGNAL = 3.1; EST_HUMAN HIT: AU127329.1, EVALUE 7.00e-87; SWISSPROT HIT: O35501, EVALUE 2.00e-25; NT HIT: gi11417339, EVALUE 4.00e-87
ctctctcttgaactccttcacaatgtgccgtagcaaggcctggtcaaagtcttccccacctaagaaggtatccccatttgtggatttcacctcaaatactcctttctgaatttccaggatagaaatatcaaaagttccaccacctaaatcatatacagcaatg

SEQ ID NO: 25653 - DNA, 111 bp, Homo sapiens
  MAP TO AC008583.4; EXPRESSED IN HEART, SIGNAL =  12; EST_HUMAN HIT: BF589904.1, EVALUE 2.00e-08; NT HIT: gi4506156, EVALUE 3.00e-04
aatagtattctggatctttagaggggtcttgaccatgagtccatgcagagagaggagcctgagctttatctcccagaaccttagtttccttatctgcaaaatgggaataat

SEQ ID NO: 25654 - DNA, 85 bp, Homo sapiens
  MAP TO AL157882.1; EXPRESSED IN HEART, SIGNAL = 2.4; NT HIT: gi9790256, EVALUE 9.00e-22; EST_HUMAN HIT: BF214941.1, EVALUE 1.00e-21
gctcattacacacaggatacatgactgcatagaagggcatataaaacgtggaaatggcctcagcttcattcttcatctcttccat

SEQ ID NO: 25655 - DNA, 130 bp, Homo sapiens
  MAP TO AL133474.7; EXPRESSED IN HEART, SIGNAL = 3.8; EST_HUMAN HIT: AU117160.1, EVALUE 6.70e+00; NT HIT: D90910.1, EVALUE 4.50e+00; SWISSPROT HIT: P36062, EVALUE 1.80e+00
acctgtggggttgatcactctcttttttgcttcctcctcccttgactttaatggcagcttcatctggttcccattcagtttctctaaattgttccttatcagtttccttcatggactctcctgcctttgt

SEQ ID NO: 25656 - DNA, 98 bp, Homo sapiens
  MAP TO AF119117.1; EXPRESSED IN HEART, SIGNAL = 1.7; SWISSPROT HIT: Q01959, EVALUE 1.00e-10; NT HIT: AF119117.1, EVALUE 1.00e-48
tctacccggaagccatcgccacgctccctctgtcctcagcctgggccgtggtcttcttcatcatgctgctcaccctgggtatcgacagcgccgtgagt

SEQ ID NO: 25657 - DNA, 329 bp, Homo sapiens
  MAP TO AL133286.5; EXPRESSED IN HEART, SIGNAL = 7.3; NT HIT: U84744.1, EVALUE 0.00e+00; SWISSPROT HIT: Q99698, EVALUE 4.00e-58; EST_HUMAN HIT: AA169312.1, EVALUE 1.90e-02
ggtaataagagatttgtttttgagttgtaatggagtaagtcaaataatcgaattaaattgcttaaatggtattcgaagtcattctctaaaagcatttgaaactctgataatcagcctaggggagcaacagaaagatgcctcagttccagatattgatgggatagacattgaacagaaggagttgtcctctgtacatgtgggtacttcttttcatcatcagcaagcttattcagattctcctcagagtctcagcaaattttatgctggcctcaaagaagcttatccaaagagacggaagactgttaaccaagatgttcatatcaacacaa

SEQ ID NO: 25658 - DNA, 185 bp, Homo sapiens
  MAP TO AC024581.1; EXPRESSED IN HEART, SIGNAL = 2.7; EST_HUMAN HIT: AW877127.1, EVALUE 1.60e-01; SWISSPROT HIT: P11717, EVALUE 2.90e+00
cgggtgtcagtctcagcagcatgccaattgccaattaagctttcctctggatagattggctcagagactgtcatatgaaactggaggctccaaagggaagcttctccagaatcactcttattggttatttcttgatggcccaacgtggtccccagggtcatcagcaggcatgccctcatggaaag

SEQ ID NO: 25659 - DNA, 322 bp, Homo sapiens
  MAP TO AL049829.3; EXPRESSED IN HEART, SIGNAL =  93; EXPRESSED IN BONE MARROW, SIGNAL = 2.1; SWISSPROT HIT: Q02566, EVALUE 1.00e-29; NT HIT: Z20656.1, EVALUE 0.00e+00; EST_HUMAN HIT: F01027.1, EVALUE 1.00e-113
cttgttctctgttgcatgcttctccttctccaccttggccagtgtcagctccaggtcatcaatgtccttcttgagctctgagcactcgtcttccagcttgcgcttcttggcagtgagctccgcgttcatctcctcctcatcctccagcctctcattcatctcctttactttggcctccagctgaatcttgtttttgatcagctggtcgcagcgctcctcagcatcattgaggttgtcttgttcctgggagaagagaacagggaggaagctgatggttaaagagaggagacctagggtcttaaaaagagctggcactcctaga

SEQ ID NO: 25660 - DNA, 211 bp, Homo sapiens
  MAP TO AL049833.3; EXPRESSED IN HEART, SIGNAL = 9.3; SWISSPROT HIT: Q08269, EVALUE 2.20e+00; NT HIT: AB021490.2, EVALUE 5.00e-01
gaattacgtcaaatacactggagtaatggtttcagtgagaaaagagcccgccctggggatcaacatgcacagatgtaactgtcccaaggttgctgggtggcctggagcttcttggtgcagattctccagagtgggtgccctggccttagttctgaaaatgacccttttccaggccacactatgtgttgcttcaacagcaccaaacccaagg

SEQ ID NO: 25661 - DNA, 120 bp, Homo sapiens
  MAP TO AC009680.5; EXPRESSED IN HELA, SIGNAL = 1.8; EXPRESSED IN FETAL LIVER, SIGNAL = 1.9; EXPRESSED IN HEART, SIGNAL = 1.7; SWISSPROT HIT: Q9ZEC6, EVALUE 4.10e+00; NT HIT: AL163227.2, EVALUE 2.00e-29; EST_HUMAN HIT: AW898344.1, EVALUE 9.00e-27
ctttatgctggttcccagaaagctcctcatttccatctgagaccacctcagcctcgacatcattgtccatattactatcagcattttggtcaaagccattcagcaagtctctaggaagtt

SEQ ID NO: 25662 - DNA, 86 bp, Homo sapiens
  MAP TO AL133368.1; EXPRESSED IN HEART, SIGNAL = 2.3; EST_HUMAN HIT: H71175.1, EVALUE 5.00e-09; NT HIT: AL163280.2, EVALUE 8.00e-10; SWISSPROT HIT: P39194, EVALUE 2.90e-01
atggccgcctgcaacctggaagacagccctcatcagaacctgaccatgctggcccccctggtctcggactcccagcctccaggatg

SEQ ID NO: 25663 - DNA, 78 bp, Homo sapiens
  MAP TO AC016372.2; EXPRESSED IN HEART, SIGNAL =   2; EST_HUMAN HIT: BF680047.1, EVALUE 9.20e-01
atggccactttgatttccagaactacccgtacacaatgtgaaaagaagaatagaggtgaggtggatttggttttggag

SEQ ID NO: 25664 - DNA, 82 bp, Homo sapiens
  MAP TO AC011501.2; EXPRESSED IN HEART, SIGNAL = 1.7; SWISSPROT HIT: Q14943, EVALUE 7.00e-05; EST_HUMAN HIT: AW951147.1, EVALUE 1.00e-18; NT HIT: gi11425635, EVALUE 4.00e-33
ggactacagatgctacggttctgttactcacaccccctatcagttgtcagctccagtgatcccctggacatcgtggtcacag

SEQ ID NO: 25665 - DNA, 285 bp, Homo sapiens
  MAP TO AC005006.2; EXPRESSED IN HELA, SIGNAL = 3.5; EXPRESSED IN ADULT LIVER, SIGNAL = 3.6; EXPRESSED IN PLACENTA, SIGNAL =   2; EXPRESSED IN BONE MARROW, SIGNAL = 1.7; EXPRESSED IN HEART, SIGNAL = 4.4; EXPRESSED IN LUNG, SIGNAL = 5.3; EXPRESSED IN FETAL LIVER, SIGNAL = 4.1; EXPRESSED IN BRAIN, SIGNAL = 2.6; SWISSPROT HIT: P14480, EVALUE 1.30e+00; NT HIT: gi11418157, EVALUE 1.70e-01; EST_HUMAN HIT: BF240666.1, EVALUE 2.60e-01
cctgccagagcacatttgagagtcccccaggcatgctcccgcctgagcatagcagcgtggatgccaagcctccagcccccttgtcctgctttggaggaagcctgggaagctgggtctgtgctgggcatcctgccattgtggacttcgaaacaaagacctgtctcaggcctagctgcctggtgccccttctaccctcccctggtggcccttggattggcattccagggggccagggcaaacaaggattgtgagtccttgtttggcctggccccctggaaggagtag

SEQ ID NO: 25666 - DNA, 128 bp, Homo sapiens
  MAP TO AC007841.1; EXPRESSED IN HEART, SIGNAL =   4; EXPRESSED IN FETAL LIVER, SIGNAL = 6.2; EXPRESSED IN ADULT LIVER, SIGNAL = 4.9; EXPRESSED IN PLACENTA, SIGNAL = 6.5; EXPRESSED IN HELA, SIGNAL = 5.3; EXPRESSED IN BRAIN, SIGNAL = 5.7; EXPRESSED IN LUNG, SIGNAL = 3.5; EXPRESSED IN BONE MARROW, SIGNAL =   6; SWISSPROT HIT: P04766, EVALUE 7.00e+00; NT HIT: AL163246.2, EVALUE 2.00e-23; EST_HUMAN HIT: BF445556.1, EVALUE 9.00e-27
tttgaatcacaggagcagatcccccccatattgttcttgttgtagggaataagtctcacgagatctgatggctttatcaggggtttccgcttttgcatccttctcattttctcttgccacccccatgt

SEQ ID NO: 25667 - DNA, 100 bp, Homo sapiens
  MAP TO AC005300.10; EXPRESSED IN FETAL LIVER, SIGNAL = 1.4; EXPRESSED IN PLACENTA, SIGNAL = 1.3; EXPRESSED IN HELA, SIGNAL = 1.7; EXPRESSED IN BONE MARROW, SIGNAL = 1.7; EXPRESSED IN LUNG, SIGNAL = 1.5; EXPRESSED IN HEART, SIGNAL = 1.7; NT HIT: gi6678436, EVALUE 2.10e-01; EST_HUMAN HIT: BE159343.1, EVALUE 1.00e-49; SWISSPROT HIT: P04468, EVALUE 5.50e+00
ctgaaatggcatccaggtccatcttgccctccacctctgcatggctctccatgccccatcgcctctcccagatcctagcactgggtccacactctcgccc

SEQ ID NO: 25668 - DNA, 533 bp, Homo sapiens
  MAP TO AC007539.8; EXPRESSED IN LUNG, SIGNAL =   2; EXPRESSED IN BONE MARROW, SIGNAL = 2.1; EXPRESSED IN HEART, SIGNAL =   2; EXPRESSED IN FETAL LIVER, SIGNAL = 2.1; EXPRESSED IN ADULT LIVER, SIGNAL = 2.5; EXPRESSED IN HELA, SIGNAL = 1.9; EXPRESSED IN PLACENTA, SIGNAL =   2; EXPRESSED IN BRAIN, SIGNAL = 1.8; EST_HUMAN HIT: BF675961.1, EVALUE 7.80e+00; NT HIT: U93604.1, EVALUE 3.40e-01
tgagttcacacaaggcagttgtgagattttgggataagaagagcagcccctgggtttgtgctgtagaaaacattgcccatcattaactgggtttccttatcagttggggccacagggtccctggtggataaagcaatgatgatgatgatgctgctgttgctgatgatgattttaatgatgataatgatgttgatgatgatgatgatattgatgacaaggataatattgatgctgctgatgatttaatgatgatgttgatgatgatgatattgatgacaatgataatattgatgctgatgatgatttaatgatgataatgatgttgatgatgatgatgatgatattgatgacaatgataatattgatgctgatgatgatttaatgatgataatgatgttgatgatgatgatgatgatattgatgacaatgataatattgatgttgatgatgatttaatgatgataatgatgatgatgatgatattgatgacaatgataatattgatgttggtgattatattgattttgatacga

SEQ ID NO: 25669 - DNA, 157 bp, Homo sapiens
  MAP TO AC007841.1; EXPRESSED IN PLACENTA, SIGNAL =   7; EXPRESSED IN HEART, SIGNAL = 1.3; EXPRESSED IN BONE MARROW, SIGNAL = 3.5; EXPRESSED IN LUNG, SIGNAL = 2.1; EXPRESSED IN FETAL LIVER, SIGNAL = 2.3; EST_HUMAN HIT: AA781336.1, EVALUE 1.40e-01; NT HIT: gi9633494, EVALUE 9.10e-02; SWISSPROT HIT: P17219, EVALUE 1.40e+00
tacgattgtcaggatgctgactcctttggagctctagagcctgaagatatgcactcaaaccccaaatttccagaaactctgcattgcagagcatcctcccagccatctgctctatctccacccacatgtgagtcatcaggatgactaatgttaccct

SEQ ID NO: 25670 - DNA, 166 bp, Homo sapiens
  MAP TO AL049758.11; EXPRESSED IN FETAL LIVER, SIGNAL = 1.8; EXPRESSED IN ADULT LIVER, SIGNAL = 3.5; EXPRESSED IN PLACENTA, SIGNAL = 4.6; EXPRESSED IN HELA, SIGNAL = 1.6; EXPRESSED IN BRAIN, SIGNAL = 1.6; EXPRESSED IN LUNG, SIGNAL = 1.8; EXPRESSED IN HEART, SIGNAL = 2.2; EXPRESSED IN BONE MARROW, SIGNAL = 1.4; SWISSPROT HIT: P26928, EVALUE 3.00e+00; NT HIT: gi11425860, EVALUE 1.50e+00; EST_HUMAN HIT: BE244902.1, EVALUE 2.00e-44
gggtgctatggagagagagagctttcaggggatcccagctctgcaggggcccgtgagggtcctggcaactcctagctgcaggatctcaagagacaaatcagctcctcctgtgaccggaggggaccgtggtgtttcaacagaaaggttactatggcagaatgcgggc

SEQ ID NO: 25671 - DNA, 588 bp, Homo sapiens; identical to SEQ ID NO: 9023
  MAP TO AL035682.16; EXPRESSED IN LUNG, SIGNAL = 2.7; EXPRESSED IN FETAL LIVER, SIGNAL = 2.5; EXPRESSED IN ADULT LIVER, SIGNAL = 3.5; EXPRESSED IN PLACENTA, SIGNAL = 7.8; EXPRESSED IN BRAIN, SIGNAL = 2.6; EXPRESSED IN HELA, SIGNAL = 2.9; EXPRESSED IN HEART, SIGNAL = 2.5; EXPRESSED IN BONE MARROW, SIGNAL = 3.4; NT HIT: AJ272327.1, EVALUE 1.50e+00; EST_HUMAN HIT: BE888280.1, EVALUE 5.60e-01; SWISSPROT HIT: Q29029, EVALUE 3.00e+00

SEQ ID NO: 25672 - DNA, 142 bp, Homo sapiens
  MAP TO AP000352.2; EXPRESSED IN ADULT LIVER, SIGNAL = 1.6; EXPRESSED IN FETAL LIVER, SIGNAL =   2; EXPRESSED IN PLACENTA, SIGNAL = 1.9; EXPRESSED IN HEART, SIGNAL = 1.6; EXPRESSED IN BRAIN, SIGNAL = 2.9; EXPRESSED IN HELA, SIGNAL = 2.1; EXPRESSED IN BONE MARROW, SIGNAL = 3.9; EXPRESSED IN LUNG, SIGNAL = 1.6; NT HIT: gi11417856, EVALUE 1.00e-74; EST_HUMAN HIT: BF346118.1, EVALUE 2.00e-74; SWISSPROT HIT: P30712, EVALUE 1.00e-25
cctgatttacctgagctgtaagtaccagacgccggaccactggtatccatctgacctgcaggctcgtgcccgtgttcatgagtacctgggctggcatgccgactgcatccgtggcacctttggtatacccctgtgggtccag

SEQ ID NO: 25673 - DNA, 138 bp, Homo sapiens
  MAP TO AC008166.1; EXPRESSED IN LUNG, SIGNAL =  19; EXPRESSED IN BONE MARROW, SIGNAL = 2.8; EXPRESSED IN HEART, SIGNAL =  12; EXPRESSED IN FETAL LIVER, SIGNAL =  39; EXPRESSED IN ADULT LIVER, SIGNAL =  28; EXPRESSED IN BRAIN, SIGNAL = 2.3; EXPRESSED IN PLACENTA, SIGNAL =  34; EXPRESSED IN HELA, SIGNAL =  13; NT HIT: AF003528.1, EVALUE 8.00e-05; EST_HUMAN HIT: R18420.1, EVALUE 3.00e-08; SWISSPROT HIT: O97664, EVALUE 4.00e+00
agacagaaaagattggtggttaccagaggccagaaagggtagtggggagggaggataaagaaaagttgattaatgggtccaaaaagcagtatgatagaaggaataacacccaatgttagatacattagtagggaaata

SEQ ID NO: 25674 - DNA, 85 bp, Homo sapiens
  MAP TO AP000123.1; EXPRESSED IN HELA, SIGNAL = 1.9; EXPRESSED IN PLACENTA, SIGNAL = 4.5; EXPRESSED IN BRAIN, SIGNAL = 2.6; EXPRESSED IN HEART, SIGNAL = 1.9; EXPRESSED IN BONE MARROW, SIGNAL = 2.2; EXPRESSED IN LUNG, SIGNAL = 1.9; EXPRESSED IN FETAL LIVER, SIGNAL = 3.3; EXPRESSED IN ADULT LIVER, SIGNAL = 2.7; NT HIT: AB040926.1, EVALUE 4.40e-02; EST_HUMAN HIT: BE877669.1, EVALUE 6.60e-02
atgtaccagctctgttcctttcttgccattcatctctgcttatgtccttagaaatagcttcataccttaagttctagggtacacg

SEQ ID NO: 25675 - DNA, 111 bp, Homo sapiens
  MAP TO AP000353.1; EXPRESSED IN FETAL LIVER, SIGNAL = 1.9; EXPRESSED IN BRAIN, SIGNAL = 1.7; EXPRESSED IN PLACENTA, SIGNAL = 1.7; EXPRESSED IN HELA, SIGNAL = 1.2; EXPRESSED IN HEART, SIGNAL = 1.6; EXPRESSED IN BONE MARROW, SIGNAL = 2.5; EST_HUMAN HIT: BF312724.1, EVALUE 1.40e+00; NT HIT: AF217491.1, EVALUE 2.40e-01; SWISSPROT HIT: P53793, EVALUE 4.20e+00
gatgtcccatggtatcatgggacagtagttggtgccaaggaggagtgccatgagctggcagacgggagcaagttctggggtttggtgggttgggaagaattcctggagaag

SEQ ID NO: 25676 - DNA, 143 bp, Homo sapiens
  MAP TO AP000041.1; EXPRESSED IN HELA, SIGNAL = 2.6; EXPRESSED IN BONE MARROW, SIGNAL = 3.7; EXPRESSED IN HEART, SIGNAL = 2.2; EXPRESSED IN LUNG, SIGNAL = 2.1; EXPRESSED IN FETAL LIVER, SIGNAL = 4.2; EXPRESSED IN ADULT LIVER, SIGNAL = 1.8; EXPRESSED IN PLACENTA, SIGNAL = 2.1; EXPRESSED IN BRAIN, SIGNAL = 2.5; NT HIT: gi11434531, EVALUE 3.20e-01; SWISSPROT HIT: P76397, EVALUE 9.00e+00; EST_HUMAN HIT: AV658033.1, EVALUE 1.20e-01
ttactgatgtagaatggtgtccagtctatagtaagctggaagctccccacctgcctgtctgtcacactcagcatgccttctgttgatgccactgtgtggataagcatagtgtctccagggagccctgtcaaaacgcccattgc

SEQ ID NO: 25677 - DNA, 117 bp, Homo sapiens
  MAP TO AC004624.6; EXPRESSED IN LUNG, SIGNAL = 7.8; EXPRESSED IN HEART, SIGNAL = 3.5; EXPRESSED IN ADULT LIVER, SIGNAL = 4.2; EXPRESSED IN FETAL LIVER, SIGNAL = 5.3; EXPRESSED IN BRAIN, SIGNAL = 3.7; EXPRESSED IN PLACENTA, SIGNAL = 3.8; EXPRESSED IN HELA, SIGNAL = 3.3; EXPRESSED IN BONE MARROW, SIGNAL = 4.2; NT HIT: M21496.1, EVALUE 6.50e-02; SWISSPROT HIT: Q20593, EVALUE 1.40e+00
ggataaccgaagcagcacaggctggcaggatcaccatgctgtctaaaggtctggggcccaagacaggtatattctctggtactgccagagaagtgggtgaggtccagatatgcagga

SEQ ID NO: 25678 - DNA, 577 bp, Homo sapiens; identical to SEQ ID NO: 9035
  MAP TO AC007567.1; EXPRESSED IN LUNG, SIGNAL = 1.3; EXPRESSED IN HEART, SIGNAL = 1.8; EXPRESSED IN FETAL LIVER, SIGNAL = 1.6; SWISSPROT HIT: P44312, EVALUE 1.70e+00; NT HIT: U57045.1, EVALUE 2.30e-02; EST_HUMAN HIT: BE696769.1, EVALUE 1.00e-04

SEQ ID NO: 25679 - DNA, 203 bp, Homo sapiens
  MAP TO AC004032.7; EXPRESSED IN HEART, SIGNAL =   3; EXPRESSED IN BONE MARROW, SIGNAL = 4.8; EXPRESSED IN LUNG, SIGNAL = 4.4; EXPRESSED IN FETAL LIVER, SIGNAL = 4.3; EXPRESSED IN ADULT LIVER, SIGNAL = 5.8; EXPRESSED IN PLACENTA, SIGNAL = 4.1; EXPRESSED IN BRAIN, SIGNAL = 3.7; EXPRESSED IN HELA, SIGNAL = 4.7; SWISSPROT HIT: Q63959, EVALUE 7.50e-01; NT HIT: gi11417901, EVALUE 1.00e-111; EST_HUMAN HIT: AU117972.1, EVALUE 1.00e-110
ccctcaggagtctgcagatccctgcaaaggctcagagaaggctgagcaggctgagcaagagggtgcctcatccctcccaggggtggggttgcccaggctggactggggatggaatgggagaggtggaggagatacacgcagtcccctccttcttccctgggatgcccggccaggaacagctttcagaaaagggaaagggctga

SEQ ID NO: 25680 - DNA, 129 bp, Homo sapiens
  MAP TO AC007556.2; EXPRESSED IN BRAIN, SIGNAL = 2.2; EXPRESSED IN HELA, SIGNAL = 1.9; EXPRESSED IN PLACENTA, SIGNAL = 4.1; EXPRESSED IN BONE MARROW, SIGNAL = 1.9; EXPRESSED IN HEART, SIGNAL = 1.6; EXPRESSED IN LUNG, SIGNAL = 1.2; EXPRESSED IN ADULT LIVER, SIGNAL =   3; EXPRESSED IN FETAL LIVER, SIGNAL =   3; NT HIT: gi11430460, EVALUE 7.00e-67; EST_HUMAN HIT: AU128912.1, EVALUE 8.00e-18; SWISSPROT HIT: P98164, EVALUE 2.00e-11
gtagaaaaccgacccctaaaccttgtacagaatatgaatataagtgtggcaatgggcattgcattccacatgacaatgtgtgtgatgatgccgatgactgtggtgactggtccgatgaactgggttgca

SEQ ID NO: 25681 - DNA, 253 bp, Homo sapiens
  MAP TO AC007106.6; EXPRESSED IN PLACENTA, SIGNAL = 5.4; EXPRESSED IN BRAIN, SIGNAL = 4.3; EXPRESSED IN HELA, SIGNAL = 5.6; EXPRESSED IN HEART, SIGNAL = 1.3; EXPRESSED IN BONE MARROW, SIGNAL = 2.6; EXPRESSED IN LUNG, SIGNAL = 3.6; EXPRESSED IN FETAL LIVER, SIGNAL = 2.1; EXPRESSED IN ADULT LIVER, SIGNAL = 3.1; NT HIT: AF198490.1, EVALUE 3.00e-77; EST_HUMAN HIT: AA699829.1, EVALUE 6.00e-79; SWISSPROT HIT: P03356, EVALUE 1.30e-02
atgctgcccaatcacctcggaagccccctgggccatcatggatgccaagcttcgggtaagtcttacagtgaagggtaagtccgtccccttcttaatcaatacggaggctacccacaccacattaccttcttttcaagggcctgtttcccttgcctccataaccattgtgggtatgacagccaggcttctaaacctcttaaaactccccaactctggttccaacttggacaacattcttttatgcactcctttt

SEQ ID NO: 25682 - DNA, 303 bp, Homo sapiens
  MAP TO AC006427.13; EXPRESSED IN LUNG, SIGNAL = 4.6; EXPRESSED IN BONE MARROW, SIGNAL = 4.5; EXPRESSED IN HEART, SIGNAL = 3.3; EXPRESSED IN ADULT LIVER, SIGNAL = 5.3; EXPRESSED IN FETAL LIVER, SIGNAL = 4.1; EXPRESSED IN BRAIN, SIGNAL = 3.6; EXPRESSED IN PLACENTA, SIGNAL = 3.7; EXPRESSED IN HELA, SIGNAL =   3; NT HIT: gi6753217, EVALUE 7.40e-01; EST_HUMAN HIT: AA813866.1, EVALUE 1.10e+00; SWISSPROT HIT: P17887, EVALUE 8.40e-01
tgtgcaaagagtgctctcaaggacaagttccatgaagggaagggacagctgcagctccctcacacatctgttcactgtcagtatattaacatgcacctggttaagtggatatgcattttattgtccagttctaatcatactaatcatcacgaaatggagaagtggctgaaaatatccctgcaaagaaatggtgggttgagcataatacaggaagaaaacaagaaaatggcagagttgatgcttctcctcctggtatgagttcttggtcagccccatcacaagatagaaataatgcaatcagtt

SEQ ID NO: 25683 - DNA, 361 bp, Homo sapiens
  MAP TO AB016897.1; EXPRESSED IN PLACENTA, SIGNAL = 3.7; EXPRESSED IN HELA, SIGNAL = 2.7; EXPRESSED IN BRAIN, SIGNAL = 1.6; EXPRESSED IN HEART, SIGNAL = 2.2; EXPRESSED IN BONE MARROW, SIGNAL = 1.3; EXPRESSED IN LUNG, SIGNAL = 2.8; EXPRESSED IN ADULT LIVER, SIGNAL = 4.3; EXPRESSED IN FETAL LIVER, SIGNAL = 3.7; NT HIT: AB011399.1, EVALUE 0.00e+00; EST_HUMAN HIT: AA317920.1, EVALUE 0.00e+00; SWISSPROT HIT: Q00725, EVALUE 5.00e-12
gtgctggaccgtgagtgaccagagaaaccactgcattaaaatatgggggtcactcccctgcagtgtgtgtgtggggagcaggaggcagtgggggtcattccccctgcagtgttgggggaggagaaggcagtgggggtcattccccctgcagtgtgtggggaggaggaggcagtgggggtcattacccctgcagtgtgttgggaggaggaggcagtgggggtcattccccctgcagtgtgtggggaggagaagacagtgggggtcattccccctgcagtgtggggggaggagaagacagtgggggtcattccccctgcagtgtggggggaggagaagacagtgggggtacattccccctgca

SEQ ID NO: 25684 - DNA, 130 bp, Homo sapiens
  MAP TO AC004032.7; EXPRESSED IN PLACENTA, SIGNAL =   4; EXPRESSED IN HELA, SIGNAL = 2.7; EXPRESSED IN BRAIN, SIGNAL = 2.5; EXPRESSED IN BONE MARROW, SIGNAL = 3.8; EXPRESSED IN HEART, SIGNAL = 2.3; EXPRESSED IN LUNG, SIGNAL = 3.4; EXPRESSED IN ADULT LIVER, SIGNAL = 3.6; EXPRESSED IN FETAL LIVER, SIGNAL = 3.9; SWISSPROT HIT: P72181, EVALUE 7.00e+00; NT HIT: U01149.1, EVALUE 7.30e-02; EST_HUMAN HIT: AW898189.1, EVALUE 9.00e-21
taatctctgagatgagatttaagtcaattccaagcatggaaatcggtgaaattaccctccaccgctccaacaacatctctgggcaggcaaggttgggtgggtggaggtgttggttaagggtttggggggt

SEQ ID NO: 25685 - DNA, 77 bp, Homo sapiens
  MAP TO AL035681.13; EXPRESSED IN HEART, SIGNAL = 2.8; EXPRESSED IN BONE MARROW, SIGNAL = 6.7; EXPRESSED IN LUNG, SIGNAL = 3.7; EXPRESSED IN FETAL LIVER, SIGNAL = 4.5; EXPRESSED IN ADULT LIVER, SIGNAL = 3.9; EXPRESSED IN HELA, SIGNAL = 5.1; EXPRESSED IN PLACENTA, SIGNAL = 5.5; EXPRESSED IN BRAIN, SIGNAL = 4.5; NT HIT: U67086.1, EVALUE 1.50e-01; EST_HUMAN HIT: BE894488.1, EVALUE 1.00e-03
agaggcgaagtgacatggcccatcaccccaccttccggaagatctactgtgatgccgttccttacctcttcaagaag

SEQ ID NO: 25686 - DNA, 185 bp, Homo sapiens
  MAP TO AP000350.1; EXPRESSED IN LUNG, SIGNAL = 8.6; EXPRESSED IN ADULT LIVER, SIGNAL =  13; EXPRESSED IN FETAL LIVER, SIGNAL = 9.4; EXPRESSED IN PLACENTA, SIGNAL = 7.6; EXPRESSED IN BONE MARROW, SIGNAL =  15; EXPRESSED IN HEART, SIGNAL = 5.6; EXPRESSED IN BRAIN, SIGNAL = 6.7; EXPRESSED IN HELA, SIGNAL = 8.6; NT HIT: AF240786.1, EVALUE 1.00e-100; SWISSPROT HIT: P30046, EVALUE 8.00e-28; EST_HUMAN HIT: AV655183.1, EVALUE 1.00e-100
cgcgtgaacgtgacggtacggccgggcctggccatggcgctgagcgggtccaccgagccctgcgcgcagctgtccatctcctccatcggcgtagtgggcaccgccgaggacaaccgcagccacagcgcccacttctttgagtttctcaccaaggagctagccctgggccaggaccggtgcgtagg

SEQ ID NO: 25687 - DNA, 348 bp, Homo sapiens
  MAP TO AC008166.1; EXPRESSED IN PLACENTA, SIGNAL = 3.4; EXPRESSED IN HELA, SIGNAL = 2.3; EXPRESSED IN LUNG, SIGNAL = 2.6; EXPRESSED IN HEART, SIGNAL = 1.7; EXPRESSED IN BONE MARROW, SIGNAL = 1.9; EXPRESSED IN ADULT LIVER, SIGNAL = 2.3; EXPRESSED IN FETAL LIVER, SIGNAL = 2.2; NT HIT: AF224669.1, EVALUE 1.00e-103; EST_HUMAN HIT: AW340174.1, EVALUE 1.00e-93; SWISSPROT HIT: P19028, EVALUE 7.10e-02
aggcaaagttctccagaaggctgtgtatactctgaatcagcgtccaatatatggtgctctttctcccaaagccaggattcatcggtccaggaatcaaggggtggaagtggaagtgggaccactgaccatcacctctagtgatctactagcaaaatttttgcttcctgctcccgtgaccttacgttttgctggcctagaggtcttagttccagagggaggaatgctgccaccaggaagcacaatgattccattaaactagaagttaacattggcacctggacactttgggctcctcctacctttaggtcaacaggccaagaagggagttacagtgttggctggggtgat

SEQ ID NO: 25688 - DNA, 156 bp, Homo sapiens
  MAP TO AP000352.2; EXPRESSED IN FETAL LIVER, SIGNAL = 5.5; EXPRESSED IN BRAIN, SIGNAL = 4.3; EXPRESSED IN PLACENTA, SIGNAL = 4.1; EXPRESSED IN HELA, SIGNAL = 4.3; EXPRESSED IN LUNG, SIGNAL =   4; EXPRESSED IN HEART, SIGNAL = 3.1; EXPRESSED IN BONE MARROW, SIGNAL = 5.9; EXPRESSED IN ADULT LIVER, SIGNAL = 3.2; NT HIT: AF240786.1, EVALUE 6.00e-83; EST_HUMAN HIT: BE884206.1, EVALUE 5.30e-01; SWISSPROT HIT: Q00174, EVALUE 4.60e-01
ctgcatcacctccgtcagcaccaagtcttccagggagatctgctccattgccaggaagggcctggccaccagcaccccccaatccaggtgctgcagggctggcatcagcctccccaacagccgctccagctgtgcagcatctgcaggctgtccgga

SEQ ID NO: 25689 - DNA, 163 bp, Homo sapiens
  MAP TO AL022329.9; EXPRESSED IN PLACENTA, SIGNAL = 3.4; EXPRESSED IN HELA, SIGNAL = 2.5; EXPRESSED IN BRAIN, SIGNAL = 3.2; EXPRESSED IN HEART, SIGNAL = 2.1; EXPRESSED IN BONE MARROW, SIGNAL =   3; EXPRESSED IN LUNG, SIGNAL = 3.3; EXPRESSED IN FETAL LIVER, SIGNAL = 3.2; EXPRESSED IN ADULT LIVER, SIGNAL = 3.4; NT HIT: AL139075.2, EVALUE 1.50e+00; EST_HUMAN HIT: AI625745.1, EVALUE 2.00e-03
aaagctgcttcccaataagctgctagataaaagcttatggcttcgtatttttattctgtaccatgtaggaatcagaattcttttaaacctaaaattagactgcttcgaatttttttctttgataagccacattgtaggaataagtattgttttgaaatgtagg

SEQ ID NO: 25690 - DNA, 153 bp, Homo sapiens
  MAP TO AL022329.9; EXPRESSED IN FETAL LIVER, SIGNAL = 2.4; EXPRESSED IN ADULT LIVER, SIGNAL = 4.4; EXPRESSED IN HELA, SIGNAL = 2.8; EXPRESSED IN PLACENTA, SIGNAL =   5; EXPRESSED IN BRAIN, SIGNAL = 2.8; EXPRESSED IN BONE MARROW, SIGNAL =   3; EXPRESSED IN HEART, SIGNAL = 1.4; EXPRESSED IN LUNG, SIGNAL = 2.5; NT HIT: AF156495.1, EVALUE 2.00e-24; EST_HUMAN HIT: AV735348.1, EVALUE 7.00e-28; SWISSPROT HIT: P39188, EVALUE 6.00e-10
ttttttttaattttttaattttttgggatagggcctcgctctgtcacccaggctggagaacagtgggatgatcatggctcactgcagccttgaattcctaggttcaagcaatcctcccacgtcagcctcctgagtagctaggactacaggtgc

SEQ ID NO: 25691 - DNA, 325 bp, Homo sapiens
  MAP TO AC007564.9; EXPRESSED IN FETAL LIVER, SIGNAL =   8; EXPRESSED IN ADULT LIVER, SIGNAL =  11; EXPRESSED IN BRAIN, SIGNAL = 3.5; EXPRESSED IN PLACENTA, SIGNAL = 5.7; EXPRESSED IN HELA, SIGNAL = 3.7; EXPRESSED IN LUNG, SIGNAL = 2.8; EXPRESSED IN BONE MARROW, SIGNAL = 2.5; EXPRESSED IN HEART, SIGNAL = 2.8; EST_HUMAN HIT: AI203012.1, EVALUE 2.00e-76; SWISSPROT HIT: P03567, EVALUE 2.80e+00; NT HIT: AL163280.2, EVALUE 1.00e-102
aaaaactgtgttagtccattttcacattgctgataaagacatacctgaaactgggaacaaaaagaggtttaattggacttacagttttgcatggctggggaggcctcagaatcatggcaggaggagaaaggcacttcttacatggcagtggcaagagaaaataagaaagaagcaaaagtggaaacccctgataaacccatcagatcttgtgagacttattcagtatcatgagaatagctcaaggaagaccagaccctatgattcaattacctccccctggctccctcccacaacatgtgggaattctgggagatacaattcaagt

SEQ ID NO: 25692 - DNA, 298 bp, Homo sapiens
  MAP TO AP000053.1; EXPRESSED IN HEART, SIGNAL = 4.1; EXPRESSED IN PLACENTA, SIGNAL = 6.1; EXPRESSED IN LUNG, SIGNAL = 5.2; EXPRESSED IN BONE MARROW, SIGNAL = 9.2; EXPRESSED IN ADULT LIVER, SIGNAL =   6; EXPRESSED IN FETAL LIVER, SIGNAL =   8; EXPRESSED IN BRAIN, SIGNAL = 8.2; EXPRESSED IN HELA, SIGNAL = 5.6; NT HIT: AL163280.2, EVALUE 8.00e-07; EST_HUMAN HIT: AW805435.1, EVALUE 5.00e-06; SWISSPROT HIT: P03708, EVALUE 3.10e+00
aggcttgaattctttctcctactctccacttgtggtagtcagtcttttgcatttaagggtcaaaaataagaaggcctattgtgtttccaaggctggggtccatagtgcatacgataggtttcagagggagagatggcagtggagatggggaaagaaaatgtggaaacctgagtctaggatgttgcttgctaagtgtactagaatatgccaccccaaatatgcctctttggcatataattattttgagctgaaggctattgagaaccagcagatgcacgaaaggtctaaaaacagagtc

SEQ ID NO: 25693 - DNA, 174 bp, Homo sapiens
  MAP TO AC007719.1; EXPRESSED IN LUNG, SIGNAL = 5.9; EXPRESSED IN BONE MARROW, SIGNAL =  10; EXPRESSED IN HEART, SIGNAL = 4.4; EXPRESSED IN FETAL LIVER, SIGNAL = 7.3; EXPRESSED IN ADULT LIVER, SIGNAL = 6.8; EXPRESSED IN PLACENTA, SIGNAL = 4.5; EXPRESSED IN HELA, SIGNAL = 3.7; EXPRESSED IN BRAIN, SIGNAL = 8.4; SWISSPROT HIT: P06681, EVALUE 5.00e-08; NT HIT: AJ278435.1, EVALUE 1.60e+00; EST_HUMAN HIT: BE538600.1, EVALUE 3.80e-02
ctgaacaatgaggttgtgatccactccaatggccattcaattggcaggttcttgatgactggcctaaaagggaacgctttcctgtgcaggaatagtgaacagtagacccaaaagtatacttctcgccagacaggactgcattaggaggaacgccagggtgtccacagtcaatca

SEQ ID NO: 25694 - DNA, 104 bp, Homo sapiens
  MAP TO AC007564.9; EXPRESSED IN PLACENTA, SIGNAL = 7.7; EXPRESSED IN ADULT LIVER, SIGNAL = 7.9; EXPRESSED IN HELA, SIGNAL = 3.9; EXPRESSED IN BRAIN, SIGNAL = 7.8; EXPRESSED IN BONE MARROW, SIGNAL = 4.4; EXPRESSED IN HEART, SIGNAL =   4; EXPRESSED IN LUNG, SIGNAL = 6.9; EXPRESSED IN FETAL LIVER, SIGNAL =  10; NT HIT: AL163267.2, EVALUE 1.00e-27; EST_HUMAN HIT: AA054182.1, EVALUE 1.00e-28
tcccctcgcaccatgattgtaagtttcctgaggcctccccagtcctgcagaactgtgagtatattaaacctcttttctttacaaattacccagtatcaggtatg

SEQ ID NO: 25695 - DNA, 164 bp, Homo sapiens
  MAP TO AL035681.13; EXPRESSED IN ADULT LIVER, SIGNAL = 3.7; EXPRESSED IN HELA, SIGNAL = 4.2; EXPRESSED IN PLACENTA, SIGNAL = 2.8; EXPRESSED IN BONE MARROW, SIGNAL = 6.2; EXPRESSED IN FETAL LIVER, SIGNAL = 1.5; EXPRESSED IN BRAIN, SIGNAL = 7.3; EXPRESSED IN HEART, SIGNAL = 2.6; EXPRESSED IN LUNG, SIGNAL = 5.5; NT HIT: gi11418177, EVALUE 8.00e-64; EST_HUMAN HIT: BF528850.1, EVALUE 1.00e-63; SWISSPROT HIT: P46060, EVALUE 3.00e-12
ttggtcacgaacgccagcagcaggggtgcaagggccttggggaaatagtcctgctgcaccatgtggttcagcgccatcagggggccgtacaggttggcaatggccttgaccttgtcttcactctgagaggaacacagcgaaaagcggggtgagcttcaaagtca

SEQ ID NO: 25696 - DNA, 80 bp, Homo sapiens
  MAP TO AC007539.8; EXPRESSED IN HELA, SIGNAL = 7.1; EXPRESSED IN PLACENTA, SIGNAL = 4.3; EXPRESSED IN BRAIN, SIGNAL = 2.6; EXPRESSED IN LUNG, SIGNAL = 2.9; EXPRESSED IN BONE MARROW, SIGNAL = 3.2; EXPRESSED IN HEART, SIGNAL = 4.5; EXPRESSED IN ADULT LIVER, SIGNAL = 4.8; EXPRESSED IN FETAL LIVER, SIGNAL =  10; NT HIT: gi11435947, EVALUE 6.00e-38; EST_HUMAN HIT: AU160072.1, EVALUE 1.00e-37
caccatcatttctgactttgaccagctgtaagagaaatgcagtcaggagcacagcatcccctacttactatcactacaag

SEQ ID NO: 25697 - DNA, 376 bp, Homo sapiens
  MAP TO AC007719.1; EXPRESSED IN HEART, SIGNAL = 2.2; EXPRESSED IN BRAIN, SIGNAL = 4.9; EXPRESSED IN HELA, SIGNAL =   5; EXPRESSED IN PLACENTA, SIGNAL = 6.9; EXPRESSED IN BONE MARROW, SIGNAL = 2.3; EXPRESSED IN LUNG, SIGNAL = 5.1; EXPRESSED IN ADULT LIVER, SIGNAL = 5.7; EXPRESSED IN FETAL LIVER, SIGNAL = 4.2; NT HIT: AL163246.2, EVALUE 0.00e+00; EST_HUMAN HIT: AA601627.1, EVALUE 0.00e+00; SWISSPROT HIT: P03357, EVALUE 5.00e-03
  unsure 40
  unsure 90
agggagggggcctgaataatccccgagaagtagtagtatnagcagatggaacactgagaagttatttctttgaggatagatttccacgantggaaaggaaatgagaggttctaagaggcgggctagtggcttgtactatagcatagcctgcctttgctggtgtgtggtgattaggcctggcagaactgccatcaataaactaagtgtgatcagggtgaggaacaggaaagaaggaaatgcggggaaatggggtgaatgtcaggcggagcagagagatacagtcatggggatcaggtgtggtatcaggaataatgtgggaggccagattgaagtctgggccaggaacaatggtaattgtgggagactcaatgaagag

SEQ ID NO: 25698 - DNA, 90 bp, Homo sapiens
  MAP TO AP000129.1; EXPRESSED IN ADULT LIVER, SIGNAL = 4.1; EXPRESSED IN FETAL LIVER, SIGNAL =   6; EXPRESSED IN PLACENTA, SIGNAL = 6.5; EXPRESSED IN HELA, SIGNAL = 6.3; EXPRESSED IN BRAIN, SIGNAL = 6.4; EXPRESSED IN BONE MARROW, SIGNAL = 8.3; EXPRESSED IN LUNG, SIGNAL =   6; EXPRESSED IN HEART, SIGNAL =   5; NT HIT: gi11435026, EVALUE 1.90e-01; EST_HUMAN HIT: BE304764.1, EVALUE 7.10e-02
tgcctcccctttcctgattcaggggcaataaactaggtcggattctccctgtccccaacaaggattcaaatatcgtgcagcaaacttcaa

SEQ ID NO: 25699 - DNA, 193 bp, Homo sapiens
  MAP TO AL079295.1; EXPRESSED IN FETAL LIVER, SIGNAL = 2.6; EXPRESSED IN ADULT LIVER, SIGNAL = 3.7; EXPRESSED IN HELA, SIGNAL =   3; EXPRESSED IN PLACENTA, SIGNAL =   4; EXPRESSED IN BRAIN, SIGNAL = 4.2; EXPRESSED IN BONE MARROW, SIGNAL = 3.5; EXPRESSED IN LUNG, SIGNAL = 2.7; EXPRESSED IN HEART, SIGNAL = 2.2; EST_HUMAN HIT: AA668239.1, EVALUE 1.10e-02; SWISSPROT HIT: P38086, EVALUE 6.60e+00; NT HIT: X83037.1, EVALUE 4.50e-01
gtggtggttaagaacagaaatgctggagccaaactccttgggtttcctaatttctacaacatggacattaatagtactgctgagtaagtatataaggctgctgagtggaataaatgctctaaaatatgtaaagcacttaagacaatgcttaatgcacagtatgtgctctgcattattatttagtattattaga

SEQ ID NO: 25700 - DNA, 208 bp, Homo sapiens
  MAP TO AC007539.8; EXPRESSED IN HELA, SIGNAL = 1.6; EXPRESSED IN BRAIN, SIGNAL = 1.7; EXPRESSED IN PLACENTA, SIGNAL = 2.6; EXPRESSED IN LUNG, SIGNAL = 1.4; EXPRESSED IN BONE MARROW, SIGNAL = 1.4; EXPRESSED IN HEART, SIGNAL = 1.4; EXPRESSED IN FETAL LIVER, SIGNAL = 2.5; NT HIT: AF176912.1, EVALUE 4.90e-01; EST_HUMAN HIT: BE565729.1, EVALUE 7.30e-01; SWISSPROT HIT: O42632, EVALUE 1.70e+00
aagacaaaagtttgtgtgtctccagttgctcatgtccccccacttccccatcccacctccccaaatgctagtaattatcatttgcaatgtaatcctgtggaaatgtgttaattacagcctcagagccctagagatcctctgcctttattatgttccagtgaatttactgggagacaattggggtcttttccaagggctaccaagtggc

SEQ ID NO: 25701 - DNA, 234 bp, Homo sapiens
  MAP TO AL035681.13; EXPRESSED IN HEART, SIGNAL = 2.9; EXPRESSED IN BONE MARROW, SIGNAL = 2.4; EXPRESSED IN LUNG, SIGNAL = 3.3; EXPRESSED IN FETAL LIVER, SIGNAL = 4.8; EXPRESSED IN ADULT LIVER, SIGNAL = 4.2; EXPRESSED IN HELA, SIGNAL = 2.7; EXPRESSED IN PLACENTA, SIGNAL = 4.3; EXPRESSED IN BRAIN, SIGNAL = 2.4; SWISSPROT HIT: P49198, EVALUE 1.90e+00; NT HIT: AF157516.2, EVALUE 2.00e-03; EST_HUMAN HIT: AW516653.1, EVALUE 2.10e-01
atggcgcaccgcgcgcagagcgtcctccaccgccctcctcttcgccctcccctggtggcttctggctctttctcgcagagaccgcagggaggtgttcagccgggagcgcccagagactacaattcccagaatgcgttgcacccaggtccctcagctcttccggaaaggttttgttcgcgtaactttgttgataacaggtactgctggctgctgggtctcttgggcaagacacag

SEQ ID NO: 25702 - DNA, 144 bp, Homo sapiens
  MAP TO AP000352.2; EXPRESSED IN HEART, SIGNAL = 1.8; EXPRESSED IN BONE MARROW, SIGNAL = 1.8; EXPRESSED IN ADULT LIVER, SIGNAL = 1.5; EXPRESSED IN FETAL LIVER, SIGNAL = 1.8; EST_HUMAN HIT: BF332018.1, EVALUE 7.00e-71; SWISSPROT HIT: Q9Y6J0, EVALUE 1.00e-19; NT HIT: gi11417862, EVALUE 5.00e-71
gcagtttcatccggtgatgagaaagaggggttgaaacaccctgggctgatactgaaatattccacttataagaacttggcccagctggcagcccagcgggaggatctggagacagccatggagttctacttagaggtgtggttt

SEQ ID NO: 25703 - DNA, 253 bp, Homo sapiens
  MAP TO AP000352.2; EXPRESSED IN LUNG, SIGNAL = 3.4; EXPRESSED IN FETAL LIVER, SIGNAL = 3.6; EXPRESSED IN ADULT LIVER, SIGNAL = 4.1; EXPRESSED IN BRAIN, SIGNAL = 4.1; EXPRESSED IN PLACENTA, SIGNAL = 3.2; EXPRESSED IN HELA, SIGNAL = 3.2; EXPRESSED IN HEART, SIGNAL = 2.7; EXPRESSED IN BONE MARROW, SIGNAL = 5.8; NT HIT: gi11417862, EVALUE 0.00e+00; EST_HUMAN HIT: BE500945.1, EVALUE 1.00e-80; SWISSPROT HIT: Q9Y6J0, EVALUE 3.00e-47
cggcgcgacagcatgctagagacagccaagcactgtttcacatcagcagcccgctgcgagggtgatggtgacgaggaggagtggctcatccactacatgctgggcaaggtggctgagaagcagcagcagccacccaccgtttacttgctgcactacaggcaggctggccactacctgcacgaggaggctgcccgctaccccaagaagatccactaccacaacccacctgagctggccatggaggccctggagg

SEQ ID NO: 25704 - DNA, 92 bp, Homo sapiens
  MAP TO AL035682.16; EXPRESSED IN ADULT LIVER, SIGNAL = 5.4; EXPRESSED IN FETAL LIVER, SIGNAL = 6.3; EXPRESSED IN HELA, SIGNAL = 3.6; EXPRESSED IN BRAIN, SIGNAL = 3.7; EXPRESSED IN PLACENTA, SIGNAL = 8.2; EXPRESSED IN BONE MARROW, SIGNAL = 3.8; EXPRESSED IN LUNG, SIGNAL = 4.1; EXPRESSED IN HEART, SIGNAL = 2.7; NT HIT: AB020702.1, EVALUE 7.60e-01; EST_HUMAN HIT: AV728354.1, EVALUE 1.10e+00; SWISSPROT HIT: P82469, EVALUE 1.90e+00
ggggtatgatgtgtgcaaatgcatgagacacacagtgagtgacaaagttgtagctgtgggcctcggtggcggggggcctcagcttcagcttt

SEQ ID NO: 25705 - DNA, 113 bp, Homo sapiens
  MAP TO AP000041.1; EXPRESSED IN HEART, SIGNAL = 2.4; EXPRESSED IN FETAL LIVER, SIGNAL = 5.3; EXPRESSED IN ADULT LIVER, SIGNAL = 6.6; EXPRESSED IN PLACENTA, SIGNAL = 5.2; EXPRESSED IN HELA, SIGNAL = 4.1; EXPRESSED IN BRAIN, SIGNAL = 5.1; EXPRESSED IN BONE MARROW, SIGNAL = 4.5; EXPRESSED IN LUNG, SIGNAL = 4.9; NT HIT: AF200528.1, EVALUE 2.50e-01; EST_HUMAN HIT: H10034.1, EVALUE 1.40e+00
gccatctggcctgagagggagaacctggcacaccacgcatatccaattaagcagaagaaggtgcctgactgcatgagtgtcatcccattgaatcttctgggaggtcctacaag

SEQ ID NO: 25706 - DNA, 220 bp, Homo sapiens
  MAP TO AL078474.2; EXPRESSED IN HEART, SIGNAL = 1.3; EXPRESSED IN PLACENTA, SIGNAL = 1.9; EXPRESSED IN BONE MARROW, SIGNAL =   2; EXPRESSED IN LUNG, SIGNAL = 1.7; EXPRESSED IN ADULT LIVER, SIGNAL = 2.5; EXPRESSED IN FETAL LIVER, SIGNAL = 2.8; EXPRESSED IN BRAIN, SIGNAL = 1.7; EXPRESSED IN HELA, SIGNAL =   2; NT HIT: M69035.1, EVALUE 8.00e-03; SWISSPROT HIT: P36022, EVALUE 1.20e+00; EST_HUMAN HIT: BF095146.1, EVALUE 2.00e-01
acaaacaaacaaaaggaactccaacagcagcagcagctaaggaaataatgttaaagtggttcacgttgcccaaggtttccaagatgttgcccatgaagagattctgcctctttgacaatctcctagaagtatcacttctctcagacgtatttttggtaggaaggaggtaccagcagtttctttcctttgtaataccattgcatctgtaagataacagaga

SEQ ID NO: 25707 - DNA, 105 bp, Homo sapiens
  MAP TO AL022319.2; EXPRESSED IN PLACENTA, SIGNAL = 1.4; EXPRESSED IN LUNG, SIGNAL = 1.9; EXPRESSED IN BONE MARROW, SIGNAL = 2.3; EXPRESSED IN HEART, SIGNAL = 1.6; EXPRESSED IN FETAL LIVER, SIGNAL = 1.9; EXPRESSED IN BRAIN, SIGNAL = 2.2; EXPRESSED IN HELA, SIGNAL = 1.5; EXPRESSED IN ADULT LIVER, SIGNAL = 1.6; NT HIT: gi11422463, EVALUE 8.90e-01; EST_HUMAN HIT: AV715377.1, EVALUE 1.00e-13; SWISSPROT HIT: Q9V3I8, EVALUE 8.30e-01
aggccagcttttagagaaaggtaccaggaaactgacaatgcttccttgaattggcttctgtatttgcttcatcagtgtctctcatagtgaatattctggtgttcc

SEQ ID NO: 25708 - DNA, 244 bp, Homo sapiens
  MAP TO AP000347.1; EXPRESSED IN PLACENTA, SIGNAL = 1.3; EXPRESSED IN BRAIN, SIGNAL = 1.7; EXPRESSED IN HELA, SIGNAL =   3; EXPRESSED IN LUNG, SIGNAL = 2.5; EXPRESSED IN HEART, SIGNAL = 2.2; EXPRESSED IN FETAL LIVER, SIGNAL = 1.8; EXPRESSED IN ADULT LIVER, SIGNAL = 2.1; NT HIT: AY012155.1, EVALUE 5.80e-01; EST_HUMAN HIT: BE870959.1, EVALUE 2.20e-01; SWISSPROT HIT: P53420, EVALUE 5.40e-01
actaagctcagaggtctcaacaaatggcaggttgaacatcagaggagttattaataggcctatagttacctcaagactccaccttaccagggccaaaaatgagtcctgggagggcagccagaaagaaagtagggcagagaggaaacacagggagaggggccctgggaccacgtcagatatggagggaaccaggggaacgagagcagccctgatgattgtactccccacagcccctgcatgcctg

SEQ ID NO: 25709 - DNA, 190 bp, Homo sapiens
  MAP TO AC005300.10; EXPRESSED IN LUNG, SIGNAL = 1.9; EXPRESSED IN HEART, SIGNAL = 2.7; EXPRESSED IN BONE MARROW, SIGNAL = 1.9; EXPRESSED IN ADULT LIVER, SIGNAL = 1.6; EXPRESSED IN FETAL LIVER, SIGNAL = 1.9; EXPRESSED IN BRAIN, SIGNAL = 2.1; EXPRESSED IN PLACENTA, SIGNAL = 1.2; EXPRESSED IN HELA, SIGNAL = 2.5; EST_HUMAN HIT: AL449511.1, EVALUE 1.00e-103; NT HIT: gi11526291, EVALUE 1.00e-103; SWISSPROT HIT: P36151, EVALUE 6.70e-02
cccacagcatagagcttccggatgggggcggcccagccccgcctctccgcctgtcgcctgatcaggtcctcggcatactggtaagtgaggatgctgggtttgcccatcaggccctcgtatctcagctccttgcccgtcactttctggtaaatggtttccaggcacagcagaaaggtgccatgtccaaacc

SEQ ID NO: 25710 - DNA, 166 bp, Homo sapiens
  MAP TO AP000123.1; EXPRESSED IN HELA, SIGNAL = 1.8; EXPRESSED IN BRAIN, SIGNAL = 2.3; EXPRESSED IN PLACENTA, SIGNAL =   4; EXPRESSED IN BONE MARROW, SIGNAL = 2.4; EXPRESSED IN HEART, SIGNAL =   2; EXPRESSED IN LUNG, SIGNAL = 1.9; EXPRESSED IN ADULT LIVER, SIGNAL =   5; EXPRESSED IN FETAL LIVER, SIGNAL = 3.6; NT HIT: gi9627909, EVALUE 2.40e-02; EST_HUMAN HIT: BF531001.1, EVALUE 1.40e-01; SWISSPROT HIT: P77252, EVALUE 3.00e+00
tttcaaaaacgtggcctaaggctttgcagaattcattttccaataactttggggacatgctcacaaccctttataaaagctgggagaaagaagaaatagaggaaggagagagaggtaaatggctgcccaagtggttaggaacttaacattttccatcaggccgatc

SEQ ID NO: 25711 - DNA, 339 bp, Homo sapiens
  MAP TO AL023553.5; EXPRESSED IN ADULT LIVER, SIGNAL = 2.4; EXPRESSED IN PLACENTA, SIGNAL = 2.5; EXPRESSED IN HELA, SIGNAL = 3.7; EXPRESSED IN BRAIN, SIGNAL = 4.5; EXPRESSED IN LUNG, SIGNAL = 4.5; EXPRESSED IN BONE MARROW, SIGNAL = 5.8; EXPRESSED IN HEART, SIGNAL = 4.1; EXPRESSED IN FETAL LIVER, SIGNAL = 2.9; NT HIT: AE005102.1, EVALUE 5.30e-02; EST_HUMAN HIT: BE897218.1, EVALUE 1.00e-110; SWISSPROT HIT: P35718, EVALUE 4.00e-05
accagccaagaccccccaaacaggatccctgacctgctgggggagatcccagagcagaagccccaggacacagcttccagccctgcactccggctctcccgcctcatgggggcttcagcaccatcagagccactcaccacaagcgtgtacggagcctccttctttggcagctcctcactggaagtggtggcatctgctgagctgggccctgtgggggacgtgtcaacaaagctctcgtccaccacccggaagcggatctcctcgccggtgtccatgtagaggtcgtgtgctccttcctccgtctcgtactcccacacccacacctgctccgcttcgtcg

SEQ ID NO: 25712 - DNA, 92 bp, Homo sapiens
  MAP TO AP000129.1; EXPRESSED IN FETAL LIVER, SIGNAL = 1.4; EXPRESSED IN PLACENTA, SIGNAL = 1.5; EXPRESSED IN HELA, SIGNAL = 1.3; EXPRESSED IN HEART, SIGNAL = 1.6; NT HIT: gi11433063, EVALUE 5.00e-33; EST_HUMAN HIT: BE567703.1, EVALUE 7.00e-33; SWISSPROT HIT: Q05086, EVALUE 5.50e+00
ctgaagtgtcagctcactggactcagggatgggctcttcatcatcttcctcactgtgatttgtgtccacttcccctcccactaccatttgca

SEQ ID NO: 25713 - DNA, 109 bp, Homo sapiens
  MAP TO AC007841.1; EXPRESSED IN LUNG, SIGNAL = 1.3; EXPRESSED IN HEART, SIGNAL = 1.3; SWISSPROT HIT: P71689, EVALUE 3.20e+00; NT HIT: AB008006.1, EVALUE 9.30e-01; EST_HUMAN HIT: AA397885.1, EVALUE 1.00e-10
ctgccagtgtagctagaccaaagcaggcggagaaaggtgggatgtccttgcttgctgggtcttctggcttcctcttcatgtccttgcttgctgggtcttctggcttcct

SEQ ID NO: 25714 - DNA, 99 bp, Homo sapiens
  MAP TO AL034406.1; EXPRESSED IN FETAL LIVER, SIGNAL = 4.6; EXPRESSED IN HELA, SIGNAL = 4.2; EXPRESSED IN PLACENTA, SIGNAL = 2.3; EXPRESSED IN BRAIN, SIGNAL = 4.5; EXPRESSED IN BONE MARROW, SIGNAL = 2.9; EXPRESSED IN LUNG, SIGNAL =   2; EXPRESSED IN HEART, SIGNAL = 3.4; EXPRESSED IN ADULT LIVER, SIGNAL = 4.5; NT HIT: AJ006345.1, EVALUE 1.00e-08; EST_HUMAN HIT: AW962164.1, EVALUE 1.00e-12; SWISSPROT HIT: P44650, EVALUE 3.20e+00
atgactcaatggaagtctccaacaattgtcttccctgtaggaacaccaaatttgacaactatctacacaaaaagtacactcataagaatcaaaaatcag

SEQ ID NO: 25715 - DNA, 79 bp, Homo sapiens
  MAP TO AC002472.3; EXPRESSED IN HELA, SIGNAL = 2.3; EXPRESSED IN HEART, SIGNAL = 2.3; EXPRESSED IN BONE MARROW, SIGNAL = 2.5; EXPRESSED IN LUNG, SIGNAL = 3.2; EXPRESSED IN FETAL LIVER, SIGNAL = 1.7; EXPRESSED IN ADULT LIVER, SIGNAL = 2.9; EXPRESSED IN PLACENTA, SIGNAL = 1.9; EXPRESSED IN BRAIN, SIGNAL = 3.1; NT HIT: AF289665.1, EVALUE 2.50e+00; EST_HUMAN HIT: BF676736.1, EVALUE 3.70e+00
cggtctagcgtgcacaggacgatccggtcggagaagccctcctgccgcagtgtctctgcacacaccagaccagctgcac

SEQ ID NO: 25716 - DNA, 574 bp, Homo sapiens; identical to SEQ ID NO: 9087
  MAP TO AL035682.16; EXPRESSED IN LUNG, SIGNAL = 2.8; EXPRESSED IN HEART, SIGNAL = 2.1; EXPRESSED IN FETAL LIVER, SIGNAL = 2.5; EXPRESSED IN ADULT LIVER, SIGNAL = 3.1; EXPRESSED IN HELA, SIGNAL = 2.4; EXPRESSED IN PLACENTA, SIGNAL = 2.4; EXPRESSED IN BRAIN, SIGNAL = 3.5; EXPRESSED IN BONE MARROW, SIGNAL = 3.9; NT HIT: L76944.1, EVALUE 1.40e+00; EST_HUMAN HIT: AI858398.1, EVALUE 5.40e-01; SWISSPROT HIT: P03117, EVALUE 2.90e+00

SEQ ID NO: 25717 - DNA, 98 bp, Homo sapiens
  MAP TO AC007462.2; EXPRESSED IN ADULT LIVER, SIGNAL = 4.7; EXPRESSED IN PLACENTA, SIGNAL =   3; EXPRESSED IN HELA, SIGNAL = 1.9; EXPRESSED IN BRAIN, SIGNAL = 2.4; EXPRESSED IN LUNG, SIGNAL = 3.1; EXPRESSED IN HEART, SIGNAL = 4.3; EXPRESSED IN BONE MARROW, SIGNAL = 2.8; EXPRESSED IN FETAL LIVER, SIGNAL = 4.1; NT HIT: L33836.1, EVALUE 3.20e+00
cttcttctttcctttctctcttttatgtttctctttcatttttgaataatctgagtgatacatacttctactacgttttcgctgcccataactccctg

SEQ ID NO: 25718 - DNA, 576 bp, Homo sapiens; identical to SEQ ID NO: 9090
  MAP TO AL021707.2; EXPRESSED IN PLACENTA, SIGNAL =   5; EXPRESSED IN ADULT LIVER, SIGNAL = 6.7; EXPRESSED IN FETAL LIVER, SIGNAL =   6; EXPRESSED IN BRAIN, SIGNAL = 3.1; EXPRESSED IN HELA, SIGNAL = 4.5; EXPRESSED IN BONE MARROW, SIGNAL = 3.5; EXPRESSED IN HEART, SIGNAL = 5.5; EXPRESSED IN LUNG, SIGNAL = 3.5; NT HIT: gi5802973, EVALUE 0.00e+00; SWISSPROT HIT: P30048, EVALUE 1.00e-49; EST_HUMAN HIT: AU117868.1, EVALUE 0.00e+00

SEQ ID NO: 25719 - DNA, 160 bp, Homo sapiens
  MAP TO AP000041.1; EXPRESSED IN HEART, SIGNAL = 1.8; EXPRESSED IN BONE MARROW, SIGNAL = 1.6; EXPRESSED IN LUNG, SIGNAL = 1.7; EXPRESSED IN FETAL LIVER, SIGNAL = 1.5; EXPRESSED IN HELA, SIGNAL = 1.6; EXPRESSED IN PLACENTA, SIGNAL = 1.9; EXPRESSED IN BRAIN, SIGNAL = 2.2; NT HIT: AL163280.2, EVALUE 2.00e-05; EST_HUMAN HIT: AW971923.1, EVALUE 6.00e-10
tccagactctggtggcctcaggcattcctcggcctgctgctgcatcacctccatctctgcccccatctggccttctcctcctggctgcatcttctcatcttctgtctgtctcaaatctccctctgcctttctcttataaagacacttgtcattggattta

SEQ ID NO: 25720 - DNA, 192 bp, Homo sapiens
  MAP TO AC004624.6; EXPRESSED IN BRAIN, SIGNAL = 4.9; EXPRESSED IN HELA, SIGNAL = 6.4; EXPRESSED IN BONE MARROW, SIGNAL = 3.7; EXPRESSED IN HEART, SIGNAL = 3.7; EXPRESSED IN FETAL LIVER, SIGNAL = 4.7; EXPRESSED IN ADULT LIVER, SIGNAL =   7; EXPRESSED IN PLACENTA, SIGNAL =   3; EXPRESSED IN LUNG, SIGNAL =   4; NT HIT: X67856.1, EVALUE 2.90e-02; EST_HUMAN HIT: BF377859.1, EVALUE 9.00e-28; SWISSPROT HIT: P57035, EVALUE 1.50e-01
gtggctgaagcaaatagaggggaccgaggccgccctgacccagaagatgctggacctggagaaggagaaggtaaaagatttgactgcctgggggtgggggagagggttcaaagagctcagagaggttgatttgcaggaaggctttgcatgtgttttcctaatgatttgcatgcatttctcaattttgctttt

SEQ ID NO: 25721 - DNA, 170 bp, Homo sapiens
  MAP TO AC007539.8; EXPRESSED IN LUNG, SIGNAL = 6.5; EXPRESSED IN BONE MARROW, SIGNAL = 5.9; EXPRESSED IN FETAL LIVER, SIGNAL = 7.9; EXPRESSED IN ADULT LIVER, SIGNAL = 9.7; EXPRESSED IN BRAIN, SIGNAL = 3.9; EXPRESSED IN HELA, SIGNAL = 4.6; EXPRESSED IN PLACENTA, SIGNAL = 7.4; EXPRESSED IN HEART, SIGNAL = 3.4; NT HIT: AF156495.1, EVALUE 9.90e-02; EST_HUMAN HIT: BF124974.1, EVALUE 3.70e-02; SWISSPROT HIT: P40024, EVALUE 7.80e-01
gatttagaatgcagtgcactcacatatgtgaatgacaagaggtcgagtatttctggggatggggacaaccgtgtgggtcagatgacccaggcagggaggacagcagggaggcaagctgtgagtgcagccgcctgtcccacatgcacagagagagaggagctccacaggct

SEQ ID NO: 25722 - DNA, 286 bp, Homo sapiens
  MAP TO Z97055.1; EXPRESSED IN BRAIN, SIGNAL = 1.6; EXPRESSED IN PLACENTA, SIGNAL = 2.8; EXPRESSED IN HELA, SIGNAL = 2.2; EXPRESSED IN BONE MARROW, SIGNAL = 1.9; EXPRESSED IN HEART, SIGNAL = 2.2; EXPRESSED IN LUNG, SIGNAL = 2.9; EXPRESSED IN FETAL LIVER, SIGNAL = 4.9; EXPRESSED IN ADULT LIVER, SIGNAL =   4; NT HIT: D87675.1, EVALUE 4.00e-73; EST_HUMAN HIT: N94950.1, EVALUE 2.00e-82; SWISSPROT HIT: P20945, EVALUE 2.90e+00
aaacctcctgggctgcattcccagatggttaaggcattctaagtcacagcatgagacaggaggtcagcacaagatacaggtcataagcaccttgctaataaagtatgttgcagtaaagatgctggctaaaacccaccaaaaccaggatggccatgacagtcacctctggttgtcctcactgctacactcccaccagcaccatgacagtttacaaatgccattgcaacatcaggaagttatcctatatggtctaaaaaaggggggcatgaataatccaccccttgtt

SEQ ID NO: 25723 - DNA, 222 bp, Homo sapiens
  MAP TO AL023553.5; EXPRESSED IN LUNG, SIGNAL = 6.9; EXPRESSED IN BONE MARROW, SIGNAL = 5.8; EXPRESSED IN HEART, SIGNAL = 4.3; EXPRESSED IN FETAL LIVER, SIGNAL =   4; EXPRESSED IN ADULT LIVER, SIGNAL = 6.2; EXPRESSED IN HELA, SIGNAL = 3.7; EXPRESSED IN PLACENTA, SIGNAL = 5.3; EXPRESSED IN BRAIN, SIGNAL = 6.6; NT HIT: gi11418187, EVALUE 1.00e-122; EST_HUMAN HIT: AV709008.1, EVALUE 1.00e-122; SWISSPROT HIT: Q92871, EVALUE 2.00e-06
gacggttgtccacacagactctggccccatctgggtgggcttgcagcaggcgtcctgggccagaggaggggccctggcatctatccaacaccaggacctctctttaggcctaggccaaactcttcagaagtcacgacacacagatgtgggccccggtcacgcctcatgagctgtctctgggaagaaaatctcccggcatcgctgcaccgtgtcctgaggaga

SEQ ID NO: 25724 - DNA, 211 bp, Homo sapiens
  MAP TO AC004624.6; EXPRESSED IN BONE MARROW, SIGNAL = 1.8; EXPRESSED IN LUNG, SIGNAL = 1.8; EXPRESSED IN HEART, SIGNAL = 1.5; EXPRESSED IN FETAL LIVER, SIGNAL = 1.3; EXPRESSED IN HELA, SIGNAL = 1.8; EXPRESSED IN BRAIN, SIGNAL = 1.9; EXPRESSED IN PLACENTA, SIGNAL = 1.2; NT HIT: AL163210.2, EVALUE 1.30e-01; EST_HUMAN HIT: AA993154.1, EVALUE 3.00e-03; SWISSPROT HIT: P22544, EVALUE 2.20e+00
caaggatggtgacatggggatatggacccagattcgccggctggtctctaagaccaatcacaagtatccttgcgagagggagacagagagggttgagtctagggatggcagtgtggccgccagtgtgggattgcatgcagctggctccaaagatgaaggcagggccaggagcccaggaatgcagctctagacctggagaagaccaggaatt

SEQ ID NO: 25725 - DNA, 140 bp, Homo sapiens
  MAP TO AP000350.1; EXPRESSED IN ADULT LIVER, SIGNAL =   5; EXPRESSED IN FETAL LIVER, SIGNAL = 6.5; EXPRESSED IN PLACENTA, SIGNAL = 6.6; EXPRESSED IN HELA, SIGNAL = 6.2; EXPRESSED IN BRAIN, SIGNAL = 4.3; EXPRESSED IN BONE MARROW, SIGNAL = 6.1; EXPRESSED IN LUNG, SIGNAL = 9.5; EXPRESSED IN HEART, SIGNAL = 5.5; EST_HUMAN HIT: AI084557.1, EVALUE 3.00e-39; NT HIT: AL163302.2, EVALUE 2.00e-02; SWISSPROT HIT: P47842, EVALUE 4.00e-06
aggtggccctcaggcctggcccctgctgctggccagctgcctggtgcccggggcgctccagctcgcctccctgcctctgctccctgaaagcccgcgctacctcctcattgactgtggagacaccgaggcctgcctggcag

SEQ ID NO: 25726 - DNA, 134 bp, Homo sapiens
  MAP TO AL035681.13; EXPRESSED IN HELA, SIGNAL = 1.4; EXPRESSED IN PLACENTA, SIGNAL = 1.9; EXPRESSED IN BRAIN, SIGNAL = 1.7; EXPRESSED IN BONE MARROW, SIGNAL = 1.9; EXPRESSED IN LUNG, SIGNAL = 1.8; EXPRESSED IN HEART, SIGNAL = 1.5; EXPRESSED IN ADULT LIVER, SIGNAL = 1.5; EXPRESSED IN FETAL LIVER, SIGNAL = 1.6; NT HIT: AE001699.1, EVALUE 3.00e-01; EST_HUMAN HIT: BF125887.1, EVALUE 1.00e-69
ctgtctgtgagatgtgtggtatcgtgggtacaagggaagccttcttctccaagaccaagaggttctgcagcgtctcctgctccaggagctactcctccaactccaagaaagccagtatcttggctaggttacag

SEQ ID NO: 25727 - DNA, 142 bp, Homo sapiens
  MAP TO AP000350.1; EXPRESSED IN FETAL LIVER, SIGNAL = 3.4; EXPRESSED IN HELA, SIGNAL = 4.1; EXPRESSED IN BRAIN, SIGNAL =   5; EXPRESSED IN PLACENTA, SIGNAL =   5; EXPRESSED IN HEART, SIGNAL = 2.8; EXPRESSED IN LUNG, SIGNAL = 3.8; EXPRESSED IN BONE MARROW, SIGNAL = 7.1; EXPRESSED IN ADULT LIVER, SIGNAL = 4.7; NT HIT: gi11417856, EVALUE 1.00e-74; EST_HUMAN HIT: BF346118.1, EVALUE 2.00e-74; SWISSPROT HIT: P30712, EVALUE 1.00e-24
caggggtataccaaaggtgccacggatgcagtcggcatgccagcccaggtactcatgaacacgggcacgagcctgcaggtcagatggataccagtggtccggcgtctggtacttacagctcaggtaaatcaggatggccgag

SEQ ID NO: 25728 - DNA, 153 bp, Homo sapiens
  MAP TO AC007463.3; EXPRESSED IN FETAL LIVER, SIGNAL = 6.6; EXPRESSED IN PLACENTA, SIGNAL = 6.3; EXPRESSED IN BONE MARROW, SIGNAL = 2.8; EXPRESSED IN ADULT LIVER, SIGNAL = 5.4; EXPRESSED IN BRAIN, SIGNAL = 3.6; EXPRESSED IN HELA, SIGNAL =  11; EXPRESSED IN HEART, SIGNAL = 4.1; EXPRESSED IN LUNG, SIGNAL = 4.6; EST_HUMAN HIT: AA307904.1, EVALUE 2.00e-65; NT HIT: AF198490.1, EVALUE 2.00e-64
gtcggacacgattggcagggagagcacgtgtgtttttatgagaattatgccaagataggtaacagatgaggaagtaatttgggcttgattgaagtaatgggggctgtctgtgaagctttgcagcagtacagccttggtaatttgctgagccta

SEQ ID NO: 25729 - DNA, 404 bp, Homo sapiens
  MAP TO AP000053.1; EXPRESSED IN HEART, SIGNAL = 2.6; EXPRESSED IN BONE MARROW, SIGNAL = 2.6; EXPRESSED IN LUNG, SIGNAL =   3; EXPRESSED IN FETAL LIVER, SIGNAL = 3.6; EXPRESSED IN ADULT LIVER, SIGNAL = 3.1; EXPRESSED IN PLACENTA, SIGNAL = 3.7; EXPRESSED IN HELA, SIGNAL = 2.3; EXPRESSED IN BRAIN, SIGNAL = 1.6; NT HIT: AF277386.1, EVALUE 1.60e-02; EST_HUMAN HIT: T60651.1, EVALUE 8.00e-64; SWISSPROT HIT: P02457, EVALUE 1.60e-01
atcccatccaagatggaggccctcctgctcctgctgccttgttctcaccccctttcgtgatgtgcgaggccatcggaaggtgtggaatttctccactgattcctctcattgtccctttctccctactcctggggaggctgcaatggtgacctcatccaccttcagaggcaggtgctggaggaggaaaggatgtgggagttcaagccggctgcagaggcccaagagcccagatggtgtccttccagcaaactggagaggcactcctcctaccaggcagccactgccccactccagggcccctggctcagctagggaagtggggctgggtttcaccccctgctcatcccctaaggcccagtgctggactcagtgcagcacctgcccagccatctctagcagcggca

SEQ ID NO: 25730 - DNA, 81 bp, Homo sapiens
  MAP TO AP000350.1; EXPRESSED IN PLACENTA, SIGNAL = 6.2; EXPRESSED IN HELA, SIGNAL =   8; EXPRESSED IN BONE MARROW, SIGNAL = 3.4; EXPRESSED IN LUNG, SIGNAL = 6.8; EXPRESSED IN HEART, SIGNAL = 4.1; EXPRESSED IN ADULT LIVER, SIGNAL = 6.3; EXPRESSED IN FETAL LIVER, SIGNAL =   7; EXPRESSED IN BRAIN, SIGNAL =   3; EST_HUMAN HIT: AV726988.1, EVALUE 2.00e-38; NT HIT: M33842.1, EVALUE 1.00e-33
cttgtctatgatgcagagacctttgttcacgtgtttatctgctgaccttctctccactattatcctatgaccctgccacat

SEQ ID NO: 25731 - DNA, 132 bp, Homo sapiens
  MAP TO AL022238.1; EXPRESSED IN HEART, SIGNAL = 2.5; NT HIT: AF065398.1, EVALUE 1.20e+00; EST_HUMAN HIT: AV723948.1, EVALUE 6.80e+00; SWISSPROT HIT: O76015, EVALUE 5.30e+00
catttgctttttttttttctttagctttgatttgcttcccacatctttgccactttctatgttcaaagggtgctagtccacacttctttgcaaactatggagtgtgcttaagggttgtcagctcaactggag

SEQ ID NO: 25732 - DNA, 81 bp, Homo sapiens
  MAP TO AB016897.1; EXPRESSED IN LUNG, SIGNAL = 2.4; EXPRESSED IN ADULT LIVER, SIGNAL = 2.1; EXPRESSED IN FETAL LIVER, SIGNAL = 1.7; EXPRESSED IN PLACENTA, SIGNAL = 1.3; EXPRESSED IN BRAIN, SIGNAL = 2.1; EXPRESSED IN HELA, SIGNAL = 2.1; EXPRESSED IN HEART, SIGNAL =   2; EXPRESSED IN BONE MARROW, SIGNAL = 2.1; NT HIT: AB012723.1, EVALUE 2.00e-38; EST_HUMAN HIT: AV700349.1, EVALUE 9.70e-01; SWISSPROT HIT: Q00668, EVALUE 9.60e+00
ttactgttacacaccctagacttgacttgggaagtaaacagcgccagcttaaggaagcacgtggcctattgataaaggatt

SEQ ID NO: 25733 - DNA, 215 bp, Homo sapiens
  MAP TO AC007564.9; EXPRESSED IN HEART, SIGNAL = 1.7; EXPRESSED IN LUNG, SIGNAL = 2.7; EXPRESSED IN BONE MARROW, SIGNAL = 2.5; EXPRESSED IN FETAL LIVER, SIGNAL = 3.8; EXPRESSED IN ADULT LIVER, SIGNAL = 6.8; EXPRESSED IN HELA, SIGNAL = 2.2; EXPRESSED IN PLACENTA, SIGNAL =   5; EXPRESSED IN BRAIN, SIGNAL = 2.7; NT HIT: AL163280.2, EVALUE 2.00e-68; EST_HUMAN HIT: BE166034.1, EVALUE 5.00e-70; SWISSPROT HIT: Q13061, EVALUE 2.70e+00
gtgtgttttcatgctgcttacaaagagatacccgagactgggaagaaaaagaggtttaattggacttacagttccacatggctggggaggcctcagaatcatggcaggaggagaaaggcacttcttatgtggcagtagcaagagaaaaagagaaagatgcaaaagcagaaacccctgataaacccatcagatctcgtgagacttgttcactatca

SEQ ID NO: 25734 - DNA, 90 bp, Homo sapiens
  MAP TO AL008582.11; EXPRESSED IN HELA, SIGNAL = 3.4; EXPRESSED IN HEART, SIGNAL = 3.7; EXPRESSED IN ADULT LIVER, SIGNAL = 2.5; EXPRESSED IN PLACENTA, SIGNAL = 2.3; EXPRESSED IN BONE MARROW, SIGNAL = 2.8; EXPRESSED IN LUNG, SIGNAL = 3.6; EXPRESSED IN FETAL LIVER, SIGNAL =   2; EXPRESSED IN BRAIN, SIGNAL =   3; NT HIT: AL163281.2, EVALUE 7.40e-01; EST_HUMAN HIT: AL137964.1, EVALUE 1.00e-43
aaagaaagcccatacacatcaatggccagggccatgatgatggtctgggcctagagggaatggtggggtggggccataggacagagatga

SEQ ID NO: 25735 - DNA, 147 bp, Homo sapiens
  MAP TO AC004032.7; EXPRESSED IN HEART, SIGNAL = 1.6; EXPRESSED IN BONE MARROW, SIGNAL = 1.8; EXPRESSED IN LUNG, SIGNAL = 1.6; EXPRESSED IN FETAL LIVER, SIGNAL =   2; EXPRESSED IN BRAIN, SIGNAL = 1.7; EXPRESSED IN PLACENTA, SIGNAL = 1.8; EXPRESSED IN HELA, SIGNAL = 1.6; NT HIT: gi6598319, EVALUE 3.30e-01; EST_HUMAN HIT: AV645676.1, EVALUE 5.00e-01; SWISSPROT HIT: P33173, EVALUE 6.10e-01
cctccggatctacctcccccatgcatgtgcagcgatgtgggagccccgagccccacagggaaagcttgggcaagaaccttctgtcctttgtgacggccgacaccagccgccaagtaattcatacaccctcagcctagcccaggtgat

SEQ ID NO: 25736 - DNA, 217 bp, Homo sapiens
  MAP TO Z82188.2; EXPRESSED IN LUNG, SIGNAL = 3.3; EXPRESSED IN FETAL LIVER, SIGNAL =   6; EXPRESSED IN ADULT LIVER, SIGNAL = 5.4; EXPRESSED IN PLACENTA, SIGNAL = 7.1; EXPRESSED IN HELA, SIGNAL = 2.4; EXPRESSED IN BRAIN, SIGNAL = 1.7; EXPRESSED IN BONE MARROW, SIGNAL = 2.6; EXPRESSED IN HEART, SIGNAL = 3.4; NT HIT: AB038161.1, EVALUE 8.00e-03; EST_HUMAN HIT: AV726862.1, EVALUE 7.70e-01
aaagtgggtgctccccaagggcaggaactgaatcccattcattctgcatttctttatgctgcctggtatgtgcctggagcataggaggtgcttagtcattgtgatgtggatagaagggtggttaatgggtgaatggaaaatggactgatggatgaacagaagaaggatgaatggggggatcatggagggaatgatggagggagagaaggaatgatgg

SEQ ID NO: 25737 - DNA, 167 bp, Homo sapiens
  MAP TO AC008022.1; EXPRESSED IN LUNG, SIGNAL = 1.3; EXPRESSED IN BONE MARROW, SIGNAL = 1.5; EXPRESSED IN HEART, SIGNAL = 1.7; EXPRESSED IN BRAIN, SIGNAL = 1.5; EXPRESSED IN PLACENTA, SIGNAL = 1.3; EXPRESSED IN HELA, SIGNAL = 1.3; EST_HUMAN HIT: BE715051.1, EVALUE 5.70e-01; SWISSPROT HIT: P06599, EVALUE 7.80e-01; NT HIT: AB040746.1, EVALUE 1.50e+00
  unsure 67
  unsure 80
  unsure 161
tcttgttactgggtacagtgggagtatagcagaggggaggtggaaagacgtcatagatgaaatggtncattgggctgggnttttgaaggataaatagcagtttgcaaggtggaggagtggtgaacttggtgagaggtaggacttcctgaatgaaaacaaanggcact

SEQ ID NO: 25738 - DNA, 184 bp, Homo sapiens
  MAP TO AP000352.2; EXPRESSED IN BRAIN, SIGNAL = 6.7; EXPRESSED IN PLACENTA, SIGNAL = 4.5; EXPRESSED IN HELA, SIGNAL = 4.4; EXPRESSED IN HEART, SIGNAL = 3.8; EXPRESSED IN LUNG, SIGNAL = 4.1; EXPRESSED IN BONE MARROW, SIGNAL = 9.1; EXPRESSED IN ADULT LIVER, SIGNAL = 5.4; EXPRESSED IN FETAL LIVER, SIGNAL = 9.1; EST_HUMAN HIT: BF343733.1, EVALUE 3.00e-09; SWISSPROT HIT: P30711, EVALUE 1.00e-09; NT HIT: AF240786.1, EVALUE 1.00e-99
agctgcattaaggtcttcagattctctttaacagcaggttctactggaggcaggtccttggccttcaggacagctgggagggcctcctggaagaggtcctcccgcactgcagcctccacgtgttgggcaccatgctgccaccgtgggtccgctttcaaagactcagcagccagcactgatgggc

SEQ ID NO: 25739 - DNA, 104 bp, Homo sapiens
  MAP TO AC007463.3; EXPRESSED IN FETAL LIVER, SIGNAL =  13; EXPRESSED IN PLACENTA, SIGNAL = 8.9; EXPRESSED IN BRAIN, SIGNAL = 2.2; EXPRESSED IN HELA, SIGNAL = 4.4; EXPRESSED IN BONE MARROW, SIGNAL = 2.1; EXPRESSED IN HEART, SIGNAL = 4.8; EXPRESSED IN LUNG, SIGNAL = 5.7; EXPRESSED IN ADULT LIVER, SIGNAL = 4.9; NT HIT: X60459.1, EVALUE 1.40e-02; EST_HUMAN HIT: AW771219.1, EVALUE 1.30e+00; SWISSPROT HIT: P10342, EVALUE 1.90e+00
taaagagttggaccagtggttctcaactggggtggttcagcccccagggatgtttttggttgtcacaaccggggacggggacaagctcctgcagatatccagtg

SEQ ID NO: 25740 - DNA, 157 bp, Homo sapiens
  MAP TO AC007539.8; EXPRESSED IN HELA, SIGNAL = 5.4; EXPRESSED IN PLACENTA, SIGNAL = 7.9; EXPRESSED IN BRAIN, SIGNAL = 3.9; EXPRESSED IN LUNG, SIGNAL = 4.5; EXPRESSED IN HEART, SIGNAL = 3.1; EXPRESSED IN BONE MARROW, SIGNAL = 6.3; EXPRESSED IN ADULT LIVER, SIGNAL = 7.6; EXPRESSED IN FETAL LIVER, SIGNAL = 5.8; NT HIT: AE000335.1, EVALUE 3.60e-01; EST_HUMAN HIT: T71101.1, EVALUE 5.30e-01; SWISSPROT HIT: Q02722, EVALUE 2.30e+00
aaattctgcacagtggttggatccaaaggagcagcagggatgggagatcatgtatgtgtacgggggagaagggaattcagagctgctggcagtgctggtctgggctatattggtgtttgttttattcattgtgtgtgtgtgtgtgtgtgtgtgtgtg

SEQ ID NO: 25741 - DNA, 150 bp, Homo sapiens
  MAP TO AC006427.13; EXPRESSED IN PLACENTA, SIGNAL = 1.5; EXPRESSED IN HELA, SIGNAL = 1.4; EXPRESSED IN HEART, SIGNAL = 1.3; EXPRESSED IN BONE MARROW, SIGNAL = 1.6; EXPRESSED IN LUNG, SIGNAL = 1.4; EXPRESSED IN FETAL LIVER, SIGNAL = 1.4; EXPRESSED IN ADULT LIVER, SIGNAL = 1.5; NT HIT: Z21621.1, EVALUE 3.40e-01; SWISSPROT HIT: O67898, EVALUE 1.40e+00; EST_HUMAN HIT: BF664806.1, EVALUE 2.00e+00
cagttgccgtcctcagcccagttttccatctggcaaacacatctttccagatccatccaaatgccatttccttctaagctgacctggtcatcccaaagcagaattaatctctcctctgaactaccatggcacttcattcggtcttccatt

SEQ ID NO: 25742 - DNA, 111 bp, Homo sapiens
  MAP TO AP000129.1; EXPRESSED IN BONE MARROW, SIGNAL = 3.9; EXPRESSED IN LUNG, SIGNAL = 3.8; EXPRESSED IN HEART, SIGNAL = 2.7; EXPRESSED IN FETAL LIVER, SIGNAL = 3.5; EXPRESSED IN ADULT LIVER, SIGNAL = 5.2; EXPRESSED IN HELA, SIGNAL = 4.4; EXPRESSED IN PLACENTA, SIGNAL = 6.7; EXPRESSED IN BRAIN, SIGNAL = 2.4; NT HIT: M32658.1, EVALUE 2.00e-23; EST_HUMAN HIT: AW979107.1, EVALUE 3.00e-23; SWISSPROT HIT: P09442, EVALUE 7.10e+00
cccgagtttcttcctcccagtgggttcatcctctcgctgacttcaggagtgaagctgcagaccctcacggtgagtgttacagctcttaaaagtagtgctgacccaaagacc

SEQ ID NO: 25743 - DNA, 175 bp, Homo sapiens
  MAP TO AC004832.3; EXPRESSED IN ADULT LIVER, SIGNAL = 1.7; EXPRESSED IN FETAL LIVER, SIGNAL = 2.1; EXPRESSED IN PLACENTA, SIGNAL = 4.5; EXPRESSED IN BRAIN, SIGNAL = 1.8; EXPRESSED IN HELA, SIGNAL =   4; EXPRESSED IN HEART, SIGNAL = 1.5; EXPRESSED IN BONE MARROW, SIGNAL = 2.1; EXPRESSED IN LUNG, SIGNAL = 2.5; NT HIT: gi11422745, EVALUE 9.00e-30; EST_HUMAN HIT: BF675911.1, EVALUE 1.00e-29; SWISSPROT HIT: P29518, EVALUE 3.90e+00
gcaaaggatcctcaaggtcattctgctcctagaagggtgtgccctgctcactggcctgctcttcatccatatctagggggctttgaaatagaggccgctgttctccctccctgccccagtgtgtggggaaaaggaaggaatgggaagggaggttctgaggacgaaagctttctct

SEQ ID NO: 25744 - DNA, 181 bp, Homo sapiens
  MAP TO AC004832.3; EXPRESSED IN LUNG, SIGNAL =   3; EXPRESSED IN FETAL LIVER, SIGNAL = 3.8; EXPRESSED IN BRAIN, SIGNAL = 3.6; EXPRESSED IN HELA, SIGNAL = 3.2; EXPRESSED IN BONE MARROW, SIGNAL = 3.3; EXPRESSED IN HEART, SIGNAL = 3.2; EXPRESSED IN ADULT LIVER, SIGNAL = 3.5; EXPRESSED IN PLACENTA, SIGNAL = 4.2; EST_HUMAN HIT: AV646993.1, EVALUE 5.00e-17; NT HIT: gi11417966, EVALUE 3.00e-17; SWISSPROT HIT: P56287, EVALUE 3.00e+00
cctaaccctgaccagaactgtttccctgttacagccagaagcttcgacctgcagaagtcggaggccatgctccggaaggtgagacacatttggctgttgcttcagttcctccccatcagaatcactccttgcgtggacttcttttgccgcacctcccatcccaatcacagcttttggcttt

SEQ ID NO: 25745 - DNA, 121 bp, Homo sapiens
  MAP TO Z83844.5; EXPRESSED IN HELA, SIGNAL = 2.1; EXPRESSED IN BRAIN, SIGNAL = 2.8; EXPRESSED IN PLACENTA, SIGNAL = 1.2; EXPRESSED IN BONE MARROW, SIGNAL = 3.4; EXPRESSED IN LUNG, SIGNAL =   2; EXPRESSED IN HEART, SIGNAL = 2.9; NT HIT: gi11418086, EVALUE 4.00e-62; EST_HUMAN HIT: BF568097.1, EVALUE 5.00e-62
atggagtcctcgcaccagcaggtgatggaggagctgcagcggcaccacgagcgggagctgcagcgcctgcagcaggagaaggagtggctcctggctgaggagacggcagccacggcctcag

SEQ ID NO: 25746 - DNA, 118 bp, Homo sapiens
  MAP TO AC004624.6; EXPRESSED IN HELA, SIGNAL = 2.5; EXPRESSED IN HEART, SIGNAL =   2; EXPRESSED IN BONE MARROW, SIGNAL = 2.8; EXPRESSED IN LUNG, SIGNAL =   2; EXPRESSED IN FETAL LIVER, SIGNAL = 1.7; EXPRESSED IN ADULT LIVER, SIGNAL = 1.6; EXPRESSED IN BRAIN, SIGNAL = 1.7; SWISSPROT HIT: P98157, EVALUE 5.40e+00; NT HIT: gi10190655, EVALUE 2.60e-01
tcaaacaaatgcaagtcccaggtgctgctgtaaaggaggaggggtaacagtggaggcgcggacagcaagagttggtgtcagggtgtcagaggaggagccttcagccagtgcaaaagcc

SEQ ID NO: 25747 - DNA, 164 bp, Homo sapiens
  MAP TO AP000353.1; EXPRESSED IN PLACENTA, SIGNAL = 1.4; EXPRESSED IN BRAIN, SIGNAL = 1.6; EXPRESSED IN HELA, SIGNAL = 1.6; EXPRESSED IN BONE MARROW, SIGNAL = 1.7; EXPRESSED IN LUNG, SIGNAL = 1.9; EXPRESSED IN HEART, SIGNAL = 1.7; EXPRESSED IN FETAL LIVER, SIGNAL = 1.3; NT HIT: AJ243213.1, EVALUE 1.50e+00; EST_HUMAN HIT: AA493535.1, EVALUE 5.60e-01; SWISSPROT HIT: P38935, EVALUE 3.90e+00
atgctctggaggtggttgctcgggtatgtgggtctgagactccaaacagctcggccaaagccgacatggagatccatcagttcacaagtagtgaatgagccttctcaggtgggtggcagtcccagggtggccaagggtccagggagtgcaccctcactctgcag

SEQ ID NO: 25748 - DNA, 168 bp, Homo sapiens
  MAP TO Z82201.1; EXPRESSED IN BONE MARROW, SIGNAL = 1.9; EXPRESSED IN LUNG, SIGNAL =   3; EXPRESSED IN HEART, SIGNAL = 2.8; EXPRESSED IN FETAL LIVER, SIGNAL = 6.8; EXPRESSED IN ADULT LIVER, SIGNAL = 2.1; EXPRESSED IN BRAIN, SIGNAL = 1.5; EXPRESSED IN PLACENTA, SIGNAL = 4.2; EXPRESSED IN HELA, SIGNAL = 3.3; NT HIT: AL163207.2, EVALUE 1.50e+00; EST_HUMAN HIT: BE178519.1, EVALUE 3.00e-55; SWISSPROT HIT: P24834, EVALUE 8.80e+00
agagtgtatataagggaatttttgaaaaaaaaaaaaaaaggaagaaaaagtgttatgtatgtttagcatcatttaataaagagcgagctttggccaaatagaattatgattggaaatgcaaatacatcgactgatgatccttacataacatgagcactgtgtgtgtgt

SEQ ID NO: 25749 - DNA, 87 bp, Homo sapiens
  MAP TO AL031588.1; EXPRESSED IN PLACENTA, SIGNAL = 1.6; EXPRESSED IN BONE MARROW, SIGNAL = 2.5; EXPRESSED IN LUNG, SIGNAL = 2.4; EXPRESSED IN HEART, SIGNAL =   3; EXPRESSED IN FETAL LIVER, SIGNAL = 2.4; EXPRESSED IN ADULT LIVER, SIGNAL = 1.7; EXPRESSED IN BRAIN, SIGNAL = 2.9; EXPRESSED IN HELA, SIGNAL = 2.4; SWISSPROT HIT: P55200, EVALUE 5.60e+00; NT HIT: AF317676.1, EVALUE 1.80e-01; EST_HUMAN HIT: AA758014.1, EVALUE 6.80e-02
ctaatgaataccttaaaactctcctgccaccatggccagtcccaggaaaggcaggggaccaaggacaggaacagagttagtcacagc

SEQ ID NO: 25750 - DNA, 186 bp, Homo sapiens
  MAP TO AC007539.8; EXPRESSED IN ADULT LIVER, SIGNAL = 5.3; EXPRESSED IN FETAL LIVER, SIGNAL = 5.3; EXPRESSED IN PLACENTA, SIGNAL = 3.9; EXPRESSED IN LUNG, SIGNAL = 2.7; EXPRESSED IN BONE MARROW, SIGNAL = 6.8; EXPRESSED IN BRAIN, SIGNAL = 5.3; EXPRESSED IN HELA, SIGNAL =   4; EXPRESSED IN HEART, SIGNAL = 2.3; EST_HUMAN HIT: AV719585.1, EVALUE 1.60e-01; NT HIT: K02056.1, EVALUE 4.30e-01; SWISSPROT HIT: Q14586, EVALUE 1.70e+00
ccacagccagcagcaaactagcggcttgaggaactattcagcagacacttatgtagcacttaagtatgcaccagacacggttctgagtggttttacaagtgccaactcacttcatcttcataccaggtcttgacagagttagttactatccctgtttctctaatgaggaaactggaccacagagag

SEQ ID NO: 25751 - DNA, 168 bp, Homo sapiens
  MAP TO AC007841.1; EXPRESSED IN PLACENTA, SIGNAL = 1.6; EXPRESSED IN HELA, SIGNAL = 1.5; EXPRESSED IN HEART, SIGNAL = 1.5; EXPRESSED IN LUNG, SIGNAL =   2; EXPRESSED IN BONE MARROW, SIGNAL = 1.5; EXPRESSED IN ADULT LIVER, SIGNAL = 1.7; EXPRESSED IN FETAL LIVER, SIGNAL = 1.9; NT HIT: D14547.1, EVALUE 1.00e-25; EST_HUMAN HIT: BF437948.1, EVALUE 3.00e-24
agtgaaatttcttctgcctctgccacccctgagacagcaagaccaaccctccacttcctcctcctcctcctcctcctcaacctgctcaacgtgaagatgatgaagatcaagaccttcatgatgatctacttccacttaatgaatagtaaatatattttctcttccttg

SEQ ID NO: 25752 - DNA, 107 bp, Homo sapiens
  MAP TO AL031588.1; EXPRESSED IN HEART, SIGNAL = 2.5; EXPRESSED IN FETAL LIVER, SIGNAL = 2.8; EXPRESSED IN ADULT LIVER, SIGNAL = 3.6; EXPRESSED IN BRAIN, SIGNAL = 4.5; EXPRESSED IN PLACENTA, SIGNAL = 3.1; EXPRESSED IN HELA, SIGNAL = 3.2; EXPRESSED IN LUNG, SIGNAL = 3.6; EXPRESSED IN BONE MARROW, SIGNAL = 5.4; NT HIT: U45426.1, EVALUE 2.30e-01; EST_HUMAN HIT: AW964557.1, EVALUE 5.30e+00; SWISSPROT HIT: O15228, EVALUE 1.90e+00
aaaaaaaaaaaaaagttcactaaattgcttgtttaatgtaatttccccttgtcataccaaaactataattttctgcaaaacaggagaacgtcagtcatcgaacattt

SEQ ID NO: 25753 - DNA, 83 bp, Homo sapiens
  MAP TO AC006548.19; EXPRESSED IN PLACENTA, SIGNAL = 4.9; EXPRESSED IN BRAIN, SIGNAL = 1.5; EXPRESSED IN HELA, SIGNAL = 2.9; EXPRESSED IN HEART, SIGNAL =   2; EXPRESSED IN BONE MARROW, SIGNAL = 4.6; EXPRESSED IN LUNG, SIGNAL = 3.2; EXPRESSED IN FETAL LIVER, SIGNAL = 3.4; NT HIT: AF224669.1, EVALUE 6.00e-23; EST_HUMAN HIT: BE061178.1, EVALUE 5.00e-18
atatcacactggtccattacattaatgacattatgctggttggatcctgtgagcaagaaatagcaaacacactagacttactg

SEQ ID NO: 25754 - DNA, 545 bp, Homo sapiens; identical to SEQ ID NO: 9147
  MAP TO AC007567.1; EXPRESSED IN HELA, SIGNAL = 5.9; EXPRESSED IN PLACENTA, SIGNAL = 5.7; EXPRESSED IN BRAIN, SIGNAL = 5.8; EXPRESSED IN LUNG, SIGNAL = 6.5; EXPRESSED IN HEART, SIGNAL = 4.4; EXPRESSED IN BONE MARROW, SIGNAL =  11; EXPRESSED IN ADULT LIVER, SIGNAL = 8.3; EXPRESSED IN FETAL LIVER, SIGNAL = 6.6; NT HIT: AL163303.2, EVALUE 1.00e-19; EST_HUMAN HIT: H37903.1, EVALUE 3.00e-39; SWISSPROT HIT: P14180, EVALUE 9.20e-01

SEQ ID NO: 25755 - DNA, 211 bp, Homo sapiens
  MAP TO Z97055.1; EXPRESSED IN FETAL LIVER, SIGNAL = 1.3; EXPRESSED IN ADULT LIVER, SIGNAL = 1.9; EXPRESSED IN PLACENTA, SIGNAL = 1.7; EXPRESSED IN HELA, SIGNAL = 1.4; EXPRESSED IN BRAIN, SIGNAL = 1.8; EXPRESSED IN LUNG, SIGNAL = 1.9; EXPRESSED IN HEART, SIGNAL = 1.6; EXPRESSED IN BONE MARROW, SIGNAL = 1.5; EST_HUMAN HIT: AI472641.1, EVALUE 7.40e-01; SWISSPROT HIT: O88935, EVALUE 1.70e+00; NT HIT: AF110520.1, EVALUE 2.00e+00
gctggaccatgaaacccttgcccagctgggtcctctctttgtctctggaaagtggggagggcccccagctgctgtctacatgcagtgacgaagagggggtgagtcctcagccctgctcctgtcctgcccacatctgggtcacactggggatgacagatgtccagtgtggctggccaagaatgaatgccggtggacaggaagagaatatgaa

SEQ ID NO: 25756 - DNA, 183 bp, Homo sapiens
  MAP TO AP000347.1; EXPRESSED IN FETAL LIVER, SIGNAL = 1.7; EXPRESSED IN BRAIN, SIGNAL = 2.8; EXPRESSED IN PLACENTA, SIGNAL = 2.5; EXPRESSED IN HELA, SIGNAL =   2; EXPRESSED IN BONE MARROW, SIGNAL = 3.1; EXPRESSED IN LUNG, SIGNAL = 2.5; EXPRESSED IN HEART, SIGNAL =   2; EXPRESSED IN ADULT LIVER, SIGNAL = 2.4; NT HIT: gi11434117, EVALUE 2.00e-65; EST_HUMAN HIT: AW249440.1, EVALUE 2.00e-96; SWISSPROT HIT: P08236, EVALUE 6.00e-26
cacgatggcatagaagtgggcactgccaatcctcagcaccactcttgtgcacaggtcctggatccatcgctccagcagggtcacctcccgttcataccacaaccagctgacaaaatgccgcagccgccagccctggccgatgtcgttgaagctggagggaaccggcatgtccacggtggggcc

SEQ ID NO: 25757 - DNA, 171 bp, Homo sapiens
  MAP TO AP000127.1; EXPRESSED IN FETAL LIVER, SIGNAL = 1.9; EXPRESSED IN ADULT LIVER, SIGNAL = 1.9; EXPRESSED IN HELA, SIGNAL = 1.7; EXPRESSED IN PLACENTA, SIGNAL = 2.2; EXPRESSED IN BRAIN, SIGNAL = 2.1; EXPRESSED IN BONE MARROW, SIGNAL = 1.9; EXPRESSED IN LUNG, SIGNAL = 1.8; EXPRESSED IN HEART, SIGNAL = 1.4; NT HIT: U03686.1, EVALUE 6.00e-34; SWISSPROT HIT: P02438, EVALUE 6.00e-03; EST_HUMAN HIT: AA699745.1, EVALUE 3.80e-02
gttcttcggcagctggacacgcaggactgctgatacgtcctggagaccccacaggctggctggcagacagtagagactcctcccactggttggcagacagtagagatgccgcccactggttggcagacactggagatgcctcccaggggctgacatccactagagacaaag

SEQ ID NO: 25758 - DNA, 287 bp, Homo sapiens
  MAP TO AC006548.19; EXPRESSED IN PLACENTA, SIGNAL = 4.6; EXPRESSED IN BONE MARROW, SIGNAL =   2; EXPRESSED IN LUNG, SIGNAL =   2; EXPRESSED IN FETAL LIVER, SIGNAL = 1.4; EXPRESSED IN BRAIN, SIGNAL = 1.8; EXPRESSED IN HELA, SIGNAL = 2.5; EXPRESSED IN HEART, SIGNAL = 1.6; EXPRESSED IN ADULT LIVER, SIGNAL =   2; NT HIT: AL163246.2, EVALUE 1.00e-64; EST_HUMAN HIT: AW816046.1, EVALUE 4.00e-40; SWISSPROT HIT: O52536, EVALUE 1.30e+00
gatggacctctctggtcaaaaactgaagatatttgtaccctgtgtgagtgttgaccaacaagtgacttcagcagaggaggattttgataatcaagtggataagatgacccattctgtggataccactcagcctctttcctcagatacccctgtcattgtccaatgagcccatgaacatagcggccatggtggcagggatggaggctatgcatggattcagcaatgtggacttccactcaccaaggctgaactgtctgtggccactgctgagtgcccaatttgccagc

SEQ ID NO: 25759 - DNA, 127 bp, Homo sapiens
  MAP TO Z95114.19; EXPRESSED IN HEART, SIGNAL = 2.3; EXPRESSED IN ADULT LIVER, SIGNAL = 1.9; EXPRESSED IN FETAL LIVER, SIGNAL = 2.3; EXPRESSED IN HELA, SIGNAL = 2.5; EXPRESSED IN BRAIN, SIGNAL = 2.6; EXPRESSED IN PLACENTA, SIGNAL = 2.4; EXPRESSED IN LUNG, SIGNAL = 2.8; EXPRESSED IN BONE MARROW, SIGNAL = 3.1; EST_HUMAN HIT: BE560399.1, EVALUE 1.00e-65; SWISSPROT HIT: O95236, EVALUE 5.00e-18; NT HIT: gi11418041, EVALUE 1.00e-65
ctgggcaattcagccgcagtcacgaatctcttccaggcttcattgttagtcagcaggatttgcagatgcactgggctgactctctcccggaagtatttggtggcctcttcagtaaagcgtttctttt

SEQ ID NO: 25760 - DNA, 243 bp, Homo sapiens
  MAP TO AL008723.8; EXPRESSED IN PLACENTA, SIGNAL = 1.9; EXPRESSED IN HELA, SIGNAL = 1.4; EXPRESSED IN LUNG, SIGNAL =   2; EXPRESSED IN HEART, SIGNAL = 1.6; EXPRESSED IN BONE MARROW, SIGNAL = 2.4; EXPRESSED IN FETAL LIVER, SIGNAL = 1.3; EXPRESSED IN BRAIN, SIGNAL =   2; EST_HUMAN HIT: AV754155.1, EVALUE 6.00e-14; SWISSPROT HIT: P08548, EVALUE 4.00e-16; NT HIT: AB009808.1, EVALUE 1.00e-11
tgcaaaacattcttgaaagaaattttaaaaggtctaaataaataaaaagacatcctatgttcatggattggaatacttaatattgttaatgtgacaatacttaccaaattgatctataaattcaacaaagtccctctcaaaatcctagctaccttatttgcaaaaactgacaagctgatcctgacatttatatggaaatgcaagagacccatattagccaaaatagtcttgaagaacaaagtt

SEQ ID NO: 25761 - DNA, 150 bp, Homo sapiens
  MAP TO Z98884.11; EXPRESSED IN LUNG, SIGNAL = 7.5; EXPRESSED IN HEART, SIGNAL = 4.2; EXPRESSED IN BRAIN, SIGNAL = 5.2; EXPRESSED IN HELA, SIGNAL = 4.8; EXPRESSED IN BONE MARROW, SIGNAL = 4.8; EXPRESSED IN ADULT LIVER, SIGNAL = 4.9; EXPRESSED IN FETAL LIVER, SIGNAL = 5.8; EXPRESSED IN PLACENTA, SIGNAL = 2.3; NT HIT: AB020640.1, EVALUE 2.00e-79; EST_HUMAN HIT: AW163688.1, EVALUE 3.00e-79; SWISSPROT HIT: Q27828, EVALUE 4.00e+00
cacacctgaccgaatcaagcaggagaattttgtgcccatggagtcctcaggattggaaagaacagaccctgccaccattagcagtacaatgagctggctggccagttatctagcggatgctgactgccttcccagtgctgcccagatccg

SEQ ID NO: 25762 - DNA, 75 bp, Homo sapiens
  MAP TO AC007539.8; EXPRESSED IN LUNG, SIGNAL = 1.4; EXPRESSED IN BONE MARROW, SIGNAL = 2.4; EXPRESSED IN HEART, SIGNAL = 1.9; EXPRESSED IN ADULT LIVER, SIGNAL = 1.8; EXPRESSED IN FETAL LIVER, SIGNAL = 1.9; EXPRESSED IN PLACENTA, SIGNAL = 1.8; EXPRESSED IN HELA, SIGNAL = 1.7; EXPRESSED IN BRAIN, SIGNAL =   2; NT HIT: L42320.1, EVALUE 5.90e-01; EST_HUMAN HIT: BF327345.1, EVALUE 8.70e-01
atgaacagtacaagaatggccatggagacaatcacattgaaactcctcactcatgtggccatgtcagcctggctg

SEQ ID NO: 25763 - DNA, 97 bp, Homo sapiens
  MAP TO Z98884.11; EXPRESSED IN PLACENTA, SIGNAL = 2.2; EXPRESSED IN BRAIN, SIGNAL = 1.6; EXPRESSED IN HELA, SIGNAL = 1.5; EXPRESSED IN HEART, SIGNAL = 1.8; EXPRESSED IN BONE MARROW, SIGNAL = 1.7; EXPRESSED IN LUNG, SIGNAL = 1.8; EXPRESSED IN FETAL LIVER, SIGNAL = 3.3; EXPRESSED IN ADULT LIVER, SIGNAL = 1.5; NT HIT: AE001711.1, EVALUE 8.10e-01; EST_HUMAN HIT: N58284.1, EVALUE 1.20e+00
tcttcagtgtgtcttaaagcatagaatctgcgttgatgacgagaacaccgtccacccaggtgtatggcacagtttgcagagaagttatgtgccatac

SEQ ID NO: 25764 - DNA, 346 bp, Homo sapiens
  MAP TO AL031587.3; EXPRESSED IN LUNG, SIGNAL = 5.4; EXPRESSED IN BONE MARROW, SIGNAL =   6; EXPRESSED IN HEART, SIGNAL = 4.4; EXPRESSED IN FETAL LIVER, SIGNAL =  11; EXPRESSED IN ADULT LIVER, SIGNAL = 5.3; EXPRESSED IN BRAIN, SIGNAL = 3.9; EXPRESSED IN PLACENTA, SIGNAL = 4.8; EXPRESSED IN HELA, SIGNAL = 4.2; NT HIT: AF019413.1, EVALUE 2.10e-01; EST_HUMAN HIT: AL046544.1, EVALUE 0.00e+00; SWISSPROT HIT: Q15062, EVALUE 2.30e+00
aatcgaaatatttagtaataaaattagtaagctggtagctctcagactagctgattatcagaatcatctgggcagttttgcaaatgcaggctctcaggccgcttcactagagattctattccgggggtctggggaaggacccaggaacctgtattttttagcatgctctcctgttaattctggatttgttggtgtgaacctgagctggaatcatcaggggtggcttcctagaggagatgggcctagaattggcatccctttgcttggtggtagagtccccactgtgggccaagtgttatgctgggggctgggcctccgtggtgaatcacatgtggttctgggccac

SEQ ID NO: 25765 - DNA, 147 bp, Homo sapiens
  MAP TO AB016897.1; EXPRESSED IN PLACENTA, SIGNAL = 3.1; EXPRESSED IN BRAIN, SIGNAL = 5.2; EXPRESSED IN HELA, SIGNAL = 5.2; EXPRESSED IN LUNG, SIGNAL = 6.3; EXPRESSED IN HEART, SIGNAL = 4.1; EXPRESSED IN BONE MARROW, SIGNAL = 7.3; EXPRESSED IN FETAL LIVER, SIGNAL = 3.9; EXPRESSED IN ADULT LIVER, SIGNAL = 6.2; NT HIT: gi11419157, EVALUE 3.00e-69; EST_HUMAN HIT: BF311737.1, EVALUE 3.20e-02; SWISSPROT HIT: Q9Y6Z2, EVALUE 2.00e-17
tacttgctctatctggcaactccttccataagggaagtctgaagtgagcagtcgagctgggagagcagagtcatgcggggcaggggaatgatggggtcccacagccgtgcccatcagcccgttgaccacatctgcatggcacaggga

SEQ ID NO: 25766 - DNA, 205 bp, Homo sapiens
  MAP TO AL031587.3; EXPRESSED IN LUNG, SIGNAL = 1.5; EXPRESSED IN BONE MARROW, SIGNAL = 1.9; EXPRESSED IN HEART, SIGNAL = 1.7; EXPRESSED IN FETAL LIVER, SIGNAL = 1.4; EXPRESSED IN BRAIN, SIGNAL =   2; EXPRESSED IN PLACENTA, SIGNAL = 1.3; EXPRESSED IN HELA, SIGNAL = 1.4; NT HIT: AL445829.1, EVALUE 1.90e+00; EST_HUMAN HIT: BF348623.1, EVALUE 1.80e-01; SWISSPROT HIT: Q63003, EVALUE 7.50e-01
ggggactctggatctgaactggacctcaggcattgggcagagggtctgcgccctgggacaagttccctcctgttagaggggctgagcctcggttctgtagaaactttaagactcaagagctggacagcagcttcgagtcctctggaccggccgcttcacattatggatcaaagcctgagacccagagagggcgctgcagcccctg

SEQ ID NO: 25767 - DNA, 211 bp, Homo sapiens
  MAP TO AC007539.8; EXPRESSED IN FETAL LIVER, SIGNAL = 3.4; EXPRESSED IN HELA, SIGNAL = 1.9; EXPRESSED IN PLACENTA, SIGNAL = 3.6; EXPRESSED IN BRAIN, SIGNAL =   4; EXPRESSED IN LUNG, SIGNAL = 2.9; EXPRESSED IN HEART, SIGNAL = 2.3; EXPRESSED IN BONE MARROW, SIGNAL = 6.3; EXPRESSED IN ADULT LIVER, SIGNAL = 4.4; NT HIT: AF029215.1, EVALUE 5.00e-01; EST_HUMAN HIT: AU118879.1, EVALUE 7.40e-01; SWISSPROT HIT: Q10269, EVALUE 1.70e+00
tcaagcttcttccaccaaccccctgctgctttgcctgggcactggcagcttcagagcagagctcccactcaatggaaaggtacacacagcccactcatctgcatgacttcccttaagggaagtgggcgtacattcattatcattagaatctgaagcctgataccgtgcctggaacacagtcacatggtttatgttcagtaaagattggttg

SEQ ID NO: 25768 - DNA, 151 bp, Homo sapiens
  MAP TO AL034406.1; EXPRESSED IN PLACENTA, SIGNAL = 1.8; EXPRESSED IN HELA, SIGNAL = 2.3; EXPRESSED IN LUNG, SIGNAL = 3.2; EXPRESSED IN HEART, SIGNAL =   2; EXPRESSED IN BONE MARROW, SIGNAL =   2; EXPRESSED IN FETAL LIVER, SIGNAL = 2.4; EXPRESSED IN ADULT LIVER, SIGNAL = 2.2; EXPRESSED IN BRAIN, SIGNAL = 1.7; NT HIT: AL163213.2, EVALUE 6.00e-09; EST_HUMAN HIT: AI073546.1, EVALUE 4.00e-17; SWISSPROT HIT: P36791, EVALUE 5.30e-02
tcctccaacattggggattacaatccaacatgagattcagacagggacacaaatacaaaccataccagcctctataacacttttggtatcaagttcacaagctaaaactagttaatctggtattaccaaattaatacctttcgttgcaata

SEQ ID NO: 25769 - DNA, 268 bp, Homo sapiens
  MAP TO AC007463.3; EXPRESSED IN HEART, SIGNAL = 1.9; EXPRESSED IN LUNG, SIGNAL = 3.9; EXPRESSED IN BONE MARROW, SIGNAL = 6.4; EXPRESSED IN FETAL LIVER, SIGNAL = 4.5; EXPRESSED IN ADULT LIVER, SIGNAL = 3.7; EXPRESSED IN PLACENTA, SIGNAL = 2.7; EXPRESSED IN BRAIN, SIGNAL = 3.1; EXPRESSED IN HELA, SIGNAL = 3.1; NT HIT: AF195953.1, EVALUE 2.00e-41; EST_HUMAN HIT: R20950.1, EVALUE 4.00e-43; SWISSPROT HIT: Q12389, EVALUE 4.30e+00
gcaccatcttcttggtactgttctcatgatagtgagttctcatgagatctggttgtttaaaagtgtgtggcacctgctccctctctttctcttgctcctgcccctgccatgtaagatgcctgtttcccctttgccttctgccatgattggaagcttcctgaggcctccacaaaagcagaagctactatgcttcctgtacagtctacagaactgcaaaccaattaaacctcttttcattagaaattacccagtctcaggtatttcttta

SEQ ID NO: 25770 - DNA, 204 bp, Homo sapiens
  MAP TO AC009313.2; EXPRESSED IN PLACENTA, SIGNAL = 1.3; EXPRESSED IN ADULT LIVER, SIGNAL = 2.3; EXPRESSED IN BRAIN, SIGNAL = 2.8; EXPRESSED IN HELA, SIGNAL = 2.4; EXPRESSED IN BONE MARROW, SIGNAL = 3.1; EXPRESSED IN HEART, SIGNAL = 1.7; EXPRESSED IN LUNG, SIGNAL = 3.3; EXPRESSED IN FETAL LIVER, SIGNAL = 2.5; EST_HUMAN HIT: BE348256.1, EVALUE 1.00e-05; NT HIT: AL163283.2, EVALUE 2.00e-12
tccttgaacaacatgagtttgaattgtgtgggtccacttacatgtgaatatatttcagtaaaagttagaccaagtgggcccacctcccctgcctcccctttcaccttctccttctctttgactcctcaaaccactgatacagcaagaccttctcatcttcctccttctcctcagcctactcaatgtgaagacaacaaggatgaa

SEQ ID NO: 25771 - DNA, 160 bp, Homo sapiens
  MAP TO AC006427.13; EXPRESSED IN HELA, SIGNAL = 3.7; EXPRESSED IN PLACENTA, SIGNAL = 3.9; EXPRESSED IN HEART, SIGNAL = 1.9; EXPRESSED IN ADULT LIVER, SIGNAL = 4.1; EXPRESSED IN FETAL LIVER, SIGNAL = 4.1; EXPRESSED IN BRAIN, SIGNAL = 3.1; EXPRESSED IN BONE MARROW, SIGNAL = 4.2; EXPRESSED IN LUNG, SIGNAL = 3.7; EST_HUMAN HIT: BE963234.2, EVALUE 2.20e+00; SWISSPROT HIT: P34602, EVALUE 6.80e+00; NT HIT: AJ243525.1, EVALUE 3.70e-01
agtttaagaattccaatatcatcgccagctgttagaggtgaaggaaacctactccagagatcatctagctgccttgctactctaagtagcagcattgcatcacctgagagctcattcacaatcccacctgtcaacaagggagaattcatgtgcacgtctt

SEQ ID NO: 25772 - DNA, 216 bp, Homo sapiens
  MAP TO Z82188.2; EXPRESSED IN HELA, SIGNAL = 1.3; EXPRESSED IN BRAIN, SIGNAL = 2.9; EXPRESSED IN LUNG, SIGNAL = 1.4; EXPRESSED IN HEART, SIGNAL = 1.8; EXPRESSED IN BONE MARROW, SIGNAL = 2.7; NT HIT: U34977.1, EVALUE 5.10e-01; EST_HUMAN HIT: R15800.1, EVALUE 1.90e-01; SWISSPROT HIT: O15534, EVALUE 1.20e-02
atgcgggtccctctctccatcagggactttcctgatgagaaaaccagcattctgcccccagagccaggctctgtgccccagacacacccagataccaaacagaaccaagctcccactgccccacacctcaggtcccaggaggccctcccagcgggccccacaggccactctctaactgacgggctgatgagagctgcccctcccatccttgagcag

SEQ ID NO: 25773 - DNA, 92 bp, Homo sapiens
  MAP TO Z95114.19; EXPRESSED IN ADULT LIVER, SIGNAL = 1.8; EXPRESSED IN FETAL LIVER, SIGNAL = 1.5; EXPRESSED IN BRAIN, SIGNAL = 1.6; EXPRESSED IN PLACENTA, SIGNAL = 2.1; EXPRESSED IN BONE MARROW, SIGNAL = 1.6; EXPRESSED IN LUNG, SIGNAL = 1.5; EXPRESSED IN HEART, SIGNAL = 1.4; NT HIT: U63963.1, EVALUE 1.90e-01; EST_HUMAN HIT: AA773696.1, EVALUE 7.20e-02; SWISSPROT HIT: P12911, EVALUE 5.50e+00
agttgtcctcagctggcatggtttgctccagcagcaggctgggatgccagctgtgcccagggctggatgagccaccctcaagtaaatgctgg

SEQ ID NO: 25774 - DNA, 167 bp, Homo sapiens
  MAP TO Z97055.1; EXPRESSED IN BONE MARROW, SIGNAL = 7.1; EXPRESSED IN LUNG, SIGNAL = 7.7; EXPRESSED IN HEART, SIGNAL = 6.2; EXPRESSED IN FETAL LIVER, SIGNAL =  10; EXPRESSED IN ADULT LIVER, SIGNAL = 3.5; EXPRESSED IN PLACENTA, SIGNAL = 4.9; EXPRESSED IN HELA, SIGNAL = 7.3; EXPRESSED IN BRAIN, SIGNAL = 8.4; NT HIT: AF156673.1, EVALUE 1.50e+00; EST_HUMAN HIT: T95489.1, EVALUE 2.00e-71; SWISSPROT HIT: P70275, EVALUE 5.10e+00
tcagtggaaagcaacttggtgatcctgagggaacgcagctggaagtggggctgctgtggggcgtggccagcctgggcaaaagggggatgggggtggggacaagcagagctgcatcggccaagagatgacgggaaaagtcagcagggcctgtccttgggcttcacgct

SEQ ID NO: 25775 - DNA, 125 bp, Homo sapiens
  MAP TO Z98884.11; EXPRESSED IN LUNG, SIGNAL = 1.6; EXPRESSED IN FETAL LIVER, SIGNAL = 1.5; EXPRESSED IN ADULT LIVER, SIGNAL =   2; EXPRESSED IN BRAIN, SIGNAL = 1.5; EXPRESSED IN HELA, SIGNAL = 1.4; EXPRESSED IN BONE MARROW, SIGNAL = 1.5; EXPRESSED IN HEART, SIGNAL = 1.7; EST_HUMAN HIT: BF357140.1, EVALUE 2.00e-40; SWISSPROT HIT: O70361, EVALUE 2.80e-01; NT HIT: gi8567387, EVALUE 2.00e-64
atacctgaagagctacaacattccagctttgaaaagaaagtgtatctcctgtacaaatacaacttcttcctcctcagaagaagacaaacagaaccacaaggcagatgatgtccaagccttacaag

SEQ ID NO: 25776 - DNA, 161 bp, Homo sapiens
  MAP TO AP000347.1; EXPRESSED IN HELA, SIGNAL = 1.6; EXPRESSED IN PLACENTA, SIGNAL =   2; EXPRESSED IN BONE MARROW, SIGNAL = 2.3; EXPRESSED IN LUNG, SIGNAL = 1.9; EXPRESSED IN HEART, SIGNAL = 1.6; EXPRESSED IN ADULT LIVER, SIGNAL = 2.8; EXPRESSED IN FETAL LIVER, SIGNAL = 3.5; EXPRESSED IN BRAIN, SIGNAL = 3.3; NT HIT: AF010496.1, EVALUE 6.00e-03; EST_HUMAN HIT: BF037078.1, EVALUE 5.50e-01; SWISSPROT HIT: P28068, EVALUE 1.80e+00
cctggctattcctccccctgaagatcagggtgactgggaagatgacagggcaggaaccaaggccccatgacctgtccctgaaggctagacagccaacaggaacatcaggggatttggccctcctaagtggctgcattccatggcagtcagccatgaggggt

SEQ ID NO: 25777 - DNA, 95 bp, Homo sapiens
  MAP TO AP000347.1; EXPRESSED IN FETAL LIVER, SIGNAL =   2; EXPRESSED IN PLACENTA, SIGNAL = 1.4; EXPRESSED IN BRAIN, SIGNAL = 2.3; EXPRESSED IN HELA, SIGNAL = 1.5; EXPRESSED IN HEART, SIGNAL = 1.4; EXPRESSED IN BONE MARROW, SIGNAL = 1.5; EXPRESSED IN LUNG, SIGNAL = 1.7; SWISSPROT HIT: Q02342, EVALUE 1.00e-03; EST_HUMAN HIT: BF531102.1, EVALUE 1.00e-46; NT HIT: X81867.1, EVALUE 2.00e-01
agcctcaacaacttctcctcggtgcacgtcatcgtctctgctctgtgcagcaacccaataggtcagctacacaagacgtgggcaggagtgtccag

SEQ ID NO: 25778 - DNA, 195 bp, Homo sapiens
  MAP TO AC007556.2; EXPRESSED IN PLACENTA, SIGNAL = 1.8; EXPRESSED IN HELA, SIGNAL = 1.3; EXPRESSED IN BRAIN, SIGNAL = 1.4; EXPRESSED IN HEART, SIGNAL = 5.1; EXPRESSED IN BONE MARROW, SIGNAL = 1.8; EXPRESSED IN FETAL LIVER, SIGNAL = 2.2; NT HIT: gi11430460, EVALUE 1.00e-78; SWISSPROT HIT: P98164, EVALUE 9.00e-25; EST_HUMAN HIT: BF671348.1, EVALUE 2.70e+00
tatgaggttccctgtgaattaattattgactccttttgtatgactaggtacctgtactgggctgactgggatacacatgccaaaatcgagagagccacattgggaggaaacttccgcgtacccattgtgaacagcagtctggtcatgcccagtgggctgactctggactatgaagaggaccttctctactgggtg

SEQ ID NO: 25779 - DNA, 159 bp, Homo sapiens
  MAP TO AC002472.3; EXPRESSED IN PLACENTA, SIGNAL = 2.6; EXPRESSED IN BRAIN, SIGNAL = 2.3; EXPRESSED IN HELA, SIGNAL = 2.2; EXPRESSED IN BONE MARROW, SIGNAL =   2; EXPRESSED IN HEART, SIGNAL =   3; EXPRESSED IN LUNG, SIGNAL = 2.4; EXPRESSED IN FETAL LIVER, SIGNAL = 2.4; EXPRESSED IN ADULT LIVER, SIGNAL = 3.4; NT HIT: gi11417812, EVALUE 1.00e-84; EST_HUMAN HIT: AI762981.1, EVALUE 9.00e-03; SWISSPROT HIT: P41885, EVALUE 1.30e+00
ctactccaccccattccctagattaggactctcctggggcatcacagcaccagagaagctgaaacaatccccctcccccatcactcctctttctaccttgcctttttggctccagctgcacagccccatgtaggaccgatgggagggtggggtctctac

SEQ ID NO: 25780 - DNA, 124 bp, Homo sapiens
  MAP TO AL022318.2; EXPRESSED IN ADULT LIVER, SIGNAL = 3.3; EXPRESSED IN PLACENTA, SIGNAL = 3.7; EXPRESSED IN HELA, SIGNAL = 1.9; EXPRESSED IN LUNG, SIGNAL = 2.4; EXPRESSED IN HEART, SIGNAL = 1.9; EXPRESSED IN BONE MARROW, SIGNAL = 2.3; EXPRESSED IN FETAL LIVER, SIGNAL = 3.2; NT HIT: AB011399.1, EVALUE 2.00e-29; EST_HUMAN HIT: AW372868.1, EVALUE 6.00e-31
acctctgctagcttcagacttttcttccgcaacttcctcacctctctcagccttcatagaattgaagagagctagggccttgctctggattaggctttcgcttaggagaatgtcatggctggtt

SEQ ID NO: 25781 - DNA, 105 bp, Homo sapiens
  MAP TO AC007564.9; EXPRESSED IN HEART, SIGNAL = 2.3; EXPRESSED IN LUNG, SIGNAL = 1.7; EXPRESSED IN BONE MARROW, SIGNAL = 4.1; EXPRESSED IN FETAL LIVER, SIGNAL = 2.5; EXPRESSED IN ADULT LIVER, SIGNAL = 2.4; EXPRESSED IN PLACENTA, SIGNAL = 1.4; EXPRESSED IN BRAIN, SIGNAL = 3.5; EXPRESSED IN HELA, SIGNAL = 2.3; NT HIT: AJ289880.1, EVALUE 6.00e-08; EST_HUMAN HIT: AW842143.1, EVALUE 2.00e-11
aacaagctcagtgggcctgagcaaaacttgggcaaaggcaccactagcctgaggtttcaggccagaaaaccgataccccaaagatcccataacactaacagcctc

SEQ ID NO: 25782 - DNA, 160 bp, Homo sapiens
  MAP TO AB016897.1; EXPRESSED IN BONE MARROW, SIGNAL = 3.3; EXPRESSED IN LUNG, SIGNAL = 2.9; EXPRESSED IN HEART, SIGNAL =   2; EXPRESSED IN FETAL LIVER, SIGNAL = 4.9; EXPRESSED IN ADULT LIVER, SIGNAL = 3.3; EXPRESSED IN PLACENTA, SIGNAL = 5.5; EXPRESSED IN HELA, SIGNAL = 3.4; EXPRESSED IN BRAIN, SIGNAL =   3; SWISSPROT HIT: P15306, EVALUE 1.00e+00; NT HIT: AL163218.2, EVALUE 1.40e+00; EST_HUMAN HIT: BF314686.1, EVALUE 2.20e+00
tactgtcctgtccccggtcccaaagcaggacattctcgagttgtgggtgggggctctgtttaaggatggcgctgtcttgctgacagtggacactctgcagccctctgtaatacggcctgcaaaaggccaaactgcctgagcaggcctctcgtgcgtggta

SEQ ID NO: 25783 - DNA, 117 bp, Homo sapiens
  MAP TO Z86090.10; EXPRESSED IN FETAL LIVER, SIGNAL =  17; EXPRESSED IN PLACENTA, SIGNAL = 6.1; EXPRESSED IN HELA, SIGNAL =  18; EXPRESSED IN HEART, SIGNAL = 5.4; EXPRESSED IN ADULT LIVER, SIGNAL = 6.7; EXPRESSED IN BRAIN, SIGNAL = 2.7; EXPRESSED IN BONE MARROW, SIGNAL = 4.2; EXPRESSED IN LUNG, SIGNAL = 9.3; NT HIT: D23660.1, EVALUE 5.00e-18; SWISSPROT HIT: P36578, EVALUE 1.00e-09; EST_HUMAN HIT: BE888422.1, EVALUE 3.00e-20
tagccttcaactttatctctgaccaccaaaaaaagttcaggaacttccttaatatgatgacctgtagacatgaccagcactggtaaggcagaggcagccaggggagaacagatagca

SEQ ID NO: 25784 - DNA, 160 bp, Homo sapiens
  MAP TO AC005300.10; EXPRESSED IN PLACENTA, SIGNAL = 1.7; EXPRESSED IN BRAIN, SIGNAL = 2.8; EXPRESSED IN HELA, SIGNAL = 2.6; EXPRESSED IN BONE MARROW, SIGNAL = 2.7; EXPRESSED IN HEART, SIGNAL = 2.6; EXPRESSED IN LUNG, SIGNAL = 2.4; EXPRESSED IN FETAL LIVER, SIGNAL = 2.4; EXPRESSED IN ADULT LIVER, SIGNAL = 2.4; NT HIT: gi11526291, EVALUE 1.00e-41; EST_HUMAN HIT: BF568478.1, EVALUE 1.00e-41; SWISSPROT HIT: P36151, EVALUE 1.80e+00
tgggcatcttggcttcagccatccacaggagatccatgttgctggctaggacggggaggtgggggtaggggggtgttgccaggccagccccagggctcccattgctgaggaggacatccatgatcagctgcaggctggtctcccagcggaccggctcccc

SEQ ID NO: 25785 - DNA, 153 bp, Homo sapiens
  MAP TO AL022318.2; EXPRESSED IN ADULT LIVER, SIGNAL =   5; EXPRESSED IN FETAL LIVER, SIGNAL = 5.2; EXPRESSED IN BRAIN, SIGNAL = 6.9; EXPRESSED IN PLACENTA, SIGNAL = 3.6; EXPRESSED IN HELA, SIGNAL = 6.7; EXPRESSED IN LUNG, SIGNAL =  10; EXPRESSED IN HEART, SIGNAL = 3.6; EXPRESSED IN BONE MARROW, SIGNAL = 6.4; SWISSPROT HIT: P54498, EVALUE 1.40e+00; EST_HUMAN HIT: AA034223.1, EVALUE 1.00e-32; NT HIT: AF149773.1, EVALUE 5.00e-37
ctgatttgaaattggtgagatgttcctttggctggttggtctgaggacccgagttgtaggtggatctcctcacccagtgaaggtgaggacaggggaccggtctcccgaaggagtcctcccgtcccgagttttggcaccaaacgtcacgcacgt

SEQ ID NO: 25786 - DNA, 108 bp, Homo sapiens
  MAP TO AC004624.6; EXPRESSED IN PLACENTA, SIGNAL = 1.3; EXPRESSED IN HELA, SIGNAL = 2.7; EXPRESSED IN BRAIN, SIGNAL =   3; EXPRESSED IN BONE MARROW, SIGNAL = 4.1; EXPRESSED IN HEART, SIGNAL = 2.9; EXPRESSED IN LUNG, SIGNAL = 4.4; EXPRESSED IN FETAL LIVER, SIGNAL = 2.8; EXPRESSED IN ADULT LIVER, SIGNAL = 2.2; EST_HUMAN HIT: AW954559.1, EVALUE 3.00e-54; NT HIT: AE001975.1, EVALUE 2.30e-01
gacctgcgcttctgccagctgacccgggagtaccaggccctgcaacgcgcctacgccctgctccaggagcaggtgggaggcacgctggacgctgagagggaggcccgg

SEQ ID NO: 25787 - DNA, 214 bp, Homo sapiens
  MAP TO AL021707.2; EXPRESSED IN BONE MARROW, SIGNAL = 3.6; EXPRESSED IN LUNG, SIGNAL = 2.7; EXPRESSED IN HEART, SIGNAL = 2.4; EXPRESSED IN ADULT LIVER, SIGNAL =   6; EXPRESSED IN FETAL LIVER, SIGNAL = 1.9; EXPRESSED IN BRAIN, SIGNAL =   3; EXPRESSED IN PLACENTA, SIGNAL = 1.8; EXPRESSED IN HELA, SIGNAL = 7.9; NT HIT: gi11418121, EVALUE 2.00e+00; EST_HUMAN HIT: BF303941.1, EVALUE 4.00e-55; SWISSPROT HIT: P78423, EVALUE 1.50e+00
aatattcttcaagtacttgtggtcctgggtcatcaggggttgcattctacccagttacagagggtttcccatcgaggaagccagcagcatcagagaagtggcagggggcctttcctccgtgtgtagggccggccttgctaacccgaaacatttcctagaaatgtgctgcttgctaacagccgctgcttcactttcagctttcagagtccactgc

SEQ ID NO: 25788 - DNA, 78 bp, Homo sapiens
  MAP TO AL035681.13; EXPRESSED IN PLACENTA, SIGNAL = 2.9; EXPRESSED IN HELA, SIGNAL = 4.6; EXPRESSED IN BRAIN, SIGNAL = 3.8; EXPRESSED IN LUNG, SIGNAL = 5.3; EXPRESSED IN HEART, SIGNAL = 3.7; EXPRESSED IN BONE MARROW, SIGNAL = 5.5; EXPRESSED IN FETAL LIVER, SIGNAL = 6.1; EXPRESSED IN ADULT LIVER, SIGNAL = 3.8; EST_HUMAN HIT: BF316616.1, EVALUE 1.00e-36; SWISSPROT HIT: P46060, EVALUE 5.00e-09; NT HIT: gi11418177, EVALUE 1.00e-36
cagcttctctggagagggaaaagccaggaaggtggagacgtctgcaggaggtggggaggacagcacgggagctggctc

SEQ ID NO: 25789 - DNA, 270 bp, Homo sapiens
  MAP TO AL031588.1; EXPRESSED IN BRAIN, SIGNAL =  12; EXPRESSED IN PLACENTA, SIGNAL = 2.9; EXPRESSED IN LUNG, SIGNAL =   9; EXPRESSED IN BONE MARROW, SIGNAL = 9.7; EXPRESSED IN HEART, SIGNAL = 5.8; EXPRESSED IN ADULT LIVER, SIGNAL = 6.5; EXPRESSED IN FETAL LIVER, SIGNAL =  12; EXPRESSED IN HELA, SIGNAL = 8.6; NT HIT: gi11418320, EVALUE 6.00e-35; EST_HUMAN HIT: AW062258.1, EVALUE 1.00e-110; SWISSPROT HIT: O75648, EVALUE 8.00e-08
ggctgctcccgatgtcagcagagccctgtaccgtgcgcctcagcaaactcctccatctattgctccaaggcccgcctttgatgttaggtcctggagaaggggaagtggtgcgggacccacaggtccagctgctccgtgccatgcagtcgggaaagggaaacaggcactaatcaaaggcaactgctcactcgtacctctttcttctgaagcacatgatgaagtctattctcagcagcgattttctttacaaactctttcgttaatcccccc

SEQ ID NO: 25790 - DNA, 76 bp, Homo sapiens
  MAP TO AL035681.13; EXPRESSED IN LUNG, SIGNAL = 1.6; EXPRESSED IN BONE MARROW, SIGNAL = 1.5; EXPRESSED IN HEART, SIGNAL = 1.5; EXPRESSED IN BRAIN, SIGNAL = 1.4; EXPRESSED IN PLACENTA, SIGNAL = 1.3; EXPRESSED IN HELA, SIGNAL = 1.3; NT HIT: AF055478.1, EVALUE 6.00e-01; EST_HUMAN HIT: BE904978.1, EVALUE 2.00e-35; SWISSPROT HIT: Q9WV08, EVALUE 7.40e+00
aaggtggaggtgctcaacagtgatgctgtgctccccagccgggtgtactggatcgcctctgtcatccagacagcag

SEQ ID NO: 25791 - DNA, 153 bp, Homo sapiens
  MAP TO AC007841.1; EXPRESSED IN LUNG, SIGNAL = 2.4; EXPRESSED IN ADULT LIVER, SIGNAL = 4.6; EXPRESSED IN FETAL LIVER, SIGNAL = 7.6; EXPRESSED IN PLACENTA, SIGNAL = 6.7; EXPRESSED IN HELA, SIGNAL = 2.2; EXPRESSED IN BRAIN, SIGNAL = 1.5; EXPRESSED IN HEART, SIGNAL = 2.1; EXPRESSED IN BONE MARROW, SIGNAL = 1.3; SWISSPROT HIT: Q10444, EVALUE 4.00e+00; EST_HUMAN HIT: BF530201.1, EVALUE 2.00e+00; NT HIT: X64565.1, EVALUE 3.50e-01
ctgaagggctttccccgtccacacctttctacaggttgccgtgactggaacaaaaaacaaatggtcaaaagctccatgaagaggaactggcaggaactgagcctgggctggactgaatgctaactttcaatctggtctggaaaaaggatttgg

SEQ ID NO: 25792 - DNA, 644 bp, Homo sapiens
  MAP TO Z95114.19; EXPRESSED IN ADULT LIVER, SIGNAL = 6.1; EXPRESSED IN PLACENTA, SIGNAL = 3.8; EXPRESSED IN HELA, SIGNAL = 2.7; EXPRESSED IN BRAIN, SIGNAL = 4.5; EXPRESSED IN BONE MARROW, SIGNAL = 2.9; EXPRESSED IN LUNG, SIGNAL = 2.3; EXPRESSED IN HEART, SIGNAL =   4; EXPRESSED IN FETAL LIVER, SIGNAL =   5; EST_HUMAN HIT: BE876529.1, EVALUE 1.00e-02; NT HIT: gi7212513, EVALUE 2.00e-12; SWISSPROT HIT: O21330, EVALUE 8.00e-21
attagcattaaccttttatgttaaagaccgagagccaggatttctccacattaaaatgtcccaactaaacacatctacattatttactatggttttatgtataatcatatcactctttatcttatttcaattaaaattctcaaaatttatctccccaataagctcaacactaaaattctttgaatcacagaaacttgaaattccttgagaaatgaaatgaatggaaatgtatttgcctttcattgccctaacagtaatacgaagacccgtagttataatctcctatttccaagtattttatttctatcatctagtcacctgattaacaactggctaatctccattcaacagcgactaattcaactcatattaaaacaaatgataataatacataataccaatggatgaagctgatcccttatactaatttcatgtattctgtttattggctcaactaatttactaggaggcttcccactcacaccaactactcaactctcaataaatttaggtatagctattccagtatgagcaggagcagtaattactggtttttgtcacaaaacaaaagcatcccttgcttatttcctaccacaaggaatgcctatttaacttctctcttttctagtcatcgtcaaaaccat

SEQ ID NO: 25793 - DNA, 123 bp, Homo sapiens
  MAP TO AL079300.11; EXPRESSED IN HELA, SIGNAL = 3.4; EXPRESSED IN LUNG, SIGNAL = 3.8; EXPRESSED IN BONE MARROW, SIGNAL = 2.2; EXPRESSED IN HEART, SIGNAL = 3.9; EXPRESSED IN FETAL LIVER, SIGNAL =  18; EXPRESSED IN ADULT LIVER, SIGNAL = 5.8; EXPRESSED IN PLACENTA, SIGNAL =  11; EXPRESSED IN BRAIN, SIGNAL = 1.8; EST_HUMAN HIT: BF244557.1, EVALUE 4.00e-01; SWISSPROT HIT: P19442, EVALUE 9.20e+00; NT HIT: X74315.1, EVALUE 6.90e-02
ttttccctgctctgttctgcaatgcaggaagttgcaaaggagctgtctcccacaggtgtgtttgaggctcctgggtcaactggcttctgtctggattcagcaatggcagatactgacagtaga

SEQ ID NO: 25794 - DNA, 271 bp, Homo sapiens
  MAP TO AL022319.2; EXPRESSED IN HELA, SIGNAL = 2.2; EXPRESSED IN LUNG, SIGNAL = 1.6; EXPRESSED IN HEART, SIGNAL = 2.4; EXPRESSED IN BONE MARROW, SIGNAL =   2; EXPRESSED IN FETAL LIVER, SIGNAL = 1.4; EXPRESSED IN BRAIN, SIGNAL = 2.1; NT HIT: AE004693.1, EVALUE 6.50e-01; SWISSPROT HIT: Q61670, EVALUE 3.90e-01; EST_HUMAN HIT: BF382468.1, EVALUE 9.80e-01
agatggaaatgggccttctcctttcatctgggcttgagaggagctggcagttttattagctttcccaggcatcaggctggaagctggcgcttgggttgttattttttttttccatcctccttttaacccacatggagtcggagtcaggtccttgcggctccccgttgctgatggaggggctcctgctctcggtcctctgctctcccacctcccagccagctgggtcctccacctgcacacccttctctgctccctggcgccagctctctct

SEQ ID NO: 25795 - DNA, 226 bp, Homo sapiens
  MAP TO AB016897.1; EXPRESSED IN LUNG, SIGNAL = 4.7; EXPRESSED IN HEART, SIGNAL = 2.8; EXPRESSED IN ADULT LIVER, SIGNAL = 5.4; EXPRESSED IN PLACENTA, SIGNAL = 9.5; EXPRESSED IN BONE MARROW, SIGNAL = 2.3; EXPRESSED IN FETAL LIVER, SIGNAL =   5; EXPRESSED IN BRAIN, SIGNAL = 3.5; EXPRESSED IN HELA, SIGNAL = 4.5; EST_HUMAN HIT: AV731140.1, EVALUE 4.00e-61; SWISSPROT HIT: P14240, EVALUE 5.00e+00; NT HIT: AL163247.2, EVALUE 2.00e-59
gccggcttgaatttctccccagaagatgggtttttcttttctactgcatcgtcaggctgcagatgttctgaactttgatgctctgcttcccttttaaaagggaatgcttttaacagcacccaggtcacagcttgaatgatttgctgcttagaaatttcttccacccaataccctaaatcatctctctcaagttcaaagttccacaaatctctagggcagaagcaaa

SEQ ID NO: 25796 - DNA, 310 bp, Homo sapiens
  MAP TO AC004624.6; EXPRESSED IN BRAIN, SIGNAL = 4.5; EXPRESSED IN PLACENTA, SIGNAL = 3.8; EXPRESSED IN HEART, SIGNAL = 3.1; EXPRESSED IN BONE MARROW, SIGNAL = 5.1; EXPRESSED IN LUNG, SIGNAL = 3.3; EXPRESSED IN FETAL LIVER, SIGNAL = 4.9; EXPRESSED IN HELA, SIGNAL = 2.9; EST_HUMAN HIT: AJ230796.1, EVALUE 7.20e-02; NT HIT: M87863.1, EVALUE 1.90e-01; SWISSPROT HIT: Q13322, EVALUE 5.90e+00
aagtctccctgctctaccgccctccacacttcctgtttcttctccatcccttcctataatgcgttcgctctccgtccgacctaccttcttgctaatccagacctcttccccaaccccagcaaaactcgggccctctcctccttcagcagcaggtggtggtgtaatgtgcagggggagctgggttccaatccctctcctcctctgctcttccctgaaccattgccttcctaccccctctactcccaaagcaaaaataaaagggatgataatattttctcatctaacagaatttgcactacagacagtgaga

SEQ ID NO: 25797 - DNA, 90 bp, Homo sapiens
  MAP TO AC004624.6; EXPRESSED IN LUNG, SIGNAL = 1.9; EXPRESSED IN HEART, SIGNAL =   2; EXPRESSED IN FETAL LIVER, SIGNAL = 2.3; EXPRESSED IN ADULT LIVER, SIGNAL = 2.5; EXPRESSED IN BRAIN, SIGNAL = 1.9; EXPRESSED IN PLACENTA, SIGNAL = 2.1; EXPRESSED IN HELA, SIGNAL = 1.7; EXPRESSED IN BONE MARROW, SIGNAL = 2.1; EST_HUMAN HIT: BF377859.1, EVALUE 2.00e-11; NT HIT: AF173843.1, EVALUE 7.40e-01; SWISSPROT HIT: P31629, EVALUE 7.30e+00
ggctacctggaagaggagctcgactaccggaagcaagcccttgaccaggcttacctggtaggaccagaagtgggtttgacactttggctt

SEQ ID NO: 25798 - DNA, 79 bp, Homo sapiens
  MAP TO AP000127.1; EXPRESSED IN ADULT LIVER, SIGNAL = 1.6; EXPRESSED IN FETAL LIVER, SIGNAL = 1.9; EXPRESSED IN PLACENTA, SIGNAL = 1.6; EXPRESSED IN BRAIN, SIGNAL = 1.4; EXPRESSED IN HELA, SIGNAL = 1.5; EXPRESSED IN BONE MARROW, SIGNAL = 1.8; EXPRESSED IN LUNG, SIGNAL = 1.7; EXPRESSED IN HEART, SIGNAL = 1.5; EST_HUMAN HIT: AU127679.1, EVALUE 9.40e-01; NT HIT: AF105227.1, EVALUE 6.30e-01
aagaccaaatgaaactcaccaaggcccagtcctgcattgtgcactgggttgcacatactcaataagaatttgtagactt

SEQ ID NO: 25799 - DNA, 110 bp, Homo sapiens
  MAP TO AL022319.2; EXPRESSED IN LUNG, SIGNAL = 2.1; EXPRESSED IN BONE MARROW, SIGNAL = 2.1; EXPRESSED IN HEART, SIGNAL = 2.5; EXPRESSED IN FETAL LIVER, SIGNAL =   2; EXPRESSED IN PLACENTA, SIGNAL = 1.6; EXPRESSED IN BRAIN, SIGNAL = 2.7; EXPRESSED IN HELA, SIGNAL = 2.4; EST_HUMAN HIT: AW978002.1, EVALUE 3.50e-01; NT HIT: AJ278191.1, EVALUE 2.40e-01
aatgaagggaacatcatttaattagtcagacactagcagtgtagaacggctggccaggaaaccctgctctggagtggagcggagaaactcgaggagtggtgattaatggg

SEQ ID NO: 25800 - DNA, 166 bp, Homo sapiens
  MAP TO AB016897.1; EXPRESSED IN HELA, SIGNAL = 1.3; EXPRESSED IN LUNG, SIGNAL = 1.2; EXPRESSED IN BONE MARROW, SIGNAL = 1.9; EXPRESSED IN HEART, SIGNAL = 1.5; EXPRESSED IN ADULT LIVER, SIGNAL =   2; NT HIT: gi6753287, EVALUE 1.50e+00; EST_HUMAN HIT: BF363473.1, EVALUE 2.20e+00; SWISSPROT HIT: Q02156, EVALUE 3.00e+00
gcattagctgccctgacagccacccactactcccgagggtgaacatccagaagagagaaggtgaacctctcagagtcggtctggaccgtaacaatgggaacggttatgctctttcaaaaggctctttctcttttatgcccacagataaaagttagggacttcttgc

SEQ ID NO: 25801 - DNA, 162 bp, Homo sapiens
  MAP TO AP000041.1; EXPRESSED IN PLACENTA, SIGNAL = 4.4; EXPRESSED IN HELA, SIGNAL = 2.7; EXPRESSED IN LUNG, SIGNAL = 3.7; EXPRESSED IN BONE MARROW, SIGNAL = 1.7; EXPRESSED IN HEART, SIGNAL = 2.7; EXPRESSED IN FETAL LIVER, SIGNAL = 2.5; EXPRESSED IN ADULT LIVER, SIGNAL = 2.5; EXPRESSED IN BRAIN, SIGNAL = 1.9; NT HIT: gi6753635, EVALUE 2.40e-02; EST_HUMAN HIT: BE887255.1, EVALUE 2.20e+00
ttgtggtgatggtggtgatggtggtggtggtggtggtggtggtcgtggtgctggttttgttccatttgcttgcttccggtggcttcactcacatgcttcctctgcagtcctggttccccacagccatgggcagaaggtacagcctatatatgagtctctatc

SEQ ID NO: 25802 - DNA, 106 bp, Homo sapiens
  MAP TO AL021707.2; EXPRESSED IN HELA, SIGNAL = 2.4; EXPRESSED IN PLACENTA, SIGNAL = 1.7; EXPRESSED IN LUNG, SIGNAL = 2.2; EXPRESSED IN HEART, SIGNAL = 2.3; EXPRESSED IN ADULT LIVER, SIGNAL = 1.5; EXPRESSED IN FETAL LIVER, SIGNAL = 2.9; EXPRESSED IN BRAIN, SIGNAL = 1.8; EST_HUMAN HIT: BE962920.2, EVALUE 1.30e+00; NT HIT: AF220177.1, EVALUE 5.80e-02
actctatttggagagccaaatcagcactcgtggaacaattaaatgctaaactgctgtgattacgaatcaaagtgaggtcaacgtgggccagagcagtcacagagga

SEQ ID NO: 25803 - DNA, 110 bp, Homo sapiens
  MAP TO AC004624.6; EXPRESSED IN LUNG, SIGNAL = 4.3; EXPRESSED IN HEART, SIGNAL =   4; EXPRESSED IN FETAL LIVER, SIGNAL = 4.6; EXPRESSED IN ADULT LIVER, SIGNAL = 3.8; EXPRESSED IN PLACENTA, SIGNAL = 3.8; EXPRESSED IN HELA, SIGNAL = 4.1; EXPRESSED IN BRAIN, SIGNAL = 3.1; EXPRESSED IN BONE MARROW, SIGNAL = 9.1; SWISSPROT HIT: P55705, EVALUE 9.30e+00; EST_HUMAN HIT: BF696918.1, EVALUE 8.90e-02; NT HIT: AJ012166.1, EVALUE 2.40e-01
ctgctgggaagtacactgtacctagaaccatagatttcactgagatagaccaggttttgtatctgcaggcacaatttggctgcttgtgaaaggaaccaaactgaagttgc

SEQ ID NO: 25804 - DNA, 93 bp, Homo sapiens
  MAP TO AL031587.3; EXPRESSED IN LUNG, SIGNAL = 5.7; EXPRESSED IN HEART, SIGNAL = 4.3; EXPRESSED IN BONE MARROW, SIGNAL = 9.3; EXPRESSED IN ADULT LIVER, SIGNAL = 3.2; EXPRESSED IN FETAL LIVER, SIGNAL = 4.9; EXPRESSED IN BRAIN, SIGNAL = 6.9; EXPRESSED IN PLACENTA, SIGNAL = 3.5; EXPRESSED IN HELA, SIGNAL = 4.5; SWISSPROT HIT: P52746, EVALUE 7.30e+00; NT HIT: gi11418099, EVALUE 1.00e-45; EST_HUMAN HIT: BE937981.1, EVALUE 8.00e-45
cagccagctgcgagcgaggcttttgtgaagttcgccgatgcccaccgcagcatcgagaagttcggcattcggcttctgaaaaccatcaagccg

SEQ ID NO: 25805 - DNA, 77 bp, Homo sapiens
  MAP TO AP000127.1; EXPRESSED IN BRAIN, SIGNAL = 4.9; EXPRESSED IN PLACENTA, SIGNAL =  49; EXPRESSED IN HELA, SIGNAL =  25; EXPRESSED IN LUNG, SIGNAL =  32; EXPRESSED IN HEART, SIGNAL =  20; EXPRESSED IN BONE MARROW, SIGNAL = 6.5; EXPRESSED IN FETAL LIVER, SIGNAL =  58; EXPRESSED IN ADULT LIVER, SIGNAL =  43; NT HIT: AF142632.1, EVALUE 2.40e+00; EST_HUMAN HIT: T27231.1, EVALUE 2.30e-01
tccttcttcttcttctccttcttcttcttcagaagctagctttctccttgaataatttagttacacttcatgtttac

SEQ ID NO: 25806 - DNA, 543 bp, Homo sapiens; identical to SEQ ID NO: 9233
  MAP TO AL022238.1; EXPRESSED IN HEART, SIGNAL = 3.4; EXPRESSED IN BONE MARROW, SIGNAL =   6; EXPRESSED IN LUNG, SIGNAL =   4; EXPRESSED IN ADULT LIVER, SIGNAL = 3.3; EXPRESSED IN FETAL LIVER, SIGNAL = 4.7; EXPRESSED IN PLACENTA, SIGNAL = 4.1; EXPRESSED IN BRAIN, SIGNAL = 5.9; EXPRESSED IN HELA, SIGNAL = 4.1; EST_HUMAN HIT: AA134119.1, EVALUE 0.00e+00; SWISSPROT HIT: P30566, EVALUE 1.00e-09; NT HIT: AF106656.1, EVALUE 0.00e+00

SEQ ID NO: 25807 - DNA, 162 bp, Homo sapiens
  MAP TO AC007106.6; EXPRESSED IN PLACENTA, SIGNAL = 4.3; EXPRESSED IN BRAIN, SIGNAL = 2.9; EXPRESSED IN HELA, SIGNAL =  13; EXPRESSED IN HEART, SIGNAL = 5.1; EXPRESSED IN BONE MARROW, SIGNAL =   7; EXPRESSED IN LUNG, SIGNAL = 8.8; EXPRESSED IN ADULT LIVER, SIGNAL = 7.2; EXPRESSED IN FETAL LIVER, SIGNAL = 5.8; SWISSPROT HIT: P25227, EVALUE 5.20e+00; NT HIT: AL163213.2, EVALUE 3.00e-57; EST_HUMAN HIT: AI631809.1, EVALUE 2.00e-59
atggacttcagtgaaatttggtgccgtgactcggatcgggggacctcccttgggagatcaatctcctgtcctcctgctctttgctccatgagaaagatccacctacgatctctggtcctcagatcaaccagaccaaggaacatctcaccaattttaaatcgg

SEQ ID NO: 25808 - DNA, 567 bp, Homo sapiens
  MAP TO AP000346.1; EXPRESSED IN PLACENTA, SIGNAL = 3.3; EXPRESSED IN BRAIN, SIGNAL =   2; EXPRESSED IN HELA, SIGNAL = 2.3; EXPRESSED IN BONE MARROW, SIGNAL = 1.6; EXPRESSED IN LUNG, SIGNAL = 2.4; EXPRESSED IN HEART, SIGNAL = 1.7; EXPRESSED IN FETAL LIVER, SIGNAL = 3.1; EXPRESSED IN ADULT LIVER, SIGNAL =   3; NT HIT: Y18890.1, EVALUE 4.00e-50; EST_HUMAN HIT: M77994.1, EVALUE 4.00e-91; SWISSPROT HIT: P10264, EVALUE 9.00e-63
atggcgtctaattcaccagcaacacaggacgcggcgctgtatcctcagccgcccactgtgagacttaatcctacagcatcacgtagtggacagggtggtgcactgcatgcagtcattgatgaagccagaaaacagggcgatcttgaggcatggcggttcctggtaattttacaactggtacaggccggggaagagactcaagtaggagcgcctgcccgagctgagactagatgtgaacctttcaccatgaaaatgttaaaagatataaaggaaggagttaaacaatatggatccaactccccttatataagaacattattagattccattgctcatggaaatagacttactccttatgactgggaaattttggccaaatcttccctttcatcctctcagtatctacagtttaaaacctggtggattgatggagtacaagaacaggtacgaaaaaatcaggctactaagcccactgttaatatagacgcagaccaattgttaggaacaggtccaaattggagcaccattaaccaacaatcagtgatgcagaatgaggctattgaacaa

SEQ ID NO: 25809 - DNA, 111 bp, Homo sapiens
  MAP TO AC008151.1; EXPRESSED IN HELA, SIGNAL = 1.2; EXPRESSED IN PLACENTA, SIGNAL = 1.6; EXPRESSED IN BRAIN, SIGNAL = 1.5; EXPRESSED IN LUNG, SIGNAL = 1.3; EXPRESSED IN BONE MARROW, SIGNAL =   3; EXPRESSED IN HEART, SIGNAL = 2.3; EXPRESSED IN FETAL LIVER, SIGNAL = 1.3; EXPRESSED IN ADULT LIVER, SIGNAL = 1.6; NT HIT: gi11434876, EVALUE 3.00e-56; EST_HUMAN HIT: AA452471.1, EVALUE 4.00e-56; SWISSPROT HIT: P56539, EVALUE 8.00e-16
atggcagaagagcacacagatctcgaggcccagatcgtcaaggatatccactgcaaggagattgacctggtgaaccgagaccccaagaacattaacgaggacatagtcaag

SEQ ID NO: 25810 - DNA, 127 bp, Homo sapiens
  MAP TO AC004032.7; EXPRESSED IN ADULT LIVER, SIGNAL = 1.9; EXPRESSED IN PLACENTA, SIGNAL = 3.8; EXPRESSED IN HELA, SIGNAL = 2.9; EXPRESSED IN BRAIN, SIGNAL = 3.9; EXPRESSED IN BONE MARROW, SIGNAL = 3.7; EXPRESSED IN LUNG, SIGNAL = 3.3; EXPRESSED IN HEART, SIGNAL = 3.2; EXPRESSED IN FETAL LIVER, SIGNAL = 4.6; NT HIT: AF280107.1, EVALUE 1.10e+00; EST_HUMAN HIT: BE767023.1, EVALUE 1.10e-01; SWISSPROT HIT: O19025, EVALUE 1.20e-01
ttaagcaagctttgcaggaagaggaggcgagaggagcacgccaaacccaggcgtgactccttccaaagcaagagactggcccagggaccctgatttagggatgggtgtgaaacgagggaagaggagg

SEQ ID NO: 25811 - DNA, 113 bp, Homo sapiens
  MAP TO AC007106.6; EXPRESSED IN LUNG, SIGNAL = 7.9; EXPRESSED IN HEART, SIGNAL = 5.9; EXPRESSED IN ADULT LIVER, SIGNAL =  13; EXPRESSED IN FETAL LIVER, SIGNAL =  14; EXPRESSED IN PLACENTA, SIGNAL = 8.7; EXPRESSED IN HELA, SIGNAL = 6.3; SWISSPROT HIT: P14336, EVALUE 5.40e+00; NT HIT: AL163284.2, EVALUE 7.00e-14; EST_HUMAN HIT: C05947.1, EVALUE 4.00e-16
gccaccacagctggtaatgctgagtttcacttgaagccagcaagtctcagaggctcacccaaggctctcaatgtagtacctgagtattgctgttggttattcagggccccagg

SEQ ID NO: 25812 - DNA, 193 bp, Homo sapiens
  MAP TO AB016897.1; EXPRESSED IN FETAL LIVER, SIGNAL = 1.5; EXPRESSED IN ADULT LIVER, SIGNAL = 1.6; EXPRESSED IN PLACENTA, SIGNAL = 1.8; EXPRESSED IN BRAIN, SIGNAL = 2.5; EXPRESSED IN HELA, SIGNAL = 1.3; EXPRESSED IN BONE MARROW, SIGNAL = 1.6; EXPRESSED IN LUNG, SIGNAL = 2.5; EXPRESSED IN HEART, SIGNAL = 1.9; EST_HUMAN HIT: AW851878.1, EVALUE 5.00e-08; SWISSPROT HIT: P35739, EVALUE 3.80e+00; NT HIT: Z79056.1, EVALUE 3.00e-05
gaggcaagaattgaggttgctgcggacccgtgcggattcgctgccagtaactcggacaccttccacccctaacacacggacacaatgggcctgcaaccacaattctcctcctggcattcagttgcacaagccactaaagtcttcccttcttgagctagttggagttggctgctgtgtcttgtgcccacgctga

SEQ ID NO: 25813 - DNA, 147 bp, Homo sapiens
  MAP TO AL022320.23; EXPRESSED IN PLACENTA, SIGNAL = 1.4; EXPRESSED IN BRAIN, SIGNAL = 1.5; EXPRESSED IN HELA, SIGNAL = 1.6; EXPRESSED IN LUNG, SIGNAL = 1.7; EXPRESSED IN HEART, SIGNAL = 1.5; EXPRESSED IN BONE MARROW, SIGNAL = 2.3; EXPRESSED IN FETAL LIVER, SIGNAL = 2.6; NT HIT: D63882.1, EVALUE 3.00e-29; SWISSPROT HIT: Q14565, EVALUE 6.00e-06
tgtcatctgtatacctttgatggtacagattcctactgatttcagtttcttaatgtcagccacgttctgtaaattaaagaatgggcacagcagactgataagatgccagcctgcaaggctcccatactatgtcatgtgtttctgtgt

SEQ ID NO: 25814 - DNA, 548 bp, Homo sapiens
  MAP TO Z82188.2; EXPRESSED IN ADULT LIVER, SIGNAL = 3.1; EXPRESSED IN HELA, SIGNAL = 4.4; EXPRESSED IN PLACENTA, SIGNAL = 4.3; EXPRESSED IN BRAIN, SIGNAL = 1.8; EXPRESSED IN LUNG, SIGNAL = 3.3; EXPRESSED IN HEART, SIGNAL = 1.9; EXPRESSED IN BONE MARROW, SIGNAL = 4.2; EXPRESSED IN FETAL LIVER, SIGNAL = 2.3; NT HIT: gi9910609, EVALUE 8.00e-27; EST_HUMAN HIT: H83155.1, EVALUE 1.00e-129; SWISSPROT HIT: Q15848, EVALUE 2.00e-15
tcagtcgtcctcggccttgatgaggtggccgctgaaggtgatgtaggtgtcgaagtcgttgctgtagatggcgttctcgcgctggcgcttgaagagccgcacccagacgcggtccccgtaggccaggtccagcatcacactctggctctgcatgatgctgcgctcgctgggctgcgcgtacaggatgacagcctctttctggttatgcataatgtgcacgtacgtctccttgtaattccagctgtgcacattgaggctgaagaagtagatgccacgcaggggagcagcaaactggccggtcgccatgtcaaagcacccatcaaggttcacaaagaccctttcgaagagcagcgtctggaagtcctcgccgctgtgcagggccgtcttgcggcccactgagaaggcgaagaagcgcttctggcacggggcgccggggctgcccatctcccccttgtcacccttgctgccctgagggccaggctccccttggggaccctccctgcccatgtaccctggcaggcccattgggcctgggtcccctttgtcac

SEQ ID NO: 25815 - DNA, 202 bp, Homo sapiens
  MAP TO AC007281.3; EXPRESSED IN ADULT LIVER, SIGNAL =  25; EXPRESSED IN FETAL LIVER, SIGNAL =  20; EXPRESSED IN BRAIN, SIGNAL = 3.5; EXPRESSED IN HELA, SIGNAL =  10; EXPRESSED IN PLACENTA, SIGNAL =  22; EXPRESSED IN HEART, SIGNAL = 7.4; EXPRESSED IN LUNG, SIGNAL =  11; EXPRESSED IN BONE MARROW, SIGNAL = 5.4; NT HIT: AJ400877.1, EVALUE 9.00e-12; EST_HUMAN HIT: AW892155.1, EVALUE 2.00e-13; SWISSPROT HIT: P39188, EVALUE 3.90e-02
taagtggcatttattataatcatcttatttcttattaaattggtagtgttcaaacttggttttatagatacttgtgaaggcattattatttttgttattatcattatcattatttttagagatagggtcttggtctgtcacccaggctgaaatgcagtgatgtcatcacagctccctgcagcatcagactcctgagctcaag

SEQ ID NO: 25816 - DNA, 120 bp, Homo sapiens
  MAP TO AL022238.1; EXPRESSED IN FETAL LIVER, SIGNAL = 1.6; EXPRESSED IN PLACENTA, SIGNAL = 1.8; EXPRESSED IN BRAIN, SIGNAL = 1.6; EXPRESSED IN HELA, SIGNAL = 2.6; EXPRESSED IN LUNG, SIGNAL = 2.1; EXPRESSED IN HEART, SIGNAL = 2.2; EXPRESSED IN BONE MARROW, SIGNAL = 1.7; EXPRESSED IN ADULT LIVER, SIGNAL = 2.3; EST_HUMAN HIT: BE906175.1, EVALUE 3.00e-26; SWISSPROT HIT: P30852, EVALUE 9.30e+00; NT HIT: AB037859.1, EVALUE 2.00e-26
ctagagacacctatgaacagagaaggccgtcagggaggcagcaggggacctggggttacctccgctctgaatgagaatgtcaaacaggtcgtccatctgctggcttgaggaaccattttc

SEQ ID NO: 25817 - DNA, 159 bp, Homo sapiens
  MAP TO AL031588.1; EXPRESSED IN LUNG, SIGNAL = 6.4; EXPRESSED IN HEART, SIGNAL = 4.9; EXPRESSED IN FETAL LIVER, SIGNAL = 5.2; EXPRESSED IN BRAIN, SIGNAL = 5.9; EXPRESSED IN HELA, SIGNAL = 5.5; EXPRESSED IN BONE MARROW, SIGNAL = 7.2; EXPRESSED IN ADULT LIVER, SIGNAL = 5.4; EXPRESSED IN PLACENTA, SIGNAL = 3.8; EST_HUMAN HIT: BE712424.1, EVALUE 2.00e-65; NT HIT: gi11418322, EVALUE 1.00e-65
atgggcacaggcctgatcctgccctcccgcagctccctgctgaggaccgcattcctcctgctgctgctcatcagcgccacctggctgctggggctgctggctgtgaaccgcgatgcactgagctttcactacctcttcgccatcttcagcggcttacag

SEQ ID NO: 25818 - DNA, 144 bp, Homo sapiens
  MAP TO AC006548.19; EXPRESSED IN ADULT LIVER, SIGNAL = 1.6; EXPRESSED IN PLACENTA, SIGNAL = 3.2; EXPRESSED IN BRAIN, SIGNAL = 2.5; EXPRESSED IN HELA, SIGNAL =   3; EXPRESSED IN BONE MARROW, SIGNAL = 2.1; EXPRESSED IN HEART, SIGNAL =   2; EXPRESSED IN LUNG, SIGNAL = 2.2; EXPRESSED IN FETAL LIVER, SIGNAL = 2.9; NT HIT: gi6912459, EVALUE 4.00e-16; EST_HUMAN HIT: BE939176.1, EVALUE 6.00e-16; SWISSPROT HIT: P43053, EVALUE 1.40e+00
ccatccataggctctgtcacgtccggcaagaaggtggactatgtccaggtggatctggagaagacccaggccctgcagaagaccatgcatgaacagatgtgcctgcggcagtcctcagagcctcccaggggcgccaagctgtga

SEQ ID NO: 25819 - DNA, 170 bp, Homo sapiens
  MAP TO AL035681.13; EXPRESSED IN BONE MARROW, SIGNAL = 2.7; EXPRESSED IN LUNG, SIGNAL = 2.7; EXPRESSED IN HEART, SIGNAL = 2.1; EXPRESSED IN FETAL LIVER, SIGNAL =   3; EXPRESSED IN ADULT LIVER, SIGNAL = 1.7; EXPRESSED IN PLACENTA, SIGNAL = 1.9; EXPRESSED IN HELA, SIGNAL = 2.6; EXPRESSED IN BRAIN, SIGNAL = 2.5; NT HIT: gi11418177, EVALUE 9.00e-67; EST_HUMAN HIT: BE793169.1, EVALUE 1.00e-66; SWISSPROT HIT: P46060, EVALUE 7.00e-17
cttcaactccgacttcttctctaaggccttggcgatgaccctggctgcttccacgcccactgtgttgccttccagacgcagagcctccaagctgtcaaagtcttcaatctctttaatcacatctttagctgccagggaccaaagagcagaaccttaggcttttggaatca

SEQ ID NO: 25820 - DNA, 150 bp, Homo sapiens
  MAP TO AL049758.11; EXPRESSED IN PLACENTA, SIGNAL = 2.1; EXPRESSED IN HELA, SIGNAL = 1.3; EXPRESSED IN LUNG, SIGNAL = 1.7; EXPRESSED IN HEART, SIGNAL =   2; EXPRESSED IN BONE MARROW, SIGNAL = 1.8; EXPRESSED IN ADULT LIVER, SIGNAL = 1.8; EXPRESSED IN FETAL LIVER, SIGNAL = 1.6; EXPRESSED IN BRAIN, SIGNAL = 1.4; SWISSPROT HIT: Q99081, EVALUE 2.30e+00; NT HIT: gi11467911, EVALUE 1.30e+00; EST_HUMAN HIT: BE618346.1, EVALUE 1.30e-01
tgtagctaaatcagagagaaacgtggctcttttagaaggcaggggccagctaccctttgtcccagcccagtgccagccacagcaggtcccgtggtctctgccctctgtgagttggtttcacagacagagccagaacactcctcccttggc

SEQ ID NO: 25821 - DNA, 124 bp, Homo sapiens
  MAP TO AP000111.1; EXPRESSED IN BRAIN, SIGNAL =   5; EXPRESSED IN HELA, SIGNAL = 4.2; EXPRESSED IN FETAL LIVER, SIGNAL = 2.4; EXPRESSED IN ADULT LIVER, SIGNAL = 3.5; EXPRESSED IN PLACENTA, SIGNAL =   3; EXPRESSED IN BONE MARROW, SIGNAL = 9.3; EXPRESSED IN HEART, SIGNAL = 4.1; EXPRESSED IN LUNG, SIGNAL = 4.6; NT HIT: gi11526198, EVALUE 6.00e-64; EST_HUMAN HIT: BF688546.1, EVALUE 9.00e-64; SWISSPROT HIT: Q08334, EVALUE 4.00e-18
cattgggaatggtaccacctcccgaaaatgtcagaatgaattctgttaatttcaagaacattctacagtgggagtcacctgcttttgccaaagggaacctgactttcacagctcagtacctaag

SEQ ID NO: 25822 - DNA, 240 bp, Homo sapiens
  MAP TO AL031587.3; EXPRESSED IN FETAL LIVER, SIGNAL = 4.4; EXPRESSED IN ADULT LIVER, SIGNAL = 3.6; EXPRESSED IN PLACENTA, SIGNAL = 4.3; EXPRESSED IN BRAIN, SIGNAL =   7; EXPRESSED IN HELA, SIGNAL = 5.1; EXPRESSED IN LUNG, SIGNAL = 5.3; EXPRESSED IN HEART, SIGNAL = 3.7; EXPRESSED IN BONE MARROW, SIGNAL = 8.9; SWISSPROT HIT: P28235, EVALUE 5.20e-01; NT HIT: AF254411.1, EVALUE 5.70e-01; EST_HUMAN HIT: AW955290.1, EVALUE 1.00e-128
ctatgccaccacctgacgtggcagaaggctggtaggatgggctggcctgaggatggccctgcctggcagaggagtggactccagtggtcgagcttgggctaccctgcccgtctctggagacagattaagtggtggcaagacccttcctaagttcctcactccttctgtggtcaatgtcttccatttcccggagtttctgcaaagggcatcagggaaagcaggtgtatcagggctaggaac

SEQ ID NO: 25823 - DNA, 75 bp, Homo sapiens
  MAP TO AL022312.7; EXPRESSED IN BRAIN, SIGNAL =   4; EXPRESSED IN HELA, SIGNAL = 3.5; EXPRESSED IN ADULT LIVER, SIGNAL =   5; EXPRESSED IN FETAL LIVER, SIGNAL =   3; EXPRESSED IN PLACENTA, SIGNAL = 5.9; EXPRESSED IN BONE MARROW, SIGNAL = 5.4; EXPRESSED IN HEART, SIGNAL = 3.5; EXPRESSED IN LUNG, SIGNAL = 3.4; NT HIT: L09113.1, EVALUE 3.70e-02; SWISSPROT HIT: P11155, EVALUE 3.30e+00; EST_HUMAN HIT: BF569282.1, EVALUE 8.00e-35
ctggtggggcaggtcctgttcacagcagcaggagtgaaggcctggccatcggtggagagggcagctgtcagaggg

SEQ ID NO: 25824 - DNA, 76 bp, Homo sapiens
  MAP TO AC004832.3; EXPRESSED IN LUNG, SIGNAL = 1.8; EXPRESSED IN BONE MARROW, SIGNAL = 2.2; EXPRESSED IN HEART, SIGNAL = 2.1; EXPRESSED IN FETAL LIVER, SIGNAL = 1.6; EXPRESSED IN HELA, SIGNAL = 1.5; EXPRESSED IN BRAIN, SIGNAL = 1.5; NT HIT: gi6005925, EVALUE 6.00e-01; EST_HUMAN HIT: AW863940.1, EVALUE 2.30e-01; SWISSPROT HIT: Q10137, EVALUE 8.50e-01
ctccgagaatcaccaccttcctgcgtgtctcttcactcatgtaagacttgaccaggttgaaggctacggcgaatag

SEQ ID NO: 25825 - DNA, 76 bp, Homo sapiens
  MAP TO AL020993.1; EXPRESSED IN BRAIN, SIGNAL = 1.6; EXPRESSED IN PLACENTA, SIGNAL = 1.3; EXPRESSED IN HELA, SIGNAL = 2.1; EXPRESSED IN BONE MARROW, SIGNAL = 1.8; EXPRESSED IN LUNG, SIGNAL = 1.9; EXPRESSED IN HEART, SIGNAL = 1.4; SWISSPROT HIT: P49674, EVALUE 3.00e-08; NT HIT: gi11418110, EVALUE 1.00e-35; EST_HUMAN HIT: BF127508.1, EVALUE 2.00e-35
ccaggtagatatctccgaaggacccgctcccgatcttccgtcccaggcggtacttgttccccacacgtagctccat

SEQ ID NO: 25826 - DNA, 90 bp, Homo sapiens
  MAP TO AC006548.19; EXPRESSED IN PLACENTA, SIGNAL = 2.4; EXPRESSED IN HELA, SIGNAL = 3.2; EXPRESSED IN BRAIN, SIGNAL = 8.2; EXPRESSED IN LUNG, SIGNAL = 3.4; EXPRESSED IN BONE MARROW, SIGNAL = 7.7; EXPRESSED IN HEART, SIGNAL = 2.8; EXPRESSED IN FETAL LIVER, SIGNAL = 3.4; EXPRESSED IN ADULT LIVER, SIGNAL = 3.5; NT HIT: X17283.1, EVALUE 7.00e-32; EST_HUMAN HIT: BF063222.1, EVALUE 1.10e+00
cgctgcctggactgtgtccccatctgctgtgaagtgaatggtgtcttctaaattcatgctgagccctaattgctgaaaagtgtaagacat

SEQ ID NO: 25827 - DNA, 104 bp, Homo sapiens
  MAP TO AC004909.2; EXPRESSED IN ADULT LIVER, SIGNAL = 3.9; EXPRESSED IN PLACENTA, SIGNAL = 3.2; EXPRESSED IN HELA, SIGNAL = 2.4; EXPRESSED IN BRAIN, SIGNAL = 2.2; EXPRESSED IN LUNG, SIGNAL = 3.5; EXPRESSED IN BONE MARROW, SIGNAL = 3.9; EXPRESSED IN HEART, SIGNAL = 2.3; EXPRESSED IN FETAL LIVER, SIGNAL = 5.4; NT HIT: AF188843.1, EVALUE 2.20e-01; EST_HUMAN HIT: BF352878.1, EVALUE 1.30e+00
cctgcagctcccactgaagatcaatggcttcttcttcttgttcaccttccaagtctcacacacgagtttctcactggcaaaacctaaaccagtaactgctagta

SEQ ID NO: 25828 - DNA, 185 bp, Homo sapiens
  MAP TO AL034406.1; EXPRESSED IN ADULT LIVER, SIGNAL = 5.1; EXPRESSED IN FETAL LIVER, SIGNAL = 4.5; EXPRESSED IN PLACENTA, SIGNAL = 4.7; EXPRESSED IN HELA, SIGNAL = 4.8; EXPRESSED IN BRAIN, SIGNAL = 3.9; EXPRESSED IN LUNG, SIGNAL = 5.2; EXPRESSED IN HEART, SIGNAL = 3.6; EXPRESSED IN BONE MARROW, SIGNAL = 3.2; EST_HUMAN HIT: AL046596.1, EVALUE 5.00e-11; SWISSPROT HIT: P35292, EVALUE 7.60e-01; NT HIT: AJ271736.1, EVALUE 8.00e-12
aggattctgccactgtagtgggcttctgtctgcacatctgtgcatttccatacatcctctgaaatctaagtggaggcccccaagcctcaactcttgccctctgcacacccataggcttaacacaatgtcaaagctgccaaggccaacaactttcaccctctggagcagcagtctgagacatatct

SEQ ID NO: 25829 - DNA, 132 bp, Homo sapiens
  MAP TO AC007092.4; EXPRESSED IN PLACENTA, SIGNAL = 1.2; EXPRESSED IN BRAIN, SIGNAL = 1.5; EXPRESSED IN BONE MARROW, SIGNAL = 1.5; EXPRESSED IN LUNG, SIGNAL = 1.4; EXPRESSED IN HEART, SIGNAL = 2.1; EXPRESSED IN FETAL LIVER, SIGNAL = 1.3; EXPRESSED IN HELA, SIGNAL = 1.4; NT HIT: gi11525893, EVALUE 7.40e-02; EST_HUMAN HIT: BF195339.1, EVALUE 1.10e-01
tgctgaggggcctgatcattaagctgcgggtctggaggagcagcggcagcgggatcagctgcctgctgagcttggtcaaagggctgtggctgaactggtgcagccagctggagcaggggcggcaggaataga

SEQ ID NO: 25830 - DNA, 160 bp, Homo sapiens
  MAP TO AP000123.1; EXPRESSED IN LUNG, SIGNAL = 2.4; EXPRESSED IN ADULT LIVER, SIGNAL =   2; EXPRESSED IN FETAL LIVER, SIGNAL = 4.7; EXPRESSED IN PLACENTA, SIGNAL = 1.8; EXPRESSED IN HELA, SIGNAL = 2.4; EXPRESSED IN HEART, SIGNAL = 2.4; NT HIT: D86976.1, EVALUE 3.70e-01; SWISSPROT HIT: P42859, EVALUE 6.00e-01; EST_HUMAN HIT: BF132815.1, EVALUE 5.50e-01
cttggaacaacttttctttgagcctcctcctgaatggaataagggaatggttgttcctgctcctacttggattcctgaagataggactggccaaggacagcctggaacaatcacagcctgctgctgtcatcgtgcaacaatttgttgcctgtattctaga

SEQ ID NO: 25831 - DNA, 313 bp, Homo sapiens
  MAP TO AL078474.2; EXPRESSED IN LUNG, SIGNAL = 1.8; EXPRESSED IN HEART, SIGNAL = 1.4; EXPRESSED IN ADULT LIVER, SIGNAL = 1.8; EXPRESSED IN FETAL LIVER, SIGNAL =   2; EXPRESSED IN PLACENTA, SIGNAL = 2.1; EXPRESSED IN HELA, SIGNAL = 1.8; NT HIT: gi5835289, EVALUE 1.90e-01; EST_HUMAN HIT: AA584465.1, EVALUE 7.20e-02; SWISSPROT HIT: O13354, EVALUE 2.60e+00
aaaacaatttatgtttaaaaccaaggaaattgcaattttcaacaatggaatatatatgggaagaacacataaatccatattcccattcccaagaggaataagctctatactaatttgtgctcagaatttaaatcccagagactataccctaaatagagatccaggaatagtgtcaaggcttctggtgggtaccatccctcagcatcttttggacacctgtgcaaaaataacaataataatgagggaacttaaccacactgaatattgtagttttatgcaaactgttttaagcactttacatgataatcttatt

SEQ ID NO: 25832 - DNA, 91 bp, Homo sapiens
  MAP TO AC009266.1; EXPRESSED IN FETAL LIVER, SIGNAL = 7.4; EXPRESSED IN HELA, SIGNAL = 5.2; EXPRESSED IN BRAIN, SIGNAL = 4.3; EXPRESSED IN PLACENTA, SIGNAL = 9.7; EXPRESSED IN LUNG, SIGNAL = 4.7; EXPRESSED IN BONE MARROW, SIGNAL = 3.9; EXPRESSED IN HEART, SIGNAL = 3.4; EXPRESSED IN ADULT LIVER, SIGNAL =  11; NT HIT: AF223391.1, EVALUE 3.00e-31; EST_HUMAN HIT: AA601416.1, EVALUE 7.00e-33
gattggagactattattctaagcgagtaactcaggaatggaaaaccaaacattgtatgttctcactgttatgtgggagctaagctatgagg

SEQ ID NO: 25833 - DNA, 191 bp, Homo sapiens
  MAP TO AB016897.1; EXPRESSED IN BRAIN, SIGNAL = 2.8; EXPRESSED IN PLACENTA, SIGNAL = 1.7; EXPRESSED IN BONE MARROW, SIGNAL = 4.3; EXPRESSED IN HEART, SIGNAL = 2.2; EXPRESSED IN FETAL LIVER, SIGNAL =   3; EXPRESSED IN ADULT LIVER, SIGNAL = 2.9; EXPRESSED IN HELA, SIGNAL = 2.6; EXPRESSED IN LUNG, SIGNAL = 3.5; NT HIT: AB011399.1, EVALUE 1.00e-103; EST_HUMAN HIT: AA314522.1, EVALUE 4.30e-02; SWISSPROT HIT: P32671, EVALUE 8.60e+00
gccacacgaggcttccatcctgtgcccgtgcctgcctctttcctcccattggaaggcctttcttgtgctagtgtttgtgcttttgtctttgcttttcacactctggccccttcttgtctcagacctcagcttaaagccacattcctgaagaggttgtccctgagcatcctgtcactgtcacagcacctgat

SEQ ID NO: 25834 - DNA, 123 bp, Homo sapiens
  MAP TO AC008151.1; EXPRESSED IN HEART, SIGNAL = 2.5; EXPRESSED IN FETAL LIVER, SIGNAL = 4.4; EXPRESSED IN ADULT LIVER, SIGNAL = 6.5; EXPRESSED IN HELA, SIGNAL = 2.9; EXPRESSED IN PLACENTA, SIGNAL = 4.7; EXPRESSED IN BRAIN, SIGNAL = 4.2; EXPRESSED IN LUNG, SIGNAL = 2.5; EXPRESSED IN BONE MARROW, SIGNAL = 6.5; NT HIT: AF003529.1, EVALUE 1.00e-18; EST_HUMAN HIT: AV655125.1, EVALUE 5.00e-16
atggttgaaagctccctgcggcctcacctgaagccaagcagatgccagcaccatgattcctgcacagatcacagacccatgggccaattaaacctcctttctttatcaattacccagcctcag

SEQ ID NO: 25835 - DNA, 154 bp, Homo sapiens
  MAP TO AL022318.2; EXPRESSED IN LUNG, SIGNAL = 4.6; EXPRESSED IN BONE MARROW, SIGNAL = 4.6; EXPRESSED IN HEART, SIGNAL = 3.6; EXPRESSED IN ADULT LIVER, SIGNAL = 3.7; EXPRESSED IN FETAL LIVER, SIGNAL = 3.4; EXPRESSED IN HELA, SIGNAL = 3.9; EXPRESSED IN PLACENTA, SIGNAL = 3.6; EXPRESSED IN BRAIN, SIGNAL = 4.1; EST_HUMAN HIT: BF237537.1, EVALUE 1.00e-23; SWISSPROT HIT: P16818, EVALUE 1.00e+00; NT HIT: gi11418138, EVALUE 1.00e-81
atacctgatggatccagacacattcactttcaactttaataatgaccctttggtccttcgacggcgccagacctacttgtgctatgaggtggagcgcctggacaatggcacctgggtcctgatggaccagcacatgggctttctatgcaacgag

SEQ ID NO: 25836 - DNA, 138 bp, Homo sapiens
  MAP TO AC004032.7; EXPRESSED IN PLACENTA, SIGNAL = 1.2; EXPRESSED IN HEART, SIGNAL = 1.6; EXPRESSED IN BONE MARROW, SIGNAL = 1.6; EXPRESSED IN LUNG, SIGNAL = 1.2; EXPRESSED IN FETAL LIVER, SIGNAL = 2.1; EXPRESSED IN HELA, SIGNAL = 1.5; EXPRESSED IN BRAIN, SIGNAL = 1.5; NT HIT: AF294308.1, EVALUE 3.10e-01; EST_HUMAN HIT: BF697253.1, EVALUE 1.80e+00; SWISSPROT HIT: Q02963, EVALUE 6.90e+00
gaaaaagtgatgtgcatcacttcagggctgaaatgattaacaagcaggtatgtctcctcggtctctctttccccacctgcctgctgaatggaacagagttcaaagtaagtgttgaaaatggtagagccacaagataga

SEQ ID NO: 25837 - DNA, 157 bp, Homo sapiens
  MAP TO AC007092.4; EXPRESSED IN BRAIN, SIGNAL =   4; EXPRESSED IN PLACENTA, SIGNAL = 3.6; EXPRESSED IN HELA, SIGNAL = 3.7; EXPRESSED IN BONE MARROW, SIGNAL = 6.3; EXPRESSED IN LUNG, SIGNAL = 2.9; EXPRESSED IN HEART, SIGNAL =   3; EXPRESSED IN ADULT LIVER, SIGNAL = 3.4; EXPRESSED IN FETAL LIVER, SIGNAL = 4.7; EST_HUMAN HIT: BE798579.1, EVALUE 2.10e+00; SWISSPROT HIT: O24361, EVALUE 3.00e+00; NT HIT: U66888.1, EVALUE 3.60e-01
ttatcttcagaatggagactgtacctcatcctgggaagaaagcctccttcaatagaaacaaacaccagtctggggccattatttgtggccactttgatcattggtgtactcttttccagattggcccctttaaacttgaggttcccaggggaagccc

SEQ ID NO: 25838 - DNA, 115 bp, Homo sapiens
  MAP TO AL022318.2; EXPRESSED IN HELA, SIGNAL = 1.6; EXPRESSED IN BRAIN, SIGNAL = 2.4; EXPRESSED IN LUNG, SIGNAL = 1.4; EXPRESSED IN BONE MARROW, SIGNAL = 3.5; EXPRESSED IN HEART, SIGNAL =   2; EXPRESSED IN FETAL LIVER, SIGNAL = 1.4; NT HIT: U72775.1, EVALUE 3.90e+00; EST_HUMAN HIT: BE928869.1, EVALUE 2.40e-02
cctcctgaggactcccctggctgggccctcctgccctccgtcctgcccccctgcctgccctcatggttacaccccctcacccacactcctcatgctccctccaccttggtgcctc

SEQ ID NO: 25839 - DNA, 109 bp, Homo sapiens
  MAP TO AC005006.2; EXPRESSED IN ADULT LIVER, SIGNAL = 3.5; EXPRESSED IN PLACENTA, SIGNAL = 1.7; EXPRESSED IN HELA, SIGNAL = 3.3; EXPRESSED IN BRAIN, SIGNAL = 2.7; EXPRESSED IN LUNG, SIGNAL = 2.6; EXPRESSED IN BONE MARROW, SIGNAL = 3.4; EXPRESSED IN HEART, SIGNAL = 2.1; EXPRESSED IN FETAL LIVER, SIGNAL = 2.2; EST_HUMAN HIT: BF528030.1, EVALUE 7.00e-55; NT HIT: gi11417972, EVALUE 5.00e-55; SWISSPROT HIT: P53261, EVALUE 9.00e-05
gttccttgatgatgtggtcgagtttgtagttgggcttattgtcctttaaacgctctacagtgttccactcgctcttcccataagccttccggagcttccggacgaacac

SEQ ID NO: 25840 - DNA, 209 bp, Homo sapiens
  MAP TO AP000350.1; EXPRESSED IN PLACENTA, SIGNAL = 2.4; EXPRESSED IN HELA, SIGNAL = 1.3; EXPRESSED IN LUNG, SIGNAL = 1.6; EXPRESSED IN HEART, SIGNAL = 1.3; EXPRESSED IN ADULT LIVER, SIGNAL =   2; EXPRESSED IN FETAL LIVER, SIGNAL = 1.4; NT HIT: gi11435903, EVALUE 1.00e-78; EST_HUMAN HIT: BE394661.1, EVALUE 2.00e-78; SWISSPROT HIT: Q04652, EVALUE 3.00e-13
gccttggtgtggctgtactggaaggtcccatgtatgccgtaggagggcatgagggctggggccatctgaacacagcggaaatttgggaccctcaggctcgccagtggaattttgttgccactgtgtctactcctaggagcacagttggtgtggcagtgctaagtggaaaacttaatgcagttggtggtggtgatgcaagttcttgtctc

SEQ ID NO: 25841 - DNA, 105 bp, Homo sapiens
  MAP TO AC006992.2; EXPRESSED IN FETAL LIVER, SIGNAL = 5.3; EXPRESSED IN ADULT LIVER, SIGNAL = 3.8; EXPRESSED IN PLACENTA, SIGNAL =   4; EXPRESSED IN HELA, SIGNAL = 4.1; EXPRESSED IN BRAIN, SIGNAL = 2.9; EXPRESSED IN LUNG, SIGNAL = 3.4; EXPRESSED IN BONE MARROW, SIGNAL = 5.5; EXPRESSED IN HEART, SIGNAL = 4.7; NT HIT: AE002186.2, EVALUE 8.90e-01; EST_HUMAN HIT: BF700567.1, EVALUE 1.30e+00
gtgctcatgacattttatctagtcagttctcacacaaaggacttgccttagatactgacaaaagcctgaaagaaaacagacgatctggcaaatgctgtgatagtg

SEQ ID NO: 25842 - DNA, 166 bp, Homo sapiens
  MAP TO AC005006.2; EXPRESSED IN LUNG, SIGNAL = 5.5; EXPRESSED IN BONE MARROW, SIGNAL = 7.1; EXPRESSED IN HEART, SIGNAL = 4.8; EXPRESSED IN FETAL LIVER, SIGNAL = 5.4; EXPRESSED IN ADULT LIVER, SIGNAL = 5.3; EXPRESSED IN HELA, SIGNAL = 3.9; EXPRESSED IN PLACENTA, SIGNAL = 2.5; EXPRESSED IN BRAIN, SIGNAL =   6; EST_HUMAN HIT: AV708225.1, EVALUE 4.00e-88; SWISSPROT HIT: P20062, EVALUE 2.00e-24; NT HIT: gi11417974, EVALUE 3.00e-88
catgttggaaccagctgctgagaccattcctcagacccaagagatcatcagtgtcacgctgcaggtgcttagtctcttgccgccgtacagacagtccatctctgttctggccgggtccaccgtggaagatgtcctgaagaaggcccatgagttaggaggattcacg

SEQ ID NO: 25843 - DNA, 163 bp, Homo sapiens
  MAP TO AC007363.3; EXPRESSED IN PLACENTA, SIGNAL = 1.5; EXPRESSED IN BRAIN, SIGNAL = 1.5; EXPRESSED IN HELA, SIGNAL = 1.5; EXPRESSED IN LUNG, SIGNAL = 1.7; EXPRESSED IN HEART, SIGNAL = 2.2; EXPRESSED IN BONE MARROW, SIGNAL = 2.5; EXPRESSED IN FETAL LIVER, SIGNAL = 1.4; NT HIT: AF217413.1, EVALUE 1.00e-04; EST_HUMAN HIT: AW117580.1, EVALUE 4.00e-05; SWISSPROT HIT: P47858, EVALUE 1.80e+00
gtccaccggttatcacattttacaagtcctcaaatcacctggagagctggttaaagcacagattgctgggcccacccctgtagtttttgactcaggatgtctgggctgggtgagacgaaaggtcccggatgatgctgatgctgccggtccaggagccacacat

SEQ ID NO: 25844 - DNA, 168 bp, Homo sapiens
  MAP TO AL079295.1; EXPRESSED IN LUNG, SIGNAL = 1.4; EXPRESSED IN FETAL LIVER, SIGNAL = 1.6; EXPRESSED IN HELA, SIGNAL = 1.4; EXPRESSED IN HEART, SIGNAL = 1.3; NT HIT: AE001811.1, EVALUE 3.90e-01; EST_HUMAN HIT: AA601025.1, EVALUE 5.80e-01; SWISSPROT HIT: P72935, EVALUE 2.30e+00
gaagagctttcctgcccaaacatgcttgccaccaagcatcgggagaaggctgtagccaagcacgaagccactacaaacctgcaaatcttctttgaaggaaccaccaggcctcagcagagaggcaaatgcctgttttcatagttgctttcataaaatagttattcagaa

SEQ ID NO: 25845 - DNA, 152 bp, Homo sapiens
  MAP TO AC009266.1; EXPRESSED IN HELA, SIGNAL = 1.5; EXPRESSED IN PLACENTA, SIGNAL = 3.1; EXPRESSED IN BRAIN, SIGNAL = 3.2; EXPRESSED IN BONE MARROW, SIGNAL = 3.7; EXPRESSED IN LUNG, SIGNAL =   2; EXPRESSED IN HEART, SIGNAL = 1.8; EXPRESSED IN ADULT LIVER, SIGNAL = 3.8; EXPRESSED IN FETAL LIVER, SIGNAL = 2.1; NT HIT: AY005150.1, EVALUE 8.70e-02; EST_HUMAN HIT: T96545.1, EVALUE 3.30e-02; SWISSPROT HIT: P56416, EVALUE 3.00e+00
  unsure 23
tgctgtgcccagatgtagggaangagagtcccgaaggagtccttggtagcaagctcataaagagcactctgggcctgtcgcctgaaatcattctgcactcctaggcttctgtgcctgtaatggaaggaaaagcctcaaagatctctgaaatg

SEQ ID NO: 25846 - DNA, 104 bp, Homo sapiens
  MAP TO AL035681.13; EXPRESSED IN HEART, SIGNAL = 4.2; EXPRESSED IN BONE MARROW, SIGNAL =   3; EXPRESSED IN LUNG, SIGNAL = 5.3; EXPRESSED IN ADULT LIVER, SIGNAL = 3.8; EXPRESSED IN FETAL LIVER, SIGNAL = 5.1; EXPRESSED IN BRAIN, SIGNAL = 5.1; EXPRESSED IN PLACENTA, SIGNAL = 3.4; EXPRESSED IN HELA, SIGNAL = 5.5; NT HIT: gi11418177, EVALUE 4.00e-52; SWISSPROT HIT: P46060, EVALUE 3.00e-12; EST_HUMAN HIT: BE897365.1, EVALUE 6.00e-52
ctactgcatcctgcactgccatcctcacagtagcttcgtccttgaacacagatgacacctttaggaaggcagagaccaccttctcggggtcagacgtgtcagtc

SEQ ID NO: 25847 - DNA, 241 bp, Homo sapiens
  MAP TO AP000053.1; EXPRESSED IN PLACENTA, SIGNAL = 3.5; EXPRESSED IN HELA, SIGNAL = 2.1; EXPRESSED IN HEART, SIGNAL =   2; EXPRESSED IN BONE MARROW, SIGNAL = 1.9; EXPRESSED IN LUNG, SIGNAL = 2.4; EXPRESSED IN ADULT LIVER, SIGNAL = 3.1; EXPRESSED IN FETAL LIVER, SIGNAL = 3.1; EXPRESSED IN BRAIN, SIGNAL = 1.6; EST_HUMAN HIT: AA594718.1, EVALUE 7.00e-26; NT HIT: AF148512.1, EVALUE 2.00e-31; SWISSPROT HIT: P43506, EVALUE 7.80e+00
tgatgcagggcaggcaagcccccaaattgggttgtagcctgagagggttcttgggttcattcaggaaggaattcaagggcaagctggtggtattagacagcaacttctgttgaagcagcagtggacagcagcagcagaggtcctgctctttgcagagcagggctaccccataggcagtgtgcccagagtagcagctcgaaggcagttctgtagtcctatttacacccacttttaattatat

SEQ ID NO: 25848 - DNA, 544 bp, Homo sapiens; identical to SEQ ID NO: 9293
  MAP TO AL079300.11; EXPRESSED IN PLACENTA, SIGNAL = 2.2; EXPRESSED IN HELA, SIGNAL = 1.7; EXPRESSED IN LUNG, SIGNAL = 2.7; EXPRESSED IN HEART, SIGNAL = 2.6; EXPRESSED IN BONE MARROW, SIGNAL = 1.6; EXPRESSED IN ADULT LIVER, SIGNAL =   2; EXPRESSED IN FETAL LIVER, SIGNAL = 2.3; EXPRESSED IN BRAIN, SIGNAL = 2.1; NT HIT: X17116.1, EVALUE 8.70e-02; EST_HUMAN HIT: BF349349.1, EVALUE 5.10e-01

SEQ ID NO: 25849 - DNA, 99 bp, Homo sapiens
  MAP TO AC007564.9; EXPRESSED IN PLACENTA, SIGNAL = 7.9; EXPRESSED IN HELA, SIGNAL = 5.4; EXPRESSED IN BONE MARROW, SIGNAL = 5.4; EXPRESSED IN LUNG, SIGNAL = 5.2; EXPRESSED IN HEART, SIGNAL =   3; EXPRESSED IN FETAL LIVER, SIGNAL = 6.4; EXPRESSED IN ADULT LIVER, SIGNAL = 5.7; EXPRESSED IN BRAIN, SIGNAL = 3.5; NT HIT: AF119841.1, EVALUE 5.00e-30; EST_HUMAN HIT: BE279086.1, EVALUE 3.00e-32
ctttactccagttcccaaaaagttcctcatctccatctgagaccacctgagcctagactttattgtccatattgctatcagcattttaggcaaagccat

SEQ ID NO: 25850 - DNA, 189 bp, Homo sapiens
  MAP TO AC008151.1; EXPRESSED IN ADULT LIVER, SIGNAL = 4.5; EXPRESSED IN BRAIN, SIGNAL = 3.4; EXPRESSED IN PLACENTA, SIGNAL = 4.2; EXPRESSED IN BONE MARROW, SIGNAL = 5.8; EXPRESSED IN HEART, SIGNAL = 2.3; EXPRESSED IN LUNG, SIGNAL = 4.9; EXPRESSED IN FETAL LIVER, SIGNAL = 4.7; EXPRESSED IN HELA, SIGNAL = 3.4; NT HIT: gi6677874, EVALUE 4.40e-01; EST_HUMAN HIT: AI580035.1, EVALUE 2.60e+00; SWISSPROT HIT: Q64411, EVALUE 1.00e+00
accatgggtcacgtgggccacagtgagcatcccctgcagcgtttcccccagtcctcccactggaagagggccagagtcatccgacagcaaatgtcccagaaacatatagagcatgcaggaaaggggcccattccttagcactgacttcatctttaaaactaagtataaaccagttcctgttcactccta

SEQ ID NO: 25851 - DNA, 165 bp, Homo sapiens
  MAP TO AC007463.3; EXPRESSED IN PLACENTA, SIGNAL = 2.6; EXPRESSED IN BRAIN, SIGNAL = 4.8; EXPRESSED IN HELA, SIGNAL =   3; EXPRESSED IN BONE MARROW, SIGNAL = 4.2; EXPRESSED IN LUNG, SIGNAL = 3.4; EXPRESSED IN HEART, SIGNAL = 2.4; EXPRESSED IN FETAL LIVER, SIGNAL = 2.8; EXPRESSED IN ADULT LIVER, SIGNAL =   2; NT HIT: AE001124.1, EVALUE 3.80e-01; EST_HUMAN HIT: BF669708.1, EVALUE 8.80e+00; SWISSPROT HIT: Q05496, EVALUE 3.00e+00
tccaaaagagttgagtgaaggcccatgttgtagggtcatacaattagtgattttatcagtctcatcccagatttctgccacctctgggtccaagctattccctgagatattctttacttgcacatcaatgagtattaatggatccatatttatggtcactacctg

SEQ ID NO: 25852 - DNA, 159 bp, Homo sapiens
  MAP TO AL023553.5; EXPRESSED IN BRAIN, SIGNAL = 3.2; EXPRESSED IN HELA, SIGNAL = 4.2; EXPRESSED IN BONE MARROW, SIGNAL = 2.3; EXPRESSED IN ADULT LIVER, SIGNAL = 2.8; EXPRESSED IN FETAL LIVER, SIGNAL =   4; EXPRESSED IN PLACENTA, SIGNAL = 3.8; EXPRESSED IN HEART, SIGNAL = 9.8; EXPRESSED IN LUNG, SIGNAL = 4.1; EST_HUMAN HIT: BE892143.1, EVALUE 2.00e-84; SWISSPROT HIT: Q99798, EVALUE 5.00e-17; NT HIT: gi11418185, EVALUE 1.00e-84
attattctggaaaactatgcgtaccctggtgttcttctgattggcactgactcccacacccccaatggtggcggccttgggggcatctgcattggagttgggggtgccgatgctgtggatgtcatggctgggatcccctgggagctgaagtgccccaag

SEQ ID NO: 25853 - DNA, 235 bp, Homo sapiens
  MAP TO AP000352.2; EXPRESSED IN HEART, SIGNAL =   4; EXPRESSED IN BONE MARROW, SIGNAL = 3.1; EXPRESSED IN LUNG, SIGNAL = 3.1; EXPRESSED IN ADULT LIVER, SIGNAL =   2; EXPRESSED IN FETAL LIVER, SIGNAL = 1.8; EXPRESSED IN BRAIN, SIGNAL = 3.7; EXPRESSED IN PLACENTA, SIGNAL = 1.8; EXPRESSED IN HELA, SIGNAL =   3; NT HIT: AF298224.1, EVALUE 2.20e+00; EST_HUMAN HIT: BF665271.1, EVALUE 3.30e+00; SWISSPROT HIT: P07866, EVALUE 1.10e+00
acgccggacggtacagtccctgttctccctactgccagcccagggcggcacatcaatcacgggggggtgctcggacgactcattttgtcgcttcgttttggtgagggggggtgctgggtctggggtgacacgggcaatgttgcggctgctcattaacctcatggattcacagtgattcttgtgcttccgagacatgctcagggtcgccacctgccagcttgcccacctgggagcc

SEQ ID NO: 25854 - DNA, 292 bp, Homo sapiens
  MAP TO AL008723.8; EXPRESSED IN HEART, SIGNAL = 1.7; EXPRESSED IN ADULT LIVER, SIGNAL = 2.7; EXPRESSED IN HELA, SIGNAL = 2.6; EXPRESSED IN PLACENTA, SIGNAL = 2.6; EXPRESSED IN BONE MARROW, SIGNAL =   3; EXPRESSED IN LUNG, SIGNAL = 1.5; EXPRESSED IN FETAL LIVER, SIGNAL = 2.9; EXPRESSED IN BRAIN, SIGNAL = 1.9; NT HIT: gi11418013, EVALUE 4.50e-02; EST_HUMAN HIT: AL118917.1, EVALUE 6.70e-02; SWISSPROT HIT: P41877, EVALUE 2.30e+00
actcagaagaatgacatcaggcccgatttccagctgggaaagatggattctaaaatcaaggaactggagccccagctgacaattctatatcagaacccaaagacgctgaagttccaaggtaagaaatctgtaaaatttgctctcagcccatcaatggccctgagaaagtagccattcaaaatgttctccattaaatatgggcataggctgaattctggcacctgaaatatttatgcccccaaaccatagttgaatatagactagagatgactagagattttgaaggtaatgt

SEQ ID NO: 25855 - DNA, 153 bp, Homo sapiens
  MAP TO AL022328.21; EXPRESSED IN BONE MARROW, SIGNAL = 2.4; EXPRESSED IN HEART, SIGNAL = 1.4; EXPRESSED IN FETAL LIVER, SIGNAL = 1.7; EXPRESSED IN HELA, SIGNAL = 1.6; EXPRESSED IN BRAIN, SIGNAL = 2.7; EXPRESSED IN PLACENTA, SIGNAL = 1.2; NT HIT: Z71561.1, EVALUE 8.80e-02; EST_HUMAN HIT: AV759992.1, EVALUE 2.00e+00; SWISSPROT HIT: O95947, EVALUE 2.30e+00
tcgaggaggtgagcccttggtgcaagcagtggggggcaccagaacccctccctggaacataggaaatgccaagtggacaggggagggcaggggtaggagggtgggcacagaggcgccacagaaagctgtgtttgagaaatggctctgccatgg

SEQ ID NO: 25856 - DNA, 170 bp, Homo sapiens
  MAP TO AL031588.1; EXPRESSED IN BRAIN, SIGNAL = 6.8; EXPRESSED IN HEART, SIGNAL =   4; EXPRESSED IN ADULT LIVER, SIGNAL = 5.4; EXPRESSED IN HELA, SIGNAL = 4.8; EXPRESSED IN PLACENTA, SIGNAL = 7.4; EXPRESSED IN BONE MARROW, SIGNAL = 6.3; EXPRESSED IN LUNG, SIGNAL = 6.4; EXPRESSED IN FETAL LIVER, SIGNAL = 7.3; SWISSPROT HIT: P44626, EVALUE 3.00e+00; EST_HUMAN HIT: BE895237.1, EVALUE 2.30e+00; NT HIT: AF202077.1, EVALUE 6.10e+00
gaagtccctcccaaagcggcgtctgggctgcgtgtcctccgccatcagctgtgtgccgtggcggagccatgccttattgcctttgctccgttgggctctgggcttcttttgctgccgagtgtgtcctggacaccatcccgcatcaggggaagctgggctaaggtcagatg

SEQ ID NO: 25857 - DNA, 159 bp, Homo sapiens
  MAP TO AL035681.13; EXPRESSED IN FETAL LIVER, SIGNAL = 1.7; EXPRESSED IN BRAIN, SIGNAL =   3; EXPRESSED IN PLACENTA, SIGNAL = 1.8; EXPRESSED IN HELA, SIGNAL = 3.3; EXPRESSED IN HEART, SIGNAL = 1.9; EXPRESSED IN LUNG, SIGNAL =   2; EXPRESSED IN BONE MARROW, SIGNAL = 3.3; EXPRESSED IN ADULT LIVER, SIGNAL = 1.7; NT HIT: U02972.1, EVALUE 9.20e-02; EST_HUMAN HIT: BF448000.1, EVALUE 2.00e-84; SWISSPROT HIT: P16356, EVALUE 2.00e-01
ggaaaagaatcccgcccactaagacgcgacccctcagacaggggtccaagaagcccctgctggaggacgaccctcagggtgccaggaagatctcgtcggagcctgttcctggcgagagtaagagccaccgggctgggtcaaggcaggaccagcctgctc

SEQ ID NO: 25858 - DNA, 93 bp, Homo sapiens
  MAP TO AC007463.3; EXPRESSED IN PLACENTA, SIGNAL = 7.1; EXPRESSED IN HELA, SIGNAL = 5.3; EXPRESSED IN BRAIN, SIGNAL = 4.6; EXPRESSED IN BONE MARROW, SIGNAL = 5.5; EXPRESSED IN LUNG, SIGNAL = 6.7; EXPRESSED IN HEART, SIGNAL = 6.1; EXPRESSED IN FETAL LIVER, SIGNAL =  15; EXPRESSED IN ADULT LIVER, SIGNAL =   6; NT HIT: gi11497621, EVALUE 7.70e-01; EST_HUMAN HIT: AI032997.1, EVALUE 1.10e+00
gttgactacccaaagatatggacctgctgaattcttgacctccataaagtcaatggtcttcaccccatccgcattttggccatcttttccctg

SEQ ID NO: 25859 - DNA, 494 bp, Homo sapiens
  MAP TO AC004624.6; EXPRESSED IN HEART, SIGNAL = 1.4; EXPRESSED IN BRAIN, SIGNAL = 1.8; EXPRESSED IN HELA, SIGNAL = 1.2; EXPRESSED IN LUNG, SIGNAL = 1.4; EXPRESSED IN BONE MARROW, SIGNAL = 1.7; NT HIT: AE004672.1, EVALUE 4.90e+00; EST_HUMAN HIT: D53316.1, EVALUE 4.60e-01; SWISSPROT HIT: P35916, EVALUE 6.10e-01
tcatgtcacctcgggggcactgagctgacgtgagatcagggaagtcttccagagaaagcaacattcccaacaaataaagagaaagtagcaaggctttccaacagcctgagtgggggtgggcactagaagcttccagacacaggcaaggcttacaaggcagaagagcctggcacactcagggacctgcagctcagtgtgactaaggtggcatatgggggactgagcttgaaggagcagaacaccgggggccttgaatgccgtggataggaggttgaacttgatcctgaggccgtgggcagccatggtggggtgcttatggagggagatcctttgacagtcaccactgttgtccagagcaaggtgctgaagacctgcgtgtggctctcggtcctcctgggtcactcccagtcctttgaagatgcactggcagccttgggcagtcacacagcatgcgatgctctctggactctgcgacttcacagatgtgcagaggc

SEQ ID NO: 25860 - DNA, 143 bp, Homo sapiens
  MAP TO Z83844.5; EXPRESSED IN BRAIN, SIGNAL =   4; EXPRESSED IN PLACENTA, SIGNAL = 3.9; EXPRESSED IN HELA, SIGNAL = 4.8; EXPRESSED IN LUNG, SIGNAL = 6.3; EXPRESSED IN HEART, SIGNAL = 4.1; EXPRESSED IN BONE MARROW, SIGNAL = 6.9; EXPRESSED IN ADULT LIVER, SIGNAL = 4.4; EXPRESSED IN FETAL LIVER, SIGNAL = 5.7; EST_HUMAN HIT: BE957696.2, EVALUE 1.90e+00; SWISSPROT HIT: P02465, EVALUE 1.00e+00; NT HIT: AE002246.2, EVALUE 8.20e-02
gccctgggaggaaggggcgtgggggcagaccagcttgtcagggttgctcagtgctggcccatgtcatgggtatcccactgccagccctgggaagaaggggcgtgggggcagactggcttgtcggggttgctcagtgctggccc

SEQ ID NO: 25861 - DNA, 139 bp, Homo sapiens
  MAP TO AL022328.21; EXPRESSED IN PLACENTA, SIGNAL = 1.7; EXPRESSED IN LUNG, SIGNAL = 1.8; EXPRESSED IN BONE MARROW, SIGNAL = 4.6; EXPRESSED IN HEART, SIGNAL = 1.6; EXPRESSED IN ADULT LIVER, SIGNAL = 1.4; EXPRESSED IN FETAL LIVER, SIGNAL = 1.9; EXPRESSED IN BRAIN, SIGNAL =   3; EXPRESSED IN HELA, SIGNAL = 1.6; NT HIT: AF304162.1, EVALUE 3.10e-01; EST_HUMAN HIT: BF349597.1, EVALUE 1.80e+00; SWISSPROT HIT: P49639, EVALUE 1.00e+00
ccacacaccagagaggacacggccacaagagtcaccccaccccatctacctggcacccctcaggccaggatggttctccataacagaggccccagtgggcccccgcccccgtctccccctaccaggggctgatagctct

SEQ ID NO: 25862 - DNA, 140 bp, Homo sapiens
  MAP TO AP000356.1; EXPRESSED IN PLACENTA, SIGNAL = 2.5; EXPRESSED IN LUNG, SIGNAL = 3.9; EXPRESSED IN BONE MARROW, SIGNAL = 3.5; EXPRESSED IN HEART, SIGNAL = 3.1; EXPRESSED IN FETAL LIVER, SIGNAL =   3; EXPRESSED IN ADULT LIVER, SIGNAL = 2.4; EXPRESSED IN BRAIN, SIGNAL = 4.4; EXPRESSED IN HELA, SIGNAL = 3.9; EST_HUMAN HIT: AA495747.1, EVALUE 5.00e-07; SWISSPROT HIT: P24193, EVALUE 3.10e+00; NT HIT: AJ251973.1, EVALUE 9.00e-08
agcagtgttcatgccctttctgttccttccaccatgtgaggacacgtaggtggcaccatctacaaggaacaggcctttaccagacacagaacctgccagcgccttgatcttggacctcagagtctccagaactgtgaaga

SEQ ID NO: 25863 - DNA, 85 bp, Homo sapiens
  MAP TO AL031588.1; EXPRESSED IN HEART, SIGNAL = 2.3; EXPRESSED IN PLACENTA, SIGNAL = 1.4; EXPRESSED IN BONE MARROW, SIGNAL = 3.2; EXPRESSED IN LUNG, SIGNAL = 1.5; EXPRESSED IN ADULT LIVER, SIGNAL = 1.6; EXPRESSED IN FETAL LIVER, SIGNAL = 1.6; EXPRESSED IN BRAIN, SIGNAL = 2.4; EXPRESSED IN HELA, SIGNAL = 1.6; EST_HUMAN HIT: BE298290.1, EVALUE 4.00e-03; NT HIT: AJ238964.1, EVALUE 6.90e-01
agcactctccttgctggaatttgccttgcattttctcacttctggggtcccttttcttggtttctctgtccagaaagatgggttt

SEQ ID NO: 25864 - DNA, 90 bp, Homo sapiens
  MAP TO AP000353.1; EXPRESSED IN LUNG, SIGNAL = 3.4; EXPRESSED IN BONE MARROW, SIGNAL =   3; EXPRESSED IN HEART, SIGNAL = 2.4; EXPRESSED IN FETAL LIVER, SIGNAL = 2.9; EXPRESSED IN ADULT LIVER, SIGNAL = 2.5; EXPRESSED IN PLACENTA, SIGNAL = 2.4; EXPRESSED IN HELA, SIGNAL = 2.4; EXPRESSED IN BRAIN, SIGNAL = 3.5; NT HIT: gi11417862, EVALUE 5.00e-36; EST_HUMAN HIT: BE740551.1, EVALUE 7.00e-36; SWISSPROT HIT: Q9Y6J0, EVALUE 8.00e-08
catctccctgttaaggtggatgaggaggctgcgctggagcaggctgtgaagttctgccaggtccatcttggggctgccgcccagagacag

SEQ ID NO: 25865 - DNA, 160 bp, Homo sapiens
  MAP TO AC007556.2; EXPRESSED IN LUNG, SIGNAL = 3.9; EXPRESSED IN HEART, SIGNAL = 1.8; EXPRESSED IN FETAL LIVER, SIGNAL = 6.4; EXPRESSED IN ADULT LIVER, SIGNAL = 5.4; EXPRESSED IN PLACENTA, SIGNAL = 2.9; EXPRESSED IN BRAIN, SIGNAL = 1.7; EXPRESSED IN HELA, SIGNAL =   2; EXPRESSED IN BONE MARROW, SIGNAL = 3.1; NT HIT: AL163278.2, EVALUE 1.00e-16; EST_HUMAN HIT: AA420453.1, EVALUE 1.00e-20; SWISSPROT HIT: P08547, EVALUE 5.00e-07
aaaaaaatgtttgtcaccactaatcatcagggaaatgcaaattaaaaccaaaatgagatatcacctcacatttgttagaatggctactatcaaaagacaaaagataacaagtattgacaagggcatggagaaaacctcttgtatactgtttgtgagaatg

SEQ ID NO: 25866 - DNA, 180 bp, Homo sapiens
  MAP TO AL031588.1; EXPRESSED IN ADULT LIVER, SIGNAL =   7; EXPRESSED IN BRAIN, SIGNAL = 7.8; EXPRESSED IN PLACENTA, SIGNAL = 5.3; EXPRESSED IN BONE MARROW, SIGNAL =   8; EXPRESSED IN LUNG, SIGNAL = 4.8; EXPRESSED IN HEART, SIGNAL = 3.8; EXPRESSED IN FETAL LIVER, SIGNAL = 4.7; EXPRESSED IN HELA, SIGNAL =   6; NT HIT: gi11418318, EVALUE 4.00e-97; SWISSPROT HIT: P43872, EVALUE 2.30e+00; EST_HUMAN HIT: AW131563.1, EVALUE 3.00e-95
aaggtttggccacatttttattcatgtctggagtgtttgtcatgaggtcgatcagaggcctgctttcagatcctacagccacgtgtgcttctggggtatcgcagaagtcgatgagaggaaggtcaatgaggggctggcttgcagcatctggagtgaccgcgagtggttccagtttgatat

SEQ ID NO: 25867 - DNA, 129 bp, Homo sapiens
  MAP TO AL022329.9; EXPRESSED IN HELA, SIGNAL = 2.4; EXPRESSED IN PLACENTA, SIGNAL = 4.2; EXPRESSED IN HEART, SIGNAL = 1.6; EXPRESSED IN LUNG, SIGNAL = 2.2; EXPRESSED IN BONE MARROW, SIGNAL =   4; EXPRESSED IN ADULT LIVER, SIGNAL = 4.6; EXPRESSED IN FETAL LIVER, SIGNAL = 3.6; EXPRESSED IN BRAIN, SIGNAL = 1.7; EST_HUMAN HIT: AI697294.1, EVALUE 1.10e-01; NT HIT: U82828.1, EVALUE 7.20e-02; SWISSPROT HIT: P15390, EVALUE 7.00e+00
tgcgcaggagccagggttttgagtgtgatgggaagctctggtgggtcttgaccaggcccgatgtatgttttaagatcattctagcctctttatgaagaatgaattgctgggatcagagtgggagcatgg

SEQ ID NO: 25868 - DNA, 120 bp, Homo sapiens
  MAP TO AP000353.1; EXPRESSED IN HEART, SIGNAL = 1.6; EXPRESSED IN FETAL LIVER, SIGNAL = 1.3; EXPRESSED IN ADULT LIVER, SIGNAL = 1.8; EXPRESSED IN BONE MARROW, SIGNAL = 1.4; NT HIT: gi11417866, EVALUE 3.00e-59; EST_HUMAN HIT: BF343566.1, EVALUE 1.00e-56; SWISSPROT HIT: P36269, EVALUE 2.00e-16
ctggctgaagttgggctcgtactccacacagcccttgctgttgacatgcaggatgggggctgcaatggccgctctcaggtcaaagccaagccacagcttgctcatgatggcctgggggag

SEQ ID NO: 25869 - DNA, 77 bp, Homo sapiens
  MAP TO AL035682.16; EXPRESSED IN BRAIN, SIGNAL = 2.1; EXPRESSED IN PLACENTA, SIGNAL = 1.9; EXPRESSED IN HELA, SIGNAL = 1.6; EXPRESSED IN HEART, SIGNAL = 1.3; EXPRESSED IN LUNG, SIGNAL = 1.9; EXPRESSED IN BONE MARROW, SIGNAL = 1.9; EXPRESSED IN ADULT LIVER, SIGNAL =   2; EXPRESSED IN FETAL LIVER, SIGNAL = 1.5; NT HIT: gi11420516, EVALUE 4.00e-36; EST_HUMAN HIT: BE901252.1, EVALUE 9.00e-01; SWISSPROT HIT: Q13469, EVALUE 1.00e-08
gtaaagttctgccccgtgaggatcatttgctggccgccatagaccaggcagctgtctgtgtcttgtctttcaaccat

SEQ ID NO: 25870 - DNA, 382 bp, Homo sapiens
  MAP TO AL031587.3; EXPRESSED IN FETAL LIVER, SIGNAL = 1.4; EXPRESSED IN BRAIN, SIGNAL = 2.2; EXPRESSED IN HELA, SIGNAL = 1.5; EXPRESSED IN LUNG, SIGNAL = 1.2; EXPRESSED IN HEART, SIGNAL =   2; EXPRESSED IN BONE MARROW, SIGNAL = 3.1; NT HIT: gi11431702, EVALUE 6.00e-02; EST_HUMAN HIT: AI970830.1, EVALUE 9.00e-02; SWISSPROT HIT: P02676, EVALUE 5.70e-01
ggctgcactgggctctcactgggcctcgggccacagcctcttcccttccatgcacccctgcgtcccaggcctggcagcttccccaggcctgtcacagaggagtggggtcagccactcctggcttcagaatctgctcggccacttcctggccacgtggcggcaggcaggtcccaacccttctctgggctccagcttcctcctccaagaagcgggggaggggataatgcaaaaccagcgacctcctgcaccagctctaaggagaccgaagtgcccagcatggggcggggtgcggaggcagccaagagctcaaaggagagccaggccacttggagttgaaatcccagcgctgacaccagccgtgcagccctggacccctctctga

SEQ ID NO: 25871 - DNA, 115 bp, Homo sapiens
  MAP TO AC006548.19; EXPRESSED IN FETAL LIVER, SIGNAL = 2.9; EXPRESSED IN HELA, SIGNAL = 2.5; EXPRESSED IN BRAIN, SIGNAL = 2.5; EXPRESSED IN PLACENTA, SIGNAL = 2.6; EXPRESSED IN LUNG, SIGNAL = 2.1; EXPRESSED IN BONE MARROW, SIGNAL = 5.7; EXPRESSED IN HEART, SIGNAL = 2.3; EXPRESSED IN ADULT LIVER, SIGNAL = 2.4; NT HIT: AJ277174.1, EVALUE 6.40e-02; EST_HUMAN HIT: AI114824.1, EVALUE 1.50e+00
atgtccgtttgtgagcgagagggtgttcacaaatgcaagaaggttggccttagaatggatgaactctctgtgttccccagtgacaaggtccagggctataggcacaggcaggctg

SEQ ID NO: 25872 - DNA, 172 bp, Homo sapiens
  MAP TO AL031587.3; EXPRESSED IN BRAIN, SIGNAL = 3.2; EXPRESSED IN PLACENTA, SIGNAL = 6.7; EXPRESSED IN HELA, SIGNAL = 3.8; EXPRESSED IN HEART, SIGNAL = 2.1; EXPRESSED IN LUNG, SIGNAL = 3.1; EXPRESSED IN BONE MARROW, SIGNAL = 2.6; EXPRESSED IN ADULT LIVER, SIGNAL = 3.8; EXPRESSED IN FETAL LIVER, SIGNAL = 3.8; NT HIT: AF275948.1, EVALUE 1.00e-01; EST_HUMAN HIT: BF238465.1, EVALUE 7.00e-53; SWISSPROT HIT: P51126, EVALUE 1.70e+00
ggtgccaaaaaggctgggatcgctgctttaacggactgacctctgagcagctcgcaggtccccggggtgtaagtgatggtcttggggcggcgccggaacccagttcctttggtcactacctccatctgcttctgtgaagccatgggaggactctgaggagggaaagacgcaa

SEQ ID NO: 25873 - DNA, 90 bp, Homo sapiens
  MAP TO Z82201.1; EXPRESSED IN LUNG, SIGNAL = 1.7; EXPRESSED IN BONE MARROW, SIGNAL =   2; EXPRESSED IN HEART, SIGNAL = 2.3; EXPRESSED IN FETAL LIVER, SIGNAL = 2.7; EXPRESSED IN ADULT LIVER, SIGNAL = 1.6; EXPRESSED IN PLACENTA, SIGNAL = 1.2; EXPRESSED IN HELA, SIGNAL = 1.7; EXPRESSED IN BRAIN, SIGNAL = 2.7; SWISSPROT HIT: Q09216, EVALUE 7.30e+00; NT HIT: AJ296282.1, EVALUE 3.00e-03; EST_HUMAN HIT: BE269469.1, EVALUE 2.80e-01
tcatgggaagataaatctgacagcggctcaaagacagtgtggaagtgagactgtggggtggtggcagtggtgggagagcagcagtctgga

SEQ ID NO: 25874 - DNA, 137 bp, Homo sapiens
  MAP TO AC007539.8; EXPRESSED IN PLACENTA, SIGNAL = 3.9; EXPRESSED IN BRAIN, SIGNAL = 3.1; EXPRESSED IN HEART, SIGNAL = 3.1; EXPRESSED IN BONE MARROW, SIGNAL = 1.7; EXPRESSED IN LUNG, SIGNAL = 1.7; EXPRESSED IN FETAL LIVER, SIGNAL = 1.7; EXPRESSED IN ADULT LIVER, SIGNAL = 2.4; EXPRESSED IN HELA, SIGNAL = 2.9; NT HIT: gi11420560, EVALUE 2.00e-33; EST_HUMAN HIT: H12866.1, EVALUE 7.00e-34; SWISSPROT HIT: Q9YUS3, EVALUE 6.90e+00
gcatggtgctccgtgccttcaggatgaagctgtgcaggaagctggcacactctgtggtggtgaggttgaccatggtgctcttgatgggaatgccatctttgttcaccatgatgatattctgcactcccctctggctc

SEQ ID NO: 25875 - DNA, 205 bp, Homo sapiens
  MAP TO AL022328.21; EXPRESSED IN FETAL LIVER, SIGNAL = 4.3; EXPRESSED IN PLACENTA, SIGNAL = 3.2; EXPRESSED IN HEART, SIGNAL = 2.2; EXPRESSED IN BRAIN, SIGNAL = 3.3; EXPRESSED IN HELA, SIGNAL = 4.2; EXPRESSED IN BONE MARROW, SIGNAL =   3; EXPRESSED IN LUNG, SIGNAL = 2.5; EXPRESSED IN ADULT LIVER, SIGNAL = 4.9; NT HIT: gi6678919, EVALUE 1.90e+00; EST_HUMAN HIT: AI209130.1, EVALUE 6.00e-23; SWISSPROT HIT: P23249, EVALUE 2.00e-06
aagtaggttttctctcctcatcaacccagggcagcgaggcacgggagggaaaaagcccatcgtggttcaacccggccgaggccgtccaggtcctgcgctactgctgcctcctggcccacagcatctccagtcaggtgtctgccagcgacattggcgtcatcacgccctaccggaagcaggtacgccctgcccaggcacgcctggt

SEQ ID NO: 25876 - DNA, 232 bp, Homo sapiens
  MAP TO AL035681.13; EXPRESSED IN ADULT LIVER, SIGNAL = 3.2; EXPRESSED IN FETAL LIVER, SIGNAL =   4; EXPRESSED IN BRAIN, SIGNAL = 3.3; EXPRESSED IN PLACENTA, SIGNAL =   2; EXPRESSED IN HELA, SIGNAL = 2.5; EXPRESSED IN HEART, SIGNAL = 2.3; EXPRESSED IN BONE MARROW, SIGNAL = 3.6; EXPRESSED IN LUNG, SIGNAL = 2.7; NT HIT: AF045656.1, EVALUE 5.50e-01; EST_HUMAN HIT: BE894488.1, EVALUE 1.00e-106; SWISSPROT HIT: P22912, EVALUE 4.80e-01
atggtggagagcatgaagtacccctttaggcagggcatgcggctggaagtggtggacaagtcccaggtgtcacgcactcgcatggctgtggtggacacagtaatcgggggtcgcctacggctcctctacgaggatggtgacagtgacgacgacttctggtgccacatgtggagccccctgatccacccagtgggttggtcacgacgtgtgggccacggcatcaagatgtcag

SEQ ID NO: 25877 - DNA, 141 bp, Homo sapiens
  MAP TO AP000233.1; EXPRESSED IN HELA, SIGNAL = 3.3; EXPRESSED IN PLACENTA, SIGNAL = 3.5; EXPRESSED IN HEART, SIGNAL = 2.9; EXPRESSED IN BONE MARROW, SIGNAL = 6.5; EXPRESSED IN LUNG, SIGNAL = 4.2; EXPRESSED IN ADULT LIVER, SIGNAL = 4.7; EXPRESSED IN FETAL LIVER, SIGNAL = 3.6; EXPRESSED IN BRAIN, SIGNAL = 6.4; EST_HUMAN HIT: N74258.1, EVALUE 1.20e-01; NT HIT: AJ005375.1, EVALUE 8.00e-02
atacaattgatgaaagtagcaggcttccaagcagccactgccattgtgcgagctggagcaggagccgggggaagagggagggaagagggtgggacatgagcagtggcagtggaagtggctgcaagagcaacagtggcagtg

SEQ ID NO: 25878 - DNA, 150 bp, Homo sapiens
  MAP TO AL022319.2; EXPRESSED IN LUNG, SIGNAL =   7; EXPRESSED IN HEART, SIGNAL = 4.9; EXPRESSED IN BONE MARROW, SIGNAL =  13; EXPRESSED IN ADULT LIVER, SIGNAL =  13; EXPRESSED IN FETAL LIVER, SIGNAL =  15; EXPRESSED IN HELA, SIGNAL = 6.1; EXPRESSED IN PLACENTA, SIGNAL =  11; EXPRESSED IN BRAIN, SIGNAL =  11; EST_HUMAN HIT: BF541649.1, EVALUE 2.00e+00; NT HIT: L26339.1, EVALUE 3.40e-01
agagccttctccacagatccaggtgggcagagggtacagcgtctgactccacctcaagcccaggctcagggactgctacttatctatggtttgttgtttacgttcataattggaaaaaatgtgaaatctcaaaaagaggtcagtgacatc

SEQ ID NO: 25879 - DNA, 139 bp, Homo sapiens
  MAP TO AL079295.1; EXPRESSED IN PLACENTA, SIGNAL = 1.7; EXPRESSED IN HEART, SIGNAL = 1.5; EXPRESSED IN LUNG, SIGNAL = 1.9; EXPRESSED IN FETAL LIVER, SIGNAL = 2.1; EXPRESSED IN BRAIN, SIGNAL = 2.8; EXPRESSED IN HELA, SIGNAL =   2; EXPRESSED IN BONE MARROW, SIGNAL = 2.7; EXPRESSED IN ADULT LIVER, SIGNAL = 2.4; NT HIT: AP001515.1, EVALUE 1.20e+00; EST_HUMAN HIT: BF382169.1, EVALUE 1.80e+00; SWISSPROT HIT: P53878, EVALUE 9.10e+00
tcaccaaatgaagtgatgatgagcatataggaagtgccctttagaaaatgcctggtaattgaattaaccaggtaattgaatacctgcttctgcagtataagtctataaaaaaaagataggaaccattctctcaatagct

SEQ ID NO: 25880 - DNA, 182 bp, Homo sapiens
  MAP TO AC007539.8; EXPRESSED IN HEART, SIGNAL = 1.4; EXPRESSED IN FETAL LIVER, SIGNAL = 1.6; EXPRESSED IN PLACENTA, SIGNAL = 2.2; EXPRESSED IN HELA, SIGNAL = 4.6; NT HIT: gi11435947, EVALUE 2.00e-98; EST_HUMAN HIT: W23234.1, EVALUE 1.00e-85; SWISSPROT HIT: P48300, EVALUE 5.10e+00
gcttttgtcattgcgatcacctccgactttatcccccgcctggtgtaccagtactcctacagtcacaatgggactctgcacggctttgtcaaccacaccctctcctttttcaacgtcagccagctgaaggaggggacgcagccagaaaactcacagtttgaccaggaggttcagttctgcag

SEQ ID NO: 25881 - DNA, 238 bp, Homo sapiens
  MAP TO Z83844.5; EXPRESSED IN FETAL LIVER, SIGNAL = 2.9; EXPRESSED IN ADULT LIVER, SIGNAL = 2.3; EXPRESSED IN HELA, SIGNAL = 2.5; EXPRESSED IN PLACENTA, SIGNAL =   5; EXPRESSED IN BRAIN, SIGNAL = 3.7; EXPRESSED IN BONE MARROW, SIGNAL = 2.6; EXPRESSED IN LUNG, SIGNAL =   3; EXPRESSED IN HEART, SIGNAL = 2.2; EST_HUMAN HIT: AA402099.1, EVALUE 1.00e-92; NT HIT: gi11545732, EVALUE 1.00e-100; SWISSPROT HIT: P55194, EVALUE 5.10e-01
acatcaacttcaacgtgtcaggcctcttctcagctgttaccctccaggacacagtcagtgacaggctggcctctgaggaacttccgtccactgccgtgcccaccccagccaccaccccggctccggctccggctccagctccagctccggccccagccttggcttcagcagctaccaaggaaaggtgaggactgaggggcttgaatggctcctgtggtactcccacaatcagcctgcc

SEQ ID NO: 25882 - DNA, 184 bp, Homo sapiens
  MAP TO Z82188.2; EXPRESSED IN PLACENTA, SIGNAL = 5.2; EXPRESSED IN LUNG, SIGNAL =   6; EXPRESSED IN FETAL LIVER, SIGNAL = 9.3; EXPRESSED IN ADULT LIVER, SIGNAL = 8.8; EXPRESSED IN BRAIN, SIGNAL = 8.1; EXPRESSED IN HELA, SIGNAL = 5.3; EXPRESSED IN BONE MARROW, SIGNAL = 8.1; EXPRESSED IN HEART, SIGNAL = 3.9; NT HIT: U52111.2, EVALUE 2.00e-24; SWISSPROT HIT: P39192, EVALUE 3.00e-08; EST_HUMAN HIT: BE940436.1, EVALUE 6.00e-29
agagacagcgtcttgctctgtcacccaggctgactgcagtggcaccattatagctcactgcagcctcaaactcccgggctcaggcgattctcccacctcagcctccccagtagctgggactgcaggcgcatatgccaccactcctggcttaaaaaaatttttttatagacataggttctcgcta

SEQ ID NO: 25883 - DNA, 79 bp, Homo sapiens
  MAP TO Z82201.1; EXPRESSED IN LUNG, SIGNAL = 1.6; EXPRESSED IN BONE MARROW, SIGNAL = 2.1; EXPRESSED IN HEART, SIGNAL = 1.6; EXPRESSED IN ADULT LIVER, SIGNAL = 1.6; EXPRESSED IN HELA, SIGNAL = 1.6; EXPRESSED IN PLACENTA, SIGNAL = 1.9; EXPRESSED IN BRAIN, SIGNAL = 1.9; NT HIT: gi9790313, EVALUE 2.50e+00; EST_HUMAN HIT: BE781251.1, EVALUE 9.40e-01
agctttaggggaagggcaatcagccaactccagccccatctagcattcctgttttacctaagtggaaaaaaaacccaat

SEQ ID NO: 25884 - DNA, 198 bp, Homo sapiens
  MAP TO AL022328.21; EXPRESSED IN ADULT LIVER, SIGNAL = 4.2; EXPRESSED IN FETAL LIVER, SIGNAL = 5.2; EXPRESSED IN BRAIN, SIGNAL = 2.4; EXPRESSED IN PLACENTA, SIGNAL = 4.1; EXPRESSED IN BONE MARROW, SIGNAL = 5.1; EXPRESSED IN HEART, SIGNAL = 2.8; EXPRESSED IN LUNG, SIGNAL =   4; EXPRESSED IN HELA, SIGNAL = 3.2; SWISSPROT HIT: P21952, EVALUE 3.40e-01; NT HIT: AK024447.1, EVALUE 1.00e-108; EST_HUMAN HIT: BE546738.1, EVALUE 4.40e-02
ggtggcctgggccccggggaaacacgggcactccatcaggcgggacattcccagggctcatggctcaggcccagaccgtccctgggcgcgtgcaggtgtgagcgattgcccggcgctgtgtggcccccggggctttgctgcccttctgtgggcatcatctccttcacacgtggacacccccgtggtgccagccggccg

SEQ ID NO: 25885 - DNA, 90 bp, Homo sapiens
  MAP TO AL031587.3; EXPRESSED IN BRAIN, SIGNAL = 4.1; EXPRESSED IN HELA, SIGNAL = 3.7; EXPRESSED IN PLACENTA, SIGNAL = 2.9; EXPRESSED IN BONE MARROW, SIGNAL = 2.9; EXPRESSED IN HEART, SIGNAL = 2.6; EXPRESSED IN LUNG, SIGNAL = 3.4; EXPRESSED IN ADULT LIVER, SIGNAL = 2.5; EXPRESSED IN FETAL LIVER, SIGNAL = 2.8; NT HIT: gi11527389, EVALUE 8.00e-44; EST_HUMAN HIT: BE898069.1, EVALUE 1.00e-43; SWISSPROT HIT: O88828, EVALUE 2.00e-10
accgcaggccaaccagaagcgaatcaccacaccatacatgaccaagtacgagcgagcccgcgtgctgggcacccgagcgctccagattgc

SEQ ID NO: 25886 - DNA, 368 bp, Homo sapiens
  MAP TO AL022328.21; EXPRESSED IN BRAIN, SIGNAL = 2.8; EXPRESSED IN PLACENTA, SIGNAL = 2.5; EXPRESSED IN HELA, SIGNAL = 2.2; EXPRESSED IN HEART, SIGNAL = 2.1; EXPRESSED IN LUNG, SIGNAL = 2.6; EXPRESSED IN BONE MARROW, SIGNAL = 5.2; EXPRESSED IN ADULT LIVER, SIGNAL = 1.9; EXPRESSED IN FETAL LIVER, SIGNAL = 2.1; NT HIT: U06127.1, EVALUE 5.80e-02; EST_HUMAN HIT: BE890177.1, EVALUE 5.00e-99; SWISSPROT HIT: O23252, EVALUE 3.00e-01
acactttttagaaccgaaatgggatgatgctggctgtcatcactggtggccctgggagctggccttccctgccactccccactccctgcactggggcttgttctgccccataaagggctgggcactgcgtggtggagggcaggccagccccacaccactgtggcggggagtgagcagttctcacctggcagagcgaaaacgtggcagacacgaccccaatcaagacgttcagcacgtctttcaccagctcgcactccttcaccagcacgggctgcggggcctgtaggacgcccccagcaagcagctggagctccccttggtggagcctgcagaacttgtcgaaagcgtcccttcccgcctccgtcagg

SEQ ID NO: 25887 - DNA, 146 bp, Homo sapiens
  MAP TO AL022329.9; EXPRESSED IN BRAIN, SIGNAL = 2.6; EXPRESSED IN PLACENTA, SIGNAL = 3.8; EXPRESSED IN HEART, SIGNAL = 2.4; EXPRESSED IN FETAL LIVER, SIGNAL = 3.6; EXPRESSED IN HELA, SIGNAL = 2.6; EXPRESSED IN BONE MARROW, SIGNAL = 3.4; EXPRESSED IN LUNG, SIGNAL = 2.5; EXPRESSED IN ADULT LIVER, SIGNAL = 3.1; EST_HUMAN HIT: AA779922.1, EVALUE 1.90e+00; NT HIT: AF187873.1, EVALUE 1.30e+00
gaaccgagacaggaggcaggcagaagaatgtgagcaaaaggcagtgagtttgcgcagcagccctggaacctgacaggagcaaatgacatggcggcattgcagagttagcttctgtaacgcttcagtgttttcgtggagtgtgtttt

SEQ ID NO: 25888 - DNA, 120 bp, Homo sapiens
  MAP TO AL079300.11; EXPRESSED IN HEART, SIGNAL = 1.3; NT HIT: X95267.1, EVALUE 2.70e-01; EST_HUMAN HIT: BE543156.1, EVALUE 1.50e+00; SWISSPROT HIT: P38024, EVALUE 5.40e+00
gaaaccaaggctgggagatggaaagcaattggtatggggttgctaagcagaacaacaacagagccaactgtcatctgcccacctttccacagcacctggagactgtcatggctatttctg

SEQ ID NO: 25889 - DNA, 100 bp, Homo sapiens
  MAP TO AL031588.1; EXPRESSED IN BRAIN, SIGNAL = 2.5; EXPRESSED IN LUNG, SIGNAL = 3.2; EXPRESSED IN HELA, SIGNAL = 2.6; EXPRESSED IN PLACENTA, SIGNAL = 1.8; EXPRESSED IN BONE MARROW, SIGNAL = 2.8; EXPRESSED IN HEART, SIGNAL =   2; EXPRESSED IN ADULT LIVER, SIGNAL = 2.1; EXPRESSED IN FETAL LIVER, SIGNAL = 2.5; NT HIT: gi11418322, EVALUE 1.00e-49; EST_HUMAN HIT: BE899406.1, EVALUE 1.00e-49; SWISSPROT HIT: P53078, EVALUE 9.50e+00
actgcgaggatctccaggcagggttctcccctctggagtctgaccaattacttcattttgcttcaaatggccaattgtgcagagggacaaagccacagcc

SEQ ID NO: 25890 - DNA, 163 bp, Homo sapiens
  MAP TO AC009266.1; EXPRESSED IN HEART, SIGNAL = 1.3; EXPRESSED IN LUNG, SIGNAL = 1.5; EXPRESSED IN BRAIN, SIGNAL = 1.3; NT HIT: AF163864.1, EVALUE 2.40e-02; EST_HUMAN HIT: BF666993.1, EVALUE 5.60e-01; SWISSPROT HIT: P37784, EVALUE 8.90e+00
aaaaatttatttttatttttatttttattttttggctagtgtactgactaggatcaccaacataaggctgaaaaaaagtggagattgcagacatacattctcttatgaaaacaggcattcttgtcttatttccaatgctagaaacaacattattaatatttca

SEQ ID NO: 25891 - DNA, 151 bp, Homo sapiens
  MAP TO AC005006.2; EXPRESSED IN FETAL LIVER, SIGNAL =   5; EXPRESSED IN ADULT LIVER, SIGNAL = 7.2; EXPRESSED IN PLACENTA, SIGNAL = 3.3; EXPRESSED IN BRAIN, SIGNAL = 5.8; EXPRESSED IN HELA, SIGNAL = 6.1; EXPRESSED IN LUNG, SIGNAL = 6.3; EXPRESSED IN HEART, SIGNAL = 4.5; EXPRESSED IN BONE MARROW, SIGNAL = 6.4; EST_HUMAN HIT: BF237638.1, EVALUE 5.10e-01; SWISSPROT HIT: Q63921, EVALUE 6.90e+00; NT HIT: AB029900.1, EVALUE 6.00e-80
cagcagggcctgccatcattgttatcatcattatcatcattacgttcccagggtcccagccacaaccccatcaaagtgtgtgcccactggcccacgatggaggcttgcaggcagccaagtccagggatgatctcaatgtagccagagactc

SEQ ID NO: 25892 - DNA, 158 bp, Homo sapiens
  MAP TO AC007539.8; EXPRESSED IN HEART, SIGNAL = 1.3; NT HIT: AB025356.1, EVALUE 6.00e-03; EST_HUMAN HIT: BE467457.1, EVALUE 5.40e-01; SWISSPROT HIT: Q10432, EVALUE 5.20e+00
cacgctcacatggcggtctggacctgcacagctgacaaaagccctttcacgtccacttttccatctcactgtgcccacctccaggaggcggagcaccttgcccatggccacacagctggcaggccactgaggcaggtttgatttcctgtcttctgaac

SEQ ID NO: 25893 - DNA, 556 bp, Homo sapiens; identical to SEQ ID NO: 9373
  MAP TO AP000353.1; EXPRESSED IN HELA, SIGNAL = 1.5; EXPRESSED IN HEART, SIGNAL = 1.5; NT HIT: gi8922131, EVALUE 8.90e-02; EST_HUMAN HIT: AW965224.1, EVALUE 1.30e-01; SWISSPROT HIT: P15276, EVALUE 6.30e-02

SEQ ID NO: 25894 - DNA, 78 bp, Homo sapiens
  MAP TO AL021707.2; EXPRESSED IN HEART, SIGNAL = 1.3; NT HIT: gi11418121, EVALUE 1.00e-36; EST_HUMAN HIT: BE894258.1, EVALUE 1.00e-36
atgcctttctttgggaatacgttcagtccgaagaagacacctcctcggaagtcggcatctctctccaacctgcattct

SEQ ID NO: 25895 - DNA, 204 bp, Homo sapiens
  MAP TO Z97055.1; EXPRESSED IN LUNG, SIGNAL = 1.4; EXPRESSED IN HEART, SIGNAL = 1.5; EXPRESSED IN PLACENTA, SIGNAL = 1.5; EXPRESSED IN HELA, SIGNAL = 1.5; EXPRESSED IN BRAIN, SIGNAL = 2.5; EXPRESSED IN BONE MARROW, SIGNAL = 1.7; SWISSPROT HIT: P02458, EVALUE 1.50e-01; EST_HUMAN HIT: BF308325.1, EVALUE 1.20e-02; NT HIT: gi11418248, EVALUE 2.00e-12
ctcaccaagtagaccacctcctgcagcaagctggtgcctggaggggagaagccccagcgcggggtgctcagaggaggcccacgcgcccggccctgtgctcgggtcaacacctgctgcccaagaaggggctcaagagccccaggtggggcccagggcgactgagtctgggaagaggagcgcgccccgcacggtctcagcctgaat

SEQ ID NO: 25896 - DNA, 91 bp, Homo sapiens
  MAP TO AC005300.10; EXPRESSED IN FETAL LIVER, SIGNAL = 5.3; EXPRESSED IN BRAIN, SIGNAL = 4.8; EXPRESSED IN HELA, SIGNAL = 4.3; EXPRESSED IN ADULT LIVER, SIGNAL = 4.7; EXPRESSED IN PLACENTA, SIGNAL = 5.2; EXPRESSED IN BONE MARROW, SIGNAL = 4.5; EXPRESSED IN HEART, SIGNAL = 3.6; EXPRESSED IN LUNG, SIGNAL = 5.7; NT HIT: AF163151.2, EVALUE 7.50e-01; EST_HUMAN HIT: BF223077.1, EVALUE 1.10e+00; SWISSPROT HIT: P25149, EVALUE 7.30e+00
taaatatccatgtacccagccctggggtcgcgagccatctcagggacgacccgattccagcggatggagaagttccctgaaaacacctgcc

SEQ ID NO: 25897 - DNA, 199 bp, Homo sapiens
  MAP TO AL023553.5; EXPRESSED IN PLACENTA, SIGNAL = 4.4; EXPRESSED IN LUNG, SIGNAL = 2.9; EXPRESSED IN BRAIN, SIGNAL = 3.5; EXPRESSED IN HELA, SIGNAL = 2.4; EXPRESSED IN BONE MARROW, SIGNAL = 2.8; EXPRESSED IN HEART, SIGNAL = 2.8; EXPRESSED IN ADULT LIVER, SIGNAL = 3.6; EXPRESSED IN FETAL LIVER, SIGNAL = 4.4; SWISSPROT HIT: O97646, EVALUE 5.50e-01; NT HIT: AJ271736.1, EVALUE 1.20e-01; EST_HUMAN HIT: AW847030.1, EVALUE 1.80e-01
cctggcccagaatcatcagtgggttcttcccccatccctgcagcccacttagcatgaggccctggagccgcacagtcacttgggtgggaggtctggctggccagagcaggccccagctcagccgcgtctccctggtaaccaccatgagctgcatctccccctctccatcctcctcttccctccctgcccctccatggcc

SEQ ID NO: 25898 - DNA, 128 bp, Homo sapiens
  MAP TO AC004624.6; EXPRESSED IN LUNG, SIGNAL = 1.6; EXPRESSED IN FETAL LIVER, SIGNAL = 1.5; EXPRESSED IN PLACENTA, SIGNAL = 1.9; EXPRESSED IN BRAIN, SIGNAL = 1.9; EXPRESSED IN HELA, SIGNAL = 1.6; EXPRESSED IN BONE MARROW, SIGNAL = 1.8; EXPRESSED IN HEART, SIGNAL = 1.4; EST_HUMAN HIT: AI678443.1, EVALUE 1.70e+00; NT HIT: AL163252.2, EVALUE 4.40e+00
gtgtcaagccctgtgccaggcaaggaagtccaacaggaggcaaatgtggtccccaccttcaaggggggcagcggggtgaggggtgaaacagacaacagcgctgtcaggtgagtgctacgacccggcat

SEQ ID NO: 25899 - DNA, 155 bp, Homo sapiens
  MAP TO Z95114.19; EXPRESSED IN BONE MARROW, SIGNAL = 1.7; EXPRESSED IN HEART, SIGNAL = 1.5; EXPRESSED IN FETAL LIVER, SIGNAL =   2; EXPRESSED IN ADULT LIVER, SIGNAL = 1.5; EXPRESSED IN HELA, SIGNAL = 1.3; EXPRESSED IN BRAIN, SIGNAL = 1.7; EXPRESSED IN PLACENTA, SIGNAL = 1.6; NT HIT: AJ237609.1, EVALUE 8.90e-02; EST_HUMAN HIT: AU149053.1, EVALUE 5.30e-01; SWISSPROT HIT: P44621, EVALUE 6.90e-02
tcttaaccaggcagtcctctgaataaagacagggtctaagtccttccccaaaattgatcacctctctaatcagagcgaagagaggagatataaatagaagagaccattttctactccaaagctttcttttcaaaaaaaaaaaaaaaaattcagag

SEQ ID NO: 25900 - DNA, 529 bp, Homo sapiens
  MAP TO AL008723.8; EXPRESSED IN FETAL LIVER, SIGNAL = 2.5; EXPRESSED IN HELA, SIGNAL = 1.7; EXPRESSED IN BRAIN, SIGNAL = 2.6; EXPRESSED IN PLACENTA, SIGNAL = 1.8; EXPRESSED IN HEART, SIGNAL = 1.5; EXPRESSED IN BONE MARROW, SIGNAL = 3.1; EXPRESSED IN LUNG, SIGNAL = 1.6; NT HIT: AJ012609.1, EVALUE 8.50e-02; EST_HUMAN HIT: AA126735.1, EVALUE 2.00e-93; SWISSPROT HIT: O01635, EVALUE 1.50e+00
aatagagattccaaaacacacaataatcacaccatacacagatgagagggaaagcataaaactgctcgtgaatcacacacagttcccagtgagaaacagtccttacaaacgcggtagttctgcaaagcagcctcgaatgcagattcctctgtggacatcttatcctcttgtgtttttttgtattattattattacaaattacatggtgatggacagaagctcacagcaaaaagtaagagtaggcagcttaaaaaatcaggttgagttgctaaaaaccggtaactctagaaatctatgcttgaacttgtcactaccctgcatcttgtttctcagggacactctactcattgaaggacctgccagccataaccacagcaggatggggacagtgtttatcacaatgacctggggacccacggggttttcaggagcccttgacaccactgggggattgaatacacacacacacctgctttccacaccgagtgttcacacccaagtgcacacttctcacccctcggctcctcca

SEQ ID NO: 25901 - DNA, 175 bp, Homo sapiens
  MAP TO AC006427.13; EXPRESSED IN HELA, SIGNAL = 2.3; EXPRESSED IN PLACENTA, SIGNAL = 2.9; EXPRESSED IN BRAIN, SIGNAL =   4; EXPRESSED IN BONE MARROW, SIGNAL = 3.1; EXPRESSED IN HEART, SIGNAL = 1.5; EXPRESSED IN LUNG, SIGNAL = 2.8; EXPRESSED IN FETAL LIVER, SIGNAL = 3.9; EXPRESSED IN ADULT LIVER, SIGNAL = 2.3; NT HIT: Z77673.1, EVALUE 7.00e-03; EST_HUMAN HIT: AA196181.1, EVALUE 2.00e-74
actggatgcattatgatagatgttaatggactatcacaaacttagccaagtgtagtctcatttgtagctgctgtgccagatatggtgtctttactaaaggagattaacacagcttgagatatatcatatgtggctatcgaactaatgaatgtgttcttttccatatctacatgag

SEQ ID NO: 25902 - DNA, 133 bp, Homo sapiens
  MAP TO AL022312.7; EXPRESSED IN LUNG, SIGNAL = 1.8; EXPRESSED IN BONE MARROW, SIGNAL = 1.7; EXPRESSED IN FETAL LIVER, SIGNAL = 1.6; EXPRESSED IN BRAIN, SIGNAL = 1.6; EXPRESSED IN PLACENTA, SIGNAL = 1.9; EXPRESSED IN HEART, SIGNAL = 1.7; EXPRESSED IN ADULT LIVER, SIGNAL = 2.4; EXPRESSED IN HELA, SIGNAL = 1.8; NT HIT: AJ400877.1, EVALUE 1.20e+00; EST_HUMAN HIT: AW813563.1, EVALUE 5.00e-53; SWISSPROT HIT: O43909, EVALUE 1.40e+00
tccccctggaaccattctcagtccctggcccatggccctgccaaagacctcatcgttcccttcccaggttattacagcggctgggctcttctccatcaaatgcattctccacacaggtcctgctgaaagcccc

SEQ ID NO: 25903 - DNA, 140 bp, Homo sapiens
  MAP TO AC004624.6; EXPRESSED IN FETAL LIVER, SIGNAL = 1.3; EXPRESSED IN HELA, SIGNAL = 1.4; EXPRESSED IN BRAIN, SIGNAL = 1.5; EXPRESSED IN PLACENTA, SIGNAL = 1.2; EXPRESSED IN LUNG, SIGNAL = 1.7; EXPRESSED IN HEART, SIGNAL = 1.4; EST_HUMAN HIT: AW341561.1, EVALUE 4.70e-01; SWISSPROT HIT: O32434, EVALUE 4.00e+00; NT HIT: AB040460.1, EVALUE 4.90e+00
ggctttgctgcaatgctaagggtctcagaactgggcagagatggctcacacacagctcgtggccgcatccatcccaagggtgttagtgaggaagccaacctactcagggcattgttcgtgtaggtgtctttagtctcctt

SEQ ID NO: 25904 - DNA, 150 bp, Homo sapiens
  MAP TO AL031588.1; EXPRESSED IN FETAL LIVER, SIGNAL = 2.8; EXPRESSED IN ADULT LIVER, SIGNAL = 1.9; EXPRESSED IN BRAIN, SIGNAL = 2.9; EXPRESSED IN HELA, SIGNAL = 3.1; EXPRESSED IN PLACENTA, SIGNAL = 3.1; EXPRESSED IN BONE MARROW, SIGNAL = 2.4; EXPRESSED IN HEART, SIGNAL =   2; EXPRESSED IN LUNG, SIGNAL = 2.7; NT HIT: gi11418322, EVALUE 2.00e-79; EST_HUMAN HIT: AW602480.1, EVALUE 3.00e-79; SWISSPROT HIT: P17133, EVALUE 7.90e-01
ctcttcagcggtgagagcgtcgtgtcctggagtgacctgaacatcatcatctctgtgccctggtacctggggctcatgttccggacccggaaggaggacagcgttctgatggaggccaccagtggtgggcccaccagctttcgcctccag

SEQ ID NO: 25905 - DNA, 117 bp, Homo sapiens
  MAP TO AL049649.4; EXPRESSED IN ADULT LIVER, SIGNAL = 2.5; EXPRESSED IN FETAL LIVER, SIGNAL = 3.8; EXPRESSED IN BRAIN, SIGNAL = 4.7; EXPRESSED IN PLACENTA, SIGNAL = 3.7; EXPRESSED IN HELA, SIGNAL = 4.7; EXPRESSED IN HEART, SIGNAL = 3.7; EXPRESSED IN LUNG, SIGNAL = 4.1; EXPRESSED IN BONE MARROW, SIGNAL = 7.3; SWISSPROT HIT: Q9S3S1, EVALUE 9.30e+00; NT HIT: AF102993.1, EVALUE 6.50e-02; EST_HUMAN HIT: W78877.1, EVALUE 9.60e-02
tgccagagacagaggagtaaccagggaggtggaggagagctgaacatttgggcaagaggaaattaaacttggggaggatatgaggtgctggaggagatcctgcacatagcaggtgcc

SEQ ID NO: 25906 - DNA, 139 bp, Homo sapiens
  MAP TO AL023553.5; EXPRESSED IN LUNG, SIGNAL = 2.1; EXPRESSED IN HEART, SIGNAL = 3.7; EXPRESSED IN BONE MARROW, SIGNAL = 2.9; EXPRESSED IN ADULT LIVER, SIGNAL = 2.7; EXPRESSED IN FETAL LIVER, SIGNAL = 2.2; EXPRESSED IN BRAIN, SIGNAL = 3.3; EXPRESSED IN PLACENTA, SIGNAL = 3.9; EXPRESSED IN HELA, SIGNAL = 1.7; NT HIT: U87929.1, EVALUE 6.00e-18; EST_HUMAN HIT: BF679155.1, EVALUE 1.80e+00; SWISSPROT HIT: O07887, EVALUE 6.90e+00
tttgaggcccaggggggctgaggggaactggatgacatatccatcagctcttatgctcttcctcctttgttttgaaactgattttcattatgtcattatacgtgctcattttctgggtgagaagttaaaataatacctc

SEQ ID NO: 25907 - DNA, 119 bp, Homo sapiens
  MAP TO AL022327.17; EXPRESSED IN HEART, SIGNAL = 2.6; EXPRESSED IN LUNG, SIGNAL = 2.4; EXPRESSED IN BONE MARROW, SIGNAL = 4.4; EXPRESSED IN ADULT LIVER, SIGNAL = 3.1; EXPRESSED IN FETAL LIVER, SIGNAL = 4.8; EXPRESSED IN BRAIN, SIGNAL = 2.8; EXPRESSED IN PLACENTA, SIGNAL = 3.9; EXPRESSED IN HELA, SIGNAL = 2.9; SWISSPROT HIT: P25351, EVALUE 2.40e+00; NT HIT: AF316896.1, EVALUE 2.60e-01; EST_HUMAN HIT: BE963233.2, EVALUE 1.50e+00
agtgcagggcctccacgacccgccaggagagccctccacacccacacgtttaatttcccagtttcccaggaagctggccagtgggatcggggtacaggaggcaggagccagcgcccccc

SEQ ID NO: 25908 - DNA, 223 bp, Homo sapiens
  MAP TO AC007363.3; EXPRESSED IN FETAL LIVER, SIGNAL = 3.3; EXPRESSED IN HELA, SIGNAL = 3.7; EXPRESSED IN PLACENTA, SIGNAL = 6.4; EXPRESSED IN BRAIN, SIGNAL = 4.4; EXPRESSED IN LUNG, SIGNAL = 3.2; EXPRESSED IN HEART, SIGNAL = 3.2; EXPRESSED IN BONE MARROW, SIGNAL = 3.3; EXPRESSED IN ADULT LIVER, SIGNAL = 3.5; NT HIT: AJ242790.1, EVALUE 1.30e-01; EST_HUMAN HIT: BF438156.1, EVALUE 7.90e-01; SWISSPROT HIT: P15714, EVALUE 2.20e+00
gggccttgcatggaccactagtgatggtgccaggagtggaatcaaccctccatcccagacgtctggcagcaacaaaaacacttacaacaaaatcaatcgaggtggtggccttggggaaatcttttctctttttaaagtaaaacaagatcacaacttcctggtgagtggccttgagcttgctacttggcataaactgaactatgttatttcaagttgagaacaa

SEQ ID NO: 25909 - DNA, 588 bp, Homo sapiens; identical to SEQ ID NO: 9401
  MAP TO AC006427.13; EXPRESSED IN ADULT LIVER, SIGNAL = 9.4; EXPRESSED IN HELA, SIGNAL = 5.5; EXPRESSED IN PLACENTA, SIGNAL =  11; EXPRESSED IN BONE MARROW, SIGNAL = 3.6; EXPRESSED IN FETAL LIVER, SIGNAL = 6.3; EXPRESSED IN BRAIN, SIGNAL = 5.1; EXPRESSED IN HEART, SIGNAL = 3.5; EXPRESSED IN LUNG, SIGNAL = 5.7; NT HIT: U60822.1, EVALUE 2.00e-52; EST_HUMAN HIT: AW470791.1, EVALUE 1.00e-57; SWISSPROT HIT: P43681, EVALUE 6.80e-02

SEQ ID NO: 25910 - DNA, 124 bp, Homo sapiens
  MAP TO AL022329.9; EXPRESSED IN ADULT LIVER, SIGNAL = 2.6; EXPRESSED IN PLACENTA, SIGNAL = 3.6; EXPRESSED IN BONE MARROW, SIGNAL = 1.6; EXPRESSED IN FETAL LIVER, SIGNAL = 2.3; EXPRESSED IN BRAIN, SIGNAL = 1.9; EXPRESSED IN HELA, SIGNAL = 2.5; EXPRESSED IN HEART, SIGNAL = 2.1; EXPRESSED IN LUNG, SIGNAL = 2.5; NT HIT: AF216696.1, EVALUE 1.10e+00; EST_HUMAN HIT: BE391091.1, EVALUE 1.60e+00; SWISSPROT HIT: P54245, EVALUE 9.20e+00
tttgtggctgtccaaaaagatgctgcctcattcagtgcaccagctcatggaggctgagtgtcccactagggcttctagactccaacaaggataatggtggccttgggtgctgtatccattgctg

SEQ ID NO: 25911 - DNA, 75 bp, Homo sapiens
  MAP TO AC007719.1; EXPRESSED IN PLACENTA, SIGNAL = 1.9; EXPRESSED IN HELA, SIGNAL = 1.5; EXPRESSED IN BRAIN, SIGNAL = 4.4; EXPRESSED IN HEART, SIGNAL = 2.2; EXPRESSED IN BONE MARROW, SIGNAL = 2.9; EXPRESSED IN LUNG, SIGNAL = 2.7; EXPRESSED IN FETAL LIVER, SIGNAL = 2.9; EXPRESSED IN ADULT LIVER, SIGNAL = 3.4; NT HIT: AB017705.1, EVALUE 5.90e-01; EST_HUMAN HIT: BF692117.1, EVALUE 3.50e+00
  unsure 57
ttgaaatccgaatgtattgttctgagatccatgccgaggcacacctgggttttcacnaagaggtttgggtaggct

SEQ ID NO: 25912 - DNA, 90 bp, Homo sapiens
  MAP TO AC007286.18; EXPRESSED IN PLACENTA, SIGNAL = 3.2; EXPRESSED IN HELA, SIGNAL = 2.2; EXPRESSED IN BRAIN, SIGNAL = 1.9; EXPRESSED IN BONE MARROW, SIGNAL = 2.2; EXPRESSED IN LUNG, SIGNAL = 3.1; EXPRESSED IN HEART, SIGNAL = 1.9; EXPRESSED IN FETAL LIVER, SIGNAL = 3.9; EXPRESSED IN ADULT LIVER, SIGNAL = 4.4; NT HIT: gi11526156, EVALUE 2.90e+00; EST_HUMAN HIT: AI675416.1, EVALUE 1.00e-43; SWISSPROT HIT: P36285, EVALUE 9.50e+00
agccttgcccatgaagtcatgcctgtggctccactgagaaattcgattaagtattccaatactgctgtgaaacgaagtgatctgattccg

SEQ ID NO: 25913 - DNA, 316 bp, Homo sapiens
  MAP TO AL034406.1; EXPRESSED IN LUNG, SIGNAL = 2.3; EXPRESSED IN HEART, SIGNAL = 1.7; EXPRESSED IN BONE MARROW, SIGNAL = 1.8; EXPRESSED IN ADULT LIVER, SIGNAL =   4; EXPRESSED IN FETAL LIVER, SIGNAL = 2.2; EXPRESSED IN BRAIN, SIGNAL = 1.9; EXPRESSED IN PLACENTA, SIGNAL = 3.1; EXPRESSED IN HELA, SIGNAL = 1.8; EST_HUMAN HIT: BE156318.1, EVALUE 3.00e-63; SWISSPROT HIT: Q44045, EVALUE 2.00e+00; NT HIT: AL163202.2, EVALUE 8.00e-75
ggaactttctagagactcattgaatgggtttgaccaaaatgctgacagtgatatgcacaataaagtccaggctgaggtggtcttagatggagataaaaaacttgttgggaacgtgaataaaggtgactcttgctatgctttagcaaagagattggcagcattttgcccctgccctagagatctgtggaactttgaccttgagagagatgatttagggtatctggtgtaagaaatttctaagtagccaagcattcaagaggaagcagaccacaaaactttggaaattttgaagcctgatgatgcaatagaaaaatcc

SEQ ID NO: 25914 - DNA, 76 bp, Homo sapiens
  MAP TO AC007841.1; EXPRESSED IN LUNG, SIGNAL = 3.2; EXPRESSED IN FETAL LIVER, SIGNAL = 1.9; EXPRESSED IN ADULT LIVER, SIGNAL = 1.9; EXPRESSED IN HELA, SIGNAL = 1.8; EXPRESSED IN PLACENTA, SIGNAL = 1.8; EXPRESSED IN BRAIN, SIGNAL = 2.5; EXPRESSED IN HEART, SIGNAL = 1.9; EXPRESSED IN BONE MARROW, SIGNAL = 2.4; NT HIT: AL161587.2, EVALUE 2.40e+00; EST_HUMAN HIT: BF663319.1, EVALUE 2.30e-01
cacacaggctggtaactggcttcagtggtggttgggctgactcagcctgaagcaagaggaaagcaaatgtggttaa

SEQ ID NO: 25915 - DNA, 113 bp, Homo sapiens
  MAP TO AL031588.1; EXPRESSED IN HELA, SIGNAL = 1.3; EXPRESSED IN BRAIN, SIGNAL = 1.6; EXPRESSED IN PLACENTA, SIGNAL = 2.4; EXPRESSED IN HEART, SIGNAL = 1.6; EXPRESSED IN LUNG, SIGNAL = 1.5; EXPRESSED IN BONE MARROW, SIGNAL = 1.4; EXPRESSED IN ADULT LIVER, SIGNAL = 1.6; EXPRESSED IN FETAL LIVER, SIGNAL = 1.4; NT HIT: U52111.2, EVALUE 9.80e-01; SWISSPROT HIT: P02810, EVALUE 9.30e+00; EST_HUMAN HIT: BE148988.1, EVALUE 1.40e+00
gcatgagctggaagggctgttctgggttggctggggccaccaactcctctgagcagccgacggggggcaggaagggccaccttgtaacagtcagcaaagccgccagggccctc

SEQ ID NO: 25916 - DNA, 103 bp, Homo sapiens
  MAP TO AP000189.1; EXPRESSED IN ADULT LIVER, SIGNAL = 3.3; EXPRESSED IN BRAIN, SIGNAL = 3.9; EXPRESSED IN PLACENTA, SIGNAL = 2.4; EXPRESSED IN HELA, SIGNAL = 3.3; EXPRESSED IN LUNG, SIGNAL = 4.2; EXPRESSED IN HEART, SIGNAL = 2.7; EXPRESSED IN BONE MARROW, SIGNAL = 4.6; EXPRESSED IN FETAL LIVER, SIGNAL = 3.5; NT HIT: AL163210.2, EVALUE 4.00e-09; EST_HUMAN HIT: C16635.1, EVALUE 9.00e-11
gaaggatgcggccaaccttgctggaggaaggtgccctgagccaaagaatgggagtggcctctagaagctgggaaaggcaaggaaatggattctccctggaggc

SEQ ID NO: 25917 - DNA, 136 bp, Homo sapiens
  MAP TO AL079295.1; EXPRESSED IN HELA, SIGNAL = 1.8; EXPRESSED IN PLACENTA, SIGNAL = 1.8; EXPRESSED IN HEART, SIGNAL = 1.6; EXPRESSED IN LUNG, SIGNAL = 1.3; NT HIT: gi11418039, EVALUE 5.00e-71; EST_HUMAN HIT: BF058283.1, EVALUE 7.00e-71; SWISSPROT HIT: O74421, EVALUE 2.10e-01
cggtctggccggcatagtcttgagtgtgtggcaccccatactctgtgggaattccattctgcggaggtggtggaaatgggatggtagtaaaaggctgaaccattgcgtcaggagttgttgtcggctcctggttacc

SEQ ID NO: 25918 - DNA, 183 bp, Homo sapiens
  MAP TO AC006548.19; EXPRESSED IN BONE MARROW, SIGNAL = 6.8; EXPRESSED IN LUNG, SIGNAL = 3.1; EXPRESSED IN HEART, SIGNAL = 3.9; EXPRESSED IN FETAL LIVER, SIGNAL = 5.3; EXPRESSED IN ADULT LIVER, SIGNAL = 3.8; EXPRESSED IN PLACENTA, SIGNAL = 4.8; EXPRESSED IN BRAIN, SIGNAL = 6.5; EXPRESSED IN HELA, SIGNAL = 3.6; NT HIT: AL445067.1, EVALUE 1.70e+00; EST_HUMAN HIT: H55641.1, EVALUE 2.00e-38; SWISSPROT HIT: Q09624, EVALUE 3.00e+00
agcatcagcgagaccctaagcagcactggggagggcgtgggaggcatcaacacatggatcagctgtgatgcatgtggatctccttcctctgtcgtagcttcctccggcaagtacacccagcatggtggagggaatgccagccggcctgctgagtccatgcatgagggagtctgttctttcctg

SEQ ID NO: 25919 - DNA, 235 bp, Homo sapiens
  MAP TO AL022318.2; EXPRESSED IN FETAL LIVER, SIGNAL = 4.4; EXPRESSED IN PLACENTA, SIGNAL = 4.7; EXPRESSED IN HEART, SIGNAL = 2.3; EXPRESSED IN LUNG, SIGNAL = 3.6; EXPRESSED IN BONE MARROW, SIGNAL = 2.3; EXPRESSED IN ADULT LIVER, SIGNAL = 4.5; EXPRESSED IN BRAIN, SIGNAL =   2; EXPRESSED IN HELA, SIGNAL = 2.4; EST_HUMAN HIT: BF528536.1, EVALUE 8.40e-01; NT HIT: X74773.1, EVALUE 1.40e-01; SWISSPROT HIT: P15792, EVALUE 1.10e+00
gtcaccgcgccatgggaacacgctaccatgggaagggagctgtgagacgcgcagggaggctccagacaggctggcctgggacaccagccgctgcccttccataacatggggacaagagagggcaaaagttcagcccaacacggaggatcttcgggcaggagatggggaagaaggagaagcaggaaggaaagagctcagtgtgggggcgcgcatggcatcccggtgggacatctga

SEQ ID NO: 25920 - DNA, 230 bp, Homo sapiens
  MAP TO AC004032.7; EXPRESSED IN HELA, SIGNAL = 1.5; EXPRESSED IN PLACENTA, SIGNAL = 1.3; EXPRESSED IN BRAIN, SIGNAL = 1.8; EXPRESSED IN HEART, SIGNAL = 1.6; EXPRESSED IN BONE MARROW, SIGNAL = 1.9; EXPRESSED IN LUNG, SIGNAL = 1.4; EXPRESSED IN FETAL LIVER, SIGNAL = 1.5; NT HIT: Y00508.1, EVALUE 2.00e-03; EST_HUMAN HIT: BF312407.1, EVALUE 3.00e-03; SWISSPROT HIT: P52734, EVALUE 6.20e-01
taaggagctcccagcttggtgcccaggagggaggctggtcgagtcggaaggtccagggaggcttcttggagggcagggccctggggctgaggatgaaggatgaagaggagggaaaagggctccgggcctacaggacacactgtgggctttggtctcagagaacctggaagaaggctatcctggctgcagcctggtggtgaggggcaacagctaggcagagatggagaggg

SEQ ID NO: 25921 - DNA, 93 bp, Homo sapiens
  MAP TO AC005300.10; EXPRESSED IN FETAL LIVER, SIGNAL = 9.8; EXPRESSED IN ADULT LIVER, SIGNAL =  16; EXPRESSED IN HELA, SIGNAL = 7.8; EXPRESSED IN PLACENTA, SIGNAL =  19; EXPRESSED IN BRAIN, SIGNAL =  11; EXPRESSED IN BONE MARROW, SIGNAL = 9.3; EXPRESSED IN HEART, SIGNAL = 5.4; EXPRESSED IN LUNG, SIGNAL =   8; EST_HUMAN HIT: BF568478.1, EVALUE 2.00e-45; SWISSPROT HIT: P14974, EVALUE 5.50e+00; NT HIT: gi11526291, EVALUE 1.00e-45
gtggtctttagccgccgctccaggtccaccatgtcaagcagaggaaaggccatccgcagctcatccacggtgacgacatttcggaagcccagt

SEQ ID NO: 25922 - DNA, 96 bp, Homo sapiens
  MAP TO AL022318.2; EXPRESSED IN LUNG, SIGNAL =  18; EXPRESSED IN FETAL LIVER, SIGNAL =  16; EXPRESSED IN BRAIN, SIGNAL =  23; EXPRESSED IN PLACENTA, SIGNAL =  16; EXPRESSED IN BONE MARROW, SIGNAL =  16; EXPRESSED IN HEART, SIGNAL = 7.4; EXPRESSED IN ADULT LIVER, SIGNAL =  15; EXPRESSED IN HELA, SIGNAL =  14; NT HIT: AF165520.1, EVALUE 3.00e-19; EST_HUMAN HIT: BF686237.1, EVALUE 4.00e-19; SWISSPROT HIT: Q10571, EVALUE 3.20e+00
catctttgccgcccgcctctactacttccagtgtccatattaccagcaggggctccacaggctgagtcaggaaggggcctccatggagttcgtggg

SEQ ID NO: 25923 - DNA, 188 bp, Homo sapiens
  MAP TO AC007313.3; EXPRESSED IN LUNG, SIGNAL = 2.8; EXPRESSED IN HEART, SIGNAL = 2.8; EXPRESSED IN FETAL LIVER, SIGNAL = 8.2; EXPRESSED IN ADULT LIVER, SIGNAL = 4.2; EXPRESSED IN HELA, SIGNAL = 3.1; EXPRESSED IN PLACENTA, SIGNAL = 8.7; EXPRESSED IN BRAIN, SIGNAL = 2.1; EXPRESSED IN BONE MARROW, SIGNAL = 2.5; NT HIT: AF025311.1, EVALUE 1.70e+00; SWISSPROT HIT: Q90643, EVALUE 1.70e+00; EST_HUMAN HIT: BE465050.1, EVALUE 6.50e-01
ccagacatacgctcaggtggcctagaccccagaattccttgcccagattgccctgatctgctccagggataggcagatatctttcctggattctgtcttccaagggtaggtctcactactagcatggccaccctggggcctaagagtaggccaagaaacagctgtttgggagtggagagagcagtcat

SEQ ID NO: 25924 - DNA, 93 bp, Homo sapiens
  MAP TO AL035681.13; EXPRESSED IN LUNG, SIGNAL = 6.2; EXPRESSED IN HEART, SIGNAL = 2.6; EXPRESSED IN BONE MARROW, SIGNAL = 6.5; EXPRESSED IN ADULT LIVER, SIGNAL = 4.8; EXPRESSED IN FETAL LIVER, SIGNAL =  10; EXPRESSED IN BRAIN, SIGNAL = 5.3; EXPRESSED IN PLACENTA, SIGNAL = 6.4; EXPRESSED IN HELA, SIGNAL = 6.9; EST_HUMAN HIT: BF034775.1, EVALUE 2.00e-45; NT HIT: gi11418177, EVALUE 1.00e-45; SWISSPROT HIT: P46060, EVALUE 4.00e-11
acggtttctgccagccacaaagaccttcagggccagaggcttgccttgggcactggatttccggtgacattcggtcagagctgcagccaggat

SEQ ID NO: 25925 - DNA, 121 bp, Homo sapiens
  MAP TO AP000233.1; EXPRESSED IN HELA, SIGNAL = 2.6; EXPRESSED IN PLACENTA, SIGNAL =  27; EXPRESSED IN LUNG, SIGNAL = 3.4; EXPRESSED IN HEART, SIGNAL = 5.2; EXPRESSED IN BONE MARROW, SIGNAL =   2; EXPRESSED IN ADULT LIVER, SIGNAL =   2; EXPRESSED IN FETAL LIVER, SIGNAL = 5.1; NT HIT: AF052051.1, EVALUE 7.00e-36; EST_HUMAN HIT: AV753828.1, EVALUE 1.00e-35; SWISSPROT HIT: P73098, EVALUE 6.20e-01
acacacaaggagtggtgagggaggaaggggacaccagcctagccagccagatcagccgaatcaaccctggagatccatggggtggcagatgtcccagccagattggcctcacatccatatt

SEQ ID NO: 25926 - DNA, 576 bp, Homo sapiens; identical to SEQ ID NO: 9425
  MAP TO AC007841.1; EXPRESSED IN PLACENTA, SIGNAL = 6.4; EXPRESSED IN BONE MARROW, SIGNAL =  18; EXPRESSED IN BRAIN, SIGNAL = 9.9; EXPRESSED IN HELA, SIGNAL = 9.4; EXPRESSED IN HEART, SIGNAL = 5.1; EXPRESSED IN LUNG, SIGNAL =   5; EXPRESSED IN ADULT LIVER, SIGNAL = 7.3; EXPRESSED IN FETAL LIVER, SIGNAL =  11; NT HIT: AF176815.1, EVALUE 2.00e-21; EST_HUMAN HIT: AI679327.1, EVALUE 7.00e-19; SWISSPROT HIT: P39188, EVALUE 1.00e-03

SEQ ID NO: 25927 - DNA, 238 bp, Homo sapiens
  MAP TO AC004624.6; EXPRESSED IN HELA, SIGNAL = 2.3; EXPRESSED IN PLACENTA, SIGNAL = 3.3; EXPRESSED IN BRAIN, SIGNAL = 2.2; EXPRESSED IN HEART, SIGNAL = 1.9; EXPRESSED IN BONE MARROW, SIGNAL = 2.2; EXPRESSED IN LUNG, SIGNAL = 2.4; EXPRESSED IN FETAL LIVER, SIGNAL = 3.7; EXPRESSED IN ADULT LIVER, SIGNAL = 2.3; NT HIT: gi11968117, EVALUE 1.40e-01; EST_HUMAN HIT: BF593558.1, EVALUE 2.10e-01; SWISSPROT HIT: P51610, EVALUE 1.50e+00
gattccctcggtggagacgctgtgtgggatgggaaggaatgatcggtaaaccacccagggaattaattctgcaggtgcggtgccaaggagggtaactaagagtctgggtttgcccaggactgaggggtttcctgaggctcacaccaggaaagtcctgggcaaaccgggtctgtcggtcaccctggtaccacgtgctgagtggggttctaagagggcagggcggatgctggtgcagtgg

SEQ ID NO: 25928 - DNA, 229 bp, Homo sapiens
  MAP TO AP000346.1; EXPRESSED IN LUNG, SIGNAL = 2.4; EXPRESSED IN BONE MARROW, SIGNAL = 3.1; EXPRESSED IN FETAL LIVER, SIGNAL = 2.3; EXPRESSED IN ADULT LIVER, SIGNAL = 1.9; EXPRESSED IN PLACENTA, SIGNAL = 3.1; EXPRESSED IN BRAIN, SIGNAL = 2.8; EXPRESSED IN HELA, SIGNAL = 2.2; EXPRESSED IN HEART, SIGNAL =   2; NT HIT: X51755.1, EVALUE 1.00e-08; EST_HUMAN HIT: BE745739.1, EVALUE 2.10e-01; SWISSPROT HIT: P30744, EVALUE 7.90e-01
ggctgtgacccaggcacagggcaggggggtggccagtatcccagtagtgtcccccagtagtgtctctgtgcctgttctctatctgaggcaggtgccgcccacagccttggagtcaccccagcatatgtccccctctctgaagctgttggtgctgatggcaacgctgggcccagtaggtcccagcaactccctgagtgacacatcccctcaggcagctgtgccgtgtggc

SEQ ID NO: 25929 - DNA, 348 bp, Homo sapiens
  MAP TO AL021707.2; EXPRESSED IN PLACENTA, SIGNAL = 6.4; EXPRESSED IN HELA, SIGNAL =   4; EXPRESSED IN LUNG, SIGNAL = 2.4; EXPRESSED IN HEART, SIGNAL = 2.6; EXPRESSED IN BONE MARROW, SIGNAL = 1.4; EXPRESSED IN FETAL LIVER, SIGNAL = 7.9; EXPRESSED IN ADULT LIVER, SIGNAL = 7.9; NT HIT: gi9507008, EVALUE 8.50e-01; EST_HUMAN HIT: BF026399.1, EVALUE 5.00e+00; SWISSPROT HIT: P20784, EVALUE 3.10e+00
tgatcattggaagccaggtgctcccccttcacttcctgtgtgcggagcacgctcgccctgggagtttcactagaaagaaggttgccatgggccagtgggacagcttgtatctcaagtgcacgcggatgccccagaatcccaggatctcagctgagctgtttgtggattattagatctgacttaaaaggtagctaatccagacccttcctcatctgtaatacatggatgacagctcccagctgtagtgttatgagaattagtgcggtcatgagtaaggtgcccagttaaagcccgagaagtaaagcagctgggccaaggtctagcaggcaactgaaggggagagccagg

SEQ ID NO: 25930 - DNA, 184 bp, Homo sapiens
  MAP TO Z83844.5; EXPRESSED IN HELA, SIGNAL = 1.5; EXPRESSED IN BRAIN, SIGNAL = 1.7; EXPRESSED IN PLACENTA, SIGNAL = 2.1; EXPRESSED IN HEART, SIGNAL = 1.9; EXPRESSED IN LUNG, SIGNAL = 1.7; EXPRESSED IN BONE MARROW, SIGNAL =   2; SWISSPROT HIT: P32017, EVALUE 4.50e-01; NT HIT: gi7661923, EVALUE 1.10e-01; EST_HUMAN HIT: BF568097.1, EVALUE 6.00e-29
agccttccagggacgctgggcttgtatccgtgtggagctggaagcctgcgggctcctcactgccttccaccagccctgccccagcttccaggtcccactgaccacccttctccctcgtaggttcaggctcttcgggcccagctggaggcgtggcgtctccaaggggaggctcctcagagtgcac

SEQ ID NO: 25931 - DNA, 138 bp, Homo sapiens
  MAP TO AC007262.4; EXPRESSED IN HELA, SIGNAL = 3.4; EXPRESSED IN PLACENTA, SIGNAL = 8.2; EXPRESSED IN LUNG, SIGNAL = 4.2; EXPRESSED IN HEART, SIGNAL =   3; EXPRESSED IN FETAL LIVER, SIGNAL = 7.8; EXPRESSED IN ADULT LIVER, SIGNAL = 7.9; SWISSPROT HIT: Q13183, EVALUE 9.10e+00; NT HIT: L78810.1, EVALUE 1.00e-06; EST_HUMAN HIT: BF029022.1, EVALUE 4.60e-01
ctcagaccaattccagtaccaactgtatcagttcagttattctgggaagcagatgctgagacagcgttaggagtgcaagtggttcattgaaagataacatctgtgaaagataaagggggagagccccagactgtgcta

SEQ ID NO: 25932 - DNA, 217 bp, Homo sapiens
  MAP TO AC007363.3; EXPRESSED IN FETAL LIVER, SIGNAL =   2; EXPRESSED IN BRAIN, SIGNAL = 2.9; EXPRESSED IN PLACENTA, SIGNAL = 1.8; EXPRESSED IN ADULT LIVER, SIGNAL = 2.2; EXPRESSED IN HELA, SIGNAL = 1.7; EXPRESSED IN BONE MARROW, SIGNAL =   3; EXPRESSED IN HEART, SIGNAL = 1.6; EXPRESSED IN LUNG, SIGNAL = 3.1; NT HIT: M81890.1, EVALUE 3.30e-02; EST_HUMAN HIT: N83909.1, EVALUE 7.70e-01; SWISSPROT HIT: P39529, EVALUE 6.20e+00
agaagtttttgctctctgatctctgactccctctctcagcttctgcaacctcttgcatggagaggtcatcagccagagatcttggttctcaatcagctcctttgaaaagagagcttggatgcccagtaacccaatttgaagtggctgagtagttgtgtctctggggctgatgtctgcctccgtggacttggtgtctgtcccatgattaagtcctcta

SEQ ID NO: 25933 - DNA, 152 bp, Homo sapiens
  MAP TO AC004032.7; EXPRESSED IN PLACENTA, SIGNAL = 1.3; EXPRESSED IN HEART, SIGNAL = 1.5; EXPRESSED IN FETAL LIVER, SIGNAL =   2; EXPRESSED IN ADULT LIVER, SIGNAL = 1.8; EXPRESSED IN BRAIN, SIGNAL = 1.6; EXPRESSED IN HELA, SIGNAL =   2; EXPRESSED IN BONE MARROW, SIGNAL = 2.3; EXPRESSED IN LUNG, SIGNAL = 1.9; NT HIT: gi11417901, EVALUE 1.00e-80; EST_HUMAN HIT: BF530976.1, EVALUE 2.00e-80; SWISSPROT HIT: P14380, EVALUE 4.00e+00
aaaggagagaaaacactgctgtcgaacattccaactccttcccacagagcagagctggacacgtcctcacgtccatcgcagagaggggcggcttccagcaggagaagagagaactcaagtggaagggaactgaaggctgagcactgtgtttg

SEQ ID NO: 25934 - DNA, 202 bp, Homo sapiens
  MAP TO AB016897.1; EXPRESSED IN PLACENTA, SIGNAL =   3; EXPRESSED IN HEART, SIGNAL = 1.6; EXPRESSED IN ADULT LIVER, SIGNAL = 2.7; EXPRESSED IN FETAL LIVER, SIGNAL = 2.7; EXPRESSED IN BRAIN, SIGNAL = 1.4; EXPRESSED IN HELA, SIGNAL = 2.6; EXPRESSED IN BONE MARROW, SIGNAL = 1.7; EXPRESSED IN LUNG, SIGNAL = 2.2; SWISSPROT HIT: P17618, EVALUE 5.70e-01; NT HIT: AB011399.1, EVALUE 1.00e-110; EST_HUMAN HIT: AU119467.1, EVALUE 9.00e-19
atgtttgaagccaacatgaaaatcttgaaagcagaaagtgggaacgagttgccgtgtacaagagaacccaaaaggactgatggctgtcttctcctcagcaatgatggaagtcagagggcagttgatacggtttggctgtttccccacccaaatctcatcttggattcccactgttgcgggagggacctggtgggcggtaatt

SEQ ID NO: 25935 - DNA, 139 bp, Homo sapiens
  MAP TO AC002472.3; EXPRESSED IN PLACENTA, SIGNAL = 1.2; EXPRESSED IN LUNG, SIGNAL = 1.2; EXPRESSED IN HEART, SIGNAL = 2.1; SWISSPROT HIT: Q10392, EVALUE 4.70e-01; NT HIT: AB002059.1, EVALUE 8.00e-73; EST_HUMAN HIT: BE620507.1, EVALUE 3.00e-64
aaaagcaggaggaagaggcgacggcggcctgtggacgtcttgcaggggtccccgaagccaagcagggtcccaaggccgattcagactccgacctagagacggaaggtgctcggggcaggggccaggcccgtctcctccc

SEQ ID NO: 25936 - DNA, 228 bp, Homo sapiens
  MAP TO AP000352.2; EXPRESSED IN BONE MARROW, SIGNAL = 3.5; EXPRESSED IN LUNG, SIGNAL = 3.5; EXPRESSED IN HEART, SIGNAL = 2.7; EXPRESSED IN ADULT LIVER, SIGNAL = 5.3; EXPRESSED IN FETAL LIVER, SIGNAL = 4.4; EXPRESSED IN HELA, SIGNAL = 3.5; EXPRESSED IN PLACENTA, SIGNAL = 4.7; EXPRESSED IN BRAIN, SIGNAL = 4.4; EST_HUMAN HIT: BF352754.1, EVALUE 8.10e-01; NT HIT: gi11417862, EVALUE 1.00e-85; SWISSPROT HIT: Q9Y6J0, EVALUE 2.00e-27
aaggcttaccctgctgtgacacttctgctgtctcccaccccgcactgtcaggtcattgactgcagcatggctgtgcaggaggaggccaaggagccccacgtctcttcagtgctaccctggatcattctacaccggatcatctggcaggaggaagacaccttccattctctgtgccaccagcagcagctccaaaacccagcggaggaaggtgcacaggcagtgggtgca

SEQ ID NO: 25937 - DNA, 98 bp, Homo sapiens
  MAP TO AP000189.1; EXPRESSED IN LUNG, SIGNAL = 1.9; EXPRESSED IN BONE MARROW, SIGNAL =   3; EXPRESSED IN ADULT LIVER, SIGNAL =   3; EXPRESSED IN FETAL LIVER, SIGNAL = 1.9; EXPRESSED IN BRAIN, SIGNAL = 2.4; EXPRESSED IN PLACENTA, SIGNAL =   3; EXPRESSED IN HEART, SIGNAL = 1.7; EXPRESSED IN HELA, SIGNAL = 1.9; NT HIT: AJ001261.1, EVALUE 8.20e-01; EST_HUMAN HIT: BF092395.1, EVALUE 1.20e+00
tgacacaaaatggcagcaaacagtggaagatggtagtcagagaaggcaacagagttctcaggaaatggagtccagaagttgtagaatttggactgtgg

SEQ ID NO: 25938 - DNA, 185 bp, Homo sapiens
  MAP TO AP000352.2; EXPRESSED IN PLACENTA, SIGNAL = 2.3; EXPRESSED IN BRAIN, SIGNAL = 2.3; EXPRESSED IN HELA, SIGNAL = 2.2; EXPRESSED IN HEART, SIGNAL =   2; EXPRESSED IN LUNG, SIGNAL =   2; EXPRESSED IN BONE MARROW, SIGNAL = 2.7; EXPRESSED IN FETAL LIVER, SIGNAL = 2.6; EXPRESSED IN ADULT LIVER, SIGNAL = 2.5; NT HIT: AF240786.1, EVALUE 2.00e-95; EST_HUMAN HIT: AV708741.1, EVALUE 5.00e-91; SWISSPROT HIT: P30712, EVALUE 5.00e-27
gtgttggggccactcattggggtccaggtgcccgaggagaaggtggaacgcaacaggactgccatagaccaggccctgcaatggctggaggacaagttcctgggggacaggcccttcctcgctggccagcaggtgacactggctgatctcatggccctggaggagctgatgcaggtgtgagctca

SEQ ID NO: 25939 - DNA, 178 bp, Homo sapiens
  MAP TO AC008022.1; EXPRESSED IN BONE MARROW, SIGNAL = 2.2; EXPRESSED IN HEART, SIGNAL = 1.3; EXPRESSED IN FETAL LIVER, SIGNAL = 1.7; EXPRESSED IN PLACENTA, SIGNAL = 1.7; EXPRESSED IN HELA, SIGNAL = 2.7; EXPRESSED IN BRAIN, SIGNAL = 1.7; NT HIT: gi7662165, EVALUE 1.00e-01; EST_HUMAN HIT: BE171198.1, EVALUE 1.60e-01
  unsure 85
  unsure 87
  unsure 156
agaaggtcctgcccgttcccttggttgctgggccatctgggtccctgtcactggggcctctgttctgaaggtatctgctgacagnanagctgcagtgggtggcagaggaggaggaggtaatttggtcccatcttggtatgatgtcctctgcgtcancgagtcattgtcagacagttgc

SEQ ID NO: 25940 - DNA, 136 bp, Homo sapiens
  MAP TO AP000233.1; EXPRESSED IN BRAIN, SIGNAL = 5.4; EXPRESSED IN PLACENTA, SIGNAL = 9.4; EXPRESSED IN HELA, SIGNAL = 4.6; EXPRESSED IN HEART, SIGNAL = 3.3; EXPRESSED IN LUNG, SIGNAL = 5.4; EXPRESSED IN BONE MARROW, SIGNAL = 5.3; EXPRESSED IN ADULT LIVER, SIGNAL = 7.5; EXPRESSED IN FETAL LIVER, SIGNAL = 6.5; NT HIT: AJ271735.1, EVALUE 6.00e-49; EST_HUMAN HIT: AA777621.1, EVALUE 9.00e-52; SWISSPROT HIT: P21164, EVALUE 7.00e+00
gacctccttagcctggatttcattgtctatatcattatcagcattttggtcaaagccattcaacaagtctctagggagtaccaaactttcccacattttcctgtcttcttttgagccttccaaactgttccaacct

SEQ ID NO: 25941 - DNA, 190 bp, Homo sapiens
  MAP TO AL022329.9; EXPRESSED IN HEART, SIGNAL = 9.6; SWISSPROT HIT: P11531, EVALUE 1.10e-01; NT HIT: D84278.1, EVALUE 2.00e-03; EST_HUMAN HIT: BE966235.2, EVALUE 6.60e-01
atttgctgatgaattggatgtagggggtggtggtggcaggggcgtggcgaaagagtggaatcactatgattattcattttttggcttaagcaactgggaggatgattttactcatttttttgataaagaagactgggagaggagcccgtttggctggagtacagaggatgtggaagttaagggtttcatt

SEQ ID NO: 25942 - DNA, 106 bp, Homo sapiens
  MAP TO AC008022.1; EXPRESSED IN LUNG, SIGNAL = 2.1; EXPRESSED IN HEART, SIGNAL = 2.1; EXPRESSED IN PLACENTA, SIGNAL = 2.7; EXPRESSED IN BONE MARROW, SIGNAL = 3.7; EXPRESSED IN ADULT LIVER, SIGNAL = 1.9; EXPRESSED IN FETAL LIVER, SIGNAL = 3.1; EXPRESSED IN BRAIN, SIGNAL = 2.4; EXPRESSED IN HELA, SIGNAL = 2.7; SWISSPROT HIT: P29126, EVALUE 9.40e+00; NT HIT: AJ006519.1, EVALUE 2.30e-01; EST_HUMAN HIT: AV655628.1, EVALUE 3.40e-01
cgattgtcctgcccttgccactggctcctatgctgtttcctcttcttccgattcttccattgggtccccagtgacctctgactcctatcattccttgcatatgggc

SEQ ID NO: 25943 - DNA, 137 bp, Homo sapiens
  MAP TO AC009266.1; EXPRESSED IN BONE MARROW, SIGNAL = 4.2; EXPRESSED IN LUNG, SIGNAL = 2.9; EXPRESSED IN HEART, SIGNAL = 2.4; EXPRESSED IN FETAL LIVER, SIGNAL = 3.3; EXPRESSED IN ADULT LIVER, SIGNAL = 4.2; EXPRESSED IN PLACENTA, SIGNAL = 3.7; EXPRESSED IN HELA, SIGNAL = 2.6; EXPRESSED IN BRAIN, SIGNAL = 2.6; NT HIT: AF195953.1, EVALUE 3.10e-01; EST_HUMAN HIT: BE719392.1, EVALUE 4.60e-01; SWISSPROT HIT: P23015, EVALUE 6.90e+00
ctttggccagagagaaatcttctttactggttactattcgatcatatgagaagtcagggcaataagtcattctaccatagatctcctgagacaaatcaaatttaacagagtcatggatgtaatatacgtatgaaatt

SEQ ID NO: 25944 - DNA, 99 bp, Homo sapiens
  MAP TO AP000352.2; EXPRESSED IN ADULT LIVER, SIGNAL =  12; EXPRESSED IN FETAL LIVER, SIGNAL = 3.1; EXPRESSED IN PLACENTA, SIGNAL = 2.9; EXPRESSED IN HELA, SIGNAL = 3.9; EXPRESSED IN BRAIN, SIGNAL = 4.1; EXPRESSED IN HEART, SIGNAL = 3.3; EXPRESSED IN LUNG, SIGNAL =   3; EXPRESSED IN BONE MARROW, SIGNAL = 3.2; NT HIT: AF240786.1, EVALUE 4.00e-49; EST_HUMAN HIT: BF570048.1, EVALUE 6.00e-49; SWISSPROT HIT: P30046, EVALUE 1.00e-12
tttgcccaggatggaggcagcggcggcgcagagtcgtttctccagccccgcgggcactcggttggcgggcaaattcgtgtccagctccaggaacggcat

SEQ ID NO: 25945 - DNA, 146 bp, Homo sapiens
  MAP TO AL021392.5; EXPRESSED IN PLACENTA, SIGNAL =  22; EXPRESSED IN BRAIN, SIGNAL = 4.1; EXPRESSED IN HELA, SIGNAL =  11; EXPRESSED IN BONE MARROW, SIGNAL = 3.7; EXPRESSED IN HEART, SIGNAL = 8.6; EXPRESSED IN LUNG, SIGNAL =  10; EXPRESSED IN ADULT LIVER, SIGNAL =  20; EXPRESSED IN FETAL LIVER, SIGNAL =  22; SWISSPROT HIT: P20785, EVALUE 6.90e+00; NT HIT: AF067253.1, EVALUE 5.00e-03; EST_HUMAN HIT: BE564998.1, EVALUE 4.90e-01
tcatttagcctggcgtggggttgaacactgtgactgtgactagatagttgttggtggttttatgtagcccaccaaggagaaaacattttttgaaaattttttgaagtcagaagatagtgaaattcaaatagctgccagttttgaat

SEQ ID NO: 25946 - DNA, 542 bp, Homo sapiens; identical to SEQ ID NO: 9461
  MAP TO AL022318.2; EXPRESSED IN FETAL LIVER, SIGNAL = 4.2; EXPRESSED IN ADULT LIVER, SIGNAL =   4; EXPRESSED IN PLACENTA, SIGNAL = 4.6; EXPRESSED IN HELA, SIGNAL =   5; EXPRESSED IN BRAIN, SIGNAL = 3.4; EXPRESSED IN LUNG, SIGNAL = 3.2; EXPRESSED IN HEART, SIGNAL = 1.6; EXPRESSED IN BONE MARROW, SIGNAL = 2.7; NT HIT: gi9635487, EVALUE 0.00e+00; EST_HUMAN HIT: AA149793.1, EVALUE 4.00e-85; SWISSPROT HIT: P11227, EVALUE 8.00e-30

SEQ ID NO: 25947 - DNA, 173 bp, Homo sapiens
  MAP TO AC007282.2; EXPRESSED IN HELA, SIGNAL = 2.1; EXPRESSED IN BRAIN, SIGNAL = 1.3; EXPRESSED IN PLACENTA, SIGNAL = 3.6; EXPRESSED IN HEART, SIGNAL = 2.8; EXPRESSED IN LUNG, SIGNAL = 1.6; EXPRESSED IN FETAL LIVER, SIGNAL = 1.6; EXPRESSED IN ADULT LIVER, SIGNAL = 1.6; NT HIT: Z77918.1, EVALUE 6.00e-31; EST_HUMAN HIT: W22618.1, EVALUE 9.00e-37; SWISSPROT HIT: Q02910, EVALUE 2.60e-01
acgctgggttcccaacaggccactgacccgtatgggtccacagcggggtttggggactcctgtggtaaagtattgtttctgggtgtgtctatgagggtgttgccagaggagattgacgtttgagtcagtggactgggagaggaagacccaccctcaatgtaggtgggcaccat

SEQ ID NO: 25948 - DNA, 85 bp, Homo sapiens
  MAP TO AC007092.4; EXPRESSED IN HEART, SIGNAL = 1.6; EXPRESSED IN BONE MARROW, SIGNAL = 1.5; EXPRESSED IN LUNG, SIGNAL = 1.3; EXPRESSED IN FETAL LIVER, SIGNAL = 2.2; EXPRESSED IN PLACENTA, SIGNAL = 2.1; EXPRESSED IN HELA, SIGNAL = 1.7; EXPRESSED IN BRAIN, SIGNAL = 1.5
tctcatacaactcaaccaaaaggaagaagaataagaagaaggaagaggaagaggaggaggaggagaaggagaccatttttctatt

SEQ ID NO: 25949 - DNA, 233 bp, Homo sapiens
  MAP TO AC009290.1; EXPRESSED IN BRAIN, SIGNAL = 2.2; EXPRESSED IN PLACENTA, SIGNAL = 3.2; EXPRESSED IN HELA, SIGNAL = 1.7; EXPRESSED IN BONE MARROW, SIGNAL = 2.7; EXPRESSED IN LUNG, SIGNAL = 2.5; EXPRESSED IN HEART, SIGNAL = 1.3; EXPRESSED IN FETAL LIVER, SIGNAL = 2.8; EXPRESSED IN ADULT LIVER, SIGNAL = 2.4; NT HIT: L41825.1, EVALUE 2.00e-93; EST_HUMAN HIT: BE178834.1, EVALUE 1.00e-61; SWISSPROT HIT: P10267, EVALUE 4.00e-21
aattggcctggcaatcattaacaaaataagccatttgaacagattggtgtaatgccactccggcagtggtggccagtgccgtgactgtaattaggcccatgatcacagcaattaaagtaacaacaaatctcttagatcttttgagaatttgttttaacacttcattaattaaatgtactgagggggaagattcccaaggtctgggtaaagttactggtatccagattccttct

SEQ ID NO: 25950 - DNA, 109 bp, Homo sapiens
  MAP TO AL031587.3; EXPRESSED IN HELA, SIGNAL = 2.6; EXPRESSED IN PLACENTA, SIGNAL = 6.8; EXPRESSED IN BRAIN, SIGNAL = 4.1; EXPRESSED IN BONE MARROW, SIGNAL = 5.7; EXPRESSED IN HEART, SIGNAL = 2.2; EXPRESSED IN LUNG, SIGNAL = 3.1; EXPRESSED IN FETAL LIVER, SIGNAL = 3.9; EXPRESSED IN ADULT LIVER, SIGNAL = 2.8; NT HIT: AF229838.1, EVALUE 9.30e-01; EST_HUMAN HIT: AA503553.1, EVALUE 2.20e-02
ctggaggggtcagagaaggagccgcactgtccaggagggtggggtggccagcaaagtggcctggagagacgaggaggagagggtttgggagagtgccttcccatgccat

SEQ ID NO: 25951 - DNA, 112 bp, Homo sapiens
  MAP TO AL031587.3; EXPRESSED IN HEART, SIGNAL = 1.3; EXPRESSED IN HELA, SIGNAL = 1.5; EXPRESSED IN LUNG, SIGNAL = 1.3; NT HIT: gi7019528, EVALUE 8.00e-57; EST_HUMAN HIT: AI005004.1, EVALUE 1.00e-56; SWISSPROT HIT: Q01956, EVALUE 7.10e+00
tgtcgttcagctgagctttatcaccagtttcctgttgctccatagcagcttcactggcgatggggcagggcctggcggaacttggggcacagatgagggaggcagttcccag

SEQ ID NO: 25952 - DNA, 175 bp, Homo sapiens
  MAP TO AC004624.6; EXPRESSED IN FETAL LIVER, SIGNAL = 1.4; EXPRESSED IN ADULT LIVER, SIGNAL = 1.9; EXPRESSED IN HELA, SIGNAL = 1.8; EXPRESSED IN BRAIN, SIGNAL = 2.2; EXPRESSED IN LUNG, SIGNAL = 1.8; EXPRESSED IN HEART, SIGNAL =   2; EXPRESSED IN BONE MARROW, SIGNAL = 2.6; SWISSPROT HIT: P23548, EVALUE 1.70e+00; NT HIT: X00854.1, EVALUE 1.00e-01; EST_HUMAN HIT: BF036577.1, EVALUE 6.00e-01
cagcagcagagccccctcaggcagagggggcttgaaggccaggagtgctgcccctgcctggaggggccaccgcatccctgctccctggagctgccagtgggcagcacctcgtcctctgttgtctttgcctttgtctgcaatgtccttccatccagacaccaaggcactgtcccag

SEQ ID NO: 25953 - DNA, 108 bp, Homo sapiens
  MAP TO AC007281.3; EXPRESSED IN LUNG, SIGNAL = 1.9; EXPRESSED IN HEART, SIGNAL = 2.3; EXPRESSED IN ADULT LIVER, SIGNAL = 2.3; EXPRESSED IN FETAL LIVER, SIGNAL = 2.9; EXPRESSED IN BRAIN, SIGNAL = 1.4; EXPRESSED IN HELA, SIGNAL =   2; EXPRESSED IN PLACENTA, SIGNAL = 2.9; NT HIT: S74906.1, EVALUE 2.00e-38; SWISSPROT HIT: Q00080, EVALUE 1.40e+00; EST_HUMAN HIT: AW973394.1, EVALUE 1.00e-37
gacaagccgcagacaaaactcctcagacaccaagttaaagaaggaaggggtttattcggccgggggcatcggcaagactcctgtctcaagagccgagctcaccgagtg

SEQ ID NO: 25954 - DNA, 150 bp, Homo sapiens
  MAP TO AC008272.1; EXPRESSED IN HELA, SIGNAL = 2.1; EXPRESSED IN PLACENTA, SIGNAL = 1.3; EXPRESSED IN HEART, SIGNAL =   2; EXPRESSED IN ADULT LIVER, SIGNAL = 1.9; EXPRESSED IN FETAL LIVER, SIGNAL =   2; EXPRESSED IN BRAIN, SIGNAL = 3.6; EXPRESSED IN BONE MARROW, SIGNAL = 3.6; EXPRESSED IN LUNG, SIGNAL = 2.5; NT HIT: gi11418980, EVALUE 1.30e+00; EST_HUMAN HIT: BF439982.1, EVALUE 5.10e-01; SWISSPROT HIT: P41036, EVALUE 3.10e+00
tatctaggaaataaatacaaccaactttttgcctatttcccaattgttacggctggtagaaataatcagcataaaataaaactgacaacagatgataccacacatggcaacaatgctattgattaaaaatggaaagaaggctcgcatcct

SEQ ID NO: 25955 - DNA, 120 bp, Homo sapiens; identical to SEQ ID NO: 25868
  MAP TO AP000354.1; EXPRESSED IN BRAIN, SIGNAL =   6; EXPRESSED IN LUNG, SIGNAL = 5.8; EXPRESSED IN BONE MARROW, SIGNAL =   8; EXPRESSED IN HELA, SIGNAL = 5.3; EXPRESSED IN PLACENTA, SIGNAL =  11; EXPRESSED IN HEART, SIGNAL = 3.9; EXPRESSED IN ADULT LIVER, SIGNAL =  11; EXPRESSED IN FETAL LIVER, SIGNAL = 9.1; EST_HUMAN HIT: BF343566.1, EVALUE 1.00e-56; NT HIT: gi11417866, EVALUE 3.00e-59; SWISSPROT HIT: P36269, EVALUE 2.00e-16

SEQ ID NO: 25956 - DNA, 102 bp, Homo sapiens
  MAP TO AL021707.2; EXPRESSED IN PLACENTA, SIGNAL = 1.8; EXPRESSED IN HELA, SIGNAL = 1.9; EXPRESSED IN BRAIN, SIGNAL = 1.4; EXPRESSED IN HEART, SIGNAL = 1.5; EXPRESSED IN BONE MARROW, SIGNAL = 1.5; EXPRESSED IN ADULT LIVER, SIGNAL = 2.4; EXPRESSED IN FETAL LIVER, SIGNAL = 3.6; EST_HUMAN HIT: BF698920.1, EVALUE 3.20e-01; NT HIT: AF324985.1, EVALUE 1.40e-02; SWISSPROT HIT: P14018, EVALUE 1.40e+00
ctggtacctctcatgaaatatccaccaaaagctatccagccagatggctcttggagaagaagaagagagaaacttctctaattctctacctgaacagaaatg

SEQ ID NO: 25957 - DNA, 102 bp, Homo sapiens
  MAP TO AL022327.17; EXPRESSED IN HELA, SIGNAL =   2; EXPRESSED IN PLACENTA, SIGNAL = 1.4; EXPRESSED IN BRAIN, SIGNAL = 2.7; EXPRESSED IN LUNG, SIGNAL = 1.8; EXPRESSED IN HEART, SIGNAL = 1.9; EXPRESSED IN BONE MARROW, SIGNAL = 1.5; EXPRESSED IN FETAL LIVER, SIGNAL =   2; NT HIT: D25217.2, EVALUE 2.00e-11; EST_HUMAN HIT: AU120203.1, EVALUE 2.00e-11; SWISSPROT HIT: Q99835, EVALUE 9.40e+00
ctccagcaggagcagcaggatgaggttgaagttgatctgccaaggggcacacacgcttcagcaccgggcccgcctttctcacgccaccgcgcttcagcgtcc

SEQ ID NO: 25958 - DNA, 186 bp, Homo sapiens
  MAP TO AP000350.1; EXPRESSED IN HEART, SIGNAL = 1.4; EXPRESSED IN BONE MARROW, SIGNAL = 1.5; EXPRESSED IN LUNG, SIGNAL = 1.7; EXPRESSED IN ADULT LIVER, SIGNAL = 1.5; EXPRESSED IN HELA, SIGNAL = 1.3; EXPRESSED IN BRAIN, SIGNAL =   2; NT HIT: AF240786.1, EVALUE 3.00e-91; EST_HUMAN HIT: H55341.1, EVALUE 3.00e-83; SWISSPROT HIT: P20135, EVALUE 5.00e-13
ttgctgatcccaaagataacaggggaggaagtttcagctgagaagatggagcatgcagtggaagaggtgaagaacagcctgcagctcttcgaggagaagtttctgcaggataagatgttcatcaccgggaaccaaatctcactggctgacttggtggccgtggtggagatgatgcaggtgtggagt

SEQ ID NO: 25959 - DNA, 151 bp, Homo sapiens
  MAP TO AL031588.1; EXPRESSED IN ADULT LIVER, SIGNAL = 2.6; EXPRESSED IN HELA, SIGNAL = 1.7; EXPRESSED IN PLACENTA, SIGNAL = 2.9; EXPRESSED IN BRAIN, SIGNAL = 1.8; EXPRESSED IN LUNG, SIGNAL = 1.8; EXPRESSED IN HEART, SIGNAL = 1.8; EXPRESSED IN FETAL LIVER, SIGNAL = 2.7; EST_HUMAN HIT: BF688818.1, EVALUE 2.00e+00; SWISSPROT HIT: P28797, EVALUE 2.30e+00; NT HIT: gi6679057, EVALUE 8.70e-02
gcttcaggtggagatgcgagaccctgggccggagcttgaggcagcagcctctacgtgggcagcaggtggtctccaaggggcactcggcatccgtcacctggccggggacgatgctgtgctggtcgcgatcgccatgctggccacgggtggc

SEQ ID NO: 25960 - DNA, 269 bp, Homo sapiens
  MAP TO AP000356.1; EXPRESSED IN FETAL LIVER, SIGNAL = 2.5; EXPRESSED IN ADULT LIVER, SIGNAL = 3.1; EXPRESSED IN HELA, SIGNAL = 2.1; EXPRESSED IN PLACENTA, SIGNAL = 3.8; EXPRESSED IN BRAIN, SIGNAL = 3.6; EXPRESSED IN BONE MARROW, SIGNAL = 2.9; EXPRESSED IN HEART, SIGNAL = 2.4; EXPRESSED IN LUNG, SIGNAL = 3.4; NT HIT: AF037338.1, EVALUE 3.00e-12; SWISSPROT HIT: P39194, EVALUE 3.40e-02; EST_HUMAN HIT: AI831991.1, EVALUE 3.00e-28
cccatctcagtctcccaaagtgctaggattacaggggtgagacactgcacccggcctcaatccttattttggcctgagaggaaaggccgtggccccatttgcaggggagaagactgaagctggaggggcaggccttgctctgggttgcacagcagcaacagaagtgggagctggccacgaggcttcctcgactcgacacactggtggggtacaccctggttctccaggtcccatggggctcagcccaggactacctcggggggtgaggg

SEQ ID NO: 25961 - DNA, 93 bp, Homo sapiens
  MAP TO AC004032.7; EXPRESSED IN FETAL LIVER, SIGNAL = 1.4; EXPRESSED IN BRAIN, SIGNAL = 1.8; EXPRESSED IN HELA, SIGNAL = 1.6; EXPRESSED IN LUNG, SIGNAL = 2.8; EXPRESSED IN HEART, SIGNAL = 2.3; EXPRESSED IN ADULT LIVER, SIGNAL = 1.6; NT HIT: gi8923880, EVALUE 4.90e-02; EST_HUMAN HIT: BE882374.1, EVALUE 7.30e-02; SWISSPROT HIT: Q05486, EVALUE 9.50e+00
ctaggcagtggaacagcatgccaacagggaagagccccagatggctcctggtttcctgtttggcaggctgggatgggagaactggtcctcact

SEQ ID NO: 25962 - DNA, 127 bp, Homo sapiens
  MAP TO AC008022.1; EXPRESSED IN LUNG, SIGNAL = 1.5; EXPRESSED IN HEART, SIGNAL = 1.9; EXPRESSED IN FETAL LIVER, SIGNAL = 1.3; EXPRESSED IN HELA, SIGNAL = 1.6; NT HIT: gi9507208, EVALUE 1.00e-03; EST_HUMAN HIT: BF313018.1, EVALUE 2.70e-02
gaatgtctcacaccgggccaggcatacagaaggcagaagcaacagattgctgctgttatgagaaggaggaggaggagagcagcgagaaccaagttgtgggtcagggtgaatgccagagggtggataa

SEQ ID NO: 25963 - DNA, 124 bp, Homo sapiens
  MAP TO AC005300.10; EXPRESSED IN HELA, SIGNAL = 1.8; EXPRESSED IN HEART, SIGNAL = 1.8; EXPRESSED IN LUNG, SIGNAL = 1.5; EXPRESSED IN BONE MARROW, SIGNAL = 1.4; EXPRESSED IN FETAL LIVER, SIGNAL = 1.9; EXPRESSED IN PLACENTA, SIGNAL = 1.2; EXPRESSED IN BRAIN, SIGNAL = 1.6; SWISSPROT HIT: P03812, EVALUE 1.80e+00; NT HIT: gi11526291, EVALUE 6.00e-58; EST_HUMAN HIT: BF528236.1, EVALUE 8.00e-58
aaaaggatacccctgggcattttccatcacgggcccctgtccagacaccagcatccgcttctcatggtactcggagaagagcttcatggggctgtgagagaggataacttggtctgcatccacc

SEQ ID NO: 25964 - DNA, 193 bp, Homo sapiens
  MAP TO AB016897.1; EXPRESSED IN PLACENTA, SIGNAL =  12; EXPRESSED IN BRAIN, SIGNAL = 3.8; EXPRESSED IN HELA, SIGNAL = 7.4; EXPRESSED IN HEART, SIGNAL = 4.2; EXPRESSED IN BONE MARROW, SIGNAL = 6.4; EXPRESSED IN LUNG, SIGNAL = 6.6; EXPRESSED IN FETAL LIVER, SIGNAL =  13; EXPRESSED IN ADULT LIVER, SIGNAL =  10; NT HIT: gi11434915, EVALUE 5.00e-04; EST_HUMAN HIT: AW385262.1, EVALUE 3.00e-06; SWISSPROT HIT: O15270, EVALUE 1.70e-02
cagctggtccaaaggcaccaattttggcatcccgcagagcgtcagagaatctttgttgccataggtgagaagtgcgtctcctgaaatgccaggtgttttctgctgacagctgcacacgctccttaccagggccgtgccatcctgctccatgacacactccatagagggatcgctgcactacaggtggtgacag

SEQ ID NO: 25965 - DNA, 220 bp, Homo sapiens
  MAP TO AP000352.2; EXPRESSED IN FETAL LIVER, SIGNAL = 1.3; EXPRESSED IN PLACENTA, SIGNAL = 1.4; EXPRESSED IN HELA, SIGNAL = 1.2; EXPRESSED IN HEART, SIGNAL = 1.4; EXPRESSED IN BONE MARROW, SIGNAL = 1.4; NT HIT: gi11417862, EVALUE 1.00e-120; EST_HUMAN HIT: AW392986.1, EVALUE 1.00e-113; SWISSPROT HIT: Q9Y6J0, EVALUE 9.00e-39
aaaagcaggacgtgcatgagttcctgctggagaacctaaccaacgggggcatcctggagctgatgatgcgctacctgaaagccatgggccacaagttcttggtaaggtggcctccaggcttggcggaggtcgtgctcagcgtctaccacagctggaggaggcacagcaccagcctgcccaacccgctgctgagggactgcagcaacaagcacatcaaggt

SEQ ID NO: 25966 - DNA, 106 bp, Homo sapiens
  MAP TO AP000344.1; EXPRESSED IN FETAL LIVER, SIGNAL = 3.8; EXPRESSED IN ADULT LIVER, SIGNAL = 5.8; EXPRESSED IN HELA, SIGNAL = 4.6; EXPRESSED IN BRAIN, SIGNAL = 4.5; EXPRESSED IN PLACENTA, SIGNAL = 5.7; EXPRESSED IN BONE MARROW, SIGNAL = 7.5; EXPRESSED IN LUNG, SIGNAL = 5.6; EXPRESSED IN HEART, SIGNAL = 4.3; NT HIT: AE001323.1, EVALUE 9.00e-01; EST_HUMAN HIT: AI808985.1, EVALUE 2.00e-52; SWISSPROT HIT: Q63880, EVALUE 1.00e-05
ccaaatattcccagccggtactggacgatcacaaccagcatgtcctcataggcagccagggaggacccatcgaagatggaggctgagccagtctcgaaggcaccgc

SEQ ID NO: 25967 - DNA, 223 bp, Homo sapiens
  MAP TO AL022312.7; EXPRESSED IN HELA, SIGNAL = 1.5; EXPRESSED IN PLACENTA, SIGNAL = 1.5; EXPRESSED IN LUNG, SIGNAL = 1.3; EXPRESSED IN HEART, SIGNAL = 1.4; EXPRESSED IN BONE MARROW, SIGNAL = 1.6; NT HIT: X64467.1, EVALUE 1.00e-07; EST_HUMAN HIT: AV720821.1, EVALUE 5.10e-02; SWISSPROT HIT: Q15811, EVALUE 4.90e+00
aggcgggagcagacagcactcagcattttctcctgctttgtgtctgggacaaggctgtaggttgtggagagcagagaacgaccttcatcttttctacaactagtcctgagtgggtgcctgctctgcactacactgtctgggtgctggctacagcagtgagccaaatagataaacatccctgccctcatggagctttgcttctggtaaaggagacaggtggacc

SEQ ID NO: 25968 - DNA, 135 bp, Homo sapiens
  MAP TO AC007556.2; EXPRESSED IN FETAL LIVER, SIGNAL = 2.5; EXPRESSED IN BRAIN, SIGNAL = 3.1; EXPRESSED IN PLACENTA, SIGNAL = 2.4; EXPRESSED IN HELA, SIGNAL = 2.3; EXPRESSED IN BONE MARROW, SIGNAL = 2.6; EXPRESSED IN LUNG, SIGNAL = 2.4; EXPRESSED IN HEART, SIGNAL = 2.6; EXPRESSED IN ADULT LIVER, SIGNAL = 2.1; SWISSPROT HIT: P98164, EVALUE 3.00e-23; EST_HUMAN HIT: AU128912.1, EVALUE 3.00e-70; NT HIT: gi11430460, EVALUE 2.00e-70
atatcaatgaatgtgaacaatttgggacttgtccccagcactgcagaaataccaaaggaagttatgagtgtgtctgtgctgatggcttcacgtctatgagtgaccgccctggaaaacgatgtgcagctgagggta

SEQ ID NO: 25969 - DNA, 76 bp, Homo sapiens
  MAP TO AL022312.7; EXPRESSED IN BRAIN, SIGNAL = 2.2; EXPRESSED IN PLACENTA, SIGNAL = 2.1; EXPRESSED IN ADULT LIVER, SIGNAL = 1.5; EXPRESSED IN FETAL LIVER, SIGNAL = 1.8; EXPRESSED IN HELA, SIGNAL = 1.7; EXPRESSED IN BONE MARROW, SIGNAL = 1.9; EXPRESSED IN HEART, SIGNAL = 1.6; EXPRESSED IN LUNG, SIGNAL = 1.7; NT HIT: gi11421663, EVALUE 6.00e-01; EST_HUMAN HIT: BE873334.1, EVALUE 8.90e-01
gtgctgcagtaggactgggttgccagctgggccctgatgctcccagtccgcatcaagaaaggccagaatcaggcag

SEQ ID NO: 25970 - DNA, 129 bp, Homo sapiens
  MAP TO AB016897.1; EXPRESSED IN PLACENTA, SIGNAL = 1.9; EXPRESSED IN BONE MARROW, SIGNAL = 1.7; EXPRESSED IN LUNG, SIGNAL = 3.2; EXPRESSED IN FETAL LIVER, SIGNAL = 1.4; EXPRESSED IN ADULT LIVER, SIGNAL =   2; EXPRESSED IN BRAIN, SIGNAL = 1.6; EXPRESSED IN HELA, SIGNAL =   2; EXPRESSED IN HEART, SIGNAL = 3.3; NT HIT: AB011399.1, EVALUE 7.00e-67; EST_HUMAN HIT: AW365099.1, EVALUE 6.00e-62
gacgaggagcggaggcggcagcagcagttagaagagatgcgcaagcgggaagcggaagaccgagcgaggcaagaggaagagcgccggcggcaggaggaggagcgaacaaaacgagacgctgaagaaaag

SEQ ID NO: 25971 - DNA, 214 bp, Homo sapiens
  MAP TO AC007556.2; EXPRESSED IN LUNG, SIGNAL = 4.5; EXPRESSED IN BRAIN, SIGNAL =   3; EXPRESSED IN HELA, SIGNAL = 5.9; EXPRESSED IN HEART, SIGNAL =   3; EXPRESSED IN BONE MARROW, SIGNAL = 1.9; EXPRESSED IN ADULT LIVER, SIGNAL = 4.5; EXPRESSED IN FETAL LIVER, SIGNAL = 5.4; EXPRESSED IN PLACENTA, SIGNAL = 4.3; NT HIT: AL163246.2, EVALUE 1.00e-88; EST_HUMAN HIT: AW753028.1, EVALUE 2.00e-78; SWISSPROT HIT: P11227, EVALUE 3.00e-04
agtggcgattaggcctggtggaactgctatcagtaaaccaagtgtgttcagggtgaggaacaggaaaaaaggaaatatggggaaatggggtgaatgtcaggtggatcagagagatacagtcatgggggtcaggtgtggtatccgtagtaatgtgggaggctggattgaagtctgggccagaaacaatggtaattgtgggagactcaacaaagag

SEQ ID NO: 25972 - DNA, 322 bp, Homo sapiens
  MAP TO AC002472.3; EXPRESSED IN PLACENTA, SIGNAL = 1.2; EXPRESSED IN BRAIN, SIGNAL = 1.5; EXPRESSED IN HEART, SIGNAL = 1.4; EXPRESSED IN BONE MARROW, SIGNAL = 1.4; EXPRESSED IN LUNG, SIGNAL = 1.2; EXPRESSED IN FETAL LIVER, SIGNAL = 1.3; EXPRESSED IN ADULT LIVER, SIGNAL = 1.9; NT HIT: AF206637.2, EVALUE 2.00e-01; EST_HUMAN HIT: BF695340.1, EVALUE 1.20e+00; SWISSPROT HIT: P00520, EVALUE 1.70e+00
gaaccctggacagatcaacaggtaaaaggtggagatgacaccgttcagaggaatcacacggcaaacacacctaaagcgtccctgtcctggtggacaccagctgccgctcctctgagctctgcaagtgctcccacatattctgccccagctgacacctcatgcctatcaccattacaacgcctgttccagaaaatcacctagcttatgttcaaggcctctcctcctcctgccgttcccaaactccagtcctcagcaccgccctggaccactttgtctccggagtcagtcccgcttctctctgacttctcagaccccagctctg

SEQ ID NO: 25973 - DNA, 193 bp, Homo sapiens
  MAP TO AC009313.2; EXPRESSED IN ADULT LIVER, SIGNAL = 4.6; EXPRESSED IN FETAL LIVER, SIGNAL =   5; EXPRESSED IN PLACENTA, SIGNAL =   6; EXPRESSED IN BRAIN, SIGNAL = 3.9; EXPRESSED IN HELA, SIGNAL = 3.5; EXPRESSED IN BONE MARROW, SIGNAL = 5.6; EXPRESSED IN HEART, SIGNAL = 2.4; EXPRESSED IN LUNG, SIGNAL = 3.5; NT HIT: gi9506404, EVALUE 1.80e+00; SWISSPROT HIT: P12034, EVALUE 2.90e+00
attctgaggtcccatttcaggccaactgatttgcagtcacaggtacctgaattgctgccctcttgtctattgtgcacatccagtcggccaccaaatcctgttgattctactcttgaaatgcctcttgaatccactcatctttatttcccctgctctagttcaagccctcatcttttacctagaatacagcatt

SEQ ID NO: 25974 - DNA, 166 bp, Homo sapiens
  MAP TO AL022238.1; EXPRESSED IN LUNG, SIGNAL = 5.7; EXPRESSED IN HEART, SIGNAL = 3.9; EXPRESSED IN BONE MARROW, SIGNAL = 7.9; EXPRESSED IN ADULT LIVER, SIGNAL =  13; EXPRESSED IN FETAL LIVER, SIGNAL = 8.9; EXPRESSED IN PLACENTA, SIGNAL =  11; EXPRESSED IN HELA, SIGNAL = 6.4; EXPRESSED IN BRAIN, SIGNAL = 3.9; NT HIT: AB008569.1, EVALUE 2.40e-02; EST_HUMAN HIT: BF685238.1, EVALUE 1.40e-01; SWISSPROT HIT: P48918, EVALUE 1.30e+00
aaccaggtcagccatcagcattttaaataatcagatgtttagtagtgcttttcttgtctgtgtctttctctttacagaggaatacatgagcagtgatgctaagaatgttaacttacattcttacatggataccatctcatttttgtccttttttgactctacaagt

SEQ ID NO: 25975 - DNA, 96 bp, Homo sapiens
  MAP TO AL022238.1; EXPRESSED IN HELA, SIGNAL = 2.8; EXPRESSED IN PLACENTA, SIGNAL =   4; EXPRESSED IN BRAIN, SIGNAL = 4.9; EXPRESSED IN HEART, SIGNAL = 2.1; EXPRESSED IN LUNG, SIGNAL = 3.5; EXPRESSED IN BONE MARROW, SIGNAL = 5.6; EXPRESSED IN ADULT LIVER, SIGNAL = 4.9; EXPRESSED IN FETAL LIVER, SIGNAL = 4.8; NT HIT: AB029016.1, EVALUE 4.00e-24; EST_HUMAN HIT: BF338706.1, EVALUE 2.00e-23
gcatgtcagcttctcttgcagcagcagcaacagcagcagttgttacagaaccagagaaagatttctcaagctgtacgccaacagcaagagcagcag

SEQ ID NO: 25976 - DNA, 84 bp, Homo sapiens
  MAP TO AP000347.1; EXPRESSED IN HELA, SIGNAL = 2.7; EXPRESSED IN PLACENTA, SIGNAL = 1.9; EXPRESSED IN BRAIN, SIGNAL = 2.8; EXPRESSED IN BONE MARROW, SIGNAL = 4.3; EXPRESSED IN LUNG, SIGNAL = 3.5; EXPRESSED IN HEART, SIGNAL = 2.5; EXPRESSED IN FETAL LIVER, SIGNAL = 3.8; EXPRESSED IN ADULT LIVER, SIGNAL = 3.8; NT HIT: gi11434115, EVALUE 9.00e-25; EST_HUMAN HIT: BE771814.1, EVALUE 1.00e-37; SWISSPROT HIT: P04424, EVALUE 9.00e-07
gcacttgttggctgtgtggatgtcctcatcattggggttgagtttgaaggtgccctgggcccactcctcaaccacctatagcac

SEQ ID NO: 25977 - DNA, 118 bp, Homo sapiens
  MAP TO Z83840.7; EXPRESSED IN FETAL LIVER, SIGNAL =   4; EXPRESSED IN ADULT LIVER, SIGNAL = 2.1; EXPRESSED IN HELA, SIGNAL =   6; EXPRESSED IN PLACENTA, SIGNAL = 2.4; EXPRESSED IN BRAIN, SIGNAL =   3; EXPRESSED IN BONE MARROW, SIGNAL = 1.4; EXPRESSED IN LUNG, SIGNAL =   3; EXPRESSED IN HEART, SIGNAL = 2.9; EST_HUMAN HIT: AU140029.1, EVALUE 3.00e-60; NT HIT: gi11418192, EVALUE 2.00e-60; SWISSPROT HIT: P55769, EVALUE 2.00e-07
acgtagggcacattcttgtcttcacacagcagcggcaggtgcagaatgatctccagtggctcggcgtctgcagccatcacgatgaactcagagatgcccctgttgagggttttggtgg

SEQ ID NO: 25978 - DNA, 569 bp, Homo sapiens; identical to SEQ ID NO: 9510
  MAP TO AL022312.7; EXPRESSED IN FETAL LIVER, SIGNAL = 4.7; EXPRESSED IN PLACENTA, SIGNAL = 3.4; EXPRESSED IN BONE MARROW, SIGNAL = 6.8; EXPRESSED IN BRAIN, SIGNAL = 4.5; EXPRESSED IN HELA, SIGNAL = 3.2; EXPRESSED IN HEART, SIGNAL = 2.3; EXPRESSED IN LUNG, SIGNAL = 3.3; EXPRESSED IN ADULT LIVER, SIGNAL = 5.4; NT HIT: AF224669.1, EVALUE 2.00e-12; EST_HUMAN HIT: AI809994.1, EVALUE 1.00e-69; SWISSPROT HIT: P39188, EVALUE 1.50e-01

SEQ ID NO: 25979 - DNA, 82 bp, Homo sapiens
  MAP TO AP000233.1; EXPRESSED IN ADULT LIVER, SIGNAL =  12; EXPRESSED IN HELA, SIGNAL = 5.7; EXPRESSED IN PLACENTA, SIGNAL = 6.3; EXPRESSED IN BRAIN, SIGNAL = 3.4; EXPRESSED IN BONE MARROW, SIGNAL = 6.3; EXPRESSED IN LUNG, SIGNAL = 7.5; EXPRESSED IN HEART, SIGNAL = 5.3; EXPRESSED IN FETAL LIVER, SIGNAL = 6.5; EST_HUMAN HIT: AW867182.1, EVALUE 5.00e-18; NT HIT: AL163202.2, EVALUE 8.00e-16
tatctggcagaagaaatttctaagcagcaaagcattcaaaatgtgactggggttttgttaaaaagcattcaagtttaaaagg

SEQ ID NO: 25980 - DNA, 83 bp, Homo sapiens
  MAP TO AL022318.2; EXPRESSED IN LUNG, SIGNAL = 2.5; EXPRESSED IN BONE MARROW, SIGNAL = 2.5; EXPRESSED IN HEART, SIGNAL = 1.5; EXPRESSED IN ADULT LIVER, SIGNAL =   2; EXPRESSED IN FETAL LIVER, SIGNAL = 3.1; EXPRESSED IN BRAIN, SIGNAL = 2.3; EXPRESSED IN PLACENTA, SIGNAL = 2.7; EXPRESSED IN HELA, SIGNAL = 2.1; NT HIT: AB007195.1, EVALUE 2.60e+00; EST_HUMAN HIT: AW976184.1, EVALUE 1.00e+00
atagcaattgatcgactccctctgaatagggtgaacctctgtcccttttgccctggatggggatgctctaggcctgctgtccc

SEQ ID NO: 25981 - DNA, 93 bp, Homo sapiens
  MAP TO AP000127.1; EXPRESSED IN HEART, SIGNAL = 1.5; EXPRESSED IN FETAL LIVER, SIGNAL = 1.5; EXPRESSED IN ADULT LIVER, SIGNAL = 1.5; EXPRESSED IN PLACENTA, SIGNAL = 1.8; EXPRESSED IN HELA, SIGNAL = 1.3; EXPRESSED IN LUNG, SIGNAL = 1.4; EXPRESSED IN BONE MARROW, SIGNAL = 1.5; NT HIT: AE002117.1, EVALUE 7.70e-01; EST_HUMAN HIT: AW005671.1, EVALUE 2.90e-01; SWISSPROT HIT: P37001, EVALUE 9.50e+00
atgagaagaaaccaagtggcaattccatggggagcgaactttggagagggaaagacagatgaaaagaataatttcaggaactttagttgcaag

SEQ ID NO: 25982 - DNA, 120 bp, Homo sapiens
  MAP TO AC006548.19; EXPRESSED IN HEART, SIGNAL = 1.8; EXPRESSED IN BONE MARROW, SIGNAL =  23; EXPRESSED IN LUNG, SIGNAL =  11; EXPRESSED IN FETAL LIVER, SIGNAL = 1.6; EXPRESSED IN ADULT LIVER, SIGNAL = 2.7; EST_HUMAN HIT: BF540922.1, EVALUE 7.00e-43; SWISSPROT HIT: P04431, EVALUE 7.00e-15; NT HIT: M20809.1, EVALUE 1.00e-61
gagacagagtcaccatcacttgccgggcgagtcagggcattagcaataatttaaattggtatcagcagaaaccagggaaaactcctaagctcctgatctatgctgcatccagtctgcaaa

SEQ ID NO: 25983 - DNA, 138 bp, Homo sapiens
  MAP TO AB016897.1; EXPRESSED IN PLACENTA, SIGNAL = 2.2; EXPRESSED IN LUNG, SIGNAL = 2.5; EXPRESSED IN HEART, SIGNAL = 1.9; EXPRESSED IN FETAL LIVER, SIGNAL =   2; EXPRESSED IN ADULT LIVER, SIGNAL = 2.3; NT HIT: AB011399.1, EVALUE 3.00e-72; EST_HUMAN HIT: AW961314.1, EVALUE 4.00e-72; SWISSPROT HIT: Q13370, EVALUE 6.90e+00
cctggaagttctggggcccctgaaaacttgacattcaaggaacgccagcgtcttttttcacaaggtcaagatgtatccaataaagtgaaagcttctcgtaaattaacagaactggagaatgaactgaacacaaagtga

SEQ ID NO: 25984 - DNA, 263 bp, Homo sapiens
  MAP TO AL022318.2; EXPRESSED IN BRAIN, SIGNAL = 5.1; EXPRESSED IN PLACENTA, SIGNAL = 3.8; EXPRESSED IN HELA, SIGNAL = 6.5; EXPRESSED IN LUNG, SIGNAL = 4.7; EXPRESSED IN HEART, SIGNAL = 6.2; EXPRESSED IN BONE MARROW, SIGNAL = 3.7; EXPRESSED IN ADULT LIVER, SIGNAL = 3.9; EXPRESSED IN FETAL LIVER, SIGNAL =   6; EST_HUMAN HIT: AA340620.1, EVALUE 2.00e-54; SWISSPROT HIT: Q15562, EVALUE 7.20e+00; NT HIT: AF029701.2, EVALUE 4.00e-82
cttggctatgccttcagctccagccacctctctaagaggaaactgttgggcaggtgggggagggctagacgcagaacaaaactgtaagccagacccggtgtgaggaggggaagtgatagaaggattatagggtgggggagcagaggctggcgaagagttgggacctggctcagcctggcgaggagcagcctgaggagaagaggagaggtcagatgagtctgtggaaaaggaggattcaaaggactcagagcttggggtggaga

SEQ ID NO: 25985 - DNA, 98 bp, Homo sapiens
  MAP TO AC005006.2; EXPRESSED IN PLACENTA, SIGNAL = 2.1; EXPRESSED IN BRAIN, SIGNAL = 2.8; EXPRESSED IN HELA, SIGNAL = 1.9; EXPRESSED IN HEART, SIGNAL = 1.9; EXPRESSED IN BONE MARROW, SIGNAL = 2.8; EXPRESSED IN LUNG, SIGNAL =   2; EXPRESSED IN FETAL LIVER, SIGNAL = 1.6; NT HIT: U78027.1, EVALUE 4.00e-12; EST_HUMAN HIT: AA630214.1, EVALUE 3.00e-10; SWISSPROT HIT: P39188, EVALUE 4.00e-03
ctgaaatctcagcattttggaaggctgaggcgggaggggaggatcgcttgagctcaacagttcaaggtcagcctgggcaacatagggagaccccatct

SEQ ID NO: 25986 - DNA, 97 bp, Homo sapiens
  MAP TO AC007539.8; EXPRESSED IN BRAIN, SIGNAL = 2.1; EXPRESSED IN PLACENTA, SIGNAL = 1.9; EXPRESSED IN HELA, SIGNAL = 1.5; EXPRESSED IN BONE MARROW, SIGNAL = 1.9; EXPRESSED IN HEART, SIGNAL = 1.6; EXPRESSED IN LUNG, SIGNAL = 1.6; EXPRESSED IN FETAL LIVER, SIGNAL = 1.5; EXPRESSED IN ADULT LIVER, SIGNAL = 1.4; NT HIT: AF217490.1, EVALUE 2.10e-01; EST_HUMAN HIT: BF369849.1, EVALUE 3.00e-01; SWISSPROT HIT: P38840, EVALUE 2.50e+00
ctgagccaaggtgggcataggatgttgctgggtcacatgagtctctgctgtgtctggaacaaaaggaactctgacttcttgagaacctactatgtgc

SEQ ID NO: 25987 - DNA, 565 bp, Homo sapiens; identical to SEQ ID NO: 9524
  MAP TO AL022319.2; EXPRESSED IN BRAIN, SIGNAL = 2.7; EXPRESSED IN PLACENTA, SIGNAL = 2.6; EXPRESSED IN HELA, SIGNAL = 2.4; EXPRESSED IN LUNG, SIGNAL = 2.4; EXPRESSED IN BONE MARROW, SIGNAL = 3.1; EXPRESSED IN HEART, SIGNAL = 1.3; EXPRESSED IN ADULT LIVER, SIGNAL = 2.9; EXPRESSED IN FETAL LIVER, SIGNAL = 2.6; NT HIT: AF183644.1, EVALUE 1.40e+00; EST_HUMAN HIT: BF026669.1, EVALUE 2.10e+00; SWISSPROT HIT: P50505, EVALUE 5.60e-01

SEQ ID NO: 25988 - DNA, 163 bp, Homo sapiens
  MAP TO AL008723.8; EXPRESSED IN HELA, SIGNAL = 1.6; EXPRESSED IN HEART, SIGNAL = 2.9; EXPRESSED IN LUNG, SIGNAL = 1.4; EXPRESSED IN BONE MARROW, SIGNAL = 1.3; SWISSPROT HIT: Q08274, EVALUE 7.80e-01; EST_HUMAN HIT: BE551932.1, EVALUE 5.60e-01; NT HIT: AL163203.2, EVALUE 2.00e-03
gtggaccagtggactgagggcaacaggaacagtggttgtattggcatcagtgctagtggtggcagcagcagcaagtctggaggttgggaaggcgggtaggagcgctccagggctgacccgcccggctgggcctggcctggggtgggtaggaagctgtgggcct

SEQ ID NO: 25989 - DNA, 184 bp, Homo sapiens
  MAP TO AL022312.7; EXPRESSED IN ADULT LIVER, SIGNAL =  13; EXPRESSED IN FETAL LIVER, SIGNAL =  30; EXPRESSED IN PLACENTA, SIGNAL =  20; EXPRESSED IN BRAIN, SIGNAL =   6; EXPRESSED IN HELA, SIGNAL = 7.4; EXPRESSED IN BONE MARROW, SIGNAL = 5.8; EXPRESSED IN HEART, SIGNAL = 6.3; EXPRESSED IN LUNG, SIGNAL = 6.6; NT HIT: gi9964314, EVALUE 1.70e+00; EST_HUMAN HIT: AV759212.1, EVALUE 6.40e-01; SWISSPROT HIT: O02697, EVALUE 1.70e+00
gcaaaaggccttgaacgctgactcaggaggtcggggtgcagggagctggatcgggggtgctgatgatgtcggaggagctccttgtggatctggagataattttcctataaaattccctctctcctttgtttccaagacccttgaccacacttgcaccttcccctaccacctctccctccacagt

SEQ ID NO: 25990 - DNA, 476 bp, Homo sapiens
  MAP TO Z83840.7; EXPRESSED IN PLACENTA, SIGNAL = 1.3; EXPRESSED IN HELA, SIGNAL = 1.8; EXPRESSED IN BRAIN, SIGNAL = 1.7; EXPRESSED IN HEART, SIGNAL = 1.6; EXPRESSED IN LUNG, SIGNAL = 1.4; EXPRESSED IN ADULT LIVER, SIGNAL = 2.1; NT HIT: gi11433415, EVALUE 4.70e+00; EST_HUMAN HIT: AI904646.1, EVALUE 0.00e+00; SWISSPROT HIT: P35732, EVALUE 1.50e-01
agagaaggattgggtggtgatccaggcactatggtggggaaaccggagacaagtagcaagtgaaatttatagagaatttgagatactatgttgggagaatcagaactggattggaggtgaacatagagcagaaattcaggcatcagagaagagagaccaaagaaaggatggatgtgaggatggcacaaatatcctggcacccgaggctgagatccaggaacaattaaaaggtgaaactgatgtggagactcagagcaatgagccacttagagaagaggatggtacagacattcagtcactagggaggagagaggttaaaggtgaggatgataaagacacccaggaacttgggaggaaaaatcagggtcagttaggaaatgaatttagtggaaagattcacataccaaaggggaagaatcaggaacatattagaggcgaagatggtgcacatacccagatatctgagtcagggaact

SEQ ID NO: 25991 - DNA, 116 bp, Homo sapiens
  MAP TO Z83844.5; EXPRESSED IN FETAL LIVER, SIGNAL = 1.5; EXPRESSED IN ADULT LIVER, SIGNAL = 1.9; EXPRESSED IN PLACENTA, SIGNAL = 1.7; EXPRESSED IN BRAIN, SIGNAL = 3.4; EXPRESSED IN HELA, SIGNAL = 1.9; EXPRESSED IN BONE MARROW, SIGNAL = 2.8; EXPRESSED IN LUNG, SIGNAL = 1.9; EXPRESSED IN HEART, SIGNAL = 2.2; NT HIT: gi11863124, EVALUE 1.00e+00; EST_HUMAN HIT: BE829256.1, EVALUE 3.80e-01
gaatgccagagccaggggccactggggctctaagatggtggagggggcgtctgctctcaaggaccctatagaaggctcagcttcccccacttccgctcagggtgtcccttcatccc

SEQ ID NO: 25992 - DNA, 115 bp, Homo sapiens
  MAP TO AC008166.1; EXPRESSED IN LUNG, SIGNAL = 1.7; EXPRESSED IN HEART, SIGNAL = 1.6; EXPRESSED IN FETAL LIVER, SIGNAL = 2.1; EXPRESSED IN PLACENTA, SIGNAL = 1.3; EXPRESSED IN HELA, SIGNAL = 1.2; NT HIT: U67507.1, EVALUE 6.40e-02; EST_HUMAN HIT: N42980.1, EVALUE 2.40e-02; SWISSPROT HIT: O51603, EVALUE 6.30e-01
ttattttttcaaaaagttaataacatttatattctgttctgtaatttcagccagaaaggttatatgctgcaagtaccccttatagggtacttgcagggactccaagtcttgttcc

SEQ ID NO: 25993 - DNA, 106 bp, Homo sapiens
  MAP TO AP000353.1; EXPRESSED IN BRAIN, SIGNAL = 6.3; EXPRESSED IN PLACENTA, SIGNAL = 2.8; EXPRESSED IN HELA, SIGNAL = 4.2; EXPRESSED IN LUNG, SIGNAL = 4.6; EXPRESSED IN HEART, SIGNAL = 3.2; EXPRESSED IN BONE MARROW, SIGNAL = 6.5; EXPRESSED IN FETAL LIVER, SIGNAL = 3.5; EXPRESSED IN ADULT LIVER, SIGNAL = 3.8; NT HIT: AF257772.1, EVALUE 3.60e+00; EST_HUMAN HIT: BF348043.1, EVALUE 1.30e+00
atggacagttggccaagagatgggccctggcttggcactggctatgtgcaggaagtggcacttcacagaattctgtttgggggactagatacaggggtccaagaag

SEQ ID NO: 25994 - DNA, 148 bp, Homo sapiens
  MAP TO Z97055.1; EXPRESSED IN PLACENTA, SIGNAL = 1.4; EXPRESSED IN HELA, SIGNAL =   2; EXPRESSED IN BRAIN, SIGNAL = 2.2; EXPRESSED IN HEART, SIGNAL = 1.8; EXPRESSED IN BONE MARROW, SIGNAL = 3.5; EXPRESSED IN LUNG, SIGNAL = 2.1; EXPRESSED IN ADULT LIVER, SIGNAL = 1.9; EXPRESSED IN FETAL LIVER, SIGNAL = 2.7; EST_HUMAN HIT: AW974431.1, EVALUE 5.00e-01; NT HIT: AJ297131.1, EVALUE 3.40e-01; SWISSPROT HIT: P40847, EVALUE 6.90e+00
gacattatggagacaaagaagctgaagaccagcaaactcaacagccagtccaggagatgctcaggcaaaggcacagaggagccacatgaaagcagagggtcaaggttgtggccaaaacgaaaagcaagggccaggagagtgatagcaa

SEQ ID NO: 25995 - DNA, 114 bp, Homo sapiens
  MAP TO Z82188.2; EXPRESSED IN FETAL LIVER, SIGNAL = 1.6; EXPRESSED IN HELA, SIGNAL = 1.3; EXPRESSED IN HEART, SIGNAL = 1.4; NT HIT: gi11863153, EVALUE 9.90e-01; EST_HUMAN HIT: BF679477.1, EVALUE 2.40e-02; SWISSPROT HIT: P20127, EVALUE 3.20e+00
cccctcatgcttaccgttgagagctgcaagttggctgcacctgccagcctcacacccactttccaagcagcagggaagggggccaaacactgccttctcctcatgagaatttcc

SEQ ID NO: 25996 - DNA, 81 bp, Homo sapiens
  MAP TO AC004032.7; EXPRESSED IN PLACENTA, SIGNAL = 3.6; EXPRESSED IN BRAIN, SIGNAL = 2.5; EXPRESSED IN HELA, SIGNAL = 2.6; EXPRESSED IN HEART, SIGNAL =   2; EXPRESSED IN LUNG, SIGNAL = 3.5; EXPRESSED IN BONE MARROW, SIGNAL = 3.5; EXPRESSED IN ADULT LIVER, SIGNAL = 3.6; EXPRESSED IN FETAL LIVER, SIGNAL = 3.6; NT HIT: AB040943.1, EVALUE 1.60e-01; EST_HUMAN HIT: BF112039.1, EVALUE 6.20e-02; SWISSPROT HIT: P28429, EVALUE 9.60e+00
atggcacatgctccaccctccaacctggccccccgccctttcgatggctacagaatgatggaaggaatccaaacactgtat

SEQ ID NO: 25997 - DNA, 80 bp, Homo sapiens
  MAP TO AC002472.3; EXPRESSED IN LUNG, SIGNAL =  12; EXPRESSED IN ADULT LIVER, SIGNAL =  10; EXPRESSED IN FETAL LIVER, SIGNAL =  14; EXPRESSED IN PLACENTA, SIGNAL = 6.7; EXPRESSED IN HELA, SIGNAL =  11; EXPRESSED IN BRAIN, SIGNAL =  13; EXPRESSED IN HEART, SIGNAL = 6.7; EXPRESSED IN BONE MARROW, SIGNAL =  18; EST_HUMAN HIT: BF311025.1, EVALUE 1.00e-37; NT HIT: AB002059.1, EVALUE 6.00e-38
atggaaaatcccgccagacagtgcaccaaaggctgtcccgccctgaaatgcaatcagagctgggttttcccaatccacag

SEQ ID NO: 25998 - DNA, 163 bp, Homo sapiens
  MAP TO AC007253.2; EXPRESSED IN HELA, SIGNAL = 1.3; EXPRESSED IN PLACENTA, SIGNAL = 2.6; EXPRESSED IN LUNG, SIGNAL = 1.7; EXPRESSED IN HEART, SIGNAL = 1.4; EXPRESSED IN FETAL LIVER, SIGNAL = 1.6; EXPRESSED IN ADULT LIVER, SIGNAL = 1.7; EST_HUMAN HIT: AA928194.1, EVALUE 1.00e-41; NT HIT: AL163246.2, EVALUE 7.00e-46; SWISSPROT HIT: P07270, EVALUE 2.30e+00
ctgcccaattccaggcaggactacaaatggcccagatccttcaggaatgaaggtttgggtcactccaccaggtaaaacaccatgatctgctgaggtgcttgctgaaggcaaagggaatacagaatgggtagaagaagaaggtagtcaacaatatcagcttcaa

SEQ ID NO: 25999 - DNA, 81 bp, Homo sapiens
  MAP TO AC006427.13; EXPRESSED IN FETAL LIVER, SIGNAL = 1.5; EXPRESSED IN ADULT LIVER, SIGNAL = 1.7; EXPRESSED IN HELA, SIGNAL = 1.4; EXPRESSED IN LUNG, SIGNAL = 1.5; EXPRESSED IN HEART, SIGNAL = 1.3; NT HIT: AL163280.2, EVALUE 2.00e-10; EST_HUMAN HIT: AV701656.1, EVALUE 7.00e-11
tagaagatggtcaggcagctgtcaactgtctctcgaaaataataattggtcacagccagcgccacggaaaggcaatctccc

SEQ ID NO: 26000 - DNA, 313 bp, Homo sapiens
  MAP TO AL035682.16; EXPRESSED IN FETAL LIVER, SIGNAL = 1.3; EXPRESSED IN BRAIN, SIGNAL = 1.7; EXPRESSED IN LUNG, SIGNAL = 1.6; EXPRESSED IN HEART, SIGNAL = 1.7; NT HIT: AF055900.1, EVALUE 1.90e-01; EST_HUMAN HIT: BF376848.1, EVALUE 1.10e+00; SWISSPROT HIT: Q15365, EVALUE 3.90e-01
gaaagtcacaaaaataatcaaaaatagtaatacaaataatataataatcattattattattgctgctataaataagatgccattttccaaaacaccaagcttttctaacttaagaaacaccacgctgcccctctcctactgtttttccactgctctccaatttgtcatcttgctggagtggaaactgccaattccattttagtcgacagctataaaaagaacattggagctggtggtgccgatgaccaaactcggggctaagattagcccaggaggctgtcacctttccttaatgtgagaaacagctgggatt

SEQ ID NO: 26001 - DNA, 137 bp, Homo sapiens
  MAP TO AB016897.1; EXPRESSED IN BONE MARROW, SIGNAL = 3.1; EXPRESSED IN LUNG, SIGNAL = 9.6; EXPRESSED IN ADULT LIVER, SIGNAL =  12; EXPRESSED IN FETAL LIVER, SIGNAL =  15; EXPRESSED IN PLACENTA, SIGNAL =  10; EXPRESSED IN HELA, SIGNAL = 6.8; EXPRESSED IN BRAIN, SIGNAL =   5; EXPRESSED IN HEART, SIGNAL = 4.5; NT HIT: AB011399.1, EVALUE 1.00e-71; EST_HUMAN HIT: AI394725.1, EVALUE 2.00e-06
tccttcactaaagtcttgaacagctccaaatcatccatagggtttgaatcagtttcttccaaactcctttcactattgatatttttccttatcccgtgaatcatgaatattctaatggcatctagaatggtgaatac

SEQ ID NO: 26002 - DNA, 154 bp, Homo sapiens
  MAP TO AC008166.1; EXPRESSED IN FETAL LIVER, SIGNAL = 6.6; EXPRESSED IN ADULT LIVER, SIGNAL =   4; EXPRESSED IN PLACENTA, SIGNAL = 5.9; EXPRESSED IN HELA, SIGNAL = 2.7; EXPRESSED IN HEART, SIGNAL = 2.5; EXPRESSED IN LUNG, SIGNAL = 3.6; SWISSPROT HIT: P08548, EVALUE 9.00e-06; NT HIT: U52111.2, EVALUE 6.00e-06; EST_HUMAN HIT: BE328232.1, EVALUE 2.00e-06
agttaatattattaaaatgcacatactacccaaagtgatctaaacacttaatgcgatctctatcaaaattctaatatcatatttcacataaatacaattaagcctaatttacataggaaaccaataaaaccctcaaataaccaaggtaatcatg

SEQ ID NO: 26003 - DNA, 181 bp, Homo sapiens
  MAP TO AC008166.1; EXPRESSED IN BONE MARROW, SIGNAL = 5.6; EXPRESSED IN LUNG, SIGNAL =  19; EXPRESSED IN HEART, SIGNAL =  10; EXPRESSED IN BRAIN, SIGNAL = 3.1; EXPRESSED IN HELA, SIGNAL =  13; EXPRESSED IN ADULT LIVER, SIGNAL =  32; EXPRESSED IN FETAL LIVER, SIGNAL =  38; EXPRESSED IN PLACENTA, SIGNAL =  32; NT HIT: AF305941.1, EVALUE 3.00e-11; EST_HUMAN HIT: BE778223.1, EVALUE 7.00e-13; SWISSPROT HIT: P27398, EVALUE 8.70e+00
agtgagtgctgtcatagatcatcttattcatgtcatctgtgaatccagcattgtgctagggaaacagactgctcttaagggtacagccagcacaagtccactccaattacacacactgataataggtgtattagtctgttctcacactgctataaataactgcctgagaccgagtaattta

SEQ ID NO: 26004 - DNA, 128 bp, Homo sapiens
  MAP TO AC007900.1; EXPRESSED IN PLACENTA, SIGNAL =  13; EXPRESSED IN BRAIN, SIGNAL =  15; EXPRESSED IN HELA, SIGNAL = 7.9; EXPRESSED IN BONE MARROW, SIGNAL =  24; EXPRESSED IN LUNG, SIGNAL =  12; EXPRESSED IN HEART, SIGNAL = 6.4; EXPRESSED IN FETAL LIVER, SIGNAL =  16; EXPRESSED IN ADULT LIVER, SIGNAL =  12; NT HIT: D83329.1, EVALUE 2.80e-01; EST_HUMAN HIT: BE830426.1, EVALUE 4.20e-01; SWISSPROT HIT: O50607, EVALUE 3.10e+00
ttcttattgccattagaactcaggctgaggaggaaatgagtcatgccttcttgggccttcttcaggcctcttgcaggtctgcacctccctgcagagaattgacataaaagacttgaatgatttgcttg

SEQ ID NO: 26005 - DNA, 76 bp, Homo sapiens
  MAP TO Z97055.1; EXPRESSED IN ADULT LIVER, SIGNAL = 1.5; EXPRESSED IN FETAL LIVER, SIGNAL = 1.6; EXPRESSED IN BRAIN, SIGNAL = 2.2; EXPRESSED IN HELA, SIGNAL =   2; EXPRESSED IN LUNG, SIGNAL = 2.3; EXPRESSED IN HEART, SIGNAL = 1.9; EXPRESSED IN BONE MARROW, SIGNAL =   2; NT HIT: AL163249.2, EVALUE 2.40e+00; EST_HUMAN HIT: AI927191.1, EVALUE 1.00e-33
ctgttgctgccagcgtgggttgggaaatgtcgggccaggtgtgtggacgtggaaggtccagatgcagcctggggca

SEQ ID NO: 26006 - DNA, 200 bp, Homo sapiens
  MAP TO Z98884.11; EXPRESSED IN PLACENTA, SIGNAL = 3.7; EXPRESSED IN HELA, SIGNAL = 5.3; EXPRESSED IN LUNG, SIGNAL = 6.6; EXPRESSED IN BONE MARROW, SIGNAL = 4.5; EXPRESSED IN HEART, SIGNAL = 5.3; EXPRESSED IN ADULT LIVER, SIGNAL = 4.6; EXPRESSED IN FETAL LIVER, SIGNAL = 3.4; EXPRESSED IN BRAIN, SIGNAL = 4.6; NT HIT: X60739.1, EVALUE 4.70e-01; EST_HUMAN HIT: BE695905.1, EVALUE 1.00e-106; SWISSPROT HIT: P34294, EVALUE 2.20e+00
tgcaattaggcattggtcaggggtgaatggctcttttcacagagagtagccaaccagagacctttgctttgatatcatcaactgcagagaatgctgttgatgggaatgctggaagcagaaactttgtcatcggaaaaacttttcttgtatgcatgagactcaacatcaggatccacagcttaaagatgggaattcaggta

SEQ ID NO: 26007 - DNA, 128 bp, Homo sapiens
  MAP TO AP000111.1; EXPRESSED IN FETAL LIVER, SIGNAL = 1.8; EXPRESSED IN ADULT LIVER, SIGNAL = 2.3; EXPRESSED IN BRAIN, SIGNAL = 2.5; EXPRESSED IN PLACENTA, SIGNAL =   2; EXPRESSED IN HELA, SIGNAL = 1.7; EXPRESSED IN HEART, SIGNAL = 1.5; EXPRESSED IN BONE MARROW, SIGNAL = 3.2; EXPRESSED IN LUNG, SIGNAL = 1.5; NT HIT: L10347.1, EVALUE 5.00e-03; EST_HUMAN HIT: AI292059.1, EVALUE 7.00e-03; SWISSPROT HIT: Q92985, EVALUE 1.20e-01
ctgaaacattgttttgctgggtgtggagtaactgagggtggcgcagttgtctgggactgatctgtccccaccccatctctccatagatattgcctaacagagaagccaactgacctcgccactgccat

SEQ ID NO: 26008 - DNA, 331 bp, Homo sapiens
  MAP TO AL049758.11; EXPRESSED IN LUNG, SIGNAL = 1.7; EXPRESSED IN ADULT LIVER, SIGNAL = 2.3; EXPRESSED IN HELA, SIGNAL = 2.1; EXPRESSED IN PLACENTA, SIGNAL = 1.5; EXPRESSED IN BONE MARROW, SIGNAL = 2.8; EXPRESSED IN HEART, SIGNAL = 1.5; EXPRESSED IN FETAL LIVER, SIGNAL = 2.7; EXPRESSED IN BRAIN, SIGNAL =   2; EST_HUMAN HIT: AU132895.1, EVALUE 8.00e-39; SWISSPROT HIT: P06436, EVALUE 2.20e+00; NT HIT: gi11420289, EVALUE 5.00e-39
acttggatccagagctaggaatcttcaacttggcatcagcaatgtccacaaagttgtgcttggtgagtttgagacagtgaatgttgagaagagggcccagagctccctgtgccttgggatggctatgcacctgctccaatgccaactggtaatacaaagccctggaaaaagtcttttgtatgcggtaatacacaagggccaagcccccagtaccgaacacattgccgaaaaggaccattttttccttgaggcactggcatcctgctgcctggatacttttgccacctcacagcacaactctcttgaaaatcatcaaaggcaagttgttctg

SEQ ID NO: 26009 - DNA, 184 bp, Homo sapiens
  MAP TO AC008166.1; EXPRESSED IN HEART, SIGNAL = 3.3; EXPRESSED IN LUNG, SIGNAL = 4.1; EXPRESSED IN FETAL LIVER, SIGNAL =  12; EXPRESSED IN ADULT LIVER, SIGNAL =  15; EXPRESSED IN HELA, SIGNAL = 3.7; EXPRESSED IN PLACENTA, SIGNAL = 9.3; EST_HUMAN HIT: BE077941.1, EVALUE 7.00e-04; SWISSPROT HIT: P10895, EVALUE 1.00e+00; NT HIT: AL163268.2, EVALUE 7.00e-03
aaccaacaaaatgaacattaaaagactagaaggtttcctccacaagattggaatcaaggcaaggaattcctctcctaccacttctagtcaacattgtactggatctcagaccaataaggcaagaaagagaaagatcagtttaatggattggaaagaaagaaataaaattgtcattacttgcaca

SEQ ID NO: 26010 - DNA, 232 bp, Homo sapiens
  MAP TO Z97055.1; EXPRESSED IN LUNG, SIGNAL = 3.4; EXPRESSED IN HEART, SIGNAL =   3; EXPRESSED IN ADULT LIVER, SIGNAL = 6.5; EXPRESSED IN FETAL LIVER, SIGNAL = 9.3; EXPRESSED IN BRAIN, SIGNAL = 1.4; EXPRESSED IN PLACENTA, SIGNAL = 7.5; EXPRESSED IN HELA, SIGNAL = 3.7; NT HIT: AF083221.1, EVALUE 1.40e-01; EST_HUMAN HIT: AV720993.1, EVALUE 3.30e+00
gctaacttggctgtgctcctactgcagcagacctaatgctcagcggtcacgacactgttacatgccttcgtgatttttaattcgtagatactgccagtctgtggcaatgaggagtttggcttattagtgtttcagaaaataaggggaattttagtctgactcattcctttttggctactctcaacgtaagagtgaattaaggaggccaagctccagttctacaaggaagttt

SEQ ID NO: 26011 - DNA, 165 bp, Homo sapiens
  MAP TO AC004032.7; EXPRESSED IN PLACENTA, SIGNAL = 1.6; EXPRESSED IN BRAIN, SIGNAL = 1.9; EXPRESSED IN HEART, SIGNAL = 1.6; EXPRESSED IN LUNG, SIGNAL = 1.6; EXPRESSED IN BONE MARROW, SIGNAL = 1.6; EXPRESSED IN ADULT LIVER, SIGNAL =   2; EXPRESSED IN FETAL LIVER, SIGNAL = 1.8; EST_HUMAN HIT: BE410373.1, EVALUE 2.20e+00; SWISSPROT HIT: Q03030, EVALUE 5.20e-02; NT HIT: gi11428398, EVALUE 5.90e+00
acccctactctgagatgtgcatacttctctccctgctggcagatggcacccctggctccggctaccatgatggtaatgataccgctagctgcaggcttgctggcttcagggatgtgctcacacatcttgctctggcagaggggtgttctgagggcagggcccctc

SEQ ID NO: 26012 - DNA, 509 bp, Homo sapiens
  MAP TO AC008022.1; EXPRESSED IN HEART, SIGNAL = 1.7; NT HIT: AL114093.1, EVALUE 3.20e-01; EST_HUMAN HIT: AW893325.1, EVALUE 1.00e-04; SWISSPROT HIT: O35762, EVALUE 1.40e+00
  unsure 199
  unsure 319
  unsure 427
  unsure 447
  unsure 448
  unsure 451
  unsure 456
acatcccccaacatccacccagagggctgaagtggacaatgttgtttggacccagcagtgcagcagggtcctcagcactccagcttacacagtgtactataccccagggaatggatggtatagtgcattggagaggttatccctgggacaaagggaaccaaagcatgcactccccagcacaagaaagtcactctgcttngctgccactgagagcaacctcatccattctagcagcagggcagggtgcctatgcatgcaccctaaggacaggctctccccacctgtagccactgctgccactgccactgggacgaagtgntggtcctcagagactgagatacacctgcctggacctgctgccaccaacagaaattccacccccttcagcagcaagaccactgcacacttgcacatgccctgagggacnaacaatcctggcctgctacnntgnctgcntgctgctactgccaacaccctgccgggggccaaagtacacattccccagagac

SEQ ID NO: 26013 - DNA, 325 bp, Homo sapiens
  MAP TO AP000353.1; EXPRESSED IN LUNG, SIGNAL = 2.2; EXPRESSED IN HEART, SIGNAL = 1.8; EXPRESSED IN BONE MARROW, SIGNAL = 1.7; EXPRESSED IN FETAL LIVER, SIGNAL = 1.5; EXPRESSED IN ADULT LIVER, SIGNAL = 1.7; EXPRESSED IN BRAIN, SIGNAL = 2.6; EXPRESSED IN PLACENTA, SIGNAL = 1.8; EXPRESSED IN HELA, SIGNAL = 1.7; NT HIT: AF062467.1, EVALUE 5.10e-02; EST_HUMAN HIT: AA595831.1, EVALUE 7.50e-02; SWISSPROT HIT: P15384, EVALUE 8.20e+00
ctaggctcctgagcaggccgggtgtgagcccagcggaggctgtgggctctcctctgccctgccaccagcggccatcccagagaagtcaacccttaggtcagtggccagcctcctttctggggtggcttcagtctggaaatttgccctctttccctttctcttccctttttcctccctctgctttcccccaaccccacacacaacttttttcctatttggcaagtttgaccaagttgcatctgagagagctgcattgggattgaaatccaaaagcagagcttggtgcctgattaccatgatgacaggctgcagctgacaagtgctc

SEQ ID NO: 26014 - DNA, 88 bp, Homo sapiens
  MAP TO AC009313.2; EXPRESSED IN BONE MARROW, SIGNAL = 5.6; EXPRESSED IN LUNG, SIGNAL = 3.1; EXPRESSED IN HEART, SIGNAL = 4.1; EXPRESSED IN FETAL LIVER, SIGNAL = 4.4; EXPRESSED IN ADULT LIVER, SIGNAL = 4.3; EXPRESSED IN HELA, SIGNAL = 4.3; EXPRESSED IN PLACENTA, SIGNAL = 4.4; EXPRESSED IN BRAIN, SIGNAL = 2.9; NT HIT: AP000063.1, EVALUE 7.20e-01; EST_HUMAN HIT: AA897285.1, EVALUE 1.10e+00
tgacctcaggtgactcaggttcaggatatcatcagtgggcacctaaggacacagtgcaggacaagcttggcagcagcatggaaaaggg

SEQ ID NO: 26015 - DNA, 387 bp, Homo sapiens
  MAP TO AC008151.1; EXPRESSED IN PLACENTA, SIGNAL = 1.2; EXPRESSED IN BRAIN, SIGNAL = 2.1; EXPRESSED IN HELA, SIGNAL = 1.4; EXPRESSED IN HEART, SIGNAL = 2.3; EXPRESSED IN BONE MARROW, SIGNAL = 1.5; EXPRESSED IN LUNG, SIGNAL = 1.5; NT HIT: AF036365.1, EVALUE 0.00e+00; EST_HUMAN HIT: AA418663.1, EVALUE 3.00e-20; SWISSPROT HIT: P56539, EVALUE 2.00e-64
gtggattttgaagacgtgatcgcagagcctgtgggcacctacagctttgacggcgtgtggaaggtgagctacaccaccttcactgtctccaagtactggtgctaccgtctgttgtccacgctgctgggcgtcccactggccctgctctggggcttcctgttcgcctgcatctccttctgccacatctgggcggtggtgccatgcattaagagctacctgatcgagatccagtgcatcagccacatctactcactctgcatccgcaccttctgcaacccactcttcgcggccctgggccaggtctgcagcagcatcaaggtggtgctgcggaaggaggtctaaagccaggtggggcaacagcggtggcagggcagggggtggtgggcc

SEQ ID NO: 26016 - DNA, 171 bp, Homo sapiens
  MAP TO AC008009.4; EXPRESSED IN HEART, SIGNAL = 1.4; EXPRESSED IN HELA, SIGNAL = 1.7; EXPRESSED IN PLACENTA, SIGNAL = 1.6; NT HIT: gi11434704, EVALUE 8.00e-92; EST_HUMAN HIT: AV723382.1, EVALUE 1.00e-91; SWISSPROT HIT: P51114, EVALUE 4.00e-26
gcaaaagatgtgattgaagagcatggtccttcagaaaaggcaataaacggcccaactagtgcttctggcgatgacatttctaagctacagcgtactccaggagaagaaaagattaataccttaaaagaagaaaacactcaagaagcagcagtcctgaatggtgtttcataa

SEQ ID NO: 26017 - DNA, 229 bp, Homo sapiens
  MAP TO Z82188.2; EXPRESSED IN LUNG, SIGNAL = 2.4; EXPRESSED IN FETAL LIVER, SIGNAL =   2; EXPRESSED IN HELA, SIGNAL = 2.1; EXPRESSED IN BRAIN, SIGNAL =   3; EXPRESSED IN PLACENTA, SIGNAL =   4; EXPRESSED IN HEART, SIGNAL = 2.3; EXPRESSED IN BONE MARROW, SIGNAL = 2.3; NT HIT: D64004.1, EVALUE 1.40e-01; SWISSPROT HIT: Q62925, EVALUE 2.30e+00; EST_HUMAN HIT: BE908897.1, EVALUE 8.10e-01
acaacacactgctggtgaccatggccttgagcaggagctgcctcacctaattctccctccctgctcaggtttgcagccagccctcccttggcacttagaggcacctgataaacgtttgatagttgatggtgagtgggcaggaatccttgttcccattttgtatataaggacaggaccagagaggggcactcaccagcatcaggaccgagctggggcaaaagcggctttc

SEQ ID NO: 26018 - DNA, 82 bp, Homo sapiens
  MAP TO AL035681.13; EXPRESSED IN LUNG, SIGNAL = 3.8; EXPRESSED IN HEART, SIGNAL = 3.1; EXPRESSED IN ADULT LIVER, SIGNAL = 6.2; EXPRESSED IN HELA, SIGNAL = 3.9; EXPRESSED IN PLACENTA, SIGNAL = 6.4; EXPRESSED IN BONE MARROW, SIGNAL = 3.3; EXPRESSED IN FETAL LIVER, SIGNAL = 4.5; EXPRESSED IN BRAIN, SIGNAL = 4.5; NT HIT: gi11418177, EVALUE 4.00e-39; EST_HUMAN HIT: BF528850.1, EVALUE 6.00e-39; SWISSPROT HIT: P46060, EVALUE 6.50e-01
agacccatgtgcacgagcagcctggtgaggaaggtgttggagttgaaggacgaggagttgaaagccttctgcatcagggcat

SEQ ID NO: 26019 - DNA, 403 bp, Homo sapiens
  MAP TO Z82201.1; EXPRESSED IN HELA, SIGNAL = 1.5; EXPRESSED IN HEART, SIGNAL = 2.3; EXPRESSED IN LUNG, SIGNAL = 1.5; EST_HUMAN HIT: AW003535.1, EVALUE 3.70e-01; SWISSPROT HIT: O68326, EVALUE 1.30e+00; NT HIT: X92751.1, EVALUE 1.60e-02
acttgatcgccctaactttattcaccctcttttacttctcatcacaaaaagagctcagatcatcttgtactggcctctatgtttgaatggctgctgtctacttctgttttgtctgttacaacttgcacgcgccacgcacacctccaccacgacaagccacatgcttttccccagagcccatgcctcatctgtcccggcctggctcaggctgcctcatctatggctccctcctttcctggccagcccaggcttaggccttacgattcagtgtgggggccacctcctccagggagtcctccttaaagggatcttttccttgtgcctccagaggatgctccagttccttcgacaacagccaattactatgaatatgacttgtctgtttaccatctgtgtctgggat

SEQ ID NO: 26020 - DNA, 161 bp, Homo sapiens
  MAP TO AP000350.1; EXPRESSED IN FETAL LIVER, SIGNAL = 2.2; EXPRESSED IN BRAIN, SIGNAL = 2.3; EXPRESSED IN HELA, SIGNAL = 1.9; EXPRESSED IN HEART, SIGNAL = 1.8; EXPRESSED IN ADULT LIVER, SIGNAL = 1.5; EXPRESSED IN PLACENTA, SIGNAL = 3.4; EXPRESSED IN BONE MARROW, SIGNAL = 2.7; EXPRESSED IN LUNG, SIGNAL = 1.5; NT HIT: AJ012008.1, EVALUE 3.70e-01; EST_HUMAN HIT: BF679022.1, EVALUE 6.00e-81; SWISSPROT HIT: P17809, EVALUE 8.00e-03
gaattcaccaatgagacatggcaggcgcgtactggagagccactgcccgatcacctagtcctgcttatgtggtccctcatcgtgtctctgtatcccctgggaggcctctttggagcactgcttgcaggtcccttggccatcacgctgggaaggtaagtgct

SEQ ID NO: 26021 - DNA, 120 bp, Homo sapiens
  MAP TO AL008723.8; EXPRESSED IN BONE MARROW, SIGNAL = 3.4; EXPRESSED IN LUNG, SIGNAL = 2.7; EXPRESSED IN HEART, SIGNAL = 2.4; EXPRESSED IN FETAL LIVER, SIGNAL = 1.3; EXPRESSED IN PLACENTA, SIGNAL = 1.6; EXPRESSED IN HELA, SIGNAL = 1.4; EXPRESSED IN BRAIN, SIGNAL = 1.9; EST_HUMAN HIT: BE973327.1, EVALUE 2.50e-02; SWISSPROT HIT: P17483, EVALUE 1.40e+00; NT HIT: AB047817.1, EVALUE 2.70e-01
atgcaggcagagccactcagacagacctgggagggacttggggcaacagcccagagagggcctggcttctgtgcagcccttaccgtgagagggggcggatggggaggggcagcccttacg

SEQ ID NO: 26022 - DNA, 193 bp, Homo sapiens
  MAP TO AL008723.8; EXPRESSED IN FETAL LIVER, SIGNAL = 1.5; EXPRESSED IN ADULT LIVER, SIGNAL = 2.4; EXPRESSED IN BRAIN, SIGNAL = 2.3; EXPRESSED IN HELA, SIGNAL = 2.5; EXPRESSED IN BONE MARROW, SIGNAL = 5.7; EXPRESSED IN LUNG, SIGNAL = 2.9; EXPRESSED IN HEART, SIGNAL = 2.6; NT HIT: X51755.1, EVALUE 7.00e-31; EST_HUMAN HIT: AI367639.1, EVALUE 3.00e-03; SWISSPROT HIT: Q05049, EVALUE 2.90e+00
gtatggaagtcagaagtccaaaatgaggcctgagctgctaagatcagggtgccagcagggccgggctccttccgggggctctgagacaaatccatttccagaacttttccagcttctagaggacgcccccagctcctggccctttcttctaactacaaagccagagctcagcatcttcagatctctctcctga

SEQ ID NO: 26023 - DNA, 940 bp, Homo sapiens
  MAP TO Z97055.1; EXPRESSED IN LUNG, SIGNAL = 4.9; EXPRESSED IN BONE MARROW, SIGNAL = 3.1; EXPRESSED IN HEART, SIGNAL = 2.9; EXPRESSED IN FETAL LIVER, SIGNAL = 5.4; EXPRESSED IN ADULT LIVER, SIGNAL = 3.1; EXPRESSED IN BRAIN, SIGNAL = 3.3; EXPRESSED IN PLACENTA, SIGNAL = 2.6; EXPRESSED IN HELA, SIGNAL = 3.8; NT HIT: gi11528489, EVALUE 2.40e+00; EST_HUMAN HIT: BF038939.1, EVALUE 3.60e+00; SWISSPROT HIT: Q00130, EVALUE 8.00e-29
ggttgctgggtggagagccttcccaccggaatgcctgagaggaggcgaggacgccgggcccctccacgcttttccctgggctccacgctgctctgtgaaagggaagggaatcatccatctggaatatgaaggaagaataacaaaacctcactgtccaccccagagaagacacggtcacagaggctgcatgccacactgcgggtgccacagggagcctgtctacacagcgtcctcacactgcaggtgccacagggaccctgtctacacagcgtcctccgactgcaggtgccacagggaccctgtccacacagcgtcctccaactgcaggtgccacagggagcctgtctacacagcgtcctccaactgcaggtgccacagggaccctgtctacacagcgtcctcacactgcaggtgccacagggaccctgtctacacagcgtcctccaactgcaggtgccacagggaccctgtctacacagcgtcctcacactgcaggtgccacagggaccctgtctacacagcgtcctcacactgcaggtgccacagggatcctgtctacacagcgtcctccaactgcaggtgccacagggagcctgcctacacagcgtcctcacactgcaggtgccacagggatcctgtctacacagcgtcctccaactgcaggtgccacagggaccctgtctacacagcgtcctcacactgcaggtgccacagggatcctgtctacacagcgtcctccaactgcaggtgccacagggagcctgtctacacatcaaactgaaggctccacagggacccagtctacacagcatcctcacactgcaggtgccacagggaccctgtctacacagcgtcctcacactgcaggtgccacagggacccagtctacacagcgtcctcacactgcaggtgccacagggacccagcctacacagcgtcc

SEQ ID NO: 26024 - DNA, 96 bp, Homo sapiens
  MAP TO AP000344.1; EXPRESSED IN PLACENTA, SIGNAL = 2.6; EXPRESSED IN BRAIN, SIGNAL = 2.4; EXPRESSED IN HELA, SIGNAL =   2; EXPRESSED IN HEART, SIGNAL = 1.8; EXPRESSED IN LUNG, SIGNAL = 2.2; EXPRESSED IN BONE MARROW, SIGNAL = 2.5; EXPRESSED IN ADULT LIVER, SIGNAL = 1.9; EXPRESSED IN FETAL LIVER, SIGNAL = 2.8; EST_HUMAN HIT: AW809314.1, EVALUE 7.50e-02; SWISSPROT HIT: Q64419, EVALUE 6.40e-01; NT HIT: gi9633069, EVALUE 1.30e-02
ggtcagcagctccttggaggattttgtcctcaggcacctcagtggggcctcagagtctgatgcattgtacccacagaattgtgcaactacctgcag

SEQ ID NO: 26025 - DNA, 143 bp, Homo sapiens
  MAP TO AC002472.3; EXPRESSED IN PLACENTA, SIGNAL = 1.3; EXPRESSED IN HELA, SIGNAL = 2.5; EXPRESSED IN LUNG, SIGNAL = 1.6; EXPRESSED IN BONE MARROW, SIGNAL = 2.2; EXPRESSED IN HEART, SIGNAL = 5.1; EXPRESSED IN FETAL LIVER, SIGNAL = 2.9; EXPRESSED IN ADULT LIVER, SIGNAL = 3.5; EXPRESSED IN BRAIN, SIGNAL = 1.4; EST_HUMAN HIT: BF127762.1, EVALUE 3.00e-24; NT HIT: gi5729973, EVALUE 4.00e-22; SWISSPROT HIT: O43281, EVALUE 2.70e-01
ggagaaacaaagacagcacctccctcgggagagtgccggccctgttggaatgcagcggccgcaaaggatccagccagaggacaccccgccagcccagcgctaccaggctgcccaagtggggtgggcctggaagaaggcagcag

SEQ ID NO: 26026 - DNA, 178 bp, Homo sapiens
  MAP TO AL022238.1; EXPRESSED IN LUNG, SIGNAL = 2.9; EXPRESSED IN ADULT LIVER, SIGNAL = 4.6; EXPRESSED IN FETAL LIVER, SIGNAL =   3; EXPRESSED IN HELA, SIGNAL = 2.7; EXPRESSED IN PLACENTA, SIGNAL = 8.5; EXPRESSED IN BRAIN, SIGNAL = 2.7; EXPRESSED IN BONE MARROW, SIGNAL = 3.7; EXPRESSED IN HEART, SIGNAL = 2.5; NT HIT: AB029016.1, EVALUE 2.00e-92; EST_HUMAN HIT: BE796519.1, EVALUE 3.00e-92; SWISSPROT HIT: P20134, EVALUE 4.50e-01
atagtggcccctggtaaaacccggggagggtcaccgtacaaccagtttgatatcatccctggtgacacactgggtggccatacgggtcctgctggtgatagctggttacctgccaaatctccaccaacaaataaaatcggaagtaaatccagcaatgccagttggcctccaggtattg

SEQ ID NO: 26027 - DNA, 190 bp, Homo sapiens
  MAP TO AC004832.3; EXPRESSED IN LUNG, SIGNAL = 3.6; EXPRESSED IN BONE MARROW, SIGNAL = 5.9; EXPRESSED IN HEART, SIGNAL =   3; EXPRESSED IN ADULT LIVER, SIGNAL = 7.2; EXPRESSED IN FETAL LIVER, SIGNAL = 5.7; EXPRESSED IN HELA, SIGNAL = 3.8; EXPRESSED IN PLACENTA, SIGNAL = 5.3; EXPRESSED IN BRAIN, SIGNAL = 3.6; EST_HUMAN HIT: BF692298.1, EVALUE 6.60e-01; SWISSPROT HIT: P49193, EVALUE 5.00e-05; NT HIT: gi11417966, EVALUE 1.80e+00
cttctgagtttgcagctcacactcatgcaacagcagctcacagactttgatgcgcttccggatcatatcctgcttggaggctgacagcaggagacccttggggtcgagggacccaatgatgttgaagtacacagggcagccttcgtagtcgtagccacaaagaccacccgagtcatacagctggatgacc

SEQ ID NO: 26028 - DNA, 98 bp, Homo sapiens
  MAP TO AC004032.7; EXPRESSED IN LUNG, SIGNAL = 1.9; EXPRESSED IN BONE MARROW, SIGNAL = 1.9; EXPRESSED IN HEART, SIGNAL = 1.3; EXPRESSED IN FETAL LIVER, SIGNAL = 1.8; EXPRESSED IN ADULT LIVER, SIGNAL = 2.2; EXPRESSED IN BRAIN, SIGNAL = 1.7; EXPRESSED IN PLACENTA, SIGNAL = 1.9; EXPRESSED IN HELA, SIGNAL = 1.3; NT HIT: gi11466457, EVALUE 5.30e-02; EST_HUMAN HIT: AA456597.1, EVALUE 5.00e-03; SWISSPROT HIT: Q09684, EVALUE 5.50e+00
cttccaactcaagatctcgtaaaattccaagtcctgctggtcctggaaatccgatgccaattgctgcctgccctgtttcatctccactgtcggaataa

SEQ ID NO: 26029 - DNA, 413 bp, Homo sapiens
  MAP TO AC004832.3; EXPRESSED IN LUNG, SIGNAL = 2.1; EXPRESSED IN HEART, SIGNAL = 2.1; EXPRESSED IN BONE MARROW, SIGNAL = 2.5; EXPRESSED IN FETAL LIVER, SIGNAL = 2.9; EXPRESSED IN ADULT LIVER, SIGNAL = 2.2; EXPRESSED IN PLACENTA, SIGNAL = 4.6; EXPRESSED IN HELA, SIGNAL = 2.4; EXPRESSED IN BRAIN, SIGNAL = 2.7; SWISSPROT HIT: P06485, EVALUE 9.40e-02; NT HIT: gi9937991, EVALUE 6.60e-02; EST_HUMAN HIT: BF572630.1, EVALUE 1.50e+00
gtcctgcccttccccgtggcagaaggagaaactgaggctggtgtaggagtctctcccttcactcacctgggccagcgacttctcctgcgatgggctcaggtcacccacttgtccactcatgctgcccatgaatgggtccaggctccactctgtggctccctccaggtggcctgccttttgccagctggtagccatgcccacatttatcaccacccagaaatcccactacttcctgtgagcctcagggcaacaggtggggctcattccttactaggtgcctcaggcatggggccctggattcagcctgccctgggttcacatcctcacttgcaaaattaggacagcgatgtttcctcggagcgttgatgacatgttgaaattgacaccacctgatttcacacacacacggaggc

SEQ ID NO: 26030 - DNA, 200 bp, Homo sapiens
  MAP TO AB016897.1; EXPRESSED IN BRAIN, SIGNAL = 2.1; EXPRESSED IN PLACENTA, SIGNAL = 8.4; EXPRESSED IN HELA, SIGNAL = 3.2; EXPRESSED IN LUNG, SIGNAL = 4.1; EXPRESSED IN BONE MARROW, SIGNAL = 1.9; EXPRESSED IN HEART, SIGNAL = 2.8; EXPRESSED IN FETAL LIVER, SIGNAL =  15; EXPRESSED IN ADULT LIVER, SIGNAL = 8.4; EST_HUMAN HIT: BE177583.1, EVALUE 2.80e+00; NT HIT: AB011399.1, EVALUE 1.00e-109; SWISSPROT HIT: Q04952, EVALUE 2.90e+00
ccctacctttgtgttcaacacatttgtagcaatacattttggacctttctggtattggagcggacgtatcgcagatgtgtgggacttgtcttgcattactgtgcacagctctgtcagcccagaaagccagtccttagcttgtaaaatgcagaaagtcacggatggttacatggttaagatttaataatcactcgtcatag

SEQ ID NO: 26031 - DNA, 231 bp, Homo sapiens
  MAP TO AB016897.1; EXPRESSED IN PLACENTA, SIGNAL = 1.7; EXPRESSED IN BONE MARROW, SIGNAL = 2.4; EXPRESSED IN HEART, SIGNAL = 2.1; EXPRESSED IN ADULT LIVER, SIGNAL = 1.9; EXPRESSED IN FETAL LIVER, SIGNAL = 1.7; EXPRESSED IN BRAIN, SIGNAL = 2.9; EXPRESSED IN HELA, SIGNAL = 1.6; EXPRESSED IN LUNG, SIGNAL = 2.2; NT HIT: AB011399.1, EVALUE 1.00e-127; EST_HUMAN HIT: D30999.1, EVALUE 2.10e-01; SWISSPROT HIT: P40764, EVALUE 2.40e-02
atggcaggaaatgtgacttgttttcttcacgcagtgcaaagcctctgcagggtttctaggaggggctggggccacccaggtgatgtcagtggctgtcgctctggttgccgggatgggaggggaaggaatggaagcccggagcaggctcctgcaggagttggaggctttgaggaaccagatggtggtgtggccacccagataggagagcatggaggcatgggctggggtggg

SEQ ID NO: 26032 - DNA, 166 bp, Homo sapiens
  MAP TO AC004032.7; EXPRESSED IN BRAIN, SIGNAL = 3.4; EXPRESSED IN PLACENTA, SIGNAL = 3.9; EXPRESSED IN BONE MARROW, SIGNAL = 4.9; EXPRESSED IN LUNG, SIGNAL = 4.6; EXPRESSED IN HEART, SIGNAL = 2.9; EXPRESSED IN ADULT LIVER, SIGNAL = 4.6; EXPRESSED IN FETAL LIVER, SIGNAL =   5; EXPRESSED IN HELA, SIGNAL = 3.7; NT HIT: AL445065.1, EVALUE 1.50e+00; EST_HUMAN HIT: BF514993.1, EVALUE 2.20e+00
aaatgagatcttagacctaccgggcagggctgccaggagaatgacatatgatattaccaataacataattaccgctagtacctatcacatgttcattcttttaaactcaataattcctcatgtaaccctggaggaagcatctattctcctagtcccatttctcaga

SEQ ID NO: 26033 - DNA, 381 bp, Homo sapiens
  MAP TO AL035701.13; EXPRESSED IN PLACENTA, SIGNAL =  33; EXPRESSED IN HELA, SIGNAL =  26; EXPRESSED IN LUNG, SIGNAL =  36; EXPRESSED IN BONE MARROW, SIGNAL =  53; EXPRESSED IN HEART, SIGNAL =  32; EXPRESSED IN FETAL LIVER, SIGNAL =  33; EXPRESSED IN ADULT LIVER, SIGNAL =  17; EXPRESSED IN BRAIN, SIGNAL =  11; EST_HUMAN HIT: BF683808.1, EVALUE 2.00e-98; SWISSPROT HIT: P53462, EVALUE 5.00e-41; NT HIT: D50659.1, EVALUE 0.00e+00
gcggggcctcggtcagcagcaccacctgctcctccagggccacgcacagctcgttgtagaaaacatggtgccagatcttctccatgtcgtcccagtttgtgacgatgccatgcttgatggggtacttcagggtcaggatgccgcacttgctctgggcctggtcgcccacgtaggagtccttctggcccatgcccaccatcacgccctggtgccgggggtgcccgatgatggaggggaatatggctcggagggcattgtcccagcaaagctgcttttcacatgccggagccattgtcaatgaagagcgcggggatctcttcttccattgccactggcagaggagcacgcagcagcgggaggacatggtgcacgtgctggtgg

SEQ ID NO: 26034 - DNA, 123 bp, Homo sapiens
  MAP TO AC006992.2; EXPRESSED IN FETAL LIVER, SIGNAL = 3.7; EXPRESSED IN HELA, SIGNAL = 2.4; EXPRESSED IN BRAIN, SIGNAL = 1.5; EXPRESSED IN PLACENTA, SIGNAL = 3.4; EXPRESSED IN HEART, SIGNAL = 2.2; EXPRESSED IN LUNG, SIGNAL = 3.3; EXPRESSED IN ADULT LIVER, SIGNAL = 5.1; EST_HUMAN HIT: BE143002.1, EVALUE 1.60e+00; NT HIT: AF195953.1, EVALUE 6.90e-02
agtggctgctatatgccaggcatcatgctacccatgaaatgtcatgatgagcaaaatgtcctgtgcctgccgtcagagagtgacagtccagcaggaaagacagacaatccagaaatataaatg

SEQ ID NO: 26035 - DNA, 264 bp, Homo sapiens
  MAP TO Z83840.7; EXPRESSED IN PLACENTA, SIGNAL = 5.4; EXPRESSED IN BRAIN, SIGNAL = 2.5; EXPRESSED IN HELA, SIGNAL = 5.4; EXPRESSED IN LUNG, SIGNAL = 3.3; EXPRESSED IN HEART, SIGNAL =   4; EXPRESSED IN BONE MARROW, SIGNAL = 3.6; EXPRESSED IN FETAL LIVER, SIGNAL = 3.5; EXPRESSED IN ADULT LIVER, SIGNAL = 4.9; SWISSPROT HIT: P12956, EVALUE 6.00e-31; NT HIT: gi11418189, EVALUE 0.00e+00; EST_HUMAN HIT: AU148836.1, EVALUE 0.00e+00
ataatgaaggttctggaagcaaaaggcccaaggtggagtattcagaagaggagctgaagacccacatcagcaagggtacgctgggcaagttcactgtgcccatgctgaaagaggcctgccgggcttacgggctgaagagtgggctgaagaagcaggagctgctggaagccctcaccaagcacttccaggactgaccagaggccgcgcgtccagctgcccttccgcagtgtggccaggctgcctggccttgtcctcagccagtta

SEQ ID NO: 26036 - DNA, 371 bp, Homo sapiens
  MAP TO AC005006.2; EXPRESSED IN ADULT LIVER, SIGNAL = 3.6; EXPRESSED IN FETAL LIVER, SIGNAL = 4.8; EXPRESSED IN PLACENTA, SIGNAL = 3.4; EXPRESSED IN HEART, SIGNAL = 3.7; EXPRESSED IN LUNG, SIGNAL = 8.3; EXPRESSED IN BRAIN, SIGNAL = 5.7; EXPRESSED IN HELA, SIGNAL = 6.9; EXPRESSED IN BONE MARROW, SIGNAL = 6.5; NT HIT: AF182714.1, EVALUE 2.00e-72; SWISSPROT HIT: Q14681, EVALUE 3.50e-02; EST_HUMAN HIT: AL045865.2, EVALUE 8.70e-02
tgccctgctgcaggaggagaggctggacgcggtgaccctgctttacgccacctcgctgcccagcttctgcctgctggcgggtgcagccctggtgctggaggctggcgttgccccaccgcccactgctggcgactctcgcctctgggcctgcatcctgctcagctgcctcctgtctgttctctataacctggccagcttctccctgctggccctcacctctgccctcaccgtccacgtcctgggcaacctcaccgtggtgggcaacctcatcctgtcccggctgttgtttggcagccgcctcagtgccctcagctacgtgggcatcgcactcactctttcaggaatgttcctttaccacaactgcgagttcg

SEQ ID NO: 26037 - DNA, 189 bp, Homo sapiens
  MAP TO Z83840.7; EXPRESSED IN FETAL LIVER, SIGNAL = 6.9; EXPRESSED IN ADULT LIVER, SIGNAL = 8.1; EXPRESSED IN PLACENTA, SIGNAL = 5.7; EXPRESSED IN HELA, SIGNAL = 5.2; EXPRESSED IN BRAIN, SIGNAL = 4.7; EXPRESSED IN HEART, SIGNAL = 4.8; EXPRESSED IN LUNG, SIGNAL =   6; EXPRESSED IN BONE MARROW, SIGNAL = 4.2; SWISSPROT HIT: Q06990, EVALUE 3.40e-01; NT HIT: X03258.1, EVALUE 4.40e-01; EST_HUMAN HIT: AW300862.1, EVALUE 1.00e-102
tgggtgatcctcgtgcaggggaggacagcatcggagatcacactgcttcacagagggatcttcagctgcaaggtcactgctgtactggggccacccttcctaagacagagagtccccagggccaggaggcacctgggaacccaaatggggctccacagaatacacgagcctccaaaaagtttagtatta

SEQ ID NO: 26038 - DNA, 131 bp, Homo sapiens
  MAP TO Z83844.5; EXPRESSED IN PLACENTA, SIGNAL = 2.2; EXPRESSED IN HELA, SIGNAL = 3.1; EXPRESSED IN LUNG, SIGNAL = 3.3; EXPRESSED IN HEART, SIGNAL = 2.7; EXPRESSED IN BONE MARROW, SIGNAL =   4; EXPRESSED IN FETAL LIVER, SIGNAL = 1.5; EXPRESSED IN ADULT LIVER, SIGNAL = 2.6; EXPRESSED IN BRAIN, SIGNAL = 4.1; NT HIT: AF092453.1, EVALUE 2.90e-01; EST_HUMAN HIT: BF333915.1, EVALUE 4.30e-01; SWISSPROT HIT: P34298, EVALUE 1.80e+00
ctgtagccccacaaactcaccataagtccaggaggaagtctgagcctcagtttctcatttttacaacggggatggtctgcctgctttgtggggtggtggtgaggctcacacgggagtggggaagctgaaca

SEQ ID NO: 26039 - DNA, 166 bp, Homo sapiens
  MAP TO AC007106.6; EXPRESSED IN ADULT LIVER, SIGNAL = 6.5; EXPRESSED IN HELA, SIGNAL = 9.8; EXPRESSED IN PLACENTA, SIGNAL =  12; EXPRESSED IN LUNG, SIGNAL = 6.8; EXPRESSED IN BONE MARROW, SIGNAL = 4.3; EXPRESSED IN FETAL LIVER, SIGNAL = 4.5; EXPRESSED IN BRAIN, SIGNAL = 8.9; EXPRESSED IN HEART, SIGNAL = 4.2; SWISSPROT HIT: P75320, EVALUE 2.30e+00; NT HIT: AJ277546.2, EVALUE 4.00e-72; EST_HUMAN HIT: AI961087.1, EVALUE 2.00e-62
gagcagggggtggtgctcgtcggggaggctcgggccgcacaggagcccatggagtgggtgggaggctcaggcatggtgggctgcaggtcccgagccctgccccgtgggaaggcagctaaggcccggcgagaaatcgagcgcagcgccggtgggccagcactgctgg

SEQ ID NO: 26040 - DNA, 114 bp, Homo sapiens
  MAP TO AC006427.13; EXPRESSED IN HEART, SIGNAL = 1.5; EXPRESSED IN LUNG, SIGNAL = 1.4; EXPRESSED IN BRAIN, SIGNAL = 1.9; EXPRESSED IN PLACENTA, SIGNAL = 1.5; EST_HUMAN HIT: BF345368.1, EVALUE 5.00e-31; NT HIT: gi11430273, EVALUE 4.00e-31
ctgcagagcattatccctccagggtactctgactcggaggagaggaagagtacgccgagggatggcgagagctagaaacagcgcgagaaggcaggcgaggatggctacgggaag

SEQ ID NO: 26041 - DNA, 162 bp, Homo sapiens
  MAP TO Z83840.7; EXPRESSED IN HELA, SIGNAL = 4.3; EXPRESSED IN BRAIN, SIGNAL = 3.1; EXPRESSED IN PLACENTA, SIGNAL = 6.3; EXPRESSED IN HEART, SIGNAL = 2.4; EXPRESSED IN LUNG, SIGNAL = 2.8; EXPRESSED IN BONE MARROW, SIGNAL = 2.9; EXPRESSED IN ADULT LIVER, SIGNAL = 3.6; EXPRESSED IN FETAL LIVER, SIGNAL = 3.8; EST_HUMAN HIT: BE907222.1, EVALUE 3.00e-86; SWISSPROT HIT: P12956, EVALUE 3.00e-25; NT HIT: gi11418189, EVALUE 2.00e-86
ggagctcaaccctgttcagtgctctgctcatcaagtgtctggagaaggaggttgcagcattgtgcagatacacaccccgcaggaacatccctccttattttgtggctttggtgccacaggaagaagagttggatgaccagaaaattcaggtgactcctccag

SEQ ID NO: 26042 - DNA, 112 bp, Homo sapiens
  MAP TO Z83844.5; EXPRESSED IN PLACENTA, SIGNAL = 1.7; EXPRESSED IN HELA, SIGNAL =   2; EXPRESSED IN BRAIN, SIGNAL = 2.7; EXPRESSED IN HEART, SIGNAL =   2; EXPRESSED IN BONE MARROW, SIGNAL = 3.3; EXPRESSED IN LUNG, SIGNAL = 2.5; EXPRESSED IN FETAL LIVER, SIGNAL = 1.4; NT HIT: gi11545732, EVALUE 8.00e-57; EST_HUMAN HIT: BE737154.1, EVALUE 1.00e-56; SWISSPROT HIT: P55194, EVALUE 2.00e-11
gaaggccttggagatgagctgtgccatccagaatcagctggcccgcatcctggccgagtttgagatgaccctggagagggacgtcctgcagccactcagcaggctgagtgag

SEQ ID NO: 26043 - DNA, 195 bp, Homo sapiens
  MAP TO AP000356.1; EXPRESSED IN HEART, SIGNAL =  12; EXPRESSED IN LUNG, SIGNAL = 4.8; EXPRESSED IN BONE MARROW, SIGNAL = 7.6; EXPRESSED IN ADULT LIVER, SIGNAL =  29; EXPRESSED IN FETAL LIVER, SIGNAL =  16; EXPRESSED IN BRAIN, SIGNAL =  14; EXPRESSED IN PLACENTA, SIGNAL =  13; EXPRESSED IN HELA, SIGNAL = 5.2; NT HIT: AF272146.1, EVALUE 4.60e-01; EST_HUMAN HIT: AW939051.1, EVALUE 1.00e-101; SWISSPROT HIT: Q10625, EVALUE 3.80e+00
cctggtggctggtcgctcacctggttcttgtagcccttgtcgacacccagggtctgggtacagaagcggtgcctcacgccaaagtggtgcatcaggtaggccaggtcgatggtccagatgctcctggtcagctgcagcttctgcagggctctctcaaactcactgtcgtccagctggcccaggtacctgcaggta

SEQ ID NO: 26044 - DNA, 79 bp, Homo sapiens
  MAP TO Z83844.5; EXPRESSED IN PLACENTA, SIGNAL = 1.7; EXPRESSED IN HELA, SIGNAL = 1.4; EXPRESSED IN HEART, SIGNAL = 1.9; EXPRESSED IN LUNG, SIGNAL = 1.8; EXPRESSED IN BONE MARROW, SIGNAL = 1.6; EXPRESSED IN ADULT LIVER, SIGNAL = 4.4; EXPRESSED IN FETAL LIVER, SIGNAL = 1.4; EXPRESSED IN BRAIN, SIGNAL = 1.5; NT HIT: gi11545732, EVALUE 4.00e-11; EST_HUMAN HIT: BF083722.1, EVALUE 7.00e-11
ccatacgaccatggccaacaaggtggagacgctgaaggaggaggaggaggagctgaagaggaaagtggagcaatgcagg

SEQ ID NO: 26045 - DNA, 153 bp, Homo sapiens
  MAP TO AP000356.1; EXPRESSED IN BRAIN, SIGNAL = 1.5; EXPRESSED IN PLACENTA, SIGNAL = 1.6; EXPRESSED IN HEART, SIGNAL = 2.5; EXPRESSED IN BONE MARROW, SIGNAL = 1.7; EXPRESSED IN ADULT LIVER, SIGNAL = 5.1; EXPRESSED IN FETAL LIVER, SIGNAL = 2.1; SWISSPROT HIT: Q03248, EVALUE 1.00e-20; EST_HUMAN HIT: AV651816.1, EVALUE 6.00e-81; NT HIT: gi11417871, EVALUE 4.00e-81
aaccatgacatggtggtggtgtctcccatcctggaacgagacagcgagcatggggatgttttgtggaatacagccgtggtgatctccaattccggagcagtcctgggaaagaccaggaaaaaccacatccccagagtgggtgatttcaacgag

SEQ ID NO: 26046 - DNA, 155 bp, Homo sapiens
  MAP TO AC007564.9; EXPRESSED IN LUNG, SIGNAL = 1.4; EXPRESSED IN HEART, SIGNAL = 1.6; EXPRESSED IN FETAL LIVER, SIGNAL = 2.1; EXPRESSED IN HELA, SIGNAL = 2.2; NT HIT: gi6679031, EVALUE 2.00e-33; EST_HUMAN HIT: BF676077.1, EVALUE 4.00e-45; SWISSPROT HIT: P33215, EVALUE 3.00e-12
gtgtgtgggttgaatttatccaccaatgtcatagatgaagcatcccatattttaatatcatctcctgatgaagcaaatctgaggttttcctgcatgactgcgcctacaaatagtttaaaacaatgtattttaaaaacatttaagaatagacatac

SEQ ID NO: 26047 - DNA, 176 bp, Homo sapiens
  MAP TO Z97055.1; EXPRESSED IN PLACENTA, SIGNAL = 4.8; EXPRESSED IN HELA, SIGNAL = 6.2; EXPRESSED IN HEART, SIGNAL = 4.2; EXPRESSED IN LUNG, SIGNAL = 5.9; EXPRESSED IN BONE MARROW, SIGNAL = 6.2; EXPRESSED IN ADULT LIVER, SIGNAL = 5.7; EXPRESSED IN FETAL LIVER, SIGNAL = 7.6; EXPRESSED IN BRAIN, SIGNAL = 5.7; NT HIT: gi10946775, EVALUE 1.60e+00; EST_HUMAN HIT: BF575239.1, EVALUE 2.40e+00; SWISSPROT HIT: P34926, EVALUE 5.90e-01
ctgcagcgctggtgagggcttctgacctcaagcacctgcacctgcttcccacctggccacagaggaacaggcccagaagtgcagggagccgacgccctgagccacacccaaccactaaaggacaagagttggcacctgccccccacacgccaaagaaggctcctggctgtgttcat

SEQ ID NO: 26048 - DNA, 134 bp, Homo sapiens
  MAP TO Z97055.1; EXPRESSED IN FETAL LIVER, SIGNAL = 1.6; EXPRESSED IN PLACENTA, SIGNAL = 1.5; EXPRESSED IN HEART, SIGNAL = 1.9; EXPRESSED IN LUNG, SIGNAL = 1.9; EXPRESSED IN BONE MARROW, SIGNAL = 1.9; EXPRESSED IN BRAIN, SIGNAL = 1.8; EXPRESSED IN HELA, SIGNAL = 2.3; EXPRESSED IN ADULT LIVER, SIGNAL = 1.5; NT HIT: U17590.1, EVALUE 3.00e-01; EST_HUMAN HIT: BE263253.1, EVALUE 7.00e-03
tggctgtgtgaccctcagcaagtctcctaccctctcggtgtctgcctgacctggccatccacaggacagttgtgggcgagctggtgtcaaggaagatgcacctggtccacccggtcctttgccatattgtccag

SEQ ID NO: 26049 - DNA, 328 bp, Homo sapiens
  MAP TO Z97055.1; EXPRESSED IN BONE MARROW, SIGNAL = 3.5; EXPRESSED IN ADULT LIVER, SIGNAL = 1.9; EXPRESSED IN HELA, SIGNAL = 2.7; EXPRESSED IN PLACENTA, SIGNAL = 3.6; EXPRESSED IN HEART, SIGNAL = 2.7; EXPRESSED IN LUNG, SIGNAL =   3; EXPRESSED IN FETAL LIVER, SIGNAL = 2.4; EXPRESSED IN BRAIN, SIGNAL = 4.9; NT HIT: M37202.1, EVALUE 3.00e-03; EST_HUMAN HIT: H55162.1, EVALUE 2.00e-64; SWISSPROT HIT: P16070, EVALUE 9.50e-01
aaatgcacgttgtacaataaagagtggaagaggatgtcaatgggcaggaatggagccaaactctacgggagaacggagctggccaggcagagctgctggacacctgaggctccctccttccaccacaaacaccactgccccatggcctagagaggtgggtaaaaaccgatctccactgagatctcccaggacagggcctgcacgtggtggcgcctgtacctgagggggtctctccgcagtactggggacattgtggatgcccacctagcagtgctcacgcacctcccccggtgcaccacccgctggcaactgcagcttggccactctg

SEQ ID NO: 26050 - DNA, 103 bp, Homo sapiens
  MAP TO AL031588.1; EXPRESSED IN FETAL LIVER, SIGNAL = 4.3; EXPRESSED IN ADULT LIVER, SIGNAL = 2.2; EXPRESSED IN HELA, SIGNAL = 3.1; EXPRESSED IN PLACENTA, SIGNAL = 3.2; EXPRESSED IN BRAIN, SIGNAL = 3.4; EXPRESSED IN HEART, SIGNAL = 2.5; EXPRESSED IN BONE MARROW, SIGNAL = 2.8; EXPRESSED IN LUNG, SIGNAL = 3.4; NT HIT: gi11418322, EVALUE 9.00e-44; EST_HUMAN HIT: AW241864.1, EVALUE 1.00e-43; SWISSPROT HIT: P16383, EVALUE 3.20e+00
actttttttttttgccattatttcttcagttttcttttcttgcactgatctttctcctctccttctgtgactccagtgactcagacgttagacctcttgatgt

SEQ ID NO: 26051 - DNA, 82 bp, Homo sapiens
  MAP TO AP000354.1; EXPRESSED IN LUNG, SIGNAL = 1.4; EXPRESSED IN BONE MARROW, SIGNAL = 1.8; EXPRESSED IN HEART, SIGNAL = 1.4; EXPRESSED IN BRAIN, SIGNAL = 1.5; NT HIT: AE004382.1, EVALUE 6.60e-01; EST_HUMAN HIT: BE165503.1, EVALUE 9.80e-01
agaatggttgcatgcaaaacgaagtattatgaaatttaaataccgaggaatgggtggagtgttagggaaggcatcccagaag

SEQ ID NO: 26052 - DNA, 131 bp, Homo sapiens
  MAP TO AL022328.21; EXPRESSED IN HEART, SIGNAL = 2.3; EXPRESSED IN LUNG, SIGNAL = 2.4; EXPRESSED IN FETAL LIVER, SIGNAL = 1.9; EXPRESSED IN ADULT LIVER, SIGNAL = 2.2; EXPRESSED IN HELA, SIGNAL = 2.3; EXPRESSED IN PLACENTA, SIGNAL = 2.5; EXPRESSED IN BRAIN, SIGNAL = 2.1; EXPRESSED IN BONE MARROW, SIGNAL =   2; NT HIT: gi6753083, EVALUE 1.10e+00; EST_HUMAN HIT: BE792832.1, EVALUE 1.00e-35; SWISSPROT HIT: Q38798, EVALUE 1.40e+00
aggggtgcccacaggtcctgccgtcagaggctcaggatggccaagtgaggcttacctctgggctccgtgggacaggcctctccgaacagccacatccagggtggctgctgcagcagaggctggagtggctg

SEQ ID NO: 26053 - DNA, 169 bp, Homo sapiens
  MAP TO AL031588.1; EXPRESSED IN ADULT LIVER, SIGNAL = 3.4; EXPRESSED IN HELA, SIGNAL = 2.3; EXPRESSED IN PLACENTA, SIGNAL = 4.6; EXPRESSED IN BRAIN, SIGNAL = 2.3; EXPRESSED IN HEART, SIGNAL = 1.9; EXPRESSED IN BONE MARROW, SIGNAL = 2.2; EXPRESSED IN LUNG, SIGNAL = 2.8; EXPRESSED IN FETAL LIVER, SIGNAL = 6.7; SWISSPROT HIT: Q62203, EVALUE 4.50e-01; NT HIT: gi11418322, EVALUE 1.00e-62; EST_HUMAN HIT: AW371376.1, EVALUE 2.00e-62
cgcctctccccgccctgacgtcacagaagatggctttacctacccaggtccctggatctgaccggccctctactcctggggggtgtccccaacctgccagaagacttcccagtgcacaaccggcagttcgtgggctgcatgcggaacctgtcagtcgacggcaaaaatg

SEQ ID NO: 26054 - DNA, 538 bp, Homo sapiens
  MAP TO AL031587.3; EXPRESSED IN PLACENTA, SIGNAL = 3.3; EXPRESSED IN LUNG, SIGNAL = 2.6; EXPRESSED IN HEART, SIGNAL =   2; EXPRESSED IN FETAL LIVER, SIGNAL = 5.6; EXPRESSED IN ADULT LIVER, SIGNAL = 4.9; EXPRESSED IN BRAIN, SIGNAL = 3.3; EXPRESSED IN HELA, SIGNAL = 2.6; EXPRESSED IN BONE MARROW, SIGNAL = 2.1; NT HIT: AF287351.1, EVALUE 3.40e-01; EST_HUMAN HIT: AW838864.1, EVALUE 5.10e-01; SWISSPROT HIT: Q96682, EVALUE 1.80e-01
gcagcaacagcctgtcccgctcctgcacacacaccctctgaaggtctgagtgaaataggcagagaatgggatgtggctgtttgtcctgggggctttaggggaccctccacccgcactgtgataggcaggcagctcccaggcctgtctgaacaggaactctgccagctctccaaaggccctgcaagccccggccactccatcacagctcattgatgggcacttatgggtgctgactgtgcacttggctggtgagccaggcctggagtgggcaggagaggcttctgaaagggtttcagaggagtccacagtctgagagaagagaacaccctgaaaaagggagttcaggggtctgaggagagactgctgtggtctgcagggtgaggtggtgctggtgaaggcagccgaggaaggggcgtcacccactggaaggcttgcagcttagggaaggagacttgaagattagagatggataaggagtggggcatatcacagaatcccagaataggagatgcagaatgtctttggaaatgaccccgtc

SEQ ID NO: 26055 - DNA, 264 bp, Homo sapiens
  MAP TO AL022328.21; EXPRESSED IN ADULT LIVER, SIGNAL = 3.9; EXPRESSED IN HELA, SIGNAL = 1.9; EXPRESSED IN PLACENTA, SIGNAL = 3.6; EXPRESSED IN BONE MARROW, SIGNAL = 1.7; EXPRESSED IN HEART, SIGNAL = 2.4; EXPRESSED IN LUNG, SIGNAL = 1.9; EXPRESSED IN FETAL LIVER, SIGNAL = 5.2; EXPRESSED IN BRAIN, SIGNAL = 3.1; NT HIT: AJ297357.1, EVALUE 3.00e-03; EST_HUMAN HIT: AW827357.1, EVALUE 6.00e-05; SWISSPROT HIT: P08547, EVALUE 2.00e-11
tcccttttgggggctgagtagcattgtattgtgtgtatacaccatacttggcgtatcagttcatctatcagtggacacttgggctgcagacatttgactattgtaagtagtgctgctacaacgggtgtacagatatctatttgagaccctgctttcagtcgtcatgggtacatacccggaagtggaattgttggtaattctagtcttaattttttgagaaaccatcatcttgctttccacagtaactgcagcattccacacccc

SEQ ID NO: 26056 - DNA, 1001 bp, Homo sapiens
  MAP TO AL031587.3; EXPRESSED IN LUNG, SIGNAL = 2.9; EXPRESSED IN BONE MARROW, SIGNAL = 7.2; EXPRESSED IN PLACENTA, SIGNAL = 3.3; EXPRESSED IN HEART, SIGNAL =   3; EXPRESSED IN ADULT LIVER, SIGNAL = 3.2; EXPRESSED IN FETAL LIVER, SIGNAL = 3.9; EXPRESSED IN BRAIN, SIGNAL = 3.4; EXPRESSED IN HELA, SIGNAL = 3.3; EST_HUMAN HIT: BF224125.1, EVALUE 4.00e-03; NT HIT: gi11430130, EVALUE 1.00e-02; SWISSPROT HIT: P06729, EVALUE 1.00e-01
ctattcctccgttataatttttggttgacatgctgatcctccacttccagcctgtgagtccctcgagggagagactgtgtctgctttgcctccatgtccccgtgctggccccatcctggcacatctgggcaggacgtcacacgacctggttctattcctggtcatgttcctgcccaagccaccccttcggtttccccatccaaaatgtgggagagctgggcttcgccaggtcacttctgagggtacaattgtccagaagatggacagggctggcgtggcccaggcctgtgccaggcgcccaagattgatggttgagggccatgggcagttccctcggtcagcagccccctccgtggctccctgtagccccatgtagagaatggggtgggtgtagagagggggcggagggctgcatgccagggcctcagcagaccagaccccaccaaagaggctagcctggcaccccccagcaggaaggtggcccccaatggttatcaaaggccagcggggcccctccctccaaggatgaaggggtgtccctgacaagcagggccatccgtcagccctgggcacaatggggtcattaacccctgaccccagctcctttttagccacttcctctgagggctgagtgtgtggggctgagaagaacagagcctcgcttttcagcgaggggctgaggagcaatggctgcttggctggtcccaggctctctagctcccaacccctgaggctccctcggaggcctgggggagcctcccactctctgtcccctgagagggcacccccttggccaaccaccctcaagccaaagcagtgtgtatggggagggacagatagagaccctgagaaagagacagagaccgggagagagggaagccgaggtgggcagatcatcagagacagacacttgagacctgagacggctcctttccctttacaaagtgcactcacaggaaaatcatagaccaaccctgcttgtgaaattagatgtgagaatc

SEQ ID NO: 26057 - DNA, 238 bp, Homo sapiens
  MAP TO AL031588.1; EXPRESSED IN HEART, SIGNAL = 1.9; EXPRESSED IN BONE MARROW, SIGNAL = 2.6; EXPRESSED IN LUNG, SIGNAL = 1.7; EXPRESSED IN ADULT LIVER, SIGNAL = 1.8; EXPRESSED IN FETAL LIVER, SIGNAL = 2.1; EXPRESSED IN HELA, SIGNAL = 1.7; EXPRESSED IN PLACENTA, SIGNAL =   2; EXPRESSED IN BRAIN, SIGNAL = 2.7; SWISSPROT HIT: O83980, EVALUE 2.60e+00; EST_HUMAN HIT: AL120739.1, EVALUE 1.00e-129; NT HIT: AL163282.2, EVALUE 5.70e-01
gcatcctgtgcagggaagcgtcgtactcaatgggacacaaacggagtcacagggacaacttgcagtgagggtccttgaaaggtggggatttgctcttcttcacctagaagaaggcttcctgccgggaggtatgagggccagagccggtgcagccacactagaccatgaggatgagaagctcatcacggcagcacaggatggagtaagcctgggtccctgacaccaaggagtactgacc

SEQ ID NO: 26058 - DNA, 98 bp, Homo sapiens
  MAP TO AC002472.3; EXPRESSED IN FETAL LIVER, SIGNAL = 3.3; EXPRESSED IN HELA, SIGNAL = 1.8; EXPRESSED IN BRAIN, SIGNAL = 2.1; EXPRESSED IN HEART, SIGNAL = 2.1; EXPRESSED IN BONE MARROW, SIGNAL = 1.5; EXPRESSED IN LUNG, SIGNAL =   2; NT HIT: X96400.1, EVALUE 8.20e-01; EST_HUMAN HIT: AV723365.1, EVALUE 7.00e-27
caatgcccaccacgcagacgtcagcccgcacgaccttgctgctcttcagcacaacctccttcagctgtggggagtgggtggataaacaggtggaccca

SEQ ID NO: 26059 - DNA, 268 bp, Homo sapiens
  MAP TO Z82188.2; EXPRESSED IN LUNG, SIGNAL = 3.5; EXPRESSED IN FETAL LIVER, SIGNAL = 2.4; EXPRESSED IN ADULT LIVER, SIGNAL =   3; EXPRESSED IN HELA, SIGNAL = 3.9; EXPRESSED IN PLACENTA, SIGNAL = 3.7; EXPRESSED IN BRAIN, SIGNAL = 3.5; EXPRESSED IN HEART, SIGNAL = 2.6; EXPRESSED IN BONE MARROW, SIGNAL = 4.4; NT HIT: AF037275.1, EVALUE 6.50e-01; EST_HUMAN HIT: AA011278.1, EVALUE 2.00e-82; SWISSPROT HIT: P31424, EVALUE 2.90e-01
aggatacatgggcaggatccagggggtcctcagagtcacagcaccgttggcagccgctggccacagctctgtcaaaggtgagctccaccatagggatctcacacatcaggagaaagagcaggagcgctgcccagacgggacccagggcggctgtccccatggtgacctggaacaaggaaggagggacaggaactatacttcactcaacatctactatgtgccgatgcctggggtgggcgggtgctgcgtcctccagccacagcactcc

SEQ ID NO: 26060 - DNA, 114 bp, Homo sapiens
  MAP TO Z83844.5; EXPRESSED IN PLACENTA, SIGNAL = 2.9; EXPRESSED IN BONE MARROW, SIGNAL = 1.9; EXPRESSED IN FETAL LIVER, SIGNAL = 2.9; EXPRESSED IN BRAIN, SIGNAL = 1.9; EXPRESSED IN HELA, SIGNAL = 1.9; EXPRESSED IN HEART, SIGNAL = 2.2; EXPRESSED IN LUNG, SIGNAL = 2.2; EXPRESSED IN ADULT LIVER, SIGNAL = 2.7; NT HIT: gi11417334, EVALUE 9.90e-01; EST_HUMAN HIT: AL121154.1, EVALUE 3.70e-01; SWISSPROT HIT: Q10959, EVALUE 3.20e+00
tgggtgaaggactgggcctgtggtgtccgctaactcgcagttgaacccagatgctggacttcctcctgtcgagagcctcggttttcccacattgcagggaagtggttgaaccat

SEQ ID NO: 26061 - DNA, 144 bp, Homo sapiens
  MAP TO AP000352.2; EXPRESSED IN BRAIN, SIGNAL =   2; EXPRESSED IN PLACENTA, SIGNAL = 2.5; EXPRESSED IN HEART, SIGNAL = 1.4; EXPRESSED IN FETAL LIVER, SIGNAL = 2.3; EXPRESSED IN ADULT LIVER, SIGNAL = 2.4; EXPRESSED IN HELA, SIGNAL =   2; EXPRESSED IN BONE MARROW, SIGNAL = 2.3; EXPRESSED IN LUNG, SIGNAL = 1.7; SWISSPROT HIT: Q9Y6J0, EVALUE 2.00e-21; NT HIT: gi11417862, EVALUE 8.00e-76; EST_HUMAN HIT: AW501630.1, EVALUE 1.00e-75
cggctccatgcttccatcctgaagctcctggggaagcccgattctggggttggtgcagaggtcctggtcaactttatgaaggaggctgcagaaggaccctttgccaggggcgaggagaagaacacacccaaagcttcagaaaag

SEQ ID NO: 26062 - DNA, 277 bp, Homo sapiens
  MAP TO Z83844.5; EXPRESSED IN HELA, SIGNAL = 1.4; EXPRESSED IN PLACENTA, SIGNAL =   2; EXPRESSED IN BONE MARROW, SIGNAL = 1.5; EXPRESSED IN HEART, SIGNAL = 1.8; EXPRESSED IN LUNG, SIGNAL = 1.7; EXPRESSED IN ADULT LIVER, SIGNAL = 1.5; NT HIT: gi11446076, EVALUE 7.00e-04; SWISSPROT HIT: P33563, EVALUE 7.00e-01; EST_HUMAN HIT: AU131513.1, EVALUE 2.00e-05
ctctgtgccaagccctccactcgcttcatccttcctcaggctctcctgtgcttctcccatgtaggtgtcatcatccccattcactgacagggaaactgagactaagaaaggggaagtgacttccccaaggctgtacttggcttctgtttatttagcattatttaatttattgattattattgagcacctactatatcctgggcactgtgctaggtgctgggaagacagatgtgaacaaaataaccccaaatctctgctgtggggagcttgcactcca

SEQ ID NO: 26063 - DNA, 118 bp, Homo sapiens
  MAP TO Z82188.2; EXPRESSED IN LUNG, SIGNAL = 2.5; EXPRESSED IN HEART, SIGNAL = 1.5; EXPRESSED IN FETAL LIVER, SIGNAL = 1.9; EXPRESSED IN ADULT LIVER, SIGNAL = 1.6; EXPRESSED IN HELA, SIGNAL = 1.2; EXPRESSED IN BRAIN, SIGNAL = 2.3; EXPRESSED IN BONE MARROW, SIGNAL = 5.6; NT HIT: gi11418068, EVALUE 2.00e-60; EST_HUMAN HIT: BE273049.1, EVALUE 3.00e-60; SWISSPROT HIT: Q05144, EVALUE 5.00e-18
cgtctgtggataggagagcggccggagacggtcgtagtcctcctgcccagcagtgtcccacagccccaggttcactggcttgctgtccaccatcacattggctgaatagttgtcaaac

SEQ ID NO: 26064 - DNA, 168 bp, Homo sapiens
  MAP TO Z97055.1; EXPRESSED IN FETAL LIVER, SIGNAL = 8.8; EXPRESSED IN ADULT LIVER, SIGNAL = 7.2; EXPRESSED IN HELA, SIGNAL = 5.7; EXPRESSED IN PLACENTA, SIGNAL = 4.6; EXPRESSED IN BRAIN, SIGNAL = 6.1; EXPRESSED IN BONE MARROW, SIGNAL = 5.1; EXPRESSED IN LUNG, SIGNAL = 4.2; EXPRESSED IN HEART, SIGNAL = 4.9; EST_HUMAN HIT: AW022015.1, EVALUE 3.00e-18; NT HIT: U62293.1, EVALUE 2.00e-06
tgcagcctcattcctcctggatgccagacaagaactcgggtgccacgagtgcaggtgcaaaaggctgtcacactgacccttaaccctcgctggcagaaggcagccgcctcacatgaaaaggcagaggggcccactgagctggtaacacttaagccccgacagctgggt

SEQ ID NO: 26065 - DNA, 152 bp, Homo sapiens
  MAP TO Z98884.11; EXPRESSED IN HEART, SIGNAL = 1.9; EXPRESSED IN BRAIN, SIGNAL = 3.1; EST_HUMAN HIT: BE700970.1, EVALUE 2.00e-80; NT HIT: AB020640.1, EVALUE 1.00e-80; SWISSPROT HIT: Q10904, EVALUE 6.00e-01
ataaccagttcaggatgtccatcctggaacgactggagcagatggagaggaggatggccgagatgacggggtcccagcagcacaaacaggcgagcggaggcggcagcagtggaggcggcagcgggagcgggaatggagggagccaggcacag

SEQ ID NO: 26066 - DNA, 95 bp, Homo sapiens
  MAP TO AL022319.2; EXPRESSED IN LUNG, SIGNAL = 1.3; EXPRESSED IN HEART, SIGNAL = 1.3; EXPRESSED IN ADULT LIVER, SIGNAL = 1.5; EXPRESSED IN FETAL LIVER, SIGNAL = 1.4; NT HIT: gi11434905, EVALUE 7.90e-01; EST_HUMAN HIT: BE788199.1, EVALUE 2.90e-01
ctgtggctgtgcgggctgcactgggttcctggtgcgctgattgtctttccatttttccttcctctgccaaggtttctatcattatccaatcccaa

SEQ ID NO: 26067 - DNA, 109 bp, Homo sapiens
  MAP TO Z82188.2; EXPRESSED IN HELA, SIGNAL = 2.4; EXPRESSED IN PLACENTA, SIGNAL = 1.6; EXPRESSED IN BRAIN, SIGNAL = 2.2; EXPRESSED IN HEART, SIGNAL =   2; EXPRESSED IN BONE MARROW, SIGNAL = 2.8; EXPRESSED IN LUNG, SIGNAL = 3.1; EXPRESSED IN FETAL LIVER, SIGNAL = 2.9; EXPRESSED IN ADULT LIVER, SIGNAL = 2.8; NT HIT: AL163285.2, EVALUE 2.00e-17; EST_HUMAN HIT: BF476511.1, EVALUE 5.00e-22
cacatgcatgttctttcaatatgcatccgtcagggccaccttcatgaatatgcatagctcctcctgtagcctgttgaatatgtatgtttagccaacgcctttagcataa

SEQ ID NO: 26068 - DNA, 102 bp, Homo sapiens
  MAP TO AC007719.1; EXPRESSED IN BRAIN, SIGNAL =   3; EXPRESSED IN PLACENTA, SIGNAL = 5.8; EXPRESSED IN HELA, SIGNAL = 3.7; EXPRESSED IN HEART, SIGNAL = 3.1; EXPRESSED IN LUNG, SIGNAL = 8.5; EXPRESSED IN BONE MARROW, SIGNAL =   5; EXPRESSED IN FETAL LIVER, SIGNAL = 6.2; EXPRESSED IN ADULT LIVER, SIGNAL = 5.4; NT HIT: AL163213.2, EVALUE 1.00e-36; EST_HUMAN HIT: AV731652.1, EVALUE 2.00e-36
cacaagataatatcatcagttaaagcaggaaccggccatctggatgtgtacgtgcaggtcacaggggatatgatagcttagcttgggctcagaggcctgaca

SEQ ID NO: 26069 - DNA, 222 bp, Homo sapiens
  MAP TO AL079300.11; EXPRESSED IN PLACENTA, SIGNAL = 1.2; EXPRESSED IN LUNG, SIGNAL = 1.3; EXPRESSED IN HEART, SIGNAL = 1.5; EXPRESSED IN FETAL LIVER, SIGNAL = 1.4; EST_HUMAN HIT: AA969186.1, EVALUE 1.30e-02; SWISSPROT HIT: P77837, EVALUE 2.80e+00; NT HIT: AL163267.2, EVALUE 9.00e-03
atgaagaaattgaagctcagagagtgataggcccccaggcacccatcaagcatgtgtcagagctggaactgcgccctgggttcactcccccaccaggtgtcaggcaggcctggtgttcaatgccagccttttcagagtgtaactcacctgggacacttctaagactgagtgttctcatttgtgaaatggagacaatgatccctgccagctgcatcctaaaag

SEQ ID NO: 26070 - DNA, 141 bp, Homo sapiens
  MAP TO AC002472.3; EXPRESSED IN PLACENTA, SIGNAL = 4.7; EXPRESSED IN BRAIN, SIGNAL = 5.5; EXPRESSED IN BONE MARROW, SIGNAL = 4.8; EXPRESSED IN LUNG, SIGNAL =   4; EXPRESSED IN HEART, SIGNAL = 2.8; EXPRESSED IN ADULT LIVER, SIGNAL = 5.5; EXPRESSED IN FETAL LIVER, SIGNAL = 6.9; EXPRESSED IN HELA, SIGNAL =   4; NT HIT: AF111168.2, EVALUE 3.20e-01; EST_HUMAN HIT: BE266305.1, EVALUE 7.00e-74; SWISSPROT HIT: P03179, EVALUE 5.30e+00
tggatatcacaggctaaaggagggggcagtccccaccatatttgagtctttctccaagttgcgccggacaaccaagaccaaaggacacagttacccacctggccccgctgaagtcagccggctcagacgatgcaggaagcg

SEQ ID NO: 26071 - DNA, 139 bp, Homo sapiens
  MAP TO Z83840.7; EXPRESSED IN HELA, SIGNAL = 5.1; EXPRESSED IN BRAIN, SIGNAL = 3.3; EXPRESSED IN PLACENTA, SIGNAL = 4.6; EXPRESSED IN BONE MARROW, SIGNAL = 3.5; EXPRESSED IN LUNG, SIGNAL = 3.7; EXPRESSED IN HEART, SIGNAL = 2.7; EXPRESSED IN ADULT LIVER, SIGNAL = 4.4; EXPRESSED IN FETAL LIVER, SIGNAL = 7.1; NT HIT: gi11418189, EVALUE 8.00e-73; EST_HUMAN HIT: BF305649.1, EVALUE 1.00e-72; SWISSPROT HIT: P12956, EVALUE 2.00e-20
tgtatccaaagtgtgtacatcagtaagatcataagcagtgatcgagatctcttggctgtggtgttctatggtaccgagaaagacaaaaattcagtgaattttaaaaatatttacgtcttacaggagctggataatccag

SEQ ID NO: 26072 - DNA, 104 bp, Homo sapiens
  MAP TO AC007719.1; EXPRESSED IN BRAIN, SIGNAL = 2.9; EXPRESSED IN PLACENTA, SIGNAL = 3.7; EXPRESSED IN HELA, SIGNAL = 1.9; EXPRESSED IN LUNG, SIGNAL = 1.9; EXPRESSED IN HEART, SIGNAL = 2.5; EXPRESSED IN BONE MARROW, SIGNAL = 2.6; EXPRESSED IN FETAL LIVER, SIGNAL = 4.4; EXPRESSED IN ADULT LIVER, SIGNAL = 2.7; EST_HUMAN HIT: AA487212.1, EVALUE 4.00e-22; NT HIT: AF009660.1, EVALUE 2.00e-23
  unsure 21
  unsure 23
atgccagcatcaagcttcctngntacatcctgaagaaccatgagccaattaaacctcttttcttaaaaattacccagtctcaggtatttcttgatagcaatgca

SEQ ID NO: 26073 - DNA, 89 bp, Homo sapiens
  MAP TO AC004032.7; EXPRESSED IN HELA, SIGNAL = 4.3; EXPRESSED IN BRAIN, SIGNAL = 4.2; EXPRESSED IN PLACENTA, SIGNAL = 7.6; EXPRESSED IN BONE MARROW, SIGNAL = 3.1; EXPRESSED IN LUNG, SIGNAL = 4.8; EXPRESSED IN HEART, SIGNAL = 3.1; EXPRESSED IN ADULT LIVER, SIGNAL = 6.3; EXPRESSED IN FETAL LIVER, SIGNAL = 8.9; NT HIT: AB038161.1, EVALUE 2.90e+00; EST_HUMAN HIT: BE178699.1, EVALUE 2.80e-01; SWISSPROT HIT: P19565, EVALUE 4.20e+00
atgttggctgagcctttcctctgtgccaggcacactcttagcaactgtgcacacatcatctcctgtgatcctcacagcagtcccataag

SEQ ID NO: 26074 - DNA, 118 bp, Homo sapiens
  MAP TO AB016897.1; EXPRESSED IN HEART, SIGNAL = 1.5; EXPRESSED IN BONE MARROW, SIGNAL = 2.4; EXPRESSED IN LUNG, SIGNAL = 1.4; EXPRESSED IN ADULT LIVER, SIGNAL = 1.8; EXPRESSED IN FETAL LIVER, SIGNAL = 1.9; EXPRESSED IN HELA, SIGNAL = 1.3; EXPRESSED IN PLACENTA, SIGNAL = 1.5; EXPRESSED IN BRAIN, SIGNAL = 1.8; SWISSPROT HIT: Q42533, EVALUE 9.30e+00; NT HIT: AB011399.1, EVALUE 2.00e-60; EST_HUMAN HIT: AW955384.1, EVALUE 3.80e-01
agggctccttcccatctcaggttcagagtccatggtgcagagtgtagggtagtcctgagtcgggagggaattcttgaagtccagggtgggatctggagggagctgatggtaaagggca

SEQ ID NO: 26075 - DNA, 98 bp, Homo sapiens
  MAP TO AC002472.3; EXPRESSED IN PLACENTA, SIGNAL = 1.4; EXPRESSED IN BRAIN, SIGNAL = 2.7; EXPRESSED IN HEART, SIGNAL = 1.9; EXPRESSED IN BONE MARROW, SIGNAL = 2.5; EXPRESSED IN LUNG, SIGNAL = 1.8; EXPRESSED IN FETAL LIVER, SIGNAL = 1.9; EXPRESSED IN HELA, SIGNAL = 1.9; NT HIT: AB002059.1, EVALUE 4.00e-46; EST_HUMAN HIT: AV707847.1, EVALUE 3.10e-01; SWISSPROT HIT: Q59118, EVALUE 7.20e+00
tccatatgtcaagtggctgaacttttgggacagtgggctctatggggcaggtacagaggccctggcaggtgccctgagcaaaagcagcagcatctgcg

SEQ ID NO: 26076 - DNA, 205 bp, Homo sapiens
  MAP TO AL008723.8; EXPRESSED IN HELA, SIGNAL = 1.4; EXPRESSED IN BONE MARROW, SIGNAL = 1.9; EXPRESSED IN LUNG, SIGNAL = 2.9; EXPRESSED IN HEART, SIGNAL = 4.6; EXPRESSED IN PLACENTA, SIGNAL = 2.1; EXPRESSED IN BRAIN, SIGNAL = 1.9; SWISSPROT HIT: Q10975, EVALUE 2.90e+00; NT HIT: X51755.1, EVALUE 1.00e-07; EST_HUMAN HIT: BF182715.1, EVALUE 7.20e-01
atgcctgggcctgggacccccaccatttcttgttcatcagggacacagcagctgtgaaggcagctgccttcaccagagcagcgatgtagcccagcaagggcagggacagagacgcaaggtctgggggatttttccacaatgctgcagaaagaaagtccctgtggagctcagtctcagccatccctgccccagctgtgagctgaac

SEQ ID NO: 26077 - DNA, 128 bp, Homo sapiens; identical to SEQ ID NO: 18948
  MAP TO AP000345.1; EXPRESSED IN PLACENTA, SIGNAL = 1.9; EXPRESSED IN HEART, SIGNAL = 1.4; EXPRESSED IN FETAL LIVER, SIGNAL = 2.6; EXPRESSED IN BRAIN, SIGNAL = 1.5; EXPRESSED IN HELA, SIGNAL = 1.6; EXPRESSED IN BONE MARROW, SIGNAL = 2.4; EXPRESSED IN LUNG, SIGNAL = 2.6; EXPRESSED IN ADULT LIVER, SIGNAL = 2.9; NT HIT: AB007961.1, EVALUE 7.20e-02; EST_HUMAN HIT: BE395061.1, EVALUE 9.00e-58; SWISSPROT HIT: P10265, EVALUE 2.00e-05

SEQ ID NO: 26078 - DNA, 148 bp, Homo sapiens
  MAP TO AB016897.1; EXPRESSED IN BRAIN, SIGNAL = 3.6; EXPRESSED IN PLACENTA, SIGNAL = 3.9; EXPRESSED IN HELA, SIGNAL = 3.2; EXPRESSED IN HEART, SIGNAL = 2.8; EXPRESSED IN LUNG, SIGNAL = 3.5; EXPRESSED IN BONE MARROW, SIGNAL = 3.9; EXPRESSED IN FETAL LIVER, SIGNAL = 4.6; EXPRESSED IN ADULT LIVER, SIGNAL = 3.3; NT HIT: AB011399.1, EVALUE 4.00e-78; SWISSPROT HIT: P37433, EVALUE 6.90e+00; EST_HUMAN HIT: AV730653.1, EVALUE 2.00e+00
atggccacttctgtctggttgttcaggtctgagttcaaatgtttattcttcagagagttcttggccagtcacccaagcttaggatgctctcggtcatgttctttctcacaaccttatatttttcacaatgtgtgtcactattttaaag

SEQ ID NO: 26079 - DNA, 127 bp, Homo sapiens
  MAP TO Z97055.1; EXPRESSED IN LUNG, SIGNAL = 1.9; EXPRESSED IN HEART, SIGNAL = 1.4; EXPRESSED IN BONE MARROW, SIGNAL = 1.9; EXPRESSED IN BRAIN, SIGNAL =   2; EXPRESSED IN HELA, SIGNAL = 1.5; NT HIT: gi11418248, EVALUE 1.00e-65; EST_HUMAN HIT: AA351518.1, EVALUE 1.00e-65; SWISSPROT HIT: P50224, EVALUE 3.00e-06
gcttatcattcataaacctccggcagaattcttgaaaggtgcctcggtagctcatggtccgcagagagcggtggaactgataataagacaccaccagatccttggggttgcgagccatatagatgac

SEQ ID NO: 26080 - DNA, 157 bp, Homo sapiens
  MAP TO AB016897.1; EXPRESSED IN ADULT LIVER, SIGNAL = 5.7; EXPRESSED IN FETAL LIVER, SIGNAL = 4.5; EXPRESSED IN HELA, SIGNAL = 4.4; EXPRESSED IN PLACENTA, SIGNAL = 3.3; EXPRESSED IN BRAIN, SIGNAL = 3.8; EXPRESSED IN BONE MARROW, SIGNAL = 4.9; EXPRESSED IN HEART, SIGNAL = 3.5; EXPRESSED IN LUNG, SIGNAL = 3.5; NT HIT: AB011399.1, EVALUE 2.00e-83; EST_HUMAN HIT: AU137249.1, EVALUE 5.30e-01; SWISSPROT HIT: Q12809, EVALUE 5.20e+00
aatccaatattcattgctgtcagtatttgctaaatagtttgagcatttattactgcagcctgtattacactgtcagatttttccagtgtgaatttttctaatgctacaattaatagaaatacattaacactgatttactgcattatgattttaacaa

SEQ ID NO: 26081 - DNA, 103 bp, Homo sapiens
  MAP TO AB016897.1; EXPRESSED IN BONE MARROW, SIGNAL =   2; EXPRESSED IN LUNG, SIGNAL = 2.1; EXPRESSED IN ADULT LIVER, SIGNAL = 1.8; EXPRESSED IN FETAL LIVER, SIGNAL = 2.6; EXPRESSED IN BRAIN, SIGNAL = 2.1; EXPRESSED IN HELA, SIGNAL = 1.6; EXPRESSED IN PLACENTA, SIGNAL = 1.6; EXPRESSED IN HEART, SIGNAL = 1.3; SWISSPROT HIT: P55196, EVALUE 4.00e-12; NT HIT: gi11419159, EVALUE 2.00e-51; EST_HUMAN HIT: BE005275.1, EVALUE 2.00e-33
acagcgacagagtgtcgtctgcctctagcacagccgagcggggaatggtgaagccgatgatcagagtagaacagcagccagattatcgcaggcaagaaagcag

SEQ ID NO: 26082 - DNA, 245 bp, Homo sapiens
  MAP TO AC004032.7; EXPRESSED IN HELA, SIGNAL = 2.9; EXPRESSED IN PLACENTA, SIGNAL = 3.3; EXPRESSED IN HEART, SIGNAL =   3; EXPRESSED IN LUNG, SIGNAL = 3.8; EXPRESSED IN BONE MARROW, SIGNAL = 4.8; EXPRESSED IN ADULT LIVER, SIGNAL = 3.6; EXPRESSED IN FETAL LIVER, SIGNAL = 4.7; EXPRESSED IN BRAIN, SIGNAL = 4.2; EST_HUMAN HIT: AU150683.1, EVALUE 3.50e+00; NT HIT: AJ133714.1, EVALUE 5.90e-01; SWISSPROT HIT: O83217, EVALUE 3.20e-01
tgttggatgttcaaatgagacaaacgaaacacacaggctgtgtaagctgtaacacgcttgccatgcatgagagtctgggcattgtgggtctcaagcccacagccacactagtatatgaatctgggttccttaatagattgtgtactcccaaagtgcagggtctctggcaaacttatctcagctgcctcagtatccaacatgcaggagatgagtaggtgatctgtgagtttctgttgaattaatga

SEQ ID NO: 26083 - DNA, 152 bp, Homo sapiens
  MAP TO AB016897.1; EXPRESSED IN LUNG, SIGNAL = 1.9; EXPRESSED IN ADULT LIVER, SIGNAL =   2; EXPRESSED IN PLACENTA, SIGNAL = 1.3; EXPRESSED IN HEART, SIGNAL =   2; NT HIT: AB011399.1, EVALUE 1.00e-80; EST_HUMAN HIT: AA668336.1, EVALUE 6.00e-13; SWISSPROT HIT: P40334, EVALUE 1.00e+00
ctccagatccccttatctgccaagttttgtctccttcaaacttctgaactcttgggcgtgtgtagcagtgagcctctttgcaaagggttcgtttcctcgggcactcatctttactgaacatggcccagcttgtcattgtgaaggtgacattg

SEQ ID NO: 26084 - DNA, 206 bp, Homo sapiens
  MAP TO AC004032.7; EXPRESSED IN HEART, SIGNAL = 1.4; EXPRESSED IN BONE MARROW, SIGNAL = 2.7; EXPRESSED IN LUNG, SIGNAL = 2.3; EXPRESSED IN ADULT LIVER, SIGNAL = 2.7; EXPRESSED IN FETAL LIVER, SIGNAL = 1.8; EXPRESSED IN BRAIN, SIGNAL = 2.1; EXPRESSED IN PLACENTA, SIGNAL = 1.4; EXPRESSED IN HELA, SIGNAL = 2.1; NT HIT: X53981.1, EVALUE 1.20e-01; EST_HUMAN HIT: BE296343.1, EVALUE 7.20e-01; SWISSPROT HIT: Q12968, EVALUE 1.30e+00
ttaaggcatcagatgcagggtttctaggaacatggcaggccctggattctggcaatactgaggcacagtgccccaacctttgctcttgaacccatgcttgccttgttcccagcgacccctccaccctaccctgcttaatatctccaaaggaattttattccaagcactgcaagatctggactggggtggggtgagggaagtagtac

SEQ ID NO: 26085 - DNA, 126 bp, Homo sapiens
  MAP TO AL022329.9; EXPRESSED IN HEART, SIGNAL = 1.9; EST_HUMAN HIT: BF594610.1, EVALUE 6.50e+00; SWISSPROT HIT: P47876, EVALUE 4.10e+00; NT HIT: gi11423540, EVALUE 4.40e+00
gcctttctggtgttgagagcttccgaggcctgattcctttgcctgttgcccgtgctgctcactttgaaaacaagagtgtttcggtggaaggatttgagaacaaaatgctggggcaaatggacattc

SEQ ID NO: 26086 - DNA, 124 bp, Homo sapiens
  MAP TO AC004832.3; EXPRESSED IN HEART, SIGNAL = 2.7; EXPRESSED IN LUNG, SIGNAL = 5.1; EXPRESSED IN BONE MARROW, SIGNAL = 3.8; EXPRESSED IN ADULT LIVER, SIGNAL = 6.7; EXPRESSED IN FETAL LIVER, SIGNAL =  12; EXPRESSED IN BRAIN, SIGNAL = 2.3; EXPRESSED IN PLACENTA, SIGNAL = 5.9; EXPRESSED IN HELA, SIGNAL = 3.6; EST_HUMAN HIT: AA504562.1, EVALUE 6.00e-28; SWISSPROT HIT: P39188, EVALUE 9.00e-09; NT HIT: AJ010770.1, EVALUE 2.00e-20
ctgtagtcccagctacatggcaggctgaggtgggaagatcactcgagcccaggggttcaaggctgcagtgagctatgatcatgctactaaactccagcctgggtgacagaacgaggccctgtct

SEQ ID NO: 26087 - DNA, 158 bp, Homo sapiens
  MAP TO AC006548.19; EXPRESSED IN FETAL LIVER, SIGNAL = 2.1; EXPRESSED IN ADULT LIVER, SIGNAL = 2.2; EXPRESSED IN PLACENTA, SIGNAL = 6.6; EXPRESSED IN HELA, SIGNAL = 1.5; EXPRESSED IN HEART, SIGNAL = 1.6; EXPRESSED IN LUNG, SIGNAL = 1.9; EXPRESSED IN BONE MARROW, SIGNAL = 1.4; NT HIT: AF003528.1, EVALUE 3.00e-51; EST_HUMAN HIT: BE463763.1, EVALUE 4.00e-42; SWISSPROT HIT: P11311, EVALUE 2.30e+00
atgagtcaacaagtcaccatgcgacctgaactgcctatcatgaactgggtgctttctgactcatctagccataacgtgggtcatgcacagcagcattccatcatcacatggaaatggtgtataagtgattgggctcaagcaggtcctggggggcacaa

SEQ ID NO: 26088 - DNA, 131 bp, Homo sapiens
  MAP TO AC007363.3; EXPRESSED IN FETAL LIVER, SIGNAL = 3.3; EXPRESSED IN ADULT LIVER, SIGNAL =   2; EXPRESSED IN PLACENTA, SIGNAL = 2.8; EXPRESSED IN HELA, SIGNAL = 1.4; EXPRESSED IN BRAIN, SIGNAL = 1.8; EXPRESSED IN BONE MARROW, SIGNAL = 2.2; EXPRESSED IN LUNG, SIGNAL = 1.6; EXPRESSED IN HEART, SIGNAL = 1.4; NT HIT: gi9625875, EVALUE 2.90e-01; EST_HUMAN HIT: BE612554.1, EVALUE 6.00e-68; SWISSPROT HIT: O42163, EVALUE 4.00e-05
agacgataaaggattctctccatcgtggtagggataacgattggacaccgttggaataactccctttgtaaccagactgtccagcaaccttccgaacaagtattttccctcctgaattatcaagcacacca

SEQ ID NO: 26089 - DNA, 95 bp, Homo sapiens
  MAP TO AC004832.3; EXPRESSED IN PLACENTA, SIGNAL = 2.6; EXPRESSED IN HELA, SIGNAL = 1.3; EXPRESSED IN HEART, SIGNAL = 1.8; EXPRESSED IN LUNG, SIGNAL = 1.3; EXPRESSED IN FETAL LIVER, SIGNAL = 2.8; EXPRESSED IN ADULT LIVER, SIGNAL = 2.4; NT HIT: J04600.1, EVALUE 7.90e-01; EST_HUMAN HIT: BF035099.1, EVALUE 7.40e-02
gaaattgaagctggtaacatctccttcttacagggtactgagatgaccagtgtagaagagaccaataagctacctcacctactgcctagcacatg

SEQ ID NO: 26090 - DNA, 274 bp, Homo sapiens
  MAP TO Z82201.1; EXPRESSED IN FETAL LIVER, SIGNAL =   3; EXPRESSED IN ADULT LIVER, SIGNAL =   2; EXPRESSED IN HELA, SIGNAL = 1.7; EXPRESSED IN PLACENTA, SIGNAL = 1.3; EXPRESSED IN HEART, SIGNAL = 1.6; EXPRESSED IN LUNG, SIGNAL = 1.7; EXPRESSED IN BONE MARROW, SIGNAL = 2.7; NT HIT: X87344.1, EVALUE 1.10e-02; EST_HUMAN HIT: AW819141.1, EVALUE 4.00e-03; SWISSPROT HIT: P53746, EVALUE 4.50e+00
ctagaaaaatagccaaaatgcagccaagagataaagacatgaaaaatataaaagacagtttaagagacatgaagaatgaaatgggaagacccaatatttatgtaatgtaataggagttccagaagaaaagaccagtgagaatggggtggagacaatattcaaagaatcatagctgggaacgttcaaaaactgaaaaatacgaattctcagattgcaatagcaggagtgtgggaaggttaaatagacatctgtaccaagatacatggtagggaaa

SEQ ID NO: 26091 - DNA, 190 bp, Homo sapiens
  MAP TO Z97055.1; EXPRESSED IN BRAIN, SIGNAL = 1.5; EXPRESSED IN HELA, SIGNAL = 1.3; EXPRESSED IN HEART, SIGNAL = 1.3; EXPRESSED IN BONE MARROW, SIGNAL = 1.6; EXPRESSED IN LUNG, SIGNAL = 1.2; SWISSPROT HIT: P51170, EVALUE 1.70e+00; NT HIT: X06322.1, EVALUE 2.80e-02; EST_HUMAN HIT: AW662875.1, EVALUE 4.20e-02
agatgagggatgtgccaaaggtgctgggcacagcagtggccgtcacgtcccaggacatggggatggtgactgtctcccacagcaggttgctctacctccagctgccaatcatgacaataaccaagccaccagctcctggtgccttctgaggactcagctccagagagcacttaaccctcgacacccctgc

SEQ ID NO: 26092 - DNA, 101 bp, Homo sapiens
  MAP TO AP000041.1; EXPRESSED IN HEART, SIGNAL = 1.3; NT HIT: AB030818.1, EVALUE 8.50e-01; EST_HUMAN HIT: BE396525.1, EVALUE 1.30e+00
atgtgtcatccatccaccccctctcccaggggcaggaccaatccgaggtctcaggcttctccgaatctgtccctgtcgccaatgagcagccctcccgagag

SEQ ID NO: 26093 - DNA, 853 bp, Homo sapiens; identical to SEQ ID NO: 17049
  MAP TO AL079300.11; EXPRESSED IN HEART, SIGNAL = 5.2; EXPRESSED IN BONE MARROW, SIGNAL = 1.5; NT HIT: gi11422560, EVALUE 5.50e-01; EST_HUMAN HIT: BE246780.1, EVALUE 0.00e+00; SWISSPROT HIT: P42329, EVALUE 3.60e+00

SEQ ID NO: 26094 - DNA, 171 bp, Homo sapiens
  MAP TO AC004832.3; EXPRESSED IN BONE MARROW, SIGNAL = 3.1; EXPRESSED IN ADULT LIVER, SIGNAL = 3.9; EXPRESSED IN BRAIN, SIGNAL = 2.7; EXPRESSED IN PLACENTA, SIGNAL = 2.6; EXPRESSED IN HEART, SIGNAL =   2; EXPRESSED IN LUNG, SIGNAL = 3.2; EXPRESSED IN FETAL LIVER, SIGNAL = 5.5; EXPRESSED IN HELA, SIGNAL = 2.1; NT HIT: AJ132352.1, EVALUE 4.00e-38; EST_HUMAN HIT: BE836452.1, EVALUE 4.00e-39; SWISSPROT HIT: P49193, EVALUE 2.30e-02
agacgccagcctggaggcaggtgaggctcccatcctcaggcaccatgtgggcattgtagcgctggctgggcagcacctccgtcatctccctagcactctgctgctcccccatcttggtcttcaggaaaaccccaaagccgatgtccccaccatctgaagcaaactgccacc

SEQ ID NO: 26095 - DNA, 167 bp, Homo sapiens
  MAP TO AC008009.4; EXPRESSED IN HEART, SIGNAL = 1.9; EXPRESSED IN FETAL LIVER, SIGNAL = 1.3; EXPRESSED IN PLACENTA, SIGNAL = 1.8; EXPRESSED IN HELA, SIGNAL = 2.4; NT HIT: gi11434704, EVALUE 4.00e-78; EST_HUMAN HIT: AV705749.1, EVALUE 3.00e-89
ctgagtgattggtcattggcaggagaagatgatcgagacagccgacatcagcgtgacagcaggagacgcccaggaggaagaggcagaagtgtttcagggggtcgaggtcgtggtggaccacgtggtggcaaatcctccatcagttctggtagtcttttctatactct

SEQ ID NO: 26096 - DNA, 401 bp, Homo sapiens
  MAP TO AC002472.3; EXPRESSED IN LUNG, SIGNAL =  17; EXPRESSED IN HEART, SIGNAL = 8.7; EXPRESSED IN BONE MARROW, SIGNAL =  29; EXPRESSED IN ADULT LIVER, SIGNAL =  26; EXPRESSED IN FETAL LIVER, SIGNAL =  26; EXPRESSED IN BRAIN, SIGNAL =  12; EXPRESSED IN PLACENTA, SIGNAL =  17; EXPRESSED IN HELA, SIGNAL =  16; EST_HUMAN HIT: AA629056.1, EVALUE 8.00e-95; SWISSPROT HIT: P08547, EVALUE 2.00e-07; NT HIT: AL163278.2, EVALUE 7.00e-11
gtccttttccttcttttcgaaacagttttattgagatgccgttcacataccatacggttcattcatgtaaagcatctgtaattcaattgcctttagaatatgcacagttacgtagccatcaccacaatacattttagaacattggtatcacctcaaattcctttttattgccaaataatattccactgtatggatataccacattgcatttatccactggtgggcattttcactcttagaatattataaataatgttgctatggatattcatgcacgagttcttgtggggacatatgtcttcatttctttcaagtatatacctaggaatggaaataatgggttatacggtaattctatgattaagcttttgaggaactgtcagacaagccatgtgattgac

SEQ ID NO: 26097 - DNA, 168 bp, Homo sapiens
  MAP TO Z83844.5; EXPRESSED IN HELA, SIGNAL = 1.2; EXPRESSED IN PLACENTA, SIGNAL = 2.2; EXPRESSED IN BONE MARROW, SIGNAL = 1.3; EXPRESSED IN LUNG, SIGNAL = 1.7; EXPRESSED IN HEART, SIGNAL = 1.4; NT HIT: gi6978492, EVALUE 1.50e+00; EST_HUMAN HIT: BE962436.2, EVALUE 2.30e+00; SWISSPROT HIT: Q04833, EVALUE 6.70e+00
tgtcaccaagtacgtactaagctggactggggccttgagggaggcacttacccttgcgtccccgagtgggtttctaggtactcacctgagggctgcacctttctgggccctcgtttctctgtcaacaacatgggaagagagtagtgagcattctcggtatcatccaga

SEQ ID NO: 26098 - DNA, 139 bp, Homo sapiens
  MAP TO Z98884.11; EXPRESSED IN FETAL LIVER, SIGNAL = 2.9; EXPRESSED IN PLACENTA, SIGNAL = 4.4; EXPRESSED IN HELA, SIGNAL = 1.6; EXPRESSED IN HEART, SIGNAL = 1.5; EXPRESSED IN LUNG, SIGNAL = 1.7; EXPRESSED IN ADULT LIVER, SIGNAL = 1.9; SWISSPROT HIT: O70361, EVALUE 7.00e-13; NT HIT: gi8567387, EVALUE 2.00e-54; EST_HUMAN HIT: AI018784.1, EVALUE 2.00e-25
tcatggttgtccaagaaatgaaaaaatacttcccctcggagagacgcaataaaccaagcactctagatgccctcaactatgctctccgctgtgtccacagcgttcaaggtaaacaagccggagagaaatttcatcctac

SEQ ID NO: 26099 - DNA, 136 bp, Homo sapiens
  MAP TO AL022318.2; EXPRESSED IN FETAL LIVER, SIGNAL = 2.1; EXPRESSED IN PLACENTA, SIGNAL = 1.2; EXPRESSED IN BRAIN, SIGNAL = 1.6; EXPRESSED IN HELA, SIGNAL = 1.4; EXPRESSED IN HEART, SIGNAL = 1.4; EXPRESSED IN LUNG, SIGNAL = 1.3; EST_HUMAN HIT: BF337531.1, EVALUE 4.50e-01; NT HIT: AB042843.1, EVALUE 1.20e+00; SWISSPROT HIT: Q08108, EVALUE 4.10e+00
tttcccccagggtcttcctgggctgatgtttcctagagagttgagggagatgttccaagctgagcaggtgaaagggacagtaccagggagagggccatcggccagagaggtcagcggcaggtaggagcagggacat

SEQ ID NO: 26100 - DNA, 163 bp, Homo sapiens
  MAP TO AC002472.3; EXPRESSED IN HEART, SIGNAL =  15; EXPRESSED IN ADULT LIVER, SIGNAL =  47; EXPRESSED IN FETAL LIVER, SIGNAL =  17; EXPRESSED IN BRAIN, SIGNAL = 2.2; EXPRESSED IN PLACENTA, SIGNAL =  59; EXPRESSED IN BONE MARROW, SIGNAL = 3.1; EXPRESSED IN LUNG, SIGNAL =  25; EXPRESSED IN HELA, SIGNAL =  22; NT HIT: gi11417812, EVALUE 4.00e-87; SWISSPROT HIT: P16252, EVALUE 2.30e-02; EST_HUMAN HIT: AI096436.1, EVALUE 7.00e-87
acatcagcttcctctgggccccaaggagaatcaggtgcacgtgcccctccttggatacccaggcctcaggggccctgctctcccaccttcgcccttcagagcccacctccccatggacatggctctggagattgagaggcagcagggaccccaggcattttac

SEQ ID NO: 26101 - DNA, 195 bp, Homo sapiens
  MAP TO AP000111.1; EXPRESSED IN FETAL LIVER, SIGNAL = 2.1; EXPRESSED IN PLACENTA, SIGNAL = 1.4; EXPRESSED IN BONE MARROW, SIGNAL = 1.6; EXPRESSED IN LUNG, SIGNAL = 1.2; EXPRESSED IN ADULT LIVER, SIGNAL = 1.6; EXPRESSED IN BRAIN, SIGNAL = 1.6; EXPRESSED IN HELA, SIGNAL = 1.3; EXPRESSED IN HEART, SIGNAL = 1.3; NT HIT: AF129756.1, EVALUE 2.00e-03; EST_HUMAN HIT: BF375871.1, EVALUE 1.70e-01; SWISSPROT HIT: P76463, EVALUE 1.30e+00
gcctgagagataatcagggtagatgcatttcaggcggagggcacaggaagttcaaaggctctgaggctggagtgggcccggtgtatttcagcaacagcgaggagaggtggctgaactggagtgaccaggcaggagatgaagaggaggtgaggtcagagggtaaatgtggctggacctggtaggagtttgtgggtc

SEQ ID NO: 26102 - DNA, 256 bp, Homo sapiens
  MAP TO AL021392.5; EXPRESSED IN LUNG, SIGNAL = 1.4; EXPRESSED IN FETAL LIVER, SIGNAL = 1.7; EXPRESSED IN ADULT LIVER, SIGNAL = 2.3; EXPRESSED IN PLACENTA, SIGNAL = 2.4; EXPRESSED IN BRAIN, SIGNAL = 1.8; EXPRESSED IN HELA, SIGNAL = 2.2; EXPRESSED IN HEART, SIGNAL = 1.6; EST_HUMAN HIT: BF316216.1, EVALUE 9.20e-01; SWISSPROT HIT: P26662, EVALUE 1.20e-01; NT HIT: U66061.1, EVALUE 3.90e-02
agtagcaggctccctcccccatcctcttggcagctgtccctccctgctccctcccggtgaccacagccaagccaagaggcctgtgctctgttccccacacgtccatgtagagtggctggacaccggtgttgattgctgtggaggtggctggagggagtggacattccattgtaatgatggcaaaaatagccatgatctttcagccactgctgaaactgctggagtcaggcccttcccaggtatgatttgccctccc

SEQ ID NO: 26103 - DNA, 332 bp, Homo sapiens
  MAP TO AC005300.10; EXPRESSED IN BRAIN, SIGNAL = 1.9; EXPRESSED IN HELA, SIGNAL = 2.9; EXPRESSED IN LUNG, SIGNAL = 1.5; EXPRESSED IN HEART, SIGNAL = 2.4; EXPRESSED IN BONE MARROW, SIGNAL = 1.6; EXPRESSED IN ADULT LIVER, SIGNAL = 1.7; NT HIT: gi11526291, EVALUE 0.00e+00; EST_HUMAN HIT: BE892638.1, EVALUE 0.00e+00; SWISSPROT HIT: P36340, EVALUE 1.70e+00
ccaaagcccagccctccttgcggaagaccagctgcacagcctcattcacgtcattcaccacgtgggaggcctccatgagccctggactgaagcataagtctcggtgcccgtggaatggaggctcccctcctccaaggacaggctccgtggactgtgggttcctgggattgtagacgcctgtacacaccaggatggagatgcagctctggcttgctgagggctgttgctgccgtgtgcccccggcccctagttctggcgccccatcatgcgttgccttctgcaggtactggtggaacaggttggcgccgtatacgtcagacatagggttatca

SEQ ID NO: 26104 - DNA, 220 bp, Homo sapiens
  MAP TO AC004624.6; EXPRESSED IN ADULT LIVER, SIGNAL =  11; EXPRESSED IN FETAL LIVER, SIGNAL = 3.5; EXPRESSED IN HELA, SIGNAL = 1.8; EXPRESSED IN BRAIN, SIGNAL = 1.6; EXPRESSED IN PLACENTA, SIGNAL = 5.5; EXPRESSED IN LUNG, SIGNAL =   2; EXPRESSED IN HEART, SIGNAL = 1.3; NT HIT: AF260225.1, EVALUE 3.30e-02; SWISSPROT HIT: P45459, EVALUE 1.60e+00; EST_HUMAN HIT: AW954559.1, EVALUE 7.00e-26
ctagccatgcctggtgcgggtgggcaggcccagctccctttgagagccagtggctttggtttgtgagatgtgaggctggctggaaatgccaaccgttgtgtttccttctaggagagagaacggctgttgcgctccaaaaggcatcgagggaaaagtctgaaaccgcccaaggtgagcctgcgatggtgcacctgccctaccttgccgctgtgtcacggat

SEQ ID NO: 26105 - DNA, 161 bp, Homo sapiens
  MAP TO AP000123.1; EXPRESSED IN LUNG, SIGNAL = 2.8; EXPRESSED IN FETAL LIVER, SIGNAL =   7; EXPRESSED IN ADULT LIVER, SIGNAL = 2.4; EXPRESSED IN HELA, SIGNAL = 2.6; EXPRESSED IN PLACENTA, SIGNAL =   7; EXPRESSED IN BRAIN, SIGNAL =   4; EXPRESSED IN BONE MARROW, SIGNAL = 2.7; EXPRESSED IN HEART, SIGNAL = 1.5; NT HIT: Y18000.1, EVALUE 3.70e-01; EST_HUMAN HIT: AW945340.1, EVALUE 5.50e-01; SWISSPROT HIT: P26046, EVALUE 3.00e+00
gagtgctcaaacctacagcctcctgggttggttcccagctaggagagagcaccagcggcaagtcctgcctggctctgggtgctgggtgccaccatcacatgtgccatgggtgatgggtgtggttggctgtgaatggaaatgcacgtggtggaatgatccca

SEQ ID NO: 26106 - DNA, 166 bp, Homo sapiens
  MAP TO AC006427.13; EXPRESSED IN HEART, SIGNAL = 1.5; EXPRESSED IN BONE MARROW, SIGNAL = 1.8; EXPRESSED IN ADULT LIVER, SIGNAL = 2.3; EXPRESSED IN HELA, SIGNAL =   2; EXPRESSED IN PLACENTA, SIGNAL =   2; EXPRESSED IN LUNG, SIGNAL = 2.4; EXPRESSED IN FETAL LIVER, SIGNAL = 3.5; EXPRESSED IN BRAIN, SIGNAL = 2.2; EST_HUMAN HIT: AI343353.1, EVALUE 4.00e-08; SWISSPROT HIT: P57063, EVALUE 3.90e+00; NT HIT: AL163285.2, EVALUE 2.00e-06
cttgatcttgggtttccagcctccaaaactgtaagaaaattaactcctgttgtttaagccgtccagccagacaaccagaaacatccaagaccagagacttggggcagcccaagaagactgatatagctactatacagtgagggcccgtatcttccatgtctttgcc

SEQ ID NO: 26107 - DNA, 271 bp, Homo sapiens
  MAP TO AP000053.1; EXPRESSED IN BONE MARROW, SIGNAL =  14; EXPRESSED IN HEART, SIGNAL = 5.8; EXPRESSED IN FETAL LIVER, SIGNAL =  13; EXPRESSED IN ADULT LIVER, SIGNAL = 8.2; EXPRESSED IN HELA, SIGNAL = 9.1; EXPRESSED IN BRAIN, SIGNAL =  16; EXPRESSED IN PLACENTA, SIGNAL = 7.2; EXPRESSED IN LUNG, SIGNAL =  10; NT HIT: U01317.1, EVALUE 1.70e-01; EST_HUMAN HIT: BF314239.1, EVALUE 2.50e-01; SWISSPROT HIT: P24485, EVALUE 8.70e-01
gaatgcccaggcagctgagctttcaggatgtcgcattgcagaggactccaatgctacatatggcagctggagaccctttcaaggcaggtggcagaacggaggccctctctatctgctggggcagccctccgggtgccccgctggaaggcagagcagctccatctctgggtgggtgagaggtgctgcatgggctcactatagtatcccaatactgtatggcagtaggctgccagagtatcctaagctgggtggcttcaacaacaggtactga

SEQ ID NO: 26108 - DNA, 159 bp, Homo sapiens
  MAP TO AC004624.6; EXPRESSED IN BRAIN, SIGNAL = 2.2; EXPRESSED IN HEART, SIGNAL = 1.9; EXPRESSED IN ADULT LIVER, SIGNAL = 3.4; EXPRESSED IN HELA, SIGNAL = 2.1; EXPRESSED IN PLACENTA, SIGNAL = 2.5; EXPRESSED IN BONE MARROW, SIGNAL = 3.2; EXPRESSED IN LUNG, SIGNAL =   2; EXPRESSED IN FETAL LIVER, SIGNAL = 2.2; NT HIT: U39394.1, EVALUE 2.30e-02; EST_HUMAN HIT: BF204762.1, EVALUE 8.50e+00; SWISSPROT HIT: P17965, EVALUE 8.90e+00
gtctcccgggggtgggatcacctggcagagggcccccctctagccttctgtaatggtgctatgaggctttactcaaagccctcgtgtacatgcgttattttagtgacttctcgctgctgccaggcgatgggtgctgctgtttcccttcttggacagaag

SEQ ID NO: 26109 - DNA, 178 bp, Homo sapiens
  MAP TO AL078474.2; EXPRESSED IN LUNG, SIGNAL = 2.1; EXPRESSED IN BONE MARROW, SIGNAL = 3.2; EXPRESSED IN HEART, SIGNAL = 1.6; EXPRESSED IN FETAL LIVER, SIGNAL = 4.3; EXPRESSED IN ADULT LIVER, SIGNAL =   3; EXPRESSED IN HELA, SIGNAL =   2; EXPRESSED IN PLACENTA, SIGNAL = 3.5; EXPRESSED IN BRAIN, SIGNAL = 2.1; EST_HUMAN HIT: AA534294.1, EVALUE 3.00e-09; NT HIT: AJ271735.1, EVALUE 1.00e-13; SWISSPROT HIT: P08547, EVALUE 8.00e-05
gatgagcagatatctctttgatatactgcttttctttcttttggataaatatccagcagaggggctcctgaattatatggtagttatatttttagtttttatatttcttagttctttgaggagcctcatattggttttcataatggctgtactattttacatttctaccaaaggtgta

SEQ ID NO: 26110 - DNA, 79 bp, Homo sapiens
  MAP TO AP000123.1; EXPRESSED IN BRAIN, SIGNAL = 2.3; EXPRESSED IN PLACENTA, SIGNAL = 5.1; EXPRESSED IN LUNG, SIGNAL = 2.7; EXPRESSED IN BONE MARROW, SIGNAL = 3.2; EXPRESSED IN HEART, SIGNAL = 1.8; EXPRESSED IN FETAL LIVER, SIGNAL =   6; EXPRESSED IN ADULT LIVER, SIGNAL = 3.1; EXPRESSED IN HELA, SIGNAL = 2.4; EST_HUMAN HIT: AI809273.1, EVALUE 6.00e-02; NT HIT: gi11431883, EVALUE 6.30e-01
actcagatatcccatttccttgaatatctaaagacccacagaaaaccttcagaaatactacactgggtcctttagtcat

SEQ ID NO: 26111 - DNA, 174 bp, Homo sapiens
  MAP TO AP000350.1; EXPRESSED IN PLACENTA, SIGNAL = 3.7; EXPRESSED IN BRAIN, SIGNAL = 2.6; EXPRESSED IN LUNG, SIGNAL = 3.3; EXPRESSED IN BONE MARROW, SIGNAL = 3.1; EXPRESSED IN HEART, SIGNAL = 2.3; EXPRESSED IN ADULT LIVER, SIGNAL = 3.6; EXPRESSED IN FETAL LIVER, SIGNAL = 5.4; EXPRESSED IN HELA, SIGNAL = 3.2; NT HIT: gi11417856, EVALUE 1.00e-93; EST_HUMAN HIT: BF346118.1, EVALUE 2.00e-93; SWISSPROT HIT: P30712, EVALUE 2.00e-27
ctgcatcagctcctccagggccatgagatcagccagtgtcacctgctggccagcgaggaagggcctgtcccccaggaacttgtcctccagccattgcagggcctggtccatggcagtcctgttgcgttccaccttctcctcgggcacctggaccccaatgaggggccccaacac

SEQ ID NO: 26112 - DNA, 235 bp, Homo sapiens
  MAP TO AC007539.8; EXPRESSED IN HEART, SIGNAL = 1.3; EXPRESSED IN FETAL LIVER, SIGNAL = 1.7; EST_HUMAN HIT: BE348727.1, EVALUE 4.00e-98; SWISSPROT HIT: Q08520, EVALUE 5.60e+00; NT HIT: gi5454007, EVALUE 1.40e-01
ggtccggtggctatggccacaccaactccgatgttcaaggcccgtgttctcaagcctccctctactggtctccacactggggcctcctctgtgtgttttcagatctctctttgtcgtctgattataacgatgcatgtgactgtatttacagcccacctagataccgcaggataatcttcccatcacaagattcttcatctgctcacattgccaaaaactcctgttttcccctcat

SEQ ID NO: 26113 - DNA, 111 bp, Homo sapiens
  MAP TO AC008272.1; EXPRESSED IN PLACENTA, SIGNAL =   2; EXPRESSED IN HELA, SIGNAL = 1.4; EXPRESSED IN HEART, SIGNAL = 1.4; EXPRESSED IN LUNG, SIGNAL = 1.5; EXPRESSED IN ADULT LIVER, SIGNAL = 1.5; EXPRESSED IN FETAL LIVER, SIGNAL = 1.5; EST_HUMAN HIT: AA663213.1, EVALUE 2.00e-18; NT HIT: AB008681.1, EVALUE 4.00e-31; SWISSPROT HIT: P15609, EVALUE 3.20e+00
ctatcaggatcatctgaaaacttccccaggtctgccttgatctgctttaaatcagagagggagaaggggacatgcacctgggttgggccaagttctctgccccctacagct

SEQ ID NO: 26114 - DNA, 154 bp, Homo sapiens
  MAP TO Z95114.19; EXPRESSED IN HEART, SIGNAL = 2.5; NT HIT: AF207899.1, EVALUE 1.40e+00; EST_HUMAN HIT: AW137066.1, EVALUE 5.20e-01; SWISSPROT HIT: O15072, EVALUE 4.00e+00
ttcatcttcacaagtacgtgacacaagacgacactggaaaccatcccgccacccaccccgacacaaatgcatatgtcagtgcttcctgtgctctatgttgactttatctcctgtcgatgcggatggactgggtatgagacgaatgcagaactga

SEQ ID NO: 26115 - DNA, 142 bp, Homo sapiens
  MAP TO AP000352.2; EXPRESSED IN HEART, SIGNAL = 1.4; EXPRESSED IN BONE MARROW, SIGNAL = 1.5; EXPRESSED IN FETAL LIVER, SIGNAL = 1.6; EXPRESSED IN PLACENTA, SIGNAL = 1.4; EXPRESSED IN HELA, SIGNAL = 1.6; EXPRESSED IN BRAIN, SIGNAL = 1.5; NT HIT: AF240786.1, EVALUE 1.00e-74; EST_HUMAN HIT: BF679796.1, EVALUE 2.00e-03; SWISSPROT HIT: Q64471, EVALUE 2.00e-09
gactatcttcttcatgggcagctgaaaggccgtgtgttgccaagccacgaactcatccacacgggcacgtgcgtgcgggtctggcgggcaccagtgcgatggtgcgctgtacttgcggcacaggtagtaaaggatggccgcg

SEQ ID NO: 26116 - DNA, 113 bp, Homo sapiens
  MAP TO AB016897.1; EXPRESSED IN HELA, SIGNAL =   2; EXPRESSED IN BRAIN, SIGNAL = 1.6; EXPRESSED IN BONE MARROW, SIGNAL = 2.2; EXPRESSED IN LUNG, SIGNAL = 1.5; EXPRESSED IN HEART, SIGNAL = 1.6; EXPRESSED IN FETAL LIVER, SIGNAL = 1.5; EXPRESSED IN ADULT LIVER, SIGNAL = 2.9; NT HIT: gi11994076, EVALUE 2.50e-01; EST_HUMAN HIT: BE788019.1, EVALUE 6.00e-03; SWISSPROT HIT: P81067, EVALUE 1.80e+00
gtgctgtggctccttcccccctcctttctccttggccttggtgtctattccttgcagcaccaggggcgtctcctcatgctgccccgttcctgcgcctctggggagcctcaggc

SEQ ID NO: 26117 - DNA, 660 bp, Homo sapiens
  MAP TO AL022319.2; EXPRESSED IN LUNG, SIGNAL = 4.8; EXPRESSED IN BONE MARROW, SIGNAL = 3.5; EXPRESSED IN HEART, SIGNAL = 2.8; EXPRESSED IN FETAL LIVER, SIGNAL = 5.7; EXPRESSED IN ADULT LIVER, SIGNAL = 5.7; EXPRESSED IN PLACENTA, SIGNAL = 5.3; EXPRESSED IN HELA, SIGNAL = 4.2; EXPRESSED IN BRAIN, SIGNAL =  11; NT HIT: AF181897.1, EVALUE 9.00e-61; EST_HUMAN HIT: BF035327.1, EVALUE 2.00e-93; SWISSPROT HIT: Q50325, EVALUE 6.90e-01
ttagtgaggaaggcatattgaaggctgagagaccaaaagctaggcctcttgtaccaacacttagccaagctgtgaatgcaatggaaaagttcccgaaggaattaaaagtgctactctagaaaacacaagaataataagaaagtgaaacagccttattgttgatatggaaaaagtctgagtggtccaaatagatcaaaccagccccaacattcccttaagccaaagcctaatccagagcaaggccctagctctcttcaattctatgaaggttgagagagatgagcaagctgcagaagaaaagtctgaagctagcagaagttggttcatgaggtttaaggaaagaaaccaactccctaacataaaaatacaaggtaaagcagcaagtgctgatacagaaactatagcaaggtatccagaagattagataattgatgatggtggctacactaaacaacagattttcaatgtagatgaaacaggcttttgttggcaaaagatgcaactggtaactttaagtggaagccaattgctcctttcccattccaaaaattctaaggcccttaagattcctttcaaaatattactgctcattgacaatgcacctggtcacccaagagctctgatggagatgtacaaggagattaatgttgttttcatgcc

SEQ ID NO: 26118 - DNA, 84 bp, Homo sapiens
  MAP TO AL022318.2; EXPRESSED IN HEART, SIGNAL =   4; EXPRESSED IN BRAIN, SIGNAL =   6; EXPRESSED IN PLACENTA, SIGNAL = 7.2; EXPRESSED IN LUNG, SIGNAL = 7.8; EXPRESSED IN BONE MARROW, SIGNAL = 7.9; EXPRESSED IN ADULT LIVER, SIGNAL = 8.4; EXPRESSED IN FETAL LIVER, SIGNAL =  43; EXPRESSED IN HELA, SIGNAL = 8.6; NT HIT: AL163210.2, EVALUE 2.00e-35; EST_HUMAN HIT: BE150340.1, EVALUE 1.00e-34; SWISSPROT HIT: P31795, EVALUE 2.20e-01
agtggcaattaggcctgatggaactgccatcaataaaccaagtgtgatcagggtgaggaacaggaaagaaggaaatatggggaa

SEQ ID NO: 26119 - DNA, 81 bp, Homo sapiens
  MAP TO AB016897.1; EXPRESSED IN PLACENTA, SIGNAL = 2.7; EXPRESSED IN HEART, SIGNAL = 2.8; EXPRESSED IN FETAL LIVER, SIGNAL = 5.1; EXPRESSED IN ADULT LIVER, SIGNAL = 2.4; EXPRESSED IN BRAIN, SIGNAL = 2.4; EXPRESSED IN HELA, SIGNAL = 3.5; EXPRESSED IN BONE MARROW, SIGNAL = 2.7; EXPRESSED IN LUNG, SIGNAL = 2.8; EST_HUMAN HIT: BF591483.1, EVALUE 2.40e-01; NT HIT: AK024496.1, EVALUE 1.60e-01
tctgcggccccagcttggggcactccatcttgacattgccctcctccctctgccccccgtctgagctggatgaggaaggca

SEQ ID NO: 26120 - DNA, 418 bp, Homo sapiens
  MAP TO AL022238.1; EXPRESSED IN LUNG, SIGNAL = 4.1; EXPRESSED IN HEART, SIGNAL = 3.1; EXPRESSED IN BONE MARROW, SIGNAL = 3.5; EXPRESSED IN FETAL LIVER, SIGNAL = 2.9; EXPRESSED IN ADULT LIVER, SIGNAL = 3.3; EXPRESSED IN BRAIN, SIGNAL = 4.9; EXPRESSED IN PLACENTA, SIGNAL = 2.8; EXPRESSED IN HELA, SIGNAL = 3.2; EST_HUMAN HIT: AW162820.1, EVALUE 1.00e-114; SWISSPROT HIT: P47240, EVALUE 1.40e+00; NT HIT: gi11034850, EVALUE 1.00e-114
aaggtgatgagcctggctccagtctgctggcgaactcccctctgatggaggatgctccacagaggctgcggtggcaggcccacctggagttcacccataaccacgatgtgggggatctcacctgggacaagattgccgtctccctaccccgctctgagaagctccgctccctggtgctggccggcatcccacatggcatgaggccacaggtaaggtggccacagggacccacagggtgttgagagggtcctggccccatgatcaggtgtcacgagaaagactgagtgcccttgcggctcccttccctcagctgtggatgcggctctctggggccctgcagaagaagaggaactctgagctgtcctaccgcgagattgtgaagaacagctccaacgatgagaccatcgctgccaagcag

SEQ ID NO: 26121 - DNA, 189 bp, Homo sapiens
  MAP TO AL022319.2; EXPRESSED IN BRAIN, SIGNAL = 3.3; EXPRESSED IN HELA, SIGNAL = 3.6; EXPRESSED IN HEART, SIGNAL = 5.3; EXPRESSED IN LUNG, SIGNAL = 3.6; EXPRESSED IN BONE MARROW, SIGNAL = 2.8; NT HIT: gi9627742, EVALUE 4.40e-01; EST_HUMAN HIT: AU130001.1, EVALUE 6.60e-01; SWISSPROT HIT: Q15878, EVALUE 5.00e+00
ggaggtgacagtggtggaggtgatggaagtggaggtgagagtagtggttgtgaagaaagtggaggtgatggaagtggaggtgttgaagtcaagcatatgatgttagaagcagctgcagtgcaaagagggcacatggtggtgcctcctcatgggtctgagatgggattcacggggatgacatgcccagcc

SEQ ID NO: 26122 - DNA, 185 bp, Homo sapiens
  MAP TO AC002472.3; EXPRESSED IN HELA, SIGNAL = 1.5; EXPRESSED IN BRAIN, SIGNAL = 1.5; EXPRESSED IN HEART, SIGNAL = 1.9; EXPRESSED IN LUNG, SIGNAL = 1.9; NT HIT: AB002059.1, EVALUE 1.00e-90; EST_HUMAN HIT: BE876713.1, EVALUE 3.00e-80; SWISSPROT HIT: O15547, EVALUE 2.00e-22
gtgggcgctcctcgccaaaaaaggctaccaggagcgggacctggaaccccagatttccatcacaaccaaactcaaaggggtttccgtgactcagatcaaggagcttggaaaccggctgtgggatgtggccgacttcgtgaagccacctcaggtgggggccctgatgttgctgacgggggcgcaag

SEQ ID NO: 26123 - DNA, 348 bp, Homo sapiens
  MAP TO AC005006.2; EXPRESSED IN PLACENTA, SIGNAL = 1.9; EXPRESSED IN HELA, SIGNAL = 1.8; EXPRESSED IN LUNG, SIGNAL = 2.3; EXPRESSED IN HEART, SIGNAL = 2.2; EXPRESSED IN BONE MARROW, SIGNAL = 2.2; EXPRESSED IN FETAL LIVER, SIGNAL = 2.6; EXPRESSED IN ADULT LIVER, SIGNAL = 2.4; EXPRESSED IN BRAIN, SIGNAL = 2.1; NT HIT: AB029900.1, EVALUE 0.00e+00; EST_HUMAN HIT: BF375937.1, EVALUE 1.30e+00; SWISSPROT HIT: P26502, EVALUE 4.70e-01
ctcgggctgtggctggctgcccctttctacccactgcctgagccacgtccaactcccaggctgcctctgcgatcactgggagacaggaatgctccaatgacacccagcagcaagctggctggctccctcccactccagtggtgtgaatattcatgagtttgcttcctggggatagcaggtggcacaccccagtaccctgcaggtgttgcccaggccttctgcctccactggacagctctggccagtcctcacctctctttggaccccaacaagcaagcagctctttcatccaagggcacagaaagattccaggtatccttgggccaaggacacagcaaccgcagacgc

SEQ ID NO: 26124 - DNA, 372 bp, Homo sapiens
  MAP TO AC005300.10; EXPRESSED IN FETAL LIVER, SIGNAL = 7.6; EXPRESSED IN ADULT LIVER, SIGNAL = 7.8; EXPRESSED IN PLACENTA, SIGNAL = 5.1; EXPRESSED IN BRAIN, SIGNAL = 8.3; EXPRESSED IN HELA, SIGNAL = 6.9; EXPRESSED IN HEART, SIGNAL = 5.6; EXPRESSED IN LUNG, SIGNAL = 8.4; EXPRESSED IN BONE MARROW, SIGNAL =  12; NT HIT: AF255680.1, EVALUE 3.60e+00; EST_HUMAN HIT: BF346356.1, EVALUE 1.00e-108; SWISSPROT HIT: P36151, EVALUE 9.00e-03
tctacaactgccaaatacacaggcaggatttctgtgttcagctgtggccatgacctaggactaggtgattccatatcccaacccaggggaaagggacttggagctggggcagcggctccattaggaaccaggtccttgggcttccatgcctctggctgccttctcacctcgcaccccagcagggctgacagctcctgggctttgctgtgttgtaagatgttcccagcatttgtaacaaaaaccacgggcacccgcagctgcccctgggagttcaccagccttcggaaggctttcagagcagcagggatcactctgtggccccgcacaagcactccatcgatgtccaacaggaacccaaaggtgggtgggctc

SEQ ID NO: 26125 - DNA, 98 bp, Homo sapiens
  MAP TO AL022318.2; EXPRESSED IN HEART, SIGNAL =   2; EXPRESSED IN LUNG, SIGNAL = 2.5; EXPRESSED IN BONE MARROW, SIGNAL = 1.9; EXPRESSED IN ADULT LIVER, SIGNAL = 2.2; EXPRESSED IN FETAL LIVER, SIGNAL = 3.4; EXPRESSED IN BRAIN, SIGNAL = 2.7; EXPRESSED IN PLACENTA, SIGNAL = 1.9; EXPRESSED IN HELA, SIGNAL = 2.2; NT HIT: AF311912.1, EVALUE 3.20e+00; EST_HUMAN HIT: BE179517.1, EVALUE 3.00e-10
aaaaatagctcactttatctattcttatcagcttgcctggccacctgggtcataagtcaaatacttgaagagcaccttagctgactatgattgcagtg

SEQ ID NO: 26126 - DNA, 202 bp, Homo sapiens
  MAP TO AC007281.3; EXPRESSED IN PLACENTA, SIGNAL =  21; EXPRESSED IN HEART, SIGNAL = 7.9; EXPRESSED IN FETAL LIVER, SIGNAL =  23; EXPRESSED IN BRAIN, SIGNAL = 1.9; EXPRESSED IN HELA, SIGNAL = 9.4; EXPRESSED IN BONE MARROW, SIGNAL = 1.9; EXPRESSED IN LUNG, SIGNAL =  14; EXPRESSED IN ADULT LIVER, SIGNAL =  20; NT HIT: AB007871.1, EVALUE 4.80e-01; EST_HUMAN HIT: R24494.1, EVALUE 1.80e-01; SWISSPROT HIT: P04258, EVALUE 1.70e+00
acgtgcgtgttcttcctctttccagaatccctgcaggagccctgatcagagctggggtttggtgaggcagggtgttgtgagtgacaagcagcagagcaaagggaaaaatgccttcagttcccacgcttcctctctgccctctaggaccaggatgtctcttcattatcactgcttgcagagccccatgccagtttcccatccc

SEQ ID NO: 26127 - DNA, 138 bp, Homo sapiens
  MAP TO AC007092.4; EXPRESSED IN LUNG, SIGNAL = 7.2; EXPRESSED IN ADULT LIVER, SIGNAL = 7.8; EXPRESSED IN PLACENTA, SIGNAL =  12; EXPRESSED IN HEART, SIGNAL = 4.7; EXPRESSED IN BONE MARROW, SIGNAL = 2.1; EXPRESSED IN FETAL LIVER, SIGNAL =  18; EXPRESSED IN BRAIN, SIGNAL = 2.5; EXPRESSED IN HELA, SIGNAL = 7.2; NT HIT: U32693.1, EVALUE 3.10e-01; EST_HUMAN HIT: AW895565.1, EVALUE 3.00e-02; SWISSPROT HIT: Q59467, EVALUE 5.30e+00
tttaaattcttgaagccccagtacagatttagcaaattgcctcttattaatgtcaatgaacatttgaaaatgtaagaagaattgggactgaatacttttcccttggatggtcctgtcttttcagcgtcgagaaactcc

SEQ ID NO: 26128 - DNA, 172 bp, Homo sapiens
  MAP TO AC007282.2; EXPRESSED IN ADULT LIVER, SIGNAL = 1.9; EXPRESSED IN BRAIN, SIGNAL = 1.7; EXPRESSED IN PLACENTA, SIGNAL = 2.4; EXPRESSED IN BONE MARROW, SIGNAL = 1.5; EXPRESSED IN HEART, SIGNAL = 1.3; EXPRESSED IN LUNG, SIGNAL = 1.3; EXPRESSED IN FETAL LIVER, SIGNAL = 1.5; EXPRESSED IN HELA, SIGNAL =   2; EST_HUMAN HIT: T40005.1, EVALUE 3.80e-02; SWISSPROT HIT: P07940, EVALUE 3.00e+00; NT HIT: AJ245480.1, EVALUE 6.00e-03
atagtcttgtatttttacccactcatttaccatttctagtgctcttccttcctgtatatctgggcttctatctgggatcatttgtcttcaacctgaagctttctttgatatttattacaatgcaggtcttctagatacaaattctctcagcttttgtctttcaccatctttt

SEQ ID NO: 26129 - DNA, 154 bp, Homo sapiens
  MAP TO AC005006.2; EXPRESSED IN FETAL LIVER, SIGNAL = 4.2; EXPRESSED IN ADULT LIVER, SIGNAL = 3.6; EXPRESSED IN HELA, SIGNAL =   4; EXPRESSED IN PLACENTA, SIGNAL = 4.2; EXPRESSED IN BRAIN, SIGNAL = 4.8; EXPRESSED IN BONE MARROW, SIGNAL = 3.7; EXPRESSED IN LUNG, SIGNAL = 5.1; EXPRESSED IN HEART, SIGNAL = 2.6; NT HIT: gi11417974, EVALUE 4.00e-81; SWISSPROT HIT: P20062, EVALUE 2.00e-26; EST_HUMAN HIT: AW820727.1, EVALUE 6.00e-81
ggcatgatcacaagggccacccccacactagctactaccagtatggcctgggcattctggccctgtgtctccaccagaagcgggtccatgacagcgtggtggacaaacttctgtatgctgtggaacctttccaccagggccaccattctgtggg

SEQ ID NO: 26130 - DNA, 93 bp, Homo sapiens
  MAP TO AL008723.8; EXPRESSED IN BONE MARROW, SIGNAL = 6.7; EXPRESSED IN HEART, SIGNAL = 3.7; EXPRESSED IN LUNG, SIGNAL = 3.7; EXPRESSED IN ADULT LIVER, SIGNAL =   3; EXPRESSED IN FETAL LIVER, SIGNAL = 2.9; EXPRESSED IN PLACENTA, SIGNAL = 3.2; EXPRESSED IN HELA, SIGNAL = 4.4; EXPRESSED IN BRAIN, SIGNAL = 3.4; NT HIT: M19364.1, EVALUE 4.90e-02; EST_HUMAN HIT: BE166261.1, EVALUE 1.10e+00
gtcagtcaccttgaagctcttctccaagtgtcatttttttttttgagttttaaagttggcctgttggtctttttattccggatacaactcctt

SEQ ID NO: 26131 - DNA, 352 bp, Homo sapiens
  MAP TO AB016897.1; EXPRESSED IN FETAL LIVER, SIGNAL = 2.3; EXPRESSED IN PLACENTA, SIGNAL = 1.4; EXPRESSED IN LUNG, SIGNAL = 2.2; EXPRESSED IN BONE MARROW, SIGNAL =   2; EXPRESSED IN HEART, SIGNAL = 1.9; EXPRESSED IN ADULT LIVER, SIGNAL = 1.9; EXPRESSED IN BRAIN, SIGNAL = 2.4; EXPRESSED IN HELA, SIGNAL = 2.2; EST_HUMAN HIT: BF434292.1, EVALUE 2.10e-02; SWISSPROT HIT: P51843, EVALUE 5.40e+00; NT HIT: gi11426968, EVALUE 1.40e-02
caaagagagaatgaatcataaaactttaaagcttagaaaagatctcagaaattaagacccgtatcttagagtggagcttctcaaatgtcatcgtgcatgcgatcccctgggcatctcgttagggagagttctgagtcggaggacaggggcagggcagggggcagggatcagcatctctaaccagctcctggggaggccgctgtggggccatgctgggatggcaaggcctcagaggacccagggcttccagtgtagactcagcttcaccccgcagaataagaggaaacatgttagaactcatttttctgtattttcaggtatagagacccttggggagggtccaaccctgctg

SEQ ID NO: 26132 - DNA, 232 bp, Homo sapiens
  MAP TO Z98884.11; EXPRESSED IN LUNG, SIGNAL = 1.6; EXPRESSED IN FETAL LIVER, SIGNAL = 2.5; EXPRESSED IN ADULT LIVER, SIGNAL = 2.4; EXPRESSED IN PLACENTA, SIGNAL = 2.2; EXPRESSED IN HELA, SIGNAL = 1.6; EXPRESSED IN BRAIN, SIGNAL = 1.4; EXPRESSED IN HEART, SIGNAL = 1.3; NT HIT: AB020640.1, EVALUE 1.00e-11; EST_HUMAN HIT: AV727809.1, EVALUE 1.00e-33
gaaaaataatgaggtttcttcgccgctgtcgccacaggtacactagtccttgtttatacattctgctcagggagaatgatgaagcaaccctgaccttcttaaccctcactaactcctatgtaaagctaatccccctgcagataatcagggcagacgtcccaaattacaatagggcggtagagctctttaactagggatcaggttgctacccttggagtgctggtaaccatgt

SEQ ID NO: 26133 - DNA, 211 bp, Homo sapiens
  MAP TO AL035682.16; EXPRESSED IN LUNG, SIGNAL = 1.5; EXPRESSED IN HEART, SIGNAL = 1.6; EXPRESSED IN BONE MARROW, SIGNAL = 1.5; EXPRESSED IN HELA, SIGNAL = 2.1; EXPRESSED IN BRAIN, SIGNAL = 1.4; EXPRESSED IN PLACENTA, SIGNAL = 1.3; SWISSPROT HIT: Q99583, EVALUE 7.40e-01; NT HIT: AB026829.1, EVALUE 1.30e-01; EST_HUMAN HIT: BE389152.1, EVALUE 7.40e-01
aagaatgaggaagagccagtccacgaaactcgggggtcaaagcgtttcaagttttaggaggagacagagagagaggtggggaatggtgtggtctgggcaaggaacagaaaagagacctggaggctggagaacttggggccgaggaagatggctgagcctcttgcctgaaattcggatcatcctgaacgcaaagggaagccgtggagggctt

SEQ ID NO: 26134 - DNA, 147 bp, Homo sapiens
  MAP TO AC004032.7; EXPRESSED IN PLACENTA, SIGNAL = 1.5; EXPRESSED IN HELA, SIGNAL = 1.8; EXPRESSED IN BRAIN, SIGNAL = 2.4; EXPRESSED IN BONE MARROW, SIGNAL = 1.3; EXPRESSED IN HEART, SIGNAL = 2.1; EXPRESSED IN LUNG, SIGNAL = 1.8; EXPRESSED IN FETAL LIVER, SIGNAL = 1.6
tagtgctgagcaaacaagaaggagaagaaggaggagggggaagagcaaaaggaaggaaagacagaggagaaggaggagaaaaggaagagaaggaggaggaagcagtgagataagagaaaagagagaggaaaaaaagacaaagagtga

SEQ ID NO: 26135 - DNA, 140 bp, Homo sapiens
  MAP TO AB016897.1; EXPRESSED IN BRAIN, SIGNAL = 5.9; EXPRESSED IN HELA, SIGNAL = 8.1; EXPRESSED IN PLACENTA, SIGNAL = 4.9; EXPRESSED IN BONE MARROW, SIGNAL = 9.6; EXPRESSED IN HEART, SIGNAL = 3.7; EXPRESSED IN LUNG, SIGNAL = 7.7; EXPRESSED IN ADULT LIVER, SIGNAL = 5.5; EXPRESSED IN FETAL LIVER, SIGNAL = 6.5; NT HIT: gi11431348, EVALUE 4.90e+00; EST_HUMAN HIT: AI299903.1, EVALUE 1.20e-01; SWISSPROT HIT: Q53193, EVALUE 3.10e+00
atgaggggcagtgccctcctcccgcgtccccctcgtgggctcctcccaggccgaggaagctcgctgcccaggcttggacagacccccgaacaaagggagctgacagctccacaacactcagcccatggggactgcagcag

SEQ ID NO: 26136 - DNA, 568 bp, Homo sapiens; identical to SEQ ID NO: 9762
  MAP TO AC008283.3; EXPRESSED IN HEART, SIGNAL = 1.4; NT HIT: AJ251387.1, EVALUE 1.40e+00; EST_HUMAN HIT: BE782738.1, EVALUE 1.40e-01; SWISSPROT HIT: P22147, EVALUE 9.60e-01

SEQ ID NO: 26137 - DNA, 194 bp, Homo sapiens
  MAP TO AC006548.19; EXPRESSED IN LUNG, SIGNAL =   5; EXPRESSED IN HEART, SIGNAL = 2.1; EXPRESSED IN FETAL LIVER, SIGNAL = 6.2; EXPRESSED IN ADULT LIVER, SIGNAL = 5.3; EXPRESSED IN HELA, SIGNAL = 3.3; EXPRESSED IN PLACENTA, SIGNAL =  12; EXPRESSED IN BRAIN, SIGNAL = 3.4; EXPRESSED IN BONE MARROW, SIGNAL = 8.2; NT HIT: gi11422099, EVALUE 4.50e-01; EST_HUMAN HIT: BE735953.1, EVALUE 6.80e-01; SWISSPROT HIT: P10104, EVALUE 9.90e-01
agcacatgaaggccccagacttaatgcagtaggtggaatcactggagagagagatgtgggcagcagtacagaatggggctcgagggggccctgccatggccccacagtctctgtcatgaacctgtgctagcatggacaagggctcaatagcttcttccatgaagtaggctcttgtagtcagatgcaggtaggtc

SEQ ID NO: 26138 - DNA, 429 bp, Homo sapiens
  MAP TO AP000041.1; EXPRESSED IN ADULT LIVER, SIGNAL = 2.1; EXPRESSED IN FETAL LIVER, SIGNAL = 2.9; EXPRESSED IN PLACENTA, SIGNAL = 2.3; EXPRESSED IN BRAIN, SIGNAL = 3.1; EXPRESSED IN HELA, SIGNAL = 2.4; EXPRESSED IN LUNG, SIGNAL = 2.6; EXPRESSED IN HEART, SIGNAL =   3; EXPRESSED IN BONE MARROW, SIGNAL = 2.4; NT HIT: gi9910585, EVALUE 6.80e-02; EST_HUMAN HIT: BE733888.1, EVALUE 4.00e-01; SWISSPROT HIT: P17671, EVALUE 8.50e-01
accaattcttccctctgtatctgcagggaaagactctgcaaaggagagcgagctctgggcgcagagcgccaaagggcccaggaggagagcacgccttccgttcttgtcaggagggggccctgaccccagggtcttcccagcacaaccatccacacagtggaaacagatttcagggggtccagctctggccagtttttcagggctgaacgagccctgggcaaaggagaggaaggtctaaaagggattgaatggtgcagccctacactgttaaaggggattgggtggatcttgtttttatatgggaagacatctaagaggtgctgagaaatgaaataaagcaggttacaaagtttgtatacaaccaggctggaagggcattcatcaaaatcttgacagtggtttgctgggaggggcagaggtgttgaaatg

SEQ ID NO: 26139 - DNA, 123 bp, Homo sapiens
  MAP TO AP000041.1; EXPRESSED IN ADULT LIVER, SIGNAL =   3; EXPRESSED IN PLACENTA, SIGNAL = 1.7; EXPRESSED IN BRAIN, SIGNAL = 4.3; EXPRESSED IN HELA, SIGNAL = 3.2; EXPRESSED IN LUNG, SIGNAL = 3.9; EXPRESSED IN HEART, SIGNAL = 2.5; EXPRESSED IN BONE MARROW, SIGNAL = 4.1; EXPRESSED IN FETAL LIVER, SIGNAL = 3.5; NT HIT: AE004241.1, EVALUE 1.10e+00; EST_HUMAN HIT: BE537719.1, EVALUE 1.00e-01; SWISSPROT HIT: P13390, EVALUE 3.10e+00
ttttgctcttggtaatgaaagactccttgaggtggttcccacagttttccatatcccagccagggctctcttcacactgtccccacttccatggctggagccgtagttttttcctggtcataa

SEQ ID NO: 26140 - DNA, 208 bp, Homo sapiens
  MAP TO AC007556.2; EXPRESSED IN FETAL LIVER, SIGNAL = 4.7; EXPRESSED IN ADULT LIVER, SIGNAL =   6; EXPRESSED IN HELA, SIGNAL = 4.5; EXPRESSED IN PLACENTA, SIGNAL = 6.2; EXPRESSED IN BRAIN, SIGNAL =   8; EXPRESSED IN BONE MARROW, SIGNAL = 5.6; EXPRESSED IN LUNG, SIGNAL = 5.1; EXPRESSED IN HEART, SIGNAL = 3.5; EST_HUMAN HIT: C18119.1, EVALUE 1.20e-02; SWISSPROT HIT: P54123, EVALUE 7.50e-01; NT HIT: M65109.1, EVALUE 1.20e-01
acttatgataaaggaaaaatgtaataagataaatagaatagaaatagaaaaccaggaccagagaagtagagggaggaagggtgctaacccagagacactgcttcttaagctctttccccaaaatggccttcataggagaggagagagaacttgtgtttgcattattacccttcctagaatagttgactattttaggagggctaacagt

SEQ ID NO: 26141 - DNA, 118 bp, Homo sapiens
  MAP TO AC008166.1; EXPRESSED IN LUNG, SIGNAL = 1.4; EXPRESSED IN FETAL LIVER, SIGNAL = 1.7; EXPRESSED IN ADULT LIVER, SIGNAL = 2.1; EXPRESSED IN BRAIN, SIGNAL = 1.4; EXPRESSED IN PLACENTA, SIGNAL = 1.5; EXPRESSED IN HELA, SIGNAL =  19; EXPRESSED IN HEART, SIGNAL = 1.3; NT HIT: U35890.1, EVALUE 2.00e-11; EST_HUMAN HIT: AV702991.1, EVALUE 1.00e-07; SWISSPROT HIT: Q10473, EVALUE 7.00e-13
aatcaaatcactggccataaggttaaactgattgattttaaacagctctttcattttctcctggtcatctttaggaatcaacacagcttttcccatttctcctggcccttcttggttt

SEQ ID NO: 26142 - DNA, 94 bp, Homo sapiens
  MAP TO AC007462.2; EXPRESSED IN HEART, SIGNAL = 6.6; EXPRESSED IN ADULT LIVER, SIGNAL =  16; EXPRESSED IN HELA, SIGNAL = 7.5; EXPRESSED IN PLACENTA, SIGNAL =  17; EXPRESSED IN BONE MARROW, SIGNAL =   3; EXPRESSED IN LUNG, SIGNAL = 8.4; EXPRESSED IN FETAL LIVER, SIGNAL =  17; EXPRESSED IN BRAIN, SIGNAL = 2.7; NT HIT: AF078164.2, EVALUE 2.00e-01; EST_HUMAN HIT: BE793264.1, EVALUE 1.10e+00; SWISSPROT HIT: P08509, EVALUE 3.20e+00
ctctgagaggctttcagagttccccatgaatgtggaaccaacaccagtattttctgactctggttttatctggatgttcttaggttcagctctg

SEQ ID NO: 26143 - DNA, 146 bp, Homo sapiens
  MAP TO AB016897.1; EXPRESSED IN ADULT LIVER, SIGNAL =  25; EXPRESSED IN PLACENTA, SIGNAL =  33; EXPRESSED IN HEART, SIGNAL = 7.2; EXPRESSED IN FETAL LIVER, SIGNAL =  22; EXPRESSED IN BRAIN, SIGNAL =   4; EXPRESSED IN HELA, SIGNAL = 8.5; EXPRESSED IN BONE MARROW, SIGNAL = 4.7; EXPRESSED IN LUNG, SIGNAL =  12; EST_HUMAN HIT: R00245.1, EVALUE 8.00e-77; SWISSPROT HIT: O42222, EVALUE 5.30e+00; NT HIT: AJ271735.1, EVALUE 3.00e-29
gctgtacaggaagcatggctggggaggcctcaggaaacttacaatcatggcagaaggcaaaggggaagcagacatgtcttacctggctggaacaggaggaagctggggaagggaggtaccacacacttttaaacaacaagatttag

SEQ ID NO: 26144 - DNA, 162 bp, Homo sapiens
  MAP TO AB016897.1; EXPRESSED IN LUNG, SIGNAL = 3.7; EXPRESSED IN BONE MARROW, SIGNAL = 6.4; EXPRESSED IN HEART, SIGNAL = 1.8; EXPRESSED IN ADULT LIVER, SIGNAL = 3.2; EXPRESSED IN FETAL LIVER, SIGNAL = 3.4; EXPRESSED IN BRAIN, SIGNAL = 4.3; EXPRESSED IN PLACENTA, SIGNAL = 2.6; EXPRESSED IN HELA, SIGNAL = 2.6; EST_HUMAN HIT: AW974465.1, EVALUE 5.50e-01; NT HIT: AB011399.1, EVALUE 2.00e-86
tgacacatccagtcgtttatcttctgatgcagcagcagttgatcacatcttccatcaaattcttccttcacttggtcttcaggactggcctgttgcccagacctcagggtctgatcccaatacacactcttttctccacttattccctaggtgaaatatttc

SEQ ID NO: 26145 - DNA, 487 bp, Homo sapiens
  MAP TO AL008723.8; EXPRESSED IN LUNG, SIGNAL = 1.6; EXPRESSED IN BONE MARROW, SIGNAL = 2.5; EXPRESSED IN ADULT LIVER, SIGNAL = 1.9; EXPRESSED IN HELA, SIGNAL = 2.4; EXPRESSED IN PLACENTA, SIGNAL = 1.8; EXPRESSED IN HEART, SIGNAL = 1.5; EXPRESSED IN FETAL LIVER, SIGNAL = 1.7; EXPRESSED IN BRAIN, SIGNAL = 2.1; NT HIT: gi9558724, EVALUE 0.00e+00; EST_HUMAN HIT: BF348283.1, EVALUE 0.00e+00; SWISSPROT HIT: Q10570, EVALUE 1.00e-52
catgtggagtccaagatgtacgctgtggccaccagcaccaacacactgtgcacctgcatcccacatgactggcgaggagaaggcatttgagaccattgagagagatgagcagtgcatccacccccaggaggcggccttatctatccagttcatctccctagtctgctgggaggctattcccaatgccaggattgagctgcagaagtgggagcttgtgaccagcacgaagacagtgtcgctgcagcaaggagaccaggtcaggcttcaaaggctacgcgtggccgccgggacctgcctcatgcaggaggaggaggaggtcatgtcctgagggcggatcttgatcatggatgtgactgaggtggtgcccgagcccagccagcccttgaccaagaacaagttcagagtcctttacgagaaggagcagaaggggcccgtgactgccctgtgcactgcaaggccacctggtgtcggccatcagccagaagat

SEQ ID NO: 26146 - DNA, 160 bp, Homo sapiens
  MAP TO AL021707.2; EXPRESSED IN FETAL LIVER, SIGNAL = 3.9; EXPRESSED IN HELA, SIGNAL = 3.3; EXPRESSED IN PLACENTA, SIGNAL = 4.5; EXPRESSED IN BRAIN, SIGNAL = 2.9; EXPRESSED IN BONE MARROW, SIGNAL = 3.6; EXPRESSED IN HEART, SIGNAL = 2.5; EXPRESSED IN LUNG, SIGNAL = 3.6; EXPRESSED IN ADULT LIVER, SIGNAL = 4.3; NT HIT: AF202723.1, EVALUE 6.00e-37; EST_HUMAN HIT: BE737161.1, EVALUE 9.00e-37; SWISSPROT HIT: Q10900, EVALUE 1.30e+00
agtccagctcttgctgaccccagatgggaccagccctcagtgtgctcagagcccccgctgctgtgcttgccaggtgcccacctggaggatgactcggggtgactgggagtggtaccacagggggatgccgaagaggctgaggagggccgtcttggtctcg

SEQ ID NO: 26147 - DNA, 104 bp, Homo sapiens
  MAP TO AC002472.3; EXPRESSED IN BRAIN, SIGNAL = 5.2; EXPRESSED IN PLACENTA, SIGNAL =  13; EXPRESSED IN HELA, SIGNAL = 6.3; EXPRESSED IN BONE MARROW, SIGNAL = 4.7; EXPRESSED IN LUNG, SIGNAL = 6.9; EXPRESSED IN HEART, SIGNAL = 5.1; EXPRESSED IN FETAL LIVER, SIGNAL =  14; EXPRESSED IN ADULT LIVER, SIGNAL = 8.2; SWISSPROT HIT: O15547, EVALUE 7.00e-09; NT HIT: AB002059.1, EVALUE 4.00e-52; EST_HUMAN HIT: AW451665.1, EVALUE 2.00e-33
gcggattccatagagcttgagcagggtgcgggcctccacacccggttgctcccaccagtgagtggctgtcctgtgggcaggaaagaaggctctggtgacctgct

SEQ ID NO: 26148 - DNA, 290 bp, Homo sapiens
  MAP TO AP000041.1; EXPRESSED IN LUNG, SIGNAL = 1.7; EXPRESSED IN HEART, SIGNAL = 1.6; EXPRESSED IN BONE MARROW, SIGNAL = 1.6; EXPRESSED IN ADULT LIVER, SIGNAL = 2.7; EXPRESSED IN HELA, SIGNAL =   2; EXPRESSED IN PLACENTA, SIGNAL =   5; EXPRESSED IN FETAL LIVER, SIGNAL = 2.7; EXPRESSED IN BRAIN, SIGNAL = 2.3; NT HIT: Y11114.1, EVALUE 1.80e-01; EST_HUMAN HIT: AW811731.1, EVALUE 1.00e+00; SWISSPROT HIT: Q58609, EVALUE 1.30e+00
agttgcccccatttctccccctactgaaatagttgaagataggagtttcaaaggttttgttttaaaaggtatgcctactgtccagaaaaactttccccaggtctttgatgaccctctggaaagttatttaattttcccaagatctgttgtagataaagaaattctttgggtagggaggatagacttggcacaagctcaactgcaaaagtattattgggttaatacggtagttgttgactcttcttcagggattctcaataatggtcctgttacatttggggccagatact

SEQ ID NO: 26149 - DNA, 208 bp, Homo sapiens
  MAP TO AL022329.9; EXPRESSED IN HEART, SIGNAL = 2.1; EXPRESSED IN BONE MARROW, SIGNAL = 2.9; EXPRESSED IN LUNG, SIGNAL = 3.1; EXPRESSED IN FETAL LIVER, SIGNAL = 2.2; EXPRESSED IN ADULT LIVER, SIGNAL = 3.6; EXPRESSED IN HELA, SIGNAL = 2.4; EXPRESSED IN PLACENTA, SIGNAL = 3.5; EXPRESSED IN BRAIN, SIGNAL = 2.8; NT HIT: L10187.1, EVALUE 1.20e-01; EST_HUMAN HIT: BF032046.1, EVALUE 7.30e-01; SWISSPROT HIT: P28908, EVALUE 1.30e+00
gctggtcagagctaggggccccaggagatgaggggctgggccatgatggtgattggggtgttcatgggaccagcttttctggtgttggaggttaggtgaaggcaaagtgcagagggcccaggtcacagggctgtgaggattgctgaccaactgagggacacccttctgtggtctggagcagtggctggggtcagcattgagaccgatg

SEQ ID NO: 26150 - DNA, 111 bp, Homo sapiens
  MAP TO AL022319.2; EXPRESSED IN FETAL LIVER, SIGNAL =   8; EXPRESSED IN ADULT LIVER, SIGNAL = 6.4; EXPRESSED IN PLACENTA, SIGNAL = 6.4; EXPRESSED IN HELA, SIGNAL = 4.5; EXPRESSED IN BRAIN, SIGNAL = 5.6; EXPRESSED IN BONE MARROW, SIGNAL = 7.4; EXPRESSED IN LUNG, SIGNAL = 4.9; EXPRESSED IN HEART, SIGNAL = 3.6; SWISSPROT HIT: P42201, EVALUE 7.10e+00; NT HIT: AL163207.2, EVALUE 6.10e-02; EST_HUMAN HIT: BF699544.1, EVALUE 3.60e-01
agggtgggaaatgtcttgctaggagagagttttttattctttaacttatataagctgtggccacagtgcgctccttcgagacgcagtgttccctgtgcccatactgcagga

SEQ ID NO: 26151 - DNA, 151 bp, Homo sapiens
  MAP TO AL049649.4; EXPRESSED IN PLACENTA, SIGNAL = 1.9; EXPRESSED IN BRAIN, SIGNAL = 2.3; EXPRESSED IN HELA, SIGNAL = 1.6; EXPRESSED IN BONE MARROW, SIGNAL = 2.5; EXPRESSED IN HEART, SIGNAL = 1.3; EXPRESSED IN LUNG, SIGNAL = 1.8; EXPRESSED IN ADULT LIVER, SIGNAL = 1.8; EXPRESSED IN FETAL LIVER, SIGNAL = 1.5; EST_HUMAN HIT: AW001114.1, EVALUE 1.30e-01; SWISSPROT HIT: Q14112, EVALUE 2.70e-01
aggaggtgagagcccagccccagttcagccaagtggaggcagaggcagtggtagcttctggcctcggagcaggagggtgggcagtgtaggggaggcaagcaggagactgccaggactgaccaggccaggtaactgtttacccaacaagagc

SEQ ID NO: 26152 - DNA, 162 bp, Homo sapiens
  MAP TO AL035681.13; EXPRESSED IN PLACENTA, SIGNAL =   3; EXPRESSED IN BRAIN, SIGNAL =   2; EXPRESSED IN HELA, SIGNAL = 3.9; EXPRESSED IN HEART, SIGNAL = 2.7; EXPRESSED IN BONE MARROW, SIGNAL = 2.1; EXPRESSED IN LUNG, SIGNAL = 2.2; EXPRESSED IN FETAL LIVER, SIGNAL = 2.2; EXPRESSED IN ADULT LIVER, SIGNAL = 1.6; NT HIT: gi11418177, EVALUE 3.00e-85; EST_HUMAN HIT: BF335560.1, EVALUE 4.00e-85; SWISSPROT HIT: P46060, EVALUE 7.00e-25
ctcggccatggccacggcgcccttctcagtgaaggtgttgtcattcaggttgatgacccgcagcagggggttgacagcgaaagcctgggccagggcagtgatgccagggtggttgatcccattctgtggcatgtggacctcctccagggtcccgatgacctg

SEQ ID NO: 26153 - DNA, 400 bp, Homo sapiens
  MAP TO AC008272.1; EXPRESSED IN PLACENTA, SIGNAL = 4.5; EXPRESSED IN HELA, SIGNAL = 1.7; EXPRESSED IN HEART, SIGNAL = 2.4; EXPRESSED IN LUNG, SIGNAL = 2.3; EXPRESSED IN BONE MARROW, SIGNAL = 4.7; EXPRESSED IN ADULT LIVER, SIGNAL = 3.2; EXPRESSED IN FETAL LIVER, SIGNAL = 5.4; EXPRESSED IN BRAIN, SIGNAL = 4.4; NT HIT: AF109907.1, EVALUE 7.00e-82; EST_HUMAN HIT: AI523366.1, EVALUE 5.00e-90
cacaggatgagataggaggtcagcacaagatacaggtcacaaagaccttgctgataaaacaggttgcgagaaagaagccagccaaaacccaccaaaaccaagacggcaatgagagtgacctctggttgtcctcatgactcattatacactaattataaaatatcagcatgctaagagacactcccaccagtgacatgacagtttacaaatgtcatggcaacatcaggaagttgccctatatggtctaaaatggggaggaaccctcagttctggaaattgcccacctctttcctggaaaactcgtgaataatccaccccttgtttagcatataatcaagaagtaaccataaaaccagcagcccttggggctgctctgtctatggagtcattcttttattcc

SEQ ID NO: 26154 - DNA, 205 bp, Homo sapiens
  MAP TO AC004032.7; EXPRESSED IN HEART, SIGNAL = 2.7; EXPRESSED IN ADULT LIVER, SIGNAL = 4.2; EXPRESSED IN PLACENTA, SIGNAL = 2.7; EXPRESSED IN BONE MARROW, SIGNAL = 4.1; EXPRESSED IN LUNG, SIGNAL = 3.8; EXPRESSED IN FETAL LIVER, SIGNAL = 4.9; EXPRESSED IN BRAIN, SIGNAL = 2.3; EXPRESSED IN HELA, SIGNAL = 3.4; EST_HUMAN HIT: R17336.1, EVALUE 7.00e-04; SWISSPROT HIT: O16140, EVALUE 8.60e-02; NT HIT: AL163227.2, EVALUE 4.80e-01
accttgccatgcctggcccagtccctccaccagagctgcactggcccctactgtgcccttctcaccttctcccatcacaggccctggcaggggttgtgcccatggctggagggctttttgctcagtgaaggcacagccacacctcagctcagccgccacatcctcagggaaatgccccccgccgcccccggcaactcctaccaga

SEQ ID NO: 26155 - DNA, 100 bp, Homo sapiens
  MAP TO AC008022.1; EXPRESSED IN BRAIN, SIGNAL = 4.2; EXPRESSED IN PLACENTA, SIGNAL = 2.7; EXPRESSED IN HELA, SIGNAL = 2.7; EXPRESSED IN BONE MARROW, SIGNAL = 3.2; EXPRESSED IN HEART, SIGNAL = 1.9; EXPRESSED IN LUNG, SIGNAL = 2.3; EXPRESSED IN ADULT LIVER, SIGNAL = 2.4; EXPRESSED IN FETAL LIVER, SIGNAL = 2.2; EST_HUMAN HIT: AW449109.1, EVALUE 5.00e-03; NT HIT: AF195953.1, EVALUE 2.10e-01
agcttttcatggacttacaagaaatatttagcagaactcatcttcgtgtccctgcaaattcgtatgttgaaaccctaaactcaatgggatggtattagga

SEQ ID NO: 26156 - DNA, 121 bp, Homo sapiens
  MAP TO AP000352.2; EXPRESSED IN LUNG, SIGNAL = 7.1; EXPRESSED IN ADULT LIVER, SIGNAL = 8.6; EXPRESSED IN FETAL LIVER, SIGNAL =  15; EXPRESSED IN PLACENTA, SIGNAL = 6.9; EXPRESSED IN HEART, SIGNAL = 4.2; EXPRESSED IN BONE MARROW, SIGNAL =  20; EXPRESSED IN BRAIN, SIGNAL =  17; EXPRESSED IN HELA, SIGNAL = 7.8; SWISSPROT HIT: O88480, EVALUE 3.00e-17; EST_HUMAN HIT: AA082181.1, EVALUE 1.00e-53; NT HIT: gi11417862, EVALUE 4.00e-62
acttcatctgcaaagctttggagaaggattgccggtacagcaaagggctggtcctcaaggagaagatttttgaggagcagccttgtctccggaaggactctctcagaatgttcctcaaatg

SEQ ID NO: 26157 - DNA, 578 bp, Homo sapiens; identical to SEQ ID NO: 9008
  MAP TO AC007841.1; EXPRESSED IN LUNG, SIGNAL =   2; EXPRESSED IN HEART, SIGNAL = 1.9; EXPRESSED IN FETAL LIVER, SIGNAL = 1.8; EXPRESSED IN BRAIN, SIGNAL = 2.1; EXPRESSED IN PLACENTA, SIGNAL = 1.2; EXPRESSED IN HELA, SIGNAL = 1.5; EXPRESSED IN BONE MARROW, SIGNAL = 2.6; NT HIT: J04982.1, EVALUE 3.70e-01; EST_HUMAN HIT: AA741158.1, EVALUE 5.50e-01; SWISSPROT HIT: Q50412, EVALUE 6.50e+00

SEQ ID NO: 26158 - DNA, 210 bp, Homo sapiens
  MAP TO AC006992.2; EXPRESSED IN PLACENTA, SIGNAL = 2.3; EXPRESSED IN BRAIN, SIGNAL = 3.7; EXPRESSED IN BONE MARROW, SIGNAL = 1.9; EXPRESSED IN LUNG, SIGNAL = 1.7; EXPRESSED IN HEART, SIGNAL = 1.9; EXPRESSED IN ADULT LIVER, SIGNAL = 2.8; EXPRESSED IN FETAL LIVER, SIGNAL = 2.6; EXPRESSED IN HELA, SIGNAL = 1.4; NT HIT: AL163280.2, EVALUE 2.00e-22; EST_HUMAN HIT: BE390947.1, EVALUE 4.00e-21; SWISSPROT HIT: Q03405, EVALUE 2.50e-01
tcagaagatgtatggaaatgcctggatgtccaggcagaaatttgctgcaggggcggggtgctcatggagaactaccatgcacctggaagagctgtagacacccaatgccagcccatgaaagcagtcaggagggaggctatagcctgcaaagccacagggacagagctgcccaaggctgtgagagcccaccatcagtgtgacccggatgtg

SEQ ID NO: 26159 - DNA, 121 bp, Homo sapiens
  MAP TO AL031588.1; EXPRESSED IN HEART, SIGNAL =   2; EXPRESSED IN BONE MARROW, SIGNAL =   2; EXPRESSED IN LUNG, SIGNAL = 2.4; EXPRESSED IN FETAL LIVER, SIGNAL = 1.8; EXPRESSED IN ADULT LIVER, SIGNAL = 1.5; EXPRESSED IN PLACENTA, SIGNAL = 1.7; EXPRESSED IN HELA, SIGNAL = 1.7; EXPRESSED IN BRAIN, SIGNAL = 1.3; NT HIT: gi11418322, EVALUE 4.00e-62; EST_HUMAN HIT: AI908715.1, EVALUE 3.00e-05; SWISSPROT HIT: Q61001, EVALUE 3.00e-05
actcgaccttccgtgccccagaggctggtgggggaaccccgtctgtggaccctgccactgtgccgtcagcaaaggctttgatcccgactgtaataagaccaacggccagtgccaatgcaag

SEQ ID NO: 26160 - DNA, 168 bp, Homo sapiens
  MAP TO AB016897.1; EXPRESSED IN PLACENTA, SIGNAL = 1.8; EXPRESSED IN HELA, SIGNAL = 1.4; EXPRESSED IN HEART, SIGNAL = 2.2; EXPRESSED IN LUNG, SIGNAL = 1.7; EXPRESSED IN BONE MARROW, SIGNAL = 2.9; EXPRESSED IN FETAL LIVER, SIGNAL = 1.6; EXPRESSED IN BRAIN, SIGNAL = 2.1; NT HIT: AB011399.1, EVALUE 5.00e-90; EST_HUMAN HIT: BF693894.1, EVALUE 1.50e-01; SWISSPROT HIT: P08921, EVALUE 6.90e-01
gtgcccggtgtctccatcacctcgaaggccccacaagccaggtgcccggcatctccatcaccccgaagggcccccgccggcgtgtttccaccccttcccacaccccgttgttccaggaagccgctcttctggtaactcgagtgatctgtcattctgggatcagcccca

SEQ ID NO: 26161 - DNA, 114 bp, Homo sapiens
  MAP TO AC006427.13; EXPRESSED IN LUNG, SIGNAL =   5; EXPRESSED IN FETAL LIVER, SIGNAL = 4.6; EXPRESSED IN ADULT LIVER, SIGNAL =   8; EXPRESSED IN PLACENTA, SIGNAL = 5.8; EXPRESSED IN BRAIN, SIGNAL = 4.2; EXPRESSED IN HELA, SIGNAL = 4.5; EXPRESSED IN HEART, SIGNAL = 2.9; EXPRESSED IN BONE MARROW, SIGNAL =   4; NT HIT: AL163210.2, EVALUE 1.00e-34; EST_HUMAN HIT: AV712805.1, EVALUE 8.00e-30; SWISSPROT HIT: P40568, EVALUE 2.40e+00
caatcatctccatctgagatcacctcagcttgatccttatagttcatatcactatcagcattttgatcaaagccattcaacacatctctaggaagttccaaactttcccacatt

SEQ ID NO: 26162 - DNA, 221 bp, Homo sapiens
  MAP TO AL031588.1; EXPRESSED IN LUNG, SIGNAL = 3.8; EXPRESSED IN FETAL LIVER, SIGNAL =   4; EXPRESSED IN ADULT LIVER, SIGNAL = 3.5; EXPRESSED IN PLACENTA, SIGNAL = 1.6; EXPRESSED IN BRAIN, SIGNAL = 3.6; EXPRESSED IN HELA, SIGNAL = 2.4; EXPRESSED IN HEART, SIGNAL = 3.2; EXPRESSED IN BONE MARROW, SIGNAL = 4.1; SWISSPROT HIT: P27400, EVALUE 3.80e-01; NT HIT: Z28202.1, EVALUE 5.20e-01; EST_HUMAN HIT: AI023592.1, EVALUE 2.00e-01
gaacctgtcttgaggcaccaacaacacgctacgaaggactcaagcccagcaagaggaagagagccaaggacacaggtcagcatcgcaggcacctactctggagtccaggagcagggatacgggggcagaggatggagcagctgggacctcagggagaggtacgcaggttgccatggctgcgtctgcagtccacctgcctttccacgccagggagtcagtga

SEQ ID NO: 26163 - DNA, 82 bp, Homo sapiens
  MAP TO AL031588.1; EXPRESSED IN FETAL LIVER, SIGNAL = 1.4; EXPRESSED IN BRAIN, SIGNAL = 1.8; EXPRESSED IN HELA, SIGNAL = 1.7; EXPRESSED IN BONE MARROW, SIGNAL = 1.9; EXPRESSED IN HEART, SIGNAL = 1.5; NT HIT: gi11418318, EVALUE 4.00e-24; EST_HUMAN HIT: BF589388.1, EVALUE 5.00e-24
ctttgtggtgctggcccagatgagcgtctaaccggggtgctgtggacagtgaccctggcaaacacaacatcagtgtcgtgag

SEQ ID NO: 26164 - DNA, 253 bp, Homo sapiens
  MAP TO AC007106.6; EXPRESSED IN BRAIN, SIGNAL =   2; EXPRESSED IN PLACENTA, SIGNAL = 2.4; EXPRESSED IN HELA, SIGNAL = 3.8; EXPRESSED IN LUNG, SIGNAL = 3.4; EXPRESSED IN HEART, SIGNAL = 2.7; EXPRESSED IN BONE MARROW, SIGNAL = 1.5; EXPRESSED IN ADULT LIVER, SIGNAL = 1.9; EXPRESSED IN FETAL LIVER, SIGNAL = 2.6; EST_HUMAN HIT: BF475611.1, EVALUE 2.30e-01; NT HIT: gi9631294, EVALUE 2.40e+00; SWISSPROT HIT: P06255, EVALUE 5.10e+00
acttcaacaaaaatgtacaatttctaaaatgagaaaaatatggagcaaatcctttaaaatgaaagtaagtctagtagtgagaaggtgtaatgaagtgagtttctatttcattctaggcttctctaagagattcaatctgttcatacacataaggatattgatacaaatgttaacaatatctgaaagtttatttttcatatttaaatgtcaatgtgctaaatgttttacatatattatatttattctaacaacc

SEQ ID NO: 26165 - DNA, 100 bp, Homo sapiens
  MAP TO AC007106.6; EXPRESSED IN PLACENTA, SIGNAL = 5.5; EXPRESSED IN HELA, SIGNAL = 3.8; EXPRESSED IN BRAIN, SIGNAL = 2.8; EXPRESSED IN BONE MARROW, SIGNAL = 2.1; EXPRESSED IN HEART, SIGNAL = 4.7; EXPRESSED IN LUNG, SIGNAL = 4.5; EXPRESSED IN ADULT LIVER, SIGNAL = 4.2; EXPRESSED IN FETAL LIVER, SIGNAL =  14; NT HIT: AF237670.1, EVALUE 5.40e-02; EST_HUMAN HIT: AI065045.1, EVALUE 5.00e-06
ttttcaaactttgcctatattatcttactctctgctggcctataaggtttttgctgagaattctgaataatctgattggtagctttatggaggtttccct

SEQ ID NO: 26166 - DNA, 117 bp, Homo sapiens
  MAP TO AL049758.11; EXPRESSED IN ADULT LIVER, SIGNAL = 1.9; EXPRESSED IN FETAL LIVER, SIGNAL = 1.6; EXPRESSED IN PLACENTA, SIGNAL = 1.7; EXPRESSED IN BRAIN, SIGNAL = 3.3; EXPRESSED IN HELA, SIGNAL = 1.6; EXPRESSED IN HEART, SIGNAL = 1.4; EXPRESSED IN BONE MARROW, SIGNAL = 1.8; EXPRESSED IN LUNG, SIGNAL =   2; NT HIT: AF196277.1, EVALUE 1.00e+00; EST_HUMAN HIT: H14599.1, EVALUE 9.60e-02; SWISSPROT HIT: Q28575, EVALUE 4.10e+00
gcccttggctcaccctgcccctggagtgtctcaggccttcccagattccaaatgcaaagaaaaaacaggagctctggattctgacagacttcaagttcaagtcccagttcctccact

SEQ ID NO: 26167 - DNA, 143 bp, Homo sapiens
  MAP TO AP000123.1; EXPRESSED IN PLACENTA, SIGNAL = 2.1; EXPRESSED IN BRAIN, SIGNAL = 2.1; EXPRESSED IN HELA, SIGNAL = 1.4; EXPRESSED IN HEART, SIGNAL = 1.6; EXPRESSED IN BONE MARROW, SIGNAL = 1.6; EXPRESSED IN LUNG, SIGNAL =   2; EXPRESSED IN FETAL LIVER, SIGNAL = 1.9; EXPRESSED IN ADULT LIVER, SIGNAL = 1.5; NT HIT: L39874.1, EVALUE 3.20e-01; EST_HUMAN HIT: BE966719.2, EVALUE 1.90e+00; SWISSPROT HIT: P55443, EVALUE 1.00e+00
cctccttcagagagacaccgtttggaaattaccagaggcctagagcaccaacccctccccagaccttggaagaattcaccatgatcccctggtaggttcaagtccacagaggatggattctgaaggggaacatgcaaacccat

SEQ ID NO: 26168 - DNA, 99 bp, Homo sapiens; identical to SEQ ID NO: 25849
  MAP TO AC007564.9; EXPRESSED IN FETAL LIVER, SIGNAL = 5.4; EXPRESSED IN ADULT LIVER, SIGNAL = 4.9; EXPRESSED IN HELA, SIGNAL = 2.9; EXPRESSED IN PLACENTA, SIGNAL = 6.5; EXPRESSED IN BRAIN, SIGNAL = 2.3; EXPRESSED IN BONE MARROW, SIGNAL = 4.3; EXPRESSED IN LUNG, SIGNAL = 2.5; EXPRESSED IN HEART, SIGNAL = 4.9; NT HIT: AF119841.1, EVALUE 5.00e-30; EST_HUMAN HIT: BE279086.1, EVALUE 3.00e-32

SEQ ID NO: 26169 - DNA, 139 bp, Homo sapiens
  MAP TO AC007564.9; EXPRESSED IN LUNG, SIGNAL = 1.3; EXPRESSED IN BONE MARROW, SIGNAL = 2.7; EXPRESSED IN HEART, SIGNAL = 1.5; EXPRESSED IN FETAL LIVER, SIGNAL = 3.4; EXPRESSED IN ADULT LIVER, SIGNAL = 3.1; EXPRESSED IN PLACENTA, SIGNAL = 3.8; EXPRESSED IN HELA, SIGNAL = 1.7; EXPRESSED IN BRAIN, SIGNAL = 2.1; NT HIT: AL163209.2, EVALUE 4.00e-22; EST_HUMAN HIT: AI565777.1, EVALUE 6.00e-22; SWISSPROT HIT: O83325, EVALUE 4.70e-01
tatcagggccttttccccaacttcactgcacacttctccttgctgcccccatgtgaagaaggacatgtttgctgccccttctgccatgattgtaaatctcctgtggcctccctggttctgcagaactgtgattcaatta

SEQ ID NO: 26170 - DNA, 229 bp, Homo sapiens; identical to SEQ ID NO: 25928
  MAP TO AP000347.1; EXPRESSED IN BONE MARROW, SIGNAL = 1.7; EXPRESSED IN HEART, SIGNAL = 6.3; NT HIT: X51755.1, EVALUE 1.00e-08; EST_HUMAN HIT: BE745739.1, EVALUE 2.10e-01; SWISSPROT HIT: P30744, EVALUE 7.90e-01

SEQ ID NO: 26171 - DNA, 120 bp, Homo sapiens
  MAP TO AL021707.2; EXPRESSED IN LUNG, SIGNAL =  10; EXPRESSED IN BONE MARROW, SIGNAL =  10; EXPRESSED IN FETAL LIVER, SIGNAL =  18; EXPRESSED IN BRAIN, SIGNAL =  12; EXPRESSED IN HELA, SIGNAL =   8; EXPRESSED IN HEART, SIGNAL = 8.2; EXPRESSED IN ADULT LIVER, SIGNAL =  10; EXPRESSED IN PLACENTA, SIGNAL =  11; EST_HUMAN HIT: BF311627.1, EVALUE 2.00e-61; SWISSPROT HIT: O08582, EVALUE 3.00e-16; NT HIT: gi11418127, EVALUE 1.00e-61
atggcggaacagatagaggccgatgtcatccttctgcgggaacggcaagaagctgggggccgcgtgcgtgattacctggtccggaaacgagtaggagacaatgacttcctggaggtcagg

SEQ ID NO: 26172 - DNA, 140 bp, Homo sapiens
  MAP TO AC004624.6; EXPRESSED IN FETAL LIVER, SIGNAL = 3.9; EXPRESSED IN BRAIN, SIGNAL = 3.5; EXPRESSED IN HELA, SIGNAL = 3.2; EXPRESSED IN PLACENTA, SIGNAL = 3.8; EXPRESSED IN LUNG, SIGNAL = 4.1; EXPRESSED IN BONE MARROW, SIGNAL = 3.4; EXPRESSED IN HEART, SIGNAL = 3.1; EXPRESSED IN ADULT LIVER, SIGNAL = 4.8; EST_HUMAN HIT: AI937551.1, EVALUE 4.70e-01; SWISSPROT HIT: Q00023, EVALUE 3.60e-01; NT HIT: AF196779.1, EVALUE 3.10e-01
ctagtggggagggctgttgggggacccccaggccgctggatccccaactctcttcgcaaaggaccattccaggcagggaggcatggggagccctgaagcttgtgtgggaactggtgaccgtacattccgcagcatgagaa

SEQ ID NO: 26173 - DNA, 78 bp, Homo sapiens
  MAP TO AC006427.13; EXPRESSED IN BONE MARROW, SIGNAL = 2.6; EXPRESSED IN ADULT LIVER, SIGNAL = 4.8; EXPRESSED IN BRAIN, SIGNAL = 1.7; EXPRESSED IN PLACENTA, SIGNAL =   5; EXPRESSED IN LUNG, SIGNAL = 2.8; EXPRESSED IN HEART, SIGNAL = 2.5; EXPRESSED IN FETAL LIVER, SIGNAL =   4; EXPRESSED IN HELA, SIGNAL = 2.5; NT HIT: AF287344.1, EVALUE 1.60e-01; EST_HUMAN HIT: BE891745.1, EVALUE 9.20e-01
cttccattcctccctgccaccatcagacatgctagagaacagtgctttcaccaacttctgctcctcacttttccctgt

SEQ ID NO: 26174 - DNA, 120 bp, Homo sapiens
  MAP TO AP000352.2; EXPRESSED IN HEART, SIGNAL = 2.2; EXPRESSED IN FETAL LIVER, SIGNAL =   4; EXPRESSED IN PLACENTA, SIGNAL = 2.8; EXPRESSED IN LUNG, SIGNAL = 2.9; EXPRESSED IN BONE MARROW, SIGNAL = 3.2; EXPRESSED IN ADULT LIVER, SIGNAL = 2.8; EXPRESSED IN BRAIN, SIGNAL = 2.8; EXPRESSED IN HELA, SIGNAL = 2.3; NT HIT: AF217491.1, EVALUE 2.70e-01; EST_HUMAN HIT: BF312724.1, EVALUE 1.50e+00; SWISSPROT HIT: P48843, EVALUE 4.10e+00
gatgtcccatggtatcatgggacagtagttggtgccaaggaggagtgccatgagctggcagacgggagcaagttctggggtttggtgggttgggaagaattcctggagaaggtgagtctc

SEQ ID NO: 26175 - DNA, 86 bp, Homo sapiens
  MAP TO Z86090.10; EXPRESSED IN ADULT LIVER, SIGNAL =   5; EXPRESSED IN HELA, SIGNAL = 3.9; EXPRESSED IN PLACENTA, SIGNAL = 5.4; EXPRESSED IN BRAIN, SIGNAL =   6; EXPRESSED IN LUNG, SIGNAL = 4.7; EXPRESSED IN HEART, SIGNAL = 3.3; EXPRESSED IN BONE MARROW, SIGNAL =   4; EXPRESSED IN FETAL LIVER, SIGNAL =   8; NT HIT: gi6005855, EVALUE 7.00e-04; EST_HUMAN HIT: AI929032.1, EVALUE 1.00e-03; SWISSPROT HIT: P16522, EVALUE 7.30e+00
cgcagggttggtgtcagtggcaggtttcacatgctggcaagctggagccagcagctccagctccagctctagcacccctggagttt

SEQ ID NO: 26176 - DNA, 128 bp, Homo sapiens
  MAP TO AC007556.2; EXPRESSED IN PLACENTA, SIGNAL = 3.1; EXPRESSED IN LUNG, SIGNAL =   3; EXPRESSED IN ADULT LIVER, SIGNAL = 2.8; EXPRESSED IN FETAL LIVER, SIGNAL =   2; EXPRESSED IN BRAIN, SIGNAL =   3; EXPRESSED IN HELA, SIGNAL = 3.3; EXPRESSED IN BONE MARROW, SIGNAL = 3.3; EXPRESSED IN HEART, SIGNAL = 2.3; NT HIT: gi11430460, EVALUE 1.00e-62; EST_HUMAN HIT: AW836684.1, EVALUE 1.10e-01; SWISSPROT HIT: P98164, EVALUE 2.00e-21
ccactcacacgtgcagcagcagtgagttccaatgcgcatctgggcgctgtattcctcaacattggtattgtgatcaagaaacagattgttttgatgcctctgatgaacctgcctcttgtggtaagaga

SEQ ID NO: 26177 - DNA, 147 bp, Homo sapiens
  MAP TO AC007462.2; EXPRESSED IN BRAIN, SIGNAL = 3.3; EXPRESSED IN ADULT LIVER, SIGNAL =  26; EXPRESSED IN HELA, SIGNAL =  12; EXPRESSED IN PLACENTA, SIGNAL =  22; EXPRESSED IN BONE MARROW, SIGNAL = 4.9; EXPRESSED IN HEART, SIGNAL =   6; EXPRESSED IN LUNG, SIGNAL =  13; EXPRESSED IN FETAL LIVER, SIGNAL =  36; NT HIT: AP000002.1, EVALUE 3.30e-01; EST_HUMAN HIT: AW166133.1, EVALUE 2.00e+00; SWISSPROT HIT: P16815, EVALUE 3.10e+00
tgtaccagtgctatggaaatgcccaccattttgtgtagcataaaggcctcgtatactttacttccactggatttctctgtctttgattcttccccccgcccccagtactctgctgccagcccatgtcttactccttcttcctctcta

SEQ ID NO: 26178 - DNA, 93 bp, Homo sapiens
  MAP TO AL022319.2; EXPRESSED IN FETAL LIVER, SIGNAL = 3.5; EXPRESSED IN BRAIN, SIGNAL = 2.6; EXPRESSED IN PLACENTA, SIGNAL =   4; EXPRESSED IN HELA, SIGNAL = 2.8; EXPRESSED IN HEART, SIGNAL = 3.2; EXPRESSED IN LUNG, SIGNAL = 3.4; EXPRESSED IN BONE MARROW, SIGNAL =   4; EXPRESSED IN ADULT LIVER, SIGNAL = 3.2; EST_HUMAN HIT: H55225.1, EVALUE 2.00e-45; SWISSPROT HIT: Q9Z0Y8, EVALUE 4.00e-05; NT HIT: gi11418157, EVALUE 1.00e-45
gtgatcactctggaaggctgggtggagatcatgtactacgtgatggatgctcactccttctacaacttcatctacttcatcctgcttatcata

SEQ ID NO: 26179 - DNA, 109 bp, Homo sapiens
  MAP TO AC004032.7; EXPRESSED IN ADULT LIVER, SIGNAL =   2; EXPRESSED IN PLACENTA, SIGNAL = 1.2; EXPRESSED IN LUNG, SIGNAL =   2; EXPRESSED IN BONE MARROW, SIGNAL = 3.3; EXPRESSED IN FETAL LIVER, SIGNAL =   2; EXPRESSED IN BRAIN, SIGNAL = 3.1; EXPRESSED IN HELA, SIGNAL = 2.2; EXPRESSED IN HEART, SIGNAL = 1.6; NT HIT: AF271207.1, EVALUE 9.30e-01; EST_HUMAN HIT: BE548243.1, EVALUE 1.40e+00
ctagatctgcttcagagcattcccagcacagcaggccagtgcaaggagaagtagaaattaaaaaggatttgatgagcctaactgagtggagaggtccaagcttgcccat

SEQ ID NO: 26180 - DNA, 208 bp, Homo sapiens
  MAP TO AC004624.6; EXPRESSED IN HEART, SIGNAL = 1.8; EXPRESSED IN FETAL LIVER, SIGNAL = 1.5; EXPRESSED IN PLACENTA, SIGNAL = 1.4; EXPRESSED IN HELA, SIGNAL = 1.9; EXPRESSED IN BRAIN, SIGNAL = 1.9; EXPRESSED IN LUNG, SIGNAL = 2.1; EXPRESSED IN BONE MARROW, SIGNAL = 1.4; EST_HUMAN HIT: BE903707.1, EVALUE 7.30e-01; SWISSPROT HIT: P54725, EVALUE 4.40e-01; NT HIT: AL161593.2, EVALUE 4.90e-01
agtcggaaagttccagaggggccaggtggccaactccgctgcatggcccaattctgaatacaatggggaacaagctttaggggacttaagtagggaagcctcagggtcagatggtcatttggggaatgccattctccctgcatgggagagagagatgatggaggcagggggagaagttcgagagctctctggagaagcagtgggcagt

SEQ ID NO: 26181 - DNA, 239 bp, Homo sapiens
  MAP TO AC004624.6; EXPRESSED IN HELA, SIGNAL = 1.4; EXPRESSED IN BRAIN, SIGNAL = 2.2; EXPRESSED IN LUNG, SIGNAL = 1.3; EXPRESSED IN HEART, SIGNAL = 1.3; EXPRESSED IN BONE MARROW, SIGNAL = 1.6; EXPRESSED IN FETAL LIVER, SIGNAL = 1.4; NT HIT: gi11424131, EVALUE 2.30e+00; EST_HUMAN HIT: BF530136.1, EVALUE 3.40e+00; SWISSPROT HIT: P36049, EVALUE 4.00e-01
tcagctcagatcccagtggctggaagacaagcctgcagggtggaggctgtcagagcccagagcacagggaccacatgcagggaaagctaatcccagagtggtgggccggggcccactgcgatgcacgtgacagtgatgcacggggacagaggatgggccctcccatctcctcagaatcccaggaggtgtgtctttcaaaacaactgcctgaaaagatgcaaaccttaagtccgtgtttc

SEQ ID NO: 26182 - DNA, 80 bp, Homo sapiens
  MAP TO AC006427.13; EXPRESSED IN LUNG, SIGNAL = 1.9; EXPRESSED IN BONE MARROW, SIGNAL = 2.2; EXPRESSED IN HEART, SIGNAL = 1.3; EXPRESSED IN FETAL LIVER, SIGNAL = 1.9; EXPRESSED IN ADULT LIVER, SIGNAL = 2.1; EXPRESSED IN PLACENTA, SIGNAL = 1.7; EXPRESSED IN HELA, SIGNAL = 1.7; EXPRESSED IN BRAIN, SIGNAL = 1.7; EST_HUMAN HIT: AW795316.1, EVALUE 2.40e-01; NT HIT: gi9506522, EVALUE 1.60e-01
atgctttcagagacacatcagggcaagaagcatggggcatggggtgaacggaggagggagaggggatccagctttgaatg

SEQ ID NO: 26183 - DNA, 91 bp, Homo sapiens
  MAP TO AL022328.21; EXPRESSED IN FETAL LIVER, SIGNAL = 1.9; EXPRESSED IN ADULT LIVER, SIGNAL = 1.9; EXPRESSED IN HEART, SIGNAL = 1.9; EXPRESSED IN LUNG, SIGNAL = 1.7; EST_HUMAN HIT: BE872284.1, EVALUE 4.40e+00; NT HIT: D90907.1, EVALUE 7.50e-01
agcagaagtcctagggcaaggacctctccatcctgtcaaccccaaatcgaagggatgccccccacggaggctggggacttttctgacccag

SEQ ID NO: 26184 - DNA, 149 bp, Homo sapiens
  MAP TO AC006427.13; EXPRESSED IN HEART, SIGNAL = 1.8; EXPRESSED IN ADULT LIVER, SIGNAL = 2.1; EXPRESSED IN PLACENTA, SIGNAL = 2.3; EXPRESSED IN LUNG, SIGNAL = 2.1; EXPRESSED IN BONE MARROW, SIGNAL = 1.9; EXPRESSED IN FETAL LIVER, SIGNAL = 2.5; EXPRESSED IN BRAIN, SIGNAL = 1.8; EXPRESSED IN HELA, SIGNAL = 2.2; NT HIT: AF019413.1, EVALUE 3.40e-01; EST_HUMAN HIT: BF315483.1, EVALUE 2.00e+00
tcttggctccaagatggtcggtacggtagatgccactggtgctccgttcatcagagatttgtctcaaccaaaaaggagctgcttcattcagatcacacttccacctcaactccttcagagaagactggggccaatgactgaccgacata

SEQ ID NO: 26185 - DNA, 319 bp, Homo sapiens
  MAP TO AL022328.21; EXPRESSED IN HEART, SIGNAL = 1.7; EXPRESSED IN LUNG, SIGNAL = 1.8; EXPRESSED IN FETAL LIVER, SIGNAL = 1.3; EXPRESSED IN HELA, SIGNAL = 1.5; NT HIT: gi11418351, EVALUE 6.00e-94; EST_HUMAN HIT: BF345802.1, EVALUE 9.00e-94; SWISSPROT HIT: P53778, EVALUE 4.00e-36
gcttccattcatccagtgtgcggtcaacgtcgtcaaaggagtcatcatacttctggacctggggctcatcttccgtgtcgtgcagggactcgaagtagggatgggccagcgcctcgcctgccgtcacccgctgctccgcgtccagcaccagcatcttctccaggaggttcacagctgcgggggaaggtgcatcaggccagaccacgggaggccccacactccagcacccggtggcccccacactagccagccgtacccagagggcttgcattggtcaggatagaggcaaaatccttcttctccaattcggggaggccct

SEQ ID NO: 26186 - DNA, 239 bp, Homo sapiens
  MAP TO Z97055.1; EXPRESSED IN LUNG, SIGNAL = 1.4; EXPRESSED IN HEART, SIGNAL = 1.4; NT HIT: gi11425031, EVALUE 1.40e-01; EST_HUMAN HIT: BF341202.1, EVALUE 2.20e-01; SWISSPROT HIT: O46482, EVALUE 3.10e-01
ctggtgacccaggtggccaggtctcccctctgcactgggggaggaaatcccgaacccagctgctgagggtgggggcagtgcatagagcattccagctctgcagacagtgttgtgggagccgccgcggaccacctggctccaagtgggacagccttttcctgctgcagggacagcgtccgtacctgcccccacccaggagatggccagaggggcagagtcctgctcagacccagggggtc

SEQ ID NO: 26187 - DNA, 118 bp, Homo sapiens
  MAP TO AC007106.6; EXPRESSED IN PLACENTA, SIGNAL = 2.4; EXPRESSED IN HELA, SIGNAL = 1.3; EXPRESSED IN LUNG, SIGNAL = 1.3; EXPRESSED IN HEART, SIGNAL =   6; EXPRESSED IN BONE MARROW, SIGNAL = 1.7; EXPRESSED IN FETAL LIVER, SIGNAL = 1.4; NT HIT: AF141325.2, EVALUE 2.60e-01; EST_HUMAN HIT: BF223357.1, EVALUE 3.80e-01; SWISSPROT HIT: P19137, EVALUE 5.40e+00
ccaaacaagtgtcatctggcagaggacctttgcccttgctgttcttttgtgtgaagagttctgtcaccagacactcacatgcctggcttattcttgtcatttagtccatttccccaag

SEQ ID NO: 26188 - DNA, 405 bp, Homo sapiens
  MAP TO AP000123.1; EXPRESSED IN LUNG, SIGNAL = 1.6; EXPRESSED IN HELA, SIGNAL = 1.3; EXPRESSED IN BRAIN, SIGNAL = 1.9; EXPRESSED IN HEART, SIGNAL = 1.9; EXPRESSED IN BONE MARROW, SIGNAL = 1.9; EST_HUMAN HIT: AW939593.1, EVALUE 6.00e-03; NT HIT: AJ131016.1, EVALUE 7.00e-08; SWISSPROT HIT: P53565, EVALUE 4.10e-02
agtgcagctgctgccatcttaacctgagtatttctccaggggcctggaaatcacctcatctctgcctaacacagccagtgcttatactcagcccagttccatcctccctccccagtgtctgagcatgctgcctggggacctggagagcgccctgcccctggagattgccctgccccatcattggcacctgagcactcctcctggggttctaaggatgggctgacccaacctgctgccaccactacaggtggcactcactcgcacatgccacctgcaagcctggggactggcttgcccagcctgtcccagccactatcaacaccagcacggaccatgtgagagccagatgattgtcccaccactgctactgccactgcccacaccatgcccactgctcaagaacct

SEQ ID NO: 26189 - DNA, 124 bp, Homo sapiens
  MAP TO AC007556.2; EXPRESSED IN LUNG, SIGNAL = 3.2; EXPRESSED IN HEART, SIGNAL = 1.5; EXPRESSED IN ADULT LIVER, SIGNAL = 1.7; EXPRESSED IN FETAL LIVER, SIGNAL = 2.7; EXPRESSED IN HELA, SIGNAL = 2.6; EXPRESSED IN PLACENTA, SIGNAL = 2.2; EXPRESSED IN BRAIN, SIGNAL = 2.7; EXPRESSED IN BONE MARROW, SIGNAL = 3.1; NT HIT: gi11430460, EVALUE 4.00e-62; EST_HUMAN HIT: BF130444.1, EVALUE 3.00e-39; SWISSPROT HIT: P98164, EVALUE 2.00e-05
ccgcagtagctgtgctgttgacaatcctcttgatcgtcgtaattggagctctggcaattgcaggattcttccactatagaaggaccggctcccttttgcctgctctgcccaagctgccaaggtc

SEQ ID NO: 26190 - DNA, 274 bp, Homo sapiens
  MAP TO AC007564.9; EXPRESSED IN ADULT LIVER, SIGNAL =  37; EXPRESSED IN BRAIN, SIGNAL = 4.2; EXPRESSED IN PLACENTA, SIGNAL =  29; EXPRESSED IN HEART, SIGNAL =  13; EXPRESSED IN FETAL LIVER, SIGNAL =  51; EXPRESSED IN HELA, SIGNAL =  15; EXPRESSED IN BONE MARROW, SIGNAL = 3.2; EXPRESSED IN LUNG, SIGNAL =  19; NT HIT: AB013139.1, EVALUE 8.00e-16; EST_HUMAN HIT: AV650547.1, EVALUE 5.00e-18; SWISSPROT HIT: P39188, EVALUE 2.00e-05
ctgtactccccaccgctcaggaggctgagctgggagaattgctggagcccaggaatttgagaccagcctgggcaacatggtgagaccacatctgtaatgaaaagaagcaaaaaagctacttgaggaactgatacaccgaaacaaaggagtaaaccaaaacaggaagacaggacatccagtctcagaaaggtaaagaaaaatcccaggatgacaggtgagcacggggcccaaagagcaaccagggcaagcagcaggtcgaaagattccagtagtg

SEQ ID NO: 26191 - DNA, 82 bp, Homo sapiens
  MAP TO AP000350.1; EXPRESSED IN PLACENTA, SIGNAL = 2.2; EXPRESSED IN HELA, SIGNAL = 2.3; EXPRESSED IN BRAIN, SIGNAL = 1.7; EXPRESSED IN BONE MARROW, SIGNAL = 3.1; EXPRESSED IN HEART, SIGNAL = 2.2; EXPRESSED IN LUNG, SIGNAL = 2.3; EXPRESSED IN FETAL LIVER, SIGNAL = 2.9; EXPRESSED IN ADULT LIVER, SIGNAL =   2; NT HIT: Z80343.1, EVALUE 6.60e-01; EST_HUMAN HIT: BE670394.1, EVALUE 6.00e-39
ggggtctgcaggagcctcttgcctccaggctggttggggaagacgtcctccaggaagtagtagatatggcccaccgcaatcc

SEQ ID NO: 26192 - DNA, 177 bp, Homo sapiens
  MAP TO AL022238.1; EXPRESSED IN BONE MARROW, SIGNAL = 5.8; EXPRESSED IN ADULT LIVER, SIGNAL = 5.8; EXPRESSED IN FETAL LIVER, SIGNAL =   8; EXPRESSED IN PLACENTA, SIGNAL = 7.4; EXPRESSED IN HELA, SIGNAL = 5.9; EXPRESSED IN BRAIN, SIGNAL = 4.7; EXPRESSED IN HEART, SIGNAL = 4.3; EXPRESSED IN LUNG, SIGNAL = 6.2; NT HIT: gi11418164, EVALUE 2.00e-95; EST_HUMAN HIT: BE256756.1, EVALUE 3.00e-95; SWISSPROT HIT: P30566, EVALUE 1.00e-28
gattgccatgagaaaatcagagtgctttctcagcaggcagcttctgtggttaagcaggaagggggtgacaatgacctcatagagcgtatccaggttgatgcctacttcagtcccattcactcccagttggatcatttactggatccttcttctttcactggtcgtgcctcccagcag

SEQ ID NO: 26193 - DNA, 106 bp, Homo sapiens
  MAP TO AC007539.8; EXPRESSED IN LUNG, SIGNAL = 2.5; EXPRESSED IN BONE MARROW, SIGNAL = 5.2; EXPRESSED IN ADULT LIVER, SIGNAL = 2.3; EXPRESSED IN FETAL LIVER, SIGNAL = 2.3; EXPRESSED IN BRAIN, SIGNAL = 3.8; EXPRESSED IN PLACENTA, SIGNAL = 2.4; EXPRESSED IN HELA, SIGNAL = 2.2; EXPRESSED IN HEART, SIGNAL = 3.3; NT HIT: Z99117.1, EVALUE 9.00e-01; EST_HUMAN HIT: AA362934.1, EVALUE 8.50e-02; SWISSPROT HIT: P29988, EVALUE 7.20e+00
gcatgatcgacttctccatggcagagaccttctcctgctcattagtagattgcctgtgtcaagcccatggcagggactcaatgaatatttttgaattggagccctg

SEQ ID NO: 26194 - DNA, 193 bp, Homo sapiens
  MAP TO AL022312.7; EXPRESSED IN HEART, SIGNAL = 1.4; EXPRESSED IN LUNG, SIGNAL = 2.3; EXPRESSED IN BONE MARROW, SIGNAL = 1.4; EXPRESSED IN ADULT LIVER, SIGNAL = 1.5; EXPRESSED IN FETAL LIVER, SIGNAL = 2.6; EXPRESSED IN PLACENTA, SIGNAL = 1.3; EXPRESSED IN HELA, SIGNAL = 1.4; EXPRESSED IN BRAIN, SIGNAL = 2.4; NT HIT: AJ277662.1, EVALUE 1.10e-01; SWISSPROT HIT: P50551, EVALUE 9.90e-01; EST_HUMAN HIT: BE393892.1, EVALUE 1.00e-104
cttgggagttatcttattgatggaggagaagagaatggatatgggggaccagtagcatctctgggagagggggagggagcagcaataactcagtcgtcggatccagctctcattgtcagagtttccggaacagcttgctcctgtttccctcactgtgcagcccagggctgggggcagtgaggagcttgcagct

SEQ ID NO: 26195 - DNA, 598 bp, Homo sapiens; identical to SEQ ID NO: 9843
  MAP TO AP000352.2; EXPRESSED IN PLACENTA, SIGNAL =  18; EXPRESSED IN HELA, SIGNAL =  14; EXPRESSED IN BRAIN, SIGNAL =  23; EXPRESSED IN BONE MARROW, SIGNAL =  15; EXPRESSED IN HEART, SIGNAL =  28; EXPRESSED IN LUNG, SIGNAL =  11; EXPRESSED IN FETAL LIVER, SIGNAL =  32; EXPRESSED IN ADULT LIVER, SIGNAL =  34; NT HIT: AJ012008.1, EVALUE 1.50e+00; EST_HUMAN HIT: BF351141.1, EVALUE 9.00e-03; SWISSPROT HIT: P11675, EVALUE 1.40e+00

SEQ ID NO: 26196 - DNA, 304 bp, Homo sapiens
  MAP TO AP000352.2; EXPRESSED IN HELA, SIGNAL = 6.3; EXPRESSED IN HEART, SIGNAL = 4.7; EXPRESSED IN BONE MARROW, SIGNAL = 9.1; EXPRESSED IN LUNG, SIGNAL = 6.8; EXPRESSED IN FETAL LIVER, SIGNAL =  13; EXPRESSED IN ADULT LIVER, SIGNAL =  10; EXPRESSED IN PLACENTA, SIGNAL =  12; EXPRESSED IN BRAIN, SIGNAL = 5.9; EST_HUMAN HIT: AW802801.1, EVALUE 9.00e-23; SWISSPROT HIT: P11369, EVALUE 8.00e-18; NT HIT: AJ006345.1, EVALUE 1.00e-14
tttgaatagtattctgttgtatgtatacaccacattttgttcattcatctgttgttggacacttgggttgcttcttaccttttggctattgtgataatgctgctatgaacatgagtgtacaagtgtctgttcaagtccctgctttcatttattttgtgtatatagccagatgtggaatttctgggtcatgtagtaattctgtacttaattttctgaggaactgccatacctttttccatagtagctgcaccattttacattctcaccaggaatgtacaaagactccagtttctccaggtcctca

SEQ ID NO: 26197 - DNA, 298 bp, Homo sapiens
  MAP TO AL008723.8; EXPRESSED IN FETAL LIVER, SIGNAL = 2.5; EXPRESSED IN PLACENTA, SIGNAL = 3.1; EXPRESSED IN LUNG, SIGNAL = 3.6; EXPRESSED IN ADULT LIVER, SIGNAL = 3.4; EXPRESSED IN BRAIN, SIGNAL =   4; EXPRESSED IN HELA, SIGNAL = 4.1; EXPRESSED IN BONE MARROW, SIGNAL = 8.4; EXPRESSED IN HEART, SIGNAL = 2.7; NT HIT: X57808.1, EVALUE 4.60e-02; EST_HUMAN HIT: R66412.1, EVALUE 2.70e-01; SWISSPROT HIT: Q12446, EVALUE 9.30e-02
aacacctctctctccattctctctcctctcctcttcctccttgcagcttggcccccaattgctgcctccttcctggatgaagctgtccctggctgaaccttcagatgcaccctctgtccctaccttggtcaagactgtctacccacccaccacggcctctgtttctttagtcttgaaatcctattcttggcctggtgctccactgcccctgacccctggaatgccctcttttctctctgcccagctccccagccctgaaagccgggctgtccaggacactgcagcaccatcaaattca

SEQ ID NO: 26198 - DNA, 117 bp, Homo sapiens
  MAP TO Z83844.5; EXPRESSED IN HEART, SIGNAL = 1.3; EXPRESSED IN BONE MARROW, SIGNAL = 1.5; NT HIT: gi7525012, EVALUE 4.00e+00; EST_HUMAN HIT: BE728219.1, EVALUE 9.60e-02; SWISSPROT HIT: P81894, EVALUE 2.40e+00
atcccatcccaactatctgttgtctatttttccccggggccttggtgtccccatttttggagtgggttgagcagctcctgtttttgaggctgccgtgaggaacaggccaaaggggct

SEQ ID NO: 26199 - DNA, 163 bp, Homo sapiens
  MAP TO AP000356.1; EXPRESSED IN FETAL LIVER, SIGNAL = 3.6; EXPRESSED IN ADULT LIVER, SIGNAL = 2.6; EXPRESSED IN PLACENTA, SIGNAL = 2.3; EXPRESSED IN BRAIN, SIGNAL = 2.2; EXPRESSED IN HELA, SIGNAL = 3.7; EXPRESSED IN HEART, SIGNAL = 2.3; EXPRESSED IN BONE MARROW, SIGNAL = 4.2; EXPRESSED IN LUNG, SIGNAL = 4.6; SWISSPROT HIT: P28967, EVALUE 3.00e+00; NT HIT: gi11417877, EVALUE 1.00e-53; EST_HUMAN HIT: AU077341.1, EVALUE 1.00e-54
gcttggttttggtgtgctgctggatgaccagaccgggcgtcgggtgagcccagaagtgagagcagttggctgtgccccagtgctgtgtgacccagaggcgccgctcaccctctctgagctggtggacatcataggtggggaagctcaggtcagggcactccca

SEQ ID NO: 26200 - DNA, 367 bp, Homo sapiens
  MAP TO AL022319.2; EXPRESSED IN HELA, SIGNAL = 2.9; EXPRESSED IN PLACENTA, SIGNAL = 2.7; EXPRESSED IN BRAIN, SIGNAL = 3.9; EXPRESSED IN LUNG, SIGNAL = 2.2; EXPRESSED IN HEART, SIGNAL = 2.8; EXPRESSED IN BONE MARROW, SIGNAL = 3.5; EXPRESSED IN ADULT LIVER, SIGNAL =   4; EXPRESSED IN FETAL LIVER, SIGNAL = 2.4; NT HIT: gi11418157, EVALUE 2.00e-45; EST_HUMAN HIT: AI261267.1, EVALUE 3.40e-01; SWISSPROT HIT: Q9Z0Y8, EVALUE 9.00e-07
agaccaaaacccaggaccgtgggtccagcactttttcttctataacagtaactacaagagtatgtggcaggcacatagtaggtccttaggaaagtttgttggacgagggcacagctctgccacacagagaagacctctttgtccctctgcctcccaagggcagaagaatagagagctgaggaggggtggctgcagctggagtcactcacagtcctcacccctgcattccgcctccccatgtctcccaggctctgatgtccctctttgtcctggcatccaaggatggttgggtgaacatcatgtacaatggactggatgctgttgctgtggaccagcaggtgggtgtagctgggaccaggccaagcct

SEQ ID NO: 26201 - DNA, 149 bp, Homo sapiens
  MAP TO AP000356.1; EXPRESSED IN HELA, SIGNAL = 1.5; EXPRESSED IN HEART, SIGNAL = 1.5; EXPRESSED IN BONE MARROW, SIGNAL = 1.6; EXPRESSED IN LUNG, SIGNAL = 1.8; EXPRESSED IN FETAL LIVER, SIGNAL = 2.1; EXPRESSED IN ADULT LIVER, SIGNAL =   2; EXPRESSED IN PLACENTA, SIGNAL = 1.4; NT HIT: gi11417877, EVALUE 9.00e-79; EST_HUMAN HIT: H72018.1, EVALUE 1.00e-63; SWISSPROT HIT: P19440, EVALUE 8.00e-22
ctgccgggatagaaaggtgcttcgggagggggagagactgaccctgccgcagctggctgacacctacgagacgctggccatcgagggtgcccaggccttctacaacggcagcctcacggcccagattgtgaaggacatccaggcggccg

SEQ ID NO: 26202 - DNA, 143 bp, Homo sapiens
  MAP TO AL022319.2; EXPRESSED IN ADULT LIVER, SIGNAL =  12; EXPRESSED IN FETAL LIVER, SIGNAL =  17; EXPRESSED IN HELA, SIGNAL = 3.9; EXPRESSED IN PLACENTA, SIGNAL = 3.8; EXPRESSED IN BRAIN, SIGNAL = 5.7; EXPRESSED IN LUNG, SIGNAL = 4.9; EXPRESSED IN HEART, SIGNAL = 3.3; EXPRESSED IN BONE MARROW, SIGNAL = 3.5; NT HIT: AF183913.1, EVALUE 2.10e-02; SWISSPROT HIT: Q93038, EVALUE 4.00e+00; EST_HUMAN HIT: BE166071.1, EVALUE 1.90e+00
ttcccccctcttggctggaaattagagctgggcagccacggaggcagccaaggccgacaacggcctgtgcctcacctgacttctggcagatgcgtgaccacccttccggtcctcagttgtcaccaagtccttcccctgcctga

SEQ ID NO: 26203 - DNA, 211 bp, Homo sapiens
  MAP TO AL023553.5; EXPRESSED IN PLACENTA, SIGNAL = 2.3; EXPRESSED IN HELA, SIGNAL = 2.9; EXPRESSED IN BRAIN, SIGNAL = 1.9; EXPRESSED IN LUNG, SIGNAL = 2.7; EXPRESSED IN HEART, SIGNAL =   2; EXPRESSED IN BONE MARROW, SIGNAL = 2.2; EXPRESSED IN FETAL LIVER, SIGNAL = 2.4; EXPRESSED IN ADULT LIVER, SIGNAL = 3.9; EST_HUMAN HIT: BF242207.1, EVALUE 7.40e-01; SWISSPROT HIT: P37427, EVALUE 1.70e+00; NT HIT: AL163302.2, EVALUE 5.00e-01
ataatgccacaagatctgtgccctttgtcagaccatggatttctgtgtgggccccctctcaaacgattcatctaatcaaatactagaagacttgtcccaacaggacctctaccccaaagggactatattcccttcttggactttccacaccttctctctcaaggtccacacctccatcccccaacagaccctcatcttcaacctcacaaag

SEQ ID NO: 26204 - DNA, 119 bp, Homo sapiens
  MAP TO AC007106.6; EXPRESSED IN HEART, SIGNAL = 1.7; NT HIT: AB040950.1, EVALUE 1.00e+00; EST_HUMAN HIT: BE888625.1, EVALUE 1.50e+00
tctcagttatgtcccttttcccaatactacaaggtaacactgactgcaagaagcttgcactcccccaaacaaggggatgtgtttgaggagctggacaaggagtagggggatgcataagc

SEQ ID NO: 26205 - DNA, 129 bp, Homo sapiens
  MAP TO AC007564.9; EXPRESSED IN LUNG, SIGNAL = 1.8; EXPRESSED IN HEART, SIGNAL = 2.3; EXPRESSED IN FETAL LIVER, SIGNAL = 1.8; EXPRESSED IN BRAIN, SIGNAL = 1.8; EXPRESSED IN HELA, SIGNAL = 2.3; NT HIT: AE004276.1, EVALUE 4.50e+00; EST_HUMAN HIT: AI198573.1, EVALUE 1.70e+00
aggaggaaggaaggaagaaaaagaagaaggaagaggaggaggagggagaagaggaagagaagaataattcagcataaaccagattgagcagacataataaacagcaagatcaatatcccaaaagtatca

SEQ ID NO: 26206 - DNA, 288 bp, Homo sapiens
  MAP TO AL008723.8; EXPRESSED IN HEART, SIGNAL =   2; EXPRESSED IN HELA, SIGNAL = 1.5; NT HIT: AE001206.1, EVALUE 7.00e-01; EST_HUMAN HIT: AV752310.1, EVALUE 6.70e-02; SWISSPROT HIT: Q03211, EVALUE 1.70e-02
ctacactgcccttggcagggggtggtttaggtgagctgtctgtggccgcactgcccgaggtggggagtaagtttgggtgctatctgtggctgcactgcctggaggcaggaagtgggttgagggtgctatcctgggctgcttctcctggtggggagcaggtaggggcactatccagggttgcactgcccggggtagggggcgatttgggtgccatatcggggcatcactgcccacggcaggggtctggttggggtcgctacccatggctacactgtctacagccactgc

SEQ ID NO: 26207 - DNA, 127 bp, Homo sapiens
  MAP TO AC006548.19; EXPRESSED IN FETAL LIVER, SIGNAL = 1.5; EXPRESSED IN HELA, SIGNAL = 1.3; EXPRESSED IN HEART, SIGNAL = 1.7; EST_HUMAN HIT: AV731815.1, EVALUE 4.20e-01; NT HIT: AP001517.1, EVALUE 1.10e+00; SWISSPROT HIT: Q10413, EVALUE 5.40e+00
cttgagaagttgaggtgagtctctcgcaccaggtggctgagtctgcggaaggccctggagtcccagtggaggttgctgttgaacagatgctgcttctggtacatggggttgtggctggccgagcggt

SEQ ID NO: 26208 - DNA, 123 bp, Homo sapiens
  MAP TO AL022319.2; EXPRESSED IN PLACENTA, SIGNAL = 1.2; EXPRESSED IN HEART, SIGNAL = 1.4; EST_HUMAN HIT: BE881642.1, EVALUE 4.00e-01; SWISSPROT HIT: Q14155, EVALUE 4.10e+00; NT HIT: gi11418157, EVALUE 2.00e-63
gtgcagctggctgagacggaggccttctccctgaactcagacaggtcctcgtccatcctgctgggtgacgacctgagtctcgaggaccccacagcctgcccacctggccgcaaagacagcaag

SEQ ID NO: 26209 - DNA, 382 bp, Homo sapiens
  MAP TO AC007564.9; EXPRESSED IN BONE MARROW, SIGNAL = 8.5; EXPRESSED IN ADULT LIVER, SIGNAL = 5.2; EXPRESSED IN FETAL LIVER, SIGNAL = 2.3; EXPRESSED IN BRAIN, SIGNAL = 3.7; EXPRESSED IN PLACENTA, SIGNAL = 4.2; EXPRESSED IN HEART, SIGNAL = 3.3; EXPRESSED IN LUNG, SIGNAL = 4.6; EXPRESSED IN HELA, SIGNAL = 3.8; NT HIT: AL163281.2, EVALUE 2.40e-01; EST_HUMAN HIT: BE716138.1, EVALUE 1.40e+00; SWISSPROT HIT: O51662, EVALUE 3.60e+00
tgagtatctttcaaatctgtctgctgctcagcacccctactgctcttatcttgatttaggttatccttatgaccggatagttgaaacagccacttcttaaccttctttccagtctccagtctttcatccctccagctctcctccaaactcctaccataatgatctccataaaatgcaaatccaatctcatgaccgctgttcttaaaatgtatgccctcagaataaagtctgaactcctttgcatgccccccccccgcccccaggccctttgccactacctggtgctgactcctgtaaatcttctctgaccccctggccagtcacactcaccacacacaccatgtaccaccctgcttagccttggcccttgctgctccctctg

SEQ ID NO: 26210 - DNA, 230 bp, Homo sapiens
  MAP TO AC007564.9; EXPRESSED IN LUNG, SIGNAL = 1.5; EXPRESSED IN BONE MARROW, SIGNAL = 1.9; EXPRESSED IN ADULT LIVER, SIGNAL = 5.4; EXPRESSED IN FETAL LIVER, SIGNAL = 1.9; EXPRESSED IN PLACENTA, SIGNAL = 3.5; EXPRESSED IN HEART, SIGNAL = 1.7; EXPRESSED IN BRAIN, SIGNAL = 1.9; EXPRESSED IN HELA, SIGNAL = 1.7; NT HIT: AL163284.2, EVALUE 3.00e-55; EST_HUMAN HIT: AA412445.1, EVALUE 1.00e-48; SWISSPROT HIT: P25711, EVALUE 2.40e+00
gtcatgtcttacatggatgacagcaggcaaagagagagagctcatgcagggaaactcccatttttaaaaccatcagatctcatgagacttattcactatcaggagaacagcatgggaaagaactgcccctatgattcaattacctcccactgggttcctctcatgaaacacgggaattgtgggagttacaattcaagatgagacctatttttaaccacaatttatccaaa

SEQ ID NO: 26211 - DNA, 129 bp, Homo sapiens
  MAP TO AC008283.3; EXPRESSED IN HEART, SIGNAL = 1.4; EXPRESSED IN LUNG, SIGNAL = 1.2; EXPRESSED IN BONE MARROW, SIGNAL = 1.4; EXPRESSED IN PLACENTA, SIGNAL = 1.7; NT HIT: gi11421527, EVALUE 7.00e-67; EST_HUMAN HIT: AW051755.1, EVALUE 1.00e-66; SWISSPROT HIT: P54289, EVALUE 4.00e-19
gataatatcgagctaggccagtggcactgccaaaaacctgccacaataatgaagggtcttcctcgcgattctttttgaaaacttcatctaaggcacttgtccagttgagttcatttaacacaattgttg

SEQ ID NO: 26212 - DNA, 305 bp, Homo sapiens
  MAP TO AC007900.1; EXPRESSED IN BRAIN, SIGNAL = 4.4; EXPRESSED IN PLACENTA, SIGNAL = 4.7; EXPRESSED IN HELA, SIGNAL = 3.8; EXPRESSED IN LUNG, SIGNAL = 4.5; EXPRESSED IN HEART, SIGNAL = 2.9; EXPRESSED IN BONE MARROW, SIGNAL = 5.6; EXPRESSED IN FETAL LIVER, SIGNAL = 4.3; EXPRESSED IN ADULT LIVER, SIGNAL =   3; NT HIT: gi11119715, EVALUE 7.40e-01; SWISSPROT HIT: O13961, EVALUE 5.00e-01; EST_HUMAN HIT: AW853567.1, EVALUE 1.10e+00
  unsure 223
gtgaaaacttactagtatggtttataagatccttcataacctcacattcaagatctcacattacttctttagcacctttgcttgtccctccccattaaaccttagtctattctcaagccacaccaacacatacttgcagttccctaaatacactgtgctgtcttgcttctgtctttgtacatgctattccttcaactttaagcactcttccctgcccttcttncacctgctctatcactatctgtctttcaaaactaagatcaaatgtctcttctttcagaatatcttcccatacaagcttagct

SEQ ID NO: 26213 - DNA, 144 bp, Homo sapiens
  MAP TO AC006548.19; EXPRESSED IN HEART, SIGNAL = 2.3; NT HIT: gi11466563, EVALUE 5.10e+00; EST_HUMAN HIT: BE790632.1, EVALUE 4.80e-01
ctgcaaagcaaaggacgtagtgttgaaaacgagaccagaaatggtgctgttaaagaggtgaacaaaagcatttactttttgaacgagtttcaaaactgtgagggtggcaaataggaaaggtaagtaggagcagccctcgaccat

SEQ ID NO: 26214 - DNA, 171 bp, Homo sapiens
  MAP TO AC004832.3; EXPRESSED IN HEART, SIGNAL = 1.3; NT HIT: AJ271049.1, EVALUE 1.00e-01; EST_HUMAN HIT: BF351785.1, EVALUE 1.50e-01; SWISSPROT HIT: O95104, EVALUE 1.30e+00
atggcatgggcaaaggcatggaggtgggaaagtgagaagcatgtggagggggtagattacagcaaacaagacagattaggacccagcttgcatagagctcacagtctcccattggtgagcataccctctgtgctgggagctttatatcattatcaaatcattcagaagcag

SEQ ID NO: 26215 - DNA, 303 bp, Homo sapiens
  MAP TO AC008166.1; EXPRESSED IN BRAIN, SIGNAL = 2.7; EXPRESSED IN ADULT LIVER, SIGNAL = 2.7; EXPRESSED IN HELA, SIGNAL = 2.6; EXPRESSED IN PLACENTA, SIGNAL = 4.8; EXPRESSED IN BONE MARROW, SIGNAL = 4.3; EXPRESSED IN HEART, SIGNAL =   2; EXPRESSED IN LUNG, SIGNAL = 3.7; EXPRESSED IN FETAL LIVER, SIGNAL = 3.5; NT HIT: AL163207.2, EVALUE 3.00e-03; EST_HUMAN HIT: AL134483.1, EVALUE 3.00e-04; SWISSPROT HIT: P38622, EVALUE 4.20e+00
ttgcagttcttgttgcctagactgcttttcatgcttatttaggactcaagagcaccttagaccacagtagtgaggcttgccaaactcaagttccaaccactgggatggatgattcttctctgtctagggctggtgtacatgctccttccatcagtgtcggctaagttctacaagtttttgctttctgttgtgacagggaagtgctgggttctaatgcaatgtcctataatcactggcctctccatcctgcaagcacacagattctccctgccactgggctgctgccagcagataggggtagag

SEQ ID NO: 26216 - DNA, 114 bp, Homo sapiens
  MAP TO AL035681.13; EXPRESSED IN LUNG, SIGNAL = 1.9; EXPRESSED IN BONE MARROW, SIGNAL = 2.1; EXPRESSED IN FETAL LIVER, SIGNAL = 1.3; EXPRESSED IN BRAIN, SIGNAL = 2.7; EXPRESSED IN HELA, SIGNAL = 3.4; EXPRESSED IN HEART, SIGNAL = 2.5; EST_HUMAN HIT: BF376134.1, EVALUE 7.00e-58; SWISSPROT HIT: P46060, EVALUE 4.00e-15; NT HIT: gi11418177, EVALUE 5.00e-58
ctttagcttgggcaggccgccgcggatggcatctgcaatggcaactgcacccttggagcgcaccaggcagtccccaaaattaatcacctccacctgccgcaaggtcttcaaggt

SEQ ID NO: 26217 - DNA, 172 bp, Homo sapiens
  MAP TO AB016897.1; EXPRESSED IN HELA, SIGNAL = 8.4; EXPRESSED IN BRAIN, SIGNAL = 9.8; EXPRESSED IN PLACENTA, SIGNAL = 6.6; EXPRESSED IN LUNG, SIGNAL = 8.1; EXPRESSED IN BONE MARROW, SIGNAL = 7.6; EXPRESSED IN HEART, SIGNAL = 4.2; EXPRESSED IN ADULT LIVER, SIGNAL = 8.5; EXPRESSED IN FETAL LIVER, SIGNAL = 7.7; NT HIT: AP001507.1, EVALUE 1.00e-01; EST_HUMAN HIT: BF036505.1, EVALUE 5.90e-01; SWISSPROT HIT: Q90054, EVALUE 1.00e+00
agcaagggaagagaaaatggccccagggctccatgagcgccagcccgaaacagcagcgatggcagggcattgctgcgttggttttctcatacctgaagaagcattaactcctccagaagccttttgcagagaagtcaaagtacttttttaaaaagaagaggagacaggaaga

SEQ ID NO: 26218 - DNA, 775 bp, Homo sapiens
  MAP TO AP000356.1; EXPRESSED IN FETAL LIVER, SIGNAL = 4.3; EXPRESSED IN ADULT LIVER, SIGNAL = 3.1; EXPRESSED IN HELA, SIGNAL = 3.7; EXPRESSED IN PLACENTA, SIGNAL = 3.1; EXPRESSED IN BRAIN, SIGNAL =   4; EXPRESSED IN LUNG, SIGNAL = 3.8; EXPRESSED IN BONE MARROW, SIGNAL =   3; EXPRESSED IN HEART, SIGNAL = 2.1; NT HIT: gi7657020, EVALUE 0.00e+00; EST_HUMAN HIT: AL041202.1, EVALUE 0.00e+00; SWISSPROT HIT: P37370, EVALUE 5.60e-02
gcacgagctggtccgggaggtctgggatctctggttctgacctctgggcacctgctgcagctgtggctgaggcccagaaatgtgaagggcctccatccactccagtagtgaccccaacgtggggttcagtgtggaggggggaggggctgctgtggcagctgcaggagcagaagtgccacgccttgttcttctcatgcctgcatccatgcttgcagctgggaagggggcaggaatcagcgaggtgacctgggctgagtcctgggaatcagaagaggtggcaggaaggggatctgaggaggagaacagggggcctggtggtctgtgcttcttcccagacacgggagctgtagaggggacctctgcagcagatgctaagggggccagtaggcccaggcagtcttgggacttgtgtgtctcctgctgtgcatccatactggatgctttagaaacagcaggcagaccagaagcccctgttgcaagtgaggacaaagtgtgggaaggccatgagggtctgcagtccgagatggccttgtcctcaacctgcagtgcactgttgatgcgctggaatgccgcctccttctcccggtccaggtcttcaacagtgacccggtaccccagctctaagggaggtggcagcatcaaaggctcccctcgcctgcgtggcagcaggggaaacttgtgtgtactgggcctagaggcctcggatgtggaggagtcattcctgagggtgagtgtctgccctggtgctatatctgctgccttttcacactgggtg

SEQ ID NO: 26219 - DNA, 301 bp, Homo sapiens
  MAP TO AC007539.8; EXPRESSED IN HELA, SIGNAL = 1.2; EXPRESSED IN LUNG, SIGNAL = 1.6; EXPRESSED IN HEART, SIGNAL = 1.4; EXPRESSED IN BONE MARROW, SIGNAL = 1.6; SWISSPROT HIT: Q01167, EVALUE 1.10e+00; NT HIT: AJ277662.1, EVALUE 4.70e-02; EST_HUMAN HIT: BE732375.1, EVALUE 7.00e-02
gggagctccacacggcgggagctgattggattgtccaccactgcacagctggggcccaacaccaggcacatgatcatcctcagtagatatttgtcgaatgagaaaagataatggtgggaaaggcaggagaatttcctgtgggttgttttcctctgggaagacatgaggggtgggctgagaatggactgaccgtatgcctcctccctcaggttttagaccagtgtgtgcatttgccagatgacccaggggtgttgggggtgtctgtgatcagggacagggcacaccttcctgctctctcctc

SEQ ID NO: 26220 - DNA, 118 bp, Homo sapiens
  MAP TO AC007564.9; EXPRESSED IN HELA, SIGNAL = 1.3; EXPRESSED IN PLACENTA, SIGNAL = 1.3; EXPRESSED IN LUNG, SIGNAL = 1.4; EXPRESSED IN HEART, SIGNAL = 1.5; EXPRESSED IN BONE MARROW, SIGNAL = 1.3; EXPRESSED IN FETAL LIVER, SIGNAL = 1.4; EXPRESSED IN BRAIN, SIGNAL = 1.4; NT HIT: AF167430.1, EVALUE 6.60e-02; EST_HUMAN HIT: AA487098.1, EVALUE 3.80e-01; SWISSPROT HIT: Q50612, EVALUE 1.10e+00
ccattggttggggggcacctaggactgcgatgaagaccagggaggggccatgggagggatccacatctgggggccactcagagggcacaagcaagctctaagggcataagtcatgtga

SEQ ID NO: 26221 - DNA, 130 bp, Homo sapiens
  MAP TO AC007841.1; EXPRESSED IN PLACENTA, SIGNAL = 1.2; EXPRESSED IN HELA, SIGNAL = 1.6; EXPRESSED IN LUNG, SIGNAL = 1.5; EXPRESSED IN HEART, SIGNAL = 4.9; EXPRESSED IN BONE MARROW, SIGNAL = 1.4; EXPRESSED IN FETAL LIVER, SIGNAL = 1.6; EXPRESSED IN BRAIN, SIGNAL = 1.9; SWISSPROT HIT: Q06364, EVALUE 3.60e-01; NT HIT: Y08937.1, EVALUE 2.90e-01; EST_HUMAN HIT: AW241836.1, EVALUE 1.70e+00
ttgtcagtagctccatgctgtcaggcccacatcccaaagccctaccaacagccagcaaggactgggacctgcctgtggggattttcccccagtcccactttgagaccctgacgcagagactcaagctcag

SEQ ID NO: 26222 - DNA, 91 bp, Homo sapiens
  MAP TO AC007539.8; EXPRESSED IN HELA, SIGNAL = 1.8; EXPRESSED IN LUNG, SIGNAL = 1.4; EXPRESSED IN HEART, SIGNAL = 1.4; EXPRESSED IN BONE MARROW, SIGNAL = 1.6; EXPRESSED IN BRAIN, SIGNAL = 1.5; NT HIT: AE000823.1, EVALUE 7.50e-01; EST_HUMAN HIT: AI138836.1, EVALUE 1.10e+00
acactatggagcagacaaagagccttgtcctcaccatcaagggggctatggtctggttgagaagaaaataagcagaacagataggaaatag

SEQ ID NO: 26223 - DNA, 90 bp, Homo sapiens
  MAP TO Z83844.5; EXPRESSED IN HELA, SIGNAL = 1.4; EXPRESSED IN BRAIN, SIGNAL = 1.4; EXPRESSED IN PLACENTA, SIGNAL = 2.2; EXPRESSED IN LUNG, SIGNAL = 2.4; EXPRESSED IN BONE MARROW, SIGNAL = 1.5; EXPRESSED IN HEART, SIGNAL = 1.9; EXPRESSED IN ADULT LIVER, SIGNAL = 1.5; NT HIT: gi11418086, EVALUE 8.00e-44; EST_HUMAN HIT: BF204945.1, EVALUE 1.00e-43; SWISSPROT HIT: P97434, EVALUE 1.00e-07
gcagatgagctggatggtgagatcgacctgcgttcctgcacggatgtcactgagtacgcggtgcagcgcaactatggcttccagatccac

SEQ ID NO: 26224 - DNA, 241 bp, Homo sapiens
  MAP TO AL022238.1; EXPRESSED IN HELA, SIGNAL = 4.9; EXPRESSED IN PLACENTA, SIGNAL = 4.8; EXPRESSED IN HEART, SIGNAL = 3.4; EXPRESSED IN LUNG, SIGNAL = 4.1; EXPRESSED IN BONE MARROW, SIGNAL = 6.6; EXPRESSED IN ADULT LIVER, SIGNAL = 4.1; EXPRESSED IN FETAL LIVER, SIGNAL = 4.9; EXPRESSED IN BRAIN, SIGNAL =   7; EST_HUMAN HIT: BF688505.1, EVALUE 3.40e+00; SWISSPROT HIT: P18516, EVALUE 5.20e-01; NT HIT: AF014845.1, EVALUE 5.80e-01
aggacatggccacctccaggtagggtgtgcccagcctgccctgaccctacacagggtcctcagacgccaccattgtcagagggcaaatggtgggcagagaccggaggaggagaagagcaacccccagggtggcaggagcaaggaggagctaggaaagagagaaggcaatgaaaaggtcacagaactgaatatactcaagaaaaacaggctgctccaaataaatgaatacagactgggccag

SEQ ID NO: 26225 - DNA, 78 bp, Homo sapiens
  MAP TO AL021707.2; EXPRESSED IN BRAIN, SIGNAL = 3.2; EXPRESSED IN HELA, SIGNAL =   3; EXPRESSED IN HEART, SIGNAL = 2.9; EXPRESSED IN ADULT LIVER, SIGNAL = 2.5; EXPRESSED IN FETAL LIVER, SIGNAL = 3.6; EXPRESSED IN PLACENTA, SIGNAL = 2.8; EXPRESSED IN BONE MARROW, SIGNAL =   4; EXPRESSED IN LUNG, SIGNAL = 4.1; NT HIT: AF202723.1, EVALUE 1.00e-36; EST_HUMAN HIT: BE939856.1, EVALUE 1.00e-36
ctgggaggcccggacgatcttcttgaagaggtcttctgagtcttgctgatgctctgctctcagggcagacagttcttc

SEQ ID NO: 26226 - DNA, 133 bp, Homo sapiens
  MAP TO AL035681.13; EXPRESSED IN LUNG, SIGNAL = 5.5; EXPRESSED IN BONE MARROW, SIGNAL = 1.9; EXPRESSED IN FETAL LIVER, SIGNAL =   2; EXPRESSED IN PLACENTA, SIGNAL =   2; EXPRESSED IN BRAIN, SIGNAL = 3.1; EXPRESSED IN HELA, SIGNAL = 5.9; EXPRESSED IN HEART, SIGNAL = 2.1; EST_HUMAN HIT: BF239753.1, EVALUE 1.10e-01; SWISSPROT HIT: P05979, EVALUE 1.20e-01; NT HIT: gi11466563, EVALUE 1.20e+00
ccctgacctggaagtggactcatcagagcttccactcctgaacccagctccgcttctacatgagcctcccggggctgacgcagggagaaagcactgctgccatttcccagtcgcgcacgtgactgccaactga

SEQ ID NO: 26227 - DNA, 212 bp, Homo sapiens
  MAP TO AL035681.13; EXPRESSED IN PLACENTA, SIGNAL =   3; EXPRESSED IN HELA, SIGNAL = 3.4; EXPRESSED IN BRAIN, SIGNAL = 3.6; EXPRESSED IN BONE MARROW, SIGNAL = 2.4; EXPRESSED IN HEART, SIGNAL = 2.5; EXPRESSED IN LUNG, SIGNAL = 3.6; EXPRESSED IN ADULT LIVER, SIGNAL = 2.5; EXPRESSED IN FETAL LIVER, SIGNAL = 5.1; NT HIT: gi11418177, EVALUE 3.00e-98; EST_HUMAN HIT: BF034775.1, EVALUE 4.00e-98; SWISSPROT HIT: P46060, EVALUE 3.00e-29
cttgccgccgccaatgcccatgccacagttgttgagcttgagttcctgcagggtgaagcaggctgagctcttgagcagggcctcgaagccttgcacaccgtcgggcccgaatgcgttgtcgcttaagtccagctccaccagctgagccccagctgtgatgagtccttcccctagtgagatctgggcacagaggaagctcgtgtcagtttcat

SEQ ID NO: 26228 - DNA, 95 bp, Homo sapiens
  MAP TO AL022327.17; EXPRESSED IN HELA, SIGNAL = 1.9; EXPRESSED IN BRAIN, SIGNAL = 1.9; EXPRESSED IN HEART, SIGNAL = 1.5; EXPRESSED IN LUNG, SIGNAL = 1.4; EST_HUMAN HIT: AV726495.1, EVALUE 2.90e-01; SWISSPROT HIT: P29784, EVALUE 7.20e+00; NT HIT: gi11528495, EVALUE 2.00e-01
ggagggggctgcatcagccaggggctgtggtgagagggtgggcaggacagagatgggctccgagcaggggagcctgggcagcagggagaagactg

SEQ ID NO: 26229 - DNA, 266 bp, Homo sapiens
  MAP TO Z98884.11; EXPRESSED IN HEART, SIGNAL = 1.4; NT HIT: gi8567387, EVALUE 2.00e-81; EST_HUMAN HIT: BF357140.1, EVALUE 1.00e-06; SWISSPROT HIT: O70361, EVALUE 2.00e-06
atacctaaatcagaaatgccaacaaatggacggtccatagacacaggaggaggagctccacagatcctgtccacggcgatgctgagcttggggtcgggcataagccaatgcggttacagcagcaccattgtccatgtcccacccccagagacaggtaccacactcgcctcttactttgaaaatatactcaactttaactacattgtgatgagaaaacaaaagtcatgaataccattcgctcggttgtaacttctaaactacacata

SEQ ID NO: 26230 - DNA, 180 bp, Homo sapiens
  MAP TO AC004624.6; EXPRESSED IN HEART, SIGNAL = 1.5; NT HIT: AF241636.1, EVALUE 4.20e-01; SWISSPROT HIT: Q01631, EVALUE 2.60e-01; EST_HUMAN HIT: AW050843.1, EVALUE 6.20e-01
caagggacagccgaagggaaccaaaagctgctgggagcctcctctgtgatgagcactattttcgggtggctgcttctggtcttgacccctgtcctgcatggggtgtgctaggtctgctgtgagaggcaggaggctggatgctgtcagttcttcctcctcctgccatagcagaggagtgtg

SEQ ID NO: 26231 - DNA, 153 bp, Homo sapiens
  MAP TO AL022319.2; EXPRESSED IN PLACENTA, SIGNAL = 2.4; EXPRESSED IN HEART, SIGNAL = 1.8; EXPRESSED IN LUNG, SIGNAL = 2.2; EXPRESSED IN FETAL LIVER, SIGNAL = 1.5; EXPRESSED IN ADULT LIVER, SIGNAL =   2; EXPRESSED IN BRAIN, SIGNAL = 2.3; EXPRESSED IN HELA, SIGNAL = 2.3; EXPRESSED IN BONE MARROW, SIGNAL = 1.7; EST_HUMAN HIT: T73693.1, EVALUE 5.20e-01; NT HIT: gi11418157, EVALUE 6.00e-06; SWISSPROT HIT: O60241, EVALUE 3.00e+00
cacggtggtgcaagctttgccccaggtaagagccactctttctggcagccctcctaggggtcattggtgtcaggctgggccctggggcatgaaggccctgatttcccttctcctcacatctgccagagccagggcagatgctgtctctgggga

SEQ ID NO: 26232 - DNA, 280 bp, Homo sapiens
  MAP TO AL022327.17; EXPRESSED IN ADULT LIVER, SIGNAL = 1.6; EXPRESSED IN BRAIN, SIGNAL = 1.5; EXPRESSED IN HEART, SIGNAL = 1.3; NT HIT: D25217.2, EVALUE 5.00e-94; EST_HUMAN HIT: AU120203.1, EVALUE 8.00e-94; SWISSPROT HIT: Q15049, EVALUE 1.00e-29
agagttgctctctctgtcccacctggggctccagggcgctgcagtccgtcaccagagggaccagatgctcgtggccctccaagggcttagtgtggagctactcacccccatcagcacagagaagacccacgtcttgtggctgaagcaggggggcagtctcttcgacagctgcaggtcgctcggcttcgcgtctggggcatagctggcggggtcttgccggccccgctccagcgtgggcatccggtcataggccagctcctctctgaatggctcctgggtc

SEQ ID NO: 26233 - DNA, 123 bp, Homo sapiens
  MAP TO AL023553.5; EXPRESSED IN LUNG, SIGNAL = 1.3; EXPRESSED IN ADULT LIVER, SIGNAL = 1.7; EXPRESSED IN HELA, SIGNAL = 1.4; EXPRESSED IN HEART, SIGNAL = 1.6; EST_HUMAN HIT: AV764043.1, EVALUE 1.60e+00; NT HIT: gi9506636, EVALUE 4.30e+00
cgtctatgtggaataactcaagctaggcagtggaatggtgagcacagctcaatgtgaggattgcgatttcccccgtctcatacaccagaaaagcactgcttatttgccattctggccattaat

SEQ ID NO: 26234 - DNA, 146 bp, Homo sapiens
  MAP TO Z83844.5; EXPRESSED IN HEART, SIGNAL = 1.3; EXPRESSED IN FETAL LIVER, SIGNAL =   2; EXPRESSED IN ADULT LIVER, SIGNAL = 2.4; EXPRESSED IN HELA, SIGNAL = 1.3; NT HIT: AL160132.1, EVALUE 8.00e-36; EST_HUMAN HIT: BF666568.1, EVALUE 2.00e-74; SWISSPROT HIT: P15656, EVALUE 5.30e+00
gcggtgccccagtctaggctgcggggacctgtccttgctcagcttggctgtccctgtagcccagcctgcacctaggtaatgactgcacagctcaaggttgggaagccaggacctctctggcctggggccagctgcctttgcctggg

SEQ ID NO: 26235 - DNA, 183 bp, Homo sapiens
  MAP TO AL021707.2; EXPRESSED IN PLACENTA, SIGNAL =  14; EXPRESSED IN LUNG, SIGNAL = 9.5; EXPRESSED IN HEART, SIGNAL = 8.3; EXPRESSED IN BONE MARROW, SIGNAL =  11; EXPRESSED IN ADULT LIVER, SIGNAL =  14; EXPRESSED IN FETAL LIVER, SIGNAL =   5; EXPRESSED IN BRAIN, SIGNAL =  14; EXPRESSED IN HELA, SIGNAL =  13; EST_HUMAN HIT: W28631.1, EVALUE 5.00e-14; NT HIT: gi11418127, EVALUE 5.00e-16; SWISSPROT HIT: O00178, EVALUE 1.50e-01
aggaggtgcggggtggccagacagcatcctttgcgctgaagaaggtgagtagcgatgatactgaacgctcccctcagactccatcatgctaggctcttggccagatgccctgctcacccactctagtcctcatggctgctctgcaaggtcgggattactggcttcatttttacagatgaggaa

SEQ ID NO: 26236 - DNA, 233 bp, Homo sapiens
  MAP TO AL022238.1; EXPRESSED IN BRAIN, SIGNAL = 1.8; EXPRESSED IN HELA, SIGNAL = 1.7; EXPRESSED IN LUNG, SIGNAL = 1.7; EXPRESSED IN HEART, SIGNAL = 1.3; EXPRESSED IN BONE MARROW, SIGNAL = 1.6; EXPRESSED IN ADULT LIVER, SIGNAL = 1.5; EXPRESSED IN FETAL LIVER, SIGNAL = 2.1; NT HIT: gi11525908, EVALUE 5.60e-01; EST_HUMAN HIT: BE672330.1, EVALUE 2.10e-01; SWISSPROT HIT: P54629, EVALUE 1.10e+00
agatgtgtccttccatcaccttgggtgagtttagtgtccacatggaaaatccacctataacctgggcttctcaacccttcctccagcccaccccagtcacacatacccatgctcacccaaaactgctccccaccagagtcactaattttagcatcctggaccatgacctcctctccttccaactggatcccactcctctggctatgttgacttcatcaaccatacccgcctaa

SEQ ID NO: 26237 - DNA, 91 bp, Homo sapiens
  MAP TO AC005300.10; EXPRESSED IN BRAIN, SIGNAL = 1.4; EXPRESSED IN LUNG, SIGNAL = 1.7; EXPRESSED IN HEART, SIGNAL = 1.4; EXPRESSED IN BONE MARROW, SIGNAL = 1.6; EXPRESSED IN FETAL LIVER, SIGNAL =  64; NT HIT: gi11526293, EVALUE 2.00e-44; EST_HUMAN HIT: BF328448.1, EVALUE 3.00e-44
caggtcaaaccctgccaccaccgtggggaacttgattcggagccccatggccattcggatggattctgcgatgacagccacatctttggat

SEQ ID NO: 26238 - DNA, 261 bp, Homo sapiens
  MAP TO AL008723.8; EXPRESSED IN HELA, SIGNAL = 1.9; EXPRESSED IN BRAIN, SIGNAL = 1.9; EXPRESSED IN LUNG, SIGNAL = 1.3; EXPRESSED IN HEART, SIGNAL = 1.3; EXPRESSED IN BONE MARROW, SIGNAL = 1.9; NT HIT: gi9558724, EVALUE 5.00e-94; EST_HUMAN HIT: BE735457.1, EVALUE 8.00e-94; SWISSPROT HIT: Q10570, EVALUE 3.00e-33
gctccccgactggcggctggtgttcttggtgaagaacttccctgtggggcagcgggtcctcatggacagctcctttggagagcccaccacacagggcgaggcccgcagggaggaggccatgtgccaggaggagctgcctctctcgtcaaggaggtgctgctggttgtgctgggcagccgccagagcacaccttacctgctggtgcatgtggaccaaaagctgcttatctacaaggccttcccccacgactctcggctcagc

SEQ ID NO: 26239 - DNA, 75 bp, Homo sapiens
  MAP TO AP000347.1; EXPRESSED IN LUNG, SIGNAL = 1.7; EXPRESSED IN BONE MARROW, SIGNAL = 4.2; EXPRESSED IN FETAL LIVER, SIGNAL = 1.4; EXPRESSED IN PLACENTA, SIGNAL = 1.3; EXPRESSED IN BRAIN, SIGNAL = 2.4; EXPRESSED IN HELA, SIGNAL = 1.5; EXPRESSED IN HEART, SIGNAL = 1.6; EST_HUMAN HIT: AV736449.1, EVALUE 2.00e-32; NT HIT: X62695.1, EVALUE 1.50e-01
gcggggagctttaaggtggccacccaggagaggaacccccagagagtccagatgaggctgcggaggcagaagaag

SEQ ID NO: 26240 - DNA, 403 bp, Homo sapiens
  MAP TO AC007092.4; EXPRESSED IN BRAIN, SIGNAL = 1.4; EXPRESSED IN PLACENTA, SIGNAL = 1.2; EXPRESSED IN HEART, SIGNAL =  16; EXPRESSED IN LUNG, SIGNAL = 4.7; EST_HUMAN HIT: AV720204.1, EVALUE 3.00e-17; SWISSPROT HIT: P37088, EVALUE 4.60e-01; NT HIT: AL163285.2, EVALUE 7.00e-14
gaaaagatgtttaattggctcatggttctgcagactttacaggaagtgtggtgccaacatctgcttctggtgtgcgcttcaggaagcttacaatcatggtggaaggtgaaagggaggcagcatgtcacatggccagagctggagcaagatagtgatggtgggaggtgccacgctcttttaaacaaccagatctcatgtgaactgactgagcaaggactcactcatcacccagaggatggagctaaaccaattctgagggatctgccccatgatccaataacttcccaccaggccccaccttcaaatctgggcatgacatttcaacatgagattcagaggggacaaacatacaaaccatatgatgatactatgcagctgatgtatgagccacagtttgtggagt

SEQ ID NO: 26241 - DNA, 172 bp, Homo sapiens
  MAP TO AC007281.3; EXPRESSED IN LUNG, SIGNAL = 1.3; EXPRESSED IN HEART, SIGNAL = 1.4; EST_HUMAN HIT: BF333010.1, EVALUE 2.30e+00; SWISSPROT HIT: P48445, EVALUE 2.30e+00; NT HIT: AL139075.2, EVALUE 4.00e-01
acttgctaagcattgcaatttggaatataaatggcatagtaactctatttataagttaagtatgcacggaaataagcaaaattttgtacagactttaaaaaattcttataatttttttacaattaaactcctgaaacacctttctcatactagtttcctatctattcataag

SEQ ID NO: 26242 - DNA, 295 bp, Homo sapiens
  MAP TO Z98884.11; EXPRESSED IN HELA, SIGNAL = 1.4; EXPRESSED IN BONE MARROW, SIGNAL = 1.4; EXPRESSED IN LUNG, SIGNAL = 1.5; EXPRESSED IN HEART, SIGNAL = 2.4; NT HIT: gi8567387, EVALUE 0.00e+00; EST_HUMAN HIT: BE149378.1, EVALUE 1.00e-129; SWISSPROT HIT: O70361, EVALUE 4.00e-08
gagattctacttccaagcagacgcggtcggccggctgcaggaaagggaagcacaagcggaagaagctgccggagccgccagacagcagcagctcgaacaccggctctggtccccgcaggggagcgcatcagaacgcacagccctgctgcccctccgcggcctcctctccgcacacctcgagcccgaccttcccacctgccgccatggtgcccagccaggccccttacctcgtcccagcttttcccctcccagccgcgacctcacccggaagagaatacgcagcccccggaactgc

SEQ ID NO: 26243 - DNA, 163 bp, Homo sapiens
  MAP TO AL008723.8; EXPRESSED IN HELA, SIGNAL = 1.3; EXPRESSED IN HEART, SIGNAL = 1.3; EXPRESSED IN LUNG, SIGNAL = 1.3; EXPRESSED IN BONE MARROW, SIGNAL = 1.8; EXPRESSED IN BRAIN, SIGNAL = 2.2; NT HIT: X51755.1, EVALUE 1.00e-25; EST_HUMAN HIT: BF217619.1, EVALUE 5.60e-01; SWISSPROT HIT: P40622, EVALUE 8.90e+00
ccctctccaggtttccgtgggctcccaaggagagagctctgtgctggcctgggactcaggaagcccagtcaggagagaggggaaggctgtggacatgaagcagccgggcaaagggtcacagaaggacatgctgttcgtggaggtggatgctgagtctctgtgg

SEQ ID NO: 26244 - DNA, 184 bp, Homo sapiens
  MAP TO AL008723.8; EXPRESSED IN HELA, SIGNAL = 2.1; EXPRESSED IN HEART, SIGNAL =   2; EXPRESSED IN LUNG, SIGNAL = 2.2; EXPRESSED IN BONE MARROW, SIGNAL = 2.2; EXPRESSED IN FETAL LIVER, SIGNAL = 2.8; EXPRESSED IN BRAIN, SIGNAL = 2.2; EXPRESSED IN PLACENTA, SIGNAL = 1.6; EST_HUMAN HIT: BE788933.1, EVALUE 2.50e+00; SWISSPROT HIT: P00340, EVALUE 3.00e+00; NT HIT: AJ003022.1, EVALUE 4.30e-01
gatcacttacgctgctctcagcctaagtgaggcagatatgagaagcacagttattcttatcttagagagggggaacttgagccttacagagattaagggggcccaaggtcacagtgacagggggagcagctcagttctctgcagcctgctcatcacacccacttggtccataggtcattctggc

SEQ ID NO: 26245 - DNA, 131 bp, Homo sapiens
  MAP TO AP000350.1; EXPRESSED IN BONE MARROW, SIGNAL = 1.5; EXPRESSED IN HEART, SIGNAL = 1.4; EXPRESSED IN PLACENTA, SIGNAL = 1.5; EXPRESSED IN BRAIN, SIGNAL = 1.4; NT HIT: gi11431396, EVALUE 7.40e-02; EST_HUMAN HIT: BF310675.1, EVALUE 6.00e-68; SWISSPROT HIT: P46408, EVALUE 1.00e-08
gtgtgagcatgaacatccagcccatgtacctgggggagagcgcccctaaggagctccgaggagctgtggccatgagctcagccatctttacggctctggggatcgtgatgggacaggtggtcggactcagg

SEQ ID NO: 26246 - DNA, 163 bp, Homo sapiens
  MAP TO Z97055.1; EXPRESSED IN PLACENTA, SIGNAL = 3.6; EXPRESSED IN BRAIN, SIGNAL = 4.3; EXPRESSED IN HELA, SIGNAL = 4.1; EXPRESSED IN HEART, SIGNAL = 3.1; EXPRESSED IN LUNG, SIGNAL = 4.1; EXPRESSED IN BONE MARROW, SIGNAL =   5; EXPRESSED IN ADULT LIVER, SIGNAL = 3.3; EXPRESSED IN FETAL LIVER, SIGNAL = 3.1; NT HIT: gi11427987, EVALUE 1.50e+00; SWISSPROT HIT: P30546, EVALUE 1.00e+00; EST_HUMAN HIT: BF573829.1, EVALUE 5.60e-01
ggctgctagtcccaggaagagaaaaagaggtgcctggagcacagctgcccccgccaagcccagcccgaagcagggatctagtcaatctgcacacacgggggacagtctggccaagaccagctgggaaagaatcagggccttgcccaaaatcaaaattcagacc

SEQ ID NO: 26247 - DNA, 166 bp, Homo sapiens
  MAP TO AL023553.5; EXPRESSED IN HEART, SIGNAL = 3.1; EXPRESSED IN LUNG, SIGNAL = 1.2; EXPRESSED IN HELA, SIGNAL = 1.8; EXPRESSED IN BRAIN, SIGNAL = 1.7; NT HIT: U87927.1, EVALUE 7.00e-89; EST_HUMAN HIT: BF313112.1, EVALUE 2.00e-74; SWISSPROT HIT: Q99798, EVALUE 3.00e-22
acagtggctgtcatgtttcttcttgcagaaagctctgggtgtgcggcagtaccatgtggcctcagtcctgtgccaacgggccaaggtggcgatgagccactttgagcccaacgagtacatccattatgacctgctagagaagaacattaacattgttcgcaaacgg

SEQ ID NO: 26248 - DNA, 111 bp, Homo sapiens
  MAP TO AC008272.1; EXPRESSED IN LUNG, SIGNAL = 5.1; EXPRESSED IN HEART, SIGNAL = 2.3; NT HIT: gi11425464, EVALUE 2.00e-39; EST_HUMAN HIT: Z18912.1, EVALUE 6.00e-37
atcctttgaccagaaattgatgtctgtgcctcttcatcgttccttgggccacctcctctcttggacagacagcctcttagaggactgctcatccaaatctgcttcttcatt

SEQ ID NO: 26249 - DNA, 155 bp, Homo sapiens
  MAP TO AL031587.3; EXPRESSED IN BONE MARROW, SIGNAL = 1.5; EXPRESSED IN BRAIN, SIGNAL =   2; EXPRESSED IN HELA, SIGNAL = 1.9; EXPRESSED IN HEART, SIGNAL = 1.4; NT HIT: gi11418097, EVALUE 2.00e-82; EST_HUMAN HIT: BE409129.1, EVALUE 4.00e-82; SWISSPROT HIT: P56693, EVALUE 3.00e-19
ctcgtggctgatctcaccaatgtccacgttgccgaagtcgatgtgaggcttcccgccctcccccatggagcgcccgtcccgcttcgggtctgccttgcccgactgcagctctgtcttcggggtggttggaggggtgggtgggccatggctctggc

SEQ ID NO: 26250 - DNA, 81 bp, Homo sapiens
  MAP TO Z97055.1; EXPRESSED IN PLACENTA, SIGNAL = 1.4; EXPRESSED IN BRAIN, SIGNAL = 3.8; EXPRESSED IN HELA, SIGNAL = 2.4; EXPRESSED IN HEART, SIGNAL = 2.6; EXPRESSED IN LUNG, SIGNAL = 2.6; EXPRESSED IN BONE MARROW, SIGNAL =   3; EXPRESSED IN FETAL LIVER, SIGNAL = 1.5; EST_HUMAN HIT: BF313539.1, EVALUE 2.00e-38; SWISSPROT HIT: P49888, EVALUE 3.80e-01; NT HIT: gi11418248, EVALUE 2.00e-38
cttggagtctccattgtggaggtcagagggcagaaagcggtagggcaggtggctcttgatgaggcggggagaggtcagttc

SEQ ID NO: 26251 - DNA, 301 bp, Homo sapiens
  MAP TO AL022319.2; EXPRESSED IN FETAL LIVER, SIGNAL = 1.4; EXPRESSED IN HELA, SIGNAL = 1.6; EXPRESSED IN BRAIN, SIGNAL = 2.4; EXPRESSED IN PLACENTA, SIGNAL =   2; EXPRESSED IN HEART, SIGNAL = 1.5; EXPRESSED IN BONE MARROW, SIGNAL = 4.5; EXPRESSED IN LUNG, SIGNAL =   2; EST_HUMAN HIT: AV715377.1, EVALUE 1.00e-46; SWISSPROT HIT: P32968, EVALUE 2.40e+00; NT HIT: AL161542.2, EVALUE 1.90e-01
aaggcacaattttgagttgatccagttcttgaactctgtagactctgataattctgaatctgttgttttgtcttttgctgatattttgtgtgtggcaaatgtcgaggaagccagttttctcagatttcaaaatagtatatggaaaaatgaagagaaaatgcaatgtgtccatcctttgcaactagtttgggatccagtgtcatctgctctaaaacacaacaaaccagtgaaaaatgatctgcttgtaaatgaagctgcaattaaaaaaaaaataggtgcccttgaagatgagctaactttt

SEQ ID NO: 26252 - DNA, 163 bp, Homo sapiens
  MAP TO AC006548.19; EXPRESSED IN PLACENTA, SIGNAL = 1.7; EXPRESSED IN BRAIN, SIGNAL = 2.4; EXPRESSED IN HELA, SIGNAL = 1.7; EXPRESSED IN HEART, SIGNAL = 1.8; EXPRESSED IN BONE MARROW, SIGNAL = 2.6; EXPRESSED IN LUNG, SIGNAL = 2.3; EXPRESSED IN FETAL LIVER, SIGNAL = 1.3; NT HIT: gi11419914, EVALUE 3.70e-01; EST_HUMAN HIT: AW377998.1, EVALUE 1.40e-01; SWISSPROT HIT: P21917, EVALUE 7.80e-01
ctgtctctgaggatcacatactcagcaggcacctgaggctgtcctagccttctccactgagtcttccaagcctgcatggggcaggcgtggggcagggagggactcagcaggaggcccaggcccatcaacagcacagttgccaagccaacagccagcagcaccc

SEQ ID NO: 26253 - DNA, 256 bp, Homo sapiens
  MAP TO AC006548.19; EXPRESSED IN HEART, SIGNAL = 2.1; EXPRESSED IN BONE MARROW, SIGNAL = 3.4; EXPRESSED IN LUNG, SIGNAL = 2.7; EXPRESSED IN FETAL LIVER, SIGNAL = 4.6; EXPRESSED IN ADULT LIVER, SIGNAL =  15; EXPRESSED IN PLACENTA, SIGNAL = 4.8; EXPRESSED IN HELA, SIGNAL = 2.5; EXPRESSED IN BRAIN, SIGNAL = 1.6; NT HIT: AJ271735.1, EVALUE 9.00e-34; EST_HUMAN HIT: AW962113.1, EVALUE 2.00e-23; SWISSPROT HIT: P08547, EVALUE 6.00e-09
gaccctggaccctggacatgttccgagactcttttacattatgtcagacatgcaagccctgcctcagcttttttcccaacactcagcttttccccaacagaagtcaggtaatatgattcctccagttttgttctttttgctcagggttgctttggctgttctgattcttgtgtggtttcatataaattttagaatttttgtttctatttctgtagagaatactgaatgtattttgataggcattgattctgcagat

SEQ ID NO: 26254 - DNA, 339 bp, Homo sapiens
  MAP TO AL079300.11; EXPRESSED IN HEART, SIGNAL = 1.4; NT HIT: U78308.1, EVALUE 5.30e-02; EST_HUMAN HIT: AI668709.1, EVALUE 5.00e-03; SWISSPROT HIT: P07460, EVALUE 5.10e+00
gtctcagagaagaaagtgagttttccaaaggcactcaatagcaaagctgagtttagaactcaacatttattcattcaacaaatagcacctcatgtcctgagcacggttgcaggcactgtagaaaaagctaagaatgggataggcaaaggccctgtcttcgtgaagcttatggtttactgtgggggacgggtaatatacttggaaatacatacattggccatgtccctaccacctgatgtcccaccagtagtccagaagctacaggtcatccttctgtgtctgcatgatattttgccaaacaccaggggtttggcctaagtccagttgctcatatcgcag

SEQ ID NO: 26255 - DNA, 140 bp, Homo sapiens
  MAP TO AC004832.3; EXPRESSED IN ADULT LIVER, SIGNAL = 3.4; EXPRESSED IN PLACENTA, SIGNAL = 2.5; EXPRESSED IN BRAIN, SIGNAL = 3.4; EXPRESSED IN HELA, SIGNAL = 2.3; EXPRESSED IN BONE MARROW, SIGNAL = 3.7; EXPRESSED IN LUNG, SIGNAL = 2.7; EXPRESSED IN HEART, SIGNAL = 2.4; EXPRESSED IN FETAL LIVER, SIGNAL = 3.6; NT HIT: gi11417966, EVALUE 2.00e-11; SWISSPROT HIT: P49193, EVALUE 9.20e-02; EST_HUMAN HIT: AW175803.1, EVALUE 3.00e-11
tcactgtgttggggagggtctcatcgccttgagactctgcagcgtctcctcagaggccttgtcgggaagcagcacctccacagtgtagctgagcttcttggcatgcatccggctgtaggtgttgtcgaagcgcaggacat

SEQ ID NO: 26256 - DNA, 76 bp, Homo sapiens
  MAP TO AC007567.1; EXPRESSED IN HELA, SIGNAL = 3.7; EXPRESSED IN PLACENTA, SIGNAL = 6.6; EXPRESSED IN BRAIN, SIGNAL = 1.9; EXPRESSED IN BONE MARROW, SIGNAL = 1.5; EXPRESSED IN LUNG, SIGNAL = 3.5; EXPRESSED IN HEART, SIGNAL =   3; EXPRESSED IN ADULT LIVER, SIGNAL = 6.6; EXPRESSED IN FETAL LIVER, SIGNAL =  11; NT HIT: AJ276242.1, EVALUE 1.50e-01; EST_HUMAN HIT: AV758315.1, EVALUE 2.30e-01
gcaaacagccttctaaagtcactcctgtctggctcaggacctccaaaatcaagattaagaatccaaacatattaaa

SEQ ID NO: 26257 - DNA, 79 bp, Homo sapiens
  MAP TO AC005006.2; EXPRESSED IN BONE MARROW, SIGNAL = 1.5; EXPRESSED IN BRAIN, SIGNAL = 3.5; EXPRESSED IN HELA, SIGNAL = 3.3; EXPRESSED IN HEART, SIGNAL = 3.2; EXPRESSED IN LUNG, SIGNAL = 5.4; EXPRESSED IN PLACENTA, SIGNAL = 1.4; EXPRESSED IN FETAL LIVER, SIGNAL = 5.1; EXPRESSED IN ADULT LIVER, SIGNAL = 5.5; SWISSPROT HIT: P53261, EVALUE 9.00e-03; NT HIT: gi11417972, EVALUE 2.00e-37; EST_HUMAN HIT: BF307528.1, EVALUE 4.00e-37
taaagtcagccaagctcagctggagcttcttccgggctttgttccgggtgatgtagttggtggccgagcctcgttcata

SEQ ID NO: 26258 - DNA, 101 bp, Homo sapiens
  MAP TO AC006992.2; EXPRESSED IN HELA, SIGNAL =   5; EXPRESSED IN HEART, SIGNAL = 4.1; EXPRESSED IN BONE MARROW, SIGNAL = 3.4; EXPRESSED IN LUNG, SIGNAL = 3.8; EXPRESSED IN FETAL LIVER, SIGNAL = 8.4; EXPRESSED IN ADULT LIVER, SIGNAL = 6.4; EXPRESSED IN PLACENTA, SIGNAL = 5.6; EXPRESSED IN BRAIN, SIGNAL = 6.4; SWISSPROT HIT: Q58725, EVALUE 3.20e+00; NT HIT: AE000492.1, EVALUE 8.50e-01; EST_HUMAN HIT: T80037.1, EVALUE 2.00e-02
ccatgtcagatcagtattagagagctttccagccacattgtacctcatctaggttcgtcccaggaaggcaagctgcctgctcgtgctgccagtagtaggtg

SEQ ID NO: 26259 - DNA, 75 bp, Homo sapiens
  MAP TO AC006427.13; EXPRESSED IN BONE MARROW, SIGNAL = 1.3; EXPRESSED IN HEART, SIGNAL = 1.4; NT HIT: AF281862.1, EVALUE 2.30e+00
atatgtttttcattcctgttatgccgcagggccgagttttccagtggcatttgaagcagtttcttcgcccgcata

SEQ ID NO: 26260 - DNA, 166 bp, Homo sapiens
  MAP TO AC007841.1; EXPRESSED IN FETAL LIVER, SIGNAL = 1.2; EXPRESSED IN HELA, SIGNAL = 1.2; EXPRESSED IN PLACENTA, SIGNAL = 1.8; EXPRESSED IN BRAIN, SIGNAL = 1.5; EXPRESSED IN HEART, SIGNAL = 1.3; EXPRESSED IN BONE MARROW, SIGNAL = 1.6; NT HIT: AF194972.1, EVALUE 3.80e-01; EST_HUMAN HIT: BF477922.1, EVALUE 5.70e-01; SWISSPROT HIT: P51610, EVALUE 1.30e+00
tccttttttccagtctcagcccaggagggatcttcacagagaaagcaagcccagcccatccccacagctggctccctggtgcccattctgaaaggctggacccatcctgacctgtccctgccccaaggactgcctggtgagggatggcttaccaacactgtgactc

SEQ ID NO: 26261 - DNA, 377 bp, Homo sapiens
  MAP TO AC008272.1; EXPRESSED IN PLACENTA, SIGNAL = 1.5; EXPRESSED IN HEART, SIGNAL = 1.5; EXPRESSED IN BONE MARROW, SIGNAL = 1.6; EXPRESSED IN ADULT LIVER, SIGNAL = 1.6; NT HIT: X57147.1, EVALUE 0.00e+00; EST_HUMAN HIT: AW503208.1, EVALUE 4.00e-93; SWISSPROT HIT: P10272, EVALUE 2.00e-18
caaaagtctggactataatttgttggcagtcatgctcgattggttccccatcctctgggagaaaagtggcagggttgagggccatgcacatgagtatttgaagcgccagtccctcaaggagtagcacctggtatctaagtaggtggttgtctgatagccacaaacttcctttggcacctagtatgccatttacatcatgagtagtccagacagtgagatcctttccttgtattattttgatagcctctgacactaagacggccactgctgcagctacccttaaacagtgagggcagccttttgctactacatcaatttccttacctaggtatgcccctggttgtggggttgtcccacgagtctgagtaatgactcca

SEQ ID NO: 26262 - DNA, 139 bp, Homo sapiens
  MAP TO AC004832.3; EXPRESSED IN HEART, SIGNAL = 2.8; EXPRESSED IN FETAL LIVER, SIGNAL = 6.7; EXPRESSED IN ADULT LIVER, SIGNAL = 6.3; EXPRESSED IN HELA, SIGNAL = 4.3; EXPRESSED IN PLACENTA, SIGNAL = 4.3; EXPRESSED IN BRAIN, SIGNAL = 5.1; EXPRESSED IN BONE MARROW, SIGNAL = 7.3; EXPRESSED IN LUNG, SIGNAL = 5.5; EST_HUMAN HIT: AI193566.1, EVALUE 8.00e-06; NT HIT: AJ132352.1, EVALUE 3.00e-07; SWISSPROT HIT: P23881, EVALUE 2.00e-05
tgagcacacagcccgggaacaggatctcgttctccacctgcagggaggagccgcggcccacggacctcgtgtgctcatactgcagcctcacctgcttgcacaggtagtagctcttgggcacctcacccccgtagttgat

SEQ ID NO: 26263 - DNA, 243 bp, Homo sapiens
  MAP TO AC005006.2; EXPRESSED IN FETAL LIVER, SIGNAL = 3.5; EXPRESSED IN ADULT LIVER, SIGNAL = 5.7; EXPRESSED IN HELA, SIGNAL = 4.2; EXPRESSED IN PLACENTA, SIGNAL = 6.9; EXPRESSED IN BRAIN, SIGNAL = 4.6; EXPRESSED IN LUNG, SIGNAL = 4.3; EXPRESSED IN BONE MARROW, SIGNAL = 8.6; EXPRESSED IN HEART, SIGNAL = 3.4; NT HIT: gi11417974, EVALUE 1.00e-100; EST_HUMAN HIT: AW384229.1, EVALUE 5.00e-98; SWISSPROT HIT: P20062, EVALUE 3.00e-28
tcctcatgacttcccccatgcgtggggcagaactgggaacagcatgtctcaaggcgagggttgctttgctggccagtctgcaggatggagccttccagaatgctctcatgatttcccagctgctgcccgttctgaaccacaagacctacattgatctgatcttcccagactgtctggcaccacgaggtagcccaactttttgtggaagcacagccctttacaatctgctgcgcacccattgac

SEQ ID NO: 26264 - DNA, 97 bp, Homo sapiens
  MAP TO AC004832.3; EXPRESSED IN ADULT LIVER, SIGNAL = 9.5; EXPRESSED IN HELA, SIGNAL = 6.9; EXPRESSED IN PLACENTA, SIGNAL =   9; EXPRESSED IN BRAIN, SIGNAL = 7.1; EXPRESSED IN LUNG, SIGNAL = 5.8; EXPRESSED IN BONE MARROW, SIGNAL = 9.4; EXPRESSED IN HEART, SIGNAL = 5.1; EXPRESSED IN FETAL LIVER, SIGNAL =  14; NT HIT: AJ132352.1, EVALUE 7.00e-29; EST_HUMAN HIT: BF339516.1, EVALUE 1.20e+00; SWISSPROT HIT: P49193, EVALUE 3.30e-02
ctcctggtacacttctaccagaggtttccagaagtgtttcagtcccaggccctcacagtcaaatatcatcacgatggtctcaatcttcttccctagc

SEQ ID NO: 26265 - DNA, 162 bp, Homo sapiens
  MAP TO AC006548.19; EXPRESSED IN FETAL LIVER, SIGNAL = 3.5; EXPRESSED IN ADULT LIVER, SIGNAL = 2.4; EXPRESSED IN PLACENTA, SIGNAL = 4.8; EXPRESSED IN LUNG, SIGNAL = 1.4; EXPRESSED IN BONE MARROW, SIGNAL = 1.4; EXPRESSED IN HEART, SIGNAL = 1.4; NT HIT: U27699.1, EVALUE 9.40e-02; EST_HUMAN HIT: BF699660.1, EVALUE 2.20e+00; SWISSPROT HIT: P50343, EVALUE 1.00e+00
gagtccagcagctacagccctggtccattggccaaatccagtggcatcaagacctcagtgtgaggcccagcgctcgtcctcacttgctgtctggccatggtcagtgagcctctctgactcaacctgtaaacctccctgggcctggatttcctcatctgtcag

SEQ ID NO: 26266 - DNA, 256 bp, Homo sapiens
  MAP TO AC007556.2; EXPRESSED IN PLACENTA, SIGNAL = 3.9; EXPRESSED IN HEART, SIGNAL = 2.5; EXPRESSED IN LUNG, SIGNAL = 1.7; EXPRESSED IN FETAL LIVER, SIGNAL = 4.3; EXPRESSED IN ADULT LIVER, SIGNAL = 2.4; EXPRESSED IN HELA, SIGNAL = 1.9; NT HIT: gi11430460, EVALUE 0.00e+00; EST_HUMAN HIT: BE711728.1, EVALUE 2.00e-04; SWISSPROT HIT: P98164, EVALUE 3.00e-50
gttactattgtagataatacctgttcatcttcggcgttcacctgtggccatggggagtgcattcctgcacactggcgctgtgacaaacgcaacgactgtgtggatggcagtgatgagcacaactgccccacccacgcacctgcttcctgccttgacacccaatacacctgtgataatcaccagtgtatctcaaagaactgggtctgtgacacagacaatgattgtggggatggatctgatgaaaagaactgcagta

SEQ ID NO: 26267 - DNA, 154 bp, Homo sapiens
  MAP TO AL034406.1; EXPRESSED IN HEART, SIGNAL = 1.5; NT HIT: U06871.1, EVALUE 3.50e-01; EST_HUMAN HIT: AW241666.1, EVALUE 5.00e-04
attagctatctcacgtgttcttcatgatgttcattttttccattctcttagtatattagttgtttttttaagttctcagtctgataattctaaaatatcagctatgtctgaatttggttctgttgtttgctctgtctcttcagattgtgttact

SEQ ID NO: 26268 - DNA, 149 bp, Homo sapiens
  MAP TO AC004032.7; EXPRESSED IN HEART, SIGNAL = 1.3; NT HIT: AF092435.1, EVALUE 1.30e+00; EST_HUMAN HIT: BF571764.1, EVALUE 1.30e-01; SWISSPROT HIT: Q03173, EVALUE 6.00e-01
ctcacttagcagacaccttgtcaccgcccgagagccgggtgttaaaaatacaaaccaggcggccagtcggccccgagtgtggcccctccacctgctccgcaccagataaccagccttccagccagccagctgatctctgctcggctgaa

SEQ ID NO: 26269 - DNA, 327 bp, Homo sapiens
  MAP TO AP000129.1; EXPRESSED IN HEART, SIGNAL = 1.6; EXPRESSED IN ADULT LIVER, SIGNAL = 2.2; EXPRESSED IN FETAL LIVER, SIGNAL = 1.3; NT HIT: AJ295844.1, EVALUE 2.00e-01; EST_HUMAN HIT: BF432200.1, EVALUE 6.00e-15; SWISSPROT HIT: Q9Z7S5, EVALUE 2.80e+00
gaatattctatcacaccagaaatttttcttatgcttcccaaccccccatcaattaccactcctaggcaaacacttttctgatttctatcatcacagattaattttgtgtgtgccagaatttcatataaacgaaatcatgcagggtgtgctatttggggtctggcttcatctactcagcatcatgtttttgagatgcatgcatgtggcactattagtaatttactccattatattgcattgtatgaaatttttttccaatttctcccttccatctttattgattctcaagattttgcacagaaaactctttggggtctagaagagcag

SEQ ID NO: 26270 - DNA, 105 bp, Homo sapiens
  MAP TO AC006548.19; EXPRESSED IN PLACENTA, SIGNAL = 1.2; EXPRESSED IN BRAIN, SIGNAL = 2.2; EXPRESSED IN BONE MARROW, SIGNAL = 6.5; EXPRESSED IN HEART, SIGNAL = 1.5; NT HIT: gi11436955, EVALUE 4.00e-03; EST_HUMAN HIT: BE939176.1, EVALUE 5.00e-03; SWISSPROT HIT: P22457, EVALUE 9.40e+00
aacccggcatctgcatttcctgtttccggtggcaccagcagttcagccccgccgaggagcactggtaacatccactacgcggccctggacttccagccgagcaag

SEQ ID NO: 26271 - DNA, 181 bp, Homo sapiens
  MAP TO AC007556.2; EXPRESSED IN HEART, SIGNAL = 1.6; EXPRESSED IN ADULT LIVER, SIGNAL = 2.2; EXPRESSED IN FETAL LIVER, SIGNAL = 1.6; NT HIT: gi11560140, EVALUE 1.70e+00; EST_HUMAN HIT: AA768861.1, EVALUE 8.00e-62; SWISSPROT HIT: Q46871, EVALUE 1.70e+00
agcaatcattatgactatttctcctattatgcccatggcaagtcaggttgtttggattacctggttcataattcaggcatcaacattaattgggtggcattatactcaagttacggttgccatacctaggagaaaacagacccagaacacagtaagtaaatattttatctacatacgggga

SEQ ID NO: 26272 - DNA, 109 bp, Homo sapiens
  MAP TO AC007463.3; EXPRESSED IN HEART, SIGNAL = 1.4; EXPRESSED IN BRAIN, SIGNAL = 1.5; NT HIT: U82671.2, EVALUE 9.30e-01; EST_HUMAN HIT: BF034217.1, EVALUE 5.40e+00; SWISSPROT HIT: P20385, EVALUE 7.20e+00
gctcgaggtccgtcccatcatacatccggaagccaggcagcatccagggcttgctcatgagccctgccttcagcggcatcaccttcttatactcatcaaggaaaggctg

SEQ ID NO: 26273 - DNA, 112 bp, Homo sapiens
  MAP TO AC007363.3; EXPRESSED IN PLACENTA, SIGNAL = 3.2; EXPRESSED IN HEART, SIGNAL = 1.4; EXPRESSED IN LUNG, SIGNAL = 1.5; EXPRESSED IN FETAL LIVER, SIGNAL = 2.9; EXPRESSED IN ADULT LIVER, SIGNAL =   5; EXPRESSED IN HELA, SIGNAL = 1.4; NT HIT: AL114281.1, EVALUE 9.70e-01; EST_HUMAN HIT: AW468253.1, EVALUE 1.40e+00; SWISSPROT HIT: O10286, EVALUE 4.20e+00
cagctgttggggaggctaaatccatgacagcaactgcggcatctgcagcataagccgccatcctcagggcaagccagagaataggcctgagacagtggccttcccacatccc

SEQ ID NO: 26274 - DNA, 118 bp, Homo sapiens
  MAP TO AL022319.2; EXPRESSED IN HEART, SIGNAL = 1.4; NT HIT: gi11418157, EVALUE 2.00e-60; EST_HUMAN HIT: H04559.1, EVALUE 1.50e+00; SWISSPROT HIT: Q9Z0Y8, EVALUE 1.00e-17
catccttgggatgcatatttttggctgcaagttcagcctccgcacggacactggagacacggtgcccgacaggaagaacttcgactccctgctgtgggccatcgtcactgtgttccag

SEQ ID NO: 26275 - DNA, 230 bp, Homo sapiens
  MAP TO AL022319.2; EXPRESSED IN HEART, SIGNAL = 1.5; NT HIT: gi11418157, EVALUE 6.00e-04; EST_HUMAN HIT: AI001815.1, EVALUE 3.20e+00; SWISSPROT HIT: Q03209, EVALUE 9.40e-01
ctggagcactacaatcagcccacggtgagccctggtctgcctcccagcccaaggttacaaggtgagggtggggtctcagcaggaccccaccccagggatagggtggggaaggggttagctgatagcaggatgtgagcagcccctccatgctgggctctatgctgggcactgcagtgggaggaggtgccggacaagcttgccctcaggaagctcagagtctggaagggaac

SEQ ID NO: 26276 - DNA, 232 bp, Homo sapiens
  MAP TO AC007556.2; EXPRESSED IN HEART, SIGNAL = 1.4; SWISSPROT HIT: P98164, EVALUE 3.00e-31; NT HIT: gi11430460, EVALUE 1.00e-111; EST_HUMAN HIT: BE711728.1, EVALUE 1.30e-02
gtccaaatggtgccgagtgccagtgtccacatgagggcaactggtatttggccaacaacaggaagcactgcattgtggacaatggtgaacgatgtggtgcatcttccttcacctgctccaatgggcgctgcatctcggaagagtggaagtgtgataatgacaacgactgtggggatggcagtgatgagatggaaagtgtctgtggtgagttggactcttggcgcttttggta

SEQ ID NO: 26277 - DNA, 185 bp, Homo sapiens
  MAP TO AP000356.1; EXPRESSED IN HEART, SIGNAL = 1.8; EXPRESSED IN BONE MARROW, SIGNAL = 2.6; EXPRESSED IN LUNG, SIGNAL = 1.9; EXPRESSED IN FETAL LIVER, SIGNAL = 2.1; EXPRESSED IN ADULT LIVER, SIGNAL =   2; EXPRESSED IN PLACENTA, SIGNAL = 2.3; EXPRESSED IN HELA, SIGNAL =   2; EXPRESSED IN BRAIN, SIGNAL = 2.1; SWISSPROT HIT: P19440, EVALUE 8.00e-11; NT HIT: gi11417877, EVALUE 5.00e-93; EST_HUMAN HIT: AI222095.1, EVALUE 5.00e-88
cccgtgggtgcagcagagccatgaagaagaagttagtggtgctgggcctgctggccgtggtcctggtgctggtcattgtcggcctctgtctctggctgccctcagcctccaaggaacctgacaaccatgtgtacaccagggctgccgtggccgcggatgccaagcagtgctcgaagattgggagg

SEQ ID NO: 26278 - DNA, 143 bp, Homo sapiens
  MAP TO AC006548.19; EXPRESSED IN HELA, SIGNAL = 1.3; EXPRESSED IN BONE MARROW, SIGNAL = 1.5; EXPRESSED IN HEART, SIGNAL = 2.2; EST_HUMAN HIT: BF314481.1, EVALUE 1.20e-01; NT HIT: gi5803006, EVALUE 1.30e+00; SWISSPROT HIT: P42759, EVALUE 8.00e-01
tcctggactgtggggaaccacgccgtctgggagtggagcagtcagggcccagggcactatgaggcctccaggctgctccagggtaggaaagaggcagagcgtctgctcctcagccaggatagccaggaggccccagccctcct

SEQ ID NO: 26279 - DNA, 438 bp, Homo sapiens
  MAP TO AB016897.1; EXPRESSED IN HEART, SIGNAL = 1.8; EXPRESSED IN FETAL LIVER, SIGNAL = 3.2; EXPRESSED IN HELA, SIGNAL = 1.4; SWISSPROT HIT: P38560, EVALUE 1.50e+00; NT HIT: gi11433056, EVALUE 6.90e-02; EST_HUMAN HIT: AW868110.1, EVALUE 7.00e-03
ataaggagctagtcctcctgcacgtccctcctctcagcaccgtcacactggtgaccacgtctccacatatgaatcttggtggacacattcaggccacagcagacgcaatggaaaggatagttcaaaacataaaaatggtcacaattttagtagcaaaaggccagcctcctgtctggactgacgttgggccttctgctgtgggtttcctgagagcctcactcccctcttcacacgcaggcctccttcactctcccgggggtcctggctaggaacctccacgcccaccacccactgctcatcttctgctgcccccacagcttagatggcctgttcacccagtgtttctcatctgcctgcctacaccatctcttcacatctcagcttagccacgaccgtctctcggagccctccggaccttggaagactggtctaggggct

SEQ ID NO: 26280 - DNA, 139 bp, Homo sapiens
  MAP TO Z95114.19; EXPRESSED IN HEART, SIGNAL = 2.7; NT HIT: X85949.1, EVALUE 1.00e-12; EST_HUMAN HIT: AV701220.1, EVALUE 2.00e-06; SWISSPROT HIT: P49591, EVALUE 5.30e+00
aaataaaaagaaactacaacaatgattttagtatcctgagaacatgatagctaaggcccaaactgggactaaatctctcactgtgcttagccataaacttaaataatttaataaacagaattatttaccagagcactat

SEQ ID NO: 26281 - DNA, 81 bp, Homo sapiens
  MAP TO Z98884.11; EXPRESSED IN HEART, SIGNAL = 1.5; EXPRESSED IN BRAIN, SIGNAL = 1.4; NT HIT: AJ277662.1, EVALUE 4.10e-02; EST_HUMAN HIT: BE858403.1, EVALUE 6.00e-05
ccctctgtgctccagccacacggtcttctgctccctgaaagccctgcctcagggccttcgcatgtgctattaccaggcctc

SEQ ID NO: 26282 - DNA, 563 bp, Homo sapiens; identical to SEQ ID NO: 9967
  MAP TO AC006427.13; EXPRESSED IN HEART, SIGNAL =  15; NT HIT: gi11431759, EVALUE 9.00e-02; EST_HUMAN HIT: H07020.1, EVALUE 5.30e-01; SWISSPROT HIT: O42105, EVALUE 2.10e+00

SEQ ID NO: 26283 - DNA, 138 bp, Homo sapiens
  MAP TO AC007539.8; EXPRESSED IN HELA, SIGNAL = 1.5; EXPRESSED IN HEART, SIGNAL = 1.3; NT HIT: gi11067424, EVALUE 4.80e+00; EST_HUMAN HIT: BF316805.1, EVALUE 1.80e+00
cctcctcctcctcctcatcctcatcaaaactgcctcttacgttgtattctctatcgtagccatcggcaccaccaaccacacacatgccctaagaccatgagaatcatcgctgattcctcattgtccttcccttctgtg

SEQ ID NO: 26284 - DNA, 117 bp, Homo sapiens
  MAP TO AP000353.1; EXPRESSED IN HEART, SIGNAL = 1.3; NT HIT: AJ271975.1, EVALUE 1.00e+00; EST_HUMAN HIT: AA776820.1, EVALUE 3.80e-01; SWISSPROT HIT: P45054, EVALUE 9.30e+00
agcacaggcagacccagccggtcctctgagggctcagcacaggccattagcacacaaagttgcatgtcagcccatttgaacctagggccacaggatcccaaagatcctgtggaggag

SEQ ID NO: 26285 - DNA, 574 bp, Homo sapiens; identical to SEQ ID NO: 9971
  MAP TO AP000356.1; EXPRESSED IN HEART, SIGNAL = 1.3; NT HIT: L81136.1, EVALUE 9.20e-02; EST_HUMAN HIT: AL048911.1, EVALUE 0.00e+00; SWISSPROT HIT: P08121, EVALUE 1.30e+00

SEQ ID NO: 26286 - DNA, 241 bp, Homo sapiens
  MAP TO AP000354.1; EXPRESSED IN HEART, SIGNAL = 1.6; NT HIT: AF020346.1, EVALUE 1.50e-01; EST_HUMAN HIT: BF057682.1, EVALUE 8.60e-01; SWISSPROT HIT: Q00125, EVALUE 6.80e+00
ctctctgtgtcctggtctgaagagtcttgtcgggctgtagccctaggtaagaagtgtgcaggaagagagtcagcaggacaactccggtctgtgtttggtgggggctggcagggaagcaggtcctggggaagtgatgttcaactgagacctgaagggtgatcaggttagccaggattaggagggaatagaggaggaggtgaggggacagctggtgccaatgcccaaggaactaaaggaactc

SEQ ID NO: 26287 - DNA, 113 bp, Homo sapiens
  MAP TO AC004832.3; EXPRESSED IN HEART, SIGNAL = 1.4; EST_HUMAN HIT: AW070963.1, EVALUE 2.30e-02; NT HIT: gi11417966, EVALUE 1.60e-02; SWISSPROT HIT: O43593, EVALUE 1.80e+00
tagaatttctccatcttctccatgaaggtttggtctgggagcagtacctccacggtgtagctgatgcgtttagaatgaaccaggctgtaggtgttgtaaaacctcaggacatc

SEQ ID NO: 26288 - DNA, 126 bp, Homo sapiens
  MAP TO AC007556.2; EXPRESSED IN HEART, SIGNAL = 1.6; NT HIT: gi11430460, EVALUE 4.00e-65; EST_HUMAN HIT: BF369218.1, EVALUE 6.50e+00; SWISSPROT HIT: P98164, EVALUE 5.00e-21
gtatctattcttcactgattggttccgtcctgctaaaattatgagagcatggagtgacggatctcacctcttgcctgtaataaacactactcttggatggcccaatggcttggccatcgattgggc

SEQ ID NO: 26289 - DNA, 169 bp, Homo sapiens
  MAP TO AC007567.1; EXPRESSED IN HEART, SIGNAL = 1.7; NT HIT: AL163280.2, EVALUE 3.90e-01; EST_HUMAN HIT: AI761429.1, EVALUE 5.00e-26; SWISSPROT HIT: P49502, EVALUE 5.10e+00
cagaacaagctgcaatctgcaataaacaggaagaggcttcatatgtgaggtaaaagcctctcttactccctctctgccaaggacgattgccaatgcagttttgataagtaaataaagaattactggatggccaagaactaccaccctaagcatatccagcagtcagccc

SEQ ID NO: 26290 - DNA, 331 bp, Homo sapiens
  MAP TO AC007281.3; EXPRESSED IN HEART, SIGNAL = 1.3; NT HIT: gi5835904, EVALUE 2.10e-01; EST_HUMAN HIT: BF380722.1, EVALUE 4.70e+00
actctctgatgttccctttcttcaccatttttttttttatctcttccctgctgcttattggagcctttcaaatagaagcactgtggtttcaaaagctatgactatttttgatctttcctctaatctatattatgaggtggtcttggccaggagatctgttctcttgatttacatagtgcactgtaccaaaagtaggaggtttagcagcacaggcaaagacaagtacaaaataaggggtaaacagaaaacagagagtatgggcaggcaccccagtagccttttccacgctgcggtccctagctctgagttcgaagaggctggtgcaaatgag

SEQ ID NO: 26291 - DNA, 255 bp, Homo sapiens
  MAP TO AC008151.1; EXPRESSED IN HEART, SIGNAL = 1.5; NT HIT: AF317901.1, EVALUE 3.90e-02; EST_HUMAN HIT: AU134730.1, EVALUE 1.50e-02; SWISSPROT HIT: P56289, EVALUE 4.00e+00
acagggcttacattccagtagggaaagaaaagcaacaaacaagcaggcaaataaataactctggacagtgcatattatgaagaaaagaaaacagagtctggaacagatactgatgtggaggagcgaggaggtcttttagaaagagaggtccaggaaggctttaatgagaaggtgacatttgtgcagctctcaaatgatgagaagcagccagccgtgggaggatcccagagaagacgattccacaccgaggaagca

SEQ ID NO: 26292 - DNA, 100 bp, Homo sapiens
  MAP TO AC006443.1; EXPRESSED IN BRAIN, SIGNAL = 2.4; EXPRESSED IN ADULT LIVER, SIGNAL = 2.3; EXPRESSED IN PLACENTA, SIGNAL = 2.3; EXPRESSED IN LUNG, SIGNAL = 2.7; EXPRESSED IN HELA, SIGNAL = 2.7; EXPRESSED IN HEART, SIGNAL = 2.4; EXPRESSED IN BONE MARROW, SIGNAL = 2.5; EXPRESSED IN FETAL LIVER, SIGNAL = 2.4; SWISSPROT HIT: P54690, EVALUE 1.90e+00; EST_HUMAN HIT: BE737392.1, EVALUE 3.10e-01
gcccctgtggccttcgagcctctgggtgccgccggcctggcagcaagtgagctcagggacaggggacttccagatgatgtgctcggtgggtggtgtgatt

SEQ ID NO: 26293 - DNA, 128 bp, Homo sapiens
  MAP TO AC004587.1; EXPRESSED IN FETAL LIVER, SIGNAL = 5.3; EXPRESSED IN BRAIN, SIGNAL = 6.2; EXPRESSED IN BONE MARROW, SIGNAL = 5.1; EXPRESSED IN ADULT LIVER, SIGNAL = 5.6; EXPRESSED IN PLACENTA, SIGNAL = 5.9; EXPRESSED IN LUNG, SIGNAL = 6.2; EXPRESSED IN HEART, SIGNAL = 4.7; EXPRESSED IN HELA, SIGNAL = 5.3; NT HIT: gi4506786, EVALUE 9.00e-54; SWISSPROT HIT: P46940, EVALUE 9.00e-19; EST_HUMAN HIT: BF673726.1, EVALUE 1.00e-53
tgcctcccaccacagaactggaggaggggcttaggaatggggtctaccttgccaaactggggaacttcttctctcccaaagtagtgtccctgaaaaaaatctatgatcgagaacagaccagatacaag

SEQ ID NO: 26294 - DNA, 90 bp, Homo sapiens
  MAP TO AC004149.1; EXPRESSED IN LUNG, SIGNAL =  26; EXPRESSED IN FETAL LIVER, SIGNAL =  22; EXPRESSED IN BRAIN, SIGNAL =  25; EXPRESSED IN BONE MARROW, SIGNAL =  24; EXPRESSED IN ADULT LIVER, SIGNAL =  23; EXPRESSED IN HELA, SIGNAL =  23; EXPRESSED IN PLACENTA, SIGNAL =  24; EXPRESSED IN HEART, SIGNAL =  21; EST_HUMAN HIT: AA349997.1, EVALUE 2.80e-01; NT HIT: AF125348.1, EVALUE 2.90e+00
tcacctcacgtccccacatgcgatgagctcatccttctcttggcaccacctgcctctcatcttggccctggctgggacgcaccaacgttt

SEQ ID NO: 26295 - DNA, 135 bp, Homo sapiens
  MAP TO AC006538.1; EXPRESSED IN BRAIN, SIGNAL = 3.4; EXPRESSED IN LUNG, SIGNAL = 2.9; EXPRESSED IN FETAL LIVER, SIGNAL =   4; EXPRESSED IN BONE MARROW, SIGNAL = 3.2; EXPRESSED IN ADULT LIVER, SIGNAL = 3.3; EXPRESSED IN PLACENTA, SIGNAL = 2.5; EXPRESSED IN HEART, SIGNAL = 4.4; EXPRESSED IN HELA, SIGNAL = 3.4; NT HIT: gi11425474, EVALUE 2.00e-58; EST_HUMAN HIT: BE907186.1, EVALUE 2.00e-58; SWISSPROT HIT: O43765, EVALUE 3.00e-08
tcactcctgctggtcgtcgttgctggcgctgggcgtccgactccggatctggctcctgagctgctctatcaactctgggttctgctgctgcatctgctgggcaaactgctggcccctgcggggaagggcacatgg

SEQ ID NO: 26296 - DNA, 248 bp, Homo sapiens
  MAP TO AC004595.1; EXPRESSED IN BRAIN, SIGNAL = 4.7; EXPRESSED IN ADULT LIVER, SIGNAL = 4.5; EXPRESSED IN PLACENTA, SIGNAL = 4.5; EXPRESSED IN BONE MARROW, SIGNAL = 4.2; EXPRESSED IN LUNG, SIGNAL = 4.9; EXPRESSED IN HELA, SIGNAL = 4.3; EXPRESSED IN HEART, SIGNAL = 5.4; EXPRESSED IN FETAL LIVER, SIGNAL = 4.4; EST_HUMAN HIT: AW502401.1, EVALUE 1.00e-111; SWISSPROT HIT: Q02446, EVALUE 1.00e-37; NT HIT: gi11421038, EVALUE 0.00e+00
gcccggaatgttctaaaaggtttatgcggagtgatcatctctccaaacatgtcaaaacgcaccagaataaaaaaggtggtgggacagctcttgccattgttacctcgggagaactggactcatctgttacagaggtgcttggctccccaagaattgtcacagttgcagccatttctcaagattcgaatccagcaactcccaatgtttcaaccaacatggaagaattctgaaaagttatttataacaga

SEQ ID NO: 26297 - DNA, 100 bp, Homo sapiens
  MAP TO AC005659.2; EXPRESSED IN PLACENTA, SIGNAL = 2.7; EXPRESSED IN LUNG, SIGNAL =   3; EXPRESSED IN FETAL LIVER, SIGNAL = 3.2; EXPRESSED IN BRAIN, SIGNAL = 2.3; EXPRESSED IN BONE MARROW, SIGNAL = 2.7; EXPRESSED IN ADULT LIVER, SIGNAL = 2.5; EXPRESSED IN HELA, SIGNAL = 2.8; EXPRESSED IN HEART, SIGNAL = 2.7; EST_HUMAN HIT: AI802702.1, EVALUE 1.20e+00; NT HIT: L78726.1, EVALUE 8.40e-01; SWISSPROT HIT: P28276, EVALUE 7.20e+00
atttgaagagaccctttggggctgtagtgccttcctttctgctggaccccagctgtgaccaagtggccaagtggccgggtgggggccactgtcaggacca

SEQ ID NO: 26298 - DNA, 285 bp, Homo sapiens
  MAP TO AC005846.1; EXPRESSED IN PLACENTA, SIGNAL = 4.1; EXPRESSED IN BONE MARROW, SIGNAL = 3.2; EXPRESSED IN ADULT LIVER, SIGNAL =   4; EXPRESSED IN LUNG, SIGNAL = 4.5; EXPRESSED IN HELA, SIGNAL = 3.8; EXPRESSED IN HEART, SIGNAL = 3.6; EXPRESSED IN FETAL LIVER, SIGNAL = 3.5; EXPRESSED IN BRAIN, SIGNAL = 3.7; NT HIT: AE004535.1, EVALUE 1.70e-01; SWISSPROT HIT: P18733, EVALUE 8.40e+00; EST_HUMAN HIT: BE172081.1, EVALUE 8.00e-17
agccatgatgatgatgaggaggaggaggaggacgagaaggaggaggaggaggaggaggaggagttgttgttagctggctccccatattctcccactgtcccgtgttttccgctggagtgcccctgccttgagaatgggagccggcagaagcaggacaagcacacgccgggctttaagcacaagtttcaacacgcattctttttctccttccccctcgcaactataacccattccttttgggtagccgagcacagcttgaggttagaaggaaaacaaggtgcccag

SEQ ID NO: 26299 - DNA, 198 bp, Homo sapiens
  MAP TO AC005827.3; EXPRESSED IN LUNG, SIGNAL = 1.4; EXPRESSED IN BONE MARROW, SIGNAL = 2.2; EXPRESSED IN PLACENTA, SIGNAL = 1.8; EXPRESSED IN HELA, SIGNAL = 1.9; EXPRESSED IN HEART, SIGNAL = 1.8; EXPRESSED IN FETAL LIVER, SIGNAL = 2.3; EXPRESSED IN BRAIN, SIGNAL = 2.1; EXPRESSED IN ADULT LIVER, SIGNAL = 2.2; NT HIT: AB014593.1, EVALUE 2.00e-03; SWISSPROT HIT: P33748, EVALUE 3.80e+00; EST_HUMAN HIT: AI420684.1, EVALUE 3.00e-03
catgattgccattttagagatgatgaactgaggctcagaaaggtcaagtggcttgcccatggtcacacgggtcttctgatatggagcctgcagctccttcacagtgcataactcagcagcccagaaaatgccttcacaccctcctcccatttgaccattcgtcacaacacatttaagatcagaccctgacggtgacat

SEQ ID NO: 26300 - DNA, 154 bp, Homo sapiens
  MAP TO AC005747.1; EXPRESSED IN BONE MARROW, SIGNAL =   2; EXPRESSED IN ADULT LIVER, SIGNAL = 1.7; EXPRESSED IN PLACENTA, SIGNAL = 1.9; EXPRESSED IN LUNG, SIGNAL =   2; EXPRESSED IN HELA, SIGNAL = 1.8; EXPRESSED IN FETAL LIVER, SIGNAL = 1.7; EXPRESSED IN HEART, SIGNAL = 1.6; EXPRESSED IN BRAIN, SIGNAL = 2.5; EST_HUMAN HIT: BE711134.1, EVALUE 2.00e-74; SWISSPROT HIT: P50532, EVALUE 1.80e+00; NT HIT: AF231997.1, EVALUE 1.00e-68
ctgggcctctcaccttctccaccgaggcatagcggctggcgagctgcttgcgaaggtcggcaatgtggtggtcgcacttcttcatgtctttcttgaagttctcacggaagttcatcaggggcttctccacctcgctgtgaagctgttgggagag

SEQ ID NO: 26301 - DNA, 151 bp, Homo sapiens
  MAP TO AC005549.1; EXPRESSED IN BONE MARROW, SIGNAL = 1.3; EXPRESSED IN PLACENTA, SIGNAL = 1.5; EXPRESSED IN LUNG, SIGNAL = 1.1; EXPRESSED IN FETAL LIVER, SIGNAL = 1.9; EXPRESSED IN ADULT LIVER, SIGNAL = 1.4; EXPRESSED IN HEART, SIGNAL = 1.4; EXPRESSED IN BRAIN, SIGNAL = 1.2; EST_HUMAN HIT: W39456.1, EVALUE 2.00e-22; SWISSPROT HIT: P80098, EVALUE 5.00e-05
gacccacttctgtgtggggtcagcacagatctccttgtccagtttggtcttgaagctgtggagcagaaaggagacagtcagatggaacaccttgagggttcagcctgggagtgtgaccaagtctatgggaaatctgtctagcccatcagcc

SEQ ID NO: 26302 - DNA, 168 bp, Homo sapiens
  MAP TO AC005137.1; EXPRESSED IN HEART, SIGNAL =   2; EXPRESSED IN BRAIN, SIGNAL = 1.9; EXPRESSED IN BONE MARROW, SIGNAL = 1.9; EXPRESSED IN PLACENTA, SIGNAL = 1.8; EXPRESSED IN LUNG, SIGNAL = 2.1; EXPRESSED IN HELA, SIGNAL = 2.2; EXPRESSED IN FETAL LIVER, SIGNAL =   2; EXPRESSED IN ADULT LIVER, SIGNAL =   2; SWISSPROT HIT: Q03692, EVALUE 5.90e-01; EST_HUMAN HIT: AU128785.1, EVALUE 9.00e+00; NT HIT: gi11439587, EVALUE 2.00e-74
ctggagcccgacgctgtctgcctgaccgcctttgatgaggtgggagatgaagagcccacagccaaactccaggccaccacgcacactcaggccgaggccttcggggtgcagacggtccagacgcacctccttcagcttcctgccacacaggagaggtcggtgatggtg

SEQ ID NO: 26303 - DNA, 111 bp, Homo sapiens
  MAP TO AC004666.7; EXPRESSED IN PLACENTA, SIGNAL = 5.3; EXPRESSED IN LUNG, SIGNAL =   6; EXPRESSED IN FETAL LIVER, SIGNAL = 4.8; EXPRESSED IN BONE MARROW, SIGNAL = 5.6; EXPRESSED IN HELA, SIGNAL = 5.1; EXPRESSED IN BRAIN, SIGNAL = 6.1; EXPRESSED IN ADULT LIVER, SIGNAL = 5.2; EXPRESSED IN HEART, SIGNAL = 5.7; SWISSPROT HIT: Q9K2Y1, EVALUE 7.10e+00; NT HIT: gi8923762, EVALUE 1.00e-46; EST_HUMAN HIT: AV695172.1, EVALUE 2.00e-46
gttgctgttgtcttgcagtttatgatccacaatggaaacctccgtgtgaaggccaagttcgaagccagagtcccagctttctactacatcccccaggccaacgactgcctg

SEQ ID NO: 26304 - DNA, 612 bp, Homo sapiens
  MAP TO AC004946.1; EXPRESSED IN PLACENTA, SIGNAL =  10; EXPRESSED IN HELA, SIGNAL =  10; EXPRESSED IN HEART, SIGNAL =  11; EXPRESSED IN FETAL LIVER, SIGNAL =  10; EXPRESSED IN BONE MARROW, SIGNAL =  10; EXPRESSED IN LUNG, SIGNAL =  12; EXPRESSED IN BRAIN, SIGNAL =  11; EXPRESSED IN ADULT LIVER, SIGNAL =  11; SWISSPROT HIT: P17971, EVALUE 5.00e-89; NT HIT: gi9789986, EVALUE 0.00e+00; EST_HUMAN HIT: AI369146.1, EVALUE 2.00e-07
cgtggctgccttttgcaagggcagcggctatcgggtggatgcctgtggcctcggggcctatgccggctcccccgaggcaggagaggaaaaggacccaagatgctctcattgtgctgaatgtgagtggcacccgcttccagacgtggcaggacaccctggaacgttacccagacactctactgggcagttctgagagggactttttctaccacccagaaactcagcagtatttctttgaccgtgacccagacatcttccgccacatcctgaatttctaccgcactgggaagctccactatcctcgccacgagtgcatctctgcttacgatgaagaactggccttctttggcctcatcccggaaatcatcggcgactgctgttatgaggagtacaaggatcgcaggcgagagaacgccgagcgcctgcaggacgacgcggataccgacaccgctggggagagcgccttgcccaccatgactgcaaggcagagggtctggagggccttcgagaacccccacaccagcacgatggccctggtgttctactatgtcacggggtttttcattgccgtctctgtcatcgcgaatgtggtggaaacagtgccgtgcggat

SEQ ID NO: 26305 - DNA, 193 bp, Homo sapiens
  MAP TO AC005553.1; EXPRESSED IN PLACENTA, SIGNAL = 1.6; EXPRESSED IN ADULT LIVER, SIGNAL = 1.6; EXPRESSED IN LUNG, SIGNAL = 1.5; EXPRESSED IN HELA, SIGNAL = 1.7; EXPRESSED IN HEART, SIGNAL = 1.6; EXPRESSED IN FETAL LIVER, SIGNAL = 1.4; EXPRESSED IN BRAIN, SIGNAL = 1.6; EXPRESSED IN BONE MARROW, SIGNAL = 1.6
cccatggtggagagagagagagagagagaaggaagaagaggaagaagaagaagagaagaagaagaggaggaggaggaggaagaagaagaagaagaggaggaggaggagaacaagaatgagaacaagaacaagaacaagaagaacaagaacgagaacaagaacaagaacaggaacaacaagaagaggagaaagt

SEQ ID NO: 26306 - DNA, 477 bp, Homo sapiens; identical to SEQ ID NO: 5717
  MAP TO AC005189.1; EXPRESSED IN LUNG, SIGNAL =   4; EXPRESSED IN HELA, SIGNAL =   5; EXPRESSED IN HEART, SIGNAL = 5.1; EXPRESSED IN FETAL LIVER, SIGNAL = 5.3; EXPRESSED IN BRAIN, SIGNAL = 4.9; EXPRESSED IN BONE MARROW, SIGNAL = 5.1; EXPRESSED IN PLACENTA, SIGNAL = 4.4; EXPRESSED IN ADULT LIVER, SIGNAL = 5.2; SWISSPROT HIT: P01876, EVALUE 4.40e-01; NT HIT: AL096807.1, EVALUE 7.60e-02; EST_HUMAN HIT: AW861059.1, EVALUE 7.00e-03

SEQ ID NO: 26307 - DNA, 216 bp, Homo sapiens
  MAP TO AC005160.1; EXPRESSED IN LUNG, SIGNAL = 1.4; EXPRESSED IN FETAL LIVER, SIGNAL = 1.3; EXPRESSED IN BONE MARROW, SIGNAL = 1.4; EXPRESSED IN PLACENTA, SIGNAL = 1.3; EXPRESSED IN BRAIN, SIGNAL = 1.4; EXPRESSED IN ADULT LIVER, SIGNAL = 1.3; EXPRESSED IN HEART, SIGNAL = 1.4; NT HIT: AP000002.1, EVALUE 8.00e-03; SWISSPROT HIT: P29051, EVALUE 3.60e+00; EST_HUMAN HIT: BE798974.1, EVALUE 7.60e-01
gtagcacaaggacccccacctccttcatcctcgggggctgctgcgaggccttctcagcgaagcattggccaggctctgggaagagccgatgaccggctgtgctttccagatttggaaacttggctcatacttttccttaagcagcctccagcttctctgcgtatttcaaatcatcttgtcattcaatgcccagagcaaacgccgtggtcttgctga

SEQ ID NO: 26308 - DNA, 80 bp, Homo sapiens
  MAP TO AC004853.1; EXPRESSED IN PLACENTA, SIGNAL = 3.7; EXPRESSED IN ADULT LIVER, SIGNAL = 4.2; EXPRESSED IN LUNG, SIGNAL =   5; EXPRESSED IN HEART, SIGNAL = 3.5; EXPRESSED IN FETAL LIVER, SIGNAL = 3.7; EXPRESSED IN BRAIN, SIGNAL = 3.9; EXPRESSED IN HELA, SIGNAL =   4; EXPRESSED IN BONE MARROW, SIGNAL = 3.6; NT HIT: AF179818.1, EVALUE 5.00e-23; EST_HUMAN HIT: AW293796.1, EVALUE 3.80e+00
atggaaacaattatcaccttccagcttcctgtgtcacggtgttatcaatcactttgtctgtgagaccttagcagtgctac

SEQ ID NO: 26309 - DNA, 75 bp, Homo sapiens
  MAP TO AC004216.1; EXPRESSED IN PLACENTA, SIGNAL = 3.6; EXPRESSED IN LUNG, SIGNAL = 1.8; EXPRESSED IN HELA, SIGNAL = 2.1; EXPRESSED IN FETAL LIVER, SIGNAL = 1.9; EXPRESSED IN ADULT LIVER, SIGNAL = 1.7; EXPRESSED IN HEART, SIGNAL =   2; EXPRESSED IN BRAIN, SIGNAL = 2.2; EXPRESSED IN BONE MARROW, SIGNAL = 1.8; NT HIT: AE001039.1, EVALUE 1.50e-01; EST_HUMAN HIT: AW338872.1, EVALUE 8.70e-01
gattttccagaaagtggggctggttatgtttcccatcactgagatgcttttgaacaataggcatcaagatgacag

SEQ ID NO: 26310 - DNA, 216 bp, Homo sapiens
  MAP TO AC004874.1; EXPRESSED IN LUNG, SIGNAL = 3.7; EXPRESSED IN BRAIN, SIGNAL = 3.8; EXPRESSED IN ADULT LIVER, SIGNAL =   3; EXPRESSED IN PLACENTA, SIGNAL = 3.3; EXPRESSED IN HELA, SIGNAL = 3.2; EXPRESSED IN HEART, SIGNAL = 2.8; EXPRESSED IN BONE MARROW, SIGNAL = 3.3; EXPRESSED IN FETAL LIVER, SIGNAL = 3.3; SWISSPROT HIT: P24939, EVALUE 9.30e-01; NT HIT: gi11141878, EVALUE 8.00e-03; EST_HUMAN HIT: BF363071.1, EVALUE 1.00e-79
tgatcctcccctccattgacaacatcaaacaggacaactttgaggtgcagcggtacgagaactcggcccacgggtacagctgggagctgtggtgcatgtacatcagccccccaaaagactggtgggacgccggagacccttctctccccatcaggtctgtggctggtgagcctggcggccaacgagcccccaaattcaagggtaaaaaggagctac

SEQ ID NO: 26311 - DNA, 301 bp, Homo sapiens
  MAP TO AC005598.6; EXPRESSED IN BONE MARROW, SIGNAL =  11; EXPRESSED IN PLACENTA, SIGNAL =  11; EXPRESSED IN LUNG, SIGNAL =  13; EXPRESSED IN HELA, SIGNAL =  11; EXPRESSED IN HEART, SIGNAL =  10; EXPRESSED IN FETAL LIVER, SIGNAL =  12; EXPRESSED IN ADULT LIVER, SIGNAL =  12; EXPRESSED IN BRAIN, SIGNAL =  12; EST_HUMAN HIT: AU126137.1, EVALUE 2.00e-14; NT HIT: gi11437150, EVALUE 1.00e-14; SWISSPROT HIT: Q9ZCA6, EVALUE 1.80e+00
ttgtcatagtctgtttatcctctttatcttctatgctgtttttaaaagcaatacaaacagaagctagagtaaccagtgttttgtctgacacattcttcttgataaactttatgaggtgtggtttatattcgtctgtacctttagtcacatgcctgcttcttagcacagaggtgatgaaaccacccacagctttgttgggggtattatatttctttatttttttgttttttagcccatcacaacattgatagctgatgttgaaactgcttgaggtaagtttgatgctttcattgaagagaat

SEQ ID NO: 26312 - DNA, 202 bp, Homo sapiens
  MAP TO AC000111.1; EXPRESSED IN PLACENTA, SIGNAL = 5.4; EXPRESSED IN HELA, SIGNAL = 4.5; EXPRESSED IN HEART, SIGNAL = 4.4; EXPRESSED IN FETAL LIVER, SIGNAL = 3.2; EXPRESSED IN BRAIN, SIGNAL = 8.1; EXPRESSED IN ADULT LIVER, SIGNAL = 4.3; EXPRESSED IN LUNG, SIGNAL = 6.7; EXPRESSED IN BONE MARROW, SIGNAL = 3.6; SWISSPROT HIT: P13569, EVALUE 2.00e-21; NT HIT: M55112.1, EVALUE 1.00e-110; EST_HUMAN HIT: AI609591.1, EVALUE 3.00e-31
actgactcggaaggcagcctatgtgagatacttcaatagctcagccttcttcttctcagggttctttgtggtgtttttatctgtgcttccctatgcactaatcaaaggaatcatcctccggaaaatattcaccaccatctcattctgcattgttctgcgcatggcggtcactcggcaatttccctgggctgtacaaacatgg

SEQ ID NO: 26313 - DNA, 123 bp, Homo sapiens
  MAP TO AC003117.1; EXPRESSED IN ADULT LIVER, SIGNAL = 6.8; EXPRESSED IN PLACENTA, SIGNAL = 6.9; EXPRESSED IN LUNG, SIGNAL =   8; EXPRESSED IN HELA, SIGNAL = 7.2; EXPRESSED IN HEART, SIGNAL = 7.2; EXPRESSED IN BRAIN, SIGNAL = 8.1; EXPRESSED IN FETAL LIVER, SIGNAL = 7.2; EXPRESSED IN BONE MARROW, SIGNAL = 7.8; NT HIT: AL163300.2, EVALUE 3.00e-38; SWISSPROT HIT: P72785, EVALUE 4.10e+00; EST_HUMAN HIT: AI796248.1, EVALUE 6.00e-31
tcctgggttcccttcccctgagtccaatcctaagccaaccagtttaaggtttgggaaattaacttttcccagttcagaggatgcatccaaggggagtgtcccatagtatggagacacaattac

SEQ ID NO: 26314 - DNA, 96 bp, Homo sapiens
  MAP TO AC002087.1; EXPRESSED IN LUNG, SIGNAL = 2.9; EXPRESSED IN FETAL LIVER, SIGNAL = 3.1; EXPRESSED IN BRAIN, SIGNAL = 3.1; EXPRESSED IN BONE MARROW, SIGNAL = 3.2; EXPRESSED IN PLACENTA, SIGNAL = 2.9; EXPRESSED IN HELA, SIGNAL =   3; EXPRESSED IN HEART, SIGNAL = 2.9; EXPRESSED IN ADULT LIVER, SIGNAL = 2.8; SWISSPROT HIT: Q24472, EVALUE 1.90e+00; EST_HUMAN HIT: AA582690.1, EVALUE 1.00e-25; NT HIT: AJ277661.1, EVALUE 4.00e-18
ggctgtggagatctgaagaaacttacaatcatggcagacggggaagaaaatatgtccttcttcacatggtggcaggaaagagaagaatgagcaaaa

SEQ ID NO: 26315 - DNA, 180 bp, Homo sapiens
  MAP TO AC005189.1; EXPRESSED IN PLACENTA, SIGNAL = 3.2; EXPRESSED IN ADULT LIVER, SIGNAL = 2.4; EXPRESSED IN BONE MARROW, SIGNAL = 5.5; EXPRESSED IN BRAIN, SIGNAL = 2.2; EXPRESSED IN FETAL LIVER, SIGNAL =   2; EXPRESSED IN HEART, SIGNAL = 2.1; EXPRESSED IN LUNG, SIGNAL = 2.7; EXPRESSED IN HELA, SIGNAL =   2; NT HIT: S82504.1, EVALUE 4.20e-01
gtacggactgctggggctttggctcttcgaagactgcagctcccccatgctctagaagagtcagaaggccttgggttcccctcctgcttctgctcctggttagtcaaggctatcactgcctattatgtgctaggcattataggagaaatcatggagaacgaattcctcaccttccaatga

SEQ ID NO: 26316 - DNA, 98 bp, Homo sapiens
  MAP TO AC006137.1; EXPRESSED IN ADULT LIVER, SIGNAL = 4.2; EXPRESSED IN HELA, SIGNAL = 4.4; EXPRESSED IN HEART, SIGNAL = 3.6; EXPRESSED IN FETAL LIVER, SIGNAL = 4.2; EXPRESSED IN BRAIN, SIGNAL = 4.7; EXPRESSED IN BONE MARROW, SIGNAL = 4.4; EXPRESSED IN PLACENTA, SIGNAL = 4.5; EXPRESSED IN LUNG, SIGNAL = 4.8; SWISSPROT HIT: Q9ZWX1, EVALUE 2.50e+00; NT HIT: Z12126.1, EVALUE 8.20e-01
ctgctgatggtccttctgtcactacgtagtcgctccgacgccaggaaagtgcggtggtggccattttggaactgggcaactttcacttcgccaatcat

SEQ ID NO: 26317 - DNA, 98 bp, Homo sapiens
  MAP TO AC000057.1; EXPRESSED IN PLACENTA, SIGNAL = 1.9; EXPRESSED IN ADULT LIVER, SIGNAL = 2.6; EXPRESSED IN LUNG, SIGNAL = 1.6; EXPRESSED IN HEART, SIGNAL = 1.9; EXPRESSED IN FETAL LIVER, SIGNAL = 1.6; EXPRESSED IN BRAIN, SIGNAL = 4.9; EXPRESSED IN BONE MARROW, SIGNAL = 1.6; EST_HUMAN HIT: AV734585.1, EVALUE 1.20e+00
catctggcaaaggcagcagtggcagtggcagcagtagcagcagcacctgtaatacccttacgtatttcttttttaaggagatttggaaggagatccac

SEQ ID NO: 26318 - DNA, 96 bp, Homo sapiens
  MAP TO AC004802.1; EXPRESSED IN PLACENTA, SIGNAL = 1.3; EXPRESSED IN HEART, SIGNAL = 1.3; EXPRESSED IN BONE MARROW, SIGNAL = 1.4; EXPRESSED IN ADULT LIVER, SIGNAL = 1.4; EXPRESSED IN LUNG, SIGNAL = 1.2; EXPRESSED IN FETAL LIVER, SIGNAL = 1.2; EXPRESSED IN BRAIN, SIGNAL = 1.4; SWISSPROT HIT: P79400, EVALUE 2.00e-05; NT HIT: L09731.1, EVALUE 2.00e-47; EST_HUMAN HIT: AA090609.1, EVALUE 4.70e+00
tggaaatttggccaactcctgtgcaacatctggctgtcttctagcatcacgtgctacatggcctccaaccgatatttctgtctgttgctctgacca

SEQ ID NO: 26319 - DNA, 178 bp, Homo sapiens
  MAP TO AC021498.4; EXPRESSED IN BONE MARROW, SIGNAL = 1.5; EXPRESSED IN LUNG, SIGNAL = 1.2; EXPRESSED IN ADULT LIVER, SIGNAL = 1.4; EXPRESSED IN PLACENTA, SIGNAL =   1; EXPRESSED IN HEART, SIGNAL = 1.3; EXPRESSED IN FETAL LIVER, SIGNAL = 3.2; EXPRESSED IN BRAIN, SIGNAL = 1.9; EST_HUMAN HIT: AL041184.2, EVALUE 9.60e+00; SWISSPROT HIT: O59295, EVALUE 3.90e+00; NT HIT: X52046.1, EVALUE 1.60e+00
cgatgtatgtgggctttcctatagtcatttcagtagatgctatagatattatggtatttgggaaactatatttcaatgtaaagaaggcaaggtgtcatgctttgacattgatttggtgggtaagagtgagaaagtgcaagtgtctatgggaatacacaacatacttaatacctttgaa

SEQ ID NO: 26320 - DNA, 84 bp, Homo sapiens
  MAP TO AC009635.4; EXPRESSED IN ADULT LIVER, SIGNAL = 2.2; EXPRESSED IN LUNG, SIGNAL =   2; EXPRESSED IN BONE MARROW, SIGNAL = 2.4; EXPRESSED IN BRAIN, SIGNAL = 2.3; EXPRESSED IN FETAL LIVER, SIGNAL = 2.2; EXPRESSED IN HEART, SIGNAL =   2; EXPRESSED IN HELA, SIGNAL = 2.7; EXPRESSED IN PLACENTA, SIGNAL = 1.8; EST_HUMAN HIT: BE147331.1, EVALUE 1.00e+00
gacttgggtatgaattcttacactctagtccagaagacaaatcttaatagcaaagacaatgtccactctgacaactggagcact

SEQ ID NO: 26321 - DNA, 204 bp, Homo sapiens
  MAP TO AL133395.14; EXPRESSED IN BONE MARROW, SIGNAL = 2.4; EXPRESSED IN PLACENTA, SIGNAL = 2.4; EXPRESSED IN HELA, SIGNAL =   4; EXPRESSED IN HEART, SIGNAL = 2.1; EXPRESSED IN LUNG, SIGNAL = 1.6; EXPRESSED IN ADULT LIVER, SIGNAL = 1.8; EXPRESSED IN FETAL LIVER, SIGNAL = 2.2; EXPRESSED IN BRAIN, SIGNAL = 2.2; EST_HUMAN HIT: AI952128.1, EVALUE 2.80e+00; SWISSPROT HIT: O60479, EVALUE 1.70e+00
gggaatgctcgagacactcctgaaggacatttcctttttggctgtaactttgaagcatatggagtgtacacagagagacctggctcagttctcttggtagatccagatgtcttggaagagcatcccaaagacatcaccagtaatgaggactgtgccacatgtggccgtgttaaactctgcgatgaatttctcaccaagggttga

SEQ ID NO: 26322 - DNA, 205 bp, Homo sapiens
  MAP TO AL162260.1; EXPRESSED IN ADULT LIVER, SIGNAL = 2.6; EXPRESSED IN HELA, SIGNAL = 2.8; EXPRESSED IN LUNG, SIGNAL = 2.7; EXPRESSED IN PLACENTA, SIGNAL = 2.1; EXPRESSED IN FETAL LIVER, SIGNAL = 2.6; EXPRESSED IN BONE MARROW, SIGNAL = 2.5; EXPRESSED IN HEART, SIGNAL = 2.1; EXPRESSED IN BRAIN, SIGNAL = 2.3; SWISSPROT HIT: Q04706, EVALUE 2.20e+00; EST_HUMAN HIT: H23072.1, EVALUE 2.80e+00
ttacaagtgagtatccctctgttgctctcctttggcacaaatattcagatgaaaaacatccacataaatgagcggtgtcttaatctgaagaaatgtgctctgcatcccatcaataggagctctaattcccctatggttcaggacactccagtgactcaaatgacctttctgccaaaggatctgcatcacttcctttgttcctgtt

SEQ ID NO: 26323 - DNA, 135 bp, Homo sapiens
  MAP TO AL139245.2; EXPRESSED IN PLACENTA, SIGNAL = 2.5; EXPRESSED IN HELA, SIGNAL = 3.9; EXPRESSED IN HEART, SIGNAL =   2; EXPRESSED IN FETAL LIVER, SIGNAL = 3.3; EXPRESSED IN BONE MARROW, SIGNAL = 3.2; EXPRESSED IN LUNG, SIGNAL = 1.9; EXPRESSED IN ADULT LIVER, SIGNAL = 1.9; EXPRESSED IN BRAIN, SIGNAL = 2.2; SWISSPROT HIT: P18080, EVALUE 2.40e+00; NT HIT: gi7656876, EVALUE 2.00e-33; EST_HUMAN HIT: AU158595.1, EVALUE 1.00e-35
gaaaaccctgttgagaggttggccgatgaccgctctaactgcttcctgctgaactggggcatagtaggggtcatgcagttgagatttcctcaggaggggtgccttcaatgtcatcaacatcagagcatgggctag

SEQ ID NO: 26324 - DNA, 169 bp, Homo sapiens
  MAP TO AC013550.4; EXPRESSED IN HEART, SIGNAL = 3.5; SWISSPROT HIT: P54296, EVALUE 9.00e-27; EST_HUMAN HIT: AI039870.1, EVALUE 1.50e-01
cttgtaaccttctgaggtccaaggggtcaagtgcagccaccgcatcagagaccctggagggtcggctgatgcccgcactgttcactgccctcactcggaatatgtaagaccttccttcaaaaagccctgtgaccgggtatttgcagattttcaccggtgcatcattgca

SEQ ID NO: 26325 - DNA, 270 bp, Homo sapiens
  MAP TO AC008567.3; EXPRESSED IN PLACENTA, SIGNAL =  13; EXPRESSED IN BONE MARROW, SIGNAL =  26; EXPRESSED IN HELA, SIGNAL =  21; EXPRESSED IN LUNG, SIGNAL =  17; EXPRESSED IN HEART, SIGNAL =  28; EXPRESSED IN BRAIN, SIGNAL =  18; EXPRESSED IN FETAL LIVER, SIGNAL =  29; EXPRESSED IN ADULT LIVER, SIGNAL = 8.9; SWISSPROT HIT: O42161, EVALUE 3.00e-26; EST_HUMAN HIT: BE934350.1, EVALUE 2.00e-45; NT HIT: X63432.1, EVALUE 3.00e-43
ggtttttgtcaagaaaggttataatgtaagtcaccgtccgcctagaagtatttgtggtagggtggacaatactgaggccggactcctcgtattcctgcttgctgatccacatctgctggaagggggacagcgagaccaagatggagccactgatccatacagaatatttgtgctcaggaggagcaatgatgttgatcttcttcatgctgggagccatggtggtgatctcctcctccatcctgtcagcaataccagcgtacatggtggtgt

SEQ ID NO: 26326 - DNA, 85 bp, Homo sapiens; identical to SEQ ID NO: 23674
  MAP TO AL139105.2; EXPRESSED IN BRAIN, SIGNAL = 1.3; EXPRESSED IN HELA, SIGNAL = 1.9; EXPRESSED IN FETAL LIVER, SIGNAL = 2.5; EXPRESSED IN HEART, SIGNAL = 2.3

SEQ ID NO: 26327 - DNA, 112 bp, Homo sapiens
  MAP TO AL121595.3; EXPRESSED IN BRAIN, SIGNAL = 2.4; EXPRESSED IN ADULT LIVER, SIGNAL = 2.4; EXPRESSED IN HELA, SIGNAL = 2.5; EXPRESSED IN PLACENTA, SIGNAL = 2.9; EXPRESSED IN LUNG, SIGNAL =   2; EXPRESSED IN HEART, SIGNAL = 2.2; EXPRESSED IN FETAL LIVER, SIGNAL = 2.4; EXPRESSED IN BONE MARROW, SIGNAL = 1.8; NT HIT: Z94828.1, EVALUE 1.60e-02; EST_HUMAN HIT: AW854897.1, EVALUE 3.60e-01
ctctctttttatctttatctcttcctttctctcctatttgaaatctgcatcttaaagactgccaccagctgctctcacaggcaattgctttgctaagtaggccacaaggatc

SEQ ID NO: 26328 - DNA, 279 bp, Homo sapiens
  MAP TO AC010352.4; EXPRESSED IN HELA, SIGNAL = 4.5; EXPRESSED IN BRAIN, SIGNAL = 3.5; EXPRESSED IN ADULT LIVER, SIGNAL = 2.7; EXPRESSED IN BONE MARROW, SIGNAL = 2.4; EXPRESSED IN FETAL LIVER, SIGNAL = 3.8; EXPRESSED IN LUNG, SIGNAL = 7.2; EXPRESSED IN HEART, SIGNAL = 3.8; EXPRESSED IN PLACENTA, SIGNAL = 2.7; NT HIT: gi6005921, EVALUE 0.00e+00; EST_HUMAN HIT: BF002333.1, EVALUE 0.00e+00; SWISSPROT HIT: O75962, EVALUE 3.00e-32
ggtgaaagagaatgagaaagaacttctggataggtcaaactctaggcagaagcctgctctgcagaaagtttttaatgctacggataggtcgaacatcattctggtgtttgcgccgctcaatgaaggaagtcagtctggacgtgtcgaggacgcccgtgcttctgccgttgccggcctgcagccactgctcctggagggccagcgcagccgagggacgcttggcggggtcctcctgcaggaggaagcacacgaactccttggccttctggctcactcctt

SEQ ID NO: 26329 - DNA, 306 bp, Homo sapiens
  MAP TO AL158823.1; EXPRESSED IN ADULT LIVER, SIGNAL =  14; EXPRESSED IN PLACENTA, SIGNAL = 8.6; EXPRESSED IN BONE MARROW, SIGNAL =  57; EXPRESSED IN FETAL LIVER, SIGNAL =  23; EXPRESSED IN HELA, SIGNAL =  16; EXPRESSED IN LUNG, SIGNAL =  34; EXPRESSED IN HEART, SIGNAL =  20; EXPRESSED IN BRAIN, SIGNAL =  16; NT HIT: gi11432694, EVALUE 0.00e+00; EST_HUMAN HIT: BF309120.1, EVALUE 0.00e+00; SWISSPROT HIT: O09167, EVALUE 1.00e-51
atgacgaacacaaagggaaagaggagaggctcccgacatatgttctctaggccttttagaaaacatggagttgttcctttggccacgtatatgcgaatctataagaaaggtgatattgtagacatcaagggaatgggtactgttcaaaaaggaatgccccacaagtgttaccatggcaaaactggaagagtctacaatgttacccagcatgctgttggtattgtaaacaaacaagttaagggcaagattcttgccaagagaattaatgtgcatattgagcacattaagcactctgagccgagatag

SEQ ID NO: 26330 - DNA, 195 bp, Homo sapiens
  MAP TO AL121953.10; EXPRESSED IN HEART, SIGNAL = 2.9; NT HIT: AL161562.2, EVALUE 4.60e-01; EST_HUMAN HIT: AI312025.1, EVALUE 2.00e-93
acacacagacgtctgaccctgcacctccaagttcccaaagatattgtacgtagaaaaaacaaacctttttttattgacattcacactcaacactgaacactccttgccaccaactgtgtgggttttctcccacactggccaattctccaataccaactggatatcatacaattcaattctggcattaatcggcat

SEQ ID NO: 26331 - DNA, 258 bp, Homo sapiens
  MAP TO AB016897.1; EXPRESSED IN LUNG, SIGNAL = 1.8; EXPRESSED IN HEART, SIGNAL = 1.6; EXPRESSED IN FETAL LIVER, SIGNAL = 1.3; EXPRESSED IN HELA, SIGNAL = 1.4; EXPRESSED IN PLACENTA, SIGNAL = 1.2; NT HIT: gi11418060, EVALUE 6.20e-01; EST_HUMAN HIT: AA089819.1, EVALUE 2.30e-01; SWISSPROT HIT: P09059, EVALUE 8.10e-01
cccagatccagggagatggtgctggctctttggtggctgtggagtgtccagacagatgagctggaatccttcagtttctctgcctctcctgtcaagttggggtagcactgcttggactcttgccccggctgcattgaccaagccttgatgttgccttgaccaagccttgatgttgccttctttgccaaaccactggccacgatgttgctggcacagcagcccaaaggcagctgcttgtccatctcagcctgacccagc

SEQ ID NO: 26332 - DNA, 151 bp, Homo sapiens
  MAP TO AC004624.6; EXPRESSED IN PLACENTA, SIGNAL = 3.5; EXPRESSED IN BRAIN, SIGNAL = 4.3; EXPRESSED IN HELA, SIGNAL = 3.2; EXPRESSED IN BONE MARROW, SIGNAL = 2.5; EXPRESSED IN LUNG, SIGNAL = 5.8; EXPRESSED IN HEART, SIGNAL = 3.6; EXPRESSED IN FETAL LIVER, SIGNAL =   2; EXPRESSED IN ADULT LIVER, SIGNAL = 2.7; SWISSPROT HIT: P22520, EVALUE 5.20e+00; NT HIT: gi11056053, EVALUE 1.40e+00; EST_HUMAN HIT: BF030207.1, EVALUE 5.10e-01
aaataagctgaagcagcaggagagggtttcccttagtaagcagcattcggatttgactgcctggcaccggcatgacatcttaatcaatcttcccacagggctattcacgattcagcttggtacccacattcccgggggaccccacagctgc

SEQ ID NO: 26333 - DNA, 536 bp, Homo sapiens
  MAP TO AC005300.10; EXPRESSED IN LUNG, SIGNAL = 1.3; EXPRESSED IN HEART, SIGNAL = 1.8; EXPRESSED IN HELA, SIGNAL = 1.6; NT HIT: AL163300.2, EVALUE 3.40e-01; SWISSPROT HIT: Q05860, EVALUE 4.00e-04; EST_HUMAN HIT: BF056033.1, EVALUE 3.20e-02
ccaagggaatggtggctccacacagagtcaagagctgcctgggggcgggggttcaaggagccgaggttgagagctgcagtgggagccaggagctgtcccctcactaagggagaaatgcccttcctcctcccgggagtcggctcttgcctctgtggcatctcaggaaatgggcccttgggagtccacctcctctgctcatttcccaccagccccttgcctcactcctgtctccccagcctaggggcctcccacacccctccaggctgcggccattgtgtgtcctttgtctctgggcagtccctcagatccccgcattcccccaggcctgcagaacagtactgctgctctctcatctccagggtgctgccccgctgcctgggcaggcgcagtgggggagcaggcagtgaggctctccactggtctttgctcttctgtttcctctgctgcccccatgaagcctggcacgtcacacagccccccacaacctgcacctggccaggccactcactctgctcgggcagtttccctgactgcct

SEQ ID NO: 26334 - DNA, 144 bp, Homo sapiens
  MAP TO AC006427.13; EXPRESSED IN PLACENTA, SIGNAL = 2.6; EXPRESSED IN LUNG, SIGNAL = 3.6; EXPRESSED IN ADULT LIVER, SIGNAL = 3.6; EXPRESSED IN FETAL LIVER, SIGNAL = 4.6; EXPRESSED IN BRAIN, SIGNAL = 3.7; EXPRESSED IN HELA, SIGNAL = 2.6; EXPRESSED IN BONE MARROW, SIGNAL = 5.7; EXPRESSED IN HEART, SIGNAL = 1.8; NT HIT: AF275366.1, EVALUE 8.20e-02; EST_HUMAN HIT: T70222.1, EVALUE 1.20e-01; SWISSPROT HIT: P40465, EVALUE 6.90e+00
ctcgcagcagaggccagttcaacaactcattcttgtatctgcttcctgatctactcccaaatttctgctccctgaaatcattttccagaggattagcccatatgagaaccttcgtcttgggctttgcttttggagaacccaggc

SEQ ID NO: 26335 - DNA, 184 bp, Homo sapiens
  MAP TO AC006548.19; EXPRESSED IN HEART, SIGNAL = 2.3; EXPRESSED IN LUNG, SIGNAL = 2.1; EXPRESSED IN FETAL LIVER, SIGNAL = 2.6; EXPRESSED IN ADULT LIVER, SIGNAL = 2.5; EXPRESSED IN HELA, SIGNAL =   2; EXPRESSED IN PLACENTA, SIGNAL = 4.8; EXPRESSED IN BRAIN, SIGNAL = 2.2; EXPRESSED IN BONE MARROW, SIGNAL = 2.1; NT HIT: AL163284.2, EVALUE 1.00e-38; EST_HUMAN HIT: BE147237.1, EVALUE 3.00e-37; SWISSPROT HIT: P44579, EVALUE 2.30e+00
agaaaatatcttgatttcatttcctttttctttatcaggtgacataagagttattgacttcatatcagcatttaagcattgttcactttatgtaatagtatttgggttggcgattggtgcgtttccggttgtaggaaggatagttatgttaggtgtaattacgaccacattattgtctttattt

SEQ ID NO: 26336 - DNA, 230 bp, Homo sapiens
  MAP TO AC006548.19; EXPRESSED IN HEART, SIGNAL = 1.5; EXPRESSED IN LUNG, SIGNAL = 1.6; EXPRESSED IN BONE MARROW, SIGNAL =   4; EXPRESSED IN ADULT LIVER, SIGNAL = 2.2; EXPRESSED IN FETAL LIVER, SIGNAL = 2.8; EXPRESSED IN HELA, SIGNAL =   2; EXPRESSED IN PLACENTA, SIGNAL = 2.2; EXPRESSED IN BRAIN, SIGNAL =   2; NT HIT: K02099.1, EVALUE 4.00e-05; EST_HUMAN HIT: H55371.1, EVALUE 2.00e-20; SWISSPROT HIT: Q15049, EVALUE 2.40e+00
gtcatttatttcccctgggttgcctacactcgcttcttcccactcccctatgaaggacaatataagcctctggacctcactaggtcagggcatgtccctgcttgcactatccatgacactttcctcttttactctttagcaatgagggaatgtcatccttacccagatgccagccacctgtctcacatccaggacagagagtctccatctcctctccagcaaatacccat

SEQ ID NO: 26337 - DNA, 199 bp, Homo sapiens
  MAP TO AC007092.4; EXPRESSED IN PLACENTA, SIGNAL = 1.4; EXPRESSED IN HELA, SIGNAL = 1.6; EXPRESSED IN HEART, SIGNAL = 1.3; EXPRESSED IN LUNG, SIGNAL = 1.2; EXPRESSED IN ADULT LIVER, SIGNAL =   2; NT HIT: Z35861.1, EVALUE 1.20e-01; EST_HUMAN HIT: Z20377.1, EVALUE 1.00e-11; SWISSPROT HIT: O43524, EVALUE 2.20e+00
catctgatatgtgaatgcagcttatctccccataggtagccaggaacagggtgcacagtcaaggcaaccccaaaaatggcctctctcccggccgcgcctgcaaagtcgtcctgagcgtcctgaacgttcctcagctggaggggcttttccctactcagtgtctggaccattgccaagaagatctgtccagctgtaagcc

SEQ ID NO: 26338 - DNA, 173 bp, Homo sapiens
  MAP TO AC007106.6; EXPRESSED IN FETAL LIVER, SIGNAL = 6.9; EXPRESSED IN PLACENTA, SIGNAL = 8.1; EXPRESSED IN HEART, SIGNAL = 2.2; EXPRESSED IN BONE MARROW, SIGNAL = 3.4; EXPRESSED IN BRAIN, SIGNAL = 2.1; EXPRESSED IN HELA, SIGNAL = 2.4; EXPRESSED IN LUNG, SIGNAL = 3.1; EXPRESSED IN ADULT LIVER, SIGNAL = 5.4; EST_HUMAN HIT: BE157617.1, EVALUE 6.00e-01; NT HIT: Y09044.1, EVALUE 1.60e+00; SWISSPROT HIT: P38356, EVALUE 1.70e+00
tcctcctccttcatcacgaggaagtctaatgtcgcacagtaaatggttttctctctcacatttctccatttctttttcatatttcttcttctctcagtttctgtatttttagagcactttataccagtatacttcactctagccacaaagggaagctggggaaaaaaagaaga

SEQ ID NO: 26339 - DNA, 163 bp, Homo sapiens
  MAP TO AC007253.2; EXPRESSED IN FETAL LIVER, SIGNAL = 1.6; EXPRESSED IN ADULT LIVER, SIGNAL = 1.9; EXPRESSED IN PLACENTA, SIGNAL = 4.6; EXPRESSED IN BRAIN, SIGNAL = 1.9; EXPRESSED IN HELA, SIGNAL = 1.8; EXPRESSED IN BONE MARROW, SIGNAL = 2.6; EXPRESSED IN LUNG, SIGNAL = 2.8; EXPRESSED IN HEART, SIGNAL = 1.4; NT HIT: AL163247.2, EVALUE 1.00e-28; EST_HUMAN HIT: BE463763.1, EVALUE 2.00e-22
actggaaaggctgccagttttgagtggggtctacaacaggagaaggctctgcagcaggtccaggctgctctgccgcttgcgccatatgatccagcagatccaatggtgcttgaggtgtcagtggcagacagggatgctgtttggagcctttggcagcccgcca

SEQ ID NO: 26340 - DNA, 98 bp, Homo sapiens
  MAP TO AC007462.2; EXPRESSED IN ADULT LIVER, SIGNAL =  74; EXPRESSED IN HELA, SIGNAL =  12; EXPRESSED IN PLACENTA, SIGNAL =  30; EXPRESSED IN BRAIN, SIGNAL =  28; EXPRESSED IN LUNG, SIGNAL =  11; EXPRESSED IN HEART, SIGNAL =  29; EXPRESSED IN BONE MARROW, SIGNAL =  17; EXPRESSED IN FETAL LIVER, SIGNAL =  47; NT HIT: AF152238.1, EVALUE 1.30e-02; EST_HUMAN HIT: BE074715.1, EVALUE 3.10e-01
gtgattagatggcttgagctcttcaaggtggtgacatttgtgccttggagcagcaagtacctgcaggtgctcagagctgagttctcaaaggtcaggtg

SEQ ID NO: 26341 - DNA, 214 bp, Homo sapiens
  MAP TO AC007462.2; EXPRESSED IN HEART, SIGNAL = 1.4; EST_HUMAN HIT: BE909689.1, EVALUE 7.50e-01; NT HIT: AB021684.1, EVALUE 3.20e-02
gaggttgactagtatgatgttagttatcaatattcctaacctgtctgtgggaagttctctcctccctctcccctcctcatgccccactcacactcccctacccacaatacacagactccttaggcctctcaccactggcttccccttagagttctgggactgtaaaaagaattcaaacactataagggcctgtactagtgtaccattctttctc

SEQ ID NO: 26342 - DNA, 148 bp, Homo sapiens
  MAP TO AC007539.8; EXPRESSED IN ADULT LIVER, SIGNAL =   2; EXPRESSED IN FETAL LIVER, SIGNAL = 5.9; EXPRESSED IN HELA, SIGNAL = 2.2; EXPRESSED IN PLACENTA, SIGNAL = 2.8; EXPRESSED IN LUNG, SIGNAL =   2; EXPRESSED IN HEART, SIGNAL = 1.4; NT HIT: AJ005586.1, EVALUE 8.50e-02; EST_HUMAN HIT: AI219763.1, EVALUE 5.00e-01; SWISSPROT HIT: P25691, EVALUE 5.30e+00
tttcaatcaagcttccagctgatgcagctggtccttggaccacatttttgagtagcaaagagtgttcttccttctctagtttagcagctgggcctcttagagaagaacagaagctgatctccccacgtcttccttcatgtccctccca

SEQ ID NO: 26343 - DNA, 217 bp, Homo sapiens
  MAP TO AC007539.8; EXPRESSED IN LUNG, SIGNAL = 2.2; EXPRESSED IN HEART, SIGNAL = 1.7; EXPRESSED IN ADULT LIVER, SIGNAL = 4.1; EXPRESSED IN FETAL LIVER, SIGNAL = 6.3; EXPRESSED IN HELA, SIGNAL = 2.1; EXPRESSED IN PLACENTA, SIGNAL = 4.8; NT HIT: AF267747.1, EVALUE 1.30e-01; EST_HUMAN HIT: W22562.1, EVALUE 1.00e-111; SWISSPROT HIT: Q14687, EVALUE 4.80e-02
gtgtccccagactgcagtgacgtcactggctccttccccaagtgcctggctgggccagtggactccttctccctgggcctatctctccagtgctatcatcatccattcaccaggaccacactggcactgattatccccctgaacttgctcatctttccccatctgttactcacagaagggctgagcttctttttagatccaagaactttactccact

SEQ ID NO: 26344 - DNA, 271 bp, Homo sapiens
  MAP TO AC007567.1; EXPRESSED IN FETAL LIVER, SIGNAL =   3; EXPRESSED IN ADULT LIVER, SIGNAL = 3.7; EXPRESSED IN HELA, SIGNAL = 1.8; EXPRESSED IN BRAIN, SIGNAL = 1.8; EXPRESSED IN PLACENTA, SIGNAL = 3.8; EXPRESSED IN HEART, SIGNAL = 1.7; EXPRESSED IN LUNG, SIGNAL = 2.2; NT HIT: Z74145.1, EVALUE 6.50e-01; SWISSPROT HIT: P45623, EVALUE 8.70e-01
agctttagggaagttaaaaataaacgtcacaaatagcattgaaaacatgcggatcttacatattatacatattgagataaaacaaaagaaccaaactctgaaaaggaaaatggtttatttgtctgatttctgtgtcatgctaatggagattattggacttaagtgccaagttctccagacagaggctggagaactaatatactttccaatagatgtactaataaattgtaacacttgtaagatcttaaacagctacatacaatttctgttg

SEQ ID NO: 26345 - DNA, 198 bp, Homo sapiens
  MAP TO AC007841.1; EXPRESSED IN HEART, SIGNAL = 2.2; NT HIT: AF120134.1, EVALUE 4.60e-01; SWISSPROT HIT: O15520, EVALUE 2.20e+00
gtcttgaagacacggaaactttcatacatttcagcttctttgtctggagtcactgcaaccccagacatgtcattgaaagggggtataattgtggtctcctccacccaccaatctgagcaagtctgaaagagtttcctgctgtgcagcagggaggctggagagccttttctggcaagggaaagtcaaaatggatttttt

SEQ ID NO: 26346 - DNA, 81 bp, Homo sapiens
  MAP TO AC007841.1; EXPRESSED IN ADULT LIVER, SIGNAL = 9.7; EXPRESSED IN FETAL LIVER, SIGNAL = 9.3; EXPRESSED IN BRAIN, SIGNAL = 4.7; EXPRESSED IN PLACENTA, SIGNAL =  13; EXPRESSED IN HELA, SIGNAL = 5.7; EXPRESSED IN HEART, SIGNAL = 3.7; EXPRESSED IN LUNG, SIGNAL = 4.4; EXPRESSED IN BONE MARROW, SIGNAL = 9.3; NT HIT: U63721.1, EVALUE 8.00e-13; EST_HUMAN HIT: AI783944.1, EVALUE 1.00e-15; SWISSPROT HIT: P39193, EVALUE 5.00e-05
ctgggcaacatggcaaaactcaatctctacaaaaattggctgggcacggtggtacgtgcctgtgatcccagctacttggga

SEQ ID NO: 26347 - DNA, 262 bp, Homo sapiens
  MAP TO AC007900.1; EXPRESSED IN PLACENTA, SIGNAL =  12; EXPRESSED IN BRAIN, SIGNAL = 2.9e+02; EXPRESSED IN BONE MARROW, SIGNAL =  22; EXPRESSED IN HEART, SIGNAL = 6.3; EXPRESSED IN LUNG, SIGNAL =  13; EXPRESSED IN FETAL LIVER, SIGNAL =  12; EXPRESSED IN ADULT LIVER, SIGNAL = 9.3; EXPRESSED IN HELA, SIGNAL = 8.8; EST_HUMAN HIT: AI570943.1, EVALUE 9.40e-01; SWISSPROT HIT: P33002, EVALUE 1.60e-01; NT HIT: AB045310.1, EVALUE 1.60e-01
gcagaatttcaaatactatggggcttttctgtatatttatgcccagtgtctatcctgcacgggacaggtacttacttccacaaatactaattatgtacctcatactaataagacacatactatgattgtaaggaagaaagaacataaatacaataatcactttcaaaatatatggcagaatatcatcaatgccagacagaatacttacacaaagttctggagaggttgtaagaagggagaaattcatctccctacagtttca

SEQ ID NO: 26348 - DNA, 352 bp, Homo sapiens
  MAP TO AC008009.4; EXPRESSED IN ADULT LIVER, SIGNAL = 1.9; EXPRESSED IN FETAL LIVER, SIGNAL = 1.4; EXPRESSED IN HELA, SIGNAL = 2.7; EXPRESSED IN HEART, SIGNAL = 5.9; EXPRESSED IN LUNG, SIGNAL = 2.2; NT HIT: U90204.1, EVALUE 2.20e-01; EST_HUMAN HIT: AI268262.1, EVALUE 1.00e-93; SWISSPROT HIT: P23881, EVALUE 1.10e+00
aggcctgggccggaggtcgccaagaagaccggaaggccgcactcaccatggctccggctgggctcccttgcttccaccgggagcacggctcatcccagctcagaggccgcggccaacacctgcacgcctttaccagagagcgacgcaacccccaacctcaagcacaggcgccctacgcaacacggcaggagcagccgcaaactaggccggaaaactgtcgtaaaaggggacgcggaggagaaggaaagtcgctcaagcagtggacagagcggagaaagcgacttcgggttggttgaagggtgggcggatctctttatttctgggtgtaggggtggggcttctctgtgttttc

SEQ ID NO: 26349 - DNA, 160 bp, Homo sapiens
  MAP TO AC008022.1; EXPRESSED IN PLACENTA, SIGNAL = 1.3; EXPRESSED IN HEART, SIGNAL = 1.5; EXPRESSED IN ADULT LIVER, SIGNAL = 1.4; EXPRESSED IN FETAL LIVER, SIGNAL = 1.4; EST_HUMAN HIT: AW007822.1, EVALUE 3.00e-18; NT HIT: U66060.1, EVALUE 5.00e-19; SWISSPROT HIT: P21245, EVALUE 1.00e+00
cttctgaagcctacttctgtcagttcatccatctcagctggagaggtattgcagtcatttggagaagaggcactctggctttttgagttttcagcaattttgttttgcttctttctcatctttgtaagcttatccaccttcagtctttgaggctgctgac

SEQ ID NO: 26350 - DNA, 126 bp, Homo sapiens
  MAP TO AC008022.1; EXPRESSED IN LUNG, SIGNAL = 1.4; EXPRESSED IN HEART, SIGNAL = 1.3; EXPRESSED IN HELA, SIGNAL = 1.3; NT HIT: AF047475.1, EVALUE 1.80e-02; EST_HUMAN HIT: BF507941.1, EVALUE 4.10e-01; SWISSPROT HIT: P26803, EVALUE 9.20e+00
  unsure 47
  unsure 71
ctgctttgttatctgcctctcccaccaaacatggagttcctggaggnctatgccttcttttctgtttctcntgcctccataattcgtgagtaagagaaaggatcccaatacaggacattaacaaat

SEQ ID NO: 26351 - DNA, 76 bp, Homo sapiens
  MAP TO AC008151.1; EXPRESSED IN PLACENTA, SIGNAL = 7.7; EXPRESSED IN BRAIN, SIGNAL = 9.2; EXPRESSED IN HELA, SIGNAL = 6.2; EXPRESSED IN LUNG, SIGNAL = 6.4; EXPRESSED IN HEART, SIGNAL =   4; EXPRESSED IN BONE MARROW, SIGNAL = 7.9; EXPRESSED IN FETAL LIVER, SIGNAL =  16; EXPRESSED IN ADULT LIVER, SIGNAL = 7.8; NT HIT: AL139074.2, EVALUE 1.50e-01; EST_HUMAN HIT: AV710415.1, EVALUE 3.50e+00
gatgctggctgccgagtcgctgaaaacaaaaccaatttttccaggagggccaagggtcacaaaaacaggtaggcaa

SEQ ID NO: 26352 - DNA, 99 bp, Homo sapiens
  MAP TO AC008151.1; EXPRESSED IN FETAL LIVER, SIGNAL = 7.5; EXPRESSED IN HELA, SIGNAL =   4; EXPRESSED IN BRAIN, SIGNAL =   2; EXPRESSED IN PLACENTA, SIGNAL =  11; EXPRESSED IN BONE MARROW, SIGNAL = 1.7; EXPRESSED IN LUNG, SIGNAL = 4.1; EXPRESSED IN HEART, SIGNAL = 3.4; EXPRESSED IN ADULT LIVER, SIGNAL =   9; EST_HUMAN HIT: AA707567.1, EVALUE 6.00e-49; SWISSPROT HIT: P47912, EVALUE 7.20e+00; NT HIT: U08988.1, EVALUE 6.00e-08
caaaggagtcagaagatgcatgcatcagtttctgggtgtccatttgtgctgccagaagaaaataccacagtctgggtaacttatagacaatagaaattt

SEQ ID NO: 26353 - DNA, 172 bp, Homo sapiens
  MAP TO AC008272.1; EXPRESSED IN LUNG, SIGNAL = 2.1; EXPRESSED IN FETAL LIVER, SIGNAL = 1.8; EXPRESSED IN ADULT LIVER, SIGNAL = 1.5; EXPRESSED IN PLACENTA, SIGNAL =   2; EXPRESSED IN BRAIN, SIGNAL = 2.7; EXPRESSED IN HELA, SIGNAL = 2.1; EXPRESSED IN BONE MARROW, SIGNAL = 3.2; EXPRESSED IN HEART, SIGNAL = 2.7; EST_HUMAN HIT: BE881292.1, EVALUE 2.30e+00; SWISSPROT HIT: P33464, EVALUE 1.30e+00; NT HIT: AF120480.2, EVALUE 1.60e+00
gtgaggaagcaaattgaagctctggctcactgcaaagaaagttatctgtccattaaagacattactggctggatctgtaagtataaagcttaccagagttgcctaagatgccacaatcgggaaaatgacagtggaaagtggtataaaggtgagggaaaagaaagaagggcca

SEQ ID NO: 26354 - DNA, 126 bp, Homo sapiens
  MAP TO AC008272.1; EXPRESSED IN HEART, SIGNAL = 1.5; NT HIT: D85517.1, EVALUE 7.10e-02; EST_HUMAN HIT: BF514858.1, EVALUE 2.70e-02; SWISSPROT HIT: Q90229, EVALUE 2.40e+00
gattgccagctcctgctccttgcagcagcccagcatgctctctgctggtgccaaaatacccttccaccaaaccccgctaacttctggaactgtcctagaggggtaaggcaagtcccgtattttgct

SEQ ID NO: 26355 - DNA, 115 bp, Homo sapiens
  MAP TO AC009290.1; EXPRESSED IN PLACENTA, SIGNAL = 5.3; EXPRESSED IN HELA, SIGNAL = 2.5; EXPRESSED IN LUNG, SIGNAL = 2.1; EXPRESSED IN HEART, SIGNAL = 1.7; EXPRESSED IN FETAL LIVER, SIGNAL = 1.7; EXPRESSED IN ADULT LIVER, SIGNAL = 1.5; NT HIT: AL163285.2, EVALUE 9.00e-26; EST_HUMAN HIT: AI216352.1, EVALUE 1.00e-22; SWISSPROT HIT: Q50738, EVALUE 9.30e+00
  unsure 42
ctgatcagcatccctatctgccgctgtcacctcaagcactanttgaatttgctgggtcatatggcccaagtggcagagcagcttgcacagcatccttgatctgttgcagagcctt

SEQ ID NO: 26356 - DNA, 241 bp, Homo sapiens
  MAP TO AC009290.1; EXPRESSED IN HEART, SIGNAL = 1.5; EXPRESSED IN LUNG, SIGNAL = 1.5; EXPRESSED IN BONE MARROW, SIGNAL =   2; EXPRESSED IN FETAL LIVER, SIGNAL = 2.1; EXPRESSED IN PLACENTA, SIGNAL = 2.8; EXPRESSED IN HELA, SIGNAL = 1.4; SWISSPROT HIT: O02193, EVALUE 5.90e+00; NT HIT: AL163268.2, EVALUE 1.00e-66; EST_HUMAN HIT: AW939485.1, EVALUE 3.00e-68
aattagaaaactcaagcagttattttcgagtgtagtacacctcctcgtggtcacactctcaacctcatctctaggggcctgccgggactttagtctagttatagatctagaagcaaacaggtgttgggtgtggctcctgagaagaatcaacattatctttcctggcaactgcctcaggggaagtcatcactgttgcttcaggcagcacagggtttatctcctcagacaaaggtggaaaggc

SEQ ID NO: 26357 - DNA, 111 bp, Homo sapiens
  MAP TO AC009313.2; EXPRESSED IN FETAL LIVER, SIGNAL = 2.5; EXPRESSED IN PLACENTA, SIGNAL = 3.2; EXPRESSED IN HELA, SIGNAL = 1.6; EXPRESSED IN BRAIN, SIGNAL = 2.3; EXPRESSED IN LUNG, SIGNAL = 1.6; EXPRESSED IN HEART, SIGNAL = 2.3; EXPRESSED IN BONE MARROW, SIGNAL = 1.5; EXPRESSED IN ADULT LIVER, SIGNAL = 2.4; NT HIT: AF275948.1, EVALUE 2.00e-05; EST_HUMAN HIT: AI673357.1, EVALUE 9.00e-05; SWISSPROT HIT: O60908, EVALUE 3.70e-01
cacatgataccttccactatatggaagatgctagtgtcttggttttggacttgccagatactggtgtcttagttttggatttcccagcatccagaactgtgaagaaataaa

SEQ ID NO: 26358 - DNA, 167 bp, Homo sapiens
  MAP TO AL008582.11; EXPRESSED IN FETAL LIVER, SIGNAL = 2.3; EXPRESSED IN HELA, SIGNAL = 3.2; EXPRESSED IN PLACENTA, SIGNAL =   4; EXPRESSED IN BRAIN, SIGNAL = 2.2; EXPRESSED IN BONE MARROW, SIGNAL =   2; EXPRESSED IN HEART, SIGNAL = 2.4; EXPRESSED IN LUNG, SIGNAL = 2.7; EXPRESSED IN ADULT LIVER, SIGNAL = 2.5; NT HIT: X15114.1, EVALUE 3.80e-01; SWISSPROT HIT: Q9VMC8, EVALUE 5.00e-22; EST_HUMAN HIT: BF246086.1, EVALUE 2.00e-65
tcagagaccccaggtcctccacagatcacacagcgcccctggtaagatccatagttacactcatcacatatgcgcaccagagtgcagggacgcacataggagtcacaaatcacacacttgccatcacctgtaaggaagagaatggagtcatgctcacaagttcttca

SEQ ID NO: 26359 - DNA, 151 bp, Homo sapiens
  MAP TO AL008723.8; EXPRESSED IN FETAL LIVER, SIGNAL = 2.4; EXPRESSED IN BRAIN, SIGNAL =   2; EXPRESSED IN PLACENTA, SIGNAL = 1.6; EXPRESSED IN HELA, SIGNAL = 1.8; EXPRESSED IN LUNG, SIGNAL = 1.7; EXPRESSED IN HEART, SIGNAL = 1.5; EXPRESSED IN BONE MARROW, SIGNAL = 2.4; EXPRESSED IN ADULT LIVER, SIGNAL = 2.2; NT HIT: AF254822.1, EVALUE 4.00e-04; EST_HUMAN HIT: H67042.1, EVALUE 5.00e-04; SWISSPROT HIT: P07204, EVALUE 6.90e+00
gattttggttctgcctcttctcaggcttgatataaatggaatccctgtctgtcctctttgtgtctggcttctttcactcaacattgtgaaattcacccatattgttgtatatgactgtagatattttattctcattgccatatggttgcct

SEQ ID NO: 26360 - DNA, 79 bp, Homo sapiens
  MAP TO AL021392.5; EXPRESSED IN BRAIN, SIGNAL = 3.3; EXPRESSED IN HELA, SIGNAL = 7.9; EXPRESSED IN FETAL LIVER, SIGNAL =  19; EXPRESSED IN ADULT LIVER, SIGNAL =  14; EXPRESSED IN PLACENTA, SIGNAL =  16; EXPRESSED IN BONE MARROW, SIGNAL = 3.5; EXPRESSED IN HEART, SIGNAL =   5; EXPRESSED IN LUNG, SIGNAL =  11; EST_HUMAN HIT: BE965632.2, EVALUE 9.40e-01; NT HIT: AJ001056.1, EVALUE 4.00e-02
gaatcagctccactttctggaaacacattgggtggactggatcagtgtccaagtacagaccccttgggaaatcagctga

SEQ ID NO: 26361 - DNA, 133 bp, Homo sapiens
  MAP TO AL021707.2; EXPRESSED IN BRAIN, SIGNAL =   2; EXPRESSED IN HELA, SIGNAL = 2.2; EXPRESSED IN PLACENTA, SIGNAL = 3.2; EXPRESSED IN BONE MARROW, SIGNAL = 2.2; EXPRESSED IN HEART, SIGNAL = 2.1; EXPRESSED IN LUNG, SIGNAL = 2.2; EXPRESSED IN ADULT LIVER, SIGNAL =   2; EXPRESSED IN FETAL LIVER, SIGNAL = 3.3; NT HIT: AL163303.2, EVALUE 1.20e+00; EST_HUMAN HIT: BE974556.1, EVALUE 1.10e-01; SWISSPROT HIT: Q9Z2V9, EVALUE 7.00e+00
gaagggcctctctgactcctcatctctgggatgcgcaactccagaattctgtcctaaccacttctatggagttgccacatcctacctcctccattgcacagcctgcttccccctctccgggggtcctggcaga

SEQ ID NO: 26362 - DNA, 148 bp, Homo sapiens
  MAP TO AL022238.1; EXPRESSED IN ADULT LIVER, SIGNAL = 1.8; EXPRESSED IN FETAL LIVER, SIGNAL = 1.8; EXPRESSED IN PLACENTA, SIGNAL = 1.2; EXPRESSED IN HELA, SIGNAL = 1.6; EXPRESSED IN HEART, SIGNAL = 1.8; EXPRESSED IN LUNG, SIGNAL = 1.5; EST_HUMAN HIT: AV697129.1, EVALUE 5.00e-01; NT HIT: AF254351.1, EVALUE 3.40e-01
atggcctgaatattctgaaattggcactctagtcaattctgacagctaactctggagttcaggtggaggcatgaacaagccagggaatgaggacaccgaggaagtgtggaggaagaggaagtatagtggcagaatctaacttgtatca

SEQ ID NO: 26363 - DNA, 110 bp, Homo sapiens
  MAP TO AL022238.1; EXPRESSED IN PLACENTA, SIGNAL =   2; EXPRESSED IN BRAIN, SIGNAL =   2; EXPRESSED IN HELA, SIGNAL = 2.2; EXPRESSED IN HEART, SIGNAL = 1.6; EXPRESSED IN BONE MARROW, SIGNAL = 2.3; EXPRESSED IN FETAL LIVER, SIGNAL = 2.2; NT HIT: V01507.1, EVALUE 2.40e-01; EST_HUMAN HIT: BE837412.1, EVALUE 3.50e-01
ttaattgaagttgtgagagtcatccaggagttccaggagagtgcagagagctagaggagagtcgaaggcgcaacattaaggcatctgaagaacaggcatataggaggagg

SEQ ID NO: 26364 - DNA, 387 bp, Homo sapiens
  MAP TO AL022318.2; EXPRESSED IN HEART, SIGNAL = 2.3; EXPRESSED IN LUNG, SIGNAL = 1.4; EXPRESSED IN ADULT LIVER, SIGNAL = 1.7; EXPRESSED IN FETAL LIVER, SIGNAL = 2.3; EXPRESSED IN PLACENTA, SIGNAL = 1.3; EXPRESSED IN HELA, SIGNAL = 1.8; EXPRESSED IN BRAIN, SIGNAL = 1.6; NT HIT: K00045.1, EVALUE 2.40e-01; EST_HUMAN HIT: AV708431.1, EVALUE 4.00e-41; SWISSPROT HIT: Q02353, EVALUE 2.80e+00
aagccgtcactgggagagccaataaagatacgacagatctggcaggagaacaagatccagcccaggtgatggggtgtgaggcttggtcttagctacaggtaggtcgtttcccttagctcctggatgactcagcttggcagccacccagacttctatcaggacccagaggtgctgccagctctggagccatgtcaggccagctttctccccatgtcaccagggaatggagatttttctggtctgctggggcttttcctaattctgcacggtcggcttgagactgtccacctgttgctccatctaggctgcgttgcccttatgagccgtcttcacaaggtacgtttggaggatgtcaggatgtctttcaaaggatttgtagacatgctt

SEQ ID NO: 26365 - DNA, 202 bp, Homo sapiens
  MAP TO AL022319.2; EXPRESSED IN LUNG, SIGNAL = 3.3; EXPRESSED IN BRAIN, SIGNAL =   3; EXPRESSED IN HELA, SIGNAL =   3; EXPRESSED IN PLACENTA, SIGNAL = 5.8; EXPRESSED IN BONE MARROW, SIGNAL = 3.3; EXPRESSED IN HEART, SIGNAL = 2.5; EXPRESSED IN ADULT LIVER, SIGNAL = 4.2; EXPRESSED IN FETAL LIVER, SIGNAL =   3; NT HIT: AF227565.1, EVALUE 4.80e-01; EST_HUMAN HIT: BE818396.1, EVALUE 7.10e-01; SWISSPROT HIT: Q99372, EVALUE 7.50e-01
actggaccaggcgtgggaggcagaatgggatttggcccaagactattcgtctgcagccaccttgggctatgcggtcaccctgctgtccctggactgcctaactcaggtgggtcagaagttggcctatgttcccactctagtggggcacctgcaggctgcctgtgggtccggagtggccaggaggggttggggccccaaagag

SEQ ID NO: 26366 - DNA, 110 bp, Homo sapiens
  MAP TO AL022320.23; EXPRESSED IN PLACENTA, SIGNAL = 3.6; EXPRESSED IN HELA, SIGNAL = 5.8; EXPRESSED IN BRAIN, SIGNAL = 5.1; EXPRESSED IN HEART, SIGNAL = 4.4; EXPRESSED IN BONE MARROW, SIGNAL =   8; EXPRESSED IN LUNG, SIGNAL = 5.6; EXPRESSED IN ADULT LIVER, SIGNAL = 5.1; EXPRESSED IN FETAL LIVER, SIGNAL = 5.2; NT HIT: gi11449811, EVALUE 3.70e+00; EST_HUMAN HIT: BE278331.1, EVALUE 2.30e-02
agggagagaatgtgctggtcacatgaatctcaaatgtagctacattttcgttatcaataaactggccgtctggttcttcattcagtctcatgagcttgattaatgtgtgt

SEQ ID NO: 26367 - DNA, 193 bp, Homo sapiens
  MAP TO AL022327.17; EXPRESSED IN ADULT LIVER, SIGNAL = 1.5; EXPRESSED IN HELA, SIGNAL = 1.6; EXPRESSED IN BRAIN, SIGNAL = 1.7; EXPRESSED IN PLACENTA, SIGNAL = 1.2; EXPRESSED IN BONE MARROW, SIGNAL = 1.7; EXPRESSED IN LUNG, SIGNAL = 1.3; EXPRESSED IN HEART, SIGNAL = 1.3; NT HIT: U49439.1, EVALUE 4.50e-01; EST_HUMAN HIT: AI824404.1, EVALUE 1.70e-01; SWISSPROT HIT: P34687, EVALUE 1.30e+00
cagtggaagctgctgccccacctggccagcaagggggcaggaagcccaccacgacttgctggcaagctctgtcgactctgctcaaagacgaacagcagaaaaggccaacacgggcttgctgggacacctgggaggcgaccccaaggttgctgcagcccaggcctctgtccacagggaagcggccgcatcctca

SEQ ID NO: 26368 - DNA, 100 bp, Homo sapiens
  MAP TO AL022327.17; EXPRESSED IN PLACENTA, SIGNAL = 3.7; EXPRESSED IN BRAIN, SIGNAL = 4.9; EXPRESSED IN BONE MARROW, SIGNAL = 6.5; EXPRESSED IN LUNG, SIGNAL = 2.9; EXPRESSED IN HEART, SIGNAL =   3; EXPRESSED IN ADULT LIVER, SIGNAL = 5.9; EXPRESSED IN FETAL LIVER, SIGNAL = 4.9; EXPRESSED IN HELA, SIGNAL = 5.3; NT HIT: gi11432956, EVALUE 3.00e-03; EST_HUMAN HIT: BE348229.1, EVALUE 2.00e-05
gctgctcagcggagcccacactgaacacagcaccctgctgaggcaggagagtaaggaatgagggtaactgggggtgaagggagaagcaaaagaacagcag

SEQ ID NO: 26369 - DNA, 111 bp, Homo sapiens
  MAP TO AL022328.21; EXPRESSED IN HELA, SIGNAL = 5.9; EXPRESSED IN BONE MARROW, SIGNAL = 3.2; EXPRESSED IN HEART, SIGNAL = 3.8; EXPRESSED IN LUNG, SIGNAL = 4.3; EXPRESSED IN FETAL LIVER, SIGNAL = 5.3; EXPRESSED IN ADULT LIVER, SIGNAL = 4.3; EXPRESSED IN PLACENTA, SIGNAL = 4.3; EXPRESSED IN BRAIN, SIGNAL = 3.4; SWISSPROT HIT: P06511, EVALUE 4.20e+00; NT HIT: D14034.1, EVALUE 3.00e-44; EST_HUMAN HIT: AW277214.1, EVALUE 2.00e-46
gcagggaagggactcctgtccagtggacacatgacccacgtgaccttacctatcattggagatgactcacattctttaccctgccccttctgccttgtatccaataaataa

SEQ ID NO: 26370 - DNA, 135 bp, Homo sapiens
  MAP TO AL022328.21; EXPRESSED IN PLACENTA, SIGNAL = 4.4; EXPRESSED IN HELA, SIGNAL = 3.1; EXPRESSED IN BONE MARROW, SIGNAL = 3.1; EXPRESSED IN LUNG, SIGNAL = 2.9; EXPRESSED IN HEART, SIGNAL = 2.6; EXPRESSED IN ADULT LIVER, SIGNAL = 3.5; EXPRESSED IN FETAL LIVER, SIGNAL = 4.3; EXPRESSED IN BRAIN, SIGNAL = 2.8; NT HIT: AF101065.1, EVALUE 1.90e-02; SWISSPROT HIT: O09053, EVALUE 2.40e+00; EST_HUMAN HIT: BF508792.1, EVALUE 4.50e-01
tggctctggagctctggtggggacacaggtgcctcccatgccgaacaccaggtttcattcatgaagcatgtgtccctgtggtgttcacaccaccaagcagaacttggaaagaacccccaaaatacagaagaaaag

SEQ ID NO: 26371 - DNA, 236 bp, Homo sapiens
  MAP TO AL022328.21; EXPRESSED IN HEART, SIGNAL = 1.5; EXPRESSED IN LUNG, SIGNAL = 1.2; EXPRESSED IN HELA, SIGNAL = 1.3; EXPRESSED IN BRAIN, SIGNAL =   2; NT HIT: AB000890.1, EVALUE 1.40e-01; EST_HUMAN HIT: AA613250.1, EVALUE 2.10e-01; SWISSPROT HIT: Q58316, EVALUE 1.50e+00
ggcacacagagaaggaagagccaaacaggcacccgccaggaggggctgctctgtagctgggaacctcactgagtttgcagcaggggccagaagtgtggcgagccattctagagaccccatttttttaatggtgcttcggactgggaagtggcatgaggcaggtttaccttctggaaagaggttgtggagaggcagggaggagaatcaagcctgtagcatcagtagaagaaggggaa

SEQ ID NO: 26372 - DNA, 174 bp, Homo sapiens
  MAP TO AL022328.21; EXPRESSED IN HEART, SIGNAL = 1.8; EXPRESSED IN LUNG, SIGNAL = 1.3; EXPRESSED IN PLACENTA, SIGNAL = 1.3; SWISSPROT HIT: O26131, EVALUE 1.30e+00; NT HIT: AF261898.1, EVALUE 4.00e-01; EST_HUMAN HIT: BF375398.1, EVALUE 1.00e-08
ccccgcttcaccacaaaggcctgggccggctgcacaggggcagaggacactggtcacagaggccaggcacccagacccccagtaaggtgccgtctccctccacccttgcacccaaccccacgccacctagagtgcctccaggacccaaaagcaaatgcccagaaggcataccca

SEQ ID NO: 26373 - DNA, 166 bp, Homo sapiens
  MAP TO AL022329.9; EXPRESSED IN FETAL LIVER, SIGNAL = 5.1; EXPRESSED IN HELA, SIGNAL = 6.2; EXPRESSED IN PLACENTA, SIGNAL = 4.6; EXPRESSED IN BRAIN, SIGNAL = 6.7; EXPRESSED IN LUNG, SIGNAL = 6.1; EXPRESSED IN HEART, SIGNAL = 3.6; EXPRESSED IN BONE MARROW, SIGNAL = 5.3; EXPRESSED IN ADULT LIVER, SIGNAL = 7.2; NT HIT: AE000833.1, EVALUE 6.00e-03; EST_HUMAN HIT: BF335519.1, EVALUE 5.70e-01; SWISSPROT HIT: P30352, EVALUE 3.50e-01
gctggtgaagaaggggtgcccccagcaccatgctctgaggcagttcaggatttggaagtcaagcagaggagaggaactaccaaaggagaccaagaaagagaagcctggagaggataggtcacagaagtcagagaagaatatttcaaagaaggcatcagtggacaac

SEQ ID NO: 26374 - DNA, 162 bp, Homo sapiens
  MAP TO AL022329.9; EXPRESSED IN LUNG, SIGNAL = 1.8; EXPRESSED IN HEART, SIGNAL = 1.5; EST_HUMAN HIT: BF590575.1, EVALUE 3.00e-86; SWISSPROT HIT: P24153, EVALUE 1.80e+00; NT HIT: gi11417883, EVALUE 2.00e-86
agcacccagaaacagggagggtcctcgaggaggacacaccagggtctcagccttttggggtgaacgaggatgaggcatctgatctattcgctaccgggactcctccaggctcccgagaggagtcgggacccttcggcttggggtcagctcagctccctgcct

SEQ ID NO: 26375 - DNA, 169 bp, Homo sapiens
  MAP TO AL022329.9; EXPRESSED IN HELA, SIGNAL = 2.4; EXPRESSED IN PLACENTA, SIGNAL = 2.5; EXPRESSED IN BRAIN, SIGNAL = 2.6; EXPRESSED IN LUNG, SIGNAL = 2.7; EXPRESSED IN HEART, SIGNAL = 1.7; EXPRESSED IN BONE MARROW, SIGNAL = 1.9; EXPRESSED IN ADULT LIVER, SIGNAL = 4.2; EXPRESSED IN FETAL LIVER, SIGNAL = 5.1; EST_HUMAN HIT: AV697966.1, EVALUE 2.00e-03; SWISSPROT HIT: P77810, EVALUE 7.80e-01; NT HIT: Z73560.1, EVALUE 6.00e-03
ggagggagagtgagtgaagacacagatgccctctgatctcctactagtggatgattcccattagcttaacccacctggaagatggaaagtgagggagtccattggaagagtccacagggtcagcagccagacatagagcaaagtagaagagatggagggggaatctgaa

SEQ ID NO: 26376 - DNA, 105 bp, Homo sapiens
  MAP TO AL023553.5; EXPRESSED IN PLACENTA, SIGNAL = 5.8; EXPRESSED IN HEART, SIGNAL = 7.4; EXPRESSED IN FETAL LIVER, SIGNAL =   4; EXPRESSED IN ADULT LIVER, SIGNAL = 4.7; EXPRESSED IN BRAIN, SIGNAL = 5.4; EXPRESSED IN HELA, SIGNAL = 5.4; EXPRESSED IN BONE MARROW, SIGNAL =   5; EXPRESSED IN LUNG, SIGNAL = 3.6; EST_HUMAN HIT: BE672921.1, EVALUE 8.40e-02; NT HIT: U87931.1, EVALUE 5.00e-30
gagctatgcctttccctgtagggcaggggttcttaacccattgtctccagacaggcgtccgaggctctgagaaagccctgaagaggtgcaatatgtttctgagta

SEQ ID NO: 26377 - DNA, 123 bp, Homo sapiens
  MAP TO AL023553.5; EXPRESSED IN HELA, SIGNAL = 5.2; EXPRESSED IN LUNG, SIGNAL = 7.1; EXPRESSED IN BONE MARROW, SIGNAL =   6; EXPRESSED IN HEART, SIGNAL =  11; EXPRESSED IN FETAL LIVER, SIGNAL = 6.9; EXPRESSED IN ADULT LIVER, SIGNAL = 5.2; EXPRESSED IN PLACENTA, SIGNAL = 3.6; EXPRESSED IN BRAIN, SIGNAL =   6; EST_HUMAN HIT: BE900742.1, EVALUE 3.00e-63; NT HIT: gi11418185, EVALUE 2.00e-63; SWISSPROT HIT: Q99798, EVALUE 6.00e-18
attgtcacagccctggccattgcgggaaccctcaagttcaacccagagaccgactacctgacgggcacggatggcaagaagttcaggctggaggctccggatgcagatgagcttcccaaaggg

SEQ ID NO: 26378 - DNA, 208 bp, Homo sapiens
  MAP TO AL023553.5; EXPRESSED IN HELA, SIGNAL = 3.3; EXPRESSED IN HEART, SIGNAL =  16; EXPRESSED IN BONE MARROW, SIGNAL = 1.5; EXPRESSED IN LUNG, SIGNAL = 2.7; EXPRESSED IN FETAL LIVER, SIGNAL = 3.1; EXPRESSED IN ADULT LIVER, SIGNAL = 3.5; EXPRESSED IN PLACENTA, SIGNAL = 2.4; EXPRESSED IN BRAIN, SIGNAL =   3; NT HIT: gi6680422, EVALUE 3.10e-02; EST_HUMAN HIT: BE780858.1, EVALUE 1.00e-113; SWISSPROT HIT: P20265, EVALUE 2.20e+00
agtgattggtgtctgtgccgtttgttgtcaagtccagggtccaggaagggtcttttcagtcaaggtcagtggaggcccaacagccacagccacagatggatccatcactgcagtgaaggaggagcagggcctagatggtggaggagcggggcaagctggtgggcactcctggccttgcctcactgtccagctcgagacactatctcct

SEQ ID NO: 26379 - DNA, 113 bp, Homo sapiens
  MAP TO AL023553.5; EXPRESSED IN HELA, SIGNAL = 1.3; EXPRESSED IN PLACENTA, SIGNAL = 1.6; EXPRESSED IN BRAIN, SIGNAL = 1.5; EXPRESSED IN HEART, SIGNAL = 1.4; EXPRESSED IN LUNG, SIGNAL = 1.2; NT HIT: AE001789.1, EVALUE 2.50e-01; EST_HUMAN HIT: H48391.1, EVALUE 2.00e-46; SWISSPROT HIT: P54897, EVALUE 4.10e+00
cttcctttggagaggcctgagctccctgtgacaaaccactttaacccttggaggatacaacttggctggctgctgcagtgactctggggggatgagaatgtcatcgaagaagc

SEQ ID NO: 26380 - DNA, 112 bp, Homo sapiens
  MAP TO AL023553.5; EXPRESSED IN HELA, SIGNAL = 1.9; EXPRESSED IN PLACENTA, SIGNAL = 1.4; EXPRESSED IN BRAIN, SIGNAL = 2.3; EXPRESSED IN BONE MARROW, SIGNAL = 1.9; EXPRESSED IN LUNG, SIGNAL = 2.8; EXPRESSED IN HEART, SIGNAL = 2.4; EXPRESSED IN FETAL LIVER, SIGNAL = 2.6; EXPRESSED IN ADULT LIVER, SIGNAL = 1.9; NT HIT: AF004213.1, EVALUE 2.40e-01; EST_HUMAN HIT: BF367354.1, EVALUE 1.40e+00
cctcactattcctcagtgtcctcacagcaaacaggctaggcctggagcctctcacatccgggtgggtagagctcataaacgaatttgaaaagaagccctctctgctccacga

SEQ ID NO: 26381 - DNA, 160 bp, Homo sapiens
  MAP TO AL023553.5; EXPRESSED IN FETAL LIVER, SIGNAL = 2.3; EXPRESSED IN ADULT LIVER, SIGNAL = 2.8; EXPRESSED IN HELA, SIGNAL = 2.9; EXPRESSED IN PLACENTA, SIGNAL = 2.1; EXPRESSED IN BRAIN, SIGNAL = 2.5; EXPRESSED IN LUNG, SIGNAL = 1.8; EXPRESSED IN HEART, SIGNAL = 1.8; EXPRESSED IN BONE MARROW, SIGNAL = 2.6; NT HIT: AJ249850.1, EVALUE 9.30e-02; EST_HUMAN HIT: BF340514.1, EVALUE 8.50e+00; SWISSPROT HIT: Q62266, EVALUE 1.20e-01
cctgacctctccccctggatgtggaccacaagtgtctacaccgtgtggaccacaagtgtctacaccgtgtagaccaccccgaattctgtgtgcccagccttcgtggatccaacttttacaagcttgaggctctttagggatgcactagtcttaaatcctt

SEQ ID NO: 26382 - DNA, 172 bp, Homo sapiens
  MAP TO AL031587.3; EXPRESSED IN HEART, SIGNAL = 1.6; EXPRESSED IN BONE MARROW, SIGNAL = 1.5; EXPRESSED IN LUNG, SIGNAL = 1.7; EXPRESSED IN FETAL LIVER, SIGNAL = 1.5; EXPRESSED IN ADULT LIVER, SIGNAL = 1.7; EXPRESSED IN PLACENTA, SIGNAL = 1.3; EXPRESSED IN HELA, SIGNAL =   2; EXPRESSED IN BRAIN, SIGNAL = 1.8; EST_HUMAN HIT: AV732645.1, EVALUE 5.90e-01; SWISSPROT HIT: P06484, EVALUE 5.90e-01; NT HIT: gi11433220, EVALUE 2.50e-02
gcgccgaactgggagagggaggaaagagatcagcttggtgactctggggcagggcaggagggggagccccttactgtgtgtcctctccctaggaggatgaagaagcccccaactcaaaggagggtggcgtcagaaagtcccagggaagagccctaggataggatgaggtccc

SEQ ID NO: 26383 - DNA, 329 bp, Homo sapiens
  MAP TO AL031587.3; EXPRESSED IN LUNG, SIGNAL = 4.9; EXPRESSED IN HEART, SIGNAL = 4.2; EXPRESSED IN HELA, SIGNAL = 5.8; EXPRESSED IN PLACENTA, SIGNAL =   6; EXPRESSED IN BONE MARROW, SIGNAL = 5.7; EXPRESSED IN ADULT LIVER, SIGNAL = 4.7; EXPRESSED IN FETAL LIVER, SIGNAL = 5.5; EXPRESSED IN BRAIN, SIGNAL = 2.8; EST_HUMAN HIT: BF572332.1, EVALUE 5.00e-03; NT HIT: AJ004891.1, EVALUE 8.10e-01; SWISSPROT HIT: Q14687, EVALUE 3.80e-02
ctttctcccttcttttccacttcggcctccaccttgtttctttctctgtccattgctccctccttctcctctttctgtccccagcctcctctctctgggaagctttttaattttgaccccacatcccacagttggtcgctcctgcctcttggtgtccttcttgtcctggccctcctgccctggctccctgtctctctccagccctgtctctgtctctccctgtttttctctccctgatgcgttctctctgtccctccctccatgaatttctctgtctctgtcctgtgccacctctcatctgccctgcctctgtaaatgtggggaggacc

SEQ ID NO: 26384 - DNA, 154 bp, Homo sapiens
  MAP TO AL031587.3; EXPRESSED IN BRAIN, SIGNAL =   5; EXPRESSED IN PLACENTA, SIGNAL = 2.4; EXPRESSED IN LUNG, SIGNAL = 3.1; EXPRESSED IN BONE MARROW, SIGNAL = 4.4; EXPRESSED IN HEART, SIGNAL = 2.3; EXPRESSED IN ADULT LIVER, SIGNAL = 2.1; EXPRESSED IN FETAL LIVER, SIGNAL = 3.2; EXPRESSED IN HELA, SIGNAL = 2.4; NT HIT: AF261896.1, EVALUE 3.50e-01; EST_HUMAN HIT: AA568513.1, EVALUE 5.00e-04; SWISSPROT HIT: Q63630, EVALUE 1.40e+00
agttttgacacatgtatgcatcacacatgaaactctatcaccacaatcaagtaaacaagtacatctaccgtccccaaactttcctcttgcccctttgtcatccctcccttcaccccaccctctccctaggcaaccacgtgcagtcactgtagat

SEQ ID NO: 26385 - DNA, 92 bp, Homo sapiens
  MAP TO AL031587.3; EXPRESSED IN LUNG, SIGNAL = 7.1; EXPRESSED IN BONE MARROW, SIGNAL = 8.4; EXPRESSED IN HELA, SIGNAL = 4.5; EXPRESSED IN PLACENTA, SIGNAL = 7.4; EXPRESSED IN HEART, SIGNAL = 3.9; EXPRESSED IN ADULT LIVER, SIGNAL = 5.9; EXPRESSED IN FETAL LIVER, SIGNAL = 7.5; EXPRESSED IN BRAIN, SIGNAL = 8.2; NT HIT: AF219984.1, EVALUE 7.60e-01; EST_HUMAN HIT: AW900962.1, EVALUE 7.20e-02; SWISSPROT HIT: Q05537, EVALUE 9.50e+00
ggttgttctttctcttctgagagctccgagtgctggccatgtgcccctggcctggggagcaaggggcctgtcctctgtgggtttatttacag

SEQ ID NO: 26386 - DNA, 90 bp, Homo sapiens
  MAP TO AL031587.3; EXPRESSED IN ADULT LIVER, SIGNAL = 1.7; EXPRESSED IN PLACENTA, SIGNAL = 1.8; EXPRESSED IN BRAIN, SIGNAL = 2.5; EXPRESSED IN HELA, SIGNAL = 2.3; EXPRESSED IN BONE MARROW, SIGNAL = 2.7; EXPRESSED IN LUNG, SIGNAL = 2.5; EXPRESSED IN HEART, SIGNAL = 1.8; EXPRESSED IN FETAL LIVER, SIGNAL = 2.4; NT HIT: gi11418099, EVALUE 8.00e-44; EST_HUMAN HIT: AU116960.1, EVALUE 1.00e-43
tgttgaagaaagtcaagcaccggctggtggagaacatgagttcagggaccgcagatgctctgggcctgagccgggccatcctgtgcaatg

SEQ ID NO: 26387 - DNA, 122 bp, Homo sapiens
  MAP TO AL031588.1; EXPRESSED IN ADULT LIVER, SIGNAL = 2.9; EXPRESSED IN PLACENTA, SIGNAL = 3.4; EXPRESSED IN HEART, SIGNAL = 3.7; EXPRESSED IN FETAL LIVER, SIGNAL = 2.4; EXPRESSED IN BRAIN, SIGNAL = 3.8; EXPRESSED IN HELA, SIGNAL = 3.1; EXPRESSED IN BONE MARROW, SIGNAL =   4; EXPRESSED IN LUNG, SIGNAL = 3.9; NT HIT: gi11429547, EVALUE 1.10e+00; EST_HUMAN HIT: BE048770.1, EVALUE 1.00e-07; SWISSPROT HIT: P15265, EVALUE 4.10e+00
ctctgggcctaccgccaaacctgcccctcccccccaaacctgcacctccccgccaaacctgcccgtcctcaaacctgctgagcctgcccccaaatctgtcccctcctcaaactaaatcttcc

SEQ ID NO: 26388 - DNA, 75 bp, Homo sapiens
  MAP TO AL031588.1; EXPRESSED IN LUNG, SIGNAL = 2.3; EXPRESSED IN HEART, SIGNAL = 2.8; EXPRESSED IN ADULT LIVER, SIGNAL = 2.1; EXPRESSED IN FETAL LIVER, SIGNAL = 4.4; EXPRESSED IN HELA, SIGNAL = 2.3; EXPRESSED IN PLACENTA, SIGNAL = 2.8; NT HIT: AB028213.1, EVALUE 2.30e+00; EST_HUMAN HIT: AV661898.1, EVALUE 8.70e-01
ctgctggttgctcctgtcccaagtgtcaccttgatgctctgcatggacaggcggatctggtttgtcacactgtgg

SEQ ID NO: 26389 - DNA, 178 bp, Homo sapiens
  MAP TO AL031588.1; EXPRESSED IN PLACENTA, SIGNAL = 3.6; EXPRESSED IN HEART, SIGNAL =   3; EXPRESSED IN FETAL LIVER, SIGNAL = 4.6; EXPRESSED IN ADULT LIVER, SIGNAL = 3.1; EXPRESSED IN BRAIN, SIGNAL = 3.8; EXPRESSED IN HELA, SIGNAL = 4.3; EXPRESSED IN BONE MARROW, SIGNAL = 3.9; EXPRESSED IN LUNG, SIGNAL = 3.5; EST_HUMAN HIT: AW935521.1, EVALUE 1.00e-02; SWISSPROT HIT: P28726, EVALUE 5.10e+00; NT HIT: AF119361.1, EVALUE 1.00e-01
atgatagaatatttctacctcaaccccaaagccatgattagcaggaaaatactagaagcatctgagagagagaaagcagtccaggtagcccggagcaggcctgtccatcagccaggccaggatgtccatgtgaggaccacgaagtgctccgcagagcatccgcagcagaccgtgacgg

SEQ ID NO: 26390 - DNA, 101 bp, Homo sapiens
  MAP TO AL031588.1; EXPRESSED IN HELA, SIGNAL = 1.5; EXPRESSED IN HEART, SIGNAL = 1.7; EXPRESSED IN LUNG, SIGNAL = 1.5; NT HIT: AJ271885.2, EVALUE 8.50e-01; EST_HUMAN HIT: BE786595.1, EVALUE 2.00e-02
cacgcctcatcatgaaggcagatgctgggagggcagcccagagcaggcccagcaatggtgtaactcactaggaagatacgattctccaaccaccaaagcca

SEQ ID NO: 26391 - DNA, 145 bp, Homo sapiens
  MAP TO AL031588.1; EXPRESSED IN ADULT LIVER, SIGNAL = 2.3; EXPRESSED IN HELA, SIGNAL = 1.8; EXPRESSED IN BRAIN, SIGNAL = 1.9; EXPRESSED IN PLACENTA, SIGNAL = 2.1; EXPRESSED IN BONE MARROW, SIGNAL = 2.4; EXPRESSED IN HEART, SIGNAL = 2.1; EXPRESSED IN LUNG, SIGNAL = 1.9; EXPRESSED IN FETAL LIVER, SIGNAL = 1.7; NT HIT: gi11425090, EVALUE 1.30e+00; EST_HUMAN HIT: AW967984.1, EVALUE 3.00e-76; SWISSPROT HIT: P27526, EVALUE 6.90e+00
aggtaaagtgatcagggggagacctactgttgggggatcgtcaccgaatgggcaattctccgagtatctccactgtcccaacttgagtgtaggtggcactggctcagacaagtacacaaagggccaccctgctgcaggcagccac

SEQ ID NO: 26392 - DNA, 108 bp, Homo sapiens
  MAP TO AL031588.1; EXPRESSED IN FETAL LIVER, SIGNAL = 3.2; EXPRESSED IN BRAIN, SIGNAL = 1.6; EXPRESSED IN PLACENTA, SIGNAL = 2.4; EXPRESSED IN HELA, SIGNAL =   3; EXPRESSED IN HEART, SIGNAL = 2.5; EXPRESSED IN LUNG, SIGNAL =   2; EXPRESSED IN BONE MARROW, SIGNAL = 3.9; EXPRESSED IN ADULT LIVER, SIGNAL = 3.1; SWISSPROT HIT: P14083, EVALUE 3.70e-01; NT HIT: U31086.1, EVALUE 9.20e-01; EST_HUMAN HIT: BE218652.1, EVALUE 3.40e-01
cagggagcaacgagcggagctcacagggccgagaaggtgtcatcttgcagcagcaggagtgcaggggtctcgcgggccttgcgggacacacgggtgtgcagcagaggc

SEQ ID NO: 26393 - DNA, 241 bp, Homo sapiens
  MAP TO AL035681.13; EXPRESSED IN PLACENTA, SIGNAL = 3.7; EXPRESSED IN HEART, SIGNAL = 1.6; EXPRESSED IN FETAL LIVER, SIGNAL =   3; EXPRESSED IN ADULT LIVER, SIGNAL = 2.3; EXPRESSED IN BRAIN, SIGNAL = 1.9; EXPRESSED IN HELA, SIGNAL =  13; EXPRESSED IN BONE MARROW, SIGNAL = 2.3; EXPRESSED IN LUNG, SIGNAL = 1.8; EST_HUMAN HIT: AV647500.1, EVALUE 5.50e-02; SWISSPROT HIT: P17674, EVALUE 2.60e+00; NT HIT: gi11418392, EVALUE 3.70e-02
ctaggactgatcgaatcagtctggattttccttggggtgatccgcaggctcccttttccaattttacttcttgagactttccttggccctcacacagagacctcccaaagggaagaggaaggtgggcaggggaacatcttagctgatcccgtcctcatccagctgataggacattgggttttcggaactggaagggaattcttagacaacagaaattcagtggccttcaaggacctgggag

SEQ ID NO: 26394 - DNA, 217 bp, Homo sapiens
  MAP TO AL035681.13; EXPRESSED IN HEART, SIGNAL = 2.9; EXPRESSED IN ADULT LIVER, SIGNAL = 4.5; EXPRESSED IN FETAL LIVER, SIGNAL = 5.9; EXPRESSED IN HELA, SIGNAL = 4.4; EXPRESSED IN BRAIN, SIGNAL = 6.8; EXPRESSED IN PLACENTA, SIGNAL = 4.3; EXPRESSED IN BONE MARROW, SIGNAL =   8; EXPRESSED IN LUNG, SIGNAL = 4.8; NT HIT: U15303.1, EVALUE 2.00e-03; EST_HUMAN HIT: AW410405.1, EVALUE 1.00e-106; SWISSPROT HIT: Q01977, EVALUE 2.70e+00
agggagggaggccggggagccgggcctggagctgctcctccacctgcttcaccagggcggcttcaggctggacagtgacagtggggaggtctgggcaggagacggatggcgttaccactcgctccatttcatgtttatgtcaaaaaaatcctcctacaaacacttctatcacctgcttggcttcactcccggtctgaagcccttcagtttatttaca

SEQ ID NO: 26395 - DNA, 118 bp, Homo sapiens
  MAP TO AL035681.13; EXPRESSED IN BRAIN, SIGNAL =   2; EXPRESSED IN PLACENTA, SIGNAL = 2.5; EXPRESSED IN HELA, SIGNAL = 2.6; EXPRESSED IN HEART, SIGNAL = 1.8; EXPRESSED IN BONE MARROW, SIGNAL = 2.1; EXPRESSED IN LUNG, SIGNAL = 2.2; EXPRESSED IN ADULT LIVER, SIGNAL =   2; EXPRESSED IN FETAL LIVER, SIGNAL =   2; NT HIT: U52111.2, EVALUE 1.00e+00; EST_HUMAN HIT: BE894488.1, EVALUE 6.00e-31
gactggaagggctacctcatgaaacggctggtgggctccaggacgcttcccgtggatttccacatcaaggtcggcagtgagcccttaactgatgtgcctccttccgctcttccatttt

SEQ ID NO: 26396 - DNA, 191 bp, Homo sapiens
  MAP TO AL035682.16; EXPRESSED IN HELA, SIGNAL = 3.6; EXPRESSED IN PLACENTA, SIGNAL = 1.6; EXPRESSED IN BRAIN, SIGNAL = 2.9; EXPRESSED IN BONE MARROW, SIGNAL = 4.1; EXPRESSED IN HEART, SIGNAL =   2; EXPRESSED IN LUNG, SIGNAL = 2.8; EXPRESSED IN FETAL LIVER, SIGNAL = 2.3; EXPRESSED IN ADULT LIVER, SIGNAL = 2.2; EST_HUMAN HIT: AI525056.1, EVALUE 3.00e-03; NT HIT: AB012161.2, EVALUE 1.10e-01; SWISSPROT HIT: Q10279, EVALUE 3.80e+00
aaccacagagcaggaacctcactccattcacccagcacctaccaatttacctggctggaagcaggtgttgatagatgacagtggtgatggtgataatgatagtggtggcagtggtggtatttggtatctactgggtatttactctgtgccaggccttgttctaagcaatctacatgtactaacccacccaa

SEQ ID NO: 26397 - DNA, 316 bp, Homo sapiens
  MAP TO AL035682.16; EXPRESSED IN BRAIN, SIGNAL =   3; EXPRESSED IN PLACENTA, SIGNAL = 3.8; EXPRESSED IN HELA, SIGNAL = 3.8; EXPRESSED IN HEART, SIGNAL = 2.4; EXPRESSED IN BONE MARROW, SIGNAL = 3.9; EXPRESSED IN LUNG, SIGNAL = 3.1; EXPRESSED IN FETAL LIVER, SIGNAL = 2.4; EXPRESSED IN ADULT LIVER, SIGNAL = 1.8; NT HIT: AB028236.1, EVALUE 7.70e-01; EST_HUMAN HIT: BF336595.1, EVALUE 1.10e+00; SWISSPROT HIT: Q99958, EVALUE 6.90e-01
acccggttatccaccagtcactccattaggccatggggtgatgactcacatgggggggtcacataaagattctgcaggttttagggcacagcccctctatcatgatcaaatccaagccagggacaggagtcatccacttaccacccttctgctgaacatgcgtacacacacccttcttctattcccccttcccctaaaggaaggtactaaggcaataagagctaatatcactgacatcagcttactttgcactgtgctaaggatttatgtgcatttaatttccggaacccttataaggaagatgctgtctcacaga

SEQ ID NO: 26398 - DNA, 461 bp, Homo sapiens
  MAP TO AL035682.16; EXPRESSED IN BRAIN, SIGNAL = 2.6; EXPRESSED IN PLACENTA, SIGNAL = 1.6; EXPRESSED IN HELA, SIGNAL =   3; EXPRESSED IN HEART, SIGNAL = 3.2; EXPRESSED IN LUNG, SIGNAL = 3.7; EXPRESSED IN BONE MARROW, SIGNAL = 3.5; EXPRESSED IN FETAL LIVER, SIGNAL =  24; EXPRESSED IN ADULT LIVER, SIGNAL = 2.6; NT HIT: AF051651.1, EVALUE 7.30e-02; EST_HUMAN HIT: AW590082.1, EVALUE 0.00e+00; SWISSPROT HIT: O43896, EVALUE 8.40e-02
ataccgtggaagcttcactgtggccctcaaggccctgcacaacctggctcctaccctcattcctgcctctccaggcactattcttacccctgagtcttatgagcgctcactacatgcctggcatcactctaagcacctcgtatacatgggcttgtctcatctgtacagcacccataggaggcaggtctcctcaccccatcctacaggggaggacaccaggcacagagaggcaagagcacaggccaaggtcacacagccagaccctgtggggaagccggattggaacccaggcagcctggcctcagagtcagcactccttatgcagtttcagatccctgtgccttgcagctcctccatctagttcctctcctctgagttccagccacagcaaccagcccttcctcgggacgccccaaagtgaggcggtgagccgccacatcccacagcctccccagagcctg

SEQ ID NO: 26399 - DNA, 166 bp, Homo sapiens
  MAP TO AL035701.13; EXPRESSED IN BRAIN, SIGNAL = 7.3; EXPRESSED IN PLACENTA, SIGNAL = 4.3; EXPRESSED IN HELA, SIGNAL = 3.5; EXPRESSED IN LUNG, SIGNAL = 5.4; EXPRESSED IN HEART, SIGNAL = 2.8; EXPRESSED IN BONE MARROW, SIGNAL = 8.3; EXPRESSED IN FETAL LIVER, SIGNAL = 6.3; EXPRESSED IN ADULT LIVER, SIGNAL = 3.6; SWISSPROT HIT: Q61982, EVALUE 5.20e+00; EST_HUMAN HIT: AV753629.1, EVALUE 4.00e-36; NT HIT: AF030997.1, EVALUE 3.80e-01
cgcacttttcgtatcatcctagatctggatgcccttcatggaacctaaaaaccagcgagtcccggaaaggcctcaggcaattgccaagccgatggccttctgccacttagttaatgtgcacctggcagcttaggtggccgcggagaaagcaactttggctgcacca

SEQ ID NO: 26400 - DNA, 92 bp, Homo sapiens
  MAP TO AL049649.4; EXPRESSED IN HEART, SIGNAL = 1.3; EXPRESSED IN LUNG, SIGNAL = 1.9; EXPRESSED IN FETAL LIVER, SIGNAL = 3.7; EST_HUMAN HIT: BE396652.1, EVALUE 1.10e+00; NT HIT: AF001168.1, EVALUE 1.90e-01
ctctaatcttgataacacctgcatcaagaatggagggagtgtgctgagccaggcccaagcaggcaggctttggctatcaatgcttcctctag

SEQ ID NO: 26401 - DNA, 175 bp, Homo sapiens
  MAP TO AL079295.1; EXPRESSED IN ADULT LIVER, SIGNAL =  42; EXPRESSED IN FETAL LIVER, SIGNAL =  80; EXPRESSED IN HELA, SIGNAL =  32; EXPRESSED IN BRAIN, SIGNAL =  11; EXPRESSED IN PLACENTA, SIGNAL =  39; EXPRESSED IN BONE MARROW, SIGNAL =  11; EXPRESSED IN LUNG, SIGNAL =  36; EXPRESSED IN HEART, SIGNAL =  20; NT HIT: AB040891.1, EVALUE 4.10e-01; EST_HUMAN HIT: BF700582.1, EVALUE 1.50e-01
aaccatgaggattaaatgcaactgtgagggcatctgtgagaatttaagtattaccatgccctccatgccccgcccccatcagtgtaattcttctccttttacggtcactgtaatttattttaggattgttcagaagaaacagatttttaagagtcaaaatggctatagcatattt

SEQ ID NO: 26402 - DNA, 157 bp, Homo sapiens
  MAP TO AL079295.1; EXPRESSED IN FETAL LIVER, SIGNAL =  18; EXPRESSED IN PLACENTA, SIGNAL =  13; EXPRESSED IN BRAIN, SIGNAL = 1.9; EXPRESSED IN HELA, SIGNAL = 6.6; EXPRESSED IN HEART, SIGNAL = 5.6; EXPRESSED IN BONE MARROW, SIGNAL = 1.8; EXPRESSED IN LUNG, SIGNAL = 7.9; EXPRESSED IN ADULT LIVER, SIGNAL =  11; NT HIT: AJ291390.1, EVALUE 9.10e-02; EST_HUMAN HIT: AW996686.1, EVALUE 5.30e-01; SWISSPROT HIT: O67542, EVALUE 3.00e+00
ttttgttaatgtgtagttactagacaggcccacaaccatatttaagtggactagatgccaaaggggcaaaaatctttcctttaaattaaaagtaggtggagagcccactttggaccacaagccactacagcctataccacagagagagactctgtcc

SEQ ID NO: 26403 - DNA, 160 bp, Homo sapiens
  MAP TO AL079300.11; EXPRESSED IN HEART, SIGNAL =   2; EXPRESSED IN BONE MARROW, SIGNAL = 1.3; NT HIT: AJ224873.1, EVALUE 3.70e-01; EST_HUMAN HIT: Z18867.1, EVALUE 4.00e-85; SWISSPROT HIT: P35800, EVALUE 1.80e+00
ctccttgaagctgcccttgaagacttcccgactctacaataacttggagacagagagactggccaggcctccccggtggccagagccagccagcatggccaccctcaagaggcgagatgagcccacagaggcatatcctgcggggatgctgggctcccag

SEQ ID NO: 26404 - DNA, 202 bp, Homo sapiens
  MAP TO AL079300.11; EXPRESSED IN PLACENTA, SIGNAL = 2.6; EXPRESSED IN HEART, SIGNAL = 1.6; EXPRESSED IN BONE MARROW, SIGNAL = 2.3; EXPRESSED IN LUNG, SIGNAL = 1.8; EXPRESSED IN ADULT LIVER, SIGNAL = 2.2; EXPRESSED IN FETAL LIVER, SIGNAL = 2.6; EXPRESSED IN BRAIN, SIGNAL = 2.2; EXPRESSED IN HELA, SIGNAL =   2; NT HIT: AF127888.1, EVALUE 1.90e+00; EST_HUMAN HIT: AA421492.1, EVALUE 7.10e-01; SWISSPROT HIT: P32927, EVALUE 2.90e+00
gaaggagcatttattgtttcctgtagctgggaaaccaaaaaggaaaatctagcttcaggcattactagatccaggaattcaaaaatgatcatggggatttggttccccaccaacctctctgctctgctgtcttctatgttggtttccttctggggcaacaagatggcggctaacagctccaaactcatgcctgcaccattct

SEQ ID NO: 26405 - DNA, 157 bp, Homo sapiens
  MAP TO AL079300.11; EXPRESSED IN PLACENTA, SIGNAL = 1.7; EXPRESSED IN BRAIN, SIGNAL =   4; EXPRESSED IN HELA, SIGNAL = 3.6; EXPRESSED IN HEART, SIGNAL = 2.5; EXPRESSED IN LUNG, SIGNAL = 3.5; EXPRESSED IN BONE MARROW, SIGNAL =   5; EXPRESSED IN ADULT LIVER, SIGNAL = 4.3; EXPRESSED IN FETAL LIVER, SIGNAL = 4.2; NT HIT: gi11419214, EVALUE 1.40e+00; EST_HUMAN HIT: AA916053.1, EVALUE 5.30e-01
gcagcaagagttattgatgaaggtgcagaattagcacaggccccagatgagcctggaggtgaagatgaagccagtttattttttctgtgttgggtaaggcaaaagcaggtttgtggggatagggttgctaaccttaaccttaatcctaaccccagtt

SEQ ID NO: 26406 - DNA, 100 bp, Homo sapiens
  MAP TO AL079300.11; EXPRESSED IN HELA, SIGNAL = 1.7; EXPRESSED IN HEART, SIGNAL = 1.6; EXPRESSED IN LUNG, SIGNAL = 2.1; EXPRESSED IN FETAL LIVER, SIGNAL = 2.9; EXPRESSED IN ADULT LIVER, SIGNAL = 2.2; EXPRESSED IN PLACENTA, SIGNAL = 3.7; EST_HUMAN HIT: BF512791.1, EVALUE 3.10e-01; NT HIT: U44894.1, EVALUE 5.40e-02
taaagctgcatcttcatggggaactgggtgcttttatgaatgagtctgagattttctgtcactattgccatttcaccatactctggtgagacaatgtctc

SEQ ID NO: 26407 - DNA, 80 bp, Homo sapiens
  MAP TO AL079300.11; EXPRESSED IN HEART, SIGNAL = 1.7; NT HIT: gi9845300, EVALUE 6.40e-01; SWISSPROT HIT: Q04228, EVALUE 3.30e+00; EST_HUMAN HIT: BF311834.1, EVALUE 9.50e-01
tgttgattatctgacatccctccatcatgatgatggagagttccatctgagccacaccgacctggtcctgtgaggacagc

SEQ ID NO: 26408 - DNA, 76 bp, Homo sapiens
  MAP TO AP000041.1; EXPRESSED IN HEART, SIGNAL = 2.1; EXPRESSED IN ADULT LIVER, SIGNAL = 2.3; EXPRESSED IN BRAIN, SIGNAL =   3; EXPRESSED IN HELA, SIGNAL = 1.7; EXPRESSED IN PLACENTA, SIGNAL = 5.5; EXPRESSED IN BONE MARROW, SIGNAL = 4.7; EXPRESSED IN LUNG, SIGNAL = 3.1; EXPRESSED IN FETAL LIVER, SIGNAL = 2.5; NT HIT: gi9055303, EVALUE 6.00e-01; EST_HUMAN HIT: AA862217.1, EVALUE 8.90e-01
gcaaggtgatggttgggaagagtcattcaattgacacttttgctccctgggtatgcagtgcattgactaggaaagt

SEQ ID NO: 26409 - DNA, 114 bp, Homo sapiens
  MAP TO AP000053.1; EXPRESSED IN HELA, SIGNAL =  13; EXPRESSED IN PLACENTA, SIGNAL =  22; EXPRESSED IN BRAIN, SIGNAL = 8.4; EXPRESSED IN LUNG, SIGNAL =  17; EXPRESSED IN HEART, SIGNAL = 8.6; EXPRESSED IN BONE MARROW, SIGNAL = 9.1; EXPRESSED IN FETAL LIVER, SIGNAL =  16; EXPRESSED IN ADULT LIVER, SIGNAL =  23; NT HIT: AY007189.1, EVALUE 9.90e-01; EST_HUMAN HIT: AW468850.1, EVALUE 9.30e-02
gtcggtactggaatctctttccgctgctgcaggagtctgaaggaatcagtcttgccgcctgtaacacatgtccagcgctgctttttctctgatgagtgtcttagtcagtttggg

SEQ ID NO: 26410 - DNA, 132 bp, Homo sapiens
  MAP TO AP000123.1; EXPRESSED IN FETAL LIVER, SIGNAL = 2.8; EXPRESSED IN ADULT LIVER, SIGNAL = 3.3; EXPRESSED IN HELA, SIGNAL = 2.2; EXPRESSED IN PLACENTA, SIGNAL = 3.1; EXPRESSED IN BRAIN, SIGNAL = 3.5; EXPRESSED IN LUNG, SIGNAL = 2.4; EXPRESSED IN HEART, SIGNAL =   2; EXPRESSED IN BONE MARROW, SIGNAL = 4.1; NT HIT: AF003529.1, EVALUE 1.00e-06; EST_HUMAN HIT: AW862537.1, EVALUE 5.00e-07; SWISSPROT HIT: P54982, EVALUE 3.10e+00
tcacatcttacatggtggcaggcaagagggcttcacttgggatgcagcattgacgaagaatgtcatagcttctggcagacgtttgttccattcattggaagagccatctgggattttgcctgattctgtatg

SEQ ID NO: 26411 - DNA, 210 bp, Homo sapiens
  MAP TO AP000123.1; EXPRESSED IN PLACENTA, SIGNAL = 2.4; EXPRESSED IN BRAIN, SIGNAL = 2.4; EXPRESSED IN HEART, SIGNAL = 1.5; EXPRESSED IN LUNG, SIGNAL = 1.3; EXPRESSED IN BONE MARROW, SIGNAL = 1.9; EXPRESSED IN ADULT LIVER, SIGNAL = 2.3; EXPRESSED IN FETAL LIVER, SIGNAL = 3.6; EXPRESSED IN HELA, SIGNAL =   2; SWISSPROT HIT: P16230, EVALUE 5.00e-02; NT HIT: U08342.1, EVALUE 2.00e-06; EST_HUMAN HIT: AI732462.1, EVALUE 2.00e-07
aagcttattatttaatggacttaacaatattttcttgttcatgatgatgttttacttccactgatacacaaatatttattaagtgcctactatgtggcaggcactgtcccaggaacaggttaagcagctgcaagcaatgtagacactgtaatttctgcattttaataaaattgctaactcatactaaatacttactatgagcctgatatt

SEQ ID NO: 26412 - DNA, 105 bp, Homo sapiens
  MAP TO AP000129.1; EXPRESSED IN FETAL LIVER, SIGNAL =  13; EXPRESSED IN PLACENTA, SIGNAL =  19; EXPRESSED IN HEART, SIGNAL = 5.5; EXPRESSED IN LUNG, SIGNAL =   8; EXPRESSED IN BRAIN, SIGNAL = 7.2; EXPRESSED IN HELA, SIGNAL =   7; EXPRESSED IN BONE MARROW, SIGNAL = 8.3; EXPRESSED IN ADULT LIVER, SIGNAL = 8.5; NT HIT: D50320.1, EVALUE 5.70e-02; EST_HUMAN HIT: AW440661.1, EVALUE 3.30e-01; SWISSPROT HIT: Q91637, EVALUE 3.20e+00
tagcatgtggatatccatttggctcttttccacatcatcccacttcttgcccaacaacctcattaatcaattggtcacagtggcagggctgaagggtatacatgg

SEQ ID NO: 26413 - DNA, 253 bp, Homo sapiens
  MAP TO AP000233.1; EXPRESSED IN PLACENTA, SIGNAL = 2.4; EXPRESSED IN HEART, SIGNAL = 1.3; EXPRESSED IN LUNG, SIGNAL = 1.7; EXPRESSED IN BONE MARROW, SIGNAL =   2; EXPRESSED IN BRAIN, SIGNAL = 1.7; EXPRESSED IN HELA, SIGNAL = 1.6; EXPRESSED IN ADULT LIVER, SIGNAL = 2.7; EXPRESSED IN FETAL LIVER, SIGNAL = 2.2; EST_HUMAN HIT: AW750834.1, EVALUE 1.50e-02; SWISSPROT HIT: O15218, EVALUE 5.10e+00; NT HIT: gi11467432, EVALUE 1.50e-01
acctactgttctttatgcttactacaggtaccttattacagaatatattcaatttcttactcacatctcctgtaacactggtgttattcatttaatttacacagatgtcatccaatgtgtttttacaattgttactttaacaaacagttatcttttaggtcattttagaatcagagaaataaagcattttatttcaactgtatttgttcctggtatgacccttttcccctttctttatgtagatccaaatttt

SEQ ID NO: 26414 - DNA, 170 bp, Homo sapiens
  MAP TO AP000346.1; EXPRESSED IN PLACENTA, SIGNAL = 3.4; EXPRESSED IN HELA, SIGNAL =   2; EXPRESSED IN BONE MARROW, SIGNAL = 1.3; EXPRESSED IN LUNG, SIGNAL = 1.6; EXPRESSED IN HEART, SIGNAL =   2; EXPRESSED IN ADULT LIVER, SIGNAL = 2.7; EXPRESSED IN FETAL LIVER, SIGNAL = 3.2; NT HIT: AL163268.2, EVALUE 2.50e-02; EST_HUMAN HIT: BE410354.1, EVALUE 3.00e-86
cctccgtgtgcccggccctgtcctgtgggtggagggtgaggagagggagagaaggaagggttggcagtttcataagaactggacctcctcctatgagtagatgaaatagtttaatgagattggttttggattttccagcttccctagaggccggaatcagactcccaata

SEQ ID NO: 26415 - DNA, 485 bp, Homo sapiens
  MAP TO AP000346.1; EXPRESSED IN FETAL LIVER, SIGNAL = 1.9; EXPRESSED IN HELA, SIGNAL = 2.4; EXPRESSED IN BRAIN, SIGNAL = 2.7; EXPRESSED IN BONE MARROW, SIGNAL = 1.9; EXPRESSED IN LUNG, SIGNAL = 2.1; EXPRESSED IN HEART, SIGNAL =   2; EXPRESSED IN ADULT LIVER, SIGNAL = 1.6; NT HIT: gi11436859, EVALUE 7.70e-02; EST_HUMAN HIT: BF064051.1, EVALUE 1.20e-01; SWISSPROT HIT: P35799, EVALUE 3.50e-01
tcagtgcctcagtttcactagctctaaagtggggcgagtaattgtgcctatcataaatgggtatgattttggcagtgccgggggcatcatactgaaaataagtgccttgtacattgtgggtacccaggaagccagtttacagcccctcagaggagacccatcagcaggcatctgagggagcctggagccctgcatcctgcaggtgcctggggtcttgtgcccaggagaagctgctccctcactccacagcagtctacagagcaccccctgaccaggggtacacctgtttgtgcaggtgtcagcagggagccctgggcctctctgggctctgactttccctggcaggactgtagagggcccagaaccctgccttctcccagccaggcccttccctcccttccccaaactcacggcctcctcaccgctctctgcctcagattcaggactaatctcactatgtccttcatccctgtttgcatcagggg

SEQ ID NO: 26416 - DNA, 151 bp, Homo sapiens
  MAP TO AP000350.1; EXPRESSED IN PLACENTA, SIGNAL =   2; EXPRESSED IN BRAIN, SIGNAL = 2.4; EXPRESSED IN LUNG, SIGNAL = 2.3; EXPRESSED IN BONE MARROW, SIGNAL = 2.4; EXPRESSED IN HEART, SIGNAL = 1.6; EXPRESSED IN FETAL LIVER, SIGNAL = 1.6; EXPRESSED IN ADULT LIVER, SIGNAL = 2.1; EXPRESSED IN HELA, SIGNAL = 2.3; NT HIT: AF240786.1, EVALUE 6.00e-80; EST_HUMAN HIT: BF030270.1, EVALUE 6.00e-13; SWISSPROT HIT: Q64471, EVALUE 7.00e-13
cttgctctatatgagctgcatgtacaaagcacctgaccactggtacctccaggacctgcaggcccgcgcccatggggatcagtacctgtcatggcagcacatggccctgcagagtagctgctgctgggccatgtggcagacggtgagccat

SEQ ID NO: 26417 - DNA, 315 bp, Homo sapiens
  MAP TO AP000352.2; EXPRESSED IN PLACENTA, SIGNAL = 1.5; EXPRESSED IN LUNG, SIGNAL = 1.2; EXPRESSED IN HEART, SIGNAL = 1.6; EXPRESSED IN BONE MARROW, SIGNAL = 2.1; EXPRESSED IN FETAL LIVER, SIGNAL = 1.5; EXPRESSED IN BRAIN, SIGNAL = 2.6; EXPRESSED IN HELA, SIGNAL = 1.2; EST_HUMAN HIT: BE463846.1, EVALUE 1.10e+00; NT HIT: AF240786.1, EVALUE 0.00e+00; SWISSPROT HIT: Q24432, EVALUE 4.60e+00
atgcctctatgggtgttggaccatccagtgatcccaggctctgaatgtgaatccagctccaccaaggaggcactatgtggcctcggtaaaggacgccaccatgcggccaccaacctggaggctggttttggctttcatttttcccacccacctccaacccttcagcacaccctgcagttagagtttcaagaaaagtcagaaccgaccatcaccccaccaaccctgcaccaccaccaccttggtctggggctccagcgctgcatgccagatgactgcagtggctttctcacccctgccagggggatcctttatgac

SEQ ID NO: 26418 - DNA, 110 bp, Homo sapiens
  MAP TO AP000352.2; EXPRESSED IN HEART, SIGNAL = 1.4; EXPRESSED IN LUNG, SIGNAL = 1.3; EXPRESSED IN BONE MARROW, SIGNAL = 1.9; EXPRESSED IN ADULT LIVER, SIGNAL = 1.4; EXPRESSED IN BRAIN, SIGNAL = 1.8; EXPRESSED IN PLACENTA, SIGNAL = 1.4; EXPRESSED IN HELA, SIGNAL = 1.6; EST_HUMAN HIT: BF056131.1, EVALUE 1.40e+00; NT HIT: gi11419857, EVALUE 9.40e-01
ctgttgaatggggtaatgtcttcgttatgggtattaaacaaaagtgcttgtacattgcagccacctcctggatggagttctccaagtcattggtggaactagggtaagac

SEQ ID NO: 26419 - DNA, 168 bp, Homo sapiens
  MAP TO AP000352.2; EXPRESSED IN HEART, SIGNAL = 4.1; EXPRESSED IN BRAIN, SIGNAL =  10; EXPRESSED IN PLACENTA, SIGNAL = 6.6; EXPRESSED IN BONE MARROW, SIGNAL =  12; EXPRESSED IN LUNG, SIGNAL = 6.7; EXPRESSED IN ADULT LIVER, SIGNAL = 3.8; EXPRESSED IN FETAL LIVER, SIGNAL =   7; EXPRESSED IN HELA, SIGNAL = 6.8; NT HIT: gi8394486, EVALUE 1.50e+00; EST_HUMAN HIT: R83077.1, EVALUE 1.50e-01; SWISSPROT HIT: Q14957, EVALUE 1.30e+00
ccaaaagcccctccacagaaaaacagcttgactctgacttcttccatctggccttgctctattaggcgaggcaggagaacaaaatgcctctgccaccaggcttggcagcttttgtctatagagcacaggcagacccagccggtcctctgagggctcagcacaggccat

SEQ ID NO: 26420 - DNA, 232 bp, Homo sapiens
  MAP TO AP000352.2; EXPRESSED IN LUNG, SIGNAL = 4.4; EXPRESSED IN BRAIN, SIGNAL = 6.3; EXPRESSED IN HELA, SIGNAL = 3.8; EXPRESSED IN BONE MARROW, SIGNAL = 3.7; EXPRESSED IN HEART, SIGNAL = 3.4; EXPRESSED IN ADULT LIVER, SIGNAL = 3.2; EXPRESSED IN FETAL LIVER, SIGNAL = 3.5; EXPRESSED IN PLACENTA, SIGNAL = 3.4; NT HIT: D82983.1, EVALUE 1.40e-01; EST_HUMAN HIT: BF306432.1, EVALUE 8.20e-01; SWISSPROT HIT: P23246, EVALUE 3.60e-01
atttcctcagggcacagcaggtgacacaggtctgggagggagggagtctcatcatctggggctttggtctgtagttcaaggtgcagtgcatgctagcaaacgatggccagctccggcttccctggctgttggtgccacactggagcctggcttgctcactgctcagcctccacttggcagtggaccttacctctgtatcccaggccttctgctcccaggtggacctgggtct

SEQ ID NO: 26421 - DNA, 172 bp, Homo sapiens
  MAP TO AP000353.1; EXPRESSED IN HEART, SIGNAL = 2.2; EXPRESSED IN LUNG, SIGNAL = 2.4; EXPRESSED IN BONE MARROW, SIGNAL =   3; EXPRESSED IN ADULT LIVER, SIGNAL = 1.6; EXPRESSED IN FETAL LIVER, SIGNAL = 2.5; EXPRESSED IN BRAIN, SIGNAL = 2.3; EXPRESSED IN PLACENTA, SIGNAL = 2.5; EXPRESSED IN HELA, SIGNAL = 2.3; NT HIT: AL163300.2, EVALUE 4.00e-01; SWISSPROT HIT: P81408, EVALUE 5.90e-01; EST_HUMAN HIT: BE871648.1, EVALUE 5.90e-01
ctgtgccggggtctccaggacaaatgcctggaagttggaggccaggacacaggtccccacagccaagcgcttccacaccttgccaggtgttttggcagagccaggccagatgccctcccaccagcccttgccccaccccctcccaggactcagaaccacagatgactttcat

SEQ ID NO: 26422 - DNA, 77 bp, Homo sapiens
  MAP TO AP000353.1; EXPRESSED IN FETAL LIVER, SIGNAL =  65; EXPRESSED IN ADULT LIVER, SIGNAL =  19; EXPRESSED IN HELA, SIGNAL = 7.4; EXPRESSED IN PLACENTA, SIGNAL =  65; EXPRESSED IN BRAIN, SIGNAL = 5.3; EXPRESSED IN BONE MARROW, SIGNAL = 5.2; EXPRESSED IN LUNG, SIGNAL =   8; EXPRESSED IN HEART, SIGNAL = 7.4; NT HIT: AL049866.2, EVALUE 3.90e-02; EST_HUMAN HIT: AI262979.1, EVALUE 2.30e-01
ctgtcagacatggcagtatccatctgatggggctttggagagggctggcacagatacaggcacagagtgcaggacat

SEQ ID NO: 26423 - DNA, 117 bp, Homo sapiens
  MAP TO AP000354.1; EXPRESSED IN BRAIN, SIGNAL = 1.5; EXPRESSED IN HELA, SIGNAL = 1.2; EXPRESSED IN BONE MARROW, SIGNAL = 1.6; EXPRESSED IN LUNG, SIGNAL = 1.3; EXPRESSED IN HEART, SIGNAL = 1.6; NT HIT: AJ289779.1, EVALUE 1.00e+00; EST_HUMAN HIT: AI375037.1, EVALUE 2.00e-03; SWISSPROT HIT: P46018, EVALUE 9.30e+00
ctgcggcctccactggacaatgagaccgtaagtgtgtggcttgacagaaagttgttgactctgctggggtgctggtacagtgctgggcacggcagtgttacagaggaagtgagccac

SEQ ID NO: 26424 - DNA, 128 bp, Homo sapiens
  MAP TO AP000354.1; EXPRESSED IN PLACENTA, SIGNAL = 1.9; EXPRESSED IN BRAIN, SIGNAL = 2.1; EXPRESSED IN HELA, SIGNAL = 1.8; EXPRESSED IN BONE MARROW, SIGNAL = 2.3; EXPRESSED IN LUNG, SIGNAL = 1.9; EXPRESSED IN HEART, SIGNAL = 1.5; EXPRESSED IN FETAL LIVER, SIGNAL = 1.6; EXPRESSED IN ADULT LIVER, SIGNAL = 2.9; NT HIT: AF234169.1, EVALUE 1.10e+00; EST_HUMAN HIT: BE896174.1, EVALUE 1.70e+00
agacattctggaggactgttaggcaacaccttccagtttaaaatgccgtattcatagactctgaagttgttatacttagtactggcacaagtattatgcataaagatggtattatacatagtaccatc

SEQ ID NO: 26425 - DNA, 304 bp, Homo sapiens
  MAP TO AP000356.1; EXPRESSED IN BRAIN, SIGNAL = 5.4; EXPRESSED IN ADULT LIVER, SIGNAL = 4.3; EXPRESSED IN HELA, SIGNAL = 3.6; EXPRESSED IN PLACENTA, SIGNAL = 3.5; EXPRESSED IN BONE MARROW, SIGNAL = 4.4; EXPRESSED IN HEART, SIGNAL = 2.8; EXPRESSED IN LUNG, SIGNAL = 4.1; EXPRESSED IN FETAL LIVER, SIGNAL = 4.8; EST_HUMAN HIT: AL041931.1, EVALUE 0.00e+00; SWISSPROT HIT: O75144, EVALUE 5.50e+00; NT HIT: U07000.1, EVALUE 3.00e-49
gcagctgcaatctgagctcagccacctacacaccaccgtggccgacactttcattaaaaagtttcctgagacgacttgcgtgcatgttgacttcatgatcagcgccgctgggaagaaccccagagccggtggggtggggctggaagcagcaggtgcagtgatagggctgggtgcccaggaggcctcagtgctcaatcaggccaaggtggccaagcccaggctgcagggaaggccggcctggggggtgtgggtgagcacaggcaggcaccagctgggcagtgttaggatgctggagcagcatccg

SEQ ID NO: 26426 - DNA, 132 bp, Homo sapiens
  MAP TO AP000359.1; EXPRESSED IN FETAL LIVER, SIGNAL =  32; EXPRESSED IN BRAIN, SIGNAL =  17; EXPRESSED IN PLACENTA, SIGNAL =  18; EXPRESSED IN HELA, SIGNAL =  21; EXPRESSED IN LUNG, SIGNAL =  21; EXPRESSED IN HEART, SIGNAL =  15; EXPRESSED IN BONE MARROW, SIGNAL =  18; EXPRESSED IN ADULT LIVER, SIGNAL =  36; NT HIT: AL163203.2, EVALUE 1.20e+00; EST_HUMAN HIT: BE568316.1, EVALUE 1.70e+00; SWISSPROT HIT: P00182, EVALUE 4.10e+00
aacctggacctgaggctgggttgcatacagcgcccttgcaggagagaaggattggtggagtttttcaagacctggtggtgaacaccaggcaagatatgaagcatgttaaagactcaaaaacaggtatgttgg

SEQ ID NO: 26427 - DNA, 118 bp, Homo sapiens
  MAP TO Z82188.2; EXPRESSED IN HELA, SIGNAL = 1.6; EXPRESSED IN PLACENTA, SIGNAL = 1.5; EXPRESSED IN BRAIN, SIGNAL = 1.9; EXPRESSED IN BONE MARROW, SIGNAL = 1.8; EXPRESSED IN HEART, SIGNAL = 1.3; EXPRESSED IN LUNG, SIGNAL = 1.6; EXPRESSED IN FETAL LIVER, SIGNAL = 1.7; NT HIT: AF068757.1, EVALUE 2.00e-60; EST_HUMAN HIT: BE964530.2, EVALUE 1.50e+00; SWISSPROT HIT: P31165, EVALUE 9.30e+00
ctggggctgcagcgggctcagagtgccaggctgggtgaagccaagggtagcaaggaacccctaggccgtggcttctccagctggctgggttcagagcatctcctccctgttcttgggg

SEQ ID NO: 26428 - DNA, 130 bp, Homo sapiens
  MAP TO Z82188.2; EXPRESSED IN BRAIN, SIGNAL = 1.5; EXPRESSED IN LUNG, SIGNAL = 1.5; EXPRESSED IN HEART, SIGNAL = 1.5; EXPRESSED IN BONE MARROW, SIGNAL = 1.6; NT HIT: gi11545708, EVALUE 2.90e-01; EST_HUMAN HIT: R06966.1, EVALUE 2.80e-02; SWISSPROT HIT: P34332, EVALUE 3.10e+00
catgctgggctgcctcctggggccctgtgcagaatccacctgccccaccactggaaacagggggtgccagagcccaggaggcaatggggtgggaagatgggcacattgaggaccgggaaccaatgcaggg

SEQ ID NO: 26429 - DNA, 212 bp, Homo sapiens
  MAP TO Z82188.2; EXPRESSED IN HELA, SIGNAL = 1.3; EXPRESSED IN HEART, SIGNAL = 1.5; EXPRESSED IN PLACENTA, SIGNAL = 1.2; EST_HUMAN HIT: BF341693.1, EVALUE 7.50e-01; SWISSPROT HIT: P17139, EVALUE 1.20e-02; NT HIT: AB051897.1, EVALUE 2.00e+00
cactcccgttcatactgtttcaagaactcgttacgtgtcagcggaatcatcctggattggattgcctcccccatgtgacgggctcctaggggtccagccctgttcccggccagaatccagccccacggatacctgggtattggggctgaaggaccctcagaggtcccctcgttcacaggggagccccaggcggtgggttctctgagtgccat

SEQ ID NO: 26430 - DNA, 126 bp, Homo sapiens
  MAP TO Z82188.2; EXPRESSED IN FETAL LIVER, SIGNAL = 4.3; EXPRESSED IN ADULT LIVER, SIGNAL = 2.8; EXPRESSED IN PLACENTA, SIGNAL = 2.5; EXPRESSED IN BONE MARROW, SIGNAL = 5.3; EXPRESSED IN LUNG, SIGNAL = 4.3; EXPRESSED IN BRAIN, SIGNAL = 3.1; EXPRESSED IN HELA, SIGNAL = 2.9; EXPRESSED IN HEART, SIGNAL = 4.3; EST_HUMAN HIT: BF508067.1, EVALUE 4.00e-04; NT HIT: AB018292.1, EVALUE 3.00e-04; SWISSPROT HIT: P24206, EVALUE 9.20e+00
atgaccactcagaagtcacaaccaaactctgggctggagccctggcctgccactgaggactccctgaacctcagtttcctggtctgtcaaatgggaaacagtcaccttcagatgacaggattgcag

SEQ ID NO: 26431 - DNA, 130 bp, Homo sapiens
  MAP TO Z83840.7; EXPRESSED IN FETAL LIVER, SIGNAL = 2.5; EXPRESSED IN PLACENTA, SIGNAL = 2.5; EXPRESSED IN BRAIN, SIGNAL = 1.4; EXPRESSED IN HELA, SIGNAL =   3; EXPRESSED IN HEART, SIGNAL = 2.6; EXPRESSED IN LUNG, SIGNAL = 2.2; EXPRESSED IN ADULT LIVER, SIGNAL = 1.6; SWISSPROT HIT: P12956, EVALUE 2.00e-18; NT HIT: gi11418189, EVALUE 2.00e-67; EST_HUMAN HIT: BF353902.1, EVALUE 2.00e-67
gcttccagctggtctttttaccctttgctgatgataaaaggaagatgccctttactgaaaaaatcatggcaactccagagcaggtgggcaagatgaaggctatcgttgagaagcttcgcttcacatacag

SEQ ID NO: 26432 - DNA, 121 bp, Homo sapiens
  MAP TO Z83840.7; EXPRESSED IN HELA, SIGNAL = 2.6; EXPRESSED IN PLACENTA, SIGNAL = 1.6; EXPRESSED IN LUNG, SIGNAL = 1.9; EXPRESSED IN BONE MARROW, SIGNAL = 1.3; EXPRESSED IN HEART, SIGNAL =   3; EXPRESSED IN FETAL LIVER, SIGNAL = 1.9; EXPRESSED IN ADULT LIVER, SIGNAL = 1.5; NT HIT: gi11418192, EVALUE 4.00e-62; EST_HUMAN HIT: BF026737.1, EVALUE 5.00e-62; SWISSPROT HIT: P55769, EVALUE 1.00e-17
cctcattggctcctttccgaagctgcttatagttacatgactgctgaacgaggtccagtagcttcttggtgaggtgggcatcggcaaggggataggcctttggattcacatcagcctcagt

SEQ ID NO: 26433 - DNA, 105 bp, Homo sapiens
  MAP TO Z83844.5; EXPRESSED IN PLACENTA, SIGNAL = 1.3; EXPRESSED IN LUNG, SIGNAL = 1.4; EXPRESSED IN HEART, SIGNAL = 1.6; EXPRESSED IN ADULT LIVER, SIGNAL =   2; EXPRESSED IN HELA, SIGNAL = 1.5; EXPRESSED IN BRAIN, SIGNAL = 1.9; EST_HUMAN HIT: BE737154.1, EVALUE 2.00e-48; SWISSPROT HIT: Q99684, EVALUE 4.80e-01; NT HIT: M84448.1, EVALUE 2.30e-01
gtagaacagcggctggagccggccaagcgggcagcccacaacatccacaagcggctgcaggcctgtctgcagggccagagcggggcagacatggacaagcgggtg

SEQ ID NO: 26434 - DNA, 77 bp, Homo sapiens
  MAP TO Z83844.5; EXPRESSED IN HEART, SIGNAL = 1.7; EXPRESSED IN LUNG, SIGNAL = 1.5; EXPRESSED IN BONE MARROW, SIGNAL = 1.9; NT HIT: gi6677930, EVALUE 8.00e-22; EST_HUMAN HIT: BE737154.1, EVALUE 6.00e-36; SWISSPROT HIT: P55194, EVALUE 2.20e-01
aagaagcttcccctcatggctctgtccaccacgatggctgagagcttcaaggagctggaccctgattccagcatggg

SEQ ID NO: 26435 - DNA, 115 bp, Homo sapiens
  MAP TO Z83844.5; EXPRESSED IN BONE MARROW, SIGNAL = 1.5; EXPRESSED IN BRAIN, SIGNAL = 1.4; EXPRESSED IN HELA, SIGNAL = 1.3; EXPRESSED IN HEART, SIGNAL = 1.3; NT HIT: AF170072.1, EVALUE 2.50e-01; SWISSPROT HIT: P35556, EVALUE 1.40e+00; EST_HUMAN HIT: BE909770.1, EVALUE 3.70e-01
gaagtccgaggcagcgggggccttccaggcccaggacgagggacggtcacagcagcccagccaaggccagagccaacttctccgaagacagtccagccctgcccccagcaggcag

SEQ ID NO: 26436 - DNA, 160 bp, Homo sapiens
  MAP TO Z83844.5; EXPRESSED IN PLACENTA, SIGNAL = 2.7; EXPRESSED IN HELA, SIGNAL = 4.1; EXPRESSED IN HEART, SIGNAL = 3.5; EXPRESSED IN BONE MARROW, SIGNAL = 5.8; EXPRESSED IN LUNG, SIGNAL =   4; EXPRESSED IN FETAL LIVER, SIGNAL = 4.4; EXPRESSED IN ADULT LIVER, SIGNAL = 6.4; EXPRESSED IN BRAIN, SIGNAL = 5.7; SWISSPROT HIT: P21574, EVALUE 6.80e+00; EST_HUMAN HIT: BE276948.1, EVALUE 3.50e-02; NT HIT: gi7242180, EVALUE 3.70e-01
aagaccaggcaggtggaggagtgaccccagatgcggaaggcagcagagaagaagagctgagtcatctgtatcgccctcaggcacgggaggaggcggatggaaattcggtggacctggaggagtgacagctgggagggattccccagctggtatctcgggc

SEQ ID NO: 26437 - DNA, 153 bp, Homo sapiens
  MAP TO Z95114.19; EXPRESSED IN PLACENTA, SIGNAL = 2.5; EXPRESSED IN HELA, SIGNAL = 2.4; EXPRESSED IN LUNG, SIGNAL = 2.4; EXPRESSED IN BONE MARROW, SIGNAL = 2.7; EXPRESSED IN HEART, SIGNAL = 2.2; EXPRESSED IN FETAL LIVER, SIGNAL =   3; EXPRESSED IN ADULT LIVER, SIGNAL = 2.4; EXPRESSED IN BRAIN, SIGNAL = 3.2; EST_HUMAN HIT: BF346466.1, EVALUE 1.30e-01; NT HIT: U30790.1, EVALUE 6.00e-03
gggttatgaaaatagttcattttgtcaagagcagcattttaaaaagaaaagagcattgaaaatatcagagtgtattgaacacagcaagagtgagtattcttttgtaagatatttgaaatatatataatatatatatacataagggtgtatata

SEQ ID NO: 26438 - DNA, 190 bp, Homo sapiens
  MAP TO Z95114.19; EXPRESSED IN LUNG, SIGNAL = 4.8; EXPRESSED IN HEART, SIGNAL =   4; EXPRESSED IN ADULT LIVER, SIGNAL = 6.1; EXPRESSED IN HELA, SIGNAL = 5.1; EXPRESSED IN PLACENTA, SIGNAL =   5; EXPRESSED IN BONE MARROW, SIGNAL = 8.2; EXPRESSED IN FETAL LIVER, SIGNAL = 6.8; EXPRESSED IN BRAIN, SIGNAL = 5.3; NT HIT: AF314254.1, EVALUE 1.80e+00; EST_HUMAN HIT: BF345073.1, EVALUE 2.60e+00; SWISSPROT HIT: Q14112, EVALUE 3.80e+00
ccccagcctggaaacattgactctagagacttccatggtttctgtagtgaggaggcaacaacaagcccaggcagctgtgaggtggccctgtcaggcccctcaaaggtaggggttggctccaagcaggcccctatctctttcttctttactgtggcttcggctgcatctgtttcagctggctcccaggcac

SEQ ID NO: 26439 - DNA, 172 bp, Homo sapiens
  MAP TO Z95114.19; EXPRESSED IN HEART, SIGNAL = 6.8; EXPRESSED IN BONE MARROW, SIGNAL = 1.9; EXPRESSED IN FETAL LIVER, SIGNAL =  34; EXPRESSED IN ADULT LIVER, SIGNAL =  24; EXPRESSED IN HELA, SIGNAL =   9; EXPRESSED IN PLACENTA, SIGNAL =  38; EXPRESSED IN BRAIN, SIGNAL =   2; EXPRESSED IN LUNG, SIGNAL =  11; EST_HUMAN HIT: T94149.1, EVALUE 7.00e-16; SWISSPROT HIT: P12107, EVALUE 4.50e-01; NT HIT: AF272662.1, EVALUE 6.20e+00
aatatcctccagtagcccagtaaacctaggaaaacctgcagttgctttactgtctgaggaacagcatggatgcgggcttgatggtcccctggggcccatcggagtctcttcccaggaaattggaggacctgaaggaaaacccttagaggcagcaggcagtggagctgaggcc

SEQ ID NO: 26440 - DNA, 146 bp, Homo sapiens
  MAP TO Z95114.19; EXPRESSED IN PLACENTA, SIGNAL =   4; EXPRESSED IN BONE MARROW, SIGNAL =   3; EXPRESSED IN LUNG, SIGNAL = 3.7; EXPRESSED IN FETAL LIVER, SIGNAL = 5.5; EXPRESSED IN ADULT LIVER, SIGNAL = 5.8; EXPRESSED IN BRAIN, SIGNAL = 1.9; EXPRESSED IN HELA, SIGNAL = 2.8; EXPRESSED IN HEART, SIGNAL = 2.2; NT HIT: AF057720.1, EVALUE 4.00e-59; EST_HUMAN HIT: R86259.1, EVALUE 2.00e-56; SWISSPROT HIT: Q61576, EVALUE 9.00e+00
ggactgatttcatattgttcaaccacacatgttttacaatcaatttgtacagttcacataattatcactgtggtcctgaggtgacgtacatcctcagcttaggaagataacaggattaagagattaaagtaaagacaggcataaga

SEQ ID NO: 26441 - DNA, 79 bp, Homo sapiens
  MAP TO Z97055.1; EXPRESSED IN PLACENTA, SIGNAL = 9.4; EXPRESSED IN HELA, SIGNAL = 8.6; EXPRESSED IN BRAIN, SIGNAL =  14; EXPRESSED IN BONE MARROW, SIGNAL =  16; EXPRESSED IN HEART, SIGNAL = 8.4; EXPRESSED IN LUNG, SIGNAL =  11; EXPRESSED IN ADULT LIVER, SIGNAL = 9.5; EXPRESSED IN FETAL LIVER, SIGNAL =  10; NT HIT: AL163278.2, EVALUE 7.00e-04; EST_HUMAN HIT: AW890110.1, EVALUE 6.00e-05
aacaagcctcaatacatttaaaaggattgaaattatcagagtataatctccaaccatacagaatgaaaacagaaattga

SEQ ID NO: 26442 - DNA, 169 bp, Homo sapiens
  MAP TO Z97055.1; EXPRESSED IN ADULT LIVER, SIGNAL = 3.4; EXPRESSED IN BRAIN, SIGNAL = 2.5; EXPRESSED IN HELA, SIGNAL = 2.3; EXPRESSED IN PLACENTA, SIGNAL = 2.6; EXPRESSED IN BONE MARROW, SIGNAL = 2.4; EXPRESSED IN HEART, SIGNAL = 2.1; EXPRESSED IN LUNG, SIGNAL = 2.3; EXPRESSED IN FETAL LIVER, SIGNAL = 3.1; NT HIT: U32622.1, EVALUE 3.90e-01; SWISSPROT HIT: P32927, EVALUE 7.80e-01; EST_HUMAN HIT: AV741272.1, EVALUE 1.50e-01
tcatgttgctgtgggacaaacagggggcatggggctgtggccacactgggccccttgcagagcagtgagggcaaatacaccgctgccgaggtgggggcctgggagggcaccaatcttcctcatcacagctgggcagctggaagccagcccaggccccagtagatccacc

SEQ ID NO: 26443 - DNA, 316 bp, Homo sapiens
  MAP TO Z97055.1; EXPRESSED IN LUNG, SIGNAL = 3.4; EXPRESSED IN ADULT LIVER, SIGNAL = 1.5; EXPRESSED IN FETAL LIVER, SIGNAL = 2.7; EXPRESSED IN PLACENTA, SIGNAL = 1.8; EXPRESSED IN BRAIN, SIGNAL = 4.7; EXPRESSED IN HELA, SIGNAL = 2.4; EXPRESSED IN BONE MARROW, SIGNAL = 2.7; EXPRESSED IN HEART, SIGNAL = 3.4; SWISSPROT HIT: P20138, EVALUE 2.00e+00; NT HIT: J05451.1, EVALUE 4.90e-02; EST_HUMAN HIT: AA279333.1, EVALUE 8.00e-05
acccagcccctgcctgccctgctccccccgacccccacccactgccggcccttccctccttcagtctcaccccagggcctttgcacctgccattgccttcacctgcaaaacccagcctctcatcctcagtctcagctcagttgtcacctcaggaaggccttcctgggccacccgggccaatgttgctctcacccccaccctgcctcactctcacacgatcttgttttcttcacggccccaccactcctggaaaaatctcatatttacattttcccgtttgttgttcagcatctgctcccgcacgcccaccagaatg

SEQ ID NO: 26444 - DNA, 77 bp, Homo sapiens
  MAP TO Z97055.1; EXPRESSED IN LUNG, SIGNAL = 6.1; EXPRESSED IN FETAL LIVER, SIGNAL = 6.1; EXPRESSED IN BRAIN, SIGNAL = 5.9; EXPRESSED IN HELA, SIGNAL = 5.4; EXPRESSED IN HEART, SIGNAL = 5.2; EXPRESSED IN BONE MARROW, SIGNAL = 5.7; EXPRESSED IN ADULT LIVER, SIGNAL = 4.2; EXPRESSED IN PLACENTA, SIGNAL = 4.3; NT HIT: S70330.1, EVALUE 1.00e-02; EST_HUMAN HIT: BE873355.1, EVALUE 2.30e-01
ctattgcaccaatttgaagagctctgtcctgtggatgatgttcaggctctccagcccagacctctctggcacaccca

SEQ ID NO: 26445 - DNA, 434 bp, Homo sapiens
  MAP TO Z98884.11; EXPRESSED IN HEART, SIGNAL = 1.6; EST_HUMAN HIT: BE177449.1, EVALUE 0.00e+00; NT HIT: AJ243211.1, EVALUE 2.70e-01; SWISSPROT HIT: Q09317, EVALUE 7.50e+00
agccacaccggtatctgaggggtggcaagtgtctgagaaagtgtgttccaggcagagggagcagcaggcgcagaggccctggggtgggccatgcctggcctgtgggaggagtgacacggagctgctgtggcctgagtggaggaaggaacgaggatggaagaagacgggaaagcacgggccacaccacagggagcagtgacttctgcacgaagtgttttatttcagtttatcacttgcttattttcaaaacgttttactttgggaattttcaaacataacacaaaagaagagaagataatgtaatgaactgctgcggtgtcatcacccagctttttaagaactcgaaccctggccagtctggcgtcatctctgccagcagcagttctttaaccccctcttcccaggttaccagacagcgtagctcagatctcgtc

SEQ ID NO: 26446 - DNA, 591 bp, Homo sapiens; identical to SEQ ID NO: 9418
  MAP TO AC004624.6; EXPRESSED IN LUNG, SIGNAL = 2.2; EXPRESSED IN HEART, SIGNAL =   2; EXPRESSED IN ADULT LIVER, SIGNAL = 4.3; EXPRESSED IN HELA, SIGNAL = 2.2; EXPRESSED IN PLACENTA, SIGNAL =  13; EXPRESSED IN BONE MARROW, SIGNAL = 1.9; EXPRESSED IN FETAL LIVER, SIGNAL = 4.4; EXPRESSED IN BRAIN, SIGNAL = 2.5; SWISSPROT HIT: P19236, EVALUE 1.70e+00; NT HIT: gi9628932, EVALUE 1.50e+00; EST_HUMAN HIT: AW157571.1, EVALUE 8.00e-28

SEQ ID NO: 26447 - DNA, 576 bp, Homo sapiens; identical to SEQ ID NO: 9096
  MAP TO AC004624.6; EXPRESSED IN FETAL LIVER, SIGNAL = 7.2; EXPRESSED IN PLACENTA, SIGNAL = 4.7; EXPRESSED IN HEART, SIGNAL = 2.8; EXPRESSED IN BONE MARROW, SIGNAL = 6.4; EXPRESSED IN LUNG, SIGNAL = 5.4; EXPRESSED IN ADULT LIVER, SIGNAL = 6.7; EXPRESSED IN BRAIN, SIGNAL = 3.5; EXPRESSED IN HELA, SIGNAL = 4.8; NT HIT: AF051654.1, EVALUE 1.40e+00; EST_HUMAN HIT: AV742623.1, EVALUE 5.40e-01; SWISSPROT HIT: Q04047, EVALUE 5.00e-02

SEQ ID NO: 26448 - DNA, 575 bp, Homo sapiens; identical to SEQ ID NO: 9031
  MAP TO AC007567.1; EXPRESSED IN HEART, SIGNAL = 2.7; EXPRESSED IN FETAL LIVER, SIGNAL = 1.8; EXPRESSED IN ADULT LIVER, SIGNAL = 2.4; EXPRESSED IN PLACENTA, SIGNAL =   3; EXPRESSED IN HELA, SIGNAL = 1.4; EXPRESSED IN LUNG, SIGNAL = 1.3; EXPRESSED IN BONE MARROW, SIGNAL = 1.4; EST_HUMAN HIT: AI872137.1, EVALUE 0.00e+00; SWISSPROT HIT: P11260, EVALUE 3.00e-05; NT HIT: AL163246.2, EVALUE 0.00e+00

SEQ ID NO: 26449 - DNA, 572 bp, Homo sapiens; identical to SEQ ID NO: 9382
  MAP TO AC007567.1; EXPRESSED IN LUNG, SIGNAL = 1.5; EXPRESSED IN HEART, SIGNAL = 1.6; EXPRESSED IN FETAL LIVER, SIGNAL = 1.5; EXPRESSED IN BRAIN, SIGNAL = 1.3; NT HIT: AJ277661.1, EVALUE 3.00e-11; EST_HUMAN HIT: BE090210.1, EVALUE 0.00e+00; SWISSPROT HIT: P43368, EVALUE 2.90e+00

SEQ ID NO: 26450 - DNA, 555 bp, Homo sapiens; identical to SEQ ID NO: 9540
  MAP TO AC008009.4; EXPRESSED IN ADULT LIVER, SIGNAL = 1.6; EXPRESSED IN HELA, SIGNAL = 1.6; EXPRESSED IN PLACENTA, SIGNAL = 2.3; EXPRESSED IN LUNG, SIGNAL = 1.2; EXPRESSED IN HEART, SIGNAL = 1.7; EXPRESSED IN FETAL LIVER, SIGNAL = 1.5; NT HIT: X92985.1, EVALUE 8.90e-02; EST_HUMAN HIT: BE439792.1, EVALUE 0.00e+00

SEQ ID NO: 26451 - DNA, 574 bp, Homo sapiens; identical to SEQ ID NO: 9947
  MAP TO AC008022.1; EXPRESSED IN HEART, SIGNAL = 3.5; EST_HUMAN HIT: BE699410.1, EVALUE 6.00e-10; NT HIT: AL161574.2, EVALUE 3.60e-01
  unsure 386
  unsure 408
  unsure 412

SEQ ID NO: 26452 - DNA, 582 bp, Homo sapiens; identical to SEQ ID NO: 9225
  MAP TO AC008151.1; EXPRESSED IN FETAL LIVER, SIGNAL = 3.5; EXPRESSED IN ADULT LIVER, SIGNAL =   3; EXPRESSED IN HELA, SIGNAL = 2.4; EXPRESSED IN PLACENTA, SIGNAL = 3.3; EXPRESSED IN BRAIN, SIGNAL = 2.8; EXPRESSED IN LUNG, SIGNAL = 2.6; EXPRESSED IN BONE MARROW, SIGNAL = 5.7; EXPRESSED IN HEART, SIGNAL = 2.3; NT HIT: X91192.1, EVALUE 2.00e-03; EST_HUMAN HIT: AW380519.1, EVALUE 6.00e-04; SWISSPROT HIT: Q05496, EVALUE 3.80e+00

SEQ ID NO: 26453 - DNA, 588 bp, Homo sapiens; identical to SEQ ID NO: 9467
  MAP TO AC008166.1; EXPRESSED IN ADULT LIVER, SIGNAL = 2.8; EXPRESSED IN PLACENTA, SIGNAL = 2.7; EXPRESSED IN BRAIN, SIGNAL = 2.1; EXPRESSED IN LUNG, SIGNAL = 1.8; EXPRESSED IN HEART, SIGNAL = 1.5; EXPRESSED IN BONE MARROW, SIGNAL = 2.6; EXPRESSED IN FETAL LIVER, SIGNAL = 1.8; NT HIT: AF163864.1, EVALUE 2.00e-49; EST_HUMAN HIT: H41159.1, EVALUE 1.00e-45; SWISSPROT HIT: P48651, EVALUE 6.70e+00

SEQ ID NO: 26454 - DNA, 572 bp, Homo sapiens; identical to SEQ ID NO: 9498
  MAP TO AL022312.7; EXPRESSED IN FETAL LIVER, SIGNAL = 1.9; EXPRESSED IN PLACENTA, SIGNAL = 3.5; EXPRESSED IN BRAIN, SIGNAL = 2.4; EXPRESSED IN HELA, SIGNAL =   2; EXPRESSED IN BONE MARROW, SIGNAL = 1.5; EXPRESSED IN HEART, SIGNAL = 1.6; EXPRESSED IN LUNG, SIGNAL = 1.9; EXPRESSED IN ADULT LIVER, SIGNAL = 1.6; SWISSPROT HIT: P54487, EVALUE 5.70e-01; NT HIT: AJ251793.1, EVALUE 3.60e-01; EST_HUMAN HIT: AI204914.1, EVALUE 0.00e+00

SEQ ID NO: 26455 - DNA, 583 bp, Homo sapiens; identical to SEQ ID NO: 9808
  MAP TO AL031588.1; EXPRESSED IN LUNG, SIGNAL = 1.2; EXPRESSED IN FETAL LIVER, SIGNAL = 1.4; EXPRESSED IN HELA, SIGNAL = 1.4; EXPRESSED IN BRAIN, SIGNAL = 1.8; EXPRESSED IN HEART, SIGNAL = 1.4; NT HIT: AF183401.1, EVALUE 6.00e-03; EST_HUMAN HIT: AU142880.1, EVALUE 5.50e-01; SWISSPROT HIT: Q02388, EVALUE 5.00e-03

SEQ ID NO: 26456 - DNA, 582 bp, Homo sapiens; identical to SEQ ID NO: 9896
  MAP TO AL035682.16; EXPRESSED IN FETAL LIVER, SIGNAL = 3.2; EXPRESSED IN ADULT LIVER, SIGNAL = 3.2; EXPRESSED IN PLACENTA, SIGNAL = 2.9; EXPRESSED IN BRAIN, SIGNAL = 2.1; EXPRESSED IN HELA, SIGNAL = 1.5; EXPRESSED IN BONE MARROW, SIGNAL = 2.2; EXPRESSED IN LUNG, SIGNAL = 1.9; EXPRESSED IN HEART, SIGNAL =   2; SWISSPROT HIT: P12276, EVALUE 2.60e-01; NT HIT: AF100956.1, EVALUE 9.30e-02; EST_HUMAN HIT: AU150281.1, EVALUE 2.20e+00

SEQ ID NO: 26457 - DNA, 588 bp, Homo sapiens; identical to SEQ ID NO: 9083
  MAP TO AL079300.11; EXPRESSED IN ADULT LIVER, SIGNAL = 7.2; EXPRESSED IN HELA, SIGNAL = 3.6; EXPRESSED IN PLACENTA, SIGNAL = 7.7; EXPRESSED IN BONE MARROW, SIGNAL =  11; EXPRESSED IN FETAL LIVER, SIGNAL = 6.5; EXPRESSED IN BRAIN, SIGNAL = 1.8; EXPRESSED IN HEART, SIGNAL = 3.4; EXPRESSED IN LUNG, SIGNAL = 3.4; NT HIT: U31815.1, EVALUE 9.40e-02; EST_HUMAN HIT: BF438131.1, EVALUE 1.40e-01

SEQ ID NO: 26458 - DNA, 560 bp, Homo sapiens; identical to SEQ ID NO: 9221
  MAP TO AP000041.1; EXPRESSED IN LUNG, SIGNAL = 2.6; EXPRESSED IN BONE MARROW, SIGNAL = 1.7; EXPRESSED IN HEART, SIGNAL = 1.3; EXPRESSED IN FETAL LIVER, SIGNAL = 2.4; EXPRESSED IN ADULT LIVER, SIGNAL = 2.1; EXPRESSED IN BRAIN, SIGNAL = 1.5; EXPRESSED IN PLACENTA, SIGNAL =   2; EXPRESSED IN HELA, SIGNAL = 1.9; NT HIT: AL161500.2, EVALUE 1.40e+00; EST_HUMAN HIT: BF446704.1, EVALUE 2.10e+00; SWISSPROT HIT: P38110, EVALUE 6.30e+00

SEQ ID NO: 26459 - DNA, 551 bp, Homo sapiens; identical to SEQ ID NO: 9033
  MAP TO AP000053.1; EXPRESSED IN PLACENTA, SIGNAL = 5.5; EXPRESSED IN BONE MARROW, SIGNAL = 6.6; EXPRESSED IN HEART, SIGNAL = 3.4; EXPRESSED IN LUNG, SIGNAL = 5.6; EXPRESSED IN ADULT LIVER, SIGNAL =   8; EXPRESSED IN FETAL LIVER, SIGNAL = 8.2; EXPRESSED IN BRAIN, SIGNAL = 3.9; EXPRESSED IN HELA, SIGNAL = 5.1; NT HIT: AL163209.2, EVALUE 1.00e-40; EST_HUMAN HIT: AI190993.1, EVALUE 0.00e+00; SWISSPROT HIT: Q08210, EVALUE 3.60e+00

SEQ ID NO: 26460 - DNA, 578 bp, Homo sapiens; identical to SEQ ID NO: 9145
  MAP TO AP000347.1; EXPRESSED IN HEART, SIGNAL = 1.6; EXPRESSED IN BONE MARROW, SIGNAL = 1.5; EXPRESSED IN LUNG, SIGNAL =   2; EXPRESSED IN FETAL LIVER, SIGNAL = 1.6; EXPRESSED IN PLACENTA, SIGNAL = 1.4; EXPRESSED IN HELA, SIGNAL = 1.4; NT HIT: gi11418657, EVALUE 3.70e-01; EST_HUMAN HIT: W26785.1, EVALUE 1.00e-48; SWISSPROT HIT: P19382, EVALUE 2.90e+00

SEQ ID NO: 26461 - DNA, 572 bp, Homo sapiens; identical to SEQ ID NO: 9426
  MAP TO Z82188.2; EXPRESSED IN LUNG, SIGNAL = 3.2; EXPRESSED IN HEART, SIGNAL = 2.3; EXPRESSED IN BONE MARROW, SIGNAL = 2.8; EXPRESSED IN ADULT LIVER, SIGNAL =   3; EXPRESSED IN HELA, SIGNAL = 2.4; EXPRESSED IN PLACENTA, SIGNAL = 2.7; EXPRESSED IN FETAL LIVER, SIGNAL =   2; EXPRESSED IN BRAIN, SIGNAL = 4.4; NT HIT: AF068757.1, EVALUE 0.00e+00; EST_HUMAN HIT: T03800.1, EVALUE 5.40e-01; SWISSPROT HIT: Q09531, EVALUE 4.90e+00

SEQ ID NO: 26462 - DNA, 555 bp, Homo sapiens; identical to SEQ ID NO: 9329
  MAP TO Z82188.2; EXPRESSED IN PLACENTA, SIGNAL = 3.4; EXPRESSED IN BRAIN, SIGNAL = 6.6; EXPRESSED IN LUNG, SIGNAL = 5.7; EXPRESSED IN BONE MARROW, SIGNAL =   3; EXPRESSED IN HEART, SIGNAL = 4.2; EXPRESSED IN FETAL LIVER, SIGNAL = 4.3; EXPRESSED IN ADULT LIVER, SIGNAL = 4.6; EXPRESSED IN HELA, SIGNAL = 3.8; NT HIT: AF129756.1, EVALUE 9.00e-05; EST_HUMAN HIT: AI685151.1, EVALUE 1.00e-04; SWISSPROT HIT: P03211, EVALUE 4.80e-02

SEQ ID NO: 26463 - DNA, 573 bp, Homo sapiens; identical to SEQ ID NO: 9961
  MAP TO Z82201.1; EXPRESSED IN HEART, SIGNAL = 1.3; EXPRESSED IN LUNG, SIGNAL = 1.7; EXPRESSED IN BONE MARROW, SIGNAL = 1.8; EXPRESSED IN FETAL LIVER, SIGNAL = 1.7; EXPRESSED IN BRAIN, SIGNAL = 1.6; SWISSPROT HIT: P04929, EVALUE 5.00e-02; NT HIT: gi11426388, EVALUE 2.30e-02; EST_HUMAN HIT: BE407615.1, EVALUE 3.50e-02

SEQ ID NO: 26464 - DNA, 575 bp, Homo sapiens; identical to SEQ ID NO: 9180
  MAP TO Z83844.5; EXPRESSED IN LUNG, SIGNAL =   2; EXPRESSED IN HEART, SIGNAL = 2.4; EXPRESSED IN FETAL LIVER, SIGNAL = 2.6; EXPRESSED IN ADULT LIVER, SIGNAL = 1.4; EXPRESSED IN PLACENTA, SIGNAL = 2.9; EXPRESSED IN HELA, SIGNAL = 1.7; EXPRESSED IN BRAIN, SIGNAL = 1.7; EXPRESSED IN BONE MARROW, SIGNAL =   2; EST_HUMAN HIT: AI903497.1, EVALUE 0.00e+00; NT HIT: gi11418079, EVALUE 1.00e-28; SWISSPROT HIT: P23206, EVALUE 1.90e-01

SEQ ID NO: 26465 - DNA, 246 bp, Homo sapiens
  MAP TO AC002472.3; EXPRESSED IN LUNG, SIGNAL = 4.1; EXPRESSED IN HELA, SIGNAL = 4.1; EXPRESSED IN PLACENTA, SIGNAL = 3.9; EXPRESSED IN BONE MARROW, SIGNAL =   4; EXPRESSED IN HEART, SIGNAL = 2.7; EXPRESSED IN ADULT LIVER, SIGNAL = 1.8; EXPRESSED IN FETAL LIVER, SIGNAL = 2.9; EXPRESSED IN BRAIN, SIGNAL = 4.6; EST_HUMAN HIT: AI205604.1, EVALUE 3.00e-56; SWISSPROT HIT: P09645, EVALUE 1.00e-19; NT HIT: L11645.1, EVALUE 2.00e-59
ttgcgagcctcagaggactccccctcctccatgccttcccccatgtaccattgcacaaaggcctgcttggcatacatgagatcaaacttatggtccaggcaggcccaggccttggtgatggctgtgatgttgcttagcatccacatggcccattgcaacttggtcaggtttcccccagggaccaccgtcaggggctggtagttaatgcccacctgccagagaagggcaagaaagcggtccgtgaag

SEQ ID NO: 26466 - DNA, 720 bp, Homo sapiens
  MAP TO AL035682.16; EXPRESSED IN FETAL LIVER, SIGNAL = 2.5; EXPRESSED IN ADULT LIVER, SIGNAL = 2.2; EXPRESSED IN PLACENTA, SIGNAL = 3.1; EXPRESSED IN HELA, SIGNAL = 1.8; EXPRESSED IN BRAIN, SIGNAL = 2.2; EXPRESSED IN BONE MARROW, SIGNAL = 2.6; EXPRESSED IN LUNG, SIGNAL = 2.6; EXPRESSED IN HEART, SIGNAL = 2.8; NT HIT: gi10092587, EVALUE 0.00e+00; EST_HUMAN HIT: BE090034.1, EVALUE 6.80e-01; SWISSPROT HIT: Q13469, EVALUE 0.00e+00
acaggcagtgacaaaactcaagcgtcttaccatcatccaagtaggtctggtccaagttctgctcctgtttaatggtcacccccgcaggtaatacttccttttggtcactgaccgggggtccgtttttggcggctctttggctcgtggcattctgctgctgaatgactgtggggtaggaacccgggctcagcctctgaccttgactgaccgggggcgggccaggtctggtggtgcctggtgcgaaattctcgcagtacatgatgtgctggaactcctggtggcttccgcagcgcagctgctggttggtgggtgagtagtggatcacaggcgaggcctgctggttggtcggagaggggtggagcagggctgagctctggccctgggagccggcgtgcaccagcacagagcggtgagcgtccgcaagggacagcggggcggccatgagggccggctgctgatagcccagcaggctggggctcaggctcttgctccgctggtagagtacggccgctgggttctgttgctggtagcgggcgtcaggggatgagagccccgtgcggaactgctggcagggagccatggtggccacgaggcaggagggggactcggccaccatcgggtgctgggggtagtaaggctggctccccaggcctccatgggtggggctgcagatcagagtggggtcatattcatccgtgggctccgtcttgatggctggga

SEQ ID NO: 26467 - DNA, 213 bp, Homo sapiens
  MAP TO AP000344.1; EXPRESSED IN BRAIN, SIGNAL = 7.3; EXPRESSED IN LUNG, SIGNAL = 6.7; EXPRESSED IN ADULT LIVER, SIGNAL = 6.5; EXPRESSED IN HELA, SIGNAL = 6.4; EXPRESSED IN PLACENTA, SIGNAL = 6.8; EXPRESSED IN BONE MARROW, SIGNAL = 4.5; EXPRESSED IN HEART, SIGNAL = 5.8; EXPRESSED IN FETAL LIVER, SIGNAL = 7.8; NT HIT: gi5834843, EVALUE 2.00e+00; EST_HUMAN HIT: T68622.1, EVALUE 3.00e+00
ctcaaacccactgtgggcttgtcagcatggtactatgacagtgctgatgacagtagtgaggatgggctcagtcacagcgaccatagtgacggaggtgtggtgatggtgatggaggtagtgatggtgatagtgatggtgatggtggtggcgatggaggtagtgatggaggtggtgttactggcggtggtggtgtggaagcggtgatgggggtgg

SEQ ID NO: 26468 - DNA, 276 bp, Homo sapiens
  MAP TO AC002472.3; EXPRESSED IN BRAIN, SIGNAL = 1.9; EXPRESSED IN LUNG, SIGNAL = 1.6; EXPRESSED IN ADULT LIVER, SIGNAL = 1.6; EXPRESSED IN HELA, SIGNAL =   2; EXPRESSED IN PLACENTA, SIGNAL = 3.6; EXPRESSED IN BONE MARROW, SIGNAL = 1.7; EXPRESSED IN HEART, SIGNAL = 2.7; EXPRESSED IN FETAL LIVER, SIGNAL = 3.6; NT HIT: AB002059.1, EVALUE 1.00e-111; EST_HUMAN HIT: AL134889.1, EVALUE 1.00e-116; SWISSPROT HIT: P02551, EVALUE 8.00e-36
tcacacttgaccatctgattggctggctcgaagtgggcactggcgatctcggccacggacagctgctcgtggtaggccttctcggctgagatgatcaaggcataggtggccagggggaggtggatgtgggtgtacggcaccaggttggtttggaattctgtcaagtacacattcagggccccaacgaatcacagggaggccgtgatggaggacacgatctgcccaatcagacgactgaggttggtgtacatgggacactcgatgtccaggttgcac

SEQ ID NO: 26469 - DNA, 83 bp, Homo sapiens
  MAP TO AC004032.7; EXPRESSED IN HEART, SIGNAL = 5.1; EXPRESSED IN BONE MARROW, SIGNAL =  12; EXPRESSED IN LUNG, SIGNAL =  11; EXPRESSED IN FETAL LIVER, SIGNAL = 8.6; EXPRESSED IN ADULT LIVER, SIGNAL = 6.4; EXPRESSED IN PLACENTA, SIGNAL = 5.3; EXPRESSED IN HELA, SIGNAL = 9.1; EXPRESSED IN BRAIN, SIGNAL = 6.9; NT HIT: AB039887.1, EVALUE 1.70e-01; EST_HUMAN HIT: H55593.1, EVALUE 1.00e-30
ggtttgacagaagcgcacagcgcaatgtcaaggctgctgcagaggggtctgcagaagacaggcccagactgccagaggatcat

SEQ ID NO: 26470 - DNA, 110 bp, Homo sapiens
  MAP TO AC004832.3; EXPRESSED IN PLACENTA, SIGNAL = 3.2; EXPRESSED IN BRAIN, SIGNAL = 3.3; EXPRESSED IN BONE MARROW, SIGNAL = 3.4; EXPRESSED IN LUNG, SIGNAL = 2.4; EXPRESSED IN HEART, SIGNAL = 2.2; EXPRESSED IN FETAL LIVER, SIGNAL = 2.6; EXPRESSED IN ADULT LIVER, SIGNAL = 2.8; EXPRESSED IN HELA, SIGNAL = 2.4; NT HIT: AE002185.2, EVALUE 9.40e-01; SWISSPROT HIT: P74101, EVALUE 6.30e-01; EST_HUMAN HIT: H80814.1, EVALUE 3.50e-01
gtgcctggtgaacggcaagaacttccactcccacttcgtgccccaagaggtccccaagagactggagctctccttccaggccttcagctttactggtactcctgctgatg

SEQ ID NO: 26471 - DNA, 95 bp, Homo sapiens
  MAP TO AC004832.3; EXPRESSED IN PLACENTA, SIGNAL = 1.6; EXPRESSED IN HEART, SIGNAL = 1.8; EXPRESSED IN BONE MARROW, SIGNAL = 2.2; EXPRESSED IN ADULT LIVER, SIGNAL = 3.6; EXPRESSED IN FETAL LIVER, SIGNAL = 3.6; EXPRESSED IN BRAIN, SIGNAL =   2; EXPRESSED IN HELA, SIGNAL = 1.9; EXPRESSED IN LUNG, SIGNAL = 1.6; NT HIT: gi11417966, EVALUE 9.00e-47; EST_HUMAN HIT: BE548918.1, EVALUE 1.00e-46; SWISSPROT HIT: P49193, EVALUE 1.10e-02
tggggaggaaggtggagaccatcaccataatttatgactgcgaggggcttggcctcaagcatctctggaagcctgctgtggaggcctatggagag

SEQ ID NO: 26472 - DNA, 85 bp, Homo sapiens
  MAP TO AC005006.2; EXPRESSED IN HEART, SIGNAL = 4.8; EXPRESSED IN BONE MARROW, SIGNAL =  11; EXPRESSED IN LUNG, SIGNAL =  11; EXPRESSED IN FETAL LIVER, SIGNAL =   9; EXPRESSED IN ADULT LIVER, SIGNAL = 8.6; EXPRESSED IN PLACENTA, SIGNAL = 8.6; EXPRESSED IN BRAIN, SIGNAL = 4.4; EXPRESSED IN HELA, SIGNAL = 5.9; NT HIT: gi11417972, EVALUE 7.00e-41; EST_HUMAN HIT: BF445128.1, EVALUE 1.00e-40; SWISSPROT HIT: P28477, EVALUE 7.30e+00
tcactccggccttgccttcttggccttcttctcagacctcaccgcctcatcgtgggctttccgcttctccgccagcttgttggcc

SEQ ID NO: 26473 - DNA, 79 bp, Homo sapiens
  MAP TO AC006548.19; EXPRESSED IN LUNG, SIGNAL = 2.4; EXPRESSED IN BONE MARROW, SIGNAL = 3.2; EXPRESSED IN HEART, SIGNAL = 1.6; EXPRESSED IN FETAL LIVER, SIGNAL = 3.2; EXPRESSED IN ADULT LIVER, SIGNAL = 1.7; EXPRESSED IN HELA, SIGNAL = 2.1; EXPRESSED IN PLACENTA, SIGNAL = 4.3; EXPRESSED IN BRAIN, SIGNAL = 2.9; NT HIT: X83528.1, EVALUE 6.30e-01; EST_HUMAN HIT: AI126906.1, EVALUE 9.40e-01; SWISSPROT HIT: Q99759, EVALUE 5.60e+00
cagcaccacggccaggctctctggctgcccattgtcttgaaacatgtatgtgcctggatctaggaactggtgggcaaac

SEQ ID NO: 26474 - DNA, 120 bp, Homo sapiens
  MAP TO AC007556.2; EXPRESSED IN LUNG, SIGNAL = 4.1; EXPRESSED IN HEART, SIGNAL =   3; EXPRESSED IN BONE MARROW, SIGNAL = 4.2; EXPRESSED IN FETAL LIVER, SIGNAL = 3.2; EXPRESSED IN ADULT LIVER, SIGNAL = 3.9; EXPRESSED IN BRAIN, SIGNAL =   3; EXPRESSED IN PLACENTA, SIGNAL =   4; EXPRESSED IN HELA, SIGNAL = 3.1; NT HIT: gi11430460, EVALUE 1.00e-61; EST_HUMAN HIT: T95481.1, EVALUE 3.90e-01; SWISSPROT HIT: P98164, EVALUE 1.00e-11
atgttccctgtaattcaccaaaccgtttccggtgtgacaacaatcgctgcatttatagtcatgaggtgtgcaatggtgtggatgactgtggagatggaactgatgagacagaggagcact

SEQ ID NO: 26475 - DNA, 299 bp, Homo sapiens
  MAP TO AC008151.1; EXPRESSED IN HEART, SIGNAL = 1.3; NT HIT: gi11434874, EVALUE 0.00e+00; SWISSPROT HIT: P30559, EVALUE 3.00e-26; EST_HUMAN HIT: W52156.1, EVALUE 1.00e-104
tcacgccgtggatggctgggagcagctcctctggctggagctgcgatggctcaggacaaaggaggacgagttgctctttttgctggcactcgtctctcccaggcgtctgcccttcaggtagctggcggagcagcacaggaagcgctgcacgagttcgtggaagaggtggcccgtgaacagcatgtagatccaggggttgcagcagctgttgaggctggccaggagcatgacgatgatgaaggccgaggctgagggggtgggggcaggagaaaggagaaaagggcattaattaacactgg

SEQ ID NO: 26476 - DNA, 89 bp, Homo sapiens
  MAP TO AL021707.2; EXPRESSED IN HEART, SIGNAL = 3.9; EXPRESSED IN ADULT LIVER, SIGNAL = 9.6; EXPRESSED IN FETAL LIVER, SIGNAL = 7.5; EXPRESSED IN BRAIN, SIGNAL =  10; EXPRESSED IN PLACENTA, SIGNAL = 6.9; EXPRESSED IN BONE MARROW, SIGNAL =  14; EXPRESSED IN LUNG, SIGNAL = 6.2; EXPRESSED IN HELA, SIGNAL = 8.8; NT HIT: AB046816.1, EVALUE 1.80e-01; EST_HUMAN HIT: BF334112.1, EVALUE 1.00e-40
tgcaaaatgacggtgctaatactcctcgtagtggtaatggtgatggtgctttgttgatgaagatgagtcttgcaggcagttttcattcc

SEQ ID NO: 26477 - DNA, 321 bp, Homo sapiens
  MAP TO AL022329.9; EXPRESSED IN PLACENTA, SIGNAL = 1.9; EXPRESSED IN HELA, SIGNAL = 1.5; EXPRESSED IN BRAIN, SIGNAL = 2.5; EXPRESSED IN HEART, SIGNAL = 1.4; EXPRESSED IN LUNG, SIGNAL = 2.1; EXPRESSED IN BONE MARROW, SIGNAL = 2.3; EXPRESSED IN ADULT LIVER, SIGNAL = 1.9; EXPRESSED IN FETAL LIVER, SIGNAL = 2.3; NT HIT: L29260.1, EVALUE 7.80e-01; EST_HUMAN HIT: AU141832.1, EVALUE 4.60e+00; SWISSPROT HIT: Q12196, EVALUE 2.10e+00
ctttcagttattatctcattcttggtccaagttaacttgtgccagtgacttgaagatgcaaggagtgcgtgtagatgtcaattcttagaaatggatgttccggtgaaatcagttttggacctagaatctgccaaagctgagcatcatgaaatgcttcgaatcgagagcctcatagatctctctgaggtacaggcagtcccagcttttacacgcaatggattcttagagacagcctcttacagtgttttccccagtacaccggactttgccaaacatctgtttggacaagggtggaaactatccgacgaaggtgtcaaggct

SEQ ID NO: 26478 - DNA, 112 bp, Homo sapiens
  MAP TO AL023553.5; EXPRESSED IN HEART, SIGNAL = 6.4; EXPRESSED IN BONE MARROW, SIGNAL = 1.7; EXPRESSED IN FETAL LIVER, SIGNAL = 3.2; EXPRESSED IN PLACENTA, SIGNAL = 1.9; EXPRESSED IN LUNG, SIGNAL = 2.5; EXPRESSED IN ADULT LIVER, SIGNAL = 1.6; EXPRESSED IN BRAIN, SIGNAL = 3.3; EXPRESSED IN HELA, SIGNAL = 2.7; NT HIT: gi11418185, EVALUE 8.00e-57; EST_HUMAN HIT: BE900742.1, EVALUE 1.00e-56; SWISSPROT HIT: Q99798, EVALUE 3.00e-16
gaaggacatcaagaagggggagaagaacacaatcgtcacctcctacaacaggaacttcacgggccgcaacgacgcaaaccccgagacccatgcctttgtcacgtccccagag

SEQ ID NO: 26479 - DNA, 101 bp, Homo sapiens
  MAP TO AL079295.1; EXPRESSED IN BONE MARROW, SIGNAL =  28; EXPRESSED IN LUNG, SIGNAL =  32; EXPRESSED IN HEART, SIGNAL =  33; EXPRESSED IN FETAL LIVER, SIGNAL =  53; EXPRESSED IN ADULT LIVER, SIGNAL =  61; EXPRESSED IN PLACENTA, SIGNAL =  30; EXPRESSED IN HELA, SIGNAL =  30; EXPRESSED IN BRAIN, SIGNAL = 4.4; NT HIT: gi11435118, EVALUE 9.00e-41; EST_HUMAN HIT: AA493896.1, EVALUE 8.00e-42; SWISSPROT HIT: Q16465, EVALUE 4.00e-09
ttggacctctgcctcatctttcttcttttgcgcttcagcctgcgcattcgcttcttcctccacttggctctcatggcacagaggtttccaaaaaaatggcg

SEQ ID NO: 26480 - DNA, 226 bp, Homo sapiens
  MAP TO AP000352.2; EXPRESSED IN FETAL LIVER, SIGNAL = 2.4; EXPRESSED IN PLACENTA, SIGNAL = 2.4; EXPRESSED IN BRAIN, SIGNAL = 1.4; EXPRESSED IN HELA, SIGNAL = 1.6; EXPRESSED IN HEART, SIGNAL =   2; EXPRESSED IN BONE MARROW, SIGNAL = 1.7; EXPRESSED IN LUNG, SIGNAL = 1.8; NT HIT: gi11417862, EVALUE 1.00e-124; EST_HUMAN HIT: AW129000.1, EVALUE 1.00e-124; SWISSPROT HIT: Q9Y6J0, EVALUE 1.00e-37
cctcggagagagcttgctggccatgtacaatcatctcaccacctgtgagcccccacgtcccagccttggcaaaaggattgatttgtcggactaccaggaccccagccagcctcttgagtcctccatggtggtgacgccagttaacgtgatccagccaagcactgtcagcaccaacccagctgtggctgtcgccgagcctgtggtctcctacacctctgtggctaca

SEQ ID NO: 26481 - DNA, 153 bp, Homo sapiens
  MAP TO AP000352.2; EXPRESSED IN FETAL LIVER, SIGNAL =  12; EXPRESSED IN BRAIN, SIGNAL = 3.6; EXPRESSED IN HELA, SIGNAL = 4.5; EXPRESSED IN PLACENTA, SIGNAL = 8.4; EXPRESSED IN BONE MARROW, SIGNAL = 3.4; EXPRESSED IN LUNG, SIGNAL = 4.8; EXPRESSED IN HEART, SIGNAL = 3.8; EXPRESSED IN ADULT LIVER, SIGNAL = 8.6; NT HIT: gi11417862, EVALUE 4.00e-81; EST_HUMAN HIT: AW818864.1, EVALUE 2.00e-37; SWISSPROT HIT: Q9Y6J0, EVALUE 1.00e-25
ggcagatttggacctgacttcccagggacccactgcctgggtgacctcctacagctgtcatttgcctcgtcccagcgcgacctgttcgaggatggttggctggagtttgtggtccgtgtttactggctgaaggctcgcttcctggcgctgcag

SEQ ID NO: 26482 - DNA, 125 bp, Homo sapiens
  MAP TO AP000356.1; EXPRESSED IN FETAL LIVER, SIGNAL = 1.7; EXPRESSED IN BRAIN, SIGNAL = 2.3; EXPRESSED IN HELA, SIGNAL = 1.6; EXPRESSED IN LUNG, SIGNAL =   2; EXPRESSED IN HEART, SIGNAL = 2.2; EXPRESSED IN ADULT LIVER, SIGNAL = 1.6; EST_HUMAN HIT: AW178575.1, EVALUE 3.00e-57; SWISSPROT HIT: O14556, EVALUE 1.40e+00; NT HIT: AF237613.1, EVALUE 4.30e+00
cagctctgggtcttcctctggcgcaggctggacccttgctgctgcttcgagtgaggggtgaggtggtagatgagctgtcggcagatcttgtccgaggacttccagagctcatagtcctgtgggag

SEQ ID NO: 26483 - DNA, 114 bp, Homo sapiens
  MAP TO Z83840.7; EXPRESSED IN LUNG, SIGNAL = 1.4; EXPRESSED IN HEART, SIGNAL = 1.8; EXPRESSED IN FETAL LIVER, SIGNAL = 1.7; EXPRESSED IN PLACENTA, SIGNAL = 1.4; EXPRESSED IN HELA, SIGNAL =   2; NT HIT: AJ250919.1, EVALUE 2.50e-01; EST_HUMAN HIT: BF028854.1, EVALUE 2.00e-46
tcccttttcatgtcatctttttcatcttttacctcacattgcattttctcttggcaatgtttgggtaccaccacagttgctatctcttgaacatctttcattaaaacatcaccg

SEQ ID NO: 26484 - DNA, 361 bp, Homo sapiens
  MAP TO AB016897.1; EXPRESSED IN HELA, SIGNAL = 2.5; EXPRESSED IN PLACENTA, SIGNAL =   3; EXPRESSED IN BRAIN, SIGNAL = 3.2; EXPRESSED IN HEART, SIGNAL = 2.5; EXPRESSED IN BONE MARROW, SIGNAL = 3.7; EXPRESSED IN LUNG, SIGNAL = 2.2; EXPRESSED IN ADULT LIVER, SIGNAL = 3.1; EXPRESSED IN FETAL LIVER, SIGNAL = 3.3; NT HIT: AF217490.1, EVALUE 5.70e-02; EST_HUMAN HIT: BF221593.1, EVALUE 3.30e-01; SWISSPROT HIT: Q02910, EVALUE 8.50e-01
cacggtagcaagtgacctcccactctaccaaatccaataaagagttttaaacaaggacccaagcgacctctccccaacaggtggcattctgcgtcacccactccctccctcttaactttctttctttggcttcggtgacttcatctgctttcttcttttctaatttgcatttgagaaagatttctacagcaacaacataaaggacaggtgggaggggtgctggactggaggcagaggccagttaggggatagccagggcgctgtttcattacactggacaatagcagtgggcatggggcagggagcaacccaaggctgcctacgaggcacagccgaggctctgtccccaggcagcgcgggg

SEQ ID NO: 26485 - DNA, 120 bp, Homo sapiens
  MAP TO AB016897.1; EXPRESSED IN PLACENTA, SIGNAL =  22; EXPRESSED IN HEART, SIGNAL = 1.3; EXPRESSED IN LUNG, SIGNAL = 1.5; EXPRESSED IN FETAL LIVER, SIGNAL = 1.6; NT HIT: AB011399.1, EVALUE 1.00e-61; EST_HUMAN HIT: AA069739.1, EVALUE 1.50e+00
ggctgtagccgttgagctccctgtgggggcctgtttcatcccgaggggactgcgtgttgctctgtgtggtttgagagaagctgctcttctctgttacttcccttctatgaaggtagaagc

SEQ ID NO: 26486 - DNA, 169 bp, Homo sapiens
  MAP TO AB016897.1; EXPRESSED IN PLACENTA, SIGNAL = 7.1; EXPRESSED IN FETAL LIVER, SIGNAL = 5.2; EXPRESSED IN BRAIN, SIGNAL = 4.9; EXPRESSED IN HELA, SIGNAL = 6.7; EXPRESSED IN BONE MARROW, SIGNAL = 6.2; EXPRESSED IN HEART, SIGNAL =   3; EXPRESSED IN LUNG, SIGNAL = 7.1; EXPRESSED IN ADULT LIVER, SIGNAL = 9.6; NT HIT: AJ007973.1, EVALUE 1.00e-47; SWISSPROT HIT: Q28983, EVALUE 7.80e-01; EST_HUMAN HIT: AI421782.1, EVALUE 7.00e-53
ggtggaggttcccaaacctcagttcttgacttctgtgcaccctcatgctcaacaccacgtggaagctaccaaggcttggggcttccaccctctgaagccacagcctgagctgtatgtcggcccctttcagtcatggctggagcatctggaacacagggcaccaagtccc

SEQ ID NO: 26487 - DNA, 211 bp, Homo sapiens
  MAP TO AB016897.1; EXPRESSED IN HELA, SIGNAL = 7.5; EXPRESSED IN PLACENTA, SIGNAL = 8.9; EXPRESSED IN BRAIN, SIGNAL =   4; EXPRESSED IN LUNG, SIGNAL = 8.4; EXPRESSED IN BONE MARROW, SIGNAL = 5.2; EXPRESSED IN HEART, SIGNAL =   3; EXPRESSED IN ADULT LIVER, SIGNAL =  13; EXPRESSED IN FETAL LIVER, SIGNAL =  17; NT HIT: AL163207.2, EVALUE 1.00e-63; EST_HUMAN HIT: AW855220.1, EVALUE 4.00e-61; SWISSPROT HIT: P96556, EVALUE 2.90e+00
aacaagctcctcatctccttctgagaccacctcagcctggaccttattgtccatattgctatcaggcttttggtcaaagccattcaacgagtctctaggaagttccaaactttcccacattttcctgtcttcctcagagcgctccaaactgttccaaaatctgcctgttacccagttccaaaattgcttccacattttggtgtatcttttc

SEQ ID NO: 26488 - DNA, 99 bp, Homo sapiens
  MAP TO AC002472.3; EXPRESSED IN BRAIN, SIGNAL = 1.5; EXPRESSED IN HELA, SIGNAL = 1.3; EXPRESSED IN LUNG, SIGNAL = 1.5; EXPRESSED IN HEART, SIGNAL = 1.4; EXPRESSED IN BONE MARROW, SIGNAL = 1.8; NT HIT: L32588.1, EVALUE 2.10e-01; EST_HUMAN HIT: BF130206.1, EVALUE 3.10e-01; SWISSPROT HIT: P45351, EVALUE 2.50e+00
ctgctgtgggcacagtggtcccctggggacctgctcccggcttgcctccctcctgtgtctgtcttctgctccctgtcctgctcagcactccctccccac

SEQ ID NO: 26489 - DNA, 116 bp, Homo sapiens
  MAP TO AC002472.3; EXPRESSED IN HELA, SIGNAL = 3.9; EXPRESSED IN PLACENTA, SIGNAL = 2.7; EXPRESSED IN BRAIN, SIGNAL = 2.7; EXPRESSED IN BONE MARROW, SIGNAL = 5.4; EXPRESSED IN LUNG, SIGNAL = 3.6; EXPRESSED IN HEART, SIGNAL = 3.6; EXPRESSED IN ADULT LIVER, SIGNAL = 4.2; EXPRESSED IN FETAL LIVER, SIGNAL = 4.9; NT HIT: AF107890.1, EVALUE 6.40e-02; EST_HUMAN HIT: BF526678.1, EVALUE 5.90e+00; SWISSPROT HIT: O13066, EVALUE 7.10e+00
tcagagcctcacccaccgcagaggctccaggatccccaaagccattgtatgagatgtctagaactttaaggaagatgtttgcctagaataccaaagagtgaagtcatgggacccca

SEQ ID NO: 26490 - DNA, 397 bp, Homo sapiens
  MAP TO AC002472.3; EXPRESSED IN FETAL LIVER, SIGNAL = 9.7; EXPRESSED IN ADULT LIVER, SIGNAL = 6.6; EXPRESSED IN PLACENTA, SIGNAL = 6.4; EXPRESSED IN BRAIN, SIGNAL = 7.9; EXPRESSED IN HELA, SIGNAL = 5.5; EXPRESSED IN HEART, SIGNAL = 4.7; EXPRESSED IN BONE MARROW, SIGNAL = 9.3; EXPRESSED IN LUNG, SIGNAL =   9; NT HIT: AF119361.1, EVALUE 9.80e-01; EST_HUMAN HIT: BE536360.1, EVALUE 3.70e-01; SWISSPROT HIT: O96433, EVALUE 1.20e-01
ctttgctcttcaagggctctgtcctgcaggctgggtggcagaaggccaggatatgagggcacagaggccctggggggatgccccgtggggatagagggaaacctggggagaaggtggaggggagtggggcagaggtggggccacaccaggagtgtgctgcggagtgagaggcagagcccgcagatgggataccgagagctctctgagacccgcgtgttgcagcatccaaacacacggagctccagctgccccagtaatggcagaatctggggtggagaacataagagggggttgtcagagtgatccagctggagggcatggaggccatagatttcacacaggacttgggtgtggagttctccaggccgcgggccaggcccactcaagcctgcctctg

SEQ ID NO: 26491 - DNA, 202 bp, Homo sapiens
  MAP TO AC004032.7; EXPRESSED IN LUNG, SIGNAL = 4.6; EXPRESSED IN HEART, SIGNAL = 3.4; EXPRESSED IN BONE MARROW, SIGNAL = 7.3; EXPRESSED IN ADULT LIVER, SIGNAL = 4.2; EXPRESSED IN BRAIN, SIGNAL = 6.9; EXPRESSED IN PLACENTA, SIGNAL = 3.8; EXPRESSED IN FETAL LIVER, SIGNAL = 6.3; EXPRESSED IN HELA, SIGNAL = 5.9; EST_HUMAN HIT: AA191097.1, EVALUE 4.50e-02; NT HIT: gi11426083, EVALUE 1.20e-01; SWISSPROT HIT: Q60564, EVALUE 3.80e+00
atggcagagttaggaggtccatcaagaccctggtcccatgatcttttgtctctgaagagcagcttttggagatgctctgtgccctggtttgttgaatcagggttcagctcatcccctggaaagggaggtctgctccttggctccctccagagatctgaagctaagcaaggaaggaggctgcagctgggccttcaggataccg

SEQ ID NO: 26492 - DNA, 167 bp, Homo sapiens
  MAP TO AC004032.7; EXPRESSED IN BRAIN, SIGNAL = 1.7; EXPRESSED IN HELA, SIGNAL = 1.3; EXPRESSED IN HEART, SIGNAL = 1.8; EXPRESSED IN BONE MARROW, SIGNAL =   2; EXPRESSED IN LUNG, SIGNAL = 1.2; NT HIT: AF291483.1, EVALUE 3.80e-01; SWISSPROT HIT: P04284, EVALUE 3.90e+00; EST_HUMAN HIT: BF341073.1, EVALUE 5.70e-01
gaagccagccgtcacccccacgcttcagctcctccttcgcataatgaatagcccaggagcctgcaggagagagagccatggccaaccaccaccagcacttcccccgggcaagccccatgatgacaccatccatcactgccaccctcggtggctgtgcgccccaggcc

SEQ ID NO: 26493 - DNA, 149 bp, Homo sapiens
  MAP TO AC004032.7; EXPRESSED IN BONE MARROW, SIGNAL = 2.2; EXPRESSED IN LUNG, SIGNAL = 1.8; EXPRESSED IN HEART, SIGNAL = 2.1; EXPRESSED IN ADULT LIVER, SIGNAL = 2.9; EXPRESSED IN FETAL LIVER, SIGNAL = 2.4; EXPRESSED IN HELA, SIGNAL = 1.9; EXPRESSED IN PLACENTA, SIGNAL = 1.8; EXPRESSED IN BRAIN, SIGNAL = 2.3; NT HIT: gi9838361, EVALUE 3.40e-01; EST_HUMAN HIT: BE537564.1, EVALUE 2.00e+00; SWISSPROT HIT: Q09201, EVALUE 2.30e+00
cttggatctaatctggggtgcccctccagcagatacgttctcctggacaaacatttctccctggtatgtgcccagaaccagcctgaagctggggatctcagcccacgccagtacccatggcctggtcctttcctgctgtgtggccgtag

SEQ ID NO: 26494 - DNA, 79 bp, Homo sapiens
  MAP TO AC004032.7; EXPRESSED IN HELA, SIGNAL = 1.9; EXPRESSED IN PLACENTA, SIGNAL = 2.2; EXPRESSED IN BRAIN, SIGNAL = 2.1; EXPRESSED IN HEART, SIGNAL = 1.6; EXPRESSED IN BONE MARROW, SIGNAL = 3.3; EXPRESSED IN LUNG, SIGNAL = 1.9; EXPRESSED IN ADULT LIVER, SIGNAL = 2.9; EXPRESSED IN FETAL LIVER, SIGNAL = 2.2; EST_HUMAN HIT: AW614596.1, EVALUE 4.00e-03; NT HIT: gi9790132, EVALUE 1.00e-02
cagatggggaaactgaagccctgagatgtgaagtccttcagcctcctagcaacaagcagcagagccaagtttcagattg

SEQ ID NO: 26495 - DNA, 107 bp, Homo sapiens
  MAP TO AC004032.7; EXPRESSED IN LUNG, SIGNAL =  13; EXPRESSED IN BONE MARROW, SIGNAL =  10; EXPRESSED IN ADULT LIVER, SIGNAL =  29; EXPRESSED IN HELA, SIGNAL =  15; EXPRESSED IN PLACENTA, SIGNAL =  20; EXPRESSED IN HEART, SIGNAL =  30; EXPRESSED IN FETAL LIVER, SIGNAL =  33; EXPRESSED IN BRAIN, SIGNAL =  28; SWISSPROT HIT: P13365, EVALUE 9.40e+00; NT HIT: AF050113.1, EVALUE 9.10e-01; EST_HUMAN HIT: BF238898.1, EVALUE 1.30e+00
ctccctggataaaatcagcagacactgtgccctccgtgggcccctcctgtcccctgtgaggccccacagccatctccacccatgcaccccagcacttaccacgggtg

SEQ ID NO: 26496 - DNA, 168 bp, Homo sapiens
  MAP TO AC004624.6; EXPRESSED IN BRAIN, SIGNAL = 3.4; EXPRESSED IN PLACENTA, SIGNAL =   4; EXPRESSED IN HELA, SIGNAL = 4.2; EXPRESSED IN HEART, SIGNAL = 2.5; EXPRESSED IN LUNG, SIGNAL = 4.1; EXPRESSED IN BONE MARROW, SIGNAL = 4.1; EXPRESSED IN FETAL LIVER, SIGNAL = 3.4; EXPRESSED IN ADULT LIVER, SIGNAL = 3.4; NT HIT: AF304354.1, EVALUE 3.90e-01; EST_HUMAN HIT: BE907014.1, EVALUE 2.30e+00; SWISSPROT HIT: P35275, EVALUE 3.00e+00
gggagacgtggagatgtcacatccaccagtgtccgctttgatgtcggggaggcctctcctggcttgcgtcttggctacaccacgtgccagctgcaggggtttcagccggtttctcaccacatctctctcagccatgacactgagcatcctggtggctcacagtgtctg

SEQ ID NO: 26497 - DNA, 101 bp, Homo sapiens
  MAP TO AC004624.6; EXPRESSED IN LUNG, SIGNAL = 2.8; EXPRESSED IN FETAL LIVER, SIGNAL = 3.1; EXPRESSED IN ADULT LIVER, SIGNAL = 3.3; EXPRESSED IN HELA, SIGNAL = 2.7; EXPRESSED IN PLACENTA, SIGNAL = 5.3; EXPRESSED IN BRAIN, SIGNAL = 2.2; EXPRESSED IN BONE MARROW, SIGNAL = 2.3; EXPRESSED IN HEART, SIGNAL = 2.5; NT HIT: gi11418543, EVALUE 8.50e-01; EST_HUMAN HIT: BE246630.1, EVALUE 1.30e+00
tcagggcagagccttgcagaagatgcagtcagggcaaagcagagggtgtccacctttgtcttcccggagcgtttgtgtccctgagggccatgactctgcct

SEQ ID NO: 26498 - DNA, 253 bp, Homo sapiens
  MAP TO AC004624.6; EXPRESSED IN ADULT LIVER, SIGNAL =  13; EXPRESSED IN FETAL LIVER, SIGNAL = 7.2; EXPRESSED IN BRAIN, SIGNAL =  15; EXPRESSED IN PLACENTA, SIGNAL = 3.5; EXPRESSED IN HELA, SIGNAL =  10; EXPRESSED IN LUNG, SIGNAL = 6.5; EXPRESSED IN HEART, SIGNAL = 5.4; EXPRESSED IN BONE MARROW, SIGNAL =  14; NT HIT: AB042553.1, EVALUE 3.90e-02; EST_HUMAN HIT: R41905.1, EVALUE 9.10e-01; SWISSPROT HIT: P10569, EVALUE 1.00e+00
atctggggtctggtcctgtgtccagcaaataccagggacccagccccggggctgggcatggggaagcagcagcagctgggagcccagctcccccgacccctgccctcagccctgcacctgctgcccgatgctaaattactctcggccactcagacagagccatggctggagggccccagggagcaatgggctgagattctgtagcagatgagggaggtgatgtgtgttgggagggaaaggagaggagaaaaga

SEQ ID NO: 26499 - DNA, 252 bp, Homo sapiens
  MAP TO AC004624.6; EXPRESSED IN ADULT LIVER, SIGNAL = 2.9; EXPRESSED IN PLACENTA, SIGNAL = 2.9; EXPRESSED IN BRAIN, SIGNAL = 3.7; EXPRESSED IN HELA, SIGNAL = 3.4; EXPRESSED IN BONE MARROW, SIGNAL = 4.8; EXPRESSED IN LUNG, SIGNAL = 3.9; EXPRESSED IN HEART, SIGNAL = 2.4; EXPRESSED IN FETAL LIVER, SIGNAL = 4.4; NT HIT: X62654.1, EVALUE 1.00e-02; SWISSPROT HIT: P29173, EVALUE 4.50e-01; EST_HUMAN HIT: BF338078.1, EVALUE 3.60e+00
ttacatttctaactccagcggtgatttatggacctgggaattgctgcaaatgctttgtctaagctcttggtgaaaagccaggatccttgctgggctcaggagctcagagggtgctgggacgttatcgacttggagggcaggacagggcattccgcctttttcttgcagacgttgtgcggggagacctggttccacagtgaccgctgccaggcacgttccaggatcaagcgtggacaccaaggacagagggag

SEQ ID NO: 26500 - DNA, 111 bp, Homo sapiens
  MAP TO AC004624.6; EXPRESSED IN HELA, SIGNAL = 2.3; EXPRESSED IN BRAIN, SIGNAL = 2.2; EXPRESSED IN PLACENTA, SIGNAL = 1.7; EXPRESSED IN LUNG, SIGNAL = 1.8; EXPRESSED IN BONE MARROW, SIGNAL =   3; EXPRESSED IN HEART, SIGNAL = 1.5; EXPRESSED IN ADULT LIVER, SIGNAL = 1.9; EXPRESSED IN FETAL LIVER, SIGNAL = 2.8; EST_HUMAN HIT: AV751711.1, EVALUE 1.40e+00; NT HIT: U91423.1, EVALUE 9.60e-01
catggagtcacccagaagctttaaacaagaaccagtgcaggagcctcaacccaaacctattaaccctgagggcctgggcagcgacatcctgtcctgacagccacctgcctg

SEQ ID NO: 26501 - DNA, 135 bp, Homo sapiens
  MAP TO AC004832.3; EXPRESSED IN PLACENTA, SIGNAL = 1.9; EXPRESSED IN BRAIN, SIGNAL = 2.5; EXPRESSED IN HELA, SIGNAL = 1.7; EXPRESSED IN HEART, SIGNAL = 1.4; EXPRESSED IN BONE MARROW, SIGNAL = 1.6; EXPRESSED IN LUNG, SIGNAL =   2; EXPRESSED IN FETAL LIVER, SIGNAL = 2.9; EXPRESSED IN ADULT LIVER, SIGNAL = 2.7; NT HIT: AJ297631.1, EVALUE 3.00e-01; EST_HUMAN HIT: BF246994.1, EVALUE 7.00e+00; SWISSPROT HIT: P00471, EVALUE 1.80e+00
cagcggatgctgatgggcactttgcagatctcagctctggccctggccttaggttctttgcactgctccacctcctggtgcaagtcccctccactcagctgccacagaggagctctggcaacagcactgctcatc

SEQ ID NO: 26502 - DNA, 112 bp, Homo sapiens
  MAP TO AC005300.10; EXPRESSED IN FETAL LIVER, SIGNAL = 9.8; EXPRESSED IN ADULT LIVER, SIGNAL =   6; EXPRESSED IN PLACENTA, SIGNAL = 6.4; EXPRESSED IN HELA, SIGNAL = 5.2; EXPRESSED IN BRAIN, SIGNAL = 2.5; EXPRESSED IN LUNG, SIGNAL = 4.8; EXPRESSED IN BONE MARROW, SIGNAL = 1.8; EXPRESSED IN HEART, SIGNAL = 4.3; NT HIT: gi11526291, EVALUE 7.00e-11; EST_HUMAN HIT: H23396.1, EVALUE 7.00e-55; SWISSPROT HIT: O15075, EVALUE 5.40e+00
cttcaatgcgggggaagtcattcctcgggaggggctgcagagagacaaaggagaggctatcaacacaagtcgccttccactccaggagaaccacaaccccacctccagggtg

SEQ ID NO: 26503 - DNA, 83 bp, Homo sapiens
  MAP TO AC005300.10; EXPRESSED IN HEART, SIGNAL = 2.3; EXPRESSED IN BONE MARROW, SIGNAL = 2.6; EXPRESSED IN ADULT LIVER, SIGNAL = 2.2; EXPRESSED IN HELA, SIGNAL = 2.7; EXPRESSED IN PLACENTA, SIGNAL = 3.3; EXPRESSED IN LUNG, SIGNAL = 2.9; EXPRESSED IN FETAL LIVER, SIGNAL = 2.8; EXPRESSED IN BRAIN, SIGNAL = 3.2; NT HIT: gi11419220, EVALUE 2.60e+00; EST_HUMAN HIT: BE297688.1, EVALUE 3.90e+00
cggccttcaatcacatgccatcgcacacgctccacacctgtgacgccctcctgtgagcttaccggccttcgatcacacgccat

SEQ ID NO: 26504 - DNA, 114 bp, Homo sapiens
  MAP TO AC005300.10; EXPRESSED IN LUNG, SIGNAL = 3.9; EXPRESSED IN FETAL LIVER, SIGNAL = 6.2; EXPRESSED IN ADULT LIVER, SIGNAL = 2.3; EXPRESSED IN PLACENTA, SIGNAL = 4.5; EXPRESSED IN HELA, SIGNAL = 2.4; EXPRESSED IN BRAIN, SIGNAL = 1.8; EXPRESSED IN BONE MARROW, SIGNAL = 2.2; EXPRESSED IN HEART, SIGNAL = 3.3; NT HIT: gi11526293, EVALUE 5.00e-58; EST_HUMAN HIT: BE795136.1, EVALUE 7.00e-58; SWISSPROT HIT: P53984, EVALUE 4.80e-01
tggttagagatgggacagacttctatggggatgtcctttttccaggagtaagtcctgactgcggggtgtttgctcaaagcaaatccatggccgattctggtagtgttcagcatc

SEQ ID NO: 26505 - DNA, 125 bp, Homo sapiens
  MAP TO AC006427.13; EXPRESSED IN HELA, SIGNAL = 2.2; EXPRESSED IN PLACENTA, SIGNAL = 1.6; EXPRESSED IN BRAIN, SIGNAL = 2.5; EXPRESSED IN BONE MARROW, SIGNAL = 3.2; EXPRESSED IN LUNG, SIGNAL = 2.3; EXPRESSED IN HEART, SIGNAL = 1.7; EXPRESSED IN FETAL LIVER, SIGNAL = 2.2; NT HIT: gi11433629, EVALUE 2.80e-01; EST_HUMAN HIT: BF508051.1, EVALUE 4.10e-01; SWISSPROT HIT: Q04360, EVALUE 5.40e+00
tgtatgatgaaccaggcactcttcaagcttatgagctcccagtgagcaagaaacacaagatcccagccctcttgtgggacatgaaaaataaatacatgacaacacagaaacagggcatttgcagg

SEQ ID NO: 26506 - DNA, 194 bp, Homo sapiens
  MAP TO AC006427.13; EXPRESSED IN HEART, SIGNAL = 1.8; NT HIT: AF238234.2, EVALUE 4.50e-01; EST_HUMAN HIT: AW151633.1, EVALUE 6.80e-01
tggccatcaacagcacccaccaggaggtggaggccacggcttcatatgctgtccactacttgccgatcagtctacatttttcaatgacttattgtccttcaaacctttgtccactagatacttacttaattttagtgattgacaaggacatttctacagttagaagcacatgcatcatctggaataacaaaggg

SEQ ID NO: 26507 - DNA, 163 bp, Homo sapiens
  MAP TO AC006427.13; EXPRESSED IN HEART, SIGNAL = 1.8; EXPRESSED IN ADULT LIVER, SIGNAL = 2.1; EXPRESSED IN HELA, SIGNAL = 2.1; EXPRESSED IN BRAIN, SIGNAL = 2.3; EXPRESSED IN BONE MARROW, SIGNAL = 3.4; EXPRESSED IN LUNG, SIGNAL = 2.2; EXPRESSED IN FETAL LIVER, SIGNAL = 2.9; EXPRESSED IN PLACENTA, SIGNAL = 1.7; EST_HUMAN HIT: AW903222.1, EVALUE 6.00e-07; NT HIT: gi11497621, EVALUE 3.70e-01
cagcagccagcaccaacttgcaagccatgggagggggcattcttggaagagaatcctcctgctcactcaagtcttcagatgactccagctctggctaacatcatgactatgatctcatgagagatgctgagtcagaaccaccaagcttagacacttcttcatt

SEQ ID NO: 26508 - DNA, 140 bp, Homo sapiens
  MAP TO AC006427.13; EXPRESSED IN HEART, SIGNAL =   3; EST_HUMAN HIT: T94583.1, EVALUE 4.70e-01; NT HIT: AJ278435.1, EVALUE 8.00e-02; SWISSPROT HIT: P54650, EVALUE 5.30e+00
aagctatgatcactttacctcctacttcttgaatcttttccttcaccactgactcattcaagctgtcttttcctctttcgtggatcatggcaatagcttcccagcctctattcttgtttctcttaaaaatatcctccata

SEQ ID NO: 26509 - DNA, 84 bp, Homo sapiens
  MAP TO AC006548.19; EXPRESSED IN PLACENTA, SIGNAL = 4.1; EXPRESSED IN BRAIN, SIGNAL = 3.1; EXPRESSED IN BONE MARROW, SIGNAL = 3.3; EXPRESSED IN LUNG, SIGNAL =   3; EXPRESSED IN HEART, SIGNAL = 1.9; EXPRESSED IN ADULT LIVER, SIGNAL = 3.7; EXPRESSED IN FETAL LIVER, SIGNAL = 4.1; EXPRESSED IN HELA, SIGNAL = 2.3; NT HIT: gi9628921, EVALUE 6.80e-01; EST_HUMAN HIT: BE883491.1, EVALUE 2.60e-01
ttgcttcctgcagaagccataatctgagagtgtgaagcgttcatattatagttgtctttgttctcagagtctgtgatttctggc

SEQ ID NO: 26510 - DNA, 282 bp, Homo sapiens
  MAP TO AC006992.2; EXPRESSED IN FETAL LIVER, SIGNAL = 5.1; EXPRESSED IN ADULT LIVER, SIGNAL =   5; EXPRESSED IN BRAIN, SIGNAL = 2.6; EXPRESSED IN PLACENTA, SIGNAL =   4; EXPRESSED IN HELA, SIGNAL = 4.1; EXPRESSED IN BONE MARROW, SIGNAL =   4; EXPRESSED IN LUNG, SIGNAL = 3.7; EXPRESSED IN HEART, SIGNAL =   3; NT HIT: AJ271735.1, EVALUE 5.00e-57; SWISSPROT HIT: P29539, EVALUE 2.50e-01; EST_HUMAN HIT: AA719635.1, EVALUE 3.00e-41
tttgtggaactttgaacttgagagagatgattcagagtatctggtagaaaaaatatctaagcagaaaaacattgaagaggtgacttgggtgctcttaaaggcattcagtttaaaaagagaatcagaatataaaagtttggaaaatttgcagcctgacaatgtgatagaaaaaaaaatcctattttctgaggagatattcaagctggctgcagagatttggataagtaatgaggagccgagttattcaccaagactatggggaaaatgtctccaggacatgta

SEQ ID NO: 26511 - DNA, 169 bp, Homo sapiens
  MAP TO AC006992.2; EXPRESSED IN HEART, SIGNAL = 2.2; EXPRESSED IN LUNG, SIGNAL = 1.8; EXPRESSED IN BONE MARROW, SIGNAL = 3.4; EXPRESSED IN FETAL LIVER, SIGNAL = 3.3; EXPRESSED IN ADULT LIVER, SIGNAL =   2; EXPRESSED IN PLACENTA, SIGNAL = 2.2; EXPRESSED IN BRAIN, SIGNAL = 2.9; EXPRESSED IN HELA, SIGNAL = 1.9; NT HIT: gi11420078, EVALUE 2.50e-02; EST_HUMAN HIT: BF697850.1, EVALUE 3.70e-02; SWISSPROT HIT: Q9ZJI5, EVALUE 6.70e+00
aaaaataaacgaaaaaagtcagtagagtcaaaatattaagagctaacatttcctgagtctatactaagtgatttacgtgtactagcttatttaatctcaacactcctagaaattggttacgatcatcatctctaatttgcagctgaggacactatgccacagcatgccg

SEQ ID NO: 26512 - DNA, 176 bp, Homo sapiens
  MAP TO AC007092.4; EXPRESSED IN FETAL LIVER, SIGNAL = 2.8; EXPRESSED IN PLACENTA, SIGNAL = 3.4; EXPRESSED IN BRAIN, SIGNAL = 1.7; EXPRESSED IN HELA, SIGNAL = 2.8; EXPRESSED IN BONE MARROW, SIGNAL = 2.1; EXPRESSED IN HEART, SIGNAL =   2; EXPRESSED IN LUNG, SIGNAL = 2.5; EXPRESSED IN ADULT LIVER, SIGNAL = 2.4; NT HIT: AL163210.2, EVALUE 4.00e-29; EST_HUMAN HIT: R42423.1, EVALUE 2.00e-47; SWISSPROT HIT: Q08054, EVALUE 3.00e+00
gtcggcatggctggggaggccttaggaaacttacaatcatggcagaaggggaaagcaaacacatccttcctcacatggcagcagcaaggagaagtgcagagtgaagttggggaagtcccttgtaaaaccatcagatctcgtgagaactcactcactatcatgagaacagcatgcag

SEQ ID NO: 26513 - DNA, 232 bp, Homo sapiens
  MAP TO AC007253.2; EXPRESSED IN PLACENTA, SIGNAL = 1.9; EXPRESSED IN HEART, SIGNAL = 1.3; EST_HUMAN HIT: AW590094.1, EVALUE 2.00e-44; NT HIT: AL163209.2, EVALUE 2.00e-47; SWISSPROT HIT: P48370, EVALUE 2.40e+00
aagcagcaatcagaagagcctgacttgtgcagagctctggcatttgctaattaatcacagtgttcctagaagtaaaattgatagaaagcgtactgtattcctacttaatttacataagcagaaaatttctaggtcgaatggacaaaagattagtttgaattataaaaacagaatcatagcccctcaatctatttctagacttgagccaacctgcagacccagaaccccttga

SEQ ID NO: 26514 - DNA, 181 bp, Homo sapiens
  MAP TO AC007253.2; EXPRESSED IN PLACENTA, SIGNAL = 3.5; EXPRESSED IN LUNG, SIGNAL = 2.9; EXPRESSED IN HEART, SIGNAL = 1.3; EXPRESSED IN BONE MARROW, SIGNAL = 4.1; EXPRESSED IN ADULT LIVER, SIGNAL = 2.3; EXPRESSED IN HELA, SIGNAL =   2; EXPRESSED IN BRAIN, SIGNAL = 2.3; NT HIT: X89211.1, EVALUE 3.00e-45; EST_HUMAN HIT: AA504795.1, EVALUE 1.00e-39; SWISSPROT HIT: P06968, EVALUE 1.70e+00
gtgacccactaacaaaatttttgcttccctttcccgtgacattatgttctgcaggcctagaggtcttagtcccagagggactaacactgccaccaggagacacaacaatgattccattaaactggaagttaaaattgccacctggccactttgggctcctcctacctctaagtcaataggc

SEQ ID NO: 26515 - DNA, 166 bp, Homo sapiens
  MAP TO AC007313.3; EXPRESSED IN LUNG, SIGNAL =   2; EXPRESSED IN BONE MARROW, SIGNAL = 2.6; EXPRESSED IN FETAL LIVER, SIGNAL = 1.7; EXPRESSED IN ADULT LIVER, SIGNAL = 1.7; EXPRESSED IN BRAIN, SIGNAL = 2.1; EXPRESSED IN PLACENTA, SIGNAL =   2; EXPRESSED IN HELA, SIGNAL = 1.6; EXPRESSED IN HEART, SIGNAL = 1.3; NT HIT: U94788.1, EVALUE 3.80e-01; EST_HUMAN HIT: AU131823.1, EVALUE 5.70e-01; SWISSPROT HIT: O01975, EVALUE 6.80e+00
caccctgtctctgtctctctctgcatgtttctttctctctggtgtgatttcccacattaaccaccgtccatttctttgattccttcttggcaatgagagctagagcaccattatgcaacaagcagtcctgcctccctgctaccttaaaataatactgtttcatggt

SEQ ID NO: 26516 - DNA, 142 bp, Homo sapiens
  MAP TO AC007463.3; EXPRESSED IN HEART, SIGNAL = 3.3; EXPRESSED IN LUNG, SIGNAL = 2.4; EXPRESSED IN BONE MARROW, SIGNAL = 3.7; EXPRESSED IN FETAL LIVER, SIGNAL = 4.3; EXPRESSED IN ADULT LIVER, SIGNAL = 4.6; EXPRESSED IN BRAIN, SIGNAL = 3.9; EXPRESSED IN PLACENTA, SIGNAL = 3.1; EXPRESSED IN HELA, SIGNAL = 2.4; NT HIT: L07288.1, EVALUE 3.20e-01; EST_HUMAN HIT: AI318509.1, EVALUE 4.80e-01; SWISSPROT HIT: P38775, EVALUE 6.90e+00
ggagccagtgctatgcaggatgcaagacacggatgttgtccactgtgaatgctggtagacagtgaagctaatgtcccctgtcagagactggaactgatgcagcgtgggaatatcagagatgttagaatcaatgagtgcactg

SEQ ID NO: 26517 - DNA, 188 bp, Homo sapiens
  MAP TO AC007463.3; EXPRESSED IN HEART, SIGNAL = 3.3; EXPRESSED IN LUNG, SIGNAL = 7.5; EXPRESSED IN FETAL LIVER, SIGNAL =  15; EXPRESSED IN ADULT LIVER, SIGNAL =  16; EXPRESSED IN HELA, SIGNAL = 4.4; EXPRESSED IN PLACENTA, SIGNAL =  13; NT HIT: AL163282.2, EVALUE 4.40e-01; EST_HUMAN HIT: AV761959.1, EVALUE 6.50e-01; SWISSPROT HIT: P36338, EVALUE 1.00e+00
tttctagtcttgcctttagtgaaaaggtgtgaggggtgctcatttctctgatacagtccattcaggattcgatcaggacagatcagtgggtgtgggatttccctaagtgggcccttggccccatgatccctgcagaaggtgactaccagagccaggagcctcctctgcagggaacagctcctcatggg

SEQ ID NO: 26518 - DNA, 177 bp, Homo sapiens
  MAP TO AC007463.3; EXPRESSED IN HEART, SIGNAL = 8.6; EXPRESSED IN BONE MARROW, SIGNAL = 6.1; EXPRESSED IN PLACENTA, SIGNAL =  26; EXPRESSED IN LUNG, SIGNAL =  18; EXPRESSED IN ADULT LIVER, SIGNAL =  30; EXPRESSED IN FETAL LIVER, SIGNAL =  41; EXPRESSED IN BRAIN, SIGNAL =   5; EXPRESSED IN HELA, SIGNAL =  13; NT HIT: U66834.1, EVALUE 1.00e-01; EST_HUMAN HIT: AL120073.1, EVALUE 1.50e-01; SWISSPROT HIT: Q05894, EVALUE 6.70e+00
atgaaaatccttagcccacactaagagagtaaagaacatgtctgttctgaccctggtaggattcctctctcacacaattctccggattcccaccatagttcctacattgctcttacccagatatgccttatggagaaggctcctccatgttttagacttcatcttactagtcccagt

SEQ ID NO: 26519 - DNA, 250 bp, Homo sapiens
  MAP TO AC007463.3; EXPRESSED IN BONE MARROW, SIGNAL = 2.8; EXPRESSED IN LUNG, SIGNAL = 3.2; EXPRESSED IN HEART, SIGNAL = 2.1; EXPRESSED IN FETAL LIVER, SIGNAL = 3.1; EXPRESSED IN ADULT LIVER, SIGNAL = 3.2; EXPRESSED IN PLACENTA, SIGNAL = 4.1; EXPRESSED IN HELA, SIGNAL = 3.3; EXPRESSED IN BRAIN, SIGNAL = 2.9; NT HIT: AE004970.1, EVALUE 6.00e-01; EST_HUMAN HIT: AW303623.1, EVALUE 2.30e-01; SWISSPROT HIT: P26509, EVALUE 1.30e+00
tcctaccagattgcaagaccaatgcaggttcctagtgctcttagggcaatgggacaccaggctacttcctgggctgagacagagaggcagttctcaagtacaaggcaccgaggatgctcacatttattcttgaagctctttctttccatggcttgtgccttggtacaaaagctctgtaaaagagcagatcagggacatttggtacgggtctgtgcagggactctgacaccaccaccagcagtggtcacag

SEQ ID NO: 26520 - DNA, 280 bp, Homo sapiens
  MAP TO AC007463.3; EXPRESSED IN LUNG, SIGNAL = 1.4; EXPRESSED IN BONE MARROW, SIGNAL = 1.5; EXPRESSED IN HEART, SIGNAL = 1.5; EXPRESSED IN FETAL LIVER, SIGNAL = 1.9; EXPRESSED IN BRAIN, SIGNAL =   2; EXPRESSED IN HELA, SIGNAL = 1.5; EXPRESSED IN PLACENTA, SIGNAL = 1.5; NT HIT: AL163278.2, EVALUE 1.70e-01; EST_HUMAN HIT: BF371288.1, EVALUE 1.00e+00; SWISSPROT HIT: P25490, EVALUE 1.20e+00
aggagatgtcaagcaaggcaatggcctcctgagggaggagcacacaccgcagtcagcctcggggccaccagcccagctggggcctctgctcaagtagttttctctcttacagctttgggaccctcctctggaagaaaaacgagtgactgaaaatgagtgaaggctttccccagtgctgttcccaacagcatccaatgtgtagacccctacatgcaaagagaccccaatgccttctcagttccacatgctgtcgatgcctcagatcgtcctggttgctgtc

SEQ ID NO: 26521 - DNA, 229 bp, Homo sapiens
  MAP TO AC007539.8; EXPRESSED IN HEART, SIGNAL = 1.6; NT HIT: AF019413.1, EVALUE 1.40e-01; EST_HUMAN HIT: BE719805.1, EVALUE 2.10e-01; SWISSPROT HIT: P54643, EVALUE 2.40e-02
agcagaagaccacaggatgagtctaatatttctgaatgctcactctggttgcttagtggagactagaccgtgggggcggggacagagtggggagccagtggaggcagttgcagtggtccaaggggaggtgacagtggcgcaaactagggtaggagccacggagatggtgagacaggttcaggtgctgactacgtttcaaaggcaaatcattcaatatttgttcatggag

SEQ ID NO: 26522 - DNA, 254 bp, Homo sapiens
  MAP TO AC007539.8; EXPRESSED IN FETAL LIVER, SIGNAL = 1.8; EXPRESSED IN HELA, SIGNAL = 1.8; EXPRESSED IN PLACENTA, SIGNAL = 1.8; EXPRESSED IN BRAIN, SIGNAL = 2.3; EXPRESSED IN BONE MARROW, SIGNAL = 2.4; EXPRESSED IN LUNG, SIGNAL = 1.6; EXPRESSED IN HEART, SIGNAL = 1.3; EXPRESSED IN ADULT LIVER, SIGNAL = 1.7; NT HIT: AB009668.1, EVALUE 3.00e-03; EST_HUMAN HIT: BF693978.1, EVALUE 5.80e-02
ggctaacagaatctcactttctagtgatgctgagccgtggtcaattctcatttatttatgggctgataatccagtgagtggattatcaagagaggtggttatccttatttctctttctcctcttcctccttccctgtctccctctcctgccaccccttttcttcctctgcctcctcccctcccccatcccaggcctattaggcactcctttctagcgagtaagccagggaaataagagaaggtgtaacgtgaac

SEQ ID NO: 26523 - DNA, 132 bp, Homo sapiens
  MAP TO AC007556.2; EXPRESSED IN ADULT LIVER, SIGNAL = 1.8; EXPRESSED IN HELA, SIGNAL = 1.7; EXPRESSED IN BRAIN, SIGNAL = 2.1; EXPRESSED IN PLACENTA, SIGNAL = 3.1; EXPRESSED IN HEART, SIGNAL = 1.4; EXPRESSED IN LUNG, SIGNAL = 1.4; EXPRESSED IN BONE MARROW, SIGNAL = 2.1; EST_HUMAN HIT: AU128912.1, EVALUE 2.00e-68; SWISSPROT HIT: P98164, EVALUE 1.00e-21; NT HIT: gi11430460, EVALUE 1.00e-68
ataaaggaaaagaaagaacatgtgctgaaaatatatgcgagcaaaattgtacccaattaaatgaaggaggatttatctgctcctgtacagctgggttcgaaaccaatgtttttgacagaacctcctgtctag

SEQ ID NO: 26524 - DNA, 388 bp, Homo sapiens
  MAP TO AC007564.9; EXPRESSED IN FETAL LIVER, SIGNAL =  23; EXPRESSED IN ADULT LIVER, SIGNAL =  34; EXPRESSED IN PLACENTA, SIGNAL =  30; EXPRESSED IN BRAIN, SIGNAL = 2.3; EXPRESSED IN HELA, SIGNAL = 7.8; EXPRESSED IN BONE MARROW, SIGNAL = 2.4; EXPRESSED IN HEART, SIGNAL = 7.2; EXPRESSED IN LUNG, SIGNAL =  11; NT HIT: X70969.1, EVALUE 6.10e-02; EST_HUMAN HIT: F03720.1, EVALUE 3.60e-01
tcaataagtatttaatattaactattaatattactactagcagtagaaatatttgcattttcatgactattatcattattgtttatcaggcactatgctaggtctggctaaaaatcttgaactaaaaaagaaaatcctaccaaacccaagcagccaagaaaaactgctttgcaatctccttatataatacatctgatatcttgacctaggataacattttccactttcaaatcatgatctgctcctaggaacctcctctccatactgattctgtatgactctagttcattcaaatcacacacacacacacacacacacacacacacacacacgtacgcgtgtgtaattgattaggcaaatttatctgtatcatgtgaaccaatatgaa

SEQ ID NO: 26525 - DNA, 271 bp, Homo sapiens
  MAP TO AC007719.1; EXPRESSED IN LUNG, SIGNAL = 2.8; EXPRESSED IN HEART, SIGNAL = 1.4; EXPRESSED IN FETAL LIVER, SIGNAL = 3.1; EXPRESSED IN ADULT LIVER, SIGNAL = 5.1; EXPRESSED IN HELA, SIGNAL = 7.5; EXPRESSED IN PLACENTA, SIGNAL = 5.5; EXPRESSED IN BRAIN, SIGNAL = 2.2; EXPRESSED IN BONE MARROW, SIGNAL = 3.2; NT HIT: M18048.1, EVALUE 1.00e-104; EST_HUMAN HIT: AW847519.1, EVALUE 1.00e-119; SWISSPROT HIT: P13729, EVALUE 5.80e+00
  unsure 155
  unsure 168
attagagtgcctaaggagattcagcatagtcctgccagcaaagattatttgtttaagagttaagagtggcagtttggggatagcaccaggagatatcagctgtgatggcttggagaaacagtgtaaaccggcagtggaaacaagagcagggcatngtatgagtagttngagaacagtgaataggagtatgactaggcagaagatagtagggatgacaagttttttggggcacagtccgagttggtctggtgtctggaatgagactggggcc

SEQ ID NO: 26526 - DNA, 76 bp, Homo sapiens
  MAP TO AC007719.1; EXPRESSED IN LUNG, SIGNAL = 3.1; EXPRESSED IN ADULT LIVER, SIGNAL =   3; EXPRESSED IN FETAL LIVER, SIGNAL = 2.8; EXPRESSED IN HELA, SIGNAL = 5.8; EXPRESSED IN PLACENTA, SIGNAL = 3.6; EXPRESSED IN BRAIN, SIGNAL = 2.9; EXPRESSED IN HEART, SIGNAL = 1.3; NT HIT: AL163213.2, EVALUE 3.00e-21; EST_HUMAN HIT: BF348229.1, EVALUE 4.00e-12
  unsure 8
  unsure 69
gggtgaanggaccaaggcaggcatccttgcgtggtttgacacctctgaaacctgggtgaataatcagangaggcat

SEQ ID NO: 26527 - DNA, 412 bp, Homo sapiens
  MAP TO AC007841.1; EXPRESSED IN PLACENTA, SIGNAL = 7.1; EXPRESSED IN HELA, SIGNAL = 5.8; EXPRESSED IN BRAIN, SIGNAL = 5.9; EXPRESSED IN LUNG, SIGNAL = 7.1; EXPRESSED IN BONE MARROW, SIGNAL = 5.2; EXPRESSED IN HEART, SIGNAL = 3.9; EXPRESSED IN ADULT LIVER, SIGNAL = 7.8; EXPRESSED IN FETAL LIVER, SIGNAL = 7.4; SWISSPROT HIT: P28871, EVALUE 5.40e+00; NT HIT: AB007953.1, EVALUE 2.00e-97; EST_HUMAN HIT: AA001415.1, EVALUE 1.00e-107
agtcccagcctctccagccacgactaaaaggagccaaggtacagctcgggctgtggcttcagaggatggaagccccaagccttggcagcttcgacatggtgttgagtctgtgagtgcacagaagtcaagagttgaggtttgggaacctctgcctagatttcagaagatgtacagaagcacctggatacccaggcagaagtttgctgcaggggcagggcctacatggagaatctctgctaaggcagtgcagaggggaaatgtggggttggagcccccacacagagtccctagtggggcactgcctagtggagccgcgagaagaaggccaccatcctccagaccccagaatggtagaccactgacagcttgcactgtgcatctggaaaagctgcagacactcaatgccagccca

SEQ ID NO: 26528 - DNA, 95 bp, Homo sapiens
  MAP TO AC007841.1; EXPRESSED IN LUNG, SIGNAL = 3.6; EXPRESSED IN HEART, SIGNAL = 2.8; EXPRESSED IN FETAL LIVER, SIGNAL = 4.4; EXPRESSED IN ADULT LIVER, SIGNAL = 3.7; EXPRESSED IN PLACENTA, SIGNAL = 3.7; EXPRESSED IN BRAIN, SIGNAL = 2.2; EXPRESSED IN HELA, SIGNAL = 3.1; EXPRESSED IN BONE MARROW, SIGNAL = 2.5; EST_HUMAN HIT: AW379431.1, EVALUE 7.40e-02; NT HIT: AJ248285.1, EVALUE 7.90e-01
agctgcctcaggaaacgtgacaatgaggagccaaagtcagtgaatgaggaagaagccacacaaaggtataagggatggaaatgcctcgttagttt

SEQ ID NO: 26529 - DNA, 118 bp, Homo sapiens
  MAP TO AC008009.4; EXPRESSED IN HEART, SIGNAL = 1.4; EXPRESSED IN BONE MARROW, SIGNAL = 1.4; NT HIT: X72327.1, EVALUE 1.00e+00; EST_HUMAN HIT: T54787.1, EVALUE 3.80e-01; SWISSPROT HIT: P97013, EVALUE 4.10e+00
tgcagaaagacgatgtaaaaacacaaacccccaagagagcgagccaacagggttgtgtcctggtgagtgtgactccccaataaccgaaacctcccgcccgcagtcgcactaaggagca

SEQ ID NO: 26530 - DNA, 233 bp, Homo sapiens
  MAP TO AC008022.1; EXPRESSED IN HELA, SIGNAL = 1.8; EXPRESSED IN PLACENTA, SIGNAL = 2.3; EXPRESSED IN LUNG, SIGNAL = 1.8; EXPRESSED IN HEART, SIGNAL =   2; EXPRESSED IN FETAL LIVER, SIGNAL = 1.4; EXPRESSED IN ADULT LIVER, SIGNAL = 1.5; EST_HUMAN HIT: AU133931.1, EVALUE 2.00e-23; SWISSPROT HIT: P52597, EVALUE 8.00e-16; NT HIT: gi4826759, EVALUE 3.00e-21
ctgacacccaccccatcaagagtccatgctgctgggccctgagggaggggagggctttgtggtcaggctccatggcccgccctggccctgatctgtcgaggatgcgcaggacgtcctctccaactgcaccatgccccattgggctcaggcgagttccatctacaccggagaggggtaggcagagtggtgaggcttttgctgaacttggatcagaagaggacgtaaaaatggcc

SEQ ID NO: 26531 - DNA, 361 bp, Homo sapiens
  MAP TO AC008151.1; EXPRESSED IN LUNG, SIGNAL =   5; EXPRESSED IN FETAL LIVER, SIGNAL =  13; EXPRESSED IN ADULT LIVER, SIGNAL =  10; EXPRESSED IN PLACENTA, SIGNAL = 8.1; EXPRESSED IN HELA, SIGNAL = 5.1; EXPRESSED IN HEART, SIGNAL = 3.7; NT HIT: AJ229043.1, EVALUE 4.00e-03; EST_HUMAN HIT: AW074604.1, EVALUE 2.00e-05
atgtcacattcaaatagagatagttttattttttttccagtcttatgcccttttttttttttactgcctaattgccctgactagaattcccagtacaatattgaatataagtggcaagagcagatatccttatcttgttcccaatcttaggaaagaaagcattcaatcattcaccattaatatgaggttagctgtggcttgtgtggtgtgtgtgtgtgtgtgcgcgcgcgtgtgtgtgtgttttatagatgcccataatcagattaagaaagctccctatattcctagtttgttgaatatttatcataaaaggattttgaatttgtcaaatgtcttgatagggttggtatgttataatgtt

SEQ ID NO: 26532 - DNA, 258 bp, Homo sapiens
  MAP TO AC008151.1; EXPRESSED IN FETAL LIVER, SIGNAL = 1.7; EXPRESSED IN HELA, SIGNAL = 1.6; EXPRESSED IN BRAIN, SIGNAL = 1.6; EXPRESSED IN LUNG, SIGNAL = 1.9; EXPRESSED IN HEART, SIGNAL = 2.2; EXPRESSED IN BONE MARROW, SIGNAL = 1.8; NT HIT: gi6679466, EVALUE 1.60e-01; EST_HUMAN HIT: BF664734.1, EVALUE 9.30e-01; SWISSPROT HIT: Q40289, EVALUE 4.10e+00
aagtattcacagctggagccctggattctggagggcacctcagctgggatttctacattgcattttcaggactgtcccactgggcccctctgggggaaagagcaggatgagagaagacagcctctgcaccagagaggtcaccaagctaattgggcaggtgcccggtgcctcccttcctttctggagcagctcttccaggatcctctacagagactcttgtgggggtggcatgaacagctcatttgttagtagcagcag

SEQ ID NO: 26533 - DNA, 103 bp, Homo sapiens
  MAP TO AC008166.1; EXPRESSED IN PLACENTA, SIGNAL = 1.8; EXPRESSED IN LUNG, SIGNAL = 1.5; EXPRESSED IN HEART, SIGNAL = 1.3; EXPRESSED IN ADULT LIVER, SIGNAL = 2.1; EXPRESSED IN FETAL LIVER, SIGNAL = 2.8; EXPRESSED IN BRAIN, SIGNAL = 1.5; EST_HUMAN HIT: AA704195.1, EVALUE 2.00e-11; NT HIT: U82671.2, EVALUE 2.00e-07
gctgcttttttgtgtagatagttgttaaatttggtgtccctgcaggaaggaaaatcagtggaggcttctgtgcagccatgttgctctgtttcccataaaagtt

SEQ ID NO: 26534 - DNA, 178 bp, Homo sapiens
  MAP TO AC008174.2; EXPRESSED IN BRAIN, SIGNAL = 4.3; EXPRESSED IN PLACENTA, SIGNAL = 1.9; EXPRESSED IN HELA, SIGNAL = 2.4; EXPRESSED IN LUNG, SIGNAL = 2.7; EXPRESSED IN HEART, SIGNAL = 1.5; EXPRESSED IN BONE MARROW, SIGNAL =   5; EXPRESSED IN FETAL LIVER, SIGNAL = 1.4; EXPRESSED IN ADULT LIVER, SIGNAL = 1.9; NT HIT: AF163864.1, EVALUE 2.00e-06; EST_HUMAN HIT: W76159.1, EVALUE 4.00e-08; SWISSPROT HIT: P08548, EVALUE 2.00e-04
cgtataccaattagcaaaacatctttcaaagttcatacatctagtagtatgtgtcataatatccttccttttttaaggctgaataacattccattgaatatttataacacattttgcttgtttatatttattcatctatcgatggacattgggattgcttccatcatttgtctatggt

SEQ ID NO: 26535 - DNA, 190 bp, Homo sapiens
  MAP TO AC008272.1; EXPRESSED IN PLACENTA, SIGNAL = 6.6; EXPRESSED IN BONE MARROW, SIGNAL = 5.6; EXPRESSED IN HEART, SIGNAL = 2.7; EXPRESSED IN FETAL LIVER, SIGNAL = 3.4; EXPRESSED IN BRAIN, SIGNAL = 3.4; EXPRESSED IN HELA, SIGNAL = 2.5; EXPRESSED IN LUNG, SIGNAL = 4.2; EXPRESSED IN ADULT LIVER, SIGNAL = 3.7; NT HIT: AJ271348.2, EVALUE 4.40e-01; EST_HUMAN HIT: AI983494.1, EVALUE 4.20e-02
acagagcaagatcctgtctgcaaaaaccaaaaccaaaaccaaaaccaaaaaaaaaaggtatatggacactaggatagagaaggtctttcttcctctgaagcctatgcaaagaaggcagcagggatctgataagtttcagcttcctagatttagctatgcctgaagctaggccaggctaaatatgcagatt

SEQ ID NO: 26536 - DNA, 81 bp, Homo sapiens
  MAP TO AC008272.1; EXPRESSED IN BONE MARROW, SIGNAL = 4.5; EXPRESSED IN PLACENTA, SIGNAL = 9.9; EXPRESSED IN HEART, SIGNAL =  13; EXPRESSED IN LUNG, SIGNAL =  16; EXPRESSED IN ADULT LIVER, SIGNAL =  12; EXPRESSED IN FETAL LIVER, SIGNAL =  25; EXPRESSED IN BRAIN, SIGNAL = 4.1; EXPRESSED IN HELA, SIGNAL =  23; NT HIT: AJ271909.1, EVALUE 4.10e-02; EST_HUMAN HIT: BF347824.1, EVALUE 6.20e-02; SWISSPROT HIT: P29226, EVALUE 5.60e+00
aaccaacctaatgacaacaacaaaatcaacaaaatacataatcaggaaattcacaaaaaaggaaaccagaaaagcatataa

SEQ ID NO: 26537 - DNA, 87 bp, Homo sapiens
  MAP TO AC009266.1; EXPRESSED IN HELA, SIGNAL = 2.3; EXPRESSED IN LUNG, SIGNAL = 3.1; EXPRESSED IN BONE MARROW, SIGNAL = 3.1; EXPRESSED IN HEART, SIGNAL = 2.2; EXPRESSED IN FETAL LIVER, SIGNAL = 3.4; EXPRESSED IN ADULT LIVER, SIGNAL = 2.1; EXPRESSED IN PLACENTA, SIGNAL = 2.4; EXPRESSED IN BRAIN, SIGNAL = 2.4; NT HIT: AF059571.1, EVALUE 4.50e-02; EST_HUMAN HIT: AW903482.1, EVALUE 1.70e-02
ggaagaataccttcagaaattcaaagtaattttcatcaaatgtggcaaagtaattttaaaccttcctgagctttatggttaataata

SEQ ID NO: 26538 - DNA, 202 bp, Homo sapiens
  MAP TO AL008582.11; EXPRESSED IN HEART, SIGNAL = 5.1; EXPRESSED IN FETAL LIVER, SIGNAL = 8.4; EXPRESSED IN ADULT LIVER, SIGNAL = 4.6; EXPRESSED IN PLACENTA, SIGNAL =   6; EXPRESSED IN HELA, SIGNAL = 3.7; EXPRESSED IN BRAIN, SIGNAL = 3.3; EXPRESSED IN BONE MARROW, SIGNAL =   3; EXPRESSED IN LUNG, SIGNAL = 4.9; NT HIT: AF134894.1, EVALUE 1.90e+00; EST_HUMAN HIT: BF364546.1, EVALUE 1.00e-110; SWISSPROT HIT: P17277, EVALUE 3.30e-01
aggggctgtgcaggccgctcctacggtcctttggcctgaggcagggcgggaggcatgcaagccagtgggggaaaacccctctgaagctgggcagccctctacctgggccccgggagccgtgctccttggaacgcaaagggccgaggagcatctggttttcatggcaaagctctactccagagctcctttaacatctgctaat

SEQ ID NO: 26539 - DNA, 171 bp, Homo sapiens
  MAP TO AL008582.11; EXPRESSED IN HELA, SIGNAL = 1.7; EXPRESSED IN BRAIN, SIGNAL = 1.3; EXPRESSED IN PLACENTA, SIGNAL = 1.5; EXPRESSED IN HEART, SIGNAL = 2.4; EXPRESSED IN LUNG, SIGNAL = 1.8; SWISSPROT HIT: Q03347, EVALUE 5.10e+00; NT HIT: U17362.1, EVALUE 1.00e-01; EST_HUMAN HIT: H15212.1, EVALUE 1.00e-91
gatggctttgagtgcgaggatagctgggtgacagaggcagtgacacgggccagcctctccctgttccagggagggtcaggctccagctgcagctctttcttccctatgagcttggacacatcaatcctaaactaggagtgtgaaggaggaagggaggagcagggagcagca

SEQ ID NO: 26540 - DNA, 151 bp, Homo sapiens
  MAP TO AL008723.8; EXPRESSED IN LUNG, SIGNAL = 2.7; EXPRESSED IN HEART, SIGNAL = 2.2; EXPRESSED IN BONE MARROW, SIGNAL = 4.5; EXPRESSED IN FETAL LIVER, SIGNAL = 1.9; EXPRESSED IN ADULT LIVER, SIGNAL =   3; EXPRESSED IN PLACENTA, SIGNAL = 2.7; EXPRESSED IN HELA, SIGNAL = 1.7; EXPRESSED IN BRAIN, SIGNAL = 1.9; NT HIT: AJ133127.1, EVALUE 6.00e-80; EST_HUMAN HIT: AI672526.1, EVALUE 3.00e-30; SWISSPROT HIT: P31636, EVALUE 6.00e-10
cgtccagctatcaggagctctttctccgacgcttgcttccgcatcttggtgtagaggtcaatggtgaagagggtgctggcgctgttgaagatggaggtcagggagctcatgagagaggccagcatgaccgaaagcatcaggcctcgcagtc

SEQ ID NO: 26541 - DNA, 247 bp, Homo sapiens
  MAP TO AL021392.5; EXPRESSED IN ADULT LIVER, SIGNAL = 5.4; EXPRESSED IN FETAL LIVER, SIGNAL =   6; EXPRESSED IN PLACENTA, SIGNAL = 7.4; EXPRESSED IN BONE MARROW, SIGNAL = 1.5; EXPRESSED IN BRAIN, SIGNAL =   2; EXPRESSED IN HELA, SIGNAL = 3.1; EXPRESSED IN HEART, SIGNAL = 2.2; EXPRESSED IN LUNG, SIGNAL = 3.7; NT HIT: AJ235375.1, EVALUE 1.00e-02; EST_HUMAN HIT: AI347355.1, EVALUE 1.00e-03
ttaacctttggggaataactggatgaaaaatacacaagaattctttgtattatttttgtgactttcctgtaagtctgaaatcatgtcaaaatttaaaagaaaaaaagccatctctagaaatctaaggtgaaaagaaacaaatgcacccaactctgtactgacttgataacacagcctcaaaggaagaaaaaagtcttgccagtgactgtcaaacaccataatctgtacctttctagtgggacaagcc

SEQ ID NO: 26542 - DNA, 172 bp, Homo sapiens
  MAP TO AL021707.2; EXPRESSED IN LUNG, SIGNAL = 2.9; EXPRESSED IN FETAL LIVER, SIGNAL = 4.7; EXPRESSED IN ADULT LIVER, SIGNAL =   4; EXPRESSED IN PLACENTA, SIGNAL = 3.1; EXPRESSED IN HELA, SIGNAL = 2.6; EXPRESSED IN HEART, SIGNAL = 2.6; SWISSPROT HIT: Q61508, EVALUE 1.00e+00; NT HIT: U52691.1, EVALUE 1.00e-01; EST_HUMAN HIT: BF344065.1, EVALUE 5.90e-01
cgttgagtttggtgggaacatgaactcaaatgccctttcaccatactctccttccctctcctccggttcaggcctttgctccatcttctccacagacatgcatcttacatgccagacccgcagaacttcttcctgctccctgaccacacaatgctcttcctacctctatgcc

SEQ ID NO: 26543 - DNA, 145 bp, Homo sapiens
  MAP TO AL021707.2; EXPRESSED IN PLACENTA, SIGNAL = 1.7; EXPRESSED IN HEART, SIGNAL = 2.1; EXPRESSED IN FETAL LIVER, SIGNAL = 3.3; EXPRESSED IN BRAIN, SIGNAL = 2.2; EXPRESSED IN HELA, SIGNAL = 2.3; EXPRESSED IN BONE MARROW, SIGNAL =   2; EXPRESSED IN LUNG, SIGNAL = 2.8; EXPRESSED IN ADULT LIVER, SIGNAL = 1.5; NT HIT: gi11418127, EVALUE 1.00e-09; EST_HUMAN HIT: AU140439.1, EVALUE 2.00e-09; SWISSPROT HIT: P35651, EVALUE 6.10e-01
gtcccggtaagtggctctgggcgggtagctgggtgggcacttcctacagtggcatcagggggtgggtctgtgctggggatgcacttatgaggccagggtcttctccttggcagggtgtggggacagtggtttcggggacaacact

SEQ ID NO: 26544 - DNA, 136 bp, Homo sapiens
  MAP TO AL021707.2; EXPRESSED IN PLACENTA, SIGNAL = 4.5; EXPRESSED IN BRAIN, SIGNAL = 5.5; EXPRESSED IN HELA, SIGNAL = 3.6; EXPRESSED IN HEART, SIGNAL = 2.8; EXPRESSED IN LUNG, SIGNAL = 4.6; EXPRESSED IN BONE MARROW, SIGNAL = 2.5; EXPRESSED IN ADULT LIVER, SIGNAL = 6.7; EXPRESSED IN FETAL LIVER, SIGNAL = 2.5; NT HIT: gi6677766, EVALUE 3.00e-01; EST_HUMAN HIT: BF329926.1, EVALUE 4.50e-01; SWISSPROT HIT: Q13202, EVALUE 1.10e+00
tcacctcgtggccgtgggccaaggacccatgggctgaccccttctaggcttgcactgtgctggtgcccaggcagatgtgggcacactgccacccacccatgccagccccacagcatgcaaagcctcctgcttggca

SEQ ID NO: 26545 - DNA, 283 bp, Homo sapiens
  MAP TO AL022238.1; EXPRESSED IN LUNG, SIGNAL = 3.9; EXPRESSED IN BONE MARROW, SIGNAL = 3.5; EXPRESSED IN BRAIN, SIGNAL = 3.2; EXPRESSED IN HELA, SIGNAL = 3.2; EXPRESSED IN ADULT LIVER, SIGNAL = 3.1; EXPRESSED IN FETAL LIVER, SIGNAL = 3.5; EXPRESSED IN PLACENTA, SIGNAL = 1.8; EXPRESSED IN HEART, SIGNAL = 2.6; NT HIT: AF042836.1, EVALUE 2.70e+00; EST_HUMAN HIT: AW663987.1, EVALUE 9.00e-29; SWISSPROT HIT: O26800, EVALUE 4.80e+00
atagcctgttattcagctggtgacgtcagtaattttccacagcagccattcatgagctcatgcagactgtcacaaggaaatgggaatagcacaatgagtgttacagaagaaaaaaagatcctgtttctttgccatcacatattatacacagacttagggaatctagactggagcacaagatatgtgggaggggttagaacaccactcctacctgtagtaataatcattgaaaccacttattggatgccttctgcttaccagacactagttgtcacaggtcact

SEQ ID NO: 26546 - DNA, 112 bp, Homo sapiens
  MAP TO AL022238.1; EXPRESSED IN HEART, SIGNAL = 1.5; EXPRESSED IN LUNG, SIGNAL = 1.9; EXPRESSED IN BONE MARROW, SIGNAL = 2.2; EXPRESSED IN FETAL LIVER, SIGNAL = 1.6; EXPRESSED IN PLACENTA, SIGNAL = 1.4; EXPRESSED IN BRAIN, SIGNAL = 1.4; EXPRESSED IN HELA, SIGNAL = 1.5; SWISSPROT HIT: P46837, EVALUE 5.40e+00; EST_HUMAN HIT: AA179901.1, EVALUE 9.10e-02; NT HIT: AB018529.1, EVALUE 9.70e-01
gacaggatcacaacagcagccttggccatggtagctgctgaccacctctgcagttcccacaaccttaacttggtgactgcagggttcggaggcaagagtaggcctggggaga

SEQ ID NO: 26547 - DNA, 125 bp, Homo sapiens
  MAP TO AL022318.2; EXPRESSED IN PLACENTA, SIGNAL =   2; EXPRESSED IN BRAIN, SIGNAL = 2.9; EXPRESSED IN HEART, SIGNAL = 2.6; EXPRESSED IN BONE MARROW, SIGNAL = 6.2; EXPRESSED IN LUNG, SIGNAL = 3.4; EXPRESSED IN FETAL LIVER, SIGNAL = 3.9; EXPRESSED IN ADULT LIVER, SIGNAL = 2.7; EXPRESSED IN HELA, SIGNAL = 3.9; NT HIT: gi11450319, EVALUE 1.10e+00; EST_HUMAN HIT: BF569142.1, EVALUE 4.10e-01; SWISSPROT HIT: Q04912, EVALUE 1.20e-01
gcatgaggggcagatggttctccaatgctgtggggcgggtcagtgtcccctgggtgtctgtggggaccgggccagcgcccactgcaactggcagcctggatacctgggctgggaggggagggccc

SEQ ID NO: 26548 - DNA, 98 bp, Homo sapiens
  MAP TO AL022319.2; EXPRESSED IN BONE MARROW, SIGNAL = 1.4; EXPRESSED IN LUNG, SIGNAL = 1.7; EXPRESSED IN FETAL LIVER, SIGNAL =   2; EXPRESSED IN PLACENTA, SIGNAL = 1.7; EXPRESSED IN BRAIN, SIGNAL = 1.4; EXPRESSED IN HEART, SIGNAL = 1.6; NT HIT: Z99117.1, EVALUE 1.30e-02; EST_HUMAN HIT: BE547155.1, EVALUE 3.10e-01; SWISSPROT HIT: P13840, EVALUE 5.50e+00
catgctgctcttcttttaaaaagccatgatgaatcttctttgaagacacttctaaagtatatgcaaaaaatacaaaaagcactgagaggatggctgta

SEQ ID NO: 26549 - DNA, 104 bp, Homo sapiens
  MAP TO AL022319.2; EXPRESSED IN HELA, SIGNAL = 1.9; EXPRESSED IN PLACENTA, SIGNAL = 1.8; EXPRESSED IN BRAIN, SIGNAL = 1.7; EXPRESSED IN LUNG, SIGNAL =   2; EXPRESSED IN HEART, SIGNAL = 1.5; EXPRESSED IN BONE MARROW, SIGNAL = 1.5; EXPRESSED IN FETAL LIVER, SIGNAL = 1.4; EST_HUMAN HIT: BE958458.1, EVALUE 8.30e-02; SWISSPROT HIT: P98095, EVALUE 9.40e+00; NT HIT: AE001546.1, EVALUE 2.20e-01
ttagggtgaccactgctgctgaaatcttgggggcattacccagagaacagcttgctcatccaggttcctcatggcagcagatgctgtttcttgcagggcctggc

SEQ ID NO: 26550 - DNA, 101 bp, Homo sapiens
  MAP TO AL022319.2; EXPRESSED IN PLACENTA, SIGNAL = 1.2; EXPRESSED IN HELA, SIGNAL = 1.9; EXPRESSED IN BRAIN, SIGNAL = 1.7; EXPRESSED IN LUNG, SIGNAL = 1.4; EXPRESSED IN HEART, SIGNAL = 1.6; EXPRESSED IN BONE MARROW, SIGNAL = 1.3; EXPRESSED IN FETAL LIVER, SIGNAL =   2; EXPRESSED IN ADULT LIVER, SIGNAL = 1.5; NT HIT: Y18000.1, EVALUE 8.50e-01; EST_HUMAN HIT: BE385776.1, EVALUE 3.20e-01; SWISSPROT HIT: P75917, EVALUE 7.20e+00
atggggtgtccccatcaacatggggtgtccccacaaagcacatgttcctgggaggcttggagaggcaaaagtcaggacctctgggcttcggttggctgcag

SEQ ID NO: 26551 - DNA, 79 bp, Homo sapiens
  MAP TO AL022319.2; EXPRESSED IN LUNG, SIGNAL =  12; EXPRESSED IN BONE MARROW, SIGNAL = 5.4; EXPRESSED IN HEART, SIGNAL = 9.2; EXPRESSED IN FETAL LIVER, SIGNAL =  31; EXPRESSED IN ADULT LIVER, SIGNAL =  14; EXPRESSED IN PLACENTA, SIGNAL =  16; EXPRESSED IN HELA, SIGNAL = 8.9; EXPRESSED IN BRAIN, SIGNAL = 4.4; EST_HUMAN HIT: F34418.1, EVALUE 3.70e+00; SWISSPROT HIT: P70379, EVALUE 9.60e+00; NT HIT: gi9910293, EVALUE 6.30e-01
atggctttggagatgaaatttctagtcctgctagccctgggtccgtcccatctctggagtgtgcactgtctcctgccag

SEQ ID NO: 26552 - DNA, 129 bp, Homo sapiens
  MAP TO AL022319.2; EXPRESSED IN HEART, SIGNAL = 5.4; EXPRESSED IN LUNG, SIGNAL = 2.2; EXPRESSED IN FETAL LIVER, SIGNAL = 1.6; EXPRESSED IN ADULT LIVER, SIGNAL = 1.7; EXPRESSED IN HELA, SIGNAL = 2.3; EXPRESSED IN PLACENTA, SIGNAL = 1.7; EXPRESSED IN BRAIN, SIGNAL = 2.3; EXPRESSED IN BONE MARROW, SIGNAL = 2.8; NT HIT: AL163283.2, EVALUE 1.80e-02; EST_HUMAN HIT: BF215972.1, EVALUE 7.00e-06
tgttggcgggcaccatccaagcagccagcgggtgggagagaacaaatgccgaaggcgaatctccgagagccgggacagcctttccttctgctgccttcgacatcagaatgccaggctcttaacctttag

SEQ ID NO: 26553 - DNA, 165 bp, Homo sapiens
  MAP TO AL022328.21; EXPRESSED IN FETAL LIVER, SIGNAL = 1.6; EXPRESSED IN BRAIN, SIGNAL = 2.1; EXPRESSED IN ADULT LIVER, SIGNAL = 1.8; EXPRESSED IN HELA, SIGNAL = 1.5; EXPRESSED IN PLACENTA, SIGNAL = 1.3; EXPRESSED IN BONE MARROW, SIGNAL =   3; EXPRESSED IN HEART, SIGNAL = 1.3; EXPRESSED IN LUNG, SIGNAL = 1.7; NT HIT: gi11434440, EVALUE 5.90e+00; EST_HUMAN HIT: BF128960.1, EVALUE 5.70e-01; SWISSPROT HIT: P23249, EVALUE 2.00e-06
atcgtgctggcaggagaccccatgcagctcggcccagtcattaagtccagactcgccatggcctatgggctgaacgtgtcctttttggaacggctgatgtctcgacccgcgtaccagagggacgaaaatgctttcggtgcttgtggcgcacataatcccctgttg

SEQ ID NO: 26554 - DNA, 142 bp, Homo sapiens
  MAP TO AL022328.21; EXPRESSED IN BRAIN, SIGNAL = 2.8; EXPRESSED IN HELA, SIGNAL = 2.1; EXPRESSED IN BONE MARROW, SIGNAL = 2.5; EXPRESSED IN HEART, SIGNAL = 2.4; EXPRESSED IN ADULT LIVER, SIGNAL = 3.1; EXPRESSED IN PLACENTA, SIGNAL = 2.5; EXPRESSED IN LUNG, SIGNAL =   3; EXPRESSED IN FETAL LIVER, SIGNAL = 2.9; NT HIT: U65406.1, EVALUE 1.30e+00; EST_HUMAN HIT: BE926645.1, EVALUE 5.00e-72
atcccaaatatgaacaatgcacggttgtgttgcgtgtagcttccactttcataaggtaatgccgggggcctttcggcctgtctacacgcacttgcttagagtcctaggagatttgggcctgtgctgctaggattctggtaga

SEQ ID NO: 26555 - DNA, 115 bp, Homo sapiens
  MAP TO AL022328.21; EXPRESSED IN LUNG, SIGNAL =   3; EXPRESSED IN ADULT LIVER, SIGNAL = 3.3; EXPRESSED IN FETAL LIVER, SIGNAL = 3.7; EXPRESSED IN PLACENTA, SIGNAL = 2.5; EXPRESSED IN HEART, SIGNAL = 2.7; EXPRESSED IN BONE MARROW, SIGNAL = 5.4; EXPRESSED IN BRAIN, SIGNAL =   2; EXPRESSED IN HELA, SIGNAL = 2.2; NT HIT: AF266462.1, EVALUE 1.00e+00; EST_HUMAN HIT: H55099.1, EVALUE 5.00e-56
gaactcaagacgacaacttccaagttttcttccccaatatccaatcccagatagacttagaaaatgtgtggaacaaaaaattgacatcctgactttccagccattacttgcagag

SEQ ID NO: 26556 - DNA, 178 bp, Homo sapiens
  MAP TO AL022329.9; EXPRESSED IN LUNG, SIGNAL = 2.4; EXPRESSED IN ADULT LIVER, SIGNAL = 2.5; EXPRESSED IN FETAL LIVER, SIGNAL = 2.6; EXPRESSED IN HELA, SIGNAL = 1.8; EXPRESSED IN PLACENTA, SIGNAL = 2.3; EXPRESSED IN BRAIN, SIGNAL = 2.6; EXPRESSED IN HEART, SIGNAL = 1.7; EXPRESSED IN BONE MARROW, SIGNAL =   3; SWISSPROT HIT: P25435, EVALUE 4.50e-01; NT HIT: D87675.1, EVALUE 4.10e-01; EST_HUMAN HIT: BF241408.1, EVALUE 6.20e-01
gaccattggggttgccgtggaagtagagagaagtcatggaattcccagttttgaagatagagtcaatagatttgtaagaaattatgttgcagtacaaaaaagggttgtggggagaagtggtttgctggggacacttgtcctcaggtctaaagataaaggagaggttttgataagaggt

SEQ ID NO: 26557 - DNA, 169 bp, Homo sapiens; identical to SEQ ID NO: 26375
  MAP TO AL022329.9; EXPRESSED IN BONE MARROW, SIGNAL =   2; EXPRESSED IN LUNG, SIGNAL = 2.4; EXPRESSED IN HEART, SIGNAL = 2.8; EXPRESSED IN ADULT LIVER, SIGNAL = 2.3; EXPRESSED IN FETAL LIVER, SIGNAL = 2.3; EXPRESSED IN HELA, SIGNAL = 2.7; EXPRESSED IN PLACENTA, SIGNAL =   4; EXPRESSED IN BRAIN, SIGNAL =   3; NT HIT: Z73560.1, EVALUE 6.00e-03; EST_HUMAN HIT: AV697966.1, EVALUE 2.00e-03; SWISSPROT HIT: P77810, EVALUE 7.80e-01

SEQ ID NO: 26558 - DNA, 112 bp, Homo sapiens
  MAP TO AL023553.5; EXPRESSED IN BRAIN, SIGNAL = 2.2; EXPRESSED IN PLACENTA, SIGNAL = 1.4; EXPRESSED IN HELA, SIGNAL = 2.2; EXPRESSED IN LUNG, SIGNAL = 1.7; EXPRESSED IN HEART, SIGNAL = 1.6; EXPRESSED IN BONE MARROW, SIGNAL = 3.3; NT HIT: gi11418445, EVALUE 9.70e-01; EST_HUMAN HIT: AW190229.1, EVALUE 3.60e-01; SWISSPROT HIT: P12287, EVALUE 1.40e+00
cttgcctggctctccaacctgggaaccagtggggcagcctcgtcccagacacactctgcctctttcaagagcagccaggccctgtggtcaagggctcacattcagtggtgtg

SEQ ID NO: 26559 - DNA, 94 bp, Homo sapiens
  MAP TO AL023553.5; EXPRESSED IN HELA, SIGNAL = 2.7; EXPRESSED IN LUNG, SIGNAL = 1.9; EXPRESSED IN HEART, SIGNAL = 2.9; EXPRESSED IN FETAL LIVER, SIGNAL = 2.1; EXPRESSED IN ADULT LIVER, SIGNAL = 2.5; NT HIT: X51780.1, EVALUE 1.30e-02; EST_HUMAN HIT: BF032751.1, EVALUE 4.50e+00
gggtagggaggaggagtgggcgctggtggcagcagaagcagcaccagcagagaaggaaagagcacctcgtcacctcacttaagtttcccacctg

SEQ ID NO: 26560 - DNA, 138 bp, Homo sapiens
  MAP TO AL031587.3; EXPRESSED IN BONE MARROW, SIGNAL = 1.6; EXPRESSED IN HEART, SIGNAL = 2.4; EXPRESSED IN LUNG, SIGNAL =   2; EXPRESSED IN HELA, SIGNAL = 1.5; EXPRESSED IN BRAIN, SIGNAL = 1.4; NT HIT: M64737.1, EVALUE 3.10e-01; SWISSPROT HIT: Q92628, EVALUE 1.40e+00; EST_HUMAN HIT: BE061418.1, EVALUE 1.20e-01
ctgggcctggtccagatgcgggggcaggagctgaaaaagaacctcagtaggggaaggtgggccctggtaccacctggttctgccaagggctcccaagttgttcgccatctctgggcctgtgggtgtctccctcttcag

SEQ ID NO: 26561 - DNA, 87 bp, Homo sapiens
  MAP TO AL031587.3; EXPRESSED IN BONE MARROW, SIGNAL = 7.4; EXPRESSED IN ADULT LIVER, SIGNAL =   4; EXPRESSED IN HELA, SIGNAL =   4; EXPRESSED IN PLACENTA, SIGNAL = 3.8; EXPRESSED IN HEART, SIGNAL = 4.2; EXPRESSED IN LUNG, SIGNAL = 6.5; EXPRESSED IN FETAL LIVER, SIGNAL = 5.7; EXPRESSED IN BRAIN, SIGNAL = 7.1; NT HIT: gi11418099, EVALUE 3.00e-03; EST_HUMAN HIT: BE780572.1, EVALUE 1.00e-03
gagctgtcgcagactcaccggggtaatggcatcccccaaagctgtggtgtgaccgtgggcaatccctggggcctctcactcccatgc

SEQ ID NO: 26562 - DNA, 258 bp, Homo sapiens
  MAP TO AL031588.1; EXPRESSED IN PLACENTA, SIGNAL =   7; EXPRESSED IN HELA, SIGNAL = 5.2; EXPRESSED IN LUNG, SIGNAL = 8.3; EXPRESSED IN HEART, SIGNAL = 4.9; EXPRESSED IN BONE MARROW, SIGNAL =  11; EXPRESSED IN ADULT LIVER, SIGNAL = 9.6; EXPRESSED IN FETAL LIVER, SIGNAL =  11; EXPRESSED IN BRAIN, SIGNAL = 8.6; NT HIT: AL445064.1, EVALUE 6.20e-01; EST_HUMAN HIT: BE882464.1, EVALUE 2.30e-01; SWISSPROT HIT: P50748, EVALUE 6.00e-01
atgctctgtcccccaattcagccctctccccaccttcaccttatcacacagatactgagcatgtcaccccttagtgggatgcaggccaggagggagggaggctggtcagaaaggtcatcagggcaagaagaggcagggggactaaggaagggggtcccgcgggcccagatcgaggacagagaggggactattaggtctttacaggagcaggccatgactttgtatgagcatgtgttagtgtgcaagactgtgtgcaag

SEQ ID NO: 26563 - DNA, 132 bp, Homo sapiens
  MAP TO AL031588.1; EXPRESSED IN FETAL LIVER, SIGNAL = 8.1; EXPRESSED IN HELA, SIGNAL = 5.4; EXPRESSED IN BRAIN, SIGNAL = 9.3; EXPRESSED IN PLACENTA, SIGNAL =  12; EXPRESSED IN BONE MARROW, SIGNAL = 5.4; EXPRESSED IN LUNG, SIGNAL = 6.2; EXPRESSED IN HEART, SIGNAL =   5; EXPRESSED IN ADULT LIVER, SIGNAL = 7.5; NT HIT: AF047874.1, EVALUE 5.00e-03; EST_HUMAN HIT: BF059498.1, EVALUE 1.70e+00; SWISSPROT HIT: P22681, EVALUE 1.40e+00
acctgcccctccaggggtctcggggctgcatcacactgcctggcactcacctggcaggcaggccatcccaagagcaccccaccagctgctaaggctgtggggaaagctgcctaccacataggggcagaggag

SEQ ID NO: 26564 - DNA, 249 bp, Homo sapiens
  MAP TO AL031588.1; EXPRESSED IN ADULT LIVER, SIGNAL = 4.9; EXPRESSED IN FETAL LIVER, SIGNAL = 4.9; EXPRESSED IN BRAIN, SIGNAL = 4.2; EXPRESSED IN PLACENTA, SIGNAL = 2.7; EXPRESSED IN BONE MARROW, SIGNAL = 8.7; EXPRESSED IN HEART, SIGNAL = 2.4; EXPRESSED IN LUNG, SIGNAL = 4.3; EXPRESSED IN HELA, SIGNAL = 3.3; NT HIT: AF139518.1, EVALUE 6.00e-01; EST_HUMAN HIT: AA210798.1, EVALUE 4.00e-49; SWISSPROT HIT: P50901, EVALUE 3.80e+00
atgctctccaaaggcaagccttcccttcctgaacagctgcctgcgcctccacctcagggaactctttctcctgccagtcctaactgtctgctggtgtcacacaaagaatgtcatcctaactcacacgcttgaccactgccactacgacccaaagtaatttcaacagttcagggaggacatatttccagataccctgaaaataaaaatcaattcacattctatcagtctatcactcttttcctgaataac

SEQ ID NO: 26565 - DNA, 244 bp, Homo sapiens
  MAP TO AL031588.1; EXPRESSED IN PLACENTA, SIGNAL = 3.4; EXPRESSED IN HEART, SIGNAL = 3.1; EXPRESSED IN FETAL LIVER, SIGNAL = 4.3; EXPRESSED IN ADULT LIVER, SIGNAL = 2.1; EXPRESSED IN HELA, SIGNAL = 3.6; EXPRESSED IN BRAIN, SIGNAL = 3.1; EXPRESSED IN BONE MARROW, SIGNAL = 3.8; EXPRESSED IN LUNG, SIGNAL = 3.1; NT HIT: gi11418318, EVALUE 0.00e+00; EST_HUMAN HIT: AI346898.1, EVALUE 0.00e+00; SWISSPROT HIT: P48418, EVALUE 3.60e+00
caatagaaaacttaggaattttaaattgatttgtaggagtaggcataacctttgtcttggaatttagacaggaatctcgccgtctgatacttctagtcttattcaattgagaagattctgaccaagcgcaactggagttcagccactggccgccaccttccggagtctggggttgggtgggggatgctgaggggggtgccgtgagctgctccgctgccagctcagaaacatcgacccgcttggc

SEQ ID NO: 26566 - DNA, 282 bp, Homo sapiens
  MAP TO AL031588.1; EXPRESSED IN LUNG, SIGNAL = 2.7; EXPRESSED IN BONE MARROW, SIGNAL = 2.6; EXPRESSED IN HEART, SIGNAL = 2.2; EXPRESSED IN FETAL LIVER, SIGNAL = 1.8; EXPRESSED IN ADULT LIVER, SIGNAL = 1.9; EXPRESSED IN HELA, SIGNAL = 2.6; EXPRESSED IN PLACENTA, SIGNAL = 2.8; EXPRESSED IN BRAIN, SIGNAL = 2.4; EST_HUMAN HIT: BF055948.1, EVALUE 2.00e-66; SWISSPROT HIT: P11261, EVALUE 6.30e+00; NT HIT: gi11418318, EVALUE 2.00e-66
aaagggactctcagatgtgggcaacggaggctgttcgggaaccggattatttaattccaagctggcagcaatacatctttctttatgtccaaagggtccgaagaagacttcatcatcttcatttgcactatttgtttaaaaaaagaatgattaataactcataacactggcatttaaaggaaagactttactgaatgtggttatgcccaaggcaagggaagaaaactcatttgtttacctcgaagaagacaatgaaagatcgaagtcaaatttttcatcggc

SEQ ID NO: 26567 - DNA, 247 bp, Homo sapiens
  MAP TO AL034406.1; EXPRESSED IN FETAL LIVER, SIGNAL =   4; EXPRESSED IN ADULT LIVER, SIGNAL = 2.4; EXPRESSED IN BRAIN, SIGNAL = 2.6; EXPRESSED IN PLACENTA, SIGNAL = 3.1; EXPRESSED IN HELA, SIGNAL = 2.9; EXPRESSED IN HEART, SIGNAL = 3.7; EXPRESSED IN LUNG, SIGNAL = 3.3; NT HIT: gi11416799, EVALUE 2.30e+00; EST_HUMAN HIT: AV694801.1, EVALUE 2.20e-01
agagcagagacatctttcctggactatgactgtagtgatagtaatgttgatgcaggtgcttcagcacttcagcatgcatgtgcttattctctctctctctctctctcacacacacacacacacacatcccactccaaaaacattgctgaagtatatgaatgcctttattaacttaatatatctggtagacgtagtagagaagaggagtaaacagaggttggtggagatgaaaaagagaggatacagt

SEQ ID NO: 26568 - DNA, 112 bp, Homo sapiens
  MAP TO AL035681.13; EXPRESSED IN PLACENTA, SIGNAL = 3.2; EXPRESSED IN HELA, SIGNAL = 2.8; EXPRESSED IN LUNG, SIGNAL = 2.4; EXPRESSED IN BONE MARROW, SIGNAL = 1.7; EXPRESSED IN HEART, SIGNAL =   7; EXPRESSED IN FETAL LIVER, SIGNAL =   4; EXPRESSED IN ADULT LIVER, SIGNAL = 2.8; EXPRESSED IN BRAIN, SIGNAL = 2.5; NT HIT: AE004553.1, EVALUE 2.40e-01; EST_HUMAN HIT: AW748965.1, EVALUE 3.00e-54; SWISSPROT HIT: Q93572, EVALUE 8.20e-01
cctctgtaccccagcaccatggctctctgtagagcagctcgagggcatcttggtcaccatccctcattaggtcagttgctaccaaggcactgtgaaagcactgcagagctgc

SEQ ID NO: 26569 - DNA, 434 bp, Homo sapiens
  MAP TO AL035682.16; EXPRESSED IN LUNG, SIGNAL = 1.4; EXPRESSED IN BONE MARROW, SIGNAL =   2; EXPRESSED IN FETAL LIVER, SIGNAL = 1.3; EXPRESSED IN BRAIN, SIGNAL = 2.1; EXPRESSED IN PLACENTA, SIGNAL = 1.4; EXPRESSED IN HELA, SIGNAL = 1.4; EXPRESSED IN HEART, SIGNAL = 1.5; EST_HUMAN HIT: BF343827.1, EVALUE 2.60e-02; NT HIT: AB033712.1, EVALUE 1.10e+00; SWISSPROT HIT: P14266, EVALUE 5.80e-02
acttcttgaaaacgtctcaagtactcggagtggagaaagcagaaggagcgccttggtgttccaagaacaaacggggccaagccagccggcgtctgtgtgcaggaatgcaggcgggaagggctgagataaagcacagatgccccatgagggagcggggtggaatgcccagacgcgacgctgggatcactggccaaggtgcaggaaacgataactcagagccgggggcttccctggaccccagggcaggggcgggatcagcttcaaagatggtttgtttgcacttgtgcgggggagggaggacctgtgtgtccactggtgactgcttccttttccagccacagaaccttccctcaaccctcaaaacgcataagcccagctcttacaaagtttccaaggaaagcccactttggcaaaatcccaagggaaataaatga

SEQ ID NO: 26570 - DNA, 80 bp, Homo sapiens
  MAP TO AL035682.16; EXPRESSED IN BONE MARROW, SIGNAL = 1.3; EXPRESSED IN LUNG, SIGNAL = 1.2; EXPRESSED IN HEART, SIGNAL = 1.3; EXPRESSED IN FETAL LIVER, SIGNAL = 1.5; EXPRESSED IN PLACENTA, SIGNAL = 1.4; NT HIT: AL445064.1, EVALUE 6.40e-01; EST_HUMAN HIT: BF229975.1, EVALUE 2.40e-01
ccaacctagggtcttcatcaaaaagtgggtcctcatccacacctgcaaagtgagcttgaagcctgaagactgagtaagaa

SEQ ID NO: 26571 - DNA, 186 bp, Homo sapiens
  MAP TO AL035701.13; EXPRESSED IN HELA, SIGNAL = 9.7; EXPRESSED IN PLACENTA, SIGNAL =  21; EXPRESSED IN LUNG, SIGNAL = 8.9; EXPRESSED IN FETAL LIVER, SIGNAL =  14; EXPRESSED IN BRAIN, SIGNAL = 7.4; EXPRESSED IN BONE MARROW, SIGNAL =  10; EXPRESSED IN HEART, SIGNAL = 6.6; EXPRESSED IN ADULT LIVER, SIGNAL =  14; NT HIT: M28877.1, EVALUE 2.00e-24; EST_HUMAN HIT: BF002476.1, EVALUE 2.00e-22; SWISSPROT HIT: P40395, EVALUE 3.40e-01
atattggtccttgtacattaatgaaatctctctgttcctgaaaattattgtcttgaagactactttttctgatatcaatatgtatatatttattatggttagtttctgatatggttttgctgtgtctgcacccaaatctcatcttgaattgtagttcccacaattcccacatgttgtggaagggat

SEQ ID NO: 26572 - DNA, 105 bp, Homo sapiens
  MAP TO AL049758.11; EXPRESSED IN FETAL LIVER, SIGNAL =   2; EXPRESSED IN ADULT LIVER, SIGNAL = 1.5; EXPRESSED IN HELA, SIGNAL = 1.3; EXPRESSED IN PLACENTA, SIGNAL = 1.9; EXPRESSED IN BRAIN, SIGNAL = 1.6; EXPRESSED IN LUNG, SIGNAL = 1.8; EXPRESSED IN HEART, SIGNAL = 1.5; EXPRESSED IN BONE MARROW, SIGNAL = 1.5; NT HIT: gi11418213, EVALUE 6.00e-45; EST_HUMAN HIT: AU118797.1, EVALUE 9.00e-45
tcagtgccccctacctgctggctgcttcctcggctcctcgaacagatcagccgagcttatggaggaacttgccgacagcctctctaggcgggccctggtctcata

SEQ ID NO: 26573 - DNA, 296 bp, Homo sapiens
  MAP TO AL049758.11; EXPRESSED IN HELA, SIGNAL = 1.7; EXPRESSED IN BRAIN, SIGNAL = 2.3; EXPRESSED IN PLACENTA, SIGNAL = 1.5; EXPRESSED IN LUNG, SIGNAL = 1.9; EXPRESSED IN BONE MARROW, SIGNAL = 3.7; EXPRESSED IN HEART, SIGNAL = 1.4; EXPRESSED IN ADULT LIVER, SIGNAL = 1.5; EXPRESSED IN FETAL LIVER, SIGNAL = 2.5; NT HIT: AF207069.1, EVALUE 1.80e-01; EST_HUMAN HIT: T03214.1, EVALUE 6.80e-02; SWISSPROT HIT: P20128, EVALUE 8.10e-01
gtgaggaattttaaaactacttaataagcacctacgaggagtcaggcactctgctaggggaagacaaagggcaagaagacacattcagctcctgccctcatgaggcttgggaactgacttatggaagggaggctgacttgaatgcagaagcctcagaagctgcattaatgaaaggcagagtttctcacggagctgacctgggaccaaatggctgccttgaggagaaggaagggtgtagtagaggctggactgccctggagtgggaagaggggggtcagcactggactggtgcaggg

SEQ ID NO: 26574 - DNA, 102 bp, Homo sapiens
  MAP TO AL078474.2; EXPRESSED IN PLACENTA, SIGNAL =   2; EXPRESSED IN FETAL LIVER, SIGNAL = 6.3; EXPRESSED IN ADULT LIVER, SIGNAL = 4.4; EXPRESSED IN BRAIN, SIGNAL = 2.2; EXPRESSED IN HELA, SIGNAL = 3.6; EXPRESSED IN BONE MARROW, SIGNAL = 2.3; EXPRESSED IN HEART, SIGNAL = 3.7; EXPRESSED IN LUNG, SIGNAL =   4; EST_HUMAN HIT: BF668905.1, EVALUE 1.30e+00; NT HIT: U82671.2, EVALUE 2.20e-01
ctccctccagcactggagtcactgcaggcttatgcatcccacttggggtcttgaggagcagtctgtccaccttgccacccatcccattggtgctgatgcacc

SEQ ID NO: 26575 - DNA, 120 bp, Homo sapiens
  MAP TO AL079295.1; EXPRESSED IN PLACENTA, SIGNAL = 6.4; EXPRESSED IN BRAIN, SIGNAL = 8.4; EXPRESSED IN HELA, SIGNAL =   6; EXPRESSED IN LUNG, SIGNAL = 7.1; EXPRESSED IN BONE MARROW, SIGNAL = 7.5; EXPRESSED IN HEART, SIGNAL = 5.2; EXPRESSED IN FETAL LIVER, SIGNAL =   8; EXPRESSED IN ADULT LIVER, SIGNAL = 4.7; NT HIT: AF188290.2, EVALUE 2.70e-01; EST_HUMAN HIT: W23871.1, EVALUE 3.00e-57; SWISSPROT HIT: gi3913587, EVALUE 5.40e+00
ggtcagtggatcctggactgcaaaaaggcacttcagtgaaccacaggaaagaagatgccaaaactggggggcaagagtttgaggtggggagaaaccccccaaaatcacttgagttaaaaa

SEQ ID NO: 26576 - DNA, 104 bp, Homo sapiens
  MAP TO AL079300.11; EXPRESSED IN ADULT LIVER, SIGNAL = 4.1; EXPRESSED IN FETAL LIVER, SIGNAL = 2.3; EXPRESSED IN HELA, SIGNAL = 2.1; EXPRESSED IN PLACENTA, SIGNAL = 2.1; EXPRESSED IN BRAIN, SIGNAL = 1.8; EXPRESSED IN BONE MARROW, SIGNAL = 2.3; EXPRESSED IN LUNG, SIGNAL = 2.1; EXPRESSED IN HEART, SIGNAL = 1.8; NT HIT: D90911.1, EVALUE 8.80e-01; EST_HUMAN HIT: BE968839.1, EVALUE 5.10e+00; SWISSPROT HIT: P26050, EVALUE 1.10e+00
tcctcaccccaagcccagtaaaaccctagccatggtcactcaccctgttctgcaaggtccacatgctgacaggcatgacgacctagctgtagagactgccaagg

SEQ ID NO: 26577 - DNA, 197 bp, Homo sapiens
  MAP TO AP000053.1; EXPRESSED IN HEART, SIGNAL = 2.1; EXPRESSED IN BONE MARROW, SIGNAL =   2; EXPRESSED IN LUNG, SIGNAL = 3.4; EXPRESSED IN FETAL LIVER, SIGNAL = 3.5; EXPRESSED IN ADULT LIVER, SIGNAL = 4.2; EXPRESSED IN HELA, SIGNAL = 3.1; EXPRESSED IN PLACENTA, SIGNAL =   5; EXPRESSED IN BRAIN, SIGNAL = 2.1; NT HIT: AF048687.1, EVALUE 3.00e-02; EST_HUMAN HIT: BE271911.1, EVALUE 1.70e-01; SWISSPROT HIT: P52026, EVALUE 2.20e+00
gccatccttggaattgaggccaacatcatctgcccatttgccagacaagctgctcaggaggagagggccacagccccttatctcctcgccaaacaagagaagatccccagttgctttttttttctgtggaagagattcttttaaaaacatttttttcatggagaagaaaatctgaaaaaaaagaatgaaaccgaacc

SEQ ID NO: 26578 - DNA, 136 bp, Homo sapiens
  MAP TO AP000053.1; EXPRESSED IN PLACENTA, SIGNAL = 5.6; EXPRESSED IN HELA, SIGNAL = 3.4; EXPRESSED IN BRAIN, SIGNAL = 3.5; EXPRESSED IN LUNG, SIGNAL = 3.2; EXPRESSED IN HEART, SIGNAL = 2.2; EXPRESSED IN BONE MARROW, SIGNAL = 5.3; EXPRESSED IN FETAL LIVER, SIGNAL = 3.3; EXPRESSED IN ADULT LIVER, SIGNAL = 4.8; NT HIT: AF297044.1, EVALUE 1.20e+00; EST_HUMAN HIT: BE871461.1, EVALUE 4.50e-01; SWISSPROT HIT: P20585, EVALUE 7.00e+00
cggattcctccgagaacagtggaatagtgctcctccccagagcacaggttttgccagtgaagattgaatttggctagaaaccgctgccctgctctctcttctcgaagcacctggaagtctgagaaggaactgggtg

SEQ ID NO: 26579 - DNA, 262 bp, Homo sapiens
  MAP TO AP000053.1; EXPRESSED IN BRAIN, SIGNAL = 1.8; EXPRESSED IN HELA, SIGNAL = 3.7; EXPRESSED IN ADULT LIVER, SIGNAL = 4.6; EXPRESSED IN FETAL LIVER, SIGNAL =  10; EXPRESSED IN PLACENTA, SIGNAL = 5.8; EXPRESSED IN BONE MARROW, SIGNAL = 1.5; EXPRESSED IN HEART, SIGNAL = 3.9; EXPRESSED IN LUNG, SIGNAL = 3.5; EST_HUMAN HIT: BE815173.1, EVALUE 4.00e-03; NT HIT: AB008824.1, EVALUE 6.30e-01
aaatcttcaagacgtcagcatcagtgacacgatggtgacagaggccagcattgcttgttgtatctttttccatcctgttcctatctacacttccattcttctgttcattctgcttgcatttcccacccagatggctttcacggacacacacacacacacacacaccgcacacacacacatcactcacagacgcaccctgtgcccaatgtcaaaagacaaaactgcaacacgtttagtcatagacctcattgtcttttattct

SEQ ID NO: 26580 - DNA, 82 bp, Homo sapiens
  MAP TO AP000053.1; EXPRESSED IN HELA, SIGNAL = 2.8; EXPRESSED IN PLACENTA, SIGNAL = 2.4; EXPRESSED IN BRAIN, SIGNAL = 4.8; EXPRESSED IN BONE MARROW, SIGNAL =   4; EXPRESSED IN HEART, SIGNAL = 2.3; EXPRESSED IN LUNG, SIGNAL =   3; EXPRESSED IN FETAL LIVER, SIGNAL = 3.6; EXPRESSED IN ADULT LIVER, SIGNAL = 4.4; EST_HUMAN HIT: AA228301.1, EVALUE 3.00e-04; NT HIT: AL163201.2, EVALUE 7.00e-04; SWISSPROT HIT: Q61572, EVALUE 4.30e+00
atgaagaaaagcaggctgggaaaatggtccacccgagagcggcacggagccaaaggaagccccaccccagcaaagggaagag

SEQ ID NO: 26581 - DNA, 105 bp, Homo sapiens
  MAP TO AP000053.1; EXPRESSED IN HEART, SIGNAL = 3.8; EXPRESSED IN BONE MARROW, SIGNAL = 5.6; EXPRESSED IN LUNG, SIGNAL = 6.4; EXPRESSED IN FETAL LIVER, SIGNAL = 8.9; EXPRESSED IN ADULT LIVER, SIGNAL = 5.5; EXPRESSED IN PLACENTA, SIGNAL = 5.2; EXPRESSED IN BRAIN, SIGNAL = 2.6; EXPRESSED IN HELA, SIGNAL = 4.1; SWISSPROT HIT: P49867, EVALUE 5.50e+00; NT HIT: AF261280.1, EVALUE 5.70e-02; EST_HUMAN HIT: AV760891.1, EVALUE 1.30e+00
ttgttttccttggtactcctggccctgacgcacccagccaggcacacagaaggtgctccagtatttgatgagtgaatgactggtagcaccagaggaaagggagca

SEQ ID NO: 26582 - DNA, 576 bp, Homo sapiens
  MAP TO AP000111.1; EXPRESSED IN PLACENTA, SIGNAL = 1.2; EXPRESSED IN HEART, SIGNAL = 2.2; SWISSPROT HIT: P44836, EVALUE 1.00e-12
gcttggttggttggttcgttggttgcttggttggttgcttggttgcttggttggctggttgcttggttgtttgcttggttgcttggttggttggttggttgcttgcttgcttgcttgcttgcttgcttgcttgcttgcttggctggttggttggttggttgcttggttggttggttgcttgcttgcttggttgcttgcttcattggttgcttggttgcttgcttcattggttgcttggttgcttgcttcgttgcttgcttggttggttgcttggttggttgcttggttggttggttggttggttgcttgattggttgcttggttgcttggttggttggttggttggttgtttggttgcttggttggttggttggttggttgcttggttggttggttggttgcttgcttgctttgttgcttgcttggttcgttggttcgttggttggttggttggttggttggttggttggttggttggttcgttgattgcttggttggttggttgcttggttggttggctggttcattggttggttggttgcttggttgtttggttggttggttttcttcacattt

SEQ ID NO: 26583 - DNA, 114 bp, Homo sapiens
  MAP TO AP000127.1; EXPRESSED IN HEART, SIGNAL = 4.2; EXPRESSED IN ADULT LIVER, SIGNAL = 4.2; EXPRESSED IN BRAIN, SIGNAL = 6.1; EXPRESSED IN PLACENTA, SIGNAL = 6.1; EXPRESSED IN BONE MARROW, SIGNAL = 5.9; EXPRESSED IN LUNG, SIGNAL = 5.1; EXPRESSED IN FETAL LIVER, SIGNAL =  10; EXPRESSED IN HELA, SIGNAL = 6.9; EST_HUMAN HIT: BF668698.1, EVALUE 1.50e+00; SWISSPROT HIT: P31349, EVALUE 4.10e+00; NT HIT: AL161541.2, EVALUE 2.50e-01
cactttgaggcaactcacgtgctccttgcttcctgctaggtcttctctgatgccatggcaaggaaagtccatgttaattttctctgcactcacatatgtaccacccagaagtgg

SEQ ID NO: 26584 - DNA, 142 bp, Homo sapiens
  MAP TO AP000127.1; EXPRESSED IN HELA, SIGNAL =   2; EXPRESSED IN BRAIN, SIGNAL =   2; EXPRESSED IN PLACENTA, SIGNAL =   2; EXPRESSED IN BONE MARROW, SIGNAL =   2; EXPRESSED IN HEART, SIGNAL = 1.7; EXPRESSED IN LUNG, SIGNAL = 2.7; EXPRESSED IN ADULT LIVER, SIGNAL = 2.6; EXPRESSED IN FETAL LIVER, SIGNAL = 2.6; NT HIT: gi11419697, EVALUE 1.30e+00; SWISSPROT HIT: P09248, EVALUE 4.70e-01; EST_HUMAN HIT: R32019.1, EVALUE 3.00e-02
ccatgccttgcataaccctctcttcctgcatatggacaggacctatgaaaatgatgagatattgctcttatgtttatgttacttcctatggccaatggaacttggcagatgcaattaagatccctaatcagttgactttgag

SEQ ID NO: 26585 - DNA, 132 bp, Homo sapiens
  MAP TO AP000189.1; EXPRESSED IN PLACENTA, SIGNAL = 1.6; EXPRESSED IN HEART, SIGNAL = 1.9; EXPRESSED IN LUNG, SIGNAL = 2.1; EXPRESSED IN ADULT LIVER, SIGNAL = 2.8; EXPRESSED IN FETAL LIVER, SIGNAL = 2.1; NT HIT: AF233355.1, EVALUE 1.20e+00; EST_HUMAN HIT: BE897376.1, EVALUE 2.00e-68; SWISSPROT HIT: P31836, EVALUE 1.40e+00
atttcacaggaatattcacccaaagcttgagagctagagcgaggagagacttgcagtcggtaactgagtagatgaaatgcataatttttcactaggtgataattccctttgggaagaagtgctttatcttta

SEQ ID NO: 26586 - DNA, 288 bp, Homo sapiens
  MAP TO AP000350.1; EXPRESSED IN FETAL LIVER, SIGNAL = 2.4; EXPRESSED IN BRAIN, SIGNAL = 1.5; EXPRESSED IN PLACENTA, SIGNAL = 1.9; EXPRESSED IN HELA, SIGNAL = 1.7; EXPRESSED IN BONE MARROW, SIGNAL = 1.8; EXPRESSED IN LUNG, SIGNAL =   2; EXPRESSED IN HEART, SIGNAL = 1.3; EXPRESSED IN ADULT LIVER, SIGNAL = 2.2; NT HIT: AF040756.1, EVALUE 7.00e-01; EST_HUMAN HIT: N54484.1, EVALUE 0.00e+00; SWISSPROT HIT: P10272, EVALUE 2.00e-09
aaggttctctgtagcagagatgtggttgaaaaaggaaaggaagacatagggtttgtagatggccatagcttcacggaagagcgaaagaagggcaggatatgtggttctctccctatggaaaaccatagaggccaaaagcttccctgcccaaacttcagccccaaagactcagataatagccttaaccagagccctggcatgaagaaaggacaaggccttgactgtttatacagacttgagatatgtgctcactgtgatccatgcccatggtgcaatcgggtacgaaag

SEQ ID NO: 26587 - DNA, 146 bp, Homo sapiens
  MAP TO AP000353.1; EXPRESSED IN PLACENTA, SIGNAL = 4.9; EXPRESSED IN BRAIN, SIGNAL = 6.7; EXPRESSED IN HELA, SIGNAL = 4.8; EXPRESSED IN HEART, SIGNAL = 3.5; EXPRESSED IN BONE MARROW, SIGNAL = 6.4; EXPRESSED IN LUNG, SIGNAL = 4.9; EXPRESSED IN FETAL LIVER, SIGNAL = 5.7; EXPRESSED IN ADULT LIVER, SIGNAL = 4.9; NT HIT: gi11431438, EVALUE 1.30e+00; EST_HUMAN HIT: AA613562.1, EVALUE 4.90e-01; SWISSPROT HIT: Q10496, EVALUE 1.00e+00
caggtctcagccagtgcctctctcctcagagagagccagtagtccagaaggaggctgttggagcccagcagacctggacaccccaaggcagggacctcatctaggacagcattgccattgccctcccaaaacctctcctagctcag

SEQ ID NO: 26588 - DNA, 163 bp, Homo sapiens
  MAP TO AP000353.1; EXPRESSED IN BRAIN, SIGNAL = 2.8; EXPRESSED IN PLACENTA, SIGNAL = 2.8; EXPRESSED IN HELA, SIGNAL = 1.6; EXPRESSED IN BONE MARROW, SIGNAL = 2.4; EXPRESSED IN HEART, SIGNAL = 1.8; EXPRESSED IN LUNG, SIGNAL = 2.1; EXPRESSED IN ADULT LIVER, SIGNAL =   2; EXPRESSED IN FETAL LIVER, SIGNAL = 1.5; SWISSPROT HIT: Q52106, EVALUE 6.00e-01; NT HIT: AF213668.1, EVALUE 3.70e-01; EST_HUMAN HIT: BE513802.1, EVALUE 1.40e-01
atggagaactgtggggacagccatcttggggcatcttttccccttcagtagggcactggtagcaacaacagccctgtgcacaccaggtgccgcatgtgccgtccccgtggatgtgcacgtgatccaggcacagctgtccactgagatggaggcagccccagac

SEQ ID NO: 26589 - DNA, 91 bp, Homo sapiens
  MAP TO AP000354.1; EXPRESSED IN HEART, SIGNAL = 2.7; NT HIT: AB002374.1, EVALUE 2.00e-44; EST_HUMAN HIT: AW501427.1, EVALUE 3.00e-44
agacattccataagtggaccaatctcaacatccaaacccctgacagccctgtcagataagagaccaaactatggggaaatccctgttcaag

SEQ ID NO: 26590 - DNA, 189 bp, Homo sapiens
  MAP TO AP000356.1; EXPRESSED IN PLACENTA, SIGNAL = 3.6; EXPRESSED IN HELA, SIGNAL = 6.2; EXPRESSED IN LUNG, SIGNAL = 7.9; EXPRESSED IN HEART, SIGNAL = 4.7; EXPRESSED IN BONE MARROW, SIGNAL = 6.1; EXPRESSED IN FETAL LIVER, SIGNAL = 4.4; EXPRESSED IN ADULT LIVER, SIGNAL =   4; EXPRESSED IN BRAIN, SIGNAL =  10; SWISSPROT HIT: Q9XEL8, EVALUE 2.90e+00; NT HIT: AF171666.1, EVALUE 2.80e-02; EST_HUMAN HIT: T89398.1, EVALUE 5.00e-94
agcaaacatggctgggctatgtcctctctcccttcagggtatcccctcccctgctctatccccatgccaccagatcgccatgtccagcctcagtttccccatcaggccccactcagcagcatctcacacagctcaccacactctcctcgagttttcattttgcaaattttcgcacctacaaaaatgtaa

SEQ ID NO: 26591 - DNA, 159 bp, Homo sapiens
  MAP TO AP000359.1; EXPRESSED IN BONE MARROW, SIGNAL = 2.6; EXPRESSED IN LUNG, SIGNAL = 2.8; EXPRESSED IN HEART, SIGNAL = 1.8; EXPRESSED IN FETAL LIVER, SIGNAL = 2.8; EXPRESSED IN ADULT LIVER, SIGNAL =   3; EXPRESSED IN PLACENTA, SIGNAL = 2.8; EXPRESSED IN HELA, SIGNAL = 2.1; EXPRESSED IN BRAIN, SIGNAL = 3.5; NT HIT: U13674.1, EVALUE 3.60e-01; EST_HUMAN HIT: H55093.1, EVALUE 1.00e-26
tcagatattctgttgtagcaaccctaaagagagtaagacaccaggcaactccacagagatgtctaatataactgtattcttcagggtcatcaccttcaggaccacaatgcctggtagggcaaggactcgcgcccgaggcagagcccgccgcagggagag

SEQ ID NO: 26592 - DNA, 297 bp, Homo sapiens
  MAP TO Z82188.2; EXPRESSED IN HELA, SIGNAL = 1.3; EXPRESSED IN BONE MARROW, SIGNAL =   2; EXPRESSED IN LUNG, SIGNAL = 1.2; EXPRESSED IN HEART, SIGNAL = 1.3; NT HIT: L11692.1, EVALUE 4.60e-02; SWISSPROT HIT: Q00286, EVALUE 3.60e-01; EST_HUMAN HIT: AW517098.1, EVALUE 2.70e-01
agacaaggaaactgaggctcctggagagtatgcgactcatccaaactcacacgctggatgtattccctcaacctgggcccagctgggggccttctgggaggagtggcattggagagctcctctgtcctgccatgggaggcccagccttctcccacatgaagacccctcagggctagagcccggggcacagatgaggagaaaggcaggcctagttcccacccccagggacggcgttccatgacattctgcaaagagtccgtgtgacttcccatgtccatttcaagctgcacagtttcc

SEQ ID NO: 26593 - DNA, 251 bp, Homo sapiens
  MAP TO Z82201.1; EXPRESSED IN BRAIN, SIGNAL = 7.1; EXPRESSED IN PLACENTA, SIGNAL = 4.5; EXPRESSED IN HELA, SIGNAL = 6.2; EXPRESSED IN BONE MARROW, SIGNAL =  11; EXPRESSED IN LUNG, SIGNAL = 6.1; EXPRESSED IN HEART, SIGNAL = 4.6; EXPRESSED IN FETAL LIVER, SIGNAL = 6.4; EXPRESSED IN ADULT LIVER, SIGNAL =   5; NT HIT: AL161571.2, EVALUE 1.50e-01; EST_HUMAN HIT: AA604269.1, EVALUE 5.80e-02; SWISSPROT HIT: Q01965, EVALUE 1.20e-01
tgcaaagagttcagggaaaggaacaggccacttttcttttccttccacactctcggtttgtggagcttgtacttctagtccaggaaggaagggaaggagaaagtactggaggtttctgctcgcaattttttatatcactttcataatgtctggctgcttctgtctacagccaaacaaatactgcactgaatctcacaccaaggagccacctgaaggccaggcctctgtttcgatgaccgtgatagagatca

SEQ ID NO: 26594 - DNA, 210 bp, Homo sapiens
  MAP TO Z83840.7; EXPRESSED IN LUNG, SIGNAL = 1.6; EXPRESSED IN HEART, SIGNAL = 2.3; EXPRESSED IN FETAL LIVER, SIGNAL = 6.9; EXPRESSED IN ADULT LIVER, SIGNAL = 1.9; EXPRESSED IN PLACENTA, SIGNAL = 4.3; EXPRESSED IN HELA, SIGNAL = 1.8; NT HIT: gi6753033, EVALUE 5.00e-01; EST_HUMAN HIT: AV648521.1, EVALUE 4.70e-02; SWISSPROT HIT: O36431, EVALUE 5.70e-01
cagagctccctgaaaagatcattcattcatagccactgagcacctcctacatagctgacattgttctgggcactgaggaaagcatggtgagcaagataaccatggtaggcagagaacaattatctcagagttgtaagaaactaaaaggtcactctttgacccctcttattcactcatataacaactatggattgagaacttattatgtgt

SEQ ID NO: 26595 - DNA, 469 bp, Homo sapiens
  MAP TO Z83840.7; EXPRESSED IN HEART, SIGNAL = 2.1; EXPRESSED IN HELA, SIGNAL = 1.7; SWISSPROT HIT: P38996, EVALUE 2.50e-01; EST_HUMAN HIT: BE258569.1, EVALUE 1.00e-116; NT HIT: AL161512.2, EVALUE 2.90e-01
atctggaggcttaggggaaaaaactggaggcttagagcgaagaaacagactgttaaaaagtaaagataatggaaagacccgtttatcagagtggaagaaccaggaacagggtggaggtgggaatgatgaagaaattcaaatacaggggaagagaaacctgagagggaccacagctgatgatggtacagagacccaggctcctgcaggagatgaccagggacagttaagagttgaaattgctgaagagatccaggtacaagggcaaggaaataagaatgacggtggagttgaggatgttgcagaactccaggatataggaagccagagaaagtgcacagatgaggatgttggagagcctcgagcaccaaggggaggaaacaaggatctggtcagaggagaggatgctgtgagggacagtctccaagtcgactgttctgggagtgagaggcccacaggcaggaagcacagc

SEQ ID NO: 26596 - DNA, 163 bp, Homo sapiens
  MAP TO Z83844.5; EXPRESSED IN PLACENTA, SIGNAL = 1.7; EXPRESSED IN BRAIN, SIGNAL =   2; EXPRESSED IN HELA, SIGNAL = 2.6; EXPRESSED IN BONE MARROW, SIGNAL = 3.3; EXPRESSED IN LUNG, SIGNAL =   3; EXPRESSED IN HEART, SIGNAL =   3; EXPRESSED IN FETAL LIVER, SIGNAL = 2.8; EXPRESSED IN ADULT LIVER, SIGNAL = 1.5; NT HIT: AF005860.1, EVALUE 1.50e+00; EST_HUMAN HIT: AA705684.1, EVALUE 7.00e-19; SWISSPROT HIT: P33832, EVALUE 3.00e+00
agccaaggccaggcttctgacagcacctgaacttctctgtccaatcagtgcgcaagagcaggctgtcaatggggcggcctcagagggtttcctgaaggaggtagcaattgagctggcttttgagggatacacgtttattaatcaagaggcagcgtttattggc

SEQ ID NO: 26597 - DNA, 451 bp, Homo sapiens
  MAP TO Z83844.5; EXPRESSED IN HELA, SIGNAL = 1.5; EXPRESSED IN LUNG, SIGNAL = 2.1; EXPRESSED IN BONE MARROW, SIGNAL =   2; EXPRESSED IN HEART, SIGNAL = 2.3; EXPRESSED IN FETAL LIVER, SIGNAL = 1.5; NT HIT: AF268152.1, EVALUE 1.10e+00; EST_HUMAN HIT: BF594422.1, EVALUE 4.20e-01; SWISSPROT HIT: P52951, EVALUE 4.70e-02
ctagactcccaaataggcctttctagggacctcttcaccatgccaccctgcctccctgccagccccactcatgccagacgctgcagaggagtaaattgtccctccatccaacagcaaacagtccctgatgccgggcccattttccagggtggaggaggatgcaggagcagctcctgaggctacaagaacccaattattgggctgggctgggaaagtggccacacccacccgcccgcagcccggcgaggaccacacctgaagcgcctctgaccctcggtctaggactccgcctgagatgccccattccttgatctggcagagaggggaggcatgggggaggggcagtggaactaggctgggccccatccagcccttcctatggttgaggttttggggaggcccggaggaaaaagtgaagctgctgtggttggtttccaagcagccacttggt

SEQ ID NO: 26598 - DNA, 98 bp, Homo sapiens
  MAP TO Z83844.5; EXPRESSED IN LUNG, SIGNAL = 1.6; EXPRESSED IN HELA, SIGNAL = 1.4; EXPRESSED IN HEART, SIGNAL = 1.3; SWISSPROT HIT: Q08893, EVALUE 1.90e+00; EST_HUMAN HIT: AA022667.1, EVALUE 3.10e-01; NT HIT: AF009179.1, EVALUE 1.30e-02
ccttagggtggtgtggagcaggtgtagggcccggagcagccctctgcctgtccagtgatcctctgcctctcctcattgccccgtcctgtcccacccac

SEQ ID NO: 26599 - DNA, 145 bp, Homo sapiens
  MAP TO Z83844.5; EXPRESSED IN ADULT LIVER, SIGNAL = 2.7; EXPRESSED IN FETAL LIVER, SIGNAL = 4.9; EXPRESSED IN HELA, SIGNAL =   4; EXPRESSED IN BRAIN, SIGNAL = 4.9; EXPRESSED IN PLACENTA, SIGNAL =   7; EXPRESSED IN LUNG, SIGNAL = 3.5; EXPRESSED IN BONE MARROW, SIGNAL = 4.4; EXPRESSED IN HEART, SIGNAL = 3.7; NT HIT: AJ131778.1, EVALUE 8.30e-02; EST_HUMAN HIT: AW956455.1, EVALUE 3.00e-76; SWISSPROT HIT: O00321, EVALUE 2.30e+00
ccaacagccaggccttacagtggggcaggcttagtgactgtgcctcagttatgctgtacctgggagtgggcaggccctctcccatgtcaccatcaaaacccactgatgaaggctggtgggagtctgagggctgcacccgggtatg

SEQ ID NO: 26600 - DNA, 162 bp, Homo sapiens
  MAP TO Z83844.5; EXPRESSED IN HEART, SIGNAL = 1.3; NT HIT: AJ237934.1, EVALUE 3.70e-01; EST_HUMAN HIT: BF685937.1, EVALUE 2.20e+00; SWISSPROT HIT: P98133, EVALUE 6.80e+00
ctgagatgagatgaagaaatgggattaagtgaggccctgagcgtggccaggcccactgagtctgagtagcagctgttattcctgttaatatcctggtcaagcctgttccaggcacctgagtgacacagacatgaagggacacgccctgtccctgcgctcacc

SEQ ID NO: 26601 - DNA, 274 bp, Homo sapiens
  MAP TO Z86090.10; EXPRESSED IN ADULT LIVER, SIGNAL = 5.3; EXPRESSED IN FETAL LIVER, SIGNAL = 6.2; EXPRESSED IN HELA, SIGNAL = 1.9; EXPRESSED IN PLACENTA, SIGNAL = 9.3; EXPRESSED IN BRAIN, SIGNAL = 2.3; EXPRESSED IN BONE MARROW, SIGNAL = 1.8; EXPRESSED IN HEART, SIGNAL = 2.5; EXPRESSED IN LUNG, SIGNAL = 1.9; EST_HUMAN HIT: BE312542.1, EVALUE 0.00e+00; SWISSPROT HIT: P97639, EVALUE 1.00e-04; NT HIT: AE004060.1, EVALUE 1.10e-02
atgaagaagggagtggggagggcagttgggcttggaggcggcagcggctgccaggctacggaggaagacccccttcccaactgcggggcttgcgctccgggacaaggtggcaggcgctggaggctgccgcagcctgcgtgggtggaggggagctcagctcggttgtgggagcaggcgaccggcactggctggatggacctggaagcctcgctgctgcccactggtcccaacgccagcaacacctctgatggccccgataacctcacttcggcag

SEQ ID NO: 26602 - DNA, 208 bp, Homo sapiens
  MAP TO Z95114.19; EXPRESSED IN HEART, SIGNAL = 3.2; EXPRESSED IN BONE MARROW, SIGNAL = 2.9; EXPRESSED IN LUNG, SIGNAL = 5.5; EXPRESSED IN FETAL LIVER, SIGNAL = 3.8; EXPRESSED IN ADULT LIVER, SIGNAL = 6.4; EXPRESSED IN PLACENTA, SIGNAL = 4.6; EXPRESSED IN HELA, SIGNAL = 2.7; EXPRESSED IN BRAIN, SIGNAL = 3.4; EST_HUMAN HIT: H26951.1, EVALUE 1.00e-113; NT HIT: gi11418041, EVALUE 1.00e-114
ccgggggcaggtcggtagtggagccgctgtttcttctgctgtatccaaaagttctaactcttcggctttctgcattttcagctctttcttttcctggccttctcattgctggttcctgcacacctcccctctattcctccccccaatatattcgttagtctaaaggaaatttcttcttcctattccccacactctccagtcccctctc

SEQ ID NO: 26603 - DNA, 124 bp, Homo sapiens
  MAP TO Z95114.19; EXPRESSED IN ADULT LIVER, SIGNAL = 1.7; EXPRESSED IN PLACENTA, SIGNAL = 1.9; EXPRESSED IN BONE MARROW, SIGNAL = 1.7; EXPRESSED IN FETAL LIVER, SIGNAL = 2.3; EXPRESSED IN BRAIN, SIGNAL = 2.4; EXPRESSED IN HELA, SIGNAL = 1.3; EXPRESSED IN HEART, SIGNAL = 1.6; EXPRESSED IN LUNG, SIGNAL = 2.3; NT HIT: U07877.1, EVALUE 2.80e-01; EST_HUMAN HIT: AA226070.1, EVALUE 2.00e-09; SWISSPROT HIT: P10180, EVALUE 6.20e-01
ctaattgataatagccagtgtgtactgggtgtctgtgatctgcagggctcctcatatgtgcctcattcgatgatcacacacaggccaggagatgggtgcaaccgtggctcccattttgaaacag

SEQ ID NO: 26604 - DNA, 124 bp, Homo sapiens
  MAP TO Z97055.1; EXPRESSED IN LUNG, SIGNAL = 1.6; EXPRESSED IN BONE MARROW, SIGNAL = 1.5; EXPRESSED IN FETAL LIVER, SIGNAL = 1.8; EXPRESSED IN PLACENTA, SIGNAL = 1.9; EXPRESSED IN HELA, SIGNAL = 1.5; EXPRESSED IN HEART, SIGNAL = 1.6; EST_HUMAN HIT: H94065.1, EVALUE 7.00e-03; NT HIT: AF289468.1, EVALUE 1.10e+00
atacgatcgggagcttagtggggaagtgaggatggagctatcattttggttacaggtggcatttcaggacatggagccagatgactcacttaagagagggcagacagggaacagaggaatgagc

SEQ ID NO: 26605 - DNA, 164 bp, Homo sapiens
  MAP TO Z97055.1; EXPRESSED IN BRAIN, SIGNAL = 3.5; EXPRESSED IN PLACENTA, SIGNAL = 2.3; EXPRESSED IN HELA, SIGNAL = 1.7; EXPRESSED IN LUNG, SIGNAL = 1.2; EXPRESSED IN HEART, SIGNAL =   2; EXPRESSED IN BONE MARROW, SIGNAL = 1.5; EXPRESSED IN FETAL LIVER, SIGNAL = 2.9; EXPRESSED IN ADULT LIVER, SIGNAL =   2; SWISSPROT HIT: Q46904, EVALUE 3.90e+00; NT HIT: gi7657632, EVALUE 1.00e-87; EST_HUMAN HIT: AI075933.1, EVALUE 2.00e-87
tctgcttgccagcattagtaggctatcacttcaggaaacaaagtaaggctgtggaattcagctcaaattccgagcgcaactcggtcctttggtggccgactctccacccactgcatgcaaatgctcctgactgcattagactcccacctgccagcctcaccagg

SEQ ID NO: 26606 - DNA, 113 bp, Homo sapiens
  MAP TO Z97055.1; EXPRESSED IN PLACENTA, SIGNAL = 3.6; EXPRESSED IN BRAIN, SIGNAL =  13; EXPRESSED IN HELA, SIGNAL =   7; EXPRESSED IN BONE MARROW, SIGNAL =  16; EXPRESSED IN HEART, SIGNAL = 3.5; EXPRESSED IN LUNG, SIGNAL = 8.2; EXPRESSED IN ADULT LIVER, SIGNAL = 8.2; EXPRESSED IN FETAL LIVER, SIGNAL = 8.3; NT HIT: AE000750.1, EVALUE 6.20e-02; EST_HUMAN HIT: AW513637.1, EVALUE 1.40e+00; SWISSPROT HIT: Q11137, EVALUE 7.10e+00
aactaaaggaagccttggaaatggatctggaacattccagatctattcctggatccctttgaacttggcctatgggggcaggaagggccgtctgagctacagaccaggtggtc

SEQ ID NO: 26607 - DNA, 196 bp, Homo sapiens
  MAP TO Z97055.1; EXPRESSED IN ADULT LIVER, SIGNAL = 1.9; EXPRESSED IN HELA, SIGNAL = 1.5; EXPRESSED IN BRAIN, SIGNAL = 1.9; EXPRESSED IN PLACENTA, SIGNAL = 1.6; EXPRESSED IN LUNG, SIGNAL = 1.4; EXPRESSED IN BONE MARROW, SIGNAL = 1.8; EXPRESSED IN HEART, SIGNAL = 1.4; NT HIT: AB030505.1, EVALUE 1.20e-01; EST_HUMAN HIT: BF241245.1, EVALUE 4.40e-02
aacccagaaacttccagaaagcagggaccatgaatccctctggaaaacagtgttaattataatcttagcagtcacagtgattgtaacgctagcagttactgtttcttgaacatctaccccatgccaggcgctgtccagcatgttctgtggagacattaatggaatcgtcacagcgacccttccagggaggaggtct

SEQ ID NO: 26608 - DNA, 212 bp, Homo sapiens
  MAP TO Z97055.1; EXPRESSED IN FETAL LIVER, SIGNAL = 1.8; EXPRESSED IN ADULT LIVER, SIGNAL = 5.2; EXPRESSED IN HELA, SIGNAL = 3.7; EXPRESSED IN PLACENTA, SIGNAL = 3.2; EXPRESSED IN BRAIN, SIGNAL = 3.2; EXPRESSED IN BONE MARROW, SIGNAL = 4.9; EXPRESSED IN LUNG, SIGNAL = 4.3; EXPRESSED IN HEART, SIGNAL = 3.3; NT HIT: gi7242153, EVALUE 5.00e-01; EST_HUMAN HIT: BE782144.1, EVALUE 7.50e-01; SWISSPROT HIT: P10447, EVALUE 1.40e-01
gaggaataaaatttcagctgctagcaaccccaggtctgcactggactgccaggggaggcggagagggtcttgtggcctaggcattactttgtaaataccacggaggacagcaggtgttgggtgcagcccgggaggctgagcagtgatcttatacatcaccatccccacattgctccaaacctgcatcctccgcctaaggtgacagggaccct

SEQ ID NO: 26609 - DNA, 138 bp, Homo sapiens
  MAP TO Z98884.11; EXPRESSED IN FETAL LIVER, SIGNAL =  14; EXPRESSED IN ADULT LIVER, SIGNAL =  14; EXPRESSED IN PLACENTA, SIGNAL = 5.9; EXPRESSED IN BRAIN, SIGNAL =  24; EXPRESSED IN HELA, SIGNAL =  13; EXPRESSED IN BONE MARROW, SIGNAL =  19; EXPRESSED IN LUNG, SIGNAL =  11; EXPRESSED IN HEART, SIGNAL = 8.9; EST_HUMAN HIT: AW236297.1, EVALUE 2.00e-52; NT HIT: AF308434.1, EVALUE 8.00e-05
catcatcatcatcggtgagttacccttttctaaactgattggaaaagtcttctccatgtgttcacagaccattgattttgtgtacaagaactcagattaaaatttccctccgaaatgttagttttggctaggtgcggt

SEQ ID NO: 26610 - DNA, 569 bp, Homo sapiens; identical to SEQ ID NO: 9767
  MAP TO AB016897.1; EXPRESSED IN FETAL LIVER, SIGNAL =   3; EXPRESSED IN HELA, SIGNAL = 1.9; EXPRESSED IN PLACENTA, SIGNAL = 1.9; EXPRESSED IN BRAIN, SIGNAL = 2.4; EXPRESSED IN BONE MARROW, SIGNAL = 2.5; EXPRESSED IN LUNG, SIGNAL = 2.1; EXPRESSED IN HEART, SIGNAL = 2.3; EXPRESSED IN ADULT LIVER, SIGNAL = 3.4; NT HIT: U11077.1, EVALUE 2.30e-02; EST_HUMAN HIT: AV726323.1, EVALUE 1.40e-01; SWISSPROT HIT: P79779, EVALUE 3.70e+00

SEQ ID NO: 26611 - DNA, 598 bp, Homo sapiens; identical to SEQ ID NO: 9794
  MAP TO AC007106.6; EXPRESSED IN LUNG, SIGNAL = 4.3; EXPRESSED IN BONE MARROW, SIGNAL = 3.3; EXPRESSED IN FETAL LIVER, SIGNAL = 2.9; EXPRESSED IN ADULT LIVER, SIGNAL = 3.3; EXPRESSED IN PLACENTA, SIGNAL = 2.9; EXPRESSED IN BRAIN, SIGNAL = 2.7; EXPRESSED IN HELA, SIGNAL = 6.1; EXPRESSED IN HEART, SIGNAL = 2.8; NT HIT: AL163246.2, EVALUE 0.00e+00; EST_HUMAN HIT: AW991957.1, EVALUE 0.00e+00; SWISSPROT HIT: P14077, EVALUE 3.00e-07

SEQ ID NO: 26612 - DNA, 565 bp, Homo sapiens; identical to SEQ ID NO: 9557
  MAP TO AC008166.1; EXPRESSED IN ADULT LIVER, SIGNAL =  24; EXPRESSED IN PLACENTA, SIGNAL =  38; EXPRESSED IN BRAIN, SIGNAL = 2.4; EXPRESSED IN HELA, SIGNAL =  15; EXPRESSED IN BONE MARROW, SIGNAL = 2.1; EXPRESSED IN HEART, SIGNAL =  12; EXPRESSED IN LUNG, SIGNAL =  21; EXPRESSED IN FETAL LIVER, SIGNAL =  37; NT HIT: gi10834856, EVALUE 2.30e-02; EST_HUMAN HIT: BE348385.1, EVALUE 9.00e-03

SEQ ID NO: 26613 - DNA, 555 bp, Homo sapiens; identical to SEQ ID NO: 9431
  MAP TO AC008283.3; EXPRESSED IN FETAL LIVER, SIGNAL = 2.4; EXPRESSED IN ADULT LIVER, SIGNAL = 4.6; EXPRESSED IN PLACENTA, SIGNAL = 2.6; EXPRESSED IN HELA, SIGNAL = 2.5; EXPRESSED IN BRAIN, SIGNAL = 1.8; EXPRESSED IN HEART, SIGNAL = 1.8; EXPRESSED IN BONE MARROW, SIGNAL = 3.9; EXPRESSED IN LUNG, SIGNAL = 2.6; SWISSPROT HIT: Q08520, EVALUE 6.20e+00; NT HIT: AB019004.1, EVALUE 3.00e-29; EST_HUMAN HIT: AI114527.1, EVALUE 2.00e-31

SEQ ID NO: 26614 - DNA, 562 bp, Homo sapiens; identical to SEQ ID NO: 9777
  MAP TO AC009266.1; EXPRESSED IN ADULT LIVER, SIGNAL = 6.5; EXPRESSED IN HELA, SIGNAL = 3.3; EXPRESSED IN PLACENTA, SIGNAL = 5.7; EXPRESSED IN LUNG, SIGNAL = 5.9; EXPRESSED IN BONE MARROW, SIGNAL = 6.4; EXPRESSED IN FETAL LIVER, SIGNAL = 4.4; EXPRESSED IN BRAIN, SIGNAL =   7; EXPRESSED IN HEART, SIGNAL = 2.3; NT HIT: AL163207.2, EVALUE 6.00e-12; EST_HUMAN HIT: AI886224.1, EVALUE 4.00e-14; SWISSPROT HIT: O14628, EVALUE 2.80e-02

SEQ ID NO: 26615 - DNA, 563 bp, Homo sapiens; identical to SEQ ID NO: 9044
  MAP TO AL022318.2; EXPRESSED IN FETAL LIVER, SIGNAL = 2.5; EXPRESSED IN ADULT LIVER, SIGNAL = 4.1; EXPRESSED IN HELA, SIGNAL =   2; EXPRESSED IN PLACENTA, SIGNAL = 3.2; EXPRESSED IN BRAIN, SIGNAL = 1.8; EXPRESSED IN BONE MARROW, SIGNAL = 2.1; EXPRESSED IN LUNG, SIGNAL = 2.4; EXPRESSED IN HEART, SIGNAL = 1.8; NT HIT: Y19210.1, EVALUE 3.60e-01; SWISSPROT HIT: P30305, EVALUE 1.60e+00; EST_HUMAN HIT: AW900576.1, EVALUE 5.30e-01

SEQ ID NO: 26616 - DNA, 556 bp, Homo sapiens; identical to SEQ ID NO: 9142
  MAP TO AL022319.2; EXPRESSED IN HELA, SIGNAL = 1.5; EXPRESSED IN PLACENTA, SIGNAL = 1.8; EXPRESSED IN BRAIN, SIGNAL = 1.8; EXPRESSED IN BONE MARROW, SIGNAL =   2; EXPRESSED IN LUNG, SIGNAL = 1.9; EXPRESSED IN HEART, SIGNAL = 1.7; EXPRESSED IN FETAL LIVER, SIGNAL = 2.2; EXPRESSED IN ADULT LIVER, SIGNAL =   2; SWISSPROT HIT: Q62203, EVALUE 1.00e-02; NT HIT: AL139078.2, EVALUE 8.90e-02; EST_HUMAN HIT: AV751105.1, EVALUE 5.20e-01

SEQ ID NO: 26617 - DNA, 571 bp, Homo sapiens; identical to SEQ ID NO: 9352
  MAP TO AP000353.1; EXPRESSED IN HEART, SIGNAL = 1.3; EXPRESSED IN FETAL LIVER, SIGNAL = 1.8; EXPRESSED IN ADULT LIVER, SIGNAL = 1.9; EXPRESSED IN HELA, SIGNAL = 1.6; EXPRESSED IN PLACENTA, SIGNAL = 2.1; EXPRESSED IN LUNG, SIGNAL = 1.6; NT HIT: AJ012008.1, EVALUE 1.40e+00; EST_HUMAN HIT: BF351141.1, EVALUE 9.00e-03; SWISSPROT HIT: P11675, EVALUE 1.30e+00

SEQ ID NO: 26618 - DNA, 118 bp, Homo sapiens
  MAP TO AC005250.1; EXPRESSED IN BONE MARROW, SIGNAL = 2.6; EXPRESSED IN PLACENTA, SIGNAL = 2.6; EXPRESSED IN LUNG, SIGNAL = 2.6; EXPRESSED IN HELA, SIGNAL = 2.3; EXPRESSED IN HEART, SIGNAL =   2; EXPRESSED IN FETAL LIVER, SIGNAL = 2.4; EXPRESSED IN ADULT LIVER, SIGNAL = 2.3; EXPRESSED IN BRAIN, SIGNAL = 2.4; SWISSPROT HIT: P04196, EVALUE 1.40e+00; NT HIT: AE001811.1, EVALUE 2.60e-01
gttcatagggcttgaaagcggggacaccaccaacattcctggcagccaagtcagatgcatggacatcgtctttaaccacatcttcacactcatccctcatctgaactatcaacaattt

SEQ ID NO: 26619 - DNA, 151 bp, Homo sapiens
  MAP TO AC002426.1; EXPRESSED IN HELA, SIGNAL = 4.6; EXPRESSED IN FETAL LIVER, SIGNAL = 4.4; EXPRESSED IN BONE MARROW, SIGNAL = 4.2; EXPRESSED IN ADULT LIVER, SIGNAL = 3.9; EXPRESSED IN PLACENTA, SIGNAL = 3.9; EXPRESSED IN LUNG, SIGNAL = 4.2; EXPRESSED IN HEART, SIGNAL = 4.9; EXPRESSED IN BRAIN, SIGNAL =   4; EST_HUMAN HIT: AA143768.1, EVALUE 2.00e+00; NT HIT: AB020712.1, EVALUE 1.40e+00
ggccctgttctgcaagacaccctagatgatgccagcaaaaatctggaaacactccacgcccttgctagaatagctctaactcagcatcggcagttcccaactcaagctgtacatcagaaatcccctaagaaccctgccaaaattggagttt

SEQ ID NO: 26620 - DNA, 153 bp, Homo sapiens
  MAP TO AC006443.1; EXPRESSED IN LUNG, SIGNAL = 2.2; EXPRESSED IN HELA, SIGNAL = 3.1; EXPRESSED IN HEART, SIGNAL = 2.3; EXPRESSED IN FETAL LIVER, SIGNAL = 4.6; EXPRESSED IN PLACENTA, SIGNAL = 2.4; EXPRESSED IN BRAIN, SIGNAL = 3.1; EXPRESSED IN BONE MARROW, SIGNAL = 2.8; EXPRESSED IN ADULT LIVER, SIGNAL = 3.1; SWISSPROT HIT: P07199, EVALUE 2.30e+00
ccctccctccagggtccagggtgcagtgctgggctgcacaacctcatgcaggtccagggcagttctctgaaagctatgggagcacagagggaaggcagctgccccacagtccacacccacaagaaactcgacacacaacaagaacattctcac

SEQ ID NO: 26621 - DNA, 145 bp, Homo sapiens
  MAP TO AL118502.29; EXPRESSED IN LUNG, SIGNAL = 3.7; EXPRESSED IN PLACENTA, SIGNAL = 2.8; EXPRESSED IN ADULT LIVER, SIGNAL = 2.4; EXPRESSED IN FETAL LIVER, SIGNAL = 3.4; EXPRESSED IN BRAIN, SIGNAL = 3.1; EXPRESSED IN BONE MARROW, SIGNAL = 3.4; EXPRESSED IN HEART, SIGNAL = 2.7; EST_HUMAN HIT: H94786.1, EVALUE 2.00e-19; NT HIT: AL163202.2, EVALUE 4.00e-22
ctccctcgtagctgtaataggtgtacttattcttgtcgggtgctgtgtcataccatgcatccgtgggttggtgcagaggctcgtagaaacggcacttgctaaaacctcccttaactatcctccaccttatccagagaagcttctt

SEQ ID NO: 26622 - DNA, 206 bp, Homo sapiens
  MAP TO AL137026.10; EXPRESSED IN ADULT LIVER, SIGNAL = 2.1; EXPRESSED IN HELA, SIGNAL = 2.7; EXPRESSED IN BRAIN, SIGNAL =   2; EXPRESSED IN LUNG, SIGNAL = 2.4; EXPRESSED IN PLACENTA, SIGNAL = 2.2; EXPRESSED IN BONE MARROW, SIGNAL = 2.6; EXPRESSED IN HEART, SIGNAL = 2.2; EXPRESSED IN FETAL LIVER, SIGNAL = 2.2; SWISSPROT HIT: P12348, EVALUE 5.70e-01; EST_HUMAN HIT: BE540169.1, EVALUE 2.90e+00; NT HIT: gi10946863, EVALUE 4.90e-01
atgaggccagagaagggtggtttagagaacgatggtttggagaacagtggtttagagaagggtggtttagagaatgatggtttagggaacagtggtttagagatcagtggtttagagaagggtggcttagaaaacgatggtttagggaacggtggtttagagaacagtggtttagagataagtgatttagagaagggtggtttaga

SEQ ID NO: 26623 - DNA, 179 bp, Homo sapiens
  MAP TO AC004551.1; EXPRESSED IN HELA, SIGNAL = 3.8; EXPRESSED IN HEART, SIGNAL = 3.3; EXPRESSED IN LUNG, SIGNAL = 2.6; EXPRESSED IN BRAIN, SIGNAL = 4.7; EXPRESSED IN PLACENTA, SIGNAL = 2.6; EXPRESSED IN ADULT LIVER, SIGNAL = 3.1; EXPRESSED IN BONE MARROW, SIGNAL = 2.5; EXPRESSED IN FETAL LIVER, SIGNAL = 3.6; EST_HUMAN HIT: BF689552.1, EVALUE 4.00e-67; NT HIT: gi11436448, EVALUE 2.00e-67; SWISSPROT HIT: Q06846, EVALUE 3.00e-20
aggaatcactcgctccaggcagatgttgaaattcttcctctggttgggcttcagtttcttgagggagaatctggtctcaccaataaattcattgtggccaaatttgtcctcatcacagacggagatcctgccaccaacacaagggggtagagagagaaacaggaacaaatattaagaca

SEQ ID NO: 26624 - DNA, 101 bp, Homo sapiens
  MAP TO AC000085.5; EXPRESSED IN FETAL LIVER, SIGNAL = 1.9; EXPRESSED IN HEART, SIGNAL = 1.9; EXPRESSED IN PLACENTA, SIGNAL = 1.5; EXPRESSED IN HELA, SIGNAL =   2; EST_HUMAN HIT: AW836843.1, EVALUE 6.00e-15; NT HIT: AL163301.2, EVALUE 3.00e-13
gccccactgggtggctagacccagaagggcaataataatcaccgcagtctggctcataggaatctccatccctaggggaaggggaagtgcaccaaatcaag

SEQ ID NO: 26625 - DNA, 164 bp, Homo sapiens
  MAP TO AP001207.1; EXPRESSED IN PLACENTA, SIGNAL =   2; EXPRESSED IN BRAIN, SIGNAL =   2; EXPRESSED IN BONE MARROW, SIGNAL = 1.7; EXPRESSED IN FETAL LIVER, SIGNAL =   3; EXPRESSED IN HEART, SIGNAL = 3.6; EXPRESSED IN ADULT LIVER, SIGNAL = 2.2; EXPRESSED IN HELA, SIGNAL = 3.6; EST_HUMAN HIT: AV760590.1, EVALUE 1.00e-51; SWISSPROT HIT: P76134, EVALUE 1.80e+00; NT HIT: AL163282.2, EVALUE 2.00e-30
atgaagaagatgcaaaagtggaaacccctgataaaaccatcagatcttgtgagacttattcgctatcacgagaacagtatgggggaaactgctcccacaattcaaattatctgccacagtgtccctcccacaacacatgggaattatgggagtacaattcaaga

SEQ ID NO: 26626 - DNA, 138 bp, Homo sapiens
  MAP TO AC007032.2; EXPRESSED IN ADULT LIVER, SIGNAL = 3.4; EXPRESSED IN LUNG, SIGNAL = 3.9; EXPRESSED IN HELA, SIGNAL = 1.3; EXPRESSED IN PLACENTA, SIGNAL = 0.7; EXPRESSED IN BT474, SIGNAL = 2.1; EXPRESSED IN BONE MARROW, SIGNAL =   2; EXPRESSED IN HBL100, SIGNAL = 2.5; EXPRESSED IN BRAIN, SIGNAL = 0.69; EXPRESSED IN FETAL LIVER, SIGNAL = 3.5; SWISSPROT HIT: P43490, EVALUE 2.00e-21; NT HIT: gi11420721, EVALUE 3.00e-72; EST_HUMAN HIT: AV686432.1, EVALUE 4.00e-72
aaggccattagttacaacatagctacacttgaaggaacaattcaagagatctcttgtcaacttctgtagcaaacctccaccagaaccgaaggcaatattttcaatactccacattttttgtttcatgccttctacaat

SEQ ID NO: 26627 - DNA, 171 bp, Homo sapiens
  MAP TO AB000882.1; EXPRESSED IN LUNG, SIGNAL = 1.6; EXPRESSED IN BRAIN, SIGNAL = 1.6; EXPRESSED IN HBL100, SIGNAL = 2.6; EXPRESSED IN ADULT LIVER, SIGNAL = 0.81; EXPRESSED IN BONE MARROW, SIGNAL = 1.7; EXPRESSED IN HELA, SIGNAL = 1.3; NT HIT: AB031007.1, EVALUE 7.00e-92; EST_HUMAN HIT: AW961093.1, EVALUE 8.00e-92; SWISSPROT HIT: P47040, EVALUE 7.50e-01
catgctgtgggacccactggtcctatcaccatctgcaccaaccaagggctgctggccataaagaatgttgaaaagagcttctataggcacagctcaacgccagcttgcaggaagcactctgcgggtgggagggtgccatctttcaggacatggtgcattttaaaaatcaaa

SEQ ID NO: 26628 - DNA, 413 bp, Homo sapiens
  MAP TO AC000353.21; EXPRESSED IN PLACENTA, SIGNAL = 0.62; EXPRESSED IN BT474, SIGNAL =   2; EXPRESSED IN HBL100, SIGNAL = 1.8; EXPRESSED IN FETAL LIVER, SIGNAL =  39; EXPRESSED IN ADULT LIVER, SIGNAL = 0.91; EXPRESSED IN BRAIN, SIGNAL = 1.2; EXPRESSED IN LUNG, SIGNAL = 1.3; EXPRESSED IN HELA, SIGNAL = 2.4; EST_HUMAN HIT: BF058866.1, EVALUE 0.00e+00; SWISSPROT HIT: Q00587, EVALUE 3.00e-07; NT HIT: gi11441318, EVALUE 0.00e+00
ccaccccgtggaacgagtgtttcctctggctgagggttggagaggaggtgtggtctcagcaggcggcccgtagcctcacagccaggcctggtggtgaggtcaccatgtccaccaaggtgcccatctatctgaagcgtggcagtcgcaagggcaagaaggagaagcttcgggacctgctgtcctcggacatgatcagcccaccgctgggggacttccgccacaccattcatattggcagtggcggcggcagtgacatgtttggcgacatctccttcctgcagggcaagttccacctcctgccggggaccatggtggaggggcctgaagaagatggcaccttcgacctccccttccagttcacccgcaccgccaccgtgtgtgggcgggagctcccggacggcccatcccctctg

SEQ ID NO: 26629 - DNA, 203 bp, Homo sapiens
  MAP TO AC002470.5; EXPRESSED IN BT474, SIGNAL = 1.2; EXPRESSED IN BONE MARROW, SIGNAL = 2.1; EXPRESSED IN HBL100, SIGNAL = 1.2; EXPRESSED IN FETAL LIVER, SIGNAL = 0.89; EXPRESSED IN HELA, SIGNAL = 0.74; EXPRESSED IN ADULT LIVER, SIGNAL = 1.2; EXPRESSED IN PLACENTA, SIGNAL =   1; EXPRESSED IN LUNG, SIGNAL = 0.66; EXPRESSED IN BRAIN, SIGNAL = 1.2; NT HIT: AF012872.1, EVALUE 2.00e-70; EST_HUMAN HIT: AW363993.1, EVALUE 3.00e-70; SWISSPROT HIT: P13983, EVALUE 6.40e-02
gcatgtgcatggtggtgaaggcacgtgtacctcatgtactccagccggtacacagagaggaggtaggtggacatggcgaagtccagcttgttgatgagtgcggacacctcgggaggggggtccagcaggttgatgatagtgctgcggagctcactcagctcagcctggagggagagaaacatccgagggctcatggggcatcc

SEQ ID NO: 26630 - DNA, 192 bp, Homo sapiens
  MAP TO AC002470.5; EXPRESSED IN BRAIN, SIGNAL =   2; EXPRESSED IN HELA, SIGNAL = 0.9; EXPRESSED IN ADULT LIVER, SIGNAL = 0.94; EXPRESSED IN BT474, SIGNAL = 1.4; EXPRESSED IN BONE MARROW, SIGNAL = 0.73; EXPRESSED IN HBL100, SIGNAL = 0.96; EXPRESSED IN LUNG, SIGNAL = 0.85; EXPRESSED IN PLACENTA, SIGNAL = 0.61; EXPRESSED IN FETAL LIVER, SIGNAL = 0.8; NT HIT: AF012872.1, EVALUE 1.00e-102; EST_HUMAN HIT: BE314516.1, EVALUE 1.00e-69; SWISSPROT HIT: P54282, EVALUE 2.90e+00
cctgctcgtccttcacagcccacaccatgaggtccacacaggcagcattcgcctgacagcgcagtttgagggggctcagctcattgtggatccggtctgcgtcatgtagaatcttctggagctccccctggctcgtgttgaactgctccagcacaaaatcatggatctccttcacaaaagaggtcgggaggt

SEQ ID NO: 26631 - DNA, 216 bp, Homo sapiens
  MAP TO AC006160.9; EXPRESSED IN FETAL LIVER, SIGNAL = 2.1; EXPRESSED IN ADULT LIVER, SIGNAL = 0.88; EXPRESSED IN BRAIN, SIGNAL = 0.87; EXPRESSED IN BONE MARROW, SIGNAL = 2.2; EXPRESSED IN HBL100, SIGNAL = 2.5; EXPRESSED IN HELA, SIGNAL = 1.4; EXPRESSED IN PLACENTA, SIGNAL =   1; EXPRESSED IN BT474, SIGNAL = 2.1; EXPRESSED IN LUNG, SIGNAL = 1.2; NT HIT: AF321617.1, EVALUE 1.00e-109; SWISSPROT HIT: P41004, EVALUE 5.30e-01; EST_HUMAN HIT: AI991235.1, EVALUE 1.00e-109
tcacgttggcttcagaggtgcagggatgttggcagatgcctgctccaggtaggccaaggagccctgagggatgtcggcgggctttttgtgctgcacgttgatgtcctccagcacctgctgccaatgcctcagctttgtcaagtgcttctggactagtgcatctttccgctgtaattcattccttagttctgacacatcctgcagatgaaagtcatg

SEQ ID NO: 26632 - DNA, 261 bp, Homo sapiens
  MAP TO AC004832.2; EXPRESSED IN HELA, SIGNAL = 3.5; EXPRESSED IN FETAL LIVER, SIGNAL = 1.8; EXPRESSED IN LUNG, SIGNAL = 0.94; EXPRESSED IN PLACENTA, SIGNAL =   1; EXPRESSED IN BT474, SIGNAL = 2.2; EXPRESSED IN BONE MARROW, SIGNAL = 0.65; EXPRESSED IN ADULT LIVER, SIGNAL = 1.3; EXPRESSED IN BRAIN, SIGNAL = 1.3; EXPRESSED IN HBL100, SIGNAL = 1.9; NT HIT: gi11417968, EVALUE 1.00e-130; EST_HUMAN HIT: BE513907.1, EVALUE 1.00e-129; SWISSPROT HIT: P71933, EVALUE 1.60e-01
ctggattaagtgtctctgcgcccaccaggtgcccagccctgaagcaggccgcagcgccagggtgactgtggctgtggtggacacctttgtatggcaggctctagcctctgtggccattccgggcttcaccatcaaccgcgtgtgtgctgcctctctctatgtcctgggcactgccacccgctggcccctggctgtccgcaagtggaccaccaccgcgcttgggctgttgaccatccccatcattatccaccccattgacag

SEQ ID NO: 26633 - DNA, 164 bp, Homo sapiens
  MAP TO AC007403.2; EXPRESSED IN BRAIN, SIGNAL =   1; NT HIT: AF281074.1, EVALUE 2.40e-02; EST_HUMAN HIT: AI004091.1, EVALUE 1.00e-87; SWISSPROT HIT: P36353, EVALUE 5.00e+00
ctagttatttaggtaggtgtcctgaaatagctctgttggtagtagtgtcttgacatgtggatgaaactcattctgtttgtgatttccattgagtagctgctccaagttacataagacttcctgccctacaacttcatcctttatatctgcagcatggacataaa

SEQ ID NO: 26634 - DNA, 249 bp, Homo sapiens
  MAP TO AC008273.1; EXPRESSED IN HELA, SIGNAL = 3.6; EXPRESSED IN ADULT LIVER, SIGNAL = 1.1; EXPRESSED IN BRAIN, SIGNAL = 1.7; SWISSPROT HIT: P46531, EVALUE 2.00e-18; EST_HUMAN HIT: BF527132.1, EVALUE 1.00e-125
gatacttcggatctgcttgtgaagaaaaggtggacccctgcgcctcgtctccgtgccagaacaacggcacctgctatgtggacggggtacactttacctgcaactgcagcccgggcttcacagggccgacctgtgcccagcttattgacttctgtgccctcagcccctgtgctcatggcacgtgccgcagcgtgggcaccagctacaaatgcctctgtgatccaggtgggtaccgcccctacacagtac

SEQ ID NO: 26635 - DNA, 598 bp, Homo sapiens
  MAP TO AF118808.1; EXPRESSED IN ADULT LIVER, SIGNAL = 1.3; EXPRESSED IN BRAIN, SIGNAL = 0.81; EXPRESSED IN PLACENTA, SIGNAL = 0.79; EXPRESSED IN BONE MARROW, SIGNAL = 0.85; EXPRESSED IN HBL100, SIGNAL = 2.1; EXPRESSED IN LUNG, SIGNAL = 0.59; EXPRESSED IN HELA, SIGNAL = 0.69; EXPRESSED IN BT474, SIGNAL = 2.9; EXPRESSED IN FETAL LIVER, SIGNAL = 0.77; NT HIT: AB037817.1, EVALUE 2.00e-17; SWISSPROT HIT: P52742, EVALUE 4.00e-82; EST_HUMAN HIT: BE162832.1, EVALUE 0.00e+00
accttacaagtgcaaagaatgtgggaaagccttcaacagacaatcaaaccttattcagcatcagagaattcattctggagagaaaccttatgactgtaaggagtgtggcaaagccttcagtacacaattatttctcattcagcatcagagaattcatacaggagaaaagccctatgaatgtaatgaatgtgcaaaatcctttagcctgaaccgaactcttactgtccatcagagaattcacactggagagaaaccttataggtgtaatgaatgtgggaaatcctttagtcaatgctcacaagttattcaacataagagaattcacactggagagaaaccttatatctgcaatgagtgtggaaaatcatttggtgctcgtctatcccttatccagcatcagagaattcacactggagagaaaccttatggttgtagtgtgtgtgggaaaacctttagtcaaaagggacatcttattcagcatcagtgaattcacacaggagagaaaccctatgaatgtagtgagtgtggaaaagctttcagccagagttttaatcttattcaccatcaaagaacacacaatggtgagaagtcctatgaa

SEQ ID NO: 26636 - DNA, 209 bp, Homo sapiens
  MAP TO AL034553.12; EXPRESSED IN LUNG, SIGNAL =   1; EXPRESSED IN HELA, SIGNAL = 2.9; EXPRESSED IN BRAIN, SIGNAL = 0.92; EXPRESSED IN PLACENTA, SIGNAL = 0.77; EXPRESSED IN HBL100, SIGNAL =   3; EXPRESSED IN FETAL LIVER, SIGNAL = 1.4; EXPRESSED IN ADULT LIVER, SIGNAL =   1; EXPRESSED IN BT474, SIGNAL = 4.2; EXPRESSED IN BONE MARROW, SIGNAL = 1.3; NT HIT: gi11420925, EVALUE 3.00e-76; SWISSPROT HIT: O60733, EVALUE 2.00e-06; EST_HUMAN HIT: AW952284.1, EVALUE 5.00e-76
aatgctgtcaatcaaaatggctctactcccctacatcatgcagcttccaaaaacaggcatgagattgctctcatgttactagaaggtggggctaatccagatggtaaggatcattatgaggctacagcaaagcaccaggccacagccaagggtaacttcaagatgattcatatccttctgtactacaaagcatccacaatcatccaaga

SEQ ID NO: 26637 - DNA, 770 bp, Homo sapiens
  MAP TO AL096772.5; EXPRESSED IN LUNG, SIGNAL = 4.5; EXPRESSED IN PLACENTA, SIGNAL = 1.2; EXPRESSED IN ADULT LIVER, SIGNAL = 0.93; EXPRESSED IN BRAIN, SIGNAL = 1.2; EXPRESSED IN FETAL LIVER, SIGNAL = 0.97; EST_HUMAN HIT: AV725650.1, EVALUE 0.00e+00; NT HIT: AB018301.1, EVALUE 0.00e+00; SWISSPROT HIT: Q14246, EVALUE 2.00e-12
gttctctcctgggaatactcctggatattatttcttatgttggggtgggcttttccatcttgagcttggcagcctgtctagttgtggaagctgtggtgtggaaatcggtgaccaagaaccggacttcttatatgcgccacacctgcatagtgaatatcgctgcctcccttctggtcgccaacacctggttcattgtggtcgctgccatccaggacaatcgctacatactctgcaagacagcctgtgtggctgccaccttcttcatccacttcttctacctcagcgtcttcttctggatgctgacactgggcctcatgctgttctatcgcctggttttcattctgcatgaaacaagcaggtccactcagaaagccattgccttctgtcttggctatggctgcccacttgccatctcggtcatcacgctgggagccacccagccccgggaagtctatacgaggaagaatgtctgttggctcaactgggaggacaccaaggccctgctggctttcgccatcccagcactgatcattgtggtggtgaacataaccatcactattgtggtcatcaccaagatcctgaggccttccattggagacaagccatgcaagcaggagaagagcagcctgtttcagatcagcaagagcattggggtcctcacaccactcttgggcctcacttggggttttggtctcaccactgtgttcccagggaccaaccttgtgttccatatcatatttgccatcctcaatgtcttccaggtgagtttt

SEQ ID NO: 26638 - DNA, 181 bp, Homo sapiens; identical to SEQ ID NO: 21377
  MAP TO AP000110.1; EXPRESSED IN BT474, SIGNAL = 0.64; EXPRESSED IN LUNG, SIGNAL = 0.93; EXPRESSED IN FETAL LIVER, SIGNAL = 1.1; EXPRESSED IN ADULT LIVER, SIGNAL = 0.75; EXPRESSED IN BRAIN, SIGNAL = 2.2; EXPRESSED IN PLACENTA, SIGNAL = 0.77; EXPRESSED IN HELA, SIGNAL = 1.2; EST_HUMAN HIT: N71175.1, EVALUE 9.80e+00; SWISSPROT HIT: P48099, EVALUE 1.70e+00; NT HIT: AL161590.2, EVALUE 1.70e+00

SEQ ID NO: 26639 - DNA, 561 bp, Homo sapiens
  MAP TO AP000151.1; EXPRESSED IN HELA, SIGNAL = 1.3; EXPRESSED IN PLACENTA, SIGNAL = 0.96; EXPRESSED IN LUNG, SIGNAL = 1.4; EXPRESSED IN BRAIN, SIGNAL = 1.2; EXPRESSED IN BT474, SIGNAL = 4.7; EXPRESSED IN HBL100, SIGNAL = 2.8; EXPRESSED IN FETAL LIVER, SIGNAL =   2; EXPRESSED IN ADULT LIVER, SIGNAL = 1.4; EXPRESSED IN BONE MARROW, SIGNAL = 1.6; EST_HUMAN HIT: BF214898.1, EVALUE 0.00e+00; SWISSPROT HIT: P53804, EVALUE 4.00e-74; NT HIT: gi11526252, EVALUE 0.00e+00
ctgcagaatatgagtttttcccagaagaaactcgacagatactagaaaaagcaggaggtttaaaaccttttctcttgggatgccctcgttttgttgtgattgacaactgtattgcactgaagaaggttgcatcacggctcaagaaaaaaaggaagaagaaaaacattaaaacaaaagtagaagaaatttcaaaagcaggggagtatgtacgagttaaactacaactgaatccagctgctagggaatttaaaccagatgtaaagtctaaaccagtgtcagattcatcttcagcaccagcttttgaaaatgtgaaacccaaacctgtgtctgcaaattctcccaagccagcttgtgaagatgtgaaggccaaaccagtatccgacaattcttctagacaagtttctgaggatgggcaacccaaaggggtctcttctaattctcctaaaccaggctctgaggatgcaaattacaagcgagtctcctgtaattccccaaaccggttcttgaggatgtgaaaccaacttattgggctcaatcccatttggtcacaggatactgtac

SEQ ID NO: 26640 - DNA, 160 bp, Homo sapiens
  MAP TO AP000153.1; EXPRESSED IN HELA, SIGNAL = 0.81; EXPRESSED IN ADULT LIVER, SIGNAL = 0.83; EXPRESSED IN BRAIN, SIGNAL = 0.99; EXPRESSED IN PLACENTA, SIGNAL = 1.4; EXPRESSED IN BT474, SIGNAL = 0.82; EXPRESSED IN BONE MARROW, SIGNAL = 2.1; EXPRESSED IN HBL100, SIGNAL =   1; EXPRESSED IN FETAL LIVER, SIGNAL = 1.1; EXPRESSED IN LUNG, SIGNAL = 1.2; EST_HUMAN HIT: H63129.1, EVALUE 2.00e-79; SWISSPROT HIT: Q61559, EVALUE 1.30e+00; NT HIT: AF092132.1, EVALUE 5.70e+00
aaatgatagagaaacttgcatagatgaaggatgtgtcccattccctgaagtcaagggaagcagagctaagattggttatgcagaccatgggctaggcactccctacaaagtcactttaatcattcccaacagtcttgtgagtagagagagcagagccctt

SEQ ID NO: 26641 - DNA, 119 bp, Homo sapiens
  MAP TO AP000246.1; EXPRESSED IN FETAL LIVER, SIGNAL = 0.61; EXPRESSED IN LUNG, SIGNAL = 0.7; EXPRESSED IN ADULT LIVER, SIGNAL = 0.67; EXPRESSED IN BRAIN, SIGNAL = 1.7; EXPRESSED IN PLACENTA, SIGNAL = 0.7; EXPRESSED IN HBL100, SIGNAL = 0.86; EXPRESSED IN BT474, SIGNAL = 0.65; EXPRESSED IN HELA, SIGNAL = 0.7; NT HIT: gi4507500, EVALUE 5.00e-61; EST_HUMAN HIT: AA233606.1, EVALUE 6.00e-61; SWISSPROT HIT: Q60610, EVALUE 3.00e-16
ctcttttttctcaccagtctgttcagcaatcagctggtcaaacacagccccaaactcttcatggattttctgcatctcattgatgtgactggcaaccttgttcatggtcttgatggcca

SEQ ID NO: 26642 - DNA, 377 bp, Homo sapiens
  MAP TO AP000207.1; EXPRESSED IN FETAL LIVER, SIGNAL = 0.83; EXPRESSED IN HELA, SIGNAL = 0.69; EXPRESSED IN ADULT LIVER, SIGNAL = 0.73; EXPRESSED IN PLACENTA, SIGNAL = 0.66; EXPRESSED IN BRAIN, SIGNAL = 1.9; EXPRESSED IN LUNG, SIGNAL = 0.95; EXPRESSED IN HBL100, SIGNAL = 1.2; EXPRESSED IN BONE MARROW, SIGNAL = 0.63; EXPRESSED IN BT474, SIGNAL =   1; NT HIT: gi11526176, EVALUE 0.00e+00; EST_HUMAN HIT: BE711811.1, EVALUE 1.00e-129; SWISSPROT HIT: Q13009, EVALUE 1.00e-59
ccccgacagggcagcttgcttcttgagctgtgccatgcgggacgcgtgactatccagggttttccggcctctttcccgctgactgatggaggtggcctgaagccgctcctgcaggtctctgtccactgaggcacccttcacggactcacagaactcatcatcgtcactgaggatgtctgtctccttgatgtcatcttgctcctcatactgagcaagatcaaactgctcctctacccatcggtcagtgtccccaccaccggggggctgctgggactctttctccgggctgcttgcggagacggcatcagaatcaatggtaaacctgtttcgagccagccgccgcctcctcctcccaagagacttgcttggggcagaca

SEQ ID NO: 26643 - DNA, 79 bp, Homo sapiens
  MAP TO AP000057.1; EXPRESSED IN FETAL LIVER, SIGNAL = 0.9; EXPRESSED IN LUNG, SIGNAL = 1.3; EXPRESSED IN PLACENTA, SIGNAL = 0.89; EXPRESSED IN BONE MARROW, SIGNAL = 3.1; EXPRESSED IN HBL100, SIGNAL = 1.7; EXPRESSED IN ADULT LIVER, SIGNAL = 0.67; EXPRESSED IN BRAIN, SIGNAL = 0.68; EXPRESSED IN BT474, SIGNAL = 1.6; EXPRESSED IN HELA, SIGNAL = 0.74; NT HIT: D89790.1, EVALUE 2.00e-37; EST_HUMAN HIT: R73338.1, EVALUE 3.00e-37; SWISSPROT HIT: Q01196, EVALUE 3.00e-08
gtgattttgatggctctgtggtaggtggcgacttgcggtgggtttgtgaagacagtgatggtcagagtgaagcttttcc

SEQ ID NO: 26644 - DNA, 107 bp, Homo sapiens
  MAP TO AP000047.1; EXPRESSED IN HBL100, SIGNAL = 1.7; EXPRESSED IN FETAL LIVER, SIGNAL = 1.1; EXPRESSED IN ADULT LIVER, SIGNAL =   1; EXPRESSED IN PLACENTA, SIGNAL = 0.77; EXPRESSED IN BT474, SIGNAL =   1; EXPRESSED IN BRAIN, SIGNAL = 6.8; EXPRESSED IN HELA, SIGNAL = 1.7; EXPRESSED IN LUNG, SIGNAL = 0.69; EXPRESSED IN BONE MARROW, SIGNAL = 0.67; NT HIT: AF232673.1, EVALUE 7.00e-54; EST_HUMAN HIT: BF036521.1, EVALUE 1.00e-53
cctgtgctttcaaatgatctgcccaggtaaagggttgagaagaggtgaaaaggagtcgcgttttaatactccagtccacaggtaactcagtactttttgaggacgga

SEQ ID NO: 26645 - DNA, 278 bp, Homo sapiens
  MAP TO AP000046.1; EXPRESSED IN ADULT LIVER, SIGNAL = 0.85; EXPRESSED IN BONE MARROW, SIGNAL = 2.2; EXPRESSED IN BRAIN, SIGNAL = 1.3; EXPRESSED IN PLACENTA, SIGNAL = 1.4; EXPRESSED IN BT474, SIGNAL = 1.2; EXPRESSED IN FETAL LIVER, SIGNAL = 1.8; EXPRESSED IN LUNG, SIGNAL = 1.1; EXPRESSED IN HELA, SIGNAL = 1.2; EXPRESSED IN HBL100, SIGNAL = 2.6; NT HIT: gi11526206, EVALUE 0.00e+00; EST_HUMAN HIT: AU131027.1, EVALUE 0.00e+00; SWISSPROT HIT: P22102, EVALUE 4.00e-44
ctaaagtctggtcaccacaaccatcaggtgctggagaggagtactggagggaagattttgccacgattttcctcacaaggctaaatccattgctatgaagaccagatgaagctattccaacaacaacatcaccctcagtgattctttccaggtgagggagtttctgatctcgctccatggcaccaacggcaaacccagctaggtcatactctccagggggatacatgtcaggcatttctgctgtttcacctcctggtgggataagacaagaacaaaga

SEQ ID NO: 26646 - DNA, 220 bp, Homo sapiens
  MAP TO AL049575.7; EXPRESSED IN FETAL LIVER, SIGNAL = 0.57; EXPRESSED IN PLACENTA, SIGNAL = 0.72; EXPRESSED IN BT474, SIGNAL = 0.64; EXPRESSED IN BONE MARROW, SIGNAL = 0.84; EXPRESSED IN LUNG, SIGNAL = 0.77; EXPRESSED IN HELA, SIGNAL = 0.66; EXPRESSED IN ADULT LIVER, SIGNAL = 0.76; EXPRESSED IN BRAIN, SIGNAL = 1.9; SWISSPROT HIT: Q01956, EVALUE 7.20e-01; EST_HUMAN HIT: AI424812.1, EVALUE 3.40e-02; NT HIT: U10991.1, EVALUE 6.00e-99
ctcgccgttgaggactgccgatgactcctggctcctgtccgaggtggggggcaccatggggagggctgtgggttttatggcaatgagctgcacagacccagaagatgtgtcaaagggttcagcggccaccttgctggagttgtcaaatagaaccgctccctcctcttcgtcactcgctggcactgaagcacaacataaacacatcgattttatgatgttg

SEQ ID NO: 26647 - DNA, 311 bp, Homo sapiens
  MAP TO AL031280.6; EXPRESSED IN PLACENTA, SIGNAL = 1.9; EXPRESSED IN LUNG, SIGNAL = 0.72; EXPRESSED IN BRAIN, SIGNAL = 1.2; EXPRESSED IN FETAL LIVER, SIGNAL = 0.7; EXPRESSED IN BONE MARROW, SIGNAL = 0.75; EXPRESSED IN ADULT LIVER, SIGNAL = 0.67; NT HIT: AF200629.1, EVALUE 4.10e-02; EST_HUMAN HIT: BF672891.1, EVALUE 1.10e+00; SWISSPROT HIT: P73668, EVALUE 7.60e-02
atggggaaactgaggtcattacagatgaggtaaataacttgcctggggtcacacaggcctcctgcctgcctctcagtccagtgctctttctactatatgtcatgtcctctcataatgaggtgggggtggggaacaaggagatggagggatgtgttgggtgcttttgtgttaccacattgcaccctcatcacagtcaggtgagatggtgccatacccactttatagatgaggaaacagacccaggtaagctgagtgatttgcccagcataagcataccaaatggcaaagcaaaattcatacgcaggttttga

SEQ ID NO: 26648 - DNA, 495 bp, Homo sapiens; identical to SEQ ID NO: 10005
  MAP TO AL031280.6; EXPRESSED IN ADULT LIVER, SIGNAL = 0.81; EXPRESSED IN PLACENTA, SIGNAL = 1.9; EXPRESSED IN BONE MARROW, SIGNAL = 0.82; EXPRESSED IN HBL100, SIGNAL = 0.68; EXPRESSED IN FETAL LIVER, SIGNAL = 0.72; EXPRESSED IN LUNG, SIGNAL = 0.76; EXPRESSED IN HELA, SIGNAL = 0.75; EXPRESSED IN BRAIN, SIGNAL = 0.77; EST_HUMAN HIT: BF373403.1, EVALUE 0.00e+00

SEQ ID NO: 26649 - DNA, 368 bp, Homo sapiens
  MAP TO AC008266.1; EXPRESSED IN PLACENTA, SIGNAL = 0.63; EXPRESSED IN HELA, SIGNAL = 1.4; EXPRESSED IN BT474, SIGNAL = 2.9; EXPRESSED IN BONE MARROW, SIGNAL = 1.2; EXPRESSED IN HBL100, SIGNAL = 2.7; EXPRESSED IN FETAL LIVER, SIGNAL = 0.96; EXPRESSED IN BRAIN, SIGNAL = 0.97; EST_HUMAN HIT: BE885510.1, EVALUE 0.00e+00; SWISSPROT HIT: P79108, EVALUE 1.90e+00; NT HIT: gi11420914, EVALUE 0.00e+00
cacagagctggaaattgaggcattaaccaaagacgcatcatcagcacttgaggatagggctttattcaaagaggcatcgccatccctttgggaacagaatgtagcttcctgcttaacactgctgctattgatcctagcagatgctccacttgcagaggaaaatttggataaacaagcggtaccaggctgttcttgtacactgttttgttttgcaaatgagtgatttacatcatcttcccaggagcaaatagttgcagcaagattggccagacggccccttctgccaactggagttgccgaggcatttgaaagcagaggtttgggaggggaagcagccttttcctctgatggcattggtgagaagagtg

SEQ ID NO: 26650 - DNA, 147 bp, Homo sapiens
  MAP TO AC007847.1; EXPRESSED IN FETAL LIVER, SIGNAL = 0.75; EXPRESSED IN PLACENTA, SIGNAL =   2; EXPRESSED IN BT474, SIGNAL =   1; EXPRESSED IN BONE MARROW, SIGNAL = 1.4; EXPRESSED IN HBL100, SIGNAL = 0.7; EXPRESSED IN LUNG, SIGNAL = 0.92; EXPRESSED IN HELA, SIGNAL = 0.76; EXPRESSED IN ADULT LIVER, SIGNAL = 0.72; EXPRESSED IN BRAIN, SIGNAL =   1; NT HIT: L28145.1, EVALUE 2.80e-01; SWISSPROT HIT: P08398, EVALUE 1.30e+00
  unsure 33
ctctgtaagaacctctatcggggcacaaatggnctcatccaccaggaacgccttatccaagacactaacttgcctctcatgggctgtacctgtttcatccacctcgctgagtagagatactgcagaccatctttcaacatgtttaga

SEQ ID NO: 26651 - DNA, 158 bp, Homo sapiens
  MAP TO AC007790.1; EXPRESSED IN BONE MARROW, SIGNAL = 0.75; EXPRESSED IN BT474, SIGNAL = 1.1; EXPRESSED IN FETAL LIVER, SIGNAL = 0.73; EXPRESSED IN LUNG, SIGNAL = 0.72; EXPRESSED IN HELA, SIGNAL = 1.9; EXPRESSED IN BRAIN, SIGNAL = 0.74; EXPRESSED IN HBL100, SIGNAL = 1.4; EST_HUMAN HIT: AA515260.1, EVALUE 4.00e-10
ctatacattgaggtctgcagctgtggtttcttgccatatcaagataaatgaattcagtgtaagggccattgtaaaagaaaaggaaatttgtggagctgtcactgaagctgcatcagtaggcatgaaaaccttgttcttttcacgaaatacctttttat

SEQ ID NO: 26652 - DNA, 247 bp, Homo sapiens
  MAP TO AC007677.2; EXPRESSED IN PLACENTA, SIGNAL = 0.95; EXPRESSED IN BRAIN, SIGNAL = 0.98; EXPRESSED IN HBL100, SIGNAL = 1.1; EXPRESSED IN FETAL LIVER, SIGNAL = 1.6; EXPRESSED IN BONE MARROW, SIGNAL = 0.77; EXPRESSED IN LUNG, SIGNAL = 0.7; EXPRESSED IN ADULT LIVER, SIGNAL = 3.7; NT HIT: gi8923631, EVALUE 0.00e+00; SWISSPROT HIT: P31040, EVALUE 1.80e-01; EST_HUMAN HIT: BE047905.1, EVALUE 0.00e+00
gttacctacctgggcaaagtctccaccactggcatgcagtttttgtcaggctgcacagaaaagccagtcattgagctctggaagaagcacacgctagcccgagaggatgtctttccggccaatgccctcctggaaatccggccattccaagtttggctccatcatctcgaccacaaaggggaggccacagtgcacatggataccttccaggtggcccgcatcgcctactgcaccgccgaccacaacg

SEQ ID NO: 26653 - DNA, 183 bp, Homo sapiens
  MAP TO AC007567.1; EXPRESSED IN FETAL LIVER, SIGNAL = 2.6; EXPRESSED IN BONE MARROW, SIGNAL = 1.6; EXPRESSED IN BRAIN, SIGNAL = 2.6; EXPRESSED IN ADULT LIVER, SIGNAL = 0.7; EXPRESSED IN BT474, SIGNAL =   2; EXPRESSED IN PLACENTA, SIGNAL = 0.86; EXPRESSED IN HELA, SIGNAL = 1.4; EXPRESSED IN LUNG, SIGNAL = 2.3; EST_HUMAN HIT: AL134791.1, EVALUE 4.00e-94; NT HIT: U55258.1, EVALUE 1.00e-96; SWISSPROT HIT: P35331, EVALUE 6.00e-19
ttaactctaacagaaatggtatggtggatggctcctaatgcgttttttgctatacattggtaatttccagagtctgcttctgaaacatgaatgatctgcaaggttttctcaaagttcttataaactgtcctgtttttgggtagcattccatcttcctttgcccagtaaataattggggtaggc

SEQ ID NO: 26654 - DNA, 169 bp, Homo sapiens
  MAP TO AC007040.2; EXPRESSED IN BONE MARROW, SIGNAL = 1.2; EXPRESSED IN PLACENTA, SIGNAL = 0.64; EXPRESSED IN BT474, SIGNAL = 1.4; EXPRESSED IN LUNG, SIGNAL =   1; EXPRESSED IN HELA, SIGNAL = 0.66; EXPRESSED IN BRAIN, SIGNAL =   2; EXPRESSED IN FETAL LIVER, SIGNAL = 1.3; NT HIT: AF026248.1, EVALUE 4.00e-62; EST_HUMAN HIT: AI521435.1, EVALUE 4.00e-81; SWISSPROT HIT: P03340, EVALUE 4.00e-04
attgatttgctccaaactgttatccagacccacaaccacacctgggctgattggcaccagttgctcatgttcctctttaacagcgaagaaaggcggagagtcctccaagcagcaactaagtggctggaggaacatgcaccagctgattaccaaaacccccaagagtatg

SEQ ID NO: 26655 - DNA, 276 bp, Homo sapiens
  MAP TO AC006970.2; EXPRESSED IN BRAIN, SIGNAL =   1; EXPRESSED IN BT474, SIGNAL = 1.9; EXPRESSED IN HBL100, SIGNAL = 2.2; EXPRESSED IN FETAL LIVER, SIGNAL = 1.2; EXPRESSED IN LUNG, SIGNAL = 1.2; EXPRESSED IN HELA, SIGNAL = 1.1; EXPRESSED IN ADULT LIVER, SIGNAL = 1.7; EXPRESSED IN PLACENTA, SIGNAL = 0.95; EXPRESSED IN BONE MARROW, SIGNAL = 1.3; EST_HUMAN HIT: AA456946.1, EVALUE 6.00e-64; NT HIT: AF144731.1, EVALUE 1.40e-01; SWISSPROT HIT: P42844, EVALUE 5.90e+00
agagtgctcgcttaaggtgctgttgaacagtcaccggggcaactacttttcccccagtgtcctccagaaaagaaagatcttgagggtttttatcttcaaaataataatgagggggtgcaaaagggtagagatgaacctctccttcctttgctgctttagctttagctggtaaataaacatgttctgtaacctcttccattacttcactatactctccttcctcctcattatcagtgtgaaaaagttccaacacggaacgaaccagaccccacactt

SEQ ID NO: 26656 - DNA, 163 bp, Homo sapiens
  MAP TO AC004887.2; EXPRESSED IN BT474, SIGNAL = 1.2; EXPRESSED IN BONE MARROW, SIGNAL = 0.87; EXPRESSED IN LUNG, SIGNAL =   1; EXPRESSED IN HELA, SIGNAL = 1.1; EXPRESSED IN ADULT LIVER, SIGNAL = 0.86; EXPRESSED IN PLACENTA, SIGNAL = 1.4; EXPRESSED IN BRAIN, SIGNAL = 0.82; EXPRESSED IN FETAL LIVER, SIGNAL = 0.91; NT HIT: AF213884.1, EVALUE 5.00e-03; SWISSPROT HIT: P11369, EVALUE 2.00e-07
agttctccagtgagtccatctggaaatttctttttctgtagattttcaattatgaattcatttttctcaatagttatagggatattcagaaaatctgtttcatactgggtgagttctggtagttggtacttttcaaggaattcatccatgtcatctaacatca

SEQ ID NO: 26657 - DNA, 396 bp, Homo sapiens
  MAP TO AC004890.2; EXPRESSED IN PLACENTA, SIGNAL = 1.5; EXPRESSED IN HBL100, SIGNAL = 2.2; EXPRESSED IN LUNG, SIGNAL = 0.99; EXPRESSED IN HELA, SIGNAL = 1.4; EXPRESSED IN ADULT LIVER, SIGNAL = 1.9; EXPRESSED IN BT474, SIGNAL = 2.3; EXPRESSED IN BONE MARROW, SIGNAL = 2.3; EXPRESSED IN FETAL LIVER, SIGNAL = 1.3; EXPRESSED IN BRAIN, SIGNAL = 0.85; EST_HUMAN HIT: AA078157.1, EVALUE 1.00e-59; NT HIT: D30612.1, EVALUE 6.00e-51; SWISSPROT HIT: O75690, EVALUE 5.80e-01
cgagtgccttacatccctgcagccccttcctcttcctacacccccagcagcaaatgaggcacacctgcagacagcagctatctctctgtggacagtggtggccgccgtgcaggctatagagaggaaggtggagatccacagccggcgactcctacacctggaaggtcggacagggacagcagagaagaaactagccagctgtgaaaagacagttaccgagcttgggaaccagctggagggcaagtgggccgtgctgggaaccctgctgcaggagtacgggctgctgcagaggcggctggagaacttggagaacctgctgcgcaacaggaacttctggatcctgcggctccctccaggtattaagggagatatcccaaaggtaataccttcatttct

SEQ ID NO: 26658 - DNA, 142 bp, Homo sapiens
  MAP TO Z98884.11; EXPRESSED IN PLACENTA, SIGNAL = 0.86; EXPRESSED IN BRAIN, SIGNAL = 1.8; NT HIT: AB020640.1, EVALUE 1.00e-74; EST_HUMAN HIT: BE795052.1, EVALUE 1.20e-01; SWISSPROT HIT: P25640, EVALUE 1.30e+00
cagctgggacagaaccccagaatccactgtcctgcaagcgaagagcccagcacagagagctggatggcccagtggcacagcgaagccatcagctctccagaaatacccaagggagtcactgttattgcaagcaccaacccag

SEQ ID NO: 26659 - DNA, 267 bp, Homo sapiens
  MAP TO AL049569.13; EXPRESSED IN BONE MARROW, SIGNAL = 2.7; EXPRESSED IN BT474, SIGNAL =   2; EXPRESSED IN BRAIN, SIGNAL =   3; EST_HUMAN HIT: AI823622.1, EVALUE 0.00e+00; NT HIT: AB023211.1, EVALUE 0.00e+00; SWISSPROT HIT: Q9Y2J8, EVALUE 6.00e-44
gtgaacatgatcgtgctggacaaggacctgggcatccccaagccattcgggccacaggttgaggaggaatgctgcctggagatgcacgtgcgtggcctcctggagcccctgggcctcgaatgcaccttcatcgacgacatttctgcctaccacaaatttctgggggaagtccactgtggcaccaacgtccgcaggaagcccttcaccttcaagtggtggcacatggtgccctgacctgccaggggccctggcgtttgcctccttcgc

SEQ ID NO: 26660 - DNA, 221 bp, Homo sapiens
  MAP TO AL049569.13; EXPRESSED IN BT474, SIGNAL = 1.3; EXPRESSED IN BONE MARROW, SIGNAL = 1.9; EXPRESSED IN BRAIN, SIGNAL =   1; NT HIT: AB030176.1, EVALUE 4.00e-97; EST_HUMAN HIT: BE089551.1, EVALUE 1.00e-94; SWISSPROT HIT: Q9Y2J8, EVALUE 1.00e-29
acccgttcttcggccaacgctatatccacatcctgggccggcggaagctctaccatgtggtcaagtacacgggtggctccgcggagctgctgttcttcgtggaaggcctctgtttccccgacgagggcttctcaggcctggtctccatccatgtcagcctgctggagtacatggcccaggtgagggctccaggcctccaccacagggggctaaccccaggg

SEQ ID NO: 26661 - DNA, 464 bp, Homo sapiens; identical to SEQ ID NO: 10018
  MAP TO AL008629.9; EXPRESSED IN PLACENTA, SIGNAL = 1.2; EXPRESSED IN FETAL LIVER, SIGNAL = 1.1; EXPRESSED IN LUNG, SIGNAL = 0.7; EXPRESSED IN HELA, SIGNAL = 2.2; EXPRESSED IN ADULT LIVER, SIGNAL =   2; EXPRESSED IN BRAIN, SIGNAL = 0.72; NT HIT: AK024445.1, EVALUE 8.00e-05; EST_HUMAN HIT: W78152.1, EVALUE 1.00e-09

SEQ ID NO: 26662 - DNA, 93 bp, Homo sapiens
  MAP TO AC009225.1; EXPRESSED IN LUNG, SIGNAL = 1.1; EXPRESSED IN BRAIN, SIGNAL = 0.86; EXPRESSED IN BONE MARROW, SIGNAL = 4.1; NT HIT: gi4501912, EVALUE 2.00e-28; EST_HUMAN HIT: AA091091.1, EVALUE 7.90e-01
catcaggcaactgatggcatagactcacctcatcatgaaccagctctagtggctctatcatatacacgaaggtatcatcttcaaacatgccac

SEQ ID NO: 26663 - DNA, 152 bp, Homo sapiens
  MAP TO AC007664.7; EXPRESSED IN HBL100, SIGNAL = 1.7; EXPRESSED IN LUNG, SIGNAL = 1.3; EXPRESSED IN HELA, SIGNAL = 1.2; EXPRESSED IN ADULT LIVER, SIGNAL = 1.6; EXPRESSED IN PLACENTA, SIGNAL = 1.3; EXPRESSED IN BT474, SIGNAL = 1.7; EXPRESSED IN BONE MARROW, SIGNAL = 1.9; EXPRESSED IN FETAL LIVER, SIGNAL = 1.6; EXPRESSED IN BRAIN, SIGNAL = 1.1; NT HIT: gi11038638, EVALUE 2.00e-73; EST_HUMAN HIT: AL043314.2, EVALUE 4.00e-78; SWISSPROT HIT: P11274, EVALUE 1.00e-22
aggaggcagtcaataagatgtccctgcacaaccttggcacggtctttggccccacgctgctccggccctccgagaaggagagcaagctccctgccaaccccagccagcccatcaccatgactgacagctggtccttggaggtcatgtcccag

SEQ ID NO: 26664 - DNA, 678 bp, Homo sapiens
  MAP TO AC007655.1; EXPRESSED IN PLACENTA, SIGNAL = 0.71; EXPRESSED IN FETAL LIVER, SIGNAL = 1.9; EXPRESSED IN ADULT LIVER, SIGNAL = 1.7; EXPRESSED IN BRAIN, SIGNAL = 0.87; EXPRESSED IN BT474, SIGNAL = 0.7; EXPRESSED IN BONE MARROW, SIGNAL = 0.76; EXPRESSED IN HBL100, SIGNAL = 0.66; EXPRESSED IN LUNG, SIGNAL = 0.76; EXPRESSED IN HELA, SIGNAL = 0.63; NT HIT: AF290204.1, EVALUE 0.00e+00; EST_HUMAN HIT: W04281.1, EVALUE 0.00e+00; SWISSPROT HIT: Q93070, EVALUE 0.00e+00
gttcccagttgacctcaactgcaaccagtctcctcttgggtggtagctcatatttataactttaaacagctcatagggagggatcaagacttccttcttgagggagaagtactgtacaggtgcacccaggcaggtgaatatggtaaatagtgtctggttcccaaactcctgtgcctcttctttcaggagggatgtggagaggaattggccaaatcgaatggtggcccctgtgtaggcattaaagtggacatccttcgtcctataatgcacctcatagcacagagtgccattctccatgatgctgtctttcctcagcagctggattgctgaggtgaggtagtagtgtaaatatttgaagtggaatgaacgttcatactgctgtggagtcctggcaacagaggccatggctctagtaaagtcagaatgaacattgctgttcaatgtataaaacaaaatagccacagcgtgtgtggtagtcatgttctggggtagaacttttccttggttaagccaggctaagtgggctttttgccacatcctaaaataattcttctgggcttctatgtcttttgtgaaataatccccttgagttagtttctccataacctgtttgctacagccttggtactgatcatcaaaagaacctggtgcgaagtcgaagtcgattttaattgcaac

SEQ ID NO: 26665 - DNA, 458 bp, Homo sapiens
  MAP TO AC007554.1; EXPRESSED IN PLACENTA, SIGNAL = 1.2; EXPRESSED IN BT474, SIGNAL = 1.1; EXPRESSED IN BONE MARROW, SIGNAL = 3.2; EXPRESSED IN HBL100, SIGNAL = 0.86; EXPRESSED IN FETAL LIVER, SIGNAL = 0.7; EXPRESSED IN LUNG, SIGNAL = 0.88; EXPRESSED IN BRAIN, SIGNAL = 0.71; EST_HUMAN HIT: AU140801.1, EVALUE 0.00e+00; SWISSPROT HIT: P13611, EVALUE 1.00e-65; NT HIT: gi11417187, EVALUE 0.00e+00
gttttcctttggaggaagatttcagtggcgactttagagaatactcaacagtgtctcatcccatagcaaaagaagaaacggtaatgatggaaggctctggagatgcagcatttagggacacccagacttcaccatctacagtacctacttcagttcacatcagtcacatatctgactcagaaggacccagtagcaccatggtcagcacttcagccttcccctgggaagagtttacatcctcagctgagggctcaggtgagcaactggtcacagtcagcagctctgttgttccagtgcttcccagtgctgtgcaaaagttttctggtacagcttcctccattatcgacgaaggattgggagaagtgggtactgtcaatgaaattgatagaagatccaccattttaccaacagcagaagtggaaggtacgaaagctccagtagagaaggaggaagtaaag

SEQ ID NO: 26666 - DNA, 174 bp, Homo sapiens
  MAP TO AC007405.2; EXPRESSED IN PLACENTA, SIGNAL = 0.6; EXPRESSED IN LUNG, SIGNAL = 0.68; EXPRESSED IN ADULT LIVER, SIGNAL = 0.86; EXPRESSED IN BRAIN, SIGNAL = 2.9; SWISSPROT HIT: P48319, EVALUE 9.00e-27; NT HIT: M55574.1, EVALUE 1.00e-93; EST_HUMAN HIT: M85674.1, EVALUE 2.00e-93
gtggctccaaaaatcaaagccctgatgatggagtcaggtacgaccatggttggctaccagccccaaggggacaaggccaacttcttccggatggtcatctccaacccagccgctacccagtctgacattgacttcctcattgaggagatagaaagactgggccaggatctgtaa

SEQ ID NO: 26667 - DNA, 243 bp, Homo sapiens
  MAP TO AC007404.2; EXPRESSED IN FETAL LIVER, SIGNAL = 1.2; EXPRESSED IN ADULT LIVER, SIGNAL = 0.79; EXPRESSED IN BONE MARROW, SIGNAL =   6; EXPRESSED IN LUNG, SIGNAL = 1.6; EXPRESSED IN HELA, SIGNAL = 0.7; EXPRESSED IN BRAIN, SIGNAL = 0.69; EXPRESSED IN PLACENTA, SIGNAL = 0.64; EXPRESSED IN BT474, SIGNAL = 0.97; EST_HUMAN HIT: BE938008.1, EVALUE 1.00e-86; SWISSPROT HIT: P55183, EVALUE 1.20e+00; NT HIT: AB037835.1, EVALUE 1.00e-130
gaagctgccaggacatctttacaaagcattagccaatgagaaagtttttctactgccagcgaagaaagcatatgtcccaaagtgtcatgaatatcagaacataattttcgatctgtctcccggtctagcattccaaaaagaagtccctcaagaccagtttctgttatattaacaccttggtgccggcaatggatatcagttcgagaactaaccccaggggcaaaaggactgacatctgaaagg

SEQ ID NO: 26668 - DNA, 270 bp, Homo sapiens
  MAP TO AC007245.3; EXPRESSED IN BRAIN, SIGNAL = 4.5; NT HIT: gi11419994, EVALUE 0.00e+00; EST_HUMAN HIT: F13083.1, EVALUE 0.00e+00; SWISSPROT HIT: P49418, EVALUE 2.00e-47
gtagagaaagccaggaggcaattcctgagaggcctcccttgcagatgctagctggtcagcagcccccatggctggtgcagaaggcgtgggctgagggtcctggataggcttctgctccgtagccagctccggtgtctcgctggtggggcccggaggagccgcgtcctcggtggtctccttgggctctgcacctatagttatttcgttttctccttcctcttcatggttggaggcaggctctatgaccaccgaaggaatgaccttctcctg

SEQ ID NO: 26669 - DNA, 169 bp, Homo sapiens
  MAP TO AC007224.2; EXPRESSED IN PLACENTA, SIGNAL =   4; EXPRESSED IN LUNG, SIGNAL = 1.7; EXPRESSED IN HELA, SIGNAL = 0.73; EXPRESSED IN ADULT LIVER, SIGNAL = 3.8; EXPRESSED IN BRAIN, SIGNAL = 0.72; EXPRESSED IN BT474, SIGNAL = 1.5; EXPRESSED IN BONE MARROW, SIGNAL = 0.71; EXPRESSED IN HBL100, SIGNAL = 1.1; EXPRESSED IN FETAL LIVER, SIGNAL = 1.3; SWISSPROT HIT: P80404, EVALUE 2.00e-20; NT HIT: U80226.1, EVALUE 3.00e-72; EST_HUMAN HIT: AA443456.1, EVALUE 4.00e-72
gtggaggatctgattgtgaaatatcggaaaaagaagaagacggtggccgggatcatcgtggagcccatccagtccgagggtggagacaaccacgcatccgatgacttctttcggaagctgagagacatcgccaggaaggtcagtggacagggccgaggttggatggagc

SEQ ID NO: 26670 - DNA, 142 bp, Homo sapiens
  MAP TO AC006548.19; EXPRESSED IN BONE MARROW, SIGNAL = 0.65; EXPRESSED IN LUNG, SIGNAL = 0.61; EXPRESSED IN BRAIN, SIGNAL = 5.2; EST_HUMAN HIT: H24278.1, EVALUE 2.00e-48; SWISSPROT HIT: P35803, EVALUE 2.00e-12; NT HIT: AF254875.1, EVALUE 1.00e-43
tgagactggatatcttgcagttcctgttctttctttgctttgatatcctggtaagcctgcattttgctagcatccaagtaagcccagttagaaaactgtatcatgagaaagtggatcttgaagggaagggtaagcatgatgg

SEQ ID NO: 26671 - DNA, 188 bp, Homo sapiens
  MAP TO AC005064.2; EXPRESSED IN FETAL LIVER, SIGNAL = 1.9; EXPRESSED IN BRAIN, SIGNAL = 0.99; EXPRESSED IN ADULT LIVER, SIGNAL = 1.9; SWISSPROT HIT: Q14511, EVALUE 6.40e+00; NT HIT: gi11422054, EVALUE 1.00e-102; EST_HUMAN HIT: R56191.1, EVALUE 1.00e-102
acacgactacatacttcttcctgaagatgccctcaccaacacaactcgacttcgctggtggcagccttttgtgatcagcaatggaattgtggtctctggggtggagcgtgctcagtgggcactggacaacattttgattggtggagcagaaatcaatcccagccaattggtggacacttttgatgatg

SEQ ID NO: 26672 - DNA, 560 bp, Homo sapiens; identical to SEQ ID NO: 18057
  MAP TO AB023054.1; EXPRESSED IN HELA, SIGNAL = 2.5; EXPRESSED IN BT474, SIGNAL = 2.7; EXPRESSED IN BONE MARROW, SIGNAL =  33; EXPRESSED IN FETAL LIVER, SIGNAL = 1.2; EXPRESSED IN LUNG, SIGNAL = 1.4; EXPRESSED IN ADULT LIVER, SIGNAL = 1.8; EXPRESSED IN BRAIN, SIGNAL = 0.72; EXPRESSED IN PLACENTA, SIGNAL = 0.71; EXPRESSED IN HBL100, SIGNAL = 2.1; SWISSPROT HIT: P19474, EVALUE 8.00e-30; NT HIT: gi11419096, EVALUE 0.00e+00; EST_HUMAN HIT: AI765855.1, EVALUE 0.00e+00

SEQ ID NO: 26673 - DNA, 124 bp, Homo sapiens
  MAP TO AC007098.2; EXPRESSED IN BT474, SIGNAL = 1.1; EXPRESSED IN FETAL LIVER, SIGNAL = 0.95; EXPRESSED IN ADULT LIVER, SIGNAL = 2.5; EXPRESSED IN HELA, SIGNAL = 1.1; EXPRESSED IN PLACENTA, SIGNAL =   1; EXPRESSED IN HBL100, SIGNAL = 2.4; EXPRESSED IN BONE MARROW, SIGNAL = 0.93; EXPRESSED IN LUNG, SIGNAL =   1; EXPRESSED IN BRAIN, SIGNAL = 1.8; EST_HUMAN HIT: BE773299.1, EVALUE 9.00e-64; NT HIT: AB020710.1, EVALUE 5.00e-64
tcaacttttctgcagccatttcaccatagctgggaagttctgacatcttcactccagatcgagcttctgctattagctgacgagctctctctctcagctgccgacgtcgctcttcatcttgctg

SEQ ID NO: 26674 - DNA, 191 bp, Homo sapiens
  MAP TO AC007375.4; EXPRESSED IN BONE MARROW, SIGNAL = 1.2; EXPRESSED IN BRAIN, SIGNAL = 2.8; EXPRESSED IN ADULT LIVER, SIGNAL = 0.98; EXPRESSED IN BT474, SIGNAL = 2.2; EXPRESSED IN HBL100, SIGNAL = 1.4; NT HIT: D49682.1, EVALUE 4.50e-01; EST_HUMAN HIT: AW843789.1, EVALUE 3.00e-73; SWISSPROT HIT: P33485, EVALUE 1.70e+00
ctgacccccgcctcctccccagccaggcacacctatggcaccatgaacaaccagccggaagagggagaagaagagagtggtctgaggggctttgcgagggagctagactcggcccagttccaggaagggctggaactggagggccagaaccagtaccactgaccgggacctgaggcctccactggcgactt

SEQ ID NO: 26675 - DNA, 163 bp, Homo sapiens
  MAP TO AC009497.2; EXPRESSED IN BT474, SIGNAL = 1.6; EXPRESSED IN FETAL LIVER, SIGNAL =   1; EXPRESSED IN HELA, SIGNAL = 1.7; EXPRESSED IN PLACENTA, SIGNAL = 1.2; EXPRESSED IN HBL100, SIGNAL = 1.7; EXPRESSED IN BONE MARROW, SIGNAL = 0.99; EXPRESSED IN LUNG, SIGNAL = 0.88; EXPRESSED IN BRAIN, SIGNAL = 0.97; NT HIT: AE000648.1, EVALUE 3.20e-01; EST_HUMAN HIT: AW385529.1, EVALUE 7.00e-83; SWISSPROT HIT: Q60284, EVALUE 6.60e+00
ggcaagaggcctgggacaactcattagagctaagaatataaaaactattggtgatttgagtactcttacagcatctgaaataaaaactcttcctatccgttctccaaaagtgtccaatgtaaaaaaggctctcagaatatatcatgagcagcaggtaaaaact

SEQ ID NO: 26676 - DNA, 169 bp, Homo sapiens
  MAP TO AC009294.6; EXPRESSED IN LUNG, SIGNAL = 1.4; EXPRESSED IN BRAIN, SIGNAL = 1.2; EXPRESSED IN BT474, SIGNAL = 1.2; SWISSPROT HIT: P14546, EVALUE 1.30e+00
acagcagacttcggcaagttgctcatcgaaaagtcagcagaactcccatataaaagaaaaattgtactcacagatgccgctgtctccaaagagagggcaaatgtgggtctatctgatgaaagcaaactcaacaatgtccttaatcacaaggatgatcagcctggtcagc

SEQ ID NO: 26677 - DNA, 159 bp, Homo sapiens
  MAP TO AP000407.1; EXPRESSED IN BRAIN, SIGNAL = 0.95; EXPRESSED IN FETAL LIVER, SIGNAL = 1.3; EST_HUMAN HIT: AA337078.1, EVALUE 2.00e-84; NT HIT: gi11444448, EVALUE 1.00e-84; SWISSPROT HIT: O60711, EVALUE 5.00e-24
atgccttattggaggaactggaacgctccacccttcaggacagtgatgaatattccaacccagctcctcttcccctggatcagcattccagaaaggagactaaccttgatgagacttcggagatcctttctattcaggataacacaagtcccttgccgg

SEQ ID NO: 26678 - DNA, 160 bp, Homo sapiens
  MAP TO AL035454.16; EXPRESSED IN HELA, SIGNAL =   1; EXPRESSED IN PLACENTA, SIGNAL = 1.2; EXPRESSED IN HBL100, SIGNAL = 1.3; EXPRESSED IN BRAIN, SIGNAL = 0.97; EXPRESSED IN BT474, SIGNAL = 1.6; EXPRESSED IN FETAL LIVER, SIGNAL = 3.8; SWISSPROT HIT: P17886, EVALUE 5.00e-03; NT HIT: gi11421891, EVALUE 3.00e-85; EST_HUMAN HIT: AI968687.1, EVALUE 4.00e-85
tctgatgcaggctgggaagaatactttgattacatctttccagaagatgctgccaaccaacctaacctcaaactcctggccatggccaaactgtggaagaaacagcagcaggaaaaggaggatgctgagcaccatccagatgaggacgtcgatgagagtg

SEQ ID NO: 26679 - DNA, 203 bp, Homo sapiens
  MAP TO AC007038.3; EXPRESSED IN BT474, SIGNAL = 1.2; EXPRESSED IN FETAL LIVER, SIGNAL = 0.93; EXPRESSED IN BRAIN, SIGNAL = 3.1; EST_HUMAN HIT: BF530735.1, EVALUE 1.00e-100; NT HIT: X05117.1, EVALUE 1.00e-01; SWISSPROT HIT: P31905, EVALUE 1.60e+00
cggatcagaaacgatctgtgaccttcattgaggctcagccagagccagcagctgccccaacagatgcgcttcctgcaacaggccaactacagggctgtagcccagccccttctaggaaaccagaagcaatggacgaaccagtcctcacatcttctcccgccatagttgttgcggatctccacagcgtgtctcccaagcaggtg

SEQ ID NO: 26680 - DNA, 157 bp, Homo sapiens
  MAP TO AL080249.11; EXPRESSED IN BRAIN, SIGNAL = 0.98; EXPRESSED IN ADULT LIVER, SIGNAL = 4.1; EXPRESSED IN FETAL LIVER, SIGNAL =  15; EXPRESSED IN BONE MARROW, SIGNAL = 0.93; NT HIT: gi11345447, EVALUE 2.00e-83; EST_HUMAN HIT: BE546437.1, EVALUE 5.30e-01; SWISSPROT HIT: P18428, EVALUE 1.00e-22
caaactacagggctcctttgatgtcagtgtcaagggcatcagcatttcggtcaacctcctgttgggcagcgagtcctccgggaggcccacagttactgcctccagctgcagcagtgacatcgctgacgtggaggtggacatgtcgggagacttgggg

SEQ ID NO: 26681 - DNA, 376 bp, Homo sapiens
  MAP TO AL034384.1; EXPRESSED IN BONE MARROW, SIGNAL = 1.4; EXPRESSED IN BRAIN, SIGNAL = 1.5; EXPRESSED IN ADULT LIVER, SIGNAL = 1.2; EXPRESSED IN BT474, SIGNAL = 1.6; EXPRESSED IN FETAL LIVER, SIGNAL = 1.2; EXPRESSED IN HBL100, SIGNAL =   1; NT HIT: AJ243957.1, EVALUE 2.00e-01; EST_HUMAN HIT: AA948560.1, EVALUE 2.40e-01
tctctctatctcctaccactaaccatccccttccttctgccttcttccccgagtaacctcagctcccctaccaagggccccaaggacagccgcatgactcagggactatgcaagagcctcctttccatcaccagcacctctaccatccacacctgcagcatcaaaacctccgcttccaccatcaccaccctcatctccaccaactccactaccaccactaccatcattactatctccccatccatcatcaccatcacttccatcacctccaccccaaccttcactaccttccaccatcattacttctaccaacatcatctcttctgcctccacctccacttccaccccaccctataatttcctctaccactttctg

SEQ ID NO: 26682 - DNA, 263 bp, Homo sapiens
  MAP TO AC007898.1; EXPRESSED IN BRAIN, SIGNAL = 1.1; EXPRESSED IN BONE MARROW, SIGNAL = 0.97; EXPRESSED IN BT474, SIGNAL = 1.6; SWISSPROT HIT: Q64632, EVALUE 7.20e+00; EST_HUMAN HIT: AW248401.1, EVALUE 2.40e-01; NT HIT: AE001270.1, EVALUE 9.00e-03
  unsure 177
  unsure 193
atgttgctaggcaacacgtgcctggacctggcacctgaccactcctttgcttcagctatgggggtgcgggggatgctcgggcacaggatgctgcgtggaccgcagatggctatggaaggaagagcaggggaccatcgaatgaccaacatccaagctcatcaagccacctcctttttnggactccaagtatgtncattcccagcaaaacttgttcgaaggaacatcgttcttgctctcaagtattcaaccaagagcaaggataa

SEQ ID NO: 26683 - DNA, 217 bp, Homo sapiens
  MAP TO AC009613.2; EXPRESSED IN BONE MARROW, SIGNAL = 1.7; EXPRESSED IN BRAIN, SIGNAL = 1.1; EXPRESSED IN BT474, SIGNAL = 1.3; EXPRESSED IN FETAL LIVER, SIGNAL =   1; NT HIT: D14547.1, EVALUE 3.00e-17; SWISSPROT HIT: Q9ZEA1, EVALUE 4.60e+00; EST_HUMAN HIT: BE005073.1, EVALUE 8.00e-04
  unsure 17
actattcattatgcatnaagtgggtttcataaaagtcttcatcttcatcatcttcatgttgaataggctaaggaggaggaagaagagaaggggctggtcttgcttgtctgtcttagggatggcagaggtagaagatctgcatgtaaagtggacccttatagttcaaactcatgtcattcaatggtcaactgtactggcaatgtttcttagtaatcaa

SEQ ID NO: 26684 - DNA, 176 bp, Homo sapiens
  MAP TO AC009444.1; EXPRESSED IN BRAIN, SIGNAL = 1.9; EXPRESSED IN BT474, SIGNAL = 1.4; NT HIT: gi4758827, EVALUE 2.00e-86; EST_HUMAN HIT: BF345183.1, EVALUE 3.00e-15; SWISSPROT HIT: P24014, EVALUE 1.50e-01
atgttcattcactggccagttgtccacctgcagggtggcgttgccgccgttcctggtgaagcgtaccacatggtatttgccgtcatttacaggggttctctcctctttgatggagatgtcaactgtgccaatgttgaagacaactccaattttcccctgttcctataataaagaaa

SEQ ID NO: 26685 - DNA, 183 bp, Homo sapiens
  MAP TO AC009408.2; EXPRESSED IN BONE MARROW, SIGNAL = 1.1; EXPRESSED IN BRAIN, SIGNAL = 1.1; EXPRESSED IN BT474, SIGNAL = 0.96; EXPRESSED IN ADULT LIVER, SIGNAL =   1; EXPRESSED IN HBL100, SIGNAL =   1; NT HIT: gi7710138, EVALUE 1.70e+00; SWISSPROT HIT: P06727, EVALUE 5.70e-01; EST_HUMAN HIT: AV710732.1, EVALUE 2.50e+00
cttgttggcggggacggcgtccgggcctgcacctgctccccctggccctgctccttccttcagttctatgactgctgagccaggtgtgtgtctagctccatgacaaagggtaccagcttttcctgcaggacacccttcatcaaggtgggaggtggtgagtgactgacacagtttcttgcccat

SEQ ID NO: 26686 - DNA, 77 bp, Homo sapiens
  MAP TO AC010888.1; EXPRESSED IN BONE MARROW, SIGNAL = 0.97; EXPRESSED IN BRAIN, SIGNAL = 1.3; EXPRESSED IN FETAL LIVER, SIGNAL =   1; EXPRESSED IN BT474, SIGNAL = 1.4; EXPRESSED IN HBL100, SIGNAL = 1.3; EXPRESSED IN HELA, SIGNAL = 0.96; SWISSPROT HIT: P54750, EVALUE 8.00e-08; NT HIT: gi4826891, EVALUE 4.00e-36; EST_HUMAN HIT: AU120157.1, EVALUE 6.00e-36
ttttcagtctgttctcctgtaagatacttaaaagtggtgttttccaattcttcaatctctgtggcactagaccccat

SEQ ID NO: 26687 - DNA, 113 bp, Homo sapiens
  MAP TO AC010092.1; EXPRESSED IN BONE MARROW, SIGNAL = 1.1; EXPRESSED IN BRAIN, SIGNAL = 1.4; EXPRESSED IN ADULT LIVER, SIGNAL = 1.3; EXPRESSED IN BT474, SIGNAL = 1.6; EXPRESSED IN FETAL LIVER, SIGNAL = 0.96; EXPRESSED IN HELA, SIGNAL = 1.6; EXPRESSED IN PLACENTA, SIGNAL = 2.9; EXPRESSED IN HBL100, SIGNAL = 1.6; EST_HUMAN HIT: BE173600.1, EVALUE 2.00e-57; SWISSPROT HIT: P34314, EVALUE 7.00e-04; NT HIT: AF162666.1, EVALUE 2.00e-57
agagagaagagtatgcaagatcgattacgcctcgggcactttacaacagttagacatggcgcttcatttactgaacaatggacagatggttttgcatttcagaatcttgtgaa

SEQ ID NO: 26688 - DNA, 129 bp, Homo sapiens
  MAP TO AC010885.1; EXPRESSED IN BRAIN, SIGNAL = 1.2; EXPRESSED IN ADULT LIVER, SIGNAL =   1
ggaaatgacagcctcttttcttccttttttccttctttgcttccatccttccttcctttcctctttctttcctttcttcttttttccatctctctctcctccttttctttctctcttctttgtttcttt

SEQ ID NO: 26689 - DNA, 253 bp, Homo sapiens
  MAP TO AC010102.1; EXPRESSED IN BRAIN, SIGNAL = 1.1; EXPRESSED IN ADULT LIVER, SIGNAL = 0.91; SWISSPROT HIT: O93343, EVALUE 3.00e+00; NT HIT: L16870.1, EVALUE 3.30e-02
tcagctctcttgtccttgtttctgaaggtacctgctccccagaggaaacagctctcctctgattgccaccttagtgccagcagtgaggtggggaatacagtctgccttgccctcggactggtagaagcgggccctgtgcaggacataggcgaacactgcccctggagatgccggcacgaccccaaggtctgttttgccaggctgaaggtgacggcccccgtcctgagctgcagcaagcgattcacagtggcca

SEQ ID NO: 26690 - DNA, 80 bp, Homo sapiens
  MAP TO AL049821.6; EXPRESSED IN ADULT LIVER, SIGNAL = 1.5; EXPRESSED IN BT474, SIGNAL = 1.2; EXPRESSED IN HBL100, SIGNAL = 1.1; EXPRESSED IN BONE MARROW, SIGNAL = 1.4; EXPRESSED IN BRAIN, SIGNAL = 1.2; EST_HUMAN HIT: AA548863.1, EVALUE 1.60e-01
atgagtatgatgagtcaagaaagggaccaggaagtggaaactgtgtgtgaggcagtgatgctgatgaatgactgtggaaa

SEQ ID NO: 26691 - DNA, 238 bp, Homo sapiens; identical to SEQ ID NO: 20999
  MAP TO AL050342.29; EXPRESSED IN BONE MARROW, SIGNAL = 0.93; EXPRESSED IN BRAIN, SIGNAL = 1.3; EXPRESSED IN BT474, SIGNAL = 1.3; SWISSPROT HIT: P50537, EVALUE 4.30e+00; NT HIT: U02477.1, EVALUE 2.20e+00; EST_HUMAN HIT: F08485.1, EVALUE 1.00e-63

SEQ ID NO: 26692 - DNA, 138 bp, Homo sapiens
  MAP TO AL033527.25; EXPRESSED IN FETAL LIVER, SIGNAL = 0.98; EXPRESSED IN ADULT LIVER, SIGNAL = 0.98; EXPRESSED IN BT474, SIGNAL = 1.1; EXPRESSED IN HELA, SIGNAL = 1.4; EXPRESSED IN PLACENTA, SIGNAL = 1.2; EXPRESSED IN BONE MARROW, SIGNAL = 1.4; EXPRESSED IN BRAIN, SIGNAL = 1.2; NT HIT: AF074918.1, EVALUE 3.00e-72; EST_HUMAN HIT: BE242161.1, EVALUE 3.00e-72; SWISSPROT HIT: Q9KAC3, EVALUE 2.00e-03
agcagttgctctatttctgaagtccaccactgtgtaattggtcacaagaggatccacaaagctgatcatgtggtgccggcagattctctgctcttgggcagaaaccttgttggtgatgatgtctaggccttcatagac

SEQ ID NO: 26693 - DNA, 430 bp, Homo sapiens
  MAP TO AC011290.1; EXPRESSED IN BT474, SIGNAL = 1.5; EXPRESSED IN HBL100, SIGNAL = 0.99; EXPRESSED IN BRAIN, SIGNAL = 1.2; EST_HUMAN HIT: AW959687.1, EVALUE 0.00e+00; SWISSPROT HIT: Q59119, EVALUE 1.40e+00; NT HIT: AF226046.1, EVALUE 0.00e+00
tgctttgctctcctggtgtcaccttcataataataattcaactttgatcaataaaataaacaatcttctggatgcagttggccagtgtgaagagtatgtgctcaaacatctgaaatcaatcactccaccgtcccatgttgtagatttattggactccattgaggatatggacctttgtcatgtagttccagctgagaaaaagattgatgaagctaaagatgaaagactctgtgaaaataatgctgagtttaacaaaaactgtagcaagagccatagtgggatagattgttcatatgtagaatgttgtagaacacaggagcatgcacattcagaaaacccaagccccacatggattttggaacagacagccagtttagttaaacagctgggcctatcagtagatgtattacaacacctcaaacaactataa

SEQ ID NO: 26694 - DNA, 319 bp, Homo sapiens
  MAP TO AC009403.1; EXPRESSED IN HBL100, SIGNAL = 1.1; EXPRESSED IN HELA, SIGNAL = 1.2; EXPRESSED IN LUNG, SIGNAL = 0.95; EXPRESSED IN BRAIN, SIGNAL = 1.2; EXPRESSED IN ADULT LIVER, SIGNAL =   1; EXPRESSED IN PLACENTA, SIGNAL = 1.5; EXPRESSED IN BONE MARROW, SIGNAL = 1.4; EXPRESSED IN FETAL LIVER, SIGNAL = 1.2; EXPRESSED IN BT474, SIGNAL = 1.3; EST_HUMAN HIT: AA418113.1, EVALUE 0.00e+00; NT HIT: AB017819.1, EVALUE 7.80e-01; SWISSPROT HIT: Q02084, EVALUE 4.00e-01
ttctcagggtgttacaattagtctgaatgctacatctggcatggttacatcatttgaactctctgacaacactaacgaccaatctggagaacaggaatctgagtatgaacaagaacaaggagaggatgaactggtttatcacaaatctgatggatcagaattgtatactcaagagtacccagaagaaggacagtatgaaggccacgaagctgagttgacagaagaccaaatagaatatgtggaagagccagaggaggagcagctttacactgatgaagtgttagacatcgagatcaatgaacctttagatgaatttaca

SEQ ID NO: 26695 - DNA, 177 bp, Homo sapiens
  MAP TO AF176315.1; EXPRESSED IN PLACENTA, SIGNAL =   1; EXPRESSED IN BRAIN, SIGNAL = 0.93; NT HIT: AJ243431.1, EVALUE 1.40e+00; EST_HUMAN HIT: T92522.1, EVALUE 1.00e-59; SWISSPROT HIT: Q44123, EVALUE 2.20e+00
atttggatggatgtgataaacaaacaagcattggtgaaactagagggaagtaggaatgctcgaatctgattggagggaatgtaaaaccgtgaaggaacagggaaaatagaatggcgtgtactggaaaaagtagaaacaggattaccagatgttcccgcagttgcacttgtgggtacc

SEQ ID NO: 26696 - DNA, 200 bp, Homo sapiens; identical to SEQ ID NO: 21713
  MAP TO AL034582.10; EXPRESSED IN LUNG, SIGNAL = 0.88; EXPRESSED IN BONE MARROW, SIGNAL = 1.2; EXPRESSED IN BRAIN, SIGNAL = 3.3; EXPRESSED IN FETAL LIVER, SIGNAL = 0.98; EXPRESSED IN BT474, SIGNAL =   3; EXPRESSED IN PLACENTA, SIGNAL = 0.99; EXPRESSED IN HELA, SIGNAL = 1.3; EXPRESSED IN HBL100, SIGNAL = 1.5; NT HIT: gi11422946, EVALUE 1.00e-109; EST_HUMAN HIT: BE250123.1, EVALUE 1.00e-109; SWISSPROT HIT: P34009, EVALUE 2.50e-01

SEQ ID NO: 26697 - DNA, 104 bp, Homo sapiens
  MAP TO AC009706.2; EXPRESSED IN PLACENTA, SIGNAL = 2.4; EXPRESSED IN HBL100, SIGNAL =   1; EXPRESSED IN BONE MARROW, SIGNAL =   1; EXPRESSED IN BRAIN, SIGNAL =   1; EXPRESSED IN ADULT LIVER, SIGNAL = 1.2; NT HIT: AF135187.1, EVALUE 5.70e-02; EST_HUMAN HIT: AA694364.1, EVALUE 9.00e-45; SWISSPROT HIT: P11369, EVALUE 5.30e+00
aaatttatcttcaggtccacccgcacatccacaaattgatgcatattcaatgttatgtaccgcagcactgtttataagagcaaaagactggaaacagcctaaat

SEQ ID NO: 26698 - DNA, 162 bp, Homo sapiens
  MAP TO AL022068.2; EXPRESSED IN BONE MARROW, SIGNAL = 1.3; EXPRESSED IN LUNG, SIGNAL = 6.4; EXPRESSED IN BRAIN, SIGNAL = 1.1; EXPRESSED IN BT474, SIGNAL =  31; EXPRESSED IN ADULT LIVER, SIGNAL =  13; EXPRESSED IN FETAL LIVER, SIGNAL =  14; EXPRESSED IN HELA, SIGNAL =  47; EXPRESSED IN PLACENTA, SIGNAL =  74; EXPRESSED IN HBL100, SIGNAL =  27; SWISSPROT HIT: P05783, EVALUE 7.00e-16; EST_HUMAN HIT: AW188385.1, EVALUE 3.00e-49; NT HIT: gi11434787, EVALUE 2.00e-49
ggagagcaccacagaggtcaccatgcagtccgccaaggttagagctgctgagatgacattcatggagctgagacgtacagtccagtccttggagatcgacctggacttgatgagaaatccgaaggccagcttggagaacagcctgagggaggtggaggcctg

SEQ ID NO: 26699 - DNA, 130 bp, Homo sapiens
  MAP TO AC007708.13; EXPRESSED IN PLACENTA, SIGNAL = 4.5; EXPRESSED IN HBL100, SIGNAL = 1.5; EXPRESSED IN HELA, SIGNAL = 0.92; EXPRESSED IN BRAIN, SIGNAL = 0.91; EXPRESSED IN FETAL LIVER, SIGNAL = 0.98; EXPRESSED IN BT474, SIGNAL = 3.1; NT HIT: gi4504626, EVALUE 3.00e-65; EST_HUMAN HIT: BE171984.1, EVALUE 3.00e-63; SWISSPROT HIT: P39375, EVALUE 8.90e+00
gggttgggttcccctggactctttctatgaagatcttccctccgcggacgcgctgggtgtagatggcataggggaaggaagagtccatggtgctgacgatctgcacctctcgctctggcgacgaaggcag

SEQ ID NO: 26700 - DNA, 339 bp, Homo sapiens
  MAP TO AL022329.9; EXPRESSED IN LUNG, SIGNAL = 1.1; EXPRESSED IN BRAIN, SIGNAL = 1.2; EXPRESSED IN ADULT LIVER, SIGNAL = 1.6; EXPRESSED IN BT474, SIGNAL = 3.8; EXPRESSED IN FETAL LIVER, SIGNAL = 1.6; EXPRESSED IN PLACENTA, SIGNAL = 3.3; EXPRESSED IN HBL100, SIGNAL = 1.9; EXPRESSED IN HELA, SIGNAL = 2.4; EST_HUMAN HIT: AU133140.1, EVALUE 3.00e-78; SWISSPROT HIT: P07947, EVALUE 5.00e-55; NT HIT: D00333.1, EVALUE 0.00e+00
ataatctttgcgactagaggttaaactaggacaaggatgttttggcaaagtgtggatgggaatatggaatggaaccacaaaagtagcaatcaaaacactaaaaccaggtacaatgatgccagaagcttttcttcaagaagctcaggtaatgaaaaaaataagacatggtaaacttgttccactatatgctgttgtttctgaagagccaatttacattgtcactgaattgatgtcaaaaggaagcttattcaatttccttaaggaaggagatggaaagtatttgaagcttccacaaatggttgatatgcctgctcagattgctgatggtatggcatatat

SEQ ID NO: 26701 - DNA, 183 bp, Homo sapiens
  MAP TO AC011336.1; EXPRESSED IN BRAIN, SIGNAL = 0.91; EXPRESSED IN ADULT LIVER, SIGNAL = 0.97; EXPRESSED IN PLACENTA, SIGNAL = 0.96; NT HIT: J02828.1, EVALUE 1.40e+00; EST_HUMAN HIT: AW515742.1, EVALUE 3.00e-54; SWISSPROT HIT: Q20762, EVALUE 1.30e+00
gtcgaaggtgctcttgcttgacacacttccaatgcgggacatagtttgagtgatagatggctaattcattgataatgtacttgttgccttgcagtcttgtgtactgctggctacctctggtctgtgtgccagtattgagcagcattctatgggaggaatgtagttgctcataacagtgtctgc

SEQ ID NO: 26702 - DNA, 129 bp, Homo sapiens
  MAP TO AC011415.1; EXPRESSED IN HBL100, SIGNAL = 1.3; EXPRESSED IN BRAIN, SIGNAL = 1.2; EXPRESSED IN ADULT LIVER, SIGNAL = 0.98; NT HIT: gi7662177, EVALUE 1.00e-46; SWISSPROT HIT: P00640, EVALUE 8.90e+00; EST_HUMAN HIT: BE266599.1, EVALUE 1.00e-46
gaggcactcattgttgcccttcaagctgccaatgaagacctcaggaccaagctcacagacattcagatagagctgcatcaagagaagtccaaggtgagcgagggctacctgaggtcgtggcattaagag

SEQ ID NO: 26703 - DNA, 282 bp, Homo sapiens
  MAP TO NM_006994.1; EXPRESSED IN PLACENTA, SIGNAL = 1.4; EXPRESSED IN HBL100, SIGNAL = 2.1; EXPRESSED IN BONE MARROW, SIGNAL = 1.3; EXPRESSED IN LUNG, SIGNAL = 1.2; EXPRESSED IN BRAIN, SIGNAL = 1.5; EXPRESSED IN BT474, SIGNAL = 1.2; EXPRESSED IN ADULT LIVER, SIGNAL = 1.3; EXPRESSED IN HELA, SIGNAL = 1.1; NT HIT: gi11418862, EVALUE 1.00e-101; EST_HUMAN HIT: BE247480.1, EVALUE 1.00e-67; SWISSPROT HIT: P18892, EVALUE 2.00e-21
gactggactctgagcccgtcattgaaatgagagaccacgaggacgggggcatccagctggagtgcatatctggagggtggtacccaaagcccctcacagtgtggagggacccctacggtgaggtcgtgcctgccctgaaggaggtctccacccctgacgcagacagcctcttcatggtcaccacagctgtgatcatcagagacaagtctgtgaggaacgtgtcctgctctatcaatgacaccctgctcggccagaagaaagaaagtgtcatttttattccag

SEQ ID NO: 26704 - DNA, 110 bp, Homo sapiens
  MAP TO AC007064.22; EXPRESSED IN BT474, SIGNAL = 0.96; EXPRESSED IN BRAIN, SIGNAL = 1.1; NT HIT: U60328.1, EVALUE 9.40e-01; SWISSPROT HIT: P38343, EVALUE 6.90e+00
gccttctgctgcatgaaattatcccggattgagaatgcaatctccctttccagcatcgtgtttctctttgtgatgctaacttgagtctcttccttctcctgtttaagatt

SEQ ID NO: 26705 - DNA, 250 bp, Homo sapiens
  MAP TO AC010140.1; EXPRESSED IN PLACENTA, SIGNAL = 0.94; EXPRESSED IN HBL100, SIGNAL = 1.4; EXPRESSED IN BRAIN, SIGNAL = 1.3; EXPRESSED IN BONE MARROW, SIGNAL = 1.7; EXPRESSED IN ADULT LIVER, SIGNAL = 1.6; EXPRESSED IN BT474, SIGNAL = 1.4; EXPRESSED IN HELA, SIGNAL = 1.5; EST_HUMAN HIT: BE728616.1, EVALUE 2.00e-08; NT HIT: AL163303.2, EVALUE 3.00e-12; SWISSPROT HIT: P26640, EVALUE 4.20e-01
atgtagcccctgttgctactctcatgggttgaagttgagtgtctgtggcttttccaagctcagggtgcaagctgtcaatggatctaccactttggggtctagaaggctgcagctctgtttccacagctccactaggcagtgccataatggggactctctgtggggtgtccaaccccatacttcccttccacactgccccatcaaatgtattctgaagggcatctgcctgtggagcaggcctctttgtggg

SEQ ID NO: 26706 - DNA, 105 bp, Homo sapiens
  MAP TO AC010721.1; EXPRESSED IN PLACENTA, SIGNAL = 1.5; EXPRESSED IN BRAIN, SIGNAL = 1.9; EXPRESSED IN FETAL LIVER, SIGNAL = 4.9; EXPRESSED IN BONE MARROW, SIGNAL = 2.3; EXPRESSED IN ADULT LIVER, SIGNAL = 1.1; EXPRESSED IN HELA, SIGNAL = 1.1; EST_HUMAN HIT: T96675.1, EVALUE 9.10e-01; SWISSPROT HIT: Q01250, EVALUE 9.10e+00
gcacttccctcttgcagaaaatgaccttcactctaagtttgcaccaagtgtggataacactgacccagccagtataagcatgagaatcaagatcctcctgaggat

SEQ ID NO: 26707 - DNA, 204 bp, Homo sapiens
  MAP TO AC011370.1; EXPRESSED IN HBL100, SIGNAL = 1.6; EXPRESSED IN BRAIN, SIGNAL = 1.4; EXPRESSED IN FETAL LIVER, SIGNAL = 2.3; NT HIT: gi7662177, EVALUE 1.00e-111; EST_HUMAN HIT: AA234271.1, EVALUE 2.00e-28; SWISSPROT HIT: P43572, EVALUE 4.90e-02
ctgatgggcttgctgtaagagctccattctctcctgaagaatctgacagtcatactctctgctcttcctcagcatttgccgccgtaacttttctactgccgtcctcagctcctcttgctgtttttcacttaataattcaccaaacttgataacagtttcttgctgtagagcattgtacaaagtagcttctagttcctggattct

SEQ ID NO: 26708 - DNA, 149 bp, Homo sapiens
  MAP TO AL035685.13; EXPRESSED IN HBL100, SIGNAL = 1.1; EXPRESSED IN BONE MARROW, SIGNAL = 1.5; EXPRESSED IN BRAIN, SIGNAL = 1.2; EXPRESSED IN BT474, SIGNAL = 1.1; EXPRESSED IN HELA, SIGNAL = 2.5; NT HIT: gi9994176, EVALUE 1.30e+00; SWISSPROT HIT: P06924, EVALUE 2.60e-01
ggcccaccatggcagatgaggcctgtccccaccagggtggaagctggatcactgggcccggcttggcacctggtaacgatccctctccagggggctgtgccctggatcctctctctcctccctcctccaccttcccccagaaagagtga

SEQ ID NO: 26709 - DNA, 151 bp, Homo sapiens
  MAP TO AL031963.11; EXPRESSED IN BRAIN, SIGNAL = 1.2; EXPRESSED IN BONE MARROW, SIGNAL = 1.7; EXPRESSED IN BT474, SIGNAL = 1.3; EXPRESSED IN ADULT LIVER, SIGNAL =   2; EXPRESSED IN PLACENTA, SIGNAL = 1.6; EXPRESSED IN HBL100, SIGNAL = 1.2; EST_HUMAN HIT: AW850271.1, EVALUE 5.00e-25; SWISSPROT HIT: O70306, EVALUE 3.00e+00; NT HIT: gi11417755, EVALUE 5.40e+00
tttctgcagcaggctccttccaccgtccaccattcatgtggcagccaaaatggtcgtcctaaaaggcacatgcaaccctctccctcacatattggaaatccttcccagatgctctgtggtcttcaggatgaagttcgaattcctcagcgtg

SEQ ID NO: 26710 - DNA, 195 bp, Homo sapiens
  MAP TO AL117338.4; EXPRESSED IN PLACENTA, SIGNAL = 1.2; EXPRESSED IN HELA, SIGNAL = 1.8; EXPRESSED IN HBL100, SIGNAL = 1.8; EXPRESSED IN BONE MARROW, SIGNAL = 2.4; EXPRESSED IN BRAIN, SIGNAL = 1.4; EXPRESSED IN ADULT LIVER, SIGNAL = 1.8; EXPRESSED IN BT474, SIGNAL = 1.5; EXPRESSED IN FETAL LIVER, SIGNAL =   1; SWISSPROT HIT: P06010, EVALUE 3.70e+00; EST_HUMAN HIT: AA933894.1, EVALUE 3.00e-12; NT HIT: AL163280.2, EVALUE 3.00e-08
tcaatgctgtcctgttaagctgagttgcttctgggtggggccacaggatgtgagggaggccttgggtccaggtggagccatgggtgtcagacatgcaaaaagcctgaaaagatacctcaaattccaacttgcaatagtggtgttgcatatcttcccattcctctccatcaccctagcctcatgacctttcattag

SEQ ID NO: 26711 - DNA, 145 bp, Homo sapiens
  MAP TO AL109756.7; EXPRESSED IN BRAIN, SIGNAL = 1.1; EST_HUMAN HIT: BE786167.1, EVALUE 1.90e+00; SWISSPROT HIT: P40226, EVALUE 1.30e+00; NT HIT: AF075238.1, EVALUE 2.80e-01
tcagtttcaacagaaacgcttctctgggggttgtcctcgtgaacatcatcagactaatcatgtggaagcgcgcctggtgccagttggatcaggagagagcgggtggatgccttgtggtcctggtgaggatgggaaaggaagcaac

SEQ ID NO: 26712 - DNA, 243 bp, Homo sapiens
  MAP TO AL109801.5; EXPRESSED IN HBL100, SIGNAL = 4.9; EXPRESSED IN HELA, SIGNAL =   3; EXPRESSED IN BONE MARROW, SIGNAL = 2.4; EXPRESSED IN BT474, SIGNAL = 1.2; EXPRESSED IN FETAL LIVER, SIGNAL = 1.6; EXPRESSED IN ADULT LIVER, SIGNAL = 1.1; EXPRESSED IN PLACENTA, SIGNAL = 1.1; EXPRESSED IN BRAIN, SIGNAL = 1.5; NT HIT: M69036.1, EVALUE 5.80e-01; SWISSPROT HIT: Q15545, EVALUE 4.50e+00
aagtaacaatgatgatgatgaggatgaggatgatgaagatgaggatgaggatgaggatgaggatgaagatgaagacaaagaagaggaggaggaagattgttctgaagagtatctggaaaggcagctgcaggccgagtttattgaatctggccagtatagggcaaatgaaggtaccagttcaataggtaagtcagaaaaaacaaagggatgggaccagggtgggtggcagtgctaacagttgac

SEQ ID NO: 26713 - DNA, 337 bp, Homo sapiens
  MAP TO AL079307.2; EXPRESSED IN BONE MARROW, SIGNAL = 1.2; EXPRESSED IN BRAIN, SIGNAL = 1.3; EXPRESSED IN LUNG, SIGNAL = 0.92; EXPRESSED IN ADULT LIVER, SIGNAL =   1; EXPRESSED IN BT474, SIGNAL = 1.5; EXPRESSED IN HELA, SIGNAL = 1.2; EXPRESSED IN PLACENTA, SIGNAL = 2.1; EXPRESSED IN HBL100, SIGNAL = 8.4; EST_HUMAN HIT: BE144364.1, EVALUE 0.00e+00; NT HIT: AJ243896.1, EVALUE 3.30e+00; SWISSPROT HIT: P26371, EVALUE 9.00e-04
agaagaagcagtaccgggaatcttacatcagtgacaacctggacctcgacatggaccagctggaaaaacggtcgcgggccagcgggagcagtgcgggcagcatgaaacacaagcgcctgtcccgtcattccaccgccagccacagcagttcccacacctcgggcattgaggcagacaccaagccccgggacacggggccagaagacagctactccagcagtgccatccaccgcaagctgaaaacctgcagctcaatgaccagtcatggcagctcccacacctcaggggtggagagtggcggcaaagaccggctggaagaggacttacaggacgatgg

SEQ ID NO: 26714 - DNA, 519 bp, Homo sapiens
  MAP TO AC011503.1; EXPRESSED IN HBL100, SIGNAL = 1.2; EXPRESSED IN PLACENTA, SIGNAL = 1.7; EXPRESSED IN BRAIN, SIGNAL = 1.2; EXPRESSED IN BONE MARROW, SIGNAL = 1.4; EXPRESSED IN BT474, SIGNAL =   2; NT HIT: gi4758513, EVALUE 0.00e+00; EST_HUMAN HIT: AA399561.1, EVALUE 0.00e+00; SWISSPROT HIT: Q05481, EVALUE 1.00e-82
gtatatgtcctcattttgctcaagacatttggccagagcagggcgtggaagattcttttcaaaaagtaatactaagaagatttgaaaaatgtggacatgagaatttacagttaagaaaaggttgtaaaagtgtggatgagtgtaaggtacacaaagaaggttataatggacttaaccagtgtttcacaactacccagggcaaagcttctcaatgtggtaaatatttgaaagtcttttataaatttataaatttaaacagatataagataagacatactagaaagaaacctttcaaatgtaaaaattgtgtcaaatcattttgcatgttttcacacaaaacccagcataaaagcatatatactacagagaagtcctacaaatgtaaagaatgtggaaaaacctttaattggtcctcaacccttactaatcataagaaaactcatactgaagaaaagccctacaaatgtgaagaatatggcaaagcttttaatcaatcctcaaattatactacacataagg

SEQ ID NO: 26715 - DNA, 496 bp, Homo sapiens
  MAP TO AL079299.8; EXPRESSED IN PLACENTA, SIGNAL = 1.1; EXPRESSED IN BONE MARROW, SIGNAL = 1.3; EXPRESSED IN LUNG, SIGNAL = 0.94; EXPRESSED IN BRAIN, SIGNAL = 1.1; EXPRESSED IN BT474, SIGNAL = 1.5; EXPRESSED IN FETAL LIVER, SIGNAL = 0.95; EXPRESSED IN HELA, SIGNAL =   1; EXPRESSED IN HBL100, SIGNAL = 2.2; EXPRESSED IN ADULT LIVER, SIGNAL = 1.3; EST_HUMAN HIT: BE222374.1, EVALUE 0.00e+00; SWISSPROT HIT: Q64623, EVALUE 2.00e-21; NT HIT: gi11545790, EVALUE 3.00e-38
tgtcagggatcattcccactggggaactgaccatgtgcacagtgttcttgccaaacaattggaactcatagtggatgagctgctcccaaaagccgctgttgggtcggatgatgggccggcatgacttggtccacgtgtgggcgtccagcagggacatggcgtggtacttcatgaggtaggcgaggcacagggcagctgagcggctcacaccagcagcacagtgcagcaaagtacggccctgcttcatctccacgctgtggatatggtcagcaatagggtcaaagaagtcacagagacgtgagttaggggagtcagccacaggtacctgcatgtactggatatcctcatacaaggtgttcactacctccactgagacattgatgaccatggtgatctggttgctagacagcatgagcttgttgttggcggccacaccattgctgatatacaggcttttggttatctgcgagaggccgctgactgagggctgccggaa

SEQ ID NO: 26716 - DNA, 129 bp, Homo sapiens
  MAP TO AL109624.1; EXPRESSED IN PLACENTA, SIGNAL = 1.1; EXPRESSED IN HELA, SIGNAL = 6.3; EXPRESSED IN HBL100, SIGNAL = 1.2; EXPRESSED IN BRAIN, SIGNAL = 1.1; EXPRESSED IN BT474, SIGNAL = 1.8; NT HIT: Z97050.1, EVALUE 2.50e-01; SWISSPROT HIT: P11469, EVALUE 4.60e-01; EST_HUMAN HIT: BE887173.1, EVALUE 1.00e-66
gaagtagctgtagtacacggcgttgttgacgtggccatactggtcattgtcctgccaccttgtctggatgggcaagaagtacccataggcctcgtggtgccaatggtaggcctcaactgtctggtcctt

SEQ ID NO: 26717 - DNA, 384 bp, Homo sapiens
  MAP TO AB023048.1; EXPRESSED IN HBL100, SIGNAL = 1.5; EXPRESSED IN HELA, SIGNAL =   2; EXPRESSED IN BRAIN, SIGNAL = 1.4; EXPRESSED IN BT474, SIGNAL = 1.3; EXPRESSED IN FETAL LIVER, SIGNAL = 1.2; EXPRESSED IN ADULT LIVER, SIGNAL = 1.3; EXPRESSED IN PLACENTA, SIGNAL = 0.96; EXPRESSED IN BONE MARROW, SIGNAL = 1.4; NT HIT: AF045555.1, EVALUE 3.70e+00; SWISSPROT HIT: P04929, EVALUE 3.10e-01; EST_HUMAN HIT: AV690090.1, EVALUE 3.60e-01
agacatgggggttagtacctgacacaactgttttggtgatggtctgagtagaaatgtcagtgaccttgttgggcacgaaagtggcagagacagtggtggaggttgcagtggccccagaggctgtggtagaggccaagaagggcgatgaggccaaagcgaaggctgtggaggtcacagatactgctgtggatggcatggtggcctcagagcctgtggtggaagccatgctgcttccagaccctgaagtgacctcagaggctgtgctcacagccatgttgctcgtggatattgcagtggaggctgtggtggtctcagagtctgtggaggaggcggttgtgggcatagatactattatggaggcactgggggtctcagaatctgtga

SEQ ID NO: 26718 - DNA, 465 bp, Homo sapiens
  MAP TO AC006364.3; EXPRESSED IN BT474, SIGNAL = 1.6; EXPRESSED IN BRAIN, SIGNAL = 1.1; EXPRESSED IN BONE MARROW, SIGNAL = 0.91; EST_HUMAN HIT: BF360293.1, EVALUE 0.00e+00; SWISSPROT HIT: Q9QYS1, EVALUE 8.00e-89; NT HIT: AF169963.1, EVALUE 0.00e+00
ttacttgcaagtgtggacatcagtcatgctttcacacctcctgcaacggacatagcagcaccagatgaacttacactcacacctctccacgtgcctgaccacatgggtgttgtaacctcggccacagcagaggaggttgcagccatctgcaccctctgatgtacggttgcattctctgccttgtgtccctgggattcccagtttcttatcttctacacagtagttgggagacttattaacatagagcagatcatccttatggattggtattttcctctgatctttttctctcctgcgcattttcctctttgttttgtctgatatctggatactgttttcatatttatccttcaacaaatggccaatcttttcaaaagaagacatggttttccagcatgttttcacagcacaggagccggaaactccgtggcagcggcagtctactgacatcaacttggcgacagc

SEQ ID NO: 26719 - DNA, 94 bp, Homo sapiens
  MAP TO AC011494.1; EXPRESSED IN FETAL LIVER, SIGNAL = 1.2; EXPRESSED IN ADULT LIVER, SIGNAL = 2.2; EXPRESSED IN HELA, SIGNAL = 1.4; EXPRESSED IN BONE MARROW, SIGNAL = 1.4; EXPRESSED IN LUNG, SIGNAL = 1.1; EXPRESSED IN BRAIN, SIGNAL = 1.3; EXPRESSED IN BT474, SIGNAL = 0.96; EXPRESSED IN PLACENTA, SIGNAL =   2; EXPRESSED IN HBL100, SIGNAL = 0.97; NT HIT: AJ271736.1, EVALUE 1.00e-17; EST_HUMAN HIT: BE071923.1, EVALUE 4.00e-15
tatatcttcaactatttgcccttggtcatctatgtgcagacagcaattggtcatgttaaactttccacagatccctccttcagctgctagcaag

SEQ ID NO: 26720 - DNA, 102 bp, Homo sapiens
  MAP TO AL034348.5; EXPRESSED IN BONE MARROW, SIGNAL = 1.6; EXPRESSED IN LUNG, SIGNAL = 5.6; EXPRESSED IN ADULT LIVER, SIGNAL = 9.6; EXPRESSED IN BT474, SIGNAL =  31; EXPRESSED IN FETAL LIVER, SIGNAL = 8.1; EXPRESSED IN PLACENTA, SIGNAL =  53; EXPRESSED IN HBL100, SIGNAL =  22; EXPRESSED IN HELA, SIGNAL =  19; EXPRESSED IN BRAIN, SIGNAL = 1.2; NT HIT: gi11434787, EVALUE 1.00e-15; EST_HUMAN HIT: AA621814.1, EVALUE 4.00e-18; SWISSPROT HIT: P05783, EVALUE 3.00e-03
cttaagatttctcatggagtccaggttgatctccaaggactgaactctacctctcagctccgtgagcatcaccttgcatttctgattttggcaactgcatgg

SEQ ID NO: 26721 - DNA, 104 bp, Homo sapiens
  MAP TO AC006466.3; EXPRESSED IN BRAIN, SIGNAL = 1.3; NT HIT: gi4501922, EVALUE 4.00e-52; EST_HUMAN HIT: AI815550.1, EVALUE 4.00e-52; SWISSPROT HIT: P41586, EVALUE 2.00e-14
ccctgccatgcattctgactgcatcttcaagaaggagcaagccatgtgcctggagaagatccagagggccaatgagctgatgggcttcaatgattcctctccag

SEQ ID NO: 26722 - DNA, 118 bp, Homo sapiens; identical to SEQ ID NO: 16869
  MAP TO AC004019.11; EXPRESSED IN ADULT LIVER, SIGNAL = 0.94; EXPRESSED IN BT474, SIGNAL = 1.1; EXPRESSED IN HBL100, SIGNAL = 1.2; EXPRESSED IN BONE MARROW, SIGNAL =   1; EXPRESSED IN BRAIN, SIGNAL = 1.6; EST_HUMAN HIT: AV661919.1, EVALUE 3.00e-60; NT HIT: AY008285.1, EVALUE 2.00e-60; SWISSPROT HIT: P53320, EVALUE 2.10e-01

SEQ ID NO: 26723 - DNA, 202 bp, Homo sapiens
  MAP TO AC009532.2; EXPRESSED IN FETAL LIVER, SIGNAL = 0.87; EXPRESSED IN ADULT LIVER, SIGNAL = 0.92; EXPRESSED IN HBL100, SIGNAL = 1.2; EXPRESSED IN PLACENTA, SIGNAL = 0.97; EXPRESSED IN BRAIN, SIGNAL = 1.1; EXPRESSED IN BONE MARROW, SIGNAL = 1.2; EST_HUMAN HIT: AW897798.1, EVALUE 4.00e-66; NT HIT: AF081250.1, EVALUE 7.00e-65
  unsure 129
attccaagaaggtctaaagaagaccaaagaacttcaagacctgaaggaggaggaggaagaacagaagagtgagagtcctgaggaacctgaagaggtagaagaaactgaggaagaggaaaagggcccaangaagcaggtgggaagcctgtgtttggagtccttgccgttgctgaaatgggggttacaattcatctaatttaaa

SEQ ID NO: 26724 - DNA, 184 bp, Homo sapiens
  MAP TO AC009664.3; EXPRESSED IN BONE MARROW, SIGNAL =   1; EXPRESSED IN BRAIN, SIGNAL = 1.2; EXPRESSED IN BT474, SIGNAL = 1.2; EXPRESSED IN HELA, SIGNAL =   1; NT HIT: M87863.1, EVALUE 3.60e-01; EST_HUMAN HIT: AW950556.1, EVALUE 7.00e-03
  unsure 172
gttctccatgtcaacaaggcaaaataataataataagaagaagaagaagaagaagaagaaggaggaggaggaggaggagaaggaggaggagaaggaggaggaagagcgggggaaggttggacctgtaggcaagatattggatttactgtttttaagctatcttccaatactntgatttctatga

SEQ ID NO: 26725 - DNA, 209 bp, Homo sapiens
  MAP TO AC010099.2; EXPRESSED IN BT474, SIGNAL = 0.95; EXPRESSED IN FETAL LIVER, SIGNAL = 1.6; EXPRESSED IN HBL100, SIGNAL = 1.1; EXPRESSED IN BRAIN, SIGNAL = 0.97; EXPRESSED IN BONE MARROW, SIGNAL = 0.92; NT HIT: AF111167.2, EVALUE 7.00e-37
caccactgcttctacctctagcactgccattgccacaaacaccatcagtatcaccatcacaaccattactaccaccgtcaccataaccaccaccaccatcagcacctgtaccataactaccatctccaccatcatcagcaccattatcatcagtatgccaccaccaccactgccattgccaatgcctgagtggaagaggagtagagcag

SEQ ID NO: 26726 - DNA, 153 bp, Homo sapiens
  MAP TO AL035462.12; EXPRESSED IN ADULT LIVER, SIGNAL = 0.95; EXPRESSED IN BT474, SIGNAL = 0.96; EXPRESSED IN FETAL LIVER, SIGNAL = 1.3; EXPRESSED IN HBL100, SIGNAL = 9.2; EXPRESSED IN BONE MARROW, SIGNAL = 1.2; EXPRESSED IN BRAIN, SIGNAL = 1.3; EST_HUMAN HIT: BF527609.1, EVALUE 7.00e-59; SWISSPROT HIT: P52546, EVALUE 3.90e+00
cctcgttctccagcttcctcttctccagctccgcctcaatctggtccagcaccatggccagttccccgaggatcttcttcaggtagctcacatcatcatgctccaagatcttggcctgggggcaggacagggccaagagaagctgagttggcc

SEQ ID NO: 26727 - DNA, 176 bp, Homo sapiens
  MAP TO AC011309.1; EXPRESSED IN BRAIN, SIGNAL = 1.2; EXPRESSED IN BONE MARROW, SIGNAL = 2.1; EXPRESSED IN FETAL LIVER, SIGNAL = 1.2; EXPRESSED IN BT474, SIGNAL = 0.96; EXPRESSED IN ADULT LIVER, SIGNAL = 1.3; EXPRESSED IN HELA, SIGNAL = 1.4; EXPRESSED IN PLACENTA, SIGNAL = 1.3; EXPRESSED IN HBL100, SIGNAL = 1.2; EST_HUMAN HIT: AI301192.1, EVALUE 4.00e-11; NT HIT: AB025285.1, EVALUE 5.00e-19
tattcattaagtggaattggatgatcataaaggtcttcatcctcaacatcttcacgttgagtaggctgaggaggatgaggaagaagaggggttggtcctactgtcctataggtggcagaggtggaagaaagtccatggaccagtgcagttgaaatctgtgttgttcaagggtcaac

SEQ ID NO: 26728 - DNA, 187 bp, Homo sapiens
  MAP TO AC011364.1; EXPRESSED IN PLACENTA, SIGNAL = 2.9; EXPRESSED IN HBL100, SIGNAL = 0.97; EXPRESSED IN BRAIN, SIGNAL = 1.1; EXPRESSED IN BT474, SIGNAL = 1.1; EST_HUMAN HIT: AV648724.1, EVALUE 2.60e+00; NT HIT: X62078.1, EVALUE 9.40e-02; SWISSPROT HIT: P07313, EVALUE 2.20e-02
gtccctcaggaggtcactcacatgcatcaaggagagcctgcgtatcttcattgacctgggggagacagacaaggctgctgaggcctggcttggggcggggcgactccactacctcatgcaggaagacgagctggtggagctgtgcctgcaggtaggcctcctgcagagctctctgggagttgttgac

SEQ ID NO: 26729 - DNA, 123 bp, Homo sapiens
  MAP TO AL035587.5; EXPRESSED IN PLACENTA, SIGNAL =   2; EXPRESSED IN HELA, SIGNAL = 2.2; EXPRESSED IN BRAIN, SIGNAL = 1.1; EXPRESSED IN BONE MARROW, SIGNAL = 1.3; EXPRESSED IN LUNG, SIGNAL = 1.5; EXPRESSED IN ADULT LIVER, SIGNAL = 1.6; EXPRESSED IN BT474, SIGNAL = 2.9; EXPRESSED IN FETAL LIVER, SIGNAL = 1.1; EXPRESSED IN HBL100, SIGNAL =   3; EST_HUMAN HIT: N83228.1, EVALUE 3.00e-63; NT HIT: AF193553.1, EVALUE 9.20e-01; SWISSPROT HIT: P17937, EVALUE 6.00e-01
caattccaaggcatgaggtttcacttctagtcgtctgagacgcaccttgtcacgtttctgccgccaggaatcatgtaggaatgattccagtcgcttaaacctgagcccttttcctttcttctg

SEQ ID NO: 26730 - DNA, 104 bp, Homo sapiens
  MAP TO AL035553.10; EXPRESSED IN BT474, SIGNAL = 1.1; EXPRESSED IN HELA, SIGNAL = 1.1; EXPRESSED IN HBL100, SIGNAL = 1.3; EXPRESSED IN BRAIN, SIGNAL = 1.5; EXPRESSED IN PLACENTA, SIGNAL = 1.7; EXPRESSED IN BONE MARROW, SIGNAL = 2.1; EXPRESSED IN ADULT LIVER, SIGNAL = 1.8; EXPRESSED IN FETAL LIVER, SIGNAL = 0.99; EST_HUMAN HIT: BE243931.1, EVALUE 6.00e-06; NT HIT: AF125348.1, EVALUE 1.00e-08
tcaccagaccctgaatgtgcggatgccttgattttggacttcctagcctccagagctgagaaatgaaattctgtagtttatagcctaccaagcttatggtattt

SEQ ID NO: 26731 - DNA, 265 bp, Homo sapiens
  MAP TO AL121760.1; EXPRESSED IN BONE MARROW, SIGNAL =   1; EXPRESSED IN BT474, SIGNAL = 1.1; EXPRESSED IN HELA, SIGNAL = 1.3; EXPRESSED IN PLACENTA, SIGNAL = 0.99; EXPRESSED IN BRAIN, SIGNAL =   1; NT HIT: gi7525012, EVALUE 1.00e+01; EST_HUMAN HIT: BE274262.1, EVALUE 1.60e-01; SWISSPROT HIT: P23091, EVALUE 4.20e-02
gtcacagtccagtgtaggtcaactcctcatggtcactcagagacccaggtccttccatccaggggaggggatcttgatttcttttttgatcttctgcatcccccggcagaggagaggaaaagacagggtgtggaggagcatgggggaggttttatgggcaggcctggaagggattcatggccaattcacctggtcttgtgtgggggtgtaggtagtgacctaggagtgaaggaaggagcagtgtcatgcccagcagttcccccag

SEQ ID NO: 26732 - DNA, 429 bp, Homo sapiens
  MAP TO AL096678.8; EXPRESSED IN PLACENTA, SIGNAL = 0.97; EXPRESSED IN HELA, SIGNAL = 0.89; EXPRESSED IN HBL100, SIGNAL = 1.2; EXPRESSED IN BONE MARROW, SIGNAL = 1.3; EXPRESSED IN BRAIN, SIGNAL = 1.1; EXPRESSED IN ADULT LIVER, SIGNAL = 0.98; EXPRESSED IN BT474, SIGNAL = 1.1; EST_HUMAN HIT: BF337966.1, EVALUE 2.60e-02; SWISSPROT HIT: P02438, EVALUE 2.10e-02; NT HIT: AF116285.1, EVALUE 4.20e+00
ctcttccttgacgtaattgagcttgtactccctcttcaccgcagggtcaaagcgtgcctggggaagccatgtctgaatctggagcaagccgaggctcacccagaggctcccacgctgggctggctcaggcaggctcctcttactctccccttcaccaacaaagtggtgcagggaggtgagcaactggcagagcagttccttgggcagcacctcctgaccagccatgtccccaagtgtctggcccacatgctggaaggcctggctgctcccaagcagcagctgctcacagttctgcatgtactcctgccgccgggactctgggagcagctctgctaggcctgccaggtgccggaacagcacctgcccctggagttgggaatccgtgcgtctgtggggacaaaaagaaagcactgaaaggtttgtactgta

SEQ ID NO: 26733 - DNA, 150 bp, Homo sapiens
  MAP TO AF170802.1; EXPRESSED IN FETAL LIVER, SIGNAL = 1.2; EXPRESSED IN BT474, SIGNAL = 0.97; EXPRESSED IN HBL100, SIGNAL = 0.92; EXPRESSED IN BRAIN, SIGNAL = 1.1; EXPRESSED IN BONE MARROW, SIGNAL = 0.97; EST_HUMAN HIT: BE090200.1, EVALUE 4.00e-04; SWISSPROT HIT: Q27200, EVALUE 7.70e-01; NT HIT: gi11422518, EVALUE 2.00e-79
cttccgggccccatgcaggtcagcagagctcctgatgttgttgaagtccaggaccagagctcccaggggagagcagagccagctcagccccagcaggacggccgccaccatccttcaatcccggggctcctggagggtcccagcactgtg

SEQ ID NO: 26734 - DNA, 227 bp, Homo sapiens
  MAP TO AL109801.5; EXPRESSED IN BONE MARROW, SIGNAL = 1.7; EXPRESSED IN FETAL LIVER, SIGNAL = 0.96; EXPRESSED IN BRAIN, SIGNAL = 0.91; NT HIT: L31568.1, EVALUE 1.00e-125; EST_HUMAN HIT: AA282466.1, EVALUE 1.00e-100; SWISSPROT HIT: P35991, EVALUE 4.00e-38
caggtctcggtgaaggaactgctttgactccaggtattccatggcttcacagacatccttgcacatctctagcagctgctgagtctggaagcggtggcgcatctccctcaggtagttcaggaggcagccattggccatgtactcagtgatgatgaagatggggcgctgcttggtgcagacgccatacaactgcaccagcttctcatgggaaagattcctacaggaaa

SEQ ID NO: 26735 - DNA, 226 bp, Homo sapiens
  MAP TO AC009944.2; EXPRESSED IN FETAL LIVER, SIGNAL = 1.6; EXPRESSED IN ADULT LIVER, SIGNAL = 1.2; EXPRESSED IN PLACENTA, SIGNAL = 6.6; EXPRESSED IN HELA, SIGNAL = 1.8; EXPRESSED IN BONE MARROW, SIGNAL = 1.4; EXPRESSED IN BRAIN, SIGNAL = 1.2; EXPRESSED IN BT474, SIGNAL = 4.3; EXPRESSED IN HBL100, SIGNAL = 3.8; EXPRESSED IN LUNG, SIGNAL = 2.5; EST_HUMAN HIT: BF001231.1, EVALUE 1.00e-119; NT HIT: gi4557250, EVALUE 1.00e-120; SWISSPROT HIT: P17027, EVALUE 8.40e+00
  unsure 101
ctggtctgaggatatgatctcttgccattttttcttcaactgttacttgtgagggtttagtttggagatgatgacttaataggtttctctttggagtgaangttttcccattgtaggcactaggaagaaccaaggcaaaagctgcagttagcgtctcatgtgtcccatttgataactctctcggggccgctgacgctggggttgctgaatgggctgtggaggtctc

SEQ ID NO: 26736 - DNA, 355 bp, Homo sapiens
  MAP TO AC006020.2; EXPRESSED IN FETAL LIVER, SIGNAL = 1.6; EXPRESSED IN BRAIN, SIGNAL = 1.6; EST_HUMAN HIT: BE765136.1, EVALUE 1.00e-104; NT HIT: gi4506328, EVALUE 0.00e+00; SWISSPROT HIT: P23471, EVALUE 6.00e-64
catgcacgttcttcagggcctgaaccttcttatgccttgtctgataatgagggctcccaacacatcttcactgtttcttacagttctgcaatacctgtgcatgattctgtgggtgtaacttatcagggttccttatttagcggccctagccatataccaatacctaagtcttcgttaataaccccaactgcatcattactgcagcctactcatgccctctctggtgatggggaatggtctggagcctcttctgatagtgaatttcttttacctgacacagatgggctgacagcccttaacatttcttcacctgtttctgtagctgaatttacatatacaacatctgtgtttggtg

SEQ ID NO: 26737 - DNA, 181 bp, Homo sapiens
  MAP TO AC008132.19; EXPRESSED IN PLACENTA, SIGNAL = 1.1; EXPRESSED IN BONE MARROW, SIGNAL = 1.3; EXPRESSED IN BRAIN, SIGNAL = 1.5; EXPRESSED IN BT474, SIGNAL = 1.4; EXPRESSED IN FETAL LIVER, SIGNAL = 2.6; EXPRESSED IN HBL100, SIGNAL = 1.5; EXPRESSED IN LUNG, SIGNAL = 0.92; EXPRESSED IN ADULT LIVER, SIGNAL = 1.4; EST_HUMAN HIT: AI222095.1, EVALUE 5.00e-90; SWISSPROT HIT: P19440, EVALUE 5.00e-09; NT HIT: J05235.1, EVALUE 3.00e-85
ctcccaatctccaagcactgcttggcatccgcggccacggcagccctggtgtacacatggttgtcaggttccttggaggccgagggcagccagagacagaggccgacaatgaccagcaccaggaccacggccagcaggcccagcaccactaacttcttcttcatggctctgctgcacccac

SEQ ID NO: 26738 - DNA, 266 bp, Homo sapiens
  MAP TO AL049697.8; EXPRESSED IN ADULT LIVER, SIGNAL = 1.1; EXPRESSED IN FETAL LIVER, SIGNAL = 5.9; EXPRESSED IN PLACENTA, SIGNAL = 1.1; EXPRESSED IN HELA, SIGNAL = 4.2; EXPRESSED IN HBL100, SIGNAL = 1.1; EXPRESSED IN BONE MARROW, SIGNAL =   1; EXPRESSED IN BRAIN, SIGNAL = 0.94; SWISSPROT HIT: P16265, EVALUE 4.30e+00; EST_HUMAN HIT: AA218891.1, EVALUE 3.00e-21
cctatttctactactgagaccttgcttttgtcatttggcatgaggcgaggcatagttttatttcgtaggtttgtgaaaggggcagttgtaggaggtagagcagggagaacaaagcgcatcttaaagaagcctatagggtcctttccagtgacttctgctcctaaaccatagaaacgctctaaagtggggttagagttgctagtggtaggaacagtaatggatataggcactgtgttaggaaaggaaggaaaagatagatagactaa

SEQ ID NO: 26739 - DNA, 131 bp, Homo sapiens
  MAP TO AL121796.1; EXPRESSED IN HELA, SIGNAL = 1.3; EXPRESSED IN PLACENTA, SIGNAL = 1.7; EXPRESSED IN HBL100, SIGNAL = 1.7; EXPRESSED IN LUNG, SIGNAL = 0.88; EXPRESSED IN BRAIN, SIGNAL = 1.1; EXPRESSED IN BONE MARROW, SIGNAL = 1.7; EXPRESSED IN BT474, SIGNAL = 1.4; EXPRESSED IN FETAL LIVER, SIGNAL = 5.5; EXPRESSED IN ADULT LIVER, SIGNAL = 1.4; EST_HUMAN HIT: AI262100.1, EVALUE 3.00e-04; SWISSPROT HIT: P41246, EVALUE 2.70e-01; NT HIT: AB038162.1, EVALUE 5.00e-03
tgcttgtccaagatggcaatactcctgctgctggttggccactcggaattgtcttcgtggagagagaagactttatggttatgggccacaatatctagggtgtggccatgggagaggagggctggggtagt

SEQ ID NO: 26740 - DNA, 673 bp, Homo sapiens
  MAP TO AC008015.4; EXPRESSED IN BONE MARROW, SIGNAL = 1.3; EXPRESSED IN FETAL LIVER, SIGNAL = 0.93; EXPRESSED IN HBL100, SIGNAL = 3.3; EXPRESSED IN HELA, SIGNAL = 1.4; EXPRESSED IN LUNG, SIGNAL = 1.8; EXPRESSED IN BRAIN, SIGNAL = 1.1; EXPRESSED IN ADULT LIVER, SIGNAL = 1.4; EXPRESSED IN BT474, SIGNAL = 2.6; EXPRESSED IN PLACENTA, SIGNAL = 1.8; NT HIT: gi11434927, EVALUE 0.00e+00; EST_HUMAN HIT: BE901104.1, EVALUE 0.00e+00; SWISSPROT HIT: P03161, EVALUE 7.70e+00
atgtggcctcatggatgagctggtacacgacttagcctcagccttggagcagacatctgagcagaataagcttggtgaactgtgggaggagatggcgctgagcccccgacagcagaggcggcagcttcggaaacgccgaggtcggaagcgtcgttctgacttcactcacctggcagagcatacctgctgctacagcgaggcctctgagtcaagtctggatgaggccactaaggactgtcgagaagtggctccggtgaccaattttagtgactctgatgacacaatggtagccaaacgacacccagctctcaatgccattgtcaagagtaagcaacattcttggcatgaatctgactcctttactgaaaatgcaccttgtcgaccactcaggcgcaggcggaaggtgaagcgagtgacatcagaggtggctgctagccttcagcagaagctgaaggtgtcagattggagctatgagagaggctgcaggttcaagtctgctaagaagcagcgtctgtcccgctggaaggagaatactccctggacctcatcaggccacggattgtgtgaatcagcagaaaataggactttcctaagcaaaacaggaaggaaagaaaggatggagtgtgaaacagatgaacaaaaacagggctctgatgagaacatgtcagaatgg

SEQ ID NO: 26741 - DNA, 543 bp, Homo sapiens
  MAP TO AC009401.1; EXPRESSED IN PLACENTA, SIGNAL = 7.4; EXPRESSED IN HBL100, SIGNAL = 1.3; EXPRESSED IN BRAIN, SIGNAL = 1.1; EXPRESSED IN BONE MARROW, SIGNAL =   1; EXPRESSED IN BT474, SIGNAL =   1; EXPRESSED IN ADULT LIVER, SIGNAL = 1.2; EXPRESSED IN FETAL LIVER, SIGNAL = 0.93; EXPRESSED IN HELA, SIGNAL =   1; NT HIT: AL163284.2, EVALUE 5.00e-09; EST_HUMAN HIT: AA383316.1, EVALUE 2.00e-08; SWISSPROT HIT: P27460, EVALUE 1.00e-08
gagaaatttggccagtttttggaggatccagggaagttcattgaggagtttgttgagttgactatgtcttctgacttaatttcacatgatttgcaaaaattattgtgcacctgctataccacagataagaaacagatggatctgagtactgtccaaaaatatgcagatggagtggccacacataacctagaccatgctagttatcatgtggaaggagatacagttccagatatggaccctcagtggaattaccagagggcttcccaagatctcaaatgcaaaaatcacatggtaacttgcttaataaaagatatgaaaaagcatgtagttaagccagttaatcatgacaagattaaagaagtaactcagagaaaggctaaaattcctgctatatttcaaggccatttggttgaggcattcaggaaatatacagaaacagactcccaagaatggcaaactctcctgtgtatgcattttatactcaatctgcctctgacattaggaagaagacataaaaggcagaattgggacctcaaattccta

SEQ ID NO: 26742 - DNA, 258 bp, Homo sapiens
  MAP TO AC007666.12; EXPRESSED IN ADULT LIVER, SIGNAL = 1.1; EXPRESSED IN HELA, SIGNAL = 7.7; EXPRESSED IN PLACENTA, SIGNAL =   1; EXPRESSED IN LUNG, SIGNAL = 2.9; EXPRESSED IN BRAIN, SIGNAL = 0.97; SWISSPROT HIT: P54098, EVALUE 1.50e+00; NT HIT: gi6680957, EVALUE 1.30e-01
atgatgaaacattttcctggagaagatggagacacagatgaagaattttggattcgagaggatgaaaagcgggagaaaagacggagtcgggctgggcgaagtggtgggagccatgtttggacccgctccagggacccagaagggtccagcaggaaacagcagcccatggagaatggaggaaagtcgttgccccccacacgccgagcgccctcttctggggacgatcagagcagcagctccacacagcccccgcgggag

SEQ ID NO: 26743 - DNA, 200 bp, Homo sapiens
  MAP TO AC009185.2; EXPRESSED IN BT474, SIGNAL = 1.4; EXPRESSED IN HBL100, SIGNAL = 1.4; EXPRESSED IN BONE MARROW, SIGNAL = 0.98; EXPRESSED IN BRAIN, SIGNAL = 1.4; NT HIT: AB032994.1, EVALUE 1.00e-100; EST_HUMAN HIT: AW500792.1, EVALUE 1.00e-100; SWISSPROT HIT: P03395, EVALUE 1.60e+00
ctcttgtaggcagagtggtcattcttgacgctgcacttcatgttctttagctcatccaggacagcaaacatgttgatgaacttgccaagggtcaggaggtaggcctcagagacaaagtccttcctgcgctcggcatggcacagccgcttcacctcgctgcagaaccgctcgatggccttgcgctgggggcagaggggcag

SEQ ID NO: 26744 - DNA, 214 bp, Homo sapiens
  MAP TO AC009892.1; EXPRESSED IN FETAL LIVER, SIGNAL = 0.89; EXPRESSED IN PLACENTA, SIGNAL = 1.1; EXPRESSED IN BRAIN, SIGNAL =   1; EST_HUMAN HIT: BE144908.1, EVALUE 2.00e-03; NT HIT: AJ223498.1, EVALUE 4.30e-01; SWISSPROT HIT: Q15031, EVALUE 7.50e+00
tacaaatcaagtaagaatgaagtaagtttcctatctatttcacgtcttagaacgctgcggtcaactagacaacactaaagggctgcatgagacagtctattctgattactgccttgattctgctttccattatgatcaccacacccagttctatgataaccacacccaattcaacacaccagattctcacctttgtcgactgacttctgacact

SEQ ID NO: 26745 - DNA, 147 bp, Homo sapiens
  MAP TO AP000407.1; EXPRESSED IN PLACENTA, SIGNAL = 1.4; EXPRESSED IN BRAIN, SIGNAL = 0.9; EXPRESSED IN BT474, SIGNAL = 2.1; EXPRESSED IN FETAL LIVER, SIGNAL = 1.4; EXPRESSED IN HBL100, SIGNAL = 1.6; EXPRESSED IN HELA, SIGNAL = 1.2; NT HIT: U05343.1, EVALUE 2.00e-17; SWISSPROT HIT: P48377, EVALUE 7.70e-01; EST_HUMAN HIT: N33561.1, EVALUE 2.00e-77
atcccaaggaagaaaaagaggaagaagacgattctgccctccctcaggaagtttccattgctgcatctagacctagccggggctggcgtagtagtaggacatctgtttctcgccatcgtgatacagagaacacccgaagctctcggt

SEQ ID NO: 26746 - DNA, 100 bp, Homo sapiens
  MAP TO AC009493.1; EXPRESSED IN PLACENTA, SIGNAL = 2.7; EXPRESSED IN BRAIN, SIGNAL =  16; NT HIT: M60718.1, EVALUE 1.00e-49; SWISSPROT HIT: Q08048, EVALUE 3.00e-14; EST_HUMAN HIT: BF085265.1, EVALUE 9.00e-45
tgtgagcaacataaaatgagaatggttcttggtgtcattgttcctggtcgtggatgtgccattccaaatcgtcctggtatttttgtccgagtagcatatt

SEQ ID NO: 26747 - DNA, 220 bp, Homo sapiens
  MAP TO AC010083.1; EXPRESSED IN BRAIN, SIGNAL = 1.2; NT HIT: M95968.1, EVALUE 1.00e-121; EST_HUMAN HIT: BE257514.1, EVALUE 9.00e-77; SWISSPROT HIT: Q03333, EVALUE 4.00e-39
cacaccggcctcggggttccttttcctcccgttgctgaaggtggaagccaaggtggaagagcagctctcgtcgtacagggcagtcctgccgtcgttgatggctgagttgatggagatggtccacatgctggaggcgtagccgtcgcagttgcagtcgtcatagctgccgccgtccccggaggcccacacgtagatgctgcctttgccgccgcggccctgg

SEQ ID NO: 26748 - DNA, 1178 bp, Homo sapiens
  MAP TO AL096711.9; EXPRESSED IN BRAIN, SIGNAL =   2; EXPRESSED IN LUNG, SIGNAL = 2.3; EXPRESSED IN BT474, SIGNAL =   1; EXPRESSED IN HELA, SIGNAL =  13; EXPRESSED IN HBL100, SIGNAL = 1.2; NT HIT: gi11418710, EVALUE 0.00e+00; EST_HUMAN HIT: BE781859.1, EVALUE 0.00e+00; SWISSPROT HIT: Q90508, EVALUE 1.00e+00
tcagaattacatttggtccaattatcctggaagcacttagaattttgcaatgcagactctgttgctgtctcataggttttcagcagcttttccacaacaccataatttgacctgggatcagctgacctcggacggccagacaaattactcggtctccagtcatgctcgtggagcatatttcgataactgcgaggacttaggtgtccctgcatttgtcttactaggcctgttgtggatttcttggtgggattatcaggcacattttccatgggcacaggcatgtgggcattggttttccaaataccggacacatcgttactttgtgatatgctacctgtgtgagtagatgaggtatcacagggcttgagatcctccgatgattttgagcagctgtgattttgctgtattgcctgacaatttctatctgttctaaatacagttctgttaaattcatcagtctttgctgccagcttctcattccttgtagtcctttcaaagccacaactgaaatttctaagtgggctactgctctctgctactgaggagctacagtcattacttacatgaagatcaggatgagatttagcagggtgatctgggatcaccatttcatattttggattactgggggtagagcaggttttctgaaaccacgaagtagaggggctcctttttgcacctatcccaatgtcacatgaccacatgctaagtccaacatcttcattacttggaggcttgctatctattttgacttctggtaccaaagaggaaaagatgataccatctttcgaagttttcccttcatttggatacaacatagacatctcttgttgtctcaaagggaagtgagggttgtaattccttttacttcgaccctcatggggcacccagctgttgtggtctaacctttccttccatctttcataggcttgttcagaatccgagctgggaaaatttcgagaggtgcttcttggaggaggaactggtggagtttcatttctttttaaatcgattgtatcaattccacattttttcgtagaattgctctggagcacattggtacagctcagattcttcctgtttttctgtttttctttttctaaactgattggaagaatgcactggtcattgttgatcatggggtccccatgaggtatattagttacatttggcatttc

SEQ ID NO: 26749 - DNA, 285 bp, Homo sapiens
  MAP TO AP000512.1; EXPRESSED IN ADULT LIVER, SIGNAL = 1.1; EXPRESSED IN BT474, SIGNAL = 1.9; EXPRESSED IN FETAL LIVER, SIGNAL = 0.88; EXPRESSED IN PLACENTA, SIGNAL = 1.5; EXPRESSED IN HELA, SIGNAL =   2; EXPRESSED IN HBL100, SIGNAL = 1.9; EXPRESSED IN LUNG, SIGNAL =   1; EXPRESSED IN BONE MARROW, SIGNAL = 1.3; EXPRESSED IN BRAIN, SIGNAL = 1.2; NT HIT: AB011149.1, EVALUE 0.00e+00; SWISSPROT HIT: O60231, EVALUE 6.00e-28; EST_HUMAN HIT: AL134956.1, EVALUE 0.00e+00
gtccctgagctgcggaagaaatctcgccgagagtacctggctaagcgggagcgagagaagcttgaggacctggaggcggagctggctgatgaggagttcctttttggggacgtggagctgagccggcacgagcggcaggagctcaaatataagcggcgagtgcgggatctcgcccgggagtaccgggcagctggggagcaggagaagctggaggccaccaatcgctaccacatgcccaaggaaacccgaggacaggtgaggtgaagcggcgtctgcttcagcctt

SEQ ID NO: 26750 - DNA, 153 bp, Homo sapiens
  MAP TO AC007898.1; EXPRESSED IN FETAL LIVER, SIGNAL = 0.92; EXPRESSED IN BRAIN, SIGNAL = 1.1; EXPRESSED IN BONE MARROW, SIGNAL = 1.1; NT HIT: AL163279.2, EVALUE 3.00e-04; EST_HUMAN HIT: AW866218.1, EVALUE 9.00e-05; SWISSPROT HIT: P53049, EVALUE 5.10e+00
gggatggggaggaggctctgagaaagattttgttttccaataagagcaccaggtacattggtacaaggattactataaaggccttcatcatcattgtcttcacattgaataggctgaggagggggaggaggaggagggataggtcttgtgtct

SEQ ID NO: 26751 - DNA, 213 bp, Homo sapiens
  MAP TO AC005412.5; EXPRESSED IN PLACENTA, SIGNAL = 0.97; EXPRESSED IN LUNG, SIGNAL = 0.91; EXPRESSED IN BRAIN, SIGNAL = 1.1; EXPRESSED IN FETAL LIVER, SIGNAL = 0.96; EXPRESSED IN BT474, SIGNAL = 1.2; EXPRESSED IN HELA, SIGNAL = 1.8; EXPRESSED IN HBL100, SIGNAL = 0.92; EXPRESSED IN ADULT LIVER, SIGNAL = 1.3; NT HIT: AB026497.1, EVALUE 8.00e-49; SWISSPROT HIT: P38175, EVALUE 5.70e+00
gaaagacaaggacaaagatggcgggcggaaggagaagaaggagaaaaaggagaaaaaggagcggatgtcagcggcagagcttcggagcctggaggagatgagcctgcgacgtggcttcttcaacctgaaccgctcctccaagcgtgaatccaagacgcgcctggaaatctccaaccccatccccatcaaggtggccagcggctctgacctgca

SEQ ID NO: 26752 - DNA, 115 bp, Homo sapiens
  MAP TO AC007970.3; EXPRESSED IN BT474, SIGNAL = 1.5; EXPRESSED IN PLACENTA, SIGNAL =   1; EXPRESSED IN HELA, SIGNAL = 1.3; EXPRESSED IN BRAIN, SIGNAL = 1.6; EST_HUMAN HIT: AV653666.1, EVALUE 2.00e-58; SWISSPROT HIT: Q55563, EVALUE 5.30e+00; NT HIT: gi5174444, EVALUE 1.00e-58
actcctgagttctcacaacgcttgaccaataagattcgggagcttcttcagcaaatggagagaggcctgaaatcagcagaccctcgggatggcaccggttacactggctgggcag

SEQ ID NO: 26753 - DNA, 118 bp, Homo sapiens
  MAP TO AC010130.2; EXPRESSED IN BRAIN, SIGNAL = 2.3; EXPRESSED IN BONE MARROW, SIGNAL = 1.6; EXPRESSED IN ADULT LIVER, SIGNAL = 1.2; NT HIT: AF175325.1, EVALUE 4.00e-09; EST_HUMAN HIT: H77749.1, EVALUE 7.00e-08; SWISSPROT HIT: Q01842, EVALUE 6.10e-01
atctggccgttcatttgtatcctttatcatatccttttttaataaactggtaaaagtatttccctgagttctgtgagctgatcccaagaaggtgctggtgggcacctccaatttgtag

SEQ ID NO: 26754 - DNA, 170 bp, Homo sapiens
  MAP TO AC011296.1; EXPRESSED IN BONE MARROW, SIGNAL =   1; EXPRESSED IN FETAL LIVER, SIGNAL = 1.2; EXPRESSED IN HBL100, SIGNAL = 1.4; EXPRESSED IN BRAIN, SIGNAL =   1; NT HIT: AF289489.1, EVALUE 6.10e+00; SWISSPROT HIT: Q12888, EVALUE 1.30e+00; EST_HUMAN HIT: BE876059.1, EVALUE 9.10e+00
tttcccacggcttttgtacctggttgccaattctgcctccacaggaagttgtcgctcagcctcttcttccactggccctgagcgtacttggcaaagtccaattgcccggaggtaagttcctccccagagttcctgtcttcaagcatcacctcttgctgctctcaccatct

SEQ ID NO: 26755 - DNA, 140 bp, Homo sapiens
  MAP TO AL079299.8; EXPRESSED IN BRAIN, SIGNAL = 1.1; EXPRESSED IN BONE MARROW, SIGNAL = 1.4; EXPRESSED IN BT474, SIGNAL = 1.3; EXPRESSED IN ADULT LIVER, SIGNAL = 0.95; EXPRESSED IN PLACENTA, SIGNAL = 0.94; EXPRESSED IN HBL100, SIGNAL = 1.1; NT HIT: AF185696.1, EVALUE 1.00e-06; EST_HUMAN HIT: AW052144.1, EVALUE 1.00e-06; SWISSPROT HIT: P22059, EVALUE 1.00e-11
actggcacgacctacagtgccacactgtccttactgcctctggacagcttcgagggctggcttctcaagtggaccaactatctgaagggctaccagcgccgctggttcgtgctgggcaatggtttgctctcttactacag

SEQ ID NO: 26756 - DNA, 286 bp, Homo sapiens
  MAP TO AC007882.2; EXPRESSED IN BONE MARROW, SIGNAL =   1; EXPRESSED IN BRAIN, SIGNAL = 1.6; EXPRESSED IN BT474, SIGNAL = 1.1; EXPRESSED IN FETAL LIVER, SIGNAL = 0.94; EXPRESSED IN PLACENTA, SIGNAL = 0.98; EXPRESSED IN HBL100, SIGNAL = 1.1; EXPRESSED IN HELA, SIGNAL = 1.4; NT HIT: gi7706742, EVALUE 0.00e+00; EST_HUMAN HIT: AA397608.1, EVALUE 0.00e+00; SWISSPROT HIT: Q63244, EVALUE 2.40e-01
agaggccaccgaccctttgttgatctgcaaggtatcaaacttcgaacatgacaagcataaaagcctgcagctcgaggagacagggtgtcacaattaccaggtgaaactagccgccctagctccaatgtctcttcagcaggagagatttggaaacagcaaggctcctctccgcagggcgaaactgctgggctgcgaaaggcgggacagggagcggaaccgtcttcaaccgttccgggagttctggtgtctggtccgctcccggctgttggtcgcagggcagagggtc

SEQ ID NO: 26757 - DNA, 181 bp, Homo sapiens
  MAP TO AC007638.1; EXPRESSED IN BRAIN, SIGNAL = 1.3; EXPRESSED IN ADULT LIVER, SIGNAL =   1; EST_HUMAN HIT: AV656051.1, EVALUE 5.00e-14; SWISSPROT HIT: Q16534, EVALUE 3.00e-24; NT HIT: gi11427779, EVALUE 3.00e-94
  unsure 91
tcatgggctgtggcttcagttcttcctcagagaacttgcgtttgcgagggtcaaacatttcctggccagggatgctggaaagggcaagatnctgctgggtctggctcataacccactgggacctggatggtgtcaggatcaatgggacttggtgtattgcggtttgctggcaacagctgac

SEQ ID NO: 26758 - DNA, 211 bp, Homo sapiens
  MAP TO AC006020.2; EXPRESSED IN BRAIN, SIGNAL = 1.1; NT HIT: gi4506328, EVALUE 1.00e-75; SWISSPROT HIT: P23471, EVALUE 6.00e-22; EST_HUMAN HIT: BF343893.1, EVALUE 2.00e-75
caatatgtcttcattcatgatacactggttgaggccatacttagtaaagaaactgaggtgctggacagtcatattcatgcctatgttaatgcactcctcattcctggaccagcaggcaaaacaaagctagagaaacaattccaggtgagtcctcttggaagcctcttggatgtcactacagaactgaatgtccctgcatcttctcatttga

SEQ ID NO: 26759 - DNA, 210 bp, Homo sapiens
  MAP TO AC006318.2; EXPRESSED IN HELA, SIGNAL = 0.94; EXPRESSED IN PLACENTA, SIGNAL = 1.1; EXPRESSED IN BRAIN, SIGNAL = 0.96; EST_HUMAN HIT: BF309084.1, EVALUE 6.00e-88; SWISSPROT HIT: Q80941, EVALUE 2.20e+00; NT HIT: AB007902.1, EVALUE 1.00e-115
tctgagtgccttcggcattttctttctcttcccaaggtgctggcagagattgcggtcattttctcgatctgagctgtagtggtgtgggtggctgagtctgctcttctttgaatgaaaggacaagccattggtaagtgcttctcgtttcttcttggtcaggggcgtctggcgtttctccacacgttcctgaggcttaagtgctacatcttt

SEQ ID NO: 26760 - DNA, 694 bp, Homo sapiens
  MAP TO AC010150.2; EXPRESSED IN HBL100, SIGNAL = 1.8; EXPRESSED IN HELA, SIGNAL = 1.7; EXPRESSED IN LUNG, SIGNAL = 1.2; EXPRESSED IN BRAIN, SIGNAL =   1; EXPRESSED IN ADULT LIVER, SIGNAL = 1.6; EXPRESSED IN BT474, SIGNAL = 1.9; EXPRESSED IN PLACENTA, SIGNAL = 1.5; EXPRESSED IN BONE MARROW, SIGNAL = 1.4; SWISSPROT HIT: P45386, EVALUE 6.00e-04; EST_HUMAN HIT: BE072624.1, EVALUE 0.00e+00; NT HIT: U37055.1, EVALUE 6.90e+00
taagaaattgacagcttctcccagtgatcccaaagtaaagaaaaccccagctgaacaaccaaaatccatgcctgtgtcagaggcctctcttatcagaatagttccagtagtctcccagtcagagtgtaaagaagaagcattgcaaatgtcatcaccaggcagaaaagaagagtgtgaaagccaaggtgaagtgcagccgaacttctccacatcttcagagcccctgctttcctcagctctcaatacacatgagcttagcagcattcttcccatcaagtgcccaaaggatgaggatctcttggagcagaagccagtcacctctgctgaacaggaatctgagaagaaccatctcaccacagcttctaattataacaaaagtgaaagccaagaatctttagttacatcgccaagcaaacccaagagtcctggggttgaaaaaccaatagtgaagcccacagcaggagcgggtccacaggagactaatatgaaagaacctctagcaactcttgttgatcagagcccagaaagcctcaagaggaagtcttccctcacccaagaagaggcccctgtgagctgggagaagaggccacgtgtcactgagaatcgccagcaccagcagccatttcaggtctcaccacagccctttctcaatagaggggacagaatccaggtgcgaaaagtaccacctctcaag

SEQ ID NO: 26761 - DNA, 291 bp, Homo sapiens
  MAP TO Z95114.19; EXPRESSED IN BRAIN, SIGNAL = 1.8; EXPRESSED IN BONE MARROW, SIGNAL = 1.1; EXPRESSED IN ADULT LIVER, SIGNAL = 0.94; EXPRESSED IN BT474, SIGNAL = 0.97; SWISSPROT HIT: Q02817, EVALUE 7.50e-01; NT HIT: AJ251973.1, EVALUE 3.80e-02; EST_HUMAN HIT: AW886784.1, EVALUE 1.80e-01
aactgactccacggctgttctgcggttggccccagtccctgctgctccccagaactcctctgtttccccaacagggttgggtgtgtggtaccaagcaaagggcaccgtgcccgtggagccaggatgtacagcagccccagcaacatctccaggtctagggcaaacagtgtgtgtctgagaagagggaagacatcaactggtgagagtcccagtgaccatgacctctttcccttctcttaccagtctccaaaacacaacaaaggaagggtgcatgaatttgtagctaacatt

SEQ ID NO: 26762 - DNA, 164 bp, Homo sapiens
  MAP TO Z98752.9; EXPRESSED IN BT474, SIGNAL = 1.1; EXPRESSED IN ADULT LIVER, SIGNAL =   1; EXPRESSED IN HELA, SIGNAL = 2.4; EXPRESSED IN PLACENTA, SIGNAL = 0.99; EXPRESSED IN BRAIN, SIGNAL = 1.6; EXPRESSED IN BONE MARROW, SIGNAL = 1.1; EXPRESSED IN LUNG, SIGNAL =   3; NT HIT: gi11420674, EVALUE 1.00e-87; EST_HUMAN HIT: AA380168.1, EVALUE 2.00e-70; SWISSPROT HIT: Q01538, EVALUE 3.00e-10
agcctgagaggttcttcttgcgggctgaggcctccgagtcagacagctccgctttcagccggctctggttcctctcagccagtgggcagcctgagaggcaatggtgagctgtgaacttgcctgtgacatggccagagccgtcgcaaccaggagtggggcacttc

SEQ ID NO: 26763 - DNA, 301 bp, Homo sapiens
  MAP TO AL035698.12; EXPRESSED IN BT474, SIGNAL =   1; EXPRESSED IN BRAIN, SIGNAL = 1.5; EST_HUMAN HIT: R19103.1, EVALUE 2.00e-05; SWISSPROT HIT: P23385, EVALUE 1.00e-43; NT HIT: L76627.1, EVALUE 0.00e+00
gctgtgagcccattcctgtgcgctatcttgagtggagcaacatcgaatccattatagccatcgccttttcatgcctgggaatccttgttaccttgtttgtcaccctaatctttgtactgtaccgggacacaccagtggtcaaatcctccagtcgggagctctgctacatcatcctagctggcatcttccttggttatgtgtgcccattcactctcattgccaaacctactaccacctcctgctacctccagcgcctcttggttggcctctcctctgcgatgtgctactctgctttagtgac

SEQ ID NO: 26764 - DNA, 119 bp, Homo sapiens
  MAP TO AC007666.12; EXPRESSED IN HBL100, SIGNAL = 0.95; EXPRESSED IN BONE MARROW, SIGNAL = 0.91; EXPRESSED IN BRAIN, SIGNAL = 1.6; EXPRESSED IN ADULT LIVER, SIGNAL = 1.1; EXPRESSED IN FETAL LIVER, SIGNAL = 0.93; EST_HUMAN HIT: AA663839.1, EVALUE 9.00e-57; NT HIT: AY008285.1, EVALUE 6.00e-61; SWISSPROT HIT: Q99297, EVALUE 9.10e-02
gatgcagcggaacctgaagatggagatgcttgccgggtgtggggctgggatgtgccaggtcgtggtgacctgtcccatggaaatgctcaagattcagctgcaggatgctggacgcctgg

SEQ ID NO: 26765 - DNA, 94 bp, Homo sapiens
  MAP TO AL049697.8; EXPRESSED IN BT474, SIGNAL = 2.3; EXPRESSED IN LUNG, SIGNAL = 5.3; EXPRESSED IN BRAIN, SIGNAL = 0.9; EST_HUMAN HIT: AA460853.1, EVALUE 5.00e-46; NT HIT: gi11419179, EVALUE 3.00e-46; SWISSPROT HIT: O08520, EVALUE 3.00e-10
ctacacttctgttgtggttaagtacacagacaacatcatgaaaggcttttctgcagcagcggccattgtcctttccaccattgcttcagtaatg

SEQ ID NO: 26766 - DNA, 200 bp, Homo sapiens
  MAP TO AF186192.1; EXPRESSED IN FETAL LIVER, SIGNAL =  18; EXPRESSED IN BONE MARROW, SIGNAL = 1.1; EXPRESSED IN BRAIN, SIGNAL = 1.2; NT HIT: AE001931.1, EVALUE 4.00e-01; SWISSPROT HIT: Q63259, EVALUE 4.40e-01
tcagtattggccccactcacagatgttctttcctgggttgggccagctccttttggacacttttgagatccacctcgggcccgtctgcgtttgcgatgctgcttttctgtggctccttccggctactgggactgttcccttctggcattgccttcggcagcacttcgaggaactcagcctccagggcctcctgttgtcct

SEQ ID NO: 26767 - DNA, 81 bp, Homo sapiens
  MAP TO AP000425.1; EXPRESSED IN PLACENTA, SIGNAL = 0.96; EXPRESSED IN HELA, SIGNAL = 1.2; EXPRESSED IN LUNG, SIGNAL = 4.1; EXPRESSED IN BRAIN, SIGNAL = 0.96; EXPRESSED IN BONE MARROW, SIGNAL = 0.93; EXPRESSED IN ADULT LIVER, SIGNAL = 0.99; EXPRESSED IN BT474, SIGNAL = 1.2; SWISSPROT HIT: Q08960, EVALUE 6.00e-03; NT HIT: gi8922751, EVALUE 8.00e-34; EST_HUMAN HIT: AA492014.1, EVALUE 1.00e-33
agcctgaagaaaatcgaccgcccactcttcaaggatttctggcagcaattccttgacagtttaaaagccttggcagtcaag

SEQ ID NO: 26768 - DNA, 111 bp, Homo sapiens
  MAP TO AL109954.10; EXPRESSED IN BT474, SIGNAL = 1.1; EXPRESSED IN LUNG, SIGNAL = 0.9; EXPRESSED IN BRAIN, SIGNAL = 2.7; EST_HUMAN HIT: BF207586.1, EVALUE 4.00e-56; NT HIT: L04193.1, EVALUE 1.30e-02; SWISSPROT HIT: P81126, EVALUE 1.00e-06
ctgaccaccatgttgcttcgcatcaaaaagtccatccaaggggatggagaaggagatggagacctaaaatgaaatgtttttgtctttgtggcatgcagctaactcctcttt

SEQ ID NO: 26769 - DNA, 205 bp, Homo sapiens
  MAP TO AL035703.17; EXPRESSED IN BRAIN, SIGNAL = 1.1; EXPRESSED IN BONE MARROW, SIGNAL =   1; EXPRESSED IN BT474, SIGNAL = 1.5; EXPRESSED IN ADULT LIVER, SIGNAL = 1.1; EXPRESSED IN HBL100, SIGNAL = 1.2; EXPRESSED IN HELA, SIGNAL = 2.1; EXPRESSED IN PLACENTA, SIGNAL = 1.2; EST_HUMAN HIT: BE964974.2, EVALUE 6.00e-60; NT HIT: AL161540.2, EVALUE 2.60e-02; SWISSPROT HIT: P18714, EVALUE 1.70e-02
ctgaggcatgggcaaattctctgccacagaggtcacatgtcactggaagcctcttcttcttcttcttgggggcatcgggctctccacctgcaccatgggcctccagctgatgtttgtccagctctttctttgaatccttggtctcactgcactccttacactgcacctgtttgctcttagccacccggcagcgcttcatgtgcac

SEQ ID NO: 26770 - DNA, 212 bp, Homo sapiens; identical to SEQ ID NO: 21745
  MAP TO AL080274.10; EXPRESSED IN HBL100, SIGNAL = 1.1; EXPRESSED IN BRAIN, SIGNAL = 1.7; EXPRESSED IN BONE MARROW, SIGNAL = 1.4; EXPRESSED IN FETAL LIVER, SIGNAL = 1.2; EXPRESSED IN BT474, SIGNAL = 1.2; EST_HUMAN HIT: AV731704.1, EVALUE 1.20e-02; NT HIT: Y15839.1, EVALUE 4.30e-01

SEQ ID NO: 26771 - DNA, 215 bp, Homo sapiens
  MAP TO AC009946.1; EXPRESSED IN BONE MARROW, SIGNAL = 1.1; EXPRESSED IN BRAIN, SIGNAL = 1.4; EXPRESSED IN BT474, SIGNAL = 0.98; NT HIT: AE001918.1, EVALUE 7.90e+00; EST_HUMAN HIT: AI766925.1, EVALUE 1.00e-112; SWISSPROT HIT: Q9Z9H0, EVALUE 1.20e+00
cacttacgaggaagccgtgagcttcccagtggccgaggggcccccaacaccacctgcataccctacggaggaagccctggagccaagtggatcgagggatgccctgctcagcacccagcccgcctggcctccacccagctatgagagcatcagccttgctcttgatgccgtttctgcggagacgacaccgagtgccacacgctcctgctcaggcc

SEQ ID NO: 26772 - DNA, 200 bp, Homo sapiens
  MAP TO AL031848.11; EXPRESSED IN BT474, SIGNAL = 1.9; EXPRESSED IN FETAL LIVER, SIGNAL = 1.1; EXPRESSED IN HBL100, SIGNAL = 1.1; EXPRESSED IN BRAIN, SIGNAL =   1; EXPRESSED IN BONE MARROW, SIGNAL = 1.2; SWISSPROT HIT: P39653, EVALUE 3.70e+00; NT HIT: gi9665228, EVALUE 8.00e-46
cacatggagggtgctggcccttgatgctggagtggctggaggagcaggagtcgtagttggagagggtgctggtaggcgagctgaggtcaaagttcagcggctggaccgacaccgtggtattgggtgaggacatgcctgaatccggctgcttagcctccagctctgcggatggatcccgggaaagcacgcggtgctccacg

SEQ ID NO: 26773 - DNA, 203 bp, Homo sapiens
  MAP TO AL080275.8; EXPRESSED IN BONE MARROW, SIGNAL = 1.5; EXPRESSED IN LUNG, SIGNAL = 1.2; EXPRESSED IN BRAIN, SIGNAL =   1; EST_HUMAN HIT: AU120003.1, EVALUE 1.00e-33; NT HIT: AF036126.1, EVALUE 1.00e-111
agtgacagtaactccggggactttgtttttgctttccagggttctctgggtagccctggcctccctggcttgcctgggccccctggacttcctggaatgaaaggtgacagggtaagagctccagcactccagaaggttctttatttggaagggtgatttctaccatgttgagaaacaaagcttgcttttggccctgtggagaa

SEQ ID NO: 26774 - DNA, 146 bp, Homo sapiens
  MAP TO AL034582.10; EXPRESSED IN BRAIN, SIGNAL = 1.3; EXPRESSED IN BONE MARROW, SIGNAL = 0.9; EXPRESSED IN LUNG, SIGNAL = 6.3; EXPRESSED IN BT474, SIGNAL = 1.1; EXPRESSED IN HBL100, SIGNAL = 1.8; SWISSPROT HIT: P06719, EVALUE 3.90e+00; NT HIT: gi11422946, EVALUE 2.00e-67; EST_HUMAN HIT: AA513225.1, EVALUE 2.00e-14
gctccatgacagtggtgacagtcaaggccgtggctgggatgcttgtcttgtccattcaagggaacctgcagcttgactaccccatcttctacgtgatgttcgtgtgcatggtgcaaccgccgtctatcaggctgcgtgagttacaa

SEQ ID NO: 26775 - DNA, 173 bp, Homo sapiens
  MAP TO AL080317.11; EXPRESSED IN LUNG, SIGNAL = 1.6; EXPRESSED IN BRAIN, SIGNAL = 0.98; EXPRESSED IN BT474, SIGNAL = 1.2; EXPRESSED IN PLACENTA, SIGNAL = 1.2; EXPRESSED IN HBL100, SIGNAL = 0.93; EXPRESSED IN HELA, SIGNAL = 1.2; SWISSPROT HIT: Q61493, EVALUE 1.00e-28; NT HIT: AF179429.1, EVALUE 5.00e-93; EST_HUMAN HIT: AW389921.1, EVALUE 1.00e-01
tttcccaagttctccacatggccaaggcaggtggaaaagcagtagttatatgcaatcacaatagaaggataaagtgattggaaatccaaaacgagaacagagttgctatagaagcgggattcaggctccataattagaggaacacactgtggggctctcatctgggatctttg

SEQ ID NO: 26776 - DNA, 132 bp, Homo sapiens
  MAP TO AC008014.5; EXPRESSED IN BRAIN, SIGNAL = 3.2; EXPRESSED IN ADULT LIVER, SIGNAL = 1.2; NT HIT: D16249.1, EVALUE 4.60e+00; SWISSPROT HIT: P27448, EVALUE 1.00e-05; EST_HUMAN HIT: BF677977.1, EVALUE 6.80e+00
ctaaatacaaggtgtccatggtgttgatcacttgaaagagcttgatgacattgggatgatttagagccttcataatgctgatctctcactgtacactctggaggctggaggatctctgctgacctttcaaga

SEQ ID NO: 26777 - DNA, 132 bp, Homo sapiens
  MAP TO AC010899.1; EXPRESSED IN BRAIN, SIGNAL = 1.1; EST_HUMAN HIT: AI913604.1, EVALUE 2.00e-68; NT HIT: gi11430117, EVALUE 1.00e-68; SWISSPROT HIT: P54764, EVALUE 4.00e-19
aagctcccctgaattctctgctgtggtatcagtgggcgattggctccaggccattaaaatggaccggtataaggataacttcacagctgctggttataccacactagaggctgtggtgcacgtgaaccagga

SEQ ID NO: 26778 - DNA, 139 bp, Homo sapiens
  MAP TO AC011282.1; EXPRESSED IN ADULT LIVER, SIGNAL = 0.99; EXPRESSED IN BT474, SIGNAL =   1; EXPRESSED IN FETAL LIVER, SIGNAL = 1.1; EXPRESSED IN HELA, SIGNAL = 0.93; EXPRESSED IN HBL100, SIGNAL = 1.4; EXPRESSED IN LUNG, SIGNAL = 0.9; EXPRESSED IN BONE MARROW, SIGNAL = 1.3; EXPRESSED IN BRAIN, SIGNAL = 1.3; NT HIT: AB017602.1, EVALUE 1.10e+00; SWISSPROT HIT: P06798, EVALUE 3.50e-01
tcagtgggggctgctctgctggagttctccagtggccaggtgcaggttgccagtgaaggtgttatgatgtgggctcacaagaagcaccttgattgggcatcgaaggctgcattgcaagagggcatgcccgtgctggagc

SEQ ID NO: 26779 - DNA, 140 bp, Homo sapiens
  MAP TO AF186190.1; EXPRESSED IN FETAL LIVER, SIGNAL = 4.6; EXPRESSED IN ADULT LIVER, SIGNAL = 1.1; EXPRESSED IN BRAIN, SIGNAL = 0.99; EXPRESSED IN BONE MARROW, SIGNAL =   1; EST_HUMAN HIT: BE794749.1, EVALUE 7.30e+00; NT HIT: AJ277662.1, EVALUE 1.20e+00; SWISSPROT HIT: Q09463, EVALUE 1.70e+00
cacgtataggcatagtgcaagcttcagcctcacagttagccctaacagaaggttggtgatgcagacgcacagacacacaggcacacgcatgcgcgtgaacacacatacacaccccacggtgcaggactttcggctgcctg

SEQ ID NO: 26780 - DNA, 461 bp, Homo sapiens
  MAP TO AL118523.3; EXPRESSED IN FETAL LIVER, SIGNAL = 0.89; EXPRESSED IN ADULT LIVER, SIGNAL = 1.1; EXPRESSED IN PLACENTA, SIGNAL = 1.3; EXPRESSED IN HELA, SIGNAL = 1.6; EXPRESSED IN BONE MARROW, SIGNAL = 1.3; EXPRESSED IN BRAIN, SIGNAL = 1.2; SWISSPROT HIT: P28887, EVALUE 2.70e+00; EST_HUMAN HIT: AI272691.1, EVALUE 6.70e+00; NT HIT: AJ003108.1, EVALUE 9.80e-01
attgactgactgttttatgaagtattgttctgagaatttctcattgctatgccctccctgtctaagtcttggtttcatacttttacttgttaaaatcccatccatgctatcatatcatattcttcatggcattttctctgattcgtcgccagatgttaattctccattcctagaaactctgcagtacataaatgtatgcccttatcatattctttcttgtaatatgattgcctccacacacataatgaggcctcctctgtgtacctaccatgagaattccagtgtgaaatttcagttgaggttgtccaagattctatttaagcagaaaccctataagccttgtggaaatgatgatgatggtgatgatgatggtgatggtgacgatgctggtgatggtgatgatgatggagacagagagagagggagcgagagagaaaggaaaaggatatttgtttccctat

SEQ ID NO: 26781 - DNA, 247 bp, Homo sapiens
  MAP TO AC011425.1; EXPRESSED IN BT474, SIGNAL = 1.3; EXPRESSED IN HELA, SIGNAL = 1.9; EXPRESSED IN PLACENTA, SIGNAL = 1.1; EXPRESSED IN HBL100, SIGNAL = 3.1; EXPRESSED IN BRAIN, SIGNAL = 2.1; NT HIT: gi11417331, EVALUE 1.00e-115; EST_HUMAN HIT: AA236371.1, EVALUE 1.00e-106; SWISSPROT HIT: P24054, EVALUE 1.00e-03
catcctgcccatctgcaaggactccctgggctggatgttcaacaagttggacatgaactatgacctcctgcttgacccttcagagatcaatgccatctacctggataagtacgagccctgtatcaagcctcttttcaactcgtgtgactccttcaaggatggcaagctttctaacaatgagtggtgctactgcttccagaagcctggaggtaaggtgggatggagggttggggtccctagcccaggg

SEQ ID NO: 26782 - DNA, 398 bp, Homo sapiens; identical to SEQ ID NO: 17624
  MAP TO AP000181.1; EXPRESSED IN BT474, SIGNAL =   1; EXPRESSED IN HELA, SIGNAL = 1.5; EXPRESSED IN PLACENTA, SIGNAL = 1.3; EXPRESSED IN BRAIN, SIGNAL = 1.6; SWISSPROT HIT: O43426, EVALUE 2.00e-70; EST_HUMAN HIT: AU131904.1, EVALUE 1.00e-116; NT HIT: AB020717.1, EVALUE 0.00e+00

SEQ ID NO: 26783 - DNA, 493 bp, Homo sapiens
  MAP TO Z99716.4; EXPRESSED IN PLACENTA, SIGNAL = 1.2; EXPRESSED IN BRAIN, SIGNAL = 1.4; EXPRESSED IN BT474, SIGNAL = 1.1; EXPRESSED IN HBL100, SIGNAL = 1.6; EXPRESSED IN HELA, SIGNAL = 0.92; SWISSPROT HIT: P25342, EVALUE 1.00e-04; NT HIT: AF285109.1, EVALUE 1.00e-105; EST_HUMAN HIT: BE891766.1, EVALUE 1.00e-105
attctgtagcaagagaaaaataccatggtttccatgtgacctctgccgtcctcctgatcacccctccgacccctcccaccttggctctgcagggctcccagagaccaggacggacgcagccatgtcagagctggtgcctgagcccaggcctaagccagcggtgcccatgaagcccatgagcatcaactccaacctgctgggctacatcggcatcgacaccatcatcgagcagatgcgcaagaagaccatgaagaccggtttcgacttcaacatcatggtcgttggtacggaaggctgtggggctgctgcaggcctggtggcgggcagcaccaaggatcccatttctttcccccaaatggctgtgaccctggctcttctaagatgagctgtttgtagaagggagaatttcaccatgctgatcacaaaggcctgacccctgtctccccttaagactagctgacccaggggtaggagcttcaggtggatgccagcc

SEQ ID NO: 26784 - DNA, 465 bp, Homo sapiens
  MAP TO AL035448.28; EXPRESSED IN PLACENTA, SIGNAL = 2.2; EXPRESSED IN BRAIN, SIGNAL = 1.9; EXPRESSED IN BT474, SIGNAL = 3.7; EXPRESSED IN HBL100, SIGNAL = 3.1; EXPRESSED IN HELA, SIGNAL =  20; NT HIT: gi11421836, EVALUE 0.00e+00; EST_HUMAN HIT: AI834229.1, EVALUE 1.00e-123; SWISSPROT HIT: Q9JWD6, EVALUE 1.30e+00
agtcactttgccacactgaacttctgtcatgccttcttgtccaaagtagctgagttcattgccatccagtatcacactggctgtgtagaaggtgtctggctcgatctgcactgggtattcaaaccatacgggaaaggtattgctggacccatctgagaagtacttgctcaagttctgccccaggacaacgccctgccgcttaagttcaatcttggcactgtattctgcagaaccacagctggagccatacagcccaaagccagcaatgaacactcttttatcaactgcaaactggatgctgtcacagcgaccacgatagcgccattggttgcttcgataggcacacgactggaaacggtgacagcgctgggggacaaggcccttacgggctttactcacaaactgaagctcaggctttttggctgcagtataccagaggaagatgtcgttggtctcattgagagt

SEQ ID NO: 26785 - DNA, 534 bp, Homo sapiens
  MAP TO AC008116.8; EXPRESSED IN BRAIN, SIGNAL = 1.2; EXPRESSED IN BONE MARROW, SIGNAL = 1.4; EXPRESSED IN BT474, SIGNAL = 1.9; EXPRESSED IN ADULT LIVER, SIGNAL = 1.6; EXPRESSED IN HBL100, SIGNAL = 2.2; EXPRESSED IN HELA, SIGNAL = 3.6; NT HIT: gi11434837, EVALUE 0.00e+00; EST_HUMAN HIT: AW504330.1, EVALUE 0.00e+00; SWISSPROT HIT: Q93075, EVALUE 6.00e-99
gttgattccaaagatagttctcataactccacaaactctgaatttgcagctgaagctgagggtcagaatgatacaattgaggaacccaacaaggtccagaaaaggaagagggatagacttcgagaccagggctccacaatgatctacctgaaggctatccagggcatcctggggaaatcgatgccaaaaaggaagggagaggctgccactcgggcaaaaccaagcgcagcagagcatcccagccatggagaaggaccagccaggagtgaaggaccagccaagactgcagaaggagcagccaggagtgtcacagtcactgctgctcagaaggagaaagacgcaaccccagagatcagcatggaggaggataagacagtgccagagaggagcagcttctatgacaggagagtagttatagaccctcaagagaaacccagtgaggagccccttggggaccgaaggactgtcattgacaaatgctctccacccctagagttcttggatgactctgactctcatttagaaatccaaaag

SEQ ID NO: 26786 - DNA, 229 bp, Homo sapiens
  MAP TO AL117343.1; EXPRESSED IN BONE MARROW, SIGNAL = 0.91; EXPRESSED IN BT474, SIGNAL = 1.4; EXPRESSED IN HBL100, SIGNAL = 1.2; EXPRESSED IN HELA, SIGNAL = 1.6; EXPRESSED IN LUNG, SIGNAL = 2.2; EXPRESSED IN BRAIN, SIGNAL = 1.2; NT HIT: gi8923056, EVALUE 1.00e-126; EST_HUMAN HIT: AW844171.1, EVALUE 2.00e-99; SWISSPROT HIT: P46100, EVALUE 1.20e-01
ctttcatctctgccagcagaccactgcccatcacctggaccccatacctccgccctgcctgtgggctgctcttgctgtcactccgttccaccttccctatttcttccccttgactctcttcaaaggagtcaggtgtttttatctcctctatccgttcagaattgccattgtgctcggcggcctttgtgtccttcctgggacagtccacaggtggacttctgactgcccc

SEQ ID NO: 26787 - DNA, 238 bp, Homo sapiens
  MAP TO Z82188.2; EXPRESSED IN HELA, SIGNAL =   4; EXPRESSED IN PLACENTA, SIGNAL = 4.8; EXPRESSED IN HBL100, SIGNAL = 2.2; EXPRESSED IN BONE MARROW, SIGNAL = 1.8; EXPRESSED IN BRAIN, SIGNAL = 1.7; EXPRESSED IN ADULT LIVER, SIGNAL = 1.2; EXPRESSED IN BT474, SIGNAL =   3; EXPRESSED IN FETAL LIVER, SIGNAL =   1; EST_HUMAN HIT: AA011278.1, EVALUE 1.00e-125; SWISSPROT HIT: P31424, EVALUE 1.30e-01; NT HIT: gi11424111, EVALUE 2.20e+00
ccttcaggatggtgatattaatgtagggtctgatctcaggcagggcgtgggggcggccggaggaagaggctgaggatacatgggcaggatccagggggtcctcagagtcacagcaccgttggcagccgctggccacagctctgtcaaaggtgagctccaccatagggatctcacacatcaggagaaagagcaggagcgctgcccagacgggacccagggcggctgtccccatggtgac

SEQ ID NO: 26788 - DNA, 862 bp, Homo sapiens
  MAP TO AL049870.1; EXPRESSED IN BT474, SIGNAL = 1.6; EXPRESSED IN HELA, SIGNAL = 1.7; EXPRESSED IN HBL100, SIGNAL = 1.2; EXPRESSED IN BONE MARROW, SIGNAL = 0.96; EXPRESSED IN BRAIN, SIGNAL = 0.98; EXPRESSED IN ADULT LIVER, SIGNAL = 0.98; NT HIT: gi11434451, EVALUE 0.00e+00; EST_HUMAN HIT: AA456760.1, EVALUE 0.00e+00; SWISSPROT HIT: Q04652, EVALUE 3.00e-57
ctgcacaaagtactttgggagcacagcgaggtcgtgtcatcaagactgtctgatgagagagtctatgttcaggcataaagtggtactttagggcttcattcaaaagatgtttacaagtgcgatcatcacgaataagatgatttgcttcatatagtctagtgagaaacttaacactcaacaatggtaatcgtacactgtttagtaactgtgctaagtatttctggcgttcttgtacatcatacttgatccaagactctaatgcataaaaaacagtctcttcggtagctacattcaaacagtcattggaaacaatttcatccaagtcagcatgtgtaagctcaaaaaactcttcagtctggcaaacagcttcaaaattctggcatatgtatttagtggctgccaaataaaggtcacggcaaccatatgtttctgcaaaacgagaaattccaatacaattaccaggatcaagttggctttcaagaaatgcacaacattctttcaggacaagttttatctggagtaggtttgctgctggcaggagagattcaactgtgtcctgagaaataaaaacagtccctgtataggcatactccacaatggcctggagagcagtttcatcaatgcattgaaactcaacctcactgttctctttttcagaaaggtttccagtgaacatagctttgaaatacgggctgacgctggcaagtaccactttgtgagcatgaattttaacatcacctactcgaagaatgatgtcacagagttcgtgatgttggcgaagaagattcaagccctgcagaagttgttcagaatgcaagtgggttaagttagcaagcatgtaggtcggggatgtgtggtccat

SEQ ID NO: 26789 - DNA, 701 bp, Homo sapiens; identical to SEQ ID NO: 19757
  MAP TO AC009962.1; EXPRESSED IN BONE MARROW, SIGNAL =   1; EXPRESSED IN BT474, SIGNAL = 2.2; EXPRESSED IN HBL100, SIGNAL = 4.2; EXPRESSED IN BRAIN, SIGNAL = 1.5; EXPRESSED IN LUNG, SIGNAL = 1.5; EXPRESSED IN ADULT LIVER, SIGNAL = 1.9; EXPRESSED IN FETAL LIVER, SIGNAL = 0.94; EXPRESSED IN PLACENTA, SIGNAL =   4; EXPRESSED IN HELA, SIGNAL =  11; EST_HUMAN HIT: AW842451.1, EVALUE 1.00e-107; SWISSPROT HIT: P27476, EVALUE 4.00e-04

SEQ ID NO: 26790 - DNA, 284 bp, Homo sapiens
  MAP TO AL035415.20; EXPRESSED IN ADULT LIVER, SIGNAL = 1.2; EXPRESSED IN FETAL LIVER, SIGNAL = 0.87; EXPRESSED IN HELA, SIGNAL =   2; EXPRESSED IN BONE MARROW, SIGNAL = 0.95; EXPRESSED IN BRAIN, SIGNAL = 0.92; SWISSPROT HIT: Q09913, EVALUE 3.80e-01
aggtgagtttgttgtcatcggagtcacagaccaggctggaagttggccagtgatgttgtttcctggtcgtttggatttccagataagtgaaagttggatgcagacggtaaatgaattccatttggaagccctgtacctgcttgacagccagccaccagcttccaggaaggccctggaggatcttagggaggtgcatggtgattgactgaagaaggtttgcttgcattggagtgccaggtggtgaccctgaagaggacggagggttgggacaagctaattgtgga

SEQ ID NO: 26791 - DNA, 157 bp, Homo sapiens
  MAP TO AL118507.4; EXPRESSED IN BRAIN, SIGNAL = 1.3; EXPRESSED IN BONE MARROW, SIGNAL =   1; EXPRESSED IN ADULT LIVER, SIGNAL = 0.92; NT HIT: AF110434.1, EVALUE 4.80e+00; SWISSPROT HIT: P25391, EVALUE 1.30e+00; EST_HUMAN HIT: BF508461.1, EVALUE 8.30e+00
ttgcctctgctactgccacaagcagtacgtgccctggcaagaccatctgtccaagaagcataagtcacccacacctgagtacaccgtggcccactctagttgtgacagcctgaatcaggcgtgtccaacaaagtccggtctgaagacatgccccagc

SEQ ID NO: 26792 - DNA, 256 bp, Homo sapiens
  MAP TO AP000567.1; EXPRESSED IN ADULT LIVER, SIGNAL =   1; EXPRESSED IN BRAIN, SIGNAL = 1.4; EXPRESSED IN BONE MARROW, SIGNAL = 1.1; EST_HUMAN HIT: W76571.1, EVALUE 2.00e-38; NT HIT: gi6754491, EVALUE 4.00e-14; SWISSPROT HIT: P02438, EVALUE 3.00e-03
cctttgggggctacctgtactacccaggctcctaccccagcagcctggtctacagcactgccctctgctctcccagcacctgccagctgcgttcctctctctacagggactgtcagaagacctgctgggagcccgccagctgccagaaatcctgctaccgccccaggacctccatcctctgctgtccctgtcagacgacttgctctggatctctaggctttcggtccagcagctgtcgctcccagggctatggatc

SEQ ID NO: 26793 - DNA, 150 bp, Homo sapiens
  MAP TO AL121657.1; EXPRESSED IN ADULT LIVER, SIGNAL = 1.7; EXPRESSED IN BRAIN, SIGNAL = 1.2; NT HIT: D11456.2, EVALUE 1.00e-59; EST_HUMAN HIT: AI673575.1, EVALUE 4.00e-47; SWISSPROT HIT: P47989, EVALUE 2.00e-15
gccggaagagttccttcacgttattacctgtgtgctgagctcgagctgcacggatggcatctttgatggcaaagaagatagaagcagccaggaagaggggcggctctccaacagcctgaacacagacagggcacagggcaggggctcagg

SEQ ID NO: 26794 - DNA, 296 bp, Homo sapiens
  MAP TO AL118496.4; EXPRESSED IN PLACENTA, SIGNAL = 0.94; EXPRESSED IN FETAL LIVER, SIGNAL = 1.1; EXPRESSED IN ADULT LIVER, SIGNAL = 0.91; EXPRESSED IN HELA, SIGNAL = 4.6; EXPRESSED IN HBL100, SIGNAL = 1.2; EXPRESSED IN BRAIN, SIGNAL = 0.98; EXPRESSED IN LUNG, SIGNAL = 1.1; EXPRESSED IN BT474, SIGNAL = 4.4; SWISSPROT HIT: P33757, EVALUE 1.00e+00; NT HIT: gi8923620, EVALUE 0.00e+00; EST_HUMAN HIT: AL046082.2, EVALUE 0.00e+00
aacagcagtttgtaaactatgcaactggaaaactgaagatgattgctagctccacaagtgcaaactgcagccaccaagtaaaacaacaaatggctaccacttttgctcgcctgtgccaacaagctgatattactcaaagacaactggaagaagaaattgctagattacccaaagaaatagatcagtgggagaaaatacaaaacaatttaaagctcttaagaaataaagctgttcaacttgaatatgagctggagaattttactaagcagtttctaccttcacgcgatgaagaatcc

SEQ ID NO: 26795 - DNA, 282 bp, Homo sapiens
  MAP TO AL049762.19; EXPRESSED IN BRAIN, SIGNAL =   1; EXPRESSED IN LUNG, SIGNAL =  11; EXPRESSED IN ADULT LIVER, SIGNAL = 1.8; EST_HUMAN HIT: BE937632.1, EVALUE 0.00e+00; SWISSPROT HIT: P31512, EVALUE 4.00e-53; NT HIT: gi4503758, EVALUE 0.00e+00
ctacattgcctacatggatgatatcgctgcctgcataggcacaaagcccagcatcccacttctgttcctcaaggatcccagactagcttgggaagttttctttggaccatgtactccttatcagtaccgcctcatgggccctggaaaatgggatggagccagaaatgccatcctgacccagtgggacagaacattgaaacctttaaaaactcgaattgtccctgattcctccaagcctgcctccatgtcacattatttaaaagcctggggggcacctgtcct

SEQ ID NO: 26796 - DNA, 94 bp, Homo sapiens
  MAP TO AL118513.3; EXPRESSED IN HBL100, SIGNAL = 2.2; EXPRESSED IN HELA, SIGNAL = 2.3; EXPRESSED IN BRAIN, SIGNAL = 0.95; EXPRESSED IN ADULT LIVER, SIGNAL = 1.5; EXPRESSED IN BT474, SIGNAL = 7.5; NT HIT: gi11420464, EVALUE 3.00e-46; EST_HUMAN HIT: BE383469.1, EVALUE 4.00e-46
caccttgcagcctcttacattcttccataaccttcttaacttcggtgtcatccaaagaagaactcagagacttagacactattggtgtttctgt

SEQ ID NO: 26797 - DNA, 255 bp, Homo sapiens
  MAP TO AC009966.2; EXPRESSED IN BRAIN, SIGNAL = 1.3; EXPRESSED IN BONE MARROW, SIGNAL = 1.3; EXPRESSED IN BT474, SIGNAL = 0.95; EXPRESSED IN ADULT LIVER, SIGNAL = 1.4; SWISSPROT HIT: P06744, EVALUE 1.30e+00; NT HIT: M16370.1, EVALUE 3.90e-02; EST_HUMAN HIT: BF304391.1, EVALUE 3.60e+00
gctgcacggctctccccgggaaactgaacgggagccaaaccatcatgtggtgaacaaatgctgtgatcgctcaactgcagagctgctgctgcaccgtattaaaaaggtgacagcctctcctctgacccttgaaccatggaaatgggcagccaccagcccacccactcagaaagccccaatgctctgtcaccagcagaggcccaacacccactccgacgtcagaaaaagaaggtggcatggtgtagttgtcagaac

SEQ ID NO: 26798 - DNA, 190 bp, Homo sapiens
  MAP TO AL035251.11; EXPRESSED IN BRAIN, SIGNAL = 1.3; EXPRESSED IN BONE MARROW, SIGNAL = 1.2; SWISSPROT HIT: P06469, EVALUE 2.20e+00; NT HIT: U41846.1, EVALUE 3.80e-01
atggtgcacaaatgtgaatatcatctatattgtggagaagatgttagagcaaaagagaaattgctaaagtattcaacagagaaatatcaaatgcccctaaataaaatgtatagattggaggaagaaattttcagtgtgtgcagaaacgatgatgatgatgatgaggatgaggatgatggaggtgatgatg

SEQ ID NO: 26799 - DNA, 1068 bp, Homo sapiens
  MAP TO AC007383.2; EXPRESSED IN HELA, SIGNAL = 1.3; EXPRESSED IN PLACENTA, SIGNAL =   1; EXPRESSED IN BONE MARROW, SIGNAL =   1; EXPRESSED IN BRAIN, SIGNAL = 0.93; EST_HUMAN HIT: R63760.1, EVALUE 0.00e+00; NT HIT: gi11430581, EVALUE 0.00e+00; SWISSPROT HIT: P46091, EVALUE 0.00e+00
cagattcttggtttctgagttcctgagctgttcactcactgtgccagaacagctgacttcccacagtgtgtacttgagtatctcagcaactgaggaccggaagcgagcttggaacttcttactaattaggacataaaggatggggttcaagcaactattgaggaatgccaaaccagtggagagggggattccagcctgcatcacatggtgggaatagctattgtggtgaatggtgagctcccaaatgctaaacaggtgataaggagtccagcaaaccacaaaggccacaaccacaaccagaattgtccagaaatgcctactggagatcaggatgcttcgcttcttcaccttgaagatgagacacaagtagcaaatactcattgttagcaaagggaagagatagccaatgataaatttcacccaagtcagaacatggtgcctgatcaaagtgaggtcaggatcatgcttctgaaaattgttatagcaaagagtatgattattgaactccacagtgtcccggaagtacagggcaggaccgccaattagagaagccaaaagccagatgaatataatgacaatcagagagttcttgagggttcgatgccgatgagataagacaggatggatcaagtggatatagtggtccaggctgatcactgtcaggaaaaaaacactggcaaacatgttcaactgggcagtgaaggaattggctttgcacagccagatgccaaagggccagtggaaattcatggccacataggagatgtacaggggcagaaagagaagaaaaatgaaatccgcaatggctagattgaggaaccacagagtggtgactgtcttcttccacttgaaccccgtgaaccaaatgacgatggcatttcctggaattcccagaacaaaagccaaacaatataacaccagggagacccagtgaacaactcccagctggactttctcctccaaatcagactccagagagtaatagtctaggtcataggaatagttttcaaattcttcaaataatgtttcctccaaatcttccatgaccttgctaaatggagaatgaag

SEQ ID NO: 26800 - DNA, 180 bp, Homo sapiens
  MAP TO AC006452.2; EXPRESSED IN BRAIN, SIGNAL = 1.2; EXPRESSED IN BONE MARROW, SIGNAL = 1.3; EXPRESSED IN ADULT LIVER, SIGNAL = 1.3; SWISSPROT HIT: O15056, EVALUE 1.70e+00; NT HIT: L05435.1, EVALUE 3.60e-01
agcactcccatgacttccctgcccctgcccagtgcttcccacagcagcccttccacgccccttctggctcttcctccaaggaggtcccacacccccagggacaggttgattctgggaaactggaatccttcatctgtgtcatcactgggcaggcgagtcaacctggggaacagttattcc

SEQ ID NO: 26801 - DNA, 127 bp, Homo sapiens
  MAP TO AC006977.3; EXPRESSED IN FETAL LIVER, SIGNAL =   1; EXPRESSED IN ADULT LIVER, SIGNAL = 1.3; EXPRESSED IN HELA, SIGNAL = 1.2; EXPRESSED IN PLACENTA, SIGNAL = 1.6; EXPRESSED IN HBL100, SIGNAL = 1.4; EXPRESSED IN BONE MARROW, SIGNAL =   1; EXPRESSED IN BRAIN, SIGNAL =   1; EST_HUMAN HIT: Z41782.1, EVALUE 1.70e+00
ttagccaatctgcttcgcgatgaaccagttttgcttgaagcagacaaacccgattgtcaggagacagtgatgatttcttcagtctctgaggaagagttttcattttccccaattcgcaaaaaaagtc

SEQ ID NO: 26802 - DNA, 191 bp, Homo sapiens
  MAP TO AC004900.2; EXPRESSED IN BRAIN, SIGNAL = 1.1; EXPRESSED IN LUNG, SIGNAL = 4.3; EXPRESSED IN BT474, SIGNAL = 2.1; EXPRESSED IN ADULT LIVER, SIGNAL = 1.1; EXPRESSED IN HBL100, SIGNAL = 1.4; EXPRESSED IN HELA, SIGNAL = 4.1; NT HIT: gi11435053, EVALUE 1.00e-103; EST_HUMAN HIT: U74308.1, EVALUE 5.00e-81; SWISSPROT HIT: P46062, EVALUE 8.00e-07
caaccttttgacaatctctttgatctcctcaatgttaataaaactacccactgaaacacattctcctcgttcatagaagattttgaggctggtgtcagttgaagtccaccctatcacatctctacaggaacaattgaagaccacgctctttgtttcctgttcaatgagcacaatgaactcattggagatcc

SEQ ID NO: 26803 - DNA, 137 bp, Homo sapiens
  MAP TO AC005998.3; EXPRESSED IN ADULT LIVER, SIGNAL = 1.4; EXPRESSED IN HELA, SIGNAL = 1.1; EXPRESSED IN BRAIN, SIGNAL = 1.1; EXPRESSED IN BONE MARROW, SIGNAL =   1; EXPRESSED IN LUNG, SIGNAL = 2.4; EST_HUMAN HIT: BE222432.1, EVALUE 2.00e-14; NT HIT: AF260225.1, EVALUE 8.00e-08; SWISSPROT HIT: P40798, EVALUE 3.90e+00
ttatgacatgcccaaagaaaagaaaaagcttatcagtcagaaacacctgaatgtacatttacactgtgatatgctttggctctgtccccacccaaatctcacgttgagttgtaatccccataattgtgtcaagggtg

SEQ ID NO: 26804 - DNA, 370 bp, Homo sapiens
  MAP TO AL022328.21; EXPRESSED IN BRAIN, SIGNAL = 1.1; EXPRESSED IN ADULT LIVER, SIGNAL =   1; SWISSPROT HIT: P23249, EVALUE 5.00e-05
gctggagccccatggccctcgtgctgaaggccggggaacttactgaggcacctgcagactccggcgaggatcgccccacctggggggccatctgctgaactggagctgttggaactttcctgctccggagctgctactttccagagtgctgctgagctgttgctgactttataacatttgggtgttttccagcttctgaacatgtcaaattacaaggagaagttttcgactttgctgtggcttgaggagatttatgcagaaatggaactgaaagagtataacatgagcgggatcatcttaagaaggaatggggatctgctggttctggaggtcccagggttggccgaagggaggccttctctctacgcag

SEQ ID NO: 26805 - DNA, 115 bp, Homo sapiens
  MAP TO AL049822.17; EXPRESSED IN LUNG, SIGNAL = 5.2; EXPRESSED IN ADULT LIVER, SIGNAL = 0.96; EXPRESSED IN BRAIN, SIGNAL = 0.91; EST_HUMAN HIT: AA216140.1, EVALUE 2.60e-01; NT HIT: AF022814.1, EVALUE 2.10e-01
cttgggtaacttgtttcatcgaactccaccccagctgaaggagccaatgctgtcccaagagaaggatcgctatggggccctaactaacctcagtctctatgctgatgtgacccag

SEQ ID NO: 26806 - DNA, 245 bp, Homo sapiens
  MAP TO AL050317.9; EXPRESSED IN LUNG, SIGNAL = 3.4; EXPRESSED IN BRAIN, SIGNAL =   4; NT HIT: AF187974.1, EVALUE 2.00e-03; SWISSPROT HIT: P10388, EVALUE 1.40e-01; EST_HUMAN HIT: BF057619.1, EVALUE 8.70e-01
tgatgtctcaactgagtcccgaagacaagtgagagaggtggcagccagggaaggaagggcagtccatgcagaagaggcagcaggatggggtaagagctggtctcccttccaggatcagttttctccagggtagacgaggaagccgaggtttgcctggcagctgctcccagcgtcccattcatttgcagctccctgctcagggctcctcctggctgctcccggctgtgccatggacccctgctcat

SEQ ID NO: 26807 - DNA, 84 bp, Homo sapiens
  MAP TO AC007427.2; EXPRESSED IN BONE MARROW, SIGNAL =   1; EXPRESSED IN LUNG, SIGNAL = 8.7; EXPRESSED IN BRAIN, SIGNAL =   1; NT HIT: gi7305230, EVALUE 5.80e-01
  unsure 8
  unsure 36
  unsure 81
gccccttnctccgttcaagcagctgggctgccaccntgctctgctgccacctgccttctgctgtccacttgctgggttgcncat

SEQ ID NO: 26808 - DNA, 77 bp, Homo sapiens
  MAP TO AC009297.2; EXPRESSED IN FETAL LIVER, SIGNAL = 0.89; EXPRESSED IN ADULT LIVER, SIGNAL = 1.5; EXPRESSED IN LUNG, SIGNAL = 1.1; EXPRESSED IN BRAIN, SIGNAL =   1
aaggaggggaacagggagaggaaggagaaaggaaagtgggaggagaagagaaggtgaggaaaagggataggaggagg

SEQ ID NO: 26809 - DNA, 144 bp, Homo sapiens
  MAP TO AL031768.9; EXPRESSED IN BRAIN, SIGNAL = 1.3; EXPRESSED IN BONE MARROW, SIGNAL =   1; EXPRESSED IN ADULT LIVER, SIGNAL = 1.3; EST_HUMAN HIT: AA225095.1, EVALUE 2.10e-02; SWISSPROT HIT: P23683, EVALUE 4.50e-01
atgtcccctccttactggcctggaacctctcactcttcagggccaaacatgcccaggacagctgccacctctgggcactgtgggccagcgcagggcctggggcctccttggcatttgctgaatttaatcgagaagaaaacaaag

SEQ ID NO: 26810 - DNA, 91 bp, Homo sapiens
  MAP TO AL050320.16; EXPRESSED IN BRAIN, SIGNAL = 1.2; EXPRESSED IN ADULT LIVER, SIGNAL =   1; EXPRESSED IN HBL100, SIGNAL = 0.9; EST_HUMAN HIT: AA778969.1, EVALUE 7.60e-01; SWISSPROT HIT: P11978, EVALUE 4.10e+00
caagaagatccaggagaaggttgaggggatgttcagagaagtggaaaatgagagattgattatcatggaggaaaagcccgagaaggtccag

SEQ ID NO: 26811 - DNA, 178 bp, Homo sapiens
  MAP TO AL121654.1; EXPRESSED IN HBL100, SIGNAL = 0.98; EXPRESSED IN BONE MARROW, SIGNAL = 1.4; EXPRESSED IN BRAIN, SIGNAL = 1.4; EXPRESSED IN LUNG, SIGNAL = 0.91; EXPRESSED IN ADULT LIVER, SIGNAL = 1.8; EXPRESSED IN BT474, SIGNAL = 1.1; EXPRESSED IN FETAL LIVER, SIGNAL = 0.87; NT HIT: gi11429692, EVALUE 6.00e-62; EST_HUMAN HIT: BE928203.1, EVALUE 5.00e-57; SWISSPROT HIT: P47989, EVALUE 3.00e-17
cagcttggcgtcagggtgctgagccttgaggtccagcagctccttgagggttgaggcctgtatccacgtcacacgctccccttcaaatcgcagctgcttccgaggagtgtctttcagcctctgggaaatgcagttttcttactacaatgtctccctcttcctactgtcattcctctta

SEQ ID NO: 26812 - DNA, 151 bp, Homo sapiens
  MAP TO AL109659.17; EXPRESSED IN BT474, SIGNAL = 0.99; EXPRESSED IN FETAL LIVER, SIGNAL = 1.4; EXPRESSED IN BONE MARROW, SIGNAL =   1; EXPRESSED IN LUNG, SIGNAL = 4.8; EXPRESSED IN BRAIN, SIGNAL = 1.2; EXPRESSED IN ADULT LIVER, SIGNAL = 1.4; NT HIT: AJ133127.1, EVALUE 9.00e-14; EST_HUMAN HIT: AI672526.1, EVALUE 2.00e-09; SWISSPROT HIT: P11170, EVALUE 8.00e-05
ctgcccaccaccatcagctcctgctctgttgacttcctgcggaagcgctgccacacatcaatggtgaacagggtgctgctgctgttgaagatggaggtgagtgagctcatgagagcggccatgatcacggcaatcatcagcccccgcagac

SEQ ID NO: 26813 - DNA, 305 bp, Homo sapiens
  MAP TO AL031651.32; EXPRESSED IN LUNG, SIGNAL =   1; EXPRESSED IN BRAIN, SIGNAL = 1.2; EXPRESSED IN BONE MARROW, SIGNAL = 1.1; EXPRESSED IN ADULT LIVER, SIGNAL = 0.9; EXPRESSED IN FETAL LIVER, SIGNAL = 1.5; NT HIT: AF158969.1, EVALUE 2.00e-04; EST_HUMAN HIT: BF529379.1, EVALUE 1.00e-103; SWISSPROT HIT: P27692, EVALUE 7.30e-02
cagcagctgaagatgctctggggcccccagctccctccctaccacctcctgcttgaatcccctggaacctggcaggcatgctatcctggagcggaaaaccttgacacctagagccccaatcctgggctcaggccctgggggctcctcctccagggtggggcctctttctggggagcctgcagaagcttctggcaaggcagccttttcctcagtcagtgggctgggggcagtggctgggccagatgttttggtctgagttgttccagctgggaaaaagcaacaacaaagaaaaggacgttaagcag

SEQ ID NO: 26814 - DNA, 499 bp, Homo sapiens
  MAP TO AB020878.1; EXPRESSED IN HELA, SIGNAL = 0.91; EXPRESSED IN PLACENTA, SIGNAL =  33; EXPRESSED IN LUNG, SIGNAL = 1.5; EXPRESSED IN BRAIN, SIGNAL = 1.8; NT HIT: X68280.1, EVALUE 0.00e+00; SWISSPROT HIT: Q15031, EVALUE 1.30e+00; EST_HUMAN HIT: BF204131.1, EVALUE 0.00e+00
gtcatcctgatgttgaacagccctgtaagtccagtgtccgcacctggagcccaaattcagctgtcaacccacacacggttcctccagcctgccctgagcctcaaggctgctacctcgagctggagttcctctaccccttggtccctgagtctctgaccatttgggtgacctttgtctccactgactgggactctagtggagctgtcaatgacatcaaactgttggctgtcagtgggaagaacatctccctgggtcctcagaatgtcttctgtgatgtcccactgaccatcagactctgggacgtgggcgaggaggtgtatggcatccaaatctacacgctggatgagcacctggagatcgatgctgccatgttgacctccactgcagacaccccactctgtctacagtgtaagcccctgaagtataaggtggtccgggaccctcctctccagatggatgtggcctccatcctacatctcaataggaaattcgtagacat

SEQ ID NO: 26815 - DNA, 152 bp, Homo sapiens
  MAP TO AF161326.1; EXPRESSED IN LUNG, SIGNAL = 2.6; EXPRESSED IN BRAIN, SIGNAL = 1.5; EXPRESSED IN BONE MARROW, SIGNAL = 1.2; EXPRESSED IN ADULT LIVER, SIGNAL = 1.2; EXPRESSED IN BT474, SIGNAL = 1.1; EXPRESSED IN HELA, SIGNAL = 1.3; SWISSPROT HIT: P27118, EVALUE 1.00e-06; NT HIT: M33764.1, EVALUE 8.70e-02; EST_HUMAN HIT: AI632488.1, EVALUE 4.00e-56
ggggactggctggtctttgacaacatgggcgcctacactgtgggcatgggttcccccttttgggggacccaggcctgccacatcacctatgccatgtcccgggtggcctggtaagagggccctgctggaaaatgggggtatggggaggaact

SEQ ID NO: 26816 - DNA, 210 bp, Homo sapiens
  MAP TO AC004852.2; EXPRESSED IN BRAIN, SIGNAL = 0.97; EXPRESSED IN FETAL LIVER, SIGNAL = 1.2; SWISSPROT HIT: Q02934, EVALUE 9.50e-01
gagccaggtttccccactgtggaaaaacagagtccccagggaccgacacttttgcaacctggggctcaggaggtcccccataagccctcacaacagaggcctgcagacctacatggagagctatgtgggcagagacgttgcttaatcacagacagagtccttggagccttggatcccccagagctccagcatcagcagctgcagttccgg

SEQ ID NO: 26817 - DNA, 146 bp, Homo sapiens
  MAP TO AC010092.1; EXPRESSED IN HELA, SIGNAL = 1.5; EXPRESSED IN PLACENTA, SIGNAL = 1.8; EXPRESSED IN HBL100, SIGNAL = 1.1; EXPRESSED IN BONE MARROW, SIGNAL =   1; EXPRESSED IN LUNG, SIGNAL = 2.1; EXPRESSED IN BRAIN, SIGNAL = 0.98; EXPRESSED IN ADULT LIVER, SIGNAL = 1.2; EXPRESSED IN BT474, SIGNAL = 2.9; EST_HUMAN HIT: AA424123.1, EVALUE 8.00e-77; NT HIT: AF162666.1, EVALUE 5.00e-77; SWISSPROT HIT: P34314, EVALUE 2.00e-15
tgaaggcaatgacttggatttctatctgaagcaacacaagttaatgtcagagaaagaagctcggtctattgtaatgcagattgtaaatgcactaagatatctcaatgagatcaaaccccctattatacattatgatcttaagccag

SEQ ID NO: 26818 - DNA, 129 bp, Homo sapiens
  MAP TO AL109954.10; EXPRESSED IN BONE MARROW, SIGNAL = 0.94; EXPRESSED IN LUNG, SIGNAL = 1.5; EXPRESSED IN BRAIN, SIGNAL =   2; EXPRESSED IN BT474, SIGNAL =   1; EST_HUMAN HIT: AA805412.1, EVALUE 4.00e-60; SWISSPROT HIT: P28663, EVALUE 2.00e-17; NT HIT: AF139987.1, EVALUE 1.60e-02
tgtcttcttcagctgcaggaaacgcattttgtcaggcagccaagctccacatgcagcttcagagcaaacatgactctgctaccagctttgtggatgctggaaatgcttacaaaaaggcagatccccaag

SEQ ID NO: 26819 - DNA, 150 bp, Homo sapiens
  MAP TO AP000406.1; EXPRESSED IN PLACENTA, SIGNAL = 1.2; EXPRESSED IN BRAIN, SIGNAL = 1.1; EXPRESSED IN LUNG, SIGNAL = 2.9; EXPRESSED IN BT474, SIGNAL = 1.2; EXPRESSED IN FETAL LIVER, SIGNAL = 0.99; SWISSPROT HIT: P17599, EVALUE 1.40e+00; NT HIT: AB023154.1, EVALUE 2.00e-79; EST_HUMAN HIT: W69750.1, EVALUE 9.00e-73
ctttcttggcttgttttttggtggtcttgcggcttgtgttggaaacccctgggatggattttatttcactcttgctgacggggggtgggtgtaggaccagctttggtggcctggtgagacacacaggcagccccgctgcactcatgagga

SEQ ID NO: 26820 - DNA, 456 bp, Homo sapiens; identical to SEQ ID NO: 20413
  MAP TO AL096776.9; EXPRESSED IN BT474, SIGNAL = 2.6; EXPRESSED IN FETAL LIVER, SIGNAL = 1.2; EXPRESSED IN PLACENTA, SIGNAL = 2.3; EXPRESSED IN HBL100, SIGNAL = 1.3; EXPRESSED IN LUNG, SIGNAL = 0.93; EXPRESSED IN BRAIN, SIGNAL = 1.3; NT HIT: AB051826.1, EVALUE 0.00e+00; EST_HUMAN HIT: AW298134.1, EVALUE 0.00e+00; SWISSPROT HIT: P25763, EVALUE 7.00e-39

SEQ ID NO: 26821 - DNA, 177 bp, Homo sapiens
  MAP TO AP000103.1; EXPRESSED IN BONE MARROW, SIGNAL = 1.2; EXPRESSED IN FETAL LIVER, SIGNAL =  73; EXPRESSED IN ADULT LIVER, SIGNAL = 0.93; EXPRESSED IN BT474, SIGNAL =  36; EXPRESSED IN HBL100, SIGNAL = 1.1; EXPRESSED IN HELA, SIGNAL = 0.97; EXPRESSED IN BRAIN, SIGNAL = 1.4; EST_HUMAN HIT: T86350.1, EVALUE 6.10e-01; NT HIT: AF231919.1, EVALUE 5.00e-68; SWISSPROT HIT: Q14146, EVALUE 3.30e-01
aatccctcttggtcaccagggtgtacagggtctttttattcaaatcaaaatggctgcagacgtccctggcagcttccggaccctgggtcaccatggcggtcatcaggctcaggcaggcgcgagccaacctgcacagggaaccagaggaaatcggacacgtcaacaacagcagaagca

SEQ ID NO: 26822 - DNA, 255 bp, Homo sapiens
  MAP TO AL050325.20; EXPRESSED IN PLACENTA, SIGNAL = 1.1; EXPRESSED IN BRAIN, SIGNAL = 2.1; EXPRESSED IN BONE MARROW, SIGNAL = 1.6; EXPRESSED IN BT474, SIGNAL = 1.7; EXPRESSED IN FETAL LIVER, SIGNAL = 1.8; EXPRESSED IN HBL100, SIGNAL =   1; NT HIT: gi11421551, EVALUE 0.00e+00; EST_HUMAN HIT: BE889696.1, EVALUE 2.30e-01; SWISSPROT HIT: P78559, EVALUE 1.00e+00
cttcttcagccactgcgtgttgttctgcagtgcctgctccagctgtttcacctgctgggtgggcaacttccccaggtgcagtgggttggccagtgattctctctggagggtgttggagtccctggagacctcaggccccggagggcagggctcagacttgggcagcaagaaggtgtagctacagtggccgtgctggactacaagtgtctcgcagcccctatccgcctcctgccttgtctgttgagccacagacat

SEQ ID NO: 26823 - DNA, 75 bp, Homo sapiens
  MAP TO AL109823.6; EXPRESSED IN HBL100, SIGNAL = 1.1; EXPRESSED IN HELA, SIGNAL = 2.2; EXPRESSED IN PLACENTA, SIGNAL = 0.99; EXPRESSED IN BRAIN, SIGNAL = 1.1; EXPRESSED IN BONE MARROW, SIGNAL = 0.9; EXPRESSED IN LUNG, SIGNAL = 2.8; EXPRESSED IN BT474, SIGNAL = 1.3; NT HIT: AB007866.2, EVALUE 5.00e-35; EST_HUMAN HIT: AI362898.1, EVALUE 6.00e-35
aacagtttttgctgaactacctcaaagagaaggatgtggcagatggaaatgtctcggattttgataatgaagaag

SEQ ID NO: 26824 - DNA, 117 bp, Homo sapiens
  MAP TO AL049593.4; EXPRESSED IN HBL100, SIGNAL = 0.98; EXPRESSED IN PLACENTA, SIGNAL = 0.96; EXPRESSED IN BRAIN, SIGNAL = 1.5; EXPRESSED IN BONE MARROW, SIGNAL = 1.2; EXPRESSED IN LUNG, SIGNAL = 1.7; EXPRESSED IN BT474, SIGNAL =   1; SWISSPROT HIT: P10687, EVALUE 2.00e-17; NT HIT: AJ278314.1, EVALUE 8.00e-60; EST_HUMAN HIT: AW900793.1, EVALUE 9.00e-60
gaagtagatatgtttggtttgcctgtggatacaaggaggaaggcatttaagaccaaaacatcccaaggaaatgctgtgaatcctgtctgggaagaagaacctattgtgttcaaaaag

SEQ ID NO: 26825 - DNA, 464 bp, Homo sapiens; identical to SEQ ID NO: 10184
  MAP TO Z97055.1; EXPRESSED IN BRAIN, SIGNAL =   1; EXPRESSED IN BONE MARROW, SIGNAL = 1.3; EXPRESSED IN BT474, SIGNAL = 1.2; EXPRESSED IN FETAL LIVER, SIGNAL =   2; EXPRESSED IN HBL100, SIGNAL = 0.98; EXPRESSED IN PLACENTA, SIGNAL = 1.3; NT HIT: U88153.1, EVALUE 1.20e+00; SWISSPROT HIT: O83399, EVALUE 4.70e+00; EST_HUMAN HIT: AV763621.1, EVALUE 1.70e+00

SEQ ID NO: 26826 - DNA, 242 bp, Homo sapiens
  MAP TO AL096702.3; EXPRESSED IN FETAL LIVER, SIGNAL = 0.92; EXPRESSED IN ADULT LIVER, SIGNAL = 1.1; EXPRESSED IN BT474, SIGNAL = 1.8; EXPRESSED IN HBL100, SIGNAL = 1.5; EXPRESSED IN HELA, SIGNAL = 1.1; EXPRESSED IN PLACENTA, SIGNAL = 1.6; EXPRESSED IN LUNG, SIGNAL = 0.93; EXPRESSED IN BRAIN, SIGNAL = 1.4; EXPRESSED IN BONE MARROW, SIGNAL = 1.3; NT HIT: AF240775.1, EVALUE 1.00e-113; EST_HUMAN HIT: AI140682.1, EVALUE 1.00e-113; SWISSPROT HIT: Q10277, EVALUE 2.70e-02
tggcgggcatggagggcaggggttgctgtagcacatctgagccaaaccatttggcaaggcccacaggggagctgctcctctggctggggcgatgctccagctgggagtgcatgtggggcaggcctgaccggctgggcacgttctgaggggttgtctgaacgctgacagctgctgcatgggaaccagagcctggaggatgcagaactgtggagataagaagggttatcattcacagcatgaga

SEQ ID NO: 26827 - DNA, 96 bp, Homo sapiens
  MAP TO AC010133.1; EXPRESSED IN BONE MARROW, SIGNAL = 2.2; EXPRESSED IN LUNG, SIGNAL = 1.7; EXPRESSED IN ADULT LIVER, SIGNAL =   1; EXPRESSED IN BRAIN, SIGNAL =   1; NT HIT: AF029895.1, EVALUE 6.80e-01; EST_HUMAN HIT: H73968.1, EVALUE 2.10e-01; SWISSPROT HIT: P31126, EVALUE 9.20e+00
ttcaccccttttgctactctccaggtaccactgaaaataacctttccattctggttgcttagtttctgtgcctgcattttccatactggttcaaag

SEQ ID NO: 26828 - DNA, 222 bp, Homo sapiens
  MAP TO AC005666.1; EXPRESSED IN HBL100, SIGNAL = 0.98; EXPRESSED IN HELA, SIGNAL = 1.3; EXPRESSED IN PLACENTA, SIGNAL = 4.9; EXPRESSED IN FETAL LIVER, SIGNAL = 1.1; EXPRESSED IN BT474, SIGNAL = 2.1; EXPRESSED IN BRAIN, SIGNAL = 1.4; EXPRESSED IN BONE MARROW, SIGNAL = 0.91; NT HIT: AB014547.1, EVALUE 1.00e-122; SWISSPROT HIT: O28052, EVALUE 6.30e-02; EST_HUMAN HIT: AA178868.1, EVALUE 1.00e-122
ctgtaggagagttctgggaagactcaggaaaattacaaactccatcacacttgttagaaatgaccttggagagtgcactgacagcttctgtttcaggacaatgttcaggtggctcccctatgccatctaaagtcctacccagctcatcctgggcagaagggtctggagctggtcccttagtctcttctaggactttgatctcaggatcagaggtgttgctct

SEQ ID NO: 26829 - DNA, 1178 bp, Homo sapiens
  MAP TO AC010127.3; EXPRESSED IN BRAIN, SIGNAL = 2.6; EXPRESSED IN HBL100, SIGNAL = 1.4; NT HIT: M91803.1, EVALUE 0.00e+00; EST_HUMAN HIT: AL120392.1, EVALUE 1.00e-129; SWISSPROT HIT: P04774, EVALUE 0.00e+00
tgtttttccacaattggctttgtcacccggtcataggaaggtggacaagctgcagtggacatggtcagatcagttttttctgtaatagagttttcatttattctgtcaattatcatgtcttcttttataagaagattagccccacctttgattttgtttttattgtacgtaaaggaagcttgttttacagttcgctttaaaaggtggcgtctgtaagcacgctgaataatgacagcagatacttcctcttgttttcgttttaaagtagtagtgattggctgataggagaccttggaaggattggaagccatgaatcgctcttccatctgtattcgtagagcatccatctctccactctctcctagaacccgctttgtaaaagcaaataagatatcaagacagtggatccggtcaccactcaccatgggcaaatccatggcaatgagctggagtttgtttggttgtggcagattgagaggcggttcaagcgcagctgcaaactgagataatttttcaaattccatgaactgagttgcatcgggatcaaacttctcccaaacctcatagaacatctcaaagtcatcctcactcagaggctctgcactttcttcagtagcaacactgaagttctccaggatgaccgcgatgtacatgttcaccacaaccaggaaggatatgatgatgtaactgacaaaaaagaaaattccaacagatgggttcccacagtctcccttaactgagcttccagggttaactttattagggtcacagtcgggtggcttactgttgagaatgggtgctagcaatccatcccagccagcagaggttgtaatttggaataggcagatcatgctgttgccaaaggtctcaaagttgaacatgtcatcgatcccaacttccctcttaacataggcaaagttggacatcccaaagatggcgtagatgaacatgactaggaagagtaggaggccgatgttaaacaacgcaggaagggacatcatcaaagcaaagagcagcgtgcggatcccctttgctcctttgatcagacgtaggattcggccaatcctagcaagacggatcactcggaacagggtaggggacacgaaatacttttctatcagctcggcaagaaacatacctatgaataaacaatgagaataccaaccagtgaagaaatc

SEQ ID NO: 26830 - DNA, 645 bp, Homo sapiens
  MAP TO AC006213.1; EXPRESSED IN BRAIN, SIGNAL =   1; EXPRESSED IN PLACENTA, SIGNAL = 1.3; EXPRESSED IN ADULT LIVER, SIGNAL = 1.1; EXPRESSED IN FETAL LIVER, SIGNAL =   1; EXPRESSED IN BT474, SIGNAL = 1.4; EXPRESSED IN LUNG, SIGNAL = 1.3; EXPRESSED IN HELA, SIGNAL = 1.2; EXPRESSED IN HBL100, SIGNAL = 1.4; NT HIT: gi11433030, EVALUE 0.00e+00; SWISSPROT HIT: Q9UK13, EVALUE 0.00e+00; EST_HUMAN HIT: AA746283.1, EVALUE 1.00e-103
cacatatatcacatttgaatggcttctccccagtatggattctctgatgttcttgaagctgtgaatcatgaatgaaggctttcccacattcctcacaattataaggtttctctcctgtgtgcaatttgcaatgaacattaagtgctgatctactatggaagcctttcccacattgcccacatttgaatggtttctctccagtatggactctctgatgagtttgcagatgtgagctctgattaaattccttaccacacacatcacacttatagcatttttctcccatatggactctctgatgaatatgaagggctgggctgtaacagaagctttttccacactcaccacatgtatgagatttctctcctgagtgtgattgttgatgaagatcaaagacagaaacatcactgaaggactgtttacattcattacaacggtaaggtttctgttgcacgtgacttatagatagtcttgcctcaatctggcaggggacatcaccttctttgaagaactgagagctgttccttatggagttttgagacctggttaggtcacttgcaatttgttcccatatttgctgacaggaccactcttcatgtggtcctgcttctggaacagtctccatctcaatttggatcttgcctc

SEQ ID NO: 26831 - DNA, 79 bp, Homo sapiens
  MAP TO AL109913.5; EXPRESSED IN HBL100, SIGNAL = 1.1; EXPRESSED IN PLACENTA, SIGNAL = 1.1; EXPRESSED IN ADULT LIVER, SIGNAL = 0.96; EXPRESSED IN BT474, SIGNAL =   1; EXPRESSED IN FETAL LIVER, SIGNAL = 1.5; EXPRESSED IN BRAIN, SIGNAL = 1.1; EST_HUMAN HIT: AL079581.1, EVALUE 4.00e-08; NT HIT: U50912.1, EVALUE 6.00e-07
gtgtgattatttggtgatgtcacgacattcagatttttcatggtgccggaattcttacactggtttcttcttatctggg

SEQ ID NO: 26832 - DNA, 141 bp, Homo sapiens
  MAP TO AP000072.1; EXPRESSED IN BONE MARROW, SIGNAL =   1; EXPRESSED IN ADULT LIVER, SIGNAL = 1.3; EXPRESSED IN BRAIN, SIGNAL = 1.2; NT HIT: AF039401.1, EVALUE 3.20e-01; SWISSPROT HIT: P51565, EVALUE 5.10e+00; EST_HUMAN HIT: AW002015.1, EVALUE 3.20e-01
cattcagcaactcaacaaatatttacagagagcctactatgggctggccccactctttgttccggaaatatctcagaaagcaaaacagatggaccacatggtttattaagaagccaaacattagcagattatcacacgata

SEQ ID NO: 26833 - DNA, 240 bp, Homo sapiens
  MAP TO AP000078.1; EXPRESSED IN BT474, SIGNAL = 1.2; EXPRESSED IN FETAL LIVER, SIGNAL =   1; EXPRESSED IN BRAIN, SIGNAL = 1.1; EXPRESSED IN BONE MARROW, SIGNAL = 1.1; EXPRESSED IN LUNG, SIGNAL =   1; EXPRESSED IN HBL100, SIGNAL = 1.1; EXPRESSED IN PLACENTA, SIGNAL = 0.9; EXPRESSED IN ADULT LIVER, SIGNAL = 1.2; NT HIT: M18060.1, EVALUE 9.00e+00; SWISSPROT HIT: P02115, EVALUE 2.00e+00; EST_HUMAN HIT: AI823923.1, EVALUE 2.20e-01
aagcccatcagatgtgtccatcagaattgtgccatcccgggctaagtgaataactgggtgttggatgaagacctcatctaccacgtgacctcccatctgggagcctgccactgcatcaggctctacacaggtccttatatcatctctccctgttccactgtccaggtcctcgcagaccttctcatggtactttggagtagacactaccctaaacaggtggaagtgattggtctgtgggct

SEQ ID NO: 26834 - DNA, 251 bp, Homo sapiens
  MAP TO AC007881.2; EXPRESSED IN HELA, SIGNAL = 0.96; EXPRESSED IN HBL100, SIGNAL = 1.1; EXPRESSED IN BT474, SIGNAL = 0.99; EXPRESSED IN LUNG, SIGNAL = 1.1; EXPRESSED IN BONE MARROW, SIGNAL =   1; EXPRESSED IN BRAIN, SIGNAL = 0.96; EST_HUMAN HIT: AU121305.1, EVALUE 0.00e+00; NT HIT: X98494.1, EVALUE 0.00e+00; SWISSPROT HIT: O00566, EVALUE 3.00e-35
gttcacttctttaacaaaagtgctttatgactttaataaaatattagagaatggtaggatccatggaagccccttgcaaaaacttgtgatagaaaattttgatgatgagcagatttggcaacaactggaattgcaaaatgaaccaattttacaatactttcagaatgcagttagtgaaacaattaatgatgaagatatcagtcttctcccagagagtgaagaacaggaacgtgaagaggatggttcagaga

SEQ ID NO: 26835 - DNA, 1125 bp, Homo sapiens
  MAP TO AC005409.1; EXPRESSED IN BT474, SIGNAL = 1.5; EXPRESSED IN BRAIN, SIGNAL = 2.4; EXPRESSED IN LUNG, SIGNAL = 1.4; EXPRESSED IN PLACENTA, SIGNAL = 0.98; EXPRESSED IN HBL100, SIGNAL = 0.93; EXPRESSED IN HELA, SIGNAL = 1.4; EST_HUMAN HIT: AI499228.1, EVALUE 0.00e+00; NT HIT: AB033034.1, EVALUE 0.00e+00; SWISSPROT HIT: P36166, EVALUE 3.30e-01
gtcgagaagatcttggaaatacttttttttctcccatggcaaaaagcccaagtaactatctgtgtaatgctgcagctttcttccaagtaacacttcagtaacgcctatgtgattttcagcattttcctccattctactgttctctttttctttccctgtgattttcttttcttttgtcatctggctttccagtggaacaatcagagatgggggcttttcttttgtcacatttccgcctatggttttttgggtgtgagtttccactctaaatcttgctgtggtctccaagtccaggggtggattctgaccctggtcatgaccattcacttttacactcactgcaggaaaagtcaacctctgcaatctttcagacactcctaagctgtttggcaagatgcttttatgaacctgtttttcctgtggagccaccaaactgtcatttgtttcatctgttattatagcttgattttttattttagcatgctgtgagttcatcagaaatgatctcagcaaggctgacttggacaaattgtatcctttcaaagtgatgtctccatgttccagttgcaaatccaaggtattgagactcaactgggcgtcttttggaaggagtgaaatatttaccaggggaattttcacctcttcctgggctctccttgttgagttaacatcatgtctcttaaacttcgggaagcgtttttctttgggaatatcctcaaaaaggatttccgcctctggaagaagtgttatgggactaactaaattttcgtaacccttctgggctgtagaattcagttttggtccctcccttgtgtccacctccactgttatctgcattttgaactcttcatcgtttgtattttgaaacgtgagattaaaatgtattgtggtggcattcattccactgtgcattatgaggtggatggttttccacttgttggcaatagaagcatgtcgaattattggattgtcactataggcaccttcaactcctcttttggctacttctgcaaagctgaaataaggcaggcattcaccttttggaataatatagtgagtctggtttgggagaaggatcactttatacaattcatgaaaatgatctacaggaaaaaacagaaacat

SEQ ID NO: 26836 - DNA, 77 bp, Homo sapiens
  MAP TO AC010872.3; EXPRESSED IN LUNG, SIGNAL = 1.1; EXPRESSED IN BRAIN, SIGNAL = 1.2; EXPRESSED IN BONE MARROW, SIGNAL = 0.92; EXPRESSED IN HBL100, SIGNAL = 1.3; EXPRESSED IN HELA, SIGNAL =   1; EXPRESSED IN PLACENTA, SIGNAL = 1.3; EXPRESSED IN ADULT LIVER, SIGNAL = 1.6; EXPRESSED IN BT474, SIGNAL = 0.98; EXPRESSED IN FETAL LIVER, SIGNAL = 1.2; EST_HUMAN HIT: R55681.1, EVALUE 7.00e-10; NT HIT: AL163247.2, EVALUE 4.00e-11
gagaaatatcacatactgttttgaaagaaaactctttggcactaaagaagcttttgggagctggcaagctctgactg

SEQ ID NO: 26837 - DNA, 160 bp, Homo sapiens
  MAP TO AC007949.1; EXPRESSED IN BONE MARROW, SIGNAL = 1.2; EXPRESSED IN LUNG, SIGNAL = 0.8; EXPRESSED IN HELA, SIGNAL = 1.1; EXPRESSED IN BRAIN, SIGNAL = 0.78; EXPRESSED IN BT474, SIGNAL = 1.4; EXPRESSED IN HBL100, SIGNAL = 1.1; EXPRESSED IN FETAL LIVER, SIGNAL = 0.76; NT HIT: gi4505316, EVALUE 4.00e-28; EST_HUMAN HIT: BE018804.1, EVALUE 5.00e-28
  unsure 79
ggaagaagtcgttctacccgaaccagagaacaagaaaatgaagaaaaagaaaaagaggaaaaagagaaacaagataaangagaaacaagaagaaaagaaggagtcagaaacatctagagaagatgaatataaacaaaagtactccagaacgtatgatgag

SEQ ID NO: 26838 - DNA, 208 bp, Homo sapiens
  MAP TO AL034371.16; EXPRESSED IN FETAL LIVER, SIGNAL = 0.66; EXPRESSED IN LUNG, SIGNAL = 0.77; EXPRESSED IN ADULT LIVER, SIGNAL = 0.65; EXPRESSED IN BRAIN, SIGNAL =   1; EXPRESSED IN PLACENTA, SIGNAL = 0.84; EXPRESSED IN BT474, SIGNAL = 0.93; EXPRESSED IN BONE MARROW, SIGNAL = 0.68; EXPRESSED IN HBL100, SIGNAL = 1.4; EXPRESSED IN HELA, SIGNAL = 0.75; NT HIT: M30198.1, EVALUE 1.90e+00; SWISSPROT HIT: Q47747, EVALUE 2.50e-01; EST_HUMAN HIT: BF675047.1, EVALUE 2.00e-10
cggaagatgctctctcttagtggtggtggtcccttcagcaacctgctgaggtgggttgtgtgccacataacgaaaggaattgtgaaacgcgagatgcacggccacggcattggccgcttctccgaggaagagatttacatgctgatggagaaggacatgcggtctttagcagggcttttgggtaatgtaccacaccttctatttctat

SEQ ID NO: 26839 - DNA, 168 bp, Homo sapiens
  MAP TO AF007544.1; EXPRESSED IN BRAIN, SIGNAL = 0.98; EXPRESSED IN ADULT LIVER, SIGNAL = 0.97; EXPRESSED IN FETAL LIVER, SIGNAL = 0.97; NT HIT: AF007544.1, EVALUE 4.00e-90; EST_HUMAN HIT: N62491.1, EVALUE 1.00e-87; SWISSPROT HIT: Q04609, EVALUE 2.00e-28
gccaaaggagtcattctctactccgaccctgctgactactttgctcctggggtgaagtcctatccagacggttggaatcttcctggaggtggtgtccagcgtggaaatatcctaaatctgaatggtgcaggagaccctctcacaccaggttacccagcaaatggtgaa

SEQ ID NO: 26840 - DNA, 1479 bp, Homo sapiens
  MAP TO AC007228.1; EXPRESSED IN BRAIN, SIGNAL = 1.1; EXPRESSED IN BT474, SIGNAL = 1.1; EST_HUMAN HIT: AL042491.2, EVALUE 0.00e+00; SWISSPROT HIT: P10078, EVALUE 0.00e+00; NT HIT: AB037852.1, EVALUE 0.00e+00
gccagcgatctgtacatgagacccaggaattatttccaaagcaagattcatatgctgaaggggtaacagacagaacctcaaacactaaacttgattgttccagtttcagagaaaattgggattctgactatgtgttcggaaggaagcttgcagtaggtcaagagacacaattcaggcaagagccaattactcataacaaaaccctctctaaggaaagagaacgtacatataacaaatctggaagatggttctatttggacgattcagaagagaaagttcataatcgtgattcaattaaaaattttcaaaaaagttcagtggtaataaaacaaacaggcatctatgcaggaaaaaagcttttcaagtgtaatgaatgtaagaaaacttttacccagagctcatctcttactgttcatcagagaattcacactggagagaaaccttataaatgtaatgaatgtgggaaggcctttagtgacggctcatcctttgcccgacaccagagatgtcacactggcaagaagccctatgagtgcattgagtgtgggaaagctttcatacagaacacatcccttatccgtcactggagatactatcatactggggagaaaccctttgattgcatcgattgtgggaaagccttcagtgaccacatagggcttaatcaacacaggagaattcatactggagagaaaccttacaaatgtgatgtatgtcacaaatccttcaggtatggttcctcccttactgtacatcaaaggattcataccggagaaaaaccatatgaatgtgatgtttgcagaaaagccttcagccatcatgcatcactcactcaacatcaaagagtacattctggagaaaagccttttaagtgtaaagagtgcggaaaagcttttaggcagaatatacaccttgccagtcatttaaggattcatactggggagaagccttttgaatgtgcggagtgtggaaaatccttcagcatcagttctcagcttgccactcatcagagaatccatactggagagaagccctatgaatgtaaggtttgtagtaaagcgttcacccagaaggctcaccttgcacagcatcagaaaacccatacaggagagaaaccatatgagtgcaaggaatgcggtaaagccttcagccagaccacacacctcattcaacatcagagagttcacactggtgagaaaccctataaatgtatggaatgtgggaaggcctttggtgataactcatcctgtactcaacatcaaagactgcacactggccaaagaccttatgaatgtattgagtgtggaaaggcattcaagacaaaatcctcccttatttgtcatcgcagaagtcatactggagaaaaaccttatgaatgcagtgtgtgtggcaaagcctttagtcatcgtcaatcccttagtgtacatcagagaatccattctggaaagaaaccatatgaatgtaaggaatgtaggaaaa

SEQ ID NO: 26841 - DNA, 200 bp, Homo sapiens
  MAP TO AL035682.16; EXPRESSED IN BRAIN, SIGNAL = 0.8; EXPRESSED IN BT474, SIGNAL = 0.83; EXPRESSED IN LUNG, SIGNAL = 0.59; SWISSPROT HIT: P09710, EVALUE 7.30e-01
ggaggcccaaaagggtctcggtgctcagctgctttctctgtaacataagcttctttggaaacggcaaggacatctgtggatccggggctgccatagccagtcatgaccacctcgggccacttggacacgggtgccccaatatccaaggcactcaccatttgcctttaacaagggatggacagggtaggagaggccagtgt

SEQ ID NO: 26842 - DNA, 104 bp, Homo sapiens
  MAP TO AC012444.1; EXPRESSED IN HELA, SIGNAL = 1.1; EXPRESSED IN ADULT LIVER, SIGNAL = 0.97; EXPRESSED IN BT474, SIGNAL = 0.97; EXPRESSED IN FETAL LIVER, SIGNAL =   1; EXPRESSED IN BRAIN, SIGNAL = 0.95; EST_HUMAN HIT: AA131842.1, EVALUE 2.30e-01; SWISSPROT HIT: O14640, EVALUE 5.50e+00; NT HIT: U25148.1, EVALUE 1.90e-01
tcaagaacaaattaaaagtggatgtgacaaccccgcagaggggtcagcagccacatctggaaagtactgcagaggtcgtgttgtccaacactttgcaccaacag

SEQ ID NO: 26843 - DNA, 98 bp, Homo sapiens
  MAP TO AL049550.5; EXPRESSED IN ADULT LIVER, SIGNAL = 0.79; EXPRESSED IN LUNG, SIGNAL = 0.86; EXPRESSED IN HELA, SIGNAL = 0.79; EXPRESSED IN BRAIN, SIGNAL = 0.9; EXPRESSED IN PLACENTA, SIGNAL = 0.61; EXPRESSED IN FETAL LIVER, SIGNAL = 0.58; NT HIT: gi8924119, EVALUE 2.00e-13; EST_HUMAN HIT: AI133517.1, EVALUE 2.00e-13
caagaactaccacaggaacataccaggaaagcagagaatccatagaccctttgaaggaagcagattgctgctccagtttcctggagacagccgaaaaa

SEQ ID NO: 26844 - DNA, 75 bp, Homo sapiens
  MAP TO AC012553.2; EXPRESSED IN BONE MARROW, SIGNAL = 1.5; EXPRESSED IN HELA, SIGNAL = 1.2; EXPRESSED IN PLACENTA, SIGNAL = 2.9; EXPRESSED IN HBL100, SIGNAL = 1.2; EXPRESSED IN BT474, SIGNAL = 1.4; EXPRESSED IN BRAIN, SIGNAL = 1.7; EXPRESSED IN LUNG, SIGNAL = 1.6; EXPRESSED IN ADULT LIVER, SIGNAL = 1.5; EXPRESSED IN FETAL LIVER, SIGNAL = 1.4; EST_HUMAN HIT: T83430.1, EVALUE 8.00e-35; NT HIT: gi6912639, EVALUE 5.00e-35
gtctttgttgtagcatttgcagactgtatgctgtttgcttcactaggaggatctttcagaatgtcagactttggt

SEQ ID NO: 26845 - DNA, 125 bp, Homo sapiens
  MAP TO AP000106.1; EXPRESSED IN FETAL LIVER, SIGNAL = 0.62; EXPRESSED IN LUNG, SIGNAL = 0.84; EXPRESSED IN HELA, SIGNAL = 0.82; EXPRESSED IN BRAIN, SIGNAL = 0.79; EXPRESSED IN PLACENTA, SIGNAL = 0.8; EXPRESSED IN BONE MARROW, SIGNAL = 0.81; EXPRESSED IN HBL100, SIGNAL = 0.81; SWISSPROT HIT: O43426, EVALUE 5.00e-17; EST_HUMAN HIT: AW375813.1, EVALUE 1.10e+00; NT HIT: AB020717.1, EVALUE 2.00e-64
cctgcatatatcttactgattgaatcaccattcacggaccacattgaccgaaaaacttcttgaaagcgagtcaccaactgaggcttttcagctaaaccaagagcttccaactgtttagctagcat

SEQ ID NO: 26846 - DNA, 102 bp, Homo sapiens; identical to SEQ ID NO: 20092
  MAP TO AC008168.2; EXPRESSED IN ADULT LIVER, SIGNAL = 1.1; EXPRESSED IN BRAIN, SIGNAL = 0.9; EXPRESSED IN HBL100, SIGNAL = 1.3; EXPRESSED IN FETAL LIVER, SIGNAL = 0.72; EXPRESSED IN HELA, SIGNAL = 0.7; EXPRESSED IN BT474, SIGNAL = 0.7; EST_HUMAN HIT: AW274720.1, EVALUE 7.00e-51; SWISSPROT HIT: Q62786, EVALUE 7.00e+00; NT HIT: X89369.1, EVALUE 4.70e-02

SEQ ID NO: 26847 - DNA, 132 bp, Homo sapiens
  MAP TO AC004689.5; EXPRESSED IN HELA, SIGNAL = 0.83; EXPRESSED IN LUNG, SIGNAL = 0.78; EXPRESSED IN BT474, SIGNAL = 0.66; EXPRESSED IN FETAL LIVER, SIGNAL = 0.73; EXPRESSED IN BRAIN, SIGNAL = 0.71; EXPRESSED IN HBL100, SIGNAL = 0.73; NT HIT: AF112282.1, EVALUE 1.60e-02
actttggatgggaaattcagcccattcaccgtgttacgaaggcgggtagccatggctttatttattttatctcatcttatgtttactattattaagcttattgttcttgctattatttactttcccccttaa

SEQ ID NO: 26848 - DNA, 160 bp, Homo sapiens
  MAP TO AC012513.2; EXPRESSED IN HBL100, SIGNAL = 2.2; EXPRESSED IN HELA, SIGNAL =   2; EXPRESSED IN PLACENTA, SIGNAL = 3.6; EXPRESSED IN ADULT LIVER, SIGNAL = 0.97; EXPRESSED IN BT474, SIGNAL = 1.4; EXPRESSED IN FETAL LIVER, SIGNAL = 1.2; EXPRESSED IN BRAIN, SIGNAL = 1.2; EXPRESSED IN BONE MARROW, SIGNAL = 1.2; SWISSPROT HIT: P13010, EVALUE 1.00e-25; EST_HUMAN HIT: AU127101.1, EVALUE 4.00e-85; NT HIT: J04977.1, EVALUE 3.00e-85
ggattttgctttcaatgtcctccagcaaatcaaaatctggtagcatcagatgtctgtgcactgtgatgttctgatactgatccccaccagaaaggggattgtcagtgccatctgtaccaaacaggactaaagcaatctcatccttgttctcagcaaacac

SEQ ID NO: 26849 - DNA, 168 bp, Homo sapiens
  MAP TO AC008177.1; EXPRESSED IN BRAIN, SIGNAL = 1.1; EXPRESSED IN BT474, SIGNAL =   1; EXPRESSED IN HELA, SIGNAL = 1.5; EXPRESSED IN PLACENTA, SIGNAL = 0.93; EST_HUMAN HIT: BF196002.1, EVALUE 7.00e-90; NT HIT: gi11430460, EVALUE 5.00e-90; SWISSPROT HIT: P98164, EVALUE 4.00e-13
atggagaacgagcaaaaggaaagtgttgctgcgacaccacctccatcaccttcgctccctgctaagcctaagcctccttcgagaagagacccaactccaacctattctgcaacagaagacacttttaaagacaccgcaaatcttgttaaagaagactctgaagtatag

SEQ ID NO: 26850 - DNA, 83 bp, Homo sapiens
  MAP TO AC009227.1; EXPRESSED IN BT474, SIGNAL = 0.67; EXPRESSED IN BONE MARROW, SIGNAL = 0.77; EXPRESSED IN HELA, SIGNAL = 0.66; EXPRESSED IN ADULT LIVER, SIGNAL = 0.96; EXPRESSED IN PLACENTA, SIGNAL = 0.73; EXPRESSED IN FETAL LIVER, SIGNAL = 0.66; EXPRESSED IN LUNG, SIGNAL = 0.71; EXPRESSED IN BRAIN, SIGNAL = 0.69; EST_HUMAN HIT: AU124864.1, EVALUE 1.00e+00
gtgtgacaataaagatctcatattcaaatgcttggtccaagatcattgagaatatgggaaataagaaaagtgagtatttgcag

SEQ ID NO: 26851 - DNA, 182 bp, Homo sapiens
  MAP TO AP000268.1; EXPRESSED IN BT474, SIGNAL = 0.93; EXPRESSED IN HBL100, SIGNAL =   1; EXPRESSED IN BRAIN, SIGNAL = 1.1; EXPRESSED IN PLACENTA, SIGNAL = 0.7; EXPRESSED IN BONE MARROW, SIGNAL = 0.97; EXPRESSED IN FETAL LIVER, SIGNAL = 0.81; EXPRESSED IN LUNG, SIGNAL = 0.73; EXPRESSED IN HELA, SIGNAL = 1.5; EXPRESSED IN ADULT LIVER, SIGNAL = 0.88; SWISSPROT HIT: O60287, EVALUE 2.00e-16; NT HIT: gi11526184, EVALUE 7.00e-83; EST_HUMAN HIT: AA528482.1, EVALUE 2.00e-65
gtcagtagagtcggcagaaacagcgagtgctgcatgagcatcacgtagaccaccgggagctggatgagcttcgtgcgcacggagctttctgggctgtacaggagctgtacggcggtgaggagcatctttaaaaatgtgtggtcctggtaccgaaatctaggcggcgagagtcaaagggaaaa

SEQ ID NO: 26852 - DNA, 133 bp, Homo sapiens
  MAP TO AP000244.1; EXPRESSED IN PLACENTA, SIGNAL = 0.62; EXPRESSED IN LUNG, SIGNAL = 0.65; EXPRESSED IN ADULT LIVER, SIGNAL = 0.68; EXPRESSED IN BRAIN, SIGNAL = 0.74; SWISSPROT HIT: O78687, EVALUE 1.50e-01
gccagacagcctctgcctgcagccagggggatagggtcacccaaagccatttgggagaggccaaccagacctgtgggcatgggacctcccagtagagccctagggctgcaaaccctgccaggtagagctggag

SEQ ID NO: 26853 - DNA, 119 bp, Homo sapiens
  MAP TO AC004987.2; EXPRESSED IN PLACENTA, SIGNAL = 0.68; EXPRESSED IN BT474, SIGNAL = 0.65; EXPRESSED IN HBL100, SIGNAL = 2.1; EXPRESSED IN LUNG, SIGNAL = 0.65; EXPRESSED IN ADULT LIVER, SIGNAL = 0.99; EXPRESSED IN BRAIN, SIGNAL = 0.81; EXPRESSED IN HELA, SIGNAL = 0.83; EST_HUMAN HIT: AA991162.1, EVALUE 1.00e-07; SWISSPROT HIT: O16118, EVALUE 4.00e+00; NT HIT: gi11525657, EVALUE 7.00e-08
ttctaccatctttgtgaacaaaacgtaaatttgacgttactggtttgctcttgtggaacactttcaataacatcaatatcattttgtctttttgcacttgctgatttagttgtttcttc

SEQ ID NO: 26854 - DNA, 243 bp, Homo sapiens
  MAP TO AC007367.3; EXPRESSED IN HELA, SIGNAL = 0.59; EXPRESSED IN BRAIN, SIGNAL =   1; NT HIT: AL163207.2, EVALUE 1.30e-01; SWISSPROT HIT: P16849, EVALUE 2.10e+00
acagaaagtaataaaagcaatgaggctgatgaaatgcctaacaattctggtattcatttaagtggatggggttctttgaacactactatagaaattcttattcttccagcaaaagcaaacaggatttcaaaggtgcacaggtctcagctgccaaacctaagtgatgaatattttcagaggatgcagaccttactgattgcttttaacagtgatgaaacacgaaaagttgcatctcatcaggga

SEQ ID NO: 26855 - DNA, 546 bp, Homo sapiens
  MAP TO AC003666.1; EXPRESSED IN BONE MARROW, SIGNAL = 0.73; EXPRESSED IN BRAIN, SIGNAL = 1.2; EST_HUMAN HIT: AU125175.1, EVALUE 0.00e+00; NT HIT: AB019432.1, EVALUE 0.00e+00; SWISSPROT HIT: P51793, EVALUE 4.00e-99
cttcatgccaaaggtaaatatggtaacgacgattttgaagatcagtgccagggccagctgccacatggccgtgtaaacaccgacaccagccggccggtctggaatgtcatccacaggccgagtcatgttggggtcattgatgtagtcacagagctgggaagactcaagggctccacagtcattgaacagctcagaaatgagctcgctggtgctctggcgtgtgtagggattggggtaggcaatgatggcagtgatggcagtcaccacaatgacctccagcaccgggtacttccccagcctggtggtcttgcgcctcctgcaccaggcgatgttgcagcggatgaagagggttccccacaagcccccgaagaccccaagcaggatgaaggggaagagttcagccatgtaccagggcgtgtggtattccacataaaagagaacgagacggctattcccaaagggattgatggatctcagcgtaaaggccgccaccagggctgcgaaaaatgacctccacaaggtcttcaggggaaagtagtaactgac

SEQ ID NO: 26856 - DNA, 228 bp, Homo sapiens
  MAP TO AP000239.1; EXPRESSED IN BRAIN, SIGNAL = 0.72; NT HIT: gi4504116, EVALUE 1.00e-126; EST_HUMAN HIT: AI659715.1, EVALUE 4.00e-91; SWISSPROT HIT: P39086, EVALUE 5.00e-39
actattgctattcttcaactccaagaagaagggaagctgcatatgatgaaagagaagtggtggcgtgggaatggctgccccgaggaagacaacaaagaagccagtgccctgggagtggaaaatattggaggcatcttcattgttctggctgccggactggtcctttctgtatttgtagctattggagaattcatatacaaatcacggaagaataatgatattgaacag

SEQ ID NO: 26857 - DNA, 215 bp, Homo sapiens
  MAP TO AP000209.1; EXPRESSED IN PLACENTA, SIGNAL = 0.74; EXPRESSED IN LUNG, SIGNAL = 0.74; EXPRESSED IN HELA, SIGNAL = 0.65; EXPRESSED IN BT474, SIGNAL = 0.67; EXPRESSED IN BONE MARROW, SIGNAL = 1.6; EXPRESSED IN FETAL LIVER, SIGNAL = 0.59; EXPRESSED IN BRAIN, SIGNAL = 0.94; SWISSPROT HIT: Q13009, EVALUE 1.00e-29; NT HIT: gi11526176, EVALUE 6.00e-93; EST_HUMAN HIT: BE715692.1, EVALUE 3.00e-71
tcagaggtttgaaatgccctgcaaaggaagtgcccaacaaacctgaaaaaggaaggcatcacccagggaattgctgaggcagaagacaaagtccttcttggggtgctcaggcaccgcctgcacaatgctgttctccacccagacggcgtgtttggggatgctgttgtggtctatcccagacctgccgtcgctctcgtagaaaaatagcgtgcatc

SEQ ID NO: 26858 - DNA, 283 bp, Homo sapiens
  MAP TO AP000199.1; EXPRESSED IN PLACENTA, SIGNAL = 0.76; EXPRESSED IN BT474, SIGNAL = 0.76; EXPRESSED IN FETAL LIVER, SIGNAL = 0.59; EXPRESSED IN LUNG, SIGNAL = 0.78; EXPRESSED IN BONE MARROW, SIGNAL = 3.5; EXPRESSED IN HBL100, SIGNAL = 0.72; EXPRESSED IN ADULT LIVER, SIGNAL = 0.66; EXPRESSED IN BRAIN, SIGNAL = 1.2; EXPRESSED IN HELA, SIGNAL = 0.82; EST_HUMAN HIT: AL044088.2, EVALUE 1.00e+00; SWISSPROT HIT: P39086, EVALUE 8.00e-34; NT HIT: U16125.1, EVALUE 1.00e-112
agaagatgtgggctttcatgagcagcaggcagcagaccgccctggtaagaaacagtgatgaggggatccagagagtgctcaccacagactacgcgctgctgatggagtccaccagcattgagtatgtgacgcagagaaactgcaacctcactcagatcgggggcctcattgactccaaaggttacggagtgggaacacctattggtaagacgggtagacatgaaccaagactgagatacagaatgtcagttaccagtatagaaggcaatgggctcagagttct

SEQ ID NO: 26859 - DNA, 195 bp, Homo sapiens
  MAP TO AC009447.1; EXPRESSED IN BT474, SIGNAL = 1.6; EXPRESSED IN BRAIN, SIGNAL = 0.9; NT HIT: Y00318.1, EVALUE 1.20e-01; EST_HUMAN HIT: AU136070.1, EVALUE 1.70e-01
  unsure 124
gtagacatacatgaggatagaactctgaatcttgaggcccaaggagtgatgaaaactattcacattgacctgttacttttactaagagaagaaattacaactttacaggttcttcagaaaccanctttaaatctttttgtagtttgttctgatgtagtcaccatgattgttttggtgagcagatgaaataagagg

SEQ ID NO: 26860 - DNA, 174 bp, Homo sapiens
  MAP TO AL079341.13; EXPRESSED IN ADULT LIVER, SIGNAL = 0.98; EXPRESSED IN BT474, SIGNAL = 0.98; EXPRESSED IN FETAL LIVER, SIGNAL = 0.96; EXPRESSED IN BRAIN, SIGNAL = 1.1; EXPRESSED IN HBL100, SIGNAL =   1; EXPRESSED IN PLACENTA, SIGNAL = 1.1; NT HIT: D90909.1, EVALUE 3.40e-01; EST_HUMAN HIT: BE314822.1, EVALUE 1.60e+00; SWISSPROT HIT: P56090, EVALUE 2.90e+00
ggcaggaaaacgtttcttttccaccacgaatgtgacgtcgccatattcttccccaatcaacaaggcaccaatatgttcagacaaaatgtgcacatgatcaatttcccccactgcagtaaaggggcgaagagggtggctgttactcatcttgtggaatagacgatagtcgttgtt

SEQ ID NO: 26861 - DNA, 583 bp, Homo sapiens
  MAP TO AL109935.20; EXPRESSED IN BT474, SIGNAL = 1.2; EXPRESSED IN BRAIN, SIGNAL = 1.1; EXPRESSED IN HELA, SIGNAL =   1; EXPRESSED IN PLACENTA, SIGNAL =   1; EXPRESSED IN HBL100, SIGNAL = 0.98; EXPRESSED IN FETAL LIVER, SIGNAL = 0.98; EXPRESSED IN ADULT LIVER, SIGNAL = 1.2; NT HIT: U82671.2, EVALUE 6.00e-18; EST_HUMAN HIT: AW862082.1, EVALUE 1.00e-37; SWISSPROT HIT: P51515, EVALUE 2.00e-10
tatttcctttgtgagttggctatagatcaaggagacttttgtgattccagcaattctgatttccatacagggtataatgccatgttccacaagaagcagaattaattggatagccctcttcaccttgggcaagataggatgcctgtagattggtgctggaagagagagattgccagggactatgaaggcgtctggggatacatagcctatggtacaagtttcattccagttagtggggaggcattggtgaactgattggccacaaatatagatggctccttgggttttaagacaagtagagatgtccaaatgaaataagtcggtgaggacagcttcaaaaaatcctgaggctgccaacatgcccaggtagctcatggctattgtcatacctggtaagacttgggtgcctggggttgctagctgattccaatatgtgcccggaattagaatattgatccagatttttacattacccatgcctcttatttcatctgagctgtagccagagatcactggttggttcacagaagtaagcaggatcagtctaaattgcagaaaaaaaccctcaaaaacaattgatgag

SEQ ID NO: 26862 - DNA, 143 bp, Homo sapiens
  MAP TO AC004890.2; EXPRESSED IN HBL100, SIGNAL = 1.2; EXPRESSED IN FETAL LIVER, SIGNAL = 1.1; EXPRESSED IN ADULT LIVER, SIGNAL = 0.93; EXPRESSED IN BRAIN, SIGNAL = 1.1; EXPRESSED IN PLACENTA, SIGNAL =   1; EXPRESSED IN BT474, SIGNAL = 1.1; EXPRESSED IN HELA, SIGNAL = 1.2; EXPRESSED IN LUNG, SIGNAL = 1.2; EXPRESSED IN BONE MARROW, SIGNAL = 1.3; SWISSPROT HIT: O43365, EVALUE 4.50e-01; EST_HUMAN HIT: BE869735.1, EVALUE 1.00e-41
ggtcgctgctcccagaatgcacctggcatcaacacggcggcggcggcggcggcttccaacaggctctggggcgccgagcggacaggaacgcagcacgggggctccgaggcggggtctgggtgttgaggggcgactggagccat

SEQ ID NO: 26863 - DNA, 212 bp, Homo sapiens
  MAP TO AC010684.2; EXPRESSED IN HELA, SIGNAL = 2.2; EXPRESSED IN PLACENTA, SIGNAL = 1.2; EXPRESSED IN HBL100, SIGNAL = 1.8; EXPRESSED IN ADULT LIVER, SIGNAL = 1.3; EXPRESSED IN BT474, SIGNAL = 1.6; EXPRESSED IN FETAL LIVER, SIGNAL = 1.5; EXPRESSED IN BONE MARROW, SIGNAL = 1.3; EXPRESSED IN LUNG, SIGNAL = 1.4; EXPRESSED IN BRAIN, SIGNAL = 1.3; EST_HUMAN HIT: BE080106.1, EVALUE 2.00e-93; NT HIT: gi11464974, EVALUE 2.00e-93; SWISSPROT HIT: P25358, EVALUE 1.00e-03
agtggccgcaggggacccagttcatcacaaaccaccagatgttcagcatcgaggcatggtggtagacgtgcaggaccgtgatctggtggttgttcttgcgcaggatgaagaagaaagtgtccataaattctatgagtttggagaagtagtaccaccagaggacacggataatctaagaggaaagggtcaaagatttaaggcttatcctcacg

SEQ ID NO: 26864 - DNA, 118 bp, Homo sapiens
  MAP TO AC010873.2; EXPRESSED IN PLACENTA, SIGNAL = 1.1; EXPRESSED IN HBL100, SIGNAL = 1.1; EXPRESSED IN BT474, SIGNAL = 1.2; EXPRESSED IN LUNG, SIGNAL = 1.1; EXPRESSED IN BRAIN, SIGNAL = 1.2; EXPRESSED IN HELA, SIGNAL = 0.99; EXPRESSED IN ADULT LIVER, SIGNAL = 1.4; EXPRESSED IN FETAL LIVER, SIGNAL = 1.1; EXPRESSED IN BONE MARROW, SIGNAL =   1; SWISSPROT HIT: P39282, EVALUE 4.00e+00; NT HIT: AE000824.1, EVALUE 5.60e-02; EST_HUMAN HIT: BE154134.1, EVALUE 4.00e-03
aaagagcagcaaaggaccatagccactgtggctgtgagtgtgttctatggcagaaagactgtgcaagaacaaccaacggtgatatttaaaacacttcaccaccaacaggatagatgct

SEQ ID NO: 26865 - DNA, 223 bp, Homo sapiens
  MAP TO AC007391.2; EXPRESSED IN LUNG, SIGNAL = 0.69; EXPRESSED IN PLACENTA, SIGNAL = 0.71; EXPRESSED IN FETAL LIVER, SIGNAL = 0.67; EXPRESSED IN BONE MARROW, SIGNAL = 1.5; EXPRESSED IN BRAIN, SIGNAL = 0.95; EST_HUMAN HIT: AV707013.1, EVALUE 1.00e-122; NT HIT: gi9257235, EVALUE 1.00e-122; SWISSPROT HIT: Q16769, EVALUE 8.00e-40
atggcacggctgaatcagtggctcctacaaacactctgttgttccagtgggaaaaatacttggagtcatagtggcaggcgaggaccaaatgtcgtttagcagtgggattgagggtgctgatgatatttgagaaagaccggtacccatagggtgtctgactcaagaaggtgtctatttccaagacccagtcagcctgaagcctctgaattcgctgcatgatgtg

SEQ ID NO: 26866 - DNA, 1270 bp, Homo sapiens
  MAP TO AC004974.1; EXPRESSED IN HBL100, SIGNAL = 1.1; EXPRESSED IN BT474, SIGNAL = 1.2; EXPRESSED IN BRAIN, SIGNAL = 1.1; EXPRESSED IN LUNG, SIGNAL = 2.6; EXPRESSED IN HELA, SIGNAL = 1.3; EST_HUMAN HIT: U74309.1, EVALUE 0.00e+00; SWISSPROT HIT: O33102, EVALUE 2.90e-01; NT HIT: gi11435053, EVALUE 0.00e+00
agaaaaattttctataatagtatgcacccagatctacgtgttccacgatgtatcttttcactctatctaggtgcaacaccaagttctccttgggcacttcaagtactgccactcctgcatttgtgcaatgggaactaagggtagactcaaaggaggcactttcacatccactaaaggagccagaatttgattttgaaaggctgattttcctctccccttctccacctatctcattccgaaaatatggacagctcattacaagctcattgcttttatcatctccctggtccatgctgaggcttcctttggaattcaggtcctctgtgctgcccattggggagctaaaactggctgaatgagacagaggtccagagaccaaggatgccacggcagctgcggaagctccagtggtggtgtttctcctcttaataacattgtgcctgttcataattgcctcattcaaatcaaataatatactctggacatcatagtgggcaaagcactttggacatgtccagggcctgacagagtcttctgatcggttatcttcaagatctgatgacttcccaagttcttcacctttggcattgcgcaatttacgaaaaatagatgagtctccagtttcagattttgaacgtcgcttgagtggtttttccctttccttaaaaagcctgaggttctctctctgtgagataggcccgtctattacatccaaagagaaaccagaacccttgccaccaccagtaatgagaaagtcactgagcttggttggagttggacctcgatcagatttgtcatctttgtagccctttaacaaatcaaaaaagctttctccagatgttccctgtttatcaattgaagatgtgctaccatattccctgtgcagtgatggtccagtcttgtatgtaggtgagatacattcatcaaagctatccacatcaagttcacttatggtgatatcactgttgcttcgctggcgtattctgcgaagagcttttctgggggagctggggtaggcttcaggcatgagaaatctggagtccatgttctccgacggtcttgtcttgtttttcagcgtgttctgtatgcttttcagcatggctgagtcattggaattgaggctaacagaacttccctgactcacaggactgcttttggaggacaggctatcaaggcaacttgaggtttctatttcctggcttgaacggctagattcttttatgttttcctttcttgggggccaatctgcaatccttgcccttacccccat

SEQ ID NO: 26867 - DNA, 139 bp, Homo sapiens
  MAP TO AL034554.8; EXPRESSED IN PLACENTA, SIGNAL = 0.66; EXPRESSED IN LUNG, SIGNAL = 0.67; EXPRESSED IN BRAIN, SIGNAL = 0.68; EST_HUMAN HIT: BF336352.1, EVALUE 1.80e+00; NT HIT: gi8393620, EVALUE 2.70e-01
gggggtgggcaggtctccacactttggacatttaaaaaaaagaggaagaagcctcctcagcagaaggctaaggatcccaaacttatagtacttgattctaacctatataacttcaagcaggaaataaaaggggcttatg

SEQ ID NO: 26868 - DNA, 91 bp, Homo sapiens
  MAP TO AP000217.1; EXPRESSED IN LUNG, SIGNAL = 0.66; EXPRESSED IN BRAIN, SIGNAL = 0.92; EXPRESSED IN PLACENTA, SIGNAL = 0.59; EXPRESSED IN HELA, SIGNAL = 0.84; NT HIT: AF028510.1, EVALUE 4.10e-02; EST_HUMAN HIT: AA446751.1, EVALUE 2.80e-01
agagggaggaggaggaaagggagggcctgagaaaagcaaaggtgagaaaagtctctgctgccgtagagcctggagcagcacgaccggcttg

SEQ ID NO: 26869 - DNA, 192 bp, Homo sapiens
  MAP TO AP000206.1; EXPRESSED IN PLACENTA, SIGNAL = 0.7; EXPRESSED IN LUNG, SIGNAL = 0.61; EXPRESSED IN HELA, SIGNAL = 0.87; EXPRESSED IN FETAL LIVER, SIGNAL = 0.69; EXPRESSED IN ADULT LIVER, SIGNAL = 0.71; EXPRESSED IN BRAIN, SIGNAL = 0.73; EST_HUMAN HIT: AA228095.1, EVALUE 4.00e-05; NT HIT: D89901.1, EVALUE 2.40e-02
cagctgaatccatagcctccgtagccacagccatagcccaacctgcggaagctgccatagccgcagccatagccatagccccagccaccaaagcctccatagccatagcccaggcctccataatagcttctgtagtagctcatggttcagcaactgtagatgtgtttggaggtcaagggcaagtttcctgag

SEQ ID NO: 26870 - DNA, 148 bp, Homo sapiens
  MAP TO AP000094.1; EXPRESSED IN FETAL LIVER, SIGNAL = 0.77; EXPRESSED IN HELA, SIGNAL = 0.76; EXPRESSED IN ADULT LIVER, SIGNAL = 1.6; EXPRESSED IN BRAIN, SIGNAL = 0.79; EXPRESSED IN PLACENTA, SIGNAL = 0.97; EXPRESSED IN LUNG, SIGNAL = 0.81; EXPRESSED IN HBL100, SIGNAL = 0.94; EXPRESSED IN BONE MARROW, SIGNAL = 0.7; EXPRESSED IN BT474, SIGNAL = 0.76; EST_HUMAN HIT: H54926.1, EVALUE 3.20e-02; SWISSPROT HIT: Q60934, EVALUE 1.00e-13; NT HIT: U16125.1, EVALUE 4.00e-47
gcaccgggcatcccagctgaccgtcagctccctgcagtgccatagacataagccatggcgcctcggacccagatttatgaacctgatcaaagaggcaagtgatgctccctcacagcccaggggcccttctgagcactgttgggcttgc

SEQ ID NO: 26871 - DNA, 690 bp, Homo sapiens
  MAP TO AL096801.16; EXPRESSED IN PLACENTA, SIGNAL = 1.4; EXPRESSED IN HBL100, SIGNAL = 1.1; EXPRESSED IN HELA, SIGNAL = 1.3; EXPRESSED IN BRAIN, SIGNAL = 1.2; EXPRESSED IN LUNG, SIGNAL = 2.1; EST_HUMAN HIT: BF530378.1, EVALUE 0.00e+00; NT HIT: gi11419183, EVALUE 0.00e+00; SWISSPROT HIT: P20333, EVALUE 6.00e-24
cttggattccttagcaccaccacagctcagccagaacagaaggcctcgaatctcattggcacataccgccatgttgaccgtgccaccggccaggtgctaacctgtgacaagtgtccagcaggaacctatgtctctgagcattgtaccaacacaagcctgcgcgtctgcagcagttgccctgtggggacctttaccaggcatgagaatggcatagagaaatgccatgactgtagtcagccatgcccatggccaatgattgagaaattaccttgtgctgccttgactgaccgagaatgcacttgcccacctggcatgttccagtctaacgctacctgtgccccccatacggtgtgtcctgtgggttggggtgtgcggaagaaagggacagagactgaggatgtgcggtgtaagcagtgtgctcggggtaccttctcagatgtgccttctagtgtgatgaaatgcaaagcatacacagactgtctgagtcagaacctggtggtgatcaagccggggaccaaggagacagacaacgtctgtggcacactcccgtccttctccagctccacctcaccttcccctggcacagccatctttccacgccctgagcacatggaaacccatgaagtcccttcctccacttatgttcccaaaggtaacttaacctcatgaattatttatttgaggaaggct

SEQ ID NO: 26872 - DNA, 871 bp, Homo sapiens
  MAP TO AL109928.12; EXPRESSED IN BRAIN, SIGNAL = 1.1; NT HIT: AL161495.2, EVALUE 2.20e+00; EST_HUMAN HIT: BF000018.1, EVALUE 0.00e+00; SWISSPROT HIT: P46379, EVALUE 2.10e+00
ttttcagttttttctcactcgatacagtggcatgaccacagctctctgcctttccctttttcctaggatgtgcatgtgcttgtgttttggaggccttacaggaatctgctgagtccagaatcacagctgcctgtttgggaactcgaatgtgaccgctggtttccaccttagagctgcttccactgccggacagatcccagcgctgcagcttcgtactcttacttgatttctttttcttttcttctgtcctcatttcaagggtttgcctctgagaacaaaacctggtaccaccaagcacatcaatgggtctaggggaagtctcaaatgcataatgtgatgggtggatttcttcatggtgaaaagctttctttcgggaagggcctgactttgaagccccttcctggtgaggtagtggcttggacagagcactagcaattagcttacttctcccagggcttttcagtgcccctgaggtcccaggggcagtggggggccttgctttgcccccctttgctttttcacactgtacagtctggacttgcagccactcaagctgaataagtctatcgatatacttcccaagaagtcctcccactcggggcacggcttccgttttgttctctgcgttcagaagcagggccatatctcgtaggtcccaggagctgaaaggggatggaaggaaattaggataatagtattcaggttttgtatggccctgaccagggtgaagatcaaagtaaactggatcaatttcttcagctcgaagattgagatctggaggtgtgaggggagaaggaggaatgggaattctttccgaatcagagagatcacttgcactgtcctcatcagcattctctttaataattttcat

SEQ ID NO: 26873 - DNA, 140 bp, Homo sapiens
  MAP TO AL035464.20; EXPRESSED IN LUNG, SIGNAL = 0.65; EXPRESSED IN BRAIN, SIGNAL = 0.7; EST_HUMAN HIT: AA203342.1, EVALUE 3.00e-04; SWISSPROT HIT: Q50318, EVALUE 6.70e+00
ttctcctggcatggagccatcactttatgagcaggcaaaggcaatcgagacctggtattcttggcctgcttcacctggaagagaacttctgccttacaaagaggggcctgggtggaggaaggaagccccagatctctcat

SEQ ID NO: 26874 - DNA, 108 bp, Homo sapiens
  MAP TO AL050315.8; EXPRESSED IN LUNG, SIGNAL = 0.7; EXPRESSED IN BRAIN, SIGNAL = 1.2; EXPRESSED IN PLACENTA, SIGNAL = 0.6; EST_HUMAN HIT: N94059.1, EVALUE 1.00e-49; SWISSPROT HIT: P10894, EVALUE 6.00e-14; NT HIT: AJ278314.1, EVALUE 2.00e-54
gagaaaggggctgagacatgtcttcattcaaatccagtttctcaggtgaaacgactccgttttcttctccactcagatagcgcatgaacccatccactgatatttgtc

SEQ ID NO: 26875 - DNA, 86 bp, Homo sapiens
  MAP TO AC007744.1; EXPRESSED IN PLACENTA, SIGNAL = 0.69; EXPRESSED IN LUNG, SIGNAL = 0.64; EXPRESSED IN BRAIN, SIGNAL = 1.4; EXPRESSED IN HELA, SIGNAL =  38; EST_HUMAN HIT: AA449549.1, EVALUE 2.00e-41; NT HIT: AB002467.1, EVALUE 7.00e-01
gttgtgtggaggaaacttggagatgctgcaggttcgtgtcctggaattaggcaacatttgtcaggaaaccagtacaaaggaccaat

SEQ ID NO: 26876 - DNA, 108 bp, Homo sapiens
  MAP TO AC006499.11; EXPRESSED IN ADULT LIVER, SIGNAL =   1; EXPRESSED IN PLACENTA, SIGNAL = 0.82; EXPRESSED IN BT474, SIGNAL = 0.66; EXPRESSED IN FETAL LIVER, SIGNAL = 0.76; EXPRESSED IN LUNG, SIGNAL = 0.6; EXPRESSED IN HELA, SIGNAL = 0.74; EXPRESSED IN BRAIN, SIGNAL = 1.1; EXPRESSED IN HBL100, SIGNAL = 1.1; EST_HUMAN HIT: AI950841.1, EVALUE 4.00e-04; SWISSPROT HIT: P41385, EVALUE 1.40e+00; NT HIT: AF074422.1, EVALUE 2.00e-04
cagcaggtgatgaacagtacaatactcaagcatcttagagcagttcacgtgtatctcagcaatttagtgctattttctcgtacaaggccttcctgcactggtacacag

SEQ ID NO: 26877 - DNA, 171 bp, Homo sapiens
  MAP TO AC007219.1; EXPRESSED IN HBL100, SIGNAL = 1.1; EXPRESSED IN HELA, SIGNAL = 0.94; EXPRESSED IN PLACENTA, SIGNAL = 0.78; EXPRESSED IN BRAIN, SIGNAL = 0.9; EXPRESSED IN ADULT LIVER, SIGNAL = 0.94; EXPRESSED IN LUNG, SIGNAL = 0.92; EXPRESSED IN FETAL LIVER, SIGNAL = 0.84; EXPRESSED IN BONE MARROW, SIGNAL = 0.94; EXPRESSED IN BT474, SIGNAL = 0.7; NT HIT: AJ251835.1, EVALUE 1.60e+00
atgcaggtgaccgtccccacatgctgctgcctcagcctgaccttcctcctgctctctctctctctctctctcccctggcgccaaattggcctgccctcagatctggcacttaacaagacagacagacagagaacaaagaccagcgtgaactccgtcaagctcatctttcat

SEQ ID NO: 26878 - DNA, 103 bp, Homo sapiens
  MAP TO AC007244.1; EXPRESSED IN ADULT LIVER, SIGNAL =   2; EXPRESSED IN BT474, SIGNAL = 1.3; EXPRESSED IN FETAL LIVER, SIGNAL = 1.2; EXPRESSED IN LUNG, SIGNAL = 1.2; EXPRESSED IN BRAIN, SIGNAL = 1.2; EXPRESSED IN BONE MARROW, SIGNAL = 1.3; EXPRESSED IN PLACENTA, SIGNAL = 3.3; EXPRESSED IN HBL100, SIGNAL = 1.4; EXPRESSED IN HELA, SIGNAL = 1.6; EST_HUMAN HIT: AA368311.1, EVALUE 3.00e-34; NT HIT: AF009668.1, EVALUE 1.00e-36; SWISSPROT HIT: P10272, EVALUE 8.00e-05
tcctatgttcaggtgtataatgacccctgcttctgctagaatgtctctccctaataagggagtggggctttcaggtataattagaaaagcatgtgaaagtaaa

SEQ ID NO: 26879 - DNA, 78 bp, Homo sapiens
  MAP TO AC007255.2; EXPRESSED IN PLACENTA, SIGNAL = 1.4; EXPRESSED IN HBL100, SIGNAL = 0.98; EXPRESSED IN ADULT LIVER, SIGNAL = 1.2; EXPRESSED IN FETAL LIVER, SIGNAL =   1; EXPRESSED IN BONE MARROW, SIGNAL = 1.2; EXPRESSED IN BRAIN, SIGNAL = 0.99; EXPRESSED IN HELA, SIGNAL = 0.99; NT HIT: U07223.1, EVALUE 1.00e-36; SWISSPROT HIT: Q03070, EVALUE 1.00e-09
atctcctccctggttcgaagggctgccctcacacacaacgacaaccacttcaattatgagaagacacacaactttaag

SEQ ID NO: 26880 - DNA, 420 bp, Homo sapiens
  MAP TO AL034420.16; EXPRESSED IN FETAL LIVER, SIGNAL = 1.1; EXPRESSED IN LUNG, SIGNAL = 0.65; EXPRESSED IN PLACENTA, SIGNAL = 0.67; EXPRESSED IN BT474, SIGNAL = 0.74; EXPRESSED IN BONE MARROW, SIGNAL = 0.79; EXPRESSED IN HBL100, SIGNAL = 0.86; EXPRESSED IN HELA, SIGNAL = 0.85; EXPRESSED IN ADULT LIVER, SIGNAL = 0.73; EXPRESSED IN BRAIN, SIGNAL = 0.72; NT HIT: gi11420514, EVALUE 0.00e+00; EST_HUMAN HIT: AI632569.1, EVALUE 0.00e+00; SWISSPROT HIT: P48006, EVALUE 1.40e+00
ttagctgaccgcaatcttgttttcttccaggaagtgaggaaactggtgtttgggaacgccgtcagtagcacttggtttttccacatctgcactgatacccgactgggagccatccatcttggagacagtggcgttattcacaacggaggtggcccccaaggaaaccgggagggtaggaacccccccactctggatcacagagatctcattggtcttcacggccagaccgccattgagcatgctggtgtactggttccacacaacagggtccacattcactgaaggggccaggatttccttgggaaagatttctgagactctttttccgtccgtacctaacagagccatggtgttctcgatggccaacttccttccacggcgggctgagttattgttcgccccgtgtgtcatgtagtgaac

SEQ ID NO: 26881 - DNA, 205 bp, Homo sapiens
  MAP TO AL049767.9; EXPRESSED IN LUNG, SIGNAL = 0.75; EXPRESSED IN HELA, SIGNAL = 0.61; EXPRESSED IN BRAIN, SIGNAL = 0.7; EXPRESSED IN PLACENTA, SIGNAL = 0.61; EXPRESSED IN BONE MARROW, SIGNAL = 1.1; EXPRESSED IN ADULT LIVER, SIGNAL = 0.71; NT HIT: gi11420870, EVALUE 1.00e-112; EST_HUMAN HIT: BE673147.1, EVALUE 1.00e-112; SWISSPROT HIT: P04279, EVALUE 2.00e-36
ttatgtaaataatgggtttcggtcgttgttaagatgttgtgccaaatgacgatcactgtcatcttcctgctctataattacaatatccaatcccccatgagatccatgttggtgtctgcctttttgttcatgactgagtaggtcttgttctctatttgtagattggccagactctccttttgcattttcaccatgccatggctct

SEQ ID NO: 26882 - DNA, 111 bp, Homo sapiens
  MAP TO AC009227.1; EXPRESSED IN FETAL LIVER, SIGNAL = 0.65; EXPRESSED IN LUNG, SIGNAL = 0.71; EXPRESSED IN PLACENTA, SIGNAL = 0.67; EXPRESSED IN BONE MARROW, SIGNAL = 0.71; EXPRESSED IN HELA, SIGNAL = 0.66; EXPRESSED IN BRAIN, SIGNAL = 0.93; SWISSPROT HIT: Q10473, EVALUE 2.00e-11; NT HIT: U35890.1, EVALUE 5.20e-02
tctgggagtccggatagatgttttctaggtaccaagaaaagggcttacacttcagattttctcttagtgtttttctgactgacacatctccataatccactttgacaacac

SEQ ID NO: 26883 - DNA, 156 bp, Homo sapiens
  MAP TO AL049594.4; EXPRESSED IN PLACENTA, SIGNAL = 1.3; EXPRESSED IN BRAIN, SIGNAL = 0.9; NT HIT: U15128.1, EVALUE 9.00e-02; EST_HUMAN HIT: AA258549.1, EVALUE 1.00e-74; SWISSPROT HIT: P28155, EVALUE 3.40e-01
accaacaaagccgtggccaagggggacttgcaccaggccagcaccagctcccggcgggccctattcctggcagtgctgtccatcaccattgggactggcgtctatgtgggcgtggccgtggccctcatcgcctacctctccaagaacaaccacctg

SEQ ID NO: 26884 - DNA, 277 bp, Homo sapiens
  MAP TO AL049828.2; EXPRESSED IN BRAIN, SIGNAL = 0.84; SWISSPROT HIT: P44520, EVALUE 5.20e-01; EST_HUMAN HIT: BF698193.1, EVALUE 2.50e-01
atagtgtgataacaattataattatagcgttgcttgcccttccacagtctttgctaaagaaatcacccagaatgatatttttacaggtcatatcatgacacatctcttgtggcatcccatcttcttcattgccagtagtcaaattcaagccctgcctaccattcacaaagccctaacttatctggcccctatctaccactttggtttcatctcctaccatccccctccccttgggtttcttattgttcctcgaatgtgccaagcattctcccttcct

SEQ ID NO: 26885 - DNA, 81 bp, Homo sapiens
  MAP TO AP000084.1; EXPRESSED IN FETAL LIVER, SIGNAL = 3.1; EXPRESSED IN PLACENTA, SIGNAL = 0.7; EXPRESSED IN BT474, SIGNAL = 0.61; EXPRESSED IN BONE MARROW, SIGNAL = 0.79; EXPRESSED IN HBL100, SIGNAL = 5.3; EXPRESSED IN LUNG, SIGNAL = 0.62; EXPRESSED IN HELA, SIGNAL = 0.66; EXPRESSED IN ADULT LIVER, SIGNAL = 0.75; EXPRESSED IN BRAIN, SIGNAL = 1.1; NT HIT: U49042.1, EVALUE 1.40e-01; EST_HUMAN HIT: AA442272.1, EVALUE 3.00e-09
gaagaaaaagcagcatttgtagcctttcttctcaatgatattgaacataccttttatcgtggagctgctggagaaaaacag

SEQ ID NO: 26886 - DNA, 456 bp, Homo sapiens
  MAP TO AC007881.2; EXPRESSED IN BRAIN, SIGNAL = 0.99; EXPRESSED IN LUNG, SIGNAL = 1.1; EXPRESSED IN PLACENTA, SIGNAL = 0.94; EXPRESSED IN HELA, SIGNAL = 1.2; EXPRESSED IN HBL100, SIGNAL = 0.97; EXPRESSED IN ADULT LIVER, SIGNAL = 1.2; EXPRESSED IN BT474, SIGNAL = 1.1; EXPRESSED IN FETAL LIVER, SIGNAL =   1; NT HIT: M10976.1, EVALUE 1.00e-125; EST_HUMAN HIT: AW867015.1, EVALUE 0.00e+00; SWISSPROT HIT: P03340, EVALUE 7.00e-16
ggttacactgcaaactctgacagccaagctgagtttcattcccagggcccccccttcccttgcctccttcggaggacccctctgattgctgcagctgacaaccaggtcggtgtttcgccgggcctgatgtccattctctttgcggttttcctcaaggcttactgcagccctgtttacaaacacctggttggctatttctaataattgtgatgtattcatccctgcaaacccagcctgtttctgcagttttcttccaatgtcttctgcgctttgactgactaaagccatgtgaatcatgcgctgattttcaagactatcaggatcaaagggagtatacatacaataggcctcacacggtgtctcgtagaattgtgctggactttcttcttttccctgaatgacctcagagaccttgttaacgtttgtggccttctgtgctcccctctttaatccttc

SEQ ID NO: 26887 - DNA, 177 bp, Homo sapiens
  MAP TO AC007511.1; EXPRESSED IN PLACENTA, SIGNAL = 2.1; EXPRESSED IN ADULT LIVER, SIGNAL = 1.2; EXPRESSED IN BT474, SIGNAL = 0.96; EXPRESSED IN LUNG, SIGNAL = 1.1; EXPRESSED IN BRAIN, SIGNAL = 0.99; EXPRESSED IN HBL100, SIGNAL = 0.98; EXPRESSED IN HELA, SIGNAL = 1.6; SWISSPROT HIT: P11364, EVALUE 1.30e+00; NT HIT: AL163209.2, EVALUE 3.00e-42; EST_HUMAN HIT: AA714294.1, EVALUE 4.00e-42
  unsure 154
agtgggcccagtgggttctgggactcatcctgtggttatttcccctgtgccagaatgcaaacttgacatagacatacttagcagctggcagaacccccacattagctccctgacttgtagggtgagggctattatggtgggaaaggccaaatgngaagccattagagctgcctctac

SEQ ID NO: 26888 - DNA, 165 bp, Homo sapiens; identical to SEQ ID NO: 18471
  MAP TO AC010092.2; EXPRESSED IN HBL100, SIGNAL = 0.99; EXPRESSED IN PLACENTA, SIGNAL = 2.9; EXPRESSED IN BRAIN, SIGNAL = 1.5; SWISSPROT HIT: P06915, EVALUE 4.40e-01; EST_HUMAN HIT: BE173421.1, EVALUE 4.00e-88; NT HIT: AF162666.1, EVALUE 3.00e-88

SEQ ID NO: 26889 - DNA, 145 bp, Homo sapiens
  MAP TO AC011743.2; EXPRESSED IN BRAIN, SIGNAL = 0.97; EXPRESSED IN HBL100, SIGNAL =   1; EXPRESSED IN PLACENTA, SIGNAL = 0.93; EXPRESSED IN ADULT LIVER, SIGNAL =   1; SWISSPROT HIT: P38755, EVALUE 8.00e-01; NT HIT: gi9256631, EVALUE 8.30e-02; EST_HUMAN HIT: AI821149.1, EVALUE 2.00e-76
gtgaattattggaattctaacatgaatgaagtccagggggtggtgatagatcaggaggggaaggcggtgtaccggctgtttggaaagtggcatgaaggactctactgtggtgtggccccctctgcaaagtgcatttggagaccag

SEQ ID NO: 26890 - DNA, 183 bp, Homo sapiens
  MAP TO AL031284.9; EXPRESSED IN BT474, SIGNAL = 1.2; EXPRESSED IN ADULT LIVER, SIGNAL = 1.2; EXPRESSED IN HBL100, SIGNAL = 0.97; EXPRESSED IN HELA, SIGNAL =   1; EXPRESSED IN BRAIN, SIGNAL = 0.94; EXPRESSED IN BONE MARROW, SIGNAL = 0.93; SWISSPROT HIT: P54264, EVALUE 2.20e+00; EST_HUMAN HIT: AU130984.1, EVALUE 6.00e-75; NT HIT: gi8922637, EVALUE 4.00e-75
tacatttttatacctgaaattcctggtggtgtgggcacttgtcctcctagcagattttgtcctggagttcagatttgaatacctgtggccattctggcttttcatcagaagcgtctatgattccttcagataccagggactggtatgtctggtaatacatgttttccatgtgtggggaccatt

SEQ ID NO: 26891 - DNA, 288 bp, Homo sapiens
  MAP TO AF109907.1; EXPRESSED IN BONE MARROW, SIGNAL = 1.3; EXPRESSED IN LUNG, SIGNAL = 1.8; EXPRESSED IN PLACENTA, SIGNAL = 1.7; EXPRESSED IN ADULT LIVER, SIGNAL =   1; EXPRESSED IN BT474, SIGNAL = 1.2; EXPRESSED IN BRAIN, SIGNAL = 1.1; EXPRESSED IN HELA, SIGNAL =   1; EXPRESSED IN HBL100, SIGNAL = 1.9; EXPRESSED IN FETAL LIVER, SIGNAL = 1.1; NT HIT: AF109907.1, EVALUE 2.00e-13; EST_HUMAN HIT: AW858464.1, EVALUE 1.00e-12
aaactggaagaagagaaaggcaaaaaggaaaaagaaagacaggaaattgagaaagaacggagagaaagagagagggagcgtgaaagggaacgagaaaggcgagaacgggaacgagaaagggaaagagaacgtgaacgagaaaaggagaaagaacgggagcgggaacgagaacgggatagggaccgtgaccggacaaaagagagagaccgagatcgggatcgagagagagatcgtgaccgggatagagaaaggagctcagatcgtaataaggatcgcagtcgatcaagg

SEQ ID NO: 26892 - DNA, 128 bp, Homo sapiens
  MAP TO AC007679.2; EXPRESSED IN PLACENTA, SIGNAL = 0.85; EXPRESSED IN BONE MARROW, SIGNAL = 0.79; EXPRESSED IN FETAL LIVER, SIGNAL = 0.97; EXPRESSED IN ADULT LIVER, SIGNAL = 0.71; EXPRESSED IN BRAIN, SIGNAL = 0.77; EXPRESSED IN BT474, SIGNAL = 1.2; EXPRESSED IN LUNG, SIGNAL = 0.82; NT HIT: gi8923290, EVALUE 2.00e-66; SWISSPROT HIT: Q58243, EVALUE 1.80e+00; EST_HUMAN HIT: BF327621.1, EVALUE 9.00e-64
ccaactgatgtttctgggtgcacagtttcaccagtctctgcagtcggcttatacatgagaagtgtggagagaaggctgtggctttcatgaggatccggtcagtcctgggtgggtccacagtgggagcc

SEQ ID NO: 26893 - DNA, 157 bp, Homo sapiens
  MAP TO AC008079.7; EXPRESSED IN FETAL LIVER, SIGNAL =   1; EXPRESSED IN LUNG, SIGNAL = 0.68; EXPRESSED IN PLACENTA, SIGNAL = 0.65; EXPRESSED IN BONE MARROW, SIGNAL = 0.64; EXPRESSED IN HBL100, SIGNAL = 1.8; EXPRESSED IN ADULT LIVER, SIGNAL = 1.1; EXPRESSED IN BRAIN, SIGNAL = 0.89; EXPRESSED IN BT474, SIGNAL = 1.2; EXPRESSED IN HELA, SIGNAL = 1.4; SWISSPROT HIT: Q9UMW8, EVALUE 5.00e-22; EST_HUMAN HIT: BE886622.1, EVALUE 9.00e-77; NT HIT: gi8394518, EVALUE 5.00e-77
gatcacggtgcccaggggagctgacgagcagaggagaagcgtccctttccagatgcttctgctgctggagaagatgcaggacagccggcagaaagcagtgcggcccctggagctggcctactgcctgcagaagtgcaacgtgccctgtaagataccc

SEQ ID NO: 26894 - DNA, 288 bp, Homo sapiens
  MAP TO AC008277.1; EXPRESSED IN ADULT LIVER, SIGNAL = 0.85; EXPRESSED IN BRAIN, SIGNAL = 1.3; EXPRESSED IN PLACENTA, SIGNAL = 1.5; EXPRESSED IN BT474, SIGNAL = 1.3; EXPRESSED IN FETAL LIVER, SIGNAL =   1; EXPRESSED IN HELA, SIGNAL = 0.89; EXPRESSED IN LUNG, SIGNAL = 1.1; EXPRESSED IN HBL100, SIGNAL = 0.86; EXPRESSED IN BONE MARROW, SIGNAL = 1.4; EST_HUMAN HIT: AV701869.1, EVALUE 0.00e+00; SWISSPROT HIT: Q05004, EVALUE 8.70e-01; NT HIT: gi11430990, EVALUE 4.00e-98
tcagaaagggaggacttggtatattttgaacataaatcatttactaaattgtgcaaggagcatgatggagaatttactggcgaagacgaaagcagtgcacatgcactagaacggaagagtgacaaccccctagatatagctgtaaccaggctggctgatttggagcggaacattgaaagaaggtatctgaagagccccttaagtaccaccattcagatcaaactggataatgtgggcacagttactgtccctgctcctgcaccatccgttagtggtgatggtgacggg

SEQ ID NO: 26895 - DNA, 108 bp, Homo sapiens
  MAP TO AL035686.11; EXPRESSED IN FETAL LIVER, SIGNAL = 0.82; EXPRESSED IN LUNG, SIGNAL =   1; EXPRESSED IN BRAIN, SIGNAL = 0.95; EXPRESSED IN HBL100, SIGNAL = 1.2; EXPRESSED IN HELA, SIGNAL = 0.69; EXPRESSED IN ADULT LIVER, SIGNAL = 0.72; EXPRESSED IN PLACENTA, SIGNAL = 0.72; EXPRESSED IN BONE MARROW, SIGNAL = 0.7; SWISSPROT HIT: P38229, EVALUE 4.00e+00
cgatgcatacggaaacatcaccaacactgatcctttctttatctgaaattttaatattttcttcatcatggatttttggcattcatttttattttttaattaaatcat

SEQ ID NO: 26896 - DNA, 183 bp, Homo sapiens
  MAP TO AC008176.1; EXPRESSED IN FETAL LIVER, SIGNAL = 0.67; EXPRESSED IN LUNG, SIGNAL = 0.87; EXPRESSED IN ADULT LIVER, SIGNAL = 0.88; EXPRESSED IN BRAIN, SIGNAL =   1; EXPRESSED IN BONE MARROW, SIGNAL = 0.65; EXPRESSED IN HELA, SIGNAL = 0.64; NT HIT: U50400.1, EVALUE 1.10e-01; SWISSPROT HIT: Q9WVZ1, EVALUE 2.20e+00; EST_HUMAN HIT: AA759149.1, EVALUE 2.00e-89
tgtagccttccgccagcgagctgaaaccagttaatcctcccatggctgcataaggaatgtcctgtcccactggtttttcctgagccaatctttcttgcttagtttccactactgtgtcatgggcatatgcaggctgaccacaagcacaagtgaagcagctatggaatcctgaacacttggaac

SEQ ID NO: 26897 - DNA, 193 bp, Homo sapiens
  MAP TO AL035420.14; EXPRESSED IN HELA, SIGNAL =   1; EXPRESSED IN PLACENTA, SIGNAL = 0.65; EXPRESSED IN BT474, SIGNAL = 0.73; EXPRESSED IN FETAL LIVER, SIGNAL = 0.58; EXPRESSED IN LUNG, SIGNAL = 0.69; EXPRESSED IN BRAIN, SIGNAL = 0.71; EXPRESSED IN BONE MARROW, SIGNAL = 0.67; EST_HUMAN HIT: AI150273.1, EVALUE 7.00e-03
tgttttgataattaaatgagataacatccttggaatgcttagcataatgtgagtgcataagaaacatttgataaatgtcaactattatgaccattattgctactccacaattcagctcaacattcttgaaggcctttgtattgggccctaggcctacaaaaacagaaatgaatccagcagtattcacaggttg

SEQ ID NO: 26898 - DNA, 201 bp, Homo sapiens
  MAP TO AL096773.6; EXPRESSED IN ADULT LIVER, SIGNAL = 1.2; EXPRESSED IN BT474, SIGNAL = 0.99; EXPRESSED IN BONE MARROW, SIGNAL = 0.92; EXPRESSED IN BRAIN, SIGNAL = 0.9; EXPRESSED IN LUNG, SIGNAL = 3.3; NT HIT: M37928.1, EVALUE 1.00e-109; SWISSPROT HIT: P23109, EVALUE 9.00e-33; EST_HUMAN HIT: AW342074.1, EVALUE 1.00e-106
gtggacacccatatccatgcagccgcttgcatgaaccagaaacatctgctgcgttttattaagaaatcttaccaaattgatgctgacagagtggtctatagcaccaaagagaagaatctgaccctaaaggaactttttgctaaattaaaaatgcatccttatgacctgactgttgattctctggatgttcatgctgtaggt

SEQ ID NO: 26899 - DNA, 173 bp, Homo sapiens
  MAP TO AC007910.1; EXPRESSED IN LUNG, SIGNAL = 0.83; EXPRESSED IN ADULT LIVER, SIGNAL = 0.83; EXPRESSED IN BRAIN, SIGNAL = 0.73; EXPRESSED IN PLACENTA, SIGNAL = 0.73; EXPRESSED IN BT474, SIGNAL = 0.85; EXPRESSED IN FETAL LIVER, SIGNAL = 0.8; EXPRESSED IN HELA, SIGNAL = 0.92; EXPRESSED IN HBL100, SIGNAL = 0.79; EXPRESSED IN BONE MARROW, SIGNAL = 0.94; EST_HUMAN HIT: AW815200.1, EVALUE 4.00e-32; SWISSPROT HIT: P26444, EVALUE 7.50e-01; NT HIT: gi7705396, EVALUE 4.00e-93
tggaagtaaacattgctcaccagatctctctacgttcagaagcattttttcatgcaatgacctctcaacacgagttgcaggactacctcaggaaaacttcccaggctgtaaaaatgcttcgagataaaattgcacagattgataaagtaatgtgtgaaggatcactccacatt

SEQ ID NO: 26900 - DNA, 991 bp, Homo sapiens
  MAP TO AC007498.2; EXPRESSED IN BT474, SIGNAL = 1.1; EXPRESSED IN FETAL LIVER, SIGNAL = 1.2; EXPRESSED IN BONE MARROW, SIGNAL = 1.2; EXPRESSED IN LUNG, SIGNAL = 1.4; EXPRESSED IN BRAIN, SIGNAL = 1.4; EXPRESSED IN HELA, SIGNAL = 0.96; EXPRESSED IN HBL100, SIGNAL = 0.94; EXPRESSED IN PLACENTA, SIGNAL = 0.97; EXPRESSED IN ADULT LIVER, SIGNAL = 1.5; SWISSPROT HIT: P39806, EVALUE 5.00e-43; EST_HUMAN HIT: AU131453.1, EVALUE 0.00e+00; NT HIT: gi11430834, EVALUE 0.00e+00
gtcctgagctccccagcggcagactgcggccccgcgggcagtgccaccaccttcaccaaccctttgttgccgctcatgtccgagcagttcaaggccaagtttccttttgggggactcctggactcagctcaggcatcagagacgtccaagcttcagcaactggtagaaaacattgacaagaaggccactgaccccaatgagtgcatcatctgccaccgggttctcagctgccagagcgccttgaaaatgcactacaggacacacactggggagaggccctttaagtgtaagatctgtggccgggctttcaccacgaaagggaatcttaaaacccactacagtgtccatcgtgctatgcccccgctcagagtccagcattcctgccccatctgccagaagaagttcacgaacgctgtggtcctgcagcagcacatccgaatgcatatgggaggccagatccccaacaccccagtccccgacagctactctgagtccatggagtctgacacaggttcctttgatgagaaaaattttgatgacctagacaacttctctgatgaaaacatggaagactgtcctgagggcagcatccctgatacacctaagtctgcagacgcctcccaagacagcttatcctcttcgcctttgcccctcgagatgtcgagcatcgctgctttggaaaatcagatgaagatgatcaatgctggcctggcagagcagctacaggccagcctgaagtcagtggagaatgggtccatcgagggggatgtcctgaccaatgattcatcctcagtgggtggtgacatggaaagccaaagtgctggcagcccagccatctcagagtctacctcttccatgcaggctctgtccccgtccaacagcacgcaggagttccacaagtcacccagcattgaggagaaaccacagagagcggtcccaagcgagtttgccaatggtttgtctcccaccccagtgaatggtggggctttgg

SEQ ID NO: 26901 - DNA, 118 bp, Homo sapiens
  MAP TO AC006344.2; EXPRESSED IN HELA, SIGNAL = 0.7; EXPRESSED IN BRAIN, SIGNAL = 0.69; EXPRESSED IN BT474, SIGNAL = 0.68; EXPRESSED IN ADULT LIVER, SIGNAL = 0.67; EXPRESSED IN PLACENTA, SIGNAL = 0.78; EXPRESSED IN LUNG, SIGNAL = 0.89; EXPRESSED IN FETAL LIVER, SIGNAL = 0.72; EXPRESSED IN HBL100, SIGNAL = 0.82; EXPRESSED IN BONE MARROW, SIGNAL = 1.5; EST_HUMAN HIT: AA953593.1, EVALUE 2.00e-60; SWISSPROT HIT: P28028, EVALUE 7.00e-17; NT HIT: M21001.1, EVALUE 2.00e-60
tctcatctcttttctttttgaggcactctgccattaatctcttcatggcttttggacagttactccgtaccttactgagatctggagacaggtatcctcgtcccaccataaaaattat

SEQ ID NO: 26902 - DNA, 375 bp, Homo sapiens; identical to SEQ ID NO: 10267
  MAP TO AC008045.4; EXPRESSED IN BONE MARROW, SIGNAL =   1; EXPRESSED IN LUNG, SIGNAL =   1; EXPRESSED IN BRAIN, SIGNAL =   1; EXPRESSED IN HELA, SIGNAL = 0.94; EXPRESSED IN PLACENTA, SIGNAL =   1; EXPRESSED IN HBL100, SIGNAL =   1; EXPRESSED IN BT474, SIGNAL = 0.91; EXPRESSED IN ADULT LIVER, SIGNAL = 1.2; EXPRESSED IN FETAL LIVER, SIGNAL = 1.1; NT HIT: L08648.1, EVALUE 5.90e-02; SWISSPROT HIT: Q9ZHE4, EVALUE 7.70e+00

SEQ ID NO: 26903 - DNA, 255 bp, Homo sapiens
  MAP TO AC007683.2; EXPRESSED IN FETAL LIVER, SIGNAL = 0.9; EXPRESSED IN LUNG, SIGNAL = 0.85; EXPRESSED IN BRAIN, SIGNAL = 0.9; EXPRESSED IN BT474, SIGNAL =   1; EXPRESSED IN BONE MARROW, SIGNAL =   1; EXPRESSED IN HBL100, SIGNAL = 1.4; EXPRESSED IN HELA, SIGNAL = 0.72; EXPRESSED IN ADULT LIVER, SIGNAL = 1.4; SWISSPROT HIT: P42703, EVALUE 5.10e+00; EST_HUMAN HIT: AW937975.1, EVALUE 0.00e+00; NT HIT: gi11465934, EVALUE 3.90e-02
gtggattcatcattcctttccctttatgacagccacgtagcaaaggagattcttcttcgagtacttacgctatttcagaatataaagaactgcctcaaaatagaaggccatttagctgtgcagcctactttcactgaaggttcattgtttttcctgttacatggagaagaatgtgcccagaaaataagagctttagttgatcaccatgatgcagaggtgaaggaaaaggttgtaacaataatacccaaaatctga

SEQ ID NO: 26904 - DNA, 101 bp, Homo sapiens
  MAP TO AC010906.2; EXPRESSED IN ADULT LIVER, SIGNAL = 1.4; EXPRESSED IN LUNG, SIGNAL = 1.1; EXPRESSED IN BRAIN, SIGNAL = 1.1; EXPRESSED IN PLACENTA, SIGNAL = 1.4; EXPRESSED IN HBL100, SIGNAL = 0.98; EXPRESSED IN HELA, SIGNAL = 1.1; NT HIT: gi8393806, EVALUE 3.40e+00; SWISSPROT HIT: O95180, EVALUE 9.10e+00
agtcctcctcatgctctgggaacgcctcctcaaggctgagctgcagcattggcctggagccctgagtcagaggggtcctagcatcaaacctgtgccaccga

SEQ ID NO: 26905 - DNA, 990 bp, Homo sapiens
  MAP TO AC007842.1; EXPRESSED IN BONE MARROW, SIGNAL = 1.5; EXPRESSED IN HBL100, SIGNAL = 0.96; EXPRESSED IN ADULT LIVER, SIGNAL = 0.67; EXPRESSED IN PLACENTA, SIGNAL = 0.59; EXPRESSED IN BT474, SIGNAL = 1.2; EXPRESSED IN FETAL LIVER, SIGNAL = 0.8; EXPRESSED IN LUNG, SIGNAL = 0.61; EXPRESSED IN BRAIN, SIGNAL = 0.74; EST_HUMAN HIT: BF672054.1, EVALUE 0.00e+00; SWISSPROT HIT: Q14585, EVALUE 0.00e+00; NT HIT: gi4507974, EVALUE 9.00e-28
agccacgattaaaggccttcccacactccttacatttaaatggcttctcaccagtatgaatgatctgatgttgagcaagctgtgtcagaagaccaaaggcctttccgcattctttacattcaaagggtttctcaccagtatgaattcggtaatgttcagtaagctggtaatgatatctaaaggtcttcctacactccttacatacaaagggtttcgcactggaatgagttttctgatgctgaataaggtttgaaacacgactaaagcctttcccacactccttacattcatatggttttacaccagcatgaatactctgatgttgaacaaggtttgagacacgattaaaggacttcccacattctttacatttaaatggcttctcacctgtgtgaatgttcttatggtgattaagctgggtgtgaagactgaaggccttgccacattccttacattcaaagggcttctcaccagtatgaaatttctgatgtcgaataaggtgcatatgaagtcgaaaggctttcccacattccttacattcaaagggtttctttccggtatgaatacttcgatgttgattaagatttgaaccacgacgaaagaatttcccacattccttacattcaaagggtttctcacctgtatgagttttctcatgttgagaaagttgtaggtgaagtctaaaagccttcccacactccttacattcatagggcttctcaccagtgtgaatactctgatgttgaacaaggttcgagccacgattgaaggccttcccacagtctttacattcaaatggtttctcaccagtatgaatgttcttatgtcgagcaagctgtgtcagaagactaaaggcctttccacattctttacattcaaagggtttcccaccagtatgaatttggcaatgttgaataagttggtaatgatatcgaaaggccatctcacattccctacatacaaagggtttctcattggaatgaatttttt

SEQ ID NO: 26906 - DNA, 95 bp, Homo sapiens
  MAP TO AC005973.2; EXPRESSED IN BRAIN, SIGNAL = 0.68; EXPRESSED IN BT474, SIGNAL = 0.75; EXPRESSED IN BONE MARROW, SIGNAL = 0.78; EXPRESSED IN ADULT LIVER, SIGNAL = 0.68; EXPRESSED IN FETAL LIVER, SIGNAL = 0.8; EXPRESSED IN LUNG, SIGNAL = 0.63; EXPRESSED IN PLACENTA, SIGNAL = 0.77; EST_HUMAN HIT: AA034109.1, EVALUE 1.00e-08; NT HIT: AB041926.1, EVALUE 8.00e-47; SWISSPROT HIT: P50527, EVALUE 7.00e+00
ccgcagggcggacaggtcgatgtcgtccaggctgcgggcgggggctgggtcgcccatggcctccgtggggaacggggcaccggggccgctcacgc

SEQ ID NO: 26907 - DNA, 168 bp, Homo sapiens
  MAP TO Z98884.11; EXPRESSED IN BONE MARROW, SIGNAL = 1.1; EXPRESSED IN FETAL LIVER, SIGNAL = 2.2; EXPRESSED IN LUNG, SIGNAL = 0.68; EXPRESSED IN HELA, SIGNAL = 0.6; EXPRESSED IN BRAIN, SIGNAL = 0.78; NT HIT: gi8567387, EVALUE 8.00e-70; EST_HUMAN HIT: H37988.1, EVALUE 2.00e-70; SWISSPROT HIT: O70361, EVALUE 2.00e-11
atgaccttgcagcaggtctatgccagtgtgaacaaaattaaaaatctgggtcagcagctctacattgagtcaatgaccaaatcatcattcaagccagtgacggggacacgcacagaaccgaatggtggtggtgagtcagcgaatggtggtggtgagtcagccggcagc

SEQ ID NO: 26908 - DNA, 319 bp, Homo sapiens
  MAP TO AL022319.2; EXPRESSED IN HELA, SIGNAL = 0.66; EXPRESSED IN BRAIN, SIGNAL = 0.92; EXPRESSED IN ADULT LIVER, SIGNAL = 1.1; EST_HUMAN HIT: AU119004.1, EVALUE 2.90e-01; NT HIT: AF223391.1, EVALUE 2.00e-01; SWISSPROT HIT: P07844, EVALUE 3.40e+00
caggcaatctcactccagagcctgtgctatcagcaactatgctattcatccaagtaggagcctagcttgaatttatggtgaggtttaaagggacattcgatttattctccgatctccctctaggactgggagctttgccatcctctcctatcaggctcatgctgcctcttctgtggaactaggcaactttcaaattgtggccctccgtcatggagccaagccatgctctgaccaattctgaaataatttggccttaatttatcaacagagaaatactgtatttcaccctattaagaatttgttaaatgttgttaaacct

SEQ ID NO: 26909 - DNA, 191 bp, Homo sapiens
  MAP TO AC007405.2; EXPRESSED IN LUNG, SIGNAL = 0.72; EXPRESSED IN ADULT LIVER, SIGNAL = 1.5; EXPRESSED IN HBL100, SIGNAL = 0.94; EXPRESSED IN HELA, SIGNAL = 0.65; EXPRESSED IN BRAIN, SIGNAL = 0.69; NT HIT: Y10554.1, EVALUE 7.00e+00; EST_HUMAN HIT: AA643697.1, EVALUE 4.00e-17
ttctgccattaactctagtggggcctgagtattctttttagggttactatcttcatcatcatcttcatcattggtatcatcttcaccatcatcctctgctgattctgacaatttatcatcaatatcctgaaggcaatattcattatttttctcctgctttacaatgactgcatctttgctcacttcaccta

SEQ ID NO: 26910 - DNA, 265 bp, Homo sapiens; identical to SEQ ID NO: 26731
  MAP TO AL121760.4; EXPRESSED IN BONE MARROW, SIGNAL = 2.2; EXPRESSED IN BRAIN, SIGNAL = 2.4; EXPRESSED IN HELA, SIGNAL = 1.6; EXPRESSED IN PLACENTA, SIGNAL = 1.7; EXPRESSED IN LUNG, SIGNAL = 1.7; EXPRESSED IN HBL100, SIGNAL = 1.5; EXPRESSED IN ADULT LIVER, SIGNAL = 1.5; EXPRESSED IN FETAL LIVER, SIGNAL = 1.4; EXPRESSED IN BT474, SIGNAL = 2.7; SWISSPROT HIT: P23091, EVALUE 4.20e-02; EST_HUMAN HIT: BE274262.1, EVALUE 1.60e-01; NT HIT: gi7525012, EVALUE 1.00e+01

SEQ ID NO: 26911 - DNA, 205 bp, Homo sapiens
  MAP TO AC011330.4; EXPRESSED IN HBL100, SIGNAL =   1; EXPRESSED IN HELA, SIGNAL =   1; EXPRESSED IN PLACENTA, SIGNAL = 1.1; EXPRESSED IN ADULT LIVER, SIGNAL = 1.1; EXPRESSED IN BT474, SIGNAL =   1; EXPRESSED IN LUNG, SIGNAL = 0.98; EXPRESSED IN BRAIN, SIGNAL = 1.4; NT HIT: gi6680821, EVALUE 4.00e-04; EST_HUMAN HIT: AW197851.1, EVALUE 4.00e-94; SWISSPROT HIT: Q24270, EVALUE 7.30e-01
caacatggtaacaacaaagtcaaagacattccaggcactcttccagaaaacagaaaagttggatagccacttaagaaggatctccaggatgaaaataagcaagataaaccaagctgccacctccaaggtcagcttcaatggccatagtttggtatttgtggattccagcaattctgtgaagatagagcaaaggaggaataaaagt

SEQ ID NO: 26912 - DNA, 3134 bp, Homo sapiens
  MAP TO AC002382.1; EXPRESSED IN HELA, SIGNAL = 1.5; EXPRESSED IN FETAL LIVER, SIGNAL = 1.8; EXPRESSED IN BT474, SIGNAL = 1.3; EXPRESSED IN BRAIN, SIGNAL = 1.2; EXPRESSED IN LUNG, SIGNAL = 1.4; EXPRESSED IN BONE MARROW, SIGNAL = 1.2; EXPRESSED IN PLACENTA, SIGNAL = 1.8; EXPRESSED IN HBL100, SIGNAL = 1.2; EXPRESSED IN ADULT LIVER, SIGNAL = 1.7; NT HIT: X66667.1, EVALUE 8.10e+00; EST_HUMAN HIT: AI190086.1, EVALUE 1.30e-01; SWISSPROT HIT: P32644, EVALUE 8.00e-03
atacaaagcccccagggtagccatagaaaagcaactccagcaaggaattttccccattaagaatggcagaaaggtatcatgcatgaagagtgctcttctccttaaaggaaaaaatctccccagaatcatatccgataaacagcggtccaccatgccaaatcgacaccaattacaatcagacaggcgttgtttgtttggaaatcaggtactgcaaacatcttcagatctcagcaatgcaaatcacagaacaggagtatcatttactttttccaaaaaagtgcacctaaaattagaatcttcagcatcagttttcagtgagaacacagaagaaacccatgattgtaacaagtcacccatttataaaacaaaacaaactgcagataagtgcaagtgctgcaggtttgcaaataaagatacacaccttaccaaggaaaaagaggtaaatatctcaccaagccatctggaaagtgttttacacaataccatctccataaactctaaaattttgcaagacaaacacgactctattgatgagacactagaagattcaattggcattcatgcttcattctctaaatctaacattcatctttcagatgtagattttactcctaccagcagagaaaaagaaactagaaatacattgaagaacactttagaaaattgtgttaatcacccatgccaagcaaatgcttccttcagcccaccaaacatttacaaccatagtgatgccaggatatctgaatgcctggatgagttttcatcactggagccaagtgaacaaaagagtacagtgcatctgaatccaaattccagaatagagaacagagaaaaatctttagataaaacagaaagagttagcaaaaatgttcaaagacttgtaaaagaagcatgtacccataatgtggcatctaaaccactaccttttctccacgttcaaagcaaggatggccacaccactcttcaatggcctacggaacttctgctctttacaaaaacagaaccctgtatctcttatggctgcaacccactgtattttgattttaagctttctcggaacacaaaggaagaccacaatctagaggacttaaaaacagaattgggtaagaagcccttggaattgaagactaaaagagagagccaagtctcaggtttaactgaagaccaacaaaaattgatccaagaagattatcaatatccgaaaccaaagacgatgatagctaatccggattgggaaaaattccagaggaaatataatttggactacagtgattctgagccaaataagagtgaatatactttcagtgcaaatgatttggaaatgaaaaatcctaaagtgcctctttacctcaacacatctctaaaggattgtgctggaaagaataatagtagtgagaacaaacttaaggaagcttcaagggcccattggcaaggctgcagaaaggcagttctaaatgatatagatgaggacctatcttttccttcctacatctctaggtttaaaaagcataaattgattccctgcagtcctcatttggaatttgaagatgaaagacaattcaactgcaagtccagtccttgtacagtagggggtcacagtgaccatgggaaagacttcagtgtaattttgaagagtaaccacatcagcatgaccagcaaggtttccggatgtggaaaccaaagatacaagagatactctccacagtcatgtttgagtagatattcttcctctttggacacatcccctagcagcatgtctagcttgagaagtacttgttcaagtcatagattcaatggtaatagcagaggtaatttgctctgcttccataaaagagaacaccactcagttgaaaggcacaaacggaaatgtctaaagcacaactgcttctacttgtctgatgatataacaaagagcagccaaatgcagtctgaaccacagaaagagaggaactgcaaattgtgggaatcatttaaaaatgaaaaatactcaaaacgtagatattgtcactgcagagaaagacaaaaactgggcaaaaatcaacaacaattttcagggctaaaatctacgagaatcatctattgtgattctaactcacagatttcctgtactggaagcagtaaaaaaccacctaattgccagggaactcagcacgacagattggactcttactcaatagagaaaatgtattacttgaataaaagcaagagaaatcaagagtctttgggcagccctcacatttgtgatctgggaaaagtcaggcccatgaagtgtaactccgggaatatcagctgccttctaaagaactgttccagtggcccttcagaaaccacagaatcaaacactgcagaaggagagaggacccctctaacagcaaaaatccttttagaaagagtacaagccaagaaatgtcaagaacaatcaagtaatgttgagatctcttcaaacagttgtaaaagtgaattagaggctccttcgcaagtcccatgcacaattcaacttgcaccatcaggctgtaacagacaagcattgcctttgtctgaaaaaatacagtatgcaagtgagagcagaaatgatcaagacagtgcaattccaaggactacggagaaagacaaaagcaaaagttcacacacaaataattttacaattttagcagacactgattgtgataaccatctttctaaaggtataattcacctagtaacagagtctcagtcactaaacataaaaagggatgcaacaacaaaagaacaatcaaaacctttaattagtgaaatccaaccttttattcaaagctgtgacccagtaccaaatgaattccctggtgcttttccgtctaataaatatactggtgtgactgattcaacagagacccaagaagaccaaataaatctagacttacaggatgtaagcatgcatataaatcatgtagagggaaatataaactcttactatgacagaactatgcagaaacctgacaaagtcgaagacggattagaaatgtgtcataaatctatctctccccctttaattcaacagcccataacattttctcctgacgaaatagataaatataagatcctacagctacaagcccagcagcatatgcagaagcaactcctatcaaagcatcttc

SEQ ID NO: 26913 - DNA, 2655 bp, Homo sapiens
  MAP TO AC005004.1; EXPRESSED IN PLACENTA, SIGNAL = 2.4; EXPRESSED IN BT474, SIGNAL = 1.2; EXPRESSED IN FETAL LIVER, SIGNAL = 1.1; EXPRESSED IN BONE MARROW, SIGNAL = 1.3; EXPRESSED IN BRAIN, SIGNAL = 1.6; EXPRESSED IN HELA, SIGNAL = 1.6; EXPRESSED IN HBL100, SIGNAL = 1.4; EXPRESSED IN LUNG, SIGNAL =   1; NT HIT: AB020698.1, EVALUE 4.40e-01; EST_HUMAN HIT: AW851714.1, EVALUE 0.00e+00; SWISSPROT HIT: P27058, EVALUE 8.40e-01
ggtgcccagacttggttgccgcttgcagtgaggggaatgaagagaagagatttcgaaggagcagacagaaggaccatgctggctccaaatggataggactctgcccaccgagtagggcagagaacagaagaccttgtctgctatggaggctggagaccgtaaccctttcaggccctgtgtaaactgggtcatgaagagcctctgcatggtaggcatgtggctggagaagctccgtttttttgtccagattcggtaacatcctggggaacaaagtgctagaagtgtgtgaaggccaaggacagagcagtctgctctggtctggactatggcagtgcctccatagtcttggagaggagctggaggctggggaggagcctgagtgtgggtctgactatggacgccagtgtcttccctgaatgttgccatcccagggcaaccgtgggacaagaagaaagaaaaggtccacttgggaggttgagacgggcactggagggcctctcctaaggcaagccttgccggagcacagtgctcaggaaaagtccttgaggactcagtcgtgcaatctgagctggatgatttcacatgaaaggatactgggaagatttcagaaccaaacagcagggacggcatcttgttgctcaaatctatgaaggtcatcttgatggattcgagagaataaagtgccatgggcttactgttaggcctcttatcccatccactagctgccaaatatggattcagctgctctgtgctggatgaaaatccgtccaggagtcttttatatctgaggcgcttgtagcttttagccattggaagaagttcagaggaacaccgtcggtatcttagcttctgagtcttcatggctggggccagtttggaggcaaggatggacagcttgtttagtaaggctgattctttggtagtcttcctaaaattcaggctcctcaagggatggcacggtgtagacatctgctttggtatgtgactaaccaagctcttggtaggtgctgtttcaggttctaatcgtgtaggtgcagacagagtacacaaactgagaagtctgtgcgcttttgtggggatgggattggaagaactctttaaaaaggcagaacttctgattttacctatttttctcccaacaatgatttgctcctgataggaaactttcttacaagttcgatggggctgcttctttaagggaagaactcctttcttcgcaaaggcaccatgtatttgatcacacccagcagaggaggggtcttgtgctttccgaggggcaccaagaaggcaaggacttgtgcatgactcagtgtccttccttaatggatgatgtaacctttcctccttctggtcttctaacttctgagtctgtgccacaatgctgtccttggccagctttgctagggtgatttcattgatcatggtggactcatctttgtcagccttcggttggttctgattttgtgcatcatctaacaacagactagatgatatgcactgttgcgatatcgtatgtgctttttgttgacgtatatatttctcttctttctgcaacatgtagtccaaaacctcagggctctgctgtttttcagcatgattaagtatcccccggcatttaaaatgggtctgagagatgttgctcacgggatcgccatcgccagtttctctggtaaccaactcctcagattgctccccaacagttaagtaacccagtcgtcccctctgatgctcttcggtttcttctcctttcactttaatatctgttttcactgtcaaaggcaaatgtctgtcagaggaattctcgtgagggtgacaagctttgcaagcattcttttccacacaggtacatacgctgtctctgtcactagaattactccaatctcttgatactatttccttcatctcaggaaggactgtgcagtcctttacattttcacaaagcatttcaccatcttttggtttacaaagatttttcaggtcagtttcttcactgttaacattagtttctgaattttcttgagaaggcattatttcaatggatttcaggcttcttagggaaacagagctttcatcatggcaagacatcgactcttttgaggaaattccaaaggtactttctttgccaaactcagagtttggttctagtcttgatccttcagtcatttcttgtgtttctctgagagatgttcctttatcttgctgtccataatggctatcatttaaagacaaatttactctgcccaatattcttttatttggttcatgatctgcaacagactccatctcatgggcacaagagtctggacacttttccatttcacagtcttttaaagatctgcatacgttttcttcacatgatttttttattttgagaaagtccactgtagaagcagcagtaactgggaaatctgaatcctgaccagttgttcctgtatgtgcagcatccagttctctccgagacaaggtactcctggagtcctcttgaaatgccagtttctcttgccttgcaccacaatccagtagattagatgccttcacgtccagcacaccttctgcaagcttattactacagtccgtgtagacgatgtctaccataccttctgtggactcatcacaaccagacatcttgacaaaggctcctttcaaattgcattt

SEQ ID NO: 26914 - DNA, 279 bp, Homo sapiens
  MAP TO AP000037.1; EXPRESSED IN ADULT LIVER, SIGNAL = 0.7; EXPRESSED IN PLACENTA, SIGNAL =   1; EXPRESSED IN BONE MARROW, SIGNAL = 1.4; EXPRESSED IN FETAL LIVER, SIGNAL = 0.83; EXPRESSED IN LUNG, SIGNAL = 0.64; EXPRESSED IN BRAIN, SIGNAL = 1.1; EXPRESSED IN HBL100, SIGNAL = 0.83; NT HIT: AB020717.1, EVALUE 0.00e+00; SWISSPROT HIT: O43426, EVALUE 3.00e-46; EST_HUMAN HIT: AU131904.1, EVALUE 2.00e-45
attcttcagacttggctctaaatgggtttccaggagcagcagtcctgtcactgaaaggatttgtcctggtcaagccagtaataaatgggtttggagaacttcgcatattttcctgggattgactccgagctggaattggaggcattgttggcatgcaacttacagaactcaaaacattactttgcgttgcagaaggcaactgaatcaacctctttgggtctggggtgggaacaggtgacgtttgaacagatagctgagcctttgatacagcaagcagat

SEQ ID NO: 26915 - DNA, 509 bp, Homo sapiens
  MAP TO AL132780.1; EXPRESSED IN BT474, SIGNAL = 1.2; EXPRESSED IN BONE MARROW, SIGNAL =   1; EXPRESSED IN BRAIN, SIGNAL =  22; SWISSPROT HIT: Q9Z3R5, EVALUE 1.40e+00; EST_HUMAN HIT: BF368332.1, EVALUE 0.00e+00; NT HIT: gi11437534, EVALUE 0.00e+00
ttttctgctgttgcttgatgctgaacgagaacgtgaacgtgaccttgatctggactctgatgttgatctggagcccatcttgggtctaccacgagggttggcatgagtacgtgcctgggctacatctctctgcttggatctgagcggtgaatgagaccgagaacctgaactgtcaggagagcgagatcttgatctagaactggaggaggaagatgaggaggaccggctagaggatgaatcagctgactgtttcaatctgtggcttgggagaagggtatgagaagctcttctgccttccttctgttccaaagatggctgtttcagacattcttcagtgattcctttggccagtgctaattcctcaatttttagagggaggggctgagcagatctgtctgactcaggttcaagatccttctgggctgagtagtcagccagtgtgcttttctgaaccagaggcaggacactctcctctggcactttctctgctggagattctgctttggtgt

SEQ ID NO: 26916 - DNA, 168 bp, Homo sapiens
  MAP TO AL121760.4; EXPRESSED IN BT474, SIGNAL = 0.92; EXPRESSED IN FETAL LIVER, SIGNAL = 1.5; EXPRESSED IN BONE MARROW, SIGNAL = 1.2; EXPRESSED IN BRAIN, SIGNAL = 1.1; EXPRESSED IN HBL100, SIGNAL = 1.3; SWISSPROT HIT: P25655, EVALUE 2.20e+00; EST_HUMAN HIT: BE077948.1, EVALUE 9.00e+00
aagaaaaaacaagtgatggcaaggcaacctggaaaaatccacacatttacacaagctctgatccttctgtacatcttcatgttttgcatgcaccaccacccacagaccctgtggtccctgatccaagacaaggagggggttaagagcaaggcccagcagaccagctaa

SEQ ID NO: 26917 - DNA, 839 bp, Homo sapiens
  MAP TO AL050326.3; EXPRESSED IN ADULT LIVER, SIGNAL = 1.1; EXPRESSED IN HELA, SIGNAL = 0.76; EXPRESSED IN BRAIN, SIGNAL = 0.74; EXPRESSED IN PLACENTA, SIGNAL = 0.96; EXPRESSED IN BONE MARROW, SIGNAL = 0.86; EXPRESSED IN HBL100, SIGNAL = 0.84; EXPRESSED IN FETAL LIVER, SIGNAL = 1.4; EXPRESSED IN LUNG, SIGNAL = 0.67; SWISSPROT HIT: P97384, EVALUE 1.10e-01
gagcctggtggcatctgggcacagccagattcaacagggagcatccatactcatctgggcacagccagattcacctggggatacccatactcacctgggcacagccagattcacctgggaatatccagattcatgtgggtatattcatattcacctgggcacagccagattcacctgcaagcacccatcacagccagtttctcctgggactatccggattcacctgggtatattcatattcacctgggcacagccagattcactggccacacccagattctcacagccaatggactgtcagatgcgccagtgctcacattccagcccctgctgcctgatgccccagggcaagagtcattctcaacatctcacacagcacaagcagctcatcctccatgcagctggcctggatggggcatccgggataccccagggcaagagtcattctcaacatctcacacagcacaagcagctcatcctccatgcagctggcctggatggagcacccgggataccccagggcaagagtcattctcaacatctcacacagcacaagcagctcatcctccatgcagctggcctggatggggcacccgggataccccagggcaagagtcattctcaacatctcacacagcacaagcagctcgccctccatgcagctggcctggatggggcacccggggctgtgcaagccctatccccttgagtctgcacaaaaaccctgtgagtttgttaatattacctgcatttcacagacaggagttcaggacacaggggggtcacctgagagtgaccaaggcttggacatcagcagcctggctcctgagtccacatcc

SEQ ID NO: 26918 - DNA, 184 bp, Homo sapiens
  MAP TO AP000031.1; EXPRESSED IN FETAL LIVER, SIGNAL = 0.59; EXPRESSED IN ADULT LIVER, SIGNAL = 0.68; EXPRESSED IN PLACENTA, SIGNAL = 1.4; EXPRESSED IN BT474, SIGNAL = 0.6; EXPRESSED IN BONE MARROW, SIGNAL = 0.63; EXPRESSED IN LUNG, SIGNAL = 0.71; EXPRESSED IN BRAIN, SIGNAL = 0.69; NT HIT: U82671.2, EVALUE 9.00e-21; EST_HUMAN HIT: AI355533.1, EVALUE 2.00e-13; SWISSPROT HIT: P34393, EVALUE 6.50e-02
gtcgaatggtaatccccagtgttgaaggtgggcctggtgggaggcgatgggatcttgggggtggatttctcatcagtggcttagctccatccccttggtgctgttctcctgacggtgagtgtgtccttgcgagacctggtcgtttaaaagtgtgtggcgcatcctccttcgctttctgtcttgc

SEQ ID NO: 26919 - DNA, 80 bp, Homo sapiens
  MAP TO AL049837.3; EXPRESSED IN PLACENTA, SIGNAL = 0.94; EXPRESSED IN HELA, SIGNAL = 0.86; EXPRESSED IN BRAIN, SIGNAL = 0.85; EXPRESSED IN LUNG, SIGNAL = 0.71; NT HIT: AB041843.1, EVALUE 6.00e-38; EST_HUMAN HIT: BE716099.1, EVALUE 1.00e-37; SWISSPROT HIT: Q92813, EVALUE 3.00e-08
acctcctttcacgagccagctgccagccttccgcaaactggtggaagagttctcctcagtggctgacttcctgctggtct

SEQ ID NO: 26920 - DNA, 120 bp, Homo sapiens
  MAP TO AC008168.2; EXPRESSED IN BRAIN, SIGNAL = 0.97; EXPRESSED IN BT474, SIGNAL = 0.73; EXPRESSED IN HBL100, SIGNAL =   1; EXPRESSED IN HELA, SIGNAL = 0.93; EXPRESSED IN FETAL LIVER, SIGNAL = 0.96; EXPRESSED IN LUNG, SIGNAL = 0.64; NT HIT: AF001292.1, EVALUE 5.70e-02; SWISSPROT HIT: P53885, EVALUE 6.00e-01; EST_HUMAN HIT: BF436202.1, EVALUE 1.50e+00
gattatgggcacaatccttattttaaaagggtgaggcaattcaaaaagaacaatttaattaaaagtaatcagaaaactggaatcaatagttattactgtcaagaactcactaagttcagg

SEQ ID NO: 26921 - DNA, 180 bp, Homo sapiens
  MAP TO AC006008.2; EXPRESSED IN PLACENTA, SIGNAL = 0.67; EXPRESSED IN BT474, SIGNAL = 2.2; EXPRESSED IN FETAL LIVER, SIGNAL = 0.82; EXPRESSED IN LUNG, SIGNAL = 0.76; EXPRESSED IN ADULT LIVER, SIGNAL = 0.69; EXPRESSED IN BRAIN, SIGNAL = 0.8; EXPRESSED IN HELA, SIGNAL = 0.64; NT HIT: L23429.1, EVALUE 2.30e-02; EST_HUMAN HIT: BF030261.1, EVALUE 1.60e-01; SWISSPROT HIT: P11584, EVALUE 6.50e+00
aatcatattaattcaatagtcatcaatcatccatttaataaacatggtaaacccctattaagttccaataatatgagaacggagagccgcaatatgaacttagacattgccttcactgtccaacatgcagttctagtcataccctatccttcgttctttaaaatctttgatggcctaaag

SEQ ID NO: 26922 - DNA, 175 bp, Homo sapiens
  MAP TO AC011409.1; EXPRESSED IN PLACENTA, SIGNAL = 0.94; EXPRESSED IN LUNG, SIGNAL = 5.2; EXPRESSED IN BRAIN, SIGNAL = 2.3; EXPRESSED IN BONE MARROW, SIGNAL = 0.95; EXPRESSED IN FETAL LIVER, SIGNAL =   1; EXPRESSED IN ADULT LIVER, SIGNAL = 0.92; SWISSPROT HIT: Q9UKP4, EVALUE 5.00e-04; EST_HUMAN HIT: AA233810.1, EVALUE 4.10e-01
accttcatccaggacagcttgccactgaagtatatgctttggggaggaagttctaacactataagcctgacattgccagtctctgaatccaggcaaacctgcaggacaaggtggattctcacatattctgtattgttttctgggaccattacaatcccttgcttcagaatctagc

SEQ ID NO: 26923 - DNA, 525 bp, Homo sapiens
  MAP TO AC007629.3; EXPRESSED IN HELA, SIGNAL = 0.9; EXPRESSED IN FETAL LIVER, SIGNAL =   1; EXPRESSED IN LUNG, SIGNAL = 0.79; EXPRESSED IN BT474, SIGNAL = 1.5; EXPRESSED IN ADULT LIVER, SIGNAL = 0.98; EXPRESSED IN BRAIN, SIGNAL = 1.1; EXPRESSED IN BONE MARROW, SIGNAL = 0.76; EXPRESSED IN HBL100, SIGNAL = 1.1; NT HIT: AB020710.1, EVALUE 0.00e+00; SWISSPROT HIT: P32583, EVALUE 1.30e-01; EST_HUMAN HIT: BF307519.1, EVALUE 0.00e+00
ctgtgcttgggttgaatctgtattggaacatattccagggtcatcagatcctgaagtccttccagagctctgctgagacttctggggttctgtgtcacttttagtcctgcgacagtaaggggaggctgtgcttggactaaggtgatcatcaggagtttgatgctcactttctgactctccaaccccgctatcatttacaaatacagagtcatcctgtgataagaagtctactgctccgctgataggctgttgtagttcaggctcccgcttcagatcactaagctctgcatagaatttttcttgatcaacagaactgtttgtatctgtttcatagtttccaactttatatgtgcttttactgctgttttcctctatctgaacgacatttagttcttggccactgaaatgtgcccttatttgatagagataagtcataacagtcagtttatcaggaattgctaataataccatatcagaaggttccaataatcgggaaattcctatgctggcaaatccatcgtatgc

SEQ ID NO: 26924 - DNA, 164 bp, Homo sapiens
  MAP TO AC010873.2; EXPRESSED IN PLACENTA, SIGNAL = 1.1; EXPRESSED IN HBL100, SIGNAL = 0.93; EXPRESSED IN FETAL LIVER, SIGNAL = 0.94; EXPRESSED IN ADULT LIVER, SIGNAL = 1.4; EXPRESSED IN BT474, SIGNAL = 0.96; EXPRESSED IN BRAIN, SIGNAL = 1.2; EXPRESSED IN BONE MARROW, SIGNAL = 0.99; EXPRESSED IN HELA, SIGNAL = 1.1; SWISSPROT HIT: O02100, EVALUE 1.30e+00
agaaatgatgacatgtttgactaggatggtggctgtggggagggagagagtcaagatgaccaaatttgctgatgtaacggatatgggtgtaggaaagagacagttgtcaatgatagttcctgggtttctgatttgtataacagaaggaatgatagtgccattaa

SEQ ID NO: 26925 - DNA, 125 bp, Homo sapiens
  MAP TO AL031390.4; EXPRESSED IN BT474, SIGNAL = 0.82; EXPRESSED IN HELA, SIGNAL = 0.69; EXPRESSED IN LUNG, SIGNAL = 0.81; EXPRESSED IN PLACENTA, SIGNAL = 0.97; EXPRESSED IN BONE MARROW, SIGNAL = 0.95; EXPRESSED IN HBL100, SIGNAL = 0.71; EXPRESSED IN FETAL LIVER, SIGNAL = 0.83; EXPRESSED IN ADULT LIVER, SIGNAL = 0.87; EXPRESSED IN BRAIN, SIGNAL = 0.73; SWISSPROT HIT: P56391, EVALUE 8.90e+00; NT HIT: AE000312.1, EVALUE 2.40e-01
cagtgctatgcacctgagcagcaaagtgagcctttgggagggcagatgcaggaaagaaacctgcgcaaagccctggatgtgggcttgggactattcatacttggaatttctgtttccaaatttaa

SEQ ID NO: 26926 - DNA, 281 bp, Homo sapiens
  MAP TO AC007640.1; EXPRESSED IN ADULT LIVER, SIGNAL = 1.3; EXPRESSED IN BRAIN, SIGNAL = 0.98; EXPRESSED IN BT474, SIGNAL = 1.7; EXPRESSED IN FETAL LIVER, SIGNAL = 1.2; EXPRESSED IN PLACENTA, SIGNAL = 0.81; EXPRESSED IN HELA, SIGNAL = 1.6; EXPRESSED IN LUNG, SIGNAL = 1.3; EXPRESSED IN HBL100, SIGNAL = 1.2; EXPRESSED IN BONE MARROW, SIGNAL = 0.94; EST_HUMAN HIT: AU140604.1, EVALUE 3.00e-78; NT HIT: L41825.1, EVALUE 3.00e-61; SWISSPROT HIT: P10267, EVALUE 1.00e-16
tacacataattattcttattgggcttatgtgccttttcctccgcttattcgacctctcacctggatagaggctgcagcagaaatctccactaacaatagtgtgtggatacctggaactacagataaacgttgccctgctcaaccaggagaacaaggcattgcatttaatgttaccatgggttataaatacccccctctgtgcctcagacatgcagctggttgcaaccatctagaaactcaagtctgggctgcttaacttccagaaagttgagctacagata

SEQ ID NO: 26927 - DNA, 128 bp, Homo sapiens
  MAP TO AL031297.4; EXPRESSED IN ADULT LIVER, SIGNAL = 0.75; EXPRESSED IN BONE MARROW, SIGNAL = 0.9; EXPRESSED IN HBL100, SIGNAL = 0.82; EXPRESSED IN BRAIN, SIGNAL = 0.68; EXPRESSED IN PLACENTA, SIGNAL = 0.78; EXPRESSED IN BT474, SIGNAL =   1; EXPRESSED IN FETAL LIVER, SIGNAL = 0.72; EXPRESSED IN LUNG, SIGNAL = 0.79; EXPRESSED IN HELA, SIGNAL = 0.75; NT HIT: gi11423156, EVALUE 3.00e-66; EST_HUMAN HIT: AA744236.1, EVALUE 3.00e-66; SWISSPROT HIT: Q9ZZM4, EVALUE 5.20e+00
cggatggcattcatcttgtcactgagcgagtacagcccctggaagtggctttggaaacattgtcttctgcagaggtctgtgctgggatctatgacatattgctggctcttatcttccttcatgacaga

SEQ ID NO: 26928 - DNA, 249 bp, Homo sapiens
  MAP TO AC005674.9; EXPRESSED IN PLACENTA, SIGNAL = 0.8; EXPRESSED IN BT474, SIGNAL = 0.6; EXPRESSED IN LUNG, SIGNAL = 0.98; EXPRESSED IN BRAIN, SIGNAL = 0.81; EXPRESSED IN FETAL LIVER, SIGNAL = 0.72; EXPRESSED IN HELA, SIGNAL = 0.91; EXPRESSED IN ADULT LIVER, SIGNAL = 0.73; EST_HUMAN HIT: T73025.1, EVALUE 9.00e-31
tcagatttcaaagcccatgtgtgttttcctatagtttcttatatgttttttctgctttgctccagacggaagaaccagatccaatgatatgtgtaagaagaataatttcagtgcaattgaaagaacagatgcacaattgactctgtcaagtgatggaatgacccgtctcaaataaagccaatgaggttggtgatggtgaagatgatgatgatgttgatgatgatgacactagtgaacaaaggctgggcg

SEQ ID NO: 26929 - DNA, 187 bp, Homo sapiens
  MAP TO AC007344.2; EXPRESSED IN HELA, SIGNAL = 0.62; EXPRESSED IN BT474, SIGNAL = 0.63; EXPRESSED IN FETAL LIVER, SIGNAL = 0.63; EXPRESSED IN LUNG, SIGNAL = 0.6; EXPRESSED IN PLACENTA, SIGNAL = 0.68; EXPRESSED IN BONE MARROW, SIGNAL = 0.67; EXPRESSED IN ADULT LIVER, SIGNAL = 0.88; EXPRESSED IN BRAIN, SIGNAL = 0.82; NT HIT: L15446.1, EVALUE 1.10e-01; EST_HUMAN HIT: AA490452.1, EVALUE 1.60e-01; SWISSPROT HIT: P11369, EVALUE 2.90e+00
tcttgttggaggattgtcaattttactgatcttttccaagaaccatctgtaagttgtaaggatttccaatgttgtttttctgtttctaatctcattgatttctgctattatttttattatttctttcattatcatactttggatatactttgcagttctttttctaggttattaaagtgggaactta

SEQ ID NO: 26930 - DNA, 173 bp, Homo sapiens
  MAP TO AC007736.3; EXPRESSED IN ADULT LIVER, SIGNAL = 1.7; EXPRESSED IN FETAL LIVER, SIGNAL = 0.58; EXPRESSED IN LUNG, SIGNAL = 0.65; EXPRESSED IN HELA, SIGNAL = 0.74; EXPRESSED IN BRAIN, SIGNAL = 0.68; EXPRESSED IN PLACENTA, SIGNAL = 0.73; SWISSPROT HIT: P34393, EVALUE 9.80e-01; NT HIT: U93305.1, EVALUE 6.20e+00; EST_HUMAN HIT: W01425.1, EVALUE 9.30e+00
tcagaacgactttgccatcctcacaaccaccacctttctgtcagggtcttccactgccccacacctcttccgcatctctctcctatgccccactgcagtacactgtgcattcttctctccacaagccaaagtgccttccaaaagagatactgttgtgaagctaaaaggacacg

SEQ ID NO: 26931 - DNA, 83 bp, Homo sapiens
  MAP TO L29074.1; EXPRESSED IN PLACENTA, SIGNAL = 1.2; EXPRESSED IN LUNG, SIGNAL = 0.71; EXPRESSED IN HELA, SIGNAL = 0.8; EXPRESSED IN BT474, SIGNAL = 0.79; EXPRESSED IN BONE MARROW, SIGNAL = 0.88; EXPRESSED IN HBL100, SIGNAL = 1.2; EXPRESSED IN FETAL LIVER, SIGNAL = 0.68; EXPRESSED IN BRAIN, SIGNAL = 0.97; EXPRESSED IN ADULT LIVER, SIGNAL = 0.78; EST_HUMAN HIT: AI887291.1, EVALUE 2.00e-39; SWISSPROT HIT: Q06787, EVALUE 2.00e-10; NT HIT: gi11420701, EVALUE 1.00e-39
gaaacgacgatcactcccgaacagataatcgtccacgtaatccaagagaggctaaaggaagaacaacagatggatcccttcag

SEQ ID NO: 26932 - DNA, 92 bp, Homo sapiens
  MAP TO AC006317.3; EXPRESSED IN LUNG, SIGNAL = 0.63; EXPRESSED IN HELA, SIGNAL = 0.61; EXPRESSED IN BRAIN, SIGNAL = 0.68; EXPRESSED IN PLACENTA, SIGNAL = 0.61; EXPRESSED IN BONE MARROW, SIGNAL = 0.76; NT HIT: AL163209.2, EVALUE 3.00e-12; SWISSPROT HIT: P13233, EVALUE 9.20e+00; EST_HUMAN HIT: AA729888.1, EVALUE 6.00e-18
actgtgatacagcaagaaggtcctcaccagatatggccccttgatcttgaacttcccagtctccagaaccatctgccaaataaacttctatt

SEQ ID NO: 26933 - DNA, 160 bp, Homo sapiens
  MAP TO AC007778.1; EXPRESSED IN LUNG, SIGNAL = 4.2; EXPRESSED IN BRAIN, SIGNAL = 0.97; EXPRESSED IN FETAL LIVER, SIGNAL = 0.92; EST_HUMAN HIT: AA687702.1, EVALUE 1.40e-01; SWISSPROT HIT: Q47866, EVALUE 3.40e-01; NT HIT: AF030694.2, EVALUE 7.90e-02
  unsure 14
aaaaatattaagtncaatagttttgtgatgagtaaggacactatgtccatgatattgttctttgtaactttagtatgtttgtcacgtttcatgagaaatatatttcaaaaaagaaatatgatcttaatttgtgttgggctatggaaactgatctctgaag

SEQ ID NO: 26934 - DNA, 300 bp, Homo sapiens
  MAP TO AC012079.2; EXPRESSED IN PLACENTA, SIGNAL = 1.1; EXPRESSED IN ADULT LIVER, SIGNAL = 1.4; EXPRESSED IN BT474, SIGNAL = 1.1; EXPRESSED IN FETAL LIVER, SIGNAL = 0.98; EXPRESSED IN BRAIN, SIGNAL = 1.3; EXPRESSED IN LUNG, SIGNAL = 0.99; EXPRESSED IN HELA, SIGNAL = 0.97; EST_HUMAN HIT: AW589784.1, EVALUE 1.10e+00; NT HIT: L11910.1, EVALUE 4.00e-02
ggccacgctttctcagtctcttttgccaattttgaatacactatcattcccttaaacattggcttcttctcttctttctcttcctcttcccttctcttcactttatttactcttgctgcattgattgcttctgcttctgtggcttcattcatcaccgatatgcagatggcccacacattgtttttcctaagttccaggcacaaatattcaactgcaaacttcacatttcctcttggatattcacggaatacctcaaaatcaatgtatccaaaatgaaatggatgcaccacccccacctgg

SEQ ID NO: 26935 - DNA, 177 bp, Homo sapiens
  MAP TO AC007898.1; EXPRESSED IN FETAL LIVER, SIGNAL = 0.95; EXPRESSED IN BRAIN, SIGNAL = 0.92; EXPRESSED IN LUNG, SIGNAL = 2.2; SWISSPROT HIT: O67551, EVALUE 9.80e-01
  unsure 18
  unsure 158
tattgttcttttttctcnccttttgctgtatttaccgaaaagatcgccaaatggtctcccacttctgagcatagcttcaagttttcacgggtgaggctggagatgatgcgaaggatgggtagttcagcacctgcctgagttctttcctgtatctgatntaaagaaataagggagacc

SEQ ID NO: 26936 - DNA, 151 bp, Homo sapiens
  MAP TO AC006552.7; EXPRESSED IN HBL100, SIGNAL =   2; EXPRESSED IN BT474, SIGNAL = 1.5; EXPRESSED IN BONE MARROW, SIGNAL = 7.3; EXPRESSED IN HELA, SIGNAL = 1.2; EXPRESSED IN ADULT LIVER, SIGNAL = 0.91; EXPRESSED IN FETAL LIVER, SIGNAL = 1.3; EXPRESSED IN LUNG, SIGNAL = 0.62; EXPRESSED IN BRAIN, SIGNAL = 0.85; SWISSPROT HIT: P14162, EVALUE 1.70e+00; NT HIT: gi4557308, EVALUE 1.40e+00; EST_HUMAN HIT: AA507388.1, EVALUE 5.10e-01
agaacaatgctttcaaagaagtgggagaagagcctcccccaactggaagctgtgttactgacactatcagcaggtgagttacagagtctgtcagcaacgataagagcactggcgtatttcctattcagactgacgctgcactgagacagga

SEQ ID NO: 26937 - DNA, 229 bp, Homo sapiens
  MAP TO AC011493.2; EXPRESSED IN FETAL LIVER, SIGNAL = 0.98; EXPRESSED IN BONE MARROW, SIGNAL = 1.2; EXPRESSED IN ADULT LIVER, SIGNAL = 1.7; EXPRESSED IN BT474, SIGNAL = 1.2; EXPRESSED IN BRAIN, SIGNAL = 1.2; EXPRESSED IN LUNG, SIGNAL = 1.1; EXPRESSED IN PLACENTA, SIGNAL = 1.1; EXPRESSED IN HELA, SIGNAL = 1.5; EXPRESSED IN HBL100, SIGNAL =   2; EST_HUMAN HIT: BE670617.1, EVALUE 7.00e-60; NT HIT: AB014607.1, EVALUE 4.00e-63; SWISSPROT HIT: P10266, EVALUE 7.70e-01
cgtgcctgctttcctcaggttttcttccaccatctgtgacagcttcttgatctgtccccaggtaggtggctgtatttgatgggtgttgctcatgatagttggggtcctcctcagcatcagtcttgacatgactgcaaccagggggtccttgggatcctcccagaatctcttcctcagcatctggctcatggtaaggtttcaggtgttttgatggtatccaaatcggttg

SEQ ID NO: 26938 - DNA, 105 bp, Homo sapiens
  MAP TO AC012129.1; EXPRESSED IN ADULT LIVER, SIGNAL = 1.5; EXPRESSED IN BT474, SIGNAL = 0.99; EXPRESSED IN BONE MARROW, SIGNAL = 1.2; EXPRESSED IN BRAIN, SIGNAL =   1; EXPRESSED IN PLACENTA, SIGNAL = 0.97; EXPRESSED IN HBL100, SIGNAL = 1.2; EXPRESSED IN HELA, SIGNAL =   1; SWISSPROT HIT: O07045, EVALUE 7.00e+00; EST_HUMAN HIT: AL120176.1, EVALUE 5.00e-03; NT HIT: AF223391.1, EVALUE 1.00e-05
aggaggttccccttcccagtgtggctctcagctgggctgccacattgcactgctcttccttctctccatggatcacaccaaccttctagtcaattttgatgagag

SEQ ID NO: 26939 - DNA, 511 bp, Homo sapiens
  MAP TO AL079305.2; EXPRESSED IN LUNG, SIGNAL = 0.88; EXPRESSED IN PLACENTA, SIGNAL = 0.92; EXPRESSED IN BT474, SIGNAL = 0.73; EXPRESSED IN BONE MARROW, SIGNAL = 0.86; EXPRESSED IN FETAL LIVER, SIGNAL = 0.61; EXPRESSED IN HELA, SIGNAL = 0.75; EXPRESSED IN ADULT LIVER, SIGNAL = 0.66; EXPRESSED IN BRAIN, SIGNAL =   1; NT HIT: AB045146.1, EVALUE 5.00e+00
tcctgagaaaccactaaaggtaatactatagttacttaagaccaattaatttgagctactgatcttgccttcaaaattttcagtactatacttgggaccaaaaaaaaaatgtcagcaatttcctcagatgttctaggaagtatggtttggagacactgaaacgtcaaccttattgttgacttctattgaacagtcagtggtagagaaggagcccttaaaatatagttagctgtgattgtttttcctggagcctcatagctacatttgctaggcaaccaagaggcaagttttggggatataaaagcagtacaatggggtaatggtaagatgagagagatgctgttatatacatggagatctgccagtactggaaaagttataatagttaaaatgatgataatgatgatgatgatgatgatgatgatgatgatgatgataatgatgatggtggtgatttggtaggatgaaaggagcacatgaccaagagtgacaatgcctgggtaagcagctt

SEQ ID NO: 26940 - DNA, 199 bp, Homo sapiens
  MAP TO AL023513.1; EXPRESSED IN HBL100, SIGNAL =   1; EXPRESSED IN PLACENTA, SIGNAL = 0.82; EXPRESSED IN BRAIN, SIGNAL = 0.97; EXPRESSED IN ADULT LIVER, SIGNAL =   1; EXPRESSED IN HELA, SIGNAL =   1; EXPRESSED IN LUNG, SIGNAL = 0.8; EXPRESSED IN FETAL LIVER, SIGNAL = 0.85; EXPRESSED IN BONE MARROW, SIGNAL = 0.8; EXPRESSED IN BT474, SIGNAL = 1.1; NT HIT: AF009665.1, EVALUE 1.80e+00; SWISSPROT HIT: P22602, EVALUE 3.30e-01
ctttttctgcagtctagtcctcagttggagcatctggctgtcagctacctttggggccacgaagtgtcctccttcatccccaggactcctaccctgaggagtcactggggaccttttagctggagcagatcccctgctgatttgtttgtaataggtggtgctcactctggacacagccaggccaggattcagaggctgg

SEQ ID NO: 26941 - DNA, 145 bp, Homo sapiens
  MAP TO AC005075.2; EXPRESSED IN BRAIN, SIGNAL =   1; EST_HUMAN HIT: AI827586.1, EVALUE 8.40e-02; SWISSPROT HIT: Q08477, EVALUE 6.70e+00; NT HIT: Y11106.1, EVALUE 2.80e-01
tgctgatgcaggagcccactctgctgccgatgggctgctccctggaaatcatctatcccatccgtccatcccatctcatcccagtgagccagcccctcagcagtgtgtgctgctgagattaagcaagtgcaccaaagacacatga

SEQ ID NO: 26942 - DNA, 632 bp, Homo sapiens
  MAP TO AC003037.1; EXPRESSED IN BRAIN, SIGNAL = 1.2; EXPRESSED IN LUNG, SIGNAL = 1.3; EXPRESSED IN HBL100, SIGNAL = 1.2; EXPRESSED IN HELA, SIGNAL = 2.1; EXPRESSED IN BT474, SIGNAL = 1.2; EST_HUMAN HIT: BE735344.1, EVALUE 0.00e+00; NT HIT: gi11421053, EVALUE 0.00e+00; SWISSPROT HIT: P51151, EVALUE 1.00e-108
ggttcttgaagcttttgagattaacaatggcaggaaaatcatcactttttaaagtaattctccttggagatggtggagttgggaagagttcacttatgaacagatatgtaactaataagtttgatacccagctcttccatacaataggtgtggaatttttaaataaagatttggaagtggatggacattttgttaccatgcagatttgggacacggcaggtcaggagcgattccgaagcctgaggacaccattttacagaggttctgactgctgcctgcttacttttagtgtcgatgattcacaaagcttccagaacttaagtaactggaagaaagaattcatatattatgcagatgtgaaagagcctgagagctttccttttgtgattctgggtaacaagattgacataagcgaacggcaggtgtctacagaagaagcccaagcttggtgcagggacaacggcgactatccttattttgaaacaagtgcaaaagatgccacaaatgtggcagcagcctttgaggaagcggttcgaagagttcttgctaccgaggataggtcagatcatttgattcagacagacacagtcaatcttcaccgaaagcccaagcctagctcatcttgctgttga

SEQ ID NO: 26943 - DNA, 75 bp, Homo sapiens
  MAP TO AC012111.1; EXPRESSED IN ADULT LIVER, SIGNAL = 1.1; EXPRESSED IN BT474, SIGNAL = 1.1; EXPRESSED IN BONE MARROW, SIGNAL =   1; EXPRESSED IN BRAIN, SIGNAL = 1.1; EXPRESSED IN PLACENTA, SIGNAL = 0.93; EXPRESSED IN HBL100, SIGNAL = 1.1; NT HIT: gi9506824, EVALUE 5.90e-01; SWISSPROT HIT: P36066, EVALUE 9.40e+00
agttgccctcacagtcgttattggtggagttactggtggcatatttggggccatcatgagttccctagctcctat

SEQ ID NO: 26944 - DNA, 173 bp, Homo sapiens
  MAP TO AP000009.2; EXPRESSED IN BT474, SIGNAL = 0.98; EXPRESSED IN BONE MARROW, SIGNAL = 2.5; EXPRESSED IN BRAIN, SIGNAL = 0.96; EXPRESSED IN FETAL LIVER, SIGNAL = 1.4; SWISSPROT HIT: P13321, EVALUE 9.80e-01; NT HIT: AF297061.1, EVALUE 1.00e-01; EST_HUMAN HIT: BF681073.1, EVALUE 1.50e-01
ctattgataacaaaaagccagcactggaagcatggcatgagtctcttgggggcttcattagcagtggaataattctccagggagtccacaaacaacagtggcagagctgcaaggaggaagataatgggagtgttaggattctggatgaggtgatgttgggcaagaggagcctg

SEQ ID NO: 26945 - DNA, 109 bp, Homo sapiens
  MAP TO AL121789.3; EXPRESSED IN BONE MARROW, SIGNAL = 1.1; EXPRESSED IN BRAIN, SIGNAL = 1.1; SWISSPROT HIT: P70671, EVALUE 9.10e+00; NT HIT: AL163204.2, EVALUE 2.00e-01; EST_HUMAN HIT: AW868003.1, EVALUE 2.40e-01
ttccactgaagcaacacggaaaccacacacaaactgtcatttgtggcaggctgttgagtgcctgtggcttcaaatgcttcggcgcatgcaatgctactactgttttcag

SEQ ID NO: 26946 - DNA, 620 bp, Homo sapiens
  MAP TO AB001523.1; EXPRESSED IN BT474, SIGNAL = 0.93; EXPRESSED IN BONE MARROW, SIGNAL = 1.2; EXPRESSED IN BRAIN, SIGNAL = 0.97; EXPRESSED IN PLACENTA, SIGNAL =   1; NT HIT: AB001523.1, EVALUE 0.00e+00; EST_HUMAN HIT: AW377134.1, EVALUE 0.00e+00; SWISSPROT HIT: P48553, EVALUE 2.00e-95
gtcataagatagtgctacccatgcattcctttgcacaactgcgagatctccattttgatccctccaatgccgtggtccacgtgggcggcgttttgtgcgttgagataaccatgtacagccagatgcctgtgcctgttcacgtggagcagattgtggtcaatgtccacttcagcattgagaaaaacagctaccggaagactgcggagtggcttaccaagcacaagacgtccaatgggatcattaactttccacccgagaccgcacctttccctgtatcccaaaacagtttgcccgcgctggagttgtatgaaatgtttgagagaagcccatctgataactccttgaacacgactgggattatctgcagaaacgtccacatgctcctgagaaggcaggagagcagctcctctctagagatgccctcaggggtggctctggaggagggtgcccacgtgctgaggtgcagccacgtgaccctggaaccaggggccaaccagataacattcaggactcaggtatgcgttcagggtgggaacttgactttcaagtttgtaaagcagggccgtggagcttacaagaactgtctggagtgtgctgtgaattgagtagagtcctttgtt

SEQ ID NO: 26947 - DNA, 132 bp, Homo sapiens
  MAP TO AC008165.2; EXPRESSED IN HELA, SIGNAL = 1.2; EXPRESSED IN BT474, SIGNAL = 0.91; EXPRESSED IN FETAL LIVER, SIGNAL = 0.62; EXPRESSED IN LUNG, SIGNAL =   1; EXPRESSED IN BRAIN, SIGNAL = 1.3; EXPRESSED IN HBL100, SIGNAL = 1.1; SWISSPROT HIT: P51693, EVALUE 2.30e+00; EST_HUMAN HIT: BE966085.2, EVALUE 4.40e-01; NT HIT: AL163301.2, EVALUE 1.60e-02
tcctacacagcatgggctggatgcaggagtttcgggtgcaccatggttgggagaggcactggctgtcgggctggtctgcgtgaacacccttgtagggcagagccagccctgcccatgtcatgtaacatcttt

SEQ ID NO: 26948 - DNA, 286 bp, Homo sapiens
  MAP TO AP000311.1; EXPRESSED IN BT474, SIGNAL = 0.87; EXPRESSED IN BONE MARROW, SIGNAL = 1.1; EXPRESSED IN HBL100, SIGNAL = 1.3; EXPRESSED IN FETAL LIVER, SIGNAL =  32; EXPRESSED IN LUNG, SIGNAL = 0.66; EXPRESSED IN BRAIN, SIGNAL = 0.69; EXPRESSED IN PLACENTA, SIGNAL = 1.1; EXPRESSED IN HELA, SIGNAL = 0.92; EXPRESSED IN ADULT LIVER, SIGNAL = 0.98; NT HIT: AF114488.1, EVALUE 0.00e+00; SWISSPROT HIT: Q15811, EVALUE 2.00e-45; EST_HUMAN HIT: AA773263.1, EVALUE 1.00e-112
gtggatgaaagccaaactggagaacccggctggcttggaggagaattaaaaggaaagacagggtggttccctgcaaactatgcagagaaaatcccagaaaatgaggttcccgctccagtgaaaccagtgactgattcaacatctgcccctgcccccaaactggccttgcgtgagacccccgcccctttggcagtaacctcttcagagccctccacgacccctaataactgggccgacttcagctccacgtacgtgttggtgggctctttctgatgatttttgaaat

SEQ ID NO: 26949 - DNA, 287 bp, Homo sapiens
  MAP TO AP000037.1; EXPRESSED IN LUNG, SIGNAL =   1; EXPRESSED IN ADULT LIVER, SIGNAL = 1.3; EXPRESSED IN BRAIN, SIGNAL = 0.92; EXPRESSED IN PLACENTA, SIGNAL = 1.3; EXPRESSED IN BONE MARROW, SIGNAL = 1.1; EXPRESSED IN HELA, SIGNAL = 1.2; EXPRESSED IN BT474, SIGNAL = 1.4; EXPRESSED IN HBL100, SIGNAL = 2.2; EXPRESSED IN FETAL LIVER, SIGNAL = 1.6; NT HIT: X87825.1, EVALUE 1.00e-103; EST_HUMAN HIT: AA042813.1, EVALUE 1.00e-125; SWISSPROT HIT: Q95157, EVALUE 9.00e-21
ctggtcgtcactgggctgtgcctgtgtgcctggtcacggtgctgtggaacctgctcagcatcctggccgtcagccctgactcccacctccacacccccatgcacttcttcctctgcaacctgtccttgcctgacatcggtttcacctccaccacggtccccaagatgatcgtggacatccaatctcacagcagagtcatctcctatgcaggctgcctgactcagatgtctctctctgccatttttggaggcatggaagagagacatgctcctgagtgtgatggccta

SEQ ID NO: 26950 - DNA, 118 bp, Homo sapiens
  MAP TO AC011019.1; EXPRESSED IN FETAL LIVER, SIGNAL = 0.94; EXPRESSED IN BONE MARROW, SIGNAL = 1.1; EXPRESSED IN BRAIN, SIGNAL =   1; NT HIT: AJ277546.2, EVALUE 7.00e-11; EST_HUMAN HIT: AA776430.1, EVALUE 3.00e-08; SWISSPROT HIT: P08548, EVALUE 2.00e-05
ttttctactttttcaatatagaagcttagagctataaaggttcctcttagtactgctttcactatatcccacaggcttttatatgttttgttttccttatcatttgcttcaagaagtg

SEQ ID NO: 26951 - DNA, 453 bp, Homo sapiens
  MAP TO AL132708.1; EXPRESSED IN BONE MARROW, SIGNAL = 1.7; EXPRESSED IN ADULT LIVER, SIGNAL = 2.5; EXPRESSED IN FETAL LIVER, SIGNAL = 2.9; EXPRESSED IN BT474, SIGNAL = 1.3; EXPRESSED IN BRAIN, SIGNAL = 1.4; EST_HUMAN HIT: AA337234.1, EVALUE 3.00e-44; NT HIT: S69364.1, EVALUE 2.00e-05; SWISSPROT HIT: O54759, EVALUE 2.00e-38
agctggcagcagacgcccccggaaacatcttcttctcgccagtgagcatctccaccaccctggccctgctctctcttggggcccaagctaacacctcagctctgatcctggagggcctgggattcaacctcacagaaacccctgaagccgacatccaccagggcttccggagcctcctccacacccttgccctgcccagccccaaactcgaactaaaagtaggaaactccctgttcctagacaagcgactaaagcctcggcagcactatttggacagcatcaaggagctttatggagcttttgctttttctgccaacttcacagattctgttacaactgggaggcagattaatgactatttgagaaggcaaacatacgggcaagtcgtggactgcctcccggagttcagccaggacacgttcatggttcttgccaattacatcttcttcaaag

SEQ ID NO: 26952 - DNA, 87 bp, Homo sapiens
  MAP TO AL050327.6; EXPRESSED IN LUNG, SIGNAL = 0.67; EXPRESSED IN BRAIN, SIGNAL = 0.7; EXPRESSED IN PLACENTA, SIGNAL = 0.59; EXPRESSED IN BONE MARROW, SIGNAL = 1.1; EXPRESSED IN HELA, SIGNAL = 0.6; NT HIT: AL163302.2, EVALUE 1.00e-02; EST_HUMAN HIT: AI673161.1, EVALUE 1.80e-01
actgggagagagctgggagggacaggtccttccacaccgccttcagagggagtacggtctggacggcatcttcattttggacttcag

SEQ ID NO: 26953 - DNA, 125 bp, Homo sapiens
  MAP TO AL031770.12; EXPRESSED IN LUNG, SIGNAL = 0.85; EXPRESSED IN HELA, SIGNAL = 0.78; EXPRESSED IN FETAL LIVER, SIGNAL = 0.67; EXPRESSED IN ADULT LIVER, SIGNAL = 0.67; EXPRESSED IN BRAIN, SIGNAL = 0.79; EXPRESSED IN PLACENTA, SIGNAL = 0.98; EXPRESSED IN BT474, SIGNAL = 0.86; EXPRESSED IN BONE MARROW, SIGNAL =   2; EXPRESSED IN HBL100, SIGNAL = 0.87; NT HIT: gi11418795, EVALUE 2.00e-64; EST_HUMAN HIT: AA161356.1, EVALUE 2.00e-64; SWISSPROT HIT: P55121, EVALUE 4.00e+00
ctgagagggcatcctgtgcttcgaagaatgtactgagaccgcctttcacataggccaggctgccctcactcttcttgttagcctgtctctttaggttggtgactgccattttgagctgctcaaaa

SEQ ID NO: 26954 - DNA, 156 bp, Homo sapiens
  MAP TO AC006111.2; EXPRESSED IN HELA, SIGNAL = 0.67; EXPRESSED IN ADULT LIVER, SIGNAL = 0.79; EXPRESSED IN BRAIN, SIGNAL = 0.77; EXPRESSED IN BT474, SIGNAL = 1.8; EXPRESSED IN BONE MARROW, SIGNAL =   1; EXPRESSED IN FETAL LIVER, SIGNAL = 0.84; EXPRESSED IN PLACENTA, SIGNAL = 0.73; EXPRESSED IN HBL100, SIGNAL = 0.99; EXPRESSED IN LUNG, SIGNAL = 0.62; SWISSPROT HIT: P24855, EVALUE 1.00e-27; NT HIT: D83195.1, EVALUE 6.00e-83; EST_HUMAN HIT: AW024534.1, EVALUE 9.00e-83
gacgtcatgttgatgggcgacttcaatgcgggctgcagctatgtgagaccctcccagtggtcatccatccgcctgtggacaagccccaccttccagtggctgatccccgacagcgctgacaccacagctacacccacgcactgtgcctatgacagg

SEQ ID NO: 26955 - DNA, 115 bp, Homo sapiens
  MAP TO AC007510.4; EXPRESSED IN BRAIN, SIGNAL = 0.76; EXPRESSED IN PLACENTA, SIGNAL = 0.61; EXPRESSED IN BONE MARROW, SIGNAL = 0.7; EXPRESSED IN LUNG, SIGNAL = 0.76; EXPRESSED IN HELA, SIGNAL = 0.72; EXPRESSED IN FETAL LIVER, SIGNAL = 0.58; SWISSPROT HIT: O18964, EVALUE 1.80e+00; NT HIT: U85806.1, EVALUE 5.40e-02
tttactgcagactcgtaggatgggggcaggtgggccaagttctggaacgagcgggagaaggagaggtcatagggctcggtggctgatgtcaggatgttgttcatccgtggcttct

SEQ ID NO: 26956 - DNA, 297 bp, Homo sapiens
  MAP TO AC005632.2; EXPRESSED IN LUNG, SIGNAL = 2.6; EXPRESSED IN PLACENTA, SIGNAL = 0.65; EXPRESSED IN BONE MARROW, SIGNAL = 0.76; EXPRESSED IN FETAL LIVER, SIGNAL = 0.67; EXPRESSED IN HELA, SIGNAL = 0.72; EXPRESSED IN ADULT LIVER, SIGNAL = 0.72; EXPRESSED IN BRAIN, SIGNAL =   1; EST_HUMAN HIT: AW803156.1, EVALUE 5.00e-08; SWISSPROT HIT: Q92793, EVALUE 6.00e-01; NT HIT: U82695.2, EVALUE 1.00e-05
tcactgccgaactgtgctcccagggctggccgaatgcctggcttccaccctcagactttctttccaatgtgtgcagagggaacacggagggacagcagttgcagcagcccacacttgctgtgtcgggcatggtctcagtggctggagcgtgaagatggaggcggggatgggagtgggcggctctgagtcaagggacacctggagcccccagaagctggaagaggcaggaggggtcctggagcccccgagggagtctggccctgccaccaccttgatgttggcctctggcctccggga

SEQ ID NO: 26957 - DNA, 142 bp, Homo sapiens
  MAP TO AP000238.1; EXPRESSED IN FETAL LIVER, SIGNAL = 0.63; EXPRESSED IN LUNG, SIGNAL = 0.65; EXPRESSED IN PLACENTA, SIGNAL = 0.84; EXPRESSED IN BONE MARROW, SIGNAL = 0.79; EXPRESSED IN HBL100, SIGNAL = 0.67; EXPRESSED IN BRAIN, SIGNAL = 0.86; EXPRESSED IN BT474, SIGNAL = 0.87; NT HIT: gi4504116, EVALUE 1.00e-74; SWISSPROT HIT: P39086, EVALUE 1.00e-21
atataatattaaaatcaaaatccgccagctgccctctgggaataaagatgccaagcctttactcaaggagatgaagaaaggcaaggagttctatgtgatatttgattgttcacatgaaacagccgctgaaatccttaagcag

SEQ ID NO: 26958 - DNA, 319 bp, Homo sapiens
  MAP TO AC011750.2; EXPRESSED IN ADULT LIVER, SIGNAL = 1.1; EXPRESSED IN BRAIN, SIGNAL =   1; NT HIT: X15898.1, EVALUE 1.70e-01; EST_HUMAN HIT: AW451306.1, EVALUE 0.00e+00; SWISSPROT HIT: P53831, EVALUE 1.50e+00
gctgccaaatcccatgagaggcgagagtgagggagaggatggttttcctcccagccttggtactcggggactcttgttttgttgcagggaagctgatgcatctgtttcaggactatcggttcctgtgagatttgctgtctttagtcccgattttccatggacaggaggcggcactttggttttcaaaacgccatcattattaccaaaaatgttaagagagccaatgactgacttttcatactgttcacggttttgtggaggaagcacgtggaggagcacacttggagatttcattgcctggcggaagacatcttgagcc

SEQ ID NO: 26959 - DNA, 113 bp, Homo sapiens
  MAP TO AP000138.1; EXPRESSED IN HELA, SIGNAL = 0.65; EXPRESSED IN BT474, SIGNAL = 1.1; EXPRESSED IN BONE MARROW, SIGNAL = 0.86; EXPRESSED IN FETAL LIVER, SIGNAL = 0.62; EXPRESSED IN LUNG, SIGNAL = 1.1; EXPRESSED IN ADULT LIVER, SIGNAL = 0.95; EXPRESSED IN HBL100, SIGNAL = 0.83; EXPRESSED IN BRAIN, SIGNAL = 0.79; SWISSPROT HIT: O97665, EVALUE 6.30e-01; NT HIT: gi11526144, EVALUE 2.00e-57; EST_HUMAN HIT: AA426183.1, EVALUE 3.00e-57
ttgctgtgttgaaatatttccaatgccacttttgcttcaacttccagagtttcaaatggaagatctttataaattaaagcatgagcatcttttgtgaaggaacgtaagttctc

SEQ ID NO: 26960 - DNA, 148 bp, Homo sapiens
  MAP TO AP000198.1; EXPRESSED IN PLACENTA, SIGNAL = 0.66; EXPRESSED IN FETAL LIVER, SIGNAL = 0.6; EXPRESSED IN LUNG, SIGNAL = 0.6; EXPRESSED IN BRAIN, SIGNAL = 0.79; EST_HUMAN HIT: H54926.1, EVALUE 3.20e-02; NT HIT: U16125.1, EVALUE 1.00e-47; SWISSPROT HIT: Q60934, EVALUE 1.00e-13
cgcaccgggcatcccagctgaccgtcagctccctgcagtgccatagacataagccatggcgcctcggacccagatttatgaacctgatcaaagaggcaagtgatgctccctcacagcccaggggcccttctgagcactgttgggcttg

SEQ ID NO: 26961 - DNA, 120 bp, Homo sapiens
  MAP TO AC005902.7; EXPRESSED IN FETAL LIVER, SIGNAL = 0.61; EXPRESSED IN HELA, SIGNAL = 0.78; EXPRESSED IN ADULT LIVER, SIGNAL = 0.74; EXPRESSED IN BRAIN, SIGNAL =  20; EXPRESSED IN BT474, SIGNAL = 0.68; EXPRESSED IN BONE MARROW, SIGNAL = 0.96; EXPRESSED IN HBL100, SIGNAL = 0.78; EXPRESSED IN LUNG, SIGNAL = 0.71; NT HIT: AF202635.1, EVALUE 1.00e-09; SWISSPROT HIT: Q10415, EVALUE 5.20e+00; EST_HUMAN HIT: T08169.1, EVALUE 3.00e-16
catggtataatccttccaggcttttatgatgttctctctactagggttctcttccatagcattggcaatcctttccatacagtactgtgtataatgagctttaaaggtcctgtgacaccc

SEQ ID NO: 26962 - DNA, 209 bp, Homo sapiens
  MAP TO AC009758.1; EXPRESSED IN ADULT LIVER, SIGNAL = 1.1; EXPRESSED IN BRAIN, SIGNAL = 0.92; NT HIT: AF176350.1, EVALUE 1.10e-01; EST_HUMAN HIT: AI138213.1, EVALUE 5.00e-36; SWISSPROT HIT: Q13607, EVALUE 2.00e-03
  unsure 171
catatatgataggattgaccatgggtgggaaaaggagatagaaaatagcaaggagtatgtggacacgaggggcagcatggcgggctacacggtgcatgactgaagagatgactactggagtgtaggtggacaggatggcacctatgtgagacacacatgtcccaaatgccnttgtagcgggcctcctgagaggcaagctggagaactgc

SEQ ID NO: 26963 - DNA, 111 bp, Homo sapiens
  MAP TO AL080239.11; EXPRESSED IN ADULT LIVER, SIGNAL = 0.69; EXPRESSED IN BRAIN, SIGNAL = 1.2; EXPRESSED IN PLACENTA, SIGNAL = 0.8; EXPRESSED IN BONE MARROW, SIGNAL = 0.73; EXPRESSED IN HELA, SIGNAL = 0.7; EXPRESSED IN BT474, SIGNAL = 0.7; EXPRESSED IN FETAL LIVER, SIGNAL = 0.7; EXPRESSED IN LUNG, SIGNAL = 0.8; NT HIT: AF236101.1, EVALUE 5.20e-02; EST_HUMAN HIT: AI564336.1, EVALUE 5.60e+00
tccatagcacttgccaatatactggatatgaaggtcgagggtgacagtggaatcaaggaaaaccctgagttctgtgccatgagcacctgcgctgataaagatgccattctc

SEQ ID NO: 26964 - DNA, 111 bp, Homo sapiens
  MAP TO AC012449.1; EXPRESSED IN BRAIN, SIGNAL = 1.2; EXPRESSED IN BONE MARROW, SIGNAL = 0.97; NT HIT: gi6671757, EVALUE 5.20e-02; EST_HUMAN HIT: AI935478.1, EVALUE 2.50e-01
tatgaggctgtcatagctccagccacttcccctggcctgacattctactcattggcctatgatgctcctaaaaagacagaggacacagtgtggaggtcatatattattcat

SEQ ID NO: 26965 - DNA, 473 bp, Homo sapiens
  MAP TO AF011889.1; EXPRESSED IN LUNG, SIGNAL = 1.1; EXPRESSED IN PLACENTA, SIGNAL =   1; EXPRESSED IN BRAIN, SIGNAL = 2.5; EST_HUMAN HIT: AV722265.1, EVALUE 0.00e+00; SWISSPROT HIT: P22304, EVALUE 7.00e-92; NT HIT: gi5360215, EVALUE 0.00e+00
tcaaggcatcaacaactggaaaagatctccaccttgggaatcattatacatattgtgatcctgcaatgggtcagaatccacaaaatacagttcccctgcatggatgtcagaaaagttagctagaaattcatcaggattgaagccaacccacacagtatacctatagtctatggtgcgtatggaatagcccatgatctttatatcttttaaactcggcttgtcagaattccactgagggatgtctgaaggccggggatactggctataggcaatcagttcacggggattaccagggaggtacggatcctcttccaagtcacggaatcgaaaatgcttcagaaggttcttgccttctctgcacagctcaacgtgaaatgaaggaacggggcagcgaggtggaacctgcagtcctgcaagtccagccagcgtgggaaaaagagacacaagttccacaaggtccatggattgcctgc

SEQ ID NO: 26966 - DNA, 445 bp, Homo sapiens
  MAP TO AC012460.2; EXPRESSED IN BRAIN, SIGNAL = 0.98; EXPRESSED IN HBL100, SIGNAL =   1; EXPRESSED IN HELA, SIGNAL =   1; EST_HUMAN HIT: BE264998.1, EVALUE 0.00e+00; SWISSPROT HIT: P34384, EVALUE 1.50e-02; NT HIT: AE002179.2, EVALUE 9.40e-01
aggtccactgctctgtaacagggctccaataactgcaaagaaagtctgctgtaacacagctgggggcactgggaattcttcactcagtgttaactgctccacagccaagtttctagccacgtgacacacgacttcctcaccagtgagaaagtcaacaagattttttatgccttcagtgggcatgtctgggtactcgtcttcaagaaactgtgtaaggcaagtctgtgaaaaagatgtcccttgttcggatagttcttgattacttttaagattcagaagaacagcttctttctctatcccaagttgttggcgtttggcctcctcacttttaatatagcagctattaacaaatgcagttttgagaagatctaaggaaaagttttcctgtaaccgatgtccaaaagcttgtatttctgcatggtaatcccagttcggcttctctgaa

SEQ ID NO: 26967 - DNA, 116 bp, Homo sapiens
  MAP TO AF024533.1; EXPRESSED IN HBL100, SIGNAL = 1.1; EXPRESSED IN PLACENTA, SIGNAL = 0.94; EXPRESSED IN ADULT LIVER, SIGNAL = 0.99; EXPRESSED IN BT474, SIGNAL = 0.92; EXPRESSED IN FETAL LIVER, SIGNAL = 0.94; EXPRESSED IN BONE MARROW, SIGNAL = 1.1; EXPRESSED IN BRAIN, SIGNAL =   1; EXPRESSED IN HELA, SIGNAL =   1
ggatgaagtgaacgtgggggttgggggagaagaggaggaggaggaggagcaagaggaagaagaagaggaagaggaagaaagaagaagaggaggaggaagaaagaagaagagaggaa

SEQ ID NO: 26968 - DNA, 126 bp, Homo sapiens
  MAP TO AC012306.2; EXPRESSED IN HELA, SIGNAL = 0.96; EXPRESSED IN HBL100, SIGNAL = 1.1; EXPRESSED IN ADULT LIVER, SIGNAL = 1.1; EXPRESSED IN BT474, SIGNAL = 0.98; EXPRESSED IN BRAIN, SIGNAL = 1.1; EXPRESSED IN BONE MARROW, SIGNAL = 0.97; EXPRESSED IN LUNG, SIGNAL = 0.93; NT HIT: S61526.1, EVALUE 4.40e+00; SWISSPROT HIT: Q9YEB2, EVALUE 4.00e+00; EST_HUMAN HIT: BE727059.1, EVALUE 6.00e-65
ctttgacccggacgtcactgtacctctgaaagtggtggtaagcagctttccaggggttccgatagtgacgaagcaaagtaatggggggtcttggacgcactgggacatatctcacaccttcctcat

SEQ ID NO: 26969 - DNA, 169 bp, Homo sapiens
  MAP TO AC010908.1; EXPRESSED IN BRAIN, SIGNAL =   1; SWISSPROT HIT: P75385, EVALUE 9.90e-01; NT HIT: X81812.1, EVALUE 3.90e-01
ttacatcatatttccttttaaggtccattctcctgctaaaagttttgttcaccttcttcacttcttggccatagtttaataattgggaaatacctccagggtaaaagttgagacaaatcactatcctgcacttcatttttgtccgagatcttggctcttcgagtccttg

SEQ ID NO: 26970 - DNA, 167 bp, Homo sapiens
  MAP TO AL049548.6; EXPRESSED IN FETAL LIVER, SIGNAL = 0.64; EXPRESSED IN LUNG, SIGNAL = 0.66; EXPRESSED IN ADULT LIVER, SIGNAL = 0.9; EXPRESSED IN HELA, SIGNAL = 0.79; EXPRESSED IN BRAIN, SIGNAL = 0.75; EXPRESSED IN BONE MARROW, SIGNAL = 0.67; EST_HUMAN HIT: AA478283.1, EVALUE 1.50e-01; SWISSPROT HIT: P25464, EVALUE 3.40e-01; NT HIT: AF068624.1, EVALUE 1.50e+00
ctctacccaagaaaatctcaatagcttgtgccgcaagtaccactcagctgagttggagagcctgggccgtgcaatgactggtctgataaagaaacatgaagccgtgagccagttgtgctccaaaacccaggccagcctgcaggaatctctggaaaaacacttcagtg

SEQ ID NO: 26971 - DNA, 110 bp, Homo sapiens
  MAP TO AC008039.1; EXPRESSED IN FETAL LIVER, SIGNAL = 0.78; EXPRESSED IN HELA, SIGNAL = 0.71; EXPRESSED IN BT474, SIGNAL = 0.83; EXPRESSED IN BONE MARROW, SIGNAL = 0.7; EXPRESSED IN ADULT LIVER, SIGNAL = 0.98; EXPRESSED IN BRAIN, SIGNAL = 0.76; NT HIT: U09135.1, EVALUE 3.70e+00; EST_HUMAN HIT: AI308002.1, EVALUE 2.40e-01; SWISSPROT HIT: Q02192, EVALUE 9.30e+00
ggcactaatcactttgccatttctgtaaatggcgccccctggagttgtaagtcatggtggccctgccggcgctcagcaattgcgctaggtcgcgaacccagagactacag

SEQ ID NO: 26972 - DNA, 75 bp, Homo sapiens
  MAP TO AC007744.1; EXPRESSED IN HBL100, SIGNAL = 0.88; EXPRESSED IN BT474, SIGNAL = 0.66; EXPRESSED IN HELA, SIGNAL = 0.66; EXPRESSED IN BRAIN, SIGNAL = 1.6; EXPRESSED IN LUNG, SIGNAL = 0.64; EST_HUMAN HIT: AI023660.1, EVALUE 6.00e-01; NT HIT: Z74103.1, EVALUE 3.20e-02
gatcgtcaacagggtaaagagtatgaacatgaccttagtgagacagaaaaagctatagtcagagaaatgtgcaat

SEQ ID NO: 26973 - DNA, 681 bp, Homo sapiens
  MAP TO AL049575.7; EXPRESSED IN PLACENTA, SIGNAL = 0.8; EXPRESSED IN ADULT LIVER, SIGNAL = 0.72; EXPRESSED IN BRAIN, SIGNAL = 1.4; NT HIT: U10991.1, EVALUE 0.00e+00; EST_HUMAN HIT: AW904936.1, EVALUE 0.00e+00; SWISSPROT HIT: P28968, EVALUE 1.00e-06
acactccaggttggatgccattttgccagtcgtgaccactgcagccgatgcagcaggaaggacagcatctgtgttttctgctcgcaatggtggcaaccgggtggccttcactgaggctgtaatggatgtcagcgcggccgtgactgtcagtgggcgtggcgtggatgctctgggcatctccaggttggtggggtttgggaggccggtgtgcatggcttgtggtttcctggggaggtaagttgtagacaacaggccagaggcagtgtccatgtttccttgcatggctgtatgtgtgctcgtggtatgtcctgttcttgcatacatgtaggttggtgtgaatgggaaggctgtatggactgcccctggtgtcctctttgggccagatgcggccttgtttgtgacatttttagcaagagtagtcatcgaactgctcttagctggtcctgaggccacggccaaagggctgctgctggtgcccttagcaaccagggctgcagacagtgcaggtggacttgatttcctcagaaacaatgtgacggcagctgctgctgttggctgtaccttagatgatactgtgtccgctgtaaagagagaaaaaacaaagtttgtcattggcttggaatgcacgtgtcacttgttctgatgatgaatggatgtaacttatggatttgctagggtgaa

SEQ ID NO: 26974 - DNA, 81 bp, Homo sapiens
  MAP TO AC007876.1; EXPRESSED IN PLACENTA, SIGNAL = 1.1; EXPRESSED IN HELA, SIGNAL = 0.95; EXPRESSED IN ADULT LIVER, SIGNAL = 0.91; EXPRESSED IN BRAIN, SIGNAL = 0.95; EXPRESSED IN BT474, SIGNAL = 1.4; EXPRESSED IN LUNG, SIGNAL = 0.88; EXPRESSED IN FETAL LIVER, SIGNAL =  91; EXPRESSED IN HBL100, SIGNAL = 1.1; EXPRESSED IN BONE MARROW, SIGNAL = 1.4; EST_HUMAN HIT: AA601315.1, EVALUE 2.60e+00
gtggctcacagtgttctcgcagaggatggggagttggtcgagcatggctgtcaacaggttgaagtccagatttttgccacc

SEQ ID NO: 26975 - DNA, 141 bp, Homo sapiens
  MAP TO AC007736.3; EXPRESSED IN PLACENTA, SIGNAL = 0.68; EXPRESSED IN BT474, SIGNAL = 0.68; EXPRESSED IN HELA, SIGNAL = 0.77; EXPRESSED IN BRAIN, SIGNAL = 0.69; EXPRESSED IN BONE MARROW, SIGNAL = 0.76; EXPRESSED IN FETAL LIVER, SIGNAL = 0.79; EXPRESSED IN LUNG, SIGNAL = 0.75; EXPRESSED IN ADULT LIVER, SIGNAL = 0.78; EST_HUMAN HIT: AA504706.1, EVALUE 7.40e+00; SWISSPROT HIT: Q58086, EVALUE 4.50e-01; NT HIT: AF216214.1, EVALUE 2.70e-01
agagatgtatttggaatgaaaagggttacaaattaagctgatgacgtaactaaaaaacatatcttcggaaacttttagtgttaatttagaagtccaatcttcaggaaacgttgagtcaaattcaacttctgggcctgacat

SEQ ID NO: 26976 - DNA, 323 bp, Homo sapiens
  MAP TO AC007993.8; EXPRESSED IN HBL100, SIGNAL = 1.3; EXPRESSED IN HELA, SIGNAL = 1.1; EXPRESSED IN PLACENTA, SIGNAL = 0.99; EXPRESSED IN BT474, SIGNAL = 1.3; EXPRESSED IN LUNG, SIGNAL = 1.1; EXPRESSED IN BRAIN, SIGNAL = 1.1; EXPRESSED IN BONE MARROW, SIGNAL = 1.5; EST_HUMAN HIT: AI657076.1, EVALUE 0.00e+00; SWISSPROT HIT: Q61045, EVALUE 2.10e+00; NT HIT: gi11426006, EVALUE 1.00e-129
agttgaacctctggacctggagcttaccataactacagaacctactacagaggttaaactgtctccaaccacagaggagacctcaactcagcctccagacccagggcttgccataactccagaacccactacagagattggacattctacagccctggggaagactacagctcctcatccagatcagcttcagactctgcatcgaaaactgactgaagtcacaggtccacctactgagctagaacctactcaggattcattggtgcagtctgaaagttacatccaagataaggctttaactgcaccagaggaacagaaggcct

SEQ ID NO: 26977 - DNA, 125 bp, Homo sapiens
  MAP TO AC007860.6; EXPRESSED IN LUNG, SIGNAL = 0.74; EXPRESSED IN BRAIN, SIGNAL = 0.74; EXPRESSED IN PLACENTA, SIGNAL = 0.65; EXPRESSED IN BT474, SIGNAL = 0.68; EXPRESSED IN BONE MARROW, SIGNAL = 0.87; EXPRESSED IN FETAL LIVER, SIGNAL = 0.6; EXPRESSED IN HELA, SIGNAL = 0.9; EXPRESSED IN HBL100, SIGNAL = 0.95; NT HIT: D29960.1, EVALUE 2.40e-01; EST_HUMAN HIT: BF339497.1, EVALUE 4.10e-01
ctcgatgccctttctaagatacttatggagacttttcttttccactccaattctgccatgctctttcggcatggtcagagctggcttctctgtgccctccagatctcatatgtaagatggtgtta

SEQ ID NO: 26978 - DNA, 660 bp, Homo sapiens
  MAP TO AL121716.2; EXPRESSED IN BRAIN, SIGNAL = 0.95; EST_HUMAN HIT: AW339490.1, EVALUE 0.00e+00; SWISSPROT HIT: Q9Y3R5, EVALUE 6.00e-03
gtatcatcagtttctcatgaaaatcctactgaagtgtttgaagatggagaaaatccaccaagtagtcgatcatcagagagtggattcactgagtttatacaatatcaagcagaccgaactgatgatattgacagagaactgagtgagggccagggggcagctgccatcccaattggtagcacatcctctgagacagaaacagcatccactgtgggatctgaagaaaccatcatccagaccccttccgtagtcactcaggggacagcaacccgaagtaggaagacagcccaaaagactgcaatgcagtgctgcttggagtatgtccaacagtttcttaccagacttatcaacctctacatcattcagaataactctttttctcagtctttggctacagaacatcaaggggatcttggtcgagaacaaggagagacttcaaaatgggacagaaattcacaaggagatgtaaaagagaaaaacataagtaaacaaaaaacttctaaagaatacctgtctgccttccttgctgcctgtcagctcttcctagagtgctcaagtttcccagtttacattgctgaggggaaccatacatcagagttacgttctgaaaaattggagactggtaaggtcatctcagttttgcttatatttcagtattgt

SEQ ID NO: 26979 - DNA, 75 bp, Homo sapiens
  MAP TO AC007446.8; EXPRESSED IN BRAIN, SIGNAL = 0.84; EXPRESSED IN BT474, SIGNAL = 0.66; EXPRESSED IN FETAL LIVER, SIGNAL = 0.67; EXPRESSED IN LUNG, SIGNAL = 0.93; EXPRESSED IN HELA, SIGNAL = 0.69; EXPRESSED IN ADULT LIVER, SIGNAL = 0.73; EXPRESSED IN PLACENTA, SIGNAL = 0.8; EXPRESSED IN BONE MARROW, SIGNAL = 0.76; NT HIT: AF098796.1, EVALUE 4.00e-20; EST_HUMAN HIT: AW297191.1, EVALUE 6.00e-35
aaaagtttcaaggttctgatggaaaaaaggaagacgaagaaaagaagtatcttgatgtcatcagcaacaaaaaca

SEQ ID NO: 26980 - DNA, 230 bp, Homo sapiens
  MAP TO AC011998.2; EXPRESSED IN HBL100, SIGNAL = 1.7; EXPRESSED IN HELA, SIGNAL = 1.3; EXPRESSED IN ADULT LIVER, SIGNAL = 0.96; EXPRESSED IN BT474, SIGNAL = 1.3; EXPRESSED IN LUNG, SIGNAL = 1.1; EXPRESSED IN BRAIN, SIGNAL = 1.1; NT HIT: gi5729729, EVALUE 1.00e-106; EST_HUMAN HIT: AL135672.1, EVALUE 1.00e-106; SWISSPROT HIT: P09975, EVALUE 5.20e+00
ggcctcgtgcaaagtattgcagcctgattttgaaatctttgagtttttctgcattcagtttggctgttaagaaatctggaagtttttggcccaactggtgaaaactgtacaacaaacattccacataactgaactgtagtttgggttcttcatcaccagcattccctccattttctgcttcttctggagggaggggcatgtattccaataacttatcaaatagtttccct

SEQ ID NO: 26981 - DNA, 199 bp, Homo sapiens
  MAP TO AF170801.1; EXPRESSED IN BRAIN, SIGNAL = 0.98; EXPRESSED IN LUNG, SIGNAL = 3.1; EXPRESSED IN ADULT LIVER, SIGNAL =   1; EXPRESSED IN BT474, SIGNAL =   1; NT HIT: M60299.1, EVALUE 2.50e-02; EST_HUMAN HIT: AA405040.1, EVALUE 6.00e-22; SWISSPROT HIT: Q62217, EVALUE 4.80e+00
ctggtttagaaggacagccatcagcaccgaggagccagtccttcttcggggtctgcactcagcccccagccccttcggcgctggttggtgccacgcggttgccacggccaagcatgtgtcctcgccagccgcactcactagctctgtgacatcgcacgaggcactaaataaatgaaagggggtgaaaatggaggagcta

SEQ ID NO: 26982 - DNA, 347 bp, Homo sapiens
  MAP TO AC003666.1; EXPRESSED IN ADULT LIVER, SIGNAL = 0.78; EXPRESSED IN BRAIN, SIGNAL = 0.7; EXPRESSED IN PLACENTA, SIGNAL = 0.73; EXPRESSED IN LUNG, SIGNAL = 0.62; EXPRESSED IN HELA, SIGNAL = 0.81; EST_HUMAN HIT: AV747105.1, EVALUE 5.00e+00; NT HIT: AF108093.1, EVALUE 7.20e-01
gagaacttggtctagcagctccctactgttcctgatctccaaggcaatatggaaatgcaaaaaaggaggaggaagaagaaagaaagagaagaagagggagaaggagaagaagaaagaaagaaggaagaagagaagaagaaggagaaagagaaagagaaggagagggagagggaggaggaggaggacagaaggaggaggaggaggagaggaggaggagaggagggggaggaggaggaggaagaggaggagctactttctttttcaggtagtattttttttgaacctcaaattttaaaagttccctataactcccaatcactcatggtgtctttctttgctttggctat

SEQ ID NO: 26983 - DNA, 190 bp, Homo sapiens
  MAP TO AC006111.2; EXPRESSED IN FETAL LIVER, SIGNAL = 0.69; EXPRESSED IN BRAIN, SIGNAL = 0.74; EXPRESSED IN BT474, SIGNAL = 0.75; EST_HUMAN HIT: BE797247.1, EVALUE 6.60e-01; SWISSPROT HIT: P35820, EVALUE 1.30e+00; NT HIT: gi11419383, EVALUE 4.40e-01
ctgttcacatgctgttcccttcgggtcacgttcatggctgagaggttcttttgacaaatctggcagaagaacaaacccttttcctccaggctatcatcatgtgccgatgctcctacccgtgcaaactcctgctgcagggtcaaggccaccgcagcgtcgctctctggggcagggggcccaagcccataca

SEQ ID NO: 26984 - DNA, 1380 bp, Homo sapiens
  MAP TO AC005859.1; EXPRESSED IN ADULT LIVER, SIGNAL = 1.1; EXPRESSED IN BRAIN, SIGNAL = 1.3; EXPRESSED IN HBL100, SIGNAL = 1.4; NT HIT: AB002314.2, EVALUE 0.00e+00; SWISSPROT HIT: Q9Z1S0, EVALUE 1.40e-01; EST_HUMAN HIT: BF433737.1, EVALUE 1.00e-83
atgacctcccaggagatgcttaatgattctctctgtttttctactacccctagtgtagctttgacagagcctgggaaggagagacgaggaggcatgccttcagcttggtctcaacatcctgaagctgatcccatcctgctaccatcaaacattcactcggaatcaaaggtgccaattccaaatcaagaccctaatgatttctcccaagcaaatcaggcatacggagaggctgtgagctggcggccaccggatctgagaggggggagcctcaggacacctcccagccagaaggctctgagacatagcagcagtatcctctccggatctgtcgatttggagaccttccgagagagaaccaagggtgcagtcagcttaaagtgtccaggcatcacagaagcacaggaggccagttctgaaaggcgagcagaactccccctggggaggaagctcaccaaaagtttttcccaaagctcaatgcacttgagctctgaggggaggtttcacaaaaggtccccagtggctcataaagactcaaagctgtataggacattacccttgcggaagctggagggcagcaattggagatgccggggacccttcagctattgcttcctgaaccgagggcaggatgaagatggtgaggaagaagaggagaggggagaggccaccgtccaggtctcttgcctctatagaccacaggtgactcaagccatgccagaaccaagcagcccatgcctggctgtggcgattcagaagcaacgaggggagctatccagagggtcagtgctgaaggtctgggcagaagacctgcgagacccagatgacttggacttcagcaacctggcttttgatgcccggattgcaagaataaatgccctaaaggagagcacatatgcaatgcctgatgggttccttgcagcccaaaatgatgccaatgagctgctctgtctcgtcagggcaaccaaggagaagagggaggagtcacgccctgaagcgtacgaccttacactttctcagtacaagcaactgttatccattgagtccagacagttgggaagtgcctgtaggaaaatggcgatggctgagaaaagcccggaggagatgctcctagctatgacttccagctttcaagtgctctgttgcctaacagaagcttgcatgcgattagttaaagtcgtgaactcagaaacacagcggcaggaaattgtagggaagatcgatgaagtggtcataaattacatttgtctactgaaagctgccgaagcagccactggaaagaaccctggggaccctaatgttggactctcggcgcgacactcaaccaccatggccgctctcgtaagcacactgacacgttctctcaagaggcttttaaacaaa

SEQ ID NO: 26985 - DNA, 912 bp, Homo sapiens
  MAP TO AL049911.2; EXPRESSED IN BT474, SIGNAL = 2.4; EXPRESSED IN ADULT LIVER, SIGNAL = 1.4; EXPRESSED IN BRAIN, SIGNAL =   1; EXPRESSED IN BONE MARROW, SIGNAL = 1.1; EXPRESSED IN LUNG, SIGNAL = 2.2; EXPRESSED IN PLACENTA, SIGNAL = 1.6; EXPRESSED IN HELA, SIGNAL = 1.7; EXPRESSED IN HBL100, SIGNAL = 1.8; EXPRESSED IN FETAL LIVER, SIGNAL = 1.6; NT HIT: AL163203.2, EVALUE 0.00e+00; EST_HUMAN HIT: BE177744.1, EVALUE 0.00e+00; SWISSPROT HIT: P31111, EVALUE 6.00e-05
gtttctcacactcatgaaagtgaaaatgatctctttcatgaaaattgcatgttgaaaaaggaaattgccatgctaaaactggaagtagccacactgaaacgtcaacaccaggtgaaggaaaataaatactttgaggacattaagattttacaagaaaagaatgctgaacttcaaatgaccctaaaactgaaacagaaaacattaacaaaaagggcatctcagtatagagagcagcttaaagttctgacagcagagaacacgatgctgacttctaaattgaaggaaaaacaagacaaagaaatactggagacagaaattgaatcacaccatcctagactggcttctgctttacaagaccatgatcaaagtgtcacatcaagaaaaaaccaagaacttgctttccacagtgcaggagatgctcatttgcaaggaataatggatgttgatgtgagtaatacaatatataacaatgaggtgctccatcaaccactttatgaagctcaaaggaaatccaaaagcccaaaaattaatctcaattatgcaggagatgatctaagagaaaatgcattggtttcggaacatgcacaaagagaccgatgtgaaacacagtgtcaaatgaagaaagctgaacacatgtatcaaaatgaacaagataatgtggacaaacacactgaacagcaggagtctttggagcagaaattatttaaactagaaagcaaaaataggtggcttcgacagcaattagtttatgcacataagaaagttaacaaaagcaaggtaacaattaatattcagtttcctgagacgaaaatgcaacgtcatctaaaagagaaaaatgaggaggtattcaattatggtaaccatttaaaagaatgtatagatcaatatgaaaaagagaaagcagaaagagaa

SEQ ID NO: 26986 - DNA, 642 bp, Homo sapiens
  MAP TO AC011301.3; EXPRESSED IN BRAIN, SIGNAL = 1.2; EST_HUMAN HIT: BF530661.1, EVALUE 1.00e-122; SWISSPROT HIT: Q9QYC0, EVALUE 1.50e+00; NT HIT: AF036943.1, EVALUE 0.00e+00
gtatggctttttgacatggctgtcactggatttaggctttctgtcctccccgggaagttgtctcggagactggtcctcatatgacctcatattgtccctcctcccagcttccatggccatcttctccctcatggcctttgctctttccgtttccaaagcgatggctttctccagcagggtcaggttccccttggtcatgtcgaacacctcttcagacctgtccgagttcacagaggtggtatcgtcgtcccgctcatgacacccatcctccttcgcacagctggcaaacactctcgaccgggggctcaactgctcctccagccgcatgaggttcagcatgtccgagtagtttctgtccggcgtccttccggggaagtcctcttctggccggacatgctgacggatgttcatgttctgctgcggattcctctcctgcgggttggtctcactgagcttcctggccaggtcgaagcactgattcctcaaacactccagactgctcagacacacctcctcatcgctctcctccaccatcttttccatgagtccgttgttcatgggcttccccaacatgacgtaattcatatttctactgtcttgctgcgacatgctgtctgcataatttctgtcattcatgttttc

SEQ ID NO: 26987 - DNA, 147 bp, Homo sapiens
  MAP TO AL109982.1; EXPRESSED IN HBL100, SIGNAL =   1; EXPRESSED IN BONE MARROW, SIGNAL = 1.2; EXPRESSED IN BRAIN, SIGNAL = 1.1; EXPRESSED IN ADULT LIVER, SIGNAL = 0.94; EXPRESSED IN FETAL LIVER, SIGNAL = 0.95; SWISSPROT HIT: P08547, EVALUE 2.00e-06; EST_HUMAN HIT: AW859898.1, EVALUE 1.00e-13; NT HIT: U66061.1, EVALUE 6.00e-09
tgtctttgttgttgttgctgttgctgttgacaatagccattctaactgttctaactggggcgagatatctcattgtcaatttgatttgcattaatctgatgaacagtgatgttgaacattttttcatatacctgttggccatgtgta

SEQ ID NO: 26988 - DNA, 151 bp, Homo sapiens
  MAP TO AC007402.3; EXPRESSED IN HELA, SIGNAL = 0.66; EXPRESSED IN BRAIN, SIGNAL = 0.73; EXPRESSED IN PLACENTA, SIGNAL = 0.61; EXPRESSED IN BT474, SIGNAL = 0.64; EXPRESSED IN HBL100, SIGNAL =  12; NT HIT: AB016426.1, EVALUE 2.90e-01; SWISSPROT HIT: Q04173, EVALUE 8.70e+00; EST_HUMAN HIT: BE874335.1, EVALUE 5.10e-01
attgttacgaaccgttaagatgtatttcactaatcctaaatttactgtgtccacattatcaacttctcttagttggacctccaaaatgactttagccactttaatgccagcagagataaggggaagaactgtgacaaaagggccgtcagag

SEQ ID NO: 26989 - DNA, 278 bp, Homo sapiens
  MAP TO AE000659.1; EXPRESSED IN FETAL LIVER, SIGNAL = 1.2; EXPRESSED IN BT474, SIGNAL =   1; EXPRESSED IN BRAIN, SIGNAL = 1.5; EXPRESSED IN BONE MARROW, SIGNAL =   1; EXPRESSED IN LUNG, SIGNAL = 0.99; EXPRESSED IN HBL100, SIGNAL = 1.3; EXPRESSED IN PLACENTA, SIGNAL = 0.91; EXPRESSED IN HELA, SIGNAL = 0.97; SWISSPROT HIT: P01737, EVALUE 3.00e-18; NT HIT: M97710.1, EVALUE 1.00e-130; EST_HUMAN HIT: AA312534.1, EVALUE 1.00e+00
aggccttcctgactataaactgcacgtacacagccacaggatacccttcccttttctggtatgtccaatatcctggagaaggtctacagctcctcctgaaagccacgaaggctgatgacaagggaagcaacaaaggttttgaagccacataccgtaaagaaaccacttctttccacttggagaaaggctcagttcaagtgtcagactcagcggtgtacttctgtgctctgagtgacacagtgacagggactgcagggggagctgagcacaaactctga

SEQ ID NO: 26990 - DNA, 200 bp, Homo sapiens
  MAP TO AC007375.4; EXPRESSED IN BT474, SIGNAL = 1.3; EXPRESSED IN ADULT LIVER, SIGNAL = 1.1; EXPRESSED IN LUNG, SIGNAL = 4.8; EXPRESSED IN BRAIN, SIGNAL = 1.1; EXPRESSED IN BONE MARROW, SIGNAL =  15; NT HIT: gi7662307, EVALUE 7.30e+00; EST_HUMAN HIT: BE348693.1, EVALUE 3.00e-76; SWISSPROT HIT: Q05793, EVALUE 9.50e-01
gtgtgtgttcctgccagacaacggcgccttctttgtcaactacgtgatcacggcagctttacttggcacaggcatggagctgctgcgtctggggtcactcttctgctacagcacccgcctcttcttctctagatcagagccagagagagtcaacatcagaaaggtacagactggctctccgctgagcacagccctcagtt

SEQ ID NO: 26991 - DNA, 110 bp, Homo sapiens
  MAP TO AC012275.1; EXPRESSED IN BONE MARROW, SIGNAL = 1.1; EXPRESSED IN FETAL LIVER, SIGNAL =   1; EXPRESSED IN ADULT LIVER, SIGNAL = 1.2; EXPRESSED IN LUNG, SIGNAL =   1; EXPRESSED IN HELA, SIGNAL = 1.1; EXPRESSED IN HBL100, SIGNAL =   1; EXPRESSED IN BT474, SIGNAL = 0.93; EXPRESSED IN BRAIN, SIGNAL = 0.98; NT HIT: AF223391.1, EVALUE 2.00e-17; EST_HUMAN HIT: BE350127.1, EVALUE 1.00e-27
tcattgtcttccatctccacatcttgtcccactggaaggttttcaggggaaataacactactggagctgtaatctcctatggtaacaatgccttcttctggatgacttcc

SEQ ID NO: 26992 - DNA, 379 bp, Homo sapiens
  MAP TO AF134471.1; EXPRESSED IN BONE MARROW, SIGNAL = 1.3; EXPRESSED IN HELA, SIGNAL = 1.9; EXPRESSED IN PLACENTA, SIGNAL = 1.1; EXPRESSED IN HBL100, SIGNAL = 1.1; EXPRESSED IN BT474, SIGNAL = 1.1; EXPRESSED IN FETAL LIVER, SIGNAL = 1.1; EXPRESSED IN ADULT LIVER, SIGNAL = 1.4; EXPRESSED IN LUNG, SIGNAL = 1.2; EXPRESSED IN BRAIN, SIGNAL = 1.1; EST_HUMAN HIT: BF026927.1, EVALUE 1.00e-03; SWISSPROT HIT: P39125, EVALUE 2.30e-01; NT HIT: AB026898.1, EVALUE 1.50e-02
tttaaaaatttccatagtctggctagaacttttcaaatctttaagttctacttcatttttgcttaacaactctgtctttaagtcatagctctcttctcgcattttactataatcaggcaggaggaggcaaacttcatctttgacattttgcttagaaattgcctcaggtaaatatccaatttcactcttaagtcctcccttccacaaaatactagaacatgcacaaatttcaaccaagttctttgccactttataaccaggatcatctccatattgtccaataacacgttccttattttcatctgagacttcatcagaatgctcttcacggttcatgttttctactgacattctgctcaggattacttaggaattctct

SEQ ID NO: 26993 - DNA, 86 bp, Homo sapiens
  MAP TO AP000045.1; EXPRESSED IN FETAL LIVER, SIGNAL = 3.5; EXPRESSED IN ADULT LIVER, SIGNAL = 0.64; EXPRESSED IN BRAIN, SIGNAL = 0.7; EXPRESSED IN BT474, SIGNAL = 0.6; EXPRESSED IN BONE MARROW, SIGNAL = 0.69; EXPRESSED IN HELA, SIGNAL = 0.69; EXPRESSED IN PLACENTA, SIGNAL = 0.62; EXPRESSED IN LUNG, SIGNAL = 0.71; EST_HUMAN HIT: AW895976.1, EVALUE 1.00e-06; NT HIT: AJ131016.1, EVALUE 3.00e-06; SWISSPROT HIT: P12775, EVALUE 9.30e+00
ttttgaaataaatgttgttgggattataagaggaagtaggctgggcacagtggctcatgcctataataggaagtgcatcatgtttt

SEQ ID NO: 26994 - DNA, 124 bp, Homo sapiens
  MAP TO AC007629.3; EXPRESSED IN HBL100, SIGNAL =   1; EXPRESSED IN HELA, SIGNAL = 0.66; EXPRESSED IN BONE MARROW, SIGNAL = 0.93; EXPRESSED IN FETAL LIVER, SIGNAL = 0.68; EXPRESSED IN LUNG, SIGNAL = 0.66; EXPRESSED IN ADULT LIVER, SIGNAL = 1.1; EXPRESSED IN BRAIN, SIGNAL = 1.1; EST_HUMAN HIT: AI205014.1, EVALUE 9.00e-64; NT HIT: AB020710.1, EVALUE 5.00e-64
ctgtgtccatgagatagcgaaggcgcttctccaccagcgcggcacgggtgtcaatttgcttttgctcattctctagtgctgccaattctcctactacatactgactggtgtctttgaacccttt

SEQ ID NO: 26995 - DNA, 135 bp, Homo sapiens
  MAP TO AC008088.1; EXPRESSED IN HELA, SIGNAL = 0.65; EXPRESSED IN PLACENTA, SIGNAL = 0.64; EXPRESSED IN BONE MARROW, SIGNAL = 1.1; EXPRESSED IN HBL100, SIGNAL = 0.98; EXPRESSED IN FETAL LIVER, SIGNAL = 0.59; EXPRESSED IN LUNG, SIGNAL = 0.67; EXPRESSED IN BRAIN, SIGNAL = 1.3; NT HIT: AF083078.1, EVALUE 1.70e-02; EST_HUMAN HIT: AL162091.1, EVALUE 6.00e-49; SWISSPROT HIT: P30622, EVALUE 1.30e+00
attacagcaagacatgcaaaagtttaagaatgaggtcaacacattagaagaagagttcctggctttgaagaaagaaaatgttcaacttcataaagaggtagggttttacttgctgccactctttgttttttctct

SEQ ID NO: 26996 - DNA, 83 bp, Homo sapiens
  MAP TO AC008067.1; EXPRESSED IN ADULT LIVER, SIGNAL = 1.1; EXPRESSED IN BRAIN, SIGNAL = 0.7; SWISSPROT HIT: P30997, EVALUE 9.00e-09; EST_HUMAN HIT: AV723447.1, EVALUE 2.00e-39; NT HIT: gi11430303, EVALUE 1.00e-39
ttgagcaggaagattatgatgtgcgtagcaggacaagtgttcagactgaggatgaccagctcattgcagggcagagcgcacgg

SEQ ID NO: 26997 - DNA, 80 bp, Homo sapiens
  MAP TO AC007639.5; EXPRESSED IN HELA, SIGNAL =   1; EXPRESSED IN ADULT LIVER, SIGNAL = 0.79; EXPRESSED IN BRAIN, SIGNAL = 0.7; NT HIT: M17838.1, EVALUE 6.40e-01; EST_HUMAN HIT: BF690334.1, EVALUE 2.40e-01; SWISSPROT HIT: P55345, EVALUE 7.10e+00
agtggcaaagctccagccccgctgctcccgggcggtgtccgcaacaagaggcttccgccccatcccaccagccatccacg

SEQ ID NO: 26998 - DNA, 119 bp, Homo sapiens
  MAP TO AC007539.8; EXPRESSED IN PLACENTA, SIGNAL = 0.6; EXPRESSED IN BRAIN, SIGNAL = 0.72; EXPRESSED IN HELA, SIGNAL = 0.61; NT HIT: U68174.1, EVALUE 2.20e-01; EST_HUMAN HIT: AU141175.1, EVALUE 3.90e-01
ttttgcatatggtgctttctctggaataccctcatcccccttttcatcccgggaaactctaatcattctttaatcacagttgaaatgtctcctagtcattgaagtctctccttaatcct

SEQ ID NO: 26999 - DNA, 713 bp, Homo sapiens
  MAP TO AC008266.1; EXPRESSED IN BRAIN, SIGNAL = 0.89; EXPRESSED IN BT474, SIGNAL = 0.9; EXPRESSED IN BONE MARROW, SIGNAL = 0.66; EXPRESSED IN HBL100, SIGNAL =   1; EXPRESSED IN FETAL LIVER, SIGNAL = 0.59; EXPRESSED IN HELA, SIGNAL = 0.81; EXPRESSED IN ADULT LIVER, SIGNAL = 0.77; EXPRESSED IN PLACENTA, SIGNAL = 0.85; EXPRESSED IN LUNG, SIGNAL = 0.77; SWISSPROT HIT: P26897, EVALUE 7.40e-01; NT HIT: AB020702.1, EVALUE 0.00e+00; EST_HUMAN HIT: AL135448.1, EVALUE 0.00e+00
aaaagcttcactggcctgagcaagaacttgctaagaagtctattctaaatgcagaagattcattgatcattgacaacaaaagaagcatttcacatttgtcctcgggagtgctaaaagacattttcacaactggaaccagtagttacaatgtcctactacagagcaaggaggaaaaaaagtatcattcacaaaaacagtcttcctccacctactccaaaagatgtagaaaacccagcaaatctcctaacacttctcgtagcaaagatcctcgcaggatgaaagccctggtgcctgtgacaagcagtggtacttggtactgcctggagaggcggcctgctgtttttgtcactagttcagtgtcaagtcctgtaaagtttacacatgatatctctgttacagggaatggcatagtactgccacctaaacccaaaagcaaggtcaagtggtgccatttctccactcttccaaagccaaagcctcagctgtctagaagctttgaaaagggagatgacttttctgggaagaaattttgtatattgactgctataaaacccaccaacttagagaaagaaaaactgagattcttcaaatctgactatacctacaatcctcagtttgagtatgccaatcctgctctgccaagcgtattagctaagcatagccacgcatctgaccgatttcttaagcaggtaaaatgccatttcaatagtggt

SEQ ID NO: 27000 - DNA, 298 bp, Homo sapiens; identical to SEQ ID NO: 21827
  MAP TO AL050342.29; EXPRESSED IN BRAIN, SIGNAL = 0.93; EXPRESSED IN BT474, SIGNAL = 1.1; NT HIT: gi8924019, EVALUE 3.90e-02; EST_HUMAN HIT: AF074689.1, EVALUE 4.70e-02; SWISSPROT HIT: P39941, EVALUE 3.00e+00

SEQ ID NO: 27001 - DNA, 223 bp, Homo sapiens
  MAP TO AL023913.5; EXPRESSED IN BRAIN, SIGNAL = 3.1; NT HIT: L19761.1, EVALUE 1.00e-78; EST_HUMAN HIT: AL133870.1, EVALUE 2.00e-78; SWISSPROT HIT: P13795, EVALUE 2.00e-22
tcaccttctccatgatcctgtcgatctggcgattctgtgtatcgatctcattgcccatatccagggccatgtgacggaggttcccgatgatgccgctcacctgctctaggttttcatccatttcattttctcgggcatcatttgttaccctgggatccaaagagcaagttttagaagacagagggtggaaaacatattgaataccaaggacccaaagcatagt

SEQ ID NO: 27002 - DNA, 482 bp, Homo sapiens
  MAP TO AL031666.3; EXPRESSED IN HELA, SIGNAL = 0.96; EXPRESSED IN FETAL LIVER, SIGNAL = 1.1; EXPRESSED IN BT474, SIGNAL = 4.4; EXPRESSED IN BONE MARROW, SIGNAL = 0.93; EXPRESSED IN BRAIN, SIGNAL = 0.99; EXPRESSED IN LUNG, SIGNAL =   1; EST_HUMAN HIT: BF371021.1, EVALUE 0.00e+00; NT HIT: AB032951.1, EVALUE 0.00e+00; SWISSPROT HIT: P33311, EVALUE 3.80e+00
ggaggtttacgtggagaacatccgcaggaagtttggggtttttaattactctccatttaggacaccctacacacccaacagccagtatcaaatgctgctcgatcccaccaaccccagcgccggcactgccaagatagacaagcaggagaaggtcaagctcaactttgacatgacggcatcccccaagatcctgatgagcaagcctgtgctgagtgggggcacaggccgccggatttccttgtcggatatgccgcgctcccccatgagcacaaactcttctgtgcacacgggctccgacgtggagcaggatgctgagaagaaggccacgtcgagccacttcagtgcgagcgaggagtccatggacttcctggataagagcacaggtcagctccgtgcgggggagcggggaggaggccccttggacacgggggtttcccatgggtgcacacttggtgggcccaagcaggtgagcatcaagcaat

SEQ ID NO: 27003 - DNA, 291 bp, Homo sapiens
  MAP TO AL132661.2; EXPRESSED IN BONE MARROW, SIGNAL = 1.6; EXPRESSED IN HBL100, SIGNAL =   1; EXPRESSED IN HELA, SIGNAL = 1.3; EXPRESSED IN PLACENTA, SIGNAL = 1.3; EXPRESSED IN FETAL LIVER, SIGNAL = 1.2; EXPRESSED IN BT474, SIGNAL = 1.9; EXPRESSED IN BRAIN, SIGNAL = 1.1; SWISSPROT HIT: P20457, EVALUE 5.00e+00
agggcaggggtgccggtgagatccccctcgggctccttgctgatgagggacagcagggagggacgtttacttcttccatgcttctccagtccagggatgcttagggctgcgtcatgtgaaatcttcatcctctgcacaggcagggccctgtgcctcctcctgaagttggaggtgaggtttttgaagcaaatggggtgatgtgctgtgatttcaaggagagacgtggtggtgaaagcaattgggtacttctttgcctagaataacaccaatgagaaactgaagatggaaaat

SEQ ID NO: 27004 - DNA, 381 bp, Homo sapiens
  MAP TO AC007282.2; EXPRESSED IN HELA, SIGNAL = 0.81; EXPRESSED IN BRAIN, SIGNAL =   1; EXPRESSED IN BT474, SIGNAL = 0.72; EXPRESSED IN FETAL LIVER, SIGNAL = 0.73; EST_HUMAN HIT: AA487865.1, EVALUE 8.90e-02; NT HIT: AE001301.1, EVALUE 5.10e-02; SWISSPROT HIT: Q29450, EVALUE 2.00e+00
acatgtgtttgcctgtacatttccagcccttgatgattctcctttgatgcttggtaaagatacatttggtagattttcttttaaactattctttgtatctaaaccctttattgtattgatagtaggatcaggggctaacttattctcagtttctaacatctttgttgtgaagatattagggtcatgggcccaggttgtattagcaggtcctgcagtttttgattgtgctggataaggaggatcctggtcttcatgctctatgacctctgcacctaagatatttctatatttgtatatatcttgatcttttctttttctgactgacattttgtttatattccttagaaaaggatcaaaaccgttcttgttgaatttctgaaa

SEQ ID NO: 27005 - DNA, 116 bp, Homo sapiens
  MAP TO AC007496.2; EXPRESSED IN BONE MARROW, SIGNAL = 1.1; EXPRESSED IN PLACENTA, SIGNAL = 0.98; EXPRESSED IN ADULT LIVER, SIGNAL = 1.5; EXPRESSED IN BRAIN, SIGNAL =   1; EXPRESSED IN HELA, SIGNAL = 1.1; EXPRESSED IN HBL100, SIGNAL =   1; EXPRESSED IN FETAL LIVER, SIGNAL = 1.1; EXPRESSED IN BT474, SIGNAL =   1; NT HIT: AF243438.1, EVALUE 6.40e-02; EST_HUMAN HIT: AA321192.1, EVALUE 5.90e+00; SWISSPROT HIT: Q29551, EVALUE 4.00e+00
ggttccaacaaccagattttacagccttaacaaagatgtccagagtggatccattctgggggtaggtggtgatgggatggctggggtcacagagaatagaaagatgactaataata

SEQ ID NO: 27006 - DNA, 80 bp, Homo sapiens
  MAP TO AC008110.1; EXPRESSED IN HELA, SIGNAL = 0.7; EXPRESSED IN BRAIN, SIGNAL = 0.73; EXPRESSED IN BT474, SIGNAL = 0.82; EXPRESSED IN FETAL LIVER, SIGNAL = 0.63; EXPRESSED IN LUNG, SIGNAL = 0.71; NT HIT: AE001248.1, EVALUE 5.40e-01; EST_HUMAN HIT: H19092.1, EVALUE 7.00e-38
atggcagtttccaggaactgtttcatcacgcttgagcggtgctttacaaaactctcctcacagaaagtgatgggctcacc

SEQ ID NO: 27007 - DNA, 87 bp, Homo sapiens
  MAP TO AC010092.2; EXPRESSED IN PLACENTA, SIGNAL = 1.1; EXPRESSED IN BRAIN, SIGNAL = 1.1; EXPRESSED IN HBL100, SIGNAL = 0.92; EXPRESSED IN ADULT LIVER, SIGNAL = 1.1; EXPRESSED IN BT474, SIGNAL = 0.97; EXPRESSED IN BONE MARROW, SIGNAL = 1.1; EST_HUMAN HIT: AA868057.1, EVALUE 7.00e-35; SWISSPROT HIT: Q00839, EVALUE 4.10e+00; NT HIT: AF162666.1, EVALUE 5.00e-42
atagatgaacaacaaaaattacttgaaaaatacaaagaacgattaaataagtgcatatcaatgagcaagaaacttcttattgaaaag

SEQ ID NO: 27008 - DNA, 177 bp, Homo sapiens
  MAP TO AL109613.10; EXPRESSED IN BT474, SIGNAL = 1.1; EXPRESSED IN HELA, SIGNAL =   1; EXPRESSED IN BONE MARROW, SIGNAL = 1.3; EXPRESSED IN LUNG, SIGNAL = 1.3; EXPRESSED IN BRAIN, SIGNAL = 0.99; NT HIT: M87298.1, EVALUE 4.10e-01; EST_HUMAN HIT: T73796.1, EVALUE 2.40e+00; SWISSPROT HIT: Q52725, EVALUE 6.50e+00
agcatttgctggattcttgagtaagagaacaataaacctaagcgcagcgttcggggcagcagcaggaacagtaaggggctgggagctgaggctggagaggaggcagggccaggtcacaaggggcttggatgccacacaaacatgcttagactttatcatgatagcaatgggatttat

SEQ ID NO: 27009 - DNA, 114 bp, Homo sapiens
  MAP TO AC009228.2; EXPRESSED IN ADULT LIVER, SIGNAL = 0.74; EXPRESSED IN BRAIN, SIGNAL = 0.92; EXPRESSED IN BONE MARROW, SIGNAL = 0.95; EXPRESSED IN HBL100, SIGNAL = 0.98; EXPRESSED IN FETAL LIVER, SIGNAL = 0.78; EXPRESSED IN PLACENTA, SIGNAL = 0.93; EXPRESSED IN BT474, SIGNAL = 0.67; EXPRESSED IN LUNG, SIGNAL = 0.97; EXPRESSED IN HELA, SIGNAL = 0.92; EST_HUMAN HIT: AI636745.1, EVALUE 5.00e-58; SWISSPROT HIT: P07274, EVALUE 6.10e-01
ctggtgaatggatttgccaagaaccctttgcaagcccgaagagaaggactgtatttcaagggaaaagattacagatgtgtccgggcagatgaatattctctttatgccaaaaat

SEQ ID NO: 27010 - DNA, 328 bp, Homo sapiens
  MAP TO AC007944.1; EXPRESSED IN BT474, SIGNAL = 0.83; EXPRESSED IN BONE MARROW, SIGNAL = 0.69; EXPRESSED IN LUNG, SIGNAL = 1.4; EXPRESSED IN HELA, SIGNAL = 0.6; EXPRESSED IN HBL100, SIGNAL = 1.1; EXPRESSED IN FETAL LIVER, SIGNAL = 0.9; EXPRESSED IN PLACENTA, SIGNAL = 0.85; EXPRESSED IN BRAIN, SIGNAL = 0.99; NT HIT: AB019130.1, EVALUE 5.10e-02; SWISSPROT HIT: O43900, EVALUE 3.00e-19; EST_HUMAN HIT: AI904560.1, EVALUE 8.20e-01
  unsure 255
  unsure 302
gtatcgaccaaggtcaaatgacctatgatggccaacactggcatgccactgagacctgtttctgctgtgctcactgcaagaaatccctcctggggcggccattcctcccgaagcagggccagatattctgctcacgggcctgcagtgctggggaagaccccaatggttctgactcctctgattccgccttccagaacgccagggccaaggagtcccggcgcagtgccaaaattggcaagaacaagggcaagacgngaggagcccatgctgaaccagcacagccagctgcaagtgagttctanaccggctgtcagccgacgtagacccc

SEQ ID NO: 27011 - DNA, 103 bp, Homo sapiens
  MAP TO AC006317.3; EXPRESSED IN PLACENTA, SIGNAL = 0.89; EXPRESSED IN FETAL LIVER, SIGNAL = 0.83; EXPRESSED IN ADULT LIVER, SIGNAL = 0.97; EXPRESSED IN BRAIN, SIGNAL = 0.81; EXPRESSED IN BT474, SIGNAL = 0.7; EXPRESSED IN BONE MARROW, SIGNAL = 1.4; EXPRESSED IN HBL100, SIGNAL = 0.8; EXPRESSED IN LUNG, SIGNAL = 0.72; EXPRESSED IN HELA, SIGNAL = 0.77; EST_HUMAN HIT: BF343655.1, EVALUE 2.10e-02; SWISSPROT HIT: O87792, EVALUE 8.00e-01
gcccttgttgattttgcacagctggtgaccaggcccaagtgcccctctcttcttcagcagccagctcagcctttaagatccaggtgggttcctccttcccgta

SEQ ID NO: 27012 - DNA, 317 bp, Homo sapiens
  MAP TO AL034345.3; EXPRESSED IN FETAL LIVER, SIGNAL =   1; EXPRESSED IN BRAIN, SIGNAL = 1.8; NT HIT: U26674.1, EVALUE 4.20e-02
tgaaaggtttctattggctttcatgtgtttcctcaacttaacaggtattagcagaagtcacagtaagcgctcaggcttcagccaaaattaaaaatgaagtacaggaggtaaaggacaaagcccaaaaaattgtggatgaaattgatagtgaaaaagtgaaagctgaaagcaagcttgaggcagctaaacctgcactggaagaagcagaagcagccctgaatgtgagcagtgcattgttaccccttccaacacaagtcctagaaggcttcatgtttcattacatgaaattaactcatcagaaaactgaattgaattct

SEQ ID NO: 27013 - DNA, 163 bp, Homo sapiens
  MAP TO AL031650.21; EXPRESSED IN BONE MARROW, SIGNAL = 0.93; EXPRESSED IN BRAIN, SIGNAL = 0.91; EXPRESSED IN BT474, SIGNAL = 1.2; NT HIT: gi4759195, EVALUE 3.20e-01; SWISSPROT HIT: Q08682, EVALUE 1.00e+00
agacctcaggctgcccatagggagggatcctgaggacccaagagtcgctagggcttgtgctttttttctttgcagtcaccgtgcctatcatgaggatgaccttggcctggatcacctctttccagaacaagcatctctgaatgtatcggcaggtgctcagctt

SEQ ID NO: 27014 - DNA, 153 bp, Homo sapiens
  MAP TO AL080239.11; EXPRESSED IN FETAL LIVER, SIGNAL = 0.62; EXPRESSED IN LUNG, SIGNAL = 0.7; EXPRESSED IN BRAIN, SIGNAL = 0.68; EXPRESSED IN PLACENTA, SIGNAL = 0.67; EXPRESSED IN HBL100, SIGNAL = 0.88; EXPRESSED IN ADULT LIVER, SIGNAL = 0.79; EXPRESSED IN BT474, SIGNAL = 0.73; EXPRESSED IN HELA, SIGNAL = 0.72; SWISSPROT HIT: Q13618, EVALUE 1.70e+00; EST_HUMAN HIT: BE794381.1, EVALUE 6.00e-50; NT HIT: AP000001.1, EVALUE 3.00e-01
gttttgaagcagggggtgacggacttcagagttgttttcctggaggcactggtaccggacttggcagaggagaaggatggtatcaatgtgttgctgggtggctgcctggagaggggagtttagccttcgggagataaagcaggatatgaaggt

SEQ ID NO: 27015 - DNA, 167 bp, Homo sapiens
  MAP TO AL078475.2; EXPRESSED IN PLACENTA, SIGNAL = 1.1; EXPRESSED IN LUNG, SIGNAL = 0.75; EXPRESSED IN BRAIN, SIGNAL = 0.75; EXPRESSED IN BT474, SIGNAL = 1.1; EXPRESSED IN ADULT LIVER, SIGNAL = 0.78; EXPRESSED IN HELA, SIGNAL = 1.7; EXPRESSED IN FETAL LIVER, SIGNAL = 0.7; EXPRESSED IN HBL100, SIGNAL = 1.1; EXPRESSED IN BONE MARROW, SIGNAL = 0.83; NT HIT: AL163203.2, EVALUE 2.00e-89; SWISSPROT HIT: P31647, EVALUE 3.80e+00; EST_HUMAN HIT: AA279718.1, EVALUE 7.00e-56
aatcccagctgtgttctccaaaatccatttcagggttgcaagatcatagttctcagggtgtttaaaggcaacaccttccggaagcccctgtactatcaaagctgactggtcttgtagcatcttctcatatggtacaggtacctctgtgggtttttgtaaagctttcc

SEQ ID NO: 27016 - DNA, 155 bp, Homo sapiens
  MAP TO AL049875.2; EXPRESSED IN BRAIN, SIGNAL = 0.71; EXPRESSED IN ADULT LIVER, SIGNAL = 0.66; NT HIT: K03013.1, EVALUE 3.00e-10; EST_HUMAN HIT: BE166413.1, EVALUE 1.00e-62; SWISSPROT HIT: Q16186, EVALUE 2.90e+00
gacaagagctcccagtgggaggggcgggttgccatttttgctgtctcacagcccttgcccttgctgtcttcaggctctggagagtcatggggaccaaaggctggtccagacccccacacagagcaaccatcttacagaaaagtggccagactatt

SEQ ID NO: 27017 - DNA, 169 bp, Homo sapiens
  MAP TO AL109941.9; EXPRESSED IN BT474, SIGNAL = 0.95; EXPRESSED IN BONE MARROW, SIGNAL =   1; EXPRESSED IN BRAIN, SIGNAL = 1.1; EXPRESSED IN HBL100, SIGNAL = 0.99; EXPRESSED IN HELA, SIGNAL =   1; SWISSPROT HIT: P54726, EVALUE 2.30e+00; NT HIT: AF257213.1, EVALUE 8.40e-02; EST_HUMAN HIT: AA593787.1, EVALUE 1.00e-01
tatttatccactcccagaaaagcatgcccttggagtttttttcccattagtgggaatttattggtaccatattctccctccactttctcttcatttctcttgtaatcatcatcatgcatttgcaacacagactataaggatatgagtacaatttttaattatggagcag

SEQ ID NO: 27018 - DNA, 261 bp, Homo sapiens
  MAP TO AL109984.5; EXPRESSED IN LUNG, SIGNAL = 2.9; EXPRESSED IN BRAIN, SIGNAL = 0.94; EXPRESSED IN ADULT LIVER, SIGNAL = 0.95; EXPRESSED IN BT474, SIGNAL = 1.2; EXPRESSED IN HELA, SIGNAL = 1.2; EXPRESSED IN HBL100, SIGNAL = 1.5; SWISSPROT HIT: Q08705, EVALUE 9.00e-22; NT HIT: gi11545802, EVALUE 0.00e+00; EST_HUMAN HIT: AI829089.1, EVALUE 0.00e+00
gagacaaaccgcacaagtgtgagttctgtgacaagtgcttcagccggaaggacaacctgaccatgcacatgcggtgccacaccagtgtgaagccacacaagtgtcacctgtgtgactacgctgccgtggacagcagtagcctcaagaagcacctgcggatccactctgatgagcggccgtacaaatgccagctctgcccctatgccagccgcaactccagccagctcaccgtccacctgcgatctcacacgggtgagtccc

SEQ ID NO: 27019 - DNA, 111 bp, Homo sapiens
  MAP TO AP000054.1; EXPRESSED IN HELA, SIGNAL = 0.6; EXPRESSED IN LUNG, SIGNAL = 0.96; EXPRESSED IN BRAIN, SIGNAL = 1.4; EXPRESSED IN PLACENTA, SIGNAL = 0.67; EXPRESSED IN HBL100, SIGNAL =   1; EXPRESSED IN FETAL LIVER, SIGNAL = 0.62; EXPRESSED IN ADULT LIVER, SIGNAL = 0.67; EST_HUMAN HIT: BF203629.1, EVALUE 4.00e-56; SWISSPROT HIT: P53805, EVALUE 1.00e-15; NT HIT: gi7657042, EVALUE 3.00e-56
atctgctgcggagaaggggttgctgaagtttattctgactcgtttgaagctcttaaaatactgaaaggtgatgtccttgtcatacgtcctaaagagggactcaaatttggc

SEQ ID NO: 27020 - DNA, 208 bp, Homo sapiens
  MAP TO AP000044.1; EXPRESSED IN LUNG, SIGNAL = 0.86; EXPRESSED IN HELA, SIGNAL = 0.77; EXPRESSED IN ADULT LIVER, SIGNAL = 1.4; EXPRESSED IN PLACENTA, SIGNAL = 0.7; EXPRESSED IN BRAIN, SIGNAL = 0.72; EXPRESSED IN BT474, SIGNAL = 0.78; EXPRESSED IN BONE MARROW, SIGNAL = 0.78; EXPRESSED IN HBL100, SIGNAL = 1.1; EXPRESSED IN FETAL LIVER, SIGNAL = 0.92; EST_HUMAN HIT: AV735185.1, EVALUE 1.00e-113; SWISSPROT HIT: P17181, EVALUE 4.00e-33; NT HIT: gi10835182, EVALUE 1.00e-114
tcttctgctttcaacttctgaggaacaaatcgaaaaatgtttcataattgaaaatataagcacaattgctacagtagaagaaactaatcaaactgatgaagatcataaaaaatacagttcccaaactagccaagattcaggaaattattctaatgaagatgaaagcgaaagtaaaacaagtgaagaactacagcaggactttgtatga

SEQ ID NO: 27021 - DNA, 191 bp, Homo sapiens
  MAP TO AC011739.2; EXPRESSED IN LUNG, SIGNAL = 1.2; EXPRESSED IN BRAIN, SIGNAL = 1.3; EXPRESSED IN BONE MARROW, SIGNAL = 1.1; EXPRESSED IN HBL100, SIGNAL = 0.99; EXPRESSED IN FETAL LIVER, SIGNAL = 1.1; NT HIT: gi11429300, EVALUE 5.00e-81; SWISSPROT HIT: P14508, EVALUE 1.30e+00; EST_HUMAN HIT: AW958496.1, EVALUE 5.00e-81
aattagccaatcgagcacagaactgaatccaattgaagtggcaattgacgagatgtccaagaaggtttctgagcttaatcagctttgcacaatggaagaagtggacatgatcagactgcagctcaaactgcaaggaagtgtcagcgtgaaggtgagtaagcattgcccagggctgagatgcacatggccaa

SEQ ID NO: 27022 - DNA, 178 bp, Homo sapiens
  MAP TO AL049735.4; EXPRESSED IN LUNG, SIGNAL = 0.68; EXPRESSED IN HELA, SIGNAL = 0.79; EXPRESSED IN ADULT LIVER, SIGNAL = 0.65; EXPRESSED IN PLACENTA, SIGNAL = 0.61; EXPRESSED IN BRAIN, SIGNAL = 0.76; EXPRESSED IN BONE MARROW, SIGNAL = 0.63
ataaaaaggagaagaagaaagaagaagagggagaagaagaaggaagaacaagagggagaagaacaaagaggaggaggaggagaaagaagaagaaagaagaaaagaagaaaaaagaaagaaagaagaagaaagaagaaagaaggaggaggagaggaaggagaagaagaaaaaaaagaag

SEQ ID NO: 27023 - DNA, 513 bp, Homo sapiens
  MAP TO AP000105.1; EXPRESSED IN LUNG, SIGNAL = 1.1; EXPRESSED IN HELA, SIGNAL = 1.8; EXPRESSED IN ADULT LIVER, SIGNAL = 0.93; EXPRESSED IN PLACENTA, SIGNAL = 1.2; EXPRESSED IN BT474, SIGNAL = 1.5; EXPRESSED IN FETAL LIVER, SIGNAL = 1.7; EXPRESSED IN BRAIN, SIGNAL = 1.1; EXPRESSED IN BONE MARROW, SIGNAL = 1.2; EXPRESSED IN HBL100, SIGNAL = 1.1; NT HIT: AJ271736.1, EVALUE 0.00e+00; EST_HUMAN HIT: BE086814.1, EVALUE 7.00e-98; SWISSPROT HIT: P26808, EVALUE 2.00e-41
tgaatataaaggccttccatactgtggtaactttgatgaataccaaaggacatcattggctaacaaatgctagattaaccaagtaccaaagcttgctatgtgaaaatccccgcataatcactgacgtctgtaacaccctaaatcccgccaccctgctcccagtatcagagagcctggtcaagcataactgtgtagacatgttggactcagtttattctagcagacctgaccttcgggaccagccatgggcatcagcagactgggagttatacatggacgggagcaacttcatcaatccacatggagaaagatgtgcaggatatgcggtggtaactttgaacgctgtcattgaagccaaaccattgccacagggcacttcagcccagaaggctgagctcattgctttaactcgggctctagaactcagtgaaggtaagactgtaaacatctacactgactcttgatatgcctttctaaccctccaagtgcatggagcattatataaggaaaagg

SEQ ID NO: 27024 - DNA, 249 bp, Homo sapiens
  MAP TO AC009944.2; EXPRESSED IN BRAIN, SIGNAL =   1; EXPRESSED IN BONE MARROW, SIGNAL = 0.96; EXPRESSED IN LUNG, SIGNAL = 1.1; NT HIT: AJ271735.1, EVALUE 3.00e-12; SWISSPROT HIT: P08548, EVALUE 8.00e-19; EST_HUMAN HIT: AW856390.1, EVALUE 1.00e-06
aaacactgtgaaagaaatcgaagaagacagaaaaaaatggaaagatattctatgttcgtatatcggaagaatcagtgttgttaaaatgtccataattacaaaaggcaatgcaattgctaccaaaatgccattgtcattcttcacagaaatagaaaaagccatttgaaatgttttatggaaccagaagaaactcagaataaccaatgctatcctgaggaaaaagaacaaaattggaggaatcatattacc

SEQ ID NO: 27025 - DNA, 174 bp, Homo sapiens
  MAP TO AC008469.2; EXPRESSED IN HBL100, SIGNAL = 1.2; EXPRESSED IN HELA, SIGNAL =   1; EXPRESSED IN PLACENTA, SIGNAL = 1.2; EXPRESSED IN ADULT LIVER, SIGNAL = 1.2; EXPRESSED IN BT474, SIGNAL = 0.96; EXPRESSED IN FETAL LIVER, SIGNAL = 1.3; EXPRESSED IN BRAIN, SIGNAL = 1.1; EXPRESSED IN BONE MARROW, SIGNAL =   1; EXPRESSED IN LUNG, SIGNAL = 1.1; NT HIT: Z97335.2, EVALUE 2.60e-02; SWISSPROT HIT: Q16610, EVALUE 6.50e+00; EST_HUMAN HIT: AW294812.1, EVALUE 2.00e-03
atgaacccacaattgtctgcagactgcacagcctcatctgcagctgaggcagagtcagccctttctccttgtcctgcttttcagcagggttggaaatgcacagtctgggatgcttcttacgggggatagcctgagatgctggaggagtcagtggttgtcattgggcagcaacca

SEQ ID NO: 27026 - DNA, 196 bp, Homo sapiens
  MAP TO AC008833.2; EXPRESSED IN BRAIN, SIGNAL = 0.97; EXPRESSED IN BONE MARROW, SIGNAL = 1.1; EXPRESSED IN HBL100, SIGNAL = 0.92; EXPRESSED IN PLACENTA, SIGNAL = 1.1; EXPRESSED IN ADULT LIVER, SIGNAL =   1; EXPRESSED IN FETAL LIVER, SIGNAL = 0.96; EST_HUMAN HIT: AI739219.1, EVALUE 3.00e-03; NT HIT: AL163213.2, EVALUE 2.50e-02; SWISSPROT HIT: P43059, EVALUE 2.80e+00
attttccaatgcaggaataatgatatcaatatgaataccaatgacaacagtaacgataatgagttcacatttattgagtatttactgtgtgctgtagactgtgttaaatcatttgcatggcttatttcatttaatctcacaagaatcccaggtggaagagactggcatttcctttcctcctttatagataaggaaa

SEQ ID NO: 27027 - DNA, 112 bp, Homo sapiens
  MAP TO AF020503.1; EXPRESSED IN FETAL LIVER, SIGNAL = 1.1; EXPRESSED IN BRAIN, SIGNAL = 0.95; EXPRESSED IN LUNG, SIGNAL =   1; EXPRESSED IN HBL100, SIGNAL = 1.8; SWISSPROT HIT: P34610, EVALUE 4.00e+00; NT HIT: AF020503.1, EVALUE 7.00e-57
cagattccttcttggctgtactaccagtaagtttgaccatgtcaatgccagggtgtttactcaacataactgtaacaagtttctaaaaatgtctagcaataaatatattatt

SEQ ID NO: 27028 - DNA, 140 bp, Homo sapiens
  MAP TO AF043945.1; EXPRESSED IN LUNG, SIGNAL =   1; EXPRESSED IN HELA, SIGNAL = 2.5; EXPRESSED IN PLACENTA, SIGNAL = 1.3; EXPRESSED IN HBL100, SIGNAL =   1; EXPRESSED IN BT474, SIGNAL = 1.1; EXPRESSED IN BRAIN, SIGNAL =   1; SWISSPROT HIT: O62621, EVALUE 9.10e+00; NT HIT: AL163283.2, EVALUE 2.00e-73; EST_HUMAN HIT: AI526135.1, EVALUE 2.00e-02
ggttccaagtgggctttgggttttattaatagtagaatcgttgaatttttatgcaaatactgctgatttacaggttggaaatctggacaaaatcagacctgccctagaagatgatgctgtggaaagtgtttgccttttgt

SEQ ID NO: 27029 - DNA, 138 bp, Homo sapiens
  MAP TO AC009886.2; EXPRESSED IN PLACENTA, SIGNAL = 1.1; EXPRESSED IN ADULT LIVER, SIGNAL = 2.5; EXPRESSED IN FETAL LIVER, SIGNAL = 2.8; EXPRESSED IN BRAIN, SIGNAL = 1.4; SWISSPROT HIT: P50440, EVALUE 1.00e-14; EST_HUMAN HIT: AV650847.1, EVALUE 1.00e-50; NT HIT: X86401.1, EVALUE 9.00e-51
  unsure 138
tgaagtcagcagcatcaaagcatggctcaaactcagttgtcacaaattttccctgagcagccaatttgtgtctgtcttctacagagtggatgggataatcctaattggaacaagaatgaacacacacaatgcactggn

SEQ ID NO: 27030 - DNA, 146 bp, Homo sapiens
  MAP TO AP000136.1; EXPRESSED IN BT474, SIGNAL = 1.2; EXPRESSED IN HBL100, SIGNAL =   1; EXPRESSED IN BRAIN, SIGNAL = 0.68; EXPRESSED IN PLACENTA, SIGNAL = 1.1; EXPRESSED IN ADULT LIVER, SIGNAL = 0.92; EXPRESSED IN HELA, SIGNAL = 0.85; EXPRESSED IN LUNG, SIGNAL = 1.3; EXPRESSED IN FETAL LIVER, SIGNAL = 0.89; EXPRESSED IN BONE MARROW, SIGNAL = 1.2; NT HIT: D87675.1, EVALUE 9.00e-05; EST_HUMAN HIT: AA864362.1, EVALUE 5.00e-04; SWISSPROT HIT: P16581, EVALUE 1.50e-01
cacaaagagaaggcagccatctgcaagtgaggaagcaggctttcaccaggaacccaactggctggcatcttgatcttggacttctcagcctccaaactgtgagaaagtaaatttctcttgttcaagtcaaccagtctatggtactt

SEQ ID NO: 27031 - DNA, 75 bp, Homo sapiens
  MAP TO AC010778.2; EXPRESSED IN LUNG, SIGNAL =   1; EXPRESSED IN PLACENTA, SIGNAL = 1.3; EXPRESSED IN ADULT LIVER, SIGNAL = 1.6; EXPRESSED IN BT474, SIGNAL = 1.4; EXPRESSED IN FETAL LIVER, SIGNAL = 1.3; EXPRESSED IN BONE MARROW, SIGNAL = 1.2; EXPRESSED IN BRAIN, SIGNAL =   1; EXPRESSED IN HELA, SIGNAL = 1.6; EXPRESSED IN HBL100, SIGNAL = 1.4; NT HIT: AB014607.1, EVALUE 4.00e-14; EST_HUMAN HIT: AI311783.1, EVALUE 2.00e-19
cctgctttcctcaggttttcttctgctatctgtgacagcttcttgatctgtccgcaggtagttggctgtgttcaa

SEQ ID NO: 27032 - DNA, 222 bp, Homo sapiens
  MAP TO AC011301.3; EXPRESSED IN BRAIN, SIGNAL =   1; NT HIT: AF036943.1, EVALUE 1.00e-100; EST_HUMAN HIT: BE222152.1, EVALUE 2.00e-71; SWISSPROT HIT: Q01538, EVALUE 3.00e-15
tttgcaccttgggagctatggctcgcttgccataagtatggttgtcgtaactgttgtattcaaacgaggtcttggaatatttctcgagctccttggccaggttggaacgcggcgtagttgtggggacattgtttctgtagccatactgaggaatctccagctgcttcacaaagcacattggcctggaagtaaacaagaaaacaaacaacagcttgctttcct

SEQ ID NO: 27033 - DNA, 120 bp, Homo sapiens
  MAP TO AP000197.1; EXPRESSED IN BT474, SIGNAL = 0.62; EXPRESSED IN BONE MARROW, SIGNAL = 0.7; EXPRESSED IN HBL100, SIGNAL = 1.3; EXPRESSED IN LUNG, SIGNAL = 1.2; EXPRESSED IN ADULT LIVER, SIGNAL =   1; EXPRESSED IN BRAIN, SIGNAL = 1.5; EXPRESSED IN PLACENTA, SIGNAL = 0.74; EXPRESSED IN FETAL LIVER, SIGNAL = 0.61; EXPRESSED IN HELA, SIGNAL = 0.65; NT HIT: X59616.1, EVALUE 5.70e-02; EST_HUMAN HIT: AI305279.1, EVALUE 1.70e-02; SWISSPROT HIT: Q9ZD03, EVALUE 5.20e+00
ttatctgttcacagagtcatcaaaagttatttctgtgtaggaagtgtcaagtagcatggataaagagtattcgggaaattctttagttgtggtcttgaagactgttgaaattattagcat

SEQ ID NO: 27034 - DNA, 260 bp, Homo sapiens
  MAP TO AC007394.2; EXPRESSED IN BRAIN, SIGNAL = 0.73; EXPRESSED IN HBL100, SIGNAL = 0.68; EXPRESSED IN FETAL LIVER, SIGNAL = 0.71; EXPRESSED IN LUNG, SIGNAL = 0.8; EXPRESSED IN HELA, SIGNAL = 0.71; EST_HUMAN HIT: AI268582.1, EVALUE 4.00e-03; NT HIT: gi6806886, EVALUE 1.30e-01; SWISSPROT HIT: P50636, EVALUE 1.80e+00
ccatagtgctgccaggtatccatgggatgctgtgcagacctgtcccagaggtgcagcctcaccttaccaacctcaccatgctggcagagaaaagccagatggatgtggaaagaagcactgttgaattcattcaagatgaagtgatgtttgtctctgtcacttggctgctgacttgcaagggaaagatactggtggatacttgttttttcatcatgttgttcaaccaagtgcccagcacagtgcctggcagtcacatttat

SEQ ID NO: 27035 - DNA, 248 bp, Homo sapiens; identical to SEQ ID NO: 20175
  MAP TO AL031676.2; EXPRESSED IN PLACENTA, SIGNAL = 0.61; EXPRESSED IN BT474, SIGNAL = 0.69; EXPRESSED IN BONE MARROW, SIGNAL = 0.8; EXPRESSED IN FETAL LIVER, SIGNAL = 0.62; EXPRESSED IN LUNG, SIGNAL = 0.62; EXPRESSED IN HELA, SIGNAL = 0.68; EXPRESSED IN ADULT LIVER, SIGNAL = 0.88; EXPRESSED IN BRAIN, SIGNAL = 0.77; NT HIT: M21572.1, EVALUE 1.30e-01; SWISSPROT HIT: P45442, EVALUE 1.20e+00; EST_HUMAN HIT: AI792127.1, EVALUE 3.50e+00

SEQ ID NO: 27036 - DNA, 82 bp, Homo sapiens
  MAP TO AC010983.3; EXPRESSED IN PLACENTA, SIGNAL = 1.3; EXPRESSED IN ADULT LIVER, SIGNAL = 1.3; EXPRESSED IN BRAIN, SIGNAL = 0.96; NT HIT: AF223391.1, EVALUE 4.00e-11; EST_HUMAN HIT: AI208733.1, EVALUE 2.00e-16
ctccatgcatgctattgcccctgaagaccttccagtgggagaagatgtgaaagtggaagacagtgatgaccttggctttgtg

SEQ ID NO: 27037 - DNA, 141 bp, Homo sapiens
  MAP TO AC007880.1; EXPRESSED IN HBL100, SIGNAL = 0.67; EXPRESSED IN BRAIN, SIGNAL = 0.87; EXPRESSED IN PLACENTA, SIGNAL = 0.78; EXPRESSED IN BT474, SIGNAL = 0.71; EXPRESSED IN BONE MARROW, SIGNAL = 0.87; EXPRESSED IN FETAL LIVER, SIGNAL = 1.9; EXPRESSED IN LUNG, SIGNAL = 0.83; EXPRESSED IN HELA, SIGNAL = 0.69; EXPRESSED IN ADULT LIVER, SIGNAL = 0.69; NT HIT: U66062.1, EVALUE 1.70e-02; EST_HUMAN HIT: AW044605.1, EVALUE 8.00e-05; SWISSPROT HIT: O00763, EVALUE 2.30e+00
cctgcaactccatgtgatgtaacgactggaacttcagcagccatcttggatcatgaggtgaccttgaggatagaagctgcatacccagatagtgatcaaggggccactgtaccagtcctggactgctcgcctcttatatga

SEQ ID NO: 27038 - DNA, 192 bp, Homo sapiens
  MAP TO AC004832.2; EXPRESSED IN HBL100, SIGNAL = 0.92; EXPRESSED IN FETAL LIVER, SIGNAL = 1.4; EXPRESSED IN HELA, SIGNAL = 0.73; EXPRESSED IN BRAIN, SIGNAL = 0.73; EXPRESSED IN PLACENTA, SIGNAL = 0.76; EXPRESSED IN ADULT LIVER, SIGNAL = 1.2; EXPRESSED IN LUNG, SIGNAL = 0.8; EXPRESSED IN BONE MARROW, SIGNAL = 1.7; EXPRESSED IN BT474, SIGNAL = 0.63; EST_HUMAN HIT: AV646993.1, EVALUE 2.60e+00; SWISSPROT HIT: P49193, EVALUE 4.00e-05; NT HIT: gi7110714, EVALUE 1.50e+00
cttctgagtttgcagctcacactcatgcaacagcagctcacagactttgatgcgcttccggatcatatcctgcttggaggctgacagcaggagacccttggggtcgagggacccaatgatgttgaagtacacagggcagccttcgtagtcgtagccacaaagaccacccgagtcatacagctggatgacctg

SEQ ID NO: 27039 - DNA, 723 bp, Homo sapiens
  MAP TO AL023656.8; EXPRESSED IN PLACENTA, SIGNAL = 0.65; EXPRESSED IN BONE MARROW, SIGNAL = 0.63; EXPRESSED IN FETAL LIVER, SIGNAL = 0.59; EXPRESSED IN LUNG, SIGNAL = 0.7; EXPRESSED IN ADULT LIVER, SIGNAL = 0.74; EXPRESSED IN BRAIN, SIGNAL = 1.4; NT HIT: gi9626737, EVALUE 7.20e+00; EST_HUMAN HIT: T10233.1, EVALUE 0.00e+00; SWISSPROT HIT: Q04652, EVALUE 3.00e-12
ctgtgaggtggttggaacacaactgccactaccagtacatggacgagctcctgcaatacatccgctttggcctaatggatgtggatactctccatacagttgccctgtcccacccccttgtccaagcaagtgagactgcaacagcccttgtcaacgaggccctggaataccaccagagcatctatgcacagcctgtctggcagactcgcaggaccaaaccacgattccagtcagacactctgtatatcattggtgggaaaaagcgcgaggtctgcaaggtcaaggaacttcggtacttcaatcctgttgatcaggagaatgctctcatagctgccattgccaactggagtgagctggctcccatgcctgtgggaaggagccaccattgtgtggcagtcatgggggacttcctgtttgtggcaggaggggaagttgagcatgccagtggccggacgtgtgctgtgaggactgcctgtcgctatgacccccgcagtaattcctgggcagagatagcacccatgaaaaactgccgggagcattttgtgctgggtgccatggaggaatacctctatgcagttgggggcagaaatgaactgcgccaggttctgcctacagttgagcgatattgccccaagaagaacaaatggacttttgttcagtcctttgacagatccctttcatgccatgctggatatgtggctgatggtcttctttggatatcag

SEQ ID NO: 27040 - DNA, 1587 bp, Homo sapiens
  MAP TO AC007326.22; EXPRESSED IN PLACENTA, SIGNAL = 0.89; EXPRESSED IN BT474, SIGNAL =   1; EXPRESSED IN FETAL LIVER, SIGNAL = 0.65; EXPRESSED IN LUNG, SIGNAL = 0.62; EXPRESSED IN HELA, SIGNAL =   1; EXPRESSED IN BRAIN, SIGNAL = 0.73; EXPRESSED IN BONE MARROW, SIGNAL = 0.9; EXPRESSED IN HBL100, SIGNAL = 0.76; NT HIT: M14123.1, EVALUE 0.00e+00; EST_HUMAN HIT: AI818326.1, EVALUE 0.00e+00; SWISSPROT HIT: P10266, EVALUE 0.00e+00
atgccatgtcaaatttgttctctatcttaagaggagactcagacttaaatagtaaaagaatattaaccccagaggcaacaaaagaaattaaattagtggaagaaaaaattcagtcagcgcaaataaatagaatagatcccttagccccactccagcttttgatttttgccactgcacattctccaacaggcatcattattcaaaatactgatcttgtggagtggtcattccttcctcacagtacagttaagacttttacattgtacttggatcaaatggctacattaatcggtcagacaagattacgaataataaaattatgtggaaatgaccaagacaaaatagttgtccctttaaccaaggaacaagttagacaagcctttatcaattctggtgcatggcagattggtcttgctaattttgtgggaattattgataatcattacccaaaaacaaagatcttccagttcttaaaattgactacttggattctacctaaaataaccagacgtgaacctttagaaaatgctctaacagtatttactgatggttccagcaatggaaaagcagcttacacagggccgaaagaacgagtaatcaaaactccatatcaatcggctcaaagagcagagttggttgcagtcattacagtgttacaagattttgaccaacctatcaatattatatcagattctgcctatgtagtacaggctacaagggatgttgagacggctctaattaaatatagcatggatgatcagttaaaccagctattcaatttattacaacaaactgtaagaaaaagaaatttcccattttatattactcatattcgagcacacactaatttaccagggcctttgactaaagcaaatgaacaagctgacttactggtatcatctgcactcataaaagcacaagaacttcatgctttgactcatgtaaatgcagcaggattaaaaaacaaatttgatgtcacatggaaacaggcaaaagatattgtacaacattgcacccagtgtcaagtcttacacctgcccactcaagaggcaggagttaatcccagaggtctgtgtcctaatgcattatggcaaatggatgtcacgcatgtaccttcatttggaagattatcatatgttcatgtaacagttgatacttattcacatttcatatgggcaacttgccaaacaggagaaagtacttcccatgttaaaaaacatttattgtcttgttttgctgtaatgggagttccagaaaaaatcaaaactgacaatggaccaggatattgtagtaaagctttccaaaaattcttaagtcagtggaaaatttcacatacaacaggaattccttataattcccaaggacaggccatagttgaaagaactaatagaacactcaaaactcaattagttaaacaaaaagaagggggagacagtaaggagtgtaccactcctcagatgcaacttaatctagcactctatactttaaattttttaaacatttatagaaatcagactactacttctgcagaacaacatcttactggtaaaaagaacagcccacatgaaggaaaactaatttggtgga

SEQ ID NO: 27041 - DNA, 155 bp, Homo sapiens
  MAP TO AC005193.2; EXPRESSED IN BONE MARROW, SIGNAL = 0.75; EXPRESSED IN HBL100, SIGNAL = 0.66; EXPRESSED IN FETAL LIVER, SIGNAL = 1.2; EXPRESSED IN HELA, SIGNAL = 0.75; EXPRESSED IN BRAIN, SIGNAL = 0.73; NT HIT: gi11422642, EVALUE 3.00e-60; EST_HUMAN HIT: AL157645.1, EVALUE 5.00e-68; SWISSPROT HIT: Q11203, EVALUE 2.00e-04
gagtgactatacttactggagtcctcctcccactggagtaagtgtagcttccacgcagaataatacaaaaatcccagtaccagaaagaggcagagggctagcagcagattgcgcacaaataccaagagtcccatcttcacatgatttacgatttc

SEQ ID NO: 27042 - DNA, 254 bp, Homo sapiens
  MAP TO AL096816.12; EXPRESSED IN BONE MARROW, SIGNAL = 1.1; EXPRESSED IN LUNG, SIGNAL = 2.4; EXPRESSED IN BRAIN, SIGNAL = 0.93; EXPRESSED IN FETAL LIVER, SIGNAL = 0.92; EST_HUMAN HIT: AI696698.1, EVALUE 0.00e+00; NT HIT: Y19207.1, EVALUE 6.10e-01
tcaagacagtcaccaccgaagagtacctggtgaaccctgtgggcatgaaccgctacagcgtggacacctccgcctccacctttaaccacaggggctccttgcacccctcctcctcgctgtactgcaagaggcagaactctggagacagccaccttgggggtggtcctgctgccaccgctggtggtccccgcactagccccatgtcttctggtggcccctcggcacctgggctgaggcctccagcctccagcccc

SEQ ID NO: 27043 - DNA, 161 bp, Homo sapiens
  MAP TO AC005064.2; EXPRESSED IN FETAL LIVER, SIGNAL = 8.2; EXPRESSED IN ADULT LIVER, SIGNAL = 0.82; EXPRESSED IN BRAIN, SIGNAL = 1.2; EXPRESSED IN PLACENTA, SIGNAL = 0.74; NT HIT: gi4826977, EVALUE 2.00e-85; EST_HUMAN HIT: H07016.1, EVALUE 4.00e-75; SWISSPROT HIT: P24821, EVALUE 3.00e-03
tgcaacacagttccgctggatccagaagggagaagaaactgagaagcaaagctgggcaattgaccacgtgtacattggagaggcttgccccaagctctgcagcgggcacggatactgcacgaccggtgccatctgcatctgcgacgagagcttccaaggtc

SEQ ID NO: 27044 - DNA, 400 bp, Homo sapiens
  MAP TO AC007537.3; EXPRESSED IN LUNG, SIGNAL = 0.77; EXPRESSED IN PLACENTA, SIGNAL = 0.73; EXPRESSED IN HBL100, SIGNAL =   1; EXPRESSED IN FETAL LIVER, SIGNAL = 0.79; EXPRESSED IN ADULT LIVER, SIGNAL = 0.8; EXPRESSED IN BRAIN, SIGNAL = 0.79; EXPRESSED IN BT474, SIGNAL = 0.87; EXPRESSED IN HELA, SIGNAL =  17; SWISSPROT HIT: P98157, EVALUE 1.00e-17; EST_HUMAN HIT: BE814458.1, EVALUE 1.00e-84; NT HIT: gi11435801, EVALUE 0.00e+00
aaatcaagatcttcctcatggtcccattgagccttgtcacttctattcgatcagtgccagtgtctgtccaataaagatttcgtgcaacccagtccacagcaataccatcaggatgggcaatttgagcagtgaccacaaactgactgccagatccatctataaatgaacggcgtatggccctcacttcatcatcagtccagtagatgtagccttccacaggatcgtaatctatggcaatggcatgacggatgtcttctaactgcagaacaatgtctgtaaaatctggtgtatccaaagaaatgcgtctcaagtctgtccttcgagctaaaagcaataattctgtggcacctagaacaacaaagtgaaatgaagaatactttgaaacccagaggtaaaattt

SEQ ID NO: 27045 - DNA, 244 bp, Homo sapiens
  MAP TO AC007403.2; EXPRESSED IN BONE MARROW, SIGNAL = 0.7; EXPRESSED IN LUNG, SIGNAL = 0.69; EXPRESSED IN HELA, SIGNAL = 0.89; EXPRESSED IN BRAIN, SIGNAL = 0.99; EXPRESSED IN FETAL LIVER, SIGNAL = 0.71; NT HIT: AJ272265.1, EVALUE 1.50e-01; SWISSPROT HIT: P08548, EVALUE 9.00e-01; EST_HUMAN HIT: D44656.1, EVALUE 2.20e-01
aacgaaatgtttcttagattcaaaggcagattgtattttaaaggtggaaatgagattcagtaaaagattaaaagaaaacatgtttgtgctgagagactcaacatggattgtcatcaaggatgtgcaaattaaaaccacaatgagttatcactacactggaatggctaaaattaaaaagaccatcaacaccaaatgcaaaacaactagaattctctcacacactgtgacactgctggtaggagtg

SEQ ID NO: 27046 - DNA, 137 bp, Homo sapiens
  MAP TO AC005883.6; EXPRESSED IN LUNG, SIGNAL = 0.69; EXPRESSED IN HELA, SIGNAL = 0.93; EXPRESSED IN BRAIN, SIGNAL = 0.98; EXPRESSED IN BONE MARROW, SIGNAL = 0.68; EXPRESSED IN HBL100, SIGNAL = 1.2; EXPRESSED IN FETAL LIVER, SIGNAL = 0.61; NT HIT: gi9910365, EVALUE 1.00e-71; EST_HUMAN HIT: Z45226.1, EVALUE 2.00e-71; SWISSPROT HIT: O75493, EVALUE 2.00e-01
tcagatctttctgagcatgagtgacaacttcaggcctgtccagccactcaacaaccgctgcatccgcaccaatatcaacttcagtttacaggggaaggactgtccaaacaaccgagcccagaagcttcagtatagag

SEQ ID NO: 27047 - DNA, 283 bp, Homo sapiens; identical to SEQ ID NO: 26858
  MAP TO AP000095.1; EXPRESSED IN BONE MARROW, SIGNAL = 0.79; EXPRESSED IN LUNG, SIGNAL = 0.63; EXPRESSED IN ADULT LIVER, SIGNAL =   1; EXPRESSED IN BRAIN, SIGNAL = 1.4; EXPRESSED IN PLACENTA, SIGNAL = 0.68; EXPRESSED IN BT474, SIGNAL = 0.9; EXPRESSED IN FETAL LIVER, SIGNAL = 0.65; EXPRESSED IN HELA, SIGNAL = 0.62; SWISSPROT HIT: P39086, EVALUE 8.00e-34; NT HIT: U16125.1, EVALUE 1.00e-112; EST_HUMAN HIT: AL044088.2, EVALUE 1.00e+00

SEQ ID NO: 27048 - DNA, 77 bp, Homo sapiens
  MAP TO AL049814.6; EXPRESSED IN HELA, SIGNAL = 0.7; EXPRESSED IN BRAIN, SIGNAL = 0.82; EXPRESSED IN LUNG, SIGNAL = 0.59; EXPRESSED IN ADULT LIVER, SIGNAL = 0.69; EXPRESSED IN PLACENTA, SIGNAL = 0.61; NT HIT: gi11428865, EVALUE 6.10e-01; EST_HUMAN HIT: AA127096.1, EVALUE 6.20e-01
ccccagctataacctgagcctctttgaccagtgagtttatgggaaggtcttttcccttccaggggatcagagaccac

SEQ ID NO: 27049 - DNA, 162 bp, Homo sapiens
  MAP TO AP000037.1; EXPRESSED IN PLACENTA, SIGNAL = 0.94; EXPRESSED IN BRAIN, SIGNAL = 1.2; EXPRESSED IN BONE MARROW, SIGNAL = 1.1; EXPRESSED IN HELA, SIGNAL = 0.62; EXPRESSED IN ADULT LIVER, SIGNAL = 0.7; NT HIT: gi4507334, EVALUE 1.00e-86; EST_HUMAN HIT: AV732718.1, EVALUE 3.00e-86; SWISSPROT HIT: O43426, EVALUE 2.00e-25
tttctataaaatcttcatttctttctttgacttgtgactgccctgcagcaaagtggctacagacgaagcaaaggctggttgtatggaagagcattcggattgcaactgctcccttatttccagttgcacctcccattccagtcttcacagtatcaactgcaa

SEQ ID NO: 27050 - DNA, 725 bp, Homo sapiens
  MAP TO AC005880.2; EXPRESSED IN LUNG, SIGNAL = 1.4; EXPRESSED IN BONE MARROW, SIGNAL = 0.95; EXPRESSED IN BRAIN, SIGNAL =   1; EXPRESSED IN HELA, SIGNAL = 1.2; NT HIT: AF134878.1, EVALUE 3.90e-01; EST_HUMAN HIT: H92741.1, EVALUE 0.00e+00; SWISSPROT HIT: P26632, EVALUE 3.90e-02
acggtcgtccgaactgtccttagtagggcaggaagtttctgaagtgacatctttggccacttcttgctttgctaaaaattgcttaggtgcagctgcatcgtctatggcatccacattttttgcttgcttttcagcagatttatctacaagaggaggtggcaccaccttctctggcttttcaacgagaacatctggttctgcctgatttggagcatcggcggaaggcaaaggaactttcgcttgtggtcgtggtggcacaggtggtttgaaagcagatccttgggttggttttgacacttgtgctgggtctgttatctcagaagtttttaggggtggaggtttatttccatctttggactgaattttcggtggtagtgggtgacttcctacagctaatttacggtttaaaactggtgatatagctccaaggggtttaatagaaagtgttgttggaacacgtttgggactatgacttaatgattgtgcctcatctttgaactcattttgtgctctgacatcacttgccaagtcttcaaattcagaatccagctctctactttcagtatctactgtcaacccggcagcttcctcttcataacccgattggcatgagcttgacaaaaagttttcttccaactggccaaagttatcttgcagcactgcaccttgattactctggccaacaggcctttcatagtacaccaggactcggtcaccagcctgct

SEQ ID NO: 27051 - DNA, 541 bp, Homo sapiens
  MAP TO AC002553.1; EXPRESSED IN BRAIN, SIGNAL = 1.2; EXPRESSED IN HBL100, SIGNAL = 1.6; EXPRESSED IN HELA, SIGNAL = 1.7; EXPRESSED IN PLACENTA, SIGNAL = 0.96; EXPRESSED IN ADULT LIVER, SIGNAL = 0.99; EXPRESSED IN BONE MARROW, SIGNAL =   2; EXPRESSED IN FETAL LIVER, SIGNAL = 1.1; EXPRESSED IN BT474, SIGNAL = 1.2; EST_HUMAN HIT: BE514943.1, EVALUE 0.00e+00; SWISSPROT HIT: P42568, EVALUE 1.50e+00; NT HIT: AB019524.1, EVALUE 0.00e+00
atttggttttatttacaggccactgcctgctgggggcccttcaataagccaaggcctgccagcctcccgttacaacactgctgcggatgccctggctgctcttgtggatgctgcagcttctgcaccccagatggatgtgtccaaaacaaaagagagtaagcatgaagctgccaggttagaagaaaatttgagaagcaggtcagcagcagttagtgaacagcagcagctagagcagaaaaccctggaggtggagaagagatctgttcagtgtttatacacttcttcagcctttccaagtggcaagccccagcctcattcttcagtagtttattctgaggctgggaaagataaagggcctcctccaaaatccagatatgaggaagagctaaggaccagagggaagactaccattactgcagctaacttcatagacgtgatcatcacccggcaaattgcctcggacaaggatgcgagggaacgtggctctcaaagttcagactcttctagtagctgtatgtatctcaatccgagtttcacaatg

SEQ ID NO: 27052 - DNA, 85 bp, Homo sapiens
  MAP TO AC009477.2; EXPRESSED IN BT474, SIGNAL = 1.2; EXPRESSED IN HELA, SIGNAL = 1.1; EXPRESSED IN BRAIN, SIGNAL = 0.92; NT HIT: gi8923679, EVALUE 2.00e-40; EST_HUMAN HIT: BF312506.1, EVALUE 1.00e-40
cggcatacgcctgcccattcgcagcgtagacaacttgagttcctggcgggtacgcaccaccgtatggcccatagccataagcctg

SEQ ID NO: 27053 - DNA, 1897 bp, Homo sapiens
  MAP TO AC003002.1; EXPRESSED IN HBL100, SIGNAL =   1; EXPRESSED IN HELA, SIGNAL = 1.2; EXPRESSED IN PLACENTA, SIGNAL = 1.4; EXPRESSED IN FETAL LIVER, SIGNAL =   1; EXPRESSED IN BT474, SIGNAL = 1.4; EXPRESSED IN BRAIN, SIGNAL = 1.1; NT HIT: U09411.1, EVALUE 2.00e-18; EST_HUMAN HIT: AA418246.1, EVALUE 0.00e+00; SWISSPROT HIT: P51523, EVALUE 0.00e+00
gttgttggcatggagccaaggatgaggaggcaccttccaagcaatgtgtttctgtaggagtgtcacaggtcacaactttaaagccagctttgtccacccagaaggcccagccctgtgagacatgtagctcacttctgaaggacattctacacctggctgagcatgacggaacacaccccaagcgtacagccaagctttacctgcaccaaaaggagcatcttagagagaagctcaccagaagtgatgaagggaggccttcgtttgtgaatgacagtgttcacctggcaaagaggaacctcacatgcatgcagggtggcaaggattttactggtgattcagatcttcaacaacaggctcttcacagtgggtggaagccacacagggacactcatggtgtggaggcctttcaaagtggacagaataattacagctgcacccaatgtgggaaagacttttgccaccaacatacactgtttgagcaccagaaaatccacacagaggaaaggccttatgagtgcagtgaatgtggcaaattgtttaggtacaactccgaccttattaaacatcagcgaaatcatactggagaaaggccttataagtgtagtgaatgtggaaaagccttcagcctcaaatacaatgttgttcaacaccagaaaattcacactggagaaaggccttatgagtgcagtgaatgtgggaaagcttttcttagaaagtctcacctacttcagcaccagaggattcacaccaggccaaggccttatgtgtgtagtgaatgtgggaaggccttccttacacaggctcaccttgttggtcaccagaaaattcatactggagaacggccttatggatgcaatgaatgtgggaaatactttatgtacagttcagcactcattagacatcagaaagttcacactggagaaaggcctttttattgctgtgaatgtgggaaattctttatggacagctgcacactcattattcaccagagagttcatactggagaaaaaccttatgaatgcaacgaatgtgggaaattctttagataccgttccacactcattagacatcagaaagttcacactggagaaaagccttatgagtgtagtgaatgtgggaagttctttatggacacttccacactcattattcatcagagagttcatactggagaaaagccttatgaatgcaacaaatgtgggaaattctttaggtattgcttcacactgaatagacatcagagagttcactctggagagaggccttatgaatgcagtgaatgtggcaaattctttgtggacagctgtacactgaagagtcatcagagagttcacactggagaaagaccttttgaatgcagcatttgtgggaaatcctttagatgtcgctccacacttgatacacatcagagaattcacactggtgaaaggccttatgagtgtagtgaatgtgggaaattctttaggcacaactcaaatcatattagacatcggagaaatcactttggagaaaggtcttttgagtgcactgagtgtgggagagtttttagccaaaattcccacctcattcggcaccaaaaagttcacactagggaaagaacttacaaatgcagcaaatgtgggaaattttttatggacagctccacactcattagtcatgagagagttcatactggagaaaagccttatgagtgcagtgaatgtgggaaagtctttagatacaactccagcctcattaaacatcggagaattcacactggagagagaccttatcagtgcagtgaatgtggaagagtctttaaccaaaattctcatctcattcagcaccagaaagttcacaccagataaagaatgtatatataaagcagatggggaaagacttcacacagaaatctact

SEQ ID NO: 27054 - DNA, 178 bp, Homo sapiens
  MAP TO AL035416.7; EXPRESSED IN LUNG, SIGNAL = 2.1; EXPRESSED IN BRAIN, SIGNAL =   1; NT HIT: Y18477.1, EVALUE 3.50e-01; SWISSPROT HIT: P20126, EVALUE 1.70e+00
atggaggcaaaaaggctagccaagaagctgttagatgtggtaagaacctagactccaagagtggaagaggtgaaggtgtatgggaagatgccaccctagatttagatgcagggtggaaggatttggctgaatatatttgcagaatatatgatttgatgactagtatcttgcagagtta

SEQ ID NO: 27055 - DNA, 303 bp, Homo sapiens
  MAP TO AF017257.1; EXPRESSED IN FETAL LIVER, SIGNAL = 1.1; EXPRESSED IN LUNG, SIGNAL = 1.9; EXPRESSED IN BRAIN, SIGNAL = 1.1; EXPRESSED IN HELA, SIGNAL =   1; EXPRESSED IN PLACENTA, SIGNAL = 1.3; SWISSPROT HIT: P15036, EVALUE 4.00e-38; NT HIT: gi11526264, EVALUE 0.00e+00; EST_HUMAN HIT: BE719553.1, EVALUE 0.00e+00
gtggcccgccggtggggaaagaggaaaaataagcccaagatgaactacgagaagctgagccggggcttacgctactattacgacaagaacatcatccacaagacgtcggggaagcgctacgtgtaccgcttcgtgtgcgacctccagaacttgctggggttcacgcccgaggaactgcacgccatcctgggcgtccagcccgacacggaggactgaggtcgccgggaccaccctgagccggccccaggctcgtggactgagtgggaagcccatcctgaccagctgctccgaggacccaggaaa

SEQ ID NO: 27056 - DNA, 145 bp, Homo sapiens
  MAP TO AL031671.11; EXPRESSED IN ADULT LIVER, SIGNAL = 0.77; EXPRESSED IN BRAIN, SIGNAL = 0.81; EXPRESSED IN BT474, SIGNAL = 1.8; EXPRESSED IN HELA, SIGNAL = 1.1; EST_HUMAN HIT: BF344034.1, EVALUE 1.90e+00; NT HIT: U34992.1, EVALUE 1.10e+00; SWISSPROT HIT: O62855, EVALUE 5.10e+00
gatttcccttcttcctctccccagcgcaaggatctgggtggttttctttgttgttgttgttgttgttgttgttggcttctggagtaaagttccagtccccaatcatcctcccttcaacaactcagctgctatgacgtcacctcta

SEQ ID NO: 27057 - DNA, 421 bp, Homo sapiens; identical to SEQ ID NO: 10428
  MAP TO AL021919.4; EXPRESSED IN PLACENTA, SIGNAL = 0.95; EXPRESSED IN HBL100, SIGNAL =   1; EXPRESSED IN FETAL LIVER, SIGNAL = 1.1; EXPRESSED IN LUNG, SIGNAL = 0.95; EXPRESSED IN BRAIN, SIGNAL =   1; EXPRESSED IN HELA, SIGNAL =   1; NT HIT: M95099.1, EVALUE 5.70e-02; EST_HUMAN HIT: BE146479.1, EVALUE 4.20e+00

SEQ ID NO: 27058 - DNA, 116 bp, Homo sapiens
  MAP TO AJ011929.1; EXPRESSED IN FETAL LIVER, SIGNAL = 0.98; EXPRESSED IN BRAIN, SIGNAL = 0.98; EXPRESSED IN HELA, SIGNAL = 2.2; EXPRESSED IN HBL100, SIGNAL = 1.1; EXPRESSED IN PLACENTA, SIGNAL = 2.7; EXPRESSED IN ADULT LIVER, SIGNAL = 2.2; EXPRESSED IN BT474, SIGNAL = 1.3; EXPRESSED IN LUNG, SIGNAL = 1.6; EXPRESSED IN BONE MARROW, SIGNAL = 1.4; NT HIT: AL163284.2, EVALUE 3.00e-59; SWISSPROT HIT: P81463, EVALUE 9.00e+00; EST_HUMAN HIT: R24918.1, EVALUE 1.00e-30
atggccactttgttcatggacccactgggtgatgacgggggtggctggggaaagaggctgagtggtgtccacagaaagggtcatcctattcacttgattattaaaattctcctctg

SEQ ID NO: 27059 - DNA, 216 bp, Homo sapiens
  MAP TO AL035703.17; EXPRESSED IN BT474, SIGNAL = 1.2; EXPRESSED IN FETAL LIVER, SIGNAL = 1.5; EXPRESSED IN HBL100, SIGNAL = 1.4; EXPRESSED IN HELA, SIGNAL = 1.6; EXPRESSED IN BRAIN, SIGNAL = 0.9; EXPRESSED IN LUNG, SIGNAL =  12; SWISSPROT HIT: P15621, EVALUE 1.00e-11; EST_HUMAN HIT: BF663791.1, EVALUE 9.00e-90; NT HIT: gi11425793, EVALUE 1.00e-118
ctggtaggccttgttgcagatcccgcagctgaagggcttccctccaacgtgggtcaccacgtgccgctccagcatggacggggcactgaagatcttcccacacgtggggcaggggtggtactctttggagtgcacctcatggatgtgcttccggtgatcctgaagagtggggaaactcatcctgcacttcttgcagtcataaggatcttctatgtc

SEQ ID NO: 27060 - DNA, 708 bp, Homo sapiens
  MAP TO AC004613.1; EXPRESSED IN FETAL LIVER, SIGNAL =   1; EXPRESSED IN LUNG, SIGNAL = 1.1; EXPRESSED IN BRAIN, SIGNAL = 1.3; EXPRESSED IN ADULT LIVER, SIGNAL = 1.1; NT HIT: U56651.1, EVALUE 0.00e+00; EST_HUMAN HIT: AA057092.1, EVALUE 0.00e+00; SWISSPROT HIT: Q61200, EVALUE 1.00e-129
aacgaacggtggaaagtcagaacttctgaaatcaggaagcagcaaatccacactaaagcacatatggacagaaagcagcaaagacttgtctatcagccgactcctgtcacagacttttcgtggcaaagagaatgatacagatttggacctgagatatgacaccccagaaccttattctgagcaagacctctgggactggctgaggaactccacagaccttcaagagcctcggcccagggccaagagaaggcccattgttaaaacgggcaagtttaagaaaatgtttggatggggcgattttcattccaacatcaaaacagtgaagctgaacctgttgataactgggaaaattgtagatcatggcaatgggacatttagtgtttatttcaggcataattcaactggtcaagggaatgtatctgtcagcttggtaccccctacaaaaatcgtggaatttgacttggcacaacaaaccgtgattgatgccaaagattccaagtcttttaattgtcgcattgaatatgaaaaggttgacaaggctaccaagaacacactctgcaactatgacccttcaaaaacctgttaccaggagcaaacccaaagtcatgtatcctggctctgctccaagccctttaaggtgatctgtatttacatttccttttatagtacagattataaactggtacagaaagtgtgccctgactacaa

SEQ ID NO: 27061 - DNA, 237 bp, Homo sapiens
  MAP TO AC012123.1; EXPRESSED IN ADULT LIVER, SIGNAL = 1.1; EXPRESSED IN FETAL LIVER, SIGNAL = 0.98; EXPRESSED IN LUNG, SIGNAL = 0.98; EXPRESSED IN BRAIN, SIGNAL = 1.1; EXPRESSED IN BONE MARROW, SIGNAL = 0.98; EST_HUMAN HIT: AV687229.1, EVALUE 8.40e-01; NT HIT: Z48183.1, EVALUE 1.20e-01; SWISSPROT HIT: P35423, EVALUE 7.30e+00
ggaagtattttggccttcagagaataaatggcgtttatcagagggacttactagtaagggagagtcacttcctgtggatctacaggaagtccattagcaatcccaaccactgctccagagggatccttgatgatatttatcacagtaattttaaccttgacctgtcatgttcaaacatgacatttggccaagattgttgaagtcttcctaagagagtgtgattgagaaataaaaatg

SEQ ID NO: 27062 - DNA, 304 bp, Homo sapiens
  MAP TO AF166112.1; EXPRESSED IN LUNG, SIGNAL =   4; EXPRESSED IN BRAIN, SIGNAL = 0.91; NT HIT: M83196.1, EVALUE 1.90e-01; EST_HUMAN HIT: AU151906.1, EVALUE 1.80e-02; SWISSPROT HIT: P17555, EVALUE 1.80e-01
caacaggactacctgcagagaaaggccttgtctgcccagcaagagctcccatcctcatcccgtgacccctcaaccttagagaacagctctgcgtttgaaggtgtccctaaagcagaggccgacccattggaaacctcaagttacgtatcttttgccagcgatcagcaggatgaagcacctacccagaacccagcagccacgcagggggagggcaccccaaaggaaggagctgacgctgtttctgggacacaggggaaggggacaggtgggcagcagagaggaggggaaggacagcagagttcca

SEQ ID NO: 27063 - DNA, 339 bp, Homo sapiens
  MAP TO AL021331.1; EXPRESSED IN BRAIN, SIGNAL =   1; EXPRESSED IN BONE MARROW, SIGNAL =   1; EXPRESSED IN PLACENTA, SIGNAL =   1; EXPRESSED IN ADULT LIVER, SIGNAL = 1.4; NT HIT: AE000859.1, EVALUE 4.50e-02; EST_HUMAN HIT: H57443.1, EVALUE 1.00e-45; SWISSPROT HIT: Q08727, EVALUE 1.70e+00
gttgagaaaatggggcagtgggaaagctgtgctcttttcacaaacagggtcactgtggggcccatggcagagctctcactccgctctctcctctgcagctctctacggcgttctgtttgagaagagcaaggaagctgccttcgccaattaccgcctgtgggaggccctgggcttcgtcattgccttcgggtacagcatgtttttgtgcgtgcacgtcaagctctacattctgctgggggtcctgagcctgaccatggtggcgtatgggcttgtggagtgcgtggagtccaagaacccgatcagaccccacgctccaggacaggtcaaccaggcagagga

SEQ ID NO: 27064 - DNA, 111 bp, Homo sapiens
  MAP TO AL008631.1; EXPRESSED IN BONE MARROW, SIGNAL = 1.3; EXPRESSED IN HBL100, SIGNAL = 1.4; EXPRESSED IN HELA, SIGNAL = 1.1; EXPRESSED IN PLACENTA, SIGNAL = 0.95; EXPRESSED IN ADULT LIVER, SIGNAL = 1.5; EXPRESSED IN BT474, SIGNAL = 1.6; EXPRESSED IN FETAL LIVER, SIGNAL = 1.2; EXPRESSED IN BRAIN, SIGNAL = 1.1; NT HIT: gi11525933, EVALUE 3.80e+00; EST_HUMAN HIT: AW970318.1, EVALUE 3.80e+00
aagagtgccttgtacgttgtaacaccccatgatgtcagttgctggcattgtgattttaacatcatcatcatcatcgtcgtcgtcgtcgtcatcgtcatcatcatcaaagtg

SEQ ID NO: 27065 - DNA, 434 bp, Homo sapiens
  MAP TO AH005332.1; EXPRESSED IN PLACENTA, SIGNAL = 1.1; EXPRESSED IN HELA, SIGNAL = 1.1; EXPRESSED IN HBL100, SIGNAL = 1.1; EXPRESSED IN BT474, SIGNAL = 1.7; EXPRESSED IN BRAIN, SIGNAL = 0.95; SWISSPROT HIT: P00519, EVALUE 4.00e-55; NT HIT: U07563.1, EVALUE 0.00e+00; EST_HUMAN HIT: AL135617.1, EVALUE 0.00e+00
gtgaaaagctccgggtcttaggctataatcacaatggggaatggtgtgaagcccaaaccaaaaatggccaaggctgggtcccaagcaactacatcacgccagtcaacagtctggagaaacactcctggtaccatgggcctgtgtcccgcaatgccgctgagtatctgctgagcagcgggatcaatggcagcttcttggtgcgtgagagtgagagcagtcctggccagaggtccatctcgctgagatacgaagggagggtgtaccattacaggatcaacactgcttctgatggcaaggtaggggacccttggcagggggcgctgatgggcccagggcaggggaaccagaggtcctgctgtcggattgataaattattgcaagaaagctcaaccaagaagatgtttaaagaatctttcaggtgggagtcattccat

SEQ ID NO: 27066 - DNA, 249 bp, Homo sapiens
  MAP TO AC010127.3; EXPRESSED IN BRAIN, SIGNAL = 0.97; EXPRESSED IN BONE MARROW, SIGNAL = 0.96; NT HIT: S71446.1, EVALUE 0.00e+00; SWISSPROT HIT: P04774, EVALUE 8.00e-41; EST_HUMAN HIT: BF347024.1, EVALUE 7.00e-17
tgaatgtgcttctggtttgtcttatattctggctaattttcagcatcatgggcgtaaatttgtttgctggcaaattctaccactgtattaacaccacaactggtgacaggtttgacatcgaagacgtgaataatcatactgattgcctaaaactaatagaaagaaatgagactgctcgatggaaaaatgtgaaagtaaactttgataatgtaggatttgggtatctctctttgcttcaagttgtaagtg

SEQ ID NO: 27067 - DNA, 432 bp, Homo sapiens; identical to SEQ ID NO: 10438
  MAP TO AL021026.1; EXPRESSED IN BT474, SIGNAL = 1.2; EXPRESSED IN FETAL LIVER, SIGNAL = 1.2; EXPRESSED IN LUNG, SIGNAL =   1; EXPRESSED IN BONE MARROW, SIGNAL = 1.2; EXPRESSED IN PLACENTA, SIGNAL = 0.94; EXPRESSED IN ADULT LIVER, SIGNAL = 1.1; EXPRESSED IN BRAIN, SIGNAL =   1; EXPRESSED IN HELA, SIGNAL = 1.1; EXPRESSED IN HBL100, SIGNAL =   1; SWISSPROT HIT: P49707, EVALUE 2.50e+00; NT HIT: AJ001689.1, EVALUE 2.00e-42; EST_HUMAN HIT: N77261.1, EVALUE 1.00e-55

SEQ ID NO: 27068 - DNA, 232 bp, Homo sapiens
  MAP TO AC011402.1; EXPRESSED IN BRAIN, SIGNAL =   1; EXPRESSED IN BT474, SIGNAL =   1; EXPRESSED IN ADULT LIVER, SIGNAL = 0.95; NT HIT: X97741.1, EVALUE 2.00e-03; EST_HUMAN HIT: AA595232.1, EVALUE 3.60e-02; SWISSPROT HIT: P97468, EVALUE 3.00e-05
gttgcccttgcaagtgtccctgtggctggacttcacatcatttcgggaagacagagagggcctgaaccaggtggccttactcctaagacccctggccttgtctatggcctttatcaacagctgtctcaatccagttctctatgtcttcattgggcatgatttctgggagcacttgctccactccctgctagctgccttagaacgggcacttagtgaggagccagatagtgcc

SEQ ID NO: 27069 - DNA, 173 bp, Homo sapiens
  MAP TO AF186193.1; EXPRESSED IN BRAIN, SIGNAL = 0.93; EXPRESSED IN LUNG, SIGNAL = 1.3; EXPRESSED IN BT474, SIGNAL = 1.5; NT HIT: D31763.1, EVALUE 4.00e-01; EST_HUMAN HIT: AW117418.1, EVALUE 1.00e-04; SWISSPROT HIT: O75820, EVALUE 1.00e-07
ttatccagagctggtagggtgcagtggttctcgagcatcacatcctggtagagtgctctctgagggggtcccaggtgctgcccctcctcctgtgtgaggtacatggccacctcctcaaacatcactgtgccctggaatcacaggtgctcactgcccagagagcctcacccctg

SEQ ID NO: 27070 - DNA, 204 bp, Homo sapiens
  MAP TO AJ239320.2; EXPRESSED IN HELA, SIGNAL =   1; EXPRESSED IN BRAIN, SIGNAL = 8.4; SWISSPROT HIT: P18826, EVALUE 8.00e-32; EST_HUMAN HIT: BE619896.1, EVALUE 3.00e-80; NT HIT: gi4505778, EVALUE 1.00e-111
ctgttcttgaaggaacaagtcattggcaatatgcactattttttccacagcaatgatgcttccgatgctatgaatttcaatatctgccagcatggtgaggacaaggatggcttcaaccagcagctgacggtactctggctgaggtacacgattcaggacagactccacatgaacagagaatttaatctcacctggagtcatctg

SEQ ID NO: 27071 - DNA, 187 bp, Homo sapiens
  MAP TO AC008088.1; EXPRESSED IN BRAIN, SIGNAL = 2.3; EXPRESSED IN PLACENTA, SIGNAL = 0.59; EXPRESSED IN BONE MARROW, SIGNAL = 0.73; EXPRESSED IN HBL100, SIGNAL = 3.4; EXPRESSED IN FETAL LIVER, SIGNAL = 0.69; EXPRESSED IN HELA, SIGNAL = 0.67; NT HIT: AJ278435.1, EVALUE 1.70e+00; EST_HUMAN HIT: BF342995.1, EVALUE 4.20e-02
atggtcatggttatgaaggtaatgacgacggtggtggggatgatggtcatggttatgaaggtactgatgatggtggtggggatgatggtcatggttatgaaggtactgatgatggtggtggtggtagtgattcctccttgaccaaataagtctgggaaatgctggcatgtacaaaactaatcaggtg

SEQ ID NO: 27072 - DNA, 114 bp, Homo sapiens
  MAP TO AL049546.3; EXPRESSED IN BONE MARROW, SIGNAL = 0.85; EXPRESSED IN BRAIN, SIGNAL = 0.73; EXPRESSED IN PLACENTA, SIGNAL = 0.68; EXPRESSED IN LUNG, SIGNAL = 0.6; EXPRESSED IN FETAL LIVER, SIGNAL = 0.62; SWISSPROT HIT: P12318, EVALUE 3.10e+00; NT HIT: D90219.1, EVALUE 9.90e-01
atggattttagaacctctgctctgaaccccaaggatgacctcagtgggctcagaattcccattacactggagatccataccatgctcatggaaaccttctggtatgtttcatac

SEQ ID NO: 27073 - DNA, 138 bp, Homo sapiens
  MAP TO AL132780.1; EXPRESSED IN HBL100, SIGNAL = 1.1; EXPRESSED IN PLACENTA, SIGNAL = 1.3; EXPRESSED IN BT474, SIGNAL = 1.3; EXPRESSED IN BRAIN, SIGNAL = 1.1; EXPRESSED IN BONE MARROW, SIGNAL = 1.3; NT HIT: AF167572.1, EVALUE 3.00e-72; SWISSPROT HIT: P38426, EVALUE 3.00e+00; EST_HUMAN HIT: BF531119.1, EVALUE 4.00e-72
ttcatagcccttggcaaagagttcataggcattaggtggaggacggttctggcttaagtattccaggtattggaggtaggagcagaactccttctctgagtggtggttggtgcctgtgatgatgaactgcacctccaa

SEQ ID NO: 27074 - DNA, 109 bp, Homo sapiens
  MAP TO AL035586.3; EXPRESSED IN HBL100, SIGNAL = 1.3; EXPRESSED IN HELA, SIGNAL = 1.5; EXPRESSED IN ADULT LIVER, SIGNAL = 0.95; EXPRESSED IN BT474, SIGNAL = 1.6; EXPRESSED IN LUNG, SIGNAL = 1.1; EXPRESSED IN BRAIN, SIGNAL = 1.8; EXPRESSED IN PLACENTA, SIGNAL = 1.5; EST_HUMAN HIT: AA453731.1, EVALUE 7.00e-55; NT HIT: gi11438385, EVALUE 5.00e-55
catgataatccttatacaatgggttagtttctctctcagaaccaataaatgattccagaccaactactacatctgacaaggttgtgacacgggcaataatggctttatt

SEQ ID NO: 27075 - DNA, 139 bp, Homo sapiens
  MAP TO AL132633.1; EXPRESSED IN FETAL LIVER, SIGNAL = 2.3; EXPRESSED IN BT474, SIGNAL = 1.2; EXPRESSED IN BONE MARROW, SIGNAL = 1.7; EXPRESSED IN BRAIN, SIGNAL = 1.4; EXPRESSED IN HBL100, SIGNAL = 1.3; EST_HUMAN HIT: AI434202.1, EVALUE 8.00e-02; SWISSPROT HIT: P75779, EVALUE 6.70e+00; NT HIT: AB032966.1, EVALUE 4.90e+00
atttatcctccttctcatttgttcctcccaactccagtggccagaaaaatcagattcgctgggaacatctgggattccagagagctctgatgtgggaaaggaagggcatcgtgatctcacagaaaccctcctctgtaga

SEQ ID NO: 27076 - DNA, 112 bp, Homo sapiens
  MAP TO AC012111.1; EXPRESSED IN BRAIN, SIGNAL = 0.95; EXPRESSED IN BONE MARROW, SIGNAL =   1; NT HIT: gi4504852, EVALUE 8.00e-57
caagccaacttctgtttaagtacacagacacaaacacggggggcaccgtgaagaaatccactacagagttcacttccagccagaaccacaatttatcgttggctgcaataaa

SEQ ID NO: 27077 - DNA, 238 bp, Homo sapiens
  MAP TO AC009231.1; EXPRESSED IN FETAL LIVER, SIGNAL = 2.9; EXPRESSED IN HBL100, SIGNAL = 0.92; EXPRESSED IN BRAIN, SIGNAL = 0.92; EST_HUMAN HIT: AI064880.1, EVALUE 1.50e-01; SWISSPROT HIT: P27312, EVALUE 5.60e+00; NT HIT: AF221632.1, EVALUE 1.40e-01
atcaactgaaaaacctcttcctcctgggcagaatgatcagttcaaggataggcacatgactcatgctgggaaaatcagggcctttcctgtgatttctcagctacagctgtcagggaagatgccatctgctactggggctactatgctgaagaaacgtgaatcctgtacagctaatggctattatggacatcacagagaaaggacctatcttagaaatagtgagatagatagcattgtt

SEQ ID NO: 27078 - DNA, 121 bp, Homo sapiens
  MAP TO AC010719.1; EXPRESSED IN HELA, SIGNAL = 0.96; EXPRESSED IN BRAIN, SIGNAL = 1.1; EXPRESSED IN FETAL LIVER, SIGNAL = 0.99; EST_HUMAN HIT: AI190959.1, EVALUE 4.30e+00; NT HIT: AL161472.2, EVALUE 3.60e+00
taaatgaaggaaatgtaatgaagcagctcctttcagaagtgaaggcaagattactgcgatacacgaggaatagtgaggtgtccagggaccagcaagagtgggaagccattgccacccctag

SEQ ID NO: 27079 - DNA, 218 bp, Homo sapiens
  MAP TO AL035409.15; EXPRESSED IN ADULT LIVER, SIGNAL = 0.72; EXPRESSED IN BRAIN, SIGNAL = 0.72; EXPRESSED IN BONE MARROW, SIGNAL = 0.63; EXPRESSED IN HELA, SIGNAL = 0.63; EXPRESSED IN LUNG, SIGNAL = 0.65; EXPRESSED IN FETAL LIVER, SIGNAL = 0.58; NT HIT: AF003528.1, EVALUE 4.00e-35; EST_HUMAN HIT: AA719551.1, EVALUE 5.00e-35; SWISSPROT HIT: P11260, EVALUE 3.70e-02
aaaaccagtcacaacttctggaaatcaagggcacacttaaagaaatgcaaaatgcacaggaaagtctcagcaatagaatcaaagaagcagaagaaagaatctcagagcttgatgacaaagctttcaaattaacccaatctgtcaaagacaaagaaaaaaaaatttttttaatgaaaaaggcttccaagaagtttgggactatattaaacatccaaacc

SEQ ID NO: 27080 - DNA, 165 bp, Homo sapiens
  MAP TO AF161801.1; EXPRESSED IN BRAIN, SIGNAL = 1.1; NT HIT: AL163302.2, EVALUE 2.10e-02; EST_HUMAN HIT: AA559935.1, EVALUE 2.20e+00; SWISSPROT HIT: P36650, EVALUE 5.00e+00
tggaccagtggcagatgctcctgggctgatcagttgtgcagaaacgtcactgggtctgttttcaccattttggctgctcatcctcatgcttgttggtctcgtgattgtaatatggctgccaaactccttccacaaagaaatcaaggaggtaggaatgggagcaag

SEQ ID NO: 27081 - DNA, 178 bp, Homo sapiens
  MAP TO AL109755.14; EXPRESSED IN PLACENTA, SIGNAL = 1.1; EXPRESSED IN HELA, SIGNAL = 0.98; EXPRESSED IN ADULT LIVER, SIGNAL =   1; EXPRESSED IN LUNG, SIGNAL = 0.93; EXPRESSED IN BRAIN, SIGNAL = 0.99; NT HIT: AL163267.2, EVALUE 8.90e-02; SWISSPROT HIT: P40232, EVALUE 5.00e-02
aaatcttctaattttggaaacactgcagaggccacatgaagtatttctccaggtcaaactggacccaagggttgccagcgtggtcactgtagtagacagaacccctcaggacaaattccataatcacactttttctctaagtatttggagattccattttattctgcagactattgaa

SEQ ID NO: 27082 - DNA, 145 bp, Homo sapiens; identical to SEQ ID NO: 26711
  MAP TO AL109756.9; EXPRESSED IN BRAIN, SIGNAL = 1.2; EXPRESSED IN HELA, SIGNAL = 0.95; EXPRESSED IN PLACENTA, SIGNAL = 0.92; EXPRESSED IN BT474, SIGNAL = 0.9; EXPRESSED IN ADULT LIVER, SIGNAL = 1.1; EXPRESSED IN FETAL LIVER, SIGNAL = 1.2; EST_HUMAN HIT: BE786167.1, EVALUE 1.90e+00; SWISSPROT HIT: P40226, EVALUE 1.30e+00; NT HIT: AF075238.1, EVALUE 2.80e-01

SEQ ID NO: 27083 - DNA, 169 bp, Homo sapiens
  MAP TO AL121588.14; EXPRESSED IN BT474, SIGNAL = 1.1; EXPRESSED IN ADULT LIVER, SIGNAL = 1.1; EXPRESSED IN BRAIN, SIGNAL = 1.2; EXPRESSED IN BONE MARROW, SIGNAL = 1.3; EXPRESSED IN LUNG, SIGNAL = 1.2; EXPRESSED IN PLACENTA, SIGNAL = 1.1; EXPRESSED IN HBL100, SIGNAL = 1.4; EXPRESSED IN HELA, SIGNAL = 1.4; EXPRESSED IN FETAL LIVER, SIGNAL = 1.4; SWISSPROT HIT: O50224, EVALUE 3.80e+00
tcagttccatccttgtagaaaaatggcctgtttcccttgtgcctggtttgccttttgattcatttcctcgacaggccatggaggaagatctggtagtccaagacgtccttgatgaagtatcagagtctaaacaagaaaaagaaactactgaacacttaaaacagaggga

SEQ ID NO: 27084 - DNA, 422 bp, Homo sapiens
  MAP TO AL121822.6; EXPRESSED IN HBL100, SIGNAL = 0.93; EXPRESSED IN BT474, SIGNAL = 0.98; EXPRESSED IN BRAIN, SIGNAL = 0.97; SWISSPROT HIT: P02686, EVALUE 3.50e-01; EST_HUMAN HIT: AU125721.1, EVALUE 3.00e-05; NT HIT: U92288.1, EVALUE 2.60e-01
atgtcagtgtctggcaagaaagagtttgatgtgaaacagatcctaaggctacgctggaggtggtttagtcatccttttcaaggttccaccaacactggaagctgtcttcagcaggaaggatatgagcatagagggaccccggttcagggcaggttgaagagccactctcgggacagaaacggactgaagaaaagcaacagtcctgtccaccacaatatactggcaccagtgccaggaccggcccctgcccatcagagagccgttcagaatttgcagcaacataatctgatagtacattttcaagcaaatgaagatactcctaaatcagttccagagaagaatttattcaaagaagcttgtgagaaacgcgcacaagatttggagatgatggctgatgacaatatagaagattctacagcaag

SEQ ID NO: 27085 - DNA, 107 bp, Homo sapiens
  MAP TO AP000556.2; EXPRESSED IN FETAL LIVER, SIGNAL = 1.1; EXPRESSED IN BT474, SIGNAL = 2.1; EXPRESSED IN BRAIN, SIGNAL = 1.8; EXPRESSED IN LUNG, SIGNAL = 1.1; EXPRESSED IN BONE MARROW, SIGNAL = 1.9; EXPRESSED IN PLACENTA, SIGNAL = 2.2; EXPRESSED IN HBL100, SIGNAL = 1.2; NT HIT: gi4505806, EVALUE 6.00e-54; EST_HUMAN HIT: AL042025.1, EVALUE 7.00e-54; SWISSPROT HIT: P42356, EVALUE 1.00e-13
tgaagtagtcaaaggcagtggagtagatcttctcgcgaagcacattgcggatggttgcatttggaaccacatcggcatgcaggagggacagccccagggtcagcagc

SEQ ID NO: 27086 - DNA, 93 bp, Homo sapiens
  MAP TO AL034419.13; EXPRESSED IN HBL100, SIGNAL = 0.99; EXPRESSED IN HELA, SIGNAL = 0.95; EXPRESSED IN PLACENTA, SIGNAL = 0.95; EXPRESSED IN ADULT LIVER, SIGNAL = 1.2; EXPRESSED IN BT474, SIGNAL = 1.2; EXPRESSED IN BRAIN, SIGNAL = 1.2; EXPRESSED IN BONE MARROW, SIGNAL = 0.99; NT HIT: AF023249.1, EVALUE 7.70e-01; EST_HUMAN HIT: AW993616.1, EVALUE 3.00e-03
gatgttgatgttgatgatgatgatggcgatgagtcccaggggattcagcatcctcttgctgggttgcacccagggagcagaataggcaaaggg

SEQ ID NO: 27087 - DNA, 78 bp, Homo sapiens
  MAP TO AP000236.1; EXPRESSED IN FETAL LIVER, SIGNAL = 0.62; EXPRESSED IN BRAIN, SIGNAL = 0.97; EXPRESSED IN LUNG, SIGNAL = 0.69; EXPRESSED IN HELA, SIGNAL = 0.79; EXPRESSED IN PLACENTA, SIGNAL = 0.61; NT HIT: M17988.1, EVALUE 9.60e+00; EST_HUMAN HIT: BF129973.1, EVALUE 9.20e-01
taagccagtcattgtttaggatttttcttatgtataccttgcgatcaatttcagatttaacatttgtgccaggatctt

SEQ ID NO: 27088 - DNA, 204 bp, Homo sapiens
  MAP TO AC006029.2; EXPRESSED IN BRAIN, SIGNAL = 1.2; EXPRESSED IN HELA, SIGNAL = 0.69; EXPRESSED IN BONE MARROW, SIGNAL = 0.69; EXPRESSED IN FETAL LIVER, SIGNAL = 0.63; EXPRESSED IN LUNG, SIGNAL = 0.88; EST_HUMAN HIT: AA258098.1, EVALUE 4.90e-01; NT HIT: Z25420.1, EVALUE 7.50e+00; SWISSPROT HIT: Q57081, EVALUE 3.20e-01
gatattttcctcctttgcatcaaccatcacttcaacacagaagatgcccaattttatacttctagaaaaattcctaactgcctgcagcagatctccatgtgaagatatgtacacccccaaatcagtgtctgttaccatttgtacatgccctttgtctttcttcttctgcatctttcctcttgccatttcctccatctggagtcc

SEQ ID NO: 27089 - DNA, 161 bp, Homo sapiens
  MAP TO Z92540.1; EXPRESSED IN BT474, SIGNAL = 1.8; EXPRESSED IN HELA, SIGNAL = 1.1; EXPRESSED IN LUNG, SIGNAL = 1.2; EXPRESSED IN BRAIN, SIGNAL =   1; NT HIT: L09555.1, EVALUE 9.30e-02; EST_HUMAN HIT: AW812079.1, EVALUE 8.60e+00; SWISSPROT HIT: P51890, EVALUE 2.90e+00
cagcagtgaggtttgaagtgatgcttgacaccacggtacagaacctcttggaatccttgccaaaattctttgaagtaactgttattccttttattttcaaagtgaagaaatggataggaatggccatgaagtatgagcatgaactgaagagaggtaaacaa

SEQ ID NO: 27090 - DNA, 131 bp, Homo sapiens
  MAP TO AC010826.2; EXPRESSED IN ADULT LIVER, SIGNAL =   1; EXPRESSED IN LUNG, SIGNAL = 1.1; EXPRESSED IN BONE MARROW, SIGNAL = 1.1; EXPRESSED IN BRAIN, SIGNAL = 1.3; EST_HUMAN HIT: AW896070.1, EVALUE 1.20e+00; SWISSPROT HIT: P48058, EVALUE 1.00e-15; NT HIT: gi11437356, EVALUE 9.00e-57
gttggttactggaatgatatggataagttagtcttgattcaagatgtaccaactcttggcaatgacacagctgctattgagaacagaacagtggttgtaaccacaattatggtaagtgttggtctatgctt

SEQ ID NO: 27091 - DNA, 304 bp, Homo sapiens
  MAP TO AL022727.1; EXPRESSED IN ADULT LIVER, SIGNAL =   1; EXPRESSED IN BT474, SIGNAL = 0.98; EXPRESSED IN LUNG, SIGNAL = 1.1; EXPRESSED IN BRAIN, SIGNAL = 1.4; EXPRESSED IN BONE MARROW, SIGNAL = 1.1; EXPRESSED IN HBL100, SIGNAL =   1; NT HIT: gi10048449, EVALUE 1.20e-02; EST_HUMAN HIT: AA338315.1, EVALUE 7.00e-02; SWISSPROT HIT: P23275, EVALUE 8.00e-31
attggccttatctggaagtagttctctttgtggttattttgatcttctgcttgatgacactgataggaaacctgttcatcatcatcctgacgtacctggactcccatctccatactcccttgtatttcttcctttcaaatctctcatttctggatctctgctacaccaccagctctatccctcagttgctggtcagtctctggggtgtggaaaagaccatttcttatgctggttgcatggttcaactttacttttttctcacactgggaaccacagagtgtgtcctactggtggtgatgtccta

SEQ ID NO: 27092 - DNA, 111 bp, Homo sapiens
  MAP TO AC004599.4; EXPRESSED IN FETAL LIVER, SIGNAL = 0.66; EXPRESSED IN LUNG, SIGNAL = 0.79; EXPRESSED IN HELA, SIGNAL = 0.62; EXPRESSED IN ADULT LIVER, SIGNAL = 0.67; EXPRESSED IN BRAIN, SIGNAL = 0.74; EXPRESSED IN BT474, SIGNAL = 0.83; EST_HUMAN HIT: BE788108.1, EVALUE 1.40e+00; SWISSPROT HIT: Q99087, EVALUE 9.30e+00; NT HIT: M27888.1, EVALUE 9.60e-01
gcccttggtctctggaaggctgaatagctgcatcttgttcatctggaaactctctgggatgagtgactttagcatctcggatgttgccatcgtagcccatgtgcataacaa

SEQ ID NO: 27093 - DNA, 417 bp, Homo sapiens
  MAP TO AC004832.2; EXPRESSED IN FETAL LIVER, SIGNAL = 0.84; EXPRESSED IN HELA, SIGNAL = 0.79; EXPRESSED IN ADULT LIVER, SIGNAL = 0.74; EXPRESSED IN LUNG, SIGNAL = 0.97; EXPRESSED IN BRAIN, SIGNAL = 0.7; EST_HUMAN HIT: M86151.1, EVALUE 2.60e-01; SWISSPROT HIT: P40631, EVALUE 1.60e-01
gttctgggtaatgggggctgtcatccagtctcctccctgcccctgctggtgcacttcctgcctctgctggtgcactttctgcccctactggtatatttgctgcctctgctggggcgcttcctgcctcggctggtgtatctcctgcccctgctggtgcactttctgcccccgctgatgcacttcctgcctctgctggtgcacttcctggctctgctggcgcacttcctgcctctgctggtgcacttcctggctctgctggcgcacttcctgcccctgctggtgtatttcctgcccctgctggtgtacttccttcccctgctggtgcacttcctgcctctgctggcgcacttcttgcctctccaggccctacctagcctctccctcttatatatggaagtcttcccagttcactgacac

SEQ ID NO: 27094 - DNA, 111 bp, Homo sapiens
  MAP TO AC007038.3; EXPRESSED IN HBL100, SIGNAL = 1.1; EXPRESSED IN BRAIN, SIGNAL = 0.93; EXPRESSED IN BONE MARROW, SIGNAL = 1.1; EXPRESSED IN ADULT LIVER, SIGNAL = 0.99; NT HIT: U66061.1, EVALUE 1.30e-02; SWISSPROT HIT: P09814, EVALUE 7.10e+00; EST_HUMAN HIT: AI204209.1, EVALUE 6.20e-02
caggtgatggagatatgatatattcatctacaaatttattttcagcaagattgccttttatttcagtcttttttaacagtgtttcaaagtgaaaatgaagaggcacatctg

SEQ ID NO: 27095 - DNA, 1917 bp, Homo sapiens
  MAP TO AC006115.1; EXPRESSED IN PLACENTA, SIGNAL = 7.7; EXPRESSED IN FETAL LIVER, SIGNAL = 2.9; EXPRESSED IN BRAIN, SIGNAL = 3.1; NT HIT: AF208980.1, EVALUE 0.00e+00; EST_HUMAN HIT: AV708395.1, EVALUE 0.00e+00; SWISSPROT HIT: P52742, EVALUE 5.00e-55
agctgggaacagagaattcgccatccttcttaaactcaccagatccctctccaggaacacttttctgaggtttggcacggaatacactctgtatgacagagtcttcatagttgcgattcttactgcccccttcacaagggttctctctggcaggaatcttctgtcgcttatcattaaggtctgagatataaatggaggattctcccttctcattagattccaccaattcatttccattgtgacttcttggaggtttggaagccactaagctatggataacagacctactgtattcccttccttcagaggtgttccctccagcacgaactctctgatggttgatagcatcgaagctctgaatggtagactctgccattacttttggtttactgggccctgctacactgtgacttttctgagcttccacagaggctaagctatgaataacagacctctcatatgattttgcctcatagacattttccttagtgggaatcttctggttttcataggggttagagctaatggtgaacgccttttcgtcctcatcactttcaagaggtcttgttatagtatgactcttctgagattcagtgaatggcccactatgaatgacagatttctcataccctctgccttcaaagaggttctttcgagaatgaattttctgatgctcactgagctctgagctttgcatgaaggcatcccggccatctgtaaagtcacagagcttctccttattgtaagttttctgacgccttttaagggactgaccaggaataaaggtttcctcacacactttacccttgttttcaaatgggttccctctagtatggattttctgatgttctttcagggatgagctatgaaggaaagtctccccacacaccttacattcgtacattttctctttaccatacattttctgaaactcattaagggctgggctgggcctaaaggtttccccgcgctcacgttcacgttcacgttcatgttcacgctcattatctttgtcatccccaaagtggattttctggtgctcaatcagggcagaactatgaaggaaggtttccttacacaccctgcactcgtagaatttgtctttgccatatattttctgaagctcactaaaggtggggctaggcatgaaggcttcctcacattcctgattcttacattccacaagataacctctagcatgaatcttccgatgttcagccaaggcggcactcttattgaaggtctctccacagtccttacattcaaaacgtttccctccaacctgacttttctgaacttcactgacagccacactgtggataaaggactcaccatactcatagaggttctctctagtatgcatgatctggtgctcaacaaattctgagatgacactgaacgacctcccacactcatcacatacatatggcattgccccaaaatcaattggctgtgactcggtaaaggagggggagctgaggctgctcaggctgctcacgctcatggcttttctcatctcactaccacattcaaagggcttcttcctgggacagcctttttgatcgtgaatcgagcccttcccatctgtgtcaaaatgatagcgcctctttctttcaagaactctctttctggaaacaagggttgaattaaacctaaagcctcccctaaatgcattcccttcataaacccgctgctggatcactgactccctcttgttcaatgaaatgtccttccagttatcatctgacattctggggaatctctgtgaccggtcgcttgactcccttgctcttcccgatttggaactgcgtgacacatccttgatgaatttttccattatcactccgtgggaagattcatcttcacaaatcccccgccggtgggttgattttttggcttcaggcatagtttttagac

SEQ ID NO: 27096 - DNA, 171 bp, Homo sapiens
  MAP TO AC007327.1; EXPRESSED IN BT474, SIGNAL = 0.98; EXPRESSED IN FETAL LIVER, SIGNAL = 0.93; EXPRESSED IN ADULT LIVER, SIGNAL = 1.2; EXPRESSED IN BONE MARROW, SIGNAL = 1.4; EXPRESSED IN BRAIN, SIGNAL = 1.1; NT HIT: AF129169.1, EVALUE 1.60e+00; SWISSPROT HIT: P54306, EVALUE 3.80e+00; EST_HUMAN HIT: AU124122.1, EVALUE 3.80e-02
gcacctcgtgctggttggctgtggagatgactgagtccagccagtgcagagggaggaaaagctcccttagagggtggaggaggtctcgggggaggatggagaggacgttgaggcaggtttggacttcctgcaggcagcgagggtttccaaagcagacaggcagctggagat

SEQ ID NO: 27097 - DNA, 441 bp, Homo sapiens; identical to SEQ ID NO: 10469
  MAP TO AL031683.1; EXPRESSED IN BONE MARROW, SIGNAL = 0.98; EXPRESSED IN ADULT LIVER, SIGNAL = 1.3; EXPRESSED IN BRAIN, SIGNAL = 1.1; SWISSPROT HIT: P31251, EVALUE 4.40e+00

SEQ ID NO: 27098 - DNA, 247 bp, Homo sapiens
  MAP TO AL049691.17; EXPRESSED IN LUNG, SIGNAL = 4.4; EXPRESSED IN BRAIN, SIGNAL = 1.1; EXPRESSED IN ADULT LIVER, SIGNAL = 0.92; EXPRESSED IN BT474, SIGNAL = 1.5; NT HIT: AF109906.1, EVALUE 3.20e-02; SWISSPROT HIT: P54282, EVALUE 1.60e+00; EST_HUMAN HIT: BE960650.1, EVALUE 5.70e-02
aatccaccagtccaggccagagcgtggccaggctaggattcctgctgtgcaggcactgcagcccagtagaagagagccagaggctggtgagggatctctgcctgctctggactgtggcaggagccagcaggaggactctctgagccagccagcaagaagccactcaccttcctgtcctctccctgcctctccctgtcctctggccagggctgaacatgatgtgggtgatgcaaggcctatggttctc

SEQ ID NO: 27099 - DNA, 159 bp, Homo sapiens
  MAP TO AC006450.11; EXPRESSED IN PLACENTA, SIGNAL = 0.7; EXPRESSED IN BONE MARROW, SIGNAL = 1.2; EXPRESSED IN HBL100, SIGNAL = 5.7; EXPRESSED IN LUNG, SIGNAL = 0.85; EXPRESSED IN HELA, SIGNAL = 0.69; EXPRESSED IN BT474, SIGNAL = 0.64; EXPRESSED IN FETAL LIVER, SIGNAL = 0.82; EXPRESSED IN ADULT LIVER, SIGNAL = 0.66; EXPRESSED IN BRAIN, SIGNAL = 0.73; SWISSPROT HIT: P27987, EVALUE 3.80e+00; NT HIT: X87578.1, EVALUE 5.70e+00
tgcagggaacaacatggaaggacatggcagccatgcacggggtgtcaaaattcaaagtgaagagagcacccacacagaaggaccagcctggcagggcttgtcaaagaccaaggtggatgaggtgggcattcaggcagaagaggcagagcgacacagggt

SEQ ID NO: 27100 - DNA, 136 bp, Homo sapiens
  MAP TO AC007011.1; EXPRESSED IN LUNG, SIGNAL = 0.95; EXPRESSED IN BRAIN, SIGNAL = 0.95; EST_HUMAN HIT: BE145854.1, EVALUE 3.10e-01; SWISSPROT HIT: P13869, EVALUE 6.80e+00; NT HIT: AB015623.1, EVALUE 1.20e+00
gagatgacctgacgctactgggctttggagccccacaggaacacctgggcagtggctggacaaaaggggaccaggtcattcctaaagccacagtactgctgctggtgcacaaatgtttatggaaagtcaaggccag

SEQ ID NO: 27101 - DNA, 517 bp, Homo sapiens
  MAP TO AC010083.1; EXPRESSED IN LUNG, SIGNAL = 0.91; EXPRESSED IN BRAIN, SIGNAL = 1.1; EXPRESSED IN BT474, SIGNAL = 0.97; EXPRESSED IN FETAL LIVER, SIGNAL = 2.1; EXPRESSED IN HELA, SIGNAL = 0.98; EST_HUMAN HIT: BE925247.1, EVALUE 3.00e-98; NT HIT: Y16723.1, EVALUE 0.00e+00; SWISSPROT HIT: Q12934, EVALUE 8.00e-82
atcttaccagagctctgcaggatataacagcagcaaaaccaagacaaaaagccctccccaagaatgttccaaggagaaaagagattataacaaaagacaaaaccaacggagctctggaagatgcaccattaaaaggtttggaagacacaaagctggtacaggtggtacttaaagaggaaagtgaatctaagtttgaatcagaaagtaaagaagtaagtcccctgacacaagaaggggctccagaggatgtgccagatggagggcagataagcaaaggctttgggaaactatacaggaaggtcaaggagaaagtgagaagccccaaagagcctgagacccccactgagctctacaccaaagagcggcacgtgctggtcacaggggatgccaattacgtggaccctagattctatgtctcctccatcacagctaaaggtggggtggctgtttctgttgcggaagactctgtgctttatgacggccaggtggagccctctcctgagtcacccaagccccc

SEQ ID NO: 27102 - DNA, 217 bp, Homo sapiens
  MAP TO AL023283.6; EXPRESSED IN BONE MARROW, SIGNAL = 1.1; EXPRESSED IN PLACENTA, SIGNAL = 1.4; EXPRESSED IN LUNG, SIGNAL = 1.2; EXPRESSED IN HELA, SIGNAL = 1.3; EXPRESSED IN HBL100, SIGNAL = 1.2; EXPRESSED IN FETAL LIVER, SIGNAL = 1.4; EXPRESSED IN BT474, SIGNAL = 1.2; EXPRESSED IN BRAIN, SIGNAL =   1; NT HIT: AL163267.2, EVALUE 4.00e-08; EST_HUMAN HIT: AW812916.1, EVALUE 6.00e-10
accaaacaaatgagcatgatagcctagccaagttgacacataaaattaatcatcacaatatgcaaactatctcaggtttctctactcatcattatctttactgctgctattcttgtttaaacaaccagtttctttcacctggacaaatgcaacagtattctacctgctctgttatcagtcagcatactttggcttatgctatggtaacaagcaaacc

SEQ ID NO: 27103 - DNA, 365 bp, Homo sapiens
  MAP TO AL080274.13; EXPRESSED IN HELA, SIGNAL =   2; EXPRESSED IN BRAIN, SIGNAL = 1.2; SWISSPROT HIT: P21575, EVALUE 1.50e+00; EST_HUMAN HIT: AA903912.1, EVALUE 0.00e+00; NT HIT: gi11421836, EVALUE 0.00e+00
ctctctctaatggtgggataaagaccctgccagtttggggccgggataaggttgttgttactgagattctgctggtggtactgctggacgctggtgctgctggagttggctggctttttacgggggaatatatcagcagccatcttcttctttttagtcttcaaggtaattatttcataacaaactggtggcaacttgctgctgttgctactgctgctgctggtatttgctttctttgagcttttcttggacctgttctttaccgtctctggaagcatcaagaagaaggtgagacatttcatgttcttttccttgtcatctaccatgagtacagtgtgtctctctttagagttagatatcccaaa

SEQ ID NO: 27104 - DNA, 139 bp, Homo sapiens
  MAP TO AL035685.13; EXPRESSED IN FETAL LIVER, SIGNAL = 0.96; EXPRESSED IN ADULT LIVER, SIGNAL = 2.5; EXPRESSED IN BRAIN, SIGNAL = 1.1; EST_HUMAN HIT: BE247526.1, EVALUE 1.30e+00; SWISSPROT HIT: O10339, EVALUE 3.00e+00
ctgtggcccagcagtcgggtctggaccaccaggctgggttccgttatgggaaagaaccagcagatgtaatggaatcatgccaattaggccaggagctgcgtggggatgatgttatcattaagttccagaagacgtggag

SEQ ID NO: 27105 - DNA, 201 bp, Homo sapiens
  MAP TO AP000217.1; EXPRESSED IN HELA, SIGNAL = 0.63; EXPRESSED IN BRAIN, SIGNAL = 0.84; EXPRESSED IN FETAL LIVER, SIGNAL = 0.6; EXPRESSED IN LUNG, SIGNAL = 0.88; EST_HUMAN HIT: BF204335.1, EVALUE 2.80e+00; NT HIT: U66564.1, EVALUE 7.40e+00
acagggtgaacagtatacactcacagtgttgcctgaaggacatgccagttcttctgctctaagcaatgatattgtctgcagagatctagtcatcttgtcagttcacgcaacattacactggtccactaatattgacaatattatgcttattgaatctgaaaaagaggaagtagcaaaggtgggagatgatctccacaaaac

SEQ ID NO: 27106 - DNA, 171 bp, Homo sapiens
  MAP TO AF064862.1; EXPRESSED IN HBL100, SIGNAL = 0.94; EXPRESSED IN FETAL LIVER, SIGNAL = 1.1; EXPRESSED IN BRAIN, SIGNAL = 0.98; EXPRESSED IN BONE MARROW, SIGNAL = 0.91; NT HIT: AL163281.2, EVALUE 7.00e-92; SWISSPROT HIT: P52902, EVALUE 4.40e-01
tgggcccacagcgagaaaccgctatgccagccagtggaccctcaaccgaccccaccccaccatctcagcacacaccctcaccacagactggaggctgccaacacccagggctgcaggatcagtagacaaagagagcgacagttacagcgtcagcccctcgcaagacacagg

SEQ ID NO: 27107 - DNA, 213 bp, Homo sapiens
  MAP TO AL050349.9; EXPRESSED IN HELA, SIGNAL = 1.4; EXPRESSED IN PLACENTA, SIGNAL = 1.4; EXPRESSED IN HBL100, SIGNAL = 1.1; EXPRESSED IN ADULT LIVER, SIGNAL = 1.6; EXPRESSED IN BT474, SIGNAL = 1.1; EXPRESSED IN BRAIN, SIGNAL = 1.3; EXPRESSED IN BONE MARROW, SIGNAL = 0.98; EXPRESSED IN LUNG, SIGNAL = 1.1; EST_HUMAN HIT: AI141802.1, EVALUE 2.00e-52; SWISSPROT HIT: Q40237, EVALUE 1.10e+00
ctttagctcgtcgggtcttcagcgttgctggagagtcaaaggtggccaccgtgcccccggtggcgctggtcatgggggcggcggggtttggtcctttgggtttgaatccctgtttgccagggctgtacactgtgggggtgggatatactggaggctccacacactggtttggcacctaggaggacaacacagtcagggaaaaagccctgccag

SEQ ID NO: 27108 - DNA, 84 bp, Homo sapiens
  MAP TO AC009237.1; EXPRESSED IN PLACENTA, SIGNAL = 0.73; EXPRESSED IN BT474, SIGNAL = 0.62; EXPRESSED IN LUNG, SIGNAL = 0.95; EXPRESSED IN ADULT LIVER, SIGNAL = 0.74; EXPRESSED IN FETAL LIVER, SIGNAL = 0.58; EXPRESSED IN HELA, SIGNAL = 0.66; EXPRESSED IN BRAIN, SIGNAL = 0.75; NT HIT: M82885.1, EVALUE 1.10e-02; EST_HUMAN HIT: AW072691.1, EVALUE 4.00e-03
ctgctgttgttgctgctgctgtgatgtttatgatcttatgactgcaggcccccttgacggctggatggtgagagaggaaaagca

SEQ ID NO: 27109 - DNA, 84 bp, Homo sapiens
  MAP TO AL049565.3; EXPRESSED IN HELA, SIGNAL = 0.8; EXPRESSED IN BT474, SIGNAL = 0.74; EXPRESSED IN BONE MARROW, SIGNAL = 0.75; EXPRESSED IN ADULT LIVER, SIGNAL = 0.93; EXPRESSED IN BRAIN, SIGNAL = 2.6; EXPRESSED IN PLACENTA, SIGNAL = 0.84; EXPRESSED IN FETAL LIVER, SIGNAL = 0.81; EXPRESSED IN LUNG, SIGNAL = 0.91; EXPRESSED IN HBL100, SIGNAL = 0.94; SWISSPROT HIT: Q03248, EVALUE 7.10e+00; NT HIT: AF003528.1, EVALUE 2.00e-03
tcttgccatgtttcccatcatgctgaagaagcgggtttactacaatggtggaatggctttttgaagattgagctacagtaccag

SEQ ID NO: 27110 - DNA, 1550 bp, Homo sapiens
  MAP TO AL034420.16; EXPRESSED IN PLACENTA, SIGNAL = 0.72; EXPRESSED IN HBL100, SIGNAL =   1; EXPRESSED IN FETAL LIVER, SIGNAL = 1.1; EXPRESSED IN LUNG, SIGNAL = 0.75; EXPRESSED IN HELA, SIGNAL = 0.76; EXPRESSED IN BT474, SIGNAL = 0.78; EXPRESSED IN BONE MARROW, SIGNAL = 0.75; EXPRESSED IN ADULT LIVER, SIGNAL = 0.86; EXPRESSED IN BRAIN, SIGNAL = 0.81; EST_HUMAN HIT: AW270757.1, EVALUE 0.00e+00; NT HIT: gi11420514, EVALUE 0.00e+00; SWISSPROT HIT: P39806, EVALUE 1.00e-38
cttccatctcagtgcggctgttctcggagctctctgctttgctcccagcatcgggagactttgacttgatgctttcggcttgactattggccggggagagtgcctggaaggatgtggtttccaggatatctgggcttcggctctgatactcctggtctcccatcagcgaggatgagtcgttggtcaagccatcgctctccacggaaccgttttctctgctgccctggcgctgcaggttaaaaggggcaggacccactttccctggggcatctaaggaagccatcatggcaaaccctagcgtgggtgatgccgagtggatgctgggaagaggcgtggggaccttggaggagctgctgggagcctcctgggagctgacttcctctacatcgatgctttcgatgacatcatcatggcagatagcgccggtgctgccgttctcacccacggtcattggctcagaacccgtaaagtcacagggattctctggcaggggcgtgttgggaatctgaccgcccatgtgcatccgaatatgttgctgcagcatcacggcattagtgaacttcttctggcagatggggcacgaatgctgcgtcttaatggatgtgttggttcggtgaaccccaaggtgtgtcttcaggttacctttggtagaaaaggctcggccacagatcttacactggaacggtctctccccggtgtgggtgcgataatgcatcttgagggagctctgacagcttaagactcggtggcaaatgagacattcgttgggatcagtggtggccttgtcaatgttctccaccaactgctgcaatttcagggtctctgaccctggctcaggggtcccactcccttggaagccaccagcccttggggaattatagtttggtcccaccccagggagtgtgggtccaccctcactttctggagaaggcccaggctgcaggtcaccgggcaaggagccacccgtgaggtccttgggattagtccccgaagaaagattctgaggtagccctacagaggtggttacaaggacaggtttgctgtctaaagaaagactcggttcatctatggggtcaggtacagagagtgcataggggatgccattgccggccgccactttgtcctggaactcggcaaacagctgggggtttgccttcacctggggatgtcggtgaaagtgcaccttgaggttgcccttggtggtgaagcgatgaccacagacagagcacacgaagggtctctctccagtgtgggagcggaggtggatctgcaaggagctatcagtcccaaaaaccttgctacagtacttacacttgtgcttgtagagggccgcctcgtctttgggtttgacatccaccgcggagatgttcggtggcttccccttccctttcttggatgtgtctagcgccacagtggagaaagggctctggaagagcaccgagcccggggcctgaggaagcaaagcgctcgggaggcgggacatgacgttcgggagcacccgggtcccatccggcttcagagtgaagggtgccagccctggggacagggag

SEQ ID NO: 27111 - DNA, 193 bp, Homo sapiens
  MAP TO AL022397.1; EXPRESSED IN BRAIN, SIGNAL = 1.5; EXPRESSED IN HELA, SIGNAL = 0.93; SWISSPROT HIT: P54002, EVALUE 2.50e-01; EST_HUMAN HIT: BE779039.1, EVALUE 1.00e-51
aatcgggaagatgtttacatttattgaaatgccccatattctcttgatctcttcccaaatatacatgtcgagatttagaatattcctcctttttacaattatctgtaccaacatatttcttttgctcatacaatttgtttattccgttggcattcttctgatttcctttcatttcttgatatcctacctcctt

SEQ ID NO: 27112 - DNA, 326 bp, Homo sapiens
  MAP TO AC007368.11; EXPRESSED IN BRAIN, SIGNAL =  49; SWISSPROT HIT: P34007, EVALUE 2.80e+00; NT HIT: AL163246.2, EVALUE 5.10e-02; EST_HUMAN HIT: W04804.1, EVALUE 1.20e+00
tccgctcccttattaaccacaaagagagcgccgagcacacctgcccaggcactgcttttctgaatggtccctccccacagaacaaggagagatcactggggcagactatgagccttggaaggttcatcttgatttcttctgttgagaaatctcattttgtgcagtgcttctgtgttctgtgtgtctctgaaatccgatatgaactcgacctcgtcagagagcaagtgaatgaggaatccatccccaaagaggacttatttctcctggttggatttttcctcttggtgcacatggaagctctcacttcactctttttgtgtgatgac

SEQ ID NO: 27113 - DNA, 295 bp, Homo sapiens
  MAP TO AL122057.1; EXPRESSED IN FETAL LIVER, SIGNAL = 0.96; EXPRESSED IN LUNG, SIGNAL = 1.8; EXPRESSED IN BRAIN, SIGNAL = 1.1; EXPRESSED IN HBL100, SIGNAL = 1.6; EXPRESSED IN HELA, SIGNAL = 1.7; EST_HUMAN HIT: BF701492.1, EVALUE 0.00e+00; SWISSPROT HIT: Q9Y5S9, EVALUE 3.00e-43; NT HIT: AF182415.1, EVALUE 0.00e+00
gtgtctgagcggcacagacgagatctcgatcgaaggcgagatggcggacgtgctagatcttcacgaggctgggggcgaagatttcgccatggatgaggatggggacgagagcattcacaaactgaaagaaaaagcgaagaaacagaagtgtcgcggctttggctccgaagaggggtcccgagcgcggatgcgtgaggattatgacagcgtggagcaggatggcgatgaacccggaccacaacgctctgttgaaggctggattctctttgtagctggagtccatgaggaagccacc

SEQ ID NO: 27114 - DNA, 186 bp, Homo sapiens
  MAP TO AC009237.1; EXPRESSED IN BONE MARROW, SIGNAL = 0.73; EXPRESSED IN ADULT LIVER, SIGNAL = 0.82; EXPRESSED IN BRAIN, SIGNAL = 0.74; EXPRESSED IN PLACENTA, SIGNAL = 0.63; EXPRESSED IN LUNG, SIGNAL = 0.85; EXPRESSED IN FETAL LIVER, SIGNAL = 0.58; NT HIT: gi11437238, EVALUE 9.00e-21; SWISSPROT HIT: P19474, EVALUE 5.70e-01; EST_HUMAN HIT: BE892280.1, EVALUE 2.00e-69
cctcgcatgttccattctggctttgctgtcattgagttgctgaaaaatgtccttgccctgcttttgcagcctgtccaagtgatgttgctcttcttcatggagaaatgcaggcatcttctgatattcagctctgattacttctatccttaaactcacataatcctgcagtgacaattggtcaaaata

SEQ ID NO: 27115 - DNA, 151 bp, Homo sapiens
  MAP TO AL049556.13; EXPRESSED IN BRAIN, SIGNAL = 0.74; EXPRESSED IN BONE MARROW, SIGNAL = 0.63; EXPRESSED IN ADULT LIVER, SIGNAL = 0.74; EXPRESSED IN LUNG, SIGNAL = 0.67; EST_HUMAN HIT: BF091980.1, EVALUE 1.30e-01; NT HIT: Y08257.1, EVALUE 2.90e-01; SWISSPROT HIT: P16680, EVALUE 5.90e-01
gttgactacccccaggaggcaggtcattctcacccgaagactgaggggaattccattcataataacaaccaggaggggcatattctccagtttgaaaagtatagccatgtcagcagcatctggagctgtagcccaggggttgaccaaatgt

SEQ ID NO: 27116 - DNA, 231 bp, Homo sapiens
  MAP TO AC007749.2; EXPRESSED IN BONE MARROW, SIGNAL =   1; EXPRESSED IN BRAIN, SIGNAL = 0.95; NT HIT: AF052959.1, EVALUE 5.50e-01; EST_HUMAN HIT: T70044.1, EVALUE 9.00e-03; SWISSPROT HIT: Q57306, EVALUE 6.00e-01
ctcacagagattgatgcagtacgtcccaggaatctgcatgttaaaggagctctgcaggtgattctgatggaggtggcccttgcaggatgctttgagaaactatatgttctatccctcgaactctgcctgcagaacagcctgagatggctcttccatgctttgaccatttggccctccacagtagtccctgagctgcgtcttcttcggaccatgagcagaatgtgtgtcccc

SEQ ID NO: 27117 - DNA, 101 bp, Homo sapiens
  MAP TO AC008176.1; EXPRESSED IN BRAIN, SIGNAL = 0.74; EXPRESSED IN FETAL LIVER, SIGNAL = 0.58; EXPRESSED IN ADULT LIVER, SIGNAL = 0.94; EXPRESSED IN LUNG, SIGNAL = 0.61; SWISSPROT HIT: P53318, EVALUE 9.10e+00; EST_HUMAN HIT: BE782748.1, EVALUE 3.20e-01; NT HIT: AF159135.1, EVALUE 8.50e-01
agacaccaacgaggccacaggcaccaacaaaggaaaaccacaccacaagcagctggtccagtaaatacactctgacacccataagtagggggatcccacca

SEQ ID NO: 27118 - DNA, 207 bp, Homo sapiens
  MAP TO AC006391.7; EXPRESSED IN BRAIN, SIGNAL = 0.91; NT HIT: D85606.1, EVALUE 1.00e-113; SWISSPROT HIT: O60733, EVALUE 1.60e+00
ccctctgctcttctggttcttggacttacagaaccactgtccccccagcttttgaagcaggtgctgatgggcctgacaagcctcagcaggaggcaccctgaatggctggtgatgtctgcccagctggagcagttgaagcagcagccaaaaccctggatgctcatcccttcccacatcagaacacagctgctctgggtcatcgcccag

SEQ ID NO: 27119 - DNA, 285 bp, Homo sapiens
  MAP TO AC009594.2; EXPRESSED IN BRAIN, SIGNAL = 0.93; EST_HUMAN HIT: AW820335.1, EVALUE 5.00e-15; NT HIT: AL163210.2, EVALUE 3.00e-18; SWISSPROT HIT: P08548, EVALUE 2.00e-34
agaaaagacaactataggccaatacctctgatgaacatcagtgcaaaaatcctccataaaatattagcaaaccaaattcaacaacacatcagaaagattatgcatcatgaccaagtaggacttttcgttggcattcaagtctggtttaacatatgcaaatcaatcaaagtgatacatcacattaacagaataaaagataaaaaccatatgatcatctcaactgacatggaaaaagcatttgacaatattcggcatcctttcttgataaaaatcctttcacaggtt

SEQ ID NO: 27120 - DNA, 128 bp, Homo sapiens
  MAP TO AL022098.1; EXPRESSED IN FETAL LIVER, SIGNAL =   1; EXPRESSED IN BRAIN, SIGNAL = 1.9; EXPRESSED IN BONE MARROW, SIGNAL = 1.2; SWISSPROT HIT: P12994, EVALUE 2.30e+00; EST_HUMAN HIT: BF511266.1, EVALUE 3.00e-17
catggcatgaaacaggtctcaaacgacttgctatctggcaacaaaatggtacaccaacacattaaactccttcaacaggagaacatcttcatgacaaagacagtggttcgcaggttggacaccaatct

SEQ ID NO: 27121 - DNA, 135 bp, Homo sapiens
  MAP TO AF161800.1; EXPRESSED IN ADULT LIVER, SIGNAL = 0.79; EXPRESSED IN BRAIN, SIGNAL = 0.74; NT HIT: AF092505.1, EVALUE 1.00e+00; SWISSPROT HIT: P50442, EVALUE 3.00e+00; EST_HUMAN HIT: BE741711.1, EVALUE 1.80e+00
gtgtcttcagaattcggcaaagtagatgggactgcagacgttaccattccctgtgactcttgctacgatcttacagacttcattgtgctgggcttagatgtcttcagagtcaccaggtacttggttgttcctaga

SEQ ID NO: 27122 - DNA, 792 bp, Homo sapiens
  MAP TO AL023513.1; EXPRESSED IN HELA, SIGNAL = 1.1; EXPRESSED IN BRAIN, SIGNAL = 0.84; NT HIT: gi11417885, EVALUE 0.00e+00; EST_HUMAN HIT: AL119662.1, EVALUE 0.00e+00; SWISSPROT HIT: Q92558, EVALUE 2.00e-03
actggtgtcttttctcctcttccaagatgctcttcccgagggagatgctagccctttgggtccttacctcctgccctcaggagccccggagagaggcagtcctggcaaagagcaccctgaagagagagtggtaacagcgccccccagttcctcacagtcggcggaagtgctgggcgagctggtgctggatgggaccgcaccctctgcacatcacgacatcccagccctgtcaccgctgcttccagaggaggcccgccccaagcacgccttgccccccaagaagaaactgccttcgctcaagcaggtgaactctgccaggaagcagctgaggcccaaggccacctccgcagccactgtccaaagggcagggtcccagccagcgtcccagggcctagatctcctctcctcctccacggagaagcctggcccaccgggggacccggaccccatcgtggcctccgaggaggcatcagaagtgcccctttggctggaccgaaaggagagtgcggtccctacaacacccgcacccctgcaaatctcccccttcacttcgcagccctatgtggcccacacactcccccagaggccagaacccggggagcctgggcctgacatggcccaggaggccccccaggaggacaccagccccatggccctgatggacaaaggtgagaatgagctgactgggtcagcctcagaggagagccaggagaccactacctccaccattatcaccaccacggtcatcaccaccgagcaggcaccaggtatgcagcccccaactcctgaagc

SEQ ID NO: 27123 - DNA, 548 bp, Homo sapiens
  MAP TO AC004886.1; EXPRESSED IN BRAIN, SIGNAL = 1.5; EST_HUMAN HIT: BE258699.1, EVALUE 8.10e+00; NT HIT: gi10048478, EVALUE 0.00e+00; SWISSPROT HIT: P27110, EVALUE 4.00e-01
ctgtagtaactctccctgaagtcagatctactgctgtgtcagttccttcagaataatcaaaagcattcttacttttatagaaaaaatgtccagcttctgctaaatttgtgtcagacatggaaggcttcattcccccaatccctctataaccatatggccctgatcgatcatactgatagtggtcatccctataaccaaaacgatcctcaggaagagtagttgcaggctgctgtgctgtgcagctccttccaaatggtaatttataaaccacatcacagcacacagctcttctccctgcggttaaatcaacgggtttttcatcttctattattttggtcatcacacttgaagtagactcatccattgttacgactgttctgtgagacttggttgtactgagatccactacttccccatcagtgattccctgggatacggtgctatcagtccatccatttgtgacaccaacaggaggcacagtgacaggttttgtaatagccaatgtcactgcatgtgctggagtacctagagataagtttattggtgct

SEQ ID NO: 27124 - DNA, 111 bp, Homo sapiens
  MAP TO AC007560.3; EXPRESSED IN HELA, SIGNAL = 0.61; EXPRESSED IN ADULT LIVER, SIGNAL = 1.1; EXPRESSED IN BRAIN, SIGNAL = 0.71; EXPRESSED IN BONE MARROW, SIGNAL = 0.84; EXPRESSED IN LUNG, SIGNAL = 0.61; EST_HUMAN HIT: AA535220.1, EVALUE 3.60e-01
atcttttcttgtatcaacttcaggggagagataagaagagaaaagataactagaaatggtcaaaatattgctgctaataataatactgtgtcatgtgaagctggcctgcaa

SEQ ID NO: 27125 - DNA, 122 bp, Homo sapiens
  MAP TO AC007217.2; EXPRESSED IN HELA, SIGNAL = 0.64; EXPRESSED IN ADULT LIVER, SIGNAL = 0.8; EXPRESSED IN BRAIN, SIGNAL = 0.84; EXPRESSED IN PLACENTA, SIGNAL = 0.87; EXPRESSED IN BONE MARROW, SIGNAL = 0.65; EXPRESSED IN HBL100, SIGNAL = 0.69; EXPRESSED IN LUNG, SIGNAL = 0.71; EXPRESSED IN FETAL LIVER, SIGNAL = 0.62; NT HIT: gi9910325, EVALUE 2.70e-01
caagacagttagggtctgagcactgtcctggaaggcgatgattagggtgatgggagcagaggtcatcacgggagttctcctccattcgacctgctccatacctgctagcagggaaatgagtt

SEQ ID NO: 27126 - DNA, 440 bp, Homo sapiens; identical to SEQ ID NO: 10502
  MAP TO AL031675.1; EXPRESSED IN PLACENTA, SIGNAL = 1.2; EXPRESSED IN HBL100, SIGNAL = 0.92; EXPRESSED IN BRAIN, SIGNAL = 0.97; EXPRESSED IN BONE MARROW, SIGNAL = 1.1; EST_HUMAN HIT: AU141149.1, EVALUE 3.00e-54; SWISSPROT HIT: P16519, EVALUE 1.00e-15; NT HIT: M95961.1, EVALUE 3.00e-59

SEQ ID NO: 27127 - DNA, 86 bp, Homo sapiens
  MAP TO AL034378.2; EXPRESSED IN FETAL LIVER, SIGNAL = 1.6; EXPRESSED IN BT474, SIGNAL = 0.96; EXPRESSED IN HELA, SIGNAL = 4.9; EXPRESSED IN BRAIN, SIGNAL = 1.1; EXPRESSED IN BONE MARROW, SIGNAL = 0.93; NT HIT: AF110520.1, EVALUE 2.80e+00; EST_HUMAN HIT: AI792369.1, EVALUE 2.60e-01
gtctgccaggggtgaggaggtggtgcagaaacaaactatcaagatgtggaccctgttcttggaactggatggacaggaacctgctg

SEQ ID NO: 27128 - DNA, 550 bp, Homo sapiens
  MAP TO AC006213.1; EXPRESSED IN LUNG, SIGNAL = 1.1; EXPRESSED IN BRAIN, SIGNAL = 0.97; NT HIT: AB021641.1, EVALUE 2.00e-17; EST_HUMAN HIT: AA084272.1, EVALUE 0.00e+00; SWISSPROT HIT: Q9Y2G7, EVALUE 9.00e-35
actttaatttcacaactgaaagcaacaagttatcttcagaaaaaagaaattatgaagtaaatgcgtaccatcaggagacatggaaaagaaataaaaccttcaaccttatgaggtttattttcagaactgacccacagtacacaattgaatttgggagacaacagagacctaaagtgggatgttttagtcaaatgatattcaaaaaacataaatcccttcctctacataagagaaataacacaagagagaaatcatatgagtgtaaggaatataagaagggctttagaaaatatttgcaccttactgaacatctgagagaccatactggtgtgataccctatgaatgtaatgaatgtggaaaagcatttgtagttttccagcattttattagacatcgaaaaatccacactgatttgaaaccctatgaatgcaatggatgtgagaaggcctttaggttttattcacagcttattcagcatcagataattcatactggtatgaaaccctatgaatgtaagcaatgcgggaaggcttttagacgtcattctca

SEQ ID NO: 27129 - DNA, 645 bp, Homo sapiens
  MAP TO AC005004.1; EXPRESSED IN BONE MARROW, SIGNAL = 1.2; EXPRESSED IN HELA, SIGNAL = 1.6; EXPRESSED IN PLACENTA, SIGNAL = 1.4; EXPRESSED IN FETAL LIVER, SIGNAL = 0.92; EXPRESSED IN BT474, SIGNAL = 0.92; EXPRESSED IN BRAIN, SIGNAL =   1; SWISSPROT HIT: P20535, EVALUE 1.10e+00; NT HIT: U34961.1, EVALUE 2.60e-02
gtagagcttttgttcctgaatcagccatttccttttttctctctaggcttactggtttgatgtttaaggtgggacagtttgaagaggcaccacaggtttggttacctggtggagagatgtcttttatttttgtctgaatgggaatggtttgtatatcagcaatgacatctgctctaccctctaatggagggtgatggctctgatgggcatctctgcctgttgctaaaggcatctctttgtttaaatgcagtagagagtcagttggcaaatttgcatgttcttgagaattaagggacacttgttgatttaaaacacattcactttctactttgtttacaaccagttcattggtacaagaaagttcattcatctcacaggctatgctctgttcatctaaaagtggaatatcatcatgtgaggtctgtataactttttctgactcaggtctgtaatcaaattctggggatggtagcaacagagcagtaccttgcttgggttttaatacctcacttacaggacttatttgatcctctggcattaaactcacaatggattttctttcaaacagaaaatcattacatgatgcttcatttaactgggtgttgccttccagatttctctggatgctgactaaggagttacagt

SEQ ID NO: 27130 - DNA, 135 bp, Homo sapiens
  MAP TO AC008157.1; EXPRESSED IN BONE MARROW, SIGNAL = 0.74; EXPRESSED IN HELA, SIGNAL = 0.67; EXPRESSED IN ADULT LIVER, SIGNAL = 0.65; EXPRESSED IN BRAIN, SIGNAL = 0.69; EST_HUMAN HIT: AW084686.1, EVALUE 7.80e-02
agaaaagaaagtgaaggaaatcgtagaagaaaaggtcacagggagctacctgaaatgaggaaaatgaactggaatagattctcaggggattgtagtagtcccagccctgatattagccagctgtgggacttttag

SEQ ID NO: 27131 - DNA, 207 bp, Homo sapiens
  MAP TO AC007182.3; EXPRESSED IN BRAIN, SIGNAL = 2.2; EXPRESSED IN BT474, SIGNAL = 0.6; EXPRESSED IN PLACENTA, SIGNAL =  37; EST_HUMAN HIT: AA938490.1, EVALUE 1.00e-113; NT HIT: gi11434935, EVALUE 1.00e-113; SWISSPROT HIT: Q60765, EVALUE 8.00e-04
gagagcgaagacctggagaaacagaacgcggctctacgcaaggagatcaagcagctcacagaggaactgaagtacttcacgtcggtgctgaacagccacgagcccctgtgctcggtgctggccgccagcacgccctcgccccccgaggtggtgtacagcgcccacgcattccaccaacctcatgtcagctccccgcgcttccagccc

SEQ ID NO: 27132 - DNA, 147 bp, Homo sapiens
  MAP TO AC007163.2; EXPRESSED IN BT474, SIGNAL = 1.5; EXPRESSED IN FETAL LIVER, SIGNAL = 1.1; EXPRESSED IN LUNG, SIGNAL = 1.1; EXPRESSED IN BRAIN, SIGNAL =   1; EXPRESSED IN HBL100, SIGNAL = 1.4; EXPRESSED IN HELA, SIGNAL = 2.4; NT HIT: gi11429907, EVALUE 1.00e-77; SWISSPROT HIT: P45491, EVALUE 1.30e+00; EST_HUMAN HIT: AU131783.1, EVALUE 2.00e-77
catctgttcttgaagttctttctggagctccttacgagctccgatggtttgctgattccgaacatattctgaaagctctttcaagcctgcctcagtaaaatattttgtgaagtgttcaacactttgcttattggcaggaaagagttc

SEQ ID NO: 27133 - DNA, 120 bp, Homo sapiens
  MAP TO AC008174.1; EXPRESSED IN BRAIN, SIGNAL = 2.5; NT HIT: AJ237848.2, EVALUE 1.00e+00; SWISSPROT HIT: Q62789, EVALUE 6.90e+00; EST_HUMAN HIT: AA100656.1, EVALUE 2.70e-01
tatggttatatctgcttccgaaagtaaaggatccatcattttatccataaattgaacagatgtttggggagttggctcatcaacattgtgaggcatgccattaaaattagagtgggagag

SEQ ID NO: 27134 - DNA, 356 bp, Homo sapiens
  MAP TO AP000072.1; EXPRESSED IN BRAIN, SIGNAL = 1.4; EXPRESSED IN BONE MARROW, SIGNAL = 1.1; EXPRESSED IN BT474, SIGNAL = 1.1; NT HIT: D90900.1, EVALUE 3.50e+00; EST_HUMAN HIT: BF217593.1, EVALUE 1.30e+00; SWISSPROT HIT: Q01338, EVALUE 2.10e-01
  unsure 305
ggtgcaaagaagagaaatgcaataaaatgataatgaggaggcccaggacccgcacaagggcaccactgcaagtagatacttcgaggaaacttcctgatgcttgtccagcccttggtggtggtgcccggcagcccgtattcttatcccaaagcaatatgtgtggagacagcccagcaaaagctgagagattgtgtgtccagagacatgttccaggaatggaaacagagagtggaggagtttcttctctcctcccgtctcccgctagagtgggcgggccctttggtgtcatcgcactgtcttcatancctactgcgctccaggcctgtggccccatggcggtcttggaccacgagtga

SEQ ID NO: 27135 - DNA, 278 bp, Homo sapiens
  MAP TO AC011193.1; EXPRESSED IN LUNG, SIGNAL = 0.89; EXPRESSED IN BRAIN, SIGNAL = 0.94; NT HIT: U12283.1, EVALUE 1.40e-01; EST_HUMAN HIT: AV692777.1, EVALUE 2.50e-01; SWISSPROT HIT: P52840, EVALUE 8.10e+00
  unsure 142
  unsure 152
gcagatcactctggatccaacaggacgtgggtgtcagcttgaatggagatgaagacagagacaactctgtgttccacatgcttcctccacgtgccctccaaatggcacagaccgcatggcccaaactctcctccagccccanatatctaccnctggctccagccaaatgaggcctgaataattcatggccaatgcgcatggcccagtcgtggagcagctttctggtggctaaattggagagcagggtggaggccagggcagctggacctgggaggggg

SEQ ID NO: 27136 - DNA, 125 bp, Homo sapiens
  MAP TO AC007832.1; EXPRESSED IN BRAIN, SIGNAL = 0.69; EXPRESSED IN ADULT LIVER, SIGNAL = 0.79; EXPRESSED IN BT474, SIGNAL = 4.4; EST_HUMAN HIT: BF091581.1, EVALUE 1.60e+00; NT HIT: AF146738.1, EVALUE 6.00e-02
  unsure 68
ccatgataaaacaccggcacaggtggttcttgagatacgtctgcagccttctagtcttcaagagcatncccacatttggggtcatcctttctcttccccaacctctccctatctgccttgtgtag

SEQ ID NO: 27137 - DNA, 280 bp, Homo sapiens
  MAP TO AC009594.2; EXPRESSED IN BRAIN, SIGNAL = 1.3; SWISSPROT HIT: P23266, EVALUE 1.00e-03; NT HIT: AF287263.1, EVALUE 7.00e-38
gatgtacagatttacagattttgatgtatcaaacatttcaatttacctgaatcatgtccttttctatactacccagcaggcaggtgacctagaacacatggagacaagaaattactctgccatgactgaattctttctggtggggctttcccaatatccagagctccagctttttctgttcctgctctgcctcatcatgtacatgataatcctcctgggaaatagcctcctcattatcatcaccatcttggattctcgcctccatactcccatgtatttc

SEQ ID NO: 27138 - DNA, 198 bp, Homo sapiens
  MAP TO AC009705.2; EXPRESSED IN BONE MARROW, SIGNAL = 1.2; EXPRESSED IN BRAIN, SIGNAL =   1; EXPRESSED IN FETAL LIVER, SIGNAL = 0.99; EXPRESSED IN ADULT LIVER, SIGNAL = 0.95; EXPRESSED IN HELA, SIGNAL = 0.91; SWISSPROT HIT: O43103, EVALUE 7.30e-01; EST_HUMAN HIT: BF574163.1, EVALUE 2.70e+00
ctccttgtatgataccgaccggatcctatccatggacaataacaatcttgaatgtgttcacaatgcctgggggaataagtcccaatccggccaggaaatgctgatctccttccgacgggatctgcttgtctcacctcagcgccagttgcttccctttacaatctctttgctggccaggttagaacatgtgctaattct

SEQ ID NO: 27139 - DNA, 171 bp, Homo sapiens
  MAP TO AC004624.6; EXPRESSED IN LUNG, SIGNAL = 0.62; EXPRESSED IN HELA, SIGNAL = 0.77; EXPRESSED IN BRAIN, SIGNAL = 0.96; EXPRESSED IN BT474, SIGNAL = 1.1; EXPRESSED IN BONE MARROW, SIGNAL = 0.7; EXPRESSED IN FETAL LIVER, SIGNAL =   2; EST_HUMAN HIT: AW157571.1, EVALUE 8.00e-92
atttacagactggaaatggaagagaaccagctgaagaatgaaatgcaagacgccaaggatcagaacgagctgttagaattcagagtgctagaactcgaagtaagagactctatctgttgtaaactctcaaacggagcagacattctctttgaacccaaactgaaattcatg

SEQ ID NO: 27140 - DNA, 528 bp, Homo sapiens
  MAP TO L05367.1; EXPRESSED IN BRAIN, SIGNAL = 1.6; NT HIT: M55267.1, EVALUE 0.00e+00; EST_HUMAN HIT: AW119014.1, EVALUE 0.00e+00; SWISSPROT HIT: P22794, EVALUE 2.00e-93
cctacttgttttgatcgtctgagagaagagactttgtttgccaaaaccacagttgatagaaatagaaaggtacagataagaaaaagcactgcaattataattaagcaaattagcatagccatgttgttgttgttttccgcacagacatcctttttgaaaatttcaccatgacttttgcttgtgttttcaatgctctgtactgttgaaggactgttgctgacgacagaaggtatataaagctcctgttcagatttagaagttaaagctacgatgtgagatgtttcaggcatgtttgtagaattacctttataatctacttcaggagttatagggtttgtgttaatgttttcattttggtttctgcctgtcttgttttgaataactgaatcccaggaagaagtactgttagcccacagacgggtatagtttgcttttgttccaggagacaaagaaaaaactgttgtcatcagaaaggcaagatgtaggtaatgtcctgtgtgttccatgtccgtgggcatacttggcaat

SEQ ID NO: 27141 - DNA, 151 bp, Homo sapiens
  MAP TO AC009301.1; EXPRESSED IN FETAL LIVER, SIGNAL = 0.57; EXPRESSED IN HELA, SIGNAL = 0.97; EXPRESSED IN ADULT LIVER, SIGNAL = 0.98; EXPRESSED IN BRAIN, SIGNAL = 0.74; EXPRESSED IN BT474, SIGNAL = 2.3; EXPRESSED IN HBL100, SIGNAL = 0.81; EST_HUMAN HIT: BE898644.1, EVALUE 5.00e-66; NT HIT: AB032956.1, EVALUE 1.00e-12; SWISSPROT HIT: P34678, EVALUE 6.00e-14
tttatatacgtgttggcatttccatcagggaaaacgtaggggtgcttcttccggaagacgtgccccactcggctgcaggggacgatctctaggctgcccccgcacatccacactcggaaggagatttctgcaagacagtcacgcccctcct

SEQ ID NO: 27142 - DNA, 291 bp, Homo sapiens
  MAP TO AF064862.1; EXPRESSED IN BRAIN, SIGNAL = 1.1; EST_HUMAN HIT: BF348620.1, EVALUE 0.00e+00; SWISSPROT HIT: Q02173, EVALUE 1.70e-02; NT HIT: AF023449.1, EVALUE 0.00e+00
agccccagttctcaaaggagcaggagctgtttgccagcatcaacaccacacgcgtgaggctgaacctcattggctggaatgatggcggctgccccatcacctccttcacactagagtacaggccctttgggaccacagtttggaccacagctcagaggacctctctctccaagtcctacatcctgtatgacctgcaggaagccacctggtatgagctgcagatgcgggtgtgcaacagtgcgggctgcgcggagaagcaggccaacttcgctacgctgaactacgatggca

SEQ ID NO: 27143 - DNA, 408 bp, Homo sapiens
  MAP TO AL109806.7; EXPRESSED IN LUNG, SIGNAL =   1; EXPRESSED IN BRAIN, SIGNAL =  14; EXPRESSED IN HELA, SIGNAL = 2.5; NT HIT: gi11421001, EVALUE 0.00e+00; EST_HUMAN HIT: AA588030.1, EVALUE 2.60e-01; SWISSPROT HIT: Q61140, EVALUE 3.00e-14
aatcctggccctcttatacctcagccttcgagtcaacagactcctgagaggaaaccccgcttatctgaacactgccggctctactttggggcgctcttcaaagccatcagcgcatttcacggcagcctcagcagcagccagcccgcggagatcatcactcagagcaagctggtcatcatggtgggacagaagctggtggacacgctgtgcatggagacccaggagagggacgtgcgcaacgagatcctccgtggcagcagtcacctctgcagcctgctcaaggacgtagcgctggccactaagaatgccgtgctcacgtaccccagccctgccgcgctggggcacctccaggcggaggctgagaagctggagcaacacacgcggcagttcagagggacactgggatga

SEQ ID NO: 27144 - DNA, 382 bp, Homo sapiens; identical to SEQ ID NO: 10522
  MAP TO AL021877.1; EXPRESSED IN BT474, SIGNAL = 0.92; EXPRESSED IN LUNG, SIGNAL = 0.95; EXPRESSED IN BRAIN, SIGNAL =   1; EXPRESSED IN PLACENTA, SIGNAL = 0.94; EXPRESSED IN ADULT LIVER, SIGNAL = 1.3; SWISSPROT HIT: P34956, EVALUE 6.00e+00; NT HIT: U66059.1, EVALUE 3.00e-28; EST_HUMAN HIT: BE144999.1, EVALUE 1.00e-19

SEQ ID NO: 27145 - DNA, 324 bp, Homo sapiens
  MAP TO AC006362.2; EXPRESSED IN BRAIN, SIGNAL = 0.9; NT HIT: AF014958.1, EVALUE 2.00e-01; EST_HUMAN HIT: AA297940.1, EVALUE 5.20e-02; SWISSPROT HIT: P29059, EVALUE 3.50e+00
tttcagaatgctgctgatctaagctgggctggcctcccagctatagttggggctcaggtcttctccacccagctcccagctttcagttttctggggccagcagacgaccctgagtatatccttctcttagcagtggtgaaagtggaaacacgcagtacttctggaggcctgggggagctgaggctcactgtcccttctgccctcttcccactggccaagacaagtcacatcgccaatctggacagacctgggacggggatggatgctctgcctctcttggtgcaaactaccaagtctcatggtgattttgaggacaggaaaggg

SEQ ID NO: 27146 - DNA, 856 bp, Homo sapiens
  MAP TO AC004925.1; EXPRESSED IN BRAIN, SIGNAL = 2.7; EXPRESSED IN BONE MARROW, SIGNAL = 1.1; EXPRESSED IN HELA, SIGNAL = 1.8; EST_HUMAN HIT: BE967533.1, EVALUE 0.00e+00; SWISSPROT HIT: P21451, EVALUE 7.00e-16; NT HIT: Y12477.1, EVALUE 0.00e+00
gacaccgggaataaatgtcttctatgttcccccacaggtcgcttctctgggagtcaccactttcaccttatgtgctctgtgcatagaccgcttccgtgctgccaccaacgtacagatgtactacgaaatgatcgaaaactgttcctcaacaactgccaaacttgctgttatatgggtgggagctctattgttagcacttccagaagttgttctccgccagctgagcaaggaggatttggggtttagtggccgagctccggcagaaaggtgcattattaagatctctcctgatttaccagacaccatctatgttctagccctcacctacgacagtgcgagactgtggtggtattttggctgttacttttgtttgcccacgcttttcaccatcacctgctctctagtgactgcgaggaaaatccgcaaagcagagaaagcctgtacccgagggaataaacggcagattcaactagagagtcagatgaactgtacagtagtggcactgaccattttatatggattttgcattattcctgaaaatatctgcaacattgttactgcctacatggctacaggggtttcacagcagacaatggacctccttaatatcatcagccagttccttttgttctttaagtcctgtgtcaccccagtcctccttttctgtctctgcaaacccttcagtcgggccttcatggagtgctgctgctgttgctgtgaggaatgcattcagaagtcttcaacggtgaccagtgatgacaatgacaacgagtacaccacggaactcgaactctcgcctttcagtaccatacgccgtgaaatgtccacttttgcttctgtcggaactcattgctga

SEQ ID NO: 27147 - DNA, 113 bp, Homo sapiens
  MAP TO AC009666.2; EXPRESSED IN FETAL LIVER, SIGNAL = 2.1; EXPRESSED IN BONE MARROW, SIGNAL = 0.98; EXPRESSED IN BRAIN, SIGNAL = 0.93; NT HIT: AF167459.1, EVALUE 1.60e-02; SWISSPROT HIT: P15265, EVALUE 1.80e+00; EST_HUMAN HIT: AW103719.1, EVALUE 4.00e-03
gggtgatgcacagcagggcaggggtgagggggacacgtggcatcgacggatggggaggcagcatcattcgcattggccaaaaggtggaagcaaaccaagtaaccacagatgga

SEQ ID NO: 27148 - DNA, 637 bp, Homo sapiens
  MAP TO AC007326.22; EXPRESSED IN FETAL LIVER, SIGNAL = 0.84; EXPRESSED IN ADULT LIVER, SIGNAL = 0.7; EXPRESSED IN BRAIN, SIGNAL = 1.1; EXPRESSED IN PLACENTA, SIGNAL = 0.8; EXPRESSED IN LUNG, SIGNAL = 0.76; EXPRESSED IN HELA, SIGNAL = 1.2; EXPRESSED IN BT474, SIGNAL = 1.1; EXPRESSED IN HBL100, SIGNAL = 0.72; NT HIT: Y08032.1, EVALUE 0.00e+00; EST_HUMAN HIT: AI635368.1, EVALUE 0.00e+00; SWISSPROT HIT: P10263, EVALUE 1.00e-105
tatggaatgattgggccattattaaagcagctttagaaccatttcaaacagaagaagatagcgtttcagtttctgatgcccctggaagctgtttaatagattgtaatgaaaagacaaggaaaaaatcccagaaagaaacggaaagtttacattgcgaatatgtagcagagccggtaatggctcagtcaacgcaaaatgttgactataatcaattacaggaggtgatatatcctgaaacgttaaaattagaaggaaaaggtccagaattagtggggccatcagagtctaaaccacgagggacaagtcctcttccagcaggtcaggtgcccgtaacattacaacctcaaaagcaggttaaagaaaataagacccaaccgccagtagcctatcaatactggcctccggctgaacttcagtatcggccacccccagaaagtcagtatggatatccaggaatgcccccagcaccacagggcagggcgccataccctcagccgcccactaggagacttaatcctacggcaccacctagtagacagggtagtgaattacatgaaattattgataaatcaagaaaggaaggagatactgaggcatggcaattcccagtaacgttagaaccgatgccacctggaga

SEQ ID NO: 27149 - DNA, 152 bp, Homo sapiens
  MAP TO AF165124.1; EXPRESSED IN BT474, SIGNAL =   1; EXPRESSED IN BRAIN, SIGNAL = 0.99; EST_HUMAN HIT: AI207936.1, EVALUE 4.00e-04; SWISSPROT HIT: P18507, EVALUE 1.00e-24; NT HIT: gi11417214, EVALUE 1.00e-80
ctcctatatcaggccgaagtttattgtcatatccttccagcaggttgtttaagatgacagtgacatcaccctcaggaacttttggagtcaagacccatgttttgttagaagcataatcttcatagtcatcatcagatttctggctagtgaag

SEQ ID NO: 27150 - DNA, 116 bp, Homo sapiens
  MAP TO AC009411.1; EXPRESSED IN BRAIN, SIGNAL = 0.93; EXPRESSED IN BT474, SIGNAL = 0.95; EXPRESSED IN FETAL LIVER, SIGNAL = 0.9; NT HIT: S57565.1, EVALUE 2.20e-01; SWISSPROT HIT: P43695, EVALUE 3.10e+00
ggcctgggatggctggtgatcacctctggatgggagagtctcacaagcatggtcgccttccaacccacaacctttctctgaatccggatgtccacccataggaccctcatgagtag

SEQ ID NO: 27151 - DNA, 115 bp, Homo sapiens
  MAP TO AL035451.5; EXPRESSED IN BRAIN, SIGNAL = 0.96; NT HIT: D44598.1, EVALUE 2.10e-01; EST_HUMAN HIT: AA613145.1, EVALUE 3.00e-04
ttactgagcatccttgacatccagtttctgaattctttgtctcatttcagacatttcaattgaaaagagattcttagaaaatagttgtgtttgtatgaatgtgtatctcttaaca

SEQ ID NO: 27152 - DNA, 208 bp, Homo sapiens
  MAP TO AC005037.2; EXPRESSED IN ADULT LIVER, SIGNAL = 0.69; EXPRESSED IN BRAIN, SIGNAL = 1.1; EXPRESSED IN BT474, SIGNAL = 1.4; EXPRESSED IN HBL100, SIGNAL = 1.7; EXPRESSED IN FETAL LIVER, SIGNAL = 0.89; EXPRESSED IN HELA, SIGNAL =   1; EST_HUMAN HIT: BE727240.1, EVALUE 1.00e-113; NT HIT: gi11141898, EVALUE 1.00e-102; SWISSPROT HIT: P54472, EVALUE 3.00e-11
caagccctttagccaaccagttgttgacgccctggggcgcagcatcataggctgtatgaggagagtagataccgactctgttctccagagcccggatcaccaggcgctccttccatgtgttccaggttatgcgcttcatgggtcggaagataggcggatggtaggagagaatgaggtctgccttcttttgcagcacctcctccatcac

SEQ ID NO: 27153 - DNA, 267 bp, Homo sapiens
  MAP TO AP000199.1; EXPRESSED IN BRAIN, SIGNAL = 1.4; EST_HUMAN HIT: AI659715.1, EVALUE 5.00e-91; SWISSPROT HIT: P39086, EVALUE 4.00e-38; NT HIT: gi11526170, EVALUE 1.00e-120
ttcttcaactccaagaagaagggaagctgcatatgatgaaagagaagtggtggcgtgggaatggctgccccgaggaagacaacaaagaagccagtgccctgggagtggaaaatattggaggcatcttcattgttctggctgccggactggtcctttctgtatttgtagctattggagaattcatatacaaatcacggaagaataatgatattgaacaggtgagtcatctctttctaggactggttagtttatagtttgcattatctg

SEQ ID NO: 27154 - DNA, 80 bp, Homo sapiens
  MAP TO AC011310.2; EXPRESSED IN BRAIN, SIGNAL = 0.92; EST_HUMAN HIT: BE065393.1, EVALUE 6.50e-01; SWISSPROT HIT: Q9QYB0, EVALUE 9.60e+00
cgttcttggtgctctcggtaattctgttgccaaggatgccactgagaagagttaccttctccagggatttaagaaccaca

SEQ ID NO: 27155 - DNA, 190 bp, Homo sapiens
  MAP TO AL117374.5; EXPRESSED IN ADULT LIVER, SIGNAL = 1.1; EXPRESSED IN BRAIN, SIGNAL = 0.95; EST_HUMAN HIT: Z24994.1, EVALUE 4.20e-02; NT HIT: gi11430271, EVALUE 2.80e-02; SWISSPROT HIT: P31039, EVALUE 7.40e-01
cgtcaccctgctgacttgggtgaccaacgtgtcccagttttccaagaactttcccagtttctgcactggaagccctgaatcctggcaaaccacgacagctggtcaccccagcaccagcccaggctctggcgggggcttcactgagctcctggagaaggaccttaaaaatcctctatccaccctggacacc

SEQ ID NO: 27156 - DNA, 136 bp, Homo sapiens
  MAP TO AL121575.6; EXPRESSED IN BRAIN, SIGNAL = 1.1; SWISSPROT HIT: P16252, EVALUE 5.90e-01; EST_HUMAN HIT: BF676078.1, EVALUE 8.00e-49; NT HIT: AB033042.1, EVALUE 5.00e-71
caccacctcttcgaaaatgctctgcagttgcgtctccatctgtactatcacccccgcctttccagggtgcccggcaaggcccggatcagactcgagctctgggaatataggggcagaggggcggagacctctggag

SEQ ID NO: 27157 - DNA, 165 bp, Homo sapiens
  MAP TO AL121588.14; EXPRESSED IN BRAIN, SIGNAL = 2.4; NT HIT: Z69893.1, EVALUE 8.20e-02; EST_HUMAN HIT: AA121953.1, EVALUE 3.90e-01; SWISSPROT HIT: P35443, EVALUE 8.60e+00
aattctttagctccagtggcaggctcaaccctcctccagagttgcaaatcaacaagatggcaggaatcaatactgaatacaccataagcccatttccccagactgataaaagttcagatccagggcaggtgagaaggattacagaaaaggttcaacctttcatcc

SEQ ID NO: 27158 - DNA, 160 bp, Homo sapiens
  MAP TO AL035690.10; EXPRESSED IN BONE MARROW, SIGNAL = 0.94; EXPRESSED IN BRAIN, SIGNAL = 0.9; EST_HUMAN HIT: AW630780.1, EVALUE 9.40e-02; SWISSPROT HIT: P43220, EVALUE 4.00e-17; NT HIT: gi11418930, EVALUE 1.00e-62
ataagaccgagaaggccagcagtgtgtacaggtacacgccctccaccaagagccagtagtaattggccgccacacagtactgcatgagcagaaacaccaggcggcagctcagagagtcctgggggtagaggaagggtgtcatggggacaacagctctgcc

SEQ ID NO: 27159 - DNA, 171 bp, Homo sapiens
  MAP TO AL078645.18; EXPRESSED IN BRAIN, SIGNAL = 0.93; EXPRESSED IN HBL100, SIGNAL = 1.2; EST_HUMAN HIT: W92486.1, EVALUE 2.00e-07; NT HIT: AJ238394.1, EVALUE 2.50e-02
gtcatcatcatcattgtcatcatcaaagctatcactgatgcagcacttattatgcagcaggcaccattcttaatgctaaaaataaatctatgtggtgggtgccattattgtctccatctaacagatgaggaaactgaggcccagagagataacttgtccaaggcccatagc

SEQ ID NO: 27160 - DNA, 2935 bp, Homo sapiens
  MAP TO AC008174.1; EXPRESSED IN BRAIN, SIGNAL = 2.6; EST_HUMAN HIT: BF090135.1, EVALUE 7.20e-01; SWISSPROT HIT: Q62209, EVALUE 6.00e-03
cagatttagcaagttcagagacatggtcataatcagataagtcactgaaagatgattcttcaccatgtaaaaatggctgtaaatgatgatacatgatttctttcataataaaaccagctaatttactgaggaatgagcatccttttttgtctgcatctttttgtacttcagcttggaattcagatgttttcaaaatattattacatatggagtcgaccaaattttcaataggttctaactgcatactttctgcattatcctctgccatggaaagtcgaatctcatgttcagaaatttcttttataatttcatcagtcaattttgaagctgcctccacaaattcatcatccggtggaaactttttctcttttagttcattttcagtgtgagttgaagggaagacatgccctagaagcctgtaaaccatatcttctaaaagagaatgaggcaacacagtaatatatggtggcaaggcatggctatcctttgtgattatgttaagcacatttctgatgatattatcagcttggggatacgaataagaagaagactctaattctcctgaaactaatgactgcacttgataatcatatatttcttccaatagcaaataatatattttcctaccaaaacatattgtgtcactttgtataaccctatgtatttgaatcagagatttatattgatctaatacttttccatatactgagttgactattttttgaaccatttctttgtatctttctgagaaacacaaatttttatcaaagttatctgcaactaaaatctctgatgtggtgaactccagaacaattgaatttaccaatgttgtaacaatcctggtaagtttcagtttcactctatctggattttcagtaaccaacatgttatgtgaaaatgcataaagaattttgcataagagctcagaaattacttcctccaaaaagacagatgagttcacaataaaagataattctctttgtttaggatctattgctttcaatttataagtttgatcaactgctgccaaaaggagagttttatcttcagataaaaatgattgaatatgatggttaaagatttcttttattataaaactcgctatttttgaaacaggtatgtcacttatgctctttttatcttttgtaatggactggtatatatttgaatgagaaagatcagcataaatggaatcaaccatagactggatatcttttgctgaaatcatactctgttttttattcccatatttaataatacatatttcatgttttgaaattattgacataatttcatttatcagttttatcactgtattacttaagtctgatttagtagtatctgactgctctgcactggtgttcaatggacttatctgagatgtaagctgagtaactattttttccaaatgactatgtgataacatagtggtatacattgttgaagcttgtctttggaatcttgatttacttatatcatattgaactctttgtattaaaacatttgcactgagtttggaatgtgatttaaaaggcagatttgctataagatctggatgaatttggaaatcaaaaatttcagccaggatgatattagttattcttgcagccaatgtctttgtgtcatttagaaaatctttattgggcacgacttccatttcatattcttgcaaaactttgctgtacaccatgtcaacaattgttttgactacatccctctccactggaggtaaacacagtctttcctcagtattatctataatgctaacttgggcttttgagaattcccctgtaatcaaatgtatgagttcttcagctttctcaaacagttcatcttctgaatctcttatggattttgtttgtacaatgcctactaccctgtggaatatttttcttaaaaccccagagattacatcttccaagaatgttgaagagtaaacactggtataaaataactgccttctctcatcatcaaaatatgtgtctgatgaagataatgattttccactcacaaatggctgaagatgtttttgacagatatgtttaatgatgaaacctgctattctatctataagaatgtcattactgcttgtgatattttgcacagctgattcttgagaaccagaggtttgcacaacatttgcaaatactgaatcaacaaggtgctgaatatcatcttctgaataaataaacttggtttcttcttcctcttttgaaaatcgaatttcatgttgggaaactttcatcctaatatcactaactaggtttgaagcaatgtcattgaaattcactcttgatatatctttttgggtgtctctgtttagaaccaggctagatgcagaagaaaataatttagataatagtactctgatcatatcttctaaaaatgtgtatggcagcaaggtgttatatagaggtacactctggcttggctcagtagatttactgatgttactaaggatgtcctgaacaatattctcagccactgaattagaataggtagaagctgaaaaatccccagaaaacagtggatgaagaaggtaatctgaaatagctgctacaattaaattggtaatattttccacaaaaatgccactgtcttcagactctttatcaacagcaaggtctagcccatgctgctttaaagcatttctataaactgaggtggcaagttcatccacaatatctgtattgaaagaaaagaaagcctgttctttgtcatcatagagaatgtgaattttagctttattgaaatgcctatttatggagtttactattctttgggtcatgtttttcaactcaatttcagtgttatgctttgggctgaaaatctttgacaaaagtctggcaacaatctcccttacaaatgaatcaaggtgaatatctaaaggtgattgcttctgaggtctgtgtgactctatcacttcactcagaac

SEQ ID NO: 27161 - DNA, 156 bp, Homo sapiens
  MAP TO AC007719.1; EXPRESSED IN BRAIN, SIGNAL = 0.72; EXPRESSED IN ADULT LIVER, SIGNAL = 0.65; EST_HUMAN HIT: H26668.1, EVALUE 3.60e-01; SWISSPROT HIT: Q26422, EVALUE 5.00e-05
cagaccatgttccattggctgtgcactgtctaactgaaggtccagaaaggatgtatccctccatgcaggaataaatgactgaactagaaaatgttgtgccatcaattcggaagactttcccattggctgtggttcctgggttaccacactgcacag

SEQ ID NO: 27162 - DNA, 220 bp, Homo sapiens
  MAP TO AC006499.11; EXPRESSED IN HBL100, SIGNAL = 0.78; EXPRESSED IN BRAIN, SIGNAL = 0.74; EST_HUMAN HIT: AW661969.1, EVALUE 2.10e+00; SWISSPROT HIT: P33066, EVALUE 7.20e-01; NT HIT: U57454.1, EVALUE 2.10e+00
gtaggagaaaggtcaacactatgatcttgcatctcacagatgctctctgcaccgaccccacaagtcgctgcatgagggctctccattctattttgctccaggttaactcattcccgtgcatcccgtggacgcatggaaatgaagtgatgttaaagttctggacgaaagggatgtcagcatttgtagactccactacaagcaccaagagctcatcgctctc

SEQ ID NO: 27163 - DNA, 214 bp, Homo sapiens
  MAP TO AP000240.1; EXPRESSED IN PLACENTA, SIGNAL = 0.62; EXPRESSED IN BRAIN, SIGNAL = 0.85; EXPRESSED IN BONE MARROW, SIGNAL = 0.68; NT HIT: M23161.1, EVALUE 2.00e-09; EST_HUMAN HIT: BF246359.1, EVALUE 3.00e-09; SWISSPROT HIT: Q46108, EVALUE 1.50e+00
tgcttctttggcttcgggtaccccaaatcctccaagctcttcttgatttggtggatcttttggaaaaacttctttggtttgtctacttttgccatactcaactctcaggttttcatagccttttatctttgaagaccccactgaagataatgcagtcccctgttgtattagtccgtttttacgctgctgatagacatacccgagactggataac

SEQ ID NO: 27164 - DNA, 193 bp, Homo sapiens
  MAP TO AL008638.1; EXPRESSED IN ADULT LIVER, SIGNAL =   1; EXPRESSED IN BRAIN, SIGNAL =   1; SWISSPROT HIT: P70281, EVALUE 1.10e-01
tgggagcatactcagcaggcttcccggggcctcctgatagacaaggtcgcatcccagcagctgtgagaaaggaggcgtgccggcctggcagctgtgctgggcgccgggaggctgccagcgaacgtggcatcacacaggagagggagatgcacttctgtgaccccccgctctcaggcagtgggtgatggggcat

SEQ ID NO: 27165 - DNA, 1118 bp, Homo sapiens
  MAP TO AC005208.1; EXPRESSED IN PLACENTA, SIGNAL = 1.2; EXPRESSED IN ADULT LIVER, SIGNAL = 1.4; EXPRESSED IN BRAIN, SIGNAL =   1; NT HIT: gi11426238, EVALUE 0.00e+00; EST_HUMAN HIT: AW580480.1, EVALUE 3.00e-74; SWISSPROT HIT: P52191, EVALUE 0.00e+00
gttctaactgaaaacccaaaccaagaaatagcaacaagtctagaattcttactactacaaaactcacctggatccctaagggcacagcaaagaatgagctattacggcagcagctatcatattatcaatgcggacgcaaaatacccaggctacccgccagagcacattatagctgagaagagaagagcaagaagacgattacttcacaaagatggcagctgtaatgtctacttcaagcacatttttggagaatggggaagctatgtggttgacatcttcaccactcttgtggacaccaagtggcgccatatgtttgtgatattttctttatcttatattctctcgtggttgatatttggctctgtcttttggctcatagcctttcatcatggcgatctattaaatgatccagacatcacaccttgtgttgacaacgtccattctttcacaggggcctttttgttctccctagagacccaaaccaccataggatatggttatcgctgtgttactgaagaatgttctgtggccgtgctcatggtgatcctccagtccatcttaagttgcatcataaatacctttatcattggagctgccttggccaaaatggcaactgctcgaaagagagcccaaaccattcgtttcagctactttgcacttataggtatgagagatgggaagctttgcctcatgtggcgcattggtgattttcggccaaaccacgtggtagaaggaacagttagagcccaacttctccgctatacagaagacagtgaagggaggatgacgatggcatttaaagacctcaaattagtcaacgaccaaatcatcctggtcaccccggtaactattgtccatgaaattgaccatgagagccctctgtatgcccttgaccgcaaagcagtagccaaagataactttgagattttggtgacatttatctatactggtgattccactggaacatctcaccaatctagaagctcctatgttccccgagaaattctctggggccataggtttaatgatgtcttggaagttaagaggaagtattacaaagtgaactgcttacagtttgaaggaagtgtggaagtatatgcccccttttgcagtgccaa

SEQ ID NO: 27166 - DNA, 119 bp, Homo sapiens
  MAP TO L14561.1; EXPRESSED IN BRAIN, SIGNAL = 3.4; SWISSPROT HIT: P20020, EVALUE 8.00e-18; NT HIT: M95541.1, EVALUE 6.00e-61; EST_HUMAN HIT: AI570253.1, EVALUE 8.00e-61
ggaatcaagaagttcgattcacaactttatgacacatcctgagtttaggatagaagattcagagcctcatatcccccttattgatgacactgatgccgaagatgatgctcctacaaaac

SEQ ID NO: 27167 - DNA, 628 bp, Homo sapiens
  MAP TO AC005632.2; EXPRESSED IN PLACENTA, SIGNAL = 0.59; EXPRESSED IN BONE MARROW, SIGNAL = 0.84; EXPRESSED IN BRAIN, SIGNAL = 0.76; EXPRESSED IN HELA, SIGNAL = 0.63; EXPRESSED IN ADULT LIVER, SIGNAL = 0.7; EXPRESSED IN FETAL LIVER, SIGNAL = 0.81; EXPRESSED IN LUNG, SIGNAL = 0.93; EST_HUMAN HIT: BF124990.1, EVALUE 0.00e+00; NT HIT: AB040413.1, EVALUE 0.00e+00; SWISSPROT HIT: P45539, EVALUE 2.00e-07
gagatgtgggagccaggggcgtagtgatgcaaggatgcagggacccagggactacgacctcccaacccccggcccgcgccccgtactcacgcacggagtggcaggctacgagcttggctgcctcctcgggcaccgggcaggtggggaagagcggcttgagcaggtaggtggcgaagaccagggccacgatgtactgcgatgaaggccggatgatgagcagctcgatccagagcttgaggaaggcgggcagcgagccgtagacgtccagcatgtaggcgtagtcgccgcccgatttggagatggtggtgcccagctccgcgtagcagagcgcgcccacgatggagaagacgccgcacgcggcccacaccaccagcgccagccccggcgagcctgcctccttgagcacgcccgtgggcgtcacgaagatgcccgagctcatgatggcgaccacgatgacggccacgcccttgagtagcgtgatgttcccctgcagggtcacgccctcgccctcgcctgccggcgccgcgccgtccgcgcgcttggcggccatcatcttctcccgcgcctcttccttctcctcggccaccggggccgctagcgcgcgccgcttcgggcccgcacccgccat

SEQ ID NO: 27168 - DNA, 267 bp, Homo sapiens
  MAP TO AL121760.4; EXPRESSED IN BONE MARROW, SIGNAL = 1.1; EXPRESSED IN BRAIN, SIGNAL = 1.8; EXPRESSED IN PLACENTA, SIGNAL =   1; EXPRESSED IN HBL100, SIGNAL = 0.99; SWISSPROT HIT: Q43075, EVALUE 1.40e+00; NT HIT: U69097.1, EVALUE 5.50e-01
agcaaacctaccaaacacagaatcattgatgacacagagacaatggcccgactcatggccctatctgccactctaagccattggactcctgtgagcctcaccaggttacacagggaagccccaacctgtgactcacaagagctcactcccaagtctgctctgccagatgctacggtggctctggttgtcactattatgtggactattatgtctactgtgcacctgccagatatcctctgggtacattggtgccataccttcaccctg

SEQ ID NO: 27169 - DNA, 151 bp, Homo sapiens
  MAP TO AC007832.1; EXPRESSED IN PLACENTA, SIGNAL = 0.94; EXPRESSED IN BRAIN, SIGNAL = 1.1; SWISSPROT HIT: P87183, EVALUE 8.70e+00; NT HIT: AF157623.1, EVALUE 5.40e+00; EST_HUMAN HIT: AU140261.1, EVALUE 8.00e-03
aggaatcataggaaaagcactaagaaaggtcataaaaataggccagaaaagtgtgggagtaaagggagacgaagaggatttcaagaaacagggaaagtttaacaaagtcaactaccaaggagtggtccagtcagacaaggaatggaaagct

SEQ ID NO: 27170 - DNA, 102 bp, Homo sapiens
  MAP TO AC007857.1; EXPRESSED IN PLACENTA, SIGNAL = 0.78; EXPRESSED IN BONE MARROW, SIGNAL = 0.73; EXPRESSED IN ADULT LIVER, SIGNAL = 0.72; EXPRESSED IN BRAIN, SIGNAL = 0.81; NT HIT: AL163268.2, EVALUE 3.00e-12; EST_HUMAN HIT: AA761372.1, EVALUE 8.00e-05
gagagctttgtttgcatctgctgtttttgaattgccttcagctcaaaataatcttcatgctcaagtggcatatttgggggttgcatactctgaacccctttg

SEQ ID NO: 27171 - DNA, 169 bp, Homo sapiens
  MAP TO AJ009612.1; EXPRESSED IN PLACENTA, SIGNAL =   1; EXPRESSED IN ADULT LIVER, SIGNAL =   1; EXPRESSED IN FETAL LIVER, SIGNAL =   1; EXPRESSED IN BONE MARROW, SIGNAL = 0.92; EXPRESSED IN BRAIN, SIGNAL = 1.5; EXPRESSED IN HELA, SIGNAL = 0.99; NT HIT: AF096268.1, EVALUE 6.00e-09; EST_HUMAN HIT: AW291799.1, EVALUE 2.00e-07; SWISSPROT HIT: P38773, EVALUE 6.50e+00
aagcatcgtaaggaagactttattcaggaccattaccataggtgtagggacctctgctatgagattttgcagttgcagggagagagagattgagctcaactccaattacagcatgggcaagtgggaattcgttgctaaggagcagggtgggggtcagcggatagaaact

SEQ ID NO: 27172 - DNA, 744 bp, Homo sapiens
  MAP TO AC011231.1; EXPRESSED IN BRAIN, SIGNAL =   1; EXPRESSED IN BONE MARROW, SIGNAL = 0.89; EST_HUMAN HIT: BE295719.1, EVALUE 6.00e-53; NT HIT: AF133643.1, EVALUE 1.90e+00; SWISSPROT HIT: P35446, EVALUE 6.00e-10
gtccgtggggaaggtgtacaggagactgtggtcccggaggagtccagagtcgggcagtgtggtgttttcatgttgacgggtggacaagtcacctgtctaactgtggtgagagcaacaggcctccaaaggaaagaagttgtttccgagtttgtgactggcacagtgacctctttcagtgggaggtttctgactggcaccactgtgtgcttgttccttacgctcgcggtgaagtcaagcctcggactgcagagtgtgtgacggctcagcatggactgcagcaccggatggtgcgctgcattcagaagctgaaccgaactgtggttgcaaatgaaatatgcgaacactttgcccttcagcctcctacagaacaggcttgcctcattccttgtccccgggattgtgtagtatctgagttcttaccatggtccaactgtagcaagggatgtgggaagaaattgcagcatagaactcgcgcggtcatagctccccctctctttggtggtttgcaatgtccaaatctgactgagtcaagagcctgtgatgctcccatttcctgtcctcttggggaagaggaatatacatttagccttaaggttggaccatggagtaaatgcagactgcctcatcttaaagaaattaatccaagcggaagaactgttctggattttaactctgattcaaatgagcgagtcacctttaaacatcaaagttacaaagcacatcatcattcgaagtcttgggcaa

SEQ ID NO: 27173 - DNA, 2069 bp, Homo sapiens
  MAP TO AL031117.1; EXPRESSED IN FETAL LIVER, SIGNAL =  18; EXPRESSED IN ADULT LIVER, SIGNAL = 2.6; EXPRESSED IN LUNG, SIGNAL =   1; EXPRESSED IN BRAIN, SIGNAL = 0.95; EXPRESSED IN PLACENTA, SIGNAL =  17; EXPRESSED IN HBL100, SIGNAL = 1.2; EST_HUMAN HIT: AI015247.1, EVALUE 2.00e-22; NT HIT: AL163283.2, EVALUE 2.00e-20; SWISSPROT HIT: P11976, EVALUE 2.50e+00
cctttttcttaacagccctaggaagagttgcatcctgttgactacagtaaggcattctgattttccaaagctgtgcagagcacaattaattgcctagactcacctgccaaccttctgcacaggcaaaacatagagttatctattggtggaattcagggtgaagaggagggcagagagtgtctatgaggaggagtggccagagtggtaaagaagagggaaacaccgtggcaaggaacacaaaccacactgatttttcagtcttgccaacagtgtgccttgcctatcaagaatggcagggaaattttgcaaaatgagttaataaaatctcagtaaacataacagatgaggctttttctaaatgttactgctactcgtattttggaacatttcccacctaccagccctggaccagctccagtcagaggttgacacagagttggcttggtgaactgcagcaacctttcggaaacaatcctgacttttttttttttttttatcaaactcatgtttctggggttatcttgaagccttacttgggggctttttatgacaacatttttgcctgcgcaacaagttccttggttctgtagtgccttttttttttttttgcacagttctctttattcaatgccctgaacttccctaaaatctgtgctgaaataataacaatggcacttacatttgtatggtatttttactgtttttgaaacacttccacatttatggtattttatgttttctttcatacttgtaattctcctctcaactcaatccgatcaggcttccattcccattgctccaccaaggctgctcttgttaaggccaacaatggcttccatgttgtcaaatccaatggtccttccctggcctcatcttactcaacccatcagcaacactggatataagttgatcgagttcttttccctaaatacttttccttctttgcttctgtgagatcaccatcttctgaatttccttctgcttcaatctcttttgctagattcttttccttttttagacttccagtatttgaaagccccagtgctcaggtcttacatctcttttattttttatttacatatttttactaggtgatcatatccagttccaaggctttacacactgctatggtttcaatgtttgtcccctccaaaactcatgttgaaacttactccccaatgtggcattattgaaaggtggggttttttagagatgattgggtcatgaaggctctggatgaatgggttaatggattaatgagttaccatgggaggagaactgatggcttttataagaagagaaagtgagacctgagctagcatgttcagtccccttaccatgtgatgccctataccacctcagaactctgcagaaagtccctaccagcaagaaggccctcaccagatttggccccttgaccttgaacttcacagcctccaggactgtaagaaataaattatgtttctttatatattacccagcttcaggtaatctgttataaacaacagacaattaactaagacacatgccatatatatactgaatactcacacattgatatctccaggtccttcttacccctgtactctagacatgtatttccatccaactgcctgttcaatatctccacttgcttgtctgataggcatcccatgtttaatatgcccaagactaaactgttatttctctcctccatattttacttcccttcagctttccttatcttaaagaaaaggcacaattctcacaattacccaaaccagaaacctgagagtcatttttcattaggagccacttttctccctctccctggtcacggtactagtctaaaatacactacaacatagcctcataactgttctctaggcagcatgccctccccatgccccacaaatacctattctgtgttgcataaagcagtcagagtagtattttacaattttaatcaggaatatcactcttctgtttaaaacccttgaaagtctgcccatcactgatagaataaaatccaaacattttagctccctgggtcggggaagggcagcactcatctctatagctccaggcca

SEQ ID NO: 27174 - DNA, 1158 bp, Homo sapiens
  MAP TO AC006239.5; EXPRESSED IN BRAIN, SIGNAL = 2.7; NT HIT: gi11429553, EVALUE 0.00e+00; SWISSPROT HIT: P04196, EVALUE 2.00e-04; EST_HUMAN HIT: BF348205.1, EVALUE 0.00e+00
gacaattcagcagtggcttgcaagggtccagtcactcctctactgtaatgagaatgggttttggggaaccttcctggagagccagcggagctgcgtgtgccacggcagcaccacgctgtgccagcgccccatcccctgcgtgataggcgggaacaacagctgcgccatgtgcagcctggccaacatctccctctgcggctcctgcaacaagggctacaagctgtatcgaggccgctgtgaaccacagaacgtggactcggagcggagcgagcagttcatcagctttgagactgacctggacttccaggacctggagctgaagtacctgctgcagaagatggactcacgcctctacgtccacaccaccttcatcagcaacgagatccgcctcgacaccttctttgaccctcggtggcgcaagcgcatgtccctcactctcaagagcaacaagaaccgcatggacttcatccacatggtgatcggcatgtccatgcgcatctgccagatgcgcaacagcagcctggaccccatgttctttgtctatgtcaacccctttagcgggagccattcggagggctggaacatgcccttcggggaatttggctacccacgctgggagaagatccgtctccaaaacagccagtgctacaactggactcttttgctgggcaatcggtggaaaacatttttcgagacggtccacatctacctacgtagtcggactcggctacctaccctactgcgaaatgagactggccagggccccgtggacctgtcggatccctccaagaggcagttctacatcaagatctcagacgtgcaggtgtttgggtatagcctgaggttcaacgccgacctcctgcgcagtgcagtgcagcaggtcaaccagtcctacacacagggcggccagttctattcctcttcgtcggtgatgctcctcttgttggatattcgggaccgaattaatcgcctggcccctcctgtggccccggggaaaccccagctggacttgttctcctgtatgctgaaacaccgcctgaaactgaccaacagcgagatcatcagggtgaaccacgccttggacctgtacaacacggagatcctcaaacagtcggaccagatgacagccaaactctgctaacccgggactccttgcca

SEQ ID NO: 27175 - DNA, 762 bp, Homo sapiens
  MAP TO AC004624.6; EXPRESSED IN BRAIN, SIGNAL =   1; SWISSPROT HIT: P35748, EVALUE 2.00e-04; NT HIT: AP001514.1, EVALUE 1.20e-01; EST_HUMAN HIT: BE563260.1, EVALUE 7.30e-01
cctctgcaaggtgacttccctctccaggacatggaccctgcgtagaaggtgctcgttctccccacttaaggcccggatcatgtcttctattcctagcacgatatcctttatcagctctttataactgacgccaagctccgagatcagtgtctggagcttccagttttccagggtgacttgctccatcgtgtctttggatttcctgacactctcagacgtggctttctggagttggcccagattccctttcagtgtttcattttcctcttcaagctccaaaattttgcagtaactcttcccattgcagtcttcaaggtcagagattgcctgtaaatattgatccagttctttctttaactgagagatgtcccctaccagcctgtggttatcccgctcgagcctggatatttttgtcacctctctctctctctctctttcaagggcgcacactctttcatggaacctctcttggtctccgtgaagtttggtgttgtcatgtaaaatctggcttctctgtttcttcaatccagaaatgagctgatgaaacctgctcctcactctctcgagggcaccccagggctcagcaggcccctgtggagggtttgggctggcttcatcccaatgaggcagtgtccctgggttaccaggaacttcgctggtgcccagggccgtggtctttcccggcttatcaccttcaccactctctttagacttcgcttcttcattagaacaaataccccaatttccccaaacctgctgaga

SEQ ID NO: 27176 - DNA, 113 bp, Homo sapiens
  MAP TO AF186191.1; EXPRESSED IN BRAIN, SIGNAL = 1.1; EXPRESSED IN BONE MARROW, SIGNAL = 0.92; EST_HUMAN HIT: BF316967.1, EVALUE 1.40e+00; NT HIT: AE001526.1, EVALUE 2.10e-01; SWISSPROT HIT: Q00664, EVALUE 6.90e+00
cttgttgcaggtttcaaccagacataccaacggtgacagggaagatgcctccacctgcatcttccacctgctcatggctctgtgaccattcactttaagagagggacaaaaac

SEQ ID NO: 27177 - DNA, 193 bp, Homo sapiens
  MAP TO AL031431.8; EXPRESSED IN BRAIN, SIGNAL = 0.94; EXPRESSED IN HBL100, SIGNAL = 0.67; EXPRESSED IN LUNG, SIGNAL = 0.89; EXPRESSED IN HELA, SIGNAL = 0.69; NT HIT: AB026898.1, EVALUE 7.10e+00; EST_HUMAN HIT: AW966015.1, EVALUE 1.00e-105; SWISSPROT HIT: P12735, EVALUE 3.80e+00
aagtctccagggagcaatgtctccagctcaagacaaaggcaatggcagcagtccggctaggatgccaggccagagtggtagagccaccccccaagttgtcagctgccacactcatgatcggtctcctcctgaggaatgtcctggggacgctgggcagggtgggctggtggctggagttctccttgaccttgtg

SEQ ID NO: 27178 - DNA, 166 bp, Homo sapiens
  MAP TO AC007126.5; EXPRESSED IN BRAIN, SIGNAL =   1; SWISSPROT HIT: P37161, EVALUE 5.00e+00; EST_HUMAN HIT: BE798380.1, EVALUE 2.00e-03; NT HIT: X86780.1, EVALUE 1.30e+00
ctttaccgaggtccacttgctgatggacacacagagttatttacgcctctgcatgtcccaggcagctctcatcctctccccttgccattcattcccatccctgcttctccacctgcgttccctattggagtcagtggcactattgtgcatcccattacccaactag

SEQ ID NO: 27179 - DNA, 156 bp, Homo sapiens
  MAP TO AC008430.2; EXPRESSED IN BRAIN, SIGNAL = 1.1; SWISSPROT HIT: P70490, EVALUE 3.00e-13; NT HIT: gi5031660, EVALUE 5.00e-83; EST_HUMAN HIT: AW965338.1, EVALUE 6.00e-83
gtggatcttcttgttccaaccaaagtgactggcatcattacacaaggagctaaagattttggtcatgtacagtttgttggctcctacaaactggcttacagcaatgatggagaacactggactgtataccaggatgaaaagcaaagaaaagataag

SEQ ID NO: 27180 - DNA, 150 bp, Homo sapiens
  MAP TO AC006020.2; EXPRESSED IN LUNG, SIGNAL = 3.7; EXPRESSED IN BRAIN, SIGNAL = 0.93; EST_HUMAN HIT: R59633.1, EVALUE 5.00e-78; NT HIT: gi4506328, EVALUE 3.00e-78; SWISSPROT HIT: P23471, EVALUE 6.00e-24
gcagaagatgaatttgtttactggccaaataaagatgagcctataaattgtgagagctttaaggtcactcttatggctgaagaacacaaatgtctatctaatgaggaaaaacttataattcaggactttatcttagaagctacacaggta

SEQ ID NO: 27181 - DNA, 203 bp, Homo sapiens
  MAP TO AP000117.1; EXPRESSED IN BRAIN, SIGNAL = 0.69; NT HIT: gi11526214, EVALUE 1.00e-87; EST_HUMAN HIT: AV687734.1, EVALUE 1.20e-02; SWISSPROT HIT: P54099, EVALUE 3.70e+00
tgcacagtgggaagctctacaaggccaagagcaacaaggagctgtatggcttccttttcaacgacttcctcctgctgactcagatcacgaagcctttggggtcttctggcaccgacaaagtcttcagccccaaatcaaacctgcagtataaaatgtataaaacagtaagttggattctagattttgcattatcagggttgacg

SEQ ID NO: 27182 - DNA, 508 bp, Homo sapiens
  MAP TO AL121758.4; EXPRESSED IN BRAIN, SIGNAL = 0.91; EXPRESSED IN BONE MARROW, SIGNAL = 0.91; EST_HUMAN HIT: AU144395.1, EVALUE 1.20e-01; NT HIT: AJ272265.1, EVALUE 5.00e+00; SWISSPROT HIT: P21997, EVALUE 1.10e+00
gtcctatgtattgggtaaggatttattatatgtagtaaaaggtaaaacattcatggaaataataaacatcaggattgtggcttctaagagggtggatggggatggtggggagggataccagggaccctctgtattagcaatcgatcctgcattagaaatcatcccaaaacataatgttttcaaagtactaacagtcattttttatatctcacagtttctgaaggcaggaatatgggcatggtttagctgggtggttctggtcctcaggaagctaaattcagctgtcagctgggcctgcagtcatctgaaggcctatcgggttggggagttggagggtaagctggagaatttgctgccaagccaaagggggttcatctgggtggctagcaaatttgtgatggttgttgatcagggactgggaagaggggagagggcctcagttcctctccatgtgggcccgcccatgcatcttgggttctatcacaacatggtggctggattccaaaag

SEQ ID NO: 27183 - DNA, 1191 bp, Homo sapiens
  MAP TO AC004886.1; EXPRESSED IN BRAIN, SIGNAL = 2.1; NT HIT: AB011131.1, EVALUE 0.00e+00; EST_HUMAN HIT: AU123733.1, EVALUE 0.00e+00; SWISSPROT HIT: P20393, EVALUE 1.80e+00
cttcactgtctgacatggcatgttggaagtcatccatgatgaatgctatgtcacggtcatagcctcgagtccgtgattcttccctcatgtgttgctgaacttcaggcaatgagtggcttgatccaaactgatccctggtgtctgcagatattggtggcaggggtccagctgcagccctggccattcccattggctggccaacaggactgagtgggctttcttcttcagaattctgggccacaattggtattcttcctctactttgactaattggcaaactggtcggcttagttctggcagaggatgatgcatgactaaaggaaacatctagagcttcagcctcttgagctttcagtcttagggaagagctagaagaatcccttttaattgataaatcaagcccatagacagaggaaggtctggaggaaggtctggacctgctgccactactgtatggcttatccgcttcatcctgcagagctgagcgtatggtatttcctaatgtgcccagtcctgtgccaagagaagatcccataaatttttgttggtctgtaatattttttctgaggccaaaagtgatgtcatcttgaaggagccttgccctggaggaaatgccaccaatagatgaagtgctagaagtcatatagcttgaataatcaggttcaaggtctctactttcttgaataggtgaaaattttgacattttagggtcaattagtgatttcttatgctttgactgcttttgataaagtatggctgctggcagttgttttgctgcttgtttttcaagtgtgagtctactgatgctatacttctcagattttggaaaatgtctgtagctagtatcagcatggtaataatgagaaagaccagcaaggtgatctaagctctctgtccctctacgaaattcctgtttaatctgatgtttcagaagctttaactcgtaaggatcctccattgggtcttcctccgccttcacataactatgcaatctagaggaagactgtaaaggtgctaggaaatctgtcacttcttgagaccggcgtgtctcagtggttcgaaggagacggtctgtttttgacagatccttttcatgaaggctaaatgcggtgcttaatgccgctgttcctttggtgatctctccaatgtcgtcaattaggacataatttcgtggagtatggtgatcaatat

SEQ ID NO: 27184 - DNA, 152 bp, Homo sapiens
  MAP TO AC007372.4; EXPRESSED IN HELA, SIGNAL = 0.72; EXPRESSED IN BRAIN, SIGNAL = 0.87; NT HIT: gi7549802, EVALUE 5.00e-68; EST_HUMAN HIT: AA724777.1, EVALUE 5.00e-68; SWISSPROT HIT: Q92813, EVALUE 2.00e-21
cactctccgcgagtggacttggagcggctcaacagcagcaccacgtgcttgagcagaatgaccgagtcatagagagccaggaagaggcagttggagaaaaaaactggcagaatttgcagtgtgatcagcaagtctacgctgaggatgcccat

SEQ ID NO: 27185 - DNA, 123 bp, Homo sapiens
  MAP TO AC007391.2; EXPRESSED IN HELA, SIGNAL = 0.67; EXPRESSED IN BONE MARROW, SIGNAL = 1.6; EXPRESSED IN BRAIN, SIGNAL = 0.96; NT HIT: gi9257235, EVALUE 2.00e-63; EST_HUMAN HIT: F08166.1, EVALUE 3.00e-63; SWISSPROT HIT: Q16769, EVALUE 3.00e-18
ggatcccgggtatcgctctatcagcaatggctgtaagtcattttgccacatttcagagatactggtgccttctgcaatttgccgaagagccgatgaattcaaaatggctggctggtggtaatt

SEQ ID NO: 27186 - DNA, 166 bp, Homo sapiens
  MAP TO AC007556.2; EXPRESSED IN FETAL LIVER, SIGNAL = 0.62; EXPRESSED IN HELA, SIGNAL = 1.5; EXPRESSED IN BRAIN, SIGNAL = 0.81; EXPRESSED IN PLACENTA, SIGNAL = 0.81; EXPRESSED IN BT474, SIGNAL = 0.69; EXPRESSED IN LUNG, SIGNAL = 0.76; SWISSPROT HIT: P98164, EVALUE 2.00e-26; NT HIT: U04441.1, EVALUE 7.00e-89; EST_HUMAN HIT: AU128912.1, EVALUE 3.00e-58
gtgttgtgtattacactgtgcgaggggagggctctaggtttggtgctatcaaacgtgcctacatccccaactttgaatccggccgcaataatcttgtgcaggaagttgacctgaaactgaaatacgtaatgcagccagatggaatagcagtggactgggttggaag

SEQ ID NO: 27187 - DNA, 414 bp, Homo sapiens; identical to SEQ ID NO: 10566
  MAP TO AL035594.7; EXPRESSED IN ADULT LIVER, SIGNAL = 0.75; EXPRESSED IN BRAIN, SIGNAL = 0.97; NT HIT: AP000001.1, EVALUE 1.00e+00; SWISSPROT HIT: P51592, EVALUE 5.20e+00; EST_HUMAN HIT: BE735791.1, EVALUE 1.50e+00

SEQ ID NO: 27188 - DNA, 76 bp, Homo sapiens
  MAP TO AC009226.2; EXPRESSED IN BRAIN, SIGNAL =   1; EST_HUMAN HIT: AI830923.1, EVALUE 3.50e+00; NT HIT: U72653.1, EVALUE 5.10e-01
ggcagaggcctggtcattgtaggtcatgttggctagagtaaagagcttgtgtttgattctcagggcaatgaagagc

SEQ ID NO: 27189 - DNA, 85 bp, Homo sapiens
  MAP TO AL096769.7; EXPRESSED IN BRAIN, SIGNAL = 0.79; EXPRESSED IN PLACENTA, SIGNAL = 0.64; EXPRESSED IN FETAL LIVER, SIGNAL = 0.57; NT HIT: AL163209.2, EVALUE 7.00e-16; EST_HUMAN HIT: BE061178.1, EVALUE 2.00e-16; SWISSPROT HIT: P03365, EVALUE 2.40e+00
gataccacactggtccattacactgatgacattatgctgattggacctagtgagcaaaaagtagcaactattctaggcttactgg

SEQ ID NO: 27190 - DNA, 175 bp, Homo sapiens
  MAP TO AL078474.2; EXPRESSED IN BRAIN, SIGNAL = 2.6; NT HIT: Y19139.1, EVALUE 6.00e-86; EST_HUMAN HIT: BE737932.1, EVALUE 1.00e-85; SWISSPROT HIT: P98073, EVALUE 6.00e-30
cttgtggaaaaaaactggcagctcaagacatcaccccaaagattgttggaggaagtaatgccaaagaaggggcctggccctgggttgtgggtctgtattatggcggccgactgctctgcggcgcatctctcgtcagcagtgactggctggtgtccgccgcacactgcgtgtatgg

SEQ ID NO: 27191 - DNA, 191 bp, Homo sapiens
  MAP TO AL096801.16; EXPRESSED IN ADULT LIVER, SIGNAL = 1.1; EXPRESSED IN BRAIN, SIGNAL = 1.1; SWISSPROT HIT: Q02917, EVALUE 9.60e-01; EST_HUMAN HIT: AA357231.1, EVALUE 1.00e-102; NT HIT: gi11419183, EVALUE 1.00e-103
cccgcttagcccgagccccatccccagccccaacgcgaaacttgagaattccgctctcctgacggtggagccttccccacaggacaagaacaagggcttcttcgtggatgagtcggagccccttctccgctgtgactctacatccagcggctcctccgcgctgagcaggaacggttcctttattaccaaag

SEQ ID NO: 27192 - DNA, 161 bp, Homo sapiens
  MAP TO AL050349.8; EXPRESSED IN BRAIN, SIGNAL = 1.1; EXPRESSED IN HBL100, SIGNAL = 1.8; EST_HUMAN HIT: BE870303.1, EVALUE 1.00e-85; NT HIT: gi11420576, EVALUE 7.00e-86; SWISSPROT HIT: Q62168, EVALUE 3.80e+00
atatccactcctggaacctggcacggtttgtgttcacctacaagggtctccgtgccctgcagtcctacatacaaggcaagacctacccagcacacgcattcctggcggccttcctcgggggtatcctggtgtttggagaaaacaataacatcaacagccag

SEQ ID NO: 27193 - DNA, 139 bp, Homo sapiens
  MAP TO AC007679.2; EXPRESSED IN LUNG, SIGNAL = 0.77; EXPRESSED IN BRAIN, SIGNAL = 0.87; EST_HUMAN HIT: BF694077.1, EVALUE 1.20e-01; NT HIT: AF090433.1, EVALUE 3.10e-01; SWISSPROT HIT: P70793, EVALUE 5.10e+00
gaaggatacacacagaaaaagggccgaaaggaagggctcaggatcgagcagagaatcctgcctaggagagaaacatggaaagagattccacaggaaaacacaggtagtagaagaacagcagccagcatttatggattga

SEQ ID NO: 27194 - DNA, 982 bp, Homo sapiens
  MAP TO AC004142.1; EXPRESSED IN BRAIN, SIGNAL = 1.2; NT HIT: AF291437.1, EVALUE 0.00e+00; EST_HUMAN HIT: AA025228.1, EVALUE 0.00e+00; SWISSPROT HIT: Q91987, EVALUE 5.00e-09
agtaattcctcacatagctgtgtccaccatcacagttcatttctggagagaggcagctgataagacatatcacaccaataatccccagaaggcctccaagacaggccataagtgttgtggtattattcttttcatactctttttgatcagggtgcaaacctttggtggtgacatttacacatttttttctgtttttctgatagatggtgggaatatcaatacaaattttatactcagttgatggattcagatgagtaagattatataccttgacatcagatggtattcgagcactttgcgcagcatgagaattttcagtcttgacaaaggctgtccatttaacactagatttgagaattttagaacttgctttccaggacaccaaaactgaattggcctgaatatctcttattttaatattcaaagagccattgttatcttgtggaaaagatccatccactttgatcataacagacttcaagtcagcgccaactaggttagttgctatacaagtatataaacccccttctttgggagttacgccatttatatctagtgttccctcagaatggacatagaacttgtctgtcagggtattaggcaagagtttttgaccagaaggtgttatccagtagatttcaggctgtggttctgcagtagctctacagtgaaaggaaacatagctcccagcttctacatttagattagaaggaaagctctcaggagctataagagggagacaaatttccatcatgtccctgaaatgcacttgccgaacattctgaccttggaattcaggtgggtccacgcaaaacagtgaatctggctccatgaatcgaatgttggttttgttcatgttcatccaacggatgacacagtcacacctgatggggttactgtgtatgctgatttccttgaggtttggcagagactcaatggtaccatggtacagggcactgagagcattgctgttcagcatgag

SEQ ID NO: 27195 - DNA, 1145 bp, Homo sapiens
  MAP TO AC004886.1; EXPRESSED IN BRAIN, SIGNAL = 1.1; EST_HUMAN HIT: AI636014.1, EVALUE 0.00e+00; SWISSPROT HIT: P38254, EVALUE 7.50e-01; NT HIT: AF138789.2, EVALUE 0.00e+00
tgcagactcgaagatccctctccccttgacctatcttcaggtgagtctgtcaggctttccatttccaattctggctcttcgtcaaaatacaaacttgtttttttctgtgatgactctgcagaatatttatctgctattgtactgttgagctcaattgttttaaatcggcgtagccctcctcctccagtaactacaagttcttcactttcctgacttttagtttctctgtatttaagttcaggactttcatcaaatgcttcatcgtcttcatcatgccatgagtgacgtcttcctgcatcttcatcaatgcttgtgctactttttcgagtcagtcgtctgtgtttccctgctgttattttgccttttccctttgtttcttccttcttctggctctcagtactgctactaatctctttgagctggtttctgatgaactcatcatcttcagaacctgaagcatcttcatcagcactcatttctatgatttgttttcgaatgaagtcctcctcttcccctgatccttggctgtcttcctgtttatactcatcactgcttgatgagccaacactagttcttcgttttctttgtggaacaggtgagttttcactttcactactctcttcaactgaatcataaggctctcttctagtagttatgtcatcaacaaactcagacttctctttatggtccttgctggaaggaatatcttgttggctatcttttttaaaagtgtctttcctttcttcttgactctctttgatctcctcttctgaaatagtaatttccaaggtttcagataaactctgagttttctcttggtctttaggctgttcaggagaaacttcatggggttgtgttttcttttctgacttttcatcagcaagtgtacttgcttgagcttccaaaatagataggactgtactttctaacttagccaaatctgaggggctggaagggctgctttcttgtgaaaaagagtcctttttgagtcccttgagaatatccttttcatcagttggaataagacttggaatttcaccaagtgagcttgatattccatcggaagaatatcccgtgtcgctcagaccttgggggcttttaggctgctgagaacttgaggtgtctgatttgtcatcttccttttc

SEQ ID NO: 27196 - DNA, 648 bp, Homo sapiens
  MAP TO AC004886.1; EXPRESSED IN BRAIN, SIGNAL = 1.9; NT HIT: gi10048482, EVALUE 0.00e+00; EST_HUMAN HIT: AW815903.1, EVALUE 3.00e-91; SWISSPROT HIT: P19246, EVALUE 6.00e-04
cgtatagccctcggtatactgaaaaggagccctggaactttcgtctgctgttggactcagaggcttggggtcagacatagaacgctgcatcatcttggctgtcttaggacttgctgggggaactttagccatatctggatgcagtactttctgtggacttatatcatcagggaggggtttttcataaggtacaaaggctgattctaaggctttgcctggtgaaagtggtgagatgggtgagtaaaggactttgggggatttgggtggggaaggagccagctgtactgtggaatctgcccggaggtgagatgaataaccaatctctaaaggtgttgggcgtttcttgtctttgggtggagatgtggcactcagatattgaggactttgtgtgtctgaatctgcttctgtttgacatcctaaactgccccctttgtaagtcttttcaggtgctgaaatgtgtttaattatttctaccttggcatccactcgtgcccgtatggagggtgttcttatggttccaactggttcagtttgcacagatatctctgctaccgtttgaactgctatgctggagactttggaaaggggtttggtcttgtcagcctctgtcatgctgtcaccatatttccctacacgagctttcctcct

SEQ ID NO: 27197 - DNA, 1298 bp, Homo sapiens
  MAP TO AC005859.1; EXPRESSED IN BRAIN, SIGNAL = 0.99; NT HIT: gi11421043, EVALUE 0.00e+00; SWISSPROT HIT: P28654, EVALUE 5.00e-14; EST_HUMAN HIT: BE787608.1, EVALUE 3.20e-01
gtgtttccaatgtggacactgaagagacaaattcttatcctttttaacataatcctaatttccaaactccttggggctagatggtttcctaaaactctgccctgtgatgtcactctggatgttccaaagaaccatgtgatcgtggactgcacagacaagcatttgacagaaattcctggaggtattcccacgaacaccacgaacctcaccctcaccattaaccacataccagacatctccccagcgtcctttcacagactggaccatctggtagagatcgatttcagatgcaactgtgtacctattccactggggtcaaaaaacaacatgtgcatcaagaggctgcagattaaacccagaagctttagtggactcacttatttaaaatccctttacctggatggaaaccagctactagagataccgcagggcctcccgcctagcttacagcttctcagccttgaggccaacaacatcttttccatcagaaaagagaatctaacagaactggccaacatagaaatactctacctgggccaaaactgttattatcgaaatccttgttatgtttcatattcaatagagaaagatgccttcctaaacttgacaaagttaaaagtgctctccctgaaagataacaatgtcacagccgtccctactgttttgccatctactttaacagaactatatctctacaacaacatgattgcaaaaatccaagaagatgattttaataacctcaaccaattacaaattcttgacctaagtggaaattgccctcgttgttataatgccccatttccttgtgcgccgtgtaaaaataattctcccctacagatccctgtaaatgcttttgatgcgctgacagaattaaaagttttacgtctacacagtaactctcttcagcatgtgcccccaagatggtttaagaacatcaacaaactccaggaactggatctgtcccaaaacttcttggccaaagaaattggggatgctaaatttctgcattttctccccagcctcatccaattggatctgtctttcaattttgaacttcaggtctatcgtgcatctatgaatctatcacaagcattttcttcactgaaaagcctgaaaattctgcggatcagaggatatgtctttaaagagttgaaaagctttaacctctcgccattacataatcttcaaaatcttgaagttcttgatcttggcactaactttataaaaattgctaacctcagcatgtttaaacaatttaaaagactgaaagtcatagatctttcagtgaataaaatatc

SEQ ID NO: 27198 - DNA, 142 bp, Homo sapiens
  MAP TO AC007535.3; EXPRESSED IN FETAL LIVER, SIGNAL = 3.6; EXPRESSED IN BRAIN, SIGNAL = 0.89; NT HIT: X78421.1, EVALUE 3.20e-01
acacacacacactccacatacatctacagagacaagtcaaaaagagcaagaagaaagcaaaaatttgaaaatcagaaaggttagagaggtttccacggtgaagaaaacttggtcaaataaaaatgtttttgaattctatagg

SEQ ID NO: 27199 - DNA, 120 bp, Homo sapiens
  MAP TO AC009484.1; EXPRESSED IN BRAIN, SIGNAL = 0.97; NT HIT: L11910.1, EVALUE 2.70e-01; EST_HUMAN HIT: AA772898.1, EVALUE 4.00e-03; SWISSPROT HIT: P77409, EVALUE 2.30e+00
accactgagcccttgaaacacagtgagtctgaagtgagatgtaagcatgcaaacacatgcccaagtatgaagatggagaacaagaagcagcatgcaaaatatgtcagtaacatgttttat

SEQ ID NO: 27200 - DNA, 3237 bp, Homo sapiens
  MAP TO AC006385.3; EXPRESSED IN BRAIN, SIGNAL = 6.5; EST_HUMAN HIT: AI003247.1, EVALUE 0.00e+00; SWISSPROT HIT: P11137, EVALUE 0.00e+00; NT HIT: gi11429264, EVALUE 0.00e+00
tcatgaagaatgaaatagttacagaaacatcgccctttgcccctgcctttttacagccagatgacaaaaaatctctgcaacaaaccagtggcccagctactgccaaagatagttttaaaattgaagagccccatgaggctaaacctgacaaaatggcagaagcaccaccctcagaggcaatgaccttacccaaagatgctcacattccagttgtagaagaacatgttatggggaaagttttagaggaagaaaaggaggccataaatcaagagactgtgcagcaaagggatactttcacccccagtggacaggaacctatacttactgaaaaggaaactgagctgaagcttgaagaaaaaaccaccatttctgacaaagaagctgtgccaaaagagagtaaacccccaaaacctgcagatgaagaaataggcataattcagacctccacagagcacactttctcagaacagaaagaccaagagcctaccacagatatgttgaaacaggactcgttccctgtaagtttggagcaagcagttacagattcagccatgacctctaaaacactggagaaagccatgaccgaaccatctgcattaattgaaaagagctcaattcaggaactttttgaaatgagagttgatgacaaagataagattgaaggagttggagctgcaacatcagctgagcttgatatgccattttatgaagataaatcaggaatgtccaagtactttgaaacatctgccttgaaagaagaagcaacaaaaagcattgagccaggcagtgattactatgaactgagtgacactagagaaagtgtccatgagtctattgataccatgtctcccatgcataaaaatggtgacaaggagtttcaaacaggaaaagaatcccagcccagtcctccagcacaagaagcagggtacagcactctcgcacagagttatccatcagatttacctgaagaacccagttctcctcaagaaagaatgttcactattgatccaaaagtgtatggagagaaaagggacctccacagtaagaataaggatgatttgacccttagcaggagtttaggacttggtggtaggtctgcaatagaacaaagaagcatgtcaatcaatttgccgatgtcttgcctagattccatagcccttggatttaactttggtcggggacatgatctttctcctctggcttccgatattctaaccaacactagtggaagtatggatgaaggggatgattaccttccagccaccacacctgcactggagaaagccccttgcttccctgtagaaagcaaagaggaagaacagatagagaaagtaaaagctactggagaagaaagtactcaagcggagatatcatgtgagtctcctttcctagccaaagatttttacaaaaatggtactgtcatggcacctgaccttcctgaaatgctagatctggcaggcacaaggtcaagattggcttctgtgagtgcagatgctgaggttgccaggaggaaatcagtcccatcagagactgtggttgaggatagtcgtactggcttgcccccggtaactgatgaaaaccatgtcattgtaaaaacggacagtcagctcgaagacctgggctactgtgtgttcaataagtacacagtcccattgccatcacctgttcaagacagtgagaatttatcaggggagagtggtaccttttacgaaggcactgatgataaagttcgaagagatttggccacagacctttcactgattgaagtgaaactggcagcagccggaagagtcaaagatgagttcagtgttgacaaagaagcatccgcgcatatctctggtgacaaatcaggactgagtaaggagtttgaccaagagaagaaagctaatgataggttggatactgtactagaaaagagtgaagaacatgctgattcaaaagaacatgccaagaaaactgaagaggctggtgatgaaatagaaacattcggattaggagtaacctatgagcaagctttggccaaagatttgtcaataccaacagatgcatcctctgagaaagcagagaagggtcttagttcagtgccagagatagctgaggtagaaccatccaaaaaggtggaacaaggtctggattttgctgtccagggtcaactagatgttaaaattagtgactttggacagatggcttcagggctaaacatagatgatagaagggcaacagagctaaaacttgaggctacacaggacatgaccccctcatccaaagcaccgcaggaggcagatgcatttatgggtgttgagtctggccacatgaaagaaggcactaaagttagtgagacagaagtcaaagagaaggtggccaagcctgacttggtgcaccaggaggctgtagacaaggaggagtcctatgaatctagtggtgagcatgaaagtctcaccatggagtccttgaaagctgatgagggcaagaaggaaacatctccagaatcatctctaattcaagatgagattgccgtcaaattgtcagtggaaataccttgcccacctgctgtttcagaggctgatttagccacagatgagagagctgatgtccagatggaatttattcaggggccaaaagaagaaagcaaagagaccccagatatatccatcacgccttctgatgttgcagagccattgcatgaaacgatcgtatctgaaccagcagagattcagagtgaggaagaagagatagaagcccagggagaatatgataaactgctcttccgctcagacacccttcagataactgacctgggtgtctcaggtgccagggaggaatttgtggagacctgcccaagtgaacacaaaggagtgattgagtctgttgtgaccatcgaggatgatttcatcactgtagtgcaaaccacaactgatgaaggggagtcagggtcccacagcgtgcgttttgcagccctagagcagcctgaggtggaaaggagaccatctcctcatgatgaagaagagtttgaagtagaagaggcagctgaagcccaggcagaacccaaagatggttccccagaggctccagcttcccctgagagagaagaggttgcactttctgaatataagacagaaacctatgacgattacaaagatgagaccaccattgacgactccatcatggacgctgacagcctctgggtggacactcaaggtgtgcattattattattattattttaactcaaacacaa

SEQ ID NO: 27201 - DNA, 717 bp, Homo sapiens
  MAP TO AC006531.1; EXPRESSED IN BRAIN, SIGNAL = 1.5; NT HIT: gi11431044, EVALUE 0.00e+00; EST_HUMAN HIT: AW893633.1, EVALUE 2.00e-52; SWISSPROT HIT: P35436, EVALUE 1.00e-118
ggtgcgctcgacctcactacagtccttggggtatttggaggccactgaccttttaaagttgtccttggttttgtggttcttactgttgtcaggttccctgtggcacgtggcccgatttgacgtttctgaaatgtcagagtgggccatctcttctggaagatacctagggctctttagggagtgggtcctattctctgctgttgcctcatccctctgggagactggattctgggatagtgaatcctggcgtatggaatccacggatttcttccacagctgccggggtctagagttcgctttggattctgtgctcacggccacctccaccgtgttagggttggactcattgagagtaagaggatgttgtccctggaatacatagttattgaggttatccttctgccggttggccacaaatgtttggagttcgttcatgttgtctccaaaaatgctctctttcccctgaaaggacctgttgtctgagtacatcaaattccccttatctgaaaccatgtccatgatgagggaacctctttggatgaagtcagcagctcttttgggtgagtccattcttgaggagttcatgttggacatgctggaaatgtttttggctgaccggaggagttttaacatgttgctctgggatcccgtcagattgaagtctggagacttcttcttttcttcaatgtgcactccatgaatgcagctgtagatgcc

SEQ ID NO: 27202 - DNA, 1137 bp, Homo sapiens
  MAP TO AL022143.1; EXPRESSED IN BRAIN, SIGNAL = 1.6; NT HIT: gi11429553, EVALUE 2.00e-07; EST_HUMAN HIT: AW955819.1, EVALUE 0.00e+00; SWISSPROT HIT: P47951, EVALUE 4.00e-02
ttagctacagagtttgccggtctcatattccacagggtttggcagcttagaattgaaagccctcagggaggactggatcctgcccacctcattgttggccagcttaagccgatgccggagcaagcaggagaaaaggtcaagtcggactttgccaggtggagaaagctggttcacccggtccctgagctcaatgagctgcaagagtgcagagtcctgggaaccttgagtatatgggtagtccaactggagaattaagtcccggatagcatctgggtcaaagggcaggctgtagccaaagacctgcaaggtgttaattttcatgtaacccaaattcttagagggatcagtcatctccaggggctcatagtagattgtctcattggagctgtcatccagggacttgattcggctccgtaggtaaacatgaactgtctcaaagaaagtcttccacctattccccaaggtgatagtccagttttggcactgggcagctgcatccacgttagtcctttcccagtcaggaaagctgccctcattcacaggcatgaaccagctctcagagtggctgcccccaaaggggttgacgtagatggccatgacaggctccagggtgctgttcttggtgagacagatctgcaaggacaaggccaacatcacgtgcaccagcccaggcttgtacttgttgctcttcagggtgagcagcatgcgcttcctccaggaagggtcaaaccagctgcccagccgcatgtcattgctgatgaagatggagtgtacctcaatgcggctatcctgcttctgcagcaggtactttagctccaggtcctgcaagtctgtctccagcccaagaaagttttccagggactcggccacctctggccggcacagcccctgggccagcacatagcccgggttgcagctcccacagcgtgtgctattgtctggagcacagtgggcacacgcgggcccttcgcccaaggcacatgggatggggccctggcaggaagattggtcataggggcaggtgcagctgtggctctgttccaggaaagtgccaggaaaggtgctttccccacagtagaggagggactggattcggttccaccagtaggacaaggaccttggggagcagagataaaa

SEQ ID NO: 27203 - DNA, 199 bp, Homo sapiens
  MAP TO AC010724.1; EXPRESSED IN ADULT LIVER, SIGNAL = 0.94; EXPRESSED IN BRAIN, SIGNAL = 0.97; NT HIT: gi6681002, EVALUE 1.00e-56; EST_HUMAN HIT: AW002137.1, EVALUE 4.80e-01; SWISSPROT HIT: Q03571, EVALUE 1.00e-06
caatgggatacttgtgcttatctgtgtcaatcccggcatacaccactccaccaaataggtcgttcaagatggctgccagggcctcagcatttagcattccatgcagagcaccgacaaacaccgtcctgctggggtcaagcctctgagatgggctccggacaaagttactgtcggctaatacccaggggatcacctgcac

SEQ ID NO: 27204 - DNA, 495 bp, Homo sapiens
  MAP TO AL009182.13; EXPRESSED IN LUNG, SIGNAL = 1.3; EXPRESSED IN HELA, SIGNAL = 1.3; EXPRESSED IN BT474, SIGNAL = 0.94; EXPRESSED IN BRAIN, SIGNAL = 1.3; EST_HUMAN HIT: BF316735.1, EVALUE 0.00e+00; NT HIT: AB040946.1, EVALUE 0.00e+00; SWISSPROT HIT: Q21313, EVALUE 1.50e-01
aacaaatgggcgtctcatctgcattccccatctgagctacctcatagtcatgcgccctgcgcagagccaggacactgcgctggtaagtgacgagtttctcagtcaggtcttccggcaggtgctggggcacgggcactttatgcctcagagacaggtcataccttctcatcattcttcgacaccaacccaagcttgccttgaaccctttctctggaatgttcatttcctgggcgatttcgagagctttcagctgcatcgcctcccgggtgatggggtcccctttggcctgcatgtatctgacatattcggccacacgctggtccaccagagcaaacctcccattcttggggcctcggaatgcccgccgcatggcgtgggcgttttgaagctgtggcttcactttgcgccagtctcgaacgtttttttccaatactccaaactgcttggcagcctggcagttgttggtactctcagcatattccactaccatcagct

SEQ ID NO: 27205 - DNA, 218 bp, Homo sapiens
  MAP TO Z98884.11; EXPRESSED IN ADULT LIVER, SIGNAL = 1.2; EXPRESSED IN FETAL LIVER, SIGNAL = 0.59; EXPRESSED IN BRAIN, SIGNAL = 0.9; EXPRESSED IN PLACENTA, SIGNAL = 0.66; NT HIT: AB020640.1, EVALUE 9.00e-92; EST_HUMAN HIT: AA663888.1, EVALUE 2.00e-84; SWISSPROT HIT: Q99104, EVALUE 3.00e-05
tacgcactttataaaaagatgacacaggctgccatccttatccagagcaaattccgaagttactatgaacaaaaaaaattccagcagagccgacgggctgctgtgctcatccaaaagtactaccgaagttataagaaatgtggcaaaagacggcaggctcgccggacggctgtgattgtacaacagaaactcaggtgggtggagaagagctcatggag

SEQ ID NO: 27206 - DNA, 87 bp, Homo sapiens
  MAP TO AL078599.19; EXPRESSED IN BONE MARROW, SIGNAL = 0.94; EXPRESSED IN BRAIN, SIGNAL = 0.99; EST_HUMAN HIT: AA079157.1, EVALUE 4.60e-02
ctaagtgtaattgaagttagaagacagaatttcatccacaggaagataatcctcatgagtaatcttaccccacttggcttctgtttg

SEQ ID NO: 27207 - DNA, 93 bp, Homo sapiens
  MAP TO AP000159.1; EXPRESSED IN BRAIN, SIGNAL = 0.75; EXPRESSED IN PLACENTA, SIGNAL = 0.91; NT HIT: D37951.1, EVALUE 1.70e-01; EST_HUMAN HIT: AA576234.1, EVALUE 2.00e-01
gcccctgcatgacctcgaccttcatcagcccccagtgcttggatcatgtcacctcccacttttcttctcactcactgcttctcatccacactg

SEQ ID NO: 27208 - DNA, 106 bp, Homo sapiens
  MAP TO AL049556.13; EXPRESSED IN BT474, SIGNAL = 0.67; EXPRESSED IN HELA, SIGNAL = 0.67; EXPRESSED IN BRAIN, SIGNAL = 0.73; EST_HUMAN HIT: AA463397.1, EVALUE 8.50e-02; NT HIT: U53367.1, EVALUE 9.00e-01
ggcagctgcagaatcatgaacatcatgccaagaacagatttcttaagaaactttttcctgtgggaagaaagatccctcttccctccttccaaaaccaaacaaaaag

SEQ ID NO: 27209 - DNA, 94 bp, Homo sapiens
  MAP TO AP000022.2; EXPRESSED IN BT474, SIGNAL = 1.2; EXPRESSED IN BONE MARROW, SIGNAL = 1.1; EXPRESSED IN BRAIN, SIGNAL = 1.1; EST_HUMAN HIT: AW103003.1, EVALUE 8.00e-01
tcatgcatagacctctgccagctcccatttacaagccctgctctggacaaaggagatgtgatcaatgccacaggtgggggagaagagctccctg

SEQ ID NO: 27210 - DNA, 550 bp, Homo sapiens
  MAP TO AL031983.1; EXPRESSED IN BRAIN, SIGNAL = 1.1; NT HIT: AJ010179.1, EVALUE 0.00e+00; SWISSPROT HIT: Q29435, EVALUE 6.90e-01; EST_HUMAN HIT: BF530404.1, EVALUE 1.00e-102
aatagtatcaagtgagataagacaaaaacaaacaaatgagcaaacaaaaactcagccattctcctctgtattcaggtgtacaaggagcgtctctttgggaagaagtacgtctggttcctcattgggtggtatgctgacaattggttcaagatctacgacccttctatcaactgcacagtggatgagatgactgaggcggtggagggccacatcacaactgagattgtcatgctgaatcctgccaatacccgcagcatttccaacatggtgagagtgtggggacttgcagtctggcacctgggagggtggagaggactgagggggccttgcaggggaaagggtggcagggagagggtgcggaatttggatataaaggagaagagggggctgtgcccaccctgaacttgtctgcattatgtttcctgtggatcctacctttgctctgacttccttgggtagagagagaaaaaaaaaaaaacgatggagttgtatgttcagtaggttcctgatgagtggaagggctgttaccatggagacgaggagcagttgg

SEQ ID NO: 27211 - DNA, 121 bp, Homo sapiens
  MAP TO AL034425.6; EXPRESSED IN BRAIN, SIGNAL = 1.3; SWISSPROT HIT: P40014, EVALUE 9.00e+00
gatggcaccagcaggtccacccgaacatttgtctctgccctgctgctctgcccacctggcctcacgttggacacaggcatgtatgttgtgtgttgaagcttgccccacttgggtctcttcc

SEQ ID NO: 27212 - DNA, 237 bp, Homo sapiens
  MAP TO AP000175.1; EXPRESSED IN BRAIN, SIGNAL = 0.69; EXPRESSED IN BT474, SIGNAL = 0.63; EST_HUMAN HIT: AA418916.1, EVALUE 7.00e-87; SWISSPROT HIT: O88866, EVALUE 2.00e-25; NT HIT: gi11526180, EVALUE 7.00e-87
gatttctctggaagatctgagcccgagcgtcgtgctgcacatgaccgagaagctgggttacaagaacagcgacgtgatcaacactgtgctctccaaccgcgcctgccacatcctggccatctacttcctcttaaacaagaaactggagcgctatttgtcaggggtaagtgcgaccctagaggcgatcgtctctgctgtctgtggaaaaaagagctcctacacccaaagtgcttctca

SEQ ID NO: 27213 - DNA, 145 bp, Homo sapiens
  MAP TO Z83844.5; EXPRESSED IN BONE MARROW, SIGNAL = 0.9; EXPRESSED IN BRAIN, SIGNAL = 1.1; NT HIT: AF008191.1, EVALUE 1.30e+00; EST_HUMAN HIT: AV762133.1, EVALUE 1.90e+00
ctgtggtctgcaccccctccagctggcgcccgtggtttgactttagggtgatgacgtgcacaccttcaaaggtgctgagccctgggagccttgtcagtccaacacgatgtagtgtgaacaagttaaccagctcgtctcggcagtt

SEQ ID NO: 27214 - DNA, 153 bp, Homo sapiens
  MAP TO AC008085.1; EXPRESSED IN PLACENTA, SIGNAL = 0.7; EXPRESSED IN BRAIN, SIGNAL = 0.7; EXPRESSED IN ADULT LIVER, SIGNAL = 1.3; NT HIT: gi5835526, EVALUE 3.00e-01; SWISSPROT HIT: P08548, EVALUE 9.00e-04; EST_HUMAN HIT: BE172085.1, EVALUE 3.50e-01
agcaatcacacttctaagaatctgtcccaaagaaatcatcagagatgtgcagagatttatgtacaaggatgtgcatcccagtgctatttataacagtgaaatattggagactctccaagtgtccatcagtgggaggatggtaaatgatgggac

SEQ ID NO: 27215 - DNA, 290 bp, Homo sapiens
  MAP TO AL031301.1; EXPRESSED IN BRAIN, SIGNAL = 1.6; NT HIT: U14632.1, EVALUE 1.80e-01
catagtgacgatgatgatgatcagatacatcatcatcatcttcttcagcaccatcatcatcaatatcaccatcatcatcaccctcatcaacagcaccataacagcaccatcaacattatcatcaccaccatcaacattatcatcaccaccatcaacattatcatcaccaccatcaacattatcatcgccatcaacattatcatcacccccatcaccctcatcatcaatagcaccgtcatcatcatcacagtaagggcagctagtgcttatatacagcatcatatgtgcca

SEQ ID NO: 27216 - DNA, 107 bp, Homo sapiens
  MAP TO AC006390.8; EXPRESSED IN HELA, SIGNAL = 0.7; EXPRESSED IN BRAIN, SIGNAL = 0.86; EST_HUMAN HIT: BF570296.1, EVALUE 8.60e-02
aaaatgcagcagtgcagactgtagtatccatgcacatggtggtggctgctgtttcttctgtttctgatcaggccttcaccttggagttggtcatcctttaccaaatc

SEQ ID NO: 27217 - DNA, 251 bp, Homo sapiens
  MAP TO AL023513.1; EXPRESSED IN BRAIN, SIGNAL = 1.1; SWISSPROT HIT: Q63515, EVALUE 2.00e-03; EST_HUMAN HIT: F05756.1, EVALUE 1.00e-104; NT HIT: AB023144.1, EVALUE 1.00e-106
cgtttgagaaaggccactgctatgagccctacatccagaatgggaacttcactacatccgacccgacctataacattgggactatagtggagttcacctgcgaccccggccactccctggagcagggcccggccatcatcgaatgcatcaatgtgcgggacccatactggaatgacacagagcccctgtgcagaggtgagcggatccacaacgctcttcccacggcaccccagggatctccaccctttgga

SEQ ID NO: 27218 - DNA, 214 bp, Homo sapiens
  MAP TO AC007237.3; EXPRESSED IN LUNG, SIGNAL = 0.68; EXPRESSED IN BRAIN, SIGNAL = 0.73; EXPRESSED IN HELA, SIGNAL = 0.61; SWISSPROT HIT: P31257, EVALUE 1.10e+00; EST_HUMAN HIT: AW163674.1, EVALUE 1.00e-114; NT HIT: AB014605.1, EVALUE 1.00e-117
tcaatgaagtagacttcgcccttctctgtataggccatttcccagttatcaggcaatgggtctggttcctcattgtcttcaggtttagttggctttgtgtcatccatctgctccttcagctcctcaggctgactgtacactggtgcaggataaggctgggagggcatctcccctgaggcacctgcacttttgtcttcatgttcactggattcta

SEQ ID NO: 27219 - DNA, 147 bp, Homo sapiens
  MAP TO AC011425.1; EXPRESSED IN BRAIN, SIGNAL =   5; EXPRESSED IN ADULT LIVER, SIGNAL = 1.1; EST_HUMAN HIT: AL043193.2, EVALUE 8.60e-02; SWISSPROT HIT: P37496, EVALUE 2.00e-01; NT HIT: AB042555.1, EVALUE 8.40e-02
aacacatacattctctctcagtgtctctgggatgctggcagcaagctcaaggaactcctgctgctccaagaggccactgaacatattggtaaacatgctcaaagccactggccctgtgttgctgtgctggataatacctttttccag

SEQ ID NO: 27220 - DNA, 119 bp, Homo sapiens
  MAP TO AC009817.2; EXPRESSED IN BRAIN, SIGNAL = 0.97; EST_HUMAN HIT: AW021431.1, EVALUE 1.00e-15; SWISSPROT HIT: P42850, EVALUE 7.10e+00; NT HIT: AF195953.1, EVALUE 3.00e-07
taatatttgtagccctgcaaaatttaaatgttgaaatcctaaccaccaagatgatgatattaggaagtgggacctttgggaggtgactggatcatgagggtagagctctcatgaatgga

SEQ ID NO: 27221 - DNA, 632 bp, Homo sapiens
  MAP TO AC004074.1; EXPRESSED IN BRAIN, SIGNAL = 5.6; NT HIT: gi11415047, EVALUE 0.00e+00; EST_HUMAN HIT: BE145191.1, EVALUE 0.00e+00; SWISSPROT HIT: P51860, EVALUE 1.00e-111
aaatatgatgagcctattctgaagctcctgacagatattaaagttaagctttcagatcctggcgagcccctcagtttcacactagaatttcacttcaaacccaatgaatatttcaaaaatgagttgttgacaaagacctatgtgctgaagtcaaagctagcatattatgatccccatccctataggggaactgcgattgagtattccacaggctgtgagatagattggaatgaaggaaagaatgtcactttgaaaaccatcaagaagaaacagaaacatcggatctggggaacaatccgaactgtaactgaagattttcccaaggattcatttttcaattttttctctcctcatggaatcacctcaaatggaagggatggaaatgatgattttttacttggtcacaatttacgtacttacataattccaagatcagtattatttttctcaggtgatgcactggaatctcagcaggagggggtagttagagaagttaatgatgcaatttatgacaaaattatttatgataattggatggctgcaattgaggaagttaaagcttgttgcaaaaaccttgaggcattagtagaagacattgatcgttagagcagagtatacatggccctgaaatt

SEQ ID NO: 27222 - DNA, 116 bp, Homo sapiens
  MAP TO AC010149.1; EXPRESSED IN BRAIN, SIGNAL = 2.6; EXPRESSED IN ADULT LIVER, SIGNAL = 1.6; EST_HUMAN HIT: BE181002.1, EVALUE 5.90e+00; NT HIT: gi5835974, EVALUE 2.20e-01
atgaagactttggaagccacgtgtcaaagaaagcaggactcccatcagccagaatccctaaatggctgtgtgactcaaagaaccctgacaaccagcaaccaccttatcctgataat

SEQ ID NO: 27223 - DNA, 86 bp, Homo sapiens
  MAP TO AC011406.1; EXPRESSED IN BRAIN, SIGNAL = 0.9; NT HIT: gi7019498, EVALUE 2.00e-03; EST_HUMAN HIT: AW236547.1, EVALUE 2.00e-41
agcgacatgagctcccgagagctgaagaggcgctttgaagtgtttggtgagattgaggagtgcgaggtgctgacaagaaataggag

SEQ ID NO: 27224 - DNA, 90 bp, Homo sapiens
  MAP TO AC010083.1; EXPRESSED IN BRAIN, SIGNAL =   1; SWISSPROT HIT: P16519, EVALUE 1.00e-11; NT HIT: M95962.1, EVALUE 8.00e-44; EST_HUMAN HIT: AU141149.1, EVALUE 1.00e-43
aggatcgttcatgttgatgtcgatctcattgatgtctctgtaacctcgcttttttcggtcaaatccttcctgctgcaaagccatctttac

SEQ ID NO: 27225 - DNA, 379 bp, Homo sapiens
  MAP TO AC007462.2; EXPRESSED IN BRAIN, SIGNAL = 1.2; EXPRESSED IN BONE MARROW, SIGNAL = 0.63; NT HIT: AB035356.1, EVALUE 0.00e+00; EST_HUMAN HIT: R59266.1, EVALUE 0.00e+00; SWISSPROT HIT: P31696, EVALUE 2.00e-03
aaatggcaggtgatcatactaggctggagttccataacatagagactggcatcatcacagaacgacggtatctttcttctgtcccctccaacttcattggacacctgcagagcttgacatttaatggaatggcatacattgacctgtgtaaaaatggcgacatagattactgtgagcttaatgccagatttggcttcaggaacatcatagcagatcctgtcaccttcaagaccaaatcgagctatgttgccttagctaccttgcaagcctacacttctatgcatctttttttccagttcaagacaacatccctagatggattaattctatataacagtggggatggaaatgactttattgtggttgaattagttaaagg

SEQ ID NO: 27226 - DNA, 172 bp, Homo sapiens
  MAP TO AL078602.10; EXPRESSED IN BRAIN, SIGNAL = 0.98; NT HIT: U06832.1, EVALUE 4.00e-01; SWISSPROT HIT: P29968, EVALUE 6.50e+00
tcctctgactcatcccgttatccggggacgattatttcatcattactcttgcatctgaaggatgtggatgtatattaatgctctaaccttcacgcatccttgaatcctgagtagtctgctggagtctgtcctgcagcagcttcctggaagagtggccagcccgctgcgtgga

SEQ ID NO: 27227 - DNA, 91 bp, Homo sapiens
  MAP TO AL121796.1; EXPRESSED IN BRAIN, SIGNAL =   1; NT HIT: gi11693131, EVALUE 4.80e-02; SWISSPROT HIT: P46692, EVALUE 1.80e+00
tccttcagcgctcgggctctcccctgcagacagccttcctcagcagccgcacagctcagggcttctcctccctgggtgccagtaaccccag

SEQ ID NO: 27228 - DNA, 87 bp, Homo sapiens
  MAP TO AC008080.1; EXPRESSED IN BRAIN, SIGNAL = 1.1; SWISSPROT HIT: P75337, EVALUE 4.30e+00; NT HIT: AF056313.1, EVALUE 1.50e-01
attatcacaaatttcctgacaactccatggtggcagcagctgggaagccacagcaaaggggtgggcctgttggtcgggctgcacggg

SEQ ID NO: 27229 - DNA, 145 bp, Homo sapiens
  MAP TO AC007115.1; EXPRESSED IN BRAIN, SIGNAL = 0.96; EST_HUMAN HIT: AW937982.1, EVALUE 3.30e-01; SWISSPROT HIT: O02754, EVALUE 1.30e+00
ctatgaagaaataaatgacctgaaggactatgaagaaatggagggagtggtgatttttttgggtgataaggaaagacttgtggggagcagacctaactgtcattataacatatatttggacattaatttaaatgttacaatacat

SEQ ID NO: 27230 - DNA, 135 bp, Homo sapiens
  MAP TO AB020861.1; EXPRESSED IN BRAIN, SIGNAL = 1.1; NT HIT: AF073482.1, EVALUE 2.00e-26; EST_HUMAN HIT: Z41938.1, EVALUE 3.00e-26; SWISSPROT HIT: Q9Y216, EVALUE 7.00e-06
tgctcgtcctccaggcaccgggcactgaagccggacaggggctggctgctccggcagatggaggcctagggggagaggtcacagcaacacaacaccatcaggtaactgtacccatgagagacactctacgtgtgt

SEQ ID NO: 27231 - DNA, 193 bp, Homo sapiens
  MAP TO AC009481.1; EXPRESSED IN BRAIN, SIGNAL = 0.91; EST_HUMAN HIT: AA905567.1, EVALUE 6.00e-32; SWISSPROT HIT: P07942, EVALUE 3.70e+00
ggattgtggcccagtgaacttaagcaattggctcaatatcacataccaagttttgaaccctgagaccagagactctgctctaattactatagtgcactcctgcagtaatgaaatcctctcacctgaatcaatgaagacgttaagggatttggatctgattcacaagaaggtgagagctgctttttgttaatat

SEQ ID NO: 27232 - DNA, 1998 bp, Homo sapiens
  MAP TO AL121716.2; EXPRESSED IN BRAIN, SIGNAL = 1.2; NT HIT: AB029040.1, EVALUE 0.00e+00; SWISSPROT HIT: Q9Y3R5, EVALUE 1.00e-64; EST_HUMAN HIT: AA603882.1, EVALUE 0.00e+00
tatatcagtgagccaagtacaactcatcacatcaaaaggaaatggtgaaaagccacttaccatggatgaaatagagaactttagtctcactgtgaatccattaagtgacagactttccctcctaagtaccagcagtgagacaattccaatggttgtgtctgattttgatcttccagaccaacagatagaaatacttcagagttctgactcgggatgttcacagtcctctgctggggacaacttgagttacgaagttgatcctgaaaccgtgaatgcccaagaggattctcaaatgcccaaggaaagctccccagatgatgatgttcaacaggtagtatttgacctgatatgtaaagttgtaagtggcctcgaagtggaatctgcatcagttacatctcaattagaaattgaagctatgcccccaaagtgcagtgatatagatccagatgaagagacgattaaaattgaagatgactccattcaacagagtcagaatgctttgctgagtaatgaaagttctcagtttctgtctgtgtctgcagagggaggccatgagtgtgtggcaaatggaatctccaggaatagctcctcaccttgtatttcaggaaccacacacactcttcatgactcttctgttgcttccatagaaaccaaatctagacaaaggagtcacagtagtattcaattcagcttcaaagaaaaattatcagaaaaagtttcggagaaggaaacaatagttaaggagtcaggtaaacaaccaggagcaaaacctaaagtaaaacttgccagaaaaaaggatgatgacaagaaaaaatcttcaaatgaaaaactcaaacaaaccagtgtattcttcagtgatggtctggatttagagaactggtatagctgtggagagggagacatttctgaaattgagagtgacatgggttctccaggatctcgaaaatctcccaatttcaacattcatcctctctatcaacatgtgctcctgtatctccagttgtatgattcatccaggactttgtatgctttctctgccatcaaagccatcttgaaaactaaccctatagcttttgtaaatgccatttcaactactagtgtaaataatgcatatactcctcagttgtctctccttcagaatctattggccagacaccggatttctgttatgggcaaagatttttatagtcacattccagtggactcaaatcataacttccggagttctatgtacatagaaattcttatttctctctgcttatattacatgcgtagccattacccaactcatgtcaaggttactgcacaagatttaataggcaatcgaaacatgcaaatgatgagcatagaaattctgacactactcttcactgagctggcaaaagtaatagaaagctcagcgaagggtttccctagttttatttctgatatgttatctaagtgcaaagttcagaaagtgattcttcattgtttgctgtcatctatctttagtgctcagaaatggcatagtgaaaaaatggcaggtaagaacctggttgctgtggaagaaggtttctcagaggacagccttattaatttctcagaggatgaatttgacaatggcagcacgttgcagtcacaacttcttaaggtgcttcagaggctgattgttctagaacacagagtaatgactattcctgaagagaatgaaacaggttttgattttgttgtatctgacttagaacacatcagtccccatcaacccatgacttctcttcagtatttgcatgctcagccaatcacatgtcaaggcatgttcctctgtgcagtgatacgagctttgcatcagcactgtgcatgtaagatgcacccacaatggattggtttaatcacatctactctgccttacatgggaaaagttctgcagagagtggttgtttctgtgacactacaactgtgcagaaatttagataatctaattcagcagtacaaatacgaaacaggattatctgatagtag

SEQ ID NO: 27233 - DNA, 94 bp, Homo sapiens
  MAP TO AC010961.2; EXPRESSED IN BRAIN, SIGNAL = 0.95; SWISSPROT HIT: P08292, EVALUE 2.40e+00; NT HIT: AF304013.1, EVALUE 5.00e-02
atgttctcagcacaggcatgccaggagttagtgattcctgactatggagagttgtgtgggacagagaccaatgagagcttctcccagtggaaag

SEQ ID NO: 27234 - DNA, 181 bp, Homo sapiens
  MAP TO AC011741.2; EXPRESSED IN BRAIN, SIGNAL = 1.1; EST_HUMAN HIT: BE504037.1, EVALUE 2.00e-50; NT HIT: gi11430303, EVALUE 1.00e-84; SWISSPROT HIT: P26232, EVALUE 4.00e-23
ctgagacagagaggaagtcatccactgaggtgatgtcatccacggcctctgtcaacactcggacctgcttctcccactggtctttgaagacgtccatgttatcctgagcaactttgctctgtggccgggcagccagtgtcagagcggcattgatgacctatttgttggaaacaatccaggg

SEQ ID NO: 27235 - DNA, 264 bp, Homo sapiens
  MAP TO AC010127.2; EXPRESSED IN BRAIN, SIGNAL = 1.1; NT HIT: M91803.1, EVALUE 0.00e+00; SWISSPROT HIT: P35498, EVALUE 3.00e-41; EST_HUMAN HIT: BF692212.1, EVALUE 2.40e-01
gacttcgtaaccagacaagtttttgacataagcatcatgattctcatctgtcttaacatggtcacaatgatggtggaaacagatgaccagagtgaatatgtgactaccattttgtcacgcatcaatctggtgttcattgtgctatttactggagagtgtgtactgaaactcatctctctacgccattattattttaccattggatggaatatttttgattttgtggttgtcattctctccattgtaggtaagaaatatttaaag

SEQ ID NO: 27236 - DNA, 250 bp, Homo sapiens
  MAP TO AC012145.1; EXPRESSED IN BRAIN, SIGNAL = 1.4; EST_HUMAN HIT: BF154497.1, EVALUE 0.00e+00; SWISSPROT HIT: P15533, EVALUE 4.00e-18; NT HIT: U91328.1, EVALUE 0.00e+00
cttgtagccctggcatacgtcttcaacaagagctgtggtgtgccctttgtgctgtggtgcccgctcacagcgccagcagatgagctgcccctcgtcttcgcagaacaggtggaactgctctccgtgttcctcacatgacatttcttgatccgtctctttgagggcttcaatgaggcttcccagctgcttgttgggtcggaggctatccatatgaaatggagcccgacactggggacagcagaatgtctcc

SEQ ID NO: 27237 - DNA, 91 bp, Homo sapiens
  MAP TO AC011422.2; EXPRESSED IN BRAIN, SIGNAL = 2.5; NT HIT: L17000.1, EVALUE 1.00e-33; SWISSPROT HIT: Q16566, EVALUE 1.00e-08; EST_HUMAN HIT: AL134969.1, EVALUE 1.00e-33
ctggggctggagttgcataaagaagattctctggtttgagatcacgatggacaatcccattttcatgtagatactaaagagggaaaataat

SEQ ID NO: 27238 - DNA, 227 bp, Homo sapiens
  MAP TO AP000516.1; EXPRESSED IN BONE MARROW, SIGNAL = 1.2; EXPRESSED IN BRAIN, SIGNAL = 0.94; EXPRESSED IN ADULT LIVER, SIGNAL =   1; EXPRESSED IN BT474, SIGNAL =   1; EXPRESSED IN HBL100, SIGNAL = 0.98; EXPRESSED IN HELA, SIGNAL = 1.3; SWISSPROT HIT: Q62191, EVALUE 7.00e-04; NT HIT: gi11419098, EVALUE 1.00e-125; EST_HUMAN HIT: BE018009.1, EVALUE 1.00e-125
agcatctcgaagcctgactgtaagcacttgccctccacctcggcagccaagtgggccaggtcccggcgcttgtccccaaggtgagcagcattttctcggagtcgctgcagaatgtcctgttcctcttcttccagtcgtgaaagcaacacctgctgctcttcatccagccgcctatgaagctcttcaaactccctcaagatctgctgtcggcgactttccactagtct

SEQ ID NO: 27239 - DNA, 178 bp, Homo sapiens
  MAP TO AP000057.1; EXPRESSED IN ADULT LIVER, SIGNAL = 0.7; EXPRESSED IN BRAIN, SIGNAL = 0.85; EXPRESSED IN PLACENTA, SIGNAL = 0.73; EXPRESSED IN BT474, SIGNAL = 0.67; EXPRESSED IN LUNG, SIGNAL = 0.79; EXPRESSED IN HELA, SIGNAL = 0.8; EXPRESSED IN BONE MARROW, SIGNAL = 1.2; EXPRESSED IN HBL100, SIGNAL = 0.86; EXPRESSED IN FETAL LIVER, SIGNAL = 0.6; EST_HUMAN HIT: N81203.1, EVALUE 4.20e-01; SWISSPROT HIT: P19751, EVALUE 4.90e+00; NT HIT: U88081.1, EVALUE 1.40e+00
ggtggtcgtggggaggaggaaggctttcagggacaagcagacggcgacagggatcacactgtcacctgtgtgcgccttttcttctaatggccttaaactgccaagtggctgcaactgcagcgtgctgattttaaatgcttttatggaaagcaccatccccttttcgactagcatcact

SEQ ID NO: 27240 - DNA, 223 bp, Homo sapiens
  MAP TO AL049836.2; EXPRESSED IN BRAIN, SIGNAL = 1.9; EXPRESSED IN ADULT LIVER, SIGNAL =   2; EXPRESSED IN PLACENTA, SIGNAL = 0.9; EXPRESSED IN BT474, SIGNAL = 0.77; EXPRESSED IN FETAL LIVER, SIGNAL = 0.64; EXPRESSED IN BONE MARROW, SIGNAL = 0.8; EXPRESSED IN LUNG, SIGNAL = 0.59; EST_HUMAN HIT: R71409.1, EVALUE 3.10e+00; NT HIT: X55294.1, EVALUE 2.90e-02; SWISSPROT HIT: Q92777, EVALUE 5.40e-01
ggatgttgccattactgatcaggagaggtctgggctgggcattggtgaagcgtttgctctcaactttactgccaccatcagtgtgctgagctccttccctcctagactcagtgctcacatcggtgcaaggggtgaatagacagcctggaggcagaagagctgcccagaccctgccctgaggctgaaagccttccctcttcctgggccagctgggatccctgga

SEQ ID NO: 27241 - DNA, 273 bp, Homo sapiens
  MAP TO AL049835.3; EXPRESSED IN BONE MARROW, SIGNAL = 1.5; EXPRESSED IN BRAIN, SIGNAL = 1.5; EXPRESSED IN HELA, SIGNAL = 0.69; EXPRESSED IN ADULT LIVER, SIGNAL = 0.88; EXPRESSED IN HBL100, SIGNAL = 2.5; NT HIT: AF272663.1, EVALUE 0.00e+00; SWISSPROT HIT: Q03555, EVALUE 9.00e-24; EST_HUMAN HIT: AV713581.1, EVALUE 6.30e-02
cttggcagcaatggctgctgcagttatatgtgatgaggaactatcttctgttgaagcaacaccactgtctttcttctcttcttcctcttcctcacattgaactcctttgtcttctgtctgtttatgggggctggtagtaggaggaggggaaagagggggaggtggggaaggcaaatcttcaagttcatcatgcacctcctttacttttacaatggcatcacgtaaaaggtcaatggcatgaggtagagctggcagtatgaattgaaagcattc

SEQ ID NO: 27242 - DNA, 224 bp, Homo sapiens
  MAP TO AC007462.2; EXPRESSED IN FETAL LIVER, SIGNAL = 1.3; EXPRESSED IN BONE MARROW, SIGNAL = 0.72; EXPRESSED IN HELA, SIGNAL = 1.5; EXPRESSED IN BRAIN, SIGNAL = 1.6; EXPRESSED IN PLACENTA, SIGNAL = 1.3; EXPRESSED IN LUNG, SIGNAL = 1.3; NT HIT: AB035356.1, EVALUE 1.00e-111; EST_HUMAN HIT: AI250879.1, EVALUE 3.10e+00; SWISSPROT HIT: Q10303, EVALUE 4.90e+00
ccatttctgtcaacacgttgcgtactccctacactgctcctggtgagagtgagattctggacctggatgatgagttgtacctgggggggctgccagaaaataaagctggccttgtcttccccaccgaggtgtggactgctctgctcaactatggctacgtgggctgcatcagggatttgttcatcgatggccaaagcaaagatatccggcaaatggctgaagtt

SEQ ID NO: 27243 - DNA, 135 bp, Homo sapiens
  MAP TO AC005774.1; EXPRESSED IN PLACENTA, SIGNAL = 0.66; EXPRESSED IN LUNG, SIGNAL = 0.65; EXPRESSED IN BRAIN, SIGNAL = 0.76; EXPRESSED IN ADULT LIVER, SIGNAL = 0.63; EXPRESSED IN BONE MARROW, SIGNAL = 0.59; SWISSPROT HIT: P04588, EVALUE 9.10e+00; NT HIT: U66059.1, EVALUE 5.00e-09; EST_HUMAN HIT: T83835.1, EVALUE 8.00e-09
atggagtagctgtactttccccattttactttctttataagcttccttttgctttgcactgtggactggccccgaattctttttttgcacaagatccaagaatcctctcttagggtctggataggaacccttttc

SEQ ID NO: 27244 - DNA, 133 bp, Homo sapiens
  MAP TO AC006211.1; EXPRESSED IN LUNG, SIGNAL = 0.58; EXPRESSED IN BRAIN, SIGNAL = 0.66; EXPRESSED IN BONE MARROW, SIGNAL = 0.49; EXPRESSED IN ADULT LIVER, SIGNAL = 0.56; EST_HUMAN HIT: H99079.1, EVALUE 1.00e-41; SWISSPROT HIT: Q99698, EVALUE 1.60e-01; NT HIT: AL163206.2, EVALUE 7.50e-02
accaagaagataattataatgtaataagtgctctgcctgattaaaaactgctgtgttctcatgagaactaggaaaggcattcagaaggacattcctgacgtcttcttggaagaggtcgaacgtaagctcgtat

SEQ ID NO: 27245 - DNA, 215 bp, Homo sapiens
  MAP TO AC006410.1; EXPRESSED IN PLACENTA, SIGNAL = 0.74; EXPRESSED IN LUNG, SIGNAL = 0.91; EXPRESSED IN BONE MARROW, SIGNAL = 0.98; EXPRESSED IN ADULT LIVER, SIGNAL = 0.97; EXPRESSED IN FETAL LIVER, SIGNAL = 0.95; EXPRESSED IN BRAIN, SIGNAL = 0.94; NT HIT: M94081.1, EVALUE 2.00e+00; EST_HUMAN HIT: AI253399.1, EVALUE 7.60e-01
cttcctctgggtgcctgtctggtccccagatgagcagcagttcctctcctctccttccatctctatcaccgtcaccatcatcatcaccatcaccgtcaccatcatcatcaccatcactgtcaccatcaccaacactttaaaagttttcactcttccgggccttttacacattaactctcccagtcctcaccacagtgctatgaagtaggtgctat

SEQ ID NO: 27246 - DNA, 190 bp, Homo sapiens
  MAP TO AC004108.1; EXPRESSED IN FETAL LIVER, SIGNAL = 0.71; EXPRESSED IN ADULT LIVER, SIGNAL = 0.61; EXPRESSED IN PLACENTA, SIGNAL = 0.75; EXPRESSED IN LUNG, SIGNAL = 0.73; EXPRESSED IN BRAIN, SIGNAL = 0.65; EXPRESSED IN BONE MARROW, SIGNAL = 0.78; SWISSPROT HIT: P32595, EVALUE 7.60e-01; NT HIT: AF146793.2, EVALUE 4.40e-01; EST_HUMAN HIT: BE300286.1, EVALUE 1.70e-01
cttcagccaatttccttctctttgccatgttttgagagcatgagggatggtgggtgctctgataccaccatatttcagcctattaattgcatctctgcagcctgtttgttttggctctagcactatacgtattttatccttaggagtggtgttacatgtctgttttgttatctgaccattgctctcttcc

SEQ ID NO: 27247 - DNA, 114 bp, Homo sapiens
  MAP TO AC003669.1; EXPRESSED IN PLACENTA, SIGNAL = 0.97; EXPRESSED IN LUNG, SIGNAL = 0.81; EXPRESSED IN BONE MARROW, SIGNAL = 0.64; EXPRESSED IN FETAL LIVER, SIGNAL = 0.72; EXPRESSED IN BRAIN, SIGNAL = 0.57; EXPRESSED IN ADULT LIVER, SIGNAL = 0.68; SWISSPROT HIT: Q24167, EVALUE 7.10e+00; EST_HUMAN HIT: BE253748.1, EVALUE 6.00e-03
ggggcacaccagtgaccaatgcagtggactaaaaagaaaccgagagtttggggactggcaataatgcagagtccgagaagggcaggtgtagctgcagcaagctggaagccaaac

SEQ ID NO: 27248 - DNA, 449 bp, Homo sapiens
  MAP TO AC006368.2; EXPRESSED IN BRAIN, SIGNAL = 0.63; EXPRESSED IN BONE MARROW, SIGNAL = 0.55; EXPRESSED IN ADULT LIVER, SIGNAL = 0.49; NT HIT: AF003529.1, EVALUE 1.00e-09; EST_HUMAN HIT: AA501787.1, EVALUE 1.00e-22; SWISSPROT HIT: P11369, EVALUE 4.00e-30
tctgattttagagaaaaaggtttcatcttttcactgtggggtatgatgttaactgtgggcttttgtatacggactttattatgtggaggtacattccttctgtggctaatttgctgagtttgtatcataaaaagatgttgttttttgtcaaatggtttttctgcatctaagaagatgatcttatggcttttgtccttcattttgttaatatgttgtaaaacatttattgatttgtgtatgttgaaccatccttgtaacccaggaatacaagggataaatcctgcttgatcacatttaacaatccttttaatgcactggtgaattccacttgctagtattttgttgaggatttttgcctctgttttcattagagatactgatccattattttctattcttgtaggtcttgtgtgattctggtgatgatgattaccaaaatcacacaaggc

SEQ ID NO: 27249 - DNA, 133 bp, Homo sapiens
  MAP TO AC005920.1; EXPRESSED IN LUNG, SIGNAL = 0.54; EXPRESSED IN BONE MARROW, SIGNAL = 0.6; EXPRESSED IN ADULT LIVER, SIGNAL = 0.59; EXPRESSED IN BRAIN, SIGNAL = 0.74; NT HIT: gi11426786, EVALUE 3.00e-69; EST_HUMAN HIT: AV754216.1, EVALUE 4.00e-69; SWISSPROT HIT: P49840, EVALUE 9.20e+00
acgtggttgacttaattcctgaaatttccattgctcagatccaggggtctctcctcctttctgagcatcaggtgtaagcaatccatctccagcaggtaatgggaaaattcctaatgatatagggcgttctttt

SEQ ID NO: 27250 - DNA, 133 bp, Homo sapiens
  MAP TO AC005389.1; EXPRESSED IN LUNG, SIGNAL = 0.71; EXPRESSED IN FETAL LIVER, SIGNAL = 0.7; EXPRESSED IN BRAIN, SIGNAL = 0.61; EXPRESSED IN BONE MARROW, SIGNAL = 0.71; EXPRESSED IN PLACENTA, SIGNAL = 0.76; EXPRESSED IN ADULT LIVER, SIGNAL = 0.62; NT HIT: U02369.1, EVALUE 3.00e-01; SWISSPROT HIT: P55047, EVALUE 8.10e-01
tgctgggcctgcagcttctgtagctcctgccagatatccttgggttgcagctgatccccgagcttttccagcttcttatcatcctgggccaagtatgtgtgctgctccttggtggaacatacaagctcttctg

SEQ ID NO: 27251 - DNA, 149 bp, Homo sapiens
  MAP TO AC005021.1; EXPRESSED IN PLACENTA, SIGNAL = 0.82; EXPRESSED IN ADULT LIVER, SIGNAL = 5.4; EXPRESSED IN LUNG, SIGNAL = 0.74; EXPRESSED IN FETAL LIVER, SIGNAL = 1.9; EXPRESSED IN BRAIN, SIGNAL = 0.76; EXPRESSED IN BONE MARROW, SIGNAL = 0.67; SWISSPROT HIT: Q15166, EVALUE 2.00e-24; NT HIT: L48516.1, EVALUE 3.00e-75; EST_HUMAN HIT: AV648699.1, EVALUE 1.00e-78
ctgatcccatgtggattaaataattctttgtcaaatccaccactgatttctagcgcttgtgcccttgggttttgttcattcagatccatcaagaagatttttcctggttcatctggcgcaaagtttggcatgcctggatattttaatcc

SEQ ID NO: 27252 - DNA, 280 bp, Homo sapiens
  MAP TO AC004542.1; EXPRESSED IN LUNG, SIGNAL = 0.61; EXPRESSED IN BONE MARROW, SIGNAL = 0.57; EXPRESSED IN BRAIN, SIGNAL = 0.74; EXPRESSED IN ADULT LIVER, SIGNAL = 0.58; NT HIT: AF185699.1, EVALUE 3.00e-03; EST_HUMAN HIT: AI419969.1, EVALUE 0.00e+00; SWISSPROT HIT: P22059, EVALUE 6.00e-22
atgactctggggacgacgacgaggctaccaccccagccgacaagagcgagctgcaccacaccctgaagaatctttccctgaagttagatgacctcagcacgtgcaatgacctcatcgccaagcacggcgctgcactccagcgctccctgacagagctggacggcctcaagatcccatctgagagtggggagaagctgaaggtggtgaatgagcgggccaccctcttccgcatcacatccaatgctatgatcaacgtgagtacccacccccaccgccctgg

SEQ ID NO: 27253 - DNA, 218 bp, Homo sapiens
  MAP TO AC004983.2; EXPRESSED IN PLACENTA, SIGNAL = 0.75; EXPRESSED IN LUNG, SIGNAL = 0.67; EXPRESSED IN BONE MARROW, SIGNAL = 0.53; EXPRESSED IN ADULT LIVER, SIGNAL = 0.57; EXPRESSED IN BRAIN, SIGNAL = 0.86; EST_HUMAN HIT: AA323348.1, EVALUE 1.00e-117; NT HIT: gi8567347, EVALUE 1.30e-01; SWISSPROT HIT: P51502, EVALUE 2.00e-04
ccgtacgagtgctccgactgcgggaagacctcccggaaggcgaacctcatccgccaccacgggatccacacgagggagaagctgcatgggtgaagagaccgtgggatcgtcacaaagtcacatcacgaggtcgccgaacctctaggagggacatcgccagggaaacagccctcaaccaaaactacgacgccaccctaggcagaggtcccatatcgggg

SEQ ID NO: 27254 - DNA, 202 bp, Homo sapiens
  MAP TO AC004123.1; EXPRESSED IN LUNG, SIGNAL = 0.77; EXPRESSED IN FETAL LIVER, SIGNAL = 0.99; EXPRESSED IN BONE MARROW, SIGNAL = 1.1; EXPRESSED IN HELA, SIGNAL = 1.8; EXPRESSED IN BRAIN, SIGNAL = 1.5; EXPRESSED IN ADULT LIVER, SIGNAL = 1.2; EXPRESSED IN PLACENTA, SIGNAL = 1.4; EST_HUMAN HIT: BE831545.1, EVALUE 1.10e-02; SWISSPROT HIT: P21401, EVALUE 5.00e+00; NT HIT: AB038502.1, EVALUE 2.00e-03
atcaagtctgctcgagtgtcctccctcccaggagaaaatataccatccatttgttcatttattcattcatttctttaaaaatactccttaaagtcctgctctatgccagtttctgtcttaggagctggagatgcagcaatgaacacatcagacaaaaatgccagctcttgtggagcttaatttccagagggggaaataaaca

SEQ ID NO: 27255 - DNA, 309 bp, Homo sapiens
  MAP TO AC004148.1; EXPRESSED IN PLACENTA, SIGNAL = 0.7; EXPRESSED IN BONE MARROW, SIGNAL = 0.66; EXPRESSED IN ADULT LIVER, SIGNAL = 0.88; EXPRESSED IN LUNG, SIGNAL = 0.77; EXPRESSED IN FETAL LIVER, SIGNAL = 0.69; EXPRESSED IN BRAIN, SIGNAL = 0.78; EST_HUMAN HIT: BE256708.1, EVALUE 0.00e+00; NT HIT: gi9910207, EVALUE 0.00e+00; SWISSPROT HIT: Q38953, EVALUE 2.00e-13
tcagtttctggcggttctcagcttcctcctaaagtactcaggggcagcctcgtacagccactgtgcatctatgacgcagaggtcccgcatgtagcacttgttggtgtagagcagctcagtgtacacgacgcaggccggcttgcagtggaagaggacagacgacgggtggatggccactggctggtgggtgtccgtggtggcataggtgccatctggctgaagctcggcggtgctcatgaagaggctgtgagccaggcagcggcggacactctccacgtctcctcgggatgatgcgattggcattgacat

SEQ ID NO: 27256 - DNA, 150 bp, Homo sapiens
  MAP TO AC005058.1; EXPRESSED IN BRAIN, SIGNAL = 0.89; EXPRESSED IN ADULT LIVER, SIGNAL = 2.1; EXPRESSED IN PLACENTA, SIGNAL = 0.69; EXPRESSED IN LUNG, SIGNAL = 0.79; EXPRESSED IN FETAL LIVER, SIGNAL = 0.96; EXPRESSED IN BONE MARROW, SIGNAL = 0.7; EST_HUMAN HIT: AI935616.1, EVALUE 8.00e-77; SWISSPROT HIT: P35890, EVALUE 3.10e+00; NT HIT: AF263613.1, EVALUE 2.00e-79
cttgacagccactccttttccttcaggaaattctagaagatgaaaagtcagttcttcaaccctagtaatgcagagctttgggtcagttgttcttcttaatgcctgaactaatgcccgggtcctgttatcaatactcacccttgcgataat

SEQ ID NO: 27257 - DNA, 237 bp, Homo sapiens
  MAP TO AC004891.1; EXPRESSED IN LUNG, SIGNAL = 0.81; EXPRESSED IN PLACENTA, SIGNAL = 0.79; EXPRESSED IN FETAL LIVER, SIGNAL = 0.75; EXPRESSED IN BRAIN, SIGNAL = 1.8; EXPRESSED IN BONE MARROW, SIGNAL = 0.82; EXPRESSED IN ADULT LIVER, SIGNAL = 0.77; SWISSPROT HIT: P10040, EVALUE 5.00e-04; NT HIT: AB020675.1, EVALUE 1.00e-121; EST_HUMAN HIT: AW898086.1, EVALUE 1.00e-121
ccatcatatgcagtattagagcaatcgcaggagtaaccgtggtatctctctaggcatttgcctccattttcacagtttgttccatagctggtgcaatggcccgagcatccggatatgaacccagatgtgacctttgctctttcctccaggtcaagtgtcaccccattcatcctcaaggagcggatgcagcccaggaagccctgctggcccccagcaccacctgggaatgacagaagg

SEQ ID NO: 27258 - DNA, 179 bp, Homo sapiens
  MAP TO AC005191.1; EXPRESSED IN PLACENTA, SIGNAL = 1.2; EXPRESSED IN LUNG, SIGNAL = 1.1; EXPRESSED IN FETAL LIVER, SIGNAL = 1.1; EXPRESSED IN BONE MARROW, SIGNAL = 1.2; EXPRESSED IN ADULT LIVER, SIGNAL = 1.1; EXPRESSED IN BRAIN, SIGNAL = 1.3; NT HIT: gi6912735, EVALUE 1.00e-96; EST_HUMAN HIT: BE169013.1, EVALUE 3.00e-55; SWISSPROT HIT: Q9UL62, EVALUE 1.00e-29
ttctgtttctcacatcggatccccttgcagttgttaggctcatcgatagctctggtttcataatagaagtaaagctggttcagtccattggcaaaagctagtagtaccaggcagtagataaagaggaatttgaggatatcaagcagcatgcgtcccaaagagatctgcagaggtcctaa

SEQ ID NO: 27259 - DNA, 137 bp, Homo sapiens
  MAP TO AC004990.1; EXPRESSED IN PLACENTA, SIGNAL = 0.71; EXPRESSED IN HELA, SIGNAL =  58; EXPRESSED IN BRAIN, SIGNAL = 0.55; EXPRESSED IN BONE MARROW, SIGNAL = 0.57; EXPRESSED IN LUNG, SIGNAL = 0.56; EXPRESSED IN ADULT LIVER, SIGNAL = 0.64; EST_HUMAN HIT: AL042439.1, EVALUE 2.00e-71; NT HIT: L14478.1, EVALUE 2.00e-02; SWISSPROT HIT: O13731, EVALUE 6.90e+00
caaatgtctctgatgaagtctccagtgaggaaggtcctgaaacaggatactcattacgtcgtcatgtggacaggacttctgaaggtgttcttcggaatagaaagtcacaccattataagaaacattaccctaatgag

SEQ ID NO: 27260 - DNA, 196 bp, Homo sapiens
  MAP TO AC005606.1; EXPRESSED IN LUNG, SIGNAL =   1; EXPRESSED IN FETAL LIVER, SIGNAL = 1.1; EXPRESSED IN BRAIN, SIGNAL = 1.3; EXPRESSED IN PLACENTA, SIGNAL =   1; EXPRESSED IN BONE MARROW, SIGNAL = 1.6; EXPRESSED IN ADULT LIVER, SIGNAL = 1.2; NT HIT: gi11431100, EVALUE 1.00e-103; SWISSPROT HIT: Q92901, EVALUE 3.00e-35; EST_HUMAN HIT: AI124720.1, EVALUE 6.00e-26
ccccggccggtgcacctcccgcagggtgtgggtcatgcccgccttgtagcccaggaaggccgtgaggtgcacgggctggctggggtcatcccgcggccacgtcttcaccttgccccggtgccggtggctcctcttatggggcaggaagcccaggtgtccgtgccgaggggcggaaaacttccggtgggactggggg

SEQ ID NO: 27261 - DNA, 396 bp, Homo sapiens
  MAP TO AC004126.1; EXPRESSED IN BRAIN, SIGNAL = 0.58; EXPRESSED IN ADULT LIVER, SIGNAL = 0.56; NT HIT: AB013721.1, EVALUE 0.00e+00; SWISSPROT HIT: Q05193, EVALUE 3.00e-03; EST_HUMAN HIT: BE904955.1, EVALUE 0.00e+00
cccttggccgctcgcctctggcgccagcgcagctcctccacctggcgttccagccctcgcaccttggcctcgagttgggccccagaggctcgggagccagtgagccggctcagcagggcgtagaggatcagcaaggccaggagtagcagggcccgggtggaagggtcaggcaccgacctcatcagggccacgaagccggccaggaagatgacaagcttcaggccccacaggatccgccccagcaaggccaagaccaagccgaggagcagagacagcagccagtagacgaccagggcccctgctccccacagcaggaaggtctggacctggccagggctgagcttcaggccctgggcgaggtaatcacctggaagccaagagagtcacagagtcagc

SEQ ID NO: 27262 - DNA, 117 bp, Homo sapiens
  MAP TO AC004896.1; EXPRESSED IN PLACENTA, SIGNAL =   1; EXPRESSED IN LUNG, SIGNAL = 0.88; EXPRESSED IN FETAL LIVER, SIGNAL = 0.96; EXPRESSED IN BONE MARROW, SIGNAL = 1.2; EXPRESSED IN ADULT LIVER, SIGNAL = 0.9; EXPRESSED IN BRAIN, SIGNAL = 0.95; EST_HUMAN HIT: AI377192.1, EVALUE 9.60e-02; SWISSPROT HIT: O68006, EVALUE 5.40e+00; NT HIT: U22661.1, EVALUE 6.50e-02
ttgtgtgaattattgatgctataccataattcctataaatgtcagttgcctgaagaggcttagatgcctctcttttggcatcaggctggccagctgtcccctcaatgttgcctggca

SEQ ID NO: 27263 - DNA, 136 bp, Homo sapiens
  MAP TO AC002364.1; EXPRESSED IN LUNG, SIGNAL = 0.48; EXPRESSED IN BONE MARROW, SIGNAL = 0.64; EXPRESSED IN BRAIN, SIGNAL = 0.62; EXPRESSED IN ADULT LIVER, SIGNAL = 0.42; SWISSPROT HIT: P24785, EVALUE 5.30e+00; EST_HUMAN HIT: U46304.1, EVALUE 7.00e-71; NT HIT: AB033106.1, EVALUE 5.00e-71
caaggctctggagttccaagtgccgctggtgtttaacgaagtgttcagaatccccgtgcattccagcgcgttgacactgaagtcacttcagttatacgtgtgttcagtgactccgcagctgcaggaagaactgctg

SEQ ID NO: 27264 - DNA, 113 bp, Homo sapiens
  MAP TO AC004129.1; EXPRESSED IN BRAIN, SIGNAL = 0.69; EXPRESSED IN ADULT LIVER, SIGNAL = 1.1; EXPRESSED IN PLACENTA, SIGNAL = 0.69; EXPRESSED IN LUNG, SIGNAL = 0.72; EXPRESSED IN FETAL LIVER, SIGNAL = 0.88; EXPRESSED IN BONE MARROW, SIGNAL = 0.84; NT HIT: AF020625.1, EVALUE 2.50e-01; EST_HUMAN HIT: BE141475.1, EVALUE 2.30e-02
ttgagggactagaagaacctcagggagtgagtgatcagctcaataccgaatcctccgtgtgccaagaggatccctttgaccctgaagccattgcaaattgttgctttttcttg

SEQ ID NO: 27265 - DNA, 382 bp, Homo sapiens
  MAP TO AC005070.1; EXPRESSED IN PLACENTA, SIGNAL = 1.2; EXPRESSED IN LUNG, SIGNAL = 1.2; EXPRESSED IN FETAL LIVER, SIGNAL = 1.1; EXPRESSED IN BONE MARROW, SIGNAL = 1.2; EXPRESSED IN ADULT LIVER, SIGNAL = 1.2; EXPRESSED IN BRAIN, SIGNAL =   1; SWISSPROT HIT: P33244, EVALUE 1.80e-01; EST_HUMAN HIT: AU118478.1, EVALUE 0.00e+00; NT HIT: gi11430834, EVALUE 9.40e-01
accatgttaacattggggccttttagaaattctaatttaactgaactgggtctgcaagaaataaagactattggttatacgagccctaggagtaggactgaagtcaacaggcagtgtcctggagaaaaggaacctgtgtcagaccttcagctaggactcgatgcagttgagccaactgccctacataaaaccctggaaacgcctgcacatgacagggctgagcccaacagccaactggactcgactcactctggacggggcacaatgtattcttcctgggtaaagagccctgacagaacaggagttaacttctcagtgaactccaacttgagggacctgacaccctcgcatcagttggaggttggaggaggcttccgaataa

SEQ ID NO: 27266 - DNA, 187 bp, Homo sapiens
  MAP TO AC004417.1; EXPRESSED IN PLACENTA, SIGNAL = 0.61; EXPRESSED IN BRAIN, SIGNAL = 0.56; EXPRESSED IN BONE MARROW, SIGNAL = 0.73; EXPRESSED IN LUNG, SIGNAL =   9; EXPRESSED IN ADULT LIVER, SIGNAL = 0.79; EST_HUMAN HIT: BE268285.1, EVALUE 4.20e-02; NT HIT: AF252763.1, EVALUE 1.10e-01; SWISSPROT HIT: O06584, EVALUE 8.70e+00
tccatgcttcctgggcaccctgaactttgtctttcagaacgctttttgtagtttcttacaatcacttgtttgatgttcatttgcctttgttgctggactgaaggcaccttgaaagcagtgactggatctgcgttggtcgcagctatatctttatcctgtggtacagtgcctggcacataagtatttg

SEQ ID NO: 27267 - DNA, 85 bp, Homo sapiens
  MAP TO AC005696.1; EXPRESSED IN PLACENTA, SIGNAL = 0.96; EXPRESSED IN BONE MARROW, SIGNAL = 0.88; EXPRESSED IN ADULT LIVER, SIGNAL = 0.76; EXPRESSED IN LUNG, SIGNAL = 0.82; EXPRESSED IN FETAL LIVER, SIGNAL = 0.95; EXPRESSED IN BRAIN, SIGNAL = 0.68; EST_HUMAN HIT: AA383073.1, EVALUE 6.00e-30; NT HIT: U72335.1, EVALUE 7.00e-41; SWISSPROT HIT: P43034, EVALUE 3.00e-06
ttatcttcgttcaaatggctatgaagaggcatattcagtttttaaaaaggaagctgaattagatgtggtatgttttactttttac

SEQ ID NO: 27268 - DNA, 209 bp, Homo sapiens
  MAP TO AC005213.1; EXPRESSED IN LUNG, SIGNAL = 0.77; EXPRESSED IN BRAIN, SIGNAL = 0.62; EXPRESSED IN BONE MARROW, SIGNAL = 0.54; EXPRESSED IN ADULT LIVER, SIGNAL = 0.44; SWISSPROT HIT: O08789, EVALUE 3.80e+00; EST_HUMAN HIT: T39129.1, EVALUE 4.00e-89; NT HIT: gi4759163, EVALUE 1.00e-114
aagaggagcaggaaacctcaggggattttggcagtggtgggtccgtggtcctgctggatgacctagaatatgaacgggagctgggaccaaaggacaaagaggggaagctgagggtgcacacccgagccgtgacagaggatgatgaggatgaggatgatgacaaagaggatgaggtcgggtacatatggtagtgcccacaagaaagagga

SEQ ID NO: 27269 - DNA, 201 bp, Homo sapiens
  MAP TO AC005661.1; EXPRESSED IN LUNG, SIGNAL = 0.71; EXPRESSED IN BRAIN, SIGNAL = 0.81; EXPRESSED IN BONE MARROW, SIGNAL = 0.5; EXPRESSED IN PLACENTA, SIGNAL = 0.67; EXPRESSED IN ADULT LIVER, SIGNAL = 0.84; EST_HUMAN HIT: AU137282.1, EVALUE 1.00e-109; SWISSPROT HIT: Q28615, EVALUE 1.10e-01; NT HIT: AB046818.1, EVALUE 1.00e-109
tctctcacgttttcaatgctgtcttctttgttttctggttgaatttcgccttcatcctccttgtgttgagttggatctttttcagcaacctggtctttggtttggggttcatgtgtagaaacaggatctaaaactacaactggttcggcttgtttttcaccgtcaatgtattttttcctgcatccaatgctactgggaggc

SEQ ID NO: 27270 - DNA, 181 bp, Homo sapiens
  MAP TO AC005079.1; EXPRESSED IN ADULT LIVER, SIGNAL = 0.81; EXPRESSED IN BRAIN, SIGNAL = 0.77; EXPRESSED IN BONE MARROW, SIGNAL = 0.71; EXPRESSED IN LUNG, SIGNAL = 0.79; SWISSPROT HIT: P11369, EVALUE 2.00e-12; EST_HUMAN HIT: AA317947.1, EVALUE 7.00e-04; NT HIT: AF109907.1, EVALUE 1.00e-04
atgggcaaaaggcatcaacaaacaattcaccaaaaacaacatccagatggcaaataagcacttgagaagatcaacatcattagccatcagggaaacgcaaataaaaatgacgaaaaggtatcactatacgcctatcagaatggctaaaattaaaaataataataataatgataccaaatgc

SEQ ID NO: 27271 - DNA, 139 bp, Homo sapiens
  MAP TO AC005697.1; EXPRESSED IN PLACENTA, SIGNAL = 0.89; EXPRESSED IN ADULT LIVER, SIGNAL = 0.67; EXPRESSED IN LUNG, SIGNAL = 0.7; EXPRESSED IN FETAL LIVER, SIGNAL = 0.71; EXPRESSED IN BRAIN, SIGNAL = 0.81; EXPRESSED IN BONE MARROW, SIGNAL = 0.75; EST_HUMAN HIT: AA744369.1, EVALUE 1.20e-01; NT HIT: gi8393592, EVALUE 3.10e-01
aagtttgaaatcactggtgtagaatacatctcaaagctgtcccagtcaagaggtgaaaaaccagggtgtttatccaccaactctcatccatctttggttgaggatgtttccagcgtattctgtgagtgtcctcgaatgc

SEQ ID NO: 27272 - DNA, 143 bp, Homo sapiens
  MAP TO AC004106.1; EXPRESSED IN ADULT LIVER, SIGNAL = 0.82; EXPRESSED IN PLACENTA, SIGNAL = 1.2; EXPRESSED IN FETAL LIVER, SIGNAL =   1; EXPRESSED IN BRAIN, SIGNAL = 0.83; EXPRESSED IN LUNG, SIGNAL = 1.2; EXPRESSED IN BONE MARROW, SIGNAL = 1.2; EST_HUMAN HIT: AW193189.1, EVALUE 5.00e-75; NT HIT: gi11420956, EVALUE 3.00e-75; SWISSPROT HIT: P56377, EVALUE 2.00e-21
aagctgcacattttaggtttccgtgctaaaacggtctgaacaagttctcttgtgatctttttcttctctttgtctgatagtgggacataccatttttgcagtcgaagctttccctgacgactaaaaagcaacataaactgcat

SEQ ID NO: 27273 - DNA, 257 bp, Homo sapiens
  MAP TO AC005217.1; EXPRESSED IN BONE MARROW, SIGNAL = 0.73; EXPRESSED IN ADULT LIVER, SIGNAL = 0.56; EXPRESSED IN PLACENTA, SIGNAL = 0.78; EXPRESSED IN BRAIN, SIGNAL = 0.74; EXPRESSED IN LUNG, SIGNAL = 0.64; SWISSPROT HIT: P52429, EVALUE 4.10e+00; EST_HUMAN HIT: BF316316.1, EVALUE 3.60e+00; NT HIT: AL163301.2, EVALUE 9.70e+00
ttcctagcagggccatctcctccctggtacttggagacctcctttctcccccacccacaccaaagcttcgggggctttggtgcttgagcatcctcttcctttcttctgtctccagtggccccttctcagctataagaaacactttcaggatctccagaagagcaacaaacctcccccaaagcccttggctccaccagctgctaatcttgctccctgccataccttcatagtcaactattaaaaaaaaaacaaaaaaa

SEQ ID NO: 27274 - DNA, 274 bp, Homo sapiens
  MAP TO AC005079.1; EXPRESSED IN PLACENTA, SIGNAL = 1.1; EXPRESSED IN LUNG, SIGNAL = 1.1; EXPRESSED IN FETAL LIVER, SIGNAL = 0.98; EXPRESSED IN BRAIN, SIGNAL =   1; EXPRESSED IN BONE MARROW, SIGNAL = 1.2; EXPRESSED IN ADULT LIVER, SIGNAL = 1.1; EST_HUMAN HIT: AI056338.1, EVALUE 4.00e-43; NT HIT: Z23266.1, EVALUE 6.60e-01; SWISSPROT HIT: P54673, EVALUE 1.20e+00
ctgggatttcaccagtcaaagccattctatgagctggggtgttgtgctggatgaatacttgctcaataatgatgcttcaaacctccaggtccaagctccaagcattgtcagcacagccatgtggagcaacttcgatgcacagaacctcttcaagtccaaccaaatagacaccacccacttgggcaacaagccatctcagagggcaaccacctcatggggctctcgacactcttcccctagcaaccatacttcaactttgacttcacggtttgtt

SEQ ID NO: 27275 - DNA, 200 bp, Homo sapiens
  MAP TO AC005014.1; EXPRESSED IN LUNG, SIGNAL = 1.2; EXPRESSED IN BRAIN, SIGNAL = 1.1; EXPRESSED IN PLACENTA, SIGNAL = 0.92; EXPRESSED IN BONE MARROW, SIGNAL = 0.86; EXPRESSED IN ADULT LIVER, SIGNAL = 1.1; EXPRESSED IN FETAL LIVER, SIGNAL = 0.78; NT HIT: AF149289.1, EVALUE 1.90e+00; EST_HUMAN HIT: BF673718.1, EVALUE 1.00e-109; SWISSPROT HIT: Q09625, EVALUE 5.00e+00
acggcaaacttgatgtcaattctaactgtgttaatgaagagcaaccagaggctgaagtaggtatctctcaaaaggattccaatcctgaagattccggggaaggaaagaaagaatctcttgaaagcgaagctgagttggaaggcttacaggatgctcctgcagggccacaggtgtctgaggagtaaaagccagagcaagtg

SEQ ID NO: 27276 - DNA, 205 bp, Homo sapiens
  MAP TO AC004921.1; EXPRESSED IN PLACENTA, SIGNAL = 1.3; EXPRESSED IN LUNG, SIGNAL = 1.5; EXPRESSED IN FETAL LIVER, SIGNAL = 1.1; EXPRESSED IN BRAIN, SIGNAL = 1.1; EXPRESSED IN ADULT LIVER, SIGNAL = 1.2; EXPRESSED IN BONE MARROW, SIGNAL = 1.3; SWISSPROT HIT: Q59750, EVALUE 2.20e+00; NT HIT: U78104.1, EVALUE 3.10e-02; EST_HUMAN HIT: H96916.1, EVALUE 1.80e-01
cacagagtgtgtgtttcggaggactcatattcctctcccctcttgcctactgcatcttggtgaggtctctgctctgcaacaaatcaacacaggcttgaaactcagtaatccagtcacgaagagaaggaaagaaaaccacctccatttaaagcaccagatagctagaccagtgctccccaaacttcggtgtgcacaagaatcataa

SEQ ID NO: 27277 - DNA, 85 bp, Homo sapiens
  MAP TO AC005385.2; EXPRESSED IN BRAIN, SIGNAL = 1.2; EXPRESSED IN PLACENTA, SIGNAL = 0.9; EXPRESSED IN LUNG, SIGNAL = 1.1; EXPRESSED IN BONE MARROW, SIGNAL = 0.95; EXPRESSED IN ADULT LIVER, SIGNAL = 1.1; EXPRESSED IN FETAL LIVER, SIGNAL = 0.84; EST_HUMAN HIT: AW270252.1, EVALUE 1.00e-40; NT HIT: gi11545770, EVALUE 7.00e-41
ttcgggcagcctgtgaattttcaacctcctttttggcttttacaaagttgtggcaggcaactgctttggcaatttttacaccaag

SEQ ID NO: 27278 - DNA, 221 bp, Homo sapiens
  MAP TO AC003035.1; EXPRESSED IN LUNG, SIGNAL = 0.89; EXPRESSED IN FETAL LIVER, SIGNAL =   1; EXPRESSED IN BRAIN, SIGNAL = 0.97; EXPRESSED IN BONE MARROW, SIGNAL = 0.86; EXPRESSED IN PLACENTA, SIGNAL = 0.84; EXPRESSED IN ADULT LIVER, SIGNAL = 0.8; NT HIT: gi11421057, EVALUE 1.00e-121; SWISSPROT HIT: P17931, EVALUE 8.50e-02; EST_HUMAN HIT: BE222250.1, EVALUE 1.00e-121
ggcggcagcagcagctggatgcagagcgcctggacagctatgtgaacgctgaccacgacctgtactgcaacacccgccggtcggtagaagccccaactgagaggcctggtgagcggcgccaggccgagatgaagcgtttgtacggggacagtgctgccaagatccaagccatggaggccgcggtgcagctgagctttgacaagcactgtgaccgaaagcag

SEQ ID NO: 27279 - DNA, 175 bp, Homo sapiens
  MAP TO AC004127.1; EXPRESSED IN ADULT LIVER, SIGNAL = 1.4; EXPRESSED IN BRAIN, SIGNAL = 1.3; EXPRESSED IN BONE MARROW, SIGNAL = 1.1; EXPRESSED IN PLACENTA, SIGNAL = 1.1; EXPRESSED IN LUNG, SIGNAL = 1.1; EXPRESSED IN FETAL LIVER, SIGNAL = 1.2; NT HIT: AE000735.1, EVALUE 1.00e-01; SWISSPROT HIT: P30362, EVALUE 3.00e-11; EST_HUMAN HIT: BE783412.1, EVALUE 4.00e-76
cttttccatgacaagccgagcaagtttaatgggatttgctatacactggactgcggacactgctcctgcagacaggtcttttccatccatgatactagcatccatttcaacctcaccatttgtgttcaagacagacccacaacctaaaaccaaaaagaagttgaaaagcaagaat

SEQ ID NO: 27280 - DNA, 157 bp, Homo sapiens
  MAP TO AC005392.1; EXPRESSED IN PLACENTA, SIGNAL = 0.91; EXPRESSED IN BRAIN, SIGNAL = 0.9; EXPRESSED IN BONE MARROW, SIGNAL = 0.94; EXPRESSED IN ADULT LIVER, SIGNAL = 0.77; EXPRESSED IN LUNG, SIGNAL = 0.99; EXPRESSED IN FETAL LIVER, SIGNAL = 0.8; EST_HUMAN HIT: BE929568.1, EVALUE 1.00e-04; NT HIT: U06679.1, EVALUE 2.00e-83; SWISSPROT HIT: P13688, EVALUE 2.00e-11
ttgcgaagtttttgccattagtgactgggttatggacataacacagatagtccccactattctctgtagtgacttgggggataaagagctcttgtcctgtttgctggttattcccattcagcagccaagaatactctgctgatgggttagagcccat

SEQ ID NO: 27281 - DNA, 155 bp, Homo sapiens
  MAP TO AC003685.1; EXPRESSED IN PLACENTA, SIGNAL = 0.76; EXPRESSED IN LUNG, SIGNAL = 0.9; EXPRESSED IN BRAIN, SIGNAL = 0.81; EXPRESSED IN BONE MARROW, SIGNAL = 0.72; EXPRESSED IN FETAL LIVER, SIGNAL = 0.81; EXPRESSED IN ADULT LIVER, SIGNAL = 0.78; NT HIT: AE004322.1, EVALUE 2.30e-02; EST_HUMAN HIT: AW444496.1, EVALUE 2.00e-31; SWISSPROT HIT: P21817, EVALUE 4.00e+00
cccgtgtgttcatctttttcagcaaaaggttctctttccccatgctcatcagttacatcttcctcccttgtttctgtaaaagggtttctttcctcacattcatcacggactggatcctttcctgcattaaaatgtaaaagacaaaccatttttag

SEQ ID NO: 27282 - DNA, 78 bp, Homo sapiens
  MAP TO AC004932.1; EXPRESSED IN LUNG, SIGNAL = 0.91; EXPRESSED IN BRAIN, SIGNAL = 0.99; EXPRESSED IN ADULT LIVER, SIGNAL = 0.97; EXPRESSED IN PLACENTA, SIGNAL = 0.99; EXPRESSED IN FETAL LIVER, SIGNAL = 0.9; EXPRESSED IN BONE MARROW, SIGNAL = 1.1; NT HIT: AK024428.1, EVALUE 3.00e-03; EST_HUMAN HIT: AA077225.1, EVALUE 3.00e-16
gcccccaaaccccagctcctccaccatccctccctgcttctctctcaaagccatctcctttcaccacgctctcctctc

SEQ ID NO: 27283 - DNA, 297 bp, Homo sapiens
  MAP TO AC003688.1; EXPRESSED IN PLACENTA, SIGNAL = 0.88; EXPRESSED IN BONE MARROW, SIGNAL = 0.92; EXPRESSED IN ADULT LIVER, SIGNAL = 0.83; EXPRESSED IN LUNG, SIGNAL = 0.8; EXPRESSED IN FETAL LIVER, SIGNAL = 0.82; EXPRESSED IN BRAIN, SIGNAL = 0.87; NT HIT: gi11426182, EVALUE 7.20e-01; EST_HUMAN HIT: AI302062.1, EVALUE 1.00e-116; SWISSPROT HIT: O55188, EVALUE 5.30e+00
ctgattctaccatgatgtcctcgtccatgacccgcatctcgccttcactggagctggcatctccatcttggcttgtttcagtgctgcccacctccttgctttcactgtcagcaggagggactccttcagggtgcactgtggcagggggcctaggagcctcagggggtgttggcagcacagggactggggcttcaccccctaccactgttgccatctcttcttcttcttcctcttcctcctcttcctcctcctcttcagagtctgtatcactggggggtgcctggggaggcccaggag

SEQ ID NO: 27284 - DNA, 106 bp, Homo sapiens
  MAP TO AC005033.1; EXPRESSED IN LUNG, SIGNAL = 0.67; EXPRESSED IN FETAL LIVER, SIGNAL = 0.8; EXPRESSED IN BRAIN, SIGNAL = 0.64; EXPRESSED IN ADULT LIVER, SIGNAL = 0.73; EXPRESSED IN BONE MARROW, SIGNAL = 0.63; EXPRESSED IN PLACENTA, SIGNAL = 0.69; EST_HUMAN HIT: AV733286.1, EVALUE 4.00e-19; NT HIT: AF223467.1, EVALUE 3.00e-19
ctgtgcagtgctttgggtgatatttgcctttagtgccttgttctccttcagagtaaactggttagcagtggttatcatgggtatggtgttagcagatgccaaccta

SEQ ID NO: 27285 - DNA, 225 bp, Homo sapiens
  MAP TO AC003074.1; EXPRESSED IN PLACENTA, SIGNAL = 0.65; EXPRESSED IN BRAIN, SIGNAL = 0.72; EXPRESSED IN BONE MARROW, SIGNAL = 0.74; EXPRESSED IN ADULT LIVER, SIGNAL = 0.78; EXPRESSED IN LUNG, SIGNAL = 0.7; EXPRESSED IN FETAL LIVER, SIGNAL = 0.69; NT HIT: AB033282.1, EVALUE 8.40e+00; SWISSPROT HIT: Q99028, EVALUE 6.60e+00
aatcttgttaaaaacaaatcagctgatgccatctggctgttcccgttccacagtggtctccaagctgcaccctgattttgggtctttgttctccgtcaccctgcttttcctgatttttattttcctcatcatcataattgccctgatcatcatcatcatgcataccttatactcatataactttttttttaagtttacagagtgtttttcatacatgatcctatg

SEQ ID NO: 27286 - DNA, 249 bp, Homo sapiens
  MAP TO AC003950.1; EXPRESSED IN PLACENTA, SIGNAL = 1.3; EXPRESSED IN LUNG, SIGNAL = 1.1; EXPRESSED IN BONE MARROW, SIGNAL =   1; EXPRESSED IN ADULT LIVER, SIGNAL = 0.72; EXPRESSED IN FETAL LIVER, SIGNAL = 0.8; EXPRESSED IN BRAIN, SIGNAL = 1.2; NT HIT: AF256652.1, EVALUE 1.50e-01; EST_HUMAN HIT: AA082329.1, EVALUE 2.30e-01; SWISSPROT HIT: P12534, EVALUE 2.20e+00
cgcacgcagaccaacaagactactgatgccttgagatcagctgcctcaagtctcatggcagatgagcagaatgtctttgctgaagcacccttgcatcttctgagcacactcatcacctcgcaggtttccagggactgggaggctggcactgcctgcctcccacaatgccccatgtcccagctcagactaaagctgatcacctttgagatttctggagcagccaacatgtgatctggccttcaaagaggg

SEQ ID NO: 27287 - DNA, 104 bp, Homo sapiens
  MAP TO AC003957.1; EXPRESSED IN PLACENTA, SIGNAL = 1.3; EXPRESSED IN BRAIN, SIGNAL = 1.3; EXPRESSED IN BONE MARROW, SIGNAL = 1.4; EXPRESSED IN ADULT LIVER, SIGNAL = 1.3; EXPRESSED IN LUNG, SIGNAL = 1.4; EXPRESSED IN FETAL LIVER, SIGNAL = 1.2; EST_HUMAN HIT: N40398.1, EVALUE 6.00e-52; NT HIT: gi4506132, EVALUE 4.00e-52; SWISSPROT HIT: P09330, EVALUE 3.00e-06
atccgacggatcgcctctgaaaggatcatgctgatatccacagttttaatcttggggcactggagcttctggacttcatgtggaattgtattggtgaccaccac

SEQ ID NO: 27288 - DNA, 199 bp, Homo sapiens
  MAP TO AC006515.7; EXPRESSED IN ADULT LIVER, SIGNAL = 0.89; EXPRESSED IN PLACENTA, SIGNAL = 0.93; EXPRESSED IN LUNG, SIGNAL = 0.76; EXPRESSED IN FETAL LIVER, SIGNAL = 1.1; EXPRESSED IN BRAIN, SIGNAL =   1; EXPRESSED IN BONE MARROW, SIGNAL = 0.91; NT HIT: AF223391.1, EVALUE 1.20e-01
cgagatgttgagtcatgcccagatccagggcaaacatcacttctctaatctctctgatgacagcccaggccccactggacctgaaattgttagggtgatgatgggggtggggatgaggaagagaagaaggatcaaatggaaggaaagtgtgtggccttgggaaagttgtttaatattccccaaacaattaaggcctcaa

SEQ ID NO: 27289 - DNA, 157 bp, Homo sapiens
  MAP TO AC005255.1; EXPRESSED IN LUNG, SIGNAL = 1.6; EXPRESSED IN BRAIN, SIGNAL = 1.6; EXPRESSED IN BONE MARROW, SIGNAL = 0.97; EXPRESSED IN PLACENTA, SIGNAL =   3; EXPRESSED IN FETAL LIVER, SIGNAL = 0.98; EXPRESSED IN ADULT LIVER, SIGNAL = 1.5; NT HIT: AF127845.1, EVALUE 2.00e-76; SWISSPROT HIT: Q95157, EVALUE 4.00e-20; EST_HUMAN HIT: AI909504.1, EVALUE 8.00e-31
acatggaattcagaacactcatgatccaggatgccagaaccagcagtccacagagttgagggttcataatgaccatgtagtgcagagggtgacagatggccacaaaccggtcataggccatcacggtcagaaggaagttatccaatcctacaaagag

SEQ ID NO: 27290 - DNA, 81 bp, Homo sapiens
  MAP TO AC002449.1; EXPRESSED IN PLACENTA, SIGNAL = 0.94; EXPRESSED IN LUNG, SIGNAL = 1.1; EXPRESSED IN BRAIN, SIGNAL = 0.93; EXPRESSED IN BONE MARROW, SIGNAL =   1; EXPRESSED IN ADULT LIVER, SIGNAL = 1.1; EXPRESSED IN FETAL LIVER, SIGNAL = 1.1; NT HIT: AJ229042.1, EVALUE 4.00e-05; EST_HUMAN HIT: BE834518.1, EVALUE 1.00e-06
aggtcaagaagccagatctggtgagggcctttttctggtggggactctgcagagctccaaggcggtgcaaggcatcaaatg

SEQ ID NO: 27291 - DNA, 133 bp, Homo sapiens
  MAP TO AC005367.1; EXPRESSED IN ADULT LIVER, SIGNAL = 1.1; EXPRESSED IN PLACENTA, SIGNAL = 0.96; EXPRESSED IN LUNG, SIGNAL = 0.98; EXPRESSED IN BRAIN, SIGNAL = 0.99; EXPRESSED IN FETAL LIVER, SIGNAL = 0.83; EXPRESSED IN BONE MARROW, SIGNAL = 0.91; EST_HUMAN HIT: BE797284.1, EVALUE 6.90e+00; NT HIT: AF037352.1, EVALUE 1.90e-02
catgactttctcggactgagttgtgtccttgaggaagagggagtgggtaaactggaggagggtgggggtcctgagaaggaatgtgggcaactgggagttggatccttggcacaccatgagctggagctgagag

SEQ ID NO: 27292 - DNA, 151 bp, Homo sapiens
  MAP TO AC005161.1; EXPRESSED IN LUNG, SIGNAL = 0.85; EXPRESSED IN BRAIN, SIGNAL = 0.83; EXPRESSED IN BONE MARROW, SIGNAL = 0.76; EXPRESSED IN PLACENTA, SIGNAL =   1; EXPRESSED IN FETAL LIVER, SIGNAL = 0.69; EXPRESSED IN ADULT LIVER, SIGNAL = 0.76; NT HIT: AL163227.2, EVALUE 5.40e+00; EST_HUMAN HIT: AW466988.1, EVALUE 1.30e-01
taggcaatttggctgtacctatcagaatcttacagccagtaaatttagaattctattcagcaaaaataattgcaaaacacataagagcatgtgtatgagaatgatccttagagcatacagccaaaaatgtaaacacaatgtaagtgttcag

SEQ ID NO: 27293 - DNA, 193 bp, Homo sapiens
  MAP TO AC004600.2; EXPRESSED IN PLACENTA, SIGNAL = 1.2; EXPRESSED IN FETAL LIVER, SIGNAL = 0.97; EXPRESSED IN BRAIN, SIGNAL = 0.96; EXPRESSED IN BONE MARROW, SIGNAL = 0.7; EXPRESSED IN ADULT LIVER, SIGNAL = 1.1; EXPRESSED IN LUNG, SIGNAL = 0.94; SWISSPROT HIT: Q05086, EVALUE 6.00e-34; NT HIT: AF016704.1, EVALUE 1.00e-105; EST_HUMAN HIT: AI378869.1, EVALUE 1.00e-104
tgggggcacctttcgagttctcaaggtaagctgagcttgctcctttcttggagggatgaggatcacagagttttgcattaatcttataaagctcgagggctttaatagctgctgcattattatccatacgaagaaaagttggacaggaagcacaaaactcattcgtgcaggcttcatttccacagccctcagt

SEQ ID NO: 27294 - DNA, 149 bp, Homo sapiens
  MAP TO AC005385.2; EXPRESSED IN PLACENTA, SIGNAL = 1.1; EXPRESSED IN ADULT LIVER, SIGNAL = 1.2; EXPRESSED IN LUNG, SIGNAL =   1; EXPRESSED IN HELA, SIGNAL = 1.8; EXPRESSED IN FETAL LIVER, SIGNAL = 0.74; EXPRESSED IN BRAIN, SIGNAL = 0.76; EXPRESSED IN BONE MARROW, SIGNAL = 0.84; SWISSPROT HIT: Q96687, EVALUE 3.50e-01; EST_HUMAN HIT: BE138506.1, EVALUE 2.00e+00
tcagtccattgtagagtcccccggaacagcgacaggcggaggcagcaggggtcccaggaagacaggagacacaaacacatataaagaggagagagcagtggacagcagccatggagagggctggttcaccggggcttttaatggtggat

SEQ ID NO: 27295 - DNA, 118 bp, Homo sapiens
  MAP TO AC005090.1; EXPRESSED IN BRAIN, SIGNAL = 1.1; EXPRESSED IN BONE MARROW, SIGNAL = 1.1; EXPRESSED IN ADULT LIVER, SIGNAL = 1.1; EXPRESSED IN PLACENTA, SIGNAL = 1.3; EXPRESSED IN FETAL LIVER, SIGNAL = 1.3; EXPRESSED IN LUNG, SIGNAL = 1.1; EST_HUMAN HIT: AW363300.1, EVALUE 3.80e-01; NT HIT: AB035972.1, EVALUE 2.60e-01
tgatgacgatgatgatgatgatgatgatgatgatgatgagatgacaatcattatgatgaaagagaaggaccaaaggaaagaaaacaggaatgagagtgttcctagtaatggaaaagga

SEQ ID NO: 27296 - DNA, 381 bp, Homo sapiens
  MAP TO AC004050.1; EXPRESSED IN HELA, SIGNAL =  56; EXPRESSED IN BRAIN, SIGNAL = 0.66; EXPRESSED IN BONE MARROW, SIGNAL = 1.4; EXPRESSED IN ADULT LIVER, SIGNAL = 0.93; EXPRESSED IN PLACENTA, SIGNAL = 1.4; EXPRESSED IN LUNG, SIGNAL = 1.6; EXPRESSED IN FETAL LIVER, SIGNAL = 1.1; NT HIT: AF265296.1, EVALUE 1.00e-03; EST_HUMAN HIT: BE541744.1, EVALUE 2.00e-89; SWISSPROT HIT: P49191, EVALUE 3.00e-33
ttctgaggaagcagaagctgatcttcctgcactggtatcaccacatcactgtgctcctgtactcttggtactcctacaaagacatggttgccgggggaggttggttcatgactatgaactatggcgtgcacgccgtgatgtactcttactatgccttgcgggcggcaggtttccgagtctcccggaagtttgccatgttcatcaccttgtcccagatcactcagatgctgatgggctgtgtggttaactacctggtcttctgctggatgcagcatgaccagtgtcactctcactttcagaacatcttctggtcctcactcatgtacctcagctaccttgtgctcttctgccatttcttctttgaggcctacatcggcaaaa

SEQ ID NO: 27297 - DNA, 167 bp, Homo sapiens
  MAP TO AC002463.1; EXPRESSED IN PLACENTA, SIGNAL = 0.59; EXPRESSED IN BRAIN, SIGNAL = 0.94; EXPRESSED IN BONE MARROW, SIGNAL = 0.88; EXPRESSED IN ADULT LIVER, SIGNAL = 0.93; EXPRESSED IN LUNG, SIGNAL = 0.7; EXPRESSED IN FETAL LIVER, SIGNAL =   1; SWISSPROT HIT: P08393, EVALUE 5.10e+00; NT HIT: AF099189.1, EVALUE 9.70e-02
gtcgcctggttagaggccgtggacgaagcggtccaggcacagccagctgcagggcgcggcctcggcggcgctgctcgtggccctggtcagtgagcgcactcactcctggactaaggtaacccgcgtggaggagacccagctcccaggtggccatcccagttcccaca

SEQ ID NO: 27298 - DNA, 270 bp, Homo sapiens
  MAP TO AC004054.1; EXPRESSED IN LUNG, SIGNAL = 1.9; EXPRESSED IN PLACENTA, SIGNAL = 1.7; EXPRESSED IN FETAL LIVER, SIGNAL = 1.3; EXPRESSED IN BRAIN, SIGNAL = 0.8; EXPRESSED IN BONE MARROW, SIGNAL = 1.7; EXPRESSED IN ADULT LIVER, SIGNAL = 0.87; EST_HUMAN HIT: AW853949.1, EVALUE 1.00e-15; SWISSPROT HIT: P26808, EVALUE 1.00e-16; NT HIT: AJ271736.1, EVALUE 1.00e-63
cccgagttaaagcaatgagttcttccttctgggctgaagtgccctgaggcaatggtttggcttcaataacatcatccaaagttaccaccgcatatcctgcgcatctttctcctcgtggactgatgaagctgctcccatccacgtataactcccagtccactgatgcccatgactggtctcgaagatcgagtctgctagaatacactgagtccaacacttccacacagttatgttcaacagggctgtctgatactgggagtaaggttgcag

SEQ ID NO: 27299 - DNA, 83 bp, Homo sapiens
  MAP TO AC004615.1; EXPRESSED IN LUNG, SIGNAL = 0.97; EXPRESSED IN FETAL LIVER, SIGNAL = 0.86; EXPRESSED IN PLACENTA, SIGNAL = 0.82; EXPRESSED IN BRAIN, SIGNAL =   1; EXPRESSED IN BONE MARROW, SIGNAL = 0.87; EXPRESSED IN ADULT LIVER, SIGNAL = 0.84; NT HIT: gi11417342, EVALUE 1.00e-39; SWISSPROT HIT: Q13591, EVALUE 5.00e-10
acatccgggtgcttctggtgggtggcgaccggttattcacctgtgggaccaatgcattcacgcctgtctgcaccaaccgctcg

SEQ ID NO: 27300 - DNA, 219 bp, Homo sapiens
  MAP TO AC005410.1; EXPRESSED IN LUNG, SIGNAL = 0.95; EXPRESSED IN FETAL LIVER, SIGNAL = 0.76; EXPRESSED IN BRAIN, SIGNAL = 0.8; EXPRESSED IN PLACENTA, SIGNAL = 0.95; EXPRESSED IN BONE MARROW, SIGNAL = 0.89; EXPRESSED IN ADULT LIVER, SIGNAL = 0.9; NT HIT: gi11415045, EVALUE 5.20e-01; SWISSPROT HIT: P48634, EVALUE 4.30e-01
agttctagaggccagaaatctgaaggtgttggcagggccatgcttctcccgaaggttctgggggaggatcccccctttctttcagcttctggtactgctgctcttccttggcttgtggcagcataaccgtaatctctatggtcttcttccctgtgtctgtcttgtgcatctctatcttctccttttctttgtttggtctcctataaggatagttatttt

SEQ ID NO: 27301 - DNA, 104 bp, Homo sapiens
  MAP TO AC005030.1; EXPRESSED IN BONE MARROW, SIGNAL = 0.7; EXPRESSED IN PLACENTA, SIGNAL = 0.66; EXPRESSED IN LUNG, SIGNAL = 0.87; EXPRESSED IN FETAL LIVER, SIGNAL = 0.7; EXPRESSED IN ADULT LIVER, SIGNAL = 0.8; EXPRESSED IN BRAIN, SIGNAL = 0.67; EST_HUMAN HIT: H26672.1, EVALUE 1.30e+00; NT HIT: AF310617.1, EVALUE 8.80e-01; SWISSPROT HIT: P54868, EVALUE 7.20e+00
cccggggagcgtcaaagtgggttctttctgctatgacagcggaatacccatgaacactgggcgggagagggttggccaggagcacgccccggggaacctgtgtg

SEQ ID NO: 27302 - DNA, 241 bp, Homo sapiens
  MAP TO AC004057.1; EXPRESSED IN PLACENTA, SIGNAL =   1; EXPRESSED IN LUNG, SIGNAL =   1; EXPRESSED IN FETAL LIVER, SIGNAL = 0.75; EXPRESSED IN BONE MARROW, SIGNAL = 0.84; EXPRESSED IN ADULT LIVER, SIGNAL = 0.62; EXPRESSED IN BRAIN, SIGNAL = 0.82; NT HIT: AE002152.1, EVALUE 5.80e-01; EST_HUMAN HIT: AA504289.1, EVALUE 3.40e+00
gggatttacagacaacagttataccttgattaatattataactaactcactccaactagctactcagtgactcaaaatactgaccaacaatttggaaaaaacttagaagaaaattaatatgattttaaaaatcaagaacaaattttcaagaggaaaatattaattcaacctgaaaaatagaataaatattagtttcttcatcttcaaaacaaggattaaagtcttcaactgacacagtagt

SEQ ID NO: 27303 - DNA, 124 bp, Homo sapiens
  MAP TO AC006477.2; EXPRESSED IN PLACENTA, SIGNAL = 0.92; EXPRESSED IN FETAL LIVER, SIGNAL = 0.84; EXPRESSED IN BRAIN, SIGNAL = 0.57; EXPRESSED IN BONE MARROW, SIGNAL =   1; EXPRESSED IN ADULT LIVER, SIGNAL = 0.82; EXPRESSED IN LUNG, SIGNAL = 0.98; NT HIT: Y09143.2, EVALUE 7.00e-02; SWISSPROT HIT: P04196, EVALUE 1.40e+00
gttcatagggcttgaaagcggggacaccaccaacattcctggcagccaagtcagatgcatggacatcgtctttaaccacatcttcacactcatccctcatctgaactatcaacaatttcatgga

SEQ ID NO: 27304 - DNA, 118 bp, Homo sapiens
  MAP TO AC004626.1; EXPRESSED IN LUNG, SIGNAL = 0.54; EXPRESSED IN BRAIN, SIGNAL = 0.57; EXPRESSED IN BONE MARROW, SIGNAL = 2.1; EXPRESSED IN PLACENTA, SIGNAL = 0.59; EXPRESSED IN ADULT LIVER, SIGNAL = 0.4; NT HIT: Z84724.1, EVALUE 4.10e+00; EST_HUMAN HIT: BF365143.1, EVALUE 3.00e-60
cttggagcatgcgtacctggtttcgtgtgagccagagctccctaacatcaaaaatcccattctagatctgatggagaataatgttatcagtgtcattgttttgaggatgaataagagc

SEQ ID NO: 27305 - DNA, 157 bp, Homo sapiens
  MAP TO AC002532.1; EXPRESSED IN ADULT LIVER, SIGNAL = 0.75; EXPRESSED IN PLACENTA, SIGNAL = 0.64; EXPRESSED IN LUNG, SIGNAL = 0.66; EXPRESSED IN BRAIN, SIGNAL = 0.82; EXPRESSED IN BONE MARROW, SIGNAL = 0.71; NT HIT: AJ006565.1, EVALUE 3.60e-01; SWISSPROT HIT: Q57458, EVALUE 2.30e+00
ctgccatgaaactgttggacgacgtgttcttttttcagattgctgttctcagaaagcccagggcaatcagatctcagccagatgtgttgagggtcaggactgagatcaacatcttgggaggtgaggttgagggaacaggggtgttgtgtgctaacac

SEQ ID NO: 27306 - DNA, 297 bp, Homo sapiens
  MAP TO AC006501.5; EXPRESSED IN ADULT LIVER, SIGNAL = 0.68; EXPRESSED IN LUNG, SIGNAL = 0.73; EXPRESSED IN BRAIN, SIGNAL = 0.81; EXPRESSED IN BONE MARROW, SIGNAL = 0.63; EXPRESSED IN PLACENTA, SIGNAL = 0.72; EST_HUMAN HIT: AI189142.1, EVALUE 0.00e+00; SWISSPROT HIT: O14727, EVALUE 2.00e-10
gccactaggctgttccatcactgccagcatctgtccattttcagtattccataggacagtggtaccatctgttgaacacgatgccaaaatatgtcctgaaggggagaaacagcagcagtggacagcataggtatgaaacttcaatggagaatgtggcagttcagtaaagtcacgtaacgagtacaggcgaattgttttgtccaaggagcaagtagccaagagggaaaaggagaaggcacagcagttgacatcgtcaccatgatcagctaatgtgtgaatcagtttcaccatgttctt

SEQ ID NO: 27307 - DNA, 262 bp, Homo sapiens
  MAP TO AC005613.1; EXPRESSED IN LUNG, SIGNAL = 0.88; EXPRESSED IN FETAL LIVER, SIGNAL = 0.76; EXPRESSED IN BONE MARROW, SIGNAL = 0.87; EXPRESSED IN PLACENTA, SIGNAL = 0.81; EXPRESSED IN BRAIN, SIGNAL = 0.99; EXPRESSED IN ADULT LIVER, SIGNAL = 0.86; SWISSPROT HIT: P12659, EVALUE 1.90e+00; EST_HUMAN HIT: AI056031.1, EVALUE 9.40e-01; NT HIT: L40608.1, EVALUE 1.60e-01
ggtattgcccaacttaatcttgtacctagatttccatgtatttctgcatgtgcatcagggacctgtgataaaattacctaatactgcagtgcaggtttacaagctcagtagtgcatgccagttgataaaattcatgtgtgtcccattcaagtacatgatcaatgaatataacaaatataaaacacattattggaaacaagtgatcattggaaccttcatttttgcagattttcttctcttcctcatacttatttgggtaaga

SEQ ID NO: 27308 - DNA, 175 bp, Homo sapiens
  MAP TO AC004063.1; EXPRESSED IN PLACENTA, SIGNAL = 0.9; EXPRESSED IN BRAIN, SIGNAL = 0.66; EXPRESSED IN BONE MARROW, SIGNAL = 0.74; EXPRESSED IN LUNG, SIGNAL = 0.74; EXPRESSED IN ADULT LIVER, SIGNAL = 0.57; NT HIT: AF181897.1, EVALUE 6.00e-37; EST_HUMAN HIT: BF035327.1, EVALUE 2.00e-37
gatcttctggataatttgctgcagcttctacgtcagcacttgctgctccactttgtactttcacgttatgaggatggcttctttccttaaccttcatgaaccaacattttttagcctcaaacttttcttcttcagcttcctcacctctctctgccttcacagaattgaagagagt

SEQ ID NO: 27309 - DNA, 171 bp, Homo sapiens
  MAP TO AC005881.2; EXPRESSED IN PLACENTA, SIGNAL = 0.68; EXPRESSED IN FETAL LIVER, SIGNAL = 0.76; EXPRESSED IN BONE MARROW, SIGNAL = 0.84; EXPRESSED IN LUNG, SIGNAL = 0.85; EXPRESSED IN BRAIN, SIGNAL = 0.65; EXPRESSED IN ADULT LIVER, SIGNAL = 0.76; NT HIT: AB046820.1, EVALUE 8.00e-92; EST_HUMAN HIT: AW500507.1, EVALUE 6.00e-35; SWISSPROT HIT: P10978, EVALUE 2.30e+00
tgttcaattaacctatgccttaaaggatgtctgctgatttctgccagagtttctggttccctctgttctccaaggataaaaaacaccatttcttgaagcaaaacatcagaggtcacttgccgaacgatgcgatgaagcagagcagtggatgtgagaatacccatctcagaa

SEQ ID NO: 27310 - DNA, 120 bp, Homo sapiens
  MAP TO AC004638.1; EXPRESSED IN BRAIN, SIGNAL = 1.6; EXPRESSED IN ADULT LIVER, SIGNAL = 0.67; EXPRESSED IN PLACENTA, SIGNAL = 0.71; EXPRESSED IN LUNG, SIGNAL = 0.72; EXPRESSED IN BONE MARROW, SIGNAL = 0.68; SWISSPROT HIT: P43166, EVALUE 2.00e-17; NT HIT: M76423.1, EVALUE 1.00e-61; EST_HUMAN HIT: N78377.1, EVALUE 1.00e-34
atggggaagttccggagcctgctttttacctcggaggacgatgagaggatccacatggtgaacaacttccggccaccacagccactgaagggccgcgtggtaaaggcctccttccgggcc

SEQ ID NO: 27311 - DNA, 153 bp, Homo sapiens
  MAP TO AC004944.1; EXPRESSED IN BONE MARROW, SIGNAL =   1; EXPRESSED IN PLACENTA, SIGNAL = 1.2; EXPRESSED IN LUNG, SIGNAL = 1.2; EXPRESSED IN FETAL LIVER, SIGNAL = 1.1; EXPRESSED IN ADULT LIVER, SIGNAL = 1.2; EXPRESSED IN BRAIN, SIGNAL = 0.97; EST_HUMAN HIT: BE350127.1, EVALUE 6.00e-19; SWISSPROT HIT: Q08372, EVALUE 9.00e+00; NT HIT: AF224669.1, EVALUE 4.00e-19
gggtcaggatcaccaatatcactctcttccatctccacatccagtcccactggaaggtcttcacgggccataacacacatggagccatcgtctcccatgataataatgccttcttctacaacacctcctgcaggatctgcctgaggctgtttt

SEQ ID NO: 27312 - DNA, 207 bp, Homo sapiens
  MAP TO AC005483.1; EXPRESSED IN PLACENTA, SIGNAL = 1.1; EXPRESSED IN BRAIN, SIGNAL = 1.1; EXPRESSED IN BONE MARROW, SIGNAL =   1; EXPRESSED IN ADULT LIVER, SIGNAL =   1; EXPRESSED IN LUNG, SIGNAL = 1.1; EXPRESSED IN FETAL LIVER, SIGNAL = 1.1; SWISSPROT HIT: P31367, EVALUE 5.00e-09; NT HIT: gi11420134, EVALUE 1.00e-105
tgggtgacagcgtgatgccctgggtgttgatcacgggcaggatctggttcccaatgactgtggcgatgatctggccctgggcgtttgtgaggagctggggggtgattggctgcacttgcaagccctgagtgccgcttgctgcttggctcgatggccctggattaggcatcagtggaatggtcccgataatctgcaagagagggccaa

SEQ ID NO: 27313 - DNA, 160 bp, Homo sapiens
  MAP TO AC006518.17; EXPRESSED IN BONE MARROW, SIGNAL = 0.65; EXPRESSED IN ADULT LIVER, SIGNAL = 1.4; EXPRESSED IN PLACENTA, SIGNAL = 6.3; EXPRESSED IN LUNG, SIGNAL = 0.74; EXPRESSED IN BRAIN, SIGNAL = 1.1; NT HIT: gi11436001, EVALUE 3.00e-85; SWISSPROT HIT: P50620, EVALUE 1.30e+00; EST_HUMAN HIT: AA558651.1, EVALUE 4.00e-85
acagaaggaaatcggggtagagagagttgacggtgtcctcgtcggggtggtcgttgctgattttgaaaaggaggtgggggaggatggcggtgatggcctcctggttttggtggtctctgctgaggaccatcatcttggttaccactatcaccagggggtc

SEQ ID NO: 27314 - DNA, 188 bp, Homo sapiens
  MAP TO AC005038.1; EXPRESSED IN LUNG, SIGNAL = 1.4; EXPRESSED IN BRAIN, SIGNAL = 1.3; EXPRESSED IN BONE MARROW, SIGNAL = 1.4; EXPRESSED IN PLACENTA, SIGNAL = 1.5; EXPRESSED IN FETAL LIVER, SIGNAL = 1.6; EXPRESSED IN ADULT LIVER, SIGNAL = 1.2; SWISSPROT HIT: P48067, EVALUE 1.00e-27; NT HIT: X82569.1, EVALUE 9.00e-95; EST_HUMAN HIT: AI032334.1, EVALUE 5.00e-08
aatggtgctgtgcccagcgaggccaccaagagggaccagaacctcaaacggggcaactggggcaaccagatcgagtttgtactgacgagcgtgggctatgccgtgggcctgggcaatgtctggcgcttcccatacctctgctatcgcaacgggggaggtacccagtgggcacagggcagggaccaccc

SEQ ID NO: 27315 - DNA, 268 bp, Homo sapiens
  MAP TO AC005659.2; EXPRESSED IN BRAIN, SIGNAL = 0.89; EXPRESSED IN PLACENTA, SIGNAL = 1.2; EXPRESSED IN LUNG, SIGNAL = 1.3; EXPRESSED IN BONE MARROW, SIGNAL = 1.4; EXPRESSED IN ADULT LIVER, SIGNAL = 1.4; EXPRESSED IN FETAL LIVER, SIGNAL = 1.3; EST_HUMAN HIT: BF593876.1, EVALUE 3.80e+00; SWISSPROT HIT: Q61554, EVALUE 4.90e-01; NT HIT: U22384.1, EVALUE 6.50e-01
agagccttgccctcacaggcacacccccttggacctgcctatccagatcccaacaccctggatcttgtccacactctggtcccttctgagaagggtgaacaccatgataacatggttcgttgctgttagaaaactcatccccctcctggcacccatcctctggcagacaatcactgttcacagccttccaggtgcggctggcccaggctatgagcaagcgagcagcaagagtgtgaacaccaccggatttgctattgagacctggatt

SEQ ID NO: 27316 - DNA, 139 bp, Homo sapiens
  MAP TO AC004835.2; EXPRESSED IN BONE MARROW, SIGNAL =   1; EXPRESSED IN ADULT LIVER, SIGNAL = 1.2; EXPRESSED IN PLACENTA, SIGNAL = 1.2; EXPRESSED IN FETAL LIVER, SIGNAL = 1.1; EXPRESSED IN BRAIN, SIGNAL = 1.1; EXPRESSED IN LUNG, SIGNAL = 1.2; SWISSPROT HIT: Q02040, EVALUE 6.00e-06; EST_HUMAN HIT: H20358.1, EVALUE 1.20e-01; NT HIT: AB040934.1, EVALUE 7.90e-02
aggttctagactccctggaagcaatatgttgatcaacaattttgctatgggcttgaggtagaggtgctgagctgcacagagctctgttgcctcagagttatcatacaccactgtgactgtcatgttgtcctcagaccac

SEQ ID NO: 27317 - DNA, 146 bp, Homo sapiens
  MAP TO AC004656.1; EXPRESSED IN LUNG, SIGNAL = 0.73; EXPRESSED IN ADULT LIVER, SIGNAL = 0.64; EXPRESSED IN PLACENTA, SIGNAL = 0.88; EXPRESSED IN BRAIN, SIGNAL = 0.74; EXPRESSED IN BONE MARROW, SIGNAL = 0.77; SWISSPROT HIT: Q15120, EVALUE 6.00e-12; NT HIT: gi4885544, EVALUE 1.00e-43; EST_HUMAN HIT: AA156158.1, EVALUE 2.00e-37
cacttctgtttgggggtgacactaatcctgttcatcctaaacacataggaagtatcgatcccacctgtaacgtggcggatgtggtgaaaggtaaggagaccgttgtaatggtatcgatcgtagttcaaattggattgtggtttatt

SEQ ID NO: 27318 - DNA, 262 bp, Homo sapiens
  MAP TO AC004707.1; EXPRESSED IN PLACENTA, SIGNAL = 0.78; EXPRESSED IN LUNG, SIGNAL = 0.82; EXPRESSED IN FETAL LIVER, SIGNAL = 0.84; EXPRESSED IN BRAIN, SIGNAL = 0.97; EXPRESSED IN BONE MARROW, SIGNAL = 0.73; EXPRESSED IN ADULT LIVER, SIGNAL = 0.88; NT HIT: gi11434402, EVALUE 1.00e-91; EST_HUMAN HIT: BE891148.1, EVALUE 2.00e-91; SWISSPROT HIT: P16815, EVALUE 4.20e+00
aatctaagtctggctcccgtccccgcaagccaccaccccggaagcacactcgttcctgggctgtgctgaagctgctgctgctgctgctgctatttggtgtggcgggagggctggttgcttgtcgggtgacagagctgcagcagcagcccctctgcaccagcgtgaacaccatctatgacaatgcggtccagggtctacgccgccatgagatcctccagtgggtcctccagaccgactctcagcagtgagcttgtccccagca

SEQ ID NO: 27319 - DNA, 307 bp, Homo sapiens
  MAP TO AC005562.1; EXPRESSED IN PLACENTA, SIGNAL = 0.78; EXPRESSED IN BRAIN, SIGNAL = 0.73; EXPRESSED IN BONE MARROW, SIGNAL = 0.77; EXPRESSED IN ADULT LIVER, SIGNAL = 0.69; EXPRESSED IN LUNG, SIGNAL = 0.69; EST_HUMAN HIT: AU134406.1, EVALUE 0.00e+00; NT HIT: gi4557700, EVALUE 0.00e+00; SWISSPROT HIT: Q04695, EVALUE 3.00e-34
cttgttctgcagctcctcgattgtcctgtagtactggctgtagtcacgggcgggccccggggcctgcctctggtaccagtcacggatcttcacctccagctcagtgttggcctcctccagggcgcgcatcttgtccaggtaggaggccaggcggtcattgaggttctgcatggtggccttctcacctccggccagcagcccatcaacgcccccaaagctgctgccatagccaccgccagagccaaagcagtagcagctggaatagctgctaccccggagggcactgcccaggccaccagcagatccc

SEQ ID NO: 27320 - DNA, 172 bp, Homo sapiens
  MAP TO AC004841.2; EXPRESSED IN ADULT LIVER, SIGNAL = 0.84; EXPRESSED IN BRAIN, SIGNAL = 0.72; EXPRESSED IN BONE MARROW, SIGNAL = 0.86; EXPRESSED IN PLACENTA, SIGNAL = 0.81; EXPRESSED IN LUNG, SIGNAL = 0.74; EXPRESSED IN FETAL LIVER, SIGNAL = 0.8; NT HIT: AJ277661.1, EVALUE 2.50e-02; EST_HUMAN HIT: H52681.1, EVALUE 1.00e-02
tcagggaaagcgatgccagcaaaacaacaacaacaacaacaacaacaacaaaacaaaacaaaacttcaccttaaaggaactcttgaagatacttcacaacattgtaattgcaaggatgaaatgttggaagctgatccaaatttggcaaggagtatggcaatttgctaaagca

SEQ ID NO: 27321 - DNA, 137 bp, Homo sapiens
  MAP TO AC005157.1; EXPRESSED IN LUNG, SIGNAL =   1; EXPRESSED IN ADULT LIVER, SIGNAL = 0.93; EXPRESSED IN PLACENTA, SIGNAL = 0.93; EXPRESSED IN FETAL LIVER, SIGNAL = 1.1; EXPRESSED IN BRAIN, SIGNAL =   1; EXPRESSED IN BONE MARROW, SIGNAL =   1; EST_HUMAN HIT: BF313593.1, EVALUE 4.60e-01; SWISSPROT HIT: P05407, EVALUE 1.00e+00
ctctttggcaggcaacagcagctgggcccacgctgccccaccttccactagactctcttccagcttcttccatttctgggcctgtcctacaattagctccatgatgagagatgccagcatctcctccaggatacata

SEQ ID NO: 27322 - DNA, 106 bp, Homo sapiens
  MAP TO AC005899.1; EXPRESSED IN PLACENTA, SIGNAL = 0.97; EXPRESSED IN ADULT LIVER, SIGNAL = 1.1; EXPRESSED IN LUNG, SIGNAL = 0.96; EXPRESSED IN FETAL LIVER, SIGNAL = 0.99; EXPRESSED IN BRAIN, SIGNAL = 0.7; EXPRESSED IN BONE MARROW, SIGNAL = 0.92; NT HIT: AF001212.1, EVALUE 3.00e-53; EST_HUMAN HIT: BE386865.1, EVALUE 4.00e-53
gtatgtacgacccttcttgaattccatcagcaaggctaaagcagctcgcctggtccgatctcttcttgatctgtttcttgatatggaagcagctacagggcaggag

SEQ ID NO: 27323 - DNA, 83 bp, Homo sapiens
  MAP TO AC004664.1; EXPRESSED IN PLACENTA, SIGNAL = 0.61; EXPRESSED IN LUNG, SIGNAL = 0.71; EXPRESSED IN FETAL LIVER, SIGNAL = 0.77; EXPRESSED IN BONE MARROW, SIGNAL = 0.8; EXPRESSED IN ADULT LIVER, SIGNAL = 0.65; EXPRESSED IN BRAIN, SIGNAL = 0.58; NT HIT: X59403.1, EVALUE 3.60e-02; EST_HUMAN HIT: BE396251.1, EVALUE 6.80e-01
ccagctgggtccccatggctctgctttcctggagaccaagaacctggactgggctgcctcagacagtgtgaggcaggagcaag

SEQ ID NO: 27324 - DNA, 229 bp, Homo sapiens
  MAP TO AC003093.1; EXPRESSED IN PLACENTA, SIGNAL = 0.7; EXPRESSED IN LUNG, SIGNAL = 0.77; EXPRESSED IN BRAIN, SIGNAL = 0.66; EXPRESSED IN BONE MARROW, SIGNAL = 0.78; EXPRESSED IN ADULT LIVER, SIGNAL = 0.6; EST_HUMAN HIT: BF569626.1, EVALUE 3.00e-93; NT HIT: gi4758153, EVALUE 2.00e-93; SWISSPROT HIT: P52192, EVALUE 6.80e+00
ctgcaccgtcttggtctggatgcccacgatgccaccacacttctcctcgacctgcatgtgctcagagatcacacacttctgcatcgtcgtgatcttctgtgtcaaaacgcacaggacctcattccttccttccagcacctgctggagcacagggtttctcagatttattgttctgaaaaagaaaaacggatgtgagtggcttagtgcctcaggggacattggtgtagtg

SEQ ID NO: 27325 - DNA, 133 bp, Homo sapiens
  MAP TO AC004738.1; EXPRESSED IN BONE MARROW, SIGNAL = 0.76; EXPRESSED IN ADULT LIVER, SIGNAL = 0.92; EXPRESSED IN PLACENTA, SIGNAL =   1; EXPRESSED IN FETAL LIVER, SIGNAL = 0.88; EXPRESSED IN BRAIN, SIGNAL = 0.77; EXPRESSED IN LUNG, SIGNAL = 0.88; NT HIT: AF229247.1, EVALUE 3.00e-01; EST_HUMAN HIT: BE963688.2, EVALUE 6.90e+00; SWISSPROT HIT: P52638, EVALUE 8.10e-01
cttgagtgtctcctcaaggtaaggcctttgctgtagctgcatgcatcccagcttccagccccagaactgagttcattttgggaacgttttctattgttgtggggcactttctcttcagacatgtaaatgctct

SEQ ID NO: 27326 - DNA, 136 bp, Homo sapiens
  MAP TO AC004648.1; EXPRESSED IN PLACENTA, SIGNAL = 1.1; EXPRESSED IN LUNG, SIGNAL = 1.1; EXPRESSED IN FETAL LIVER, SIGNAL = 1.1; EXPRESSED IN BRAIN, SIGNAL = 1.1; EXPRESSED IN BONE MARROW, SIGNAL = 1.1; EXPRESSED IN ADULT LIVER, SIGNAL = 1.3; SWISSPROT HIT: P49766, EVALUE 3.10e+00; NT HIT: U20760.1, EVALUE 1.20e+00; EST_HUMAN HIT: R02811.1, EVALUE 1.80e+00
aagcagctgtaaaggaactgaccgcagtctactccattgccttcgacattgcttccaacagcttctgggtgtcggccgttcacgtgtgcctgggcaacatcagaaattcctatgtgagccccatttggaaaaccaa

SEQ ID NO: 27327 - DNA, 247 bp, Homo sapiens
  MAP TO AC006239.5; EXPRESSED IN PLACENTA, SIGNAL = 0.8; EXPRESSED IN LUNG, SIGNAL =   1; EXPRESSED IN FETAL LIVER, SIGNAL = 1.2; EXPRESSED IN BRAIN, SIGNAL =   1; EXPRESSED IN BONE MARROW, SIGNAL = 1.2; EXPRESSED IN ADULT LIVER, SIGNAL =   1; SWISSPROT HIT: Q58851, EVALUE 2.80e+00; NT HIT: M11228.1, EVALUE 3.80e-02; EST_HUMAN HIT: BE071577.1, EVALUE 2.20e-01
cagtgatggcagtaatagtagcagaagggttggtgattggaagaatattattggctccatcttcagggctgttgaggtgatcaaacgcaaggataatttgtatgcaaaatataaatttcaacctctgaaattaaaggacctaaatgtgaatcctggctccaccattgatcacacagctgatctggaatatactcaatctctccagacatcccttttcacaccattaaatcaggtaaaacctatttat

SEQ ID NO: 27328 - DNA, 127 bp, Homo sapiens
  MAP TO AC005586.1; EXPRESSED IN PLACENTA, SIGNAL = 1.4; EXPRESSED IN BONE MARROW, SIGNAL = 1.1; EXPRESSED IN FETAL LIVER, SIGNAL = 1.1; EXPRESSED IN LUNG, SIGNAL = 1.2; EXPRESSED IN BRAIN, SIGNAL = 1.2; EXPRESSED IN ADULT LIVER, SIGNAL = 1.2; SWISSPROT HIT: O88942, EVALUE 5.40e+00; NT HIT: X58741.1, EVALUE 2.80e-01; EST_HUMAN HIT: R12245.1, EVALUE 2.70e-02
gatgacgttctggcggtcagcagtcttctggacactttccggacaccagcccacagtcattccctcccacagcccactcagaactgcaactggaaatccaaacgcattcaaaaactggctaaggcag

SEQ ID NO: 27329 - DNA, 210 bp, Homo sapiens
  MAP TO AC003101.1; EXPRESSED IN PLACENTA, SIGNAL = 1.6; EXPRESSED IN LUNG, SIGNAL = 1.6; EXPRESSED IN FETAL LIVER, SIGNAL = 1.4; EXPRESSED IN BRAIN, SIGNAL = 1.4; EXPRESSED IN ADULT LIVER, SIGNAL = 1.6; EXPRESSED IN HELA, SIGNAL = 2.3; EXPRESSED IN BONE MARROW, SIGNAL = 1.4; SWISSPROT HIT: Q9Y946, EVALUE 1.30e+00; EST_HUMAN HIT: BF035674.1, EVALUE 5.00e-85
ctcatcgaggacttgcggaaggagctggagcacctgcagatgtacaagctggactgcgagcggccaggcaggggccgcagtgcctcctctggcctaggcgagttcaatgccagggcccgcgaggtggagctcgagcacgaggtcaagcggctcaagcaggtgggtctagcagtctctgtgtccagtggggcagggtggccgggcccacca

SEQ ID NO: 27330 - DNA, 241 bp, Homo sapiens
  MAP TO AC005384.1; EXPRESSED IN PLACENTA, SIGNAL = 1.4; EXPRESSED IN LUNG, SIGNAL = 1.4; EXPRESSED IN FETAL LIVER, SIGNAL = 1.2; EXPRESSED IN BRAIN, SIGNAL = 1.5; EXPRESSED IN BONE MARROW, SIGNAL = 0.96; EXPRESSED IN ADULT LIVER, SIGNAL = 1.4; NT HIT: AF111168.2, EVALUE 3.00e-12; SWISSPROT HIT: Q9X5X3, EVALUE 1.50e+00; EST_HUMAN HIT: AI796839.1, EVALUE 2.00e-07
tccaggccaggcttcctcgacattggcactattgacattttggtctgcaaaattgttacggggggctgtcctgtgcattgtagggtatttagcagcgtccctggcctctaccgtccggataccagtagcacctttctcaactatggcagccaaaaatgtcctttcagcactgccaaatgtctccagggggcagaagcgcacctgcttgacaatcactgcccgaagcgaagggtgcctcaga

SEQ ID NO: 27331 - DNA, 86 bp, Homo sapiens
  MAP TO AC006539.1; EXPRESSED IN BONE MARROW, SIGNAL = 1.1; EXPRESSED IN FETAL LIVER, SIGNAL = 0.92; EXPRESSED IN ADULT LIVER, SIGNAL = 0.82; EXPRESSED IN PLACENTA, SIGNAL = 0.78; EXPRESSED IN LUNG, SIGNAL = 0.79; EXPRESSED IN BRAIN, SIGNAL = 1.2; NT HIT: AB043953.1, EVALUE 1.80e-01; EST_HUMAN HIT: N50109.1, EVALUE 3.00e-10
aaagagagcatggcttctgaacaagctaaacaagtgggtcaactggccctgggtctatgacctgtacggggtgggccagtagaact

SEQ ID NO: 27332 - DNA, 411 bp, Homo sapiens
  MAP TO AC005283.1; EXPRESSED IN LUNG, SIGNAL = 0.91; EXPRESSED IN PLACENTA, SIGNAL = 1.3; EXPRESSED IN FETAL LIVER, SIGNAL = 0.9; EXPRESSED IN BRAIN, SIGNAL = 0.91; EXPRESSED IN BONE MARROW, SIGNAL =   1; EXPRESSED IN ADULT LIVER, SIGNAL = 0.88; SWISSPROT HIT: Q62786, EVALUE 1.00e-06; NT HIT: AB007935.1, EVALUE 0.00e+00; EST_HUMAN HIT: AI659351.1, EVALUE 2.00e-52
tgacaaagctgcaggtgagcaaatcgaagaggaccctcaccctggtggaaaacaagcccattcagctgaactgctcagtcaagtctcagaccagccagaactcccactttgcggtgctctggtacgtccacaagccctcagatgccaacggcaagcttatcctgaagaccacccacaactccgccttcgaatacggtacttacgtggaggaggagggcctgagagccaggctccagtttgagaggcatgtgtcgggggacctgttcagcctcaccgtccagagagccgaggtcagcgacagcggcagctactactgccacgtggagtagtggctgctgagccccaactacgcctggtacaagctggcagaggaggtttctgggcgcacagaagtcactgtgaaacagccag

SEQ ID NO: 27333 - DNA, 266 bp, Homo sapiens
  MAP TO AC006385.3; EXPRESSED IN LUNG, SIGNAL = 0.85; EXPRESSED IN FETAL LIVER, SIGNAL = 0.83; EXPRESSED IN PLACENTA, SIGNAL = 0.9; EXPRESSED IN BRAIN, SIGNAL = 0.98; EXPRESSED IN BONE MARROW, SIGNAL = 0.77; EXPRESSED IN ADULT LIVER, SIGNAL = 0.84; NT HIT: L18988.1, EVALUE 2.50e+00; EST_HUMAN HIT: AI925707.1, EVALUE 2.40e-01
gatctcagatctccaccatcacagttgcgaccttcaataccactttggcgtcattcaacgtaggctatgcagactttttcaatgagcatatgaggaaactctgcaaccaggtgcctatcccggagatgccacatgaacctctggcatgtgctaacctacctcgaagcctcacagactcctgcataaactacagctacctagaggacacagaacatattgacgggaccaataactttgtccacaagaatggaatgcttgatctttct

SEQ ID NO: 27334 - DNA, 360 bp, Homo sapiens
  MAP TO AC005296.1; EXPRESSED IN PLACENTA, SIGNAL = 1.2; EXPRESSED IN LUNG, SIGNAL =   1; EXPRESSED IN FETAL LIVER, SIGNAL =   1; EXPRESSED IN ADULT LIVER, SIGNAL = 1.2; EXPRESSED IN BRAIN, SIGNAL = 0.91; EXPRESSED IN BONE MARROW, SIGNAL = 1.2; EST_HUMAN HIT: BE184840.1, EVALUE 5.20e+00; SWISSPROT HIT: P25848, EVALUE 9.70e+00
ttctttttctccttctccttttccttctcttttcccttctccctctcctcctcactcttcctctttcctccctccccttcctcctcttccctccctcctactccttctctcctcttccctcccctcctcctcttccctccctccccctcctcttccctccctcccttccttttctcctcctccttcttcttcttctcctccttttcctcctcttccccctccccgccctccttctcctccttcttgcagtgggcaagcactctccaattgcagacatccctagttccccgctgttcacactcagcctgaatcatgcccatgtgatagctgcctgtctcctgcaggcatttgaattttcat

SEQ ID NO: 27335 - DNA, 159 bp, Homo sapiens
  MAP TO AC005020.1; EXPRESSED IN BONE MARROW, SIGNAL = 0.75; EXPRESSED IN PLACENTA, SIGNAL = 0.68; EXPRESSED IN LUNG, SIGNAL = 0.98; EXPRESSED IN FETAL LIVER, SIGNAL = 0.72; EXPRESSED IN BRAIN, SIGNAL = 0.62; EXPRESSED IN ADULT LIVER, SIGNAL = 0.66; EST_HUMAN HIT: AW340873.1, EVALUE 7.00e-59; NT HIT: AF170025.1, EVALUE 4.00e-72; SWISSPROT HIT: Q9Y2L8, EVALUE 1.00e-20
aagttggtgaaaattgaagaggtggctgatgtggctgtatccttcatcctggaggaatgggggcatttggaccagtcccagaagtccctttatagggatgacaggaaggagaactatgggagtattacttccatgggtaaggattatttcatctgcatg

SEQ ID NO: 27336 - DNA, 153 bp, Homo sapiens
  MAP TO AC003030.1; EXPRESSED IN BRAIN, SIGNAL = 1.1; EXPRESSED IN PLACENTA, SIGNAL = 0.85; EXPRESSED IN LUNG, SIGNAL = 0.79; EXPRESSED IN BONE MARROW, SIGNAL = 0.78; EXPRESSED IN ADULT LIVER, SIGNAL = 0.79; EXPRESSED IN FETAL LIVER, SIGNAL = 0.9; SWISSPROT HIT: O60811, EVALUE 1.40e+00; NT HIT: AB020699.1, EVALUE 3.00e-66; EST_HUMAN HIT: AU126919.1, EVALUE 2.00e-65
acctgaataaagcctgtgggaacgccatggatgcccatgaagccgcccagatgcaccagaacttctcgcagcagctgctccaggaccacattgaggcctgcagcctccccgaacacaacctcatcacggtacgggtgtgggtgttaggggacg

SEQ ID NO: 27337 - DNA, 196 bp, Homo sapiens
  MAP TO AC004925.1; EXPRESSED IN BRAIN, SIGNAL = 1.2; EXPRESSED IN BONE MARROW, SIGNAL = 1.2; EXPRESSED IN ADULT LIVER, SIGNAL = 1.1; EXPRESSED IN PLACENTA, SIGNAL =   1; EXPRESSED IN FETAL LIVER, SIGNAL = 1.1; EXPRESSED IN LUNG, SIGNAL = 1.4; EST_HUMAN HIT: AW818211.1, EVALUE 4.40e-02; SWISSPROT HIT: O60613, EVALUE 1.00e-06; NT HIT: Z46773.1, EVALUE 1.20e-01
tgggatgcagttgccaagagcaactgcatcccaagcgctagctgcatttggagcagtgctactttctttggctccttcagcaactttctctgttgctcttgtgacccttctggactgtttaccctgttgcagctggatcctaactgcagagagtactatcagagaaaagttcaatttgaaaacagaagcctggatg

SEQ ID NO: 27338 - DNA, 250 bp, Homo sapiens
  MAP TO AC005023.1; EXPRESSED IN LUNG, SIGNAL = 0.87; EXPRESSED IN FETAL LIVER, SIGNAL = 0.9; EXPRESSED IN PLACENTA, SIGNAL = 0.77; EXPRESSED IN BRAIN, SIGNAL = 0.97; EXPRESSED IN BONE MARROW, SIGNAL = 0.89; EXPRESSED IN ADULT LIVER, SIGNAL = 0.71; SWISSPROT HIT: P21414, EVALUE 1.00e-26; EST_HUMAN HIT: AW997214.1, EVALUE 8.00e-32; NT HIT: M11636.1, EVALUE 2.40e+00
aatgacagccaccttctccggagcccatacggcttccaataattgcaaaatttcctccttattttttatttcttttccttcagtagtcaaaagtcctctctctttgtgtattcccccatgggcacgcagggttgcaaaagcatattttgagtcagtacatatgtttactttcttccccttggccaataacagtgctctggttaatgctattaattcagccttcttagcggaagtcccagaaggtaaggct

SEQ ID NO: 27339 - DNA, 111 bp, Homo sapiens
  MAP TO AC005521.1; EXPRESSED IN LUNG, SIGNAL = 0.77; EXPRESSED IN ADULT LIVER, SIGNAL = 0.66; EXPRESSED IN PLACENTA, SIGNAL = 0.59; EXPRESSED IN FETAL LIVER, SIGNAL = 0.85; EXPRESSED IN BRAIN, SIGNAL = 0.8; EXPRESSED IN BONE MARROW, SIGNAL = 0.69; NT HIT: D50871.1, EVALUE 2.40e-01; EST_HUMAN HIT: BE887312.1, EVALUE 1.40e+00; SWISSPROT HIT: Q06624, EVALUE 7.10e+00
gtctagtgctcatcttggcattgacatctggctgcagaagccccagggcaagaggcataatgcttctcaccctcagttttcttacttgggtggtaagcgggaaagaaggag

SEQ ID NO: 27340 - DNA, 120 bp, Homo sapiens
  MAP TO AC005919.1; EXPRESSED IN ADULT LIVER, SIGNAL = 1.4; EXPRESSED IN PLACENTA, SIGNAL = 1.3; EXPRESSED IN LUNG, SIGNAL =   1; EXPRESSED IN BRAIN, SIGNAL = 0.85; EXPRESSED IN FETAL LIVER, SIGNAL = 0.96; EXPRESSED IN BONE MARROW, SIGNAL = 1.1; EST_HUMAN HIT: AA992141.1, EVALUE 3.90e-01; NT HIT: AB033171.1, EVALUE 2.70e-01
ttgggtggcagaggtgatagtggtgatagtgttggtagtggtggtgatggtggtggtggtggtagaagtaatggaaagaaaaaaggaagaagaataattcatttagtatccattctgttg

SEQ ID NO: 27341 - DNA, 291 bp, Homo sapiens
  MAP TO AC005291.1; EXPRESSED IN PLACENTA, SIGNAL = 0.79; EXPRESSED IN LUNG, SIGNAL = 0.91; EXPRESSED IN FETAL LIVER, SIGNAL = 0.86; EXPRESSED IN BONE MARROW, SIGNAL = 1.5; EXPRESSED IN ADULT LIVER, SIGNAL = 0.94; EXPRESSED IN BRAIN, SIGNAL = 0.81; EST_HUMAN HIT: AA192091.1, EVALUE 1.00e-68; SWISSPROT HIT: P13535, EVALUE 6.00e-49; NT HIT: Z38133.1, EVALUE 0.00e+00
gttcctgtagttccttaaactctctgcagctaagcgattggcatggttcagctggatttccatttcattcagatctccttccattttcttcttgactctcagagcatcatttctgcttctaatctctgcatccagcgtgctctgcattgtctccacgactctagtgtggtttctcttcagctggtcaatttcctcatccttttctgcgatttttctatcaacttcagacttgacttggtttaactcaagctggatacgcagaatctttccttcttcatgttcaagagatgc

SEQ ID NO: 27342 - DNA, 78 bp, Homo sapiens
  MAP TO AC005355.1; EXPRESSED IN LUNG, SIGNAL = 0.92; EXPRESSED IN FETAL LIVER, SIGNAL = 0.73; EXPRESSED IN BRAIN, SIGNAL = 0.55; EXPRESSED IN BONE MARROW, SIGNAL = 0.74; EXPRESSED IN ADULT LIVER, SIGNAL = 0.76; NT HIT: D50608.1, EVALUE 3.90e-02; EST_HUMAN HIT: BE148258.1, EVALUE 2.30e-01
tcagatattcaagtggacagaaaaagatgctcttctttctcttggacttggagatgtgagagcatcagcagctgctga

SEQ ID NO: 27343 - DNA, 159 bp, Homo sapiens
  MAP TO AC000097.1; EXPRESSED IN LUNG, SIGNAL = 0.74; EXPRESSED IN FETAL LIVER, SIGNAL = 0.83; EXPRESSED IN BRAIN, SIGNAL = 0.8; EXPRESSED IN BONE MARROW, SIGNAL = 0.89; EXPRESSED IN ADULT LIVER, SIGNAL = 0.67; EXPRESSED IN PLACENTA, SIGNAL = 0.87; NT HIT: X74504.1, EVALUE 1.00e-10; EST_HUMAN HIT: BF351691.1, EVALUE 4.00e-82; SWISSPROT HIT: P54797, EVALUE 7.00e-21
gcacctacgggctgagcaacgcgctgctggagactccctggaggaagctgtgctttgggaagcagctcttcctggaggctgtggaacggagccaggcgctgcccaaggatgtgctcatcgccagcctcctggatgtgctcaacaatgaagaggcgtgag

SEQ ID NO: 27344 - DNA, 110 bp, Homo sapiens
  MAP TO AC006254.10; EXPRESSED IN BRAIN, SIGNAL = 0.97; EXPRESSED IN ADULT LIVER, SIGNAL =  30; EXPRESSED IN PLACENTA, SIGNAL = 0.65; EXPRESSED IN LUNG, SIGNAL = 0.44; EXPRESSED IN BONE MARROW, SIGNAL = 0.56; EXPRESSED IN FETAL LIVER, SIGNAL = 8.1; SWISSPROT HIT: Q14624, EVALUE 6.00e-16; NT HIT: AF119856.1, EVALUE 1.00e-55; EST_HUMAN HIT: AV648777.1, EVALUE 2.00e-55
aagtgaccttcaagaaccccctggtatgggttcacgcatcccctgaacacgtggtggtgactcggaaccgaagaagctctgcgtacaagtggaaggagacgctattctca

SEQ ID NO: 27345 - DNA, 171 bp, Homo sapiens
  MAP TO AC005666.1; EXPRESSED IN PLACENTA, SIGNAL = 0.8; EXPRESSED IN LUNG, SIGNAL = 0.68; EXPRESSED IN FETAL LIVER, SIGNAL = 0.96; EXPRESSED IN ADULT LIVER, SIGNAL = 0.63; EXPRESSED IN BRAIN, SIGNAL = 0.97; EXPRESSED IN BONE MARROW, SIGNAL = 0.81; SWISSPROT HIT: Q13615, EVALUE 9.00e-17; NT HIT: AF264717.1, EVALUE 8.00e-92; EST_HUMAN HIT: AW503564.1, EVALUE 1.00e-91
catgtctgagctgggtgtgtagaggaagttatgaaagtttttattgccagctcgaaggagcgcccacacagagcaggtccgcttgtagatgttgcgcttctctcgctcacaggggttgttggccaggaaggtgccgtagaggcaggagtatgtgtgttgcaccagttttac

SEQ ID NO: 27346 - DNA, 207 bp, Homo sapiens
  MAP TO AC003667.1; EXPRESSED IN LUNG, SIGNAL = 0.76; EXPRESSED IN FETAL LIVER, SIGNAL = 0.97; EXPRESSED IN PLACENTA, SIGNAL = 0.92; EXPRESSED IN BRAIN, SIGNAL = 0.68; EXPRESSED IN BONE MARROW, SIGNAL = 0.93; EXPRESSED IN ADULT LIVER, SIGNAL = 0.86; EST_HUMAN HIT: BE144526.1, EVALUE 2.00e-16; SWISSPROT HIT: P08548, EVALUE 9.00e-19; NT HIT: AJ277557.1, EVALUE 3.00e-21
aattcaacatcctttcatgacaaaaactctcaacaaactaggcatagaaggaacataccttaacataatgaaggccatgtatgataaacccatggctgtcatcatactgaatggggaaaagctaaaagcctttcctctaagaatggaacaagtatgcctactttcaccactcttatttgatatagtacttgagtttctagccagagc

SEQ ID NO: 27347 - DNA, 233 bp, Homo sapiens
  MAP TO AC002080.1; EXPRESSED IN LUNG, SIGNAL = 0.74; EXPRESSED IN PLACENTA, SIGNAL = 0.66; EXPRESSED IN BRAIN, SIGNAL = 0.64; EXPRESSED IN BONE MARROW, SIGNAL = 0.68; EXPRESSED IN ADULT LIVER, SIGNAL = 0.54; SWISSPROT HIT: P26246, EVALUE 4.30e+00; NT HIT: AF181722.1, EVALUE 3.60e-02
aagctttgtcagtgaagataagtggagactgaagaaggaaggggcttctcttcttggttccagttttcttttctctcttcttgctcctgtggtgcttgtccagtataaaggacacacagtggtgctcagcagcctccccatggacagcttcccagacagtgccactggtgccacagccagcttcccagccagaagggctggaaagtggcttcctggcatgttcagcagcaacc

SEQ ID NO: 27348 - DNA, 222 bp, Homo sapiens
  MAP TO AC005792.1; EXPRESSED IN BRAIN, SIGNAL = 0.77; EXPRESSED IN PLACENTA, SIGNAL = 0.92; EXPRESSED IN LUNG, SIGNAL = 0.84; EXPRESSED IN FETAL LIVER, SIGNAL = 0.78; EXPRESSED IN BONE MARROW, SIGNAL = 0.91; EXPRESSED IN ADULT LIVER, SIGNAL = 0.81; EST_HUMAN HIT: T70551.1, EVALUE 2.00e-01; SWISSPROT HIT: Q10683, EVALUE 3.70e+00; NT HIT: AF107793.1, EVALUE 1.30e-01
tttctctcccacatacctcttctggggaagttacttaaggatttagtcttgcctcagaaaggtctagctgacatggaagaagacaaggaacttggagagcaggaaggaatccaaatgtcagttgtatggcagccagaggagccaccatccctgcctggagcatcaaaacaacaggcttcagatgggagatgtccaagggaaaaagtgagtgaattccatggg

SEQ ID NO: 27349 - DNA, 154 bp, Homo sapiens
  MAP TO AC006257.1; EXPRESSED IN LUNG, SIGNAL = 0.74; EXPRESSED IN FETAL LIVER, SIGNAL = 0.77; EXPRESSED IN PLACENTA, SIGNAL = 0.76; EXPRESSED IN BRAIN, SIGNAL = 0.85; EXPRESSED IN BONE MARROW, SIGNAL = 0.83; EXPRESSED IN ADULT LIVER, SIGNAL = 0.71; NT HIT: gi11419032, EVALUE 1.00e-81; EST_HUMAN HIT: AA255569.1, EVALUE 1.00e-81; SWISSPROT HIT: P49643, EVALUE 1.00e-21
ctctatcaatagccaagttttcaaattctattaaagatatgttttcagaaggtggctgcaagtaaaactgaaggcaatgagggtaggaagcattcctctggtcacctgccaacctcagcttcctccactttcttccagaaaactccatcttggt

SEQ ID NO: 27350 - DNA, 136 bp, Homo sapiens
  MAP TO AC005971.5; EXPRESSED IN PLACENTA, SIGNAL = 0.85; EXPRESSED IN LUNG, SIGNAL = 0.72; EXPRESSED IN FETAL LIVER, SIGNAL = 0.87; EXPRESSED IN BRAIN, SIGNAL = 0.66; EXPRESSED IN ADULT LIVER, SIGNAL = 1.1; EXPRESSED IN BONE MARROW, SIGNAL = 0.82; NT HIT: AL163283.2, EVALUE 1.00e-09; EST_HUMAN HIT: BE888016.1, EVALUE 2.00e-09; SWISSPROT HIT: O88480, EVALUE 1.80e+00
caaagatattttttcaacaaaagttacaccaagtgtgcctgcctctcccgccttcccatccacttcctccacctcttccgcctccccatccacttcctccacctcttccgcctctgccacccctgagacagcaaga

SEQ ID NO: 27351 - DNA, 206 bp, Homo sapiens
  MAP TO AC005409.1; EXPRESSED IN PLACENTA, SIGNAL = 1.1; EXPRESSED IN LUNG, SIGNAL =   1; EXPRESSED IN FETAL LIVER, SIGNAL = 0.89; EXPRESSED IN BRAIN, SIGNAL = 0.68; EXPRESSED IN BONE MARROW, SIGNAL = 0.95; EXPRESSED IN ADULT LIVER, SIGNAL = 0.93; SWISSPROT HIT: P28976, EVALUE 3.30e-01; NT HIT: Z48234.1, EVALUE 1.20e-01
catccttagtactgtcaaaaacaacaactgagacattggtagaagggttttttggttttgcaacattgaaaatgtcactggcagaatgaaaagaaggataaagagatggcaggtccttcagggtgatgttggctggcagggctgggtccaggacaagcattggcaccttaatgcagtgtgttagcaaacactctaactgcttctca

SEQ ID NO: 27352 - DNA, 203 bp, Homo sapiens
  MAP TO AC005318.1; EXPRESSED IN PLACENTA, SIGNAL = 0.76; EXPRESSED IN LUNG, SIGNAL = 0.98; EXPRESSED IN FETAL LIVER, SIGNAL = 0.87; EXPRESSED IN BONE MARROW, SIGNAL = 0.66; EXPRESSED IN ADULT LIVER, SIGNAL =   1; EXPRESSED IN BRAIN, SIGNAL = 0.59; NT HIT: gi11432974, EVALUE 1.00e-100; SWISSPROT HIT: P08910, EVALUE 5.00e-32; EST_HUMAN HIT: AW075983.1, EVALUE 1.00e-100
ctcagtgcactgtacccctggcacacgctgacgcagcacaggaccttctcttggtttgcctgagtctcccccaagtatttgcacacaatgttaccacccaggctgaagcccacgacgaccagctgggtcaggggatatgtcttcttgatgtagttcaccatggctccaaattcccacgtgcagcctgtgggcaaaagggtgag

SEQ ID NO: 27353 - DNA, 83 bp, Homo sapiens
  MAP TO AC004769.1; EXPRESSED IN BRAIN, SIGNAL = 0.94; EXPRESSED IN ADULT LIVER, SIGNAL = 0.87; EXPRESSED IN PLACENTA, SIGNAL = 1.4; EXPRESSED IN FETAL LIVER, SIGNAL = 0.8; EXPRESSED IN BONE MARROW, SIGNAL = 0.7; EXPRESSED IN LUNG, SIGNAL = 0.83; SWISSPROT HIT: P09592, EVALUE 9.60e+00; NT HIT: J04836.1, EVALUE 6.70e-01
ctcattctggttcttacacagaataccctgcagaataagctccttgaggtgggggacagtttctctggggttaaacactgtgt

SEQ ID NO: 27354 - DNA, 586 bp, Homo sapiens
  MAP TO AC006486.1; EXPRESSED IN LUNG, SIGNAL = 0.81; EXPRESSED IN PLACENTA, SIGNAL = 0.73; EXPRESSED IN FETAL LIVER, SIGNAL = 0.89; EXPRESSED IN BRAIN, SIGNAL = 0.78; EXPRESSED IN BONE MARROW, SIGNAL = 0.87; EXPRESSED IN ADULT LIVER, SIGNAL = 0.91; NT HIT: gi9625578, EVALUE 1.50e+00; EST_HUMAN HIT: D61564.1, EVALUE 0.00e+00; SWISSPROT HIT: P04726, EVALUE 2.30e-02
ccagtctcccagccttttcagcagcctgagaaacctggtcgtgtccgtcgtcggaagactaggcgggaacgtaacaaggccctggtgggcagccgccggccattagcccaccacgatcctcctgtggccattcgggatccacctgtggtccctactgcctccaagctcgtggtcataacccagggccggctgagccgggagcaccggggtctcttcaaccacgaggtgaaatccctagatgttgcaaggctgcttagcagtgggaccctggtgccaggcagccccacactccccgccaagccctccccaagcccaggcagggcccaggaaccagccccacggtccagggacaaagagaaccaggtgcctggaggttcgggcccaggcccacccagttccccagagttgtctggcgtggggcagctgctggcagagctgcagtgtcagctgagtttgccacaggccttcccccggaggaacctgattcaggatgccagggatgccatcgtgcacaccttgcaggcctgtcatggttgtgtgcctgaccttgccctggtgcttcggggctgccagccacccttgccag

SEQ ID NO: 27355 - DNA, 158 bp, Homo sapiens
  MAP TO AC004962.1; EXPRESSED IN PLACENTA, SIGNAL =   1; EXPRESSED IN LUNG, SIGNAL = 0.94; EXPRESSED IN BRAIN, SIGNAL = 1.1; EXPRESSED IN FETAL LIVER, SIGNAL = 1.1; EXPRESSED IN ADULT LIVER, SIGNAL = 0.95; EXPRESSED IN BONE MARROW, SIGNAL = 1.1; SWISSPROT HIT: P19732, EVALUE 1.30e+00; NT HIT: AF287263.1, EVALUE 1.40e+00
cttcagccgcttctctttcatgatggcctggtactggaagtggggtagctgggtcagccgcgtggcttcctgggccttggcccagcctgtgtccacctccttcatcagcttcttcttgctgaagcaggtctctttggagctgtaagtcccagggccta

SEQ ID NO: 27356 - DNA, 80 bp, Homo sapiens
  MAP TO AC005922.1; EXPRESSED IN LUNG, SIGNAL =   1; EXPRESSED IN FETAL LIVER, SIGNAL = 0.69; EXPRESSED IN BRAIN, SIGNAL = 0.72; EXPRESSED IN PLACENTA, SIGNAL = 0.86; EXPRESSED IN BONE MARROW, SIGNAL = 0.73; EXPRESSED IN ADULT LIVER, SIGNAL = 0.69; NT HIT: gi6005700, EVALUE 7.00e-07; EST_HUMAN HIT: BF678682.1, EVALUE 1.00e-06
cgcatgagcgtgggtcagcaaacatgggctcttctctgcaagaactgtctcaaaaaatggagaatgaaaagacagacctt

SEQ ID NO: 27357 - DNA, 138 bp, Homo sapiens
  MAP TO AC006543.7; EXPRESSED IN PLACENTA, SIGNAL = 1.1; EXPRESSED IN FETAL LIVER, SIGNAL = 1.1; EXPRESSED IN BRAIN, SIGNAL = 1.3; EXPRESSED IN LUNG, SIGNAL = 1.2; EXPRESSED IN BONE MARROW, SIGNAL = 1.1; EXPRESSED IN ADULT LIVER, SIGNAL = 1.2; EST_HUMAN HIT: H24181.1, EVALUE 4.00e-72; SWISSPROT HIT: O95754, EVALUE 3.00e-22; NT HIT: gi4759093, EVALUE 3.00e-72
tgcatcaccaacaacatgaagctccggcactttggctcatctctctccctgcctgaccgcgtactcaccttcatccgggaccacccactcatggacaggccagtgtttccagctgatggccaccccctgctggtcact

SEQ ID NO: 27358 - DNA, 360 bp, Homo sapiens
  MAP TO AC003663.1; EXPRESSED IN ADULT LIVER, SIGNAL = 0.96; EXPRESSED IN PLACENTA, SIGNAL = 0.97; EXPRESSED IN LUNG, SIGNAL = 1.1; EXPRESSED IN BRAIN, SIGNAL = 0.8; EXPRESSED IN FETAL LIVER, SIGNAL = 0.95; EXPRESSED IN BONE MARROW, SIGNAL = 0.91; NT HIT: U21091.1, EVALUE 8.90e-01; SWISSPROT HIT: Q99102, EVALUE 2.00e-03; EST_HUMAN HIT: BF380661.1, EVALUE 2.00e-14
ggatgggctaagttgtcccagttgtcctgtgacctttcactgacaagtctgtctttccccatgacctgtgatggcatctttagtgcgtcctgggtcccggctgtgctggggtctggtagcagcggctggtttagtgtgtcctgggtcctggctgtgctggggtctgttagcagcggctggtttagtgtgtcctgggtcctaactttgctggagtctggtagcgacagctggtttagtgtgtcctgggtcccaactgtgctggagtctagtagcggcggctggtttagtgcgtcctgggtcccggctgtgctggggtctggtggcagcagctggtttggtggttctctctgttgcccctgc

SEQ ID NO: 27359 - DNA, 175 bp, Homo sapiens
  MAP TO AC003687.1; EXPRESSED IN PLACENTA, SIGNAL = 0.93; EXPRESSED IN BRAIN, SIGNAL = 0.92; EXPRESSED IN ADULT LIVER, SIGNAL = 0.91; EXPRESSED IN LUNG, SIGNAL = 0.84; EXPRESSED IN FETAL LIVER, SIGNAL =   1; EXPRESSED IN BONE MARROW, SIGNAL = 0.88; NT HIT: AJ250732.1, EVALUE 7.00e-03; SWISSPROT HIT: P11941, EVALUE 5.00e-09; EST_HUMAN HIT: BF511575.1, EVALUE 2.00e-84
ctgagcagtacatccggcacacgttggggacgttcggggtgaggttgctgcaccacctccggctgttgatctggaagatcccgttgttggtgctcccatcagcctcgtagtccaaagcagctgcgttgaaaccgcttgtgaaataagcaaggcagacccctgcatagggcagagc

SEQ ID NO: 27360 - DNA, 156 bp, Homo sapiens; identical to SEQ ID NO: 22807
  MAP TO AC000025.2; EXPRESSED IN ADULT LIVER, SIGNAL = 0.58; EXPRESSED IN PLACENTA, SIGNAL = 0.68; EXPRESSED IN LUNG, SIGNAL = 0.68; EXPRESSED IN BRAIN, SIGNAL = 0.56; EXPRESSED IN FETAL LIVER, SIGNAL = 0.71; EXPRESSED IN BONE MARROW, SIGNAL = 0.65; NT HIT: gi11417946, EVALUE 4.00e-75; SWISSPROT HIT: P34492, EVALUE 1.00e-02; EST_HUMAN HIT: BE292898.1, EVALUE 5.00e-75

SEQ ID NO: 27361 - DNA, 336 bp, Homo sapiens
  MAP TO AC006097.1; EXPRESSED IN LUNG, SIGNAL = 0.89; EXPRESSED IN BRAIN, SIGNAL = 0.62; EXPRESSED IN ADULT LIVER, SIGNAL = 3.6; EXPRESSED IN PLACENTA, SIGNAL = 0.81; EXPRESSED IN FETAL LIVER, SIGNAL = 2.5; EXPRESSED IN BONE MARROW, SIGNAL = 0.75; SWISSPROT HIT: Q10699, EVALUE 5.80e-01; NT HIT: AF040453.1, EVALUE 8.20e-01
aacgaaggaggaagtgccatgcgggagccggcccctgggggcgttaaaggtaccctcacggcccctctcagccacctcttcacagaagggaccattctcaaagggagccagagcctgggcatgctgggccggtagagggtttgcccggattcgcagtcagggctgcacctccggccaggaggctgagagggaggacatccacccagcaactggggagcaaagtggacaggggtggccgagccccaggaggggagagtgtcagagatgtgtgacaactgagagaaggccctgctgggtccattcatcctcatcatcttcttcatcatcatcatcatc

SEQ ID NO: 27362 - DNA, 77 bp, Homo sapiens
  MAP TO AC005367.1; EXPRESSED IN PLACENTA, SIGNAL = 1.3; EXPRESSED IN LUNG, SIGNAL = 1.3; EXPRESSED IN FETAL LIVER, SIGNAL = 1.5; EXPRESSED IN ADULT LIVER, SIGNAL = 1.2; EXPRESSED IN BRAIN, SIGNAL = 1.1; EXPRESSED IN BONE MARROW, SIGNAL = 1.3; SWISSPROT HIT: O95180, EVALUE 8.50e-01; EST_HUMAN HIT: AI926083.1, EVALUE 9.00e-01; NT HIT: M59940.1, EVALUE 6.10e-01
cctcggctaacttggccccatctcctacctggcaatgctggttctgctccagcattagcacctgtaaaactcctttc

SEQ ID NO: 27363 - DNA, 137 bp, Homo sapiens
  MAP TO AC005572.1; EXPRESSED IN BONE MARROW, SIGNAL =   1; EXPRESSED IN PLACENTA, SIGNAL = 0.95; EXPRESSED IN LUNG, SIGNAL = 0.94; EXPRESSED IN FETAL LIVER, SIGNAL = 1.2; EXPRESSED IN ADULT LIVER, SIGNAL = 1.1; EXPRESSED IN BRAIN, SIGNAL =   1; EST_HUMAN HIT: AW297896.1, EVALUE 6.00e-59; NT HIT: gi11034810, EVALUE 4.00e-59; SWISSPROT HIT: P30999, EVALUE 5.00e-03
ctcatgctgctcatgctgccagtctcggatccgagcttgcatcgctccagctggctggctacgatctgccgttcagcctccagctctcgggtcagcctttcaaactgtaattcctgaaagaaacccatcaacaagat

SEQ ID NO: 27364 - DNA, 82 bp, Homo sapiens
  MAP TO AC006249.1; EXPRESSED IN BONE MARROW, SIGNAL = 0.64; EXPRESSED IN PLACENTA, SIGNAL = 0.68; EXPRESSED IN LUNG, SIGNAL = 0.83; EXPRESSED IN FETAL LIVER, SIGNAL = 0.7; EXPRESSED IN ADULT LIVER, SIGNAL = 0.78; EXPRESSED IN BRAIN, SIGNAL = 0.59; NT HIT: AL163267.2, EVALUE 3.00e-09; EST_HUMAN HIT: AA134017.1, EVALUE 3.00e-13
tcaccagaagctaagcagacgctggtgtcatgcttcttgtacagcctgcagaaccatgggctaagtaaacctctctttttta

SEQ ID NO: 27365 - DNA, 174 bp, Homo sapiens
  MAP TO AC004240.1; EXPRESSED IN PLACENTA, SIGNAL = 0.64; EXPRESSED IN LUNG, SIGNAL = 0.91; EXPRESSED IN BRAIN, SIGNAL =   1; EXPRESSED IN BONE MARROW, SIGNAL = 0.63; EXPRESSED IN ADULT LIVER, SIGNAL = 0.75; SWISSPROT HIT: Q61554, EVALUE 5.90e-01; NT HIT: AF229844.1, EVALUE 7.00e-46; EST_HUMAN HIT: BF351459.1, EVALUE 2.00e-93
ccttcgtaagaacctctgcagcagtccttgcatgggctcgccatcccaccgcagctgcacccagcggaaatgctgctgcaccagcaagtcggagccctggagacaggccttggcgatggttcccatcagaaagcagttctcatgaaagtaataacattcggacagtccatttcc

SEQ ID NO: 27366 - DNA, 136 bp, Homo sapiens
  MAP TO AC006285.9; EXPRESSED IN LUNG, SIGNAL = 0.44; EXPRESSED IN BRAIN, SIGNAL = 0.59; EXPRESSED IN ADULT LIVER, SIGNAL = 0.43; EXPRESSED IN BONE MARROW, SIGNAL = 0.61; EST_HUMAN HIT: AW977509.1, EVALUE 1.80e+00; SWISSPROT HIT: P27972, EVALUE 9.10e+00; NT HIT: AF062636.1, EVALUE 7.70e-02
ctagaggaactgaggcgaccgtggagtcagtgcctgcgaggtctcggcctcctgggaagagtagctcggccccagctcacagcgtggcaggaaggtcacttgccagcagctggggaacttaagctctttgagggac

SEQ ID NO: 27367 - DNA, 233 bp, Homo sapiens
  MAP TO AC006254.10; EXPRESSED IN PLACENTA, SIGNAL = 0.75; EXPRESSED IN LUNG, SIGNAL = 0.66; EXPRESSED IN FETAL LIVER, SIGNAL =   7; EXPRESSED IN BRAIN, SIGNAL = 0.7; EXPRESSED IN BONE MARROW, SIGNAL = 0.64; EXPRESSED IN ADULT LIVER, SIGNAL =  15; EST_HUMAN HIT: AV656958.1, EVALUE 7.00e-57; SWISSPROT HIT: P19827, EVALUE 2.00e-31; NT HIT: X69539.1, EVALUE 1.00e-128
cccatgggcctgcacatcagccttgaagctgctctgtttgttgtcagcaatgcgcccggccaccacaatctctgagccttcgtagtactgtttatggtggttctgggtcagggccaagacagcatcctgggggtactgcaaatccacatccaccagcaggggtttggctacctggctgtagaaaccctgcagggatagaggttgcagccttagagctgagcaccctgggctcc

SEQ ID NO: 27368 - DNA, 152 bp, Homo sapiens
  MAP TO AC005533.2; EXPRESSED IN PLACENTA, SIGNAL = 1.3; EXPRESSED IN LUNG, SIGNAL = 1.3; EXPRESSED IN FETAL LIVER, SIGNAL = 1.4; EXPRESSED IN ADULT LIVER, SIGNAL = 1.3; EXPRESSED IN BRAIN, SIGNAL = 1.1; EXPRESSED IN BONE MARROW, SIGNAL = 1.4; EST_HUMAN HIT: H27492.1, EVALUE 8.00e+00; NT HIT: D42045.1, EVALUE 3.50e-01; SWISSPROT HIT: Q16555, EVALUE 9.00e+00
caggtccacaatgccagtgggatcaaagaggtgaaggaccatgcacacgtcctgctccccaatggcatgcgcattcacacttgggctgtagagaggggagcgatggcccagctggcttggtaggcttggtaggcttggtaggcttgggaaca

SEQ ID NO: 27369 - DNA, 155 bp, Homo sapiens
  MAP TO AC004817.1; EXPRESSED IN PLACENTA, SIGNAL = 0.95; EXPRESSED IN ADULT LIVER, SIGNAL = 0.85; EXPRESSED IN LUNG, SIGNAL = 0.98; EXPRESSED IN FETAL LIVER, SIGNAL = 0.87; EXPRESSED IN BRAIN, SIGNAL = 0.84; EXPRESSED IN BONE MARROW, SIGNAL = 0.76; SWISSPROT HIT: Q57865, EVALUE 4.00e+00; EST_HUMAN HIT: AA193672.1, EVALUE 5.30e-01; NT HIT: AB011538.1, EVALUE 5.50e+00
tgagcctcagctgcttctgccctctggttgaagaagatcaggatctctttatatgctaccaaggaggcctgttggacttcaacactttgtcctcgcaaagagtaactgcccttggccttttgctgtctttctccagtgcaaccatagccctcaac

SEQ ID NO: 27370 - DNA, 221 bp, Homo sapiens
  MAP TO AC005326.1; EXPRESSED IN PLACENTA, SIGNAL = 0.73; EXPRESSED IN LUNG, SIGNAL = 0.56; EXPRESSED IN FETAL LIVER, SIGNAL = 0.69; EXPRESSED IN ADULT LIVER, SIGNAL = 0.53; EXPRESSED IN BRAIN, SIGNAL = 0.85; EXPRESSED IN BONE MARROW, SIGNAL = 0.58; EST_HUMAN HIT: BE271424.1, EVALUE 1.00e-121; SWISSPROT HIT: P08243, EVALUE 1.00e-37; NT HIT: gi11421676, EVALUE 1.00e-121
atttgaataccagaccaaagtggatggtgagataatccttcatctttatgacaaaggaggaattgagcaaacaatttgtatgttggatggtgtgtttgcatttgttttactggatactgccaataagaaagtgttcctgggtagagatacatatggagtcagacctttgtttaaagcaatgacagaagatggatttttggctgtatgttcagaagctaaag

SEQ ID NO: 27371 - DNA, 323 bp, Homo sapiens
  MAP TO AC004682.1; EXPRESSED IN LUNG, SIGNAL = 1.2; EXPRESSED IN FETAL LIVER, SIGNAL = 1.5; EXPRESSED IN BRAIN, SIGNAL = 1.2; EXPRESSED IN BONE MARROW, SIGNAL = 1.2; EXPRESSED IN PLACENTA, SIGNAL = 1.3; EXPRESSED IN ADULT LIVER, SIGNAL = 1.1; NT HIT: gi11432414, EVALUE 0.00e+00; SWISSPROT HIT: Q92620, EVALUE 1.00e-35; EST_HUMAN HIT: BE260777.1, EVALUE 0.00e+00
ctgtctttccggatattttggccagcctggtcaccgccctcttcctcagcatccttctggtcatccttgctctcttcccagtccttgtaggaggagactttggacttcttcttgtcctccccatcgtccttctcctctcgctctctccgtttcagggaagccagcaagtccagtccgagtaatgaagggcggggagcaggagccttgaagacatgctgctcgctggccgcacttttggacttgcaaataagaccaccaacctgacagtccagatcagtgccttccaatcgatggatcgaggcatcctcactggtgtcccccat

SEQ ID NO: 27372 - DNA, 180 bp, Homo sapiens
  MAP TO AC006120.1; EXPRESSED IN PLACENTA, SIGNAL = 0.92; EXPRESSED IN LUNG, SIGNAL = 0.81; EXPRESSED IN FETAL LIVER, SIGNAL =  17; EXPRESSED IN BRAIN, SIGNAL = 0.61; EXPRESSED IN BONE MARROW, SIGNAL = 0.66; EXPRESSED IN ADULT LIVER, SIGNAL =  42; NT HIT: gi4557326, EVALUE 4.00e-97; EST_HUMAN HIT: AI191637.1, EVALUE 5.00e-97; SWISSPROT HIT: P02749, EVALUE 1.00e-30
tgaaaaaagccactgtggtgtaccaaggagagagagtaaagattcaggaaaaatttaagaatggaatgctacatggtgataaagtttctttcttctgcaaaaataaggaaaagaagtgtagctatacagaggatgctcagtgtatagatggcactatcgaagtccccaaatgcttcaagg

SEQ ID NO: 27373 - DNA, 105 bp, Homo sapiens
  MAP TO AC000403.1; EXPRESSED IN LUNG, SIGNAL = 1.4; EXPRESSED IN BRAIN, SIGNAL = 1.1; EXPRESSED IN BONE MARROW, SIGNAL = 1.2; EXPRESSED IN PLACENTA, SIGNAL = 1.2; EXPRESSED IN FETAL LIVER, SIGNAL = 1.3; EXPRESSED IN ADULT LIVER, SIGNAL = 1.4; SWISSPROT HIT: P54924, EVALUE 3.20e+00
agcatgtctccaaagacagttatccaatatccatgcctcctggtattgatgcccttttggggtcccctctccttgaatcgaatctcacttttgatccattgaaag

SEQ ID NO: 27374 - DNA, 256 bp, Homo sapiens
  MAP TO AC005538.2; EXPRESSED IN LUNG, SIGNAL = 1.7; EXPRESSED IN BONE MARROW, SIGNAL = 1.1; EXPRESSED IN PLACENTA, SIGNAL = 0.97; EXPRESSED IN FETAL LIVER, SIGNAL = 1.1; EXPRESSED IN BRAIN, SIGNAL = 1.1; EXPRESSED IN ADULT LIVER, SIGNAL = 0.92; SWISSPROT HIT: O94759, EVALUE 6.00e-16; EST_HUMAN HIT: BE390627.1, EVALUE 1.00e-98; NT HIT: gi4507688, EVALUE 1.00e-02
ggaactgccttctctgctccccaaacttggtgcagcccgaatggaagaacccgcggtcgctgctcccaccctcacctttggactgcgcgatgtagatgagccggctgaagatcttgcgcatgcgcggcttcagggcgaagttcttggcgcccccggtcacagaaatgaccaggttgggtgttttcaggtgccagtgctgggtcagcagctcgtaaaggatttccgcgtccgtgtcgcaggacagacgtatatacta

SEQ ID NO: 27375 - DNA, 287 bp, Homo sapiens
  MAP TO AC004831.1; EXPRESSED IN BRAIN, SIGNAL = 0.68; EXPRESSED IN BONE MARROW, SIGNAL = 0.71; EXPRESSED IN ADULT LIVER, SIGNAL = 0.81; EXPRESSED IN PLACENTA, SIGNAL = 0.84; EXPRESSED IN FETAL LIVER, SIGNAL = 0.81; EXPRESSED IN LUNG, SIGNAL = 0.89; EST_HUMAN HIT: AI862398.1, EVALUE 2.60e-01; SWISSPROT HIT: P17332, EVALUE 2.90e+00
gcagtggtggattggagaaaggcactagggtttgtgagactggttttaagcaggatattgaacaacgtattttactttgtattgtgatttttcctgaggacaagatgaaatgtgagctgagtgagaacacaaagaacaggatttatcagggttggattactataatccagtcatcgttccatctgtcattgattaattttgtagagaagtggttctcgaactgtgcgaatcagttacttgcaaagcttgtggaaacacagatttacgggccccagcccatgaatctg

SEQ ID NO: 27376 - DNA, 98 bp, Homo sapiens
  MAP TO AC005477.1; EXPRESSED IN LUNG, SIGNAL = 0.99; EXPRESSED IN FETAL LIVER, SIGNAL = 0.92; EXPRESSED IN BRAIN, SIGNAL = 0.83; EXPRESSED IN BONE MARROW, SIGNAL = 0.93; EXPRESSED IN ADULT LIVER, SIGNAL = 0.9; EXPRESSED IN PLACENTA, SIGNAL = 0.95; NT HIT: AF111853.1, EVALUE 2.10e-01; SWISSPROT HIT: O60241, EVALUE 9.50e+00; EST_HUMAN HIT: BE796491.1, EVALUE 1.00e-03
tattgtacaaaatgcctttataagacctccagaaaccagttatgaaaccacagtgcccctaggcaaatacaaagtgaagaacagcagaattaaaacag

SEQ ID NO: 27377 - DNA, 131 bp, Homo sapiens
  MAP TO AC005495.1; EXPRESSED IN PLACENTA, SIGNAL = 0.8; EXPRESSED IN ADULT LIVER, SIGNAL = 0.67; EXPRESSED IN LUNG, SIGNAL = 0.77; EXPRESSED IN FETAL LIVER, SIGNAL = 0.91; EXPRESSED IN BRAIN, SIGNAL = 0.68; EXPRESSED IN BONE MARROW, SIGNAL = 0.81; NT HIT: AF162677.1, EVALUE 1.90e-02; EST_HUMAN HIT: AA027211.1, EVALUE 2.00e-21; SWISSPROT HIT: P13364, EVALUE 7.00e+00
ctggaaatttgttcgttttttccaaaggcaaactatatacaagtttttcttcactttctgttgttaacttggcatcaggaatgtgctgcttaataagggatgtgattttttctgtgtcacacatttcattc

SEQ ID NO: 27378 - DNA, 128 bp, Homo sapiens
  MAP TO AC002299.1; EXPRESSED IN LUNG, SIGNAL = 0.71; EXPRESSED IN BRAIN, SIGNAL = 0.73; EXPRESSED IN BONE MARROW, SIGNAL = 0.79; EXPRESSED IN ADULT LIVER, SIGNAL = 0.77; EXPRESSED IN PLACENTA, SIGNAL = 0.65; NT HIT: M13975.1, EVALUE 3.00e-66; EST_HUMAN HIT: T29198.1, EVALUE 2.00e-64; SWISSPROT HIT: P04410, EVALUE 7.00e-21
ttgacaacgtgatgctcgattctgagggacacatcaagattgccgattttggcatgtgtaaggaaaacatctgggatggggtgacaaccaagacattctgtggcactccagactacatcgcccccgag

SEQ ID NO: 27379 - DNA, 139 bp, Homo sapiens
  MAP TO AC004796.2; EXPRESSED IN BONE MARROW, SIGNAL = 0.79; EXPRESSED IN PLACENTA, SIGNAL = 0.98; EXPRESSED IN LUNG, SIGNAL = 0.78; EXPRESSED IN FETAL LIVER, SIGNAL = 0.76; EXPRESSED IN ADULT LIVER, SIGNAL = 0.94; EXPRESSED IN BRAIN, SIGNAL =   1; SWISSPROT HIT: P31271, EVALUE 3.10e+00; NT HIT: gi4505798, EVALUE 8.00e-73; EST_HUMAN HIT: AW754111.1, EVALUE 1.00e-72
tggtagctgaaatccttcaatgtcaatggagaccttcacactagcattttctccgcatatgtttctttgcgctgtgactggacttaacaaatagcctgggtttgtgcggtgattggtatatggaaatttggtcttcaat

SEQ ID NO: 27380 - DNA, 92 bp, Homo sapiens
  MAP TO AC006425.9; EXPRESSED IN LUNG, SIGNAL = 0.51; EXPRESSED IN BRAIN, SIGNAL = 0.58; EXPRESSED IN ADULT LIVER, SIGNAL = 0.59; EXPRESSED IN BONE MARROW, SIGNAL = 0.7; SWISSPROT HIT: P22056, EVALUE 9.50e+00; NT HIT: AF199420.1, EVALUE 1.00e-33; EST_HUMAN HIT: R12719.1, EVALUE 2.00e-33
catgaaatggtctcagctgacaaaaacgggatcgctttggaaacatctttaccctgttcattgggccagaggtaggtaaatgggtttttaaa

SEQ ID NO: 27381 - DNA, 217 bp, Homo sapiens
  MAP TO AC004381.1; EXPRESSED IN BRAIN, SIGNAL = 0.63; EXPRESSED IN PLACENTA, SIGNAL = 0.86; EXPRESSED IN LUNG, SIGNAL =   1; EXPRESSED IN BONE MARROW, SIGNAL = 0.68; EXPRESSED IN ADULT LIVER, SIGNAL = 0.75; EST_HUMAN HIT: AL134903.1, EVALUE 1.00e-119; NT HIT: gi11525815, EVALUE 1.00e-119; SWISSPROT HIT: P87151, EVALUE 2.80e-02
ctgataacttcttctctattcacatgactgttatttcgagatttgtacacaatctgaaatgtccctttgtttggagctttaaaccagggttccaaaaatgtttctgcatattttttcatatcttctaaaaaagccttgcatgtgcctgagatgggtaacattcgcaaaataactcgagtcttctttttcttggttttgtacatatcctggagaatat

SEQ ID NO: 27382 - DNA, 83 bp, Homo sapiens
  MAP TO AC004886.1; EXPRESSED IN BONE MARROW, SIGNAL = 0.74; EXPRESSED IN ADULT LIVER, SIGNAL = 0.75; EXPRESSED IN PLACENTA, SIGNAL = 0.92; EXPRESSED IN LUNG, SIGNAL = 0.8; EXPRESSED IN FETAL LIVER, SIGNAL = 0.7; EXPRESSED IN BRAIN, SIGNAL = 0.62; NT HIT: U43599.1, EVALUE 1.70e-01
ctttgcaataattgtttcaacttttctcaggtagtctgcataattggctataagaattgttttacttgtatttaggtatgtgc

SEQ ID NO: 27383 - DNA, 97 bp, Homo sapiens
  MAP TO AC003104.1; EXPRESSED IN ADULT LIVER, SIGNAL = 1.1; EXPRESSED IN PLACENTA, SIGNAL = 1.1; EXPRESSED IN LUNG, SIGNAL = 0.92; EXPRESSED IN FETAL LIVER, SIGNAL = 1.5; EXPRESSED IN BRAIN, SIGNAL = 0.87; EXPRESSED IN BONE MARROW, SIGNAL = 1.4; SWISSPROT HIT: P51826, EVALUE 4.20e+00
atgcccctgcctctgccccagtgcagtggagcctccacgtggcctgtatctggagctcatctggtcatggtccaggagaaggtgacagtgggaaagt

SEQ ID NO: 27384 - DNA, 238 bp, Homo sapiens
  MAP TO AC000085.4; EXPRESSED IN PLACENTA, SIGNAL = 0.9; EXPRESSED IN ADULT LIVER, SIGNAL = 1.2; EXPRESSED IN LUNG, SIGNAL = 1.2; EXPRESSED IN FETAL LIVER, SIGNAL = 1.3; EXPRESSED IN BRAIN, SIGNAL = 0.97; EXPRESSED IN BONE MARROW, SIGNAL =   1; EST_HUMAN HIT: BE296968.1, EVALUE 8.50e-01; NT HIT: gi9257201, EVALUE 1.00e-114; SWISSPROT HIT: P53675, EVALUE 4.00e-33
ctccaaaaccttggaattaatccagctaacattggattcagcacactgaccatggaatctgacaagttcatatgtatccgagagaaagttggtgagcaggcacaggtcacgatcattgacatgagtgacccaatggctccgatccgacggcctatctctgcagagagtgccatcatgaatccagcctctaaggtgatagctctgaaaggtaaacccgatgggattgttagaaaggaat

SEQ ID NO: 27385 - DNA, 220 bp, Homo sapiens
  MAP TO AC004988.2; EXPRESSED IN PLACENTA, SIGNAL = 0.7; EXPRESSED IN LUNG, SIGNAL = 0.6; EXPRESSED IN BRAIN, SIGNAL = 0.73; EXPRESSED IN BONE MARROW, SIGNAL = 0.65; EXPRESSED IN ADULT LIVER, SIGNAL = 0.67; NT HIT: U82671.2, EVALUE 5.20e-01; SWISSPROT HIT: P44132, EVALUE 3.10e-01
ttactgtggaagaatcttatagacatcagcttaaccaagtcatcatacatcccgagagcgaacttccatatcatgtaccccttggtatcatgtataatctcaatttcctgcccgaaatgcatggcttcaatctaattgtgggaaaacatctggccaacttaaacttagggaccattgtccctaagctgaccagtattcttcagaagcatcaaggttatgg

SEQ ID NO: 27386 - DNA, 139 bp, Homo sapiens
  MAP TO AC005541.1; EXPRESSED IN PLACENTA, SIGNAL = 0.75; EXPRESSED IN LUNG, SIGNAL = 0.9; EXPRESSED IN FETAL LIVER, SIGNAL = 0.75; EXPRESSED IN ADULT LIVER, SIGNAL = 0.85; EXPRESSED IN BRAIN, SIGNAL = 0.67; EXPRESSED IN BONE MARROW, SIGNAL = 0.87; NT HIT: Z74883.1, EVALUE 3.10e-01; SWISSPROT HIT: Q01820, EVALUE 6.10e-01
tcatcaatgactcagttactgagccattccctgggaataacatcttgactaaacataatctttatcttcaaggacctctcattattcagtggagtaaagacacggggaaatggggaattttcatgcagtcgttagaggt

SEQ ID NO: 27387 - DNA, 82 bp, Homo sapiens
  MAP TO AC004768.1; EXPRESSED IN BONE MARROW, SIGNAL = 0.85; EXPRESSED IN PLACENTA, SIGNAL = 0.74; EXPRESSED IN LUNG, SIGNAL = 0.83; EXPRESSED IN FETAL LIVER, SIGNAL = 1.5; EXPRESSED IN BRAIN, SIGNAL = 0.68; EXPRESSED IN ADULT LIVER, SIGNAL = 0.73; EST_HUMAN HIT: BF374353.1, EVALUE 9.80e-01; NT HIT: AF280107.1, EVALUE 4.20e-02
aatgccagacttcttgttctcaggaggatgcccattgacagtacagcaaagcagcttgccaacccaagtgtgcagtattctc

SEQ ID NO: 27388 - DNA, 197 bp, Homo sapiens
  MAP TO AC005042.1; EXPRESSED IN PLACENTA, SIGNAL = 0.59; EXPRESSED IN LUNG, SIGNAL = 0.65; EXPRESSED IN ADULT LIVER, SIGNAL = 0.57; EXPRESSED IN BRAIN, SIGNAL = 0.65; EXPRESSED IN BONE MARROW, SIGNAL = 0.63; NT HIT: gi11430988, EVALUE 3.00e-70; EST_HUMAN HIT: AU128040.1, EVALUE 4.00e-70; SWISSPROT HIT: P30999, EVALUE 9.00e-10
ggagtttgcctggcgtgatcctgagttgcctgaggtcattcacatgcttcagcaccagttcccatctgttcaggcaaatgcagcggcctacctgcagcacctgtgctttggtgacaacaaagtgaagatggaggtacaggacatggtgcctgggatgactggggaaaataatgcctttgcatttaacagccacgtgc

SEQ ID NO: 27389 - DNA, 103 bp, Homo sapiens
  MAP TO AC004992.1; EXPRESSED IN BRAIN, SIGNAL = 0.92; EXPRESSED IN BONE MARROW, SIGNAL = 0.81; EXPRESSED IN ADULT LIVER, SIGNAL = 0.86; EXPRESSED IN PLACENTA, SIGNAL =   1; EXPRESSED IN LUNG, SIGNAL = 0.91; EXPRESSED IN FETAL LIVER, SIGNAL = 0.8; SWISSPROT HIT: P08548, EVALUE 9.00e-07; NT HIT: AJ277546.2, EVALUE 1.00e-12; EST_HUMAN HIT: AI312351.1, EVALUE 2.00e-14
tgcttccaaactcattctacaaagccagtattaccctgatactaaagccagacaaaaatgtgtcaaaaaaagaaaaatacaggccaacgtccctgatgaacat

SEQ ID NO: 27390 - DNA, 197 bp, Homo sapiens
  MAP TO AC005729.1; EXPRESSED IN PLACENTA, SIGNAL = 0.64; EXPRESSED IN BRAIN, SIGNAL = 0.66; EXPRESSED IN BONE MARROW, SIGNAL = 0.56; EXPRESSED IN ADULT LIVER, SIGNAL = 0.96; EXPRESSED IN LUNG, SIGNAL = 0.64; EST_HUMAN HIT: AW969038.1, EVALUE 1.00e-107; SWISSPROT HIT: P26009, EVALUE 5.00e+00; NT HIT: gi4505798, EVALUE 1.00e-107
ctgggttgtatttcttatgatatgtaaaaacagagacttccttgattcgaccatcttgtctaaaggagtatgttttaggtgaaaatgaaaggatgggctcatcattagaaggaagaccagaaaaacgaagctgagcaaggttgtgaatgaagaagttaaactttgtggcaatgcttcccaaacttgattcaataagc

SEQ ID NO: 27391 - DNA, 106 bp, Homo sapiens
  MAP TO AC006285.9; EXPRESSED IN BONE MARROW, SIGNAL = 1.1; EXPRESSED IN PLACENTA, SIGNAL =   1; EXPRESSED IN LUNG, SIGNAL = 0.95; EXPRESSED IN FETAL LIVER, SIGNAL = 0.91; EXPRESSED IN BRAIN, SIGNAL = 0.82; EXPRESSED IN ADULT LIVER, SIGNAL = 1.2; EST_HUMAN HIT: AA928129.1, EVALUE 4.00e-53; NT HIT: gi11526297, EVALUE 3.00e-53; SWISSPROT HIT: P34125, EVALUE 4.20e+00
cttgctgaatgatgtactctgccgaatagtcctccaggtatgtcacgccaaactgcagcagtgcgctcaaaggttcttgaccacgtcttgtcaattccaaaagcat

SEQ ID NO: 27392 - DNA, 277 bp, Homo sapiens
  MAP TO AC004935.1; EXPRESSED IN BONE MARROW, SIGNAL = 0.95; EXPRESSED IN PLACENTA, SIGNAL = 0.83; EXPRESSED IN LUNG, SIGNAL =   1; EXPRESSED IN FETAL LIVER, SIGNAL =  14; EXPRESSED IN ADULT LIVER, SIGNAL =   1; EXPRESSED IN BRAIN, SIGNAL = 0.99; NT HIT: U35323.1, EVALUE 3.00e-03; SWISSPROT HIT: P11454, EVALUE 4.60e+00; EST_HUMAN HIT: BE158684.1, EVALUE 6.40e-02
aaatggggagatgagcctaaagcagtgcctggggatactgatggcatcaagcacttacactagaaaagaagaaaggtctgacttcagggatctaagtatccactttacgcaacttgaaaagaagaggaagaagaagaagcctcaggacagcggagtggaaagagaaagggggcatgggtccttccgtgagttgcttcttgtcttcctcatcactgcttcgtggtcacgagatggctacactgtctccagctttacatccatgttccagaagaaggga

SEQ ID NO: 27393 - DNA, 216 bp, Homo sapiens
  MAP TO AC006316.2; EXPRESSED IN LUNG, SIGNAL = 0.85; EXPRESSED IN BRAIN, SIGNAL = 0.94; EXPRESSED IN ADULT LIVER, SIGNAL = 0.62; EXPRESSED IN PLACENTA, SIGNAL = 0.79; EXPRESSED IN FETAL LIVER, SIGNAL =   1; EXPRESSED IN BONE MARROW, SIGNAL = 0.66; NT HIT: gi11422054, EVALUE 1.00e-118; EST_HUMAN HIT: AW966303.1, EVALUE 7.60e-01; SWISSPROT HIT: Q90404, EVALUE 1.60e+00
aggaaagatgtaattagctgacgccgcccatctttgttgaaaaccagggccttaccactggccaagacaccacaaccaaagctgacttcagcaccacggatagagtaaaagttatggtaagaggagagcctggaactgccaaagctttcagaaataaacattgggaatgtctgggatgccatctcacaagctgggccagaaaatccagggtcacac

SEQ ID NO: 27394 - DNA, 204 bp, Homo sapiens
  MAP TO AC005696.1; EXPRESSED IN BRAIN, SIGNAL = 1.1; EXPRESSED IN PLACENTA, SIGNAL = 0.88; EXPRESSED IN LUNG, SIGNAL = 1.3; EXPRESSED IN FETAL LIVER, SIGNAL = 0.91; EXPRESSED IN BONE MARROW, SIGNAL = 0.89; EXPRESSED IN ADULT LIVER, SIGNAL = 0.73; SWISSPROT HIT: P43035, EVALUE 7.00e-35; EST_HUMAN HIT: BE867909.1, EVALUE 1.00e-111; NT HIT: U72336.1, EVALUE 1.00e-111
atggaattagaatcaaagctaaatgaagcaaaagaagaatttacgtcaggtggacctcttggtcagaaacgagacccaaaagaatggattccccgtccgccagaaaaatatgcattgagtggtcacaggagtccagtcactcgagtcattttccatcctgtgttcagtgttatggtctctgcttcagaggatgctacaattaag

SEQ ID NO: 27395 - DNA, 111 bp, Homo sapiens
  MAP TO AC006299.1; EXPRESSED IN PLACENTA, SIGNAL = 0.8; EXPRESSED IN LUNG, SIGNAL = 0.7; EXPRESSED IN BRAIN, SIGNAL = 0.67; EXPRESSED IN BONE MARROW, SIGNAL = 0.7; EXPRESSED IN ADULT LIVER, SIGNAL = 0.66; NT HIT: AF009624.1, EVALUE 6.10e-02; SWISSPROT HIT: P70700, EVALUE 4.20e+00; EST_HUMAN HIT: N41974.1, EVALUE 1.00e-03
ccttccactatgtggagacacaacaagaaagcactatctacaggccaagaaatcgatcttctccagacaccaaatctactgaagccttgacctcggactttccagctcaaa

SEQ ID NO: 27396 - DNA, 137 bp, Homo sapiens
  MAP TO AC006457.2; EXPRESSED IN BONE MARROW, SIGNAL = 0.59; EXPRESSED IN LUNG, SIGNAL = 0.55; EXPRESSED IN BRAIN, SIGNAL = 0.58; EXPRESSED IN ADULT LIVER, SIGNAL = 0.41; NT HIT: U34778.1, EVALUE 2.00e-02
tacactaactgggtgttctctatcaaagtcaacactgcaaacaacaaagggtatcatctggccaagaaaaagataatttctgattccaattcaacacagctcctgtgtaacaggtgtttctctagttctcagctcca

SEQ ID NO: 27397 - DNA, 329 bp, Homo sapiens
  MAP TO AC005831.1; EXPRESSED IN BONE MARROW, SIGNAL = 1.2; EXPRESSED IN PLACENTA, SIGNAL = 0.85; EXPRESSED IN LUNG, SIGNAL = 0.82; EXPRESSED IN FETAL LIVER, SIGNAL = 0.87; EXPRESSED IN ADULT LIVER, SIGNAL = 0.9; EXPRESSED IN BRAIN, SIGNAL = 1.2; EST_HUMAN HIT: AA813204.1, EVALUE 2.00e-08; SWISSPROT HIT: P47442, EVALUE 2.90e-02; NT HIT: gi9629732, EVALUE 3.20e+00
gggcctgagtggatatcccctaacagaagaggagccaggaaccggggagccagggcctgggggtccgtacccccggccgctccgcagaatcatctccgttgaagaagaccccctgccccagctcctggatggtggctttgagcaacccctgagcaaatgctcagaagaggaagaggtctctgaccagggggtacagggacaaatcccggaggccccacccttgaaactcacccccacatccccccgagggcagcctgttggaaaagaagccctgtgtaaggtaagggcacagcctaccttggttcatgcacatcacttctatgatctgt

SEQ ID NO: 27398 - DNA, 346 bp, Homo sapiens
  MAP TO AC006425.9; EXPRESSED IN LUNG, SIGNAL = 0.71; EXPRESSED IN FETAL LIVER, SIGNAL = 0.86; EXPRESSED IN PLACENTA, SIGNAL = 0.84; EXPRESSED IN BRAIN, SIGNAL = 0.62; EXPRESSED IN BONE MARROW, SIGNAL = 0.72; EXPRESSED IN ADULT LIVER, SIGNAL =   1; NT HIT: AL163202.2, EVALUE 7.00e-26; SWISSPROT HIT: P21415, EVALUE 1.00e+00; EST_HUMAN HIT: F04238.1, EVALUE 6.00e-15
tcccccgccaaaaaaaaaaaaagaagaagaaaagcctcttatggatcttttgactctcaagttaacatagacgtcattggagtcccacaagaagtgcctaacagattcaaagtccatgaccaaatagctgcagaatttaaatccatatttccacaggtaactattaataaaaatgtggcttggataaattacatctattataatcagcaacagtttattaattacaccaaggatgctatcaaaggaatagctgaccaattaaggcctactagccaaatgacttgggaaaacagaatagctctagacatgttattagccaaaaaaggtagggtttgtgttataatta

SEQ ID NO: 27399 - DNA, 194 bp, Homo sapiens
  MAP TO AC005038.1; EXPRESSED IN LUNG, SIGNAL = 0.68; EXPRESSED IN FETAL LIVER, SIGNAL = 0.85; EXPRESSED IN BRAIN, SIGNAL = 0.74; EXPRESSED IN BONE MARROW, SIGNAL = 0.82; EXPRESSED IN ADULT LIVER, SIGNAL = 0.65; SWISSPROT HIT: Q02734, EVALUE 3.00e-30; NT HIT: gi11422642, EVALUE 6.00e-96; EST_HUMAN HIT: AA333771.1, EVALUE 2.00e-32
  unsure 179
  unsure 180
  unsure 181
  unsure 182
  unsure 183
  unsure 184
  unsure 185
  unsure 186
  unsure 187
  unsure 188
  unsure 189
  unsure 190
  unsure 191
  unsure 192
  unsure 193
  unsure 194
cactctctccttgtagacgatgtatttcaaccacttaaagtcctgccacttgaagccggcgaggacaaagagagaatcgcgctcgtactgctcaggccgctgcatggcgccctcggggtaggtgatgcgcagtgtcgttttgctgcccacgtccttctcaaagcctttcactggtgctnnnnnnnnnnnnnnnn

SEQ ID NO: 27400 - DNA, 104 bp, Homo sapiens
  MAP TO AC006324.2; EXPRESSED IN PLACENTA, SIGNAL = 0.6; EXPRESSED IN LUNG, SIGNAL = 0.72; EXPRESSED IN FETAL LIVER, SIGNAL = 0.8; EXPRESSED IN BRAIN, SIGNAL = 1.1; EXPRESSED IN BONE MARROW, SIGNAL = 0.75; EXPRESSED IN ADULT LIVER, SIGNAL = 0.61; EST_HUMAN HIT: AW379529.1, EVALUE 2.10e-02; SWISSPROT HIT: P06546, EVALUE 5.50e+00; NT HIT: AB031329.1, EVALUE 5.70e-02
tacctgtccccaccgtgattgtggtctggctcatctccctgcattccttcctcctgccagctgactttcatgccatctttctgccacacaaacatgtggctagt

SEQ ID NO: 27401 - DNA, 183 bp, Homo sapiens
  MAP TO AC004860.1; EXPRESSED IN LUNG, SIGNAL = 1.1; EXPRESSED IN BRAIN, SIGNAL = 0.82; EXPRESSED IN BONE MARROW, SIGNAL = 1.1; EXPRESSED IN PLACENTA, SIGNAL = 1.1; EXPRESSED IN FETAL LIVER, SIGNAL = 0.98; EXPRESSED IN ADULT LIVER, SIGNAL = 0.94; SWISSPROT HIT: P16666, EVALUE 3.00e+00; EST_HUMAN HIT: BE251894.1, EVALUE 4.10e-02; NT HIT: AF152185.1, EVALUE 4.30e-01
tgccttccttttcatcatctcttctttcctggcccactgctgccagcctgtgaacaggatcacaccacggggcggctttccccagagtcaggaggttcactacgtagctagggccagaagtcacttttttgtaataagaatttttattgcatttttttctgttgcataagttggacatgatcc

SEQ ID NO: 27402 - DNA, 197 bp, Homo sapiens
  MAP TO AC002089.1; EXPRESSED IN PLACENTA, SIGNAL = 0.85; EXPRESSED IN BRAIN, SIGNAL = 0.96; EXPRESSED IN BONE MARROW, SIGNAL = 0.85; EXPRESSED IN ADULT LIVER, SIGNAL = 0.66; EXPRESSED IN LUNG, SIGNAL = 0.68; EXPRESSED IN FETAL LIVER, SIGNAL =   1; SWISSPROT HIT: P55585, EVALUE 6.50e+00; NT HIT: AF212124.1, EVALUE 4.60e-01
aagtagcttaacacccacgcctttaatatcctgtatcacagaaatacacgatgtgtcactatgggcacataggccaactctgaacatgacactagtgacaattttatcattggcttttgtggggtcaacatttccatattcaactttggtctttatctctctagggtattctaggagacatgaaacttaggtgagaa

SEQ ID NO: 27403 - DNA, 144 bp, Homo sapiens
  MAP TO AC005414.2; EXPRESSED IN PLACENTA, SIGNAL = 0.77; EXPRESSED IN LUNG, SIGNAL = 0.79; EXPRESSED IN FETAL LIVER, SIGNAL = 0.8; EXPRESSED IN BONE MARROW, SIGNAL = 0.81; EXPRESSED IN BRAIN, SIGNAL = 0.74; EXPRESSED IN ADULT LIVER, SIGNAL = 0.69; EST_HUMAN HIT: BF687742.1, EVALUE 3.10e-02; NT HIT: D00646.1, EVALUE 3.20e-01; SWISSPROT HIT: P08686, EVALUE 4.00e+00
ttaagggatcttcaccgtctccatttctttgtggctgcatttttgctctgtcttttggaggaactcggctagtaccctccccaagaccaagtctgctgtcttcagggcttgttcctgcagaatcggagcgcggttttccaggag

SEQ ID NO: 27404 - DNA, 274 bp, Homo sapiens
  MAP TO AC004655.1; EXPRESSED IN LUNG, SIGNAL = 0.92; EXPRESSED IN FETAL LIVER, SIGNAL = 0.92; EXPRESSED IN BRAIN, SIGNAL = 0.8; EXPRESSED IN PLACENTA, SIGNAL = 1.1; EXPRESSED IN BONE MARROW, SIGNAL = 0.89; EXPRESSED IN ADULT LIVER, SIGNAL = 0.86; SWISSPROT HIT: Q99880, EVALUE 4.00e-20; EST_HUMAN HIT: AI688098.1, EVALUE 3.00e-10; NT HIT: gi5870894, EVALUE 2.00e-16
caagaatcacaagcatagccacaaggaaagctactctatctacatttacaaggtattgaagcaggtccatctcaactctggcatctcatcgaaggccatgggcatcatgaactcatttgtcaatatcttcaagtgcatcattcctgatgcattacaagtactcgacgatcacctccagggagatccatacagcttgtgcctgctgcctagggagatggccaatcacactgtgtctcacaacaccaaggccctcaccaagtacaccagctccaag

SEQ ID NO: 27405 - DNA, 106 bp, Homo sapiens
  MAP TO AC004690.1; EXPRESSED IN PLACENTA, SIGNAL = 0.99; EXPRESSED IN LUNG, SIGNAL = 0.96; EXPRESSED IN FETAL LIVER, SIGNAL = 1.2; EXPRESSED IN BRAIN, SIGNAL = 0.94; EXPRESSED IN BONE MARROW, SIGNAL =   1; EXPRESSED IN ADULT LIVER, SIGNAL = 1.1; EST_HUMAN HIT: BE066541.1, EVALUE 3.40e-01; SWISSPROT HIT: P10517, EVALUE 5.50e+00; NT HIT: L39112.1, EVALUE 2.30e-01
atggatttttctatcccactctccccatcctcatcacttctacattcagcctcagtctctctctctacctgctgcttatcttgacacatggcttttgatctctgct

SEQ ID NO: 27406 - DNA, 124 bp, Homo sapiens
  MAP TO AC004808.1; EXPRESSED IN PLACENTA, SIGNAL = 0.68; EXPRESSED IN LUNG, SIGNAL = 0.54; EXPRESSED IN BRAIN, SIGNAL = 1.3; EXPRESSED IN ADULT LIVER, SIGNAL = 0.47; NT HIT: gi6912461, EVALUE 6.00e-64; SWISSPROT HIT: Q62696, EVALUE 4.70e-01
ttgctggtccatcttctgccagtctcaacacatacaaatccattttgtattcccttcctccacgaatgctgaatccaaatcctttggctcctttctccatgtccacagtgaaataatcaaaatc

SEQ ID NO: 27407 - DNA, 200 bp, Homo sapiens
  MAP TO AC005230.1; EXPRESSED IN LUNG, SIGNAL = 0.73; EXPRESSED IN PLACENTA, SIGNAL = 0.75; EXPRESSED IN FETAL LIVER, SIGNAL = 0.76; EXPRESSED IN BRAIN, SIGNAL = 0.65; EXPRESSED IN BONE MARROW, SIGNAL = 0.7; EXPRESSED IN ADULT LIVER, SIGNAL = 0.58; NT HIT: AB018348.1, EVALUE 1.00e-90; EST_HUMAN HIT: U74313.1, EVALUE 2.00e-93; SWISSPROT HIT: O34685, EVALUE 1.30e+00
tcaaacagggccaaaagtgtgagtctgtcaaagttaatgccaatccacagctggggtaggatccaaaagcgataatagtgtttaaccttttgggcagcttcttctgttgggccgtaagtagctgccaagtcagggcttagatcaatgtcctgttgctccaacaaatctgtatcaatggtcaatagtctattcaatcgaat

SEQ ID NO: 27408 - DNA, 285 bp, Homo sapiens
  MAP TO AC004999.1; EXPRESSED IN BRAIN, SIGNAL = 0.61; EXPRESSED IN ADULT LIVER, SIGNAL = 0.63; EXPRESSED IN BONE MARROW, SIGNAL = 0.7; EXPRESSED IN PLACENTA, SIGNAL =   1; EXPRESSED IN LUNG, SIGNAL = 0.72; EXPRESSED IN FETAL LIVER, SIGNAL = 0.72; NT HIT: gi11416889, EVALUE 0.00e+00; SWISSPROT HIT: P55289, EVALUE 6.00e-49; EST_HUMAN HIT: AI198515.1, EVALUE 0.00e+00
gacaagggagagggcactgcgaaatacaccctctcaggagatggcgctggcaccgtttttaccattgatgaaaccacaggggacattcatgcaataaggagcctagatagagaagaaaaacctttctacactcttcgtgctcaggctgtggacatagaaaccagaaagcccctggagcctgaatcagaattcatcatcaaagtgcaggatattaatgataatgagccaaagttttgggatggaccttatgttgctactgtcccagaaatgtctcctgtgggtgag

SEQ ID NO: 27409 - DNA, 154 bp, Homo sapiens
  MAP TO AC005553.1; EXPRESSED IN BONE MARROW, SIGNAL =   1; EXPRESSED IN PLACENTA, SIGNAL = 0.92; EXPRESSED IN LUNG, SIGNAL = 1.1; EXPRESSED IN FETAL LIVER, SIGNAL = 0.97; EXPRESSED IN ADULT LIVER, SIGNAL = 0.92; EXPRESSED IN BRAIN, SIGNAL = 0.87; EST_HUMAN HIT: AA284261.1, EVALUE 5.20e-01
ctttattacacatgatgtgttctgatattttctcttctgttttattgtagaagatgctggttatgggccacattagataggttgtacagtctaggaatggattgcagcctgcagtttgaaaaacactggaacagctagggagtggtggtgacat

SEQ ID NO: 27410 - DNA, 159 bp, Homo sapiens
  MAP TO AC002302.1; EXPRESSED IN LUNG, SIGNAL = 0.79; EXPRESSED IN BRAIN, SIGNAL = 0.74; EXPRESSED IN PLACENTA, SIGNAL = 0.83; EXPRESSED IN FETAL LIVER, SIGNAL = 0.81; EXPRESSED IN BONE MARROW, SIGNAL = 0.91; EXPRESSED IN ADULT LIVER, SIGNAL = 0.79; EXPRESSED IN HELA, SIGNAL = 1.9; NT HIT: Y17395.1, EVALUE 1.40e+00; SWISSPROT HIT: P18583, EVALUE 1.80e+00; EST_HUMAN HIT: AW842327.1, EVALUE 5.40e-01
gacttgcccattggggctctttcagacctgactggtcattgggtatctgtggccatgataatcactctcttcctggacgtgaccctcctctcgttaaccaggatgcctgtgttcttaaggttggccgtttccaaggacagagagcttgcatcccatttc

SEQ ID NO: 27411 - DNA, 223 bp, Homo sapiens
  MAP TO AC002093.1; EXPRESSED IN LUNG, SIGNAL = 1.1; EXPRESSED IN FETAL LIVER, SIGNAL = 1.1; EXPRESSED IN BRAIN, SIGNAL =   1; EXPRESSED IN BONE MARROW, SIGNAL = 1.1; EXPRESSED IN PLACENTA, SIGNAL = 0.99; EXPRESSED IN ADULT LIVER, SIGNAL = 1.4; NT HIT: gi11426718, EVALUE 6.00e-84; SWISSPROT HIT: Q06805, EVALUE 3.00e-03
  unsure 31
  unsure 45
  unsure 60
  unsure 133
ccagtatctggctcacaggcctccccatgtncggcagtgagggcnactgctgttcgccanctctcgccaaaggtgccaggcaggcagggctgctggcactgggtcccgttccagcccggctcgcaggactcancagctgcctgtgtctggagagcacggctcattgtgtttgcagcggccacagctgggaagagaagggcttcgtgggaacagtgggggtgga

SEQ ID NO: 27412 - DNA, 160 bp, Homo sapiens
  MAP TO AC003665.1; EXPRESSED IN ADULT LIVER, SIGNAL = 1.1; EXPRESSED IN LUNG, SIGNAL = 0.68; EXPRESSED IN PLACENTA, SIGNAL = 0.67; EXPRESSED IN FETAL LIVER, SIGNAL = 0.73; EXPRESSED IN BRAIN, SIGNAL = 0.67; EXPRESSED IN BONE MARROW, SIGNAL = 0.66; NT HIT: AP001507.1, EVALUE 9.30e-02
ctccaccagcaccagcacgggcaccaccatctacagccaccaccttcaccgtcacaaccaccaccagtagtaccgtcactacaaccaccacctccaccagcaccaattccatcaccagctccaatggcttagcctttctcttctaacacaagcaggaaga

SEQ ID NO: 27413 - DNA, 108 bp, Homo sapiens
  MAP TO AC004662.1; EXPRESSED IN ADULT LIVER, SIGNAL = 0.88; EXPRESSED IN PLACENTA, SIGNAL = 0.88; EXPRESSED IN LUNG, SIGNAL = 0.83; EXPRESSED IN BRAIN, SIGNAL = 0.85; EXPRESSED IN BONE MARROW, SIGNAL = 0.81; EXPRESSED IN FETAL LIVER, SIGNAL = 0.82; SWISSPROT HIT: P51854, EVALUE 9.50e-02; EST_HUMAN HIT: AA056103.1, EVALUE 3.40e-01; NT HIT: U43407.1, EVALUE 9.20e-01
ttcttttctggtttcttgtctcttgacaattttcttacactctttgattctcacaaaactggccattatgagggactgccaaccagacatctcatgttccttcctcga

SEQ ID NO: 27414 - DNA, 106 bp, Homo sapiens
  MAP TO AC005699.9; EXPRESSED IN LUNG, SIGNAL = 0.69; EXPRESSED IN BONE MARROW, SIGNAL = 0.71; EXPRESSED IN PLACENTA, SIGNAL = 0.73; EXPRESSED IN BRAIN, SIGNAL = 0.75; EXPRESSED IN ADULT LIVER, SIGNAL = 0.7; EST_HUMAN HIT: AA985491.1, EVALUE 8.50e-02
gactttatgtttactaagcctcagttccatcataagcaaaagcgtggaggggagaagaataataagagccacttcatggacatgtcataggaataagatgagacta

SEQ ID NO: 27415 - DNA, 357 bp, Homo sapiens
  MAP TO AC005740.1; EXPRESSED IN PLACENTA, SIGNAL = 1.1; EXPRESSED IN BRAIN, SIGNAL = 1.2; EXPRESSED IN BONE MARROW, SIGNAL = 1.3; EXPRESSED IN ADULT LIVER, SIGNAL = 1.2; EXPRESSED IN LUNG, SIGNAL =   1; EXPRESSED IN FETAL LIVER, SIGNAL = 1.2; EST_HUMAN HIT: AA312223.1, EVALUE 2.00e-79; NT HIT: gi7705617, EVALUE 4.00e-77; SWISSPROT HIT: P02458, EVALUE 3.70e-01
gattctgggggctgcccaattcgtgaatccttcattggtcagttaaactcctttaaatttaattcggctgaagtttttcttttaacagtgtacaaatacctcttcaagattctgctttcaattcttttggacatgcacccagaagttatgttgatagatcggccctgaggtgaactaaagccagcagccccacatcatgtcaaagttcggccgggccacccggggcctcaggaagcccgaggtcggcgatgtgatccggaccatcgtgcgggcaggcctggccatgcccgggcccccactaggcccagtgctgggtcagagaagggcttccatcaaccaattttgcaaggagttcaa

SEQ ID NO: 27416 - DNA, 254 bp, Homo sapiens
  MAP TO AC004587.1; EXPRESSED IN PLACENTA, SIGNAL = 1.2; EXPRESSED IN BONE MARROW, SIGNAL =   1; EXPRESSED IN ADULT LIVER, SIGNAL = 0.83; EXPRESSED IN LUNG, SIGNAL = 0.96; EXPRESSED IN FETAL LIVER, SIGNAL = 1.1; EXPRESSED IN BRAIN, SIGNAL = 0.92; SWISSPROT HIT: P46940, EVALUE 1.00e-36; NT HIT: gi4506786, EVALUE 1.00e-124; EST_HUMAN HIT: BE084636.1, EVALUE 1.00e-123
gtcgaaggtagatcagattcaagagattgtgacaggaaatcctacggttattaaaatggttgtaagtttcaaccgtggtgcccgtggccagaatgccctgagacagatcttggccccagtcgtgaaggaaattatggatgacaaatctctcaacatcaaaactgaccctgtggatatttacaaatcttgggttaatcagatggagtctcagacaggagaggcaaggtatgttaaccataatgacacttttcttt

SEQ ID NO: 27417 - DNA, 242 bp, Homo sapiens
  MAP TO AC005866.3; EXPRESSED IN PLACENTA, SIGNAL = 1.1; EXPRESSED IN BONE MARROW, SIGNAL = 1.2; EXPRESSED IN ADULT LIVER, SIGNAL = 1.3; EXPRESSED IN FETAL LIVER, SIGNAL = 1.3; EXPRESSED IN LUNG, SIGNAL = 1.3; EXPRESSED IN BRAIN, SIGNAL = 1.2; SWISSPROT HIT: P22002, EVALUE 8.00e-15; EST_HUMAN HIT: AI693324.1, EVALUE 6.00e-05; NT HIT: Z26269.1, EVALUE 0.00e+00
gtactggaactccttgagcaacctggtggcatccttgctgaactctgtgcgctccatcgcctccctgctccttctcctcttcctcttcatcatcatcttctccctcctggggatgcagctctttggaggaaagttcaactttgatgagatgcagacccggaggagcacattcgataacttcccccagtccctcctcactgtgtttcaggtatggactcttctctgctgggattcggactcgg

SEQ ID NO: 27418 - DNA, 134 bp, Homo sapiens
  MAP TO AC006453.3; EXPRESSED IN PLACENTA, SIGNAL = 0.83; EXPRESSED IN ADULT LIVER, SIGNAL = 0.87; EXPRESSED IN LUNG, SIGNAL = 0.94; EXPRESSED IN FETAL LIVER, SIGNAL =   1; EXPRESSED IN BRAIN, SIGNAL = 0.99; EXPRESSED IN BONE MARROW, SIGNAL =   1; EST_HUMAN HIT: AA297847.1, EVALUE 9.00e-58; SWISSPROT HIT: O49858, EVALUE 4.70e-01
gtttggggtgatccacttggtgttcaccaacctgcttctgtgggccaacggcgtcctcaatgagtcaaagcaccaactcaatgagcacaaggaatggctcatcactctgggctttgggaacataacaacaggtg

SEQ ID NO: 27419 - DNA, 97 bp, Homo sapiens
  MAP TO AC005702.1; EXPRESSED IN BONE MARROW, SIGNAL = 0.84; EXPRESSED IN PLACENTA, SIGNAL = 1.1; EXPRESSED IN LUNG, SIGNAL = 0.89; EXPRESSED IN FETAL LIVER, SIGNAL = 0.83; EXPRESSED IN ADULT LIVER, SIGNAL = 0.74; EXPRESSED IN BRAIN, SIGNAL = 0.86; NT HIT: gi8922819, EVALUE 8.10e-01; EST_HUMAN HIT: BE888196.1, EVALUE 9.00e-48
aggaagcagaacagagacatcgagaattggcagctaaagctggaggatttaatgactttgcaactttagctgtcatctttgaacaatgcaaatcaag

SEQ ID NO: 27420 - DNA, 111 bp, Homo sapiens
  MAP TO AC006319.2; EXPRESSED IN LUNG, SIGNAL = 0.72; EXPRESSED IN PLACENTA, SIGNAL = 0.7; EXPRESSED IN BRAIN, SIGNAL = 0.77; EXPRESSED IN BONE MARROW, SIGNAL = 0.65; EXPRESSED IN ADULT LIVER, SIGNAL = 0.67; SWISSPROT HIT: P25623, EVALUE 5.40e+00; NT HIT: M83377.1, EVALUE 2.40e-01
attcctctttccaggtgctgtctccttctgcagcttcccgtaggcctcttcccactgctctttctgctcttctataaaactccacatttaatgcctacaccttaccaaact

SEQ ID NO: 27421 - DNA, 120 bp, Homo sapiens
  MAP TO AC005007.1; EXPRESSED IN PLACENTA, SIGNAL = 1.1; EXPRESSED IN LUNG, SIGNAL = 0.85; EXPRESSED IN FETAL LIVER, SIGNAL = 0.89; EXPRESSED IN BRAIN, SIGNAL = 0.79; EXPRESSED IN BONE MARROW, SIGNAL = 0.74; EXPRESSED IN ADULT LIVER, SIGNAL = 0.87; NT HIT: gi7662303, EVALUE 1.00e-61; EST_HUMAN HIT: AA608749.1, EVALUE 2.00e-61; SWISSPROT HIT: P24339, EVALUE 1.80e+00
gacaagattttcattgtctccagttcccttgcaagttgcacattcagttcttaaatcttcagccttgggcttcttttgcaacacagactgtctttgtcttctctctctaggaactctttc

SEQ ID NO: 27422 - DNA, 320 bp, Homo sapiens
  MAP TO AC000134.14; EXPRESSED IN PLACENTA, SIGNAL = 0.59; EXPRESSED IN BONE MARROW, SIGNAL = 0.64; EXPRESSED IN ADULT LIVER, SIGNAL = 0.58; EXPRESSED IN BRAIN, SIGNAL = 2.7; EXPRESSED IN LUNG, SIGNAL = 0.59; EST_HUMAN HIT: AI567470.1, EVALUE 2.90e-01; NT HIT: AB035266.1, EVALUE 0.00e+00; SWISSPROT HIT: Q21313, EVALUE 1.00e-09
ctggcgcaggtttcgggtgacccggacgtcgtgccaggcgttgtcgttgaacttgccattgacgggttccacaagggcctcgaaggcacctgagcctaggttgatgaccagccagacagccccagacttgagggacaggttgacgtagtcggccgacttgcctgtatgcagcatcaggccgttgcgttgcagggtgcggaaggccagtgtgatctcatcagtgctgctctggatggggttgtgtgacaggtcgtagcagaagaactcattgcctttgaaggtcgccacaaactcctccttgcctggatgccgtggtgtgg

SEQ ID NO: 27423 - DNA, 242 bp, Homo sapiens
  MAP TO AC005630.1; EXPRESSED IN PLACENTA, SIGNAL = 1.1; EXPRESSED IN LUNG, SIGNAL = 0.91; EXPRESSED IN FETAL LIVER, SIGNAL = 1.1; EXPRESSED IN BONE MARROW, SIGNAL = 1.1; EXPRESSED IN BRAIN, SIGNAL = 1.3; EXPRESSED IN ADULT LIVER, SIGNAL = 1.2; NT HIT: gi11429683, EVALUE 2.00e-68; EST_HUMAN HIT: AI928799.1, EVALUE 1.00e-115; SWISSPROT HIT: P21575, EVALUE 1.00e-21
accccggagttcatcatctcggagccgctggccagtatgtactcatgtgggaaccagaacacactgatggaggagttggcagagcaggcacagcagcacgacgagatgctgcacatgcaccacgcgctgaaggaggcgctcagcatcatcggtgacatcaacaggaccactgtcaccatgcccatgcccccgcccgtggacgacacctggttgcaggtgcagagcatccctgacgcacacag

SEQ ID NO: 27424 - DNA, 168 bp, Homo sapiens
  MAP TO AC004802.1; EXPRESSED IN LUNG, SIGNAL = 1.2; EXPRESSED IN FETAL LIVER, SIGNAL = 1.1; EXPRESSED IN BRAIN, SIGNAL = 1.3; EXPRESSED IN BONE MARROW, SIGNAL = 1.3; EXPRESSED IN PLACENTA, SIGNAL = 1.3; EXPRESSED IN ADULT LIVER, SIGNAL = 1.1; SWISSPROT HIT: P48679, EVALUE 4.00e-02; NT HIT: AB015617.1, EVALUE 5.00e-90; EST_HUMAN HIT: AW996723.1, EVALUE 1.00e-75
cttcttctgaagaacattaaccttccgctccttcacatccaacatgtccttgaggtcatgtatctctccagcttgtgtccccttctcttcagccatatcctgaatttgttttgtctttttattcaacatggtttccttctcttccaaacgcaatcggagagcatccac

SEQ ID NO: 27425 - DNA, 114 bp, Homo sapiens
  MAP TO AC002088.1; EXPRESSED IN PLACENTA, SIGNAL = 1.1; EXPRESSED IN LUNG, SIGNAL = 0.78; EXPRESSED IN FETAL LIVER, SIGNAL = 1.1; EXPRESSED IN BRAIN, SIGNAL =   1; EXPRESSED IN BONE MARROW, SIGNAL = 0.97; EXPRESSED IN ADULT LIVER, SIGNAL = 0.58; EST_HUMAN HIT: AV732214.1, EVALUE 8.00e-27; NT HIT: AL163300.2, EVALUE 1.00e-15
ttgtttgaagaaattgccacagccactccagccttcagtaactactaccctgatcagttagcagccatcaatatcaaggcaagaccctccacaagcaaaaagattatgactcac

SEQ ID NO: 27426 - DNA, 177 bp, Homo sapiens
  MAP TO AC003669.1; EXPRESSED IN BONE MARROW, SIGNAL = 1.2; EXPRESSED IN ADULT LIVER, SIGNAL = 1.2; EXPRESSED IN PLACENTA, SIGNAL = 1.2; EXPRESSED IN LUNG, SIGNAL = 1.3; EXPRESSED IN FETAL LIVER, SIGNAL = 1.2; EXPRESSED IN BRAIN, SIGNAL = 1.3; NT HIT: gi11225608, EVALUE 2.00e-95; SWISSPROT HIT: Q10715, EVALUE 6.00e-18; EST_HUMAN HIT: AW016672.1, EVALUE 1.00e-85
ttaggtgtggctgcagaaagtgacatgatttccccaacagcttcatggaatccttcattagctccatttcttagcagaaaaggttgtgcagcatatgccatatcatactggatatgccccatctcatgatgagctgtcaggaagtcgtccattgtcacctttgtgcacataaggatc

SEQ ID NO: 27427 - DNA, 138 bp, Homo sapiens
  MAP TO AC005495.1; EXPRESSED IN ADULT LIVER, SIGNAL = 0.95; EXPRESSED IN LUNG, SIGNAL = 5.2; EXPRESSED IN PLACENTA, SIGNAL = 0.72; EXPRESSED IN FETAL LIVER, SIGNAL = 0.82; EXPRESSED IN BRAIN, SIGNAL = 0.76; EXPRESSED IN BONE MARROW, SIGNAL = 0.78; NT HIT: U67507.1, EVALUE 7.80e-02; EST_HUMAN HIT: H13952.1, EVALUE 8.00e-43; SWISSPROT HIT: P74055, EVALUE 6.90e+00
acgagaaaatgaagtgctctccatttgaataagctccgtgaagttaaaaattcccataagggcattgctaacaattcccataagaacaggaaaacaattcaatttcttggtattacacgcaacagaaaatctgtaatc

SEQ ID NO: 27428 - DNA, 237 bp, Homo sapiens
  MAP TO AC004704.2; EXPRESSED IN LUNG, SIGNAL = 0.81; EXPRESSED IN FETAL LIVER, SIGNAL = 0.73; EXPRESSED IN BONE MARROW, SIGNAL = 0.79; EXPRESSED IN PLACENTA, SIGNAL = 0.85; EXPRESSED IN BRAIN, SIGNAL = 0.71; EXPRESSED IN ADULT LIVER, SIGNAL = 0.71; SWISSPROT HIT: Q9VG40, EVALUE 3.40e+00; EST_HUMAN HIT: AW090090.1, EVALUE 1.00e-05; NT HIT: gi4885120, EVALUE 7.00e-16
gccaccttgttcatcatcatcgctgagcataatcacaggccagaggttgtgccaagcacacacaaatgtatcttcagtgttctaactgttggcaacagcacgtacagcatccttcatgctaaacttcttttgaaaccttccacacccacacctctgttcactgctgctaccatgatgttcaagaaagtgtttttatatttactctctattgatctcaggatacccttgtcaggtggc

SEQ ID NO: 27429 - DNA, 334 bp, Homo sapiens
  MAP TO AC003042.1; EXPRESSED IN PLACENTA, SIGNAL = 0.68; EXPRESSED IN ADULT LIVER, SIGNAL = 0.69; EXPRESSED IN LUNG, SIGNAL = 0.72; EXPRESSED IN BRAIN, SIGNAL = 0.68; EXPRESSED IN BONE MARROW, SIGNAL = 0.71; EST_HUMAN HIT: T66998.1, EVALUE 1.00e-126; NT HIT: M33312.1, EVALUE 3.20e+00; SWISSPROT HIT: P49335, EVALUE 1.10e-01
tatttgccgaaaggtaatcatcctaagtgaggtcaacggcggctggcacaggactggccctgcaggcggctgggccacgttgccatggtgacggagcccgctcacttccagcagctgcaagggctggagaatcctgaggaaggagaccccaggtctcttttctttcccccaaaaggggctgaaggagacctgcaggtgtttgcattccccgtcccagcccccaagagacagactaagagcccctggggaaatgtcccagcccaggttcgcagggggtccatcctggagcacaggggtctctgcgggcatcatctcattctgtcctacaataacc

SEQ ID NO: 27430 - DNA, 247 bp, Homo sapiens
  MAP TO AC002117.1; EXPRESSED IN HELA, SIGNAL =   2; EXPRESSED IN FETAL LIVER, SIGNAL = 2.4; EXPRESSED IN BRAIN, SIGNAL = 1.4; EXPRESSED IN BONE MARROW, SIGNAL = 1.5; EXPRESSED IN ADULT LIVER, SIGNAL = 2.3; EXPRESSED IN PLACENTA, SIGNAL = 1.6; EXPRESSED IN LUNG, SIGNAL = 2.3; EST_HUMAN HIT: W03547.1, EVALUE 1.00e-127; SWISSPROT HIT: P10895, EVALUE 1.00e-05
ctgtctcgttgagctcataggtctgaatgagctgctgggcgcgggccagtgtggcgccctcctcgccctggtcctccaggaactccagcagctcaggggcactcagcacgcggtcctcgcccgagtactgatggaagatctcctccagctccggccgcttcagcagccgccgcaggaactcctcgatctcagccccctctagacggtcgttgttggagtggtcacactcctggggagcagcaggaga

SEQ ID NO: 27431 - DNA, 142 bp, Homo sapiens
  MAP TO AC004053.1; EXPRESSED IN PLACENTA, SIGNAL = 0.58; EXPRESSED IN BONE MARROW, SIGNAL = 0.52; EXPRESSED IN ADULT LIVER, SIGNAL = 0.42; EXPRESSED IN LUNG, SIGNAL = 0.43; EXPRESSED IN BRAIN, SIGNAL = 0.6; SWISSPROT HIT: P18552, EVALUE 3.10e+00; NT HIT: M27138.1, EVALUE 1.30e+00
ccacctcttcctccctctcagcacacgtgggcacagagtggaccacagtgaggaccctgctattagggaacccttctccagatgcagtatcttggtattcttgacaaactgcagtgcagtacatgtcgcctcctcttctgtc

SEQ ID NO: 27432 - DNA, 149 bp, Homo sapiens
  MAP TO AC006460.3; EXPRESSED IN PLACENTA, SIGNAL = 0.79; EXPRESSED IN BRAIN, SIGNAL = 0.74; EXPRESSED IN FETAL LIVER, SIGNAL = 0.69; EXPRESSED IN LUNG, SIGNAL = 0.61; EXPRESSED IN BONE MARROW, SIGNAL = 0.61; EXPRESSED IN ADULT LIVER, SIGNAL = 0.49; SWISSPROT HIT: Q01336, EVALUE 2.30e+00; NT HIT: AB042297.1, EVALUE 3.40e-01; EST_HUMAN HIT: AW796111.1, EVALUE 2.00e-03
gaaatcaagaggaaatcaagcacaagcttccaagagttctttcccactggggtcacccaggacatgtgtgacaacatgtatgaaatgctgtctatcggggaagctcagccgagactctatgcccagggtttttattcagggctgcccct

SEQ ID NO: 27433 - DNA, 118 bp, Homo sapiens
  MAP TO AC004125.1; EXPRESSED IN PLACENTA, SIGNAL = 0.72; EXPRESSED IN FETAL LIVER, SIGNAL = 0.7; EXPRESSED IN BRAIN, SIGNAL = 0.61; EXPRESSED IN BONE MARROW, SIGNAL = 0.65; EXPRESSED IN LUNG, SIGNAL = 0.62; EXPRESSED IN ADULT LIVER, SIGNAL = 0.58; SWISSPROT HIT: P19506, EVALUE 1.80e+00; EST_HUMAN HIT: AI732776.1, EVALUE 2.50e-02; NT HIT: AJ009698.1, EVALUE 2.60e-01
tagacatgtccagagcccaggagaagaacctgaatgctggaaccctttcagaagaaaaggttcctctgagcccttctcagaaggggtctgttggccaggaaaatccagtgctgaaatt

SEQ ID NO: 27434 - DNA, 81 bp, Homo sapiens
  MAP TO AC004167.1; EXPRESSED IN LUNG, SIGNAL = 0.57; EXPRESSED IN BONE MARROW, SIGNAL = 0.58; EXPRESSED IN ADULT LIVER, SIGNAL = 0.56; EXPRESSED IN BRAIN, SIGNAL = 0.62; NT HIT: AL163249.2, EVALUE 6.50e-01
ggacagggccagttacaagagcgtacaacctgtgcggtcacgcagggcccctattcagaagggtcccacacttgatttgag

SEQ ID NO: 27435 - DNA, 173 bp, Homo sapiens
  MAP TO AC004231.1; EXPRESSED IN BONE MARROW, SIGNAL = 0.96; EXPRESSED IN PLACENTA, SIGNAL = 0.96; EXPRESSED IN LUNG, SIGNAL = 0.97; EXPRESSED IN FETAL LIVER, SIGNAL = 0.94; EXPRESSED IN ADULT LIVER, SIGNAL = 0.86; EXPRESSED IN BRAIN, SIGNAL = 0.84; NT HIT: gi6754485, EVALUE 4.00e-10; SWISSPROT HIT: O76011, EVALUE 3.00e-19; EST_HUMAN HIT: R64023.1, EVALUE 4.00e-36
gctgacccagatccagagtctgattgataacctggaagctcagctggcagagatccggtgtgccctggaaagacagaaccaagaatacgagatcctgctggacgtcaagtcccggctggaatgtgagattaccacataccgcagccttctggagagctcggatggcaagtatg

SEQ ID NO: 27436 - DNA, 123 bp, Homo sapiens
  MAP TO AC005873.2; EXPRESSED IN LUNG, SIGNAL = 2.8; EXPRESSED IN BRAIN, SIGNAL = 1.2; EXPRESSED IN ADULT LIVER, SIGNAL = 1.5; EXPRESSED IN PLACENTA, SIGNAL = 1.6; EXPRESSED IN FETAL LIVER, SIGNAL = 1.4; EXPRESSED IN BONE MARROW, SIGNAL = 1.7; NT HIT: gi7106410, EVALUE 9.20e-01; EST_HUMAN HIT: AI383120.1, EVALUE 1.10e+00
ctacaaaatgctgccagtgtaatctttctaaaattaatcataaaactcttctcaaaaaccttctgtgtgatcctcggcatcttgtttaaattgtcttccatgatatgctcctatatttgctac

SEQ ID NO: 27437 - DNA, 81 bp, Homo sapiens
  MAP TO AC004057.1; EXPRESSED IN PLACENTA, SIGNAL = 0.75; EXPRESSED IN BRAIN, SIGNAL = 0.69; EXPRESSED IN ADULT LIVER, SIGNAL = 0.64; EXPRESSED IN LUNG, SIGNAL = 0.53; EXPRESSED IN BONE MARROW, SIGNAL = 0.61; NT HIT: Z26634.2, EVALUE 2.00e-38; EST_HUMAN HIT: AI076681.1, EVALUE 2.40e-01; SWISSPROT HIT: Q01484, EVALUE 3.00e-08
ctcctcagtcacaaccttcagggtgtcgaccacggagatgtagcccagacgcttagcaatcgccaaggcagtgttgccatt

SEQ ID NO: 27438 - DNA, 123 bp, Homo sapiens
  MAP TO AC006464.3; EXPRESSED IN LUNG, SIGNAL = 0.61; EXPRESSED IN BRAIN, SIGNAL = 0.55; EXPRESSED IN BONE MARROW, SIGNAL = 0.69; EXPRESSED IN ADULT LIVER, SIGNAL = 0.61; EXPRESSED IN PLACENTA, SIGNAL = 0.67; NT HIT: X52401.1, EVALUE 1.00e-03; EST_HUMAN HIT: AI004062.1, EVALUE 2.00e-09
gattgaatgagctgtgccacggggaaagtgagagcccagccaacctgctgggtctcatttacgatgaagagaccaagaggagacttagaaaggaggatgaggaggaagactttttagatgaca

SEQ ID NO: 27439 - DNA, 166 bp, Homo sapiens
  MAP TO AC005019.1; EXPRESSED IN LUNG, SIGNAL = 0.76; EXPRESSED IN BRAIN, SIGNAL = 0.75; EXPRESSED IN BONE MARROW, SIGNAL = 0.68; EXPRESSED IN ADULT LIVER, SIGNAL = 0.88; EXPRESSED IN PLACENTA, SIGNAL = 0.6; EXPRESSED IN FETAL LIVER, SIGNAL = 0.85; SWISSPROT HIT: P17437, EVALUE 3.00e+00; NT HIT: AF163864.1, EVALUE 1.00e-16; EST_HUMAN HIT: AW859810.1, EVALUE 4.00e-08
gcaccagcatctgctcctggtgagggcctcaggctgcttccactcatggcagaaggtgaaggggaatcatgtgcagagattgcatggtgagggagtaagcaaaagagaggaagaggggaagtgccaggctctttgtaacaaccagctctcacaggaacgaacagag

SEQ ID NO: 27440 - DNA, 441 bp, Homo sapiens
  MAP TO AC006475.3; EXPRESSED IN PLACENTA, SIGNAL =   1; EXPRESSED IN LUNG, SIGNAL =   1; EXPRESSED IN FETAL LIVER, SIGNAL =   1; EXPRESSED IN BONE MARROW, SIGNAL = 1.1; EXPRESSED IN ADULT LIVER, SIGNAL = 0.77; EXPRESSED IN BRAIN, SIGNAL =   1; SWISSPROT HIT: P25386, EVALUE 1.00e-03; EST_HUMAN HIT: AA219147.1, EVALUE 1.00e-118; NT HIT: AB046861.1, EVALUE 0.00e+00
atttctgaaactgatgaaaaagaagacctgctgcatgaaaacctcttgatgcaagatgaaattgcctggctcaggctggaaaaagacacaataagaaaccaaaacctggaaaataaatacttaaaagactttgaaattgtgaaaagaaagcgtgaagaccttctaaaggctctaaaacggaatggggaaacattagcaaaaatgatagcctgttacagtggacagcttgctgctctgacagatgaaaacacaacgctgcattccaaactggagaagcaaagggagagcaggcaaagactggaaacagaaatgcaatcatgtggttgtagactcaatgctgctctatgtgatcatgatcaaagtcattcatcagaaagagatcaagagcttgctttccagggcacagtagataaatggtgtcatttacaggaaaatttgaac

SEQ ID NO: 27441 - DNA, 148 bp, Homo sapiens
  MAP TO AC005881.2; EXPRESSED IN BONE MARROW, SIGNAL = 0.85; EXPRESSED IN PLACENTA, SIGNAL = 0.72; EXPRESSED IN LUNG, SIGNAL = 0.77; EXPRESSED IN FETAL LIVER, SIGNAL = 0.89; EXPRESSED IN BRAIN, SIGNAL = 0.97; EXPRESSED IN ADULT LIVER, SIGNAL = 0.88; SWISSPROT HIT: Q09550, EVALUE 2.30e+00; EST_HUMAN HIT: BF210920.1, EVALUE 1.30e-01; NT HIT: AL032684.1, EVALUE 1.30e+00
gagacctgtctgcagaagttgcactacaacgtgtccagtggcacgatggcgttacatacaagatgttcaggagaacagaggaaggataccagtgcatcctgattggatatggggccaaggaagactttacaaagcaagtgatatttaa

SEQ ID NO: 27442 - DNA, 202 bp, Homo sapiens
  MAP TO AC004127.1; EXPRESSED IN BONE MARROW, SIGNAL = 0.78; EXPRESSED IN PLACENTA, SIGNAL = 0.78; EXPRESSED IN LUNG, SIGNAL = 0.8; EXPRESSED IN FETAL LIVER, SIGNAL = 0.7; EXPRESSED IN ADULT LIVER, SIGNAL = 0.72; EXPRESSED IN BRAIN, SIGNAL = 0.8; SWISSPROT HIT: O57971, EVALUE 5.00e-07; EST_HUMAN HIT: BE621069.1, EVALUE 1.00e-110
ctgcgttgaactcgggatcgtcttccagggcgacgacagctccctctacggcatccacggcgctcccgccctcccggaggatgccgtagcccacggtggcggctctgaccatgccctggtgcactcgctccttccgatccttggagatgggaccggctccgccgccgtggaccactacgatgggattcatgtcggcgggtcc

SEQ ID NO: 27443 - DNA, 150 bp, Homo sapiens
  MAP TO AC005669.1; EXPRESSED IN PLACENTA, SIGNAL = 0.9; EXPRESSED IN LUNG, SIGNAL = 0.79; EXPRESSED IN FETAL LIVER, SIGNAL = 0.9; EXPRESSED IN BRAIN, SIGNAL = 0.8; EXPRESSED IN BONE MARROW, SIGNAL = 0.88; EXPRESSED IN ADULT LIVER, SIGNAL = 0.76; SWISSPROT HIT: P48067, EVALUE 6.00e-01; EST_HUMAN HIT: AI733761.1, EVALUE 1.00e-75; NT HIT: gi11181769, EVALUE 2.00e-79
ggccagctcgtgaccaaagattacccggcctatgcactggctgtcatcgggctgcttgtggcctcctccaccatgtgcatccccctggcggccctggggacttttgttcagcgtcgcctcaagaggggagacgcagaccccgtggcctga

SEQ ID NO: 27444 - DNA, 104 bp, Homo sapiens
  MAP TO AC003090.1; EXPRESSED IN PLACENTA, SIGNAL = 1.1; EXPRESSED IN LUNG, SIGNAL = 1.2; EXPRESSED IN FETAL LIVER, SIGNAL = 2.1; EXPRESSED IN BRAIN, SIGNAL = 0.86; EXPRESSED IN BONE MARROW, SIGNAL = 1.1; EXPRESSED IN ADULT LIVER, SIGNAL = 2.4; NT HIT: gi8922992, EVALUE 2.20e-01; EST_HUMAN HIT: AI208794.1, EVALUE 6.00e-52; SWISSPROT HIT: P46804, EVALUE 2.40e+00
ggtttcagagcctggggaactgggcttctggggtccaggagagtcagtgatgccggcagatgctgtgtcagtgccttgcacgtgccatcctggatcttacggag

SEQ ID NO: 27445 - DNA, 117 bp, Homo sapiens
  MAP TO AC005703.1; EXPRESSED IN PLACENTA, SIGNAL = 0.71; EXPRESSED IN LUNG, SIGNAL = 0.81; EXPRESSED IN FETAL LIVER, SIGNAL = 0.94; EXPRESSED IN BONE MARROW, SIGNAL = 0.82; EXPRESSED IN BRAIN, SIGNAL = 0.83; EXPRESSED IN ADULT LIVER, SIGNAL = 1.1; EST_HUMAN HIT: AI655301.1, EVALUE 1.50e+00
tgaccaccaggctcatgccatccgtccccacactgctagccaaatctcagccaatgccatcagaattgcaccccaaaatgaaatgcttccactagaacagtgcggtctgatgagaat

SEQ ID NO: 27446 - DNA, 176 bp, Homo sapiens
  MAP TO AC005840.1; EXPRESSED IN ADULT LIVER, SIGNAL = 1.2; EXPRESSED IN PLACENTA, SIGNAL =   1; EXPRESSED IN LUNG, SIGNAL = 1.1; EXPRESSED IN FETAL LIVER, SIGNAL = 1.2; EXPRESSED IN BONE MARROW, SIGNAL = 1.1; EXPRESSED IN BRAIN, SIGNAL =   1; SWISSPROT HIT: Q00174, EVALUE 1.00e+00; EST_HUMAN HIT: BE968841.1, EVALUE 3.90e-02; NT HIT: AF212306.1, EVALUE 6.40e+00
cccattgtcaactgccattgcatcctgttgcatcttttgaagaccaccatcaagaggctgtctttgttggttttctgccagcttttccttgtagacaggagctcccctctacgtggcctgtgctctgtggatgtgtcctggagcctgtactgactccacactggcaaaatagacat

SEQ ID NO: 27447 - DNA, 491 bp, Homo sapiens; identical to SEQ ID NO: 10805
  MAP TO AC005731.2; EXPRESSED IN ADULT LIVER, SIGNAL = 0.85; EXPRESSED IN PLACENTA, SIGNAL = 0.9; EXPRESSED IN LUNG, SIGNAL = 0.81; EXPRESSED IN FETAL LIVER, SIGNAL = 0.86; EXPRESSED IN BONE MARROW, SIGNAL = 0.78; EXPRESSED IN BRAIN, SIGNAL = 0.77; EST_HUMAN HIT: BE817247.1, EVALUE 4.60e-01; SWISSPROT HIT: P37662, EVALUE 6.90e+00; NT HIT: U53588.1, EVALUE 4.80e+00

SEQ ID NO: 27448 - DNA, 486 bp, Homo sapiens
  MAP TO AC004816.1; EXPRESSED IN PLACENTA, SIGNAL = 0.92; EXPRESSED IN BRAIN, SIGNAL = 1.1; EXPRESSED IN BONE MARROW, SIGNAL =   1; EXPRESSED IN ADULT LIVER, SIGNAL =   1; EXPRESSED IN LUNG, SIGNAL = 0.88; EXPRESSED IN FETAL LIVER, SIGNAL = 1.1; NT HIT: U07747.1, EVALUE 1.00e-15; SWISSPROT HIT: P80192, EVALUE 8.00e-73; EST_HUMAN HIT: AA160611.1, EVALUE 3.00e-76
tgttagaaattgattttgcggagctcaccttggaagagattattggcatcgggggctttgggaaggtctatcgtgctttctggataggggatgaggttgctgtgaaagcagctcgccacgaccctgatgaggacatcagccagaccatagagaatgttcgccaagaggccaagctcttcgccatgctgaagcaccccaacatcattgccctaagaggggtatgtctgaaggagcccaacctctgcttggtcatggagtttgctcgtggaggacctttgaatagagtgttatctgggaaaaggattcccccagacatcctggtgaattgggctgtgcagattgccagagggatgaactacttacatgatgaggcaattgttcccatcatccaccgcgaccttaagtccagcaacagtgagtatgaagagatggggctggaggggctcagagcagttgcagttgtatcccacgacgtcagtaggagtg

SEQ ID NO: 27449 - DNA, 297 bp, Homo sapiens
  MAP TO AC004843.1; EXPRESSED IN LUNG, SIGNAL = 1.6; EXPRESSED IN FETAL LIVER, SIGNAL = 1.4; EXPRESSED IN PLACENTA, SIGNAL = 1.6; EXPRESSED IN BRAIN, SIGNAL = 1.6; EXPRESSED IN BONE MARROW, SIGNAL = 1.4; EXPRESSED IN ADULT LIVER, SIGNAL = 1.5; EST_HUMAN HIT: T96623.1, EVALUE 2.70e-01; NT HIT: AF076962.1, EVALUE 4.60e-02; SWISSPROT HIT: Q59699, EVALUE 3.60e-01
acacctcaaagaggagatgcaggaggatgagcagtctgcagtgcaggaggttggagacaaagagaaggtgatgtcacagaaacctacgggcacatggtcccttctccaaggtactcattacaccaaagtgagcatgcatgtgaccgagggtgccctggagaggggacattcacttccgaaaagggtgattaccaaaggccacgtgacagaaggagacctttggtttgggctggaaggattgttcaggattttgctggacaaggccaggtggaaggaggatgtgatgagaccctgttt

SEQ ID NO: 27450 - DNA, 86 bp, Homo sapiens
  MAP TO AC006199.1; EXPRESSED IN BONE MARROW, SIGNAL = 0.65; EXPRESSED IN LUNG, SIGNAL = 0.45; EXPRESSED IN FETAL LIVER, SIGNAL = 0.84; EXPRESSED IN BRAIN, SIGNAL = 0.6; EXPRESSED IN ADULT LIVER, SIGNAL = 1.1
aactttatctatacctatatctatatctatatctatatctatatctatatctatatctatgtacatatatatgccctacttttcta

SEQ ID NO: 27451 - DNA, 230 bp, Homo sapiens
  MAP TO AC005683.2; EXPRESSED IN LUNG, SIGNAL = 0.83; EXPRESSED IN BRAIN, SIGNAL = 2.4; EXPRESSED IN BONE MARROW, SIGNAL = 2.1; EXPRESSED IN PLACENTA, SIGNAL = 0.91; EXPRESSED IN FETAL LIVER, SIGNAL = 0.86; EXPRESSED IN ADULT LIVER, SIGNAL = 0.64; SWISSPROT HIT: P35331, EVALUE 7.00e-40; EST_HUMAN HIT: AU130055.1, EVALUE 1.00e-126; NT HIT: gi4826863, EVALUE 1.00e-127
aggaattcatggcgttgacaggagaaggtgcctctgagctttcgtttccttcagccggctctttctctttcttaccactgtattgtccaataaaggagccatcctcattgaactggccattaaccccttctccatagtcaactaggctgtcgtcactatcttcttttttcacagtcctgtctgaaggagttcgacttccttttttcaaaggcttgtggtcttctgcatca

SEQ ID NO: 27452 - DNA, 193 bp, Homo sapiens
  MAP TO AC003098.1; EXPRESSED IN BONE MARROW, SIGNAL = 0.67; EXPRESSED IN LUNG, SIGNAL = 0.84; EXPRESSED IN ADULT LIVER, SIGNAL = 0.67; EXPRESSED IN PLACENTA, SIGNAL = 0.63; EXPRESSED IN BRAIN, SIGNAL = 0.7; SWISSPROT HIT: Q13368, EVALUE 2.00e-28; NT HIT: gi11525883, EVALUE 2.00e-95; EST_HUMAN HIT: AW955726.1, EVALUE 3.00e-95
ttacctgacccaactaacaggtacccagtgagtgtccttgctcagcttctctaagaccactttgagctggctgtaggcaccctggagatcctccttcaccagcacggcgtctaccaggtgcccgtaatgccggtctatgaaggcggcagaagcggccatctcttgctgctgctcatcctgcaaggaaaggggt

SEQ ID NO: 27453 - DNA, 184 bp, Homo sapiens
  MAP TO AC006504.1; EXPRESSED IN PLACENTA, SIGNAL = 0.9; EXPRESSED IN LUNG, SIGNAL = 0.78; EXPRESSED IN BRAIN, SIGNAL = 0.65; EXPRESSED IN FETAL LIVER, SIGNAL = 0.75; EXPRESSED IN BONE MARROW, SIGNAL = 0.74; EXPRESSED IN ADULT LIVER, SIGNAL = 0.89; EST_HUMAN HIT: AV661044.1, EVALUE 3.00e-21; NT HIT: Y15994.1, EVALUE 1.00e-19; SWISSPROT HIT: Q06811, EVALUE 1.70e+00
accagctcacaattctgcaggctgtgcaggaagcacagtgccaggatctgcttctggtgaaggactcaggaagcttccaatcatggcagaaggcaaaagtggagcaggcagctcacatggcaaaagtgagagcaagagagcaaggggagagatccctcatactcttaaacaatcagatcacaca

SEQ ID NO: 27454 - DNA, 188 bp, Homo sapiens
  MAP TO AC005771.1; EXPRESSED IN PLACENTA, SIGNAL = 1.3; EXPRESSED IN LUNG, SIGNAL = 1.5; EXPRESSED IN FETAL LIVER, SIGNAL = 1.2; EXPRESSED IN BRAIN, SIGNAL = 1.2; EXPRESSED IN BONE MARROW, SIGNAL = 1.2; EXPRESSED IN ADULT LIVER, SIGNAL = 1.3; EST_HUMAN HIT: AA326168.1, EVALUE 1.70e-01; NT HIT: AF020927.1, EVALUE 1.10e-01; SWISSPROT HIT: Q19981, EVALUE 5.00e+00
ccatttgcatgccgctagtattctgtggattcttattataactggctttgtgtcttttggaggttgtgaattccagacaatcctggtggctgggaagaatctgaaaatgttcgtattccatgtcacttgtgatgtgaggaaacaatcttacagccttaaaatccttcatgaaattaaatattatctta

SEQ ID NO: 27455 - DNA, 184 bp, Homo sapiens
  MAP TO AC005518.2; EXPRESSED IN BRAIN, SIGNAL = 0.68; EXPRESSED IN LUNG, SIGNAL = 0.68; EXPRESSED IN BONE MARROW, SIGNAL = 0.59; EXPRESSED IN ADULT LIVER, SIGNAL = 0.49; EST_HUMAN HIT: AA995496.1, EVALUE 6.40e-01; NT HIT: gi7662349, EVALUE 1.00e-99; SWISSPROT HIT: P02549, EVALUE 2.30e+00
cttgacatcttgcagaaataggagacatactgctcgcagtactcggcactgtcagtgatggcacttatctggtccatggaggcgctgtaaacgagctgtgtcactgagtatttttctgggttgtagccgaccacaggcgtctgcatctgcaagtcatgagacactatggtccacactttgtcct

SEQ ID NO: 27456 - DNA, 250 bp, Homo sapiens
  MAP TO AC005023.1; EXPRESSED IN PLACENTA, SIGNAL = 0.66; EXPRESSED IN BRAIN, SIGNAL = 0.57; EXPRESSED IN ADULT LIVER, SIGNAL = 0.67; EXPRESSED IN LUNG, SIGNAL = 0.7; EXPRESSED IN FETAL LIVER, SIGNAL = 0.7; EXPRESSED IN BONE MARROW, SIGNAL = 0.82; EST_HUMAN HIT: BF205229.1, EVALUE 5.70e-02; NT HIT: AF309388.1, EVALUE 1.00e-02; SWISSPROT HIT: Q9YAV0, EVALUE 7.50e-01
aatagacgctcctgatcttggggttgcggatcctcagcggaggagtcctgggccaactcctcaggctgctgctgccagggctcctggtggccaccaccgcccttctggttctcgtggatcatggggtccgcagctcccgcgtacacgtgactttcttttcctgctcctgctccctgctcgggtttggtccgtattttcttctcatcgtctcctccagcttcagtcactgaagtctctatatccttcgcat

SEQ ID NO: 27457 - DNA, 150 bp, Homo sapiens
  MAP TO AC006480.2; EXPRESSED IN PLACENTA, SIGNAL = 0.93; EXPRESSED IN FETAL LIVER, SIGNAL =   1; EXPRESSED IN ADULT LIVER, SIGNAL = 0.94; EXPRESSED IN LUNG, SIGNAL = 0.96; EXPRESSED IN BRAIN, SIGNAL = 0.93; EXPRESSED IN BONE MARROW, SIGNAL = 0.95; NT HIT: gi11420197, EVALUE 2.00e-55; SWISSPROT HIT: O43184, EVALUE 3.10e+00; EST_HUMAN HIT: BE789470.1, EVALUE 3.00e-79
gcagcttctgtgagtttgtggggacattggtctgtcggtgccagtacatcctcctccatgatgacttccctatggacaacctcatctccctgctcactggcttctcagactcacaagtctgcgccttctgtcacactagcaccctggctg

SEQ ID NO: 27458 - DNA, 80 bp, Homo sapiens
  MAP TO AC004074.1; EXPRESSED IN PLACENTA, SIGNAL = 0.93; EXPRESSED IN LUNG, SIGNAL = 0.81; EXPRESSED IN FETAL LIVER, SIGNAL = 0.87; EXPRESSED IN BONE MARROW, SIGNAL = 1.2; EXPRESSED IN ADULT LIVER, SIGNAL = 0.96; EXPRESSED IN BRAIN, SIGNAL = 0.96; EST_HUMAN HIT: AA296652.1, EVALUE 2.00e-04; NT HIT: AL163282.2, EVALUE 1.00e-02
gcttggccccctttagtcatgactggagaagctggagtgcagggcaccaaggccctagagttcaaacagcagagcaacac

SEQ ID NO: 27459 - DNA, 105 bp, Homo sapiens
  MAP TO AC004220.1; EXPRESSED IN BRAIN, SIGNAL = 0.76; EXPRESSED IN ADULT LIVER, SIGNAL = 3.2; EXPRESSED IN PLACENTA, SIGNAL = 1.3; EXPRESSED IN LUNG, SIGNAL = 0.61; EXPRESSED IN BONE MARROW, SIGNAL = 0.81; EXPRESSED IN FETAL LIVER, SIGNAL = 0.78; NT HIT: S60371.1, EVALUE 2.30e-01; SWISSPROT HIT: Q13286, EVALUE 4.20e+00; EST_HUMAN HIT: AA419587.1, EVALUE 3.30e-01
tctgcccctaagtgcccaagcattgtcccatgggaagagcccaaaccagatctctgctaacaagaaggtctggaaaatgtagtttatacactttcaacccttgtg

SEQ ID NO: 27460 - DNA, 142 bp, Homo sapiens
  MAP TO AC003684.1; EXPRESSED IN LUNG, SIGNAL = 1.1; EXPRESSED IN BRAIN, SIGNAL = 0.79; EXPRESSED IN BONE MARROW, SIGNAL = 1.1; EXPRESSED IN ADULT LIVER, SIGNAL =   1; EXPRESSED IN PLACENTA, SIGNAL =   1; EXPRESSED IN FETAL LIVER, SIGNAL = 1.1; NT HIT: AE004006.1, EVALUE 8.10e-02; SWISSPROT HIT: Q53201, EVALUE 6.90e+00
tttatttgatgatctacctatcccacgccttcaagcagtgcctgggaatccctggcaacaggtgctccatgaatacgtgttcgatcaacatgctgagtgtgcttaaggctttccatttttactgtacagactttttagtagt

SEQ ID NO: 27461 - DNA, 217 bp, Homo sapiens
  MAP TO AC005846.1; EXPRESSED IN PLACENTA, SIGNAL = 1.1; EXPRESSED IN LUNG, SIGNAL = 0.68; EXPRESSED IN BRAIN, SIGNAL = 0.65; EXPRESSED IN BONE MARROW, SIGNAL = 0.59; EXPRESSED IN ADULT LIVER, SIGNAL = 0.63; EST_HUMAN HIT: R73939.1, EVALUE 3.00e-09; NT HIT: M25833.1, EVALUE 4.00e-82; SWISSPROT HIT: P04275, EVALUE 5.00e-14
atgaaggcctctgcgtggagagcaccgagtgtccctgcgtgcattccggaaagcgctaccctcccggcacctccctctctcgagactgcaacacctggtaatgggggctgcgcagcgtgctctgggagacctgcctgggggactggggagggaagctgggtcagcaggggtggtggcaggtggaaaagaacctggaccgtgccaagaaagaagagac

SEQ ID NO: 27462 - DNA, 172 bp, Homo sapiens
  MAP TO AC005068.1; EXPRESSED IN BRAIN, SIGNAL = 0.64; EXPRESSED IN LUNG, SIGNAL = 0.65; EXPRESSED IN BONE MARROW, SIGNAL = 0.53; EXPRESSED IN ADULT LIVER, SIGNAL = 0.73; EXPRESSED IN PLACENTA, SIGNAL = 0.64; SWISSPROT HIT: P08183, EVALUE 3.00e-27; NT HIT: AF016535.1, EVALUE 2.00e-92; EST_HUMAN HIT: AW847648.1, EVALUE 2.30e+00
ctttgcccagacagcagctgacagtccaagaacaggactgatggccaaaatcacaagggttagcttccaaccacgtgtaaatcctactataaacccagtgaaaaatgttgccattgactgaaagaacattccaattttgtcaccaattccttcattaatcttggagacatca

SEQ ID NO: 27463 - DNA, 161 bp, Homo sapiens
  MAP TO AC005863.1; EXPRESSED IN BONE MARROW, SIGNAL = 1.2; EXPRESSED IN ADULT LIVER, SIGNAL = 1.2; EXPRESSED IN PLACENTA, SIGNAL = 1.3; EXPRESSED IN LUNG, SIGNAL = 1.3; EXPRESSED IN FETAL LIVER, SIGNAL = 1.3; EXPRESSED IN BRAIN, SIGNAL = 1.2; SWISSPROT HIT: P17990, EVALUE 1.30e+00; EST_HUMAN HIT: BE720222.1, EVALUE 5.50e-01; NT HIT: AF135187.1, EVALUE 3.70e-01
agacagcagggggcgcttttcaaggggcaggtcgagggaagttgctggccccgcggctgctgctgtgcatggcagggaacctggttcccgggctgccgctcacactgttcaagtcgagcactgggagctgcatgcactgctaagagaagacgctagaaccg

SEQ ID NO: 27464 - DNA, 174 bp, Homo sapiens
  MAP TO AC006518.17; EXPRESSED IN ADULT LIVER, SIGNAL = 0.94; EXPRESSED IN LUNG, SIGNAL = 1.1; EXPRESSED IN FETAL LIVER, SIGNAL = 0.99; EXPRESSED IN BRAIN, SIGNAL = 0.96; EXPRESSED IN BONE MARROW, SIGNAL =   1; EXPRESSED IN PLACENTA, SIGNAL = 1.2; SWISSPROT HIT: O14207, EVALUE 1.00e+00; EST_HUMAN HIT: BE781612.1, EVALUE 1.00e-42; NT HIT: AF227138.1, EVALUE 1.00e-93
gagtaggaagaaagtgatcacacttttaactcctctgtgggctttggtgctggcgtctccggatattttgacagtgtgctgcatcttcttgcgatgtttccacatggagaagatgaggagaagaaacattgccagggacaaagtaaagggtatgaaaatgaacacagtgctggt

SEQ ID NO: 27465 - DNA, 148 bp, Homo sapiens
  MAP TO AC005070.1; EXPRESSED IN LUNG, SIGNAL = 1.2; EXPRESSED IN PLACENTA, SIGNAL = 1.2; EXPRESSED IN FETAL LIVER, SIGNAL = 0.97; EXPRESSED IN BRAIN, SIGNAL = 1.4; EXPRESSED IN BONE MARROW, SIGNAL = 1.1; EXPRESSED IN ADULT LIVER, SIGNAL =   1; NT HIT: gi11420732, EVALUE 4.00e-78; EST_HUMAN HIT: AI808855.1, EVALUE 5.00e-78; SWISSPROT HIT: P36616, EVALUE 6.00e-08
gaggagcacctgctttctgccactcagtggcctcagctgccattcttctcacatatgcatcatccacacacatcaagatattttccggctttatgtcagtatgaatgatcttgcacttactgtgtaagtaatctaacccttgaaggac

SEQ ID NO: 27466 - DNA, 216 bp, Homo sapiens
  MAP TO AC000111.1; EXPRESSED IN PLACENTA, SIGNAL = 0.86; EXPRESSED IN LUNG, SIGNAL =   1; EXPRESSED IN BONE MARROW, SIGNAL = 1.4; EXPRESSED IN FETAL LIVER, SIGNAL = 0.92; EXPRESSED IN BRAIN, SIGNAL = 1.2; EXPRESSED IN ADULT LIVER, SIGNAL = 1.1; SWISSPROT HIT: P13569, EVALUE 1.00e-35; NT HIT: M55109.1, EVALUE 1.00e-118; EST_HUMAN HIT: AA381148.1, EVALUE 7.60e-01
gaagtcaccaaagcagtacagcctctcttactgggaagaatcatagcttcctatgacccggataacaaggaggaacgctctatcgcgatttatctaggcataggcttatgccttctctttattgtgaggacactgctcctacacccagccatttttggccttcatcacattggaatgcagatgagaatagctatgtttagtttgatttataagaag

SEQ ID NO: 27467 - DNA, 186 bp, Homo sapiens
  MAP TO AC004460.1; EXPRESSED IN FETAL LIVER, SIGNAL = 1.6; EXPRESSED IN HELA, SIGNAL =   2; EXPRESSED IN PLACENTA, SIGNAL = 0.87; EXPRESSED IN LUNG, SIGNAL = 0.97; EXPRESSED IN BRAIN, SIGNAL = 0.58; EXPRESSED IN BONE MARROW, SIGNAL = 0.95; EXPRESSED IN ADULT LIVER, SIGNAL = 0.81; SWISSPROT HIT: Q08201, EVALUE 2.20e+00; NT HIT: AL110985.1, EVALUE 1.10e-01; EST_HUMAN HIT: AW298453.1, EVALUE 6.50e-01
ttgctcatttacttccctgtgctggctaggtacctggaaatgcctttgaaggaacttaagatttccttttatttccatgcttgggggcaggtgcccggcaagcccctaagaggggtctctgctccatctcatcttcatatcagccccttgcatgtccctgaagtggttctccaaaacaaattctag

SEQ ID NO: 27468 - DNA, 117 bp, Homo sapiens
  MAP TO AC005833.1; EXPRESSED IN PLACENTA, SIGNAL = 0.64; EXPRESSED IN BONE MARROW, SIGNAL = 0.68; EXPRESSED IN ADULT LIVER, SIGNAL = 0.67; EXPRESSED IN LUNG, SIGNAL = 0.71; EXPRESSED IN FETAL LIVER, SIGNAL = 0.69; EXPRESSED IN BRAIN, SIGNAL = 0.73; SWISSPROT HIT: P48569, EVALUE 1.10e+00; EST_HUMAN HIT: AW198093.1, EVALUE 1.50e+00; NT HIT: AF207550.1, EVALUE 2.60e-01
gctgggactggggatggagggctatgcagagggaacagtatttgcaaagacctggacagcatggtgtgctctgggacttaagatagttcaaattgctggagcataacgtactctttt

SEQ ID NO: 27469 - DNA, 153 bp, Homo sapiens
  MAP TO AC005702.1; EXPRESSED IN PLACENTA, SIGNAL = 0.67; EXPRESSED IN LUNG, SIGNAL = 0.89; EXPRESSED IN BONE MARROW, SIGNAL = 0.64; EXPRESSED IN ADULT LIVER, SIGNAL = 0.6; EXPRESSED IN FETAL LIVER, SIGNAL = 0.68; EXPRESSED IN BRAIN, SIGNAL = 0.77; NT HIT: gi4758563, EVALUE 3.00e-32; SWISSPROT HIT: P04008, EVALUE 6.80e+00; EST_HUMAN HIT: BE765232.1, EVALUE 1.00e-66
ccaggtgtggcccgtgggcacgtttttggaaccggttcgttgatgcctgggccagggatgatgacactgtgctcaagcatcttagggcctctatgaagaaactaacaagaaagcagggggacctgccacccccaggtgggctccagtgccatg

SEQ ID NO: 27470 - DNA, 85 bp, Homo sapiens
  MAP TO AC004875.1; EXPRESSED IN PLACENTA, SIGNAL = 0.82; EXPRESSED IN FETAL LIVER, SIGNAL = 0.8; EXPRESSED IN BRAIN, SIGNAL = 0.91; EXPRESSED IN ADULT LIVER, SIGNAL = 0.79; EXPRESSED IN LUNG, SIGNAL = 0.71; EXPRESSED IN BONE MARROW, SIGNAL = 0.8; NT HIT: AB035662.1, EVALUE 6.90e-01; EST_HUMAN HIT: AV733185.1, EVALUE 1.00e+00
ctgatacattcgaatgtatggagatgagcaagacatatgccaatgagattgagattgaattattgagaagtacatagaaagtaca

SEQ ID NO: 27471 - DNA, 96 bp, Homo sapiens
  MAP TO AC005533.2; EXPRESSED IN BONE MARROW, SIGNAL = 1.2; EXPRESSED IN PLACENTA, SIGNAL = 0.8; EXPRESSED IN LUNG, SIGNAL = 0.98; EXPRESSED IN FETAL LIVER, SIGNAL = 0.93; EXPRESSED IN ADULT LIVER, SIGNAL = 0.84; EXPRESSED IN BRAIN, SIGNAL = 1.1; EST_HUMAN HIT: AI187394.1, EVALUE 7.00e-36; NT HIT: AF073921.1, EVALUE 2.00e-47; SWISSPROT HIT: P49758, EVALUE 8.00e-12
tttccggatgtcctcttttgttgttttcctgattggttggctgagtacatgcaccgggctctgtgcctgggactcttcagtcacgccatacacgga

SEQ ID NO: 27472 - DNA, 103 bp, Homo sapiens
  MAP TO AC006501.5; EXPRESSED IN LUNG, SIGNAL = 0.71; EXPRESSED IN BRAIN, SIGNAL = 0.74; EXPRESSED IN BONE MARROW, SIGNAL = 0.61; EXPRESSED IN ADULT LIVER, SIGNAL = 0.64; EXPRESSED IN PLACENTA, SIGNAL = 0.68; SWISSPROT HIT: Q09472, EVALUE 3.20e+00; EST_HUMAN HIT: BF213873.1, EVALUE 3.30e-01
gcacgcgctcttggcattcatgttctcgcgtcaggagggcaagttgaaccgccagcagaccatggagcttggccaccacatcctgaaggcgcacattttcaag

SEQ ID NO: 27473 - DNA, 134 bp, Homo sapiens
  MAP TO AC004973.1; EXPRESSED IN LUNG, SIGNAL = 0.72; EXPRESSED IN BONE MARROW, SIGNAL = 1.2; EXPRESSED IN ADULT LIVER, SIGNAL = 0.69; EXPRESSED IN PLACENTA, SIGNAL = 0.93; EXPRESSED IN FETAL LIVER, SIGNAL = 0.81; EXPRESSED IN BRAIN, SIGNAL = 0.86; SWISSPROT HIT: P21551, EVALUE 2.40e+00; NT HIT: AB019507.1, EVALUE 1.90e-02
tagaggtgactgccagccatggaaatatatctgatcaaatcaaaaataaatgtaaacccaattcaatttcccctctgcatgatcccaacaatgttcacagccaccccaatgccaatcccgccatgaaggaagag

SEQ ID NO: 27474 - DNA, 192 bp, Homo sapiens
  MAP TO AC004583.1; EXPRESSED IN PLACENTA, SIGNAL = 0.81; EXPRESSED IN LUNG, SIGNAL = 0.83; EXPRESSED IN FETAL LIVER, SIGNAL = 0.75; EXPRESSED IN BRAIN, SIGNAL = 0.81; EXPRESSED IN ADULT LIVER, SIGNAL = 0.66; EXPRESSED IN BONE MARROW, SIGNAL = 0.98; NT HIT: gi11433046, EVALUE 1.00e-102; SWISSPROT HIT: Q05890, EVALUE 1.50e-01; EST_HUMAN HIT: AU125340.1, EVALUE 1.00e-100
gccccagttgtgacaacgttgaggaagatatgaatgcttctgctcaaggtgcttctgccacagttttggaagaaacaaggaaggaaacggctcctgtgcagctccctgtttcagggccagaactggctgccatgatgaagattggaacaagggtcatgagaggtgtggactggaaatggggcgatcaggtac

SEQ ID NO: 27475 - DNA, 255 bp, Homo sapiens
  MAP TO AC005729.1; EXPRESSED IN PLACENTA, SIGNAL = 0.72; EXPRESSED IN LUNG, SIGNAL =   1; EXPRESSED IN BRAIN, SIGNAL = 0.78; EXPRESSED IN ADULT LIVER, SIGNAL = 0.59; EXPRESSED IN BONE MARROW, SIGNAL = 0.64; EST_HUMAN HIT: BE063527.1, EVALUE 1.00e-06; SWISSPROT HIT: P22555, EVALUE 6.00e-01; NT HIT: Y08257.1, EVALUE 9.60e+00
atatcctctaccccccggaataataccagcaatatcacaggggtggtgtacaccccctgtgatattgagagtaatatcattctctccacccccagatattaagaacaatatcatggcggggggttgtatatccccagtgatattgggaataatgtcatcctctccttccctggaaattaggaacaatatcacaggggggtgtacaccttctttgatattggaagcaatatcatcctcttccccgctggatattag

SEQ ID NO: 27476 - DNA, 173 bp, Homo sapiens
  MAP TO AC002288.1; EXPRESSED IN ADULT LIVER, SIGNAL =   1; EXPRESSED IN PLACENTA, SIGNAL = 1.1; EXPRESSED IN LUNG, SIGNAL = 1.2; EXPRESSED IN FETAL LIVER, SIGNAL = 0.93; EXPRESSED IN BRAIN, SIGNAL =   1; EXPRESSED IN BONE MARROW, SIGNAL = 0.9; EST_HUMAN HIT: R91214.1, EVALUE 1.00e-48; NT HIT: M22878.1, EVALUE 5.00e-93; SWISSPROT HIT: P00008, EVALUE 8.00e-26
tgagaaaagcaagaagatttttgttcagaagtgtgcccagtgccacaccgtggaaaagggaggcaagcataagacagggcctaatctcttcgggtggaagacaggtcaggccattggattctcttacacagacaccagtaagaacaaaggcatcacctggggagaggatacac

SEQ ID NO: 27477 - DNA, 133 bp, Homo sapiens
  MAP TO AC005872.2; EXPRESSED IN BONE MARROW, SIGNAL = 0.81; EXPRESSED IN ADULT LIVER, SIGNAL = 0.94; EXPRESSED IN PLACENTA, SIGNAL = 0.93; EXPRESSED IN LUNG, SIGNAL = 0.91; EXPRESSED IN FETAL LIVER, SIGNAL = 0.94; EXPRESSED IN BRAIN, SIGNAL =   1; EST_HUMAN HIT: N98645.1, EVALUE 7.00e-06; SWISSPROT HIT: P38857, EVALUE 1.80e+00; NT HIT: D85606.1, EVALUE 2.00e-05
gcagaggaaacagcaagtgcaaaggccctggggtcaaagaatgattggcatatccaagaaaaaacagcccattacaaaggttcacacccccataaacctgactgtcctcaggaaggtgagctactggacaatg

SEQ ID NO: 27478 - DNA, 169 bp, Homo sapiens
  MAP TO AC004881.1; EXPRESSED IN BONE MARROW, SIGNAL = 1.2; EXPRESSED IN PLACENTA, SIGNAL = 1.2; EXPRESSED IN LUNG, SIGNAL = 1.2; EXPRESSED IN FETAL LIVER, SIGNAL = 1.2; EXPRESSED IN ADULT LIVER, SIGNAL =   1; EXPRESSED IN BRAIN, SIGNAL = 1.2; EST_HUMAN HIT: AI809792.1, EVALUE 9.00e-03; SWISSPROT HIT: P54842, EVALUE 5.10e+00
aattacagaagagaaactaaaactttcctttgcttcatttcaagggcctgtgactgtgaagtcacatgagctgccacatccaaggcgttgtcatggagacagtggtggttgcataaatgatgttggtccccactttcataaaaaaaaaagtaatttaaatttttatgta

SEQ ID NO: 27479 - DNA, 274 bp, Homo sapiens
  MAP TO AC005538.2; EXPRESSED IN BRAIN, SIGNAL = 1.2; EXPRESSED IN PLACENTA, SIGNAL = 1.2; EXPRESSED IN LUNG, SIGNAL = 2.1; EXPRESSED IN FETAL LIVER, SIGNAL = 1.1; EXPRESSED IN BONE MARROW, SIGNAL = 1.3; EXPRESSED IN ADULT LIVER, SIGNAL = 1.2; NT HIT: AF200923.2, EVALUE 2.60e+00; EST_HUMAN HIT: BE791173.1, EVALUE 0.00e+00; SWISSPROT HIT: O94759, EVALUE 2.00e-05
gagttctatgtccatctcgtcccggccatttctgtcttccttccggaagcctcttcggaagttcgcaaccagtttccagacaaacgtgaggagggcatcattataggaattcttggcgatctgcagattccggtacacaagcgtgctgaagtggttggagaagagttcagtgaggacatcatgggtgagaaacttccgtaggttcaagccattctccagaaagaggcggacaaacttgggtctgtcctttatgagagccgtaaacatgacttct

SEQ ID NO: 27480 - DNA, 317 bp, Homo sapiens
  MAP TO AC003071.1; EXPRESSED IN PLACENTA, SIGNAL = 0.71; EXPRESSED IN BRAIN, SIGNAL = 0.87; EXPRESSED IN ADULT LIVER, SIGNAL = 0.51; EXPRESSED IN LUNG, SIGNAL = 0.58; EXPRESSED IN BONE MARROW, SIGNAL = 0.51; EST_HUMAN HIT: BF213628.1, EVALUE 2.00e-60; NT HIT: gi7661637, EVALUE 4.00e-61; SWISSPROT HIT: Q9Y3U8, EVALUE 6.00e-28
gggcaaggcagggggctcagtccttggcagcggctttcctcatggtggccaggacattgcgcagctcctcctacttcctcttggtgcggatgtgtgttcccacctttttcttgatgaacttgaaggcccttttgtccttggagaccttgagctactccatgggatgctgcccatacagggtgaagccacacacctctcagatcatatcccgcatgaacttggtgtgtttggtcaggcacctgcgatggcagctgggcctgggcttgctcacattcttggtcaccttgtggcccttgttgaggcccatggctgtagga

SEQ ID NO: 27481 - DNA, 255 bp, Homo sapiens
  MAP TO AC004977.1; EXPRESSED IN PLACENTA, SIGNAL = 0.82; EXPRESSED IN LUNG, SIGNAL = 0.94; EXPRESSED IN FETAL LIVER, SIGNAL = 0.8; EXPRESSED IN ADULT LIVER, SIGNAL = 0.76; EXPRESSED IN BRAIN, SIGNAL = 1.3; EXPRESSED IN BONE MARROW, SIGNAL = 0.82; NT HIT: U13658.1, EVALUE 1.60e-01; SWISSPROT HIT: P19474, EVALUE 2.00e-03; EST_HUMAN HIT: AW968854.1, EVALUE 2.00e-66
gataagataaagagtcagcgaatgagaatcagcacggagttttcaaagctgcacaacttcctggttgaagaagaggacctgtttcttcagagattgaacaaagaagaagaagagacgaagaagaagctgaatgagaacacgttaaaactcaatcaaactatcgcttcattgaagaagctcatcttagaggtgggggagaagagccaggctcccaccctggagctgcttcaggtgagacagttacgagtgggggtg

SEQ ID NO: 27482 - DNA, 92 bp, Homo sapiens
  MAP TO AC004103.1; EXPRESSED IN LUNG, SIGNAL = 0.79; EXPRESSED IN BRAIN, SIGNAL = 0.95; EXPRESSED IN BONE MARROW, SIGNAL =   1; EXPRESSED IN ADULT LIVER, SIGNAL = 0.85; EXPRESSED IN PLACENTA, SIGNAL = 0.93; EXPRESSED IN FETAL LIVER, SIGNAL = 0.97; NT HIT: D90375.1, EVALUE 3.00e+00; EST_HUMAN HIT: AW992583.1, EVALUE 2.80e-01
actctaataacacctctatagtaatcacgatgatgacaacgatgataccaaagtccatggcagcttcttatgcttaatgggaaaatagtaag

SEQ ID NO: 27483 - DNA, 183 bp, Homo sapiens
  MAP TO AC003104.1; EXPRESSED IN PLACENTA, SIGNAL =   1; EXPRESSED IN LUNG, SIGNAL = 1.1; EXPRESSED IN FETAL LIVER, SIGNAL = 0.93; EXPRESSED IN BONE MARROW, SIGNAL = 0.84; EXPRESSED IN ADULT LIVER, SIGNAL = 0.99; EXPRESSED IN BRAIN, SIGNAL = 0.88; EST_HUMAN HIT: AI905004.1, EVALUE 9.00e-99; SWISSPROT HIT: Q14532, EVALUE 3.90e+00; NT HIT: M77026.1, EVALUE 1.10e-01
gtctggggtctgcagatgatctacaagtcagtgaagctgccagtgctcaaagtccgcagcatgctgctggagacccctcaggggcggatccaggccaaaaagtggtcccgcgtgcccttctccgtgcctgactttgacttcctgcagcattgtgccgagaacttgtcggacctctccctggac

SEQ ID NO: 27484 - DNA, 127 bp, Homo sapiens
  MAP TO AC002065.1; EXPRESSED IN PLACENTA, SIGNAL = 0.72; EXPRESSED IN LUNG, SIGNAL = 0.8; EXPRESSED IN FETAL LIVER, SIGNAL = 0.79; EXPRESSED IN BONE MARROW, SIGNAL = 0.83; EXPRESSED IN ADULT LIVER, SIGNAL = 0.6; EXPRESSED IN BRAIN, SIGNAL = 0.75; NT HIT: L00974.1, EVALUE 7.20e-02; EST_HUMAN HIT: H71106.1, EVALUE 7.00e-03
cttgcctcacacccagccaaagtgaataagaagatcatcaacaacttcaatgtgatcctacttgcttcttcccttgaacctcccactgatgggcctgcttgtcacactggtccttcaataccactac

SEQ ID NO: 27485 - DNA, 271 bp, Homo sapiens
  MAP TO AC004147.1; EXPRESSED IN LUNG, SIGNAL = 1.1; EXPRESSED IN BRAIN, SIGNAL = 1.1; EXPRESSED IN PLACENTA, SIGNAL = 1.1; EXPRESSED IN FETAL LIVER, SIGNAL = 1.3; EXPRESSED IN BONE MARROW, SIGNAL = 1.1; EXPRESSED IN ADULT LIVER, SIGNAL = 1.3; NT HIT: gi9998943, EVALUE 0.00e+00; EST_HUMAN HIT: AV750469.1, EVALUE 6.20e-02; SWISSPROT HIT: Q62962, EVALUE 7.00e-35
gtcccgatggacctcaaggaaagccccagtgagggcagcctgcaaccttctagcatccagatctttgccaacacctccaccctccatggcatccgccacatcttcgtgtatgggccgctgaccatccggcgtgtgctgtgggcagtggccttcgtgggctctctgggcctgctgctggtggagagctctgagagggtgtcctactacttctcctaccagcatgtcactaaggtggacgaagtggtggctcaaagcctggtcttcccagctg

SEQ ID NO: 27486 - DNA, 279 bp, Homo sapiens
  MAP TO AC005541.1; EXPRESSED IN LUNG, SIGNAL = 0.83; EXPRESSED IN BONE MARROW, SIGNAL = 1.1; EXPRESSED IN PLACENTA, SIGNAL = 0.78; EXPRESSED IN FETAL LIVER, SIGNAL = 0.86; EXPRESSED IN BRAIN, SIGNAL = 0.99; EXPRESSED IN ADULT LIVER, SIGNAL = 0.89; SWISSPROT HIT: P08548, EVALUE 4.00e-18; NT HIT: D86566.1, EVALUE 3.00e-15; EST_HUMAN HIT: AI082459.1, EVALUE 2.00e-29
ttctaagaattttgtggtggagcctttaggtttttcaaaatacaagaacgtgtcatctgcaaagtgggggcaatttgacttactcttttccaatttggatgccctgtatttctctttcttaattgctctggctaggacttctagtactatgctgattaagactggtaaaagtaggcatctttctcttgttccagttcttagaaaaaaggctttcagttctttcccattcagtacaatgttagctgttggtttgtcatacatggccttcattatgttgag

SEQ ID NO: 27487 - DNA, 83 bp, Homo sapiens
  MAP TO AC004046.1; EXPRESSED IN PLACENTA, SIGNAL = 2.5; EXPRESSED IN LUNG, SIGNAL = 0.85; EXPRESSED IN FETAL LIVER, SIGNAL = 2.4; EXPRESSED IN BRAIN, SIGNAL = 0.59; EXPRESSED IN ADULT LIVER, SIGNAL = 1.6; EXPRESSED IN HELA, SIGNAL = 2.4; EXPRESSED IN BONE MARROW, SIGNAL = 3.9; SWISSPROT HIT: P40799, EVALUE 9.60e+00; NT HIT: Y17062.1, EVALUE 2.60e+00
tagccttcgggtctgccccatgccacgtggtaaccatcctgacctgtgagggagtctgcagcaatacagtggcttacaccaaa

SEQ ID NO: 27488 - DNA, 124 bp, Homo sapiens
  MAP TO AC003078.1; EXPRESSED IN LUNG, SIGNAL = 0.66; EXPRESSED IN PLACENTA, SIGNAL = 0.74; EXPRESSED IN BRAIN, SIGNAL = 0.62; EXPRESSED IN BONE MARROW, SIGNAL = 0.71; EXPRESSED IN ADULT LIVER, SIGNAL = 0.75; SWISSPROT HIT: P30988, EVALUE 2.00e-12; EST_HUMAN HIT: AA330431.1, EVALUE 3.00e-17; NT HIT: gi11422189, EVALUE 6.00e-64
atattcaaagggatgatctcagcactctcctcgccttggttgttggctggttcattcctcagctcctgatggcagatgtaaattgggatgtcgccagcctccgcagcagcggctgcagcgcgag

SEQ ID NO: 27489 - DNA, 182 bp, Homo sapiens
  MAP TO AC004123.1; EXPRESSED IN PLACENTA, SIGNAL = 0.78; EXPRESSED IN LUNG, SIGNAL = 0.77; EXPRESSED IN FETAL LIVER, SIGNAL = 0.8; EXPRESSED IN BRAIN, SIGNAL = 0.63; EXPRESSED IN ADULT LIVER, SIGNAL = 0.75; EXPRESSED IN BONE MARROW, SIGNAL = 0.77; SWISSPROT HIT: P19319, EVALUE 3.90e+00; EST_HUMAN HIT: BF222646.1, EVALUE 1.00e-11; NT HIT: AF152238.1, EVALUE 4.00e-04
gaggaagaggaggaagaggaagaagaagaggaggaagaggaacagaaggaggaggaggaaaaggaggaggaggaggatactctcaccatgcgttttctctgtgaccccagaatactctcagcatgtgaaaggctggcttcccattgccttttgccatgattggacgcttcctgaggcctcag

SEQ ID NO: 27490 - DNA, 89 bp, Homo sapiens
  MAP TO AC003664.1; EXPRESSED IN BRAIN, SIGNAL = 0.93; EXPRESSED IN BONE MARROW, SIGNAL = 0.99; EXPRESSED IN ADULT LIVER, SIGNAL = 0.87; EXPRESSED IN PLACENTA, SIGNAL =   1; EXPRESSED IN LUNG, SIGNAL = 0.98; EXPRESSED IN FETAL LIVER, SIGNAL = 0.87; NT HIT: AL163249.2, EVALUE 2.00e-07; EST_HUMAN HIT: AW088924.1, EVALUE 2.00e-08
agaaaagagctgttcatgaaccaggaaacaggctctcactagacactgaatctgccagcacctctgtcttggacttccagactccagaa

SEQ ID NO: 27491 - DNA, 172 bp, Homo sapiens
  MAP TO AC005875.1; EXPRESSED IN ADULT LIVER, SIGNAL = 0.91; EXPRESSED IN BONE MARROW, SIGNAL = 0.99; EXPRESSED IN PLACENTA, SIGNAL = 0.91; EXPRESSED IN LUNG, SIGNAL = 1.1; EXPRESSED IN FETAL LIVER, SIGNAL = 0.91; EXPRESSED IN BRAIN, SIGNAL = 0.95; SWISSPROT HIT: P07259, EVALUE 6.70e+00; EST_HUMAN HIT: N86245.1, EVALUE 2.30e+00
atataaggccaggatgttagtgatggtggtgattgtaatagacactgccgcttttgaatagacattggacatccgctctcgtatgtcacctgcaaggttggtcttatgccaggcagaaatcatgataaacatgtcatcgaccccaacacctgtaaaaaaaaaaaaaaaaaaa

SEQ ID NO: 27492 - DNA, 169 bp, Homo sapiens
  MAP TO AC005722.1; EXPRESSED IN BONE MARROW, SIGNAL = 0.99; EXPRESSED IN ADULT LIVER, SIGNAL = 0.86; EXPRESSED IN PLACENTA, SIGNAL = 0.9; EXPRESSED IN LUNG, SIGNAL = 1.1; EXPRESSED IN FETAL LIVER, SIGNAL = 0.95; EXPRESSED IN BRAIN, SIGNAL = 0.96; NT HIT: gi11426910, EVALUE 1.00e-90; SWISSPROT HIT: Q10768, EVALUE 5.10e+00; EST_HUMAN HIT: T16293.1, EVALUE 2.00e-90
tccctaaaactcaagcatcttccaacctgttagccttggttactcgtcatgggcctgctgaagaacagtcgaaagatgggaatgagccacgggaatgtgcccattgcctcttagtgcaaggaagtgagaggcagcgggccgagcagcagagcaaggcagtgtttggcag

SEQ ID NO: 27493 - DNA, 186 bp, Homo sapiens
  MAP TO AC006254.10; EXPRESSED IN PLACENTA, SIGNAL = 0.85; EXPRESSED IN BRAIN, SIGNAL = 0.8; EXPRESSED IN BONE MARROW, SIGNAL = 0.9; EXPRESSED IN ADULT LIVER, SIGNAL = 6.5; EXPRESSED IN LUNG, SIGNAL = 0.91; EXPRESSED IN FETAL LIVER, SIGNAL =  10; EST_HUMAN HIT: T68764.1, EVALUE 6.00e-63; SWISSPROT HIT: Q06033, EVALUE 1.00e-31; NT HIT: X14690.1, EVALUE 1.00e-100
cccatggcccttcacatctgccttaaagctgttcatgtcctcgtccaccaggcgcccggccaccacgatctcagagccatcgtagaagtgctggtaagtgttctgggtgaggtccaggatagcgttctcggggtactccatctccacacccgtcagcagtgggttggccacctcctcatagaagcc

SEQ ID NO: 27494 - DNA, 92 bp, Homo sapiens
  MAP TO AC005079.1; EXPRESSED IN LUNG, SIGNAL = 0.83; EXPRESSED IN BONE MARROW, SIGNAL = 0.71; EXPRESSED IN ADULT LIVER, SIGNAL = 0.63; EXPRESSED IN PLACENTA, SIGNAL = 1.1; EXPRESSED IN FETAL LIVER, SIGNAL = 0.73; EXPRESSED IN BRAIN, SIGNAL = 0.7; EST_HUMAN HIT: AA860856.1, EVALUE 2.80e-01; NT HIT: AF091216.1, EVALUE 1.90e-01
gcctttttgagatcacttgcagcacctaactcaatgtagtgcttaagatcaactatttcataggacagttgtgaggatgaatgtagtactac

SEQ ID NO: 27495 - DNA, 95 bp, Homo sapiens
  MAP TO AC005746.1; EXPRESSED IN LUNG, SIGNAL = 0.83; EXPRESSED IN PLACENTA, SIGNAL = 0.82; EXPRESSED IN FETAL LIVER, SIGNAL = 0.69; EXPRESSED IN BRAIN, SIGNAL = 0.76; EXPRESSED IN ADULT LIVER, SIGNAL = 0.78; EXPRESSED IN BONE MARROW, SIGNAL = 0.69; NT HIT: X91856.1, EVALUE 2.00e-01; EST_HUMAN HIT: BE565040.1, EVALUE 1.20e+00
ccaattcctgtatatgcaaccatcaatttgtacactagaaatcgtggagatggtcacatcaaacaccacatgatttaccattttagcttttgaaa

SEQ ID NO: 27496 - DNA, 263 bp, Homo sapiens
  MAP TO AC005844.7; EXPRESSED IN LUNG, SIGNAL = 1.4; EXPRESSED IN PLACENTA, SIGNAL = 1.4; EXPRESSED IN FETAL LIVER, SIGNAL = 1.2; EXPRESSED IN BRAIN, SIGNAL = 1.3; EXPRESSED IN BONE MARROW, SIGNAL = 1.2; EXPRESSED IN ADULT LIVER, SIGNAL = 1.2; SWISSPROT HIT: P42285, EVALUE 8.30e-01; EST_HUMAN HIT: BE061860.1, EVALUE 1.00e-58; NT HIT: AJ245536.1, EVALUE 6.30e-01
ctaggttgctagagaagccaaagatggctccagagtatctggttaggacagtttgcttcactctccccacagcattgatggaatgcttggaagaggcaggcagttcccttagaatcgggtcggcgcaggcttcgctgtgcccgtgtttcctccgtatggacatggccatccttgctgccttaacttctggcattgctgttgtgccctccaggccatctgctgctgtctttggtcctccatttcttccttcctttaccatggca

SEQ ID NO: 27497 - DNA, 174 bp, Homo sapiens
  MAP TO AC000016.1; EXPRESSED IN LUNG, SIGNAL = 0.41; EXPRESSED IN ADULT LIVER, SIGNAL = 0.47; EXPRESSED IN BRAIN, SIGNAL = 0.7; EXPRESSED IN BONE MARROW, SIGNAL = 0.6; SWISSPROT HIT: P51461, EVALUE 2.30e+00; NT HIT: AL161563.2, EVALUE 2.60e-02
cagctcctggcagaccctcagggttgcagtcctctcactggtgcttctattcccactctgcaacttgtcagctctgtagcacagcttcacaggacccaggagccccaagttctcaacccttaaccacctcatcaggctctcgaacatcatcatcaaagaaaagccagaaacaat

SEQ ID NO: 27498 - DNA, 176 bp, Homo sapiens
  MAP TO AC003117.1; EXPRESSED IN BRAIN, SIGNAL = 0.85; EXPRESSED IN BONE MARROW, SIGNAL = 0.54; EXPRESSED IN PLACENTA, SIGNAL = 0.67; EXPRESSED IN LUNG, SIGNAL = 0.88; EXPRESSED IN ADULT LIVER, SIGNAL = 0.69; EST_HUMAN HIT: AV742621.1, EVALUE 2.00e-65; NT HIT: gi11428081, EVALUE 2.00e-83; SWISSPROT HIT: P06178, EVALUE 2.30e+00
tcaagctttgagattggagtgatttctgaggtagatgagctggaaatattttcaacagtttcactgtccacaactgcattggaagactcttcatgcaaatcaactgtagggagtgtctccaccaccggtggacttaacttttttgactctgtattctgtttaaaaaaacaagtcag

SEQ ID NO: 27499 - DNA, 258 bp, Homo sapiens
  MAP TO AC005988.1; EXPRESSED IN LUNG, SIGNAL = 1.1; EXPRESSED IN FETAL LIVER, SIGNAL = 0.88; EXPRESSED IN BRAIN, SIGNAL =   1; EXPRESSED IN BONE MARROW, SIGNAL = 0.97; EXPRESSED IN PLACENTA, SIGNAL = 0.92; EXPRESSED IN ADULT LIVER, SIGNAL =   1; NT HIT: AF142621.1, EVALUE 0.00e+00; EST_HUMAN HIT: AV723873.1, EVALUE 3.70e+00; SWISSPROT HIT: P22105, EVALUE 1.80e+00
agtgccggggtgatgtctgtgtacctgtttatgaagcggtacaccgcggaggacatgtacaggccccaccctggcttctaccgccctcggctgagcaactgctccgattactcaggccagttcctacacccagacgcctgggtcaggggccgcagcccctccgacatctccagcgaggcctccctgcagatgaacagcaactaccccgccttgctcaagtgccccgactatgatcagatgtcctcttcaccctgctga

SEQ ID NO: 27500 - DNA, 96 bp, Homo sapiens
  MAP TO AC000056.1; EXPRESSED IN BONE MARROW, SIGNAL = 0.71; EXPRESSED IN PLACENTA, SIGNAL = 1.5; EXPRESSED IN LUNG, SIGNAL = 1.2; EXPRESSED IN ADULT LIVER, SIGNAL = 1.5; EXPRESSED IN BRAIN, SIGNAL = 0.91; EST_HUMAN HIT: AI948714.1, EVALUE 7.50e-02; NT HIT: M94066.1, EVALUE 8.00e-01
gggcatccgcttcaacctctcagtcaagactgacttctctcctgtgatgttcctaaacatctgtgatcagcccagccttttgcgggagggagagcg

SEQ ID NO: 27501 - DNA, 162 bp, Homo sapiens
  MAP TO AC004050.1; EXPRESSED IN LUNG, SIGNAL = 1.6; EXPRESSED IN BRAIN, SIGNAL =   1; EXPRESSED IN PLACENTA, SIGNAL = 1.9; EXPRESSED IN FETAL LIVER, SIGNAL = 0.95; EXPRESSED IN BONE MARROW, SIGNAL = 1.8; EXPRESSED IN ADULT LIVER, SIGNAL =   1; SWISSPROT HIT: P14646, EVALUE 3.00e+00; NT HIT: AJ294727.1, EVALUE 5.80e+00; EST_HUMAN HIT: BE927220.1, EVALUE 2.20e+00
aaggtgtgtagtaagcagcatcttctgcctctcttgaggctcttcacactggggaggaaaatttccgctctgaaacatgggaatccagcaggcatgctccgtggcttcaggggtccagagttgagcaaacccagcccgaatgaatgcaaagaatgtgaataa

SEQ ID NO: 27502 - DNA, 195 bp, Homo sapiens
  MAP TO AC004492.1; EXPRESSED IN PLACENTA, SIGNAL = 0.95; EXPRESSED IN LUNG, SIGNAL =   1; EXPRESSED IN BRAIN, SIGNAL = 0.58; EXPRESSED IN FETAL LIVER, SIGNAL = 0.67; EXPRESSED IN BONE MARROW, SIGNAL = 0.82; EXPRESSED IN ADULT LIVER, SIGNAL = 0.72; NT HIT: gi11421930, EVALUE 1.00e-106; SWISSPROT HIT: P09608, EVALUE 1.70e+00; EST_HUMAN HIT: AU130113.1, EVALUE 1.00e-106
ctgtgcaaaatcagcagcaagtcgcattttcccaccttcaccaagaggtcttatgagactggcatggcggataaaaagttcaacagctctttgggcaatagcctcagtgttgtcaaagacaaaatccaagcattcaaagtgtttaaaatagtcactcataactctggcaatgaaaccttgtagctccttcatgta

SEQ ID NO: 27503 - DNA, 180 bp, Homo sapiens
  MAP TO AC006531.1; EXPRESSED IN LUNG, SIGNAL = 0.57; EXPRESSED IN BRAIN, SIGNAL = 0.95; EXPRESSED IN BONE MARROW, SIGNAL = 0.52; EXPRESSED IN ADULT LIVER, SIGNAL = 0.53; SWISSPROT HIT: Q00959, EVALUE 2.00e-28; NT HIT: U09002.1, EVALUE 4.00e-97; EST_HUMAN HIT: AW950843.1, EVALUE 8.00e-19
ctttttgtcactgaggccggtcacttggtccacaaattcctcttggatcatgaaggcagccagattggctgtgtagctagccaggaatatgacagcgaagaaggcccatacagataccatgatcttgctggtggtccctttaggattctggacaggcacggagttattgaacaccaggcc

SEQ ID NO: 27504 - DNA, 176 bp, Homo sapiens
  MAP TO AC004992.1; EXPRESSED IN LUNG, SIGNAL = 0.59; EXPRESSED IN BRAIN, SIGNAL = 0.95; EXPRESSED IN BONE MARROW, SIGNAL = 0.71; EXPRESSED IN PLACENTA, SIGNAL = 0.65; EXPRESSED IN FETAL LIVER, SIGNAL = 0.68; EXPRESSED IN ADULT LIVER, SIGNAL = 0.53; EST_HUMAN HIT: BF675203.1, EVALUE 3.90e-02; NT HIT: AF206518.2, EVALUE 1.60e+00; SWISSPROT HIT: Q9X5U0, EVALUE 2.30e+00
caggaaccacacagtcctggtttttctcctttctcttgctgctgcttctgtctcctttgtaggtttcttctcatcgctacagttcctaaacattggagtacccccagggatcagtacttgatcctcctcttttcttttgacactctcttcctcggtgatttcatctaatgttttct

SEQ ID NO: 27505 - DNA, 318 bp, Homo sapiens
  MAP TO AC002073.1; EXPRESSED IN LUNG, SIGNAL = 0.78; EXPRESSED IN BONE MARROW, SIGNAL = 1.1; EXPRESSED IN PLACENTA, SIGNAL = 1.1; EXPRESSED IN FETAL LIVER, SIGNAL = 1.2; EXPRESSED IN BRAIN, SIGNAL = 0.88; EXPRESSED IN ADULT LIVER, SIGNAL = 0.91; NT HIT: X91195.1, EVALUE 0.00e+00; SWISSPROT HIT: O27115, EVALUE 5.30e-01; EST_HUMAN HIT: BE503096.1, EVALUE 0.00e+00
gtgctcagcttctgcatggcccggatcttgtccagcaggccagagatgaaggcctctgtgggtttgtaacagtcaaccagcagctccttgaccctggaagcccaggcatcgtcactctccatgtccaggagctcatccacgtcaatctctagttctgagatctcctcttcctggcagtcgtagaggcgcgtgagctgctccaggatccactcctctaggttgaggtgcttccgtagctccttggggtcatacttgatggtgaccttcccttggcgcctcactgggccctcatcatccgcgcagcccgggccctctcct

SEQ ID NO: 27506 - DNA, 308 bp, Homo sapiens
  MAP TO AC004166.4; EXPRESSED IN LUNG, SIGNAL = 0.43; EXPRESSED IN BRAIN, SIGNAL = 0.64; EXPRESSED IN ADULT LIVER, SIGNAL = 0.46; EXPRESSED IN PLACENTA, SIGNAL = 0.62; EST_HUMAN HIT: AA861773.1, EVALUE 4.00e-34; SWISSPROT HIT: P24571, EVALUE 3.40e+00
caactctggagctccaagtcataaaaatgcctaattcccaccagctgactgacagcccagccctcggtttattttccatccctaaagagagaggaatgcagccatccgtgacatttttgggacatggatctctgccccacctcacatcatctctgatagcaccactcagcctgggaggtatgttgctcatctacccgcaaaacaaaaccatctattctccaaaaacagggaccagaaccctgaccctgctggcctcggtcctgggcatggttttggtgcccaggtctgtgtccaggtggccctcgggc

SEQ ID NO: 27507 - DNA, 230 bp, Homo sapiens
  MAP TO AC005901.1; EXPRESSED IN PLACENTA, SIGNAL = 1.2; EXPRESSED IN LUNG, SIGNAL = 0.84; EXPRESSED IN FETAL LIVER, SIGNAL = 1.2; EXPRESSED IN BRAIN, SIGNAL = 0.83; EXPRESSED IN ADULT LIVER, SIGNAL = 0.95; EXPRESSED IN BONE MARROW, SIGNAL = 0.95; NT HIT: gi11425900, EVALUE 1.00e-118; SWISSPROT HIT: P57082, EVALUE 3.00e-35
tgatagaagaggcttgagtccctctgggtgggaaaggtgctgaggggcaggtcctgcggctccgcgagctgtgagtgtgccccgttctcgtgctggtagtgctggagtgcctggtgggtgccgagcagggggcccacgtccggtgtggctgagagctggggggagatgagcctctgcctcatgatgcttttggaaatcacggggtattctttgctgaaggggtggggagg

SEQ ID NO: 27508 - DNA, 197 bp, Homo sapiens
  MAP TO AC004898.1; EXPRESSED IN PLACENTA, SIGNAL = 0.7; EXPRESSED IN LUNG, SIGNAL = 0.63; EXPRESSED IN BRAIN, SIGNAL = 0.92; EXPRESSED IN BONE MARROW, SIGNAL = 0.73; EXPRESSED IN ADULT LIVER, SIGNAL = 0.65; NT HIT: gi5454007, EVALUE 8.00e-06; SWISSPROT HIT: P42722, EVALUE 2.90e+00; EST_HUMAN HIT: AL138274.1, EVALUE 3.00e-37
cggccttctatcttaaaaaccagcactgtttcatctctatgacccttctgttaccacatctctctgacaccaccctggagaggttctctgcaggactcatgattaaattagtcccattgcataatctgggcttatcgcctcgtcttgaaatccatagtaaccttaattacatctgcaaaatctcttttaccatttaa

SEQ ID NO: 27509 - DNA, 245 bp, Homo sapiens
  MAP TO AC006262.1; EXPRESSED IN PLACENTA, SIGNAL = 0.99; EXPRESSED IN BRAIN, SIGNAL = 1.2; EXPRESSED IN ADULT LIVER, SIGNAL = 0.95; EXPRESSED IN LUNG, SIGNAL = 0.91; EXPRESSED IN FETAL LIVER, SIGNAL = 1.1; EXPRESSED IN BONE MARROW, SIGNAL = 1.1; SWISSPROT HIT: Q16629, EVALUE 1.20e+00; NT HIT: AE000854.1, EVALUE 3.80e-02; EST_HUMAN HIT: AA454642.1, EVALUE 0.00e+00
ctgtgccagccggcacccaggtgtggagacaagatctacaaccccttggagcagtgctgttacaatgacgccatcgtgtccctgagcgagacccgccaatgtggtcccccctgcaccttctggccctgctttgagctctgctgtcttgattcctttggcctcacaaacgattttgttgtgaagctgaaggttcagggtgtgaattcccagtgccactcatctcccatctccagtaaatgtgaaag

SEQ ID NO: 27510 - DNA, 195 bp, Homo sapiens
  MAP TO AC004578.3; EXPRESSED IN ADULT LIVER, SIGNAL = 0.92; EXPRESSED IN PLACENTA, SIGNAL = 0.83; EXPRESSED IN BONE MARROW, SIGNAL = 0.79; EXPRESSED IN LUNG, SIGNAL = 0.94; EXPRESSED IN FETAL LIVER, SIGNAL = 0.83; EXPRESSED IN BRAIN, SIGNAL = 0.93; SWISSPROT HIT: Q09632, EVALUE 9.90e-01; EST_HUMAN HIT: AA618613.1, EVALUE 2.70e+00
gcatgtctcagccaagtccttggaccagtgcagagaggcctgtttgtctgagatgggcttgccaatctgcagttcagatgacaccagctcgccttggaagaaggctgactcaaaacaccagtgtttacagaggaaaagtgagaaactgatgagcttccacaggaagaaatccatgcactcgagagattatgggct

SEQ ID NO: 27511 - DNA, 140 bp, Homo sapiens
  MAP TO AC006337.2; EXPRESSED IN PLACENTA, SIGNAL = 0.77; EXPRESSED IN LUNG, SIGNAL =   1; EXPRESSED IN FETAL LIVER, SIGNAL = 0.72; EXPRESSED IN BRAIN, SIGNAL = 0.83; EXPRESSED IN BONE MARROW, SIGNAL = 0.78; EXPRESSED IN ADULT LIVER, SIGNAL = 0.82; SWISSPROT HIT: P42003, EVALUE 2.40e+00; NT HIT: AF016052.1, EVALUE 1.20e+00
ttcaatgatcaatgcagatagcaaactggcatagaatttgcagtatctgagattgttcataatagaaatcacacgtatttttatatcaatcacatcacactggtgcagatgccacataatatcagttacgctcatcacga

SEQ ID NO: 27512 - DNA, 172 bp, Homo sapiens
  MAP TO AC005553.1; EXPRESSED IN PLACENTA, SIGNAL = 1.1; EXPRESSED IN FETAL LIVER, SIGNAL = 0.95; EXPRESSED IN LUNG, SIGNAL = 1.2; EXPRESSED IN BRAIN, SIGNAL = 1.2; EXPRESSED IN BONE MARROW, SIGNAL = 0.87; EXPRESSED IN ADULT LIVER, SIGNAL = 0.99; SWISSPROT HIT: P34803, EVALUE 7.80e-01; NT HIT: AK024472.1, EVALUE 1.00e-01; EST_HUMAN HIT: H82495.1, EVALUE 1.50e-01
tttctgtgcagagcctgattctcctgggggtgggggatggcaaggcctggaaggataaacagatgaacagaggacccccccacctccatctcttgcttcaaccatcccctgatcaccatcatgagctgttttacacttaggcctcagcagaaaggcttctgccactagaaca

SEQ ID NO: 27513 - DNA, 115 bp, Homo sapiens
  MAP TO AC004504.1; EXPRESSED IN LUNG, SIGNAL = 0.57; EXPRESSED IN BRAIN, SIGNAL = 0.65; EXPRESSED IN BONE MARROW, SIGNAL = 1.2; EXPRESSED IN ADULT LIVER, SIGNAL = 0.47; NT HIT: gi7305186, EVALUE 6.40e-02
cagattatcccagctgattatccaagtgatcactttgatgatgagattctggaaaaataaacttcactgccaatacttcaccttacaagcaggtgaacactcttctgcatattta

SEQ ID NO: 27514 - DNA, 280 bp, Homo sapiens
  MAP TO AC006538.1; EXPRESSED IN PLACENTA, SIGNAL = 0.8; EXPRESSED IN BRAIN, SIGNAL = 0.88; EXPRESSED IN ADULT LIVER, SIGNAL = 0.85; EXPRESSED IN LUNG, SIGNAL = 0.78; EXPRESSED IN FETAL LIVER, SIGNAL = 0.97; EXPRESSED IN BONE MARROW, SIGNAL = 0.87; SWISSPROT HIT: P55315, EVALUE 5.70e-01; NT HIT: AF087913.1, EVALUE 6.80e-01; EST_HUMAN HIT: AL133871.1, EVALUE 4.00e-03
atcctgccatctcccaataccaccatctccaacaccgccatctcccgatacccacatctcccaatacccacatctcccgataccgctacctctcaataccgccacctcccaacactgccatctcccgatacccacatctcccaatactgctacctctcaataccaccacctccaacaccaccatctccaacactgccacctccaacaccaccatctccaacaccgccacctccaacaccgccgtctcccgatacctccacctccggacacccccacctcc

SEQ ID NO: 27515 - DNA, 120 bp, Homo sapiens
  MAP TO AC004999.1; EXPRESSED IN PLACENTA, SIGNAL = 1.3; EXPRESSED IN LUNG, SIGNAL = 1.1; EXPRESSED IN FETAL LIVER, SIGNAL = 1.2; EXPRESSED IN BRAIN, SIGNAL = 1.3; EXPRESSED IN ADULT LIVER, SIGNAL = 1.5; EXPRESSED IN BONE MARROW, SIGNAL =   1; NT HIT: gi11416891, EVALUE 1.00e-61; SWISSPROT HIT: Q16637, EVALUE 1.20e-01; EST_HUMAN HIT: BE298816.1, EVALUE 2.00e-61
ctgttgtaaggaagctgcagtattcttcttttggcttttattcttcttagcaggttttcttttaggtgtggtttttggtttacccgaagtttcacaaatgtcaccattctttagagcatg

SEQ ID NO: 27516 - DNA, 130 bp, Homo sapiens
  MAP TO AC003678.1; EXPRESSED IN PLACENTA, SIGNAL = 1.3; EXPRESSED IN LUNG, SIGNAL = 1.2; EXPRESSED IN FETAL LIVER, SIGNAL = 1.3; EXPRESSED IN BONE MARROW, SIGNAL = 1.5; EXPRESSED IN BRAIN, SIGNAL = 1.6; EXPRESSED IN ADULT LIVER, SIGNAL = 1.1; EST_HUMAN HIT: BE181655.1, EVALUE 4.30e-01; SWISSPROT HIT: P30731, EVALUE 7.00e+00
aagatggcttcacagtgagcgtgactgtgaggctgttgtgcccctcctccctgatcttctgccacgaccctggagcccacttcagtcaccactgccaaaccatcaccttccatcacacacactcggactg

SEQ ID NO: 27517 - DNA, 174 bp, Homo sapiens
  MAP TO AC004059.2; EXPRESSED IN ADULT LIVER, SIGNAL = 0.51; EXPRESSED IN PLACENTA, SIGNAL = 2.9; EXPRESSED IN LUNG, SIGNAL = 0.65; EXPRESSED IN BRAIN, SIGNAL = 0.59; EXPRESSED IN BONE MARROW, SIGNAL = 0.55; SWISSPROT HIT: P51461, EVALUE 2.30e+00; NT HIT: AL161563.2, EVALUE 2.60e-02
gcacagctcctggcagaccctcagggttgcagtcctctcactggtgcttctattcccactctgcaacttgtcagctctgtagcacagcttcacaggacccaggagccccaagttctcaacccttaaccacctcatcaggctctcgaacatcatcatcaaagaaaagccagaaac

SEQ ID NO: 27518 - DNA, 444 bp, Homo sapiens
  MAP TO AC005237.2; EXPRESSED IN LUNG, SIGNAL = 1.2; EXPRESSED IN PLACENTA, SIGNAL = 1.2; EXPRESSED IN FETAL LIVER, SIGNAL = 1.2; EXPRESSED IN BRAIN, SIGNAL = 0.91; EXPRESSED IN BONE MARROW, SIGNAL =   1; EXPRESSED IN ADULT LIVER, SIGNAL = 0.98; EST_HUMAN HIT: BE175169.1, EVALUE 1.00e-125; NT HIT: AL161548.2, EVALUE 7.00e-02
ctattcctcctcgtcgtcgtcctcatcctcatcattgtcctccgcctcgtcgtcgtcctcatcatcgtcatcctcatcattgtcatcctcatcattgtcctcctcatcatcgtcatcctcatcctcatccagacttgcccttttgtcatcagatgtgctgctctcagactcctcctcctcccgagccaggagcttcttaaaaacttgaaactcctcaacagaagtacaggctgtcctggccaaaaactcagcttctgaaactctgagaatgtccttgagcaatgggttagggatctgtgtctgccccttcttatcaggggtttggtaccgtcccaggcgctccaggtaaatgtgtctctgcttaatcttggttagtgaatactgcaagtactcactctttacaatgtctggatgcttaattcccatcctgaagtatgcatactg

SEQ ID NO: 27519 - DNA, 89 bp, Homo sapiens
  MAP TO AC006021.2; EXPRESSED IN LUNG, SIGNAL = 1.4; EXPRESSED IN BRAIN, SIGNAL = 0.72; EXPRESSED IN BONE MARROW, SIGNAL = 0.9; EXPRESSED IN PLACENTA, SIGNAL = 0.94; EXPRESSED IN ADULT LIVER, SIGNAL = 0.79; EST_HUMAN HIT: BE867650.1, EVALUE 5.00e-43; SWISSPROT HIT: P24557, EVALUE 4.30e-02; NT HIT: D34613.1, EVALUE 3.00e-43
catttcaggagggccaagagagccactgacagggccaccgtcaccatggggccattcacttccaattttagaaaccccaaggcttccat

SEQ ID NO: 27520 - DNA, 138 bp, Homo sapiens
  MAP TO AC003683.1; EXPRESSED IN BRAIN, SIGNAL = 0.7; EXPRESSED IN BONE MARROW, SIGNAL = 0.73; EXPRESSED IN PLACENTA, SIGNAL = 0.59; EXPRESSED IN LUNG, SIGNAL = 0.68; EXPRESSED IN FETAL LIVER, SIGNAL = 0.87; EXPRESSED IN ADULT LIVER, SIGNAL = 0.6; NT HIT: L35321.2, EVALUE 2.00e-02; EST_HUMAN HIT: AW856789.1, EVALUE 1.20e-01
gctatgaatactgggaaaacccactatgttcctttcaggtttacacctcctactatgattaagaaaaaatataggctggtttttattagaatcatcatcatcatcatcatcctcaccaccaccaccatcataatcaaa

SEQ ID NO: 27521 - DNA, 198 bp, Homo sapiens
  MAP TO AC005737.1; EXPRESSED IN BRAIN, SIGNAL = 0.59; EXPRESSED IN BONE MARROW, SIGNAL = 0.51; EXPRESSED IN ADULT LIVER, SIGNAL = 0.46; EXPRESSED IN LUNG, SIGNAL = 0.56; EXPRESSED IN FETAL LIVER, SIGNAL = 0.75; SWISSPROT HIT: O13124, EVALUE 3.80e+00; NT HIT: D26215.1, EVALUE 4.60e-01
tgatcactctggctgtcaagaattgactgagggtcggggggaaatggagtcaagccggtctttttttggaagccactgcaacaaaagtgatctgagttcaggcattagcattacagatgcccacatgagacaggattttgcaggtggaggtattttacaggttgagaggtacaattgggtggttgattggatgcacag

SEQ ID NO: 27522 - DNA, 78 bp, Homo sapiens
  MAP TO AC004584.1; EXPRESSED IN BONE MARROW, SIGNAL = 1.3; EXPRESSED IN ADULT LIVER, SIGNAL = 1.1; EXPRESSED IN PLACENTA, SIGNAL = 1.2; EXPRESSED IN LUNG, SIGNAL = 1.2; EXPRESSED IN FETAL LIVER, SIGNAL = 0.97; EXPRESSED IN BRAIN, SIGNAL = 1.3; EST_HUMAN HIT: BE832601.1, EVALUE 2.00e-20; NT HIT: gi4827064, EVALUE 1.00e-36
ctaactgtcatgtacagtcagatcaacggggcgtcgagagcactggatgatgtgagaaacaggcagcaggatgtgcgg

SEQ ID NO: 27523 - DNA, 183 bp, Homo sapiens
  MAP TO AC005740.1; EXPRESSED IN BRAIN, SIGNAL = 0.86; EXPRESSED IN ADULT LIVER, SIGNAL = 0.68; EXPRESSED IN LUNG, SIGNAL = 0.75; EXPRESSED IN BONE MARROW, SIGNAL = 0.68; EXPRESSED IN PLACENTA, SIGNAL = 0.69; EXPRESSED IN FETAL LIVER, SIGNAL = 0.7; SWISSPROT HIT: P97458, EVALUE 1.00e+00; NT HIT: X61670.1, EVALUE 2.70e-02; EST_HUMAN HIT: BE718984.1, EVALUE 1.60e-01
ctgcaaatcctctgtctccatccataccagcacaggcagcccttcagctctcacctgggccagcgcagtggtttcctcatgggtcccctgcttcaactcttgccttcctgcaggaagtccattgtcccctaggctagcagagggagcatttaaaagcatcagtgggatcactcccctcttgtg

SEQ ID NO: 27524 - DNA, 210 bp, Homo sapiens
  MAP TO AC002036.1; EXPRESSED IN PLACENTA, SIGNAL = 0.61; EXPRESSED IN BRAIN, SIGNAL = 0.58; EXPRESSED IN LUNG, SIGNAL = 0.64; EXPRESSED IN BONE MARROW, SIGNAL = 0.56; EXPRESSED IN ADULT LIVER, SIGNAL = 0.48; SWISSPROT HIT: P57080, EVALUE 2.00e-13; NT HIT: AB040948.1, EVALUE 1.00e-106; EST_HUMAN HIT: AA434168.1, EVALUE 1.00e-106
gagctgaatgccaaagcagcttctctttttgaaacaaatgatgatcactccgtaactgagggcattaatgtgatgaatgaactgatcatcccctgcattcaccttatcattaataatgacatttccaaggatgatctggatgccattgaggtcatgagaaaccattggtgctcttaccttgggcaagatattgcaggtatatgctcttgg

SEQ ID NO: 27525 - DNA, 218 bp, Homo sapiens
  MAP TO AC005919.1; EXPRESSED IN LUNG, SIGNAL =   1; EXPRESSED IN BRAIN, SIGNAL = 0.64; EXPRESSED IN ADULT LIVER, SIGNAL =   1; EXPRESSED IN PLACENTA, SIGNAL = 0.97; EXPRESSED IN FETAL LIVER, SIGNAL = 0.96; EXPRESSED IN BONE MARROW, SIGNAL = 1.1; NT HIT: gi11427965, EVALUE 7.00e-62; EST_HUMAN HIT: AA234932.1, EVALUE 4.00e-52; SWISSPROT HIT: P02535, EVALUE 2.00e-17
cctccctctccaccgagcaggcggtggtaggtctcgatctccacctccaggcgtgtcttgatgtcctgcagttgtgcatactctgtgttctggtattcagtctcgccccggatctggcagatctgctcctccaggatgctgatatacatcttaatttctgacagctgagccacgtagccagcttctgtgtcagccagggttccttctggggagctttg

SEQ ID NO: 27526 - DNA, 466 bp, Homo sapiens
  MAP TO AC004616.1; EXPRESSED IN LUNG, SIGNAL = 0.77; EXPRESSED IN BRAIN, SIGNAL = 0.69; EXPRESSED IN BONE MARROW, SIGNAL = 0.65; EXPRESSED IN ADULT LIVER, SIGNAL = 0.76; EXPRESSED IN PLACENTA, SIGNAL = 0.87; SWISSPROT HIT: P08548, EVALUE 3.00e-05; EST_HUMAN HIT: AI524195.1, EVALUE 3.00e-05; NT HIT: AF029308.1, EVALUE 2.00e-05
aataatatcccattgtatggatgtaccacattttatttatttattctcactggttgatggacattttgattgtttccacattgtagattttgtgaatcatgctgccataaacatgcatgtgcaagtatttgttgaatacttactcgttctattttcaagcctgactcatcttctgaattccagaactgtcatcccaacatgttttatatttttctttggccttcctctgcacttaaatataattcaaactccttggatatccaatgagtttctgcattttcggggcttctgcccccaaaatgcagctgctccttgtgcctgtaatgtaattggccgacaggtcaactgcttttcaaactctgggtctctgctcttgcaggttcctctcccggaaatcatttcaactggctcttgtcatgtttacctgattctcagccttcaaagatcagctcagatatcaccttct

SEQ ID NO: 27527 - DNA, 329 bp, Homo sapiens
  MAP TO AC003685.1; EXPRESSED IN LUNG, SIGNAL = 0.57; EXPRESSED IN PLACENTA, SIGNAL = 0.64; EXPRESSED IN FETAL LIVER, SIGNAL = 0.89; EXPRESSED IN BRAIN, SIGNAL = 0.61; EXPRESSED IN BONE MARROW, SIGNAL = 0.66; EXPRESSED IN ADULT LIVER, SIGNAL = 0.49; NT HIT: U14731.1, EVALUE 5.20e-02; SWISSPROT HIT: O00268, EVALUE 8.10e-02; EST_HUMAN HIT: N22134.1, EVALUE 1.20e+00
acccggagaaccaacagctcattggaacctcatgtgaacatgacacagacccttcaaaccaaacatgctcagttgaattttccatcttcttcccaatttgcccctcctctgggtgttataacccaggagaaactatccccacctactccagggttgattcccaaacaccctttctctcagtcccccgtcctaaaagcacagaagcctgatcattctgaaccacctgctctgcagagctctgatccaggccattcctctggcattcctggaaatactcctcacttgtcgcccccatttttaaccactctcctcagagcagcacgagcctt

SEQ ID NO: 27528 - DNA, 489 bp, Homo sapiens
  MAP TO AC006070.1; EXPRESSED IN PLACENTA, SIGNAL =   1; EXPRESSED IN LUNG, SIGNAL = 1.4; EXPRESSED IN BRAIN, SIGNAL =   1; EXPRESSED IN BONE MARROW, SIGNAL = 1.1; EXPRESSED IN FETAL LIVER, SIGNAL = 1.2; EXPRESSED IN ADULT LIVER, SIGNAL = 1.3; SWISSPROT HIT: O75690, EVALUE 6.00e-10; EST_HUMAN HIT: BE250684.1, EVALUE 3.00e-11; NT HIT: X73462.1, EVALUE 6.00e-15
ggctgtgatcaaggcctctgccaagagacctgctgccgccccagctgctgccagaccacctgttgctgccccagctgtgttgtatccagctgctgccgcccatcctgctctcagactacctgctgccagaccacttgctgtcgccccagctgctgccacccagtctgttgtcagaccacctgccgccccagctgtggtgtgtccagctgctgccgcccactctgctgtcagaccacctgccaccccagctgtggtatgtccagctgctgccgtccactctgttgtcagaccacctgccgccccagctgtggtgtgtccagctgctgccgtccactctgctgtcagaccacctgctgccgtgcaacttgctgccgccccagctgctgtggatcctcttgttgaacctcatattggactatcaaccatgagccagtcaccatcccatgatatgaaagtgtcatttatatcaacttgtccatgtgttaaatg

SEQ ID NO: 27529 - DNA, 159 bp, Homo sapiens
  MAP TO AC006487.7; EXPRESSED IN BRAIN, SIGNAL = 0.98; EXPRESSED IN BONE MARROW, SIGNAL = 0.86; EXPRESSED IN PLACENTA, SIGNAL = 0.88; EXPRESSED IN LUNG, SIGNAL = 0.97; EXPRESSED IN FETAL LIVER, SIGNAL = 0.81; EXPRESSED IN ADULT LIVER, SIGNAL = 0.69; EST_HUMAN HIT: BE876686.1, EVALUE 2.00e-84; NT HIT: gi11434422, EVALUE 1.00e-84; SWISSPROT HIT: O43791, EVALUE 2.00e-26
agcctggaattcctggccggcaacacacaagcagcagtctgtgaaccgggaattctcccacagtcctcctaactcatctgccagccggcactcaggaacctttaccatgttcatggtattctggccagaaatgttgacagaatcttgcacaacactcac

SEQ ID NO: 27530 - DNA, 303 bp, Homo sapiens
  MAP TO AC005185.1; EXPRESSED IN PLACENTA, SIGNAL = 0.58; EXPRESSED IN BRAIN, SIGNAL = 0.55; EXPRESSED IN BONE MARROW, SIGNAL = 0.61; EXPRESSED IN ADULT LIVER, SIGNAL = 0.45; EXPRESSED IN LUNG, SIGNAL = 0.56; SWISSPROT HIT: P51843, EVALUE 1.00e-43; NT HIT: U31929.1, EVALUE 0.00e+00; EST_HUMAN HIT: BE673986.1, EVALUE 0.00e+00
gcccacatgactttatatctttgtacagagcatttccagcatcatatcatccatgctgactgtgccgatgatgggcctgaagaacagttcagcaatgacattggcattgatgaatctcagcaggaaaagggtactattaagttcgatgaatctgtcatggggcccttggtgcgtcatcctggtgtgttcactgagtatttgctgagttccccactggagtccctgaatgtacttcacgcactgcaggcccggcacgtctggagggagaaaaatctctttgttataaaacagctcaccacagag

SEQ ID NO: 27531 - DNA, 132 bp, Homo sapiens
  MAP TO AC006360.2; EXPRESSED IN ADULT LIVER, SIGNAL = 0.46; EXPRESSED IN LUNG, SIGNAL = 0.53; EXPRESSED IN BRAIN, SIGNAL = 0.57; EXPRESSED IN BONE MARROW, SIGNAL = 0.52; SWISSPROT HIT: P94694, EVALUE 3.10e+00; NT HIT: U41066.1, EVALUE 1.20e+00; EST_HUMAN HIT: T19615.1, EVALUE 1.00e-04
ctttctgccctgtctcttctgtggtcccaggagctttaataccttttatcctccaggtcttggaattggacgtcacactactctggaaagtggcattgggtgccatgttgcaatgggcaccatgattaactc

SEQ ID NO: 27532 - DNA, 198 bp, Homo sapiens
  MAP TO AC004592.1; EXPRESSED IN PLACENTA, SIGNAL = 0.95; EXPRESSED IN LUNG, SIGNAL = 0.95; EXPRESSED IN FETAL LIVER, SIGNAL =   1; EXPRESSED IN BRAIN, SIGNAL = 0.68; EXPRESSED IN BONE MARROW, SIGNAL = 0.92; EXPRESSED IN ADULT LIVER, SIGNAL = 0.88; EST_HUMAN HIT: N28629.1, EVALUE 1.80e-01; NT HIT: AL161566.2, EVALUE 4.60e-01; SWISSPROT HIT: P40587, EVALUE 1.30e+00
agcctgactttggggaggtttggattcaaaagctgtccttactgcttttggatgagaacttgggaaaactcgcttatttggacacagggcctttcctgctactggaggtttgctgttctgagcaccttcctggacagaatctagcagctcaagaaggacacccttgttcagaggaagaagcatttctgttctgttcat

SEQ ID NO: 27533 - DNA, 429 bp, Homo sapiens
  MAP TO AC006211.1; EXPRESSED IN PLACENTA, SIGNAL = 0.8; EXPRESSED IN LUNG, SIGNAL = 0.73; EXPRESSED IN FETAL LIVER, SIGNAL = 0.9; EXPRESSED IN BONE MARROW, SIGNAL = 0.8; EXPRESSED IN BRAIN, SIGNAL = 1.1; EXPRESSED IN ADULT LIVER, SIGNAL = 0.78; NT HIT: gi11425950, EVALUE 0.00e+00; SWISSPROT HIT: P17200, EVALUE 5.00e-01; EST_HUMAN HIT: AW276760.1, EVALUE 0.00e+00
aatgtctcagtgtgtttcatgtgccctaattcccaatggctgtcagttacaatatcagaaattaaaacccacgcagaaatcacattgtctttgttttcactgtcttccagtgtcatcttgcattacaacatataagaagacaccacctccagtcccacccagaactaccacgaaacctttcatttctatcacagcccagagtagcacagagtcagcccaggatgcctacatggacggacagggccagcgaggagatattatcagccagtctggactcagcaactccaccgagagcctggacagtatgaaggctctgacagccgccatcgaagctgcaaacgcccagatccatggccctgccagtcaacacatgggcaataacactgccaccgtcaccaccacgactaccatagccaccgtcaccacgga

SEQ ID NO: 27534 - DNA, 222 bp, Homo sapiens
  MAP TO AC005731.2; EXPRESSED IN BRAIN, SIGNAL = 0.99; EXPRESSED IN ADULT LIVER, SIGNAL = 0.85; EXPRESSED IN LUNG, SIGNAL = 0.77; EXPRESSED IN FETAL LIVER, SIGNAL = 0.83; EXPRESSED IN BONE MARROW, SIGNAL = 0.8; EXPRESSED IN PLACENTA, SIGNAL = 0.66; SWISSPROT HIT: P51816, EVALUE 3.00e-24; EST_HUMAN HIT: AW662817.1, EVALUE 2.00e-63; NT HIT: AF012623.1, EVALUE 1.00e-108
atggggaaggcctagaaccccactgtcactctttcctaccagcctaacaaggcttgtctctttccatttcccaggaacactccatccccagtgtctctcaacaacgtctcccccatcaacgcaatggggaactgtaacaatggcccagtcaccattccccagcgcattcaccacatggctgccagccacgtcaacatcactagcaatgtgttacggggctat

SEQ ID NO: 27535 - DNA, 118 bp, Homo sapiens
  MAP TO AC005841.3; EXPRESSED IN LUNG, SIGNAL = 1.2; EXPRESSED IN FETAL LIVER, SIGNAL = 0.88; EXPRESSED IN BRAIN, SIGNAL = 1.2; EXPRESSED IN BONE MARROW, SIGNAL = 0.77; EXPRESSED IN ADULT LIVER, SIGNAL = 0.88; EXPRESSED IN PLACENTA, SIGNAL = 0.83; EST_HUMAN HIT: BE314018.1, EVALUE 3.00e-29; NT HIT: U04706.1, EVALUE 4.00e-06; SWISSPROT HIT: Q27969, EVALUE 3.00e-08
gttgtgatcaatgatatatgtctgtccatcccaggcgcatgcaactacctcctcatgcccgttgccctgaaaaaggacagagacaaaaggaacataaaggagctgtggactggattct

SEQ ID NO: 27536 - DNA, 190 bp, Homo sapiens
  MAP TO AC004228.2; EXPRESSED IN PLACENTA, SIGNAL = 0.9; EXPRESSED IN ADULT LIVER, SIGNAL = 0.81; EXPRESSED IN LUNG, SIGNAL = 1.1; EXPRESSED IN FETAL LIVER, SIGNAL = 0.73; EXPRESSED IN BRAIN, SIGNAL = 0.96; EXPRESSED IN BONE MARROW, SIGNAL = 0.96; NT HIT: gi11439789, EVALUE 1.00e-103; SWISSPROT HIT: Q94225, EVALUE 2.90e+00; EST_HUMAN HIT: BF569527.1, EVALUE 1.00e-103
accaccagcctcaccagctcggccccaggttctgctgtccgcaccttggacatgtgttccagccacccctgccctgtcatctgctgttcctcacccactaccaaccctaccactggtcctagtcttggccccagctttaaccctggccatgttctcagcccaagtcccagccccagcaccaaccgctcag

SEQ ID NO: 27537 - DNA, 90 bp, Homo sapiens
  MAP TO AC005723.1; EXPRESSED IN ADULT LIVER, SIGNAL = 0.61; EXPRESSED IN PLACENTA, SIGNAL = 0.64; EXPRESSED IN LUNG, SIGNAL = 0.69; EXPRESSED IN BRAIN, SIGNAL = 0.63; EXPRESSED IN BONE MARROW, SIGNAL = 0.49; NT HIT: U22463.1, EVALUE 7.40e-01; EST_HUMAN HIT: AA404576.1, EVALUE 2.80e-01; SWISSPROT HIT: P49581, EVALUE 7.30e+00
actagccattttcccattttcagtctagtcctaagcatcatcccaacatactctacaagcaaaaggaggattgtcattgtgattagtact

SEQ ID NO: 27538 - DNA, 155 bp, Homo sapiens
  MAP TO AC003103.1; EXPRESSED IN PLACENTA, SIGNAL =   1; EXPRESSED IN FETAL LIVER, SIGNAL = 0.9; EXPRESSED IN ADULT LIVER, SIGNAL = 0.89; EXPRESSED IN LUNG, SIGNAL = 1.2; EXPRESSED IN BRAIN, SIGNAL = 1.6; EXPRESSED IN BONE MARROW, SIGNAL = 1.1; SWISSPROT HIT: P56524, EVALUE 3.00e+00; EST_HUMAN HIT: AI831975.1, EVALUE 3.00e-70
gcagcactcgtggctgccgacacccaggagacacagtcctgttccgttcccctttctgcttctcagagggtagtgggggttgggccttttgtctcttgtatggaatgtgaaatgctgcaaagacgagcaattgttcttcaatgctttgtcctccc

SEQ ID NO: 27539 - DNA, 88 bp, Homo sapiens
  MAP TO AC002087.1; EXPRESSED IN PLACENTA, SIGNAL = 0.92; EXPRESSED IN LUNG, SIGNAL =   1; EXPRESSED IN BRAIN, SIGNAL = 0.81; EXPRESSED IN FETAL LIVER, SIGNAL = 1.1; EXPRESSED IN BONE MARROW, SIGNAL = 0.88; EXPRESSED IN ADULT LIVER, SIGNAL = 0.78; EST_HUMAN HIT: BE044497.1, EVALUE 3.00e-04; NT HIT: gi4758179, EVALUE 2.00e-04
cattgccgtggtctgttggttgaatctctctctcccctttcccagtggcatcagcaactgcacaccaggtccatgatggttgctgctt

SEQ ID NO: 27540 - DNA, 381 bp, Homo sapiens
  MAP TO AC005880.2; EXPRESSED IN LUNG, SIGNAL = 0.76; EXPRESSED IN FETAL LIVER, SIGNAL =   1; EXPRESSED IN BRAIN, SIGNAL = 0.58; EXPRESSED IN BONE MARROW, SIGNAL = 1.3; EXPRESSED IN PLACENTA, SIGNAL = 0.65; EXPRESSED IN ADULT LIVER, SIGNAL = 1.5; SWISSPROT HIT: P05130, EVALUE 1.00e-06; EST_HUMAN HIT: AW470846.1, EVALUE 0.00e+00
cgaggaggcaggcctaagagggtttcctgtccttccagcctaaggtttttcagtgtcctgtctatttgcctatcagttgctccacaaacagaagtctcagctagacacttttcttgacattttttatggcaaacataagcacaaaacatacactgggaagctgctttagtccaaacttttttcttacagtagtcacaccatgttgggttctggaactgagtatcctgaaaactgtgtttgttttctgttaaacccatctgtccaacaaattgctcctctttagggagaacagaaacttcttcaaccaaatggggttctttttctttttctacgttagtaactacatggtggtctgattctccttctttcaaatatttgaag

SEQ ID NO: 27541 - DNA, 163 bp, Homo sapiens
  MAP TO AC004648.1; EXPRESSED IN PLACENTA, SIGNAL = 1.3; EXPRESSED IN BRAIN, SIGNAL = 0.9; EXPRESSED IN BONE MARROW, SIGNAL = 1.3; EXPRESSED IN ADULT LIVER, SIGNAL =   1; EXPRESSED IN LUNG, SIGNAL = 0.93; EXPRESSED IN FETAL LIVER, SIGNAL = 0.94; EST_HUMAN HIT: BF685486.1, EVALUE 2.20e+00; SWISSPROT HIT: Q43908, EVALUE 3.00e+00; NT HIT: AL163278.2, EVALUE 3.70e-01
gagggacacagatattcagatgatagcagtagccaatgctaatttagaagtggatatctccacctaccaccatgatatgaaccagatggagagcaagggcaaagttgtggctagcttgtttgcaacttcatgtaacccacagcccactgcatctcgctgcatg

SEQ ID NO: 27542 - DNA, 207 bp, Homo sapiens
  MAP TO AC005068.1; EXPRESSED IN BRAIN, SIGNAL = 1.5; EXPRESSED IN BONE MARROW, SIGNAL = 0.97; EXPRESSED IN ADULT LIVER, SIGNAL = 2.5; EXPRESSED IN PLACENTA, SIGNAL =   1; EXPRESSED IN LUNG, SIGNAL =   1; EXPRESSED IN FETAL LIVER, SIGNAL =   1; EST_HUMAN HIT: BF313560.1, EVALUE 1.00e-110; SWISSPROT HIT: P08183, EVALUE 5.00e-34; NT HIT: AF016535.1, EVALUE 1.00e-113
attaggcagtgactcgatgaaggcatgtatgttggcctcctttgctgccctcacaatctcttcctgtgacaccacccggctgttgtctccataggcaatgttctcagcaatgctgcagtcaaacaggatgggctcctgggacacgatgcccaggtgtgctcggagccactgaacattcagtcgctttatttctttgccatcaagcag

SEQ ID NO: 27543 - DNA, 86 bp, Homo sapiens
  MAP TO AC005858.1; EXPRESSED IN FETAL LIVER, SIGNAL =   1; EXPRESSED IN BRAIN, SIGNAL = 1.1; EXPRESSED IN ADULT LIVER, SIGNAL = 0.86; EXPRESSED IN LUNG, SIGNAL = 0.94; EXPRESSED IN BONE MARROW, SIGNAL = 0.95; EXPRESSED IN PLACENTA, SIGNAL = 0.89; NT HIT: AB021316.1, EVALUE 7.00e-01; EST_HUMAN HIT: AV710409.1, EVALUE 1.00e+00
tgaggagtaccaacagagacaccttcggaaagctaaagcagttccatgaatggaagataaggactagcaggtataaggctcacact

SEQ ID NO: 27544 - DNA, 101 bp, Homo sapiens
  MAP TO AC006221.1; EXPRESSED IN ADULT LIVER, SIGNAL = 0.55; EXPRESSED IN LUNG, SIGNAL = 0.6; EXPRESSED IN BRAIN, SIGNAL = 0.81; EXPRESSED IN BONE MARROW, SIGNAL = 0.54; EST_HUMAN HIT: BF663825.1, EVALUE 1.30e+00; NT HIT: gi9635677, EVALUE 3.40e+00
aatggagaactctgccatcagaaatcagaaacccagtctgctttgaagcaggttatgactcagctggtgggagagaaattcaacacccaagataacaactg

SEQ ID NO: 27545 - DNA, 117 bp, Homo sapiens
  MAP TO AC004600.2; EXPRESSED IN BRAIN, SIGNAL = 1.5; EXPRESSED IN LUNG, SIGNAL = 1.6; EXPRESSED IN BONE MARROW, SIGNAL = 1.4; EXPRESSED IN ADULT LIVER, SIGNAL = 1.2; EXPRESSED IN PLACENTA, SIGNAL = 1.7; EXPRESSED IN FETAL LIVER, SIGNAL = 1.2; NT HIT: Z97341.2, EVALUE 1.00e+00
ctcagatcctgaatgtgagttgtaatagacatacttgttatctgacaagatcctcagttgttccactgacccatagaatgagggactctcgtgatataaacctatgaacgtagtcct

SEQ ID NO: 27546 - DNA, 143 bp, Homo sapiens
  MAP TO AC005096.1; EXPRESSED IN PLACENTA, SIGNAL = 1.1; EXPRESSED IN LUNG, SIGNAL = 1.4; EXPRESSED IN BRAIN, SIGNAL = 1.1; EXPRESSED IN FETAL LIVER, SIGNAL = 1.2; EXPRESSED IN BONE MARROW, SIGNAL = 1.4; EXPRESSED IN ADULT LIVER, SIGNAL = 1.2; SWISSPROT HIT: Q01285, EVALUE 1.00e+00; NT HIT: L27221.1, EVALUE 3.20e-01; EST_HUMAN HIT: BE908248.1, EVALUE 4.80e-01
ggtatcatcctggtttttcagggagaagtcaagtcactggcccaggtcctcaagctggccagtgtggcccggtctgaccccgaggttctgcccgggtttctgtccctccagcctggcatcgtgaactcaggggaaacagatgg

SEQ ID NO: 27547 - DNA, 284 bp, Homo sapiens
  MAP TO AC005726.1; EXPRESSED IN LUNG, SIGNAL = 1.6; EXPRESSED IN FETAL LIVER, SIGNAL = 1.4; EXPRESSED IN BRAIN, SIGNAL = 1.9; EXPRESSED IN BONE MARROW, SIGNAL = 1.5; EXPRESSED IN PLACENTA, SIGNAL = 1.4; EXPRESSED IN ADULT LIVER, SIGNAL = 1.3; SWISSPROT HIT: Q13183, EVALUE 5.00e-21; NT HIT: gi11426671, EVALUE 2.00e-72
ggggcaggccgcaccccaacgatgaggaggacacggagggcgatgcgtttatgcaggttccagtgttccaccgcgatggccaccagcagccccccgaagaacaggaggttggagtccttaagatactcgacggcaacctggcaggtggagacatggctgagcggcgggaagaccctggagtctcccacggtgcccccgaggttatgggatgcagtcactgacattcccacagactggcattcccctgggctctcgaaactggatggaaatggtctctgaatgat

SEQ ID NO: 27548 - DNA, 116 bp, Homo sapiens
  MAP TO AC000005.1; EXPRESSED IN PLACENTA, SIGNAL = 0.6; EXPRESSED IN LUNG, SIGNAL = 0.67; EXPRESSED IN BRAIN, SIGNAL = 0.73; EXPRESSED IN BONE MARROW, SIGNAL = 0.64; EXPRESSED IN ADULT LIVER, SIGNAL = 0.59; NT HIT: AJ006345.1, EVALUE 2.50e-01
ggacacaagccaagaagtcaagaactgttgaagccgcagtctccactctcctactgacaccagagaccacccagcccagccaaaccatatggcctcttgttttcctgatgtatgag

SEQ ID NO: 27549 - DNA, 113 bp, Homo sapiens
  MAP TO AC000117.1; EXPRESSED IN PLACENTA, SIGNAL = 0.81; EXPRESSED IN BONE MARROW, SIGNAL = 0.87; EXPRESSED IN ADULT LIVER, SIGNAL = 0.75; EXPRESSED IN LUNG, SIGNAL =   1; EXPRESSED IN FETAL LIVER, SIGNAL = 0.84; EXPRESSED IN BRAIN, SIGNAL = 0.98; NT HIT: AL163207.2, EVALUE 2.50e-01
atgcattgcctactgatgtgatgtctgtttccaggactgattcagtccgagaagagatgggaaagtcagtagatattgaagcctcagaggttccacaggtaaccaaccctaag

SEQ ID NO: 27550 - DNA, 427 bp, Homo sapiens
  MAP TO AC006518.17; EXPRESSED IN PLACENTA, SIGNAL = 1.1; EXPRESSED IN LUNG, SIGNAL = 1.1; EXPRESSED IN FETAL LIVER, SIGNAL = 1.1; EXPRESSED IN BONE MARROW, SIGNAL = 0.95; EXPRESSED IN ADULT LIVER, SIGNAL =   1; EXPRESSED IN BRAIN, SIGNAL = 0.77; SWISSPROT HIT: P02810, EVALUE 9.70e-02; EST_HUMAN HIT: BF155670.1, EVALUE 0.00e+00; NT HIT: M13058.1, EVALUE 0.00e+00
atggaggagactctgagcagttcatagatgaggagcgtcagggaccacctttgggaggacagcaatctcaaccctctgctggtgatgggaaccagaatgatggccctcagcagggaccaccccaacaaggaggccagcagcaacaaggtccaccacctcctcagggaaagccacaaggaccaccccaacagggaggccatccccctcctcctcaaggaaggccacaaggaccaccccaacagggaggccatccccgtcctcctcgaggaaggccacaaggaccaccccaacagggaggccatcagcaaggtcctcccccacctcctcctggaaagccccagggaccacctccccaagggggccgcccacaaggacctccacaggggcagtctcctcagtaatctaggattcaatgataggtatgatt

SEQ ID NO: 27551 - DNA, 131 bp, Homo sapiens
  MAP TO AC003037.1; EXPRESSED IN LUNG, SIGNAL = 0.66; EXPRESSED IN BRAIN, SIGNAL = 0.7; EXPRESSED IN ADULT LIVER, SIGNAL = 0.61; EXPRESSED IN PLACENTA, SIGNAL = 0.69; EXPRESSED IN FETAL LIVER, SIGNAL = 0.76; EXPRESSED IN BONE MARROW, SIGNAL = 0.67; EST_HUMAN HIT: AW772650.1, EVALUE 6.00e-68; NT HIT: AF157063.1, EVALUE 4.00e-68; SWISSPROT HIT: P38334, EVALUE 6.20e-01
aatgccgacacaaaccactcgttgaacttgtccacagttttcaagtacatgttgttcgatagccacatgttctcatctacgaggtcgagagcagcatgagctatgaactggttcagatgacgatggtcgtc

SEQ ID NO: 27552 - DNA, 157 bp, Homo sapiens
  MAP TO AC003108.1; EXPRESSED IN BONE MARROW, SIGNAL = 1.2; EXPRESSED IN PLACENTA, SIGNAL = 1.2; EXPRESSED IN LUNG, SIGNAL = 1.4; EXPRESSED IN FETAL LIVER, SIGNAL = 1.3; EXPRESSED IN BRAIN, SIGNAL = 1.3; EXPRESSED IN ADULT LIVER, SIGNAL = 1.2; NT HIT: M64239.1, EVALUE 2.30e-02; EST_HUMAN HIT: BE885401.1, EVALUE 2.00e-83
aaagacaaagaaagtgaaccggaaaggaagcacttcttccacgtcctcctcctcctccagctccgtggtggacccgctgagcagcgtcctcgatgggactgaccccctctccatgtttgcagccactgctgaccccgcagccttggcagctgccatg

SEQ ID NO: 27553 - DNA, 81 bp, Homo sapiens
  MAP TO AC004706.1; EXPRESSED IN PLACENTA, SIGNAL = 0.91; EXPRESSED IN LUNG, SIGNAL = 0.97; EXPRESSED IN BRAIN, SIGNAL = 0.76; EXPRESSED IN BONE MARROW, SIGNAL = 0.86; EXPRESSED IN FETAL LIVER, SIGNAL = 1.4; EXPRESSED IN ADULT LIVER, SIGNAL = 2.2; EST_HUMAN HIT: AW195419.1, EVALUE 9.70e-01; NT HIT: AF078163.1, EVALUE 6.50e-01; SWISSPROT HIT: Q13183, EVALUE 2.00e-05
ctggaagagtgggaaaagcaagacaggcatgagagaggtgacagccagagggatgacttctgtgcaccagtaaatggccat

SEQ ID NO: 27554 - DNA, 284 bp, Homo sapiens
  MAP TO AC002094.1; EXPRESSED IN PLACENTA, SIGNAL = 0.7; EXPRESSED IN ADULT LIVER, SIGNAL = 0.81; EXPRESSED IN LUNG, SIGNAL = 0.67; EXPRESSED IN FETAL LIVER, SIGNAL = 0.71; EXPRESSED IN BRAIN, SIGNAL = 0.83; EXPRESSED IN BONE MARROW, SIGNAL = 0.73; NT HIT: L05367.1, EVALUE 4.40e-02; SWISSPROT HIT: O42280, EVALUE 3.00e-07; EST_HUMAN HIT: AW898205.1, EVALUE 1.00e+00
ccatctccctcttcttgccctctccagcctgacggggtgggaggtcttgacgccattcccaggattgggcgctgcggtggccccaacacggggtggggccaacctgaagcagtgtgacctgctgatgctgaagttttcccagcggcagaagcagctctgctggagggacccctacctggctgagaccctgcgggacgctgcacacctgggcctgctccagtttcagtcccatcctgagttccatcctgagttccagctccgtcgtgagcgctggaactgtagcc

SEQ ID NO: 27555 - DNA, 227 bp, Homo sapiens
  MAP TO AC004839.1; EXPRESSED IN PLACENTA, SIGNAL = 0.85; EXPRESSED IN ADULT LIVER, SIGNAL = 0.85; EXPRESSED IN LUNG, SIGNAL = 0.82; EXPRESSED IN FETAL LIVER, SIGNAL = 0.75; EXPRESSED IN BRAIN, SIGNAL = 0.74; EXPRESSED IN BONE MARROW, SIGNAL = 0.6; SWISSPROT HIT: Q09504, EVALUE 6.00e-16; NT HIT: gi11421920, EVALUE 1.00e-125; EST_HUMAN HIT: AI679904.1, EVALUE 1.00e-125
gatccatgatgaccttaaaagaactgtagatctttgtcaaaaggctgaagcaacaggagtttcatggattacagtccatggaagaactgctgaagaaagacatcagccagtgcactatgattccattaaaataattaaggaaaatatgtctatacctgtaattgctaatggagacatcagaagcttaaaggaagcagaaaatgtgtggcggattactgggacagatg

SEQ ID NO: 27556 - DNA, 182 bp, Homo sapiens
  MAP TO AC006377.3; EXPRESSED IN BONE MARROW, SIGNAL = 0.51; EXPRESSED IN ADULT LIVER, SIGNAL = 0.52; EXPRESSED IN BRAIN, SIGNAL = 0.64; NT HIT: AB004799.1, EVALUE 2.70e-02; SWISSPROT HIT: Q99808, EVALUE 3.00e+00; EST_HUMAN HIT: N73227.1, EVALUE 6.30e-01
ttatgcagtcccatctcacttgccagcaccacctccctttctttgtagatgaagaatgggactcctttcacttttagttctattaaaatagctctggctttctctgtggttaaaaatatgagcttgatatcgctcaggtagtgacacaaggtaaacgctaatacaggaccaactcccatagc

SEQ ID NO: 27557 - DNA, 233 bp, Homo sapiens
  MAP TO AC003043.1; EXPRESSED IN BRAIN, SIGNAL = 0.65; SWISSPROT HIT: P28799, EVALUE 7.00e-47; NT HIT: gi11525897, EVALUE 1.00e-128; EST_HUMAN HIT: BE747981.1, EVALUE 1.00e-128
acctggcggtagggacagcaggcccagccctgtcggttgtctcggcagcaggtctggttatcatggcagaagtgtccttccccacactccacgtccttcacacccacgtgagggctacgggccaggaaggtggcaggctgggcagagaccacttccttctcgcaggatcgagccttcacgttgcaggtgtagccagccgggcagcagtgctggcgatcctcgcagcacacagc

SEQ ID NO: 27558 - DNA, 102 bp, Homo sapiens
  MAP TO AC005079.1; EXPRESSED IN PLACENTA, SIGNAL =   1; EXPRESSED IN FETAL LIVER, SIGNAL = 0.89; EXPRESSED IN BRAIN, SIGNAL = 1.2; EXPRESSED IN BONE MARROW, SIGNAL =   1; EXPRESSED IN LUNG, SIGNAL = 0.88; EXPRESSED IN ADULT LIVER, SIGNAL = 1.2; NT HIT: U20215.1, EVALUE 5.50e-02; SWISSPROT HIT: Q9Y5T5, EVALUE 7.20e+00; EST_HUMAN HIT: AW511225.1, EVALUE 9.00e-51
aggaatgagaggcacaagttgcagtaaaagcttgacaccattttgccattcttcttctctttcaaattcacagtacaagtagctacattcatcagaggaaaa

SEQ ID NO: 27559 - DNA, 147 bp, Homo sapiens
  MAP TO AC006481.3; EXPRESSED IN BONE MARROW, SIGNAL = 0.58; EXPRESSED IN ADULT LIVER, SIGNAL = 0.68; EXPRESSED IN PLACENTA, SIGNAL = 0.58; EXPRESSED IN LUNG, SIGNAL = 0.59; EXPRESSED IN BRAIN, SIGNAL = 0.57; NT HIT: X64111.1, EVALUE 3.30e-01; EST_HUMAN HIT: BF527281.1, EVALUE 1.30e-01
cactacagcccaggcttccttcttctctttctttatccttatctggtgcttcttgtgccaacaccccagtgacttatgaagccagcaatagaaaagccaagagtactggaccctgtagccaaatgtgaagtatatttcctctttaat

SEQ ID NO: 27560 - DNA, 208 bp, Homo sapiens
  MAP TO AC005261.1; EXPRESSED IN ADULT LIVER, SIGNAL =   1; EXPRESSED IN PLACENTA, SIGNAL = 0.93; EXPRESSED IN LUNG, SIGNAL = 1.1; EXPRESSED IN BRAIN, SIGNAL = 1.1; EXPRESSED IN BONE MARROW, SIGNAL = 0.99; EXPRESSED IN FETAL LIVER, SIGNAL = 0.98; NT HIT: AB017332.1, EVALUE 1.00e-104; EST_HUMAN HIT: BE874500.1, EVALUE 1.00e-24; SWISSPROT HIT: P38991, EVALUE 6.00e-13
gcggcgcctcacagtcgatgactttgaaatcgggcgtcccctgggcaaggggaaatttgggaatgtgtacctggctcggctcaaggaaagccatttcattgtggccctgaaggttctcttcaagtcgcagatagagaaggaaggactggagcaccagctgcgccgggaaattgagatccaggctcatctacagtaaggacagtctctg

SEQ ID NO: 27561 - DNA, 85 bp, Homo sapiens
  MAP TO AC005915.1; EXPRESSED IN PLACENTA, SIGNAL = 0.85; EXPRESSED IN ADULT LIVER, SIGNAL = 0.63; EXPRESSED IN LUNG, SIGNAL = 0.68; EXPRESSED IN BRAIN, SIGNAL = 0.82; EXPRESSED IN BONE MARROW, SIGNAL = 0.55; EST_HUMAN HIT: BF032287.1, EVALUE 4.10e+00; NT HIT: Y18278.1, EVALUE 6.90e-01
ggttgcttgtagccaaagaaccataaaaagtacacctaggaatagggcctatggttttgacagtaagtatcgttagagatatagc

SEQ ID NO: 27562 - DNA, 91 bp, Homo sapiens
  MAP TO AC005162.1; EXPRESSED IN BRAIN, SIGNAL = 0.62; EXPRESSED IN ADULT LIVER, SIGNAL = 0.71; EXPRESSED IN PLACENTA, SIGNAL = 0.73; EXPRESSED IN LUNG, SIGNAL = 0.86; EXPRESSED IN BONE MARROW, SIGNAL = 0.71; EXPRESSED IN FETAL LIVER, SIGNAL = 0.68; EST_HUMAN HIT: AW005639.1, EVALUE 3.00e-13; SWISSPROT HIT: Q46930, EVALUE 1.40e+00
ccccgcagttgagagtgctgcactgcaagtgttacctggtgaggcccacctccagcccactacttctggggtatgtgaggtctgcctgcaa

SEQ ID NO: 27563 - DNA, 196 bp, Homo sapiens
  MAP TO AC005920.1; EXPRESSED IN PLACENTA, SIGNAL =   1; EXPRESSED IN LUNG, SIGNAL = 0.59; EXPRESSED IN BRAIN, SIGNAL = 1.3; EXPRESSED IN BONE MARROW, SIGNAL = 0.78; EXPRESSED IN ADULT LIVER, SIGNAL = 0.76; EXPRESSED IN FETAL LIVER, SIGNAL = 0.82; EST_HUMAN HIT: AU143428.1, EVALUE 1.00e-106; SWISSPROT HIT: O60481, EVALUE 8.60e+00; NT HIT: gi11426786, EVALUE 1.00e-106
ctcgactgatacactggggagaggtcttctgggatctgaactcccaaaggatctgtaaagacatgctctgtgtagacgccagtttgggagatgtccactgtgtcttcagctgaccccgcattcccttctgtagcttcagttgcttcttctgctgttggaacattttcatcaacctcactattttctgcttccattt

SEQ ID NO: 27564 - DNA, 360 bp, Homo sapiens
  MAP TO AC004622.1; EXPRESSED IN PLACENTA, SIGNAL = 0.65; EXPRESSED IN BRAIN, SIGNAL = 0.6; EXPRESSED IN BONE MARROW, SIGNAL = 0.63; EXPRESSED IN ADULT LIVER, SIGNAL = 0.66; EXPRESSED IN LUNG, SIGNAL = 0.74; EST_HUMAN HIT: AW752848.1, EVALUE 0.00e+00; NT HIT: gi7706512, EVALUE 0.00e+00; SWISSPROT HIT: P14771, EVALUE 6.00e-06
aagttcttacattctcgacaatgaagtgcaattttaataaaatgcttaataatcttcattcgtttgagctgatttgcttcagttaaaatttctgaggcaacccagaatgtctcttggtttacaatgtcctcaaacctcttcaaatgagtatttcctgttttggaatttaacttaaaaaggtcatcgatgtactcagtcggttcaatattacgaaacaaatcaaagtccctcattgacagctgggtggccacctcaatggtactgagctgcagcatggatagctggctttccttaactagttcttgagcatcttcatctgaacataaggtttctgtttccatgttattttttaagtaatac

SEQ ID NO: 27565 - DNA, 1033 bp, Homo sapiens
  MAP TO AC005104.1; EXPRESSED IN LUNG, SIGNAL = 1.2; EXPRESSED IN BRAIN, SIGNAL = 0.88; EXPRESSED IN PLACENTA, SIGNAL = 1.1; EXPRESSED IN BONE MARROW, SIGNAL = 1.1; EXPRESSED IN ADULT LIVER, SIGNAL = 1.1; EXPRESSED IN FETAL LIVER, SIGNAL = 1.2; NT HIT: gi7662309, EVALUE 1.00e-125; EST_HUMAN HIT: BE901608.1, EVALUE 0.00e+00; SWISSPROT HIT: O88888, EVALUE 1.20e+00
gagtcctcggccgtcgtgggtgggtagctgagctgctctaactggtcgatgatgtcagagaactggaaggccgagctggactcagagcggactgagtaggctgggaagttgaccatggagctggcctcagattgactggctgagctgcatgtgtgcacagacagcccaccacgtagtggcatgttattgagggagctgttttcagactggctgtttctcagtgagctggtctcagaaggacccagcaggcgctgcatccggctggcctgcgccttcacctcaaatagctccgaggtgtctgaggggtgtgcgttcccattgaagtcactttcctcctcaaatgcaaaaccgtcttctgtgttcatatctactgcctccatggagtacctgtctgggctggaccgagcagaccctggaagctcacacaaaggaggggccaccagaggctgggcagaggcctgagattcctgtgggactacagagccataaggaaaagaaaacgcctcagagcctccagcaaagaaggagatgtctgctgggtcatcgtctatgaactcctcagatacctgcagctgggcatttgtcaatgtgaaagcaggggcccccccacgacactgccggtcacaccggtgctccccaccggaaggaaatgagcctgtggtaaagtcatccccaccattgtcatttttacaagcagcgctgagctccctaccggccctccctgtgtctaggtctaaggcactgaaactctgccccccagcacagacagaaccacagctgctcacgacatgacaaaacccgacacctggaccaggctggagtgcggggggcccgaggggctgggccgatggtgtgtcggggcctccagccactgctccactgcgcctctctgcagctggactcttgacgtaggaaacctggggatctgtgagggagctgctgctgtccttaaactctggcaggccagaggggaccagagtggagggagagagcgagtaaaaggcattcgctgaagatggggaggcaggagtcc

SEQ ID NO: 27566 - DNA, 103 bp, Homo sapiens
  MAP TO AC005144.1; EXPRESSED IN PLACENTA, SIGNAL = 0.78; EXPRESSED IN LUNG, SIGNAL = 0.8; EXPRESSED IN FETAL LIVER, SIGNAL = 0.73; EXPRESSED IN BRAIN, SIGNAL = 0.56; EXPRESSED IN BONE MARROW, SIGNAL = 0.61; EXPRESSED IN ADULT LIVER, SIGNAL = 0.76; NT HIT: U67087.1, EVALUE 2.20e-01; EST_HUMAN HIT: AA693844.1, EVALUE 1.30e+00
ggctgcacgttctggcatgtccctgtgccatgctcatgagctgcttctcagtggggatttcagaatcccctctgttgttctccgactgaccgcaagaaatcta

SEQ ID NO: 27567 - DNA, 105 bp, Homo sapiens
  MAP TO AC002449.1; EXPRESSED IN PLACENTA, SIGNAL =   1; EXPRESSED IN LUNG, SIGNAL = 1.1; EXPRESSED IN FETAL LIVER, SIGNAL = 1.1; EXPRESSED IN BONE MARROW, SIGNAL = 1.1; EXPRESSED IN ADULT LIVER, SIGNAL = 0.83; EXPRESSED IN BRAIN, SIGNAL = 1.2; NT HIT: L42898.1, EVALUE 3.50e+00; EST_HUMAN HIT: BF026938.1, EVALUE 5.20e+00
tgaactacatgaaacacactaacaagtgtcattttctatgtgaagccttttccaaccatgagcaaagctttgcttacagctatagtcactgttaccaagctgcag

SEQ ID NO: 27568 - DNA, 341 bp, Homo sapiens
  MAP TO AC002453.1; EXPRESSED IN PLACENTA, SIGNAL = 0.74; EXPRESSED IN LUNG, SIGNAL = 0.71; EXPRESSED IN FETAL LIVER, SIGNAL = 0.88; EXPRESSED IN ADULT LIVER, SIGNAL = 0.74; EXPRESSED IN BONE MARROW, SIGNAL = 0.92; EXPRESSED IN BRAIN, SIGNAL = 0.92; NT HIT: AE001770.1, EVALUE 3.30e+00; EST_HUMAN HIT: BF334851.1, EVALUE 1.00e-108; SWISSPROT HIT: P97792, EVALUE 1.50e-01
gacttgtatcttctgactggcagatagagttccatttccctgaatgttgaccttcacgatgtaattgccttcatcagggaactgcagtgggttgataagcagagatgcattgggtggcatcatggtgaacttgtgttggtattccaagtcaggaaccacagacttattcacagagcccagtaagtatttgggcattgtgtggggtctctcaaatagccatatgatctggatgtctgatgctggagtgtggaagccatagtggacgggtaggtagagggcctgacctctgacgccatggacagtgtgtgatggcactgtcaccttcagccccgagcaagcac

SEQ ID NO: 27569 - DNA, 162 bp, Homo sapiens
  MAP TO AC005151.1; EXPRESSED IN LUNG, SIGNAL = 1.1; EXPRESSED IN BRAIN, SIGNAL = 0.94; EXPRESSED IN ADULT LIVER, SIGNAL = 0.97; EXPRESSED IN PLACENTA, SIGNAL = 0.89; EXPRESSED IN FETAL LIVER, SIGNAL = 0.8; EXPRESSED IN BONE MARROW, SIGNAL =   1; SWISSPROT HIT: Q28295, EVALUE 7.80e-01; EST_HUMAN HIT: AA283879.1, EVALUE 5.50e-01; NT HIT: gi7305360, EVALUE 1.00e-37
cctgccagctgtccagaaagggagcagggtcctcagccccacccaccactgagccatccttcagggtaaggtcattggctgcatctccatcacagatacctgaaaggggccaaacaatcccaacagccacgatcatcactaccactcccatgtcgtcagctc

SEQ ID NO: 27570 - DNA, 92 bp, Homo sapiens
  MAP TO AC005549.1; EXPRESSED IN LUNG, SIGNAL = 1.3; EXPRESSED IN FETAL LIVER, SIGNAL = 1.1; EXPRESSED IN BRAIN, SIGNAL = 1.3; EXPRESSED IN PLACENTA, SIGNAL = 1.1; EXPRESSED IN BONE MARROW, SIGNAL = 1.5; EXPRESSED IN ADULT LIVER, SIGNAL = 1.3; SWISSPROT HIT: P10342, EVALUE 9.50e+00; NT HIT: Y18933.1, EVALUE 5.00e-45; EST_HUMAN HIT: BF569947.1, EVALUE 7.20e-02
ccactctctgcttccagaacacaccatagctccattccaccttgaggcctttgcccatgctggaccccagcacctggtacagtatcttccat

SEQ ID NO: 27571 - DNA, 181 bp, Homo sapiens
  MAP TO AC005667.1; EXPRESSED IN PLACENTA, SIGNAL = 0.73; EXPRESSED IN BRAIN, SIGNAL = 0.83; EXPRESSED IN ADULT LIVER, SIGNAL = 0.86; EXPRESSED IN LUNG, SIGNAL =   1; EXPRESSED IN FETAL LIVER, SIGNAL = 0.84; EXPRESSED IN BONE MARROW, SIGNAL = 0.9; NT HIT: gi11465934, EVALUE 4.20e-01; SWISSPROT HIT: P34369, EVALUE 1.70e+00; EST_HUMAN HIT: BE925803.1, EVALUE 1.60e-01
actggtgagtttggaaggaggaactgtgccttatatcatcctctcttttcttcttgggagcaagcttcgctcccgtggggtgggaagagtaggcccattccagctcagctgcctgtcatcgagccgccaagtctgcctaactctgaagttgagtatcgggaagctcgattgtctgatgata

SEQ ID NO: 27572 - DNA, 158 bp, Homo sapiens
  MAP TO AC003669.1; EXPRESSED IN PLACENTA, SIGNAL = 1.3; EXPRESSED IN ADULT LIVER, SIGNAL = 1.2; EXPRESSED IN LUNG, SIGNAL = 1.3; EXPRESSED IN FETAL LIVER, SIGNAL = 1.3; EXPRESSED IN BRAIN, SIGNAL = 1.2; EXPRESSED IN BONE MARROW, SIGNAL = 1.4; SWISSPROT HIT: P36924, EVALUE 6.80e+00; EST_HUMAN HIT: AL039738.1, EVALUE 3.00e-55; NT HIT: gi11225608, EVALUE 3.00e-57
ttgcttacctcttcaaaggtatgttccacatcttcaatcaactggccgcggctgtagtcatagccatctaccccatttacttcatagtctcctctccaataatccccatagtcctcataatctgtttgtttttttttttaaagagaaagggaagaaca

SEQ ID NO: 27573 - DNA, 364 bp, Homo sapiens
  MAP TO AC002037.1; EXPRESSED IN PLACENTA, SIGNAL = 0.96; EXPRESSED IN ADULT LIVER, SIGNAL = 0.83; EXPRESSED IN LUNG, SIGNAL = 0.94; EXPRESSED IN FETAL LIVER, SIGNAL = 0.69; EXPRESSED IN BRAIN, SIGNAL = 0.89; EXPRESSED IN BONE MARROW, SIGNAL = 0.8; SWISSPROT HIT: P28301, EVALUE 1.50e+00; EST_HUMAN HIT: BE748912.1, EVALUE 3.40e-01
ggccgtcggtgccagctcttccatgggcacttgcactctggctgtcgctgtctacctttacctcaccagttggcagccagattcttccagaccagtgatcagaaagggcctctgtgtctctagtccctggtcactaggctctcgggatcctgctctttttatgggagccgagttggcaggagcttggcttctgaccagctgctggaagaaggatgagaatcagatcttcagaagggtggacctttcttggtggattgtgttcaagaaatcaaagaagagagacagtttgagtattgcgagcaggcccgatggggaggctgtgaactgggactgggtgctgctctgtcactcgctgtctgattag

SEQ ID NO: 27574 - DNA, 204 bp, Homo sapiens
  MAP TO AB019440.1; EXPRESSED IN PLACENTA, SIGNAL = 1.3; EXPRESSED IN ADULT LIVER, SIGNAL =  50; EXPRESSED IN LUNG, SIGNAL = 1.3; EXPRESSED IN HELA, SIGNAL = 6.3; EXPRESSED IN FETAL LIVER, SIGNAL =  13; EXPRESSED IN BRAIN, SIGNAL = 1.2; EXPRESSED IN BONE MARROW, SIGNAL = 0.82; NT HIT: AE001249.1, EVALUE 4.80e-01; SWISSPROT HIT: P05691, EVALUE 3.30e-01; EST_HUMAN HIT: AA913000.1, EVALUE 7.20e-01
tcgctctctgcagatggcacacctggtcctgcttttgcaccttatgttgataagaagccatctccccacgagcacatttataaaaatccttacgttgataagatactgtctccccacgagcacatttataaaaatccttacattttactgcggcacagcaacccatctgggaccctttctgtgacagagagattttttttcctt

SEQ ID NO: 27575 - DNA, 159 bp, Homo sapiens
  MAP TO AC003103.1; EXPRESSED IN ADULT LIVER, SIGNAL = 0.64; EXPRESSED IN PLACENTA, SIGNAL = 0.83; EXPRESSED IN LUNG, SIGNAL = 0.73; EXPRESSED IN BRAIN, SIGNAL = 0.87; EXPRESSED IN BONE MARROW, SIGNAL = 0.78; EXPRESSED IN FETAL LIVER, SIGNAL = 0.76; SWISSPROT HIT: Q28559, EVALUE 1.00e-24; EST_HUMAN HIT: BE902501.1, EVALUE 1.00e-69; NT HIT: gi4826636, EVALUE 3.00e-54
atacatctccatgtgccgggggttgatggaggagtcaatcaccacccaggagccaccccgcagctcagcctggggaggaatgtaaaccagcacaggctggcagcactccctcaagccatccacaatgtaagcaccaaacttcagcacttggtcgtacat

SEQ ID NO: 27576 - DNA, 174 bp, Homo sapiens
  MAP TO AC005726.1; EXPRESSED IN PLACENTA, SIGNAL = 0.95; EXPRESSED IN ADULT LIVER, SIGNAL = 0.71; EXPRESSED IN LUNG, SIGNAL = 0.71; EXPRESSED IN FETAL LIVER, SIGNAL = 0.69; EXPRESSED IN BRAIN, SIGNAL = 0.58; EXPRESSED IN BONE MARROW, SIGNAL = 0.73; NT HIT: gi11426657, EVALUE 7.00e-83; EST_HUMAN HIT: F11192.1, EVALUE 1.00e-82; SWISSPROT HIT: P08964, EVALUE 3.00e-02
gaacatagtgagaagaagcaacgggtcaggttccagcttgagatctctagcaatccagaggagcaacgcagcagcatactgcatttgcaggaggctgtgcggcagcatgtggcccaaatacgacagctggagaagcagatgtattctatcatgaaggtagtcactgcagataga

SEQ ID NO: 27577 - DNA, 179 bp, Homo sapiens
  MAP TO AC005849.1; EXPRESSED IN LUNG, SIGNAL =   1; EXPRESSED IN BRAIN, SIGNAL = 0.57; EXPRESSED IN PLACENTA, SIGNAL = 0.81; EXPRESSED IN BONE MARROW, SIGNAL = 0.61; EXPRESSED IN ADULT LIVER, SIGNAL = 0.62; SWISSPROT HIT: P12382, EVALUE 4.50e-01; NT HIT: AF202635.1, EVALUE 1.00e-07; EST_HUMAN HIT: AV731382.1, EVALUE 2.00e-19
attgtggatatggcaaaaaagatggggtgaagggtttgatatggatctcagaaaaattgaagagcttaatagacaccacccaagacgaattaacagaagatgactcgatagagatgagtgcttctgaacctgtgccagatgaagaagaagatgtagaagcagcagtggcagaaaataat

SEQ ID NO: 27578 - DNA, 93 bp, Homo sapiens
  MAP TO AC005695.1; EXPRESSED IN PLACENTA, SIGNAL = 1.5; EXPRESSED IN LUNG, SIGNAL = 1.5; EXPRESSED IN FETAL LIVER, SIGNAL = 1.3; EXPRESSED IN BRAIN, SIGNAL = 1.5; EXPRESSED IN BONE MARROW, SIGNAL = 1.3; EXPRESSED IN ADULT LIVER, SIGNAL = 1.3; EST_HUMAN HIT: AA418145.1, EVALUE 2.90e-01
aactctagaaagttcatcttatgaggcagaatttgcatcttgaagaaggcgtaggaggctgctggcaggtgtttctctggctcgaatgcagat

SEQ ID NO: 27579 - DNA, 126 bp, Homo sapiens
  MAP TO AC003108.1; EXPRESSED IN PLACENTA, SIGNAL = 1.7; EXPRESSED IN BONE MARROW, SIGNAL = 1.1; EXPRESSED IN ADULT LIVER, SIGNAL = 1.4; EXPRESSED IN LUNG, SIGNAL = 1.4; EXPRESSED IN FETAL LIVER, SIGNAL = 1.3; EXPRESSED IN BRAIN, SIGNAL = 1.1; EST_HUMAN HIT: BF513488.1, EVALUE 2.00e-58; SWISSPROT HIT: P16755, EVALUE 1.10e+00; NT HIT: AF139760.1, EVALUE 2.80e-01
gcctgtgttgcctactgcttcatcaccatcccctccctggcgggcatcttcacacgtctcaatctctacctgcattctggtcaggtggccttggccaaccagtgcctctcccaaggtaagtccatc

SEQ ID NO: 27580 - DNA, 97 bp, Homo sapiens
  MAP TO AC005137.1; EXPRESSED IN LUNG, SIGNAL = 0.92; EXPRESSED IN PLACENTA, SIGNAL = 0.84; EXPRESSED IN FETAL LIVER, SIGNAL = 0.98; EXPRESSED IN BRAIN, SIGNAL = 0.91; EXPRESSED IN BONE MARROW, SIGNAL = 1.1; EXPRESSED IN ADULT LIVER, SIGNAL = 0.98; SWISSPROT HIT: P32175, EVALUE 3.20e+00; NT HIT: AB006955.1, EVALUE 6.00e-48; EST_HUMAN HIT: AI674417.1, EVALUE 3.00e-01
tggtggtacattcgcagcacatcatagagatagtccttctctgcatcattttcaatcagaaaatccacctggaaaatccaatagcagaatcacagct

SEQ ID NO: 27581 - DNA, 113 bp, Homo sapiens
  MAP TO AC002067.1; EXPRESSED IN PLACENTA, SIGNAL = 0.85; EXPRESSED IN BRAIN, SIGNAL = 1.1; EXPRESSED IN BONE MARROW, SIGNAL = 1.1; EXPRESSED IN ADULT LIVER, SIGNAL = 1.1; EXPRESSED IN LUNG, SIGNAL = 0.96; EXPRESSED IN HELA, SIGNAL = 3.1; EXPRESSED IN FETAL LIVER, SIGNAL = 1.1; NT HIT: AJ271325.1, EVALUE 3.90e+00; EST_HUMAN HIT: BE963939.2, EVALUE 1.00e-03
cagatcaaagaatcttttcctggggatgcagatgaagtgagagagtccaggagtgttgtgctgatggcctctacgtggaccaataactatggagggagaaatacttagtactc

SEQ ID NO: 27582 - DNA, 195 bp, Homo sapiens
  MAP TO AC005857.1; EXPRESSED IN ADULT LIVER, SIGNAL = 1.3; EXPRESSED IN PLACENTA, SIGNAL = 1.4; EXPRESSED IN LUNG, SIGNAL = 1.4; EXPRESSED IN BRAIN, SIGNAL = 0.97; EXPRESSED IN BONE MARROW, SIGNAL = 1.1; EXPRESSED IN FETAL LIVER, SIGNAL = 1.3; NT HIT: AF060221.1, EVALUE 2.90e-02; SWISSPROT HIT: Q06801, EVALUE 3.40e-01
agagctcaccctacttctttctactccccagaactcatgaaattcctctggtttcattttgcagagtggtttagccttatctttgttgtgaaaatccttccagatggcccagcagggaatagaggtgggtcagggtccactcttttcacactccaagaagcccagcaaaggtatttttctaaacacagagctgaa

SEQ ID NO: 27583 - DNA, 181 bp, Homo sapiens
  MAP TO AC004857.1; EXPRESSED IN PLACENTA, SIGNAL = 0.84; EXPRESSED IN LUNG, SIGNAL = 0.99; EXPRESSED IN FETAL LIVER, SIGNAL = 0.78; EXPRESSED IN BRAIN, SIGNAL = 0.94; EXPRESSED IN BONE MARROW, SIGNAL = 0.87; EXPRESSED IN ADULT LIVER, SIGNAL = 0.87; EST_HUMAN HIT: BE093906.1, EVALUE 6.30e-01; NT HIT: gi6753287, EVALUE 1.70e+00
catcagcagaaactctgttttgagcagaatgcttgaattctgtatatcggaagagaactccaaatagtaggcaaggaagactgagttgattgaaagatggtcttgttcttcatattggtaaatatctttgggaggaaatagcatgtgatccatgaacatgcacatgtttacttccagtttg

SEQ ID NO: 27584 - DNA, 92 bp, Homo sapiens
  MAP TO AC005697.1; EXPRESSED IN BONE MARROW, SIGNAL = 0.84; EXPRESSED IN PLACENTA, SIGNAL = 0.92; EXPRESSED IN LUNG, SIGNAL = 0.99; EXPRESSED IN FETAL LIVER, SIGNAL = 1.1; EXPRESSED IN BRAIN, SIGNAL = 0.79; EXPRESSED IN ADULT LIVER, SIGNAL = 0.95; EST_HUMAN HIT: BE999973.1, EVALUE 2.00e-23; SWISSPROT HIT: P35228, EVALUE 3.00e-13; NT HIT: AB022318.1, EVALUE 5.00e-45
gctttctccacattgttgttgatgtctttttccccattcattgcatactggtggaatttggtcttgaacagaaatttccaaggacaggccat

SEQ ID NO: 27585 - DNA, 270 bp, Homo sapiens
  MAP TO AC002070.1; EXPRESSED IN LUNG, SIGNAL =   1; EXPRESSED IN FETAL LIVER, SIGNAL = 1.1; EXPRESSED IN BONE MARROW, SIGNAL = 1.1; EXPRESSED IN PLACENTA, SIGNAL = 0.91; EXPRESSED IN BRAIN, SIGNAL = 0.96; EXPRESSED IN ADULT LIVER, SIGNAL = 1.1; SWISSPROT HIT: P09002, EVALUE 3.00e-01; EST_HUMAN HIT: F30631.1, EVALUE 6.00e-33
ggccagagccccagaccacacagaccgtgcgctcctccgccctcccggcgccgccggcctcgcccatgtctcagtacgcccctagcccggacttcaagagggctttggacagcagtcccgaggccaacactgaagatgacaagaccgaggaggacgtgcccatgcccaagaactacctgtggctcaccatcgtctcgtgtttttgccctgcgtaccccatcaacatcgtggctttggtcttttccatcatggtgagtgaatcacggccag

SEQ ID NO: 27586 - DNA, 80 bp, Homo sapiens
  MAP TO AC002541.1; EXPRESSED IN FETAL LIVER, SIGNAL = 0.9; EXPRESSED IN BONE MARROW, SIGNAL =   1; EXPRESSED IN PLACENTA, SIGNAL = 0.97; EXPRESSED IN LUNG, SIGNAL =   1; EXPRESSED IN BRAIN, SIGNAL = 1.6; EXPRESSED IN ADULT LIVER, SIGNAL = 0.84; SWISSPROT HIT: Q09669, EVALUE 3.30e+00
aaaagcacttgctctgtttcctgcactcatttgccctcatgttacctccagcgagtggtagacaggggaaagctaagcaa

SEQ ID NO: 27587 - DNA, 130 bp, Homo sapiens
  MAP TO AC000062.1; EXPRESSED IN PLACENTA, SIGNAL = 0.83; EXPRESSED IN BRAIN, SIGNAL = 0.6; EXPRESSED IN BONE MARROW, SIGNAL = 0.77; EXPRESSED IN ADULT LIVER, SIGNAL = 0.82; EXPRESSED IN LUNG, SIGNAL = 0.77; EXPRESSED IN FETAL LIVER, SIGNAL = 0.83; NT HIT: AL049784.1, EVALUE 2.00e-67; SWISSPROT HIT: Q19020, EVALUE 4.10e+00
caatgagctccctttctgagtactgcctgccttccattctacgtacattatttgactggtataaaaggcaaaatggcattgaggatgaatcacatgaatacagaccaagaacaagcaataaatcaaaaag

SEQ ID NO: 27588 - DNA, 300 bp, Homo sapiens
  MAP TO AC000382.1; EXPRESSED IN PLACENTA, SIGNAL = 0.69; EXPRESSED IN LUNG, SIGNAL =   1; EXPRESSED IN FETAL LIVER, SIGNAL = 1.2; EXPRESSED IN BONE MARROW, SIGNAL = 0.65; EXPRESSED IN BRAIN, SIGNAL = 0.64; EXPRESSED IN ADULT LIVER, SIGNAL = 0.55; EST_HUMAN HIT: BF206660.1, EVALUE 1.10e+00; SWISSPROT HIT: P76217, EVALUE 2.00e-11; NT HIT: AE000269.1, EVALUE 1.00e-94
  unsure 35
  unsure 190
  unsure 204
  unsure 268
  unsure 276
  unsure 289
ttgcttccagcagtgcggcaaagcgttcgacaacngcatgacgttcagcaaatgaaaaccgcgccagcgcggaaacccgcacgggctgcccgacaagctgctcgagctgagcggcatcggcatcattgccttgccataacacctcgccgaataccgaaataccttcacacgcgatgcgccctggcccgtnattcaatcaccgtnaatcatagagtcatgctgttttctcctctgcgcacaggcgcaccaaacgaacgcgatcccggcnttggcatnggaaggcactcanttgttgcgcgt

SEQ ID NO: 27589 - DNA, 206 bp, Homo sapiens
  MAP TO AC005154.1; EXPRESSED IN LUNG, SIGNAL = 1.3; EXPRESSED IN BONE MARROW, SIGNAL = 1.3; EXPRESSED IN ADULT LIVER, SIGNAL = 1.1; EXPRESSED IN PLACENTA, SIGNAL = 1.3; EXPRESSED IN FETAL LIVER, SIGNAL = 1.4; EXPRESSED IN BRAIN, SIGNAL =   1; NT HIT: AF149773.1, EVALUE 1.00e-112; EST_HUMAN HIT: BF035492.1, EVALUE 7.20e-01; SWISSPROT HIT: P17057, EVALUE 1.60e+00
attgggctggggccaggtatctgggagctgggtctgctctcctgggtggagctttcccaggccagtggtgcagaccaatggggactgaagttggagatcctggtaagacagctccagggatacccaaaggaaaaaaccaagctaatggaggcagccagaaaacaggacacaccgcagaacaaaagatggatcaccaagtggaaaaa

SEQ ID NO: 27590 - DNA, 100 bp, Homo sapiens
  MAP TO AC002076.1; EXPRESSED IN LUNG, SIGNAL = 0.94; EXPRESSED IN BRAIN, SIGNAL = 0.88; EXPRESSED IN PLACENTA, SIGNAL = 0.85; EXPRESSED IN BONE MARROW, SIGNAL = 0.87; EXPRESSED IN ADULT LIVER, SIGNAL = 0.89; EXPRESSED IN FETAL LIVER, SIGNAL = 0.95; SWISSPROT HIT: P50152, EVALUE 1.00e-13; EST_HUMAN HIT: H18291.1, EVALUE 1.00e-49; NT HIT: gi4758447, EVALUE 1.00e-49
ctttaaaggggttcttgtcttctggaattccctttactagaggatcctctccagaacgttcttcaatatagttctttatttcttcagaacatttagacac

SEQ ID NO: 27591 - DNA, 504 bp, Homo sapiens
  MAP TO AC005740.1; EXPRESSED IN ADULT LIVER, SIGNAL = 1.1; EXPRESSED IN PLACENTA, SIGNAL = 1.1; EXPRESSED IN LUNG, SIGNAL = 1.2; EXPRESSED IN BRAIN, SIGNAL = 0.99; EXPRESSED IN BONE MARROW, SIGNAL = 1.1; EXPRESSED IN FETAL LIVER, SIGNAL = 1.4; NT HIT: gi11416225, EVALUE 0.00e+00; SWISSPROT HIT: P50876, EVALUE 3.00e-04; EST_HUMAN HIT: BE258330.1, EVALUE 0.00e+00
gcactttggttctgggcagttgaggcattgaacctggccatctctgatctggatttcaaagtagtccttcagacaggctttgcagtacacatgcctgcactccaagaagtacatgcattcactacccagcttctcacagaaacagatactgcacaggaacaatttactattaaagcattttatctgctgagcttgatcaaagtccaagatttcctggatcagatttgacagtgattccacatcctgcactgctctctcatccacaatttcctcttggtctacatcagatccagcagctcctccaaaatctagctctgtgttgggagaagcttgagctgtccttctctgcacttttttctgagaaccaatcttgagctcaaaaggagagacaatattcaagtatgctagggtctcttccttaagaaattgcatccaggcaaacaggaccacgctgccacggtgttcttcccataggttgtctaagtgcttgcatagagcagatag

SEQ ID NO: 27592 - DNA, 444 bp, Homo sapiens
  MAP TO AC004914.1; EXPRESSED IN PLACENTA, SIGNAL = 0.88; EXPRESSED IN ADULT LIVER, SIGNAL = 0.95; EXPRESSED IN LUNG, SIGNAL =   1; EXPRESSED IN FETAL LIVER, SIGNAL = 0.91; EXPRESSED IN BRAIN, SIGNAL = 0.91; EXPRESSED IN BONE MARROW, SIGNAL = 0.89; EST_HUMAN HIT: AU147610.1, EVALUE 2.70e-02; SWISSPROT HIT: P37757, EVALUE 5.90e+00; NT HIT: AE002234.2, EVALUE 5.00e-03
caggggccccgtgtgctctcatggcggggatgatgctagcacccaggtctcggggttccctgccaggatctttccaccttctcgcttggtgggaggcatatgctctttggtcagagagaagtccaggttggcccggtgtgaggggaaccatccctcagcacaagcttctttgctctggtgccagccgagtgtcccagagagaggcagtgcctgcctctggtgaggggtgagaactgccttaagaagtgggactgcaaaaacagtgactgactgggggccgggatatctagctatgccattttcatgaaaaagttggttcattttaaggaaccaccctccctctggacctccctccttttcagccacttgaaccagttactcatccagttgaagttcttgcctatagccagggaggtgaggagtttatccccttccttccagtct

SEQ ID NO: 27593 - DNA, 141 bp, Homo sapiens
  MAP TO AC005261.1; EXPRESSED IN PLACENTA, SIGNAL = 0.98; EXPRESSED IN LUNG, SIGNAL = 0.86; EXPRESSED IN FETAL LIVER, SIGNAL = 0.98; EXPRESSED IN BONE MARROW, SIGNAL = 0.96; EXPRESSED IN ADULT LIVER, SIGNAL = 0.93; EXPRESSED IN BRAIN, SIGNAL = 0.78; SWISSPROT HIT: P21506, EVALUE 5.00e-09; NT HIT: gi10190695, EVALUE 7.00e-67; EST_HUMAN HIT: BE869931.1, EVALUE 4.00e-17
agttgtgtgaccttcgaggatgtgttcgtgtacttctctcgggaggagtgggaactccttgaggaggcacagagattcctgtaccgtgatgtgatgctggagaactttgcacttgtggctacactaggtaagtctgtgttt

SEQ ID NO: 27594 - DNA, 276 bp, Homo sapiens
  MAP TO AC004677.1; EXPRESSED IN PLACENTA, SIGNAL = 0.96; EXPRESSED IN LUNG, SIGNAL = 1.2; EXPRESSED IN BRAIN, SIGNAL = 0.99; EXPRESSED IN FETAL LIVER, SIGNAL = 1.2; EXPRESSED IN BONE MARROW, SIGNAL = 2.7; EXPRESSED IN ADULT LIVER, SIGNAL = 1.6; NT HIT: AL161577.2, EVALUE 1.70e-01; SWISSPROT HIT: P12036, EVALUE 9.10e-01; EST_HUMAN HIT: BE885873.1, EVALUE 5.00e-98
cacttttgttgatttctttgtcagcttctttccctttttctcctcctttgtcagttttgtcttctctgttgattccttcctctttttcttctccactatcagctcctttctctcctccattcttggtgttctcttcttctccactgtcagctcttttttctcctccattgttgactcctttctctccttctttgtcctgaacactgatataaacagctttgttatagccttcccggttccgagcaatttcaatggcaaagaattgtatcctggggg

SEQ ID NO: 27595 - DNA, 100 bp, Homo sapiens
  MAP TO AC005666.1; EXPRESSED IN PLACENTA, SIGNAL = 1.1; EXPRESSED IN LUNG, SIGNAL = 1.1; EXPRESSED IN FETAL LIVER, SIGNAL = 0.94; EXPRESSED IN BRAIN, SIGNAL = 5.6; EXPRESSED IN BONE MARROW, SIGNAL =   1; EXPRESSED IN ADULT LIVER, SIGNAL = 1.5; SWISSPROT HIT: O43236, EVALUE 1.00e-12; NT HIT: U88870.1, EVALUE 1.00e-49; EST_HUMAN HIT: AW964640.1, EVALUE 1.00e-49
cacttcgggaggtgtcagtgtgtctgccttagccaggataggcacgatgttgacccgctgatgcagggccttcatgaattcaacatccaatggccggagc

SEQ ID NO: 27596 - DNA, 160 bp, Homo sapiens
  MAP TO AC002080.1; EXPRESSED IN PLACENTA, SIGNAL = 0.72; EXPRESSED IN LUNG, SIGNAL = 0.55; EXPRESSED IN BRAIN, SIGNAL = 0.63; EXPRESSED IN BONE MARROW, SIGNAL = 0.66; EXPRESSED IN ADULT LIVER, SIGNAL = 0.67; NT HIT: gi11422024, EVALUE 3.00e-85; EST_HUMAN HIT: AL036412.1, EVALUE 1.00e-82; SWISSPROT HIT: P08581, EVALUE 4.00e-30
attgaatggcttgggctgcagacatttccagtcctgcagtcaatgcctctctgccccaccctttgttcagtgtggctggtgccacgacaaatgtgtgcgatcggaggaatgcctgagcgggacatggactcaacagatctgtctgcctgcaatctacaag

SEQ ID NO: 27597 - DNA, 131 bp, Homo sapiens
  MAP TO AC005157.1; EXPRESSED IN BONE MARROW, SIGNAL = 1.1; EXPRESSED IN PLACENTA, SIGNAL = 0.96; EXPRESSED IN LUNG, SIGNAL = 0.94; EXPRESSED IN FETAL LIVER, SIGNAL = 1.2; EXPRESSED IN ADULT LIVER, SIGNAL = 0.92; EXPRESSED IN BRAIN, SIGNAL = 0.85; EST_HUMAN HIT: C15839.1, EVALUE 4.30e-01; SWISSPROT HIT: P16431, EVALUE 3.60e-01; NT HIT: AF295925.1, EVALUE 1.10e+00
tatgggttcaacagctcagcaagaatccaatcagtgagaaggttaacaccctgcttcttgtaggacccctaatcatcaccagtgatttccctggagccctcctcatttggcttagtgggaggaaaaattta

SEQ ID NO: 27598 - DNA, 388 bp, Homo sapiens
  MAP TO AC003693.1; EXPRESSED IN PLACENTA, SIGNAL =   1; EXPRESSED IN ADULT LIVER, SIGNAL = 1.1; EXPRESSED IN LUNG, SIGNAL = 1.1; EXPRESSED IN FETAL LIVER, SIGNAL = 1.1; EXPRESSED IN BRAIN, SIGNAL = 1.3; EXPRESSED IN BONE MARROW, SIGNAL =   1; NT HIT: M29906.1, EVALUE 2.40e-01; SWISSPROT HIT: P10284, EVALUE 3.80e-02; EST_HUMAN HIT: AW953119.1, EVALUE 3.60e-01
acaaccacagcatccccggcctggaacgaggctgcccccagcacgttcctcgtactcctgtccagggacaggaggggctgcccctgccaccgagtccccttctccaggacctggggcctgtgggtgtgaggcaggtgttcttggaaggggtcactctccaggcacccggcggccaaggcttgtggctggagcagctcccgctgtggggtcggcgtcgggccccgtgtggccggagaggagctgaagggtcacttagcttcgggctggggcgaggacaggggacaccccagagaggtatgccaggcctccttcctgcgccccactctcggcagaagcagaggtcacaggctgtgctgaggccccatggtgctgcccccatgatgccagg

SEQ ID NO: 27599 - DNA, 262 bp, Homo sapiens
  MAP TO AC005799.1; EXPRESSED IN PLACENTA, SIGNAL = 1.2; EXPRESSED IN LUNG, SIGNAL = 1.1; EXPRESSED IN FETAL LIVER, SIGNAL = 1.6; EXPRESSED IN BRAIN, SIGNAL = 1.2; EXPRESSED IN BONE MARROW, SIGNAL = 1.2; EXPRESSED IN ADULT LIVER, SIGNAL = 4.4; NT HIT: gi10946887, EVALUE 2.50e+00; SWISSPROT HIT: P36956, EVALUE 1.10e+00; EST_HUMAN HIT: BE156561.1, EVALUE 0.00e+00
gcttgtcaagttagcctggccagagtctggggccgactgttccactgggccgtcgactatgacactctgctgtccatgggccactatgcacccctccactgtccttaggatggtttggagccttcgatccagggcaaggaggtggggttcagtgaggacagggctgagctggtcttccagcagtgattctcgcatcacatcgctgagtctgtagtcagcttgggccagcagctgcaggtgcaaaagtgttttcttttttatc

SEQ ID NO: 27600 - DNA, 126 bp, Homo sapiens
  MAP TO AC005277.1; EXPRESSED IN LUNG, SIGNAL = 0.89; EXPRESSED IN BONE MARROW, SIGNAL = 0.9; EXPRESSED IN PLACENTA, SIGNAL = 0.92; EXPRESSED IN FETAL LIVER, SIGNAL = 0.79; EXPRESSED IN BRAIN, SIGNAL = 0.63; EXPRESSED IN ADULT LIVER, SIGNAL = 0.79; SWISSPROT HIT: Q15648, EVALUE 5.40e+00; NT HIT: D85606.1, EVALUE 3.00e-04; EST_HUMAN HIT: AA974932.1, EVALUE 2.00e-06
cccatatttggtgtaaaactgggtggcaccacggttccaagaaatctttttccaggaactttcatgaatattccagctcgtgttaaagaaatccataaaggtaacaacgccaaagtcccttccatg

SEQ ID NO: 27601 - DNA, 126 bp, Homo sapiens
  MAP TO AC005017.1; EXPRESSED IN PLACENTA, SIGNAL = 0.9; EXPRESSED IN ADULT LIVER, SIGNAL = 1.2; EXPRESSED IN LUNG, SIGNAL = 1.1; EXPRESSED IN FETAL LIVER, SIGNAL = 1.2; EXPRESSED IN BRAIN, SIGNAL = 1.1; EXPRESSED IN BONE MARROW, SIGNAL = 1.9; SWISSPROT HIT: Q51933, EVALUE 4.10e+00; EST_HUMAN HIT: AA356973.1, EVALUE 1.60e+00; NT HIT: gi11419739, EVALUE 1.10e+00
gtagctttctctggctttttagattgttttccaggtccctcttgaggtgcttttcaggtttactagatatttcttctattgtcaccactgtgtcgaaggagcagatcatgaaccttggtcttcttc

SEQ ID NO: 27602 - DNA, 190 bp, Homo sapiens
  MAP TO AC003670.1; EXPRESSED IN PLACENTA, SIGNAL = 0.93; EXPRESSED IN BONE MARROW, SIGNAL =   1; EXPRESSED IN FETAL LIVER, SIGNAL = 0.75; EXPRESSED IN LUNG, SIGNAL = 0.76; EXPRESSED IN BRAIN, SIGNAL = 0.94; EXPRESSED IN ADULT LIVER, SIGNAL = 0.73; EST_HUMAN HIT: AA516212.1, EVALUE 7.00e-04; SWISSPROT HIT: P08323, EVALUE 1.70e+00; NT HIT: AF147081.1, EVALUE 1.10e-01
caggcattgtttaaaggccttgctgcagaacaccctggcctatgggggtcaaacatcagttatcatggtgcttttgcttcaagacagcatcactcttaccatgcaacagctgttttcctacatatacaaatgtgtacatgaagagagaaggaagcaaaaacacttaaaatatgagaaaaataagaacaag

SEQ ID NO: 27603 - DNA, 97 bp, Homo sapiens
  MAP TO AC005162.1; EXPRESSED IN PLACENTA, SIGNAL = 0.69; EXPRESSED IN LUNG, SIGNAL = 0.84; EXPRESSED IN FETAL LIVER, SIGNAL = 0.7; EXPRESSED IN BONE MARROW, SIGNAL = 0.72; EXPRESSED IN ADULT LIVER, SIGNAL = 0.7; EXPRESSED IN BRAIN, SIGNAL = 0.81; NT HIT: M34137.1, EVALUE 2.10e-01; EST_HUMAN HIT: AI061275.1, EVALUE 7.60e-02
caacatcatggttaacaacatcaccacattatttccaagacaaggcattacacacgaagtagaccactcttctgtgggaggtggagaatgggcattt

SEQ ID NO: 27604 - DNA, 318 bp, Homo sapiens
  MAP TO AC004526.1; EXPRESSED IN PLACENTA, SIGNAL = 0.66; EXPRESSED IN BONE MARROW, SIGNAL = 0.53; EXPRESSED IN LUNG, SIGNAL = 0.56; EXPRESSED IN BRAIN, SIGNAL = 0.85; EXPRESSED IN ADULT LIVER, SIGNAL = 0.49; EST_HUMAN HIT: AW752722.1, EVALUE 3.00e-69; NT HIT: M38107.1, EVALUE 0.00e+00; SWISSPROT HIT: Q04690, EVALUE 5.00e-56
aacttcagcagagcgaacaaaagtcctagggcaatcagtctttctaaatgacatttattatgcttcggaaattgaagaaatctgcctagtagatgagaaccagttcaccttaaccattgcaaaccagggcacgccgctcaccttcatgcaccaggagtgtgaagccattgtccagtctatcattcatatccggacccgctgggaactgtcacagcccgactctatcccccaacacaccaagattcggccaaaagatgtccctgggacactgctcaatatcgcattacttaatttaggcagttctgacccgagtttacg

SEQ ID NO: 27605 - DNA, 145 bp, Homo sapiens
  MAP TO AC003953.1; EXPRESSED IN LUNG, SIGNAL = 1.2; EXPRESSED IN FETAL LIVER, SIGNAL = 1.2; EXPRESSED IN BRAIN, SIGNAL = 1.3; EXPRESSED IN BONE MARROW, SIGNAL = 1.1; EXPRESSED IN PLACENTA, SIGNAL = 1.2; EXPRESSED IN ADULT LIVER, SIGNAL = 1.2; EST_HUMAN HIT: BE969695.1, EVALUE 1.90e+00; SWISSPROT HIT: P16821, EVALUE 6.90e+00
ttatcttacagcttattttttgacaatatacacttcttcagcttctcccaccccacctataagcttatctgcaacaatcccatcattacgtctttctttctttttgccaggatgtcattcttcttgtctacagttaaccctttag

SEQ ID NO: 27606 - DNA, 97 bp, Homo sapiens
  MAP TO AC002301.1; EXPRESSED IN PLACENTA, SIGNAL = 0.57; EXPRESSED IN BRAIN, SIGNAL = 0.66; EXPRESSED IN BONE MARROW, SIGNAL = 0.6; EXPRESSED IN ADULT LIVER, SIGNAL = 0.49; EXPRESSED IN LUNG, SIGNAL = 0.68; NT HIT: Z30584.1, EVALUE 4.00e-21; EST_HUMAN HIT: AI833168.1, EVALUE 9.00e-48
gaagtggtggtggaaagcgattctctcattctggcaaccagttggacggccccatcaccgccctccgggtccgagtcaacacatactacatcgtagg

SEQ ID NO: 27607 - DNA, 155 bp, Homo sapiens
  MAP TO AC004240.1; EXPRESSED IN PLACENTA, SIGNAL = 0.67; EXPRESSED IN LUNG, SIGNAL = 0.72; EXPRESSED IN FETAL LIVER, SIGNAL = 0.77; EXPRESSED IN BRAIN, SIGNAL = 0.94; EXPRESSED IN BONE MARROW, SIGNAL = 0.55; EXPRESSED IN ADULT LIVER, SIGNAL = 0.73; SWISSPROT HIT: Q61554, EVALUE 3.00e+00; EST_HUMAN HIT: Z20946.1, EVALUE 6.00e-44
ccagctgctaccagacacaccttaaaacctttggaagcagcaatgtgggcagcagtccagccttctctgttggcgtggttaatgaggtctgcaggaacaacaggcttggatatgccttcaggactctcttctcctccatccaagtcaaagacact

SEQ ID NO: 27608 - DNA, 487 bp, Homo sapiens
  MAP TO AC003080.1; EXPRESSED IN PLACENTA, SIGNAL = 0.62; EXPRESSED IN BONE MARROW, SIGNAL = 0.49; EXPRESSED IN ADULT LIVER, SIGNAL = 0.51; EXPRESSED IN LUNG, SIGNAL = 0.49; EXPRESSED IN BRAIN, SIGNAL = 0.59; EST_HUMAN HIT: AA167678.1, EVALUE 5.00e-84; NT HIT: AJ277546.2, EVALUE 6.00e-61; SWISSPROT HIT: P11260, EVALUE 2.00e-19
gaatgcatcagagtctcttaatagcagaattgataaagcagaagaaagaattgggaagcttgaagacaggctatttgaaaatacacagtcagaggagacaaaagaaaaaagaatagaaaacaatgacgcacttctacaatatctagaaaatagcttcaaaagtgcaaatctaagagttattggtcttaaagaggaggtagagaaagagatagtgctagaaagtttctttgaagggataataacagagaaattcccaaacctagagaaagatatcagcattcaagtacaagaaggttacagaacaccaagcagatttaacccaaagaagactacctcaaagcatttaataatcaaactccgaaaggtcaaggatgaagaaaggatcctaaaagcagcaaaagaaaagaaacaagtaacacaatggagctccaatacatctggcagcagactattcggtggaaatcttacaggcaaagagagtgtggca

SEQ ID NO: 27609 - DNA, 173 bp, Homo sapiens
  MAP TO AC005057.1; EXPRESSED IN ADULT LIVER, SIGNAL = 1.3; EXPRESSED IN PLACENTA, SIGNAL = 1.8; EXPRESSED IN LUNG, SIGNAL = 1.6; EXPRESSED IN BRAIN, SIGNAL =   1; EXPRESSED IN FETAL LIVER, SIGNAL = 1.5; EXPRESSED IN BONE MARROW, SIGNAL = 1.2; SWISSPROT HIT: Q15056, EVALUE 1.00e-13; EST_HUMAN HIT: BE840117.1, EVALUE 4.00e-48; NT HIT: AF045555.1, EVALUE 5.00e-93
tggtaggcatactgcaaatctttatgatgttcagctttagaagaaccaatcacctctgtcatctggtccaccttttctgaatccaaagccacctttatcttgttttctgccttctgcaatgtccacacgaagtgaccgatcgcccaacagctaatgataaagggaaaatagtg

SEQ ID NO: 27610 - DNA, 236 bp, Homo sapiens
  MAP TO AC005166.1; EXPRESSED IN LUNG, SIGNAL = 0.92; EXPRESSED IN BRAIN, SIGNAL = 0.97; EXPRESSED IN BONE MARROW, SIGNAL = 0.89; EXPRESSED IN PLACENTA, SIGNAL = 0.86; EXPRESSED IN FETAL LIVER, SIGNAL = 0.87; EXPRESSED IN ADULT LIVER, SIGNAL = 0.94; SWISSPROT HIT: Q62241, EVALUE 4.40e+00; NT HIT: Z48051.1, EVALUE 5.60e-01; EST_HUMAN HIT: BF035752.1, EVALUE 8.00e-72
gaagttatatcattttcacctgcatcgatgctccttctactcttgccacacaggcgacccgatccaagaaagtcactgccacaggcaccgccacaaagaagcctttacaaaaggccttgatgtatcttttcacccacccttgtgactgtgccatacctaaaaatacaaagaaaacaactatgaaattagtctcaagaaaggtgaaaaacaaagacataaaaacagtacatgaaaag

SEQ ID NO: 27611 - DNA, 111 bp, Homo sapiens
  MAP TO AC006534.2; EXPRESSED IN PLACENTA, SIGNAL = 1.6; EXPRESSED IN LUNG, SIGNAL = 1.7; EXPRESSED IN BRAIN, SIGNAL = 1.4; EXPRESSED IN BONE MARROW, SIGNAL = 1.6; EXPRESSED IN FETAL LIVER, SIGNAL = 1.4; EXPRESSED IN ADULT LIVER, SIGNAL = 1.7; NT HIT: gi4507070, EVALUE 6.10e-02; SWISSPROT HIT: Q10813, EVALUE 2.10e-01
tggctgccaaggagttcttggtccaggaaggctatgacccagggacctggagacttagtcacccaacttaaggggaaagttcaaaatcaaattctgtctgaaaaacattta

SEQ ID NO: 27612 - DNA, 80 bp, Homo sapiens
  MAP TO AC003084.1; EXPRESSED IN LUNG, SIGNAL = 1.3; EXPRESSED IN FETAL LIVER, SIGNAL = 0.99; EXPRESSED IN BRAIN, SIGNAL = 1.4; EXPRESSED IN BONE MARROW, SIGNAL =   1; EXPRESSED IN PLACENTA, SIGNAL = 1.3; EXPRESSED IN ADULT LIVER, SIGNAL = 1.2; NT HIT: AF257303.1, EVALUE 1.00e-02; EST_HUMAN HIT: BE513270.1, EVALUE 2.40e-01
atgccctcattttacacagagagacactgaggaaggaggactttggtacctctgagccaggcagtggcgaagaaatttag

SEQ ID NO: 27613 - DNA, 92 bp, Homo sapiens
  MAP TO AC004457.1; EXPRESSED IN PLACENTA, SIGNAL = 0.72; EXPRESSED IN BRAIN, SIGNAL = 0.72; EXPRESSED IN BONE MARROW, SIGNAL = 0.58; EXPRESSED IN ADULT LIVER, SIGNAL = 0.65; EXPRESSED IN LUNG, SIGNAL = 0.69; EST_HUMAN HIT: AA806461.1, EVALUE 1.80e-02; NT HIT: AF045555.1, EVALUE 1.20e-02
ttgtctttgacactaactagcttcttgacatcagcatcagttttctcatcagtaaaaggagtagttaaatggtagttaagattcataaaatt

SEQ ID NO: 27614 - DNA, 123 bp, Homo sapiens
  MAP TO AC005686.1; EXPRESSED IN PLACENTA, SIGNAL = 0.77; EXPRESSED IN ADULT LIVER, SIGNAL = 0.7; EXPRESSED IN LUNG, SIGNAL = 0.76; EXPRESSED IN FETAL LIVER, SIGNAL = 0.82; EXPRESSED IN BRAIN, SIGNAL = 0.68; EXPRESSED IN BONE MARROW, SIGNAL = 0.71; EST_HUMAN HIT: AI863650.1, EVALUE 6.30e+00; NT HIT: AF059679.1, EVALUE 4.30e+00
tttcttttctcttcctcctcctcctcctcctcctcctccttgtcctcctcccctaccttcttttccttcttctcctttctctctagtaaaatggagatagtcgtagcatccttacctgtggag

SEQ ID NO: 27615 - DNA, 153 bp, Homo sapiens
  MAP TO AC005094.1; EXPRESSED IN BONE MARROW, SIGNAL = 0.93; EXPRESSED IN PLACENTA, SIGNAL = 0.62; EXPRESSED IN LUNG, SIGNAL = 1.1; EXPRESSED IN FETAL LIVER, SIGNAL = 0.87; EXPRESSED IN BRAIN, SIGNAL = 0.83; EXPRESSED IN ADULT LIVER, SIGNAL = 0.77; SWISSPROT HIT: P17631, EVALUE 3.00e+00; EST_HUMAN HIT: AI539448.1, EVALUE 2.00e-06; NT HIT: AJ277661.1, EVALUE 1.40e+00
atgtgaaggcagctgaagaatttttggaaactctggatgtgctgattgtggaggaaaattacttgccagagcaaatcgatagggatgaaaccttcctattctgcaaatggatgcctgagaggactttcatccataaggaagccaagttaacgc

SEQ ID NO: 27616 - DNA, 193 bp, Homo sapiens
  MAP TO AC004534.1; EXPRESSED IN PLACENTA, SIGNAL = 1.3; EXPRESSED IN LUNG, SIGNAL = 1.3; EXPRESSED IN FETAL LIVER, SIGNAL = 1.1; EXPRESSED IN BRAIN, SIGNAL = 0.9; EXPRESSED IN ADULT LIVER, SIGNAL = 1.4; EXPRESSED IN BONE MARROW, SIGNAL = 1.2; NT HIT: U65067.1, EVALUE 5.00e-07; EST_HUMAN HIT: AA513906.1, EVALUE 1.70e-01; SWISSPROT HIT: P24152, EVALUE 5.10e-02
ctgctgtcactgccagcaacatccatcagcagtggcatcagttggggggtgtggacagggccaagggggaaaggaagatcggcccttcgcacaggtggggggctgaagagtgggggggtcaccaccctctgagcaccctcactgggttgggtgggggccaaagtctggtcagaagtcagcagcatggggggct

SEQ ID NO: 27617 - DNA, 87 bp, Homo sapiens
  MAP TO AC005234.1; EXPRESSED IN BONE MARROW, SIGNAL = 1.2; EXPRESSED IN PLACENTA, SIGNAL = 0.89; EXPRESSED IN LUNG, SIGNAL = 1.3; EXPRESSED IN FETAL LIVER, SIGNAL = 1.1; EXPRESSED IN BRAIN, SIGNAL = 1.2; EXPRESSED IN ADULT LIVER, SIGNAL = 1.1; EST_HUMAN HIT: BE710994.1, EVALUE 1.10e+00; NT HIT: gi6678428, EVALUE 1.80e-01; SWISSPROT HIT: Q56307, EVALUE 4.30e+00
ccaaccaagcccacagtgacagggaaacaggagcccaggatcatggatctctttctcatacggaagaacaaggatgatggtctcacc

SEQ ID NO: 27618 - DNA, 94 bp, Homo sapiens
  MAP TO AC004025.1; EXPRESSED IN PLACENTA, SIGNAL = 0.64; EXPRESSED IN LUNG, SIGNAL = 0.79; EXPRESSED IN BRAIN, SIGNAL = 0.95; EXPRESSED IN BONE MARROW, SIGNAL = 0.77; EXPRESSED IN ADULT LIVER, SIGNAL = 0.73; EXPRESSED IN FETAL LIVER, SIGNAL = 0.74; EST_HUMAN HIT: AW368636.1, EVALUE 1.10e+00; NT HIT: AF096264.1, EVALUE 5.00e-02
gcaacagccttgcatttcagtctggtaattaaggaggatgagcaggatcatgctttgggcaaagcaatacaagggaatgaagcaggaatgcaaa

SEQ ID NO: 27619 - DNA, 517 bp, Homo sapiens
  MAP TO AC004531.1; EXPRESSED IN PLACENTA, SIGNAL = 1.6; EXPRESSED IN LUNG, SIGNAL = 1.7; EXPRESSED IN FETAL LIVER, SIGNAL = 1.5; EXPRESSED IN BRAIN, SIGNAL = 1.3; EXPRESSED IN BONE MARROW, SIGNAL = 1.7; EXPRESSED IN ADULT LIVER, SIGNAL = 1.4; EXPRESSED IN HELA, SIGNAL = 1.7; NT HIT: U14510.1, EVALUE 0.00e+00; SWISSPROT HIT: Q12968, EVALUE 7.00e-90; EST_HUMAN HIT: BE379007.1, EVALUE 0.00e+00
gagaagctgctggggaagctgttgtagcagaccctgaatgtgaaggaccatatgtaataggttgtaactgagacgaaggctgacctgtaatctggtcagccactggagaagaaagagatctttgtcctgtatttgaacaatgatatcccattgattgcagatgaggcagggtatgcacagaatgaggtgtatgggctaagagatgtcctgttgagcctgaatttgaagaatgaaatggtatggatgacagtggttgacagccaagattcactaaaccagaaagagttgcatcctgctgaaacaaaactgaatcaaattcttgactagaggcagcattaataggaagacaagttggtccattgtacacaacattagtttgcataggctgataggaagaccccacaggaggtgttggtgtgacttgaaaaggctggtgtacaattggagaaggaatcatatgctgttctttactaacactctcatctctacactgcaactgtggcagatgggatgaggt

SEQ ID NO: 27620 - DNA, 240 bp, Homo sapiens
  MAP TO AC004968.1; EXPRESSED IN PLACENTA, SIGNAL = 0.97; EXPRESSED IN LUNG, SIGNAL = 0.84; EXPRESSED IN FETAL LIVER, SIGNAL = 0.85; EXPRESSED IN BRAIN, SIGNAL = 0.89; EXPRESSED IN BONE MARROW, SIGNAL = 0.86; EXPRESSED IN ADULT LIVER, SIGNAL = 0.92; SWISSPROT HIT: P75357, EVALUE 2.10e+00; EST_HUMAN HIT: AA308064.1, EVALUE 3.40e+00
gtgagccagggaattaaaactcacacatcttatgggaaaatctacactactcaacagggtacactcaccatggcttctgtaataacagtctacatgcactaccaggtgaataaaagtctttacagcaaagctgaattcaactttttagttctaccacttactacaaataaatctatgacaatcgctactcatcccatgaaaatcagcaacatgaaaaggagtactgaactcaagaatacc

SEQ ID NO: 27621 - DNA, 85 bp, Homo sapiens
  MAP TO AC004541.1; EXPRESSED IN FETAL LIVER, SIGNAL = 1.2; EXPRESSED IN BONE MARROW, SIGNAL =   1; EXPRESSED IN ADULT LIVER, SIGNAL = 1.3; EXPRESSED IN PLACENTA, SIGNAL = 1.2; EXPRESSED IN LUNG, SIGNAL = 1.1; EXPRESSED IN BRAIN, SIGNAL =   1; EST_HUMAN HIT: AW877806.1, EVALUE 2.00e-11; NT HIT: AL163227.2, EVALUE 2.00e-07
gctgtagagggttctgcttctgtggaagcctcggaaaacttacaatcacggcagaaggcgaagaggaatcaagcacctcttcatg

SEQ ID NO: 27622 - DNA, 80 bp, Homo sapiens
  MAP TO AC002533.1; EXPRESSED IN LUNG, SIGNAL = 1.2; EXPRESSED IN FETAL LIVER, SIGNAL = 0.8; EXPRESSED IN BRAIN, SIGNAL = 0.67; EXPRESSED IN BONE MARROW, SIGNAL = 0.84; EXPRESSED IN PLACENTA, SIGNAL = 0.94; EXPRESSED IN ADULT LIVER, SIGNAL = 1.1; EST_HUMAN HIT: AV733787.1, EVALUE 2.40e-01
gataatttccataatagaggaaatagatcatctgagactaactatattagacaatgttggtacaacagatccaagatgag

SEQ ID NO: 27623 - DNA, 163 bp, Homo sapiens
  MAP TO AC006211.1; EXPRESSED IN ADULT LIVER, SIGNAL = 1.3; EXPRESSED IN PLACENTA, SIGNAL = 1.4; EXPRESSED IN LUNG, SIGNAL = 0.92; EXPRESSED IN BRAIN, SIGNAL = 1.1; EXPRESSED IN FETAL LIVER, SIGNAL = 1.4; EXPRESSED IN BONE MARROW, SIGNAL = 1.3; NT HIT: gi7661999, EVALUE 6.00e-40; EST_HUMAN HIT: BE883736.1, EVALUE 9.00e-40
cattctctctagtctccatgggcacctcctccccggagccctcctctggctctgccacctccactgccatctccgctgccgccgcctcctcttcctcctcctcctcctggtctctcaccttgtggacaatgaagaggtggcggctgagggagctggcagaggt

SEQ ID NO: 27624 - DNA, 82 bp, Homo sapiens
  MAP TO AC004417.1; EXPRESSED IN LUNG, SIGNAL = 0.95; EXPRESSED IN BRAIN, SIGNAL =   1; EXPRESSED IN BONE MARROW, SIGNAL =   1; EXPRESSED IN ADULT LIVER, SIGNAL = 0.84; EXPRESSED IN PLACENTA, SIGNAL = 0.89; EXPRESSED IN FETAL LIVER, SIGNAL =   1; NT HIT: U66480.1, EVALUE 1.10e-02
ggtacatttctctttctttttgttctatgctattttgggtggagtttctgtttcctatagccagaagagcccgaatggagtc

SEQ ID NO: 27625 - DNA, 210 bp, Homo sapiens
  MAP TO AC005186.1; EXPRESSED IN BRAIN, SIGNAL = 0.57; EXPRESSED IN LUNG, SIGNAL = 0.54; EXPRESSED IN BONE MARROW, SIGNAL = 0.65; EXPRESSED IN ADULT LIVER, SIGNAL = 0.62; EXPRESSED IN PLACENTA, SIGNAL = 0.75; EST_HUMAN HIT: AA994712.1, EVALUE 3.00e-09; SWISSPROT HIT: Q61476, EVALUE 1.70e+00; NT HIT: AL163249.2, EVALUE 2.00e-09
aagacaagttttaaatgcactgagaaaccaaatacatttgtgtaacttgctttattgcaatattcagttgattgtggtggtctggaaccaagcccacaatatctccaaggtatgcctgtgcaaggtctacaccaacaactcacacagcaaagtcatgaaatccactctgtaggccagattaaggtttccctgtcacatgattgtgcccaa

SEQ ID NO: 27626 - DNA, 175 bp, Homo sapiens
  MAP TO AC005923.2; EXPRESSED IN PLACENTA, SIGNAL = 1.1; EXPRESSED IN LUNG, SIGNAL = 1.1; EXPRESSED IN FETAL LIVER, SIGNAL = 1.1; EXPRESSED IN BRAIN, SIGNAL = 1.3; EXPRESSED IN BONE MARROW, SIGNAL = 0.99; EXPRESSED IN ADULT LIVER, SIGNAL = 1.2; NT HIT: AB011536.1, EVALUE 3.00e-94; EST_HUMAN HIT: AU116945.1, EVALUE 9.40e+00; SWISSPROT HIT: Q16983, EVALUE 4.00e-10
ctggtgtgcactgcagtcgccatcctcctgcactacttcttcctcagcaccttcgcgtggctcttcgtgcaggggctgcacctctaccgcatgcaggttgagccacgcaacgtggaccgcggcgccatgcgcttctaccatgccctgggctggggcgtccctgctgtgctgctgg

SEQ ID NO: 27627 - DNA, 115 bp, Homo sapiens
  MAP TO AC005736.1; EXPRESSED IN PLACENTA, SIGNAL = 0.83; EXPRESSED IN LUNG, SIGNAL = 0.79; EXPRESSED IN FETAL LIVER, SIGNAL = 0.88; EXPRESSED IN BRAIN, SIGNAL = 0.8; EXPRESSED IN BONE MARROW, SIGNAL = 0.83; EXPRESSED IN ADULT LIVER, SIGNAL = 0.89; NT HIT: AF111102.1, EVALUE 3.90e+00; SWISSPROT HIT: Q15531, EVALUE 7.10e+00; EST_HUMAN HIT: R92567.1, EVALUE 2.00e-58
aactttcagaactaccatgcaaataagaaatttcaaaggacttttctctaacacacatttcatagtgaacgtctcagctggattaacataattaacgctgtgttctttctggctc

SEQ ID NO: 27628 - DNA, 207 bp, Homo sapiens
  MAP TO AC005045.2; EXPRESSED IN BRAIN, SIGNAL = 0.68; EXPRESSED IN ADULT LIVER, SIGNAL = 2.4; EXPRESSED IN PLACENTA, SIGNAL = 0.8; EXPRESSED IN LUNG, SIGNAL = 0.61; EXPRESSED IN FETAL LIVER, SIGNAL = 0.88; EXPRESSED IN BONE MARROW, SIGNAL = 0.62; EST_HUMAN HIT: BF671299.1, EVALUE 1.00e-98; NT HIT: gi9961249, EVALUE 1.00e-113; SWISSPROT HIT: P21439, EVALUE 2.00e-33
ggggtaacgtctcgatgaaaggatgtatgttggcagctttggctgcactcacaatttcatcctgtgatacaacccggctgttgtctccataggcaatattctcggcaatgctgcagtcaaataggataggctcctgagacacgattccgagttgagctctgagccactggacattgagtttctttgcttcttgaccatcgagaagct

SEQ ID NO: 27629 - DNA, 115 bp, Homo sapiens
  MAP TO AC004585.1; EXPRESSED IN PLACENTA, SIGNAL = 0.79; EXPRESSED IN LUNG, SIGNAL = 0.78; EXPRESSED IN FETAL LIVER, SIGNAL = 0.73; EXPRESSED IN BONE MARROW, SIGNAL = 0.68; EXPRESSED IN ADULT LIVER, SIGNAL = 0.68; EXPRESSED IN BRAIN, SIGNAL = 0.61; EST_HUMAN HIT: AI149272.1, EVALUE 2.00e-05; NT HIT: AL163300.2, EVALUE 1.60e-02; SWISSPROT HIT: P08547, EVALUE 3.20e-02
atatgtattctgctgttgttgggtggtgttttatagatagacgttaggtctagttggttcatagcattgttcaaatcttctgttttcttgttgatcaactgcttagttgttgtat

SEQ ID NO: 27630 - DNA, 113 bp, Homo sapiens
  MAP TO AC004382.1; EXPRESSED IN PLACENTA, SIGNAL = 6.3; EXPRESSED IN LUNG, SIGNAL = 0.79; EXPRESSED IN FETAL LIVER, SIGNAL = 0.73; EXPRESSED IN BRAIN, SIGNAL = 0.66; EXPRESSED IN BONE MARROW, SIGNAL = 0.7; EXPRESSED IN ADULT LIVER, SIGNAL = 0.73; EST_HUMAN HIT: BE960680.1, EVALUE 3.60e-01; SWISSPROT HIT: O00626, EVALUE 4.00e-18; NT HIT: gi11431281, EVALUE 2.00e-57
gccaacatggaagacagcgtctgctgccgtgattacgtccgttaccgtctgcccctgcgcgtggtgaaacacttctactggacctcagactcctgcccgaggcctggcgtggt

SEQ ID NO: 27631 - DNA, 211 bp, Homo sapiens
  MAP TO AC004390.1; EXPRESSED IN FETAL LIVER, SIGNAL = 0.78; EXPRESSED IN BONE MARROW, SIGNAL = 0.74; EXPRESSED IN PLACENTA, SIGNAL = 0.82; EXPRESSED IN LUNG, SIGNAL = 0.92; EXPRESSED IN BRAIN, SIGNAL = 0.93; EXPRESSED IN ADULT LIVER, SIGNAL = 0.79; SWISSPROT HIT: Q10233, EVALUE 2.90e+00; NT HIT: AJ296176.1, EVALUE 5.00e-04; EST_HUMAN HIT: AU159412.1, EVALUE 3.00e-06
cagccccatgacctgggcaagtcacttcacctctctgagtctgagcctcagtctccccgtttgtgacacgaggccgatcctcactgggctgttgggataattcagccctttggaacccggtacgcaaatgccaggtattattaacaccatggaaggggctttgccaactgcctggtccaacctgcttattttccagatgaagagaacgagg

SEQ ID NO: 27632 - DNA, 165 bp, Homo sapiens
  MAP TO AC004039.1; EXPRESSED IN PLACENTA, SIGNAL = 0.72; EXPRESSED IN LUNG, SIGNAL = 0.67; EXPRESSED IN BONE MARROW, SIGNAL = 0.95; EXPRESSED IN FETAL LIVER, SIGNAL = 1.3; EXPRESSED IN BRAIN, SIGNAL = 0.61; EXPRESSED IN ADULT LIVER, SIGNAL = 0.86; NT HIT: gi11417370, EVALUE 3.00e-88; SWISSPROT HIT: P35225, EVALUE 2.00e-13
aatctgcaacttcaatagtcaggtcctgtctctgcaaataatgatgctttcgaagtttcagttgaactgtccctcgcgaaaaagtttctttaaatgtaagagcaggtcctttacaaactgggccacctcgattttggtgtctcggacatgcaagctggaaaactg

SEQ ID NO: 27633 - DNA, 292 bp, Homo sapiens
  MAP TO AC005803.1; EXPRESSED IN PLACENTA, SIGNAL = 0.9; EXPRESSED IN LUNG, SIGNAL = 0.85; EXPRESSED IN FETAL LIVER, SIGNAL = 1.1; EXPRESSED IN BONE MARROW, SIGNAL = 0.89; EXPRESSED IN ADULT LIVER, SIGNAL = 1.1; EXPRESSED IN BRAIN, SIGNAL = 0.94; NT HIT: gi4557568, EVALUE 1.00e-100; EST_HUMAN HIT: AA664125.1, EVALUE 1.00e-03; SWISSPROT HIT: P19691, EVALUE 3.90e+00
ctccatcgtcttgttccagggaggggctgctgccagccttggaggcagagctgccggagcagagcgagtggttggaggccctgggggacgtgctggggctgctggtgcccgagctctctgagtacgggccagacgtgtccaggagctcgccgtcctgagccgtgtctccaggtgggtggaagggcagctgctgctgctgctgctgcaggagctggatcttctccagttccttctggaactgctggtgctggagctgctgctgctgatgcatgctctgggaagagaaacccac

SEQ ID NO: 27634 - DNA, 99 bp, Homo sapiens
  MAP TO AC006221.1; EXPRESSED IN LUNG, SIGNAL =   1; EXPRESSED IN FETAL LIVER, SIGNAL = 1.4; EXPRESSED IN BRAIN, SIGNAL = 1.1; EXPRESSED IN BONE MARROW, SIGNAL = 1.2; EXPRESSED IN PLACENTA, SIGNAL = 1.2; EXPRESSED IN ADULT LIVER, SIGNAL = 1.4; SWISSPROT HIT: P55552, EVALUE 7.20e+00; NT HIT: U80017.1, EVALUE 1.30e-02; EST_HUMAN HIT: AI571315.1, EVALUE 2.00e-02
ctgaatgggaagcactcagcaccaacaccagtcctagcacacttctgaaaatgtgttccattgactctactgggctatcaggaataaatgaaatagttg

SEQ ID NO: 27635 - DNA, 140 bp, Homo sapiens
  MAP TO AC004984.1; EXPRESSED IN LUNG, SIGNAL = 0.87; EXPRESSED IN FETAL LIVER, SIGNAL =   1; EXPRESSED IN BRAIN, SIGNAL = 0.77; EXPRESSED IN BONE MARROW, SIGNAL =   1; EXPRESSED IN ADULT LIVER, SIGNAL =   1; EXPRESSED IN PLACENTA, SIGNAL = 0.91; NT HIT: X60459.1, EVALUE 2.00e-18; EST_HUMAN HIT: W72151.1, EVALUE 8.00e-09; SWISSPROT HIT: P75857, EVALUE 1.80e+00
gaggatgattctgggaagatggcagaggagagagaaccaggagtctgtattctcacctggacaacaattgcactggcagaatctgtccagtataactattttggaactctggaggctacttaaggcttccaacttccaga

SEQ ID NO: 27636 - DNA, 107 bp, Homo sapiens
  MAP TO AC004106.1; EXPRESSED IN ADULT LIVER, SIGNAL = 1.4; EXPRESSED IN PLACENTA, SIGNAL = 1.5; EXPRESSED IN LUNG, SIGNAL = 1.5; EXPRESSED IN BRAIN, SIGNAL = 1.3; EXPRESSED IN FETAL LIVER, SIGNAL = 1.4; EXPRESSED IN BONE MARROW, SIGNAL = 1.7; EST_HUMAN HIT: T85172.1, EVALUE 1.30e+00; NT HIT: L36033.1, EVALUE 9.10e-01
atactattgccgtcagcttgcaccttgcagctaattctgttgctttcttgtttttggttgaaattcttggagtaggctgttatgacaaaagtgaacattttaatgtt

SEQ ID NO: 27637 - DNA, 96 bp, Homo sapiens
  MAP TO AC005152.1; EXPRESSED IN LUNG, SIGNAL = 1.1; EXPRESSED IN FETAL LIVER, SIGNAL = 0.97; EXPRESSED IN PLACENTA, SIGNAL = 0.97; EXPRESSED IN BRAIN, SIGNAL = 0.99; EXPRESSED IN BONE MARROW, SIGNAL = 0.84; EXPRESSED IN ADULT LIVER, SIGNAL = 0.79; EST_HUMAN HIT: AW846877.1, EVALUE 1.00e-03; NT HIT: AF260225.1, EVALUE 5.00e-05
ggaatacaattagaaggtgtcctctatgaggaagagggccctcaccaggcaccaaacctgcctgagccttgatcttaaacttcacgtccactagaa

SEQ ID NO: 27638 - DNA, 250 bp, Homo sapiens
  MAP TO AC004549.1; EXPRESSED IN ADULT LIVER, SIGNAL = 0.65; EXPRESSED IN PLACENTA, SIGNAL = 0.8; EXPRESSED IN LUNG, SIGNAL = 0.92; EXPRESSED IN BRAIN, SIGNAL = 0.91; EXPRESSED IN FETAL LIVER, SIGNAL = 0.88; EXPRESSED IN BONE MARROW, SIGNAL = 0.67; EST_HUMAN HIT: AV711263.1, EVALUE 1.00e-124; NT HIT: gi11421737, EVALUE 1.00e-124; SWISSPROT HIT: P13538, EVALUE 1.80e-01
gaagatacttgttttttaaaggagcaacttcgtaaagcagaggaacaggttcaggcaactcggcaagaagttgtctttctggctaaagaactcagtgatgctgtcaacgtacgagacagaacgatggcagacctgcatactgcacgcttggaaaacgagaaagtgaaaaagcagttagctgatgcagtggcagaacttaaactaaatgctatgaaaaaagatcaggtaaaacaagttaattttgaatttg

SEQ ID NO: 27639 - DNA, 136 bp, Homo sapiens
  MAP TO AC005738.1; EXPRESSED IN PLACENTA, SIGNAL = 0.98; EXPRESSED IN LUNG, SIGNAL = 0.95; EXPRESSED IN FETAL LIVER, SIGNAL = 1.1; EXPRESSED IN BRAIN, SIGNAL =   1; EXPRESSED IN ADULT LIVER, SIGNAL = 1.6; EXPRESSED IN BONE MARROW, SIGNAL = 1.2; EST_HUMAN HIT: AW195446.1, EVALUE 9.00e-58; SWISSPROT HIT: O95715, EVALUE 1.00e-17; NT HIT: AF106911.1, EVALUE 6.00e-58
ctgcgcttctcgttccaggcgttgtaccacttgatgaagcgcttggtgctctgcagcttggggtgcaggcagtgctcctgacctcggtacctggacacgctcttggtggtgatgctgaaacggagcaggatgaggt

SEQ ID NO: 27640 - DNA, 321 bp, Homo sapiens
  MAP TO AC006375.2; EXPRESSED IN PLACENTA, SIGNAL = 0.74; EXPRESSED IN LUNG, SIGNAL = 0.84; EXPRESSED IN BRAIN, SIGNAL = 0.73; EXPRESSED IN ADULT LIVER, SIGNAL = 0.61; EXPRESSED IN FETAL LIVER, SIGNAL = 0.71; EXPRESSED IN BONE MARROW, SIGNAL = 0.79; NT HIT: M75967.1, EVALUE 2.00e-01
gctcagccttgctcctccctcttcaccctgtccagtgctcattctcctaacctccttgttccagtggagtcaggagagaaagtggatatggctccaggggtagctgaagcctccatctattgttttagtgttgatctttaaatatatgttcaaatacacactccttatgctactgctagtgtacctagcgcggaaggatattatacatgtggttttaatgtaaacttcttcaccgcaggtccaaacttacaacttcgaattctatactgtggtctttccaccaacagccgtggtggctttggcaaagctctttatcctttg

SEQ ID NO: 27641 - DNA, 144 bp, Homo sapiens
  MAP TO AC004129.1; EXPRESSED IN LUNG, SIGNAL = 1.1; EXPRESSED IN BRAIN, SIGNAL = 0.88; EXPRESSED IN BONE MARROW, SIGNAL =   1; EXPRESSED IN PLACENTA, SIGNAL = 1.1; EXPRESSED IN FETAL LIVER, SIGNAL =   1; EXPRESSED IN ADULT LIVER, SIGNAL = 0.99; NT HIT: AB028986.1, EVALUE 1.00e-13; EST_HUMAN HIT: BE562352.1, EVALUE 2.00e-15; SWISSPROT HIT: Q62414, EVALUE 2.70e-01
ctccgagctgggttcctgtcctgatcacagtccctctggacacagaacaggccaacacccccgcctacctggaggccatgaaaggggtcatgtccagctccagggcaaggaacatgtacgtggtgattgtccgctgcagcttgg

SEQ ID NO: 27642 - DNA, 123 bp, Homo sapiens
  MAP TO AC004492.1; EXPRESSED IN PLACENTA, SIGNAL = 1.1; EXPRESSED IN LUNG, SIGNAL = 0.78; EXPRESSED IN FETAL LIVER, SIGNAL =   1; EXPRESSED IN BONE MARROW, SIGNAL = 0.83; EXPRESSED IN ADULT LIVER, SIGNAL = 0.91; EXPRESSED IN BRAIN, SIGNAL = 0.84; EST_HUMAN HIT: AV707068.1, EVALUE 3.00e-63; SWISSPROT HIT: P31322, EVALUE 3.00e-17; NT HIT: gi11421940, EVALUE 2.00e-63
aagagaatggtgcagtagaaatcgctcgatgctcgcggggacagtactttggagagcttgccctggtaactaacaaacctcgagcagcttctgcccacgccattgggactgtcaaatgtttag

SEQ ID NO: 27643 - DNA, 92 bp, Homo sapiens
  MAP TO AC004112.1; EXPRESSED IN LUNG, SIGNAL = 0.76; EXPRESSED IN FETAL LIVER, SIGNAL = 1.8; EXPRESSED IN BRAIN, SIGNAL =   1; EXPRESSED IN BONE MARROW, SIGNAL = 1.1; EXPRESSED IN PLACENTA, SIGNAL = 0.87; EXPRESSED IN ADULT LIVER, SIGNAL = 1.2; NT HIT: gi11496268, EVALUE 5.00e-45; SWISSPROT HIT: P47043, EVALUE 9.50e+00; EST_HUMAN HIT: W81660.1, EVALUE 8.00e-45
ctgtttccaaggaattcttcattgcaaaacatacaaacgccatgaaaattggtatcatttcgttcttgctgctgttgttccagaatttctct

SEQ ID NO: 27644 - DNA, 225 bp, Homo sapiens
  MAP TO AC002523.1; EXPRESSED IN LUNG, SIGNAL =   1; EXPRESSED IN FETAL LIVER, SIGNAL = 1.5; EXPRESSED IN ADULT LIVER, SIGNAL = 1.5; EXPRESSED IN PLACENTA, SIGNAL = 0.93; EXPRESSED IN BRAIN, SIGNAL = 0.83; EXPRESSED IN BONE MARROW, SIGNAL = 0.8; EST_HUMAN HIT: AI041760.1, EVALUE 3.20e+00; SWISSPROT HIT: P27658, EVALUE 7.60e-01; NT HIT: AB025017.1, EVALUE 5.40e-01
aatggtttctgacatctctcacatcccagagagccccaacgtcctgatgggtgaggtgcagattgactccttttcttttgactatagctgcagctgccctaagatgacgtaaggtttcctggccagggggcttgccaaggacaacttccttttctggtccctgctttccaagcactcctggaagacctaagccctgctccccacgtagcatcagactcttgatgg

SEQ ID NO: 27645 - DNA, 282 bp, Homo sapiens
  MAP TO AC005065.1; EXPRESSED IN PLACENTA, SIGNAL = 1.5; EXPRESSED IN LUNG, SIGNAL = 0.93; EXPRESSED IN FETAL LIVER, SIGNAL = 0.89; EXPRESSED IN ADULT LIVER, SIGNAL = 0.8; EXPRESSED IN BRAIN, SIGNAL = 0.85; EXPRESSED IN BONE MARROW, SIGNAL = 0.95; NT HIT: AF067804.1, EVALUE 5.00e-51; EST_HUMAN HIT: BE160025.1, EVALUE 3.00e-53
tgtgcatgcctcaaagaaaacccagagtgccctgttctaaaacgtagttctgaatccatggaaaatatcaatagtggttatgagaccagacggaaaaaaggaaaaaaagacaaagatatttcaaaagaaaaagatacacaaaatcagaatattactttggattgtgaaggaacgaccaacaaaatgaagagcccagaaactaaacaaagaaagctttctccactgagactatcagtatcaaataatcaggtactgaactctgctctcaatgaaattgaataa

SEQ ID NO: 27646 - DNA, 161 bp, Homo sapiens
  MAP TO AC004408.1; EXPRESSED IN LUNG, SIGNAL = 1.2; EXPRESSED IN FETAL LIVER, SIGNAL =   1; EXPRESSED IN BRAIN, SIGNAL =   1; EXPRESSED IN BONE MARROW, SIGNAL = 0.85; EXPRESSED IN ADULT LIVER, SIGNAL = 0.96; EXPRESSED IN PLACENTA, SIGNAL = 0.97; NT HIT: gi9966886, EVALUE 7.00e-86; SWISSPROT HIT: P26550, EVALUE 1.80e+00; EST_HUMAN HIT: AW028265.1, EVALUE 1.00e-85
atctggcagcgtgtccatggccagggtgcccccacccaggtcctggctcagctgggtcctgtccggctctgacacatgcccagggctctctcgggctctccggttccagccccgcacggtccctttggcagcccatccagagcctgggccctcatcgtgac

SEQ ID NO: 27647 - DNA, 174 bp, Homo sapiens
  MAP TO AC005274.1; EXPRESSED IN LUNG, SIGNAL = 1.1; EXPRESSED IN FETAL LIVER, SIGNAL =   1; EXPRESSED IN BRAIN, SIGNAL = 1.4; EXPRESSED IN BONE MARROW, SIGNAL = 0.91; EXPRESSED IN ADULT LIVER, SIGNAL = 0.9; EXPRESSED IN PLACENTA, SIGNAL = 4.8; NT HIT: gi7662241, EVALUE 1.00e-93; SWISSPROT HIT: P50535, EVALUE 8.80e+00; EST_HUMAN HIT: BE779713.1, EVALUE 6.00e-01
ttttgtaaaactccagcatcatattatccgtggcgacgctgaggggccggcgggcctgctcgggctggcgccggtcagcagggtccatgtctggggagggcattgagctgtagttggcattatggttcacgtgtactggactcccataattgccagtaatgttgaactctatct

SEQ ID NO: 27648 - DNA, 98 bp, Homo sapiens
  MAP TO AC005870.1; EXPRESSED IN LUNG, SIGNAL = 0.8; EXPRESSED IN BRAIN, SIGNAL = 0.88; EXPRESSED IN ADULT LIVER, SIGNAL = 0.83; EXPRESSED IN PLACENTA, SIGNAL =   1; EXPRESSED IN FETAL LIVER, SIGNAL = 0.86; EXPRESSED IN BONE MARROW, SIGNAL = 0.7; NT HIT: M62962.1, EVALUE 1.30e-02; SWISSPROT HIT: P38994, EVALUE 9.50e+00
gaagaacaagatgaccatctacatggccaagaaccttctgtggttcccttgcaccttgctgttacaagttgtaggatacccttgggtgtttttgctgt

SEQ ID NO: 27649 - DNA, 179 bp, Homo sapiens
  MAP TO AC005146.1; EXPRESSED IN LUNG, SIGNAL =   1; EXPRESSED IN BONE MARROW, SIGNAL = 0.91; EXPRESSED IN PLACENTA, SIGNAL = 0.99; EXPRESSED IN FETAL LIVER, SIGNAL = 1.1; EXPRESSED IN BRAIN, SIGNAL =   1; EXPRESSED IN ADULT LIVER, SIGNAL = 1.1; NT HIT: AL163247.2, EVALUE 4.20e-01
ttttggattttataattccgtgttgtagaaagtgtcctgtgcatgataaggtgctgatcagcattccaggactctgcccaccagctgccagtagcaccccctgtccaagtgtgacaatcaacaataaatgtctccagacactgcccctggggaaggtggagagcaaaatcacctccagt

SEQ ID NO: 27650 - DNA, 319 bp, Homo sapiens
  MAP TO AC005215.1; EXPRESSED IN LUNG, SIGNAL = 0.57; EXPRESSED IN ADULT LIVER, SIGNAL = 0.44; EXPRESSED IN PLACENTA, SIGNAL = 0.58; EXPRESSED IN BRAIN, SIGNAL = 0.58; EST_HUMAN HIT: AA502184.1, EVALUE 5.00e-09; SWISSPROT HIT: P46405, EVALUE 1.00e-07; NT HIT: X79417.1, EVALUE 2.00e-13
tcagcacaaagggcctcccctgatttgacagaggtgggctcatcatgcaggctcacagagatgggcttggctctcatctaaggctctgacagctttgtaaatccttatgctgggccatcatgcatgagggcggtcagcacttcttgtaaagcagtgttaacgtccaggacacttcctgcagcagtggcttcctgggccttggcggtgggtcacgactgaagccaaatcaaggccacacctgagccttcacatgattcagcagcagcagcagcagggaacaagcaatcaccaacctctatctttttataaacggggagac

SEQ ID NO: 27651 - DNA, 270 bp, Homo sapiens
  MAP TO AC004417.1; EXPRESSED IN BRAIN, SIGNAL = 2.4; EXPRESSED IN ADULT LIVER, SIGNAL = 0.94; EXPRESSED IN LUNG, SIGNAL = 0.53; EXPRESSED IN FETAL LIVER, SIGNAL = 0.7; EXPRESSED IN BONE MARROW, SIGNAL = 0.56; EST_HUMAN HIT: BE780610.1, EVALUE 4.00e-03; NT HIT: U07223.1, EVALUE 0.00e+00; SWISSPROT HIT: P52757, EVALUE 8.00e-48
ttaaactacaggctcttccacgacgggaaacactttgtgggtgagaagaggtttgagtcgattcatgatctggtgacagatggcttgataacactgtacatagaaacaaaagctgccgagtacatttcaaaaatgacaactaaccccatctatgaacacattggatatgccaccctactcagagaaaaagtatccagaaggctgagcaggtctaaaaatgaaccaagaaaaacaaacgtcacacatgaagaacacacagcggtggaaaag

SEQ ID NO: 27652 - DNA, 196 bp, Homo sapiens
  MAP TO AC005281.2; EXPRESSED IN LUNG, SIGNAL = 0.63; EXPRESSED IN FETAL LIVER, SIGNAL = 0.68; EXPRESSED IN BONE MARROW, SIGNAL = 0.68; EXPRESSED IN PLACENTA, SIGNAL = 0.81; EXPRESSED IN ADULT LIVER, SIGNAL = 0.71; EXPRESSED IN BRAIN, SIGNAL = 0.77; SWISSPROT HIT: Q60604, EVALUE 2.00e-32; NT HIT: X78479.1, EVALUE 6.00e-62; EST_HUMAN HIT: BE897112.1, EVALUE 1.00e-106
aggtgaaacaccaatcttcaaacagttttttaaggactggagagataaagatcagagtgatggcttcgggaaagtttatgtcacagagaaagtggctcaaataaaacaaattccctttgatgcctcaaaattacacagttctccgcagatggcagcccagcacaatatggtggatgatggttctggcaaagtggag

SEQ ID NO: 27653 - DNA, 167 bp, Homo sapiens
  MAP TO AC004508.1; EXPRESSED IN PLACENTA, SIGNAL = 0.79; EXPRESSED IN LUNG, SIGNAL = 0.71; EXPRESSED IN FETAL LIVER, SIGNAL = 0.7; EXPRESSED IN BRAIN, SIGNAL = 0.63; EXPRESSED IN ADULT LIVER, SIGNAL = 0.71; EXPRESSED IN BONE MARROW, SIGNAL = 0.67; NT HIT: AL163285.2, EVALUE 2.00e-89; EST_HUMAN HIT: BF379088.1, EVALUE 3.70e-02; SWISSPROT HIT: P20592, EVALUE 6.00e-22
atggccgggaatggccggggcatcagccatgagctcatcagcctggagatcacctcccctgaggttccagacctgaccatcattgaccttcccggcatcaccagggtggctgtggacaaccagccccgagacatcggactgcaggtgagcccttctggaatttggga

SEQ ID NO: 27654 - DNA, 75 bp, Homo sapiens
  MAP TO AC005020.1; EXPRESSED IN LUNG, SIGNAL = 1.1; EXPRESSED IN FETAL LIVER, SIGNAL = 0.92; EXPRESSED IN BONE MARROW, SIGNAL = 0.96; EXPRESSED IN PLACENTA, SIGNAL = 0.93; EXPRESSED IN BRAIN, SIGNAL = 1.2; EXPRESSED IN ADULT LIVER, SIGNAL = 1.1; NT HIT: AF246303.1, EVALUE 9.10e+00; EST_HUMAN HIT: R19745.1, EVALUE 3.50e+00
atgggggacggaggtgttcactgcaggcgccaaccgcatgctcacaatgctcacctgcaggccttgccacccagg

SEQ ID NO: 27655 - DNA, 179 bp, Homo sapiens
  MAP TO AC004601.1; EXPRESSED IN BONE MARROW, SIGNAL = 1.4; EXPRESSED IN PLACENTA, SIGNAL = 0.98; EXPRESSED IN LUNG, SIGNAL = 1.1; EXPRESSED IN FETAL LIVER, SIGNAL = 1.7; EXPRESSED IN BRAIN, SIGNAL = 0.93; EXPRESSED IN ADULT LIVER, SIGNAL = 1.6; SWISSPROT HIT: P37370, EVALUE 4.50e-01; EST_HUMAN HIT: BF110434.1, EVALUE 4.00e-02
ctgtcagggaggctgaggaacggggatatggtgctgcgcagggcaggtggaggctgggggctgctggatctctctccataggcatggtgggaacaaccctgtctgtccccacaggctgcaggaggatgggctgggctgccacatttggtccatacagctatgcttgagcattttgaatc

SEQ ID NO: 27656 - DNA, 114 bp, Homo sapiens
  MAP TO AC004100.1; EXPRESSED IN LUNG, SIGNAL = 1.2; EXPRESSED IN FETAL LIVER, SIGNAL = 0.94; EXPRESSED IN BRAIN, SIGNAL = 0.9; EXPRESSED IN BONE MARROW, SIGNAL = 0.97; EXPRESSED IN PLACENTA, SIGNAL = 0.86; EXPRESSED IN ADULT LIVER, SIGNAL =   1; NT HIT: gi9626821, EVALUE 3.90e+00; SWISSPROT HIT: P38156, EVALUE 1.10e+00; EST_HUMAN HIT: W86680.1, EVALUE 2.40e-02
agtgcaccacactgggaaaagcccaagccacacagagaggccactcgtgggtgctctcgttggcagtcccagctgagtccagccttggagtcacatgtgagtgagaagtctcca

SEQ ID NO: 27657 - DNA, 79 bp, Homo sapiens
  MAP TO AC004926.2; EXPRESSED IN PLACENTA, SIGNAL =   1; EXPRESSED IN BRAIN, SIGNAL = 0.77; EXPRESSED IN BONE MARROW, SIGNAL = 0.98; EXPRESSED IN ADULT LIVER, SIGNAL =   1; EXPRESSED IN LUNG, SIGNAL = 0.99; EXPRESSED IN FETAL LIVER, SIGNAL = 1.4; NT HIT: U53885.1, EVALUE 6.30e-01; EST_HUMAN HIT: AI807537.1, EVALUE 6.00e-02
acatacctgtatttgattatggtaagaactgggcttttaatgtactcctcaccagaatagtgaacactgtagccaaaag

SEQ ID NO: 27658 - DNA, 161 bp, Homo sapiens
  MAP TO AC004864.1; EXPRESSED IN PLACENTA, SIGNAL = 2.3; EXPRESSED IN LUNG, SIGNAL = 0.98; EXPRESSED IN BRAIN, SIGNAL = 0.88; EXPRESSED IN ADULT LIVER, SIGNAL =   1; EXPRESSED IN FETAL LIVER, SIGNAL = 1.1; EXPRESSED IN BONE MARROW, SIGNAL =   1; SWISSPROT HIT: P05231, EVALUE 7.80e-01; NT HIT: X76913.1, EVALUE 1.50e+00
ccctctagtggtctcctgatcccttccctcttggtaacactgattcttctgcctattttgaggcaggctcaggaacgccctcctccaggaatccttcctacgccagtctgtggcatggcatgtgctgcttctctgggctcccataatattctctacatact

SEQ ID NO: 27659 - DNA, 150 bp, Homo sapiens
  MAP TO AC005210.2; EXPRESSED IN BONE MARROW, SIGNAL = 0.57; EXPRESSED IN ADULT LIVER, SIGNAL = 0.64; EXPRESSED IN PLACENTA, SIGNAL =   1; EXPRESSED IN BRAIN, SIGNAL = 0.67; EXPRESSED IN LUNG, SIGNAL = 0.57; SWISSPROT HIT: P57492, EVALUE 7.90e-01; NT HIT: S81113.1, EVALUE 5.30e+00; EST_HUMAN HIT: BE541068.1, EVALUE 5.10e-01
atgtctcatcttggctgtttaaccattaactgtgactccatagaacagccactgcttctaatacaggaaatctgtgccaacctggggctagaactgggaacaaatctgcatctagctatcaactgtgctggacatgagctgatggactac

SEQ ID NO: 27660 - DNA, 343 bp, Homo sapiens
  MAP TO AC004558.1; EXPRESSED IN ADULT LIVER, SIGNAL = 1.9; EXPRESSED IN PLACENTA, SIGNAL = 2.2; EXPRESSED IN LUNG, SIGNAL = 1.6; EXPRESSED IN BRAIN, SIGNAL = 1.1; EXPRESSED IN FETAL LIVER, SIGNAL = 1.9; EXPRESSED IN BONE MARROW, SIGNAL = 8.3; SWISSPROT HIT: P31997, EVALUE 6.00e-62; EST_HUMAN HIT: AW361642.1, EVALUE 2.00e-70; NT HIT: gi11426367, EVALUE 0.00e+00
ccagttacttcttcactcataagatttagctttatgacttgtagggtgtaggatcctgtgtcatttctggtgacgttccgcatcagcagggatgcattggggtatattgtctctcgattgctgtatgcaggccctggggtaatctgttgatttgatattacatatcctataattcgacggttggcatccactgtttcccctttgtaccagttgtagccacgagggtcctggggcagattgtggacaagtagaagaacctccttcccctctgcagcattggatggcacagcttcaatagtgagctgagcagtggtgggcgggttccagaaggtgaaaagtgagg

SEQ ID NO: 27661 - DNA, 102 bp, Homo sapiens
  MAP TO AC002124.1; EXPRESSED IN ADULT LIVER, SIGNAL = 0.93; EXPRESSED IN LUNG, SIGNAL = 0.74; EXPRESSED IN PLACENTA, SIGNAL = 0.58; EXPRESSED IN FETAL LIVER, SIGNAL = 0.69; EXPRESSED IN BRAIN, SIGNAL = 0.71; EXPRESSED IN BONE MARROW, SIGNAL = 0.71; EST_HUMAN HIT: AA744837.1, EVALUE 9.00e-51; NT HIT: L78130.1, EVALUE 9.00e-04
catgatgatcattaccaccaccatcaccaccatccacttctgctgcacagagatgcaatccaatgtttccattcttctaaagtataattattttgaaataag

SEQ ID NO: 27662 - DNA, 97 bp, Homo sapiens
  MAP TO AC005959.1; EXPRESSED IN PLACENTA, SIGNAL = 0.71; EXPRESSED IN BONE MARROW, SIGNAL = 0.73; EXPRESSED IN ADULT LIVER, SIGNAL = 0.73; EXPRESSED IN LUNG, SIGNAL = 0.77; EXPRESSED IN FETAL LIVER, SIGNAL = 0.69; EXPRESSED IN BRAIN, SIGNAL = 0.64; NT HIT: M29747.1, EVALUE 8.10e-01; EST_HUMAN HIT: AU123240.1, EVALUE 9.00e-48
gtatgatagaacgagggctgattccaccaacagcaaggattacctttcagaatccacccattacacccagagcagctcctctgcatagttttgatga

SEQ ID NO: 27663 - DNA, 229 bp, Homo sapiens
  MAP TO AC005866.3; EXPRESSED IN BONE MARROW, SIGNAL = 0.51; EXPRESSED IN ADULT LIVER, SIGNAL = 0.57; EXPRESSED IN LUNG, SIGNAL = 0.53; EXPRESSED IN BRAIN, SIGNAL = 0.64; SWISSPROT HIT: Q13936, EVALUE 1.00e-11; EST_HUMAN HIT: AI016238.1, EVALUE 1.00e-86; NT HIT: Z26298.1, EVALUE 1.00e-114
gtttcgcctccagtgccaccgcattgtcaatgacacgatcttcaccaacctgatcctcttcttcattctgctcagcagcatttccctggctgctgaggacccggtccagcacacctccttcaggaaccatgtatgcatcgcctgtgtcttctgcactccttccccctggggctgtgccaggcccacagcttctgttgctgacatcattgttcaatcaggagcccaattc

SEQ ID NO: 27664 - DNA, 82 bp, Homo sapiens
  MAP TO AB019441.1; EXPRESSED IN PLACENTA, SIGNAL = 0.66; EXPRESSED IN LUNG, SIGNAL = 0.46; EXPRESSED IN FETAL LIVER, SIGNAL = 1.1; EXPRESSED IN BONE MARROW, SIGNAL = 0.74; EXPRESSED IN BRAIN, SIGNAL = 0.78; EXPRESSED IN ADULT LIVER, SIGNAL = 0.8; NT HIT: M37277.1, EVALUE 3.00e-34; EST_HUMAN HIT: BE295500.1, EVALUE 4.00e-34
ctggcctgggcttcacctgacctggacctcacctggcctccggcctcacctgcacctgctccaggtcttgctggaacctgag

SEQ ID NO: 27665 - DNA, 80 bp, Homo sapiens
  MAP TO AC005277.1; EXPRESSED IN PLACENTA, SIGNAL = 0.97; EXPRESSED IN LUNG, SIGNAL =   1; EXPRESSED IN FETAL LIVER, SIGNAL = 0.98; EXPRESSED IN BONE MARROW, SIGNAL =   1; EXPRESSED IN ADULT LIVER, SIGNAL = 0.98; EXPRESSED IN BRAIN, SIGNAL = 0.95; NT HIT: U32820.1, EVALUE 9.90e+00; EST_HUMAN HIT: AW590572.1, EVALUE 4.00e-03
caaagtttgttttgccagataacatgaaatattcacattttctgaggattaagacacaaatatctgcccatcgcagtaag

SEQ ID NO: 27666 - DNA, 196 bp, Homo sapiens
  MAP TO AC005078.1; EXPRESSED IN PLACENTA, SIGNAL = 1.3; EXPRESSED IN LUNG, SIGNAL = 1.3; EXPRESSED IN FETAL LIVER, SIGNAL = 1.3; EXPRESSED IN BRAIN, SIGNAL = 1.4; EXPRESSED IN BONE MARROW, SIGNAL = 1.1; EXPRESSED IN ADULT LIVER, SIGNAL = 1.2; NT HIT: gi6753651, EVALUE 3.00e-45; SWISSPROT HIT: P39057, EVALUE 2.00e-24; EST_HUMAN HIT: R23111.1, EVALUE 3.00e-09
gtactcatgagagcattaagggatttcaatatgcccaaaatagtgactgacgacatcccagtgtttctgggcctggtcggtgacctgtttccagccctggatgtgccccggaggaggaagctgcactttgaacagatggtcaggcagtctaccctggagctccgcctgcagcctgaagagagcttcatcctcaaag

SEQ ID NO: 27667 - DNA, 109 bp, Homo sapiens
  MAP TO AC005699.9; EXPRESSED IN PLACENTA, SIGNAL =   1; EXPRESSED IN LUNG, SIGNAL =   1; EXPRESSED IN FETAL LIVER, SIGNAL = 0.9; EXPRESSED IN ADULT LIVER, SIGNAL =   1; EXPRESSED IN BRAIN, SIGNAL = 0.96; EXPRESSED IN BONE MARROW, SIGNAL = 0.77; EST_HUMAN HIT: AW863916.1, EVALUE 3.50e-01
tgtgaaaatatcaccaaagatactttgcattgttgttttattgttgatgatgatgatgatgatgactggtttctttgtttccttcagtccactagtggaagaaaactat

SEQ ID NO: 27668 - DNA, 109 bp, Homo sapiens
  MAP TO AC004106.1; EXPRESSED IN PLACENTA, SIGNAL =   1; EXPRESSED IN LUNG, SIGNAL = 0.85; EXPRESSED IN BRAIN, SIGNAL = 0.59; EXPRESSED IN FETAL LIVER, SIGNAL = 0.81; EXPRESSED IN BONE MARROW, SIGNAL = 0.8; EXPRESSED IN ADULT LIVER, SIGNAL = 1.6; NT HIT: AF140708.1, EVALUE 2.00e-04
tagtggtaattttggaggaggtgacaatgttaatggtggtgatgatgctgatgttgctggtgatgatgatggccaagaaagagataaagaagaaagtcttatttatggt

SEQ ID NO: 27669 - DNA, 294 bp, Homo sapiens
  MAP TO AC006064.9; EXPRESSED IN PLACENTA, SIGNAL = 0.98; EXPRESSED IN LUNG, SIGNAL = 0.8; EXPRESSED IN BRAIN, SIGNAL = 0.85; EXPRESSED IN ADULT LIVER, SIGNAL = 0.79; EXPRESSED IN FETAL LIVER, SIGNAL = 0.94; EXPRESSED IN BONE MARROW, SIGNAL = 0.97; EST_HUMAN HIT: AI686048.1, EVALUE 0.00e+00; SWISSPROT HIT: Q14839, EVALUE 9.00e-19; NT HIT: gi4557452, EVALUE 0.00e+00
ctttgccctccttggtcttggccttgcggataggcacctccacagggggaggtggtggtgcaacctcagtggctgtcaccatgctctccaccacagctaccgctgctgctgccgcagctgccactgatgccccagaactgcctttgaaggggttattggtactgaactcccgccattttgcacccaaaaccatcatcatcttggagacagcaatcttgggatttttggcagcaatgaggggtctggtggagaaatgcacaagagcagagggaaaggtttaagaataaaaaaaga

SEQ ID NO: 27670 - DNA, 374 bp, Homo sapiens
  MAP TO AC004460.1; EXPRESSED IN BONE MARROW, SIGNAL = 1.1; EXPRESSED IN PLACENTA, SIGNAL = 1.2; EXPRESSED IN LUNG, SIGNAL = 1.3; EXPRESSED IN FETAL LIVER, SIGNAL = 1.1; EXPRESSED IN BRAIN, SIGNAL = 1.1; EXPRESSED IN ADULT LIVER, SIGNAL = 1.1; NT HIT: AB020637.1, EVALUE 2.00e-79; EST_HUMAN HIT: AI201297.1, EVALUE 8.00e-70; SWISSPROT HIT: P38099, EVALUE 5.30e-01
ctctgaggacgtggtgaccccctctgcagtgactccatcggccctctcagcctccgctgggccatttatcacagtgacggatgacccgggagctgcaagcatctttgcagaaaccatgaccaaaactgaagaggtaaagaggcattcttttttcgctttgtattgtgaaattaccaaatggcaggtggagccgcagatcgatgaccccaacagcaaccttgaggaggtgattaatgaggcagaggccatcacctctgagaacagcctgggatgtaagcaagccttgaatacagattaccttgattctgattaccaaagaggacagctgtaccctttctcccttggcagtgatctccaggtggccgcgtttattc

SEQ ID NO: 27671 - DNA, 208 bp, Homo sapiens
  MAP TO AC005837.1; EXPRESSED IN BONE MARROW, SIGNAL = 0.64; EXPRESSED IN PLACENTA, SIGNAL = 0.7; EXPRESSED IN LUNG, SIGNAL = 0.59; EXPRESSED IN FETAL LIVER, SIGNAL = 0.7; EXPRESSED IN ADULT LIVER, SIGNAL = 0.82; EXPRESSED IN BRAIN, SIGNAL = 0.72; SWISSPROT HIT: P48988, EVALUE 1.90e-01; EST_HUMAN HIT: AA333207.1, EVALUE 1.00e-76
agtgagaaagctgaggcctggagacatgaaaggaattgctgccactgtccagggtcacacacatcagtggcaaggccaggaacagactcaacttccctgtgcaccttttcaccacctcccttcctctggtgaccttttttttcttcctccctcgcagctcctcctttattttcttccttttcttgcctgtggtaacctacagagagta

SEQ ID NO: 27672 - DNA, 170 bp, Homo sapiens
  MAP TO AC002541.1; EXPRESSED IN LUNG, SIGNAL = 0.8; EXPRESSED IN FETAL LIVER, SIGNAL = 0.81; EXPRESSED IN BRAIN, SIGNAL = 1.4; EXPRESSED IN BONE MARROW, SIGNAL = 1.1; EXPRESSED IN ADULT LIVER, SIGNAL = 0.73; EXPRESSED IN PLACENTA, SIGNAL = 0.81; SWISSPROT HIT: P10842, EVALUE 1.20e-01; NT HIT: X76274.1, EVALUE 3.90e-01; EST_HUMAN HIT: BE277717.1, EVALUE 9.10e+00
atttctttaaattcagcagtgtaattatgaatatccatcaccatttctgctgccaagaccactgcaatgaagtagggaaaagggaatggcatactgagatgagagccagtgggagtggcctgccccatggtaaggagtattttatcacttatatcgtttataattgtctg

SEQ ID NO: 27673 - DNA, 220 bp, Homo sapiens
  MAP TO AC004253.1; EXPRESSED IN ADULT LIVER, SIGNAL = 2.2; EXPRESSED IN PLACENTA, SIGNAL = 0.93; EXPRESSED IN LUNG, SIGNAL = 1.9; EXPRESSED IN BRAIN, SIGNAL = 1.4; EXPRESSED IN FETAL LIVER, SIGNAL = 1.2; EXPRESSED IN BONE MARROW, SIGNAL = 0.9; SWISSPROT HIT: P04928, EVALUE 4.10e-01; NT HIT: M90698.1, EVALUE 1.30e-01; EST_HUMAN HIT: BE741666.1, EVALUE 1.00e-112
atctgctttcaactccgagtcccagtcctcattaaaaagatcgccaggctgttccttgggtggacagtttgtcccttctgacagctcccaggtattcagttctccatcagagtcctcctcatccatggcaaagccttcctcttcagaatgggtgccctcaccccgggcaggactgtcattaggaatgctctgtgttccacgggctaaattgacaaagaga

SEQ ID NO: 27674 - DNA, 103 bp, Homo sapiens
  MAP TO AC004875.1; EXPRESSED IN ADULT LIVER, SIGNAL = 0.81; EXPRESSED IN PLACENTA, SIGNAL = 0.74; EXPRESSED IN LUNG, SIGNAL = 0.9; EXPRESSED IN BRAIN, SIGNAL = 0.69; EXPRESSED IN BONE MARROW, SIGNAL = 0.78; EXPRESSED IN FETAL LIVER, SIGNAL = 0.73; SWISSPROT HIT: P47447, EVALUE 5.50e+00
atgaaaataatctctctcctggaaataaatgcatctgatatagcggtcataagcacaaaaggaaaaaatatgatgtcattaaccatcttgaccccaaccaatt

SEQ ID NO: 27675 - DNA, 121 bp, Homo sapiens
  MAP TO AC005562.1; EXPRESSED IN PLACENTA, SIGNAL = 0.89; EXPRESSED IN LUNG, SIGNAL = 0.82; EXPRESSED IN FETAL LIVER, SIGNAL = 0.9; EXPRESSED IN BONE MARROW, SIGNAL = 0.87; EXPRESSED IN ADULT LIVER, SIGNAL = 0.76; EXPRESSED IN BRAIN, SIGNAL = 0.81; EST_HUMAN HIT: BE746606.1, EVALUE 2.50e-02; NT HIT: M35418.1, EVALUE 2.00e-32; SWISSPROT HIT: P18054, EVALUE 4.00e-11
atcgtccacctcctccaccaaagggatgacacggtgagggtggaccctgagctgcaggcctgggatcaggagatcatggaggtggggctgtgccaggcccaggaccgaggtaagatctgtc

SEQ ID NO: 27676 - DNA, 509 bp, Homo sapiens
  MAP TO AC001228.1; EXPRESSED IN ADULT LIVER, SIGNAL = 1.1; EXPRESSED IN LUNG, SIGNAL = 1.1; EXPRESSED IN PLACENTA, SIGNAL = 0.96; EXPRESSED IN FETAL LIVER, SIGNAL =   1; EXPRESSED IN BRAIN, SIGNAL = 1.2; EXPRESSED IN BONE MARROW, SIGNAL = 1.3; SWISSPROT HIT: Q09639, EVALUE 4.90e-01; EST_HUMAN HIT: BE797385.1, EVALUE 0.00e+00; NT HIT: gi11440673, EVALUE 0.00e+00
cgcggcgggctcatggcgtgcggggtttgggctgcggggatggcctggagggctccgagggctcggagggtgcggcggccgcggcagccacggcgtcctcggcgggtgcggcgggtgcggtgcgttcctggcggctgcgaaagtcctgcagggcgcggcggttctggaaatcgatgagcgccagcgcgatggccgcgttccagcagctctcgcccgcgcagcggaagtcgatctccttgtggtcggtggtgacgatggtgaagtacacgtacttgcccgtgcgctccacgcagtccaccttgaggatggagtggaagcgcagctccttggggcgcgcgcgggggctggcggggaacaggctcaggcggtcggaggtgagcaccccgcgcttcttcttccatagctggaagaggctgtcgctgcgcttctccaactcgccctcgcgtagcacctcgtcgggggatttcatgtcgtgccgagcgcgggactgggagcggcaatgcgggcgg

SEQ ID NO: 27677 - DNA, 141 bp, Homo sapiens
  MAP TO AC005918.5; EXPRESSED IN LUNG, SIGNAL = 0.65; EXPRESSED IN BONE MARROW, SIGNAL = 0.58; EXPRESSED IN PLACENTA, SIGNAL = 0.67; EXPRESSED IN FETAL LIVER, SIGNAL = 0.76; EXPRESSED IN BRAIN, SIGNAL = 1.4; EXPRESSED IN ADULT LIVER, SIGNAL = 0.7; EST_HUMAN HIT: N99615.1, EVALUE 3.00e-02; SWISSPROT HIT: Q06686, EVALUE 6.10e-01
attcttggcaggaagccagagaggaaaatgggcaggaacctactggcctctggggtacactggatggtctggctctgcccagagaactatgagctacttcaaggtggggaggggaaaggggcttctagcagctggtgggga

SEQ ID NO: 27678 - DNA, 354 bp, Homo sapiens
  MAP TO AC002060.2; EXPRESSED IN LUNG, SIGNAL = 0.81; EXPRESSED IN PLACENTA, SIGNAL = 0.68; EXPRESSED IN FETAL LIVER, SIGNAL = 0.69; EXPRESSED IN BRAIN, SIGNAL = 0.75; EXPRESSED IN BONE MARROW, SIGNAL = 0.73; EXPRESSED IN ADULT LIVER, SIGNAL = 0.75; NT HIT: AJ131016.1, EVALUE 3.00e-37; SWISSPROT HIT: P23090, EVALUE 8.30e-01; EST_HUMAN HIT: W92708.1, EVALUE 1.00e-40
ctcatctccaaaattctctgccacctgcagagttacctgtttttcagccacagttagggtttgccttagcagcagcataacatccctccgtgagaagtcaagtacctgagttaaattttggaaagcttctatatacctatcagggtcattagaaaattggcctaagtctccctttacctgtctaaggtcctgcaatgagaagggaacttgaaccctagtggcatcacctccattgggcatttcctgtaggggtaagagtgaaggtgggggagtgggaaattttggagatggtggaggtggaagagctggtggcatggttggaggtggccgcagataagtgagactggaagccat

SEQ ID NO: 27679 - DNA, 182 bp, Homo sapiens
  MAP TO AC002301.1; EXPRESSED IN ADULT LIVER, SIGNAL = 0.55; EXPRESSED IN LUNG, SIGNAL = 0.53; EXPRESSED IN BRAIN, SIGNAL = 0.71; EXPRESSED IN BONE MARROW, SIGNAL = 0.57; NT HIT: gi11436415, EVALUE 4.20e-01; SWISSPROT HIT: P11088, EVALUE 3.00e+00; EST_HUMAN HIT: BF183584.1, EVALUE 1.60e-01
cagtcctcagagcgctctcgggcggtgcccatgggctcaatccacagctctcctcctgggcgccacaccagggtgggtgcacggtggctggggtctgggcggagagcacggcggaacaggcgttcagccaacacagcggtggtgaggatgaagagcgcagccagggtggccaggaccagcat

SEQ ID NO: 27680 - DNA, 195 bp, Homo sapiens
  MAP TO AC005972.1; EXPRESSED IN PLACENTA, SIGNAL = 0.82; EXPRESSED IN BRAIN, SIGNAL = 1.2; EXPRESSED IN BONE MARROW, SIGNAL = 0.92; EXPRESSED IN ADULT LIVER, SIGNAL = 0.95; EXPRESSED IN LUNG, SIGNAL = 1.2; EXPRESSED IN FETAL LIVER, SIGNAL =   1; NT HIT: AE000894.1, EVALUE 4.60e-01; SWISSPROT HIT: P91247, EVALUE 1.70e+00
ctctcagctgcctgtagagccagttggagtattttcaggagaacacccaaaagttttaggcaaaattccatgtcagccatctgctgctgcctcaagaaaacaatggcttctccttttcttcccaaccaaatctcatgcaagtgcctctcattggtggagtccgggctgaatactgttggcaagatcagggaaatg

SEQ ID NO: 27681 - DNA, 98 bp, Homo sapiens
  MAP TO AC000004.1; EXPRESSED IN BRAIN, SIGNAL = 0.6; EXPRESSED IN BONE MARROW, SIGNAL = 0.81; EXPRESSED IN PLACENTA, SIGNAL = 0.58; EXPRESSED IN LUNG, SIGNAL = 0.66; EXPRESSED IN ADULT LIVER, SIGNAL = 0.7; EST_HUMAN HIT: AA768651.1, EVALUE 1.00e-03; NT HIT: AJ006345.1, EVALUE 9.00e-04
ggaatgttcttcacatccttaccaacaaccgttattgtcttctttatagccattctagtgaatatgtaatggtacctcattgtgattttattagcatt

SEQ ID NO: 27682 - DNA, 104 bp, Homo sapiens
  MAP TO AC006095.1; EXPRESSED IN PLACENTA, SIGNAL = 0.74; EXPRESSED IN LUNG, SIGNAL = 0.84; EXPRESSED IN BONE MARROW, SIGNAL = 0.78; EXPRESSED IN ADULT LIVER, SIGNAL = 0.87; EXPRESSED IN FETAL LIVER, SIGNAL = 0.89; EXPRESSED IN BRAIN, SIGNAL =   1; NT HIT: AL161557.2, EVALUE 2.20e-01; EST_HUMAN HIT: AI942338.1, EVALUE 8.30e-02
taaacactgctgagaccttcagaaagtggtcaaatgggtgggtgattacgctcttggatggatgctatggtaaaatagaaaagggtaacaagaagctctttggg

SEQ ID NO: 27683 - DNA, 193 bp, Homo sapiens
  MAP TO AC003080.1; EXPRESSED IN PLACENTA, SIGNAL = 0.61; EXPRESSED IN FETAL LIVER, SIGNAL = 0.72; EXPRESSED IN BRAIN, SIGNAL = 0.63; EXPRESSED IN LUNG, SIGNAL = 0.59; EXPRESSED IN BONE MARROW, SIGNAL = 0.61; EXPRESSED IN ADULT LIVER, SIGNAL = 0.69; EST_HUMAN HIT: BE089509.1, EVALUE 3.00e-58; NT HIT: AF127085.1, EVALUE 4.50e-01; SWISSPROT HIT: P28041, EVALUE 8.70e-02
ctgggttggtataaagctggctttccacggttttgccaatgcactgcagtttgatggcctgcagggaatcatccacatgcaggatggtcggcagactgcccagggtgtcctggaccaagttggctacttcccggacatcaaagagcttcaacagttctgagtacacggcagggaaagagctcagaaacacagc

SEQ ID NO: 27684 - DNA, 226 bp, Homo sapiens
  MAP TO AC005920.1; EXPRESSED IN BONE MARROW, SIGNAL = 0.68; EXPRESSED IN PLACENTA, SIGNAL = 0.68; EXPRESSED IN LUNG, SIGNAL = 0.53; EXPRESSED IN FETAL LIVER, SIGNAL = 0.69; EXPRESSED IN ADULT LIVER, SIGNAL = 0.61; EXPRESSED IN BRAIN, SIGNAL = 0.97; NT HIT: gi11426786, EVALUE 1.00e-115; EST_HUMAN HIT: BE174479.1, EVALUE 3.00e-96; SWISSPROT HIT: Q37895, EVALUE 5.10e-02
cagtagatacatttctagtttcctgggctacctgtacttcaatgtgtttgcttatctctgatttatttggcgcatctgtaaccttcacaaatccttcgttttcttcctttaagggagtatcagtaggaattgttgccacatctgaattagctgttgatgctggagtggtagctttagatccgccttggctaacatcagaaagctcatcctacaaataaaaataatt

SEQ ID NO: 27685 - DNA, 311 bp, Homo sapiens
  MAP TO AC002303.1; EXPRESSED IN LUNG, SIGNAL = 0.6; EXPRESSED IN ADULT LIVER, SIGNAL = 0.54; EXPRESSED IN PLACENTA, SIGNAL = 0.71; EXPRESSED IN BRAIN, SIGNAL = 0.57; EXPRESSED IN BONE MARROW, SIGNAL = 0.65; NT HIT: gi11431469, EVALUE 0.00e+00; SWISSPROT HIT: O43426, EVALUE 2.00e+00; EST_HUMAN HIT: AI198025.1, EVALUE 0.00e+00
ccttggttggggtggagtgatgaggctgggtcttgggccggaggtttgcagaggctcttgtgtctttctgggaccctctgcctctccgcttgctgctgctcctctcctcctcactgtccgactcagagaggaaggtgtcctcgccttcaggcagaagcgactcctcctgcatagacgccaggctcacggtggtcaagagctcgctgcgggccttctctctttggtactgccggcttaggtcgctctcctctgcaaacacgcaggaaatgtacttggtggttcgctgccgaccttcgtcttccatgaatccc

SEQ ID NO: 27686 - DNA, 404 bp, Homo sapiens
  MAP TO AC005840.1; EXPRESSED IN PLACENTA, SIGNAL = 1.1; EXPRESSED IN LUNG, SIGNAL =   1; EXPRESSED IN FETAL LIVER, SIGNAL = 0.96; EXPRESSED IN BONE MARROW, SIGNAL =   1; EXPRESSED IN ADULT LIVER, SIGNAL = 1.2; EXPRESSED IN BRAIN, SIGNAL = 0.85; SWISSPROT HIT: P13753, EVALUE 4.10e-02; NT HIT: gi11436267, EVALUE 1.00e-118; EST_HUMAN HIT: BF357123.1, EVALUE 0.00e+00
tcaggggatgtgtggtagaagctgtggcagctgccgccttgggaaaatagtcaggagcagaggcaggagcatgaagccagggctgcgaacaaagtggatgggcagcagaacaaggccatagatgagctggggcaggagagccatgagccctagtgtggaggtggggaaaaggaggacactcccagtacctggtgggacaacctgggtgctggccccaaggggctcctccagagagatgtgtgtgacctggcaggtgtaagtggcacctgcagagccaggttctgcggtgagagaggaggagatgctgtaggtgcctgccacgctttgcctgaggctggagaaggaggcaccagagacttgggctggggatccacccagctcctctcgggtccacgtcaccacca

SEQ ID NO: 27687 - DNA, 180 bp, Homo sapiens
  MAP TO AC006501.5; EXPRESSED IN LUNG, SIGNAL = 0.88; EXPRESSED IN FETAL LIVER, SIGNAL = 1.3; EXPRESSED IN BONE MARROW, SIGNAL = 0.81; EXPRESSED IN PLACENTA, SIGNAL = 1.9; EXPRESSED IN BRAIN, SIGNAL = 0.73; EXPRESSED IN ADULT LIVER, SIGNAL = 0.72; EST_HUMAN HIT: AL040518.1, EVALUE 1.00e-94; NT HIT: U43139.1, EVALUE 1.10e-01; SWISSPROT HIT: Q16760, EVALUE 6.80e-02
caattttcaaatcatcagccagactttcttttgtaagattcaacagttcttttccatcaatgttattcatcttgaaaataccaacaagatcttttaaatcttgtgcacaaagccatgttgagacatcctcctctgaccaatcttcggtaaattgcttcagctgatgttctgtgcgccttg

SEQ ID NO: 27688 - DNA, 206 bp, Homo sapiens
  MAP TO AC004974.1; EXPRESSED IN LUNG, SIGNAL = 0.55; EXPRESSED IN FETAL LIVER, SIGNAL = 0.71; EXPRESSED IN BRAIN, SIGNAL = 0.89; EXPRESSED IN BONE MARROW, SIGNAL = 0.73; EXPRESSED IN PLACENTA, SIGNAL = 0.8; EXPRESSED IN ADULT LIVER, SIGNAL = 0.67; SWISSPROT HIT: Q60483, EVALUE 2.20e+00; NT HIT: gi11435053, EVALUE 1.00e-103; EST_HUMAN HIT: BF379254.1, EVALUE 1.00e-100
cccttgttcatccagtttcatgagctgctctgtgaccttgggtgtgttgaaggccaaccgcaggcactggacattgagctcaggaaccacgtgctccagcacttctttgagaggcaggcctctggctgtcgagtgcttggctgtcgacggaatggcgtcctccaggaccgaacctctcagtgtcatgagctgcaagagagacaggt

SEQ ID NO: 27689 - DNA, 151 bp, Homo sapiens
  MAP TO AC005879.2; EXPRESSED IN BONE MARROW, SIGNAL = 0.93; EXPRESSED IN PLACENTA, SIGNAL = 1.1; EXPRESSED IN LUNG, SIGNAL = 0.99; EXPRESSED IN FETAL LIVER, SIGNAL = 0.88; EXPRESSED IN ADULT LIVER, SIGNAL = 0.95; EXPRESSED IN BRAIN, SIGNAL = 1.2; NT HIT: gi7662393, EVALUE 6.00e-80; EST_HUMAN HIT: AV708927.1, EVALUE 9.00e-80; SWISSPROT HIT: P40161, EVALUE 1.80e+00
agtacttggaatgattgcagaagacgtatcagaaaatgttccatcattttttctacccttcatcttatcttttaactttgcaaaaggagatctggttttgtccttcattgataagtcaaacatacttgcggtcatattgttcctcataaac

SEQ ID NO: 27690 - DNA, 131 bp, Homo sapiens
  MAP TO AC005747.1; EXPRESSED IN BRAIN, SIGNAL = 0.62; EXPRESSED IN LUNG, SIGNAL = 0.72; EXPRESSED IN FETAL LIVER, SIGNAL = 0.71; EXPRESSED IN BONE MARROW, SIGNAL = 0.94; EXPRESSED IN ADULT LIVER, SIGNAL = 0.65; EXPRESSED IN PLACENTA, SIGNAL = 0.59; SWISSPROT HIT: Q9Z8L2, EVALUE 4.10e+00; NT HIT: AF197861.1, EVALUE 1.10e+00
atggagtgtccggcatactcttcttcatctgcattagctacttcctccccaacaccatcactgtcctctgtccacgaagtggcaagaggaagcctcacactgtggctgtcactggcacccatcataagagg

SEQ ID NO: 27691 - DNA, 190 bp, Homo sapiens
  MAP TO AC003691.1; EXPRESSED IN PLACENTA, SIGNAL = 0.82; EXPRESSED IN BRAIN, SIGNAL = 0.72; EXPRESSED IN BONE MARROW, SIGNAL = 0.77; EXPRESSED IN ADULT LIVER, SIGNAL = 0.64; EXPRESSED IN LUNG, SIGNAL = 0.79; EXPRESSED IN FETAL LIVER, SIGNAL = 0.79; NT HIT: AF261028.1, EVALUE 7.00e-03; EST_HUMAN HIT: H08270.1, EVALUE 1.00e-94; SWISSPROT HIT: P42436, EVALUE 7.60e-01
aaatcttacggtaacagcgaatatccatagcatgatattctcccttgtggtagaaaatgaccacttctctatcatggacaacagctgtcattctttcagattttttaatgtcatcttctctgcccacacacacagaagaatattccctcttttcaggatcttgtgcagagccatcaagattcatgctagt

SEQ ID NO: 27692 - DNA, 151 bp, Homo sapiens
  MAP TO AC004881.1; EXPRESSED IN PLACENTA, SIGNAL = 0.9; EXPRESSED IN BONE MARROW, SIGNAL = 0.83; EXPRESSED IN ADULT LIVER, SIGNAL = 0.91; EXPRESSED IN LUNG, SIGNAL = 0.83; EXPRESSED IN FETAL LIVER, SIGNAL = 0.79; EXPRESSED IN BRAIN, SIGNAL = 0.93; EST_HUMAN HIT: AV712326.1, EVALUE 5.10e-01; SWISSPROT HIT: P33067, EVALUE 3.10e+00
aactccaggccccaatgcccacacaatttgtctcccaattctaaatctagatgtcactgataaaataaaggctttgcttcttgtctcagtaagaagaaaaaccttggagaatacagttaccattggagtcacaagttcgatcttatctcat

SEQ ID NO: 27693 - DNA, 228 bp, Homo sapiens
  MAP TO AC005585.1; EXPRESSED IN LUNG, SIGNAL = 1.1; EXPRESSED IN ADULT LIVER, SIGNAL = 0.99; EXPRESSED IN PLACENTA, SIGNAL = 1.1; EXPRESSED IN FETAL LIVER, SIGNAL = 1.1; EXPRESSED IN BRAIN, SIGNAL = 0.76; EXPRESSED IN BONE MARROW, SIGNAL = 0.95; NT HIT: gi11417964, EVALUE 1.00e-116; SWISSPROT HIT: Q15459, EVALUE 2.00e-28; EST_HUMAN HIT: BE408097.1, EVALUE 1.00e-116
cgagctggggatgttggtggctgaagatggtggcggtggctgttgagggatttcattgggcttgctggggccaatcttctctttagtgtcatcctctggcaccaggcctttggccttgtgaatggcctcaatctgctcctggagggtgatgttggcctgggcagcctgctgggtccgggccatgctgcctgagtggccatcccaggtcacctgcaagtgaaagcaaag

SEQ ID NO: 27694 - DNA, 136 bp, Homo sapiens
  MAP TO AC005228.1; EXPRESSED IN BRAIN, SIGNAL =   1; EXPRESSED IN ADULT LIVER, SIGNAL = 0.86; EXPRESSED IN PLACENTA, SIGNAL = 0.9; EXPRESSED IN FETAL LIVER, SIGNAL = 0.84; EXPRESSED IN BONE MARROW, SIGNAL = 0.75; EXPRESSED IN LUNG, SIGNAL = 0.9; NT HIT: M22967.1, EVALUE 1.20e+00; EST_HUMAN HIT: BF352940.1, EVALUE 2.00e-18
aggattcctgtgatctgttgtttattgtagctttcacatgagaggaattgctggaagaaacatttggtatcatggaagaaacatttggtatcatgcttcagaatgtgagttttgagatgcctgcaataaaatatag

SEQ ID NO: 27695 - DNA, 95 bp, Homo sapiens
  MAP TO AC004982.1; EXPRESSED IN PLACENTA, SIGNAL = 1.1; EXPRESSED IN LUNG, SIGNAL = 0.98; EXPRESSED IN BRAIN, SIGNAL = 1.1; EXPRESSED IN BONE MARROW, SIGNAL =   1; EXPRESSED IN ADULT LIVER, SIGNAL = 0.93; EXPRESSED IN FETAL LIVER, SIGNAL = 0.93; EST_HUMAN HIT: AI797128.1, EVALUE 2.90e-01; NT HIT: X95199.1, EVALUE 3.10e+00
aagtcctcttcaaatgggatttttttgtctttcatacagctatatttttcaaatatggaaatagaattgtcagatttattgagagctgaagaaac

SEQ ID NO: 27696 - DNA, 284 bp, Homo sapiens
  MAP TO AC002490.1; EXPRESSED IN BRAIN, SIGNAL = 0.8; EXPRESSED IN ADULT LIVER, SIGNAL = 0.49; EXPRESSED IN PLACENTA, SIGNAL = 0.72; EXPRESSED IN LUNG, SIGNAL = 0.7; EXPRESSED IN BONE MARROW, SIGNAL = 0.68; SWISSPROT HIT: P30838, EVALUE 8.00e-30; EST_HUMAN HIT: BE736055.1, EVALUE 1.00e-125; NT HIT: gi11426913, EVALUE 1.00e-125
  unsure 238
gctctgtcgctgcagaatgaatggaacgcctactatgaggaggtggtgtacgtcctagaggagatcgagtacatgatccagaagctccctgagtgggccgcggatgagcccgtggagaagacgccccagactcagcaggacgagctctacatccactcggagccactgggcgtggtcctcgtcattggcacctggaactaccccttcaacctcaccatccagcccatggtgggcgccnatcgctgcaggtgcatggccctgtgggaagggaagctgggggagca

SEQ ID NO: 27697 - DNA, 237 bp, Homo sapiens
  MAP TO AC004586.1; EXPRESSED IN FETAL LIVER, SIGNAL = 0.96; EXPRESSED IN BRAIN, SIGNAL = 0.65; EXPRESSED IN BONE MARROW, SIGNAL = 0.79; EXPRESSED IN ADULT LIVER, SIGNAL = 0.75; EXPRESSED IN PLACENTA, SIGNAL = 0.59; EXPRESSED IN LUNG, SIGNAL = 0.7; SWISSPROT HIT: P49641, EVALUE 2.00e-30; EST_HUMAN HIT: AI752165.1, EVALUE 2.00e-97; NT HIT: D55649.1, EVALUE 0.00e+00
gtgtctgtgcctgtccgcctgccagccctgggcctgggcgtgctgcagctacagctgggcctggatgggcaccgcacgctgccctcctctgtgcgcatctacctgcacggccggcagctgtccgtcagcaggcacgaagcgtttcctctccgtgtcattgactctggcaccagcgacttcgccctcagcaaccgctacatgcaggtctggttctcaggccttactgggctcctcaag

SEQ ID NO: 27698 - DNA, 355 bp, Homo sapiens
  MAP TO AC006237.1; EXPRESSED IN ADULT LIVER, SIGNAL = 0.58; EXPRESSED IN LUNG, SIGNAL = 0.66; EXPRESSED IN PLACENTA, SIGNAL = 0.71; EXPRESSED IN FETAL LIVER, SIGNAL = 0.68; EXPRESSED IN BRAIN, SIGNAL = 0.92; EXPRESSED IN BONE MARROW, SIGNAL = 0.69; NT HIT: AF315683.1, EVALUE 1.00e-119; SWISSPROT HIT: Q9XSZ5, EVALUE 8.00e-08; EST_HUMAN HIT: BE531280.1, EVALUE 2.00e-27
gtaacaaatggtacaagcagcacctctcctaccgcctggtgaactggcctgagcatctccggagccggcagttcggggcgccgtgcgcgccgccttccagttgtggagcaacgtctcagcgctggagttctgggaggccccagccacaggccccgctgacatccggctcaccttcttccaaggggaccacaacgatgggctgggcaatgcctttgatggcccaggtgctggcacaaagcctccctcccgcacagcaggaggggaacccaacttggagaagcagtttgggggtggcaatgaagcattcaccctccctgtggccttggctgaggcacatctccctgcagagaaccct

SEQ ID NO: 27699 - DNA, 177 bp, Homo sapiens
  MAP TO AC004737.1; EXPRESSED IN BONE MARROW, SIGNAL = 0.56; EXPRESSED IN ADULT LIVER, SIGNAL = 0.59; EXPRESSED IN LUNG, SIGNAL = 0.57; EXPRESSED IN BRAIN, SIGNAL = 0.79; EST_HUMAN HIT: BE538768.1, EVALUE 6.10e-01; SWISSPROT HIT: P02467, EVALUE 2.00e-01
cgctcatgtctccgtggcagggccgggactcctggtcccccgcgattctgagcggtgcctcacagcctaggtcctccaacctcacagggcggcccgcagcaaatgcgccactgtccggtgcggccaaccagctcgtggtgcgctgtgggaaggtcacaggacggagctggggggcgg

SEQ ID NO: 27700 - DNA, 102 bp, Homo sapiens
  MAP TO AC005291.1; EXPRESSED IN BONE MARROW, SIGNAL = 0.65; EXPRESSED IN PLACENTA, SIGNAL = 0.74; EXPRESSED IN LUNG, SIGNAL = 0.79; EXPRESSED IN FETAL LIVER, SIGNAL = 0.85; EXPRESSED IN BRAIN, SIGNAL = 0.72; EXPRESSED IN ADULT LIVER, SIGNAL = 0.82; EST_HUMAN HIT: BF310443.1, EVALUE 5.00e+00
ctttcccttctggaggatgagaagatcagtgctgtcactcatctttcgcctctcttctgccccctccaccttaactcctgacatctgtccactggatgctca

SEQ ID NO: 27701 - DNA, 79 bp, Homo sapiens
  MAP TO AC006534.2; EXPRESSED IN BONE MARROW, SIGNAL = 0.59; EXPRESSED IN PLACENTA, SIGNAL = 0.68; EXPRESSED IN LUNG, SIGNAL = 0.52; EXPRESSED IN ADULT LIVER, SIGNAL = 0.61; EXPRESSED IN BRAIN, SIGNAL = 0.61; EST_HUMAN HIT: AW794502.1, EVALUE 4.00e-37; NT HIT: X66746.1, EVALUE 1.60e-01
gaatgctgattgcaaacttttatgttggtttgttcatgcatgtttttctcgtattcccgaacatcatccattgtcatat

SEQ ID NO: 27702 - DNA, 203 bp, Homo sapiens
  MAP TO AC003083.1; EXPRESSED IN BONE MARROW, SIGNAL = 1.2; EXPRESSED IN PLACENTA, SIGNAL = 1.2; EXPRESSED IN LUNG, SIGNAL = 1.1; EXPRESSED IN FETAL LIVER, SIGNAL = 1.1; EXPRESSED IN ADULT LIVER, SIGNAL = 0.94; EXPRESSED IN BRAIN, SIGNAL = 1.2; SWISSPROT HIT: P26362, EVALUE 3.80e+00; NT HIT: D38589.1, EVALUE 4.80e-01; EST_HUMAN HIT: AI889077.1, EVALUE 1.00e-48
tcataccactgtttattgtgttttcggtaaagcaacgtatccaaggcaacagcattgacatccagagctcctggagaaggccactggttggtgagatgggcagttaactcttgtctcgatcttaaatcattattctttagcacagtcctgtgaatattaagatggtgagtgcttttgtcttcactgttctacaatggcagagg

SEQ ID NO: 27703 - DNA, 146 bp, Homo sapiens
  MAP TO AC002307.1; EXPRESSED IN PLACENTA, SIGNAL =   2; EXPRESSED IN LUNG, SIGNAL = 0.72; EXPRESSED IN BRAIN, SIGNAL = 0.86; EXPRESSED IN BONE MARROW, SIGNAL = 2.8; EXPRESSED IN ADULT LIVER, SIGNAL =   1; NT HIT: U52111.2, EVALUE 1.00e-62; EST_HUMAN HIT: BE734055.1, EVALUE 4.00e-57; SWISSPROT HIT: P33897, EVALUE 4.00e-19
tgcaggatgtggtgcaggtgcatgatgtccaggatggcttccaggtcctgctctgagtagcccttccttcgcatgtcctccactgagtccgggtaggtcacctggtcacgcagggaacccacagacatgtagggcctgtgggaaag

SEQ ID NO: 27704 - DNA, 279 bp, Homo sapiens
  MAP TO AC006544.19; EXPRESSED IN PLACENTA, SIGNAL = 1.1; EXPRESSED IN LUNG, SIGNAL = 0.99; EXPRESSED IN FETAL LIVER, SIGNAL = 1.1; EXPRESSED IN BONE MARROW, SIGNAL =   1; EXPRESSED IN ADULT LIVER, SIGNAL = 1.2; EXPRESSED IN BRAIN, SIGNAL =   1; EST_HUMAN HIT: AW178142.1, EVALUE 0.00e+00; SWISSPROT HIT: Q92620, EVALUE 3.00e-06; NT HIT: AL163201.2, EVALUE 6.80e-01
ttttgttttgttttttacctcctcactgggcaggaacactagcacatctcctggaagctccttccgacacaattcaagcactgcttggcaggcagcttccacccgatcaggtgggatggtgtcccagtagatgggggaaggtctctcaccaggctctctgggtatatgcacaataggaggattgccccagaaagctcggagcttaggttcaagggctgggtcagtaaccacaaccactctgaggtcccccggaagtttttccagcctggcatcttgcag

SEQ ID NO: 27705 - DNA, 221 bp, Homo sapiens
  MAP TO AC004023.1; EXPRESSED IN PLACENTA, SIGNAL = 0.85; EXPRESSED IN LUNG, SIGNAL = 0.84; EXPRESSED IN FETAL LIVER, SIGNAL = 0.94; EXPRESSED IN BONE MARROW, SIGNAL = 0.9; EXPRESSED IN ADULT LIVER, SIGNAL = 0.9; EXPRESSED IN BRAIN, SIGNAL = 0.86; SWISSPROT HIT: Q46905, EVALUE 7.40e-01; EST_HUMAN HIT: AI791952.1, EVALUE 2.00e-60; NT HIT: AL163218.2, EVALUE 2.00e-59
atggctgaaagaggccaatgtagagcttgggccatggcttcagagggtgcagtccccaagctttggcagcttccacatggtattgagcctgcgagtgcacagaagtcaagaattgaggtttgggaacctccgcctagatttcagaggatgtatggaaatgcctgcgtgcccaggcagaagtttgctgcagaggtggggccttcatggagaacctctgccag

SEQ ID NO: 27706 - DNA, 181 bp, Homo sapiens
  MAP TO AC002310.1; EXPRESSED IN PLACENTA, SIGNAL = 7.2; EXPRESSED IN ADULT LIVER, SIGNAL = 2.8; EXPRESSED IN LUNG, SIGNAL = 1.1; EXPRESSED IN FETAL LIVER, SIGNAL = 0.68; EXPRESSED IN BRAIN, SIGNAL = 0.6; EXPRESSED IN BONE MARROW, SIGNAL =  14; NT HIT: gi4504756, EVALUE 2.00e-92; EST_HUMAN HIT: AW500274.1, EVALUE 3.00e-92; SWISSPROT HIT: P20701, EVALUE 4.00e-27
tgcctcccattgaagatgtacacagccccctgctcctccagaggggcccccacagccacgtctaccagcccatcgccgttgatgtctgtcagagcagtgatggcttctccaaaccgcccgagtgggtagccggggtccccctgcagctctgagacttcttcaaaccccaactaggaagtag

SEQ ID NO: 27707 - DNA, 181 bp, Homo sapiens
  MAP TO AC006153.2; EXPRESSED IN BONE MARROW, SIGNAL = 0.63; EXPRESSED IN PLACENTA, SIGNAL = 0.79; EXPRESSED IN LUNG, SIGNAL = 0.78; EXPRESSED IN FETAL LIVER, SIGNAL = 0.67; EXPRESSED IN ADULT LIVER, SIGNAL = 0.72; EXPRESSED IN BRAIN, SIGNAL = 0.71; NT HIT: AJ250713.1, EVALUE 9.00e-98; SWISSPROT HIT: P56749, EVALUE 7.00e-29; EST_HUMAN HIT: BE718060.1, EVALUE 1.60e-01
acgggagcagtgactgcctgatgtacgacactacttggtactcatcagttgaccagctggacctgcgtgtcctccagtttgccctacccctcagcatgctgatcgccatgggtgccctgctgctctgcctgattggaatgtgcaacactgccttcaggtcctcggtgcccaacatcaaact

SEQ ID NO: 27708 - DNA, 144 bp, Homo sapiens
  MAP TO AC005881.2; EXPRESSED IN PLACENTA, SIGNAL = 0.73; EXPRESSED IN LUNG, SIGNAL = 0.6; EXPRESSED IN BRAIN, SIGNAL = 0.9; EXPRESSED IN BONE MARROW, SIGNAL = 0.68; EXPRESSED IN ADULT LIVER, SIGNAL = 0.76; SWISSPROT HIT: P75515, EVALUE 4.00e+00; NT HIT: AF016494.1, EVALUE 3.20e-01
gcaggtttagcgtgggggctggcacgcctggtgttagagtggtgtctgtgactgtgagatttgggtctatcataagctttacagttggcttctcaatggtcttaacactgtcaccatggaaactgaacatcaaaagacaaggga

SEQ ID NO: 27709 - DNA, 197 bp, Homo sapiens
  MAP TO AC004486.1; EXPRESSED IN LUNG, SIGNAL = 1.9; EXPRESSED IN FETAL LIVER, SIGNAL = 1.2; EXPRESSED IN BONE MARROW, SIGNAL = 1.5; EXPRESSED IN PLACENTA, SIGNAL = 1.5; EXPRESSED IN BRAIN, SIGNAL = 1.3; EXPRESSED IN ADULT LIVER, SIGNAL = 1.4; NT HIT: AB008681.1, EVALUE 2.00e-28; EST_HUMAN HIT: BF224402.1, EVALUE 2.00e-28; SWISSPROT HIT: P33467, EVALUE 3.00e-02
attaaagccttcttccttggcaacactcgttgtctcagtgattggctttctgtgcagcaagcagcagaacctagaccaaaccccttgtgtttcagtaacaagtagacaccgactggtattcagggacaggtctgctttggaggcacgaggcagggaaaggaccatcctcttcttcatgtcaaccccaccctgcagaa

SEQ ID NO: 27710 - DNA, 319 bp, Homo sapiens
  MAP TO AC005876.2; EXPRESSED IN ADULT LIVER, SIGNAL = 1.1; EXPRESSED IN FETAL LIVER, SIGNAL = 1.2; EXPRESSED IN BRAIN, SIGNAL = 1.3; EXPRESSED IN BONE MARROW, SIGNAL = 1.3; EXPRESSED IN PLACENTA, SIGNAL = 1.3; EXPRESSED IN LUNG, SIGNAL =   1; SWISSPROT HIT: P08124, EVALUE 8.00e+00; NT HIT: AJ242625.1, EVALUE 5.00e-02; EST_HUMAN HIT: BE169147.1, EVALUE 1.20e+00
tatgaggagagactagcaaatgagaccgagaaggagtggcatgtgaggtaggaagagaacctagagaatgtctactgaatgccagatgaagagaatgtctactgaatgccagatgaagaggatgtctcaaggatatgtgagtgtatactgtgtctaggtctgccagtagatcagatactgtaataactgaaaatctgcaacctagagggcattgacattgctggagagcagttatcagtggacttgggaatatttcaaaatattttagcttatgttctatcttttaacatgaaatattgatggccaagttacacaaaca

SEQ ID NO: 27711 - DNA, 241 bp, Homo sapiens
  MAP TO AC005926.1; EXPRESSED IN ADULT LIVER, SIGNAL = 0.7; EXPRESSED IN BRAIN, SIGNAL = 0.66; EXPRESSED IN LUNG, SIGNAL = 2.6; EXPRESSED IN FETAL LIVER, SIGNAL = 0.71; EXPRESSED IN BONE MARROW, SIGNAL = 0.73; EXPRESSED IN PLACENTA, SIGNAL = 0.58; SWISSPROT HIT: P34979, EVALUE 9.00e-01; NT HIT: D50601.1, EVALUE 5.80e-01; EST_HUMAN HIT: AW857846.1, EVALUE 8.60e-01
gatcaggaacccagctagcagtggtttcgggaatcaaggtcggaccaccagattccaaaagccaggtgcttggccactggatttcagtacttcctctgcccacagtttacttttaagcaacaaaaatcatcatcctccaaatcattcctttgctagttatgcctcctgtgcagaatgtaggatttttatcaaagaggttcctccgggagcttcccattcatctgaggaagtaaaaggtaaa

SEQ ID NO: 27712 - DNA, 329 bp, Homo sapiens
  MAP TO AC004499.1; EXPRESSED IN FETAL LIVER, SIGNAL = 0.88; EXPRESSED IN BRAIN, SIGNAL = 0.64; EXPRESSED IN BONE MARROW, SIGNAL = 0.84; EXPRESSED IN ADULT LIVER, SIGNAL = 0.8; EXPRESSED IN PLACENTA, SIGNAL = 0.89; EXPRESSED IN LUNG, SIGNAL = 0.89; EST_HUMAN HIT: BE089972.1, EVALUE 1.20e+00; SWISSPROT HIT: Q9Z7X5, EVALUE 1.30e+00; NT HIT: U16790.1, EVALUE 8.10e-01
tgatgatgctgtgttgcaaagccacagtcccacaagaggccacaaagagagaaaaatggcaggatgaaggcaaaatacaagttgagatgcattcaggaggtgaagcgactgagagggaactgactgttggccttggcattgcacgtcttctggatagcgttgtgggcaatggtgctgccaggcaggactcccttcatttctctcaggataacactcctgaggccaacggggagactggagccacccacatcccaaaagcatccagagaagtggatgcaatctgcagagcagccttgctctcacacctttgtttccttcgaatggttgac

SEQ ID NO: 27713 - DNA, 162 bp, Homo sapiens
  MAP TO AC004582.1; EXPRESSED IN BONE MARROW, SIGNAL = 1.2; EXPRESSED IN ADULT LIVER, SIGNAL = 0.82; EXPRESSED IN LUNG, SIGNAL = 0.76; EXPRESSED IN PLACENTA, SIGNAL = 0.95; EXPRESSED IN FETAL LIVER, SIGNAL = 0.73; EXPRESSED IN BRAIN, SIGNAL = 0.63; SWISSPROT HIT: P49657, EVALUE 7.80e-01; EST_HUMAN HIT: BE871772.1, EVALUE 2.20e+00; NT HIT: AF097363.1, EVALUE 9.40e-02
tgggcaagaactcaaaagtcaagaaggaggtaaatgtcagaaagatccaggagagcataaaaggtgggacagcacacaaacagccagtggtggggatggtgggcaagaaatccaagaaggcagtgtcactgaggtcagtcctaggcaataagggcacagcca

SEQ ID NO: 27714 - DNA, 253 bp, Homo sapiens
  MAP TO AC005104.1; EXPRESSED IN BONE MARROW, SIGNAL = 0.74; EXPRESSED IN PLACENTA, SIGNAL = 0.6; EXPRESSED IN LUNG, SIGNAL = 0.82; EXPRESSED IN FETAL LIVER, SIGNAL = 0.78; EXPRESSED IN BRAIN, SIGNAL = 0.66; EXPRESSED IN ADULT LIVER, SIGNAL = 0.7; NT HIT: gi9506650, EVALUE 3.00e-58; EST_HUMAN HIT: BE674544.1, EVALUE 0.00e+00; SWISSPROT HIT: Q14681, EVALUE 2.00e-30
aaccttgttcttgcaaaatcttggccttctttctgggttcactggccatactgtatggggtgttgtgaagtttcttggacaccacatagaggaacttggcctgatcttcattcccatagttgtaagaagagccattgctgaccagttgttcaaacttccagctgtcggacatggtggacaccacctgtgtgagttcctcctcctgacactgaagcacgtggtacacatgcttcatgggcacctgtgatgtttt

SEQ ID NO: 27715 - DNA, 151 bp, Homo sapiens
  MAP TO AC004468.1; EXPRESSED IN PLACENTA, SIGNAL = 0.82; EXPRESSED IN LUNG, SIGNAL = 0.89; EXPRESSED IN FETAL LIVER, SIGNAL = 0.84; EXPRESSED IN BRAIN, SIGNAL = 0.96; EXPRESSED IN BONE MARROW, SIGNAL = 0.88; EXPRESSED IN ADULT LIVER, SIGNAL = 0.81; NT HIT: M18533.1, EVALUE 6.00e-80; SWISSPROT HIT: P11532, EVALUE 4.00e-08
tttacatagagttttaatggatctccagaatcagaaactgaaagagttgaatgactggctaacaaaaacagaagaaagaacaaggaaaatggaggaagagcctcttggacctgatcttgaagacctaaaacgccaagtacaacaacataag

SEQ ID NO: 27716 - DNA, 238 bp, Homo sapiens
  MAP TO AC000384.1; EXPRESSED IN PLACENTA, SIGNAL = 0.77; EXPRESSED IN LUNG, SIGNAL = 1.1; EXPRESSED IN BONE MARROW, SIGNAL = 0.88; EXPRESSED IN ADULT LIVER, SIGNAL = 1.1; EXPRESSED IN FETAL LIVER, SIGNAL = 0.96; EXPRESSED IN BRAIN, SIGNAL = 1.3; NT HIT: gi7662039, EVALUE 0.00e+00; SWISSPROT HIT: P57453, EVALUE 1.10e+00; EST_HUMAN HIT: AA211486.1, EVALUE 1.00e-128
atccttgaggctgcgggtctccagggcaccagtggaccccgtttccgactcaatatcatccacagatggcctctcagaaatatccgaacgggttgtctcgtctgcttcctggacacttgtgggactagagagggcatctagcggtcctggagacatggctggtgggtctgagggaggtgaagaggggcctccgctggtccctgcatcatcctgcactgaggcttccagggatgccgca

SEQ ID NO: 27717 - DNA, 215 bp, Homo sapiens
  MAP TO AC004031.1; EXPRESSED IN PLACENTA, SIGNAL =   1; EXPRESSED IN FETAL LIVER, SIGNAL = 1.1; EXPRESSED IN ADULT LIVER, SIGNAL = 0.94; EXPRESSED IN LUNG, SIGNAL = 0.89; EXPRESSED IN BRAIN, SIGNAL = 0.75; EXPRESSED IN BONE MARROW, SIGNAL = 0.95; EST_HUMAN HIT: AI762391.1, EVALUE 1.90e-01; NT HIT: X75297.1, EVALUE 2.00e+00; SWISSPROT HIT: P56434, EVALUE 4.90e+00
gagctcccaccctggagctactctgtcccctccttaaacagtgagcaggaggatcccagcgacccagcttccaagatcgcctccctgctcttagcaaagctggcagattatgtggttccaggtgagaagctcctcaacaggagagtagcatggcagtgcagcattcctgtgcccagtcaggtcccccttgcatctgtgcttcctatgatgaaaga

SEQ ID NO: 27718 - DNA, 132 bp, Homo sapiens
  MAP TO AC002078.1; EXPRESSED IN PLACENTA, SIGNAL = 1.1; EXPRESSED IN LUNG, SIGNAL = 1.3; EXPRESSED IN FETAL LIVER, SIGNAL =   1; EXPRESSED IN ADULT LIVER, SIGNAL = 0.98; EXPRESSED IN BRAIN, SIGNAL = 1.4; EXPRESSED IN BONE MARROW, SIGNAL = 1.2; NT HIT: AF288294.1, EVALUE 1.20e+00; SWISSPROT HIT: Q01631, EVALUE 9.20e+00; EST_HUMAN HIT: AA776132.1, EVALUE 4.40e-01
cactgctattgctaccctggaaaccaggagtgcttctgcagccgcctccacccgtgacagtgatcatctgccgtgcctgctccctagtgctgttcccagaaaggtgcatctgactggctgagcgtcagtcat

SEQ ID NO: 27719 - DNA, 218 bp, Homo sapiens
  MAP TO AC006027.1; EXPRESSED IN LUNG, SIGNAL = 1.2; EXPRESSED IN BRAIN, SIGNAL = 0.85; EXPRESSED IN ADULT LIVER, SIGNAL = 1.3; EXPRESSED IN PLACENTA, SIGNAL = 1.2; EXPRESSED IN FETAL LIVER, SIGNAL = 1.1; EXPRESSED IN BONE MARROW, SIGNAL =   1; SWISSPROT HIT: P35735, EVALUE 4.70e+00; EST_HUMAN HIT: AI476732.1, EVALUE 1.00e-119
gatgactcagcagatcaaggctggaagactcattctcgtcaggtggttgacgttggctgtcagttggaacctcacctggggctgtttgccagaacacctacacatggcatgtccatggagctatttgacttcctcactgcaatggctgggttccaagagcagttatcccaagagaacaaggcagaagtgcatgacttttagaatcttgtctcacaagt

SEQ ID NO: 27720 - DNA, 123 bp, Homo sapiens
  MAP TO AC002451.1; EXPRESSED IN PLACENTA, SIGNAL = 0.9; EXPRESSED IN ADULT LIVER, SIGNAL = 0.84; EXPRESSED IN LUNG, SIGNAL = 1.1; EXPRESSED IN FETAL LIVER, SIGNAL = 0.98; EXPRESSED IN BRAIN, SIGNAL = 0.99; EXPRESSED IN BONE MARROW, SIGNAL = 0.9; SWISSPROT HIT: Q10000, EVALUE 7.10e+00; EST_HUMAN HIT: AA481879.1, EVALUE 1.00e-01
ttcaaggtcagccactttaattttacaagaaagtaccaaactgttttccaaagtgatgtacatgtttgcatttctaccagcaatatgagagttccggttgctgtcattcttgtcaatagttgg

SEQ ID NO: 27721 - DNA, 172 bp, Homo sapiens
  MAP TO AC006151.3; EXPRESSED IN PLACENTA, SIGNAL = 0.8; EXPRESSED IN LUNG, SIGNAL = 0.93; EXPRESSED IN FETAL LIVER, SIGNAL = 0.72; EXPRESSED IN BRAIN, SIGNAL =   1; EXPRESSED IN ADULT LIVER, SIGNAL = 0.83; EXPRESSED IN BONE MARROW, SIGNAL = 0.97; NT HIT: L29029.1, EVALUE 2.50e-02; SWISSPROT HIT: P13285, EVALUE 1.30e+00
agaagacacacatgtcatcactccaatgatgccctcccttctccttttccttctccgaggccagacagcaaggaggatgagcaagaagatcggggttgggagtgatcagccccagctggccactgctttaacccagtcgggtcttagagtctctgagactcgccccagcgga

SEQ ID NO: 27722 - DNA, 165 bp, Homo sapiens
  MAP TO AC005028.1; EXPRESSED IN FETAL LIVER, SIGNAL = 0.68; EXPRESSED IN BRAIN, SIGNAL = 0.74; EXPRESSED IN BONE MARROW, SIGNAL = 0.6; EXPRESSED IN PLACENTA, SIGNAL = 0.63; EXPRESSED IN ADULT LIVER, SIGNAL = 0.5; EXPRESSED IN LUNG, SIGNAL = 0.58; NT HIT: S46825.1, EVALUE 3.80e-01; SWISSPROT HIT: P23570, EVALUE 8.90e+00; EST_HUMAN HIT: AA700331.1, EVALUE 2.20e+00
cagatgtgtgactggtctcctccaagtacacggttatatcctccatgactaggattgcatctgcgatgcttggtgtctccacaatgccaggtataaaaccttcattaactgacttttcaacagggctctgagcctcctgaaccctcatgtcactccatgtggcca

SEQ ID NO: 27723 - DNA, 148 bp, Homo sapiens
  MAP TO AC004082.1; EXPRESSED IN BONE MARROW, SIGNAL = 0.51; EXPRESSED IN ADULT LIVER, SIGNAL = 0.71; EXPRESSED IN PLACENTA, SIGNAL = 0.86; EXPRESSED IN LUNG, SIGNAL = 0.8; EXPRESSED IN BRAIN, SIGNAL = 0.66; NT HIT: AE000759.1, EVALUE 3.40e-01; SWISSPROT HIT: Q00918, EVALUE 2.70e-01; EST_HUMAN HIT: AA868502.1, EVALUE 2.00e+00
tggttgcgttaattgtgggtccattgctacctcttatatctgaccttttataggtttgtaatgcttttgtcttttgaagcaaatacatggatggaggcaaaatcctccgtgtttgcaggttgggcagcagctccagatctgcttgagc

SEQ ID NO: 27724 - DNA, 166 bp, Homo sapiens
  MAP TO AC005000.1; EXPRESSED IN PLACENTA, SIGNAL = 1.6; EXPRESSED IN BRAIN, SIGNAL = 0.57; EXPRESSED IN BONE MARROW, SIGNAL = 0.77; EXPRESSED IN ADULT LIVER, SIGNAL =   1; EXPRESSED IN LUNG, SIGNAL = 0.85; EXPRESSED IN FETAL LIVER, SIGNAL = 1.1; EST_HUMAN HIT: BE142871.1, EVALUE 1.00e-88; NT HIT: gi7549808, EVALUE 7.00e-89; SWISSPROT HIT: P13797, EVALUE 8.00e-26
cttcattcctgcttaattcaatgtcagcgaacaaaccgatcttaatgatctgccaaagcagtcccaaaaccagatgaggtttcccagccctcaaatcttctgcaccaatgttcacaacatgacacccaatggcagaagcagagttcagtgccaagttcaagttttc

SEQ ID NO: 27725 - DNA, 324 bp, Homo sapiens
  MAP TO AC005319.1; EXPRESSED IN PLACENTA, SIGNAL = 0.68; EXPRESSED IN LUNG, SIGNAL = 0.64; EXPRESSED IN FETAL LIVER, SIGNAL = 0.69; EXPRESSED IN BRAIN, SIGNAL = 0.67; EXPRESSED IN BONE MARROW, SIGNAL = 0.76; EXPRESSED IN ADULT LIVER, SIGNAL = 0.69; NT HIT: D38145.1, EVALUE 7.90e-01; SWISSPROT HIT: P06972, EVALUE 2.10e+00
gccagcccctaagaaccttctttgggagagtggtggccacctccatggcagcaaggctgactgcatttggcattcatgaaaactccaacaatgggggcattcaccctggaaagcctggaaagagaaatactgacattcataaaagaaacagtgggggtgaaatacccgatggacataaatacccatctttaagcctagagttcctgatggtatttcctcaagtgttgagtttacagcagcccttctcagagccttcatgcgctaagatatcacttatgaatctccacaaggatcacagtgtctacggtgtcccaagcttatttg

SEQ ID NO: 27726 - DNA, 123 bp, Homo sapiens
  MAP TO AC006354.2; EXPRESSED IN ADULT LIVER, SIGNAL = 0.68; EXPRESSED IN LUNG, SIGNAL = 0.6; EXPRESSED IN PLACENTA, SIGNAL = 0.72; EXPRESSED IN FETAL LIVER, SIGNAL = 0.82; EXPRESSED IN BRAIN, SIGNAL = 0.7; EXPRESSED IN BONE MARROW, SIGNAL = 0.65; EST_HUMAN HIT: AA406039.1, EVALUE 1.00e-01
ctctctttgcaaattcctgagattgtgcatgttcattgcccaggtcataatggctgctgacattcaatctttccatgaggagtcccttgcagtcccagcacatcttcctggtgttttctcatc

SEQ ID NO: 27727 - DNA, 85 bp, Homo sapiens
  MAP TO AC004587.1; EXPRESSED IN PLACENTA, SIGNAL =   1; EXPRESSED IN LUNG, SIGNAL = 0.77; EXPRESSED IN FETAL LIVER, SIGNAL = 0.8; EXPRESSED IN BRAIN, SIGNAL = 0.61; EXPRESSED IN BONE MARROW, SIGNAL = 1.1; EXPRESSED IN ADULT LIVER, SIGNAL = 0.88; EST_HUMAN HIT: AU139621.1, EVALUE 1.00e-40; SWISSPROT HIT: P46940, EVALUE 7.00e-09; NT HIT: gi11433010, EVALUE 7.00e-41
tgcagtcatgaaattatttgatagagctaaagtaaatgtcaacctcctgatcttccttctcaacaaaaagttctacgggaagtaa

SEQ ID NO: 27728 - DNA, 97 bp, Homo sapiens
  MAP TO AC002299.1; EXPRESSED IN PLACENTA, SIGNAL = 1.1; EXPRESSED IN BRAIN, SIGNAL = 0.92; EXPRESSED IN BONE MARROW, SIGNAL = 0.87; EXPRESSED IN ADULT LIVER, SIGNAL = 0.86; EXPRESSED IN LUNG, SIGNAL = 1.1; EXPRESSED IN FETAL LIVER, SIGNAL = 0.83; EST_HUMAN HIT: BE379328.1, EVALUE 7.60e-02
ggctgtcttcagtctggttgttggccacagcctctctgagaaaatggcctttgaaggacatgatgtgggatctgcaccatgtgatcctggagaaaga

SEQ ID NO: 27729 - DNA, 212 bp, Homo sapiens
  MAP TO AC004491.1; EXPRESSED IN BONE MARROW, SIGNAL = 1.2; EXPRESSED IN ADULT LIVER, SIGNAL = 1.1; EXPRESSED IN PLACENTA, SIGNAL = 1.2; EXPRESSED IN LUNG, SIGNAL = 1.2; EXPRESSED IN FETAL LIVER, SIGNAL =   1; EXPRESSED IN BRAIN, SIGNAL = 1.1; SWISSPROT HIT: P31896, EVALUE 9.70e-01; NT HIT: AF079878.1, EVALUE 3.20e-02; EST_HUMAN HIT: BE151283.1, EVALUE 1.00e-73
ttccaagttttaaagaacacggcacgggccaaacaaaatgggcccgcaaaagaatccagccctcgagacgccagtctgtggcctctgctgcagagtggtctctgcttactcacatcgtcctcctctcttcccctcagccacaccctccagtccttcaagcccctgatccgggtccaggcctaccagaccctgaaggtgggttcctccttcat

SEQ ID NO: 27730 - DNA, 165 bp, Homo sapiens
  MAP TO AC006358.2; EXPRESSED IN BONE MARROW, SIGNAL = 0.65; EXPRESSED IN ADULT LIVER, SIGNAL = 0.51; EXPRESSED IN LUNG, SIGNAL = 0.5; EXPRESSED IN BRAIN, SIGNAL = 0.58; SWISSPROT HIT: Q07084, EVALUE 3.90e+00; EST_HUMAN HIT: BE970813.1, EVALUE 3.60e-02; NT HIT: M31650.1, EVALUE 2.40e-02
cccaggaagggagtgtctgccaccggctgcagccgccacctggcctcctgggagacctggcgggaaggggaaagccgggcaggaaccacactcacagacggtctccccatccccgcctctgccgccttctcctgcttcgctgtacgtggctctccaaagtggagg

SEQ ID NO: 27731 - DNA, 148 bp, Homo sapiens
  MAP TO AC001228.1; EXPRESSED IN BRAIN, SIGNAL = 0.98; EXPRESSED IN ADULT LIVER, SIGNAL = 0.53; EXPRESSED IN PLACENTA, SIGNAL = 0.92; EXPRESSED IN LUNG, SIGNAL = 0.51; EXPRESSED IN BONE MARROW, SIGNAL = 0.54; NT HIT: gi11440683, EVALUE 4.00e-50; SWISSPROT HIT: P49589, EVALUE 2.00e-12; EST_HUMAN HIT: BE304362.1, EVALUE 6.00e-50
cttcagggcggcctgaacatcctccaagagctgtgccgcttcaggcctcttctcccgatactgctcgaacaggtggttctgccgggccctcttgatgatctggggagggaaggcagacattggggagtgatgcttggatcccacatgc

SEQ ID NO: 27732 - DNA, 325 bp, Homo sapiens
  MAP TO AC005189.1; EXPRESSED IN LUNG, SIGNAL = 0.6; EXPRESSED IN BONE MARROW, SIGNAL = 0.72; EXPRESSED IN ADULT LIVER, SIGNAL = 0.71; EXPRESSED IN PLACENTA, SIGNAL = 1.2; EXPRESSED IN BRAIN, SIGNAL = 0.65; SWISSPROT HIT: Q62736, EVALUE 5.50e-01; NT HIT: gi11420293, EVALUE 0.00e+00; EST_HUMAN HIT: AA456375.1, EVALUE 0.00e+00
aagaatgtctaaagcacccctggttgacacagagcagtattcaagagccttctttcaggatggaaaaggcactagaagaagcaaatgccctccaagaaggtcattctgtgcctgaaattaattcggataccgacaaatcagaaaccaaggaatccattgtaaccgaagagttaattgtagttacttcatatactctaggacaatgcagacagtctgaaaaagagaaaatggagcaaaaggccatttccaaacgatttaaatttgaggaacctttgctacaagaaattccaggagaatttatctactgagcaatatttccctttag

SEQ ID NO: 27733 - DNA, 309 bp, Homo sapiens
  MAP TO AC002041.1; EXPRESSED IN BONE MARROW, SIGNAL = 1.2; EXPRESSED IN PLACENTA, SIGNAL =   1; EXPRESSED IN LUNG, SIGNAL = 1.2; EXPRESSED IN FETAL LIVER, SIGNAL =   1; EXPRESSED IN ADULT LIVER, SIGNAL = 1.1; EXPRESSED IN BRAIN, SIGNAL = 1.3; EST_HUMAN HIT: AI612841.1, EVALUE 0.00e+00; SWISSPROT HIT: P53796, EVALUE 4.00e-45; NT HIT: U41302.1, EVALUE 0.00e+00
ttagtgagcactcatggtgctttctcccctcctctcccaggcagaccccaaaagcgtcagggaaaggcaggccccctggaggggtggggtggggatgaagcaggggctgctatggctaccagaggtgagctggtgatgtgagctgagctgtcccatgacactctccaccacgacgaccttgctgctctcggacactggggtcagggtggtcaggcccctgacatctgcatcctgagctcggtactccaagtggtggaggccccagatggtctgggtcaggtgcttccagcactgcaggagaggacatgt

SEQ ID NO: 27734 - DNA, 106 bp, Homo sapiens
  MAP TO AC005154.1; EXPRESSED IN LUNG, SIGNAL = 0.7; EXPRESSED IN FETAL LIVER, SIGNAL = 0.82; EXPRESSED IN PLACENTA, SIGNAL = 0.68; EXPRESSED IN BRAIN, SIGNAL = 0.7; EXPRESSED IN BONE MARROW, SIGNAL = 0.78; EXPRESSED IN ADULT LIVER, SIGNAL = 0.76; SWISSPROT HIT: P41250, EVALUE 8.00e-12; EST_HUMAN HIT: AA115799.1, EVALUE 6.00e-43; NT HIT: gi6996009, EVALUE 4.00e-43
gacctctggccatgtagacaaatttgctgacttcatggtgaaagacgtaaaaaatggagaatgttttcgtgctgaccatctattaaaaggtgaggttcttcatctc

SEQ ID NO: 27735 - DNA, 198 bp, Homo sapiens
  MAP TO AC002519.1; EXPRESSED IN PLACENTA, SIGNAL = 1.1; EXPRESSED IN LUNG, SIGNAL = 1.5; EXPRESSED IN FETAL LIVER, SIGNAL = 1.3; EXPRESSED IN BRAIN, SIGNAL = 1.4; EXPRESSED IN BONE MARROW, SIGNAL = 1.5; EXPRESSED IN ADULT LIVER, SIGNAL = 1.6; EST_HUMAN HIT: BE296188.1, EVALUE 6.90e-01; SWISSPROT HIT: P33691, EVALUE 1.30e+00
aaaacaccgggtaaggctctgctgcctcctccacttgtggcatcgggagctgctggctcactagtttggtgcacactctggacctctttggtgaagctgcagctgaagagccttcaggctctgctatggcagagaaagagcctgagtcaaggccgagagcagaatcctgtgaatttgaaagtggcaggtaggatggtc

SEQ ID NO: 27736 - DNA, 273 bp, Homo sapiens
  MAP TO AC005007.1; EXPRESSED IN PLACENTA, SIGNAL = 0.86; EXPRESSED IN BRAIN, SIGNAL = 0.86; EXPRESSED IN ADULT LIVER, SIGNAL = 0.84; EXPRESSED IN LUNG, SIGNAL = 0.81; EXPRESSED IN FETAL LIVER, SIGNAL = 0.83; EXPRESSED IN BONE MARROW, SIGNAL = 0.78; NT HIT: gi11421326, EVALUE 0.00e+00; EST_HUMAN HIT: AW748596.1, EVALUE 0.00e+00; SWISSPROT HIT: P40872, EVALUE 1.50e+00
caaaataataattcacaaaatctgcagtgagagctggttgcttatgttttctccttccatccacactagaactagtatctgaattgtccactggaaagatatctgtactgatccccatgagttctgctttccgcataagtttacgaatagctgaagcactgctggtgagtggtctgggcaatttttcccttggaacccaggcctggggtctggtagatcgagctagttctgctttggcacgatactgctgaagccgggcattgatccttgcct

SEQ ID NO: 27737 - DNA, 447 bp, Homo sapiens
  MAP TO AC002536.1; EXPRESSED IN LUNG, SIGNAL = 0.77; EXPRESSED IN BRAIN, SIGNAL = 0.6; EXPRESSED IN BONE MARROW, SIGNAL = 0.67; EXPRESSED IN ADULT LIVER, SIGNAL = 0.84; NT HIT: U77629.1, EVALUE 0.00e+00; SWISSPROT HIT: P19360, EVALUE 1.00e-30; EST_HUMAN HIT: AW341052.1, EVALUE 9.00e-24
ggagaagtcgagtagctcgcgctccgcaggactcagcgcgccttcgcagccgctgtcgtccgacgagtaggcggaacgcggggagccgggctccgagctgcccccgcggcccggggacgaagaagcgcgggagggcgaggcggcgaccggggtggtccctggcggcccgcggggcgcagacggccgcacggcctgcggcctcagccctcccgccagcgcgttgcgcacggcgtcgtgctcggccagcaggcgctgcagcgcgcggatgtactccacggctgagcgcagcgtctccaccttgctcagcttcttgctggcgccgccgtgcggcacgtgctgccgcagcgcctggaagcccaagttcaccagcttcacgcggttgcgctcgcgctcattgcgccgcgctacggccgctgcgccgcctccggtctctgcggtggccggtcg

SEQ ID NO: 27738 - DNA, 95 bp, Homo sapiens
  MAP TO AC005324.1; EXPRESSED IN LUNG, SIGNAL = 0.62; EXPRESSED IN BRAIN, SIGNAL = 0.6; EXPRESSED IN ADULT LIVER, SIGNAL = 0.84; EXPRESSED IN FETAL LIVER, SIGNAL = 0.78; EXPRESSED IN BONE MARROW, SIGNAL = 1.6; EXPRESSED IN PLACENTA, SIGNAL = 0.86; NT HIT: gi11425439, EVALUE 9.00e-47; SWISSPROT HIT: Q02975, EVALUE 3.00e-08; EST_HUMAN HIT: BE902618.1, EVALUE 1.00e-46
tcagggttgctcttcagtgtgaactctttgatgtctgatgagagatgaactgcacttaaagcttttcccacactcattacatctaaagggtttct

SEQ ID NO: 27739 - DNA, 102 bp, Homo sapiens
  MAP TO AC004455.1; EXPRESSED IN PLACENTA, SIGNAL = 0.89; EXPRESSED IN BRAIN, SIGNAL = 1.2; EXPRESSED IN BONE MARROW, SIGNAL = 1.4; EXPRESSED IN ADULT LIVER, SIGNAL = 0.87; EXPRESSED IN LUNG, SIGNAL = 0.96; EXPRESSED IN FETAL LIVER, SIGNAL = 0.97; SWISSPROT HIT: P00525, EVALUE 5.50e+00; EST_HUMAN HIT: T11532.1, EVALUE 8.10e-02; NT HIT: gi4505678, EVALUE 2.20e-01
caagaaagccctgtattccagcacaggaagcaggaatgtcttaagccacactgcgctgtttctgctggagacatctccctgctctcaaaccttccttcactg

SEQ ID NO: 27740 - DNA, 412 bp, Homo sapiens
  MAP TO AC005924.2; EXPRESSED IN PLACENTA, SIGNAL = 0.8; EXPRESSED IN BONE MARROW, SIGNAL = 0.86; EXPRESSED IN ADULT LIVER, SIGNAL = 0.69; EXPRESSED IN LUNG, SIGNAL = 0.89; EXPRESSED IN FETAL LIVER, SIGNAL = 0.83; EXPRESSED IN BRAIN, SIGNAL = 0.8; NT HIT: AB040958.1, EVALUE 0.00e+00; EST_HUMAN HIT: BE780453.1, EVALUE 0.00e+00; SWISSPROT HIT: P03079, EVALUE 6.20e-01
tcagagggcagactttttgtagaggaagtccggcttgcttggtgacctccttcctctgcttattgaatcttccctttccaaatctgtatttctctgagctccatggcccagggactcactgtctgccagtcttctaccggatctctcttcgggagcttcagagctacatgcagaaagtgaaggtctgttaggagtcagcccaaaagtcaagtcagtttctactgcagttcgtcccctgacatgggctggaccggtactagcattttctggggctgccaaaggaaagtctgaccgctggggaggttgctcaacgacatccaggtgtatcggctcattcttttgtctgtgtagatgcccgtcaggggaaagtggatattctctcctagcttcttcctgttttttaggagacgtc

SEQ ID NO: 27741 - DNA, 308 bp, Homo sapiens
  MAP TO AB019440.1; EXPRESSED IN PLACENTA, SIGNAL = 0.84; EXPRESSED IN FETAL LIVER, SIGNAL = 0.89; EXPRESSED IN BRAIN, SIGNAL = 1.1; EXPRESSED IN ADULT LIVER, SIGNAL = 1.1; EXPRESSED IN LUNG, SIGNAL = 0.95; EXPRESSED IN BONE MARROW, SIGNAL =   1; NT HIT: X92217.1, EVALUE 0.00e+00; SWISSPROT HIT: P01766, EVALUE 2.00e-39; EST_HUMAN HIT: AW403942.1, EVALUE 1.00e-121
ggcttggtacagcctggggggtccctgagactctcctgtgcagcctctggattcaccttcagtagctacgacatgcactgggtccgccaagctacaggaaaaggtctggagtgggtctcagctattggtactgctggtgacacatactatccaggctccgtgaagggccgattcaccatctccagagaaaatgccaagaactccttgtatcttcaaatgaacagcctgagagccggggacacggctgtgtattactgtgcaagagacacagtgaggggaagtcagtatgagcccagacacaaacctcc

SEQ ID NO: 27742 - DNA, 447 bp, Homo sapiens
  MAP TO AC000114.1; EXPRESSED IN PLACENTA, SIGNAL = 0.75; EXPRESSED IN BRAIN, SIGNAL = 0.98; EXPRESSED IN BONE MARROW, SIGNAL = 0.77; EXPRESSED IN ADULT LIVER, SIGNAL = 0.65; EXPRESSED IN LUNG, SIGNAL = 0.65; SWISSPROT HIT: P11994, EVALUE 5.30e-01; NT HIT: AF111168.2, EVALUE 4.40e+00; EST_HUMAN HIT: AV709075.1, EVALUE 2.00e-03
tagctccacagtacccatcagtggcctcacccaaatgcaatccctgccatcagccctccaaaagtatgccctctactatctggccctgcttgaatgcaaagccctgccagctgctccacctgaacatgaaaaaaccctcaacagtggccttgctcaaatgcaaagccttgtcagtaacaccagcaaaacatggaaatcagcctgctggccctgtctgaccatgaagcccctccagctggccttgttcaactgcacacaccagaaggaggccctataccctccaaagaccatgatgacaggccctgaacatcatcaggcccatgcagcagacctcgcccacctatggatcacactagttggcctgcccagaatcccagtcttggataactggggagagtctttccctgccaaagccagtctgtaaagactggaagaggtgactacttt

SEQ ID NO: 27743 - DNA, 189 bp, Homo sapiens
  MAP TO AC005192.1; EXPRESSED IN PLACENTA, SIGNAL = 0.72; EXPRESSED IN LUNG, SIGNAL = 0.57; EXPRESSED IN FETAL LIVER, SIGNAL = 1.3; EXPRESSED IN ADULT LIVER, SIGNAL = 0.69; EXPRESSED IN BRAIN, SIGNAL = 0.97; EXPRESSED IN BONE MARROW, SIGNAL = 0.9; SWISSPROT HIT: P51375, EVALUE 3.80e+00; EST_HUMAN HIT: AI370976.1, EVALUE 1.70e-01
aaccagcattttatgaaaattgccttctgtgggaagtctggccgaggaggcagtgtcccacagaagagaaagataaagacataggtagcaactttcagacttccaagagctccagttttttcacctgtgaaacaggtttaatcataacccatgcagctgtaaggcaggaacaaggtgatgtgtgtgtga

SEQ ID NO: 27744 - DNA, 212 bp, Homo sapiens
  MAP TO AC002045.1; EXPRESSED IN LUNG, SIGNAL = 0.79; EXPRESSED IN BONE MARROW, SIGNAL = 0.88; EXPRESSED IN ADULT LIVER, SIGNAL = 0.88; EXPRESSED IN PLACENTA, SIGNAL = 1.1; EXPRESSED IN FETAL LIVER, SIGNAL = 1.2; EXPRESSED IN BRAIN, SIGNAL =   1; NT HIT: AJ248286.1, EVALUE 2.00e+00; SWISSPROT HIT: Q02062, EVALUE 5.20e-01; EST_HUMAN HIT: AW148452.1, EVALUE 1.90e-01
acacagacatgctgtctctgttcccagtgctggggaatgcagagaactggggactgaaggaagagcaggcgttcaggtaagcattaatcaggggaccttccacaagggaaaagggagtactggcccagttgaagtccagccagcactcagcatggtcaaggatggggtggtgctctctccagccattcaaggtgctgagaaaagaacagaac

SEQ ID NO: 27745 - DNA, 149 bp, Homo sapiens
  MAP TO AC006212.1; EXPRESSED IN BONE MARROW, SIGNAL = 0.65; EXPRESSED IN ADULT LIVER, SIGNAL = 0.49; EXPRESSED IN LUNG, SIGNAL = 0.58; EXPRESSED IN BRAIN, SIGNAL = 0.77; SWISSPROT HIT: P26190, EVALUE 5.20e+00; NT HIT: AF020503.1, EVALUE 6.00e-12; EST_HUMAN HIT: AW805991.1, EVALUE 2.00e-09
cttgtttgtgcttcgcatagttgcaaattttttcatattgaagatttctggcaatcctgtgattagcaacattcccttaagccaaagcttaatccagaggaaggtcctaacccttctcaagttcatgatgtctgagagagatgagaaaa

SEQ ID NO: 27746 - DNA, 78 bp, Homo sapiens
  MAP TO AC002090.1; EXPRESSED IN LUNG, SIGNAL = 1.8; EXPRESSED IN BRAIN, SIGNAL = 1.2; EXPRESSED IN PLACENTA, SIGNAL = 1.9; EXPRESSED IN BONE MARROW, SIGNAL = 1.3; EXPRESSED IN ADULT LIVER, SIGNAL = 1.5; EXPRESSED IN FETAL LIVER, SIGNAL = 1.1; NT HIT: gi9910365, EVALUE 1.00e-36; EST_HUMAN HIT: R25012.1, EVALUE 1.00e-36; SWISSPROT HIT: O70354, EVALUE 2.00e-03
taccaccaatccatttggactctttgcagcttctgtgacattcgtatatagctcatggttatagtggatgagctgcac

SEQ ID NO: 27747 - DNA, 199 bp, Homo sapiens
  MAP TO AC004829.2; EXPRESSED IN LUNG, SIGNAL = 1.1; EXPRESSED IN BRAIN, SIGNAL = 0.96; EXPRESSED IN PLACENTA, SIGNAL = 1.1; EXPRESSED IN FETAL LIVER, SIGNAL = 0.78; EXPRESSED IN BONE MARROW, SIGNAL = 0.93; EXPRESSED IN ADULT LIVER, SIGNAL = 0.93; SWISSPROT HIT: Q57830, EVALUE 3.80e+00; NT HIT: Z33374.1, EVALUE 7.30e+00
catgtaactttgtctttgaaggttttgaagcataataattctgctgaagcagcataatgttaatattttgcacttatttagagaaacagtttgggacagatgtactaaaatacaaatagaattggaaaaaaatataagatactggccaataagaatgtgaatagctataagaagtaacttttgaattaaaagaaggata

SEQ ID NO: 27748 - DNA, 139 bp, Homo sapiens
  MAP TO AC006153.2; EXPRESSED IN BRAIN, SIGNAL = 0.68; EXPRESSED IN ADULT LIVER, SIGNAL = 0.68; EXPRESSED IN PLACENTA, SIGNAL = 0.68; EXPRESSED IN LUNG, SIGNAL = 0.75; EXPRESSED IN BONE MARROW, SIGNAL = 0.72; SWISSPROT HIT: P42641, EVALUE 3.60e-01; NT HIT: AF129756.1, EVALUE 1.20e+00; EST_HUMAN HIT: AW451950.1, EVALUE 1.00e-63
gagttggaattgtacaaagaggaacttcagacaaaacctgcactcttggcagttaataaaatggacttgccagatgcccaagataagttccatgaattgatgagccagctccagaatcctaaaggtaaacctatttatt

SEQ ID NO: 27749 - DNA, 82 bp, Homo sapiens
  MAP TO AC004655.1; EXPRESSED IN LUNG, SIGNAL = 0.8; EXPRESSED IN BONE MARROW, SIGNAL = 2.1; EXPRESSED IN ADULT LIVER, SIGNAL = 0.73; EXPRESSED IN PLACENTA, SIGNAL = 0.79; EXPRESSED IN FETAL LIVER, SIGNAL = 0.76; EXPRESSED IN BRAIN, SIGNAL = 0.87; NT HIT: gi8393994, EVALUE 4.00e-33
agaaaaaaaatcaaagaaggggcgccaagaagccctagaaagactgaaaaaggctaaagctggtgagaagtataaatatgaa

SEQ ID NO: 27750 - DNA, 114 bp, Homo sapiens
  MAP TO AC004508.1; EXPRESSED IN BRAIN, SIGNAL = 0.95; EXPRESSED IN BONE MARROW, SIGNAL = 0.94; EXPRESSED IN LUNG, SIGNAL = 0.94; EXPRESSED IN ADULT LIVER, SIGNAL = 1.1; EXPRESSED IN PLACENTA, SIGNAL = 0.79; EXPRESSED IN FETAL LIVER, SIGNAL = 0.87; SWISSPROT HIT: P37237, EVALUE 2.40e+00; EST_HUMAN HIT: AA775985.1, EVALUE 4.00e-13; NT HIT: AL163285.2, EVALUE 5.00e-58
ccctgcatctcagcagctctagtttcagccatggctcaaaggggcccaggtatagctcaagctgctgcttcagagggtgcaggccataagcctggggggtattcacatgatatt

SEQ ID NO: 27751 - DNA, 136 bp, Homo sapiens
  MAP TO AC004055.1; EXPRESSED IN LUNG, SIGNAL = 1.7; EXPRESSED IN FETAL LIVER, SIGNAL = 1.5; EXPRESSED IN PLACENTA, SIGNAL = 1.3; EXPRESSED IN BRAIN, SIGNAL = 1.1; EXPRESSED IN BONE MARROW, SIGNAL = 1.2; EXPRESSED IN ADULT LIVER, SIGNAL = 3.6; NT HIT: U81158.1, EVALUE 4.70e+00; EST_HUMAN HIT: BF683327.1, EVALUE 1.80e+00
ctcttcctagacagggtcatactgctgagcatactcgagttaagtgtgatacagaagttaagccataaattcaatgagatggaagactctggcatccgaggcacacgcacggtccagtgtcagaggggcttacact

SEQ ID NO: 27752 - DNA, 112 bp, Homo sapiens
  MAP TO AC005207.1; EXPRESSED IN PLACENTA, SIGNAL = 0.61; EXPRESSED IN LUNG, SIGNAL = 0.53; EXPRESSED IN BONE MARROW, SIGNAL = 0.54; EXPRESSED IN ADULT LIVER, SIGNAL = 0.62; EXPRESSED IN BRAIN, SIGNAL = 1.9; NT HIT: AB020705.1, EVALUE 8.00e-57; SWISSPROT HIT: P90680, EVALUE 2.40e+00; EST_HUMAN HIT: AU124786.1, EVALUE 1.00e-56
tccgggggctgtgtcatgaccatgaaggagtcgtgaaacccgcccacactggtatgctcttcctgctcctcattctcagtgtcacattcaatgtcactgtcgctactcattc

SEQ ID NO: 27753 - DNA, 163 bp, Homo sapiens
  MAP TO AC002476.1; EXPRESSED IN LUNG, SIGNAL = 0.99; EXPRESSED IN FETAL LIVER, SIGNAL = 0.86; EXPRESSED IN BRAIN, SIGNAL = 0.57; EXPRESSED IN PLACENTA, SIGNAL = 1.4; EXPRESSED IN BONE MARROW, SIGNAL =   1; EXPRESSED IN ADULT LIVER, SIGNAL = 0.81; SWISSPROT HIT: Q02645, EVALUE 6.80e+00; NT HIT: AL163249.2, EVALUE 5.80e+00; EST_HUMAN HIT: AW890336.1, EVALUE 7.00e-87
agtccaggtaaccaataatattgtcctgagctggattaatgaagtgcagaagaaaagcagaaggcacagactggagatcaaattagaaggcaaaattgaccaaacggatgtagggggtgtacgaggaggagataatagaatggtttccaattccacacttgac

SEQ ID NO: 27754 - DNA, 83 bp, Homo sapiens
  MAP TO AC004111.1; EXPRESSED IN FETAL LIVER, SIGNAL = 0.68; EXPRESSED IN BRAIN, SIGNAL = 0.62; EXPRESSED IN BONE MARROW, SIGNAL = 0.72; EXPRESSED IN ADULT LIVER, SIGNAL = 0.78; EXPRESSED IN PLACENTA, SIGNAL = 1.2; EXPRESSED IN LUNG, SIGNAL = 0.81; EST_HUMAN HIT: AI672896.1, EVALUE 6.40e-02
tgtcattccatcaaggacccagagcagcagaagagatatccagaaggactcactctccaagacaagaagtgaaaacagcaggg

SEQ ID NO: 27755 - DNA, 143 bp, Homo sapiens
  MAP TO AC005539.1; EXPRESSED IN PLACENTA, SIGNAL = 1.1; EXPRESSED IN LUNG, SIGNAL = 1.1; EXPRESSED IN BRAIN, SIGNAL = 1.1; EXPRESSED IN FETAL LIVER, SIGNAL = 1.1; EXPRESSED IN BONE MARROW, SIGNAL = 0.91; EXPRESSED IN ADULT LIVER, SIGNAL = 1.1; EST_HUMAN HIT: AW837471.1, EVALUE 7.50e+00; SWISSPROT HIT: P52624, EVALUE 4.00e-08; NT HIT: AL161553.2, EVALUE 3.20e-01
ccaagccgccgtctgatgaagttggagattaggagctgaggccgttgctggtactccaccaggacatcatgaggcaagttgatctgatcacagtcgagtctgtcgagaagtgtcacacagaccacagcagctagaagagcaat

SEQ ID NO: 27756 - DNA, 87 bp, Homo sapiens
  MAP TO AC004773.1; EXPRESSED IN PLACENTA, SIGNAL = 0.72; EXPRESSED IN BRAIN, SIGNAL = 0.82; EXPRESSED IN BONE MARROW, SIGNAL = 0.83; EXPRESSED IN ADULT LIVER, SIGNAL = 0.68; EXPRESSED IN LUNG, SIGNAL = 0.8; EXPRESSED IN FETAL LIVER, SIGNAL = 0.71; EST_HUMAN HIT: R06037.1, EVALUE 1.10e+00; NT HIT: U33883.2, EVALUE 2.80e+00
tagatgccctgcaacagagatctgtcctggggactccacctcatctttgccagcggtgtgcagctggcttcctaaaatccacccaga

SEQ ID NO: 27757 - DNA, 109 bp, Homo sapiens
  MAP TO AC005997.2; EXPRESSED IN LUNG, SIGNAL = 0.77; EXPRESSED IN FETAL LIVER, SIGNAL = 0.75; EXPRESSED IN PLACENTA, SIGNAL = 0.79; EXPRESSED IN ADULT LIVER, SIGNAL = 0.59; EXPRESSED IN BRAIN, SIGNAL = 0.6; EXPRESSED IN BONE MARROW, SIGNAL = 0.62; EST_HUMAN HIT: AA431833.1, EVALUE 3.50e-01
tagcatggattgtggtgctgtagaactacaattgctttcatggttagaatgcatggtggtgagtacagtgaagagaaaagttcataaacacgacccagttctgctacta

SEQ ID NO: 27758 - DNA, 118 bp, Homo sapiens
  MAP TO AC004060.1; EXPRESSED IN LUNG, SIGNAL = 0.78; EXPRESSED IN FETAL LIVER, SIGNAL =   1; EXPRESSED IN BRAIN, SIGNAL = 0.91; EXPRESSED IN BONE MARROW, SIGNAL =   1; EXPRESSED IN PLACENTA, SIGNAL = 0.98; EXPRESSED IN ADULT LIVER, SIGNAL =   1; NT HIT: AL162757.2, EVALUE 2.60e-01
agtgacactgatgactgacacaagctgcatgctagtaggcaccatactgatccaaacccttgagcaggtattgatttgcatcaacagtgtattccagaaattgcacataattgcgagc

SEQ ID NO: 27759 - DNA, 193 bp, Homo sapiens
  MAP TO AC004843.1; EXPRESSED IN LUNG, SIGNAL = 0.63; EXPRESSED IN BRAIN, SIGNAL = 0.67; EXPRESSED IN ADULT LIVER, SIGNAL = 0.61; EXPRESSED IN PLACENTA, SIGNAL = 0.61; EXPRESSED IN BONE MARROW, SIGNAL = 0.5; NT HIT: AL163282.2, EVALUE 1.10e-01; SWISSPROT HIT: P70343, EVALUE 5.80e-01; EST_HUMAN HIT: AW363249.1, EVALUE 1.70e-01
gagctcgtgcacagttggcttgattttgaatgagactgacaatgcagctgaaacaggatggtggccagggcacagtgaggcaggtagaaagcctgtgggagcaaaatataaggaggtgctcaccttcagtgtcatgcaagtgactcagataaatgtcgtgaagatgaaggaggaagacagagggaaagacaaa

SEQ ID NO: 27760 - DNA, 137 bp, Homo sapiens
  MAP TO AC006011.2; EXPRESSED IN ADULT LIVER, SIGNAL = 0.68; EXPRESSED IN BRAIN, SIGNAL = 0.57; EXPRESSED IN PLACENTA, SIGNAL = 0.58; EXPRESSED IN LUNG, SIGNAL = 0.56; SWISSPROT HIT: Q59622, EVALUE 9.10e+00; EST_HUMAN HIT: AA747535.1, EVALUE 1.20e-01
ctggaactgagcaggaatgggttttgcataaggaactttcttctgaggtacttttttctgatccttttgcatcacttcctccattccccaatctaaacctggaattgtcatttcaatttcatttgattcatctttcc

SEQ ID NO: 27761 - DNA, 241 bp, Homo sapiens
  MAP TO AC006121.1; EXPRESSED IN LUNG, SIGNAL = 0.83; EXPRESSED IN FETAL LIVER, SIGNAL = 0.9; EXPRESSED IN PLACENTA, SIGNAL = 1.1; EXPRESSED IN BRAIN, SIGNAL = 0.98; EXPRESSED IN BONE MARROW, SIGNAL = 0.78; EXPRESSED IN ADULT LIVER, SIGNAL = 1.2; SWISSPROT HIT: Q93008, EVALUE 7.00e-39; NT HIT: gi11420654, EVALUE 1.00e-124; EST_HUMAN HIT: BE833893.1, EVALUE 7.00e-57
ttaattgtccaatcaactttctatcatctgcaggatctatcagctcaccgcccacaaagagctcaatttttgtatgggctacgttggctttaatacgattgagaatacatcgtcgtactgaaccaattgtatcatttgtatgagaccatacctccaagtcatcaacctgtctgccctggtttggaaatcgaactacaaaagagaggtgtttaccgcggaatgctctggggggaaaaagaaa

SEQ ID NO: 27762 - DNA, 145 bp, Homo sapiens
  MAP TO AC005295.1; EXPRESSED IN PLACENTA, SIGNAL = 0.94; EXPRESSED IN ADULT LIVER, SIGNAL =   1; EXPRESSED IN LUNG, SIGNAL = 0.78; EXPRESSED IN FETAL LIVER, SIGNAL = 0.79; EXPRESSED IN BRAIN, SIGNAL = 0.79; EXPRESSED IN BONE MARROW, SIGNAL = 0.81; NT HIT: AL163218.2, EVALUE 7.00e-21; EST_HUMAN HIT: BE888016.1, EVALUE 2.00e-15
atgtgcccacttatacaagaattttcttccactctgccatccctgagacagcaagaccaagccctccttttcctcctcctcagcctcctcaacttgaagacaaggatgaaaacctttatgatgatctacttccacttagtgaaca

SEQ ID NO: 27763 - DNA, 95 bp, Homo sapiens
  MAP TO AC004740.1; EXPRESSED IN LUNG, SIGNAL = 0.66; EXPRESSED IN BRAIN, SIGNAL = 0.55; EXPRESSED IN BONE MARROW, SIGNAL = 0.6; EXPRESSED IN ADULT LIVER, SIGNAL = 0.73; EXPRESSED IN PLACENTA, SIGNAL = 0.73; EST_HUMAN HIT: N33295.1, EVALUE 1.20e+00
ctactttattcatcattgtcatctgttgctgctcttgcagcagaataaggaaattggtataaaccattcgaagttcagaagtccgtcttgaatgc

SEQ ID NO: 27764 - DNA, 231 bp, Homo sapiens
  MAP TO AC006352.3; EXPRESSED IN BRAIN, SIGNAL = 1.7; EXPRESSED IN BONE MARROW, SIGNAL = 1.1; EXPRESSED IN LUNG, SIGNAL = 0.41; EXPRESSED IN FETAL LIVER, SIGNAL = 1.3; EST_HUMAN HIT: AI224931.1, EVALUE 4.00e-95; SWISSPROT HIT: Q02817, EVALUE 1.20e-01; NT HIT: gi5729867, EVALUE 1.00e-100
tttcagctgattcaatgggcaaatgtgacacgtccgcatgtcagagaactgcacggtgattttgcccttcggggtgatgccagtcacggtgccttctccaaactcatcgtgcacaatttggccgcccaggcacaggcgaccatcgatgcctccaatcacagccaggaccgccatgaggccccccacttcagggttctcggagttggggaagtagtcctctaactgggccta

SEQ ID NO: 27765 - DNA, 144 bp, Homo sapiens
  MAP TO AC004811.2; EXPRESSED IN PLACENTA, SIGNAL = 0.59; EXPRESSED IN LUNG, SIGNAL = 0.51; EXPRESSED IN ADULT LIVER, SIGNAL = 0.72; EXPRESSED IN BRAIN, SIGNAL = 0.89; EXPRESSED IN BONE MARROW, SIGNAL = 0.7; EST_HUMAN HIT: AU124814.1, EVALUE 4.80e-01; NT HIT: AF086824.1, EVALUE 2.00e-73; SWISSPROT HIT: P49025, EVALUE 3.00e-20
actgcattctgtgatgtaggtagcaaggtcctgctccaggagggatctctgagtctcagaggccttcagctccacctccttctgactaagcacagcctccacctctgacactctccgatgtaaccgggtcatttcctgctccat

SEQ ID NO: 27766 - DNA, 315 bp, Homo sapiens
  MAP TO AC005216.1; EXPRESSED IN PLACENTA, SIGNAL = 0.62; EXPRESSED IN LUNG, SIGNAL = 0.85; EXPRESSED IN FETAL LIVER, SIGNAL = 0.87; EXPRESSED IN BRAIN, SIGNAL = 0.94; EXPRESSED IN ADULT LIVER, SIGNAL = 0.75; EXPRESSED IN BONE MARROW, SIGNAL = 0.92; EST_HUMAN HIT: BF002227.1, EVALUE 1.10e+00; SWISSPROT HIT: P27285, EVALUE 4.00e-01
gattggagagcatggacaaatgagatgtgccgctgagtttgctaggatggggctggagatggaggagggtttgtctcacagggtcaagccctcccagaaaaaaaccatgaggttaggtcttgctgtccaacaagtaggggtgggaagtaagataactgagagtcttatgcacagagaaatccaaaaagcaaatctacccctgctccaaaagttgccagacacagccaagccacttgaaaaagaactgaagcttacaatgtggttctggatcattgacatcaaaacacaatgatcattttgcattccccaggtcac

SEQ ID NO: 27767 - DNA, 147 bp, Homo sapiens
  MAP TO AC005358.1; EXPRESSED IN PLACENTA, SIGNAL = 0.95; EXPRESSED IN LUNG, SIGNAL = 0.88; EXPRESSED IN FETAL LIVER, SIGNAL = 0.97; EXPRESSED IN BONE MARROW, SIGNAL = 0.9; EXPRESSED IN ADULT LIVER, SIGNAL = 0.98; EXPRESSED IN BRAIN, SIGNAL = 0.95; EST_HUMAN HIT: AA177111.1, EVALUE 1.00e-04; NT HIT: U62095.1, EVALUE 1.30e+00
cattatcatcgtcattgccatcaccaccaccatcattatcatcatcgtcatcaacatcatcatcatggctctcatttgtaggaaatctaccatgtaccaggctctgtcccgagtgttttctttatatctgtttacccacggaattct

SEQ ID NO: 27768 - DNA, 138 bp, Homo sapiens
  MAP TO AC002541.1; EXPRESSED IN LUNG, SIGNAL = 0.91; EXPRESSED IN FETAL LIVER, SIGNAL =   1; EXPRESSED IN BONE MARROW, SIGNAL = 1.1; EXPRESSED IN PLACENTA, SIGNAL = 0.67; EXPRESSED IN BRAIN, SIGNAL = 1.3; EXPRESSED IN ADULT LIVER, SIGNAL = 0.86; NT HIT: AL163227.2, EVALUE 3.00e-23; EST_HUMAN HIT: BF243950.1, EVALUE 4.00e-23
tcctcatattgagttttgactttctgctgaacactgatgctcttcattcctatccagagtctgaattctatttctgtcatttcagccatttcagcctggttaagaaccattgctggggaaatattcctgtttttggag

SEQ ID NO: 27769 - DNA, 99 bp, Homo sapiens
  MAP TO AC005079.1; EXPRESSED IN LUNG, SIGNAL = 0.77; EXPRESSED IN BRAIN, SIGNAL = 0.94; EXPRESSED IN BONE MARROW, SIGNAL = 0.65; EXPRESSED IN PLACENTA, SIGNAL = 1.3; EXPRESSED IN FETAL LIVER, SIGNAL = 0.69; EXPRESSED IN ADULT LIVER, SIGNAL = 0.69; EST_HUMAN HIT: AU140742.1, EVALUE 6.00e-49; NT HIT: gi5032118, EVALUE 2.10e-01
agagatgaaatcggacgaattgaactagtccagaagctggcaaaagaaaactatcagtttttgcagacggacaaaaaagaacaggagaagtctgaacac

SEQ ID NO: 27770 - DNA, 219 bp, Homo sapiens
  MAP TO AC002457.1; EXPRESSED IN LUNG, SIGNAL = 0.42; EXPRESSED IN BONE MARROW, SIGNAL = 0.53; EXPRESSED IN BRAIN, SIGNAL = 0.57; NT HIT: M29428.1, EVALUE 1.00e-120; SWISSPROT HIT: P08183, EVALUE 2.00e-27
acaattatttctaacactatctgttctttcagtgatgtctccaagattaatgaaggaattggtgacaaaattggaatgttctttcagtcaatggcaacatttttcactgggtttatagtaggatttacacgtggttggaagctaacccttgtgattttggccatcagtcctgttcttggactgtcagctgctgtctgggcaaaggtaggtgaagcctgt

SEQ ID NO: 27771 - DNA, 173 bp, Homo sapiens
  MAP TO AC004816.1; EXPRESSED IN BRAIN, SIGNAL = 0.58; EXPRESSED IN BONE MARROW, SIGNAL = 0.52; EXPRESSED IN ADULT LIVER, SIGNAL = 0.42; NT HIT: AF084561.1, EVALUE 1.00e-01; SWISSPROT HIT: P80192, EVALUE 1.00e-30; EST_HUMAN HIT: AW014042.1, EVALUE 8.00e-93
gctggaatcctgatccccactcacgaccatctttcacgaatatcctggaccagctaaccaccatagaggagtctggtttctttgaaatgcccaaggactccttccactgcctgcaggacaactggaaacacgagattcaggagatgtttgaccaactcagggccaaagaaaag

SEQ ID NO: 27772 - DNA, 165 bp, Homo sapiens
  MAP TO AC005220.1; EXPRESSED IN LUNG, SIGNAL = 0.92; EXPRESSED IN BRAIN, SIGNAL = 1.4; EXPRESSED IN BONE MARROW, SIGNAL = 0.79; EXPRESSED IN ADULT LIVER, SIGNAL = 2.8; EXPRESSED IN PLACENTA, SIGNAL = 1.1; EXPRESSED IN FETAL LIVER, SIGNAL = 0.98; EST_HUMAN HIT: F07056.1, EVALUE 3.00e-58; NT HIT: U83117.1, EVALUE 8.00e-58; SWISSPROT HIT: Q93068, EVALUE 4.00e-25
ctcaagaaatcgtactgtcagagacagggcgttccagtgaattccctcaggtttctctttgaaggtcagagaattgctgataatcatactccagaagaactgggaatggaggaagaagatgtgattgaggtttatcaggaacaaatcggaggtcattcaacagtt

SEQ ID NO: 27773 - DNA, 254 bp, Homo sapiens
  MAP TO AC002126.1; EXPRESSED IN LUNG, SIGNAL = 0.46; EXPRESSED IN BRAIN, SIGNAL = 0.58; EXPRESSED IN ADULT LIVER, SIGNAL = 0.46; NT HIT: J04157.1, EVALUE 1.50e-01; EST_HUMAN HIT: BF057438.1, EVALUE 0.00e+00; SWISSPROT HIT: Q01888, EVALUE 5.00e-09
ctgcgctggcctcatcgggcagtcggcctcgtacccgctggatgtggtgcggcggcgcatgcagacggccggcgtcacgggctacccgcgcgcctccatcgcccgcacgctgcgcaccatcgtgcgggaggagggcgccgtgcgcggcctctacaaaggcttgagcatgaactgggtcaagggtcccatcgccgtgggcatcagcttcaccaccttcgacctcatgcagatcctgctgcggcacctgcagagct

SEQ ID NO: 27774 - DNA, 147 bp, Homo sapiens
  MAP TO AC005368.1; EXPRESSED IN HELA, SIGNAL = 1.7; EXPRESSED IN BRAIN, SIGNAL = 0.82; EXPRESSED IN BONE MARROW, SIGNAL = 1.3; EXPRESSED IN PLACENTA, SIGNAL = 1.1; EXPRESSED IN LUNG, SIGNAL = 0.78; EXPRESSED IN FETAL LIVER, SIGNAL = 1.5; EXPRESSED IN ADULT LIVER, SIGNAL = 1.2; SWISSPROT HIT: O60610, EVALUE 2.00e-21; NT HIT: gi4885182, EVALUE 1.00e-77; EST_HUMAN HIT: AW500800.1, EVALUE 2.00e-77
ctctcctgtgagctgggacacctctgcttccaggtcctgtttctctgtggcaatttgctgcttttcagaatgcagtgcatctttttctccctgaagatcttgaagcttctgctcaaagtcactttccatctttttcatttccacctg

SEQ ID NO: 27775 - DNA, 168 bp, Homo sapiens
  MAP TO AC002543.1; EXPRESSED IN PLACENTA, SIGNAL = 0.95; EXPRESSED IN BRAIN, SIGNAL = 1.5; EXPRESSED IN BONE MARROW, SIGNAL = 1.3; EXPRESSED IN ADULT LIVER, SIGNAL = 1.1; EXPRESSED IN LUNG, SIGNAL = 0.93; EXPRESSED IN FETAL LIVER, SIGNAL = 1.1; NT HIT: gi11422027, EVALUE 8.00e-24; SWISSPROT HIT: P47755, EVALUE 7.00e-08; EST_HUMAN HIT: BF242503.1, EVALUE 1.00e-23
aagtactgtacaatttgcagtattttatagatttttaaagttggacattccatggccctaaattcattcttatgcttattttctttgccaataaggtgtatggcaaaaaaatagatggacagcaaaccattattgcatgcatagaaagccatcagttccaagcaaaaa

SEQ ID NO: 27776 - DNA, 177 bp, Homo sapiens
  MAP TO AC004132.1; EXPRESSED IN BRAIN, SIGNAL = 1.2; EXPRESSED IN BONE MARROW, SIGNAL =   1; EXPRESSED IN ADULT LIVER, SIGNAL = 0.87; EXPRESSED IN PLACENTA, SIGNAL = 0.9; EXPRESSED IN LUNG, SIGNAL = 0.82; EXPRESSED IN FETAL LIVER, SIGNAL = 1.1; NT HIT: gi11427182, EVALUE 2.00e-95; EST_HUMAN HIT: AI244667.1, EVALUE 3.00e-95; SWISSPROT HIT: Q03365, EVALUE 8.00e-28
cacagagtgtccctgtcatcaacagtgtggccggcagcctggcagccctgcagcccgtccagttctcccagcagctgcacagccctcaccagcagcccctcatgcagcagagcccaggcagccacatggcccagcagcccttcatggcagctgtgactcagctgcagaactcacaca

SEQ ID NO: 27777 - DNA, 154 bp, Homo sapiens
  MAP TO AC006016.2; EXPRESSED IN BRAIN, SIGNAL = 0.66; EXPRESSED IN ADULT LIVER, SIGNAL = 0.64; EXPRESSED IN FETAL LIVER, SIGNAL = 0.72; EXPRESSED IN BONE MARROW, SIGNAL = 0.68; EXPRESSED IN PLACENTA, SIGNAL = 0.69; EXPRESSED IN LUNG, SIGNAL = 0.64; SWISSPROT HIT: Q09452, EVALUE 1.40e+00; NT HIT: U37150.1, EVALUE 3.50e-01; EST_HUMAN HIT: AV727665.1, EVALUE 5.20e-01
acagattacattaaattctcccagaagaacttgagcaaatacgtgagtattaatattatgtggggagagatgttccaagggaagcactggtatgatcccaaggggacaaggaatcagtacgatgttgagatgttgagcagactaccaccgtagc

SEQ ID NO: 27778 - DNA, 93 bp, Homo sapiens
  MAP TO AC005083.1; EXPRESSED IN LUNG, SIGNAL = 0.48; EXPRESSED IN FETAL LIVER, SIGNAL = 0.72; EXPRESSED IN BRAIN, SIGNAL = 0.58; EXPRESSED IN ADULT LIVER, SIGNAL = 0.43; EXPRESSED IN BONE MARROW, SIGNAL = 0.6; NT HIT: gi11422567, EVALUE 7.70e-01; SWISSPROT HIT: P55847, EVALUE 9.50e+00; EST_HUMAN HIT: R69194.1, EVALUE 2.90e-01
tctctgtcacctgtaagccccaggcacactgagtccataaatgccttcttggcagaggttctcagcatcatagttccatggaaatagccatgc

SEQ ID NO: 27779 - DNA, 208 bp, Homo sapiens
  MAP TO AC005585.1; EXPRESSED IN PLACENTA, SIGNAL = 0.84; EXPRESSED IN LUNG, SIGNAL = 0.84; EXPRESSED IN FETAL LIVER, SIGNAL = 0.76; EXPRESSED IN BONE MARROW, SIGNAL = 0.79; EXPRESSED IN ADULT LIVER, SIGNAL = 0.8; EXPRESSED IN BRAIN, SIGNAL = 0.75; SWISSPROT HIT: Q92609, EVALUE 2.00e-03; NT HIT: gi7661587, EVALUE 6.00e-13; EST_HUMAN HIT: AW954566.1, EVALUE 1.00e-103
cttcacagaagaacatgtcccagacacgcagcacagagctccagggcaaggttcgggagaaggcgcacatgaaccattctgtcatatagaggagcgggtcgatcttctgacggctgaggtgcttgtgggccaccggcgacaccttctgcaacagcgagaaaaggatctccccgtccagctggatcgcctcctagggagacatcgaggc

SEQ ID NO: 27780 - DNA, 205 bp, Homo sapiens
  MAP TO AC004820.2; EXPRESSED IN BONE MARROW, SIGNAL = 0.83; EXPRESSED IN PLACENTA, SIGNAL = 0.7; EXPRESSED IN LUNG, SIGNAL = 0.57; EXPRESSED IN BRAIN, SIGNAL = 0.68; EXPRESSED IN ADULT LIVER, SIGNAL = 0.51; NT HIT: AF133820.2, EVALUE 1.00e-112; SWISSPROT HIT: P11799, EVALUE 9.00e-08; EST_HUMAN HIT: BF672815.1, EVALUE 1.00e-112
ggacatccagctgcacagtgaaggtggcttctcctgctctattcttggcaacacatgcataagcccctgcatctgaagctctgactacttcaaagatgagtgaatgaagacccttctcagacactatcattttgtgcaaatcatctgattgaactgttcttccatttagataccatgacacatcaggagctggcagtccactcac

SEQ ID NO: 27781 - DNA, 94 bp, Homo sapiens
  MAP TO AC005383.1; EXPRESSED IN LUNG, SIGNAL = 0.82; EXPRESSED IN PLACENTA, SIGNAL = 0.84; EXPRESSED IN FETAL LIVER, SIGNAL = 0.75; EXPRESSED IN BRAIN, SIGNAL = 0.63; EXPRESSED IN BONE MARROW, SIGNAL = 0.72; EXPRESSED IN ADULT LIVER, SIGNAL = 0.66; NT HIT: AL445066.1, EVALUE 7.80e-01; EST_HUMAN HIT: AA652904.1, EVALUE 4.50e+00
ttgacagctgaattattagaatactgcaatgctccgaaaagtcgaccaccctatagaccaagaattggagacgcatgctgtgccaaatacacaa

SEQ ID NO: 27782 - DNA, 123 bp, Homo sapiens
  MAP TO AC005284.1; EXPRESSED IN PLACENTA, SIGNAL = 0.91; EXPRESSED IN LUNG, SIGNAL = 0.91; EXPRESSED IN BRAIN, SIGNAL = 0.69; EXPRESSED IN FETAL LIVER, SIGNAL = 0.93; EXPRESSED IN BONE MARROW, SIGNAL = 0.83; EXPRESSED IN ADULT LIVER, SIGNAL = 0.85; NT HIT: AF052755.1, EVALUE 4.30e+00; EST_HUMAN HIT: BF380703.1, EVALUE 1.60e+00; SWISSPROT HIT: Q01497, EVALUE 9.20e+00
ttttgtttaggagtctatgtagctcttaccttgcaaccagaacttctgatccagaaacacatcttctattctgcctactacctggagatcagagcccaaaggaaggtgggaggaatgatttta

SEQ ID NO: 27783 - DNA, 136 bp, Homo sapiens
  MAP TO AC005178.1; EXPRESSED IN PLACENTA, SIGNAL = 0.84; EXPRESSED IN ADULT LIVER, SIGNAL = 0.81; EXPRESSED IN LUNG, SIGNAL = 0.82; EXPRESSED IN FETAL LIVER, SIGNAL = 0.84; EXPRESSED IN BRAIN, SIGNAL = 0.72; EXPRESSED IN BONE MARROW, SIGNAL = 0.84; EST_HUMAN HIT: AI216307.1, EVALUE 1.10e-01; NT HIT: Z74812.1, EVALUE 3.00e-01
gtggcaaagataacaacaacaacaacaaccattataatagcaatagtaacagtggtgactgctctatccagactgttaagtgtcaggcactgtgtaagcacttcccaggcattagttcactgattctcactcatga

SEQ ID NO: 27784 - DNA, 112 bp, Homo sapiens
  MAP TO AC004863.1; EXPRESSED IN BONE MARROW, SIGNAL = 0.95; EXPRESSED IN PLACENTA, SIGNAL = 1.2; EXPRESSED IN LUNG, SIGNAL = 1.3; EXPRESSED IN FETAL LIVER, SIGNAL = 0.95; EXPRESSED IN BRAIN, SIGNAL = 1.1; EXPRESSED IN ADULT LIVER, SIGNAL =   1; SWISSPROT HIT: P45490, EVALUE 3.20e+00; EST_HUMAN HIT: BE222778.1, EVALUE 2.00e-43
ccgggtgctgggtccacacttccctggtctctatttcctccgtttgaatgtctctttcaacattatcttcgttacactgaacatatgccttaaaaacaaaaatatgccaaaa

SEQ ID NO: 27785 - DNA, 138 bp, Homo sapiens
  MAP TO AC004869.1; EXPRESSED IN BRAIN, SIGNAL = 0.62; EXPRESSED IN BONE MARROW, SIGNAL = 1.6; EXPRESSED IN ADULT LIVER, SIGNAL = 0.57; EXPRESSED IN LUNG, SIGNAL = 0.65; NT HIT: AJ271885.2, EVALUE 1.00e-06; SWISSPROT HIT: P02381, EVALUE 1.80e+00; EST_HUMAN HIT: AI270615.1, EVALUE 8.00e-09
acattattgtcagcacccttgtagtcattgtttccaattttgatcattctagtaagtatataattgtgatttttctttatatttccataatgactaatgatattgagcatctctttcatgtgcttatttgtcatctat

SEQ ID NO: 27786 - DNA, 390 bp, Homo sapiens
  MAP TO AC005358.1; EXPRESSED IN PLACENTA, SIGNAL = 1.3; EXPRESSED IN LUNG, SIGNAL = 1.2; EXPRESSED IN BRAIN, SIGNAL = 0.96; EXPRESSED IN FETAL LIVER, SIGNAL = 1.1; EXPRESSED IN BONE MARROW, SIGNAL = 1.1; EXPRESSED IN ADULT LIVER, SIGNAL = 1.1; SWISSPROT HIT: P02381, EVALUE 9.00e-04; NT HIT: U03540.2, EVALUE 2.40e-01; EST_HUMAN HIT: AW085269.1, EVALUE 3.60e-01
agcgtggttggaattttgcaagttccgtcactctatgctcatagcaaagagactgtggcacatcctgttgtacagtatatcattgtgagcattgagtatatcattgtgagcattgagtatatcattgtgagcactgagtatatcattgtgagcgttgagtatatcattgtgagcgttgagtatatcattgtgagcgttgagtatatcattgtgagcattgagtatatcatagtgagcattgagtatatcactgtgagcgttgagtatatcattgtgaaaattgagtatatcattgtgagcattgagcaaatgcatcactgtaccctagcctgtctccagccagccttcggcatggcctccactagtggattattatatcttacttttacc

SEQ ID NO: 27787 - DNA, 99 bp, Homo sapiens
  MAP TO AC005368.1; EXPRESSED IN PLACENTA, SIGNAL = 1.4; EXPRESSED IN ADULT LIVER, SIGNAL = 1.6; EXPRESSED IN LUNG, SIGNAL = 1.4; EXPRESSED IN FETAL LIVER, SIGNAL = 1.6; EXPRESSED IN BRAIN, SIGNAL = 1.2; EXPRESSED IN BONE MARROW, SIGNAL = 1.7; NT HIT: gi6681182, EVALUE 2.00e-04; EST_HUMAN HIT: AL134881.1, EVALUE 2.00e-17
ccaacacctttaactcttttacttttttcttttgcacagatttcttttcttctccaccttcttgatccttcttggctagcagggaaaagattagaaaag

SEQ ID NO: 27788 - DNA, 98 bp, Homo sapiens
  MAP TO AC005529.7; EXPRESSED IN FETAL LIVER, SIGNAL = 0.94; EXPRESSED IN BRAIN, SIGNAL = 0.94; EXPRESSED IN BONE MARROW, SIGNAL =   1; EXPRESSED IN ADULT LIVER, SIGNAL = 0.91; EXPRESSED IN PLACENTA, SIGNAL = 0.87; EXPRESSED IN LUNG, SIGNAL = 1.1; SWISSPROT HIT: P36382, EVALUE 2.50e+00; EST_HUMAN HIT: AU132578.1, EVALUE 1.20e+00; NT HIT: Y18000.1, EVALUE 1.00e-48
tcctcgagaccctggttgtacaccctgaggtgcttctgcttcattacctgctgaaatttggagacctcttcttcctggataaccttcaagatactcat

SEQ ID NO: 27789 - DNA, 242 bp, Homo sapiens
  MAP TO AC002536.1; EXPRESSED IN PLACENTA, SIGNAL = 0.62; EXPRESSED IN LUNG, SIGNAL = 0.58; EXPRESSED IN ADULT LIVER, SIGNAL = 0.74; EXPRESSED IN BRAIN, SIGNAL = 0.68; EXPRESSED IN BONE MARROW, SIGNAL = 0.71; SWISSPROT HIT: P17671, EVALUE 1.20e+00
gggaagccccacatccgggacgtgtgtgccctgggggacacacagcaaatgactgacaaggaggaacagaaggcagcctcttgcttccagtcctgggagaccatgctgaagccctgcctcctggcttatctgtatctcctgcacaagaattccagcccaggctctgtttctagggagtgtgccctgagatgccagcgcttgagcttcgagagcacgagggggtaggttctggtggacaggga

SEQ ID NO: 27790 - DNA, 186 bp, Homo sapiens
  MAP TO AC005988.1; EXPRESSED IN LUNG, SIGNAL = 1.5; EXPRESSED IN FETAL LIVER, SIGNAL = 1.6; EXPRESSED IN BRAIN, SIGNAL = 0.87; EXPRESSED IN ADULT LIVER, SIGNAL = 1.3; EXPRESSED IN BONE MARROW, SIGNAL = 0.82; EXPRESSED IN PLACENTA, SIGNAL = 0.8; SWISSPROT HIT: P03186, EVALUE 5.10e+00; NT HIT: U82671.2, EVALUE 1.00e-07; EST_HUMAN HIT: BE070438.1, EVALUE 2.00e-07
aagatcacggtgttggcaggattggtttcttctgaggcctctgtccttggcttgcagacggctaccttcccgctgtgtcctcatgtggtctgtgtgcccgtgtccctggtgtccctcagtgtgtccacattccctctcctggtgtccaaggacaccagtcagattggattcgggtccatccccgat

SEQ ID NO: 27791 - DNA, 117 bp, Homo sapiens
  MAP TO AC006097.1; EXPRESSED IN PLACENTA, SIGNAL = 0.89; EXPRESSED IN LUNG, SIGNAL =   1; EXPRESSED IN FETAL LIVER, SIGNAL = 1.8; EXPRESSED IN BRAIN, SIGNAL = 1.1; EXPRESSED IN BONE MARROW, SIGNAL =   1; EXPRESSED IN ADULT LIVER, SIGNAL = 2.9; NT HIT: S83182.1, EVALUE 8.00e-60; SWISSPROT HIT: Q25464, EVALUE 1.00e-03; EST_HUMAN HIT: T68666.1, EVALUE 7.00e-55
cttgggagcagctgggacctgtgtaagggtgtttacagacacagcggtagtagggaggactctgggtaatgagacattggccccggccacatgggttgtccttgcacgtattttgca

SEQ ID NO: 27792 - DNA, 92 bp, Homo sapiens
  MAP TO AC004547.1; EXPRESSED IN BRAIN, SIGNAL = 0.66; EXPRESSED IN ADULT LIVER, SIGNAL = 0.4; NT HIT: AB032953.1, EVALUE 7.60e-01; EST_HUMAN HIT: AW892763.1, EVALUE 8.00e-45
ggagagctttggaagtttgtcctctacatcactgagttgattctccgcagtgttgtctgttattctattcatggaaatttaagcctgttgtt

SEQ ID NO: 27793 - DNA, 87 bp, Homo sapiens
  MAP TO AC004879.1; EXPRESSED IN LUNG, SIGNAL =   1; EXPRESSED IN FETAL LIVER, SIGNAL = 0.89; EXPRESSED IN BONE MARROW, SIGNAL = 0.94; EXPRESSED IN PLACENTA, SIGNAL = 0.84; EXPRESSED IN BRAIN, SIGNAL = 0.77; EXPRESSED IN ADULT LIVER, SIGNAL = 0.98; NT HIT: AL163280.2, EVALUE 4.50e-02; EST_HUMAN HIT: AA484689.1, EVALUE 2.70e-01
gcaagataccgaacttccctatgcttccgtttcctcattgctgcaacaggataaagatgattttaattagcatttccctcatagttt

SEQ ID NO: 27794 - DNA, 161 bp, Homo sapiens
  MAP TO AC006350.2; EXPRESSED IN ADULT LIVER, SIGNAL = 0.96; EXPRESSED IN PLACENTA, SIGNAL = 0.7; EXPRESSED IN LUNG, SIGNAL = 0.6; EXPRESSED IN FETAL LIVER, SIGNAL =   1; EXPRESSED IN BRAIN, SIGNAL = 0.66; EXPRESSED IN BONE MARROW, SIGNAL = 0.66; SWISSPROT HIT: Q92785, EVALUE 4.60e-01; EST_HUMAN HIT: AW846883.1, EVALUE 5.50e-01; NT HIT: M10806.1, EVALUE 3.70e-01
gattttgcagaaaagaagtccacagcaaaggccctggaagatgtaaaggcaaacttttactgtgaattatgtgacaagcagtatcacaaacaccaggagtttgacaatcatattaattcttatgaccatgctcataagcaggtaaggcaaagtgggaaaag

SEQ ID NO: 27795 - DNA, 194 bp, Homo sapiens
  MAP TO AC006354.2; EXPRESSED IN ADULT LIVER, SIGNAL = 0.78; EXPRESSED IN PLACENTA, SIGNAL = 0.66; EXPRESSED IN LUNG, SIGNAL = 0.62; EXPRESSED IN FETAL LIVER, SIGNAL = 0.7; EXPRESSED IN BRAIN, SIGNAL = 0.81; EXPRESSED IN BONE MARROW, SIGNAL = 0.65; SWISSPROT HIT: P37938, EVALUE 7.60e-01
aaaacaaatatgtcagcttagaacatgtagggaaacccatcatagctggaggaacggaacatggaggagatagttccacctttgtggtacagataggaatacctgatagacccagcatgactgctggaggaggggcaggaatactttggaaagccatattcctgaaaacaaaagccacagtcactaacagaaat

SEQ ID NO: 27796 - DNA, 184 bp, Homo sapiens
  MAP TO AC004984.1; EXPRESSED IN PLACENTA, SIGNAL = 0.66; EXPRESSED IN LUNG, SIGNAL = 0.69; EXPRESSED IN BRAIN, SIGNAL = 0.58; EXPRESSED IN BONE MARROW, SIGNAL = 0.56; EXPRESSED IN ADULT LIVER, SIGNAL = 0.62; EST_HUMAN HIT: AV725992.1, EVALUE 1.00e-94; NT HIT: AL163285.2, EVALUE 1.00e-25; SWISSPROT HIT: P15744, EVALUE 4.50e-01
ctgccacggatgatgactcctctgatggtcttggaaaagtcaatcaaaaaccttctgaaaagcattcatcattctagatgccatcaagaacattcgggattcatgagaggaggtcaaaatatcaacattaacaggagtttgggagaagctgactccacccctcatgggtgagtttgaggggttc

SEQ ID NO: 27797 - DNA, 453 bp, Homo sapiens
  MAP TO AC005538.2; EXPRESSED IN PLACENTA, SIGNAL = 0.74; EXPRESSED IN LUNG, SIGNAL = 0.79; EXPRESSED IN FETAL LIVER, SIGNAL =   1; EXPRESSED IN ADULT LIVER, SIGNAL = 0.8; EXPRESSED IN BRAIN, SIGNAL = 0.98; EXPRESSED IN BONE MARROW, SIGNAL = 1.3; SWISSPROT HIT: Q93083, EVALUE 2.70e+00; NT HIT: gi11430857, EVALUE 0.00e+00; EST_HUMAN HIT: BE898340.1, EVALUE 0.00e+00
actgcagtcgtatctccagaaagagtcctggtgacccagcgaaaccagcttcatctcccagagaatgggatcctttgcatccttcctccacagacatggccttagtacctagaaatgacagcctctccctacaagagaccagtagcagcagcttcttaagcagccagccctttgaagatgatgacatttgcaatgtgaccatcagtgacctgtacgcagggatgctgcactccatgagccggctgttgagcacaaagccatcaagcatcatctccaccaaaacgttcatcatgcaaaactggaactccaggaggaggcacagatataagagcaggatgaacaaaacatattgcaaaggagccagacgttctcagaggagctccaaggagaacttcataccctgctctgagcctgtgaaagggacaggggcattaagagattgcaagaacgtat

SEQ ID NO: 27798 - DNA, 279 bp, Homo sapiens
  MAP TO AC004991.1; EXPRESSED IN PLACENTA, SIGNAL = 0.99; EXPRESSED IN FETAL LIVER, SIGNAL = 1.1; EXPRESSED IN BRAIN, SIGNAL = 1.2; EXPRESSED IN BONE MARROW, SIGNAL = 1.1; EXPRESSED IN ADULT LIVER, SIGNAL = 1.1; EXPRESSED IN LUNG, SIGNAL = 1.1; EST_HUMAN HIT: BE739880.1, EVALUE 6.40e-02; NT HIT: gi11420658, EVALUE 0.00e+00; SWISSPROT HIT: P38811, EVALUE 1.00e-10
gcccctcgcctacagcacgctggccgacctcgtgcaccatgtccgccagcacctgcccctcagcgacctctccctcgccgtccagctcttcgccaagaacatcgacgatgagtccctgcccagcagcatccagaccatgtcctgcaagctcctgctgaacctggtggactgcatccgttccaagagcgagcaggagagtggcaatgggagagacgtcctgatgcggatgctggaggtaccagctcttctgagagtatcatccatcctgcactctatcct

SEQ ID NO: 27799 - DNA, 160 bp, Homo sapiens
  MAP TO AC006210.1; EXPRESSED IN ADULT LIVER, SIGNAL = 0.69; EXPRESSED IN PLACENTA, SIGNAL = 0.8; EXPRESSED IN LUNG, SIGNAL = 0.81; EXPRESSED IN FETAL LIVER, SIGNAL = 0.81; EXPRESSED IN BRAIN, SIGNAL = 0.72; EXPRESSED IN BONE MARROW, SIGNAL = 0.77; EST_HUMAN HIT: AA143063.1, EVALUE 5.50e-01; SWISSPROT HIT: O35654, EVALUE 2.30e+00; NT HIT: L10353.1, EVALUE 3.70e-01
ctgccatcgctgcttttgtcccatttgaagtgaacgcagtgctgccctcctggcaggtcctggcacagcagcttcaccacccaccgggtcccctcacaccagtggctgctgaccaccgtggtgagagagaaggcgagggcgatgcagatgggtaggagga

SEQ ID NO: 27800 - DNA, 102 bp, Homo sapiens
  MAP TO AC002465.1; EXPRESSED IN LUNG, SIGNAL = 0.54; EXPRESSED IN FETAL LIVER, SIGNAL = 0.7; EXPRESSED IN PLACENTA, SIGNAL = 0.63; EXPRESSED IN BRAIN, SIGNAL = 0.62; EXPRESSED IN BONE MARROW, SIGNAL = 0.78; EXPRESSED IN ADULT LIVER, SIGNAL = 0.52; NT HIT: AF229843.1, EVALUE 1.00e-12; EST_HUMAN HIT: AI992277.1, EVALUE 3.20e-01
caactttgtctcttcagatagctctccaaattgtatctcttctacctgtagttctttaagagcagccagaattttctgctggtctttactggtaattccatt

SEQ ID NO: 27801 - DNA, 333 bp, Homo sapiens
  MAP TO AC005411.1; EXPRESSED IN ADULT LIVER, SIGNAL = 0.96; EXPRESSED IN PLACENTA, SIGNAL = 0.96; EXPRESSED IN LUNG, SIGNAL = 0.98; EXPRESSED IN BRAIN, SIGNAL =   1; EXPRESSED IN BONE MARROW, SIGNAL = 0.85; EXPRESSED IN FETAL LIVER, SIGNAL = 0.87; SWISSPROT HIT: Q01279, EVALUE 6.50e+00; EST_HUMAN HIT: AI264458.1, EVALUE 3.10e-01
tgcaagagtggactgagcttccatcacatgccaggagatgagtcagacacagtcatggtctggaggagtccaggatcgctcattctgcaagaggcagggacagacgtgtgtgccgtggacagacagacagcctcgtctattctgcgaacatttcacatcctgtcaccagtgtggctgctcgggcacacacgagggacagcgggtgggggggaaagtaaccctatccaattcctgacattgcagccccctcacacccgctctgatctccattacatcctgggattgaatggccctataaaaatgtccaccgtgaaagacagattcaaaaactga

SEQ ID NO: 27802 - DNA, 380 bp, Homo sapiens
  MAP TO AC006213.1; EXPRESSED IN PLACENTA, SIGNAL = 1.1; EXPRESSED IN LUNG, SIGNAL = 0.94; EXPRESSED IN BRAIN, SIGNAL = 0.97; EXPRESSED IN FETAL LIVER, SIGNAL = 0.97; EXPRESSED IN BONE MARROW, SIGNAL = 0.85; EXPRESSED IN ADULT LIVER, SIGNAL = 1.1; EST_HUMAN HIT: W37163.1, EVALUE 0.00e+00; NT HIT: gi11433033, EVALUE 0.00e+00; SWISSPROT HIT: Q9UK11, EVALUE 2.00e-50
cataaagagtttctctcccacgtggactctctgatgaacatgaagagctgagatgtaacagatgctttttccacactcatcacatgtataagacttctcttctgagtataactgctgaggaagatcaaagatgggaacatcactgatggactgtttacacttcccaccctgggaaggtttctgtcctgtatgaattgtgggtagtcctgcttcaacctgggaggggacatcaccattttcaaagaactgagagttatttatgatagagtcctgagacctggttaagtcttttgcaatttgttcccagatttgctggcaggaccactcttcatgtgctcctgcttctggaacagactccaactcagtttggatcttgcctc

SEQ ID NO: 27803 - DNA, 118 bp, Homo sapiens
  MAP TO AC005629.1; EXPRESSED IN BRAIN, SIGNAL = 0.91; EXPRESSED IN PLACENTA, SIGNAL = 0.83; EXPRESSED IN LUNG, SIGNAL = 0.89; EXPRESSED IN BONE MARROW, SIGNAL = 0.68; EXPRESSED IN ADULT LIVER, SIGNAL = 0.74; EXPRESSED IN FETAL LIVER, SIGNAL = 0.83; NT HIT: AF104669.1, EVALUE 1.00e+00
  unsure 100
aaaccttgtgccattgcaatgcctcctctgggtcatggaagcgcttttgttttctcgtttggggattaaagtcttagaaatgtataaggattttttcccnacagcattggtaaacttg

SEQ ID NO: 27804 - DNA, 129 bp, Homo sapiens
  MAP TO AC006227.1; EXPRESSED IN BONE MARROW, SIGNAL = 0.72; EXPRESSED IN ADULT LIVER, SIGNAL = 0.71; EXPRESSED IN PLACENTA, SIGNAL = 0.86; EXPRESSED IN LUNG, SIGNAL = 0.77; EXPRESSED IN BRAIN, SIGNAL = 0.61; SWISSPROT HIT: P15577, EVALUE 7.00e+00; EST_HUMAN HIT: BF672121.1, EVALUE 6.60e+00
atcaacaccttcaagcgctttctccgtctctctcttttgtatttcatccagtttttccaggtgttcttagcgggagtgttggtctgctgcgagtacttcagcatagccagatatggagtctgaaatcga

SEQ ID NO: 27805 - DNA, 154 bp, Homo sapiens
  MAP TO AC006377.3; EXPRESSED IN LUNG, SIGNAL = 0.64; EXPRESSED IN BRAIN, SIGNAL = 0.59; EXPRESSED IN BONE MARROW, SIGNAL = 0.56; EXPRESSED IN ADULT LIVER, SIGNAL = 0.53; NT HIT: gi11420965, EVALUE 1.00e-81; SWISSPROT HIT: Q63421, EVALUE 1.00e-23; EST_HUMAN HIT: AW471186.1, EVALUE 9.00e-06
gtgaacgatgctcttgaaccggggcttctcgtcgctcctcctgagcatcatccccatctgccgcgtgaaggtggaggccagccagtctcggacctcagaaggcacagcatctgactgaatgtcactgagctcatcctctgtatccaggagtctc

SEQ ID NO: 27806 - DNA, 130 bp, Homo sapiens
  MAP TO AC004957.1; EXPRESSED IN PLACENTA, SIGNAL = 1.2; EXPRESSED IN LUNG, SIGNAL = 1.3; EXPRESSED IN FETAL LIVER, SIGNAL =   1; EXPRESSED IN BONE MARROW, SIGNAL = 0.89; EXPRESSED IN BRAIN, SIGNAL = 1.1; EXPRESSED IN ADULT LIVER, SIGNAL = 1.3
acagaaaggagcaaaagagagaaggggaatgtcaaggagaaaaagagagagaaaggagagaagaacaaagaagacaggagaaggaaagggaggaggagagaagggatggtgagaaggaggaagaagggaa

SEQ ID NO: 27807 - DNA, 171 bp, Homo sapiens
  MAP TO AC005365.1; EXPRESSED IN BRAIN, SIGNAL = 0.92; EXPRESSED IN PLACENTA, SIGNAL = 0.91; EXPRESSED IN LUNG, SIGNAL = 1.1; EXPRESSED IN BONE MARROW, SIGNAL = 0.79; EXPRESSED IN ADULT LIVER, SIGNAL = 0.91; EXPRESSED IN FETAL LIVER, SIGNAL = 0.72; NT HIT: AF179428.1, EVALUE 8.00e-92; SWISSPROT HIT: O60673, EVALUE 6.00e-28; EST_HUMAN HIT: W96453.1, EVALUE 5.90e-01
gtgtggagttgcatgctcgaactagacgagacttagaaccggatcctgaatttgacccaatctgtgctctgttctactgcatctcatctgacactccactgccagatacagaaaaaacagaactcacaggtgtaatagtgattgataaagacaagacagttttcagtcaag

SEQ ID NO: 27808 - DNA, 186 bp, Homo sapiens
  MAP TO AC003086.1; EXPRESSED IN ADULT LIVER, SIGNAL = 0.61; EXPRESSED IN LUNG, SIGNAL = 0.56; EXPRESSED IN BRAIN, SIGNAL =   2; EXPRESSED IN BONE MARROW, SIGNAL = 0.61; EST_HUMAN HIT: AU136800.1, EVALUE 1.00e-100; NT HIT: gi11419410, EVALUE 1.00e-100; SWISSPROT HIT: Q9ZHE1, EVALUE 1.00e+00
ctcctttggaaagaaggaacatcttcaggtcctgctcattggtaatcatcctatgaaaaactccaggctgtcgtttccttgccatgtcaatatctactcccatagtaagtaagtttttcagtaggtcctcatttttcaaaggctcactgtctgtattatgacacttcacaccaaaaagcctaaatg

SEQ ID NO: 27809 - DNA, 425 bp, Homo sapiens
  MAP TO AC005562.1; EXPRESSED IN BRAIN, SIGNAL = 1.1; EXPRESSED IN ADULT LIVER, SIGNAL = 1.3; EXPRESSED IN PLACENTA, SIGNAL = 1.2; EXPRESSED IN LUNG, SIGNAL = 1.4; EXPRESSED IN BONE MARROW, SIGNAL = 1.2; EXPRESSED IN FETAL LIVER, SIGNAL = 1.1; NT HIT: gi11426002, EVALUE 3.00e-41; SWISSPROT HIT: O42410, EVALUE 4.30e+00; EST_HUMAN HIT: BE794853.1, EVALUE 0.00e+00
tcaacttagaaccaactgttaaacaaactgagacaaaatgggaatacaacaatgtgggcattgacttgtcccctgagcccaaaagcttcaattacccattgctctcgtccccaggtgatcagcttgaaattcagctaaccgagcagctacggtccctcatccccaacgaggatgtgagaaagttcatgtctcatgttatctggaccttgaaaatggaatgttcagaaacacatgtgcaagggagctgtgccaagctcatgtcgcgaacaggcctcctgatgaagcttctcagcgagcagcaggaagcaaaggcattgaatgtagaatgggatacggaccaacaaaaaacaaattatattaatgagaacatggaacagaatgaacagaaagagcagaagtcaagtgaggtgaggagcacacagaaa

SEQ ID NO: 27810 - DNA, 91 bp, Homo sapiens
  MAP TO AC003091.1; EXPRESSED IN PLACENTA, SIGNAL = 0.82; EXPRESSED IN LUNG, SIGNAL = 0.7; EXPRESSED IN FETAL LIVER, SIGNAL = 0.72; EXPRESSED IN BONE MARROW, SIGNAL = 0.79; EXPRESSED IN BRAIN, SIGNAL = 0.83; EXPRESSED IN ADULT LIVER, SIGNAL = 0.68; SWISSPROT HIT: P50110, EVALUE 7.30e+00; NT HIT: X56037.1, EVALUE 3.00e+00
cttttctggctaacaaactcctgtccatcttcaacatccagcaatcccatgatctcttcattgaaggattgtgcaacatccctttatttcc

SEQ ID NO: 27811 - DNA, 395 bp, Homo sapiens
  MAP TO AC005586.1; EXPRESSED IN PLACENTA, SIGNAL = 0.85; EXPRESSED IN BRAIN, SIGNAL = 0.68; EXPRESSED IN BONE MARROW, SIGNAL = 0.83; EXPRESSED IN ADULT LIVER, SIGNAL = 0.86; EXPRESSED IN LUNG, SIGNAL = 0.91; EXPRESSED IN FETAL LIVER, SIGNAL = 0.81; SWISSPROT HIT: P31792, EVALUE 3.00e-08; NT HIT: D10083.1, EVALUE 4.00e-06; EST_HUMAN HIT: T87947.1, EVALUE 4.00e-72
actccaaatatgctttccacagcctccataaccatgctgccatttggactgaaagaggttttctcaccacacagggctcttccattatcaatgcctctctaataaaggcccttcttaaggctgctctcttgctggccaaggctgaggtcattcactgtaaaggacaccagaaaccaacggatcttattgctaaagaaaatgcctacgccaacaaaatagccaaggaaataaccaatgcctccacacctgctaatattccagcccccactccagaaggccagtatttttctttctcctctatgactcccacctactcttcttctaaaaacccactctaccagtcttttccaactcagggcaagaggttcttagaccatggaaaattcattcttcct

SEQ ID NO: 27812 - DNA, 276 bp, Homo sapiens
  MAP TO AC005392.1; EXPRESSED IN PLACENTA, SIGNAL = 1.4; EXPRESSED IN LUNG, SIGNAL = 0.84; EXPRESSED IN BRAIN, SIGNAL = 0.56; EXPRESSED IN BONE MARROW, SIGNAL = 3.1; EXPRESSED IN ADULT LIVER, SIGNAL = 0.79; SWISSPROT HIT: Q00888, EVALUE 4.00e-46; NT HIT: M32626.1, EVALUE 0.00e+00; EST_HUMAN HIT: BE767955.1, EVALUE 0.00e+00
cactgcggatgccaccatatcggtcccgtatttcacattgataaggtcctgtttcatttctcgtgacattgggtagaatgaggatcctgttttcaatgggtcgctttaccctgggactgacagggaggctctgaccatttagccaccaaatgtaggtgtagttcttactcttaggttcacaggtgaaggttaagacatccttattctctctggggtttaagttgttgattgtgatgtagggcttggacagctttgctgtgtggataacagagagaa

SEQ ID NO: 27813 - DNA, 400 bp, Homo sapiens
  MAP TO AC005691.1; EXPRESSED IN FETAL LIVER, SIGNAL = 0.85; EXPRESSED IN BONE MARROW, SIGNAL = 0.83; EXPRESSED IN PLACENTA, SIGNAL = 0.95; EXPRESSED IN LUNG, SIGNAL = 0.94; EXPRESSED IN BRAIN, SIGNAL = 0.79; EXPRESSED IN ADULT LIVER, SIGNAL = 0.99; NT HIT: gi4557446, EVALUE 2.50e-01; SWISSPROT HIT: P26019, EVALUE 8.80e+00; EST_HUMAN HIT: AA189080.1, EVALUE 1.00e-25
tctacattttcaaaccttttaaggagcttgttgcggtctgcaaaagcttctgctaaactcctcactgtgaattttcttcagggttctttttcttctcctgtactttccctttttcttgcctcttcttcagctatgtgatcctgttccagttccaacaattcctccttagtcaattcttcattaaccacctctgagagctcctcaatgtcatcctcatccacacccgggttgaagctgtttgccatttcaaccacagccttgttgatttttaatccccttatgcttggaaaatcctttgaagcttggataaacctcttgagtgtcttcttccagatgccattcatacactcattgatgacatcacttaagcccaagcaaggttcacgatgcaaagatgtaa

SEQ ID NO: 27814 - DNA, 169 bp, Homo sapiens
  MAP TO AC000120.1; EXPRESSED IN BRAIN, SIGNAL = 0.57; EXPRESSED IN ADULT LIVER, SIGNAL = 0.42; SWISSPROT HIT: Q16850, EVALUE 1.00e-28; EST_HUMAN HIT: AI927051.1, EVALUE 2.00e-90; NT HIT: gi11419406, EVALUE 1.00e-90
cttcgtttgtaacggataactgggttttcaggggtgtgaatcatagttgtataattcacagtgggaaagtatccatcaatgagatcaaattcatataaacgaagcatagtggaccaaattgtcttaatttgaacataggcaaaattttccccaatacaacgatgacgcc

SEQ ID NO: 27815 - DNA, 126 bp, Homo sapiens
  MAP TO AC005831.1; EXPRESSED IN LUNG, SIGNAL = 1.1; EXPRESSED IN BRAIN, SIGNAL = 0.62; EXPRESSED IN PLACENTA, SIGNAL = 0.8; EXPRESSED IN BONE MARROW, SIGNAL = 0.87; EXPRESSED IN ADULT LIVER, SIGNAL = 0.7; EST_HUMAN HIT: AA503892.1, EVALUE 6.00e-65; NT HIT: L10113.1, EVALUE 7.10e-02
gctctaaacaaatgatagttattacatcgtcctctgtctccccatgcaagagaccagaacaaaacaatatacaaaagagagagaaaatcccacacctcttggtaactggaaaggctgaggccatgg

SEQ ID NO: 27816 - DNA, 169 bp, Homo sapiens
  MAP TO AC005879.2; EXPRESSED IN PLACENTA, SIGNAL = 0.82; EXPRESSED IN ADULT LIVER, SIGNAL = 0.7; EXPRESSED IN LUNG, SIGNAL = 0.88; EXPRESSED IN FETAL LIVER, SIGNAL = 0.68; EXPRESSED IN BRAIN, SIGNAL = 0.62; EXPRESSED IN BONE MARROW, SIGNAL = 0.72; NT HIT: U95177.1, EVALUE 9.90e-02; EST_HUMAN HIT: AI217223.1, EVALUE 3.00e-83; SWISSPROT HIT: P54923, EVALUE 4.50e-01
cgcatggtaaggaatcacttccagactgggccttcccatgggcttccctgagcttcctggactcaaatcatagtccttcttttcctctcccctttggacttgataaacgcagtcccattcatttaatctccaacttagaaatccggagaatgtgagccctgggatttac

SEQ ID NO: 27817 - DNA, 85 bp, Homo sapiens
  MAP TO AC004129.1; EXPRESSED IN PLACENTA, SIGNAL = 1.2; EXPRESSED IN LUNG, SIGNAL = 1.3; EXPRESSED IN BRAIN, SIGNAL = 1.5; EXPRESSED IN ADULT LIVER, SIGNAL = 1.8; EXPRESSED IN FETAL LIVER, SIGNAL =   2; EXPRESSED IN BONE MARROW, SIGNAL = 1.4; EXPRESSED IN HELA, SIGNAL = 1.8; SWISSPROT HIT: P91620, EVALUE 5.60e+00; EST_HUMAN HIT: AI038280.1, EVALUE 1.70e-02
tagcagcaaagcaactccatgagccagcttcatgctcaggatcatcctgcgccttctcctcatgggttctgctgctcttctgcag

SEQ ID NO: 27818 - DNA, 98 bp, Homo sapiens
  MAP TO AC004827.1; EXPRESSED IN ADULT LIVER, SIGNAL = 0.56; EXPRESSED IN PLACENTA, SIGNAL = 0.59; EXPRESSED IN LUNG, SIGNAL = 0.64; EXPRESSED IN BRAIN, SIGNAL = 0.71; EXPRESSED IN BONE MARROW, SIGNAL = 0.7; EST_HUMAN HIT: R37789.1, EVALUE 1.20e+00; NT HIT: AB028994.1, EVALUE 1.00e-48
actccaatactctggaaagaaaaactcccattcagatcctgggacaagagcctgatgcagagatggtggaatatctcatctaaacggccaaatcaaga

SEQ ID NO: 27819 - DNA, 102 bp, Homo sapiens
  MAP TO AC004694.1; EXPRESSED IN LUNG, SIGNAL = 0.72; EXPRESSED IN BRAIN, SIGNAL = 0.64; EXPRESSED IN BONE MARROW, SIGNAL = 0.91; EXPRESSED IN ADULT LIVER, SIGNAL = 0.67; EXPRESSED IN PLACENTA, SIGNAL = 0.65; EST_HUMAN HIT: AV718037.1, EVALUE 3.20e-01; NT HIT: Y11356.1, EVALUE 8.60e-01
cccattattgttaccaacaaccataagcacagaagtgttttcttttctcattgtcaagggagtccagacattcctgatagcaaatgtacgtgtgtcaatgta

SEQ ID NO: 27820 - DNA, 183 bp, Homo sapiens
  MAP TO AC006084.1; EXPRESSED IN PLACENTA, SIGNAL = 0.94; EXPRESSED IN BONE MARROW, SIGNAL = 0.96; EXPRESSED IN ADULT LIVER, SIGNAL = 0.74; EXPRESSED IN LUNG, SIGNAL = 1.2; EXPRESSED IN FETAL LIVER, SIGNAL =   1; EXPRESSED IN BRAIN, SIGNAL = 0.72; SWISSPROT HIT: P08894, EVALUE 5.10e+00; EST_HUMAN HIT: AW978157.1, EVALUE 9.00e-99; NT HIT: gi7706136, EVALUE 6.00e-99
gatgaggaatccaacttttctggatcatgtaggaaacgctggctttgaccaaaatctaaactgcggtgtgataatactggaggacagtcctcttccaaggggtgatgattcattcttccagcttgtggagacagctgagcttctccagactcagagtcctcctgccaagacttaaaagcagga

SEQ ID NO: 27821 - DNA, 79 bp, Homo sapiens
  MAP TO AC004111.1; EXPRESSED IN BRAIN, SIGNAL = 0.84; EXPRESSED IN PLACENTA, SIGNAL =   1; EXPRESSED IN LUNG, SIGNAL = 0.96; EXPRESSED IN BONE MARROW, SIGNAL = 1.1; EXPRESSED IN ADULT LIVER, SIGNAL =   1; EXPRESSED IN FETAL LIVER, SIGNAL =   1; NT HIT: L27798.1, EVALUE 6.30e-01; EST_HUMAN HIT: BE561792.1, EVALUE 9.40e-01
ttacttctataactagaaaattattatcctcataggaaatcctggcaaattgctgaaaacatttctcttctgagttaat

SEQ ID NO: 27822 - DNA, 181 bp, Homo sapiens
  MAP TO AC005386.1; EXPRESSED IN LUNG, SIGNAL = 1.1; EXPRESSED IN ADULT LIVER, SIGNAL = 0.99; EXPRESSED IN PLACENTA, SIGNAL =   1; EXPRESSED IN FETAL LIVER, SIGNAL = 0.9; EXPRESSED IN BRAIN, SIGNAL = 0.93; EXPRESSED IN BONE MARROW, SIGNAL =   1; SWISSPROT HIT: P39007, EVALUE 3.00e+00; NT HIT: X97580.1, EVALUE 2.70e-02; EST_HUMAN HIT: AW975996.1, EVALUE 2.50e+00
ctgccacatgttctacatcagtggtgagatggtcatgattctagccaccgtttaccatccagccatgtctctctccaacatcagcctagtgcaagcttcagtgagctctcgcctgtgctatggcagtgtcctctcaacgagattcaccatctactgtgggttcctccagttggccccagat

SEQ ID NO: 27823 - DNA, 138 bp, Homo sapiens
  MAP TO AC005090.1; EXPRESSED IN PLACENTA, SIGNAL =   1; EXPRESSED IN ADULT LIVER, SIGNAL = 1.1; EXPRESSED IN LUNG, SIGNAL = 1.1; EXPRESSED IN FETAL LIVER, SIGNAL = 1.1; EXPRESSED IN BRAIN, SIGNAL = 0.93; EXPRESSED IN BONE MARROW, SIGNAL = 1.1; NT HIT: AE001094.1, EVALUE 2.70e-01; EST_HUMAN HIT: BE002785.1, EVALUE 3.10e-01
ctttgctcaggcttcattgcccaaagcaatctcatggccacacctgatttcaagaggaagagatgcatcatcctcctgctggagaggatggtgaatctggtgaataatactacaaagaacaacatgaagaatcacaat

SEQ ID NO: 27824 - DNA, 207 bp, Homo sapiens
  MAP TO AC004505.1; EXPRESSED IN BONE MARROW, SIGNAL = 0.55; EXPRESSED IN PLACENTA, SIGNAL = 0.62; EXPRESSED IN LUNG, SIGNAL = 0.52; EXPRESSED IN ADULT LIVER, SIGNAL = 0.53; EXPRESSED IN BRAIN, SIGNAL = 0.56; NT HIT: AF185589.1, EVALUE 1.20e-01; EST_HUMAN HIT: AW608799.1, EVALUE 1.80e-01; SWISSPROT HIT: P25159, EVALUE 6.60e-02
ccccaccccctagaggagcagctaacccagtacgtcacctttgccctgggtcagtacgtcacctttgccctgggtcacttagtacaacttttccaacagatcctccagcaatgccaccttgccattggcttcacgctcacagagagcaaaagcagccatgttttatatcaacaattggccctctgtcataactgtttcaaagacagg

SEQ ID NO: 27825 - DNA, 76 bp, Homo sapiens
  MAP TO AC006539.1; EXPRESSED IN LUNG, SIGNAL = 0.59; EXPRESSED IN FETAL LIVER, SIGNAL = 0.84; EXPRESSED IN BRAIN, SIGNAL = 0.6; EXPRESSED IN BONE MARROW, SIGNAL = 0.66; EXPRESSED IN ADULT LIVER, SIGNAL = 0.58; NT HIT: M61867.1, EVALUE 7.00e-13; EST_HUMAN HIT: AA603590.1, EVALUE 3.00e-25; SWISSPROT HIT: Q03924, EVALUE 8.00e-04
tcatgtctcttcacattccagggctcctgtctttgctccagacggctaatcagttctggcttagaaacagtaagac

SEQ ID NO: 27826 - DNA, 170 bp, Homo sapiens
  MAP TO AC004127.1; EXPRESSED IN PLACENTA, SIGNAL = 1.3; EXPRESSED IN LUNG, SIGNAL = 1.3; EXPRESSED IN BONE MARROW, SIGNAL = 1.2; EXPRESSED IN FETAL LIVER, SIGNAL = 1.1; EXPRESSED IN BRAIN, SIGNAL = 1.2; EXPRESSED IN ADULT LIVER, SIGNAL =   1; NT HIT: AF125316.1, EVALUE 9.90e-02; EST_HUMAN HIT: AI879995.1, EVALUE 5.00e-91
gttatatgaagtcaagggttaaaggtttaggtggcctcatcgtggttagcaaaacaggagactgggtggcaaagtggacctccacctccatgccctgggcagccgccaaggacggcaagctgcacttcggaattgatcctgacgatactactatcaccgaccttccctaa

SEQ ID NO: 27827 - DNA, 387 bp, Homo sapiens
  MAP TO AC005411.1; EXPRESSED IN PLACENTA, SIGNAL = 1.1; EXPRESSED IN LUNG, SIGNAL = 1.2; EXPRESSED IN FETAL LIVER, SIGNAL = 1.1; EXPRESSED IN BONE MARROW, SIGNAL = 1.1; EXPRESSED IN ADULT LIVER, SIGNAL = 1.1; EXPRESSED IN BRAIN, SIGNAL = 0.99; SWISSPROT HIT: P36018, EVALUE 9.60e-01; EST_HUMAN HIT: BF217200.1, EVALUE 0.00e+00; NT HIT: Z97343.1, EVALUE 6.10e-02
actgagcactataatgagagtttagtaatctggcctctagttttgtgtctgccagtaacttactttctgagggagtcttatctgggcctcagttcactcatttacaaactttgcgaatttgaactggaaccagatgccctgtggcagtctcagaattctctccagaactctgctggctggaggatgcatactaggagaaagacatctcaggatgagattgtgctctattatatgtcacgtttgctttgcactgagaggcctattgttaatactgccaatacctacagcatctcagacacagcgagaagcagcaatcacttccttctgaaggacagagaccacatgtatcaaaatccctgtctctggaccatctggctgctgattgta

SEQ ID NO: 27828 - DNA, 198 bp, Homo sapiens
  MAP TO AC004600.2; EXPRESSED IN PLACENTA, SIGNAL = 0.64; EXPRESSED IN FETAL LIVER, SIGNAL = 0.85; EXPRESSED IN BRAIN, SIGNAL = 0.63; EXPRESSED IN BONE MARROW, SIGNAL = 0.67; EXPRESSED IN ADULT LIVER, SIGNAL = 0.74; EXPRESSED IN LUNG, SIGNAL = 0.83; SWISSPROT HIT: O08759, EVALUE 8.00e-22; NT HIT: AF016706.1, EVALUE 1.00e-108; EST_HUMAN HIT: BE891281.1, EVALUE 1.00e-76
caatatctggattgaagatttcctccacaaccagctgaaaaaattctttggaaacacctccctcatcaactccttgttctccttcaaattccacatacaactgcttcttcaagtctgcaggattttccatagcgatcatctctagctagtgattgaaaagataaacatgaaaagaagatgattgctagtatcaggaaa

SEQ ID NO: 27829 - DNA, 221 bp, Homo sapiens
  MAP TO AC003688.1; EXPRESSED IN PLACENTA, SIGNAL = 0.64; EXPRESSED IN LUNG, SIGNAL = 0.46; EXPRESSED IN ADULT LIVER, SIGNAL = 0.46; EXPRESSED IN BRAIN, SIGNAL = 0.91; EST_HUMAN HIT: H79697.1, EVALUE 2.00e-17; SWISSPROT HIT: P14672, EVALUE 4.00e-35; NT HIT: M91463.1, EVALUE 1.00e-121
gagcgagttccagccatgagctacgtctccattgtggccatctttggcttcgtggcattttttgagattggccctggccccattccttggttcatcgtggccgagctcttcagccagggaccccgcccggcagccatggctgtggctggtttctccaactggacgagcaacttcatcattggcatgggtttccagtatgttgcggtaggtccccccgcccc

SEQ ID NO: 27830 - DNA, 180 bp, Homo sapiens
  MAP TO AC004740.1; EXPRESSED IN LUNG, SIGNAL = 0.6; EXPRESSED IN BRAIN, SIGNAL = 0.6; EXPRESSED IN BONE MARROW, SIGNAL = 0.66; EXPRESSED IN ADULT LIVER, SIGNAL = 0.66; EXPRESSED IN PLACENTA, SIGNAL = 0.65; NT HIT: AF038854.1, EVALUE 1.10e-01; EST_HUMAN HIT: AA831871.1, EVALUE 6.20e-01; SWISSPROT HIT: P20792, EVALUE 6.80e-02
gaaatattcctttggagtttatcatctttttgctccagtgtgagcttgggtgctccctagtttctgaaaagttgtcctctgggacttccctgttaacacccttctggatggagctcctgtgtcctgtgtcagggttttcctctttgctggtgtataccttcatttagtacgggctgcaca

SEQ ID NO: 27831 - DNA, 114 bp, Homo sapiens
  MAP TO AC006478.2; EXPRESSED IN PLACENTA, SIGNAL = 0.82; EXPRESSED IN LUNG, SIGNAL = 0.96; EXPRESSED IN FETAL LIVER, SIGNAL = 0.83; EXPRESSED IN BRAIN, SIGNAL = 0.95; EXPRESSED IN ADULT LIVER, SIGNAL = 0.89; EXPRESSED IN BONE MARROW, SIGNAL = 0.86; EST_HUMAN HIT: AA989415.1, EVALUE 3.70e-01; SWISSPROT HIT: Q07084, EVALUE 5.40e+00; NT HIT: AJ251973.1, EVALUE 2.50e-01
aaccatttacacagagagatttattgagccagccaccgtggcatgtgtaggagctaatgaagatgctaagaggaaagaattagcttcaggaccagagagtggagctcatttcag

SEQ ID NO: 27832 - DNA, 86 bp, Homo sapiens
  MAP TO AC004130.1; EXPRESSED IN PLACENTA, SIGNAL = 0.98; EXPRESSED IN BRAIN, SIGNAL = 0.76; EXPRESSED IN BONE MARROW, SIGNAL = 0.85; EXPRESSED IN ADULT LIVER, SIGNAL = 0.68; EXPRESSED IN LUNG, SIGNAL = 0.85; EST_HUMAN HIT: AW367936.1, EVALUE 4.00e-31; NT HIT: gi4504778, EVALUE 2.00e-41; SWISSPROT HIT: P26012, EVALUE 4.90e-01
aagacaatagatgtgcatcttcaaatgcagcatcctgtgccaggtgccttgcgctgggtccagaatgtggatggtgtgttcaagag

SEQ ID NO: 27833 - DNA, 181 bp, Homo sapiens
  MAP TO AC004605.1; EXPRESSED IN PLACENTA, SIGNAL = 1.1; EXPRESSED IN LUNG, SIGNAL = 1.1; EXPRESSED IN FETAL LIVER, SIGNAL = 1.5; EXPRESSED IN BONE MARROW, SIGNAL = 0.98; EXPRESSED IN ADULT LIVER, SIGNAL = 0.9; EXPRESSED IN BRAIN, SIGNAL = 1.1; SWISSPROT HIT: P46506, EVALUE 1.00e+00
aatggtcacgcaaacgggttttaaagcagatgctttttatttcatactctttcttcctgttttttactccactatggtgaatgcctttggactggttttcattgaaagaggacaggaggcagctgtgattctgatgtgtccactagtgggcactgcagtgcttctaacgttctgtatattt

SEQ ID NO: 27834 - DNA, 108 bp, Homo sapiens
  MAP TO AC004626.1; EXPRESSED IN PLACENTA, SIGNAL = 0.65; EXPRESSED IN BONE MARROW, SIGNAL = 0.51; EXPRESSED IN LUNG, SIGNAL = 0.55; EXPRESSED IN BRAIN, SIGNAL = 0.61; EXPRESSED IN ADULT LIVER, SIGNAL = 0.5; SWISSPROT HIT: P27120, EVALUE 7.20e+00; NT HIT: M64703.1, EVALUE 9.20e-01; EST_HUMAN HIT: AI808102.1, EVALUE 1.40e+00
gtgcagatccagtgaaaactttcccaatatccagcaattcaaagttgaagtgaatcttaggtcccatgccttcccctttgattcggaggggcagacggatttctcggc

SEQ ID NO: 27835 - DNA, 361 bp, Homo sapiens
  MAP TO AC003042.1; EXPRESSED IN FETAL LIVER, SIGNAL = 0.68; EXPRESSED IN BONE MARROW, SIGNAL = 0.74; EXPRESSED IN ADULT LIVER, SIGNAL = 0.8; EXPRESSED IN PLACENTA, SIGNAL = 0.83; EXPRESSED IN LUNG, SIGNAL = 0.7; EXPRESSED IN BRAIN, SIGNAL = 0.71; EST_HUMAN HIT: BE273103.1, EVALUE 1.00e-112; SWISSPROT HIT: P39290, EVALUE 1.00e-06
ccggctggtgatgaccttatccactccgaggaagtgtgcggaacgcagcacagccccaaaattccggggatcctggatcccatcgaggacgagccacaactgctgggggtcgtcgcctgggctcgcctccccggcctctctccaaggccggggccgcagcgggctcacctccatgcagacaccctggtggacctggtagcggcacattgtgtccagtttctgccgtctgggccgcagaactggaatgtcccgcgcctcggccatccggagcagctcggcccgcttcccctgcagcccagctttacccgcctggagcaggagccgggccacagagcggcgggcggcctgcagagccaggaga

SEQ ID NO: 27836 - DNA, 167 bp, Homo sapiens
  MAP TO AC005495.1; EXPRESSED IN BONE MARROW, SIGNAL = 0.88; EXPRESSED IN PLACENTA, SIGNAL = 0.92; EXPRESSED IN LUNG, SIGNAL = 0.98; EXPRESSED IN FETAL LIVER, SIGNAL =   1; EXPRESSED IN ADULT LIVER, SIGNAL =   1; EXPRESSED IN BRAIN, SIGNAL = 0.75; SWISSPROT HIT: P45295, EVALUE 5.90e-01; NT HIT: X61001.1, EVALUE 3.80e-01; EST_HUMAN HIT: H63370.1, EVALUE 2.00e-84
ctgtgttattgatgatcaacaggctggtacggggttcctggggaagttgtccaggagagagaaaatacaattcgtttttaaattcccaatcgatcttttcatttaacatagcatacattatattttcaacaatcaaagggaatattgcgattccaaataccaataat

SEQ ID NO: 27837 - DNA, 175 bp, Homo sapiens
  MAP TO AC004775.1; EXPRESSED IN PLACENTA, SIGNAL = 0.7; EXPRESSED IN LUNG, SIGNAL = 0.72; EXPRESSED IN BRAIN, SIGNAL = 0.61; EXPRESSED IN ADULT LIVER, SIGNAL = 0.68; EXPRESSED IN BONE MARROW, SIGNAL = 0.71; SWISSPROT HIT: P45355, EVALUE 3.90e+00; EST_HUMAN HIT: AA677831.1, EVALUE 2.00e-03
aattcctcctgctctctccattcttatgccaggccataatcaactcagcctggacatctgctgcagtcctccctcccctctccctgttgtacccaatctccttgctcccagtctggcttgcctccacactctgttttctgcttacagccggagcattccatttagaaaacagatt

SEQ ID NO: 27838 - DNA, 130 bp, Homo sapiens
  MAP TO AC004850.2; EXPRESSED IN LUNG, SIGNAL = 0.68; EXPRESSED IN PLACENTA, SIGNAL = 0.64; EXPRESSED IN BRAIN, SIGNAL = 0.76; EXPRESSED IN BONE MARROW, SIGNAL = 0.77; EXPRESSED IN ADULT LIVER, SIGNAL = 0.65; SWISSPROT HIT: P49754, EVALUE 9.00e-21; EST_HUMAN HIT: AL120542.1, EVALUE 2.00e-67; NT HIT: gi7657676, EVALUE 2.00e-67
catcatctcaaagcaaagaatcaccaatgtgccccgggatgatataagtcttcgcccagacatgtatccctgcagcctctgctggaaggacaatgtgacactgattattggctgggggacttctgtcaag

SEQ ID NO: 27839 - DNA, 149 bp, Homo sapiens
  MAP TO AC005293.1; EXPRESSED IN PLACENTA, SIGNAL = 0.82; EXPRESSED IN LUNG, SIGNAL = 0.58; EXPRESSED IN BRAIN, SIGNAL = 0.65; EXPRESSED IN BONE MARROW, SIGNAL = 0.64; EXPRESSED IN ADULT LIVER, SIGNAL = 0.62; SWISSPROT HIT: P03876, EVALUE 5.20e+00; EST_HUMAN HIT: BF576199.1, EVALUE 5.00e-01; NT HIT: AF060568.1, EVALUE 1.30e+00
tctgggaagcttcactattcctaagaataacaggaataacagattcttcattcctaccctcagaggttctgttccggccaatgtggatgaggcctaggaatctgtattttctcaaagatcatggggggattctgatcatgatttcagga

SEQ ID NO: 27840 - DNA, 140 bp, Homo sapiens
  MAP TO AC005250.1; EXPRESSED IN PLACENTA, SIGNAL = 1.2; EXPRESSED IN ADULT LIVER, SIGNAL = 1.1; EXPRESSED IN LUNG, SIGNAL = 1.4; EXPRESSED IN FETAL LIVER, SIGNAL = 0.98; EXPRESSED IN BRAIN, SIGNAL = 1.1; EXPRESSED IN BONE MARROW, SIGNAL = 0.89; SWISSPROT HIT: P24814, EVALUE 4.70e-01; EST_HUMAN HIT: BF347985.1, EVALUE 1.20e-01
cacagtcagttgcttcaaaggtgaaagggatctgaggctgctgtctgttattcccttgcagtcagccatataaatgtgactgagatttggataattcttgtctataaatttgaaggatgcatcagtaacccttttatttc

SEQ ID NO: 27841 - DNA, 219 bp, Homo sapiens
  MAP TO AC004227.1; EXPRESSED IN PLACENTA, SIGNAL = 0.74; EXPRESSED IN LUNG, SIGNAL = 0.69; EXPRESSED IN BRAIN, SIGNAL = 0.75; EXPRESSED IN BONE MARROW, SIGNAL = 0.92; EXPRESSED IN FETAL LIVER, SIGNAL = 1.1; EXPRESSED IN ADULT LIVER, SIGNAL = 0.81; SWISSPROT HIT: P38630, EVALUE 2.70e+00; NT HIT: gi7706512, EVALUE 1.00e-104; EST_HUMAN HIT: BF373810.1, EVALUE 2.00e-01
tactaaatcgtgttttatccaaaatcttcctgattttgtttcttccacctgaaacagtatttgctttaactttcttacttcctttctcctgtgatgtctgttcaatatctcctggcacatgctggatagaatggcgattactttttttttcagcaattttgggaatatgaggaacaccagatttctcttgttcagtcctaaaaagtaactctttgaaca

SEQ ID NO: 27842 - DNA, 140 bp, Homo sapiens
  MAP TO AC004825.2; EXPRESSED IN PLACENTA, SIGNAL = 1.4; EXPRESSED IN LUNG, SIGNAL = 1.4; EXPRESSED IN FETAL LIVER, SIGNAL = 1.3; EXPRESSED IN BONE MARROW, SIGNAL = 1.5; EXPRESSED IN ADULT LIVER, SIGNAL = 1.3; EXPRESSED IN BRAIN, SIGNAL = 1.3; EST_HUMAN HIT: H08818.1, EVALUE 3.00e-02; SWISSPROT HIT: O15315, EVALUE 5.30e+00; NT HIT: AB023212.1, EVALUE 9.00e-45
cttgttcttcacttccttccttacaaagactagaactttggcccagacttaaactgatatcatcagaagtcttagcagtgtctgtatctcctacaaagttaagagaaacatgtgaggaccttatattaacagtaaggctg

SEQ ID NO: 27843 - DNA, 178 bp, Homo sapiens
  MAP TO AC005154.1; EXPRESSED IN LUNG, SIGNAL = 1.1; EXPRESSED IN FETAL LIVER, SIGNAL = 1.1; EXPRESSED IN BRAIN, SIGNAL = 1.1; EXPRESSED IN PLACENTA, SIGNAL = 1.1; EXPRESSED IN BONE MARROW, SIGNAL = 1.1; EXPRESSED IN ADULT LIVER, SIGNAL = 0.99; SWISSPROT HIT: P36494, EVALUE 6.70e+00; NT HIT: AF149773.1, EVALUE 5.00e-96; EST_HUMAN HIT: BF698239.1, EVALUE 6.20e-01
aagtgaccatccatgatgcacagagcacgtaccagggtaaagttccagctgggacgcaggcatcagcaattgtagaatttgggttctcccttcctcagatccctgactgtccttggtcattcaagaaagattcactgtccctaggccaagagtcaggagcaaaacaggaacaccaagg

SEQ ID NO: 27844 - DNA, 270 bp, Homo sapiens
  MAP TO AC004659.1; EXPRESSED IN PLACENTA, SIGNAL = 0.76; EXPRESSED IN LUNG, SIGNAL = 0.67; EXPRESSED IN BRAIN, SIGNAL = 1.1; EXPRESSED IN ADULT LIVER, SIGNAL = 0.76; EXPRESSED IN BONE MARROW, SIGNAL = 0.75; NT HIT: gi11426758, EVALUE 0.00e+00; SWISSPROT HIT: P48664, EVALUE 5.00e-45; EST_HUMAN HIT: AW968405.1, EVALUE 1.60e-02
cagataatgatgcccaccagcctcataatagcctcattgaggctgtcgaagaagtccctgaggactctgcccttgtgtttcatgccaccaatgaccagcccaaaggccacagagaagaccacgaggcccagggcgttgatgccattggcggagccaggcacgggtacagtctcctcaaagctcagcatctcctgcagggtacccaaggcccgagtgacattttccaggaagctggttccgttctccactgagaatggaggaggcatggag

SEQ ID NO: 27845 - DNA, 146 bp, Homo sapiens
  MAP TO AC006524.1; EXPRESSED IN LUNG, SIGNAL = 0.74; EXPRESSED IN FETAL LIVER, SIGNAL =   1; EXPRESSED IN BRAIN, SIGNAL = 0.75; EXPRESSED IN BONE MARROW, SIGNAL = 1.2; EXPRESSED IN PLACENTA, SIGNAL = 0.92; EXPRESSED IN ADULT LIVER, SIGNAL = 0.87; EST_HUMAN HIT: AW845689.1, EVALUE 1.90e+00; NT HIT: AF158020.1, EVALUE 5.20e+00
aatcttcctcttcttcctcctcctccttctccttctctttttgtccttgttcttgttcttcttctccttcatcatcatcatcatcatcatgccattagcataataggagttaacatttatggacttggtacctatgtgttaaaagc

SEQ ID NO: 27846 - DNA, 197 bp, Homo sapiens
  MAP TO AC004796.2; EXPRESSED IN PLACENTA, SIGNAL = 1.7; EXPRESSED IN LUNG, SIGNAL = 1.4; EXPRESSED IN FETAL LIVER, SIGNAL =   1; EXPRESSED IN BRAIN, SIGNAL = 1.1; EXPRESSED IN BONE MARROW, SIGNAL = 1.1; EXPRESSED IN ADULT LIVER, SIGNAL = 1.1; NT HIT: gi4505798, EVALUE 2.00e-98; EST_HUMAN HIT: BE206270.1, EVALUE 1.00e-27; SWISSPROT HIT: P34133, EVALUE 3.80e+00
ctgtctggctgatccactagcctgccttactttttctgctactcctcctaaaagctgtacaagtttcgtctgttttagaagttcttctctaagtcgttttcctcctactgacaggagagcacccaaaacatgttcgtatcgggtactaaactgtacatcatgcagggcatctttgagaagcctaatacagcaaaata

SEQ ID NO: 27847 - DNA, 105 bp, Homo sapiens
  MAP TO AC005206.1; EXPRESSED IN PLACENTA, SIGNAL = 0.66; EXPRESSED IN LUNG, SIGNAL = 0.78; EXPRESSED IN FETAL LIVER, SIGNAL = 0.76; EXPRESSED IN BRAIN, SIGNAL = 0.93; EXPRESSED IN BONE MARROW, SIGNAL = 0.76; EXPRESSED IN ADULT LIVER, SIGNAL = 0.75; NT HIT: AF198089.1, EVALUE 2.30e-01
atggctcgccacatcagccaggaccctcacacaggaccactggaccctcacaggcacctactttctgctgaagcaattgctcataaagcctttcatctgaaacca

SEQ ID NO: 27848 - DNA, 108 bp, Homo sapiens
  MAP TO AC004662.1; EXPRESSED IN LUNG, SIGNAL = 0.92; EXPRESSED IN BRAIN, SIGNAL = 0.68; EXPRESSED IN ADULT LIVER, SIGNAL = 0.78; EXPRESSED IN PLACENTA, SIGNAL = 1.6; EXPRESSED IN FETAL LIVER, SIGNAL = 0.88; EXPRESSED IN BONE MARROW, SIGNAL = 0.77; SWISSPROT HIT: P28365, EVALUE 4.20e+00; EST_HUMAN HIT: AW339596.1, EVALUE 3.00e-54; NT HIT: AF008915.1, EVALUE 2.00e-54
ctggtacatacaaaggcccaattctgccatacttggtttaaaaagttcacgaagtctataatcttgcattaatttaacaaatacacagaaagcttcttcttctggcat

SEQ ID NO: 27849 - DNA, 250 bp, Homo sapiens
  MAP TO AC005283.1; EXPRESSED IN ADULT LIVER, SIGNAL = 0.96; EXPRESSED IN PLACENTA, SIGNAL = 1.1; EXPRESSED IN LUNG, SIGNAL = 1.1; EXPRESSED IN BRAIN, SIGNAL = 0.89; EXPRESSED IN BONE MARROW, SIGNAL = 0.91; EXPRESSED IN FETAL LIVER, SIGNAL = 0.93; EST_HUMAN HIT: AA204740.1, EVALUE 1.00e-107; NT HIT: gi11421595, EVALUE 1.00e-127; SWISSPROT HIT: Q62786, EVALUE 1.00e-10
gtcatctccctgagccgagatttcatgcttcactccggcagcgaatatgcctggaggcagagcctgggggaggtgcggctggacaagctggggaggaccaccttccgcctcaccatcttccacctgcagccttctgaccagggcgagttctactgcgaggccgccgagtggatccagaatccggatgggtcgtggtatgctatgacccgaaagcgttccgagggagccgtggtcaacgtccagccaactg

SEQ ID NO: 27850 - DNA, 162 bp, Homo sapiens
  MAP TO AC005209.1; EXPRESSED IN PLACENTA, SIGNAL = 0.66; EXPRESSED IN LUNG, SIGNAL = 0.75; EXPRESSED IN FETAL LIVER, SIGNAL = 0.79; EXPRESSED IN BRAIN, SIGNAL = 0.68; EXPRESSED IN ADULT LIVER, SIGNAL = 0.79; EXPRESSED IN BONE MARROW, SIGNAL = 0.67; NT HIT: M20543.1, EVALUE 5.80e+00; SWISSPROT HIT: Q04912, EVALUE 6.00e-01
tccaagtccactggctcaaaagtggtggtgctggggccagaactccagtcccccggtgcctcctgctccactccacacaccactccacacgacttatctgcaccattgaaggatgattccctgctgtaagtgatcagggtgaaactgggaagccacagagcc

SEQ ID NO: 27851 - DNA, 136 bp, Homo sapiens
  MAP TO AC003958.1; EXPRESSED IN LUNG, SIGNAL = 1.3; EXPRESSED IN FETAL LIVER, SIGNAL = 1.8; EXPRESSED IN BRAIN, SIGNAL = 1.4; EXPRESSED IN PLACENTA, SIGNAL = 1.4; EXPRESSED IN BONE MARROW, SIGNAL = 1.1; EXPRESSED IN ADULT LIVER, SIGNAL = 1.6; SWISSPROT HIT: O76014, EVALUE 7.00e-04; NT HIT: gi11641408, EVALUE 5.00e-71; EST_HUMAN HIT: BE541737.1, EVALUE 1.80e+00
atggctcctggagcaagaaatgtctttgtctctcctatcgatgttgggtgccagcctgtggcagaggccaatgctgcctccatgtgcctcttggccaacgtggcacacgccaacagagtccgtgtggggtcgactc

SEQ ID NO: 27852 - DNA, 145 bp, Homo sapiens
  MAP TO AC005215.1; EXPRESSED IN PLACENTA, SIGNAL = 0.9; EXPRESSED IN LUNG, SIGNAL = 0.7; EXPRESSED IN BRAIN, SIGNAL = 1.1; EXPRESSED IN FETAL LIVER, SIGNAL = 0.93; EXPRESSED IN BONE MARROW, SIGNAL = 0.92; EXPRESSED IN ADULT LIVER, SIGNAL = 0.92; SWISSPROT HIT: O24357, EVALUE 3.50e-01; EST_HUMAN HIT: BF362026.1, EVALUE 1.90e+00; NT HIT: X04398.1, EVALUE 1.30e+00
agggccagccagggaaagttagcgtctgtgatttgtgcaatcaatcttctttttccgaaggacatcctgtgggcaaggcaggtcctcccaaccccatcgccaagaatgttccttgctgacatgttcaacacgagtggaggtcaca

SEQ ID NO: 27853 - DNA, 90 bp, Homo sapiens
  MAP TO AC005094.1; EXPRESSED IN BRAIN, SIGNAL = 0.76; EXPRESSED IN ADULT LIVER, SIGNAL = 0.8; EXPRESSED IN PLACENTA, SIGNAL = 0.9; EXPRESSED IN LUNG, SIGNAL = 0.96; EXPRESSED IN BONE MARROW, SIGNAL = 0.98; EXPRESSED IN FETAL LIVER, SIGNAL = 0.79; EST_HUMAN HIT: BE072615.1, EVALUE 5.00e-12; SWISSPROT HIT: P11369, EVALUE 3.70e-01; NT HIT: AB007970.1, EVALUE 4.00e-15
aaaacataaaaatggtcaacaggtatatgaaaaggtggtcaacatcatcaatcatcaggaaaatgcaaactaaaactactgtgagtaatc

SEQ ID NO: 27854 - DNA, 84 bp, Homo sapiens
  MAP TO AC002457.1; EXPRESSED IN PLACENTA, SIGNAL = 0.74; EXPRESSED IN BRAIN, SIGNAL = 0.73; EXPRESSED IN BONE MARROW, SIGNAL = 0.6; EXPRESSED IN ADULT LIVER, SIGNAL = 0.65; EXPRESSED IN LUNG, SIGNAL = 0.68; EST_HUMAN HIT: BE792052.1, EVALUE 2.60e-01
cacattatcattgacaactgtgagaatctgcagaaaaaaacaatatggaactacaacttcacgttcttgagaaaagcttgcagt

SEQ ID NO: 27855 - DNA, 85 bp, Homo sapiens
  MAP TO AC005243.1; EXPRESSED IN BRAIN, SIGNAL = 1.3; EXPRESSED IN PLACENTA, SIGNAL = 1.1; EXPRESSED IN LUNG, SIGNAL = 1.3; EXPRESSED IN BONE MARROW, SIGNAL = 0.87; EXPRESSED IN ADULT LIVER, SIGNAL = 1.3; EXPRESSED IN FETAL LIVER, SIGNAL =   1; NT HIT: AF106693.1, EVALUE 1.70e-01; EST_HUMAN HIT: AA813222.1, EVALUE 4.00e-03
cttaaatgccttctcttccatgaagacttccttgatcactcctgtctttacagatgaacggctaactggaataccaacagaataa

SEQ ID NO: 27856 - DNA, 312 bp, Homo sapiens
  MAP TO AC004031.1; EXPRESSED IN ADULT LIVER, SIGNAL = 0.63; EXPRESSED IN PLACENTA, SIGNAL = 0.58; EXPRESSED IN LUNG, SIGNAL = 0.74; EXPRESSED IN BRAIN, SIGNAL = 1.9; EXPRESSED IN BONE MARROW, SIGNAL = 0.64; EXPRESSED IN FETAL LIVER, SIGNAL = 0.73; EST_HUMAN HIT: BE701434.1, EVALUE 0.00e+00; NT HIT: AB014514.1, EVALUE 0.00e+00
gaaacttcttgtggaccacggacatggcagcctgcgtgaaggagcttgttttccatctcctggcagagctcctgcgcacggtgcacaccctggagcagaggcggcaccccgctggcctgtcctcctcaatcgccctccagctgaacccctgcctggccatgctgatggccttgcagtcggagctccacaagctgtacgacgaggagacgcagaactgggtctcaggcggcgcctgcgggggctccgggggggcggcggccggtgaccagggcaggttctctacgtattttcatgcactcatggaagggtgcc

SEQ ID NO: 27857 - DNA, 87 bp, Homo sapiens
  MAP TO AC002080.1; EXPRESSED IN LUNG, SIGNAL = 0.6; EXPRESSED IN BRAIN, SIGNAL = 0.65; EXPRESSED IN BONE MARROW, SIGNAL = 0.65; EXPRESSED IN PLACENTA, SIGNAL = 0.62; EXPRESSED IN ADULT LIVER, SIGNAL = 0.56; EST_HUMAN HIT: AW166158.1, EVALUE 8.00e-11; NT HIT: AL163282.2, EVALUE 5.00e-05
accatgttttgacacggcagaaaaatcctcgccagaagcccagcagataccagtgccatgcttcttgtacagcctacagaaacgtga

SEQ ID NO: 27858 - DNA, 96 bp, Homo sapiens
  MAP TO AC005386.1; EXPRESSED IN BONE MARROW, SIGNAL = 0.68; EXPRESSED IN PLACENTA, SIGNAL = 0.79; EXPRESSED IN LUNG, SIGNAL = 0.86; EXPRESSED IN FETAL LIVER, SIGNAL = 0.76; EXPRESSED IN ADULT LIVER, SIGNAL = 0.74; EXPRESSED IN BRAIN, SIGNAL = 0.72; EST_HUMAN HIT: R65961.1, EVALUE 3.00e-01; SWISSPROT HIT: P42537, EVALUE 4.20e+00; NT HIT: AF280369.1, EVALUE 5.10e-02
ttggactgactgagggtcttctcctccacatactggcaattccatttcttctttctactttgtttggaaatcatattttcattcttgtaaaggaac

SEQ ID NO: 27859 - DNA, 130 bp, Homo sapiens
  MAP TO AC005393.1; EXPRESSED IN PLACENTA, SIGNAL = 0.79; EXPRESSED IN FETAL LIVER, SIGNAL = 0.68; EXPRESSED IN BRAIN, SIGNAL = 0.61; EXPRESSED IN LUNG, SIGNAL = 0.78; EXPRESSED IN BONE MARROW, SIGNAL = 0.72; EXPRESSED IN ADULT LIVER, SIGNAL = 0.64; EST_HUMAN HIT: H02655.1, EVALUE 2.00e-27; SWISSPROT HIT: P53544, EVALUE 7.00e+00; NT HIT: AF139818.1, EVALUE 7.30e-02
gcgtgccaaatggaagaggcagcagcggcagcaaatgcagacacggccatcactagggccagcaaaccagacaacttcagtgaagaaggaggagactccctcagccataactactgcaaacattcgtcca

SEQ ID NO: 27860 - DNA, 203 bp, Homo sapiens
  MAP TO AC006021.2; EXPRESSED IN LUNG, SIGNAL = 0.61; EXPRESSED IN BRAIN, SIGNAL = 0.79; EXPRESSED IN BONE MARROW, SIGNAL = 0.69; EXPRESSED IN ADULT LIVER, SIGNAL = 0.75; EXPRESSED IN PLACENTA, SIGNAL = 0.69; EST_HUMAN HIT: AW815703.1, EVALUE 2.80e+00; SWISSPROT HIT: P12430, EVALUE 5.00e+00; NT HIT: U92882.1, EVALUE 4.80e-01
ttattccaggggctttcctctttgattctgaagaacacaaggtccatttaaccattcgacaaaacaaaacgaaatttctgatcactccaccacgcagaatagaacatgccggtggacatgtgaacatgcgggagaacccatgtcgggcgttcattgttcatctgcgtctacaggagggggctacagtcaatgctcccactgtc

SEQ ID NO: 27861 - DNA, 216 bp, Homo sapiens
  MAP TO AC002486.1; EXPRESSED IN LUNG, SIGNAL = 1.1; EXPRESSED IN FETAL LIVER, SIGNAL =   1; EXPRESSED IN BRAIN, SIGNAL = 1.2; EXPRESSED IN BONE MARROW, SIGNAL = 0.95; EXPRESSED IN PLACENTA, SIGNAL = 0.96; EXPRESSED IN ADULT LIVER, SIGNAL = 1.1; NT HIT: AF045016.1, EVALUE 1.30e-01; SWISSPROT HIT: P21447, EVALUE 6.00e-15; EST_HUMAN HIT: AL040762.1, EVALUE 1.00e-111
atcatggtggatgagaatgacatcagagctttaaatgtgcggcattatcgagaccatattggagtggttagtcaagagcctgttttgttcgggaccaccatcagtaacaatatcaagtatggacgagatgatgtgactgatgaagagatggagagagcagcaagggaagcaaatgcgtatgattttatcatggagtttcctaatgtgagtacactg

SEQ ID NO: 27862 - DNA, 189 bp, Homo sapiens
  MAP TO AC004139.1; EXPRESSED IN LUNG, SIGNAL = 1.1; EXPRESSED IN FETAL LIVER, SIGNAL = 1.2; EXPRESSED IN BRAIN, SIGNAL =   1; EXPRESSED IN BONE MARROW, SIGNAL = 0.99; EXPRESSED IN PLACENTA, SIGNAL = 0.97; EXPRESSED IN ADULT LIVER, SIGNAL = 1.1; NT HIT: AB033093.1, EVALUE 6.00e-93; EST_HUMAN HIT: BF380240.1, EVALUE 8.00e-93; SWISSPROT HIT: P49695, EVALUE 4.40e-01
aacccggcctgacaggacccacaggcagcacttagacgatgtgggggccgtgcccatggtggagcgagtgacagcgccaaaagcagagcgcttgctcaacccaccaccacccgtgcatgacccaaaccacagcaaaatgagattgcgagaccattcatctgagagaagtgaaggtagggccaggcccat

SEQ ID NO: 27863 - DNA, 78 bp, Homo sapiens
  MAP TO AC005247.1; EXPRESSED IN PLACENTA, SIGNAL = 0.72; EXPRESSED IN BRAIN, SIGNAL = 0.73; EXPRESSED IN BONE MARROW, SIGNAL = 0.7; EXPRESSED IN ADULT LIVER, SIGNAL = 0.7; EXPRESSED IN LUNG, SIGNAL = 0.84; EXPRESSED IN FETAL LIVER, SIGNAL = 0.7; NT HIT: gi11420568, EVALUE 1.00e-36; SWISSPROT HIT: P49754, EVALUE 4.00e-09; EST_HUMAN HIT: AL120542.1, EVALUE 1.00e-36
tttttggcattgggcacacattatggcaaggtttatttacttgatgtccaggggaacatcactcagaagtttgatgta

SEQ ID NO: 27864 - DNA, 138 bp, Homo sapiens
  MAP TO AC004040.1; EXPRESSED IN PLACENTA, SIGNAL = 0.79; EXPRESSED IN BONE MARROW, SIGNAL = 0.88; EXPRESSED IN ADULT LIVER, SIGNAL = 0.62; EXPRESSED IN LUNG, SIGNAL = 0.66; EXPRESSED IN FETAL LIVER, SIGNAL = 0.81; EXPRESSED IN BRAIN, SIGNAL = 3.9; NT HIT: X71887.1, EVALUE 3.10e-01; SWISSPROT HIT: P46616, EVALUE 4.00e+00
acatggagccaagggctgtggaaaacaactgactgaggagccactcccaggaagccaaactggggcattatcagaaaatattattcatcctaaaaatagacccgccatccagtgggattgtagaattgctatgtacca

SEQ ID NO: 27865 - DNA, 169 bp, Homo sapiens
  MAP TO AC005255.1; EXPRESSED IN PLACENTA, SIGNAL = 0.86; EXPRESSED IN BONE MARROW, SIGNAL = 0.85; EXPRESSED IN FETAL LIVER, SIGNAL = 0.95; EXPRESSED IN LUNG, SIGNAL = 0.96; EXPRESSED IN BRAIN, SIGNAL = 1.3; EXPRESSED IN ADULT LIVER, SIGNAL =   1; NT HIT: AF016903.1, EVALUE 3.90e-01; SWISSPROT HIT: Q60953, EVALUE 7.80e-01; EST_HUMAN HIT: AA714760.1, EVALUE 1.50e-01
ttgatatccctcaatggacttggctctgttgaccttccctccttgcacaatcggtgcaggcagggcaagggggtgggtgtcaggggctggttctctggagtggatggacatttcagagaggcatagagaaggtgctcttggtctggggctggtgaactgcaggtgggtt

SEQ ID NO: 27866 - DNA, 115 bp, Homo sapiens
  MAP TO AC004605.1; EXPRESSED IN LUNG, SIGNAL = 0.58; EXPRESSED IN FETAL LIVER, SIGNAL = 0.72; EXPRESSED IN BRAIN, SIGNAL = 0.55; EXPRESSED IN BONE MARROW, SIGNAL = 0.67; EXPRESSED IN ADULT LIVER, SIGNAL = 0.92; EXPRESSED IN PLACENTA, SIGNAL = 0.7; NT HIT: U91328.1, EVALUE 3.90e+00
gcagcagcggtagctccttctctgcttcctcatcttcttccccttcttcttcctatttctcttcctcatcaccttcttagtgcagtcattctgtaacttgattactctgtgggac

SEQ ID NO: 27867 - DNA, 249 bp, Homo sapiens
  MAP TO AC004774.1; EXPRESSED IN LUNG, SIGNAL = 1.3; EXPRESSED IN FETAL LIVER, SIGNAL = 1.3; EXPRESSED IN BRAIN, SIGNAL = 1.7; EXPRESSED IN BONE MARROW, SIGNAL = 1.5; EXPRESSED IN PLACENTA, SIGNAL = 1.3; EXPRESSED IN ADULT LIVER, SIGNAL = 1.3; SWISSPROT HIT: P70397, EVALUE 1.00e-36; NT HIT: gi11420786, EVALUE 0.00e+00; EST_HUMAN HIT: BE142363.1, EVALUE 0.00e+00
gtgaagatatggtttcagaacaaacgctctaagtttaagaaactgctgaagcagggcagtaatcctcatgagagcgaccccctccagggctcggcggccctgtcgccacgctcgccagcgctgcctccagtctgggacgtttctgcctcggccaagggtgtcagtatgccccccaacagctacatgcctggctattctcactggtactcctctccacaccaggacacgatgcagagaccacagatgatg

SEQ ID NO: 27868 - DNA, 187 bp, Homo sapiens
  MAP TO AC004638.1; EXPRESSED IN PLACENTA, SIGNAL = 0.96; EXPRESSED IN ADULT LIVER, SIGNAL = 1.1; EXPRESSED IN LUNG, SIGNAL = 1.2; EXPRESSED IN FETAL LIVER, SIGNAL = 1.1; EXPRESSED IN BRAIN, SIGNAL = 1.3; EXPRESSED IN BONE MARROW, SIGNAL = 1.2; EST_HUMAN HIT: AW675158.1, EVALUE 1.60e-01; NT HIT: gi11430734, EVALUE 1.00e-101; SWISSPROT HIT: P43166, EVALUE 2.00e-31
tggcacaagctgtatcccattgcccagggagatcgccaatcacccatcaatatcatctccagccaggctgtgtactctcccagcctgcaaccactggagctttcctatgaggcctgcatgtccctcagcatcaccaacaatggccactctgtccaggtagacttcaatgacagcgatgaccgaaccg

SEQ ID NO: 27869 - DNA, 100 bp, Homo sapiens
  MAP TO AC005066.1; EXPRESSED IN PLACENTA, SIGNAL = 1.1; EXPRESSED IN BONE MARROW, SIGNAL = 1.1; EXPRESSED IN ADULT LIVER, SIGNAL = 1.1; EXPRESSED IN LUNG, SIGNAL = 1.3; EXPRESSED IN FETAL LIVER, SIGNAL = 1.1; EXPRESSED IN BRAIN, SIGNAL = 1.2; NT HIT: gi7019486, EVALUE 2.10e-01; EST_HUMAN HIT: BF368016.1, EVALUE 7.90e-02
cctggaccttgagcctgagctgaatgctgttttatatgggatgaaacatttagcaggccttaaaggggtcaatatgttttatgaagtggaggaatataag

SEQ ID NO: 27870 - DNA, 140 bp, Homo sapiens
  MAP TO AC004051.1; EXPRESSED IN BRAIN, SIGNAL = 0.71; EXPRESSED IN PLACENTA, SIGNAL = 0.73; EXPRESSED IN LUNG, SIGNAL = 0.95; EXPRESSED IN BONE MARROW, SIGNAL = 0.86; EXPRESSED IN ADULT LIVER, SIGNAL = 0.98; EXPRESSED IN FETAL LIVER, SIGNAL =   1; EST_HUMAN HIT: AA136403.1, EVALUE 3.00e-73; SWISSPROT HIT: P38159, EVALUE 3.10e+00; NT HIT: gi4504450, EVALUE 2.00e-39
gttggcagacaagaaagacggcttcccccttctatggaaatcctccacgtgattcccacggcaattcaggcggtggagcaccaagaggtggtggcagtggaggaagccgatctgatagagggggaggcagaagcagatac

SEQ ID NO: 27871 - DNA, 164 bp, Homo sapiens; identical to SEQ ID NO: 23122
  MAP TO AC004166.4; EXPRESSED IN PLACENTA, SIGNAL = 0.79; EXPRESSED IN LUNG, SIGNAL = 0.83; EXPRESSED IN BONE MARROW, SIGNAL = 1.1; EXPRESSED IN FETAL LIVER, SIGNAL = 2.1; EXPRESSED IN BRAIN, SIGNAL = 0.69; EXPRESSED IN ADULT LIVER, SIGNAL = 0.8; NT HIT: gi4506544, EVALUE 2.00e-03; EST_HUMAN HIT: N48128.1, EVALUE 2.00e-87

SEQ ID NO: 27872 - DNA, 142 bp, Homo sapiens
  MAP TO AC004222.1; EXPRESSED IN PLACENTA, SIGNAL = 1.3; EXPRESSED IN FETAL LIVER, SIGNAL = 1.5; EXPRESSED IN BRAIN, SIGNAL = 1.9; EXPRESSED IN ADULT LIVER, SIGNAL =   4; EXPRESSED IN LUNG, SIGNAL = 0.91; EXPRESSED IN BONE MARROW, SIGNAL = 0.97; NT HIT: M89914.1, EVALUE 1.00e-74; SWISSPROT HIT: Q04690, EVALUE 2.00e-21
agcccctttcgattctaggtggtggctttttatctaaaatccctgcttcatacggtgagacaatggcaggattgataaatctgaggaacatggcacttcctactgcaccgatgctgttctgagggaaacgctggctaaccac

SEQ ID NO: 27873 - DNA, 104 bp, Homo sapiens
  MAP TO AC002482.1; EXPRESSED IN PLACENTA, SIGNAL = 0.77; EXPRESSED IN FETAL LIVER, SIGNAL = 0.85; EXPRESSED IN BONE MARROW, SIGNAL = 0.7; EXPRESSED IN LUNG, SIGNAL = 0.65; EXPRESSED IN BRAIN, SIGNAL = 0.73; EXPRESSED IN ADULT LIVER, SIGNAL = 0.59; EST_HUMAN HIT: BE909451.1, EVALUE 1.30e+00; NT HIT: AB038490.1, EVALUE 2.20e-01
aggtgggagatcatgaacccaaaaaggagacagttgaaggtgtggaacccaatgctgcatcaggagagttcattgcaaagatcactcgtgacctaatcctcccc

SEQ ID NO: 27874 - DNA, 126 bp, Homo sapiens
  MAP TO AC004056.1; EXPRESSED IN PLACENTA, SIGNAL =   1; EXPRESSED IN BRAIN, SIGNAL = 1.1; EXPRESSED IN BONE MARROW, SIGNAL = 0.97; EXPRESSED IN ADULT LIVER, SIGNAL = 1.2; EXPRESSED IN LUNG, SIGNAL =   1; EXPRESSED IN FETAL LIVER, SIGNAL = 1.1; EST_HUMAN HIT: AW294881.1, EVALUE 1.60e+00; SWISSPROT HIT: P53395, EVALUE 3.10e+00
agctctccatcactgaacggtacaggaaagcccaggagaagaaaatgtttggaaaatgtaagataccacatttctactattgtaacattgggaaaaaggcagtcatcaactatcattcttaaaatc

SEQ ID NO: 27875 - DNA, 167 bp, Homo sapiens
  MAP TO AC005208.1; EXPRESSED IN PLACENTA, SIGNAL = 0.92; EXPRESSED IN BONE MARROW, SIGNAL = 0.82; EXPRESSED IN ADULT LIVER, SIGNAL = 0.78; EXPRESSED IN LUNG, SIGNAL = 0.7; EXPRESSED IN FETAL LIVER, SIGNAL = 0.72; EXPRESSED IN BRAIN, SIGNAL = 0.81; EST_HUMAN HIT: AA194201.1, EVALUE 5.70e-01; NT HIT: AB018545.1, EVALUE 1.50e+00; SWISSPROT HIT: P38851, EVALUE 8.80e+00
ggcacttccagatcagtatcagcttcaacggctcaaagttgttccaggaaatgaatgaagtgccctgtgtgacctccagtaagcttgcttatttcaagagagcttggtgttttctcgtgacaaccttgcagattacttcggtgacaatgtaagccttgttccaacac

SEQ ID NO: 27876 - DNA, 177 bp, Homo sapiens
  MAP TO AC004804.1; EXPRESSED IN PLACENTA, SIGNAL = 0.96; EXPRESSED IN LUNG, SIGNAL =   1; EXPRESSED IN BRAIN, SIGNAL = 0.99; EXPRESSED IN BONE MARROW, SIGNAL =   1; EXPRESSED IN FETAL LIVER, SIGNAL = 0.89; EXPRESSED IN ADULT LIVER, SIGNAL = 0.95; SWISSPROT HIT: P17644, EVALUE 3.40e-01; EST_HUMAN HIT: BE816111.1, EVALUE 4.00e-30; NT HIT: AB029004.1, EVALUE 2.00e-52
agagctgtcgttgagattgtcctcccgtcgtcgcgcctcctctaacatttgtgcactcttctttttttccacctgttccttgtgcttcagatttgctaccttcttattctggtctttcacttgcctaatgacagaaggagaaaaatcaagctttgcatatgtatgtatagaaacaaa

SEQ ID NO: 27877 - DNA, 282 bp, Homo sapiens
  MAP TO AC005212.1; EXPRESSED IN PLACENTA, SIGNAL = 2.4; EXPRESSED IN LUNG, SIGNAL = 0.93; EXPRESSED IN BRAIN, SIGNAL = 1.4; EXPRESSED IN BONE MARROW, SIGNAL =   1; EXPRESSED IN FETAL LIVER, SIGNAL = 0.91; EXPRESSED IN ADULT LIVER, SIGNAL = 0.83; SWISSPROT HIT: Q99758, EVALUE 1.00e-38; NT HIT: X97187.1, EVALUE 0.00e+00; EST_HUMAN HIT: BE006012.1, EVALUE 0.00e+00
ggtacatccgggaaggcttcctggccgtgcagcatgctgtggaccgggccatcatggagtaccatgccgatgccgccacacgccagctgttccagagactgacggtgaccatcaagaggttcccgtacccgccgttcatcgcagaccccttcctcgtggccatccagtaccagctgcccctgctgctgctgctcagcttcacctacaccgcgctcaccattgcccgtgctgtcgtgcaggagaaggaaaggaggctgaaggtgactgcccgctttggctccc

SEQ ID NO: 27878 - DNA, 127 bp, Homo sapiens
  MAP TO AC005365.1; EXPRESSED IN BONE MARROW, SIGNAL = 0.92; EXPRESSED IN PLACENTA, SIGNAL = 1.1; EXPRESSED IN LUNG, SIGNAL = 0.94; EXPRESSED IN FETAL LIVER, SIGNAL = 0.89; EXPRESSED IN BRAIN, SIGNAL = 0.96; EXPRESSED IN ADULT LIVER, SIGNAL =   1; SWISSPROT HIT: O60673, EVALUE 1.00e-15; EST_HUMAN HIT: AW961952.1, EVALUE 3.00e-60; NT HIT: AF157476.1, EVALUE 2.00e-60
tatgtttgtgctactgaaaggagccactaaggagcagtcttttaagattggtcaggaaattgccgaagctgtaactgctaccaatcctaaaccagtgaaattgaagtttgaaaaggtaagaggaatg

SEQ ID NO: 27879 - DNA, 122 bp, Homo sapiens
  MAP TO AC004691.1; EXPRESSED IN PLACENTA, SIGNAL = 0.78; EXPRESSED IN LUNG, SIGNAL = 0.58; EXPRESSED IN BRAIN, SIGNAL = 0.72; EXPRESSED IN BONE MARROW, SIGNAL = 1.2; EXPRESSED IN FETAL LIVER, SIGNAL = 0.7; EXPRESSED IN ADULT LIVER, SIGNAL = 0.71; EST_HUMAN HIT: AA485196.1, EVALUE 1.60e+00; SWISSPROT HIT: O95479, EVALUE 3.10e+00; NT HIT: AJ404004.1, EVALUE 1.10e+00
gatgtggaggatgagttgataagggaagaggtcatcctgtcgccagtcccatcagtgctcaagttgcagacagcatcaaaaccaattgacctctcagtagcaaaggtaagtgtaaggagact

SEQ ID NO: 27880 - DNA, 111 bp, Homo sapiens
  MAP TO AC002545.1; EXPRESSED IN LUNG, SIGNAL = 1.1; EXPRESSED IN BONE MARROW, SIGNAL = 1.1; EXPRESSED IN ADULT LIVER, SIGNAL = 0.93; EXPRESSED IN PLACENTA, SIGNAL = 0.93; EXPRESSED IN FETAL LIVER, SIGNAL = 1.1; EXPRESSED IN BRAIN, SIGNAL = 1.1; NT HIT: AE003890.1, EVALUE 2.40e-01; EST_HUMAN HIT: BF062651.1, EVALUE 9.00e-02
ggaatgatttgtcacccttcctctccataccacacttcttctcttccaccagaaacccattatctgttggagggactgaggcaaggagctgaatcatatattttcctagtg

SEQ ID NO: 27881 - DNA, 456 bp, Homo sapiens; identical to SEQ ID NO: 11257
  MAP TO AC005587.1; EXPRESSED IN LUNG, SIGNAL = 0.9; EXPRESSED IN BRAIN, SIGNAL = 0.56; EXPRESSED IN BONE MARROW, SIGNAL = 0.84; EXPRESSED IN ADULT LIVER, SIGNAL = 0.53; NT HIT: Z50156.1, EVALUE 2.90e-01; EST_HUMAN HIT: W92776.1, EVALUE 4.30e-01

SEQ ID NO: 27882 - DNA, 102 bp, Homo sapiens
  MAP TO AC005532.1; EXPRESSED IN PLACENTA, SIGNAL = 0.91; EXPRESSED IN BONE MARROW, SIGNAL = 0.88; EXPRESSED IN ADULT LIVER, SIGNAL =   1; EXPRESSED IN LUNG, SIGNAL = 0.94; EXPRESSED IN FETAL LIVER, SIGNAL =   1; EXPRESSED IN BRAIN, SIGNAL = 0.67; SWISSPROT HIT: P08547, EVALUE 1.90e-02; EST_HUMAN HIT: BE154112.1, EVALUE 1.00e-03; NT HIT: L44140.1, EVALUE 6.00e-11
catatgatccagcaattccacttctggatatatacccaatgagagcagggtttcaagaaagtatttgtacactcatggtcattgcagcagtattcacaagag

SEQ ID NO: 27883 - DNA, 129 bp, Homo sapiens
  MAP TO AC002537.1; EXPRESSED IN PLACENTA, SIGNAL = 1.1; EXPRESSED IN BRAIN, SIGNAL = 1.3; EXPRESSED IN ADULT LIVER, SIGNAL = 0.95; EXPRESSED IN LUNG, SIGNAL = 1.3; EXPRESSED IN FETAL LIVER, SIGNAL =   1; EXPRESSED IN BONE MARROW, SIGNAL = 1.1; SWISSPROT HIT: Q29466, EVALUE 2.00e-18; EST_HUMAN HIT: AU140565.1, EVALUE 1.00e-66; NT HIT: gi4885084, EVALUE 7.00e-67
ctcatcaaaaaattgctgagttttgcgaagtataaattttaattcggtcagttccaggaagtttctcttcagagcttcctggtttgtgttgatttccttcagttcattttcaatcttctcaaaattggc

SEQ ID NO: 27884 - DNA, 115 bp, Homo sapiens
  MAP TO AC004503.1; EXPRESSED IN BONE MARROW, SIGNAL = 1.5; EXPRESSED IN ADULT LIVER, SIGNAL = 1.2; EXPRESSED IN PLACENTA, SIGNAL = 1.1; EXPRESSED IN LUNG, SIGNAL = 1.1; EXPRESSED IN FETAL LIVER, SIGNAL = 1.3; EXPRESSED IN BRAIN, SIGNAL = 0.95; NT HIT: AF165214.1, EVALUE 8.50e-01; EST_HUMAN HIT: BE392296.1, EVALUE 4.00e+00
acgggctggggcgctggaggtgctgagggtgctggaggtgctggaggtgctgggggtgctggaggtgctgagggtgctggagcagcgccaggggaaaggagagccaggcagtcca

SEQ ID NO: 27885 - DNA, 159 bp, Homo sapiens
  MAP TO AC003025.1; EXPRESSED IN BONE MARROW, SIGNAL = 0.67; EXPRESSED IN LUNG, SIGNAL = 0.66; EXPRESSED IN ADULT LIVER, SIGNAL = 0.77; EXPRESSED IN BRAIN, SIGNAL = 0.61; EST_HUMAN HIT: BF348522.1, EVALUE 9.00e-06; NT HIT: gi7019512, EVALUE 5.00e-68; SWISSPROT HIT: P03186, EVALUE 9.00e-02
ctcctgcattgtgaagtccaggcaggggcccacgtcctctcggtacaccctttccaggaaggggcaggtcttgtccagggtgggggattccctccaggcctggaactctgcaaacaggattgtgtccacctgtgggggagggcaagcgagggtgggggc

SEQ ID NO: 27886 - DNA, 248 bp, Homo sapiens
  MAP TO AC002060.2; EXPRESSED IN BRAIN, SIGNAL = 0.55; EXPRESSED IN ADULT LIVER, SIGNAL = 0.58; EXPRESSED IN LUNG, SIGNAL = 0.66; EXPRESSED IN BONE MARROW, SIGNAL = 0.63; SWISSPROT HIT: P01709, EVALUE 2.00e-24; NT HIT: X57825.1, EVALUE 1.00e-130; EST_HUMAN HIT: H61392.1, EVALUE 1.00e-83
tccagagatggtcatggaggccgtattgccagacttggagccagagaaacgatcagggacccttgagggctgagtattgacattgtagatcatgggtttggggactgtgcctgggtgctgttggtaccaggagacatagtcataactcccaacatcactgctggttccagtgcaggagatggtgactgactgtccaggagacccggacacggagggaggctgaatcagggcagactgggcccaagagc

SEQ ID NO: 27887 - DNA, 79 bp, Homo sapiens
  MAP TO AC005384.1; EXPRESSED IN PLACENTA, SIGNAL = 0.77; EXPRESSED IN LUNG, SIGNAL = 0.71; EXPRESSED IN FETAL LIVER, SIGNAL = 0.73; EXPRESSED IN BRAIN, SIGNAL = 0.64; EXPRESSED IN ADULT LIVER, SIGNAL = 0.68; EXPRESSED IN BONE MARROW, SIGNAL = 0.66; NT HIT: D30052.1, EVALUE 2.50e+00; SWISSPROT HIT: P26914, EVALUE 5.60e+00; EST_HUMAN HIT: BF131686.1, EVALUE 3.70e+00
atacaaggctgatgatcccacctacatgagctacttgccaaaactgatgccaagaggactgaatgaggtgaattgctga

SEQ ID NO: 27888 - DNA, 168 bp, Homo sapiens
  MAP TO AC002090.1; EXPRESSED IN PLACENTA, SIGNAL = 0.95; EXPRESSED IN LUNG, SIGNAL = 0.76; EXPRESSED IN ADULT LIVER, SIGNAL = 0.57; EXPRESSED IN BRAIN, SIGNAL = 0.74; EXPRESSED IN BONE MARROW, SIGNAL = 0.73; NT HIT: gi9910365, EVALUE 5.00e-90; EST_HUMAN HIT: BF530723.1, EVALUE 7.00e-87; SWISSPROT HIT: O70354, EVALUE 1.00e-13
tccattgaggaggtgctccgacccttggctgtcctcactcccaaagtgtagtcggatctcctccagccggtggctgtatgtcatgggccctccagatatgttgaccaagtgctccttgtccaggcgaagggatacgtgtcttccagtgttgtacatggtcccactgac

SEQ ID NO: 27889 - DNA, 194 bp, Homo sapiens
  MAP TO AC004513.1; EXPRESSED IN BRAIN, SIGNAL = 0.73; EXPRESSED IN ADULT LIVER, SIGNAL = 0.92; EXPRESSED IN BONE MARROW, SIGNAL = 0.73; EXPRESSED IN PLACENTA, SIGNAL = 0.8; EXPRESSED IN LUNG, SIGNAL = 0.73; EXPRESSED IN FETAL LIVER, SIGNAL = 0.68; NT HIT: Z27494.1, EVALUE 7.10e+00; EST_HUMAN HIT: AA652266.1, EVALUE 4.30e-02; SWISSPROT HIT: P53242, EVALUE 5.00e+00
ccacaaccaccatcgctgtcaccatcatcatcattatcctacacttctggagacttgcctcatccaatggtgtttccttccattatgttctctacattggtgttgacttgcgtttttctcctaaaacacaccaagagtttctctgtattcttaagatgaaagccaaactatcccatggcacgcaaagccccaaa

SEQ ID NO: 27890 - DNA, 144 bp, Homo sapiens
  MAP TO AC000004.1; EXPRESSED IN LUNG, SIGNAL = 1.3; EXPRESSED IN PLACENTA, SIGNAL = 1.2; EXPRESSED IN FETAL LIVER, SIGNAL =   1; EXPRESSED IN BRAIN, SIGNAL = 1.1; EXPRESSED IN BONE MARROW, SIGNAL =   1; EXPRESSED IN ADULT LIVER, SIGNAL = 1.4; SWISSPROT HIT: Q90477, EVALUE 4.00e+00; EST_HUMAN HIT: AW939552.1, EVALUE 4.80e-01; NT HIT: AB002359.1, EVALUE 3.20e-01
gaagaattggtgaggcttcctctgcaggaagacttctgccgcaacacacacaccagcagtcctagaaccacctgctcgccgatgatgctcatttccttcaaaccaaattgctaccattacaatgatgacaagaagaacagtgtc

SEQ ID NO: 27891 - DNA, 111 bp, Homo sapiens
  MAP TO AC005592.1; EXPRESSED IN LUNG, SIGNAL = 0.95; EXPRESSED IN BRAIN, SIGNAL = 1.5; EXPRESSED IN BONE MARROW, SIGNAL = 0.96; EXPRESSED IN PLACENTA, SIGNAL = 0.93; EXPRESSED IN FETAL LIVER, SIGNAL = 1.1; EXPRESSED IN ADULT LIVER, SIGNAL =   1; NT HIT: AJ006345.1, EVALUE 2.40e-01; EST_HUMAN HIT: AI420786.1, EVALUE 3.00e-14; SWISSPROT HIT: P43473, EVALUE 4.20e+00
ccaggctacctttctggagaagccacatggagaagagaggtcctggaggttgggaggccacatggagaactgaggcatcccagctgacagccagcaccaactgccagccat

SEQ ID NO: 27892 - DNA, 154 bp, Homo sapiens
  MAP TO AC002066.1; EXPRESSED IN LUNG, SIGNAL = 1.1; EXPRESSED IN ADULT LIVER, SIGNAL = 0.94; EXPRESSED IN PLACENTA, SIGNAL = 1.1; EXPRESSED IN FETAL LIVER, SIGNAL = 0.73; EXPRESSED IN BRAIN, SIGNAL = 0.87; EXPRESSED IN BONE MARROW, SIGNAL = 1.3; NT HIT: AJ133269.1, EVALUE 1.00e-81
aaatgctgcctaatttcttcagttatctgcaaaagcaaatacttttctcgaaggatctttttcaatgagaaaacagtccctctgtggtagaatttcctctttttacatttgaaggtgaaatgtatatcatccagattatcatcaaatgttttaa

SEQ ID NO: 27893 - DNA, 305 bp, Homo sapiens
  MAP TO AC005342.1; EXPRESSED IN PLACENTA, SIGNAL = 0.68; EXPRESSED IN BONE MARROW, SIGNAL = 0.83; EXPRESSED IN ADULT LIVER, SIGNAL = 0.9; EXPRESSED IN LUNG, SIGNAL = 0.83; EXPRESSED IN FETAL LIVER, SIGNAL = 0.89; EXPRESSED IN BRAIN, SIGNAL = 0.99; SWISSPROT HIT: Q31125, EVALUE 2.00e-16
gactgcctcacggacatccccacgccaactcccacgccggactgcgtcacggacatccccacgccaactcccacgccggactgcgtcacggacatccccacgccaactcccacgccggactgcctcacggacatccccacgccaactcccacgccggacagcgttatggacatccccacgccaactcccacgccggactgcgtcacggacatccccacgccaactcccacgccggactgcgtcacggacatccccacgccaactcccacgccaggttcctgcaccccacacccggctcctcctca

SEQ ID NO: 27894 - DNA, 150 bp, Homo sapiens
  MAP TO AC005229.1; EXPRESSED IN PLACENTA, SIGNAL = 0.84; EXPRESSED IN LUNG, SIGNAL = 0.86; EXPRESSED IN BONE MARROW, SIGNAL = 0.8; EXPRESSED IN ADULT LIVER, SIGNAL = 0.83; EXPRESSED IN FETAL LIVER, SIGNAL = 0.76; EXPRESSED IN BRAIN, SIGNAL = 0.67; SWISSPROT HIT: O13332, EVALUE 3.10e+00; EST_HUMAN HIT: BE256893.1, EVALUE 3.00e-79
gtgaccttacttatggtgatgccaatccagtggtcaggagcgaggcgcccagcctgtgtctgaatcctcctactgaccctggggatccgtgcgacttgatcttagatattggtggtgaagcgccgctctccttgacagcatccaggaaag

SEQ ID NO: 27895 - DNA, 157 bp, Homo sapiens
  MAP TO AC002428.1; EXPRESSED IN PLACENTA, SIGNAL = 0.72; EXPRESSED IN LUNG, SIGNAL = 0.54; EXPRESSED IN BRAIN, SIGNAL = 1.1; EXPRESSED IN ADULT LIVER, SIGNAL = 0.44; SWISSPROT HIT: Q9V1R3, EVALUE 8.90e+00; EST_HUMAN HIT: H19634.1, EVALUE 3.40e-02; NT HIT: AF129533.1, EVALUE 2.00e-83
tgacatactgaagatgagcaaaatgctttttaatgatctgctgaatgagatcaggatgagtggacttaaaagatgaagtagctgactggttcagttcaaattcaaactttctccaaaggtcagaaatatgaaaaacttcattccacctcctacatac

SEQ ID NO: 27896 - DNA, 111 bp, Homo sapiens
  MAP TO AC004738.1; EXPRESSED IN PLACENTA, SIGNAL = 0.6; EXPRESSED IN LUNG, SIGNAL = 0.51; EXPRESSED IN BRAIN, SIGNAL = 0.61; EXPRESSED IN BONE MARROW, SIGNAL = 0.57; EXPRESSED IN ADULT LIVER, SIGNAL = 0.55; NT HIT: Z97341.2, EVALUE 9.60e-01
tcctgaatgtgagttgtaatagacatacttgttatctgacaagatcctcagttgttccactgacccatagaatgagggactctcgtgatataaacctatgaacgtagtcct

SEQ ID NO: 27897 - DNA, 123 bp, Homo sapiens
  MAP TO AC005599.5; EXPRESSED IN PLACENTA, SIGNAL = 0.72; EXPRESSED IN BRAIN, SIGNAL = 0.88; EXPRESSED IN ADULT LIVER, SIGNAL = 0.68; EXPRESSED IN LUNG, SIGNAL = 0.47; EXPRESSED IN FETAL LIVER, SIGNAL = 0.87; EXPRESSED IN BONE MARROW, SIGNAL = 0.81; EST_HUMAN HIT: AV699073.1, EVALUE 4.00e-01; NT HIT: AB032369.1, EVALUE 2.00e-63; SWISSPROT HIT: P25502, EVALUE 4.10e+00
ttataggccgggctggtaaaattttaatcgactgccatgtctcttccatccgaagctcagggtcatcatagtcatcatcactgtggccttttgctccatccaggactgcagcaaagtttcttt

SEQ ID NO: 27898 - DNA, 190 bp, Homo sapiens
  MAP TO AC004614.1; EXPRESSED IN BRAIN, SIGNAL = 0.75; EXPRESSED IN BONE MARROW, SIGNAL = 0.69; EXPRESSED IN ADULT LIVER, SIGNAL = 0.8; EXPRESSED IN PLACENTA, SIGNAL = 0.71; EXPRESSED IN LUNG, SIGNAL = 0.66; EXPRESSED IN FETAL LIVER, SIGNAL = 0.71; NT HIT: Y09124.1, EVALUE 6.90e+00; SWISSPROT HIT: Q00156, EVALUE 1.30e+00
ttgtcttctatggctacagtgccttctccagcatcataatcagaggacttgcagatgcctggtttcttggtcttgtattttatgtatgaataatattgctttattcaaaagaatatatcttatagtaaagggacatgacaagcagcaatgacaatgaaatccactggactttctacatactcattaccca

SEQ ID NO: 27899 - DNA, 109 bp, Homo sapiens
  MAP TO AC002112.1; EXPRESSED IN LUNG, SIGNAL = 1.1; EXPRESSED IN BRAIN, SIGNAL = 1.5; EXPRESSED IN BONE MARROW, SIGNAL = 0.77; EXPRESSED IN PLACENTA, SIGNAL = 0.9; EXPRESSED IN FETAL LIVER, SIGNAL = 0.84; EXPRESSED IN ADULT LIVER, SIGNAL = 0.91; NT HIT: gi11417704, EVALUE 2.00e-42; EST_HUMAN HIT: AI052586.1, EVALUE 2.00e-42
ggggatccaaaacaagccccgtggagcagcagccagagcaacagcagccgcaagacattgtttctctccctctgcccccccttccccacgcaaccccagatccatttac

SEQ ID NO: 27900 - DNA, 173 bp, Homo sapiens
  MAP TO AC004744.1; EXPRESSED IN BRAIN, SIGNAL =   1; EXPRESSED IN BONE MARROW, SIGNAL = 1.2; EXPRESSED IN LUNG, SIGNAL = 0.84; EXPRESSED IN FETAL LIVER, SIGNAL = 1.5e+02; EXPRESSED IN ADULT LIVER, SIGNAL = 1.4; EXPRESSED IN PLACENTA, SIGNAL =   1; SWISSPROT HIT: Q9Z2V6, EVALUE 2.00e-03; NT HIT: AF038560.1, EVALUE 4.00e-01; EST_HUMAN HIT: T06037.1, EVALUE 4.00e-70
attcatacctgctgtcttcctgagcaaagggctgttccacatccactgttagggaggccagggcagaaacggtctctgtctcctcttgcaactgagcaccagccagagcacagccccttggcacagccaccatccttactgacttccaatacttgcctaggaaaaacatccat

SEQ ID NO: 27901 - DNA, 138 bp, Homo sapiens
  MAP TO AC004464.1; EXPRESSED IN BRAIN, SIGNAL = 1.4; EXPRESSED IN ADULT LIVER, SIGNAL = 1.5; EXPRESSED IN PLACENTA, SIGNAL = 1.4; EXPRESSED IN BONE MARROW, SIGNAL = 1.2; EXPRESSED IN LUNG, SIGNAL = 1.5; EXPRESSED IN FETAL LIVER, SIGNAL = 1.3; SWISSPROT HIT: P35172, EVALUE 6.90e+00; NT HIT: L77570.1, EVALUE 1.00e-03; EST_HUMAN HIT: BF508155.1, EVALUE 2.00e-03
catatgggctatttgcgtactggctgactcagggctgatgtatccatcaggcacagcagacacagatttatagcccacaacatttctaggggcccatgaaaatggttttattttcatttctttgaaaatcaggagaaa

SEQ ID NO: 27902 - DNA, 182 bp, Homo sapiens
  MAP TO AC003044.1; EXPRESSED IN PLACENTA, SIGNAL = 1.2; EXPRESSED IN LUNG, SIGNAL = 0.95; EXPRESSED IN FETAL LIVER, SIGNAL = 1.3; EXPRESSED IN BRAIN, SIGNAL = 1.2; EXPRESSED IN BONE MARROW, SIGNAL = 1.2; EXPRESSED IN ADULT LIVER, SIGNAL = 1.1; NT HIT: AJ225782.1, EVALUE 3.00e-05; SWISSPROT HIT: P73440, EVALUE 1.70e+00; EST_HUMAN HIT: BF111341.1, EVALUE 3.00e-03
ccatagactggcaagagcatgcaagtggtcactttgacaaattgttggaagttgccagtggagtagctggagagtgagaaactgctggggccaaagtttttgttgccactggaaacaagggtaagaattatagcagaattcttgtcagaaaccatgcaaaagtcaagtggggtgaaatcttt

SEQ ID NO: 27903 - DNA, 286 bp, Homo sapiens
  MAP TO AC006116.1; EXPRESSED IN LUNG, SIGNAL = 0.67; EXPRESSED IN BRAIN, SIGNAL = 0.55; EXPRESSED IN ADULT LIVER, SIGNAL = 0.9; EXPRESSED IN FETAL LIVER, SIGNAL = 0.92; EXPRESSED IN BONE MARROW, SIGNAL = 0.71; NT HIT: gi4507974, EVALUE 1.00e-11; EST_HUMAN HIT: BF306337.1, EVALUE 2.00e-30; SWISSPROT HIT: Q14585, EVALUE 1.00e-23
agccatatttaaaggccttcccacattccttacatttatagggtttctcattagtataaattccttgatgattaataaggagttccttttgccagaagtcttttctacatttattatacccaaaaggtttttctctagtatgaattttctgataaaaagtaagggatgcatgctggtcaaaagtgggcatttcttcatgtctgatgatcatctgatggaaatgtctgtctggatttccctgttgtctgtcaaactggtttctgcattcccaatcatcttggaaact

SEQ ID NO: 27904 - DNA, 149 bp, Homo sapiens
  MAP TO AC002454.1; EXPRESSED IN LUNG, SIGNAL = 0.91; EXPRESSED IN ADULT LIVER, SIGNAL = 0.97; EXPRESSED IN PLACENTA, SIGNAL = 0.85; EXPRESSED IN FETAL LIVER, SIGNAL = 0.85; EXPRESSED IN BRAIN, SIGNAL = 0.64; EXPRESSED IN BONE MARROW, SIGNAL = 0.82; SWISSPROT HIT: P13545, EVALUE 3.10e+00; NT HIT: AB038267.1, EVALUE 5.00e-03; EST_HUMAN HIT: AA573274.1, EVALUE 2.00e+00
agattgatatgcagcttccaggggaaagaatgaaggaggggcaggatgtggtcttggtgaatcagaagcggccctccttccccacccctcttctgagtcagcatgcagccacatggccccacatggtgcagttctggttctcggatgag

SEQ ID NO: 27905 - DNA, 141 bp, Homo sapiens
  MAP TO AC004104.1; EXPRESSED IN ADULT LIVER, SIGNAL = 0.74; EXPRESSED IN LUNG, SIGNAL = 0.64; EXPRESSED IN FETAL LIVER, SIGNAL = 0.78; EXPRESSED IN BRAIN, SIGNAL = 0.94; EXPRESSED IN BONE MARROW, SIGNAL = 0.92; EXPRESSED IN PLACENTA, SIGNAL = 0.84; EST_HUMAN HIT: AI204374.1, EVALUE 4.70e-01
gatgcaggcaccaatcttcacattttctatgttgacagtgtccaaccagaaacttacagcagggcccacattcctgaaattatgatttgaaataatttgagctatgagttctttaactgcaaaatgtactgtatgctatta

SEQ ID NO: 27906 - DNA, 82 bp, Homo sapiens
  MAP TO AC005666.1; EXPRESSED IN LUNG, SIGNAL =   1; EXPRESSED IN BRAIN, SIGNAL = 0.94; EXPRESSED IN PLACENTA, SIGNAL = 1.1; EXPRESSED IN BONE MARROW, SIGNAL =   1; EXPRESSED IN ADULT LIVER, SIGNAL = 0.94; EXPRESSED IN FETAL LIVER, SIGNAL = 1.1; NT HIT: X03845.1, EVALUE 6.60e-01; EST_HUMAN HIT: AL040739.1, EVALUE 5.00e-12
agatcttcagtttctttggacaaaagcatactactatcttcttttttactgtcagtttcttgttcttctaagtgcctttgat

SEQ ID NO: 27907 - DNA, 151 bp, Homo sapiens
  MAP TO AC000002.1; EXPRESSED IN BONE MARROW, SIGNAL = 0.63; EXPRESSED IN PLACENTA, SIGNAL = 0.57; EXPRESSED IN LUNG, SIGNAL = 0.67; EXPRESSED IN ADULT LIVER, SIGNAL = 0.69; EXPRESSED IN BRAIN, SIGNAL = 0.71; SWISSPROT HIT: P13054, EVALUE 2.30e+00; NT HIT: AF281342.1, EVALUE 8.70e-02; EST_HUMAN HIT: BE791375.1, EVALUE 1.30e-01
tcagctgggtcacttggccgtgtacttgatcttccttcctcctttgccctggccaaggaggctccagtcctgacaatccccacagcccttgaggggtgccatagtggggactggtgcccccagcagatgaggtgggtgctcaccctggttc

SEQ ID NO: 27908 - DNA, 113 bp, Homo sapiens
  MAP TO AC005217.1; EXPRESSED IN PLACENTA, SIGNAL = 0.64; EXPRESSED IN LUNG, SIGNAL = 0.71; EXPRESSED IN BRAIN, SIGNAL = 0.79; EXPRESSED IN BONE MARROW, SIGNAL = 0.8; EXPRESSED IN ADULT LIVER, SIGNAL = 0.71; SWISSPROT HIT: P38435, EVALUE 7.10e+00; NT HIT: gi8394138, EVALUE 2.50e-01
atatgagtaatatacctttccataccttcttggtgtgtggatggcataatcagtgttgacatccaggacaacttttgagtgggagtccattttgactctgcaaaatcagtgtt

SEQ ID NO: 27909 - DNA, 181 bp, Homo sapiens
  MAP TO AC002064.1; EXPRESSED IN PLACENTA, SIGNAL = 0.74; EXPRESSED IN LUNG, SIGNAL = 0.64; EXPRESSED IN ADULT LIVER, SIGNAL = 0.61; EXPRESSED IN BRAIN, SIGNAL = 0.7; EXPRESSED IN BONE MARROW, SIGNAL = 0.65; SWISSPROT HIT: P38767, EVALUE 4.50e-01; NT HIT: AE002155.1, EVALUE 1.10e-01
tgagatctatcaatgtcaaagagcaagctttccagcactggagatcaatgtctttggtgattcctgggctgatgctggcaagcactcctttttgaaactcaaagtcagcattaaccagattgatcagcatcatgcagcccaaatgtagatagaaccatcttcttgtagcaaaacacatatt

SEQ ID NO: 27910 - DNA, 180 bp, Homo sapiens
  MAP TO AC005079.1; EXPRESSED IN BONE MARROW, SIGNAL = 0.55; EXPRESSED IN ADULT LIVER, SIGNAL = 0.67; EXPRESSED IN PLACENTA, SIGNAL = 0.71; EXPRESSED IN LUNG, SIGNAL = 0.75; EXPRESSED IN BRAIN, SIGNAL = 0.67; SWISSPROT HIT: P34578, EVALUE 6.00e-05; EST_HUMAN HIT: AA890583.1, EVALUE 2.00e-96; NT HIT: gi6912455, EVALUE 1.00e-96
caagagctgatctacttcacgttcagcagacagggaagtggggaacacactgcaaatctcagccttctgctccagagatgcaatgaggtccagctttgggtggccacggagattctgctctgcagccagctgggcaagcgagtgcagctggtgaaaaaattcatcaaaattgcggctcag

SEQ ID NO: 27911 - DNA, 121 bp, Homo sapiens
  MAP TO AC002458.1; EXPRESSED IN PLACENTA, SIGNAL = 1.3; EXPRESSED IN LUNG, SIGNAL = 1.5; EXPRESSED IN FETAL LIVER, SIGNAL = 1.1; EXPRESSED IN BONE MARROW, SIGNAL = 1.3; EXPRESSED IN ADULT LIVER, SIGNAL = 1.1; EXPRESSED IN BRAIN, SIGNAL = 1.3; EST_HUMAN HIT: R61674.1, EVALUE 2.50e-02; NT HIT: AF190930.1, EVALUE 1.70e-02
catccaggttctgaataatggtacactgccatttatccaagcctgttgatgactggttatgttttgtaaaatgaagtttcttggagaggctagttgttgtattaaatattactgtcatcat

SEQ ID NO: 27912 - DNA, 92 bp, Homo sapiens
  MAP TO AC005738.1; EXPRESSED IN PLACENTA, SIGNAL = 0.84; EXPRESSED IN LUNG, SIGNAL = 0.88; EXPRESSED IN BRAIN, SIGNAL = 0.88; EXPRESSED IN ADULT LIVER, SIGNAL = 0.93; EXPRESSED IN FETAL LIVER, SIGNAL = 0.98; EXPRESSED IN BONE MARROW, SIGNAL = 0.89; NT HIT: U72487.1, EVALUE 7.60e-01
atgacagagttgctgaggtgaaagtagctcatggcgcgagatccagcaccttctgcagtatggtcatccttgttactggggctgataggatc

SEQ ID NO: 27913 - DNA, 88 bp, Homo sapiens
  MAP TO AC003687.1; EXPRESSED IN LUNG, SIGNAL = 1.1; EXPRESSED IN BRAIN, SIGNAL = 0.79; EXPRESSED IN PLACENTA, SIGNAL = 0.77; EXPRESSED IN BONE MARROW, SIGNAL = 0.64; EXPRESSED IN ADULT LIVER, SIGNAL = 0.46; EST_HUMAN HIT: AI540070.1, EVALUE 2.70e-01
cctgcaaagatgttatccagcatcttaaaactcttgcattggcttccagccatcatgttcaggtccacctccctggacagttaggaaa

SEQ ID NO: 27914 - DNA, 91 bp, Homo sapiens
  MAP TO AC002117.1; EXPRESSED IN PLACENTA, SIGNAL = 0.6; EXPRESSED IN LUNG, SIGNAL = 0.74; EXPRESSED IN BRAIN, SIGNAL = 0.65; EXPRESSED IN BONE MARROW, SIGNAL = 0.59; EXPRESSED IN ADULT LIVER, SIGNAL = 0.63; EST_HUMAN HIT: BE882919.1, EVALUE 3.00e-13; NT HIT: gi10835072, EVALUE 2.00e-13; SWISSPROT HIT: O70310, EVALUE 7.30e+00
tgacactggagccaaaaagaagaaaaagaaacaaaaaaagaagaaagaaaaaggcagtgagacagattcagcccaggatcagcctgtgaag

SEQ ID NO: 27915 - DNA, 175 bp, Homo sapiens
  MAP TO AC005865.1; EXPRESSED IN ADULT LIVER, SIGNAL = 1.2; EXPRESSED IN PLACENTA, SIGNAL = 0.97; EXPRESSED IN LUNG, SIGNAL =   1; EXPRESSED IN BRAIN, SIGNAL = 1.2; EXPRESSED IN FETAL LIVER, SIGNAL =   1; EXPRESSED IN BONE MARROW, SIGNAL = 1.1; NT HIT: AF111103.1, EVALUE 1.00e-01; SWISSPROT HIT: P80492, EVALUE 2.30e+00; EST_HUMAN HIT: BE271437.1, EVALUE 3.90e-02
accttctcattgcacaggtagcccaagacgccctgtccttctcccactcccaggcctggccagcccatgctgaggccagcttctcagcagccacagatatcacccatctcaggttggctggctcagggtgcagtgtccatgacaccagaaccctttcctggtcctgtgacggagc

SEQ ID NO: 27916 - DNA, 141 bp, Homo sapiens
  MAP TO AC003049.1; EXPRESSED IN PLACENTA, SIGNAL = 1.2; EXPRESSED IN LUNG, SIGNAL = 0.97; EXPRESSED IN FETAL LIVER, SIGNAL = 1.1; EXPRESSED IN BRAIN, SIGNAL = 1.8; EXPRESSED IN ADULT LIVER, SIGNAL = 0.93; EXPRESSED IN BONE MARROW, SIGNAL = 1.1; SWISSPROT HIT: P21249, EVALUE 1.80e+00
gaaacagaaaagctttttaactgctatcgagagaaatttcaggaagaagaaaatgtttcttctatcccccaagagctgcagaaaaagcagacagtatacctgcatcataagctacttcaaaggcaagatggtgagaatatt

SEQ ID NO: 27917 - DNA, 108 bp, Homo sapiens
  MAP TO AC005188.1; EXPRESSED IN BRAIN, SIGNAL = 0.59; EXPRESSED IN ADULT LIVER, SIGNAL = 0.48; EXPRESSED IN PLACENTA, SIGNAL = 0.6; EXPRESSED IN BONE MARROW, SIGNAL = 0.61; EXPRESSED IN LUNG, SIGNAL = 0.58; SWISSPROT HIT: Q60963, EVALUE 3.20e+00; EST_HUMAN HIT: BF678702.1, EVALUE 3.40e-01
ctagtgaacaacagagaagacaaagtcatcacagtcagagggatataactcttggccttttggactatatccccacccagattcttcaagtgattggaatgactgaat

SEQ ID NO: 27918 - DNA, 294 bp, Homo sapiens
  MAP TO AC002067.1; EXPRESSED IN PLACENTA, SIGNAL = 0.81; EXPRESSED IN LUNG, SIGNAL = 0.76; EXPRESSED IN FETAL LIVER, SIGNAL = 0.85; EXPRESSED IN BRAIN, SIGNAL = 0.81; EXPRESSED IN BONE MARROW, SIGNAL = 1.1; EXPRESSED IN ADULT LIVER, SIGNAL = 0.81; NT HIT: gi4826977, EVALUE 1.00e-127; EST_HUMAN HIT: BE250134.1, EVALUE 1.10e+00; SWISSPROT HIT: P01267, EVALUE 1.80e+00
cggcatggagcgcagtggctgggcccggcagactttcctcctagcgctgttgctgggggcgacgctgagggcgcgcgcggcggctggctattacccccgcttttcgcccttctttttcctgtgcacccaccacggggagctggaaggggatggggagcagggcgaggtgctcatttccctgcatattgcgggcaaccccacctactacgttccgggacaagaataccatggtaggtaccgcagcacctccgcgctcgccgccgccgggtgcgcccgccagcgcacctttctcat

SEQ ID NO: 27919 - DNA, 104 bp, Homo sapiens
  MAP TO AC002478.1; EXPRESSED IN LUNG, SIGNAL = 0.66; EXPRESSED IN FETAL LIVER, SIGNAL = 0.74; EXPRESSED IN PLACENTA, SIGNAL = 0.73; EXPRESSED IN BRAIN, SIGNAL = 0.88; EXPRESSED IN BONE MARROW, SIGNAL = 0.65; EXPRESSED IN ADULT LIVER, SIGNAL = 0.78; NT HIT: U13421.1, EVALUE 2.20e-01; EST_HUMAN HIT: BF086199.1, EVALUE 2.10e-02
agtgatgaatgaatgaaataattattacatagcagtttgtttagggtctggcacattgtagggacatagatatcatcatcatcatcatcatcatcactgttcat

SEQ ID NO: 27920 - DNA, 180 bp, Homo sapiens
  MAP TO AC000111.1; EXPRESSED IN PLACENTA, SIGNAL = 0.92; EXPRESSED IN BONE MARROW, SIGNAL = 0.94; EXPRESSED IN ADULT LIVER, SIGNAL = 0.94; EXPRESSED IN LUNG, SIGNAL = 1.1; EXPRESSED IN FETAL LIVER, SIGNAL =   1; EXPRESSED IN BRAIN, SIGNAL = 1.1; NT HIT: gi11422155, EVALUE 4.00e-97; SWISSPROT HIT: P13569, EVALUE 6.00e-30; EST_HUMAN HIT: AA524439.1, EVALUE 8.00e-59
atggtgattatgggagaactggagccttcagagggtaaaattaagcacagtggaagaatttcattctgttctcagttttcctggattatgcctggcaccattaaagaaaatatcatctttggtgtttcctatgatgaatatagatacagaagcgtcatcaaagcatgccaactagaagag

SEQ ID NO: 27921 - DNA, 113 bp, Homo sapiens
  MAP TO AC005370.1; EXPRESSED IN BONE MARROW, SIGNAL = 1.2; EXPRESSED IN PLACENTA, SIGNAL = 1.1; EXPRESSED IN LUNG, SIGNAL = 1.1; EXPRESSED IN FETAL LIVER, SIGNAL = 1.1; EXPRESSED IN BRAIN, SIGNAL = 0.99; EXPRESSED IN ADULT LIVER, SIGNAL =   1; SWISSPROT HIT: P77735, EVALUE 2.80e-01; NT HIT: AL163278.2, EVALUE 4.00e-03; EST_HUMAN HIT: AA489873.1, EVALUE 3.60e-01
gtagaagagaagccccttctccctctttctctctctcagtcccgtgtgaatgcctggggcccactcgccaggcaaagggagattggcccctggaaggagccaaccctaaagag

SEQ ID NO: 27922 - DNA, 261 bp, Homo sapiens
  MAP TO AC002483.1; EXPRESSED IN FETAL LIVER, SIGNAL = 1.1; EXPRESSED IN BRAIN, SIGNAL = 1.2; EXPRESSED IN BONE MARROW, SIGNAL = 1.2; EXPRESSED IN PLACENTA, SIGNAL = 1.2; EXPRESSED IN ADULT LIVER, SIGNAL = 0.94; EXPRESSED IN LUNG, SIGNAL = 1.1; EST_HUMAN HIT: BE817156.1, EVALUE 3.00e-81; SWISSPROT HIT: P22905, EVALUE 3.20e+00; NT HIT: AL049784.1, EVALUE 0.00e+00
gcaacattaccactcacccacaatgtggatctgcagtggttggtggaatggaacgcagtcctggtcaatagccattatgatgtgaaaagcccttcccatgtctggatatttgcacagtctgtcaaagacccctgggtcctctgcctcttcagcttcctccggcaggagaacttacccaagcactgccccacagccctcagctatgcctggccttatgccttcactcggctccagtcggtgatgcctctggtggacccaaag

SEQ ID NO: 27923 - DNA, 169 bp, Homo sapiens
  MAP TO AC005483.1; EXPRESSED IN LUNG, SIGNAL = 0.81; EXPRESSED IN BRAIN, SIGNAL = 0.66; EXPRESSED IN BONE MARROW, SIGNAL = 0.67; EXPRESSED IN ADULT LIVER, SIGNAL = 0.67; EXPRESSED IN PLACENTA, SIGNAL = 0.73; EXPRESSED IN FETAL LIVER, SIGNAL = 0.68; SWISSPROT HIT: P56223, EVALUE 5.00e-20; EST_HUMAN HIT: R35139.1, EVALUE 1.00e-05; NT HIT: U91934.1, EVALUE 1.00e-90
ctgcagatggccgactggctgtacgcggggccctctgtagcactgagagcctgtcccacctgagtctgggtcaggccaagggacaggcgccggattttaaaagctttggcaaattctcggatctcctccagattaaccccatccacctcacccgctgccgtttgaggat

SEQ ID NO: 27924 - DNA, 137 bp, Homo sapiens
  MAP TO AC000115.1; EXPRESSED IN PLACENTA, SIGNAL = 1.1; EXPRESSED IN LUNG, SIGNAL = 1.3; EXPRESSED IN BRAIN, SIGNAL = 0.88; EXPRESSED IN BONE MARROW, SIGNAL = 1.3; EXPRESSED IN FETAL LIVER, SIGNAL = 1.3; EXPRESSED IN ADULT LIVER, SIGNAL = 1.2; SWISSPROT HIT: P54753, EVALUE 1.00e+00; NT HIT: U82695.2, EVALUE 7.80e-02; EST_HUMAN HIT: BF130878.1, EVALUE 4.60e-01
tggattattcagccttggttattattctctgttacctgaagctgatggagttggtaattctgaataaactgaagagcaccattgtcacccacttcctaaaggaaagtaccagctttcagaaggacaatgcccatgtc

SEQ ID NO: 27925 - DNA, 222 bp, Homo sapiens
  MAP TO AC004702.1; EXPRESSED IN PLACENTA, SIGNAL = 0.71; EXPRESSED IN LUNG, SIGNAL = 0.7; EXPRESSED IN FETAL LIVER, SIGNAL = 1.1; EXPRESSED IN ADULT LIVER, SIGNAL = 0.61; EXPRESSED IN BRAIN, SIGNAL = 0.95; EXPRESSED IN BONE MARROW, SIGNAL =   1; SWISSPROT HIT: P48383, EVALUE 4.30e-01; EST_HUMAN HIT: BE276496.1, EVALUE 1.00e-113; NT HIT: AB041533.1, EVALUE 1.00e-114
ggaggggcggctctgctggtgaccaccctgccgtggccctgcacatcccccagctccttctgcaaccgggcattcttctcctcctcctccagcagtttcctcttcacggtgcgcagctcctgctgggcctcacacttgatgtcattggccaccaccactgcggtctgcagatccgcctggaaccgcctccattcctcggtctcctcctgaaaatgtcagagc

SEQ ID NO: 27926 - DNA, 87 bp, Homo sapiens
  MAP TO AC005303.1; EXPRESSED IN BONE MARROW, SIGNAL =   1; EXPRESSED IN FETAL LIVER, SIGNAL = 4.6; EXPRESSED IN BRAIN, SIGNAL = 1.1; EXPRESSED IN ADULT LIVER, SIGNAL = 1.2; EXPRESSED IN PLACENTA, SIGNAL = 0.99; EXPRESSED IN LUNG, SIGNAL = 1.3; SWISSPROT HIT: P24092, EVALUE 7.30e+00; EST_HUMAN HIT: BE061890.1, EVALUE 6.80e-02
attcaccactgccaatggacttgtggcaaaatccaggggcacttttgtgtcatactcgacaaagggcatcagaaagattaaattgat

SEQ ID NO: 27927 - DNA, 89 bp, Homo sapiens
  MAP TO AC005754.1; EXPRESSED IN PLACENTA, SIGNAL = 0.9; EXPRESSED IN LUNG, SIGNAL =   1; EXPRESSED IN ADULT LIVER, SIGNAL = 0.96; EXPRESSED IN FETAL LIVER, SIGNAL = 1.2; EXPRESSED IN BRAIN, SIGNAL = 1.2; EXPRESSED IN BONE MARROW, SIGNAL = 1.1; NT HIT: M73789.1, EVALUE 7.30e-01; EST_HUMAN HIT: AI613509.1, EVALUE 5.00e-43
acagatgaagtcttcccagaagtgctccaggatgaggcagataagtgtcaacatgaccaattctatgtgattgtcatccaatggcatgg

SEQ ID NO: 27928 - DNA, 194 bp, Homo sapiens
  MAP TO AC005071.2; EXPRESSED IN BRAIN, SIGNAL = 2.2; EXPRESSED IN LUNG, SIGNAL = 1.5; EXPRESSED IN FETAL LIVER, SIGNAL = 1.7; EXPRESSED IN BONE MARROW, SIGNAL = 1.6; EXPRESSED IN ADULT LIVER, SIGNAL = 1.3; EXPRESSED IN PLACENTA, SIGNAL = 1.4; SWISSPROT HIT: O33231, EVALUE 3.40e-01; EST_HUMAN HIT: BF314302.1, EVALUE 1.00e-105; NT HIT: AF267747.1, EVALUE 9.00e-58
ggatgaagtctgtctgatacgtggacagcatgaacacggatatgttctggtcagccagtggggcgatgactgacttggcgatcttggtcatgccaataggctgggagctggagaagctgccaccgccggacaccacgttcagggccagccaggtggcatccgccacactcaggtgctccgaggagggcagctct

SEQ ID NO: 27929 - DNA, 311 bp, Homo sapiens
  MAP TO AC002300.1; EXPRESSED IN PLACENTA, SIGNAL = 1.1; EXPRESSED IN ADULT LIVER, SIGNAL =   1; EXPRESSED IN LUNG, SIGNAL = 1.2; EXPRESSED IN FETAL LIVER, SIGNAL = 1.1; EXPRESSED IN BRAIN, SIGNAL = 1.1; EXPRESSED IN BONE MARROW, SIGNAL = 0.91; NT HIT: gi11431474, EVALUE 0.00e+00; EST_HUMAN HIT: AW190344.1, EVALUE 4.00e-96; SWISSPROT HIT: P51168, EVALUE 5.00e-60
atgcacgtgaagaagtacctgctgaagggcctgcatcggctgcagaagggccccggctacacgtacaaggagctgctggtgtggtactgcgacaacaccaacacccacggccccaagcgcatcatctgtgaggggcccaagaagaaagccatgtggttcctgctcaccctgctcttcgccgccctcgtctgctggcagtggggcatcttcatcaggacctacttgagctgggaggtcagcgtctccctctccgtaggcttcaagaccatggacttccctgccgtcaccatctgcaatgctagccccttcaa

SEQ ID NO: 27930 - DNA, 250 bp, Homo sapiens
  MAP TO AC003108.1; EXPRESSED IN BRAIN, SIGNAL = 0.6; EXPRESSED IN BONE MARROW, SIGNAL = 0.76; EXPRESSED IN LUNG, SIGNAL = 0.53; NT HIT: gi11432438, EVALUE 0.00e+00; EST_HUMAN HIT: BE313075.1, EVALUE 0.00e+00; SWISSPROT HIT: P37965, EVALUE 2.50e-01
ccgccagcgtgttctcgggcgcgtcgtggctgccgccacggtgggcgatggcagaaatgcggtcccggggcttgagcacctgcagggccctgcaagagggcaccggctcaaagctgaagacgcgcagtagaacgaagaggctgccggtgaggaggcaggcattgaccgggctccgcgtcaccagcagcagcactagcagcaggaaggagaaagggcccaggaggccgccctggtcctcccacagccacat

SEQ ID NO: 27931 - DNA, 205 bp, Homo sapiens
  MAP TO AC005516.1; EXPRESSED IN BONE MARROW, SIGNAL = 0.99; EXPRESSED IN FETAL LIVER, SIGNAL = 0.89; EXPRESSED IN BRAIN, SIGNAL = 1.2; EXPRESSED IN ADULT LIVER, SIGNAL =   1; EXPRESSED IN PLACENTA, SIGNAL = 0.9; EXPRESSED IN LUNG, SIGNAL = 0.92; NT HIT: L27386.1, EVALUE 4.00e-94; EST_HUMAN HIT: BF678981.1, EVALUE 1.80e-01; SWISSPROT HIT: P42858, EVALUE 1.00e-16
tcacaaggaccttaagctaccatcactatgcaacaacaagccaaggctgcggggacaaacctgctgtttggctaacattgggaggatgatgtcagctatctgtcgagacagtcgcttccacttgtcttcattctccttgtggcactgctgcaggacaagaatgaacatctccaacacctataagagcgtgcacaattagaaagtc

SEQ ID NO: 27932 - DNA, 105 bp, Homo sapiens
  MAP TO AC005875.1; EXPRESSED IN PLACENTA, SIGNAL =   1; EXPRESSED IN LUNG, SIGNAL = 1.2; EXPRESSED IN BRAIN, SIGNAL = 1.1; EXPRESSED IN BONE MARROW, SIGNAL = 0.94; EXPRESSED IN ADULT LIVER, SIGNAL = 1.2; EXPRESSED IN FETAL LIVER, SIGNAL = 1.3; EST_HUMAN HIT: AI492960.1, EVALUE 2.00e-05; NT HIT: X89211.1, EVALUE 1.00e-03; SWISSPROT HIT: O66592, EVALUE 7.30e-02
gcagccaaggaagttactgtactgcctggaaggactgatcctgattaccaaggagaaattggagtgctgctacataatggaggtaaggaagagtatgtatggaat

SEQ ID NO: 27933 - DNA, 134 bp, Homo sapiens
  MAP TO AC005210.2; EXPRESSED IN BRAIN, SIGNAL = 1.2; EXPRESSED IN ADULT LIVER, SIGNAL =   1; EXPRESSED IN LUNG, SIGNAL = 1.3; EXPRESSED IN FETAL LIVER, SIGNAL = 1.2; EXPRESSED IN BONE MARROW, SIGNAL = 1.2; EXPRESSED IN PLACENTA, SIGNAL = 1.7; NT HIT: AB029010.1, EVALUE 1.20e+00; SWISSPROT HIT: Q9RUR0, EVALUE 7.00e+00
cagagaggtggaaaacaaccgaagcccaccgaaggagaactgaagaatgtgaactctgagcagcgcttaacaaataaaacacccagccaggtgaaggcagcgctccaagccatggggggtgctggggtcgcaag

SEQ ID NO: 27934 - DNA, 311 bp, Homo sapiens
  MAP TO AC002993.1; EXPRESSED IN BRAIN, SIGNAL = 0.56; EXPRESSED IN ADULT LIVER, SIGNAL = 0.41; EXPRESSED IN LUNG, SIGNAL = 0.59; EST_HUMAN HIT: BE869993.1, EVALUE 1.00e-129; NT HIT: gi8923770, EVALUE 1.00e-129
ggctagtgaatgttcccgaggaacccattgaagaggaggaagaggaggaggaggaggaagaggaagaggaagaagaagaccaggacatggatgcagatgacagagtggtggtagagtaccacgaggagctcccggctctcaagcagccccgggagcggagcgcgtctagacgatccagtgccagcagctcagactcagatgaaatggactatgatctagaactgaaaatgatttccacgccttcaccaaagaaaagcatgaaaatgactatgtatgctgacgaagtggaatctcagttgaaaaatattagg

SEQ ID NO: 27935 - DNA, 205 bp, Homo sapiens
  MAP TO AC006195.1; EXPRESSED IN LUNG, SIGNAL = 1.2; EXPRESSED IN ADULT LIVER, SIGNAL = 1.2; EXPRESSED IN PLACENTA, SIGNAL = 7.6; EXPRESSED IN FETAL LIVER, SIGNAL = 1.4; EXPRESSED IN BRAIN, SIGNAL = 1.1; EXPRESSED IN BONE MARROW, SIGNAL = 1.1; SWISSPROT HIT: P38110, EVALUE 1.70e+00; NT HIT: AF095771.1, EVALUE 6.00e-93; EST_HUMAN HIT: AA453960.1, EVALUE 5.00e-88
tatagatgatgtgggttatgatcatacatacctcaaaatgatgatcaatcaactcaaaatattcttgaaggggtatagatcccgaaaaagaacatgcaaaatctttgactccctgtttttcaaaatattcttgaaggcgaagaataagctcattggttatgagccaaagatcttcaaattgttcactctgaatgcgatatcgttc

SEQ ID NO: 27936 - DNA, 208 bp, Homo sapiens
  MAP TO AC005293.1; EXPRESSED IN PLACENTA, SIGNAL = 1.1; EXPRESSED IN LUNG, SIGNAL = 1.2; EXPRESSED IN FETAL LIVER, SIGNAL = 1.7; EXPRESSED IN BRAIN, SIGNAL = 0.95; EXPRESSED IN BONE MARROW, SIGNAL = 1.4; EXPRESSED IN ADULT LIVER, SIGNAL = 1.2; EST_HUMAN HIT: BF676744.1, EVALUE 7.30e-01; SWISSPROT HIT: P29935, EVALUE 2.90e+00; NT HIT: V01109.1, EVALUE 8.00e-03
tgggaaggaggttgcaccttccgtaggtgatccttggtgatgtgcctctgccttaggacaccatccatcttacgtgctgtaatgaggacattgccccccacccactcccaagcagggcccccaaagaggccagtcatgttatttaaggctttatctctacacaaataataaatgcagagatcacaggcatggggaagttaattagtat

SEQ ID NO: 27937 - DNA, 155 bp, Homo sapiens
  MAP TO AC005722.1; EXPRESSED IN LUNG, SIGNAL =   1; EXPRESSED IN FETAL LIVER, SIGNAL = 0.8; EXPRESSED IN BRAIN, SIGNAL = 1.4; EXPRESSED IN BONE MARROW, SIGNAL = 0.72; EXPRESSED IN PLACENTA, SIGNAL = 0.94; EXPRESSED IN ADULT LIVER, SIGNAL = 0.95; NT HIT: gi7662209, EVALUE 5.00e-71; EST_HUMAN HIT: H11144.1, EVALUE 8.00e-71; SWISSPROT HIT: O75385, EVALUE 4.00e-13
gttcagtctgcagccctggatgagatgtttcagcagaccgaagatattgtttatcgctatcataaggcagcccttcttttggaaggcctaagtaggattctacaggaccctgcagatattgaaaatgtgcataaatgtaagttgacttacaaagt

SEQ ID NO: 27938 - DNA, 197 bp, Homo sapiens
  MAP TO AC002303.1; EXPRESSED IN LUNG, SIGNAL = 0.62; EXPRESSED IN BRAIN, SIGNAL = 1.5; EXPRESSED IN BONE MARROW, SIGNAL = 0.63; EXPRESSED IN ADULT LIVER, SIGNAL = 0.5; SWISSPROT HIT: Q22498, EVALUE 7.50e-01; EST_HUMAN HIT: BE879292.1, EVALUE 4.00e-73; NT HIT: gi11431469, EVALUE 1.00e-107
tggctgcctttagatggggcttcagagcaggcctcccaggcacttccagaggaggacggccggacgcctgccctgcctgactcctgctttatcgttctccgttcactgatgaagcttggcttctccacggtgttgctggcagggtgcccgtagatgaggtaccacagaaacatgtggaccacccgcaggcgaggcat

SEQ ID NO: 27939 - DNA, 133 bp, Homo sapiens; identical to SEQ ID NO: 27325
  MAP TO AC004738.1; EXPRESSED IN LUNG, SIGNAL =   1; EXPRESSED IN BONE MARROW, SIGNAL = 0.96; EXPRESSED IN PLACENTA, SIGNAL = 1.1; EXPRESSED IN FETAL LIVER, SIGNAL = 0.96; EXPRESSED IN BRAIN, SIGNAL = 0.85; EXPRESSED IN ADULT LIVER, SIGNAL =   1; EST_HUMAN HIT: BE963688.2, EVALUE 6.90e+00; NT HIT: AF229247.1, EVALUE 3.00e-01; SWISSPROT HIT: P52638, EVALUE 8.10e-01

SEQ ID NO: 27940 - DNA, 115 bp, Homo sapiens
  MAP TO AC005586.1; EXPRESSED IN LUNG, SIGNAL = 0.82; EXPRESSED IN FETAL LIVER, SIGNAL =   1; EXPRESSED IN BONE MARROW, SIGNAL = 0.83; EXPRESSED IN PLACENTA, SIGNAL = 0.83; EXPRESSED IN BRAIN, SIGNAL = 1.1; EXPRESSED IN ADULT LIVER, SIGNAL = 0.89; NT HIT: M89948.1, EVALUE 2.50e-01; EST_HUMAN HIT: AI291407.1, EVALUE 2.00e-58; SWISSPROT HIT: P56730, EVALUE 6.30e-01
ctgctgagcctttccaagcgaaatgccccacgtgcgccaacggccacctcggccgtcgccccacgcttggcccgcagccagaggaagcccagcaacttctgctctttcttaattt

SEQ ID NO: 27941 - DNA, 153 bp, Homo sapiens
  MAP TO AC004746.1; EXPRESSED IN PLACENTA, SIGNAL = 1.1; EXPRESSED IN LUNG, SIGNAL = 1.2; EXPRESSED IN FETAL LIVER, SIGNAL = 1.2; EXPRESSED IN ADULT LIVER, SIGNAL = 1.2; EXPRESSED IN BRAIN, SIGNAL = 1.1; EXPRESSED IN BONE MARROW, SIGNAL = 1.1; NT HIT: X02212.1, EVALUE 5.40e+00
agcacatactttaactattttggagaagggagaaatgctgagtgttccagcagctatcataataacccttgcatatttttcagtagcataagattagaattatgggaacaagaaggagatgcagccatgtgggatggaggagaagcaagagaa

SEQ ID NO: 27942 - DNA, 113 bp, Homo sapiens
  MAP TO AC002119.1; EXPRESSED IN BRAIN, SIGNAL = 1.7; EXPRESSED IN ADULT LIVER, SIGNAL = 0.65; EXPRESSED IN PLACENTA, SIGNAL = 1.1; EXPRESSED IN LUNG, SIGNAL = 1.1; EXPRESSED IN BONE MARROW, SIGNAL = 0.93; EXPRESSED IN FETAL LIVER, SIGNAL = 1.2; EST_HUMAN HIT: AU119016.1, EVALUE 3.60e-01; NT HIT: AB027571.1, EVALUE 1.60e-02
ttatttgggggtgacagtaattatggagctggagtgctcctcgacaaagacagacagagctcctcgcagagggatggtttccatggcaatagcatcagcatctgaatgacttc

SEQ ID NO: 27943 - DNA, 172 bp, Homo sapiens
  MAP TO AC004848.1; EXPRESSED IN BONE MARROW, SIGNAL = 1.2; EXPRESSED IN PLACENTA, SIGNAL = 1.1; EXPRESSED IN LUNG, SIGNAL = 1.3; EXPRESSED IN FETAL LIVER, SIGNAL = 1.1; EXPRESSED IN ADULT LIVER, SIGNAL = 1.2; EXPRESSED IN BRAIN, SIGNAL = 1.2; NT HIT: gi11421514, EVALUE 8.00e-89; EST_HUMAN HIT: BE694785.1, EVALUE 2.30e+00; SWISSPROT HIT: Q14563, EVALUE 5.00e-25
cttttgaaaatccttgatattaaccaggtcgaatgaaaatatgtgatcctttgctccaacatacagcctactccgttcctcatccaaaaggaaggtatgataactggagctgttggccaagccattgaaagtgatcacattgttggattccaacatttctgcaaggtaacaa

SEQ ID NO: 27944 - DNA, 253 bp, Homo sapiens
  MAP TO AC006463.3; EXPRESSED IN PLACENTA, SIGNAL = 0.74; EXPRESSED IN LUNG, SIGNAL = 0.93; EXPRESSED IN BRAIN, SIGNAL = 0.95; EXPRESSED IN BONE MARROW, SIGNAL = 0.77; EXPRESSED IN FETAL LIVER, SIGNAL = 0.79; EXPRESSED IN ADULT LIVER, SIGNAL = 0.73; NT HIT: AJ299427.1, EVALUE 6.10e-01; EST_HUMAN HIT: AA897680.1, EVALUE 6.00e-05; SWISSPROT HIT: P15926, EVALUE 4.00e-04
caaacaggcagactcatggctggccctcatcgaacgtggaggctgtacttttacacataaaatcaacgtggcagcagagaagggagcaaatggggtgatcatctacaactatcaaggtacgggcagtaaagtatttcccatgtctcaccaggggacggaaaatatagtcgcggtgatgataagcaacctgaaaggcatggaaattttgcactcgattcagaaaggagtctatgtgacagtcatcattgaagtg

SEQ ID NO: 27945 - DNA, 304 bp, Homo sapiens
  MAP TO AC005317.1; EXPRESSED IN FETAL LIVER, SIGNAL = 0.69; EXPRESSED IN PLACENTA, SIGNAL = 0.75; EXPRESSED IN LUNG, SIGNAL = 0.49; EXPRESSED IN BRAIN, SIGNAL = 0.83; EXPRESSED IN BONE MARROW, SIGNAL = 0.57; EXPRESSED IN ADULT LIVER, SIGNAL = 0.8; NT HIT: U60325.1, EVALUE 1.00e-115; EST_HUMAN HIT: T86774.1, EVALUE 1.00e-115; SWISSPROT HIT: P54098, EVALUE 6.00e-35
aaaagtcaaaactgaccagtctggcccaaggaacgctcacccaaagccccacataggagcacatggccaggctagaggccatgggccccgcatacctggtcaagaggttggtgatctgcaaggccagggcagcgcggtagcggtcctcctcccgcaccaggtagcgaacctcgtcatggatgctgatgcagaagcgcccatctatggcaaactcttcaaacagccacttcatggccacaagcatgaggtgtaagtagtcaacagcagagctctgtaccacccaattcacacggctggtcataaa

SEQ ID NO: 27946 - DNA, 143 bp, Homo sapiens
  MAP TO AC005696.1; EXPRESSED IN LUNG, SIGNAL = 0.98; EXPRESSED IN FETAL LIVER, SIGNAL = 0.74; EXPRESSED IN BRAIN, SIGNAL = 0.77; EXPRESSED IN BONE MARROW, SIGNAL = 0.94; EXPRESSED IN ADULT LIVER, SIGNAL = 0.96; EXPRESSED IN PLACENTA, SIGNAL = 0.93; SWISSPROT HIT: O62653, EVALUE 4.00e+00; EST_HUMAN HIT: BE559647.1, EVALUE 7.50e+00
ccattagccccatcccctgccagacaagggtggctctgtggacattcgctcccgtgtggacttccagattgcacatgtgtggggctcaagtggttccctgtgggtactccacacggcagcttccaagaaggcccagcgtggcc

SEQ ID NO: 27947 - DNA, 167 bp, Homo sapiens
  MAP TO AC005358.1; EXPRESSED IN FETAL LIVER, SIGNAL = 1.3; EXPRESSED IN BONE MARROW, SIGNAL = 1.2; EXPRESSED IN ADULT LIVER, SIGNAL = 1.2; EXPRESSED IN PLACENTA, SIGNAL = 1.4; EXPRESSED IN LUNG, SIGNAL = 1.5; EXPRESSED IN BRAIN, SIGNAL = 1.2; NT HIT: AL161513.2, EVALUE 3.80e-01; SWISSPROT HIT: Q49640, EVALUE 3.00e+00; EST_HUMAN HIT: BF204735.1, EVALUE 5.70e-01
cttccactgcagagaggtccattccaactgctcagatgaagctgaaaagagcccgactcgccgatgatctcaatgaaaaaattgctctacgaccagggccactggagctggtggaaaaaaacattcttcctgtggattctgctgtgaaagaggccataaaaggtagt

SEQ ID NO: 27948 - DNA, 78 bp, Homo sapiens
  MAP TO AC006251.3; EXPRESSED IN BONE MARROW, SIGNAL = 0.71; EXPRESSED IN ADULT LIVER, SIGNAL = 0.69; EXPRESSED IN LUNG, SIGNAL = 0.69; EXPRESSED IN FETAL LIVER, SIGNAL = 0.75; EXPRESSED IN BRAIN, SIGNAL = 0.74; NT HIT: U01947.1, EVALUE 4.00e-05; SWISSPROT HIT: P11369, EVALUE 4.90e-01; EST_HUMAN HIT: BE967684.1, EVALUE 1.00e-03
ctgcccacccgcattcacagcagcactctgaacaatagcagaaaggtggaagcaacccaagcatccatctacagataa

SEQ ID NO: 27949 - DNA, 130 bp, Homo sapiens
  MAP TO AC005681.1; EXPRESSED IN LUNG, SIGNAL = 0.92; EXPRESSED IN FETAL LIVER, SIGNAL = 0.79; EXPRESSED IN PLACENTA, SIGNAL = 0.98; EXPRESSED IN BRAIN, SIGNAL = 0.79; EXPRESSED IN BONE MARROW, SIGNAL = 0.75; EXPRESSED IN ADULT LIVER, SIGNAL = 0.82; SWISSPROT HIT: Q9ZL20, EVALUE 6.20e-01; NT HIT: AF321001.1, EVALUE 2.90e-01; EST_HUMAN HIT: AW812238.1, EVALUE 4.30e-01
aaatctttcctgatgtattattgtttgcatttttgccctccttatgtttgttgatcacttgtatgcctccccttttattgcttagtaaattgacattcgtgttccttgccaagttttccaacatgctctt

SEQ ID NO: 27950 - DNA, 115 bp, Homo sapiens
  MAP TO AC004677.1; EXPRESSED IN PLACENTA, SIGNAL = 0.87; EXPRESSED IN LUNG, SIGNAL = 0.74; EXPRESSED IN FETAL LIVER, SIGNAL = 0.73; EXPRESSED IN BRAIN, SIGNAL = 0.8; EXPRESSED IN ADULT LIVER, SIGNAL =   1; EXPRESSED IN BONE MARROW, SIGNAL = 0.64; EST_HUMAN HIT: AA809752.1, EVALUE 2.00e-58; NT HIT: gi11422031, EVALUE 1.00e-58
cttctgggtccaacacatctatcctaagggtctcaaaatttttccggaactcagagtaaatttggtcatctactttggtgagtttcaggaactgtgggtcaactgatgaaatcag

SEQ ID NO: 27951 - DNA, 160 bp, Homo sapiens
  MAP TO AC005161.1; EXPRESSED IN PLACENTA, SIGNAL = 0.82; EXPRESSED IN FETAL LIVER, SIGNAL = 0.84; EXPRESSED IN BONE MARROW, SIGNAL = 0.73; EXPRESSED IN LUNG, SIGNAL = 0.97; EXPRESSED IN BRAIN, SIGNAL = 0.8; EXPRESSED IN ADULT LIVER, SIGNAL =   1; NT HIT: AL163206.2, EVALUE 2.00e-03; SWISSPROT HIT: P48434, EVALUE 6.80e+00; EST_HUMAN HIT: BE065042.1, EVALUE 9.00e-06
gcccttataaaagaggtgctagagaatttccttgcccttttcccaccatgtgaggatagaaaaaaggtgccaactataaaccaggaaacaggccctcagcagacactgaatctgccagcacactcatcttgtactttccagcctgcacaactgtggagaa

SEQ ID NO: 27952 - DNA, 214 bp, Homo sapiens
  MAP TO AC003071.1; EXPRESSED IN PLACENTA, SIGNAL = 0.61; EXPRESSED IN LUNG, SIGNAL = 0.54; EXPRESSED IN BRAIN, SIGNAL = 0.59; EXPRESSED IN BONE MARROW, SIGNAL = 0.51; EXPRESSED IN ADULT LIVER, SIGNAL = 0.56; NT HIT: gi4758017, EVALUE 4.00e-48; SWISSPROT HIT: Q08094, EVALUE 3.00e-30; EST_HUMAN HIT: AU124065.1, EVALUE 2.00e-50
ggtgtcagagatgtgccgctgcgtcccaggagccgtcatggccacctggctgacacacttgtttatacgcatctggacactgatgatggagtggtccatggggggcaggatgtagttgttggggtcgtagaaatgcctcctcatgccgtatgcggtcatccctgactggctggcgcatttgttggtgcccatctgcagcccgaggatgcactgg

SEQ ID NO: 27953 - DNA, 127 bp, Homo sapiens
  MAP TO AC005069.2; EXPRESSED IN FETAL LIVER, SIGNAL = 0.68; EXPRESSED IN BRAIN, SIGNAL = 0.84; EXPRESSED IN ADULT LIVER, SIGNAL = 0.66; EXPRESSED IN PLACENTA, SIGNAL = 0.99; EXPRESSED IN LUNG, SIGNAL = 0.95; EXPRESSED IN BONE MARROW, SIGNAL = 0.7; SWISSPROT HIT: P08983, EVALUE 5.00e-13; EST_HUMAN HIT: BF335131.1, EVALUE 7.00e-06; NT HIT: L02838.1, EVALUE 3.00e-10
gaaattcaacacaatacacaagcatgaggtgatgaccaagaagaggatgaagatcgtcttctcagtgggtttggagatgaagcagtccacagtgttgggacaaggcttcaaatcacactttataagg

SEQ ID NO: 27954 - DNA, 86 bp, Homo sapiens
  MAP TO AC005690.7; EXPRESSED IN PLACENTA, SIGNAL = 0.59; EXPRESSED IN LUNG, SIGNAL = 0.64; EXPRESSED IN BRAIN, SIGNAL = 0.61; EXPRESSED IN ADULT LIVER, SIGNAL = 0.64; EXPRESSED IN BONE MARROW, SIGNAL = 0.96; NT HIT: L26487.1, EVALUE 4.50e-02; EST_HUMAN HIT: BE616409.1, EVALUE 6.70e-02
aacgactgtttttacctgaaaatgcccaggcaccttaagggcctgaatgaagtctttggagaagagggaggtggctgggaagaggg

SEQ ID NO: 27955 - DNA, 143 bp, Homo sapiens
  MAP TO AC004685.1; EXPRESSED IN LUNG, SIGNAL = 0.55; EXPRESSED IN PLACENTA, SIGNAL = 0.61; EXPRESSED IN BRAIN, SIGNAL = 1.1; EXPRESSED IN BONE MARROW, SIGNAL = 0.62; EXPRESSED IN ADULT LIVER, SIGNAL = 0.44; EST_HUMAN HIT: BE531007.1, EVALUE 1.00e-69; SWISSPROT HIT: P27393, EVALUE 2.10e-01; NT HIT: AE004876.1, EVALUE 3.20e-01
agagaggccctcaatgaggtctgagtggaagaggcggatgggcctggtcaccggctggtgaacccactcatcgtacttctctcccaagtggcccacctgccacaggagaggctttcgccagtccaccaggtcctgcaagagat

SEQ ID NO: 27956 - DNA, 81 bp, Homo sapiens
  MAP TO AC005872.2; EXPRESSED IN LUNG, SIGNAL = 0.98; EXPRESSED IN FETAL LIVER, SIGNAL = 0.97; EXPRESSED IN BRAIN, SIGNAL = 0.67; EXPRESSED IN BONE MARROW, SIGNAL = 0.9; EXPRESSED IN PLACENTA, SIGNAL = 0.98; EXPRESSED IN ADULT LIVER, SIGNAL =   1; NT HIT: X75881.1, EVALUE 4.10e-02
atgttggatggggtcaacagttggatgatgtttaacatgtttatatatgtgttggaggactacataatgtttgtgatcggg

SEQ ID NO: 27957 - DNA, 97 bp, Homo sapiens
  MAP TO AC005592.1; EXPRESSED IN BONE MARROW, SIGNAL = 1.2; EXPRESSED IN PLACENTA, SIGNAL = 1.1; EXPRESSED IN LUNG, SIGNAL = 1.2; EXPRESSED IN FETAL LIVER, SIGNAL = 1.2; EXPRESSED IN BRAIN, SIGNAL = 1.4; EXPRESSED IN ADULT LIVER, SIGNAL = 1.1; NT HIT: AJ223392.1, EVALUE 2.10e-01; EST_HUMAN HIT: N94327.1, EVALUE 1.20e+00
catttgagtttgtgacctcaggaagagaagatgtcttcacaataacaatatacacagttttcctctgctcagaacctatcacacctctttggtacat

SEQ ID NO: 27958 - DNA, 320 bp, Homo sapiens
  MAP TO AC004707.1; EXPRESSED IN PLACENTA, SIGNAL = 0.96; EXPRESSED IN LUNG, SIGNAL = 1.1; EXPRESSED IN FETAL LIVER, SIGNAL = 1.1; EXPRESSED IN BONE MARROW, SIGNAL = 0.7; EXPRESSED IN ADULT LIVER, SIGNAL = 0.91; EXPRESSED IN BRAIN, SIGNAL = 0.68; EST_HUMAN HIT: BE047365.1, EVALUE 2.00e-70; NT HIT: AJ271736.1, EVALUE 1.00e-121; SWISSPROT HIT: P38883, EVALUE 6.20e+00
ttgaagacatagttagaaatatgacaaaactggcacatgtgcctgtgcaagtgtggcatggatttgatcctgacgccatgtttggaaaatggttcccagcattaagaagatttaaaactcttgtaataagagttataatagtaatagaaacctacttgctgctcccttgtttgctacctgtacttcttcaaatgataaaaagcttcatcactaccttagttcaccaaaatgcttcagcacaagtgtactatatgaattactatcgatctgtcttgcaagaagacataggtaataaaaatgaaagtgagaactcccactat

SEQ ID NO: 27959 - DNA, 75 bp, Homo sapiens
  MAP TO AC005599.5; EXPRESSED IN LUNG, SIGNAL = 1.3; EXPRESSED IN BRAIN, SIGNAL = 1.2; EXPRESSED IN BONE MARROW, SIGNAL = 0.77; EXPRESSED IN ADULT LIVER, SIGNAL = 0.76; EXPRESSED IN PLACENTA, SIGNAL =   1; EXPRESSED IN FETAL LIVER, SIGNAL = 0.9; EST_HUMAN HIT: AA866182.1, EVALUE 5.60e-02; NT HIT: gi11419654, EVALUE 1.50e-01
cctgaacctctagctcctaaatgggaggtctggtgcctaacacagtgcctggagcatgtgcacaccaatgtggtg

SEQ ID NO: 27960 - DNA, 102 bp, Homo sapiens
  MAP TO AC004749.1; EXPRESSED IN ADULT LIVER, SIGNAL = 0.72; EXPRESSED IN PLACENTA, SIGNAL = 0.82; EXPRESSED IN LUNG, SIGNAL = 0.73; EXPRESSED IN BRAIN, SIGNAL = 0.97; EXPRESSED IN FETAL LIVER, SIGNAL = 0.71; EXPRESSED IN BONE MARROW, SIGNAL =   1; SWISSPROT HIT: P09708, EVALUE 5.50e+00; EST_HUMAN HIT: BF377495.1, EVALUE 9.00e-51; NT HIT: gi11416751, EVALUE 6.00e-51
tgaattcattccactgaacaggtctcctgatccaacatgagctgtatgcacaaagtttgtgggctctccaatcatacttctgtcaatccgccgtcgcctttt

SEQ ID NO: 27961 - DNA, 192 bp, Homo sapiens
  MAP TO AC004849.1; EXPRESSED IN LUNG, SIGNAL = 0.68; EXPRESSED IN FETAL LIVER, SIGNAL = 0.72; EXPRESSED IN BRAIN, SIGNAL = 0.75; EXPRESSED IN BONE MARROW, SIGNAL =   1; EXPRESSED IN PLACENTA, SIGNAL = 0.74; EXPRESSED IN ADULT LIVER, SIGNAL = 0.77; SWISSPROT HIT: P91706, EVALUE 1.70e+00; EST_HUMAN HIT: AF049567.1, EVALUE 1.00e-20
cgagcacagaggaagaagctattcagggcatgctgtctatggcagggttgcactattccacgtgtttacaaaggcaaatacaaagcacagactgcagtggtgaaagaaactctctccaggatcccagcagctgccatggcagtaaccatgaggttaggcagttgtatcgctatgataaaccagtggaatgtg

SEQ ID NO: 27962 - DNA, 105 bp, Homo sapiens
  MAP TO AC003086.1; EXPRESSED IN PLACENTA, SIGNAL = 0.76; EXPRESSED IN ADULT LIVER, SIGNAL = 0.76; EXPRESSED IN LUNG, SIGNAL = 0.75; EXPRESSED IN FETAL LIVER, SIGNAL = 0.68; EXPRESSED IN BRAIN, SIGNAL = 1.2; EXPRESSED IN BONE MARROW, SIGNAL = 0.73; EST_HUMAN HIT: AI792146.1, EVALUE 2.00e-52
ggatctgtcagagagtccagagaatgaagctgtagtgcagaaaaggaaagcagcaggagtgcagcagagatcaacccctgagaaacccatagccctacggaaagg

SEQ ID NO: 27963 - DNA, 257 bp, Homo sapiens
  MAP TO AC004526.1; EXPRESSED IN LUNG, SIGNAL = 1.2; EXPRESSED IN FETAL LIVER, SIGNAL =   1; EXPRESSED IN BONE MARROW, SIGNAL = 1.8; EXPRESSED IN PLACENTA, SIGNAL = 1.1; EXPRESSED IN BRAIN, SIGNAL = 1.2; EXPRESSED IN ADULT LIVER, SIGNAL = 0.88; EST_HUMAN HIT: M77935.1, EVALUE 1.00e-102; NT HIT: M38113.1, EVALUE 0.00e+00; SWISSPROT HIT: P21359, EVALUE 3.00e-45
aattgacaagacatgcttatctccaactcctactttagaacaacatcttatgtgggatgatattgctattttagcacgctacatgctgatgctgtccttcaacaattcccttgatgtggcagctcatcttccctacctcttccacgttgttactttcttagtagccacaggtccgctctcccttagagcttccacacatggactggtcattaatatcattcactctctgtgtacttgttcacagcttcattttagtg

SEQ ID NO: 27964 - DNA, 176 bp, Homo sapiens
  MAP TO AC004912.1; EXPRESSED IN PLACENTA, SIGNAL = 0.73; EXPRESSED IN LUNG, SIGNAL = 0.98; EXPRESSED IN BRAIN, SIGNAL = 0.76; EXPRESSED IN ADULT LIVER, SIGNAL = 0.8; EXPRESSED IN FETAL LIVER, SIGNAL = 0.7; EXPRESSED IN BONE MARROW, SIGNAL = 0.83; SWISSPROT HIT: Q12765, EVALUE 5.00e-30; NT HIT: gi11419376, EVALUE 8.00e-95; EST_HUMAN HIT: BE825750.1, EVALUE 1.00e-94
cagtcagctttcgctcaccactaagatggatgcagagcatccggaactcaggagttacgctcagagccaaggttggtggacgggagagggcgagttcaatttttccgaagtcttttctccagttgaggatcatctagactgcggtgctggcaaagacagcttagaaaaacaagaag

SEQ ID NO: 27965 - DNA, 102 bp, Homo sapiens
  MAP TO AC003664.1; EXPRESSED IN BRAIN, SIGNAL = 1.2; EXPRESSED IN ADULT LIVER, SIGNAL = 0.89; EXPRESSED IN LUNG, SIGNAL = 1.1; EXPRESSED IN BONE MARROW, SIGNAL =   1; EXPRESSED IN PLACENTA, SIGNAL = 1.2; EXPRESSED IN FETAL LIVER, SIGNAL =   1; SWISSPROT HIT: Q01833, EVALUE 2.40e+00; EST_HUMAN HIT: BE538819.1, EVALUE 1.30e+00
agaaattgatggtgccatcaatcagcggaatgttggagctggagtcagggatttgcccctttgctgcagccaaagaagccctataattactgaaagccaggc

SEQ ID NO: 27966 - DNA, 192 bp, Homo sapiens
  MAP TO AC006355.3; EXPRESSED IN LUNG, SIGNAL = 0.49; EXPRESSED IN BRAIN, SIGNAL = 0.56; EXPRESSED IN BONE MARROW, SIGNAL = 0.52; EXPRESSED IN ADULT LIVER, SIGNAL = 0.57; SWISSPROT HIT: P55487, EVALUE 1.30e+00; NT HIT: AJ391284.1, EVALUE 2.90e-02
aggtcttaacataaaacaccattttccagattgtctttcagactctcctatcccaaattattctgcatcccatcagcaagggacattttctacagaaccactcagcagcgaggcagacaagaggttgaggctaaaagaatccaagacaaaaaccagctgctgcagacaaggtagaggaagagaacagactag

SEQ ID NO: 27967 - DNA, 236 bp, Homo sapiens
  MAP TO AC005531.1; EXPRESSED IN ADULT LIVER, SIGNAL = 0.85; EXPRESSED IN PLACENTA, SIGNAL =   1; EXPRESSED IN LUNG, SIGNAL = 0.97; EXPRESSED IN FETAL LIVER, SIGNAL = 0.74; EXPRESSED IN BRAIN, SIGNAL = 0.81; EXPRESSED IN BONE MARROW, SIGNAL = 0.89; NT HIT: D00579.1, EVALUE 1.40e-01; SWISSPROT HIT: P09403, EVALUE 6.70e-01; EST_HUMAN HIT: AW843875.1, EVALUE 1.00e-130
aagcagctttgacatcagagccagcgctcctgtgggcctgggggcagggggtcgtggtgcctacagcgagaaagacacacaagcagcacgcagctcgcgctgtgctctctcggaagaaggagaccttaccttcaggaaaaatagagccacagcagtgccacatgccagggcgagcattctggttgacaggggccaggctgtacttgctgctagggtctggtgacctggggccagag

SEQ ID NO: 27968 - DNA, 116 bp, Homo sapiens
  MAP TO AC005220.1; EXPRESSED IN LUNG, SIGNAL = 0.6; EXPRESSED IN BONE MARROW, SIGNAL = 0.56; EXPRESSED IN BRAIN, SIGNAL = 0.57; EXPRESSED IN ADULT LIVER, SIGNAL = 0.5; EST_HUMAN HIT: AW609520.1, EVALUE 1.00e-56; NT HIT: AF199411.1, EVALUE 2.50e-01; SWISSPROT HIT: Q92622, EVALUE 9.30e+00
cctccaagaagctgtgtcttttgctgaacattccacaggttgtcagagacagaggcagcattcagctcaggccccctagaccccaagtcctgcatcgtcccagtgtcacaaggcct

SEQ ID NO: 27969 - DNA, 337 bp, Homo sapiens
  MAP TO AC006207.5; EXPRESSED IN BRAIN, SIGNAL = 0.99; EXPRESSED IN BONE MARROW, SIGNAL =   1; EXPRESSED IN PLACENTA, SIGNAL = 0.73; EXPRESSED IN LUNG, SIGNAL = 0.82; EXPRESSED IN FETAL LIVER, SIGNAL = 0.94; EXPRESSED IN ADULT LIVER, SIGNAL = 0.91; NT HIT: gi8923778, EVALUE 1.00e-123; SWISSPROT HIT: Q01804, EVALUE 2.00e-30; EST_HUMAN HIT: AL042443.1, EVALUE 0.00e+00
aaaataattttcctgaaaaggtgttactgtgtttttcaaatggaaatcattatgatattgtgtatcccgtaaagtataaagaaagctctgctatgtgtcagtctctcctttatgaattgctgtatgagaaggtatttaaaactgatgttagtaaaattgtgatggaactagacacgttggaagtagctgatgaagacaacagtgaaatatcagattcagaggatgacagctgcaagagtaaaactgctgttgctgctgctgatgtgaatggatttaaacctttgtcaggcaacgagcagctgaagaacaatgggaactctactagcctgcctttggc

SEQ ID NO: 27970 - DNA, 178 bp, Homo sapiens
  MAP TO AC005389.1; EXPRESSED IN LUNG, SIGNAL = 0.95; EXPRESSED IN FETAL LIVER, SIGNAL = 0.75; EXPRESSED IN BONE MARROW, SIGNAL = 0.82; EXPRESSED IN PLACENTA, SIGNAL = 0.83; EXPRESSED IN BRAIN, SIGNAL = 0.9; EXPRESSED IN ADULT LIVER, SIGNAL = 0.78; NT HIT: Z99064.1, EVALUE 2.60e-02; EST_HUMAN HIT: BE409305.1, EVALUE 9.60e+00
gaagaagagcaaaggagaagaaaaaggtggggaacagaaaaatcaggaggaaacaaaagcaaaggagagacaacaaaccacaaagatgaagacgacaatgaggaagatggccatggaaatgcatatgatgaagacaatcaggctggcaaagaaaacagccaagaaacaaagacagtgg

SEQ ID NO: 27971 - DNA, 279 bp, Homo sapiens
  MAP TO AC000382.1; EXPRESSED IN PLACENTA, SIGNAL = 0.92; EXPRESSED IN BRAIN, SIGNAL = 0.9; EXPRESSED IN BONE MARROW, SIGNAL = 0.84; EXPRESSED IN ADULT LIVER, SIGNAL = 0.84; EXPRESSED IN LUNG, SIGNAL = 0.78; EXPRESSED IN FETAL LIVER, SIGNAL = 0.84; SWISSPROT HIT: P09483, EVALUE 5.40e-01; EST_HUMAN HIT: AI168270.1, EVALUE 0.00e+00
ccccagctcacaccccccaacacccccaagctggtgagtgaggtggaggagctgtacaagtccatcacagcgctgcaggagaagcttctacaagcagagcagtccctgtgcaacctcgaggacatccacatgagcctggagaaggacatcactgccatgaccaacagtctcttcatcgaccgccagaagtgcatggcccatcgtacttgctaccccaccatcctgcagctggctggctaccagtgagcagcggcacggtgcttccccccagtcccccaa

SEQ ID NO: 27972 - DNA, 100 bp, Homo sapiens
  MAP TO AC005409.1; EXPRESSED IN LUNG, SIGNAL = 0.95; EXPRESSED IN FETAL LIVER, SIGNAL = 0.94; EXPRESSED IN BRAIN, SIGNAL = 1.9; EXPRESSED IN BONE MARROW, SIGNAL = 0.98; EXPRESSED IN ADULT LIVER, SIGNAL = 0.77; EXPRESSED IN PLACENTA, SIGNAL = 0.82; EST_HUMAN HIT: BE938896.1, EVALUE 4.00e-47; NT HIT: gi6981617, EVALUE 2.00e-14; SWISSPROT HIT: Q63520, EVALUE 3.00e-08
aagtattttttcttcttgttcctcagctttctgcatatctaaatcccactgctgaaacaaagtcagaaactgctgagaatattcttggttaagcttctgc

SEQ ID NO: 27973 - DNA, 340 bp, Homo sapiens
  MAP TO AC006254.10; EXPRESSED IN PLACENTA, SIGNAL = 0.85; EXPRESSED IN LUNG, SIGNAL = 0.91; EXPRESSED IN BRAIN, SIGNAL = 0.83; EXPRESSED IN BONE MARROW, SIGNAL = 0.92; EXPRESSED IN FETAL LIVER, SIGNAL = 0.89; EXPRESSED IN ADULT LIVER, SIGNAL = 0.91; SWISSPROT HIT: P51957, EVALUE 9.00e-61; NT HIT: gi11435215, EVALUE 0.00e+00; EST_HUMAN HIT: BE734087.1, EVALUE 0.00e+00
tctgaaagcccatacctgcaaacaggacttgagcaataccacagaactagccacaatcagtagcgtaaatattgacatcttacctgcaaaagggagggattcagtgagtgatggctttgttcaggagaatcagccaagatatttggatgcctctaatgagttaggaggtatatgcagtatttctcaagtggaagaggagatgctgcaggacaacactaaatccagtgcccagcctgaaaacctgattcccatgtggtcctctgacattgtcactggggaaaagaatgaaccagtgaagcctctgcagcccctaatcaaagaacaaaagccaaaggaccag

SEQ ID NO: 27974 - DNA, 252 bp, Homo sapiens
  MAP TO AC005324.1; EXPRESSED IN LUNG, SIGNAL = 0.73; EXPRESSED IN FETAL LIVER, SIGNAL = 0.7; EXPRESSED IN BRAIN, SIGNAL = 0.75; EXPRESSED IN BONE MARROW, SIGNAL = 0.88; EXPRESSED IN ADULT LIVER, SIGNAL = 0.76; EXPRESSED IN PLACENTA, SIGNAL = 0.85; NT HIT: gi11425446, EVALUE 1.00e-130; SWISSPROT HIT: P10192, EVALUE 5.20e-01; EST_HUMAN HIT: BE786924.1, EVALUE 1.00e-129
gtgtcggtgtcagaggtcaaagcggtggctgaaatgcagtttggggaactccttgctgctgtgaggaaggcccaggccaatgtgatgctcttcttagaggagaaggagcaagctgcgctgagccaggccaacggtatcaaggcccacctggagtacaggagtgccgagatggagaagagcaagcaggagctggagaggatggcggccatcagcaacactgtccagttcttggaggtatgggggttgcggggg

SEQ ID NO: 27975 - DNA, 137 bp, Homo sapiens
  MAP TO AC004100.1; EXPRESSED IN FETAL LIVER, SIGNAL = 0.76; EXPRESSED IN BRAIN, SIGNAL = 0.92; EXPRESSED IN BONE MARROW, SIGNAL = 0.66; EXPRESSED IN ADULT LIVER, SIGNAL = 0.6; EXPRESSED IN PLACENTA, SIGNAL = 0.66; EXPRESSED IN LUNG, SIGNAL = 0.67; SWISSPROT HIT: Q9UL62, EVALUE 4.00e+00; EST_HUMAN HIT: AA564561.1, EVALUE 1.00e-04; NT HIT: M97252.1, EVALUE 3.10e-01
ggctctgctctggctgttccctctacctgggattctcttcccccagaccagtggttctcaaccaggggacagtgttgcccccaagggacatttgatgtttttggttgtcgcaactggagagagggtgctactggcac

SEQ ID NO: 27976 - DNA, 144 bp, Homo sapiens
  MAP TO AC004582.1; EXPRESSED IN PLACENTA, SIGNAL =   1; EXPRESSED IN BONE MARROW, SIGNAL = 0.81; EXPRESSED IN ADULT LIVER, SIGNAL =   1; EXPRESSED IN LUNG, SIGNAL =   1; EXPRESSED IN FETAL LIVER, SIGNAL = 0.85; EXPRESSED IN BRAIN, SIGNAL = 0.62; EST_HUMAN HIT: AA319054.1, EVALUE 1.90e+00; NT HIT: M13918.2, EVALUE 1.30e+00
catctacccactgctcagctgcaggcagctttctagaagatgctgttaacaatggcaatgcgcccaagagaaagagattcaggaccaggaagctagatgagtcccaggtcctcctctttctggctctgagacctaaagggcaag

SEQ ID NO: 27977 - DNA, 206 bp, Homo sapiens
  MAP TO AC004259.1; EXPRESSED IN LUNG, SIGNAL = 1.3; EXPRESSED IN FETAL LIVER, SIGNAL = 1.4; EXPRESSED IN BONE MARROW, SIGNAL = 1.2; EXPRESSED IN PLACENTA, SIGNAL = 1.5; EXPRESSED IN BRAIN, SIGNAL = 1.1; EXPRESSED IN ADULT LIVER, SIGNAL = 1.2; EST_HUMAN HIT: BF574235.1, EVALUE 1.00e-112; NT HIT: U84404.1, EVALUE 1.00e-112; SWISSPROT HIT: Q05086, EVALUE 2.00e-36
tgggtgagagtctcccaagtcacgaaaagttccttttttccccattagcttcctgtagacaaccatgggaaaatgtacatccagtatacagttattgtaaatagccagacccagtactatgccaatcagagtaaactgaccctcagtttcaaaagaagatggattaaaccaaaacaattttgtagattcatcgtatgtgaacatac

SEQ ID NO: 27978 - DNA, 292 bp, Homo sapiens
  MAP TO AC005383.1; EXPRESSED IN ADULT LIVER, SIGNAL = 1.1; EXPRESSED IN PLACENTA, SIGNAL =   1; EXPRESSED IN LUNG, SIGNAL = 1.3; EXPRESSED IN BRAIN, SIGNAL = 1.2; EXPRESSED IN FETAL LIVER, SIGNAL = 1.2; EXPRESSED IN BONE MARROW, SIGNAL = 0.96; EST_HUMAN HIT: AA496841.1, EVALUE 1.00e-100; NT HIT: gi11056013, EVALUE 1.10e-02; SWISSPROT HIT: Q63244, EVALUE 2.10e-01
cagaagcctgttgtccttgatgacacagagctgcttggcccactgtcccagccacttcttgcgccacaggaaggcgcagatgcgggcgtcacgcatcagctcgatgccggcctccggcgagggccactggtaaggggccgacttgcccttgctgccgtcctcttcatcgtaggactcgtaggagctgctcacagcctctccgtcctctgcaaggaagaccagctcggtcagggccccatggggcaggggacagtcctgaagcagcatcgctggggagggcagcaggcaggag

SEQ ID NO: 27979 - DNA, 151 bp, Homo sapiens
  MAP TO AC005536.2; EXPRESSED IN LUNG, SIGNAL = 0.8; EXPRESSED IN FETAL LIVER, SIGNAL = 0.75; EXPRESSED IN BONE MARROW, SIGNAL = 0.81; EXPRESSED IN BRAIN, SIGNAL = 0.77; EXPRESSED IN ADULT LIVER, SIGNAL = 0.7; EXPRESSED IN PLACENTA, SIGNAL = 0.63; NT HIT: AJ271885.2, EVALUE 8.70e-02; EST_HUMAN HIT: AI611494.1, EVALUE 8.00e+00; SWISSPROT HIT: Q58890, EVALUE 4.00e+00
gctggagagatacagcagaaaatccaacaagatttccaatgacaaggagtttactgtttcaaaggagaagaaaggcaataaacaaatggacaggtctataacctgtcatgtgggaataagtactaagaaggagagtaagaataagggtgag

SEQ ID NO: 27980 - DNA, 102 bp, Homo sapiens
  MAP TO AC004686.1; EXPRESSED IN PLACENTA, SIGNAL = 0.93; EXPRESSED IN BRAIN, SIGNAL =   1; EXPRESSED IN ADULT LIVER, SIGNAL =   1; EXPRESSED IN LUNG, SIGNAL = 1.1; EXPRESSED IN FETAL LIVER, SIGNAL =   1; EXPRESSED IN BONE MARROW, SIGNAL = 1.1; SWISSPROT HIT: P21425, EVALUE 8.00e-14; NT HIT: gi4506736, EVALUE 6.00e-51; EST_HUMAN HIT: AL079835.1, EVALUE 6.00e-49
ccaagtacccgaagtagctcaaaacattctggtctgattttttctggccctctgttcacactagtttctgagatttcaaatttctcacaatgttccatgcca

SEQ ID NO: 27981 - DNA, 247 bp, Homo sapiens
  MAP TO AC005297.1; EXPRESSED IN PLACENTA, SIGNAL = 0.77; EXPRESSED IN BONE MARROW, SIGNAL = 0.92; EXPRESSED IN ADULT LIVER, SIGNAL = 0.88; EXPRESSED IN FETAL LIVER, SIGNAL = 0.83; EXPRESSED IN LUNG, SIGNAL = 0.9; EXPRESSED IN BRAIN, SIGNAL = 0.9; NT HIT: AJ243213.1, EVALUE 1.00e-08; SWISSPROT HIT: Q90471, EVALUE 3.20e-01; EST_HUMAN HIT: AW440864.1, EVALUE 5.00e-21
agagagttttttctcccccttcattttgaagattatttttactgaatataaaattctaggcttttttattttaaaagtttatgtctttaactcaactctcttctgtctcatttttctgtttacccaccattcttgcatgttgtgcactttttccattatagtccttagcatattaatcataattattttaaattcctggtctgataattccaaaatgtctgccatatctaagtctggttctgatgat

SEQ ID NO: 27982 - DNA, 111 bp, Homo sapiens
  MAP TO AC006013.2; EXPRESSED IN LUNG, SIGNAL = 0.83; EXPRESSED IN FETAL LIVER, SIGNAL = 0.77; EXPRESSED IN BRAIN, SIGNAL = 0.72; EXPRESSED IN BONE MARROW, SIGNAL = 0.86; EXPRESSED IN ADULT LIVER, SIGNAL = 0.61; NT HIT: AE000847.1, EVALUE 2.40e-01; EST_HUMAN HIT: R62805.1, EVALUE 9.00e-02
catgtcatcattcagtaagagttcagaggcctctgagaaccgggggagttgatggtgtgaatgccagtctgagaaccggagaagatgagatgagacgttccaacttaagag

SEQ ID NO: 27983 - DNA, 186 bp, Homo sapiens
  MAP TO AC004467.1; EXPRESSED IN BRAIN, SIGNAL = 0.9; EXPRESSED IN LUNG, SIGNAL = 1.2; EXPRESSED IN BONE MARROW, SIGNAL = 1.1; EXPRESSED IN ADULT LIVER, SIGNAL = 0.86; EXPRESSED IN PLACENTA, SIGNAL = 1.8; EXPRESSED IN FETAL LIVER, SIGNAL = 2.4; EST_HUMAN HIT: X84714.1, EVALUE 2.60e+00; NT HIT: gi7382479, EVALUE 1.00e-100; SWISSPROT HIT: O54834, EVALUE 1.00e-29
cagtggattctatcaccgatcttgatgacaatcagtctcgactactagaagctttacaactttccttgcctgctgaggctcaaagtaaaaaggaaaaagccagagataagaaactcagtctgaatcctatttacagacaggtccctaggctggtggacagctgctgtcagcacctagaaaaacatg

SEQ ID NO: 27984 - DNA, 267 bp, Homo sapiens
  MAP TO AC003065.1; EXPRESSED IN LUNG, SIGNAL = 0.53; EXPRESSED IN BRAIN, SIGNAL = 0.66; EXPRESSED IN BONE MARROW, SIGNAL = 0.59; EXPRESSED IN ADULT LIVER, SIGNAL = 0.52; EST_HUMAN HIT: AI493849.1, EVALUE 3.80e+00
ctccttctttttcttcttctcctcctcctcctcctcctcctcctccttcacctcctcctccttctcctcctcctcctccttctcctcctcctccttctcctcctcctccttctcctcctcctccttctcctcctccttctcctcctcctccttctcctcctcctccttctcctcctcctccttctccttctcctcctcctcctcctcctcctcctcccctcctcctccacctgtttctcctccttctccttttcctcttcctgggat

SEQ ID NO: 27985 - DNA, 98 bp, Homo sapiens
  MAP TO AC002079.1; EXPRESSED IN LUNG, SIGNAL = 0.95; EXPRESSED IN PLACENTA, SIGNAL = 0.76; EXPRESSED IN FETAL LIVER, SIGNAL = 0.8; EXPRESSED IN BRAIN, SIGNAL = 0.75; EXPRESSED IN BONE MARROW, SIGNAL = 0.85; EXPRESSED IN ADULT LIVER, SIGNAL = 0.82; SWISSPROT HIT: P25994, EVALUE 9.50e+00; EST_HUMAN HIT: AW470831.1, EVALUE 1.20e+00; NT HIT: AJ010142.1, EVALUE 8.20e-01
gcatttagctttgaaggaagtcagtggctgcaagttgagtccctggcaccagtgtagcagtggttacagagaagtcaaggtcttgatatcagtgcttg

SEQ ID NO: 27986 - DNA, 118 bp, Homo sapiens
  MAP TO AC005325.1; EXPRESSED IN PLACENTA, SIGNAL = 1.3; EXPRESSED IN LUNG, SIGNAL = 1.1; EXPRESSED IN FETAL LIVER, SIGNAL = 1.3; EXPRESSED IN BONE MARROW, SIGNAL = 1.2; EXPRESSED IN ADULT LIVER, SIGNAL =   1; EXPRESSED IN BRAIN, SIGNAL = 1.3; NT HIT: Y11204.1, EVALUE 1.00e+00
ctcatgcccactggactctgatgataaatcttgacgatctcatcaaggtcatggtcttcattatagtcatgatcatcattatcatcatgaacaaaggcatcctaaaatgagggagagc

SEQ ID NO: 27987 - DNA, 114 bp, Homo sapiens
  MAP TO AB013139.1; EXPRESSED IN BRAIN, SIGNAL = 0.68; EXPRESSED IN BONE MARROW, SIGNAL = 0.7; EXPRESSED IN PLACENTA, SIGNAL = 0.6; EXPRESSED IN LUNG, SIGNAL = 0.67; EXPRESSED IN ADULT LIVER, SIGNAL =   1; SWISSPROT HIT: P04392, EVALUE 3.20e+00; EST_HUMAN HIT: AI478521.1, EVALUE 7.00e-58; NT HIT: AF051334.1, EVALUE 5.00e-58
gtcacatatcctggagcaggaaaacttccacacatcattggaggatcagatctaatagctcatcatgctcgaaagaatacagaactagaagagtggctaaggcaggaaatggag

SEQ ID NO: 27988 - DNA, 141 bp, Homo sapiens
  MAP TO AC005536.2; EXPRESSED IN PLACENTA, SIGNAL = 0.88; EXPRESSED IN LUNG, SIGNAL = 0.77; EXPRESSED IN FETAL LIVER, SIGNAL = 0.74; EXPRESSED IN ADULT LIVER, SIGNAL = 0.68; EXPRESSED IN BRAIN, SIGNAL = 0.93; EXPRESSED IN BONE MARROW, SIGNAL = 0.8; SWISSPROT HIT: P11369, EVALUE 4.00e-05; NT HIT: AJ006345.1, EVALUE 2.00e-05; EST_HUMAN HIT: AA357407.1, EVALUE 2.00e-09
attaacacagtactagaattcctagctaaagcacttcaacaagaggaagaaatagagcacccaattggaatgaaagaagtcaaattatcctcatttgctgactatatggtcttagatgtagaaaaacctaaagattccact

SEQ ID NO: 27989 - DNA, 180 bp, Homo sapiens
  MAP TO AC005495.1; EXPRESSED IN PLACENTA, SIGNAL = 0.75; EXPRESSED IN LUNG, SIGNAL = 0.74; EXPRESSED IN FETAL LIVER, SIGNAL = 0.93; EXPRESSED IN BONE MARROW, SIGNAL = 0.64; EXPRESSED IN BRAIN, SIGNAL = 0.81; EXPRESSED IN ADULT LIVER, SIGNAL = 0.97; SWISSPROT HIT: P34358, EVALUE 1.00e-02; NT HIT: M37276.1, EVALUE 1.10e-01; EST_HUMAN HIT: AV654143.1, EVALUE 2.00e-87
tttcatgtcacttgcactcattcctttgacagctccataaatttcaaaatgttcctgcaatgtagtatctggccacaaagggtttatctgaggacagtaacccatacacttcagtgaatcatcatcttcacttgtctctgaagaataatctcctaaaaatacctatagaaacacaaacca

SEQ ID NO: 27990 - DNA, 183 bp, Homo sapiens
  MAP TO AC006239.5; EXPRESSED IN ADULT LIVER, SIGNAL = 0.57; EXPRESSED IN LUNG, SIGNAL = 0.67; EXPRESSED IN BRAIN, SIGNAL = 0.55; EXPRESSED IN BONE MARROW, SIGNAL = 0.55; SWISSPROT HIT: P21270, EVALUE 5.10e+00; EST_HUMAN HIT: AA398047.1, EVALUE 1.60e-01
cttttactgtcttcattttactgatgtggtaattgaagttcatagacagacctgaggtcacagaagtcaggaatggtggagatgtgctacgagctgcattctttttgctacatgacagctgcctctcactcatatccacatagtggacacaatgtgtgtgattcatggtcacatgttttgttt

SEQ ID NO: 27991 - DNA, 146 bp, Homo sapiens
  MAP TO AC002299.1; EXPRESSED IN LUNG, SIGNAL = 0.66; EXPRESSED IN FETAL LIVER, SIGNAL = 0.71; EXPRESSED IN BONE MARROW, SIGNAL = 0.84; EXPRESSED IN PLACENTA, SIGNAL = 0.65; EXPRESSED IN BRAIN, SIGNAL = 0.57; EXPRESSED IN ADULT LIVER, SIGNAL = 0.67; SWISSPROT HIT: P04410, EVALUE 1.00e-23; NT HIT: M13975.1, EVALUE 5.00e-77; EST_HUMAN HIT: H40311.1, EVALUE 8.00e-77
aaaaaccttgtacctatggaccccaatggcctgtcagatccctacgtaaaactgaaactgattcccgatcccaaaagtgagagcaaacagaagaccaaaaccatcaaatgctccctcaaccctgagtggaatgagacatttagatt

SEQ ID NO: 27992 - DNA, 168 bp, Homo sapiens
  MAP TO AC005342.1; EXPRESSED IN LUNG, SIGNAL = 0.84; EXPRESSED IN BRAIN, SIGNAL = 1.1; EXPRESSED IN BONE MARROW, SIGNAL = 1.2; EXPRESSED IN PLACENTA, SIGNAL = 0.73; EXPRESSED IN FETAL LIVER, SIGNAL = 0.94; EXPRESSED IN ADULT LIVER, SIGNAL = 0.76; NT HIT: gi6753235, EVALUE 2.00e-03; SWISSPROT HIT: P34374, EVALUE 2.60e-01; EST_HUMAN HIT: BF091922.1, EVALUE 7.00e-50
cttacagtctggccagttatacttctcaaacaccggctcgtagtcctccacggcgccgtcgctgatgagcatgatggcctggttgcagaggcttccttgcttggcctcttggaactgtgtagggaagaggagtgcccatgaccacaggccaagcccacccccctccac

SEQ ID NO: 27993 - DNA, 97 bp, Homo sapiens
  MAP TO AC003669.1; EXPRESSED IN PLACENTA, SIGNAL = 0.93; EXPRESSED IN LUNG, SIGNAL =   1; EXPRESSED IN BRAIN, SIGNAL = 1.1; EXPRESSED IN BONE MARROW, SIGNAL = 0.89; EXPRESSED IN ADULT LIVER, SIGNAL = 0.81; EXPRESSED IN FETAL LIVER, SIGNAL = 0.87; SWISSPROT HIT: P51813, EVALUE 7.00e-13; NT HIT: gi11420995, EVALUE 6.00e-48; EST_HUMAN HIT: F06972.1, EVALUE 9.00e-48
atcacagcaaaagaagaaaatgtcaccaaataattacaaagaacggctttttgttttgaccaaaacaaacctttcctactatgaatatgacaaaatg

SEQ ID NO: 27994 - DNA, 342 bp, Homo sapiens
  MAP TO AC004687.1; EXPRESSED IN BONE MARROW, SIGNAL =   1; EXPRESSED IN FETAL LIVER, SIGNAL = 0.99; EXPRESSED IN BRAIN, SIGNAL = 0.94; EXPRESSED IN ADULT LIVER, SIGNAL =   1; EXPRESSED IN PLACENTA, SIGNAL = 0.83; EXPRESSED IN LUNG, SIGNAL = 0.99; SWISSPROT HIT: P80025, EVALUE 1.00e-52; NT HIT: U39573.1, EVALUE 0.00e+00
tgccaggaagcagggcacacgggcagtggtgttgatgaactcacaggggcttggcttcttgctgtcatagggcaggtagggtagtccatggtctgagacctcctggttgacagccatgaggcccagggggctgctgaggttgcggaggcggctggccaggcttggctcggagctgtacacaaagctggcatccaggaaggaggtcagagcgttgatctgctctcgggccagggacttgtagggtggagtggggcagacgaacccagctcggaagaaaggcatgcatttcccttgagtccccgccttggggtcattgggtgggaactgcagagagagtgggca

SEQ ID NO: 27995 - DNA, 535 bp, Homo sapiens
  MAP TO AC005663.1; EXPRESSED IN LUNG, SIGNAL = 0.71; EXPRESSED IN PLACENTA, SIGNAL = 0.74; EXPRESSED IN FETAL LIVER, SIGNAL = 0.82; EXPRESSED IN BRAIN, SIGNAL = 0.75; EXPRESSED IN BONE MARROW, SIGNAL = 0.82; EXPRESSED IN ADULT LIVER, SIGNAL = 0.74; EST_HUMAN HIT: W26367.1, EVALUE 1.30e-01
aactggcctcacggccaccgggatagcagttgggcaagtaggttacagggcgggtggggcaggtgacgcaaaacctggctgccagggcgggtccaaccccaaccggaaggaggctgggccagggcaccacaggtgggaagatgctgatgagctcctccctgtgctgtgtgctctgcagctgtgatctcatctcaagagtcccaggtcacatggcagggatgggcaaggtgagcctggaggggctcatggtggggcacctgctggttgggctagaggtgaagaagcagtgagctggccaccccgagcaggcacacgtgggatgctgggatcaagtgggcctgctggaccctgcacccacggcctggcagcccctgagagagtcaggatggcctcggcactggatctgttcatttgtagctctgctctgcccagccacgctgtggacactcctggaagtcagcatgctgccttctgctctctcatagcaggatctgctgatccccgccagggtgcaagaggtccctgggcaagctgg

SEQ ID NO: 27996 - DNA, 446 bp, Homo sapiens
  MAP TO AC005703.1; EXPRESSED IN BRAIN, SIGNAL = 0.91; EXPRESSED IN BONE MARROW, SIGNAL = 0.7; EXPRESSED IN PLACENTA, SIGNAL = 0.76; EXPRESSED IN LUNG, SIGNAL = 0.7; EXPRESSED IN FETAL LIVER, SIGNAL = 0.72; EXPRESSED IN ADULT LIVER, SIGNAL = 0.77; SWISSPROT HIT: P24555, EVALUE 6.90e-01; EST_HUMAN HIT: BE671987.1, EVALUE 0.00e+00
gcctgagccttccttggagacccagcacatactacaaagtcgcctccaattccccaagcgtggccccgtactgcaccagatcacagagggtgtccgagaataccatgcttccctttgtttccaacagaaccactttcttcacaagatacacaccggatgactggtacaggtccaatttaaccaactatcaagagtccaacacttcccgacataattcggagaaactaagagtggatacatctcgcctgattcaagacaaatatcaacaaacaagaaaaactcaggcagacacaacccaaaatctgggagaacgtgtcaatgacatagggttttggaaatctgaaatcattcatgagttggatgaaatgattggagagacaaatgcacttactgatgtgaagaaaagactggagcgggctttgatggagactgaagcccctcttcag

SEQ ID NO: 27997 - DNA, 146 bp, Homo sapiens
  MAP TO AC006500.4; EXPRESSED IN PLACENTA, SIGNAL = 0.59; EXPRESSED IN LUNG, SIGNAL = 0.7; EXPRESSED IN BRAIN, SIGNAL = 0.71; EXPRESSED IN BONE MARROW, SIGNAL = 0.63; EXPRESSED IN ADULT LIVER, SIGNAL = 0.69; SWISSPROT HIT: P21969, EVALUE 5.30e+00; NT HIT: AB034233.1, EVALUE 3.30e-01; EST_HUMAN HIT: AA676941.1, EVALUE 1.90e+00
cctgcttgtcagtttggccctcttcactgcagagagcttggattttgttgaacacagaggaaccctttcctctttccagctgagcacatctggttttggcgttgaaaggatctgaggtgtcaggtttaaatgccttatctgaccag

SEQ ID NO: 27998 - DNA, 204 bp, Homo sapiens
  MAP TO AC005343.1; EXPRESSED IN PLACENTA, SIGNAL = 1.8; EXPRESSED IN LUNG, SIGNAL = 0.7; EXPRESSED IN FETAL LIVER, SIGNAL = 0.79; EXPRESSED IN BRAIN, SIGNAL = 1.8; EXPRESSED IN ADULT LIVER, SIGNAL = 3.7; EXPRESSED IN BONE MARROW, SIGNAL = 0.78; EST_HUMAN HIT: AW793226.1, EVALUE 4.00e-70; SWISSPROT HIT: P29905, EVALUE 3.80e+00; NT HIT: M35200.1, EVALUE 4.80e-01
acagggcagctcctgtgatgtagaggctggccatcagcatcaaccagcctatctgccctatggtggcggccttaaggaacccctccgagatgacatagtgcaaggtaggaatgattccactcaggcctaggcccaaaaacactcctaggagtcacaagaagagagtaaagtaatgcagaagagaaacaaagagccagaagtcag

SEQ ID NO: 27999 - DNA, 112 bp, Homo sapiens
  MAP TO AC006515.7; EXPRESSED IN BRAIN, SIGNAL = 0.65; EXPRESSED IN ADULT LIVER, SIGNAL = 0.7; EXPRESSED IN LUNG, SIGNAL = 0.7; EXPRESSED IN BONE MARROW, SIGNAL = 0.67; EXPRESSED IN PLACENTA, SIGNAL = 0.78; EXPRESSED IN FETAL LIVER, SIGNAL = 0.75; SWISSPROT HIT: P08721, EVALUE 8.20e-01; NT HIT: D49530.1, EVALUE 6.20e-02
ctcagaaaattcttggctggcattcttggagtttctgatttttacataaggttctaaatattctgtggactcttctatacagtgcgtctctgcttctggttcatccaattct

SEQ ID NO: 28000 - DNA, 194 bp, Homo sapiens
  MAP TO AC005352.1; EXPRESSED IN LUNG, SIGNAL = 0.49; EXPRESSED IN BRAIN, SIGNAL = 0.59; EXPRESSED IN BONE MARROW, SIGNAL = 0.55; EXPRESSED IN ADULT LIVER, SIGNAL = 0.43; SWISSPROT HIT: O60287, EVALUE 3.80e+00; NT HIT: AF295739.1, EVALUE 1.20e-01
cctctgggtccatgtttactattgcggttcctgaaggaacctcatcatcaccattgttgatggtgtcccctacctgtgtgaaggttctcatggggcttagaaggctggcaaatatcttgcaggcctcgaaacagcattgccatgtgccatgactctcctttagcttcttagagctcagttccctatcagcaatc

SEQ ID NO: 28001 - DNA, 133 bp, Homo sapiens
  MAP TO AC002092.1; EXPRESSED IN LUNG, SIGNAL = 0.64; EXPRESSED IN FETAL LIVER, SIGNAL = 0.99; EXPRESSED IN BONE MARROW, SIGNAL = 0.58; EXPRESSED IN BRAIN, SIGNAL = 0.67; EXPRESSED IN ADULT LIVER, SIGNAL = 0.65; NT HIT: AJ277557.1, EVALUE 3.00e-69; EST_HUMAN HIT: AW105151.1, EVALUE 1.70e+00; SWISSPROT HIT: P10247, EVALUE 5.30e+00
acactcagacccgatgtatctgtccctggggtgctggtttccttgtgcatggcagtgctgtctggtggcctcaggtcggaaatcaggggccgtgctgatgtcttcctctaagccctcacttccagcctgttgg

SEQ ID NO: 28002 - DNA, 184 bp, Homo sapiens
  MAP TO AC003683.1; EXPRESSED IN FETAL LIVER, SIGNAL = 2.2; EXPRESSED IN BRAIN, SIGNAL = 1.3; EXPRESSED IN BONE MARROW, SIGNAL = 1.8; EXPRESSED IN ADULT LIVER, SIGNAL = 1.4; EXPRESSED IN PLACENTA, SIGNAL = 1.3; EXPRESSED IN LUNG, SIGNAL = 1.3; NT HIT: gi11421007, EVALUE 1.00e-99; EST_HUMAN HIT: BE697162.1, EVALUE 1.60e-01; SWISSPROT HIT: P24524, EVALUE 6.00e-29
tctggaacgccaaatgggatattatttgatccagatgtacatcccaagcctgcttatagtaattttgtcctgggtttccttttggataaatatggatgcagcccctgccagggtcgcactgggcatcaccacagtcttaacgatgaccacccagagttcaggctccagggcatctctgccaaag

SEQ ID NO: 28003 - DNA, 152 bp, Homo sapiens
  MAP TO AC005858.1; EXPRESSED IN PLACENTA, SIGNAL = 0.95; EXPRESSED IN LUNG, SIGNAL = 0.93; EXPRESSED IN FETAL LIVER, SIGNAL = 1.1; EXPRESSED IN ADULT LIVER, SIGNAL = 0.78; EXPRESSED IN BRAIN, SIGNAL = 0.93; EXPRESSED IN BONE MARROW, SIGNAL =   1; SWISSPROT HIT: P55780, EVALUE 1.00e+00; EST_HUMAN HIT: AA582952.1, EVALUE 2.00e-80
atgaagaaaatgaccctacaggacccacaatcccggatgatgtggcttccttggatgacacaggccctggacattacctgggggatgctgaagaagacaactcaggaggccaagcaaatcctgctccaggcacagacaccattcactccagg

SEQ ID NO: 28004 - DNA, 204 bp, Homo sapiens
  MAP TO AC003042.1; EXPRESSED IN PLACENTA, SIGNAL = 1.3; EXPRESSED IN LUNG, SIGNAL = 1.3; EXPRESSED IN FETAL LIVER, SIGNAL = 1.3; EXPRESSED IN BONE MARROW, SIGNAL = 1.3; EXPRESSED IN BRAIN, SIGNAL = 1.1; EXPRESSED IN ADULT LIVER, SIGNAL = 1.2; NT HIT: AF146793.2, EVALUE 3.10e-02; EST_HUMAN HIT: AW294648.1, EVALUE 1.00e-111; SWISSPROT HIT: P40872, EVALUE 3.80e+00
cctcctgcgaactctggctcagcacgacccaaaagatgtgcaatgaagtctgtttcacagcaaacatgtatgtgtcgttcatgtggacagcaccgcaagccttcataaagtgcagcacagtagcccttttctttgctgcagtcaagttcaccaataaggatattgtatgctcggaggactttatttttgcaatcagtgcaaaac

SEQ ID NO: 28005 - DNA, 132 bp, Homo sapiens
  MAP TO AC003049.1; EXPRESSED IN PLACENTA, SIGNAL = 1.1; EXPRESSED IN FETAL LIVER, SIGNAL = 1.1; EXPRESSED IN BRAIN, SIGNAL = 1.1; EXPRESSED IN BONE MARROW, SIGNAL = 1.1; EXPRESSED IN LUNG, SIGNAL = 1.1; EXPRESSED IN ADULT LIVER, SIGNAL = 1.1; NT HIT: J03071.1, EVALUE 4.60e+00; EST_HUMAN HIT: T78960.1, EVALUE 2.80e-02; SWISSPROT HIT: P00477, EVALUE 4.10e+00
caggtctgtgcatgttggggagaggagacacaagaagggtaacattcccagaaaagtttggaggaccagcaccacagaccatggggccagcatgagctgtgtcaaaggccaggactgtactgtgaggttgga

SEQ ID NO: 28006 - DNA, 109 bp, Homo sapiens
  MAP TO AC004825.2; EXPRESSED IN ADULT LIVER, SIGNAL = 0.67; EXPRESSED IN PLACENTA, SIGNAL = 0.68; EXPRESSED IN BRAIN, SIGNAL = 0.65; EXPRESSED IN LUNG, SIGNAL = 0.72; EXPRESSED IN BONE MARROW, SIGNAL = 0.73; NT HIT: AB023212.1, EVALUE 2.00e-54; SWISSPROT HIT: O06974, EVALUE 9.40e+00
ctggttgcttggatctagaccggcataagaatttctggaactgcaaccaactgggggtgtggcctctcggatgaactcagacatttcaatccctccaccaggatcactg

SEQ ID NO: 28007 - DNA, 132 bp, Homo sapiens
  MAP TO AC005678.1; EXPRESSED IN LUNG, SIGNAL = 1.3; EXPRESSED IN FETAL LIVER, SIGNAL = 1.4; EXPRESSED IN BONE MARROW, SIGNAL = 1.3; EXPRESSED IN PLACENTA, SIGNAL = 1.1; EXPRESSED IN BRAIN, SIGNAL = 1.3; EXPRESSED IN ADULT LIVER, SIGNAL = 1.4; NT HIT: D37916.1, EVALUE 8.00e-05; EST_HUMAN HIT: AA360028.1, EVALUE 3.00e-08; SWISSPROT HIT: Q64625, EVALUE 3.00e-15
ataggcggccacattgacaaacaggacgtgcttgcctgcaaactgcttgaattggatgtactcctcgccgttgagggtgagggctccatactcatagatggtgcctgttacccctttgttgcaatccacctg

SEQ ID NO: 28008 - DNA, 229 bp, Homo sapiens
  MAP TO AC003693.1; EXPRESSED IN PLACENTA, SIGNAL = 0.8; EXPRESSED IN FETAL LIVER, SIGNAL = 0.73; EXPRESSED IN BRAIN, SIGNAL = 1.2; EXPRESSED IN BONE MARROW, SIGNAL = 0.87; EXPRESSED IN ADULT LIVER, SIGNAL = 0.79; EXPRESSED IN LUNG, SIGNAL = 0.89; NT HIT: U07561.1, EVALUE 2.20e+00; SWISSPROT HIT: O14994, EVALUE 6.00e-03
ctgctccacacggccgagcccacaggcctgctgtctccaaagccacccagacaccaagggctggccgtcctcaggtgtgattggcaccaaggccctgggggcatgtccgatttgactgggagaggagaccctgtgtggacgtggcttctaggccacttagattgctgtcgttgcctcctttggcgatgtctggcggggtggcccgggaccgatgcagctgaaatccacc

SEQ ID NO: 28009 - DNA, 169 bp, Homo sapiens
  MAP TO AC005686.1; EXPRESSED IN BRAIN, SIGNAL = 0.66; EXPRESSED IN BONE MARROW, SIGNAL = 0.49; EXPRESSED IN ADULT LIVER, SIGNAL = 0.45; EXPRESSED IN LUNG, SIGNAL = 0.45; NT HIT: AF003528.1, EVALUE 1.00e-10; EST_HUMAN HIT: AL134399.1, EVALUE 2.00e-06; SWISSPROT HIT: P52322, EVALUE 2.30e+00
gttgtacagtcatcaccaccatccatctgcatcatccttttcatcttgtgaaactgaaactttatactcgttacacaacactccctgtttcccccactccccatcacctggcaagcaccattctactttctgtctctaagattctgtctactccaagtacctcatataa

SEQ ID NO: 28010 - DNA, 331 bp, Homo sapiens
  MAP TO AC001226.1; EXPRESSED IN PLACENTA, SIGNAL = 0.61; EXPRESSED IN LUNG, SIGNAL = 0.5; EXPRESSED IN FETAL LIVER, SIGNAL = 0.68; EXPRESSED IN ADULT LIVER, SIGNAL = 0.64; EXPRESSED IN BRAIN, SIGNAL =   1; EXPRESSED IN BONE MARROW, SIGNAL = 0.57; NT HIT: AF129532.1, EVALUE 0.00e+00; SWISSPROT HIT: P53699, EVALUE 1.30e+00; EST_HUMAN HIT: BE762770.1, EVALUE 0.00e+00
tagatggtttgaatgtcttttaataatctgtttgatcagctctggatgggtagctttcaaataagatgtagctggctgattcagttcaaattcaaaacatctccacaagtcaggcatgtgaaatacctggttccagttgcggcaaacttgtgaagcatgagcccggtcaagaagaggcaaatatttaaatacttggagaataatgtcctgaaggagattaccccaatcacaagtctgagaatgctcatttgtagtcctcagtttcttggatttctctgcagttccttcttctgatgaattacggtcactatctcttcctcctcgtttcatc

SEQ ID NO: 28011 - DNA, 105 bp, Homo sapiens
  MAP TO AC005823.1; EXPRESSED IN PLACENTA, SIGNAL = 0.74; EXPRESSED IN LUNG, SIGNAL = 0.93; EXPRESSED IN FETAL LIVER, SIGNAL = 0.91; EXPRESSED IN BRAIN, SIGNAL = 0.69; EXPRESSED IN BONE MARROW, SIGNAL = 0.95; EXPRESSED IN ADULT LIVER, SIGNAL = 0.83; EST_HUMAN HIT: AA323583.1, EVALUE 9.10e-01; NT HIT: AF034920.1, EVALUE 1.90e-01
atggccgtgcccatggactggctggatctgagagacatggccatgaccatgctgccccagagcaccagctccttcagagtgtggacgctgaccacgtggtcccag

SEQ ID NO: 28012 - DNA, 78 bp, Homo sapiens
  MAP TO AC003954.1; EXPRESSED IN PLACENTA, SIGNAL = 0.82; EXPRESSED IN LUNG, SIGNAL = 0.87; EXPRESSED IN FETAL LIVER, SIGNAL = 0.8; EXPRESSED IN BONE MARROW, SIGNAL = 0.66; EXPRESSED IN ADULT LIVER, SIGNAL = 0.88; EXPRESSED IN BRAIN, SIGNAL = 0.73; NT HIT: AF065630.1, EVALUE 9.60e+00
agattcagacacattaaactgctcaatccctttgaaatacacaacccgtattttagcctgatgggttctcgattgaat

SEQ ID NO: 28013 - DNA, 285 bp, Homo sapiens
  MAP TO AC005828.1; EXPRESSED IN PLACENTA, SIGNAL = 0.59; EXPRESSED IN FETAL LIVER, SIGNAL = 0.67; EXPRESSED IN BRAIN, SIGNAL = 0.88; EXPRESSED IN BONE MARROW, SIGNAL = 0.79; EXPRESSED IN ADULT LIVER, SIGNAL = 0.63; EXPRESSED IN LUNG, SIGNAL = 0.77; NT HIT: Z92910.1, EVALUE 1.70e-01; SWISSPROT HIT: P13944, EVALUE 6.40e+00; EST_HUMAN HIT: H78456.1, EVALUE 2.60e-01
agaagccacagctgtgagacatgaatttactgtagccgtccacatatccagttggttctaccacccaaattttacttgcaagtatctgtttgtttccatctctcatgatcataatgaccacatcctgggatctcacatggattactttcacctcttggtctcccttcttgccctcttcgagtccattctccaccagcagccagagcaatcttataaaaacacaaatcagaccatgtaacctcttcctgaaaatcctccagtggctttctatgattagagtaaaat

SEQ ID NO: 28014 - DNA, 167 bp, Homo sapiens
  MAP TO AC006504.1; EXPRESSED IN ADULT LIVER, SIGNAL = 1.2; EXPRESSED IN PLACENTA, SIGNAL = 0.82; EXPRESSED IN BRAIN, SIGNAL = 0.82; EXPRESSED IN LUNG, SIGNAL = 0.7; EXPRESSED IN BONE MARROW, SIGNAL = 0.54; SWISSPROT HIT: Q55682, EVALUE 1.30e+00; EST_HUMAN HIT: AA442630.1, EVALUE 4.00e-11; NT HIT: AE000216.1, EVALUE 9.70e-02
acaccttccttctcttccacatcttcacaacccttctggatcacaagcctaagtccactgaccacatcacctgtcacctggaccttgcacacttagtgatgctcctcattgcggtcttcttggcatctccagacctgtttaagtaactacatttgcagaataactta

SEQ ID NO: 28015 - DNA, 280 bp, Homo sapiens
  MAP TO AC005832.1; EXPRESSED IN PLACENTA, SIGNAL = 0.91; EXPRESSED IN LUNG, SIGNAL =   1; EXPRESSED IN FETAL LIVER, SIGNAL = 0.71; EXPRESSED IN BONE MARROW, SIGNAL = 0.83; EXPRESSED IN ADULT LIVER, SIGNAL = 0.94; EXPRESSED IN BRAIN, SIGNAL = 1.2; SWISSPROT HIT: Q09690, EVALUE 3.00e-24; EST_HUMAN HIT: H53198.1, EVALUE 1.00e-123; NT HIT: AF263541.1, EVALUE 4.00e-95
ctgagggccaagcccacggtctccgtgggagccgaccgccagccctccgcgtacctccatgatgcaggccagctgctccacctcattctccccggggaacagggggtagcccgtgtacaactccgccgtgatgcagcccaggctccacatgtcaatggccacgtcgtaggggtggcccaggatcacttctggggatcggtagaaccggctttggatgtacgtgtatactgcggaggcaaagtaagagaaacctcgtgggacaaacttcttaccctccaga

SEQ ID NO: 28016 - DNA, 383 bp, Homo sapiens
  MAP TO AC004622.1; EXPRESSED IN PLACENTA, SIGNAL = 0.72; EXPRESSED IN ADULT LIVER, SIGNAL = 0.62; EXPRESSED IN LUNG, SIGNAL = 0.71; EXPRESSED IN BRAIN, SIGNAL = 0.79; EXPRESSED IN BONE MARROW, SIGNAL = 1.5; EST_HUMAN HIT: AW502362.1, EVALUE 0.00e+00; NT HIT: gi11416749, EVALUE 0.00e+00; SWISSPROT HIT: P01484, EVALUE 2.80e+00
aagtgacagttttataaactgggtcagtggcatccttggggtccaagccttcagatgactcagctggggtgctctccaatactctccgtttaactgtcccatagtttggttcatacgtgtcagacagagaactggaggaggtccaactctttctctctaggcttcctttacactgcccacaagttctagagcagcttttagaacaggaatagggctcagagtcagtgggttcaacttcagcaatggggtcatccaaatgggtatgtctgtaagagttcaaaaaatcccagctttttgggtttggaaggctttggaagttgtcatgggagctgcttgaacacgaagtccaacttccacgaccactgtcagctgcttctataatg

SEQ ID NO: 28017 - DNA, 153 bp, Homo sapiens
  MAP TO AC002042.1; EXPRESSED IN PLACENTA, SIGNAL = 0.74; EXPRESSED IN BONE MARROW, SIGNAL = 0.72; EXPRESSED IN ADULT LIVER, SIGNAL = 0.73; EXPRESSED IN LUNG, SIGNAL = 0.77; EXPRESSED IN BRAIN, SIGNAL = 0.99; EST_HUMAN HIT: BF529560.1, EVALUE 1.30e-01; SWISSPROT HIT: P47823, EVALUE 7.90e-01
ttgccagtatgggcctctgctcagtggttccagagggaaaagaggaggtcttacttgcaaagtattgtgttgttacattaaaatctgtattagggctatccagaggtctgaaacaaggctctcttttttctctaagtcagaaaaaaaaatcag

SEQ ID NO: 28018 - DNA, 123 bp, Homo sapiens
  MAP TO AC004063.1; EXPRESSED IN BRAIN, SIGNAL = 0.58; EXPRESSED IN ADULT LIVER, SIGNAL = 0.5; EXPRESSED IN LUNG, SIGNAL = 0.5; EXPRESSED IN FETAL LIVER, SIGNAL = 0.76; NT HIT: U15967.1, EVALUE 2.70e-01
aatatcctgaatttagtactaaaagcaaaggataaggaaggtgttatgtggcctctgtataacagagaatgttctatactgaaaacttatgatatactttctaccttagacaaagccagacag

SEQ ID NO: 28019 - DNA, 77 bp, Homo sapiens
  MAP TO AC004219.1; EXPRESSED IN PLACENTA, SIGNAL =   1; EXPRESSED IN LUNG, SIGNAL = 1.2; EXPRESSED IN FETAL LIVER, SIGNAL =   1; EXPRESSED IN BRAIN, SIGNAL = 0.86; EXPRESSED IN ADULT LIVER, SIGNAL = 0.97; EXPRESSED IN BONE MARROW, SIGNAL = 0.96; NT HIT: AJ229041.1, EVALUE 1.00e-11; EST_HUMAN HIT: BE856505.1, EVALUE 5.00e-21
tatggcttggctgtgtccccatgcagatctcatcttgaattgtagctcctataattccgatgtgttgtaggagggaa

SEQ ID NO: 28020 - DNA, 170 bp, Homo sapiens
  MAP TO AC004064.1; EXPRESSED IN PLACENTA, SIGNAL = 1.1; EXPRESSED IN LUNG, SIGNAL = 0.99; EXPRESSED IN FETAL LIVER, SIGNAL =   1; EXPRESSED IN BRAIN, SIGNAL = 0.94; EXPRESSED IN BONE MARROW, SIGNAL = 1.1; EXPRESSED IN ADULT LIVER, SIGNAL =   1; EST_HUMAN HIT: AL138026.1, EVALUE 5.00e-29; SWISSPROT HIT: P21414, EVALUE 4.00e-04; NT HIT: AF087913.1, EVALUE 3.00e-48
ggaccgtcttgccccaagggttcacagactcccctaaactttttggccaaattttagaagaagtactagaaaaagttgtcatcccagaacaaatatgccttcttcagtacctggatgacattcttatatctggtgaagatctagagaaggtaactgacttctctacacat

SEQ ID NO: 28021 - DNA, 176 bp, Homo sapiens
  MAP TO AC005738.1; EXPRESSED IN PLACENTA, SIGNAL = 0.67; EXPRESSED IN LUNG, SIGNAL = 0.7; EXPRESSED IN BRAIN, SIGNAL = 0.64; EXPRESSED IN BONE MARROW, SIGNAL = 0.7; EXPRESSED IN ADULT LIVER, SIGNAL = 0.61; SWISSPROT HIT: P98092, EVALUE 1.30e+00; NT HIT: AF109905.1, EVALUE 1.60e+00; EST_HUMAN HIT: AW105653.1, EVALUE 6.10e-01
tggggctccccagcactcgggacaagaaggaaatttggaggcaggaactcagaggaatcgggcagaactcacgtttccaactgtgcaagacaactccctggaactcacagcagccatcataattatcgcttgcagaaggggtcttatcacataacagctttctcactcctcagggg

SEQ ID NO: 28022 - DNA, 180 bp, Homo sapiens
  MAP TO AC004223.1; EXPRESSED IN PLACENTA, SIGNAL = 1.1; EXPRESSED IN FETAL LIVER, SIGNAL =   1; EXPRESSED IN BONE MARROW, SIGNAL = 1.3; EXPRESSED IN ADULT LIVER, SIGNAL =   1; EXPRESSED IN LUNG, SIGNAL = 1.2; EXPRESSED IN BRAIN, SIGNAL =   1; NT HIT: gi7710125, EVALUE 4.00e-97; EST_HUMAN HIT: BE261599.1, EVALUE 5.00e-97; SWISSPROT HIT: P49916, EVALUE 3.00e-09
gttactcagcttcccttctgctttcttggtactggctgagggcttgctgggggccttgcgggacacagcagaccctgagggacccttattctcttcactgctaccccctgtagtggagctcccctcatctccagccactacagtgaagtctgccttctccttggacaactggtacagttc

SEQ ID NO: 28023 - DNA, 278 bp, Homo sapiens
  MAP TO AC004134.1; EXPRESSED IN PLACENTA, SIGNAL = 0.87; EXPRESSED IN LUNG, SIGNAL = 0.91; EXPRESSED IN FETAL LIVER, SIGNAL = 0.82; EXPRESSED IN BRAIN, SIGNAL = 0.7; EXPRESSED IN BONE MARROW, SIGNAL = 0.93; EXPRESSED IN ADULT LIVER, SIGNAL =   1; SWISSPROT HIT: P21851, EVALUE 3.00e-47; EST_HUMAN HIT: AL039581.1, EVALUE 0.00e+00; NT HIT: gi11425572, EVALUE 0.00e+00
ctcccatgatgaattggcaagtgtttacgatgaattccatgacttccttccacaaaagcattgggaggcttatgatacacagaggccaaagaaccaatgtggcagattagctcatccagcagagttggctcaataaggtccgtctcctcagagatcagtggcttctcagacaagactacttctttagctgtaacagggtcagttgagagaaggcgccaataaatatagccccggtctcgaaggtcaggattatcagaatcctaaagaaaaggcaaagg

SEQ ID NO: 28024 - DNA, 178 bp, Homo sapiens
  MAP TO AC004141.1; EXPRESSED IN LUNG, SIGNAL = 0.94; EXPRESSED IN BRAIN, SIGNAL = 0.71; EXPRESSED IN ADULT LIVER, SIGNAL =   1; EXPRESSED IN PLACENTA, SIGNAL = 0.91; EXPRESSED IN FETAL LIVER, SIGNAL = 0.76; EXPRESSED IN BONE MARROW, SIGNAL = 0.78; EST_HUMAN HIT: H14888.1, EVALUE 7.00e-87; SWISSPROT HIT: P48436, EVALUE 3.90e+00; NT HIT: AB023177.1, EVALUE 5.00e-96
gccagaatggatcgtgctcgtatctgtttcccttctgtcgttttccctgagcaggtgtgtgagcaggaggaccacgtagaccatgtgctgagcacacagtctttcgggcatggggcatcacaggccacagggatggggaagatggcatctctgcacagctgtctgtcaacttcttctc

SEQ ID NO: 28025 - DNA, 194 bp, Homo sapiens
  MAP TO AC004526.1; EXPRESSED IN PLACENTA, SIGNAL = 0.72; EXPRESSED IN BONE MARROW, SIGNAL = 0.56; EXPRESSED IN ADULT LIVER, SIGNAL = 0.62; EXPRESSED IN LUNG, SIGNAL = 0.73; EXPRESSED IN BRAIN, SIGNAL = 0.83; NT HIT: M38107.1, EVALUE 1.00e-105; SWISSPROT HIT: Q04690, EVALUE 4.00e-21; EST_HUMAN HIT: AW951634.1, EVALUE 1.00e-105
tgagcttattgttaagtttcttgatgccttgattgacacgtacctgcctggaattgatgaagaaaccagtgaagaatccctcctgactcccacatctccttaccctcctgcactgcagagccagcttagtatcactgccaaccttaacctttctaattccatgacctcacttgcaacttcccagcattccccag

SEQ ID NO: 28026 - DNA, 159 bp, Homo sapiens
  MAP TO AC005552.1; EXPRESSED IN BRAIN, SIGNAL = 0.87; EXPRESSED IN PLACENTA, SIGNAL = 0.77; EXPRESSED IN LUNG, SIGNAL = 0.8; EXPRESSED IN BONE MARROW, SIGNAL = 0.77; EXPRESSED IN ADULT LIVER, SIGNAL = 0.63; EXPRESSED IN FETAL LIVER, SIGNAL = 1.1; SWISSPROT HIT: P25198, EVALUE 4.00e+00; EST_HUMAN HIT: BE966592.2, EVALUE 5.40e-01
tttttctcaacttctgaagtttcagctatgtacacagcaatattgttgaccttcttcacttcagacagccgacagaagagaattgctatttttttcagtccttttggtctgtcttttgttttagtcccaacattggacattagaatagtaattgctccc

SEQ ID NO: 28027 - DNA, 138 bp, Homo sapiens
  MAP TO AC004053.1; EXPRESSED IN LUNG, SIGNAL = 0.74; EXPRESSED IN FETAL LIVER, SIGNAL = 0.7; EXPRESSED IN BRAIN, SIGNAL = 0.71; EXPRESSED IN BONE MARROW, SIGNAL = 1.1; EXPRESSED IN PLACENTA, SIGNAL = 1.1; EXPRESSED IN ADULT LIVER, SIGNAL = 0.52; EST_HUMAN HIT: BE179090.1, EVALUE 7.20e+00
tccggagatatagttacagtcatttccatggtgtaacactacagtcagctcaataccacagccccatttgggctctacctcttttcttgaattttttttactgttgttcttcacttctagtccctggaattgtctttc

SEQ ID NO: 28028 - DNA, 194 bp, Homo sapiens
  MAP TO AC005669.1; EXPRESSED IN PLACENTA, SIGNAL = 0.98; EXPRESSED IN LUNG, SIGNAL = 1.3; EXPRESSED IN FETAL LIVER, SIGNAL = 1.1; EXPRESSED IN BRAIN, SIGNAL = 0.99; EXPRESSED IN BONE MARROW, SIGNAL = 1.1; EXPRESSED IN ADULT LIVER, SIGNAL = 1.1; SWISSPROT HIT: Q05870, EVALUE 2.60e-01; EST_HUMAN HIT: AA885371.1, EVALUE 1.00e-94; NT HIT: AJ289880.1, EVALUE 1.00e-103
gattttataaaggcccaagacttaagtaacttagaaaacactgtcgctgccttaaagagtgagtttcagaagacacttaatgacaagacagaaaaccagaagtcactggaggagaatctggcgacagccaagcacgatctactcagggttcaggagcagctgcacatggctgaaaaggtcagaagaccatgttt

SEQ ID NO: 28029 - DNA, 118 bp, Homo sapiens
  MAP TO AC004880.1; EXPRESSED IN PLACENTA, SIGNAL = 1.6; EXPRESSED IN LUNG, SIGNAL = 1.6; EXPRESSED IN FETAL LIVER, SIGNAL = 1.3; EXPRESSED IN BRAIN, SIGNAL = 1.5; EXPRESSED IN BONE MARROW, SIGNAL = 1.4; EXPRESSED IN ADULT LIVER, SIGNAL = 1.4; EST_HUMAN HIT: BE780163.1, EVALUE 6.00e+00
tgctggagattcaacaagagcggtttctcactgatgagttcacacttctggattctgctttcatttggaaaattctcctcaagcggcgagatcatgaaccccctgacaaaggaaagac

SEQ ID NO: 28030 - DNA, 109 bp, Homo sapiens
  MAP TO AC004467.1; EXPRESSED IN ADULT LIVER, SIGNAL = 0.61; EXPRESSED IN PLACENTA, SIGNAL =   1; EXPRESSED IN BONE MARROW, SIGNAL = 0.69; EXPRESSED IN LUNG, SIGNAL = 1.2; EXPRESSED IN BRAIN, SIGNAL = 0.83; SWISSPROT HIT: O43182, EVALUE 7.00e-13; EST_HUMAN HIT: AA533455.1, EVALUE 7.00e-55; NT HIT: gi7382477, EVALUE 5.00e-55
gtcatcagacaaagaattctcagttcagagttcagcccgggctgaggagagcacggccatcatcgctgttgtgcaaaagatgattgaaaattatgaagccctgttcatg

SEQ ID NO: 28031 - DNA, 85 bp, Homo sapiens
  MAP TO AC005536.2; EXPRESSED IN LUNG, SIGNAL = 0.92; EXPRESSED IN BRAIN, SIGNAL = 0.9; EXPRESSED IN PLACENTA, SIGNAL =   1; EXPRESSED IN FETAL LIVER, SIGNAL = 0.97; EXPRESSED IN BONE MARROW, SIGNAL = 0.75; EXPRESSED IN ADULT LIVER, SIGNAL = 1.1; EST_HUMAN HIT: AI914380.1, EVALUE 2.60e-01
catgttcatataaagacatgaggcggtctaggtgtaattcagtgggagaagtgtaccctgtgtagtgtaccctggtgacaatgtg

SEQ ID NO: 28032 - DNA, 196 bp, Homo sapiens
  MAP TO AC000114.1; EXPRESSED IN FETAL LIVER, SIGNAL = 1.5; EXPRESSED IN BRAIN, SIGNAL = 0.6; SWISSPROT HIT: P35590, EVALUE 1.30e+00; NT HIT: gi5031864, EVALUE 2.00e-03; EST_HUMAN HIT: BF446009.1, EVALUE 3.00e-03
atgcaacgtcccatcattctggagatgagctcctccatgcagcaacccaggacagcagctagtgccaccaggagcagcagagcacagccggcacctgtcaccactgtgcacatctgccaggccaggcttgggatggcattgaagctggcatagcgcccacattcttccaccatgatcagactgtgtccctctcccc

SEQ ID NO: 28033 - DNA, 126 bp, Homo sapiens
  MAP TO AC003093.1; EXPRESSED IN BRAIN, SIGNAL = 0.55; EXPRESSED IN ADULT LIVER, SIGNAL = 0.59; EXPRESSED IN PLACENTA, SIGNAL = 0.66; EXPRESSED IN LUNG, SIGNAL = 0.6; EXPRESSED IN BONE MARROW, SIGNAL = 0.62; SWISSPROT HIT: P35845, EVALUE 2.10e-01; NT HIT: AY008372.1, EVALUE 4.00e-65; EST_HUMAN HIT: H73831.1, EVALUE 6.00e-65
catacacaggcagaagaggagccgccgccacagtagatgctttcatgccatttcccaaacagccgatgaaccgcttttccactcctgtcaaacactgtgccttcaatctcatgggcattagtgctc

SEQ ID NO: 28034 - DNA, 137 bp, Homo sapiens
  MAP TO AC002557.1; EXPRESSED IN LUNG, SIGNAL = 0.41; EXPRESSED IN BRAIN, SIGNAL = 0.62; EXPRESSED IN BONE MARROW, SIGNAL = 0.57; NT HIT: gi4585709, EVALUE 2.00e-14; EST_HUMAN HIT: BE268461.1, EVALUE 1.80e+00; SWISSPROT HIT: P95458, EVALUE 1.40e+00
cctcccagctggggtaagcccccccatcgcagagctccagcaggaccttgggtcccaagacctggggaaacaaggccatggctgcaggcagctgcccaccctggggcagaagacttgggaatggggtgggcatgcct

SEQ ID NO: 28035 - DNA, 137 bp, Homo sapiens
  MAP TO AC004886.1; EXPRESSED IN PLACENTA, SIGNAL = 1.5; EXPRESSED IN LUNG, SIGNAL = 1.5; EXPRESSED IN FETAL LIVER, SIGNAL = 1.3; EXPRESSED IN BRAIN, SIGNAL = 1.4; EXPRESSED IN ADULT LIVER, SIGNAL = 1.4; EXPRESSED IN BONE MARROW, SIGNAL = 1.3; SWISSPROT HIT: P25574, EVALUE 2.40e+00; EST_HUMAN HIT: AW896645.1, EVALUE 4.00e-63; NT HIT: AB011131.1, EVALUE 1.00e-71
ttgctcttgatgttgactgagtggtctagagtggaccaatctttccggcagttttcggtccagaccatgtccattttccaaacgagactccctgggtttatcaaaccaatctgtttcctcacgacgcagatgatagg

SEQ ID NO: 28036 - DNA, 116 bp, Homo sapiens
  MAP TO AC005859.1; EXPRESSED IN LUNG, SIGNAL = 0.48; EXPRESSED IN BRAIN, SIGNAL = 0.55; EXPRESSED IN BONE MARROW, SIGNAL = 0.51; EST_HUMAN HIT: AA780728.1, EVALUE 9.50e-02; NT HIT: AF099810.1, EVALUE 2.50e-01; SWISSPROT HIT: Q9Z4J7, EVALUE 8.20e-01
tcagtcctgggcaaaccaggacgtttggtctcccgttccctcttctaaggtggatagttctgcatccccggcactaccttggtaaggaatcccacgagcatggctttgatcttgtg

SEQ ID NO: 28037 - DNA, 273 bp, Homo sapiens
  MAP TO AC005866.3; EXPRESSED IN FETAL LIVER, SIGNAL = 1.9; EXPRESSED IN BRAIN, SIGNAL = 1.5; EXPRESSED IN ADULT LIVER, SIGNAL = 3.5; EXPRESSED IN LUNG, SIGNAL = 2.2; EXPRESSED IN BONE MARROW, SIGNAL = 1.2; EXPRESSED IN PLACENTA, SIGNAL = 1.4; EXPRESSED IN HELA, SIGNAL = 1.7; NT HIT: gi5730038, EVALUE 2.00e-56; SWISSPROT HIT: P41997, EVALUE 1.00e-07; EST_HUMAN HIT: AW962016.1, EVALUE 3.00e-56
ctcatgaggcacccacttatcaagctttttcacctttccaataagcttcaaatgcctaacaaccatagaatggttgacattgagttattcggcaaattctcttgtagttgtaagaggatcggctttgatggtggctctcaattggtcatcgtcaacttcccatggcctgccattatgctcctcatcttcttcattatgctcctcatcttctttgcaaaaccttttgaaccaccactgtgccgtacgttcgttagcaattcctgggccaaatga

SEQ ID NO: 28038 - DNA, 120 bp, Homo sapiens
  MAP TO AC000015.2; EXPRESSED IN BONE MARROW, SIGNAL = 0.95; EXPRESSED IN PLACENTA, SIGNAL = 0.77; EXPRESSED IN LUNG, SIGNAL = 0.66; EXPRESSED IN FETAL LIVER, SIGNAL = 0.73; EXPRESSED IN ADULT LIVER, SIGNAL = 0.71; EXPRESSED IN BRAIN, SIGNAL = 0.67; NT HIT: gi4759171, EVALUE 1.00e-61; SWISSPROT HIT: P50848, EVALUE 3.10e+00; EST_HUMAN HIT: AI935778.1, EVALUE 2.00e-61
tttatctactgctttccgtacaatttctttatattcttccttggtgatatctttattttggtaaaatggcttgatggccaattttacctcttgtgctgctttttcttgaatttgcaattt

SEQ ID NO: 28039 - DNA, 99 bp, Homo sapiens
  MAP TO AC005823.1; EXPRESSED IN LUNG, SIGNAL = 1.1; EXPRESSED IN BRAIN, SIGNAL =   1; EXPRESSED IN PLACENTA, SIGNAL = 1.4; EXPRESSED IN FETAL LIVER, SIGNAL = 1.5; EXPRESSED IN BONE MARROW, SIGNAL = 1.2; EXPRESSED IN ADULT LIVER, SIGNAL = 1.5; NT HIT: U32832.1, EVALUE 5.30e-02
tttcccctggctgattccacacccactgggattttaatttgacctttgtgtgtcctgatattgggaaggggtgtgcactgatttagggactggaacatt

SEQ ID NO: 28040 - DNA, 94 bp, Homo sapiens
  MAP TO AC003108.1; EXPRESSED IN LUNG, SIGNAL = 0.69; EXPRESSED IN FETAL LIVER, SIGNAL = 0.74; EXPRESSED IN BONE MARROW, SIGNAL = 0.67; EXPRESSED IN PLACENTA, SIGNAL = 0.75; EXPRESSED IN BRAIN, SIGNAL = 0.62; EXPRESSED IN ADULT LIVER, SIGNAL = 0.78; NT HIT: AJ276505.1, EVALUE 5.00e-02; EST_HUMAN HIT: AW582253.1, EVALUE 5.00e-46
taaaatgttcctgatagaaaaattgatcaagctgcaggatatggagaagaaagcaaaccccagctcacttgttctggaaaggagagaggtggag

SEQ ID NO: 28041 - DNA, 237 bp, Homo sapiens
  MAP TO AC004898.1; EXPRESSED IN LUNG, SIGNAL = 1.2; EXPRESSED IN FETAL LIVER, SIGNAL =   1; EXPRESSED IN BRAIN, SIGNAL = 1.1; EXPRESSED IN BONE MARROW, SIGNAL = 1.1; EXPRESSED IN ADULT LIVER, SIGNAL = 1.1; EXPRESSED IN PLACENTA, SIGNAL =   1; NT HIT: gi7661855, EVALUE 1.00e-118; SWISSPROT HIT: P53119, EVALUE 6.00e-04; EST_HUMAN HIT: AL043761.1, EVALUE 1.00e-118
gctctctatgagaacatgctggtggagctgccctttgcaggcttctttctttccaagttgcttggaaccagtgccgacgtggacattcaccacctcgcctccctagaccctgaggtgtataagaatttgctctttctgaagagctacgaagacgatgtggaggagcttgggctgaacttcactgtggtgaacaatgacctgggagaggcgcaggtgaggggtcaggaggaggattca

SEQ ID NO: 28042 - DNA, 106 bp, Homo sapiens
  MAP TO AC005348.1; EXPRESSED IN LUNG, SIGNAL = 0.83; EXPRESSED IN FETAL LIVER, SIGNAL = 0.92; EXPRESSED IN BRAIN, SIGNAL =   1; EXPRESSED IN BONE MARROW, SIGNAL = 0.98; EXPRESSED IN PLACENTA, SIGNAL = 0.76; EXPRESSED IN ADULT LIVER, SIGNAL = 0.86; EST_HUMAN HIT: BE275994.1, EVALUE 4.00e-53; SWISSPROT HIT: P46941, EVALUE 2.80e-01; NT HIT: Y10388.3, EVALUE 3.00e-53
tttgccaagtggttcatgagcagctgtaacatctgccgatttttctctgggagccgatgaacaaggctgtggatttcagagacccgagactcctggttctccagtt

SEQ ID NO: 28043 - DNA, 80 bp, Homo sapiens
  MAP TO AC005871.2; EXPRESSED IN BRAIN, SIGNAL = 1.2; EXPRESSED IN LUNG, SIGNAL = 1.1; EXPRESSED IN FETAL LIVER, SIGNAL = 1.9; EXPRESSED IN BONE MARROW, SIGNAL = 1.2; EXPRESSED IN ADULT LIVER, SIGNAL = 1.5; EXPRESSED IN PLACENTA, SIGNAL = 1.4; NT HIT: AE002132.1, EVALUE 4.10e-02; EST_HUMAN HIT: AI557388.1, EVALUE 3.80e+00
atggggaaggtgccctggctggggagagcgtttataaaaccacatttaataaaagagagtgttatattaagtatgtttgc

SEQ ID NO: 28044 - DNA, 107 bp, Homo sapiens
  MAP TO AC005550.1; EXPRESSED IN PLACENTA, SIGNAL = 0.96; EXPRESSED IN ADULT LIVER, SIGNAL = 0.95; EXPRESSED IN LUNG, SIGNAL =   1; EXPRESSED IN FETAL LIVER, SIGNAL = 0.79; EXPRESSED IN BRAIN, SIGNAL = 0.81; EXPRESSED IN BONE MARROW, SIGNAL = 0.8; EST_HUMAN HIT: BE243571.1, EVALUE 1.30e+00; SWISSPROT HIT: P35831, EVALUE 5.50e+00; NT HIT: M15972.1, EVALUE 3.60e+00
gctttgtagtgatttttttcagcagttgtaaagttttgatttttaagagtccctttgaagacgtggcagatgttggctttgctaataatgctggaaagcgtagcagg

SEQ ID NO: 28045 - DNA, 132 bp, Homo sapiens
  MAP TO AC004905.1; EXPRESSED IN ADULT LIVER, SIGNAL = 1.3; EXPRESSED IN PLACENTA, SIGNAL = 1.1; EXPRESSED IN LUNG, SIGNAL = 1.3; EXPRESSED IN BRAIN, SIGNAL = 1.4; EXPRESSED IN FETAL LIVER, SIGNAL = 1.4; EXPRESSED IN BONE MARROW, SIGNAL = 1.3; NT HIT: U19241.1, EVALUE 1.90e-02; SWISSPROT HIT: P01132, EVALUE 1.40e+00; EST_HUMAN HIT: BE007413.1, EVALUE 1.10e-01
tggccgttatggccagggagctggagatgcaattgttggccaaacagaggtgagcctgccctcagggagcttactgtctgatgcaggcagcacataccaaacaggtaaacaggtgagtcaggtatggtcaca

SEQ ID NO: 28046 - DNA, 202 bp, Homo sapiens
  MAP TO AC005296.1; EXPRESSED IN ADULT LIVER, SIGNAL = 0.86; EXPRESSED IN PLACENTA, SIGNAL = 0.85; EXPRESSED IN LUNG, SIGNAL = 0.87; EXPRESSED IN BRAIN, SIGNAL = 0.8; EXPRESSED IN FETAL LIVER, SIGNAL = 0.83; EXPRESSED IN BONE MARROW, SIGNAL = 0.71; NT HIT: U08888.1, EVALUE 1.00e-110; SWISSPROT HIT: P41247, EVALUE 1.00e-20; EST_HUMAN HIT: AA075984.1, EVALUE 1.00e-105
tgctacagctagaatgaagcacatcaacctatcatttgcagcgtgtggatttctgggcatttaccacttgggggcagcatctgcactttgcagacatggcaaaaaacttgtgaaggatgtcaaagccttcgctggggcgtctgcgggatcgttggttgcttctgttctgctaacagcaccagaaaaaatagaggtaattaag

SEQ ID NO: 28047 - DNA, 76 bp, Homo sapiens
  MAP TO AC004240.1; EXPRESSED IN LUNG, SIGNAL = 0.74; EXPRESSED IN BRAIN, SIGNAL = 0.95; EXPRESSED IN BONE MARROW, SIGNAL = 0.65; EXPRESSED IN PLACENTA, SIGNAL = 0.6; EXPRESSED IN ADULT LIVER, SIGNAL = 0.73; NT HIT: AF229844.1, EVALUE 3.00e-21; EST_HUMAN HIT: BE832636.1, EVALUE 2.00e-35
gttgatttctatttgccttgtattactgctgctgctgcttcttttggtgttctgggaacactgggtgactttactt

SEQ ID NO: 28048 - DNA, 146 bp, Homo sapiens
  MAP TO AC005738.1; EXPRESSED IN BONE MARROW, SIGNAL = 0.64; EXPRESSED IN PLACENTA, SIGNAL = 0.69; EXPRESSED IN LUNG, SIGNAL = 0.63; EXPRESSED IN ADULT LIVER, SIGNAL = 0.53; EXPRESSED IN BRAIN, SIGNAL = 0.72; NT HIT: AE001057.1, EVALUE 5.20e+00; EST_HUMAN HIT: AW391055.1, EVALUE 1.90e+00; SWISSPROT HIT: Q63769, EVALUE 6.10e-01
gcgaagtgattgcagagcggttggagagtgaatggatccggagcagcgtagcaaacagcgcagtctggggggctccatcccgccgcagggccaaggcctttcctgccagtccgacgaactgccggtagatggcactctgaacccgt

SEQ ID NO: 28049 - DNA, 114 bp, Homo sapiens
  MAP TO AC003657.1; EXPRESSED IN LUNG, SIGNAL = 0.72; EXPRESSED IN BRAIN, SIGNAL = 0.73; EXPRESSED IN PLACENTA, SIGNAL = 0.71; EXPRESSED IN BONE MARROW, SIGNAL = 0.8; EXPRESSED IN ADULT LIVER, SIGNAL = 0.73; EXPRESSED IN FETAL LIVER, SIGNAL = 0.72; SWISSPROT HIT: P53701, EVALUE 4.00e-16; EST_HUMAN HIT: BE792471.1, EVALUE 7.00e-58; NT HIT: gi4885400, EVALUE 5.00e-58
gccatttgcattgtctactgtcagagaagagtcatccattccgagagcagattcagagaaaaagtgggtttacccttctgagcagatgttctggaatgcaatgttaaagaaagg

SEQ ID NO: 28050 - DNA, 355 bp, Homo sapiens
  MAP TO AC005740.1; EXPRESSED IN PLACENTA, SIGNAL = 0.62; EXPRESSED IN LUNG, SIGNAL = 0.62; EXPRESSED IN BONE MARROW, SIGNAL = 0.69; EXPRESSED IN ADULT LIVER, SIGNAL = 0.64; EXPRESSED IN BRAIN, SIGNAL = 0.65; EST_HUMAN HIT: AW340037.1, EVALUE 2.00e-58; SWISSPROT HIT: P18460, EVALUE 5.50e+00; NT HIT: AB026893.1, EVALUE 0.00e+00
cccctgacccggcctggatggcgagactctctttgcccctcaccaccaactaccgtgacaatgtgatctccccggatgctgcagccacggaggagccaaggaccttccagacgttcggcaaggcagaggcaccagagctgagcccaacaggcacgaggctggccagcacctttgtctcggagatgagctcactgctggagatgctgctggaacagcgctccagcatgcccgtggaggccgcctccgaggcgctgcggcggctctcggtctgcgggaggaccctcagtttagacttggccaccagtgcagcctcaggcatgaaagtgcaaggggacccaggtggaaagacggggac

SEQ ID NO: 28051 - DNA, 105 bp, Homo sapiens
  MAP TO AC005510.3; EXPRESSED IN LUNG, SIGNAL = 0.88; EXPRESSED IN FETAL LIVER, SIGNAL = 0.7; EXPRESSED IN BRAIN, SIGNAL = 1.1; EXPRESSED IN BONE MARROW, SIGNAL = 0.69; EXPRESSED IN PLACENTA, SIGNAL = 0.86; EXPRESSED IN ADULT LIVER, SIGNAL = 0.65; EST_HUMAN HIT: BE019291.1, EVALUE 3.30e-01; NT HIT: gi8923323, EVALUE 2.30e-01
tacaggtcagtaaacactttcctggagatgccggagcagtttcattttggtacagataatatgggatttgttgtgactcagaatatcagtccagagtgggactga

SEQ ID NO: 28052 - DNA, 85 bp, Homo sapiens
  MAP TO AC005771.1; EXPRESSED IN BRAIN, SIGNAL = 0.84; EXPRESSED IN LUNG, SIGNAL = 0.99; EXPRESSED IN FETAL LIVER, SIGNAL = 0.81; EXPRESSED IN BONE MARROW, SIGNAL = 0.76; EXPRESSED IN ADULT LIVER, SIGNAL = 0.74; EXPRESSED IN PLACENTA, SIGNAL = 0.98; EST_HUMAN HIT: BE253668.1, EVALUE 4.10e+00
tcagattctgcacctcgctggccgtgcataaagaaggctgggacatccctgaattcacagtcagggtggtcgtctgtgtgcagaa

SEQ ID NO: 28053 - DNA, 237 bp, Homo sapiens
  MAP TO AC002094.1; EXPRESSED IN PLACENTA, SIGNAL = 0.84; EXPRESSED IN BONE MARROW, SIGNAL = 0.68; EXPRESSED IN ADULT LIVER, SIGNAL = 0.8; EXPRESSED IN LUNG, SIGNAL = 0.99; EXPRESSED IN FETAL LIVER, SIGNAL = 0.89; EXPRESSED IN BRAIN, SIGNAL = 1.1; NT HIT: gi10863936, EVALUE 0.00e+00; SWISSPROT HIT: Q13829, EVALUE 5.00e-40; EST_HUMAN HIT: AU137738.1, EVALUE 0.00e+00
tcagtcgcgatgggtagactggtggccgagctgccggtcatcgtaagtgctgtagcgcttgacgtggatgcggcggacacggtcccgcagttcaaaggtctcctcatcttcactgggggaagcctggctgcggctacggcttgtggcctccaacaaggagttgtcggggacgcggggagtctcatagagtaggacgttgagtgtctcctcatagattcgggcctctgggaattccac

SEQ ID NO: 28054 - DNA, 168 bp, Homo sapiens
  MAP TO AC005518.2; EXPRESSED IN PLACENTA, SIGNAL = 1.4; EXPRESSED IN LUNG, SIGNAL = 1.3; EXPRESSED IN BRAIN, SIGNAL = 1.1; EXPRESSED IN ADULT LIVER, SIGNAL = 1.6; EXPRESSED IN FETAL LIVER, SIGNAL = 1.3; EXPRESSED IN BONE MARROW, SIGNAL = 1.2; SWISSPROT HIT: P43050, EVALUE 6.70e+00; NT HIT: AB001615.1, EVALUE 3.90e-01; EST_HUMAN HIT: AF075301.1, EVALUE 5.00e-20
gtccttctcaggtaataggccttaaaaagtgctttaatgccttgatgcaatggttgaatcaaagaggtggtgtttggagggaaaaacattactttgatattgggatggagatcaccaataaaaggagcatgtgtgggaccatcaccaacaataagcaaatcctgaaag

SEQ ID NO: 28055 - DNA, 126 bp, Homo sapiens
  MAP TO AC004612.1; EXPRESSED IN PLACENTA, SIGNAL =   5; EXPRESSED IN LUNG, SIGNAL = 0.93; EXPRESSED IN FETAL LIVER, SIGNAL = 0.85; EXPRESSED IN BRAIN, SIGNAL = 0.97; EXPRESSED IN BONE MARROW, SIGNAL = 0.84; EXPRESSED IN ADULT LIVER, SIGNAL = 0.98; SWISSPROT HIT: P05937, EVALUE 4.00e-16; NT HIT: M19879.1, EVALUE 4.00e-65; EST_HUMAN HIT: BF090181.1, EVALUE 3.00e-05
ctagttatccccagcacagagaataagagcaagatccgttcggtacagcttccctccatccgacaaagccattatgttcttcttgtatgttgtaatattattaatatccagatcctgtacagaata

SEQ ID NO: 28056 - DNA, 85 bp, Homo sapiens
  MAP TO AC000100.2; EXPRESSED IN BONE MARROW, SIGNAL = 0.59; EXPRESSED IN PLACENTA, SIGNAL = 0.59; EXPRESSED IN LUNG, SIGNAL = 0.59; EXPRESSED IN FETAL LIVER, SIGNAL = 1.6; EXPRESSED IN BRAIN, SIGNAL = 0.64; EXPRESSED IN ADULT LIVER, SIGNAL = 4.2; NT HIT: AF095824.1, EVALUE 4.40e-02; EST_HUMAN HIT: BF432443.1, EVALUE 6.60e-02
cttttcctggctttctcttggtactggagaaagtccagcctgctgtcgagttcttcgaacgaccaataggactaagctagaggaa

SEQ ID NO: 28057 - DNA, 135 bp, Homo sapiens
  MAP TO AC003667.1; EXPRESSED IN PLACENTA, SIGNAL = 0.96; EXPRESSED IN FETAL LIVER, SIGNAL = 0.76; EXPRESSED IN BONE MARROW, SIGNAL = 0.82; EXPRESSED IN LUNG, SIGNAL = 0.69; EXPRESSED IN BRAIN, SIGNAL = 0.71; EXPRESSED IN ADULT LIVER, SIGNAL = 0.68; SWISSPROT HIT: Q03560, EVALUE 1.80e+00; NT HIT: AL163206.2, EVALUE 3.00e-01; EST_HUMAN HIT: AV700234.1, EVALUE 1.80e+00
aatgacataagacagcttaaattctcctttaaattgaccttgagaactttttagaagttttatttggaagtcagcctcagctctatgcttatcaaaaccatttaagtaagtcatcttcttcaatgaagcatgaag

SEQ ID NO: 28058 - DNA, 166 bp, Homo sapiens
  MAP TO AC005872.2; EXPRESSED IN LUNG, SIGNAL = 1.5; EXPRESSED IN BONE MARROW, SIGNAL = 1.3; EXPRESSED IN ADULT LIVER, SIGNAL = 1.4; EXPRESSED IN PLACENTA, SIGNAL = 1.5; EXPRESSED IN FETAL LIVER, SIGNAL = 1.3; EXPRESSED IN BRAIN, SIGNAL = 1.4; SWISSPROT HIT: P28738, EVALUE 1.00e+00; NT HIT: AF071757.1, EVALUE 9.70e-02; EST_HUMAN HIT: AI969034.1, EVALUE 1.00e-88
cacttttcaacatgtttgcttggttttctaagtcagatatttcaatcttgacattttctttcatcaaaagctctcttttctttgttatttcataatcattattaaagtctgtaatttccttaataaatttgtcttcctcctctatcatttgtttctttatagcctc

SEQ ID NO: 28059 - DNA, 327 bp, Homo sapiens
  MAP TO AC005668.1; EXPRESSED IN PLACENTA, SIGNAL = 1.4; EXPRESSED IN ADULT LIVER, SIGNAL = 1.4; EXPRESSED IN LUNG, SIGNAL = 0.55; EXPRESSED IN FETAL LIVER, SIGNAL = 1.1; EXPRESSED IN BRAIN, SIGNAL =   1; EXPRESSED IN BONE MARROW, SIGNAL = 1.5
agcccaagatcttcatcaacactgtcatcatcgtcatcgctgtcatcatcatcgctgtcatcatcatcaccatcgctgtcaacatcatcatcatcatcactgtcatcatcatcaccatcactgtcatcatcatcatcaccatcactgtcatcatcatcactgtcatcatcatcatcatcatcactgtcatcatcatcatcatcatcactgtcatcatcattgtcatcgctgtcatcatcatcactgtcatcatcatcatcattctcatcatcatcatcatcactgctgtcatcatcatcatcatcactgctgtcatcatcaccatca

SEQ ID NO: 28060 - DNA, 163 bp, Homo sapiens
  MAP TO AC006065.3; EXPRESSED IN FETAL LIVER, SIGNAL = 0.81; EXPRESSED IN BRAIN, SIGNAL = 0.65; EXPRESSED IN BONE MARROW, SIGNAL = 0.74; EXPRESSED IN ADULT LIVER, SIGNAL =   1; EXPRESSED IN PLACENTA, SIGNAL = 0.71; EXPRESSED IN LUNG, SIGNAL = 0.82; NT HIT: X76289.1, EVALUE 3.70e-01; SWISSPROT HIT: P11898, EVALUE 1.30e+00; EST_HUMAN HIT: AL118568.1, EVALUE 1.40e-01
ttggccactggccagccaatggtggggcaaactttggagcaggctatcacggttggaacaatcagtgctgaaggagttgaagaggatgggcaagccacggcttctccttctggaaacggagatcatctccaaagaagaccatcattttctactatggacaatg

SEQ ID NO: 28061 - DNA, 101 bp, Homo sapiens
  MAP TO AC006075.1; EXPRESSED IN PLACENTA, SIGNAL = 1.6; EXPRESSED IN LUNG, SIGNAL = 1.5; EXPRESSED IN BONE MARROW, SIGNAL = 1.4; EXPRESSED IN ADULT LIVER, SIGNAL = 1.6; EXPRESSED IN FETAL LIVER, SIGNAL = 1.5; EXPRESSED IN BRAIN, SIGNAL = 1.3; NT HIT: AF082738.1, EVALUE 2.20e-01; SWISSPROT HIT: P52704, EVALUE 5.50e+00; EST_HUMAN HIT: BF351332.1, EVALUE 1.30e+00
ccttgcacttgccattttgtacaaaagtatgtttggttccgtgccttccttccttctctggcaaattgaaaattatgatggaaataagaatttccaaaaac

SEQ ID NO: 28062 - DNA, 451 bp, Homo sapiens
  MAP TO AC005803.1; EXPRESSED IN FETAL LIVER, SIGNAL = 1.2; EXPRESSED IN BONE MARROW, SIGNAL = 1.2; EXPRESSED IN PLACENTA, SIGNAL =   1; EXPRESSED IN LUNG, SIGNAL = 0.94; EXPRESSED IN BRAIN, SIGNAL = 0.98; EXPRESSED IN ADULT LIVER, SIGNAL = 1.3; NT HIT: L01973.1, EVALUE 0.00e+00; SWISSPROT HIT: P35499, EVALUE 6.00e-57; EST_HUMAN HIT: BE736384.1, EVALUE 2.00e-03
gccccggctcaccttgctatcctcaggctctgagaaagtgtcggtttcctcctcggtgggcatctccaggtcggactcctcggaggcgatgggcacctgtatggtcaggtaggggttgttgatgaagttaaggtggtccagctcgaggctggatggggggccgtcagccaggcccatgtggttcaggatgtgattgtccttcttcaggtcctcctcgggcggctccttcttctcatcctcgggggcagtctcccccgcctctccagcctccccggccccgtcagcctccccgaggctgagcatgatgtccttggggctcaggatcttgccatgcagcagccccaggaggaaggccttggcaaagccgatgcccaacttgatgcgcccgatggcaatctgcaggttgttcatctcgccatcctcatccgaggctgccagactgtcggcgctg

SEQ ID NO: 28063 - DNA, 122 bp, Homo sapiens
  MAP TO AC004529.1; EXPRESSED IN LUNG, SIGNAL =   1; EXPRESSED IN FETAL LIVER, SIGNAL =   1; EXPRESSED IN BRAIN, SIGNAL = 0.91; EXPRESSED IN BONE MARROW, SIGNAL = 0.91; EXPRESSED IN PLACENTA, SIGNAL = 1.1; EXPRESSED IN ADULT LIVER, SIGNAL = 0.95; NT HIT: AF017178.2, EVALUE 1.10e+00; EST_HUMAN HIT: AA490060.1, EVALUE 1.00e-62
tgggaatgcaagtggccaacagtagtgaagaggatgagcttgtgtggtcaaaatgggatgtggatgtgaaatttatcctgtgctgtgcaaagtaccacagagtgagtcaccttcctcaccag

SEQ ID NO: 28064 - DNA, 230 bp, Homo sapiens
  MAP TO AC002303.1; EXPRESSED IN LUNG, SIGNAL = 0.79; EXPRESSED IN BONE MARROW, SIGNAL = 0.75; EXPRESSED IN ADULT LIVER, SIGNAL = 0.68; EXPRESSED IN PLACENTA, SIGNAL = 0.91; EXPRESSED IN FETAL LIVER, SIGNAL = 0.67; EXPRESSED IN BRAIN, SIGNAL = 0.75; EST_HUMAN HIT: BE729323.1, EVALUE 1.00e-102; NT HIT: gi4753160, EVALUE 1.00e-102; SWISSPROT HIT: P48791, EVALUE 1.30e-01
ctcgtgggggaacacacggcccagccggagggtacagtccaaggtgggctcatagaaagccatggggctctcgtccaggctggagggcacttccacctcttccaccacgggtgtagagaagagcgagacaggccttggctttctcagccagcgcttccggatgcagccgagggactccaggccctggagacaccagacacacaggttacagcggcactgccctcgcctgc

SEQ ID NO: 28065 - DNA, 226 bp, Homo sapiens
  MAP TO AC004067.1; EXPRESSED IN PLACENTA, SIGNAL = 0.94; EXPRESSED IN LUNG, SIGNAL = 0.97; EXPRESSED IN FETAL LIVER, SIGNAL = 1.2; EXPRESSED IN BRAIN, SIGNAL = 0.94; EXPRESSED IN ADULT LIVER, SIGNAL =   1; EXPRESSED IN BONE MARROW, SIGNAL =   1; SWISSPROT HIT: P55109, EVALUE 5.80e-01; NT HIT: AY007381.1, EVALUE 2.00e-31; EST_HUMAN HIT: BE271295.1, EVALUE 1.00e-124
cgtcactgcatttatactggcagagaccgtcctcgcctcccaggaggtccaaggcggcgttcaggtacgtgtctatcttatgaacgccgttccggatggtcttcagggtggctctccagtcggtggtctgggcctgctcctggcacctgacaacagcggccatgaggaggagcaggagggtgagcgcggggcgcgagagcagggccatgcgcgcagcgccgggctc

SEQ ID NO: 28066 - DNA, 115 bp, Homo sapiens
  MAP TO AC005670.1; EXPRESSED IN PLACENTA, SIGNAL = 1.1; EXPRESSED IN ADULT LIVER, SIGNAL = 1.4; EXPRESSED IN LUNG, SIGNAL = 1.1; EXPRESSED IN FETAL LIVER, SIGNAL = 1.2; EXPRESSED IN BRAIN, SIGNAL = 1.1; EXPRESSED IN BONE MARROW, SIGNAL =   1; NT HIT: S52770.1, EVALUE 1.00e+00; SWISSPROT HIT: P31283, EVALUE 7.10e+00
aaaacccatgtgtgggtcttccattcaccctcttattaattggcctggagtgcagccggggcattgggagttgcccaaggcgattgtaatgcccaggggtagggagccgatggct

SEQ ID NO: 28067 - DNA, 167 bp, Homo sapiens
  MAP TO AC005844.7; EXPRESSED IN PLACENTA, SIGNAL = 1.3; EXPRESSED IN LUNG, SIGNAL = 1.4; EXPRESSED IN FETAL LIVER, SIGNAL = 1.5; EXPRESSED IN BRAIN, SIGNAL = 1.3; EXPRESSED IN BONE MARROW, SIGNAL = 1.2; EXPRESSED IN ADULT LIVER, SIGNAL = 1.3; SWISSPROT HIT: P26041, EVALUE 1.00e+00; EST_HUMAN HIT: AI217359.1, EVALUE 3.00e-89; NT HIT: M16230.2, EVALUE 2.50e-02
tcagatctgaaaaccaaaataaagagaagtcatggatgcttgaaaaagataatttgatgtcaaagattaagcaatatagggtgcagtgtaagaagaaagaagataaaattggaaaagtgttgcccgttatgcatgagagtcaccatgctcaaagtgaatatattaag

SEQ ID NO: 28068 - DNA, 506 bp, Homo sapiens
  MAP TO AC005815.1; EXPRESSED IN PLACENTA, SIGNAL =   1; EXPRESSED IN BONE MARROW, SIGNAL = 0.68; EXPRESSED IN ADULT LIVER, SIGNAL = 0.71; EXPRESSED IN LUNG, SIGNAL = 0.81; EXPRESSED IN FETAL LIVER, SIGNAL = 0.71; EXPRESSED IN BRAIN, SIGNAL = 0.64; SWISSPROT HIT: Q62786, EVALUE 2.00e-05; NT HIT: AB007935.1, EVALUE 0.00e+00; EST_HUMAN HIT: H17004.1, EVALUE 6.00e-87
atcctccctctgtacttgggaaactcacttgtatctagaacacggatgccgatgggggctgactcctcctccgtcagccggtaccattccttctgagggctgggcagccactcctccacatggcaggagtaattgcctgtatcttgggggcttgcctgcagcactgtgagccggtagagcaccggggagagcctctggaagcgaagcctgccctcccaaggactgccctctgggccaaagacagcatctgggcccacgctcagcagggccgtccgctctgttgggtcgtcgtcgtcgtcgtcctcctcctcctcctcctcctcctcctccctttcctcttcctgttcttccaggccagggctgctccttttccccccagctttagtcctcagggaataccaggccacagcgaagcgggagtcctggctggagcgggacacgatgctacagtccagctggaaagctgccttctcagagaccgtggcattggggaccactgtgtccac

SEQ ID NO: 28069 - DNA, 93 bp, Homo sapiens
  MAP TO AC005961.1; EXPRESSED IN ADULT LIVER, SIGNAL = 1.2; EXPRESSED IN FETAL LIVER, SIGNAL = 0.99; EXPRESSED IN BRAIN, SIGNAL = 0.91; EXPRESSED IN BONE MARROW, SIGNAL = 2.8; EXPRESSED IN PLACENTA, SIGNAL = 1.8; EXPRESSED IN LUNG, SIGNAL =   1; NT HIT: AE000980.1, EVALUE 4.90e-02; EST_HUMAN HIT: AA847450.1, EVALUE 2.90e-01
acacctaagttatgctaatgaagtctgtcagggtggaatccatggagagcttcagggtggggccgccagaaagatcaaatttgtgattagaag

SEQ ID NO: 28070 - DNA, 125 bp, Homo sapiens
  MAP TO AC004470.1; EXPRESSED IN BRAIN, SIGNAL = 0.58; EXPRESSED IN ADULT LIVER, SIGNAL = 0.7; EXPRESSED IN LUNG, SIGNAL = 0.76; EXPRESSED IN FETAL LIVER, SIGNAL = 0.7; EXPRESSED IN BONE MARROW, SIGNAL = 0.64; EXPRESSED IN PLACENTA, SIGNAL = 0.65; NT HIT: Z99124.1, EVALUE 1.10e+00; EST_HUMAN HIT: AI298883.1, EVALUE 2.00e-03
ctaaagaggtgaagttgatttccctactcctggttttggagttagataatgtgacattttttggccaatggaatgacagcggaagtcatgtgtctaaaatgctagacatgcttgtatatgatcag

SEQ ID NO: 28071 - DNA, 136 bp, Homo sapiens
  MAP TO AC002299.1; EXPRESSED IN PLACENTA, SIGNAL = 0.82; EXPRESSED IN BONE MARROW, SIGNAL = 0.69; EXPRESSED IN ADULT LIVER, SIGNAL = 0.82; EXPRESSED IN FETAL LIVER, SIGNAL = 0.67; EXPRESSED IN LUNG, SIGNAL =   1; EXPRESSED IN BRAIN, SIGNAL = 0.76; EST_HUMAN HIT: BE796426.1, EVALUE 7.00e-71; NT HIT: gi11431590, EVALUE 5.00e-71; SWISSPROT HIT: P05127, EVALUE 9.00e-21
cagtcagggaaccaaggtcccggaagaaaagacgaccaacactgtctccaaatttgacaacaatggcaacagagaccggatgaaactgaccgattttaacttcctaatggtgctggggaaaggcagctttggcaag

SEQ ID NO: 28072 - DNA, 160 bp, Homo sapiens
  MAP TO AC005827.3; EXPRESSED IN LUNG, SIGNAL = 0.84; EXPRESSED IN FETAL LIVER, SIGNAL = 0.67; EXPRESSED IN BRAIN, SIGNAL = 0.95; EXPRESSED IN PLACENTA, SIGNAL = 0.74; EXPRESSED IN BONE MARROW, SIGNAL = 0.65; EXPRESSED IN ADULT LIVER, SIGNAL = 0.79; NT HIT: AF302046.1, EVALUE 5.70e+00; SWISSPROT HIT: Q49415, EVALUE 8.90e+00
gagtaaaaagcttcccaagaagcacaagtcacatacatgttttcctaatttgcttttaatctcaagagtttacaagttggctaactctaatgcacaagtcacatctgtaatagcagccttcatctccactgccgttgtcaagagggctcggaaatataaa

SEQ ID NO: 28073 - DNA, 398 bp, Homo sapiens
  MAP TO AC003117.1; EXPRESSED IN ADULT LIVER, SIGNAL = 0.86; EXPRESSED IN PLACENTA, SIGNAL = 1.1; EXPRESSED IN LUNG, SIGNAL = 0.97; EXPRESSED IN FETAL LIVER, SIGNAL = 0.86; EXPRESSED IN BRAIN, SIGNAL = 0.95; EXPRESSED IN BONE MARROW, SIGNAL =   1; SWISSPROT HIT: Q61704, EVALUE 7.70e-01; NT HIT: gi11428081, EVALUE 0.00e+00; EST_HUMAN HIT: AL121162.1, EVALUE 6.00e-09
tagcgaccactgagagacatgttaacttctaaggctttaatacgattattaagtctcataaatactgactccttttggtttgatccatgtacaagatttccattagcatatcctagatctgtagaattttgcaattcagcataaaaatctgtagctgtcctctgtaaccctctcaaaagggcatcttctggagactgttcttcttcttttacttcaggtaatgaagaagaatccacaacagaaatcaaagtttgctttgctgtgtcagctatattcattttggcttccccatcttcattgtcgggtacagtggctgtatttattggtggcactattgtttcagacagctttgtgaaaatttgcatggagttcacatcttcttttataatattatccat

SEQ ID NO: 28074 - DNA, 75 bp, Homo sapiens
  MAP TO AC005772.1; EXPRESSED IN LUNG, SIGNAL = 0.53; EXPRESSED IN BRAIN, SIGNAL = 0.69; EXPRESSED IN ADULT LIVER, SIGNAL = 0.58; EST_HUMAN HIT: AI983738.1, EVALUE 5.60e-02; NT HIT: L36867.1, EVALUE 5.90e-01
gtcatccatgacgacccagtacatttattctgcaggaattcacatctacagaaggctggcagtcatcttccatct

SEQ ID NO: 28075 - DNA, 1347 bp, Homo sapiens
  MAP TO AC005666.1; EXPRESSED IN BRAIN, SIGNAL = 0.56; EXPRESSED IN ADULT LIVER, SIGNAL = 0.42; EXPRESSED IN LUNG, SIGNAL = 0.5; EST_HUMAN HIT: AA312125.1, EVALUE 0.00e+00; NT HIT: AF030358.2, EVALUE 8.70e-01; SWISSPROT HIT: P29832, EVALUE 3.20e-01
tcacatacccaggaagaaagcagtaaacctttgaatgggttgtttgcaggtgtgcttgggggtctgtggcacttcactcagtggtgcccaacttggaaactcctttggtggtgatggtggtgataggcttgccttctctctctggaacttcagatcctcacagaaagggctagagtctattttaaaaccggacaataaaagatctagggaaggagagcacttaggctcaaaatccggtgttgtcagctggctttggggtgtttcaacttcaggattcagcaagggccaccatgaggagtcaggtccgtacctaggtaaggaccgaggaggcaagggcctaggggtcagttccagttctgcatggatggagggcttttgcgagagttctggatacctgggtgtaggtccttgggacatgtaagtaatttctgggggtttttgggtttgctgtttatagatgggctctggagtaacaaacatggatgacttgtgggagccctcagacactgatggaactgtcacatggtgagttggctctactgactgtacccctggggagatggtgaccctgcggccaacctcgctgtttcctcggattggggtcctcacgttggactccacctgtgatgatactaagacctttgcggagggcttggtttcaggataggcagaatacttatgaagagactcagggtctacccgtgcagaaactcggtgtacaccatcagaatctttaaggacagagagtttgagcaatgagtccaagttcatattcctatacaaggccttgggttttgaaggaattggaccgtaaggacctgtttctgattcttctacagggacccttctctgggctgtctgatagtctgcagagacacagctgcttccgtgctctaggagagagggactccttggagatctgatctcactagtagtcgtaattctttggatgggctcagtttgtactgcttcatcctttgggtaagacaaaatcctacggggaactctgactccttgggggttctggaccttggatggtgggtcatcttctaagatttgtgattgtaagttattcttctggtcttgaaaactcaactgatgagtagatttggcatctgggattgatgaagcatgatggccgacctcgcgccctgacttgctctcactgcctcttcgtgctgcttcctctctgggtggactaactttccattgtctgcttgaagcatgggaagccagtgtctgagtcttctggctctttagatggggagaggaatggcgggatgattctgttcttggtccagtctcgggtccccgaggagtgggtactgcatagtgtccaggtcctga

SEQ ID NO: 28076 - DNA, 188 bp, Homo sapiens
  MAP TO AC004594.1; EXPRESSED IN ADULT LIVER, SIGNAL = 0.84; EXPRESSED IN PLACENTA, SIGNAL =   1; EXPRESSED IN FETAL LIVER, SIGNAL = 0.93; EXPRESSED IN BRAIN, SIGNAL =   1; EXPRESSED IN BONE MARROW, SIGNAL = 0.77; EXPRESSED IN LUNG, SIGNAL = 1.1; EST_HUMAN HIT: BE386106.1, EVALUE 1.00e-102; SWISSPROT HIT: Q08880, EVALUE 5.00e+00; NT HIT: AB046811.1, EVALUE 1.00e-102
ggatggtttagccctggccaagtctttgtgttagatgagtactgtgcccgttatggtgtgagaggctgtcacagacatctctgctaccttgcagaactgatggaacattcagaaaatggtgctgtcattgaccctaccctgctccattacagctttgcattctgtgcctctcatgtgcacggcaacag

SEQ ID NO: 28077 - DNA, 109 bp, Homo sapiens
  MAP TO AC005856.1; EXPRESSED IN PLACENTA, SIGNAL = 0.83; EXPRESSED IN LUNG, SIGNAL = 0.8; EXPRESSED IN FETAL LIVER, SIGNAL = 0.79; EXPRESSED IN BRAIN, SIGNAL =   1; EXPRESSED IN ADULT LIVER, SIGNAL = 0.91; EXPRESSED IN BONE MARROW, SIGNAL = 0.9; NT HIT: AL445065.1, EVALUE 3.70e+00
gagcacatgatatttagcagacatccttcagacatgatcactacaactgggttccagctctgctgcttggttgacaacttcaggcacaactctacacaccacagggtat

SEQ ID NO: 28078 - DNA, 380 bp, Homo sapiens
  MAP TO AC005695.1; EXPRESSED IN ADULT LIVER, SIGNAL = 0.82; EXPRESSED IN PLACENTA, SIGNAL = 0.71; EXPRESSED IN LUNG, SIGNAL = 1.1; EXPRESSED IN BRAIN, SIGNAL = 0.94; EXPRESSED IN BONE MARROW, SIGNAL = 0.96; EXPRESSED IN FETAL LIVER, SIGNAL = 1.2; SWISSPROT HIT: Q90922, EVALUE 3.00e-42; EST_HUMAN HIT: AA769914.1, EVALUE 1.40e+00; NT HIT: gi4758839, EVALUE 0.00e+00
ctagccacagcagctgggagcccacccgtctgcctgtgcttccttgcagccgtccagatccacatcctgaaggcggacaaggcgggggactggtggaagttcacggtgaacatcatctccgtgtataagcagggcacgagccgcatccgccgcggtgaccagagcctgtggatccgctcgcgggacatcgcctgcaagtgtcccaaaatcaagcccctcaagaagtacctgctgctgggcaacgcggaggactctccggaccagagcggcatcgtggccgataaaagcagcctggtgatccagtggcgggacacgtgggcgcggcggctgcgcaagttccagcagcgtgagaagaagggcaagtgcaagaaggcctagcg

SEQ ID NO: 28079 - DNA, 171 bp, Homo sapiens
  MAP TO AC003662.1; EXPRESSED IN ADULT LIVER, SIGNAL = 0.52; EXPRESSED IN LUNG, SIGNAL = 0.72; EXPRESSED IN FETAL LIVER, SIGNAL = 0.72; EXPRESSED IN BRAIN, SIGNAL = 0.62; EXPRESSED IN BONE MARROW, SIGNAL = 0.84; EST_HUMAN HIT: BE255009.1, EVALUE 2.00e-34; NT HIT: AF039517.1, EVALUE 1.00e-87; SWISSPROT HIT: P34998, EVALUE 1.00e-28
cccagccaatgcagatgaacatccatttgcgcagccggtcagtggagtaggtgagcacgatggctgtgtgcaggtagcagccctcgccgaacatccagaagaagttggtcacatggaagtagttgtaggcggctgtcaccaacctgcaccagccctgccaccccaccccca

SEQ ID NO: 28080 - DNA, 174 bp, Homo sapiens
  MAP TO AC005552.1; EXPRESSED IN PLACENTA, SIGNAL = 0.8; EXPRESSED IN BRAIN, SIGNAL = 0.83; EXPRESSED IN BONE MARROW, SIGNAL = 0.81; EXPRESSED IN ADULT LIVER, SIGNAL = 0.99; EXPRESSED IN LUNG, SIGNAL = 0.77; EXPRESSED IN FETAL LIVER, SIGNAL = 0.98; NT HIT: AJ272265.1, EVALUE 4.00e-07; SWISSPROT HIT: P29539, EVALUE 3.40e-01; EST_HUMAN HIT: AL138043.1, EVALUE 6.00e-04
gacaatgatgatgatagttatcttagtactggtagctataacaaaataccacggactgagtaccttatacacaacaggaatttatttgtcacaactgtgaaagctagaagttggagatcagggtaccagcatggtcaggttcttgtgagagccttcttctgggctgaagacttc

SEQ ID NO: 28081 - DNA, 110 bp, Homo sapiens
  MAP TO AC005739.1; EXPRESSED IN PLACENTA, SIGNAL = 1.1; EXPRESSED IN BRAIN, SIGNAL = 1.1; EXPRESSED IN ADULT LIVER, SIGNAL = 1.4; EXPRESSED IN LUNG, SIGNAL = 1.3; EXPRESSED IN FETAL LIVER, SIGNAL = 1.3; EXPRESSED IN BONE MARROW, SIGNAL = 1.6; NT HIT: AF181897.1, EVALUE 2.00e-08; EST_HUMAN HIT: BF035327.1, EVALUE 7.00e-15
tcctttgaagctttgaagccagacttttcatctacattgaaaatctattgttttagtgcagccaccttcatcaatgatcttagctagaccttctgatgctacagcttcac

SEQ ID NO: 28082 - DNA, 191 bp, Homo sapiens
  MAP TO AC004587.1; EXPRESSED IN PLACENTA, SIGNAL = 1.1; EXPRESSED IN LUNG, SIGNAL = 1.1; EXPRESSED IN FETAL LIVER, SIGNAL =   1; EXPRESSED IN BRAIN, SIGNAL = 1.2; EXPRESSED IN ADULT LIVER, SIGNAL = 0.87; EXPRESSED IN BONE MARROW, SIGNAL =   1; EST_HUMAN HIT: AA191536.1, EVALUE 2.00e-87; NT HIT: gi4506786, EVALUE 1.00e-87; SWISSPROT HIT: P46940, EVALUE 6.00e-24
gattggcagcagtagcactgattaatgctgcaatccagaagggtgttgctgagaagactgttttggaactgatgaatcccgaagcccagctgccccaggtgtatccatttgccgccgatctctatcagaaggagctggctaccctgcagcgacaaagtcctgaagtgagttcactaaacctgtcctgtttg

SEQ ID NO: 28083 - DNA, 128 bp, Homo sapiens
  MAP TO AC004417.1; EXPRESSED IN PLACENTA, SIGNAL = 0.7; EXPRESSED IN LUNG, SIGNAL = 0.63; EXPRESSED IN BONE MARROW, SIGNAL = 0.6; EXPRESSED IN ADULT LIVER, SIGNAL = 0.63; EXPRESSED IN BRAIN, SIGNAL = 0.64; NT HIT: AF221126.1, EVALUE 7.20e-02; SWISSPROT HIT: P21332, EVALUE 7.00e+00
cacctcagcaaaacctggagatacaagacaaagcaaaaacaagcatgatcccttccttcgtggcaggacttacaacatgcagggagaaatcattgtttttggaactcacatcaataaatacagaacta

SEQ ID NO: 28084 - DNA, 224 bp, Homo sapiens
  MAP TO AC005683.2; EXPRESSED IN PLACENTA, SIGNAL = 0.71; EXPRESSED IN LUNG, SIGNAL = 0.61; EXPRESSED IN FETAL LIVER, SIGNAL = 0.68; EXPRESSED IN BONE MARROW, SIGNAL = 0.57; EXPRESSED IN ADULT LIVER, SIGNAL = 0.57; EXPRESSED IN BRAIN, SIGNAL = 2.9; EST_HUMAN HIT: R25521.1, EVALUE 6.00e-85; SWISSPROT HIT: P35331, EVALUE 1.00e-33; NT HIT: U55258.1, EVALUE 1.00e-123
tcttctccagaatgtcccatgactacagctggctcgggggcaaaccccatgtcattcagggcctgaactttgatcaggtatggaacaaaggttggcgtgcctgagacaatatatttggatacatttgccacaaccacagatgtccattcatcatcaccatctttctggcgccagctaactttgtactgaaggcctggcccattagattcgaaaccattcaaggg

SEQ ID NO: 28085 - DNA, 106 bp, Homo sapiens
  MAP TO AC004112.1; EXPRESSED IN PLACENTA, SIGNAL = 0.85; EXPRESSED IN ADULT LIVER, SIGNAL = 0.85; EXPRESSED IN LUNG, SIGNAL = 0.72; EXPRESSED IN FETAL LIVER, SIGNAL = 0.78; EXPRESSED IN BRAIN, SIGNAL = 0.59; EXPRESSED IN BONE MARROW, SIGNAL = 0.82; EST_HUMAN HIT: BF592945.1, EVALUE 2.00e-11; SWISSPROT HIT: P18584, EVALUE 3.20e+00
tgggatggtcaatacacatgcctatcctctctccaggtaattcaagggggtttctggaggtccctttcatcaggtcattcttctcactgccctgtttcagtgggag

SEQ ID NO: 28086 - DNA, 170 bp, Homo sapiens
  MAP TO AC004451.1; EXPRESSED IN BRAIN, SIGNAL = 0.6; EXPRESSED IN BONE MARROW, SIGNAL = 0.59; EXPRESSED IN PLACENTA, SIGNAL = 0.7; EXPRESSED IN LUNG, SIGNAL = 0.71; EXPRESSED IN FETAL LIVER, SIGNAL = 0.77; EXPRESSED IN ADULT LIVER, SIGNAL = 0.75; SWISSPROT HIT: Q13201, EVALUE 3.00e+00
catatgatgaagaaaggggaaccagtaatgtgctgaccctgtgtgaggcagtgttgctagaagaaaggggagaacgagtctttgaacacgaagacaatgacctgaatctcagagctttaaatgagacattgttcggtcttgtcttagatatgtcacatgagtatttgcaa

SEQ ID NO: 28087 - DNA, 142 bp, Homo sapiens
  MAP TO AC004499.1; EXPRESSED IN PLACENTA, SIGNAL = 0.83; EXPRESSED IN LUNG, SIGNAL = 0.83; EXPRESSED IN FETAL LIVER, SIGNAL = 0.72; EXPRESSED IN BRAIN, SIGNAL = 0.66; EXPRESSED IN ADULT LIVER, SIGNAL = 0.8; EXPRESSED IN BONE MARROW, SIGNAL = 0.81; NT HIT: AL163279.2, EVALUE 8.10e-02; SWISSPROT HIT: Q61578, EVALUE 9.10e+00
aaccatggcagtggtcaaaatggaatgaactgaagccagttggaagaaggtgagcaagttggagtctaacgtgtcaaagagtggccacctgtcaaggaattcaggggctgcattcccaccctggagggaaaaagaaggtcag

SEQ ID NO: 28088 - DNA, 152 bp, Homo sapiens
  MAP TO AC004127.1; EXPRESSED IN LUNG, SIGNAL =   1; EXPRESSED IN FETAL LIVER, SIGNAL = 1.4; EXPRESSED IN BRAIN, SIGNAL = 0.95; EXPRESSED IN PLACENTA, SIGNAL = 1.2; EXPRESSED IN BONE MARROW, SIGNAL = 1.1; EXPRESSED IN ADULT LIVER, SIGNAL = 1.4; NT HIT: AJ224172.1, EVALUE 1.00e-80; SWISSPROT HIT: O95969, EVALUE 5.00e-22; EST_HUMAN HIT: AW103293.1, EVALUE 2.00e-80
tgttagacttcttcttcattagtgaacctctgttcaagttaagtcttgccaaatttgatgcccctccggaagctgttgcagccaagttaggagtgaagagatgcacggatcagatgtcccttcagaaacgaagcctcattgcggaagtcctg

SEQ ID NO: 28089 - DNA, 85 bp, Homo sapiens
  MAP TO AC005697.1; EXPRESSED IN LUNG, SIGNAL = 0.5; EXPRESSED IN BRAIN, SIGNAL = 0.65; EXPRESSED IN BONE MARROW, SIGNAL = 0.55; EXPRESSED IN ADULT LIVER, SIGNAL = 0.44; EXPRESSED IN FETAL LIVER, SIGNAL = 1.7; EST_HUMAN HIT: BF247939.1, EVALUE 4.10e+00
ctctatgtgctgctctcaagagagaaagtaaaaaaaccagggtgatcttggctagagttgccacaaggactagcactgacttcat

SEQ ID NO: 28090 - DNA, 88 bp, Homo sapiens
  MAP TO AC004073.1; EXPRESSED IN ADULT LIVER, SIGNAL =   1; EXPRESSED IN PLACENTA, SIGNAL = 0.59; EXPRESSED IN LUNG, SIGNAL = 0.89; EXPRESSED IN BRAIN, SIGNAL = 0.88; EXPRESSED IN BONE MARROW, SIGNAL = 0.78; EXPRESSED IN FETAL LIVER, SIGNAL = 0.82; NT HIT: U69633.1, EVALUE 7.20e-01; EST_HUMAN HIT: N56708.1, EVALUE 1.10e+00
agctgctgcaaaaattcaagctgcagtatgtgacatacacatgtctggagaacatggatccttgtccagttgctctttgaatagcact

SEQ ID NO: 28091 - DNA, 227 bp, Homo sapiens
  MAP TO AC006065.3; EXPRESSED IN PLACENTA, SIGNAL = 0.64; EXPRESSED IN FETAL LIVER, SIGNAL = 0.68; EXPRESSED IN BRAIN, SIGNAL = 0.73; EXPRESSED IN BONE MARROW, SIGNAL = 0.6; EXPRESSED IN LUNG, SIGNAL = 0.54; EXPRESSED IN ADULT LIVER, SIGNAL = 0.47; SWISSPROT HIT: Q56887, EVALUE 4.00e+00; NT HIT: gi11545868, EVALUE 5.40e-01; EST_HUMAN HIT: AA868671.1, EVALUE 1.00e-122
gctgaaaaggtgagtcatgcctgttctagccagttttggcccttgtacctgtgcttggtcttggaatgagcctttcagccagtttgcacctatgagtccgatgggaggtttgctggggcttctaggaaaggtggattcttcataacagaacattgtcagaaatgtttccttttctgcctgctctgtctcatcctgcttcagatgaatatcatgtaaggccatgatac

SEQ ID NO: 28092 - DNA, 114 bp, Homo sapiens
  MAP TO AC004081.1; EXPRESSED IN PLACENTA, SIGNAL = 0.99; EXPRESSED IN BONE MARROW, SIGNAL = 0.76; EXPRESSED IN ADULT LIVER, SIGNAL = 0.85; EXPRESSED IN LUNG, SIGNAL = 0.7; EXPRESSED IN FETAL LIVER, SIGNAL = 0.83; EXPRESSED IN BRAIN, SIGNAL = 0.72; EST_HUMAN HIT: AW513244.1, EVALUE 6.00e-46; NT HIT: gi4504510, EVALUE 1.00e-43; SWISSPROT HIT: P54102, EVALUE 2.00e-15
atcatcctcatatgcttctccattgtaatggtgccatctttcctgatttggatcaaagtccaccagttctacttgatccatctcatcagtttcttccacttccttcctcttggg

SEQ ID NO: 28093 - DNA, 100 bp, Homo sapiens
  MAP TO AC005726.1; EXPRESSED IN ADULT LIVER, SIGNAL = 0.51; EXPRESSED IN LUNG, SIGNAL = 0.56; EXPRESSED IN BRAIN, SIGNAL = 0.62; EXPRESSED IN BONE MARROW, SIGNAL = 0.58; EST_HUMAN HIT: AV703000.1, EVALUE 1.00e-49; SWISSPROT HIT: Q9Z2R6, EVALUE 9.00e-13; NT HIT: AF028789.1, EVALUE 1.00e-49
ggttgcccatcaaccggcgggacctggaccccaatgctgggcgctttgtccgctaccagttcacgcctgccttcctccgcctgaggcaggtgggagccac

SEQ ID NO: 28094 - DNA, 207 bp, Homo sapiens
  MAP TO AC004580.2; EXPRESSED IN LUNG, SIGNAL = 1.2; EXPRESSED IN FETAL LIVER, SIGNAL = 1.3; EXPRESSED IN BONE MARROW, SIGNAL =   1; EXPRESSED IN PLACENTA, SIGNAL = 1.2; EXPRESSED IN BRAIN, SIGNAL = 1.1; EXPRESSED IN ADULT LIVER, SIGNAL = 1.2; SWISSPROT HIT: Q03703, EVALUE 1.70e+00; NT HIT: AJ278435.1, EVALUE 1.90e+00
gacctgcagccaggcctggtcaccaaccgtgctgctgccccagccgaggagtgcggggatgtccgggctgagccagcaatgcctgaaccctacatggtaatagatggctgtacacgacactatgaggtggctgctgccaccacagcccatgttgagggcctgatagactcccagccaagcctggcaggtctcattcccactgctcca

SEQ ID NO: 28095 - DNA, 85 bp, Homo sapiens
  MAP TO AC006075.1; EXPRESSED IN PLACENTA, SIGNAL = 1.4; EXPRESSED IN LUNG, SIGNAL = 0.88; EXPRESSED IN FETAL LIVER, SIGNAL = 2.8; EXPRESSED IN BONE MARROW, SIGNAL = 1.6; EXPRESSED IN ADULT LIVER, SIGNAL = 1.5; EXPRESSED IN BRAIN, SIGNAL = 1.1; EST_HUMAN HIT: AA613148.1, EVALUE 4.10e+00; NT HIT: AP000422.1, EVALUE 1.70e-01
aagcagcttgtcaaagcctgatgctctgtcaatggctgagtgatctatactgcatgaatcccccccttcagctcttgatgtgtcc

SEQ ID NO: 28096 - DNA, 114 bp, Homo sapiens
  MAP TO AC004029.1; EXPRESSED IN LUNG, SIGNAL = 1.1; EXPRESSED IN FETAL LIVER, SIGNAL = 1.1; EXPRESSED IN BRAIN, SIGNAL = 0.8; EXPRESSED IN BONE MARROW, SIGNAL = 1.4; EXPRESSED IN PLACENTA, SIGNAL = 1.2; EXPRESSED IN ADULT LIVER, SIGNAL = 0.79; EST_HUMAN HIT: Z20573.1, EVALUE 2.40e-02
tcttaatatctaccaagaaaaacctgaacaagacaaaaaacaaatcctgctggatctttgattgtgattgcattcttactgtgggagatgagcccgtgattttgaagtttttct

SEQ ID NO: 28097 - DNA, 238 bp, Homo sapiens
  MAP TO AC005961.1; EXPRESSED IN BRAIN, SIGNAL = 0.59; EXPRESSED IN BONE MARROW, SIGNAL = 0.53; EXPRESSED IN LUNG, SIGNAL = 0.5; EXPRESSED IN ADULT LIVER, SIGNAL = 0.44; EST_HUMAN HIT: AI308124.1, EVALUE 2.00e-60; NT HIT: AF014399.1, EVALUE 3.60e-02
atatgacttcctatatgaaaaggaacacatctgctgcttagaagagtggaccagccctgtgcaccagaagatctacaccaccttcatccttgtcatcctcttcctcctgcctcttatggtgatgcttattctgtacagtaaaattggttatgaactttggataaagaaaagagttggggatggttcagtgcttcgaactattcatggaaaagaaatgtccaaaatagccaggtctgtt

SEQ ID NO: 28098 - DNA, 218 bp, Homo sapiens
  MAP TO AC004583.1; EXPRESSED IN FETAL LIVER, SIGNAL = 0.76; EXPRESSED IN BRAIN, SIGNAL = 0.94; EXPRESSED IN BONE MARROW, SIGNAL = 0.81; EXPRESSED IN ADULT LIVER, SIGNAL = 0.84; EXPRESSED IN PLACENTA, SIGNAL = 0.7; EXPRESSED IN LUNG, SIGNAL = 0.81; SWISSPROT HIT: P21827, EVALUE 9.00e-03; NT HIT: gi11433046, EVALUE 2.00e-87
ccacccactgcctggctctgactgaggacagcgaggtccacagctgggggagcaacgaccagtgccagcactttgacaccttgcgcgtgaccaagccagaacctgcagcattgccaggactggacaccaaacacatagtgggaattgcctgtgggcctgcccaggtactgaatatagagcttgatttggtattttggaggattttggtttccagttgt

SEQ ID NO: 28099 - DNA, 82 bp, Homo sapiens
  MAP TO AC006079.1; EXPRESSED IN PLACENTA, SIGNAL = 0.72; EXPRESSED IN LUNG, SIGNAL = 0.83; EXPRESSED IN FETAL LIVER, SIGNAL = 0.79; EXPRESSED IN ADULT LIVER, SIGNAL = 0.8; EXPRESSED IN BRAIN, SIGNAL = 0.78; EXPRESSED IN BONE MARROW, SIGNAL = 0.78; EST_HUMAN HIT: AW088924.1, EVALUE 1.00e-03; NT HIT: AK024445.1, EVALUE 7.00e-04
gtccaaggtcaagatgctggcagattcggtgcgcagtgagggcccattcatcatagacagtcatcttttcactgcaacctca

SEQ ID NO: 28100 - DNA, 431 bp, Homo sapiens
  MAP TO AC004045.1; EXPRESSED IN FETAL LIVER, SIGNAL = 0.83; EXPRESSED IN BRAIN, SIGNAL = 0.69; EXPRESSED IN BONE MARROW, SIGNAL = 0.84; EXPRESSED IN ADULT LIVER, SIGNAL = 0.6; EXPRESSED IN PLACENTA, SIGNAL = 0.82; EXPRESSED IN LUNG, SIGNAL = 0.53; SWISSPROT HIT: P26808, EVALUE 1.00e-40; NT HIT: AJ298105.1, EVALUE 7.00e-08; EST_HUMAN HIT: BE078468.1, EVALUE 4.00e-01
agctattaatgatactgtggaagacattcaccccatcgtggctaacccatacactatgtttgcttcactacctaaggatcacgaatggtttacagtgctagacttaaaggatgccttcttttgcataccagtagaaatagaaagccaactattgtttgctttcgagtggacagaccctgagacagctgcacagtttcaatattgctggactgtgctccctcaagggtttaaaaactccccaagtatatttggagaggctttgattcaagacttgagaggcttacaattagaaaatggggtgctacttcaatatgtggatgatttattaatttccagcacctcaaaacaagaatgtcaagaaaacactgtaaagaccctaaaccacttggcagcttgtgagtataaagtttcaagtaagaaggcccaaatat

SEQ ID NO: 28101 - DNA, 134 bp, Homo sapiens
  MAP TO AC004485.1; EXPRESSED IN PLACENTA, SIGNAL = 1.2; EXPRESSED IN FETAL LIVER, SIGNAL = 1.1; EXPRESSED IN BRAIN, SIGNAL = 1.1; EXPRESSED IN BONE MARROW, SIGNAL = 1.1; EXPRESSED IN LUNG, SIGNAL = 1.2; EXPRESSED IN ADULT LIVER, SIGNAL = 0.97; EST_HUMAN HIT: AW849999.1, EVALUE 7.00e-06; NT HIT: AB007546.1, EVALUE 5.00e-06
gggctcaaaaaccacatgtggctagtggctgccatattagacagagggataaaggacattccacagaaagctctagttagtcaggaagttcttctgctgacagcactggttaacaaggttagcaaaagggttcc

SEQ ID NO: 28102 - DNA, 101 bp, Homo sapiens
  MAP TO AC005988.1; EXPRESSED IN PLACENTA, SIGNAL =   1; EXPRESSED IN LUNG, SIGNAL = 1.1; EXPRESSED IN FETAL LIVER, SIGNAL =   1; EXPRESSED IN ADULT LIVER, SIGNAL = 0.94; EXPRESSED IN BRAIN, SIGNAL = 1.9; EXPRESSED IN BONE MARROW, SIGNAL = 0.93; EST_HUMAN HIT: BE087536.1, EVALUE 4.00e-50; SWISSPROT HIT: Q10918, EVALUE 9.40e+00; NT HIT: M12996.1, EVALUE 1.00e-49
gatgccctgtaaggattttgcccactgggcaactcagaaatacttcgatctcccaagatataagaggcagcagcaaacgtgcctattgacgtctgtttcat

SEQ ID NO: 28103 - DNA, 394 bp, Homo sapiens
  MAP TO AC004590.1; EXPRESSED IN PLACENTA, SIGNAL = 0.63; EXPRESSED IN LUNG, SIGNAL = 0.52; EXPRESSED IN ADULT LIVER, SIGNAL = 0.52; EXPRESSED IN BRAIN, SIGNAL = 0.55; EXPRESSED IN BONE MARROW, SIGNAL = 0.65; SWISSPROT HIT: O54898, EVALUE 5.00e-65; NT HIT: AF227744.1, EVALUE 0.00e+00; EST_HUMAN HIT: AA631382.1, EVALUE 3.70e-01
gtgcctgccaaagctcttgcaagatctccagcccttgcttgaaagcagacagtggagcctgtggtccagacagctgcccctactgtgcccgggccggggcaggggaggtggagctcgccgaccgtgaaatgcctgactcagacagcgaggcagtttatgagttcacacaggatgcccagcacagcgacctccgggacccccacagccggcggcaacggagcctgggcccagatgcagagcccagctctgtgctggccttctggaggctaatctgtgacaccttccgaaagattgtggacagcaagtactttggccggggaatcatgatcgccatcctggtcaacacactcagcatgggcatcgaataccacgagcaggtaggagagtgggcaga

SEQ ID NO: 28104 - DNA, 162 bp, Homo sapiens
  MAP TO AC005886.1; EXPRESSED IN LUNG, SIGNAL =   1; EXPRESSED IN FETAL LIVER, SIGNAL = 0.95; EXPRESSED IN BONE MARROW, SIGNAL = 1.1; EXPRESSED IN PLACENTA, SIGNAL = 1.1; EXPRESSED IN BRAIN, SIGNAL = 0.9; EXPRESSED IN ADULT LIVER, SIGNAL = 0.83; NT HIT: X12925.1, EVALUE 2.40e-02; EST_HUMAN HIT: BE891628.1, EVALUE 2.20e+00
cttgagagctgtgatcacccaaccacccagacagaaccttctcctttaagcacttcatttttagctctttgaaagtcataattaccatcatcactaccatcatcatcattatcgtcatcaacaccatcatcatcatcatcgtatatgtttgctgaacaacta

SEQ ID NO: 28105 - DNA, 209 bp, Homo sapiens
  MAP TO AC004492.1; EXPRESSED IN PLACENTA, SIGNAL = 1.1; EXPRESSED IN LUNG, SIGNAL = 1.1; EXPRESSED IN FETAL LIVER, SIGNAL = 1.2; EXPRESSED IN BONE MARROW, SIGNAL = 1.1; EXPRESSED IN ADULT LIVER, SIGNAL = 1.2; EXPRESSED IN BRAIN, SIGNAL =   1; EST_HUMAN HIT: AU134187.1, EVALUE 1.00e-114; SWISSPROT HIT: Q02346, EVALUE 1.70e+00; NT HIT: gi6912409, EVALUE 1.00e-114
ctatgacttcacacctatggattcttctgcagtttatgtgttaagtagtatggctcgccagcgtcgtgcatctttgtcttgtggaggacctggtggtcaagactttgcaagatctggattcagtaaaaactgtggctcacctggatcatcacagctctcttccaattctttgtatgctaaagctgtcaaaaaccacagctcagggactg

SEQ ID NO: 28106 - DNA, 212 bp, Homo sapiens
  MAP TO AC004594.1; EXPRESSED IN PLACENTA, SIGNAL = 0.67; EXPRESSED IN FETAL LIVER, SIGNAL = 0.95; EXPRESSED IN BRAIN, SIGNAL = 0.97; EXPRESSED IN BONE MARROW, SIGNAL = 0.93; EXPRESSED IN ADULT LIVER, SIGNAL = 0.89; EXPRESSED IN LUNG, SIGNAL = 0.72; EST_HUMAN HIT: BF370838.1, EVALUE 2.00e-16; SWISSPROT HIT: Q62245, EVALUE 4.50e+00; NT HIT: AB046811.1, EVALUE 1.00e-109
gccttcagggtggttgtatgttctttaatgctgttaaagaaggagatactgtaatctttgccagtgatgatgaacaggacagaatattatgggttcaagccatgtatagggccacaggtcaatcatataaaccagttcctgcaattcaaacccagaaactgaatcctaaaggaggaactctccatgcagatgctcagctttgtaagttttgt

SEQ ID NO: 28107 - DNA, 114 bp, Homo sapiens
  MAP TO AC004054.1; EXPRESSED IN PLACENTA, SIGNAL = 1.6; EXPRESSED IN LUNG, SIGNAL =   1; EXPRESSED IN FETAL LIVER, SIGNAL =   1; EXPRESSED IN ADULT LIVER, SIGNAL = 0.71; EXPRESSED IN BRAIN, SIGNAL = 0.82; EXPRESSED IN BONE MARROW, SIGNAL = 1.4; NT HIT: X97869.1, EVALUE 6.30e-02; EST_HUMAN HIT: BF366740.1, EVALUE 5.70e+00
cttcctttctgtataaacagatttcttccctatagtggtgcttgccagctttcctttatgttttaattccagttgcatgattttagtatttgacattttagttcctagtgaatt

SEQ ID NO: 28108 - DNA, 85 bp, Homo sapiens
  MAP TO AC004168.2; EXPRESSED IN PLACENTA, SIGNAL = 0.58; EXPRESSED IN LUNG, SIGNAL = 0.69; EXPRESSED IN BONE MARROW, SIGNAL = 0.6; EXPRESSED IN ADULT LIVER, SIGNAL = 0.64; EXPRESSED IN BRAIN, SIGNAL = 0.56; NT HIT: Y14379.1, EVALUE 4.40e-02; EST_HUMAN HIT: AW302461.1, EVALUE 3.00e-38
ctccgtgcaaatgaatcacaaaattgattatcatagccgcaaaattgattatcacagttttatagataagaaaaccaaggcttga

SEQ ID NO: 28109 - DNA, 108 bp, Homo sapiens
  MAP TO AC004601.1; EXPRESSED IN LUNG, SIGNAL = 0.89; EXPRESSED IN ADULT LIVER, SIGNAL = 0.7; EXPRESSED IN PLACENTA, SIGNAL = 0.87; EXPRESSED IN FETAL LIVER, SIGNAL = 0.93; EXPRESSED IN BRAIN, SIGNAL = 0.68; EXPRESSED IN BONE MARROW, SIGNAL = 0.84; SWISSPROT HIT: P54258, EVALUE 4.80e-01; EST_HUMAN HIT: BE012071.1, EVALUE 1.00e-53
ctgcttgtgcagccagcccctcaccaccacgggaacattggggttcctccgaatggcctggtctctcttcccaaagctgtggactttactgctggactttatgatcta

SEQ ID NO: 28110 - DNA, 112 bp, Homo sapiens
  MAP TO AC004063.1; EXPRESSED IN PLACENTA, SIGNAL = 0.65; EXPRESSED IN LUNG, SIGNAL = 0.45; EXPRESSED IN BONE MARROW, SIGNAL = 0.83; EXPRESSED IN ADULT LIVER, SIGNAL = 0.42; EXPRESSED IN BRAIN, SIGNAL = 0.61; EST_HUMAN HIT: AA299442.1, EVALUE 6.00e-03; NT HIT: gi11525746, EVALUE 9.70e-01
tcatcttcctcaatgagattcatcagttgaaaatgatcacttctaacttgaaattctataatgttgaaagtcgttattttcctgaactttctgtagaagttgcaatggaagc

SEQ ID NO: 28111 - DNA, 152 bp, Homo sapiens
  MAP TO AC005919.1; EXPRESSED IN PLACENTA, SIGNAL = 0.89; EXPRESSED IN FETAL LIVER, SIGNAL =   1; EXPRESSED IN BRAIN, SIGNAL = 1.5; EXPRESSED IN BONE MARROW, SIGNAL = 0.81; EXPRESSED IN ADULT LIVER, SIGNAL = 0.79; EXPRESSED IN LUNG, SIGNAL = 0.77; SWISSPROT HIT: P19012, EVALUE 7.00e-06; NT HIT: AF253407.1, EVALUE 5.40e+00; EST_HUMAN HIT: T75215.1, EVALUE 2.00e-80
agaagcatctcgtgctcttgaagctgcttttcgatgccgcgccttacttcctgtagctctttttctagtccttcaatcacagtctctaggtcttgcagctgcatctggtaatgctgctcgctggcatgtagggagttttcaaggcccctttc

SEQ ID NO: 28112 - DNA, 138 bp, Homo sapiens
  MAP TO AC005879.2; EXPRESSED IN LUNG, SIGNAL = 0.77; EXPRESSED IN ADULT LIVER, SIGNAL = 0.75; EXPRESSED IN PLACENTA, SIGNAL = 0.71; EXPRESSED IN FETAL LIVER, SIGNAL = 0.8; EXPRESSED IN BRAIN, SIGNAL = 0.94; EXPRESSED IN BONE MARROW, SIGNAL = 0.64; SWISSPROT HIT: P36051, EVALUE 9.10e+00; NT HIT: AJ271735.1, EVALUE 1.20e+00; EST_HUMAN HIT: AU122602.1, EVALUE 7.20e+00
tctataatcttcagtggtgcctccccttttctccgtgaccttattatacatctttgtttcatttattcccaggttccttatagattttactgtcattgtaaatgccatgattttgttctttttcatattccaattggt

SEQ ID NO: 28113 - DNA, 123 bp, Homo sapiens
  MAP TO AC006239.5; EXPRESSED IN LUNG, SIGNAL = 0.66; EXPRESSED IN BRAIN, SIGNAL = 0.58; EXPRESSED IN BONE MARROW, SIGNAL = 0.68; EXPRESSED IN ADULT LIVER, SIGNAL = 0.66; EST_HUMAN HIT: AA658888.1, EVALUE 6.30e+00; NT HIT: AF101091.1, EVALUE 1.10e+00; SWISSPROT HIT: P47012, EVALUE 9.20e+00
caaaggaggctttttctgctcctcctcctcttcctctttcttccacttctttctctgcctctatatcctctttaaccttagccttgccttcctttttttcacttacctggtcattaaaattat

SEQ ID NO: 28114 - DNA, 389 bp, Homo sapiens
  MAP TO AC006518.17; EXPRESSED IN BRAIN, SIGNAL = 0.66; EXPRESSED IN PLACENTA, SIGNAL = 0.74; EXPRESSED IN LUNG, SIGNAL = 0.75; EXPRESSED IN BONE MARROW, SIGNAL = 0.82; EXPRESSED IN ADULT LIVER, SIGNAL = 0.56; NT HIT: AF227135.1, EVALUE 0.00e+00; SWISSPROT HIT: P43801, EVALUE 6.50e+00
ctatggaacaaaaggctttcttcttctaaggaaacacttcacaaatcttaacatcttcagaaaagcttccctcaacttgctatttcccataattagaatgaatgaatggcttgatgggaaaatgacagttactatgtcaccaatcatcaacactaattttccctgaggaatcagagcgctagaggtcataacaagaaagactgggtagtacacgatgaggaggagcagaaagatgatcactgcctttatggccctcatgtgggcctctgtactggggtctctgaaccctgtagcatgcagtcgaatctgcttggtgtgtctaactagggagaaaagtaacaagaaaaatgagatcaggcaaaggataaagggaaccatcacccccaggt

SEQ ID NO: 28115 - DNA, 86 bp, Homo sapiens
  MAP TO AC004383.1; EXPRESSED IN LUNG, SIGNAL = 0.71; EXPRESSED IN BRAIN, SIGNAL = 0.71; EXPRESSED IN BONE MARROW, SIGNAL = 0.62; EXPRESSED IN ADULT LIVER, SIGNAL = 0.64; NT HIT: AJ293919.1, EVALUE 4.50e-02; EST_HUMAN HIT: AA356168.1, EVALUE 3.00e-41
aagaagatgaggaacgagagagtaaaagccgaggaaaagtagaaattgatcagcaacaactaactcagcagcaacttaatggaaac

SEQ ID NO: 28116 - DNA, 90 bp, Homo sapiens
  MAP TO AC004888.1; EXPRESSED IN LUNG, SIGNAL = 0.65; EXPRESSED IN BRAIN, SIGNAL = 0.62; EXPRESSED IN BONE MARROW, SIGNAL = 0.65; EXPRESSED IN PLACENTA, SIGNAL = 0.92; EXPRESSED IN ADULT LIVER, SIGNAL = 0.59; EST_HUMAN HIT: AA018422.1, EVALUE 2.80e-01; SWISSPROT HIT: O15055, EVALUE 5.60e+00; NT HIT: U73846.1, EVALUE 1.90e-01
agaagaggagtgtaaaaaggcaaataagaaggttagaaaacaagagtacagtcaacaagatggagaaagatggaagaaggaccctgaaag

SEQ ID NO: 28117 - DNA, 75 bp, Homo sapiens
  MAP TO AC006007.1; EXPRESSED IN BONE MARROW, SIGNAL = 2.4; EXPRESSED IN ADULT LIVER, SIGNAL = 3.8; EXPRESSED IN HELA, SIGNAL = 1.6; EXPRESSED IN FETAL LIVER, SIGNAL = 5.6; EXPRESSED IN BRAIN, SIGNAL = 1.3; EXPRESSED IN PLACENTA, SIGNAL = 3.1; EXPRESSED IN LUNG, SIGNAL = 1.2; NT HIT: AB023486.1, EVALUE 5.90e-01; SWISSPROT HIT: P04180, EVALUE 7.40e+00
aaagtggcaagtgttatagaaaagaaaattaaggtgtctgatggtatgaagattaagaattgggtgtgggctagg

SEQ ID NO: 28118 - DNA, 125 bp, Homo sapiens
  MAP TO AC002088.1; EXPRESSED IN LUNG, SIGNAL = 1.2; EXPRESSED IN BRAIN, SIGNAL = 1.7; EXPRESSED IN ADULT LIVER, SIGNAL = 0.58; EXPRESSED IN PLACENTA, SIGNAL = 0.97; EXPRESSED IN FETAL LIVER, SIGNAL = 1.4; EXPRESSED IN BONE MARROW, SIGNAL = 1.3; NT HIT: gi6678160, EVALUE 1.10e+00; EST_HUMAN HIT: AW104394.1, EVALUE 1.60e+00; SWISSPROT HIT: Q9Z2V6, EVALUE 4.00e-07
gaggaaatacagcttgttcattctgaacatcactcactgttgtatggcaccaaccccctggacggacagaagctggaccccaggatactcctaggtctgtacgggcctccactgtactgggaaca

SEQ ID NO: 28119 - DNA, 244 bp, Homo sapiens
  MAP TO AC006116.1; EXPRESSED IN BONE MARROW, SIGNAL = 1.3; EXPRESSED IN ADULT LIVER, SIGNAL = 1.2; EXPRESSED IN FETAL LIVER, SIGNAL = 1.3; EXPRESSED IN BRAIN, SIGNAL = 1.3; EXPRESSED IN PLACENTA, SIGNAL = 1.5; EXPRESSED IN LUNG, SIGNAL = 1.4; EST_HUMAN HIT: BF541312.1, EVALUE 5.60e-02; SWISSPROT HIT: P48442, EVALUE 4.00e-04
agaggaggcaggtggcagggctggggcggccgatgaagagcgaggaagagagaaagcagagtgtgagggagacaaggagggtgtagctcagagtctggttgctggccttgactatgggagtgttttggtgccacacaaactccacaaggatcagaacagagaggacagagtagaacaaggctgtgcatgccagagtcaggcccaaagtttcatcataggccaggaaggtctcctatttgagaag

SEQ ID NO: 28120 - DNA, 382 bp, Homo sapiens
  MAP TO AC000134.14; EXPRESSED IN LUNG, SIGNAL = 0.69; EXPRESSED IN BRAIN, SIGNAL = 0.7; EXPRESSED IN ADULT LIVER, SIGNAL = 2.2; EXPRESSED IN PLACENTA, SIGNAL = 0.77; EXPRESSED IN FETAL LIVER, SIGNAL = 0.9; EXPRESSED IN BONE MARROW, SIGNAL = 0.75; NT HIT: AB035266.1, EVALUE 0.00e+00; SWISSPROT HIT: P31696, EVALUE 3.00e-03; EST_HUMAN HIT: AL079497.1, EVALUE 0.00e+00
cccttgaccagctcgatgacaatgaagtcattgccgttgcccgagttgaacagaagaagcccatcaggggccgtggtcttgaactggaagaagaggtgcatggaagcataggcttggagcgtggcgagtgccaggtagctgctgcgactcttgaaggtgacgggatcggccacaatggcacgcaggccaaagcgagcattgagctcacagtaggtgatgtcaccatccttgcactggtccatgtagggctggccattgaacacgagcccactcagatgcccgatgaagttggagggcaccacggagataaaccgccgctccgtcatgatgcccgtctcaatgttgtggaactccagccgcatatgggctcctgccatctgtc

SEQ ID NO: 28121 - DNA, 99 bp, Homo sapiens
  MAP TO AC005833.1; EXPRESSED IN BRAIN, SIGNAL = 0.95; EXPRESSED IN PLACENTA, SIGNAL = 0.68; EXPRESSED IN LUNG, SIGNAL = 0.73; EXPRESSED IN BONE MARROW, SIGNAL = 0.66; EXPRESSED IN ADULT LIVER, SIGNAL = 0.64; EXPRESSED IN FETAL LIVER, SIGNAL = 0.79; NT HIT: gi11525737, EVALUE 4.00e-49; SWISSPROT HIT: Q24568, EVALUE 3.20e+00; EST_HUMAN HIT: D20963.1, EVALUE 3.10e-01
cttttgggtagccacgtgcttgtgctccagacctgtagcacgcaagtgtgggaaatccagcacactgtcagagactggggtcagaccaacagccagtga

SEQ ID NO: 28122 - DNA, 333 bp, Homo sapiens
  MAP TO AC005702.1; EXPRESSED IN PLACENTA, SIGNAL = 1.3; EXPRESSED IN BRAIN, SIGNAL =   1; EXPRESSED IN ADULT LIVER, SIGNAL = 1.1; EXPRESSED IN LUNG, SIGNAL = 1.3; EXPRESSED IN FETAL LIVER, SIGNAL = 1.2; EXPRESSED IN BONE MARROW, SIGNAL = 1.2; SWISSPROT HIT: P33824, EVALUE 1.70e+00; EST_HUMAN HIT: AA057741.1, EVALUE 5.00e-37; NT HIT: gi11545780, EVALUE 1.00e-101
cgggcccttggaaatttgcttcattttctgcaaccctctcatatagaaaaacccacatttgcagaaatcattgaggagtctatccaggccctaatttctactgttctaacagaagctgccatgaaagtccgatggaatgcttgttatgcaatgggaaatgtatttaaaaatcctgcccttcctttaggtaagaaagtttcccttcactccctggtggaaagcctcttgggacacacaccaatctacgttgttgttaaagatgtttgtcacatgttatttgtcatagtattaggaaaaaatggagacatactgaagacaagtttagggggacat

SEQ ID NO: 28123 - DNA, 166 bp, Homo sapiens
  MAP TO AC005839.1; EXPRESSED IN LUNG, SIGNAL = 1.3; EXPRESSED IN FETAL LIVER, SIGNAL = 1.2; EXPRESSED IN PLACENTA, SIGNAL = 1.2; EXPRESSED IN BRAIN, SIGNAL = 3.1; EXPRESSED IN BONE MARROW, SIGNAL = 1.1; EXPRESSED IN ADULT LIVER, SIGNAL = 1.1; EST_HUMAN HIT: BE560742.1, EVALUE 1.40e-01; SWISSPROT HIT: P36322, EVALUE 5.20e-02
tgaactctcggctagtgctgggaggtgggaaggcctccggggctgtctgtgctggaagggttcgatatggaggaggagtcaactcttcgtcaccagagaagctcctccgcaccccacctgtcatgggcaggctcgacaaactgacaggcttcttcccaattggcat

SEQ ID NO: 28124 - DNA, 153 bp, Homo sapiens
  MAP TO AC006145.2; EXPRESSED IN LUNG, SIGNAL = 1.1; EXPRESSED IN FETAL LIVER, SIGNAL = 0.86; EXPRESSED IN PLACENTA, SIGNAL = 0.91; EXPRESSED IN BRAIN, SIGNAL = 1.1; EXPRESSED IN BONE MARROW, SIGNAL = 0.93; EXPRESSED IN ADULT LIVER, SIGNAL = 0.81; EST_HUMAN HIT: AA345917.1, EVALUE 8.10e+00; NT HIT: gi4757893, EVALUE 4.00e-81; SWISSPROT HIT: P13806, EVALUE 4.00e-25
cacatatgctgagcgatgtcctgctccttgttttggtgcagcaccgggctcacatactgactgataatcataagatttgttaaaagcataaactgatatattaaccaggtgtctcatcaagctgggatcaatctctccaaaaaatcttccaat

SEQ ID NO: 28125 - DNA, 108 bp, Homo sapiens
  MAP TO AC005959.1; EXPRESSED IN LUNG, SIGNAL =   1; EXPRESSED IN FETAL LIVER, SIGNAL = 0.87; EXPRESSED IN PLACENTA, SIGNAL = 0.75; EXPRESSED IN BRAIN, SIGNAL = 0.84; EXPRESSED IN BONE MARROW, SIGNAL = 0.84; EXPRESSED IN ADULT LIVER, SIGNAL = 0.75; SWISSPROT HIT: P45332, EVALUE 9.40e+00; NT HIT: L35058.1, EVALUE 9.20e-01; EST_HUMAN HIT: AI539362.1, EVALUE 9.00e-08
gggttgaatgtaaaaatcttgcaggatcctgaaaacatccaccacagagctgctgtaaatgcgaactatggaatcagtttgccatatattaatcagagaaaagcatgt

SEQ ID NO: 28126 - DNA, 244 bp, Homo sapiens
  MAP TO AC004691.1; EXPRESSED IN ADULT LIVER, SIGNAL = 0.98; EXPRESSED IN PLACENTA, SIGNAL = 0.72; EXPRESSED IN FETAL LIVER, SIGNAL = 1.1; EXPRESSED IN BRAIN, SIGNAL = 0.59; EXPRESSED IN BONE MARROW, SIGNAL = 0.69; EXPRESSED IN LUNG, SIGNAL = 0.62; EST_HUMAN HIT: BE902616.1, EVALUE 1.00e-105; SWISSPROT HIT: P39620, EVALUE 5.40e-01; NT HIT: AP000003.1, EVALUE 3.70e-02
gagatgtacttggtaattttgtatcatctaaaaggcccccgcacaaaagtaagcccatgcagacggtcccgggtgaaactcctgtgttgacttctgcatgggagaagatagacaagcttcactcggagccttccttggatgtgaagaggatgggagagaattccaggccaaagtctggtctgattgtgcgaggcatgatgtctgggcccatcgccagctccccacaggtggggctgttgctctt

SEQ ID NO: 28127 - DNA, 110 bp, Homo sapiens
  MAP TO AC004828.2; EXPRESSED IN BONE MARROW, SIGNAL = 0.87; EXPRESSED IN ADULT LIVER, SIGNAL = 1.1; EXPRESSED IN PLACENTA, SIGNAL = 1.1; EXPRESSED IN FETAL LIVER, SIGNAL = 1.1; EXPRESSED IN BRAIN, SIGNAL = 1.3; EXPRESSED IN LUNG, SIGNAL =   1; EST_HUMAN HIT: BE378282.1, EVALUE 6.00e-03; NT HIT: gi7305308, EVALUE 6.00e-05; SWISSPROT HIT: P56163, EVALUE 2.00e-14
acccaacctgcctgcagtttaccctgaacatgaccgaggctgtcaagacctacaagtggcagtgcatagagtgcaaatcctgtatcctctgtgggacctcagagaatgat

SEQ ID NO: 28128 - DNA, 81 bp, Homo sapiens
  MAP TO AC004875.1; EXPRESSED IN BONE MARROW, SIGNAL = 0.67; EXPRESSED IN ADULT LIVER, SIGNAL = 0.66; EXPRESSED IN PLACENTA, SIGNAL = 0.74; EXPRESSED IN LUNG, SIGNAL = 0.7; EXPRESSED IN BRAIN, SIGNAL = 0.65; NT HIT: AB015596.1, EVALUE 5.50e-01; EST_HUMAN HIT: AA631260.1, EVALUE 2.60e+00
ttcttctttagtgtctgatatctctgggttccagatttcccagacagtgtagccaatttttaagtctaataaatattttta

SEQ ID NO: 28129 - DNA, 105 bp, Homo sapiens
  MAP TO AC004533.1; EXPRESSED IN BONE MARROW, SIGNAL = 0.79; EXPRESSED IN PLACENTA, SIGNAL = 0.76; EXPRESSED IN LUNG, SIGNAL = 0.86; EXPRESSED IN FETAL LIVER, SIGNAL = 0.69; EXPRESSED IN ADULT LIVER, SIGNAL = 0.75; EXPRESSED IN BRAIN, SIGNAL = 0.9; EST_HUMAN HIT: AW440214.1, EVALUE 5.20e+00; NT HIT: AF000227.1, EVALUE 2.30e-01
agaagattgaatctaaattactttgacttcttttggcctaactttggtgatgctaccagacatgaaaaggaggcctttttgagtatcacccacggaaataaagag

SEQ ID NO: 28130 - DNA, 162 bp, Homo sapiens
  MAP TO AC004381.1; EXPRESSED IN PLACENTA, SIGNAL = 0.84; EXPRESSED IN FETAL LIVER, SIGNAL = 0.84; EXPRESSED IN BRAIN, SIGNAL =   1; EXPRESSED IN LUNG, SIGNAL =   1; EXPRESSED IN BONE MARROW, SIGNAL = 1.1; EXPRESSED IN ADULT LIVER, SIGNAL = 0.84; SWISSPROT HIT: P46676, EVALUE 2.30e+00; NT HIT: AF126145.1, EVALUE 1.00e-31
tcggaagtccagccacccttcacggctgtgatcagacaccaggagcttggttttcagagaggggcactgagaagctatggagtccacctctgaggcaagggcatctatggtcacaatgcccttggctttagacaactgtagtcgatagagaatgtctttggc

SEQ ID NO: 28131 - DNA, 181 bp, Homo sapiens
  MAP TO AC006515.7; EXPRESSED IN BRAIN, SIGNAL = 0.67; EXPRESSED IN BONE MARROW, SIGNAL = 0.55; EXPRESSED IN ADULT LIVER, SIGNAL = 0.54; EXPRESSED IN LUNG, SIGNAL = 0.57; SWISSPROT HIT: Q15031, EVALUE 6.00e-32; EST_HUMAN HIT: AU132841.1, EVALUE 1.00e-97; NT HIT: gi7661871, EVALUE 9.00e-98
gctaaatggtgggccagatgtcatcaagtgggaaaggagagtaattcccggatgtaccagaagcatctacagtgccacgggaaagtggacaaaagagtatacattgcagacaagaaaggatgttgagaaatggtggcatcaacgaataaaagaacaggcctccaaaatttcagaagctgat

SEQ ID NO: 28132 - DNA, 212 bp, Homo sapiens
  MAP TO AC004701.1; EXPRESSED IN PLACENTA, SIGNAL = 1.4; EXPRESSED IN LUNG, SIGNAL = 1.1; EXPRESSED IN FETAL LIVER, SIGNAL = 1.1; EXPRESSED IN BRAIN, SIGNAL = 1.4; EXPRESSED IN BONE MARROW, SIGNAL = 1.1; EXPRESSED IN ADULT LIVER, SIGNAL = 1.1; EST_HUMAN HIT: H02197.1, EVALUE 1.20e-02; SWISSPROT HIT: P19055, EVALUE 3.50e-02
ctgttaactgggagattaaatgggctgttgaccaggcttctcagttcctccccacatggtcctccccattgggatgtttgggctccctcaacagcgtgcagctggtttccaagaacaagtatcacgaaaagacagaaagtgaaagctgccagcatcctaaggcccagacactggttcagcatctcttgtgccatatcctgttggtcaattaa

SEQ ID NO: 28133 - DNA, 172 bp, Homo sapiens
  MAP TO AC005972.1; EXPRESSED IN BRAIN, SIGNAL = 0.8; EXPRESSED IN ADULT LIVER, SIGNAL = 0.74; EXPRESSED IN BONE MARROW, SIGNAL = 0.77; EXPRESSED IN LUNG, SIGNAL = 0.79; EXPRESSED IN FETAL LIVER, SIGNAL = 0.87; EXPRESSED IN PLACENTA, SIGNAL = 0.8; NT HIT: AL163278.2, EVALUE 2.00e-03; SWISSPROT HIT: P49126, EVALUE 3.90e+00; EST_HUMAN HIT: T86569.1, EVALUE 2.00e-03
aagtgccagatagtacatattttatgctttgcaagccgcatagtggccagagataggggagttttcttcggtaattcaatgtcaacaaggaccttgtgttccagctcgccacactgtatttcataatgttggcagccagcatatccagggacttcagggtctttttctatgt

SEQ ID NO: 28134 - DNA, 94 bp, Homo sapiens
  MAP TO AC004831.1; EXPRESSED IN ADULT LIVER, SIGNAL = 1.2; EXPRESSED IN BRAIN, SIGNAL = 1.3; EXPRESSED IN BONE MARROW, SIGNAL = 1.3; EXPRESSED IN PLACENTA, SIGNAL = 1.4; EXPRESSED IN LUNG, SIGNAL = 1.5; EXPRESSED IN FETAL LIVER, SIGNAL = 1.2; EST_HUMAN HIT: BE544038.1, EVALUE 2.90e-01; SWISSPROT HIT: P54258, EVALUE 7.30e+00; NT HIT: AF250371.1, EVALUE 2.00e-01
cagaaccagaaacttctcttccaaccccacactatctagccaggggactgggaggtcttcctgtgttcccaggaagagaggaacatggactatg

SEQ ID NO: 28135 - DNA, 109 bp, Homo sapiens
  MAP TO AC006487.7; EXPRESSED IN LUNG, SIGNAL = 0.77; EXPRESSED IN FETAL LIVER, SIGNAL = 0.79; EXPRESSED IN BRAIN, SIGNAL = 0.7; EXPRESSED IN BONE MARROW, SIGNAL = 0.68; EXPRESSED IN PLACENTA, SIGNAL = 0.72; EXPRESSED IN ADULT LIVER, SIGNAL = 0.68; EST_HUMAN HIT: AA030041.1, EVALUE 7.00e-55; NT HIT: gi11434422, EVALUE 5.00e-55; SWISSPROT HIT: O43791, EVALUE 2.00e-15
ttgtcatcagggagaagcccgttggcctcatccaaaagaaaatctctacggatgaatttcttgaatccccagtctttgccttgcacaaacctatatgcccgttgactct

SEQ ID NO: 28136 - DNA, 126 bp, Homo sapiens
  MAP TO AC006095.1; EXPRESSED IN BRAIN, SIGNAL = 0.72; EXPRESSED IN ADULT LIVER, SIGNAL = 0.68; EXPRESSED IN FETAL LIVER, SIGNAL = 0.78; EXPRESSED IN BONE MARROW, SIGNAL = 0.82; EXPRESSED IN PLACENTA, SIGNAL = 0.58; EXPRESSED IN LUNG, SIGNAL = 0.81; SWISSPROT HIT: P98074, EVALUE 7.00e+00; NT HIT: X55981.1, EVALUE 1.10e+00
ttgtagcaatcgccaaagcaagggtgaattttagtcagaacagaggtggcacctttgttgttctcctccttgaattcttctgtcattgtgctgagggtagtgacaaggctcacagagataggctgt

SEQ ID NO: 28137 - DNA, 249 bp, Homo sapiens
  MAP TO AC005996.2; EXPRESSED IN FETAL LIVER, SIGNAL = 0.95; EXPRESSED IN PLACENTA, SIGNAL = 0.94; EXPRESSED IN LUNG, SIGNAL =   1; EXPRESSED IN BRAIN, SIGNAL = 0.9; EXPRESSED IN BONE MARROW, SIGNAL =   1; EXPRESSED IN ADULT LIVER, SIGNAL = 0.95; SWISSPROT HIT: P26444, EVALUE 7.00e-19; NT HIT: AB031082.1, EVALUE 9.30e+00; EST_HUMAN HIT: BE901645.1, EVALUE 2.30e-01
atcactctctatgaaggcaagcacttcacagggcagaagctggaggtcttcggggactgtgacaacttccaggaccggggctttatgaaccgagtgaactccatccacgtggagagcggagcctgggtctgcttcaatcaccccgacttccggggccagcagttcatcttggagcacggcgactaccccgacttcttccgctggaacagccacagtgaccacatgggctcctgtcggcctgtaggaatg

SEQ ID NO: 28138 - DNA, 112 bp, Homo sapiens
  MAP TO AC004737.1; EXPRESSED IN BRAIN, SIGNAL = 1.2; EXPRESSED IN ADULT LIVER, SIGNAL = 1.2; EXPRESSED IN BONE MARROW, SIGNAL = 1.2; EXPRESSED IN PLACENTA, SIGNAL = 1.1; EXPRESSED IN LUNG, SIGNAL = 1.3; EXPRESSED IN FETAL LIVER, SIGNAL = 1.1; EST_HUMAN HIT: AW467760.1, EVALUE 1.40e+00; NT HIT: gi11427603, EVALUE 3.80e+00
ccatgacaatatctattctctggcttttaggcttgcaatgggcaacaaaattctacagtgtaattgtcaacagaatacgtggtcaattcctgatggagtctgtagggtcagt

SEQ ID NO: 28139 - DNA, 169 bp, Homo sapiens
  MAP TO AC006531.1; EXPRESSED IN BONE MARROW, SIGNAL = 0.6; EXPRESSED IN LUNG, SIGNAL = 0.66; EXPRESSED IN BRAIN, SIGNAL = 0.64; EXPRESSED IN ADULT LIVER, SIGNAL = 0.63; SWISSPROT HIT: Q00959, EVALUE 2.00e-29; NT HIT: gi6006002, EVALUE 1.00e-90; EST_HUMAN HIT: AF057010.1, EVALUE 5.80e-01
ttcaccgatcattccattccacacattgttaactttcttgccatgcttcccattggtcaccagatagaggtcgtaagtaaacttcacagttctggaaagcttcttcagaatatcaatgcagaaccccttgcagcatttcttcacattcatcccctcattggttgaattg

SEQ ID NO: 28140 - DNA, 169 bp, Homo sapiens
  MAP TO AC004103.1; EXPRESSED IN BRAIN, SIGNAL = 0.6; EXPRESSED IN PLACENTA, SIGNAL = 0.74; EXPRESSED IN LUNG, SIGNAL = 0.7; EXPRESSED IN BONE MARROW, SIGNAL = 0.62; EXPRESSED IN ADULT LIVER, SIGNAL = 0.73; EXPRESSED IN FETAL LIVER, SIGNAL = 1.2; NT HIT: AF261087.1, EVALUE 1.00e-47; SWISSPROT HIT: Q02878, EVALUE 1.00e-20; EST_HUMAN HIT: AA627822.1, EVALUE 7.00e-50
agtccacagctttctgattgatcttgcactgctctgttatctcatatttctctttttctgtgtcaaagatctcacttgcctggtgtctgggcttctgcagctgctgcttcttgaagtaaatgccagtaagatgtttagggatttttacattgctgatatgaattttggt

SEQ ID NO: 28141 - DNA, 237 bp, Homo sapiens
  MAP TO AC004551.1; EXPRESSED IN LUNG, SIGNAL = 1.2; EXPRESSED IN BRAIN, SIGNAL = 1.1; EXPRESSED IN BONE MARROW, SIGNAL = 1.1; EXPRESSED IN ADULT LIVER, SIGNAL = 1.2; EXPRESSED IN PLACENTA, SIGNAL = 1.1; EXPRESSED IN FETAL LIVER, SIGNAL = 1.2; EST_HUMAN HIT: BE295499.1, EVALUE 0.00e+00; SWISSPROT HIT: P00973, EVALUE 3.00e-39; NT HIT: D00068.1, EVALUE 0.00e+00
gagcgaactcagtacgaagctgagcgcacgggggttgccccagcgtggagcctggacctcaaacttcacggaaaatgctctctctctttgacaggcttccagctgtctcctaatttcctggatgaactctccccggcgatttaactgatcctgaaaagtggtgagaggactgaggaagacaaccaggtcagcgtcagatcggcctctgagggtggtgcccttgcctgaggagccacc

SEQ ID NO: 28142 - DNA, 449 bp, Homo sapiens
  MAP TO AC004108.1; EXPRESSED IN PLACENTA, SIGNAL = 0.73; EXPRESSED IN BRAIN, SIGNAL = 0.61; EXPRESSED IN BONE MARROW, SIGNAL = 0.68; EXPRESSED IN ADULT LIVER, SIGNAL = 0.76; EXPRESSED IN LUNG, SIGNAL = 0.73; EXPRESSED IN FETAL LIVER, SIGNAL = 0.77; NT HIT: AF219927.1, EVALUE 2.00e-51; EST_HUMAN HIT: BE148495.1, EVALUE 1.00e-29; SWISSPROT HIT: P21249, EVALUE 2.10e-02
aaagcaatgaaatccatccaaaggacagtaacatcaaatataaaaaggaacatcagcccatacagataagaaagaaccaggataagaactctggcaaatcaaaaagccaagatgtcttcttagctccaaacaactgcactggttctccagcagtggtttttaaccaggctgaaatggccgaaatgacagacattaaattcagaatatggataagaataaagatcattgagatacaggagaaagttgagacccaatccaaggaatctaaggaatataacaaaatgattcaggagctgaaagacaaaatgaatattttaagaaataatcaaattgatctgatagagctgaaaaatgacttcgagaattttataatacaattgcaagtattaacagcagaattgaccaagctgaggaaagaattgcagagctcgaacactgcttttccaaaa

SEQ ID NO: 28143 - DNA, 473 bp, Homo sapiens
  MAP TO AC005919.1; EXPRESSED IN PLACENTA, SIGNAL = 0.91; EXPRESSED IN LUNG, SIGNAL = 1.1; EXPRESSED IN FETAL LIVER, SIGNAL = 0.86; EXPRESSED IN BRAIN, SIGNAL =   1; EXPRESSED IN BONE MARROW, SIGNAL = 0.9; EXPRESSED IN ADULT LIVER, SIGNAL = 0.87; NT HIT: gi11427965, EVALUE 0.00e+00; SWISSPROT HIT: Q99456, EVALUE 3.00e-11; EST_HUMAN HIT: BE737057.1, EVALUE 1.00e-13
cactccttgattttgttctccagatcagtgttagcctcctccagggctctgaccttgtctaggtaattggccaagcggtcattgaggttctgcatggtttgcttttcccctccagagaaaagccccccatcgccaacaccacctcccataccaccaccatagctgtagaagcctccagtagcaccactgctgaatctagaactcccacagaatccagaacccctgccaaatccagagaccccgccaaagctagaacccccaccaaatcctgtcccagagcctgaagctcccccaaaaccaccccctactgagcagctaccaaagccccctccaaagctgcccccaaaagcaccgctagaccccccactcaggctgcagctgctggctcctcctcggaagccctgggccgagctgccccccagaccacatctgcttccactgctgaagctgcttccaccagcagacaccctggc

SEQ ID NO: 28144 - DNA, 404 bp, Homo sapiens
  MAP TO AC006024.1; EXPRESSED IN HELA, SIGNAL = 2.2; EXPRESSED IN PLACENTA, SIGNAL = 1.3; EXPRESSED IN LUNG, SIGNAL = 1.5; EXPRESSED IN FETAL LIVER, SIGNAL = 2.4; EXPRESSED IN BRAIN, SIGNAL = 1.4; EXPRESSED IN BONE MARROW, SIGNAL = 1.5; EXPRESSED IN ADULT LIVER, SIGNAL = 2.8; SWISSPROT HIT: P50397, EVALUE 5.00e-49; NT HIT: Y13298.1, EVALUE 0.00e+00; EST_HUMAN HIT: AU118607.1, EVALUE 0.00e+00
gaagaaatcattgtgcaggatggaaaagtaattggtataaaatccgaaggagaaattgctcactgtaagcagctcatctgtgaccctagctatgtaaaagatcagctagaaaaagtgggccaggtcatcagagttatttgcatcctcagccactccatcaagaacaccagtgatgtcaactcctgccagatcattattccacagaaccaagtcagtagaaagtcagatatctgtgtttgcacgatctcctctgcgcacaatgtagcaacacaagagaagtatattgccatagttaccacaactgtggaaaccaaggagcctgagaaggaagtcatatcatctttggagctcttggagccaactagatgggaatttgttagtatcagtggcctcctggtaccgaa

SEQ ID NO: 28145 - DNA, 166 bp, Homo sapiens
  MAP TO AC004123.1; EXPRESSED IN PLACENTA, SIGNAL = 0.83; EXPRESSED IN BONE MARROW, SIGNAL = 0.95; EXPRESSED IN FETAL LIVER, SIGNAL = 0.9; EXPRESSED IN LUNG, SIGNAL = 0.85; EXPRESSED IN BRAIN, SIGNAL = 0.9; EXPRESSED IN ADULT LIVER, SIGNAL = 0.87; EST_HUMAN HIT: AA137027.1, EVALUE 2.20e+00; NT HIT: AJ290947.1, EVALUE 6.00e+00
gtcagagagtagggaggaggaggaggagaaggaggaagacgaggaggaagaggaggaggaggaagaggaatacgagaaggaggaggagaaggaagaggaggaggaggaggaggaaagagatctggagtttagtaaaggacccttcttgtcttcagttgagtcatga

SEQ ID NO: 28146 - DNA, 208 bp, Homo sapiens
  MAP TO AC004126.1; EXPRESSED IN PLACENTA, SIGNAL = 0.63; EXPRESSED IN LUNG, SIGNAL = 0.57; EXPRESSED IN FETAL LIVER, SIGNAL = 0.77; EXPRESSED IN BRAIN, SIGNAL = 0.78; EXPRESSED IN BONE MARROW, SIGNAL = 0.72; EXPRESSED IN ADULT LIVER, SIGNAL = 0.95; NT HIT: AB013721.1, EVALUE 5.00e-35; SWISSPROT HIT: Q00416, EVALUE 4.40e-01; EST_HUMAN HIT: BE262161.1, EVALUE 1.00e-113
caatccaggcatccagtgtccctcgcacagatcgacctatctgggtcaagacatcaactggggcttctctcttctgttggcctggtggtgcaaagtctcgacgggactgggccaatgctgagtggaggaggataagggccactaggaccatcagaatggctttgaacacatgctttccccatggtgaactgatgctggaggctgccat

SEQ ID NO: 28147 - DNA, 111 bp, Homo sapiens
  MAP TO AC005690.7; EXPRESSED IN LUNG, SIGNAL = 0.41; EXPRESSED IN PLACENTA, SIGNAL = 2.1; EXPRESSED IN BRAIN, SIGNAL = 1.1; EXPRESSED IN ADULT LIVER, SIGNAL = 0.86; EST_HUMAN HIT: AA452734.1, EVALUE 4.00e-56; SWISSPROT HIT: P70662, EVALUE 2.10e-01; NT HIT: gi4504970, EVALUE 3.00e-56
cttgttcatctcatagattcggtactctggctgtaccatgtatggtgtatgcctcctataaaatgggccgaaaggagaagaatagaaggggtcatgtggtgtgctggacat

SEQ ID NO: 28148 - DNA, 202 bp, Homo sapiens
  MAP TO AC004857.1; EXPRESSED IN LUNG, SIGNAL = 0.75; EXPRESSED IN BRAIN, SIGNAL = 0.74; EXPRESSED IN ADULT LIVER, SIGNAL = 0.84; EXPRESSED IN BONE MARROW, SIGNAL = 0.69; EXPRESSED IN PLACENTA, SIGNAL = 0.78; EXPRESSED IN FETAL LIVER, SIGNAL = 0.74; SWISSPROT HIT: P50549, EVALUE 7.00e-38; EST_HUMAN HIT: AI560289.1, EVALUE 1.00e-110; NT HIT: X87175.1, EVALUE 1.00e-110
tgtctacaagtttgtgtgtgatccagaagcccttttctccatggcctttccagataatcagcgtccactgctgaagacagacatggaacgtcacatcaacgaggaggacacagtgcctctttctcactttgatgagagcatggcctacatgccggaagggggctgctgcaacccccacccctacaacgaaggctacgtgtat

SEQ ID NO: 28149 - DNA, 80 bp, Homo sapiens
  MAP TO AC006012.2; EXPRESSED IN BONE MARROW, SIGNAL = 0.61; EXPRESSED IN PLACENTA, SIGNAL = 0.84; EXPRESSED IN LUNG, SIGNAL = 0.87; EXPRESSED IN ADULT LIVER, SIGNAL = 0.74; EXPRESSED IN BRAIN, SIGNAL = 0.55; NT HIT: AB033012.1, EVALUE 7.00e-04; EST_HUMAN HIT: AW860963.1, EVALUE 2.00e-04
caagaccttggttcttaaccttttatgggtcactgaccccttggagaatctgatgaaagcttaaaacaaaaaaaaaaaag

SEQ ID NO: 28150 - DNA, 355 bp, Homo sapiens
  MAP TO AC004616.1; EXPRESSED IN PLACENTA, SIGNAL = 0.83; EXPRESSED IN LUNG, SIGNAL = 0.94; EXPRESSED IN FETAL LIVER, SIGNAL = 0.99; EXPRESSED IN BRAIN, SIGNAL = 0.87; EXPRESSED IN ADULT LIVER, SIGNAL = 0.83; EXPRESSED IN BONE MARROW, SIGNAL = 0.85; NT HIT: AF245505.1, EVALUE 0.00e+00; SWISSPROT HIT: O02833, EVALUE 1.00e-04; EST_HUMAN HIT: BF304158.1, EVALUE 4.00e-87
tctcacaatcgcaggtccacggatttccctgcaagtaaagattctccagaagcggcatgttccgaagcatgctggcaggaagagttctaaccatgttctctgctaagtagaggtgccttatggtggagagtctgaaataatccaaaaatgtgaacgtggagaaggtgctggggtgcagctggtggaggagatttccttccaaatggagtagcctcagagacgttaagccgttgaaagcttgagggtggataaactcgatcttgttgtggtcaatgtgcagcctcattaagttagagagaccctggagggtctgtcctgtgatcactctcagcttgttgtagctgaacttgaaaac

SEQ ID NO: 28151 - DNA, 80 bp, Homo sapiens
  MAP TO AC005884.1; EXPRESSED IN PLACENTA, SIGNAL = 0.59; EXPRESSED IN ADULT LIVER, SIGNAL = 0.56; EXPRESSED IN LUNG, SIGNAL = 0.51; EXPRESSED IN BRAIN, SIGNAL = 0.57; EXPRESSED IN BONE MARROW, SIGNAL = 0.51; NT HIT: gi8923130, EVALUE 6.00e-38; EST_HUMAN HIT: AA017316.1, EVALUE 1.00e-37
catgacctggatgttccgaagatagcagccacacaaaattctccgcccatcgatttgctgggtgaaatttgtggaggagg

SEQ ID NO: 28152 - DNA, 97 bp, Homo sapiens
  MAP TO AC002461.1; EXPRESSED IN LUNG, SIGNAL = 0.49; EXPRESSED IN BRAIN, SIGNAL = 0.78; NT HIT: AB007877.1, EVALUE 8.10e-01; SWISSPROT HIT: O96000, EVALUE 3.20e+00; EST_HUMAN HIT: AA417785.1, EVALUE 1.20e+00
gcattcatttaccatcctgacatagtctaggtctgcactgcatgatgttgatgatacttttgtcaacgtgaagaatgcagtgccattgttacagaaa

SEQ ID NO: 28153 - DNA, 92 bp, Homo sapiens
  MAP TO AC004692.1; EXPRESSED IN LUNG, SIGNAL = 1.2; EXPRESSED IN BRAIN, SIGNAL = 0.87; EXPRESSED IN ADULT LIVER, SIGNAL = 1.2; EXPRESSED IN FETAL LIVER, SIGNAL = 1.2; EXPRESSED IN BONE MARROW, SIGNAL = 1.2; EXPRESSED IN PLACENTA, SIGNAL = 1.4; NT HIT: AB037964.1, EVALUE 5.00e-05; EST_HUMAN HIT: BE908119.1, EVALUE 7.20e-02
ttgttggtagtgatgatgacggtgatgaccatggtggtggtgatggcgaggatgcaggctccatttacacactcactgaataaactcaaatc

SEQ ID NO: 28154 - DNA, 228 bp, Homo sapiens
  MAP TO AC004614.1; EXPRESSED IN PLACENTA, SIGNAL =   2; EXPRESSED IN LUNG, SIGNAL = 0.82; EXPRESSED IN FETAL LIVER, SIGNAL = 0.75; EXPRESSED IN ADULT LIVER, SIGNAL = 0.69; EXPRESSED IN BRAIN, SIGNAL = 0.81; EXPRESSED IN BONE MARROW, SIGNAL = 0.76; EST_HUMAN HIT: AV700761.1, EVALUE 8.10e-01; SWISSPROT HIT: P45702, EVALUE 1.80e+00; NT HIT: Z21619.1, EVALUE 5.40e-01
agagagagagagaaagtgcgtgcagataacaacagagataatgagttcttcctggaaggaggttggcaggatcaagaatggcctcctagagaaaatgctgctagcgttaaggattagaaggcatgcaccaggtctaggatggagatggccaaagaatatgggaacaaaaagagcaaaggcactgagaattgcagcagtaattgttccgtgtggaaaaatactgtttct

SEQ ID NO: 28155 - DNA, 243 bp, Homo sapiens
  MAP TO AC004648.1; EXPRESSED IN LUNG, SIGNAL = 1.7; EXPRESSED IN FETAL LIVER, SIGNAL = 1.5; EXPRESSED IN BRAIN, SIGNAL = 1.5; EXPRESSED IN BONE MARROW, SIGNAL = 1.8; EXPRESSED IN PLACENTA, SIGNAL = 1.5; EXPRESSED IN ADULT LIVER, SIGNAL = 1.7; SWISSPROT HIT: Q64428, EVALUE 5.40e-01; EST_HUMAN HIT: BF183321.1, EVALUE 8.70e-01
ctcagctttgccctccgggtcagatgtcagaaaaagatgacagtggaaatgcctcttgtaagggacttgaatgcatcaggctggtgggggaagaagccctgcttcagtccacttttgagtatcgtgcaaacgtcacacatttccacctgcacagaacgacaaggacagaactgcatttccacctgccgtggaactacaagaggcaggagtggtacctctggtgagggatggcccaggatttgc

SEQ ID NO: 28156 - DNA, 211 bp, Homo sapiens
  MAP TO AC006070.1; EXPRESSED IN LUNG, SIGNAL = 0.71; EXPRESSED IN BRAIN, SIGNAL = 0.93; EXPRESSED IN BONE MARROW, SIGNAL = 0.72; EXPRESSED IN PLACENTA, SIGNAL = 0.63; EXPRESSED IN ADULT LIVER, SIGNAL = 0.6; NT HIT: gi7657286, EVALUE 2.00e-19; EST_HUMAN HIT: BE250684.1, EVALUE 5.00e-05
agggtgtgctgcagcaggaaggctggcagcagctggtcacacagatgggctggcagcaggtgttttgacagcaagttgggcggcagcaaggctggcagcagctggacacacagcaggagggctggcagcagggtgtgctgctgcaggtggtcacagtggtgggcttccagcaggtggtcctgcagcacgtaggctgacagcaaggggaaca

SEQ ID NO: 28157 - DNA, 153 bp, Homo sapiens
  MAP TO AC004703.1; EXPRESSED IN LUNG, SIGNAL = 1.4; EXPRESSED IN FETAL LIVER, SIGNAL = 1.2; EXPRESSED IN BRAIN, SIGNAL =   1; EXPRESSED IN BONE MARROW, SIGNAL = 1.2; EXPRESSED IN ADULT LIVER, SIGNAL = 1.5; EXPRESSED IN PLACENTA, SIGNAL = 1.3; NT HIT: AF003529.1, EVALUE 6.00e-12; SWISSPROT HIT: Q09749, EVALUE 1.80e+00; EST_HUMAN HIT: BE173035.1, EVALUE 2.00e-12
acatggtacgacatgtatgaaccttgaaaacactgtgctgagtgaaggaatccagacacaaatgtccacatattgcatgaatccatttgtatatgaaatgtccagagtgggcaaatccatagagacagagaagacattcgtggttgtcaaggg

SEQ ID NO: 28158 - DNA, 115 bp, Homo sapiens
  MAP TO AC004842.2; EXPRESSED IN PLACENTA, SIGNAL = 0.61; EXPRESSED IN LUNG, SIGNAL = 0.58; EXPRESSED IN FETAL LIVER, SIGNAL =   1; EXPRESSED IN BRAIN, SIGNAL = 0.61; EXPRESSED IN BONE MARROW, SIGNAL = 0.6; EXPRESSED IN ADULT LIVER, SIGNAL = 0.67; EST_HUMAN HIT: AA889259.1, EVALUE 1.50e+00
taggaaaccaggcaaaggcagtggtcctaagggagagtcagtctccacctgtgtgcatgggctctggaccagacagcagctcagggaacaccgtcagctgtgggcctatctcatt

SEQ ID NO: 28159 - DNA, 353 bp, Homo sapiens
  MAP TO AB019439.1; EXPRESSED IN ADULT LIVER, SIGNAL = 0.54; EXPRESSED IN LUNG, SIGNAL = 0.57; EXPRESSED IN BRAIN, SIGNAL = 0.56; NT HIT: X92278.1, EVALUE 0.00e+00; SWISSPROT HIT: P06331, EVALUE 1.00e-53; EST_HUMAN HIT: BE672445.1, EVALUE 0.00e+00
gggtcctgtcccaggtgcagctacagcagtggggcgcaggactgttgaagccttcggagaccctgtccctcacctgcgctgtctatggtgggtccttcagtggttactactggagctggatccgccagcccccagggaaggggctggagtggattggggaaatcaatcatagtggaagcaccaactacaacccgtccctcaagagtcgagtcaccatatcagtagacacgtccaagaaccagttctccctgaagctgagctctgtgaccgccgcggacacggctgtgtattactgtgcgagaggcacagtgaggggaggtgagtgtgagcccagacaaaaacctccctgcagg

SEQ ID NO: 28160 - DNA, 115 bp, Homo sapiens
  MAP TO AC004828.2; EXPRESSED IN LUNG, SIGNAL = 0.78; EXPRESSED IN BONE MARROW, SIGNAL = 0.79; EXPRESSED IN PLACENTA, SIGNAL = 0.71; EXPRESSED IN FETAL LIVER, SIGNAL = 0.82; EXPRESSED IN BRAIN, SIGNAL = 0.88; EXPRESSED IN ADULT LIVER, SIGNAL = 0.81; NT HIT: U13992.1, EVALUE 2.50e-01; SWISSPROT HIT: P53326, EVALUE 1.40e+00; EST_HUMAN HIT: BF477337.1, EVALUE 3.70e-01
gacttccaaatgcagggatggaatataagcagaacgtcatgggctcagcagtgactccaccacccgaggccgaggccgtgcttctggaagatagaaggagacatcatcgtgtgtt

SEQ ID NO: 28161 - DNA, 151 bp, Homo sapiens
  MAP TO AC002042.1; EXPRESSED IN ADULT LIVER, SIGNAL = 0.69; EXPRESSED IN PLACENTA, SIGNAL = 0.78; EXPRESSED IN LUNG, SIGNAL = 0.79; EXPRESSED IN BRAIN, SIGNAL = 0.89; EXPRESSED IN FETAL LIVER, SIGNAL = 0.7; EXPRESSED IN BONE MARROW, SIGNAL = 0.91; NT HIT: gi6680084, EVALUE 4.00e-04; EST_HUMAN HIT: BF196068.1, EVALUE 4.00e-60; SWISSPROT HIT: Q61085, EVALUE 4.00e-05
agtggccgcaaacccaaaggtgcgggagcaagtgcggctggagctgagcttcgtcaactcagacctgcagatgctcaaggaagagctggaggggctgaacatctcagtgggcgtctatcagaacacagagtaagtgggagcagcacacttc

SEQ ID NO: 28162 - DNA, 157 bp, Homo sapiens
  MAP TO AC002059.3; EXPRESSED IN LUNG, SIGNAL = 0.79; EXPRESSED IN FETAL LIVER, SIGNAL = 0.87; EXPRESSED IN BRAIN, SIGNAL = 0.74; EXPRESSED IN BONE MARROW, SIGNAL = 0.8; EXPRESSED IN HELA, SIGNAL = 1.7; EXPRESSED IN PLACENTA, SIGNAL = 0.92; EXPRESSED IN ADULT LIVER, SIGNAL = 0.76; SWISSPROT HIT: Q11079, EVALUE 2.70e-01; NT HIT: J03866.1, EVALUE 1.40e+00
ccacacactccagccccggtccacatcccccaaggctccttgtgggattcctcagcagcaccaatgcactgactgtcactatgttctcctagatttggtcgaagatctcagtgaatacccatctgtccatcttgaagacctcatgacaccggagatg

SEQ ID NO: 28163 - DNA, 120 bp, Homo sapiens
  MAP TO AC004845.1; EXPRESSED IN FETAL LIVER, SIGNAL = 1.1; EXPRESSED IN BONE MARROW, SIGNAL = 0.85; EXPRESSED IN ADULT LIVER, SIGNAL = 0.98; EXPRESSED IN PLACENTA, SIGNAL = 1.1; EXPRESSED IN LUNG, SIGNAL = 0.91; EXPRESSED IN BRAIN, SIGNAL = 1.1; NT HIT: L07899.1, EVALUE 1.70e-02; EST_HUMAN HIT: F20456.2, EVALUE 9.90e-02; SWISSPROT HIT: Q00166, EVALUE 6.20e-01
ctaattttccctgagaagatgcctgtggctgtgtgacgaatgactattttgtggagggggtgccaggcttctctcctgctgctgtggagtttgctggaacatgggaaaaggtcgatcttt

SEQ ID NO: 28164 - DNA, 131 bp, Homo sapiens
  MAP TO AC004748.1; EXPRESSED IN PLACENTA, SIGNAL = 0.7; EXPRESSED IN ADULT LIVER, SIGNAL = 0.65; EXPRESSED IN LUNG, SIGNAL = 0.63; EXPRESSED IN BRAIN, SIGNAL = 0.75; EXPRESSED IN BONE MARROW, SIGNAL = 0.58; NT HIT: AF072220.1, EVALUE 4.50e+00; EST_HUMAN HIT: T62589.1, EVALUE 6.80e+00; SWISSPROT HIT: P55268, EVALUE 1.40e+00
ctgtgctcccaaacatgctgttagaagttatggaagaaagcaatattgtcactgtggcaggaatgtgtcccttctttctggtgattgttaggacaagcattattattcttgctgttgcccaagttgaatga

SEQ ID NO: 28165 - DNA, 155 bp, Homo sapiens
  MAP TO AC002065.1; EXPRESSED IN PLACENTA, SIGNAL = 0.77; EXPRESSED IN ADULT LIVER, SIGNAL = 0.98; EXPRESSED IN LUNG, SIGNAL = 0.94; EXPRESSED IN FETAL LIVER, SIGNAL = 0.91; EXPRESSED IN BRAIN, SIGNAL = 0.83; EXPRESSED IN BONE MARROW, SIGNAL = 0.81; EST_HUMAN HIT: U70071.1, EVALUE 1.30e-01; NT HIT: AF128847.1, EVALUE 2.00e-05; SWISSPROT HIT: O60673, EVALUE 1.40e+00
agctgctgacactgcaggcaagggagagctggccgtgcagctgtgtgtgggagcagccagagcggcagagctggctgctgagaggagctgtggagccggagcagacaaccaagataaaggcggacagtgtgagagagctgttgatgagagagctg

SEQ ID NO: 28166 - DNA, 177 bp, Homo sapiens
  MAP TO AC005920.1; EXPRESSED IN PLACENTA, SIGNAL =   2; EXPRESSED IN ADULT LIVER, SIGNAL = 1.3; EXPRESSED IN LUNG, SIGNAL = 0.93; EXPRESSED IN FETAL LIVER, SIGNAL = 1.4; EXPRESSED IN BRAIN, SIGNAL = 1.5; EXPRESSED IN BONE MARROW, SIGNAL =   1; EST_HUMAN HIT: AW958121.1, EVALUE 3.00e-95; SWISSPROT HIT: P34609, EVALUE 3.00e-09; NT HIT: AB011088.1, EVALUE 3.00e-85
atttcacagcatcccggtgcccatggaagcaaagctgtgcatgtgccattgaacaatagggtataaatgtccctggagtcactttatcactgttttcatcaccatatacacggattacacttccaggacgatttcctggtacacctgaggttttatttgctgcaacagaaaaaccaa

SEQ ID NO: 28167 - DNA, 132 bp, Homo sapiens
  MAP TO AC004676.1; EXPRESSED IN BRAIN, SIGNAL = 0.73; EXPRESSED IN BONE MARROW, SIGNAL = 0.61; EXPRESSED IN PLACENTA, SIGNAL = 0.68; EXPRESSED IN LUNG, SIGNAL = 0.58; EXPRESSED IN ADULT LIVER, SIGNAL = 0.71; NT HIT: AF026544.2, EVALUE 2.90e-01; SWISSPROT HIT: P32334, EVALUE 2.70e-01; EST_HUMAN HIT: BF336745.1, EVALUE 2.00e-68
gcttcccaagtggtatgctgtggattatgggtttgcagagatactgatctcagtggtcggggggcagctgggagaggtgatgcaggcggagctccagactggttgactctagctgcttctggtcagagctac

SEQ ID NO: 28168 - DNA, 133 bp, Homo sapiens
  MAP TO AC000016.1; EXPRESSED IN LUNG, SIGNAL = 0.65; EXPRESSED IN FETAL LIVER, SIGNAL = 0.87; EXPRESSED IN BRAIN, SIGNAL = 0.68; EXPRESSED IN BONE MARROW, SIGNAL = 0.82; EXPRESSED IN PLACENTA, SIGNAL = 0.76; EXPRESSED IN ADULT LIVER, SIGNAL = 0.8; NT HIT: AF095703.1, EVALUE 3.00e-69; EST_HUMAN HIT: R23397.1, EVALUE 7.00e-03; SWISSPROT HIT: P16978, EVALUE 7.00e+00
gcctgggccatggtgtcatgtcgtgacatcaagagaagtgaatggatggaaacaggaaaagacacagtgaagatggagaagaggagcaggacgagaaagaccagaagccaccctgcgggtaccacaaatcaaa

SEQ ID NO: 28169 - DNA, 618 bp, Homo sapiens
  MAP TO AC000134.14; EXPRESSED IN PLACENTA, SIGNAL =   1; EXPRESSED IN LUNG, SIGNAL = 0.62; EXPRESSED IN FETAL LIVER, SIGNAL =   1; EXPRESSED IN ADULT LIVER, SIGNAL = 0.68; EXPRESSED IN BRAIN, SIGNAL = 0.57; EXPRESSED IN BONE MARROW, SIGNAL = 0.79; EST_HUMAN HIT: AF001543.1, EVALUE 0.00e+00; NT HIT: Z30697.2, EVALUE 2.50e-02; SWISSPROT HIT: Q06846, EVALUE 1.10e+00
cccagcccatgggcgctgctggccacaacagctcgtggccacgagacttgcggcctgcgccatccacgtagatgccagcagtggtgaagagtagcaggaactcgctgaggctaagctccacggcacccagtgcctcacccaggcccccgcgggatggtggcagctcctcaggcaccaaaccggcccccagcgccaacggcgcagcctcgttgagcagcgggtagagtgcaaagccaccggcggcgcccacacatagccggtcgcccagcagccccaggctctgcacagtggcaggtgcctgcagctcacggatgcggcgctgccagggcccagggcccgggcccagctggtagcagagcacctggcgcttgacggctacacagagcaccggggtgcgggcctgcaggatgcttccagctgccagcacctggcagcctcgagactcggggatcttggcacctgctacctctatgttctccagctccgccagggcaaagagacgcacgctggggccgcggccacacagcacgaccagcaggcctgcactggggctcaaggtcagctgctgcacgcgccggcactcccccacctggaagatgtctgcagggttggcgaggg

SEQ ID NO: 28170 - DNA, 178 bp, Homo sapiens
  MAP TO AC004881.1; EXPRESSED IN BONE MARROW, SIGNAL = 0.71; EXPRESSED IN ADULT LIVER, SIGNAL = 0.63; EXPRESSED IN PLACENTA, SIGNAL = 0.71; EXPRESSED IN LUNG, SIGNAL = 0.63; EXPRESSED IN BRAIN, SIGNAL = 0.78; SWISSPROT HIT: P17948, EVALUE 3.90e+00; EST_HUMAN HIT: BF667502.1, EVALUE 2.40e+00
gacatcgtgtcttgagctatggcactccacacgtacagaaaagtcaggatcaggcaaggatggttcagaaaggagcaagaaacccagcacacagctggagtcttcctcaacaagtctgactggattccactctgaaatctctcttgaaatggattctatcatttggtcagaccttgac

SEQ ID NO: 28171 - DNA, 181 bp, Homo sapiens
  MAP TO AC000066.1; EXPRESSED IN LUNG, SIGNAL = 0.61; EXPRESSED IN BRAIN, SIGNAL = 0.6; EXPRESSED IN BONE MARROW, SIGNAL = 0.56; EXPRESSED IN ADULT LIVER, SIGNAL = 0.52; NT HIT: gi11419408, EVALUE 9.00e-98; EST_HUMAN HIT: AA620569.1, EVALUE 1.00e-97
tctgagaaacagcactcatagtagcacagctgcagacttactacaagccaaacaacagatcctcactcatcaacagcagcttgaagaacaagaccacttattagaagattatcagaaaaagaaagaagacttcacaatgcaaattagtttcttgcaagagaaaattaaagtatatgaaatg

SEQ ID NO: 28172 - DNA, 146 bp, Homo sapiens
  MAP TO AC004988.2; EXPRESSED IN BONE MARROW, SIGNAL = 0.9; EXPRESSED IN ADULT LIVER, SIGNAL = 0.88; EXPRESSED IN LUNG, SIGNAL = 0.86; EXPRESSED IN PLACENTA, SIGNAL = 0.91; EXPRESSED IN FETAL LIVER, SIGNAL = 0.97; EXPRESSED IN BRAIN, SIGNAL = 0.93; SWISSPROT HIT: P52178, EVALUE 3.10e+00
tcttgctctacccaccgtcttctgcatctttatttatggcaagtccatctttcccgttgctcaggacacaaatcttgaaactacagttgactgtctcacagtccacatctcactcaacaggaattgctgtagctttactgccaaaa

SEQ ID NO: 28173 - DNA, 287 bp, Homo sapiens
  MAP TO AC004894.1; EXPRESSED IN PLACENTA, SIGNAL = 0.7; EXPRESSED IN LUNG, SIGNAL = 0.68; EXPRESSED IN BRAIN, SIGNAL = 0.62; EXPRESSED IN BONE MARROW, SIGNAL = 0.72; EXPRESSED IN ADULT LIVER, SIGNAL = 0.74; SWISSPROT HIT: Q99435, EVALUE 3.40e-01; EST_HUMAN HIT: BE148961.1, EVALUE 2.60e-01; NT HIT: gi4557598, EVALUE 7.00e-01
agcaggacagtttttctccagggtccaattataacagagccaattatgttttgggatgcattcacgacccttgcaattcttctacatgcatacataaaactctgcacatgtatgtgtcagaatttactaatatggattccaaatattgcttcatccatcaacagaactgtacacccaaaaacgaagtggaaactaaaatgtgcttcattagcttttcaaataatgttaaatttacagacatgctaaagagcaggctgctgactcagattgagccacactcttcaagg

SEQ ID NO: 28174 - DNA, 106 bp, Homo sapiens
  MAP TO AC004638.1; EXPRESSED IN PLACENTA, SIGNAL = 0.82; EXPRESSED IN FETAL LIVER, SIGNAL = 0.78; EXPRESSED IN BRAIN, SIGNAL = 0.72; EXPRESSED IN BONE MARROW, SIGNAL = 0.65; EXPRESSED IN LUNG, SIGNAL = 0.86; EXPRESSED IN ADULT LIVER, SIGNAL = 0.71; NT HIT: L42547.1, EVALUE 9.00e-01; SWISSPROT HIT: P32381, EVALUE 5.50e+00
tcttcagcttccacaatgactttgtgacgatcacattggtatgggcaagagtgcaagagcttgctaaagtttcggctattcagggatttttctactgctatgcaac

SEQ ID NO: 28175 - DNA, 324 bp, Homo sapiens
  MAP TO AC000403.1; EXPRESSED IN PLACENTA, SIGNAL = 0.58; EXPRESSED IN LUNG, SIGNAL = 0.72; EXPRESSED IN FETAL LIVER, SIGNAL = 0.78; EXPRESSED IN BRAIN, SIGNAL = 0.56; EXPRESSED IN BONE MARROW, SIGNAL = 0.62; EXPRESSED IN ADULT LIVER, SIGNAL = 0.98; EST_HUMAN HIT: BF028866.1, EVALUE 3.00e-84; NT HIT: M90354.1, EVALUE 0.00e+00; SWISSPROT HIT: Q13890, EVALUE 1.00e-39
aagactggcagctggcatttatcttgtcccttcaaggctcagaggttaacggttttatacataagggtagtcctgatcataaacctagcgacagcagaggataaaaaatttcagttctccttaaagaaattaggggtaaacaatatccctggtattgaagaggtgaatatgtttacacaccaaggaacagtgattcactttaacaaccctgaagttcaggcatcgctggcagcaaacactttcaccatgacaggccatgctgagacaaagcagctgacagaaatgctactcagcatcgatcataaaccagtgctgcagatggtc

SEQ ID NO: 28176 - DNA, 369 bp, Homo sapiens
  MAP TO AB003151.1; EXPRESSED IN LUNG, SIGNAL = 0.65; EXPRESSED IN FETAL LIVER, SIGNAL = 0.71; EXPRESSED IN BRAIN, SIGNAL = 0.98; EXPRESSED IN PLACENTA, SIGNAL = 0.8; EXPRESSED IN BONE MARROW, SIGNAL = 0.72; EXPRESSED IN ADULT LIVER, SIGNAL = 0.59; SWISSPROT HIT: O75828, EVALUE 1.00e-48; NT HIT: gi7108334, EVALUE 0.00e+00; EST_HUMAN HIT: BE408293.1, EVALUE 0.00e+00
atgtcgtcctgcagccgcgtggcgctggtgaccggggccaacaggggcatcggcttggccatcgcgcgcgaactgtgccgacagttctctggggatgtggtgctcaccgcgcgggacgtggcgcggggccaggcggccgtgcagcagctgcaggcggagggcctgagcccgcgcttccaccaactggacatcgacgacttgcagagcatccgcgccctgcgcgacttcctgcgcaaggagtacggggggctcaacgtactggtcaacaacgcggccgtcgccttcaagagtaggtgcagggcttgggttggggccccctggagcgctccgagggtgcggaggtggccagccgcaggctccccacccgtc

SEQ ID NO: 28177 - DNA, 184 bp, Homo sapiens
  MAP TO AC004782.1; EXPRESSED IN PLACENTA, SIGNAL = 0.84; EXPRESSED IN LUNG, SIGNAL = 0.84; EXPRESSED IN FETAL LIVER, SIGNAL = 0.95; EXPRESSED IN ADULT LIVER, SIGNAL = 0.87; EXPRESSED IN BRAIN, SIGNAL = 0.91; EXPRESSED IN BONE MARROW, SIGNAL = 0.88; NT HIT: gi11416870, EVALUE 3.00e-85; SWISSPROT HIT: Q03070, EVALUE 4.00e-10; EST_HUMAN HIT: BE276273.1, EVALUE 5.00e-85
cttttcgtggttttctattaggatctcaatgacaatgttctgaaatttgatgtccatgatggctgctactgtttcttcctgaggcctcagcagagtgggtccaaacaccacaccaaggtttgccaccgtcatcaaattctgcttgtggttgttagcaacactgggaggaaggaaaagaaaaggt

SEQ ID NO: 28178 - DNA, 75 bp, Homo sapiens
  MAP TO AC002037.1; EXPRESSED IN PLACENTA, SIGNAL = 0.63; EXPRESSED IN ADULT LIVER, SIGNAL = 0.56; EXPRESSED IN LUNG, SIGNAL = 0.55; EXPRESSED IN BRAIN, SIGNAL = 0.61; NT HIT: X68801.1, EVALUE 5.90e-01; EST_HUMAN HIT: BE547673.1, EVALUE 8.70e-01
atggtgttgatcttggccttatacagcttcaccctttcagaaaacaagggcacgtgggcgatcttggtggtaggt

SEQ ID NO: 28179 - DNA, 187 bp, Homo sapiens
  MAP TO AC006241.1; EXPRESSED IN PLACENTA, SIGNAL = 1.1; EXPRESSED IN LUNG, SIGNAL =   1; EXPRESSED IN FETAL LIVER, SIGNAL = 0.89; EXPRESSED IN BONE MARROW, SIGNAL = 0.95; EXPRESSED IN BRAIN, SIGNAL =   1; EXPRESSED IN ADULT LIVER, SIGNAL = 0.86; EST_HUMAN HIT: AA812862.1, EVALUE 6.50e-01; NT HIT: AE000571.1, EVALUE 4.40e-01; SWISSPROT HIT: P48621, EVALUE 1.30e+00
aagcccaggtcttcccactggtctgcaaggcccatgtggtctagcccctgttgtctctctgatctcagctcctgttgttcacactctgctctcccacacaagccgccttgctttttctcggacagatcaggctttaggctctgctctcgctgttcccacaggcaggaatgctgtctctcagaattcc

SEQ ID NO: 28180 - DNA, 153 bp, Homo sapiens
  MAP TO AC004857.1; EXPRESSED IN LUNG, SIGNAL = 0.54; EXPRESSED IN BONE MARROW, SIGNAL = 0.69; EXPRESSED IN PLACENTA, SIGNAL = 0.59; EXPRESSED IN BRAIN, SIGNAL = 0.57; EXPRESSED IN ADULT LIVER, SIGNAL = 0.42; SWISSPROT HIT: P50549, EVALUE 6.00e-26; EST_HUMAN HIT: AL120951.1, EVALUE 6.00e-81; NT HIT: gi11420544, EVALUE 4.00e-81
ccaggaatgtatcgggaaggacccacataccaacggcgaggatcacttcagctctggcagtttttggtagctcttctggatgacccttcaaattctcattttattgcctggactggtcgaggcatggaatttaaactgattgagcctgaagag

SEQ ID NO: 28181 - DNA, 89 bp, Homo sapiens
  MAP TO AC005920.1; EXPRESSED IN BONE MARROW, SIGNAL = 0.9; EXPRESSED IN PLACENTA, SIGNAL = 0.9; EXPRESSED IN LUNG, SIGNAL = 0.69; EXPRESSED IN FETAL LIVER, SIGNAL = 0.88; EXPRESSED IN ADULT LIVER, SIGNAL = 0.88; EXPRESSED IN BRAIN, SIGNAL = 1.3; EST_HUMAN HIT: AV689285.1, EVALUE 7.00e-02; SWISSPROT HIT: Q93572, EVALUE 1.90e+00; NT HIT: AF190449.1, EVALUE 7.30e-01
atgggtggctctgccaccccaggacactggactggggccacccttacagaaccggttcgaagccaaacaatggcacgtcacagtccagc

SEQ ID NO: 28182 - DNA, 474 bp, Homo sapiens
  MAP TO AC003661.1; EXPRESSED IN BONE MARROW, SIGNAL = 0.9; EXPRESSED IN ADULT LIVER, SIGNAL = 0.88; EXPRESSED IN LUNG, SIGNAL = 0.98; EXPRESSED IN PLACENTA, SIGNAL = 0.83; EXPRESSED IN FETAL LIVER, SIGNAL = 0.73; EXPRESSED IN BRAIN, SIGNAL = 1.6; NT HIT: gi11525833, EVALUE 1.00e-123; SWISSPROT HIT: P52850, EVALUE 1.00e-04; EST_HUMAN HIT: F07258.1, EVALUE 6.00e-93
ggtcctgggccgcgcggggccacctcagccgcggagggcgcgcaggctgctcttcgccttcacgctctcgctctcctgcacttacctgtgttacagcttcctgtgctgctgcgacgacctgggtcggagccgcctcctcggcgcgcctcgctgcctccgcggccccagcgcgggcggccagaaacttctccagaagtcccgcccctgtgatccctccgggccgacgcccagcgagcccagcgctcccagcgcgcccgccgccgccgtgcccgcccctcgcctctccggttccaaccactccggctcacccaagctgggtaccaagcggttgccccaagccctcattgtgggcgtgaagaaggggggcacccgggccgtgctggagtttatccgagtacacccggacgtgcgggccttgggcacggaaccccacttctttgacaggaactacggccgcgggctggattggtacag

SEQ ID NO: 28183 - DNA, 135 bp, Homo sapiens
  MAP TO AC001228.1; EXPRESSED IN LUNG, SIGNAL = 0.67; EXPRESSED IN BRAIN, SIGNAL = 0.76; EXPRESSED IN BONE MARROW, SIGNAL = 0.58; EXPRESSED IN FETAL LIVER, SIGNAL = 0.84; EXPRESSED IN ADULT LIVER, SIGNAL = 0.91; SWISSPROT HIT: P53852, EVALUE 5.00e-05; NT HIT: AF288207.1, EVALUE 2.00e-70; EST_HUMAN HIT: AI682220.1, EVALUE 3.00e-70
tcactggaagcttccattctgggccatctgcagatattccttgtagagcttctcctgagcctcgaagagcttcttcagcttcttggcttgccctttgctgagctctttgccctccatgtcatgtgtgggcagacc

SEQ ID NO: 28184 - DNA, 294 bp, Homo sapiens
  MAP TO AB019438.1; EXPRESSED IN ADULT LIVER, SIGNAL = 0.6; EXPRESSED IN LUNG, SIGNAL = 0.44; EXPRESSED IN BRAIN, SIGNAL = 0.6; EXPRESSED IN BONE MARROW, SIGNAL = 0.5; SWISSPROT HIT: P19181, EVALUE 3.00e-46; NT HIT: M99679.1, EVALUE 0.00e+00; EST_HUMAN HIT: AW402542.1, EVALUE 0.00e+00
ggcttgatccagcctggggggtccctgagactctcctgtgcagcctctgggttcaccgtcagtagcaactacatgagctgggtccgccaggctccagggaaggggctggagtgggtctcagttatttatagcggtggtagcacatactacgcagactccgtgaagggccgattcaccatctccagagacaattccaagaacacgctgtatcttcaaatgaacagcctgagagccgaggacacggccgtgtattactgtgcgagagacacagtgaggggaagtcattgtgcgccc

SEQ ID NO: 28185 - DNA, 408 bp, Homo sapiens
  MAP TO AC005004.1; EXPRESSED IN PLACENTA, SIGNAL = 0.77; EXPRESSED IN LUNG, SIGNAL = 0.7; EXPRESSED IN FETAL LIVER, SIGNAL = 1.2; EXPRESSED IN BRAIN, SIGNAL = 0.65; EXPRESSED IN BONE MARROW, SIGNAL = 0.78; EXPRESSED IN ADULT LIVER, SIGNAL = 0.67; SWISSPROT HIT: Q01956, EVALUE 2.10e-01; NT HIT: D31957.1, EVALUE 2.60e-01
ctgactcgggctagtcttttcttcagcagctgtggaatgttgatgtggatcttcctttgctccctcagagggttctcttataattcctgcctggccccctggatctctgaagacctttggctccatgctctcgcttctctttgccctatccaagatcccagatgccacagaacctcctgctgtggagtccactagcccacatcgcccaggctcactcccatgatccaaggtctcataggtttcttcacaacaactctccacatgagtcctctgcagctccaagggcaatgccctattctgacttaaaagagagcttgaggctccaggttttacatctggaatcacacttggctcagggtcagcatgaagctctctggagacacttactgggagttcagagtataattc

SEQ ID NO: 28186 - DNA, 83 bp, Homo sapiens
  MAP TO AC002302.1; EXPRESSED IN BRAIN, SIGNAL =   1; EXPRESSED IN BONE MARROW, SIGNAL = 1.2; EXPRESSED IN ADULT LIVER, SIGNAL = 1.1; EXPRESSED IN PLACENTA, SIGNAL = 0.86; EXPRESSED IN FETAL LIVER, SIGNAL = 1.2; EXPRESSED IN LUNG, SIGNAL = 1.1; NT HIT: M13975.1, EVALUE 1.00e-33; SWISSPROT HIT: P04411, EVALUE 3.00e-09; EST_HUMAN HIT: AW016184.1, EVALUE 2.00e-33
gtggtgcacaagcggtgccatgaatttgtcacattctcctgccctggcgctgacaagggtccagcctccgatgtaagtaatgg

SEQ ID NO: 28187 - DNA, 193 bp, Homo sapiens
  MAP TO AC002089.1; EXPRESSED IN LUNG, SIGNAL = 0.99; EXPRESSED IN FETAL LIVER, SIGNAL = 1.7; EXPRESSED IN BONE MARROW, SIGNAL = 0.93; EXPRESSED IN PLACENTA, SIGNAL = 0.91; EXPRESSED IN BRAIN, SIGNAL = 1.3; EXPRESSED IN ADULT LIVER, SIGNAL = 0.68; NT HIT: M37036.1, EVALUE 4.50e-01; SWISSPROT HIT: P47429, EVALUE 9.90e-01
ggcattagacagagaagacattcttatgaagactatttttaacattctcttagtttacatcttcctcatctttgaagctgacagtatgtatagggtaaaagttcctgagtacagaacaacacacagagtgtatcctgaagtggcagtttctagccaaggaaaggcttctgagacaaaggtagtccagttctaa

SEQ ID NO: 28188 - DNA, 99 bp, Homo sapiens
  MAP TO AC005044.1; EXPRESSED IN LUNG, SIGNAL = 0.59; EXPRESSED IN BRAIN, SIGNAL = 0.69; EXPRESSED IN ADULT LIVER, SIGNAL = 0.56; NT HIT: D64088.1, EVALUE 8.30e-01; EST_HUMAN HIT: AW511225.1, EVALUE 6.00e-49
agtaggagttgccagactcctatggccatagatctgcactggacgaaaggacagtgttctagaagccagtctaccagctctgacccaacgcagctcctc

SEQ ID NO: 28189 - DNA, 186 bp, Homo sapiens
  MAP TO AC005495.1; EXPRESSED IN PLACENTA, SIGNAL = 1.4; EXPRESSED IN LUNG, SIGNAL = 1.3; EXPRESSED IN BRAIN, SIGNAL = 1.1; EXPRESSED IN FETAL LIVER, SIGNAL = 1.2; EXPRESSED IN BONE MARROW, SIGNAL = 1.2; EXPRESSED IN ADULT LIVER, SIGNAL = 1.4; SWISSPROT HIT: Q03497, EVALUE 2.90e+00; NT HIT: AB014759.1, EVALUE 1.10e-01; EST_HUMAN HIT: BF352883.1, EVALUE 7.00e-10
ctgggccattccagcagtgaaggcaaaagggctaagaagacttaatacccatcccaaagataaaggaagttgtctatataacacagtgaatcccagacatccccaaaatacagtgaagagaaatccagccaaaccagcgagcataggtttccttattaaaacactcatgaggaaagccaatgctat

SEQ ID NO: 28190 - DNA, 251 bp, Homo sapiens
  MAP TO AC002549.1; EXPRESSED IN BONE MARROW, SIGNAL =  11; EXPRESSED IN ADULT LIVER, SIGNAL = 2.1; EXPRESSED IN PLACENTA, SIGNAL = 5.4; EXPRESSED IN LUNG, SIGNAL = 0.8; EXPRESSED IN BRAIN, SIGNAL = 0.64; EST_HUMAN HIT: AV719681.1, EVALUE 2.30e-01; SWISSPROT HIT: P08393, EVALUE 1.00e+00
ctccaagggatgccgcctccctccccaccactgggggtgttttcatggaagtcactggcctcctctgctctccctggactgcaggaaaagctccaagcgcaagccgcggacagcagacagctctcactcccgacacagatgggtttccgccctgccatccgaccagaaggagggcaacctgctcagggatgaggcctccagcgctcggtgcctccagggctccttcggtaccttccagggctgcacgcggg

SEQ ID NO: 28191 - DNA, 308 bp, Homo sapiens
  MAP TO AC004707.1; EXPRESSED IN PLACENTA, SIGNAL = 1.1; EXPRESSED IN LUNG, SIGNAL = 1.2; EXPRESSED IN FETAL LIVER, SIGNAL = 1.2; EXPRESSED IN BONE MARROW, SIGNAL = 1.3; EXPRESSED IN BRAIN, SIGNAL = 1.4; EXPRESSED IN ADULT LIVER, SIGNAL =   1; SWISSPROT HIT: P16315, EVALUE 2.00e+00; EST_HUMAN HIT: R87430.1, EVALUE 0.00e+00; NT HIT: AB002330.1, EVALUE 1.90e-01
agccagaggaataaattcttcttcatcttcactttcactgcttagcaacctgactggctgtgtttgtgtgacagtttcagctatttctgggacaggtggtgaaaataactctggtgctggaggacaggaggcttcacaatctgagatgtcaaccactacaatcttctcttccctttcaggctgtctcctctttgttgaagatggttccttcttcagaaaggcaaatgttggcaactcctcagagtcactatcaccagaatccagtgagggtgatgacttctttagagccatcagtatgtgctatcaaa

SEQ ID NO: 28192 - DNA, 78 bp, Homo sapiens
  MAP TO AC002557.1; EXPRESSED IN BRAIN, SIGNAL = 0.85; EXPRESSED IN LUNG, SIGNAL = 0.54; SWISSPROT HIT: P22105, EVALUE 1.70e-01; NT HIT: gi11426108, EVALUE 1.00e-36; EST_HUMAN HIT: AI000991.1, EVALUE 5.90e-02
gggcagggggttatggatactgcagtctttgcctgtccagtctggctgacagatgcacttcccttcattgctgcagac

SEQ ID NO: 28193 - DNA, 233 bp, Homo sapiens
  MAP TO AC002117.1; EXPRESSED IN LUNG, SIGNAL = 0.5; EXPRESSED IN BONE MARROW, SIGNAL = 0.69; EXPRESSED IN BRAIN, SIGNAL = 0.62; EXPRESSED IN ADULT LIVER, SIGNAL = 0.45; SWISSPROT HIT: P16406, EVALUE 2.50e+00; EST_HUMAN HIT: BE614105.1, EVALUE 1.00e-128; NT HIT: gi11427141, EVALUE 1.00e-128
tcctcggactctgctttatgttgcggtgagaactctgcccaggtgtgcagggtttggcttgtgggctgcttgctgctcatctgatttttgtcccagtagtccctgcgttcttcattcaaccccttctgggacttcagctcagagagcaccatcccgggggtcagggcctccccacaggagccctgcagtgtggtagcgccatggctgtctcaaaccaagcaaaggaaggaccc

SEQ ID NO: 28194 - DNA, 81 bp, Homo sapiens
  MAP TO AC004746.1; EXPRESSED IN PLACENTA, SIGNAL = 0.96; EXPRESSED IN FETAL LIVER, SIGNAL = 1.1; EXPRESSED IN BRAIN, SIGNAL = 1.2; EXPRESSED IN BONE MARROW, SIGNAL = 0.99; EXPRESSED IN ADULT LIVER, SIGNAL =   1; EXPRESSED IN LUNG, SIGNAL = 1.1; EST_HUMAN HIT: AI681483.1, EVALUE 4.00e-03
tccttccaaagagtgctgtatggaaatgtgggaaagagtaacttcacagtagagaaacctgaaaaacaccacccgatcaaa

SEQ ID NO: 28195 - DNA, 279 bp, Homo sapiens
  MAP TO AC003106.1; EXPRESSED IN BONE MARROW, SIGNAL = 0.72; EXPRESSED IN BRAIN, SIGNAL = 0.78; EXPRESSED IN ADULT LIVER, SIGNAL = 0.59; EXPRESSED IN PLACENTA, SIGNAL = 0.62; EXPRESSED IN LUNG, SIGNAL = 0.61; EXPRESSED IN FETAL LIVER, SIGNAL = 0.95; SWISSPROT HIT: P75881, EVALUE 4.70e+00; EST_HUMAN HIT: BE670170.1, EVALUE 4.00e-03
ttagttcaaaagcactacataacaatgagtttaagtgttcttttccagacattgtcaaggatcattccaggaccaataatttcaacatcagtgaaagatttaattaaagcagggaaaaataaaaatggcaataaactgcatcctaagcttcagctttgtatgcatgttttatcaactcacactcttctgagaaagatgcctgggacacgaacatttctgtatgagaaaataaattccagtgttaattttgtcattcagagaagaagcatgataaagtac

SEQ ID NO: 28196 - DNA, 145 bp, Homo sapiens
  MAP TO AC005730.1; EXPRESSED IN BONE MARROW, SIGNAL = 0.76; EXPRESSED IN ADULT LIVER, SIGNAL = 0.64; EXPRESSED IN PLACENTA, SIGNAL = 0.69; EXPRESSED IN LUNG, SIGNAL = 0.74; EXPRESSED IN BRAIN, SIGNAL = 0.75; NT HIT: gi11426908, EVALUE 2.00e-76; SWISSPROT HIT: P97492, EVALUE 3.10e+00; EST_HUMAN HIT: AV704513.1, EVALUE 3.00e-76
ccagactcaagagaccaaatcaagcctttctaagacccttgaacaagtcttgcacgacactattgtcctcccttacttcattcaattcatggaacttcggcgaatggagcatttggtgaaattttggttagaggctgaaagtttt

SEQ ID NO: 28197 - DNA, 119 bp, Homo sapiens
  MAP TO AC005858.1; EXPRESSED IN PLACENTA, SIGNAL = 0.59; EXPRESSED IN LUNG, SIGNAL = 0.71; EXPRESSED IN BRAIN, SIGNAL = 0.81; EXPRESSED IN BONE MARROW, SIGNAL = 0.72; EXPRESSED IN ADULT LIVER, SIGNAL = 0.61; EST_HUMAN HIT: AA457619.1, EVALUE 2.00e-18; NT HIT: X68128.1, EVALUE 1.00e+00; SWISSPROT HIT: P10263, EVALUE 9.40e-02
cctagagctctgggaacagtgggaaaaagtcttaaacaacatcgtgcgcaagggcaacgggtcccagtaacatctttaatgttatgggccttagttagggctgctttggccccactcta

SEQ ID NO: 28198 - DNA, 160 bp, Homo sapiens
  MAP TO AC005863.1; EXPRESSED IN BONE MARROW, SIGNAL = 0.94; EXPRESSED IN ADULT LIVER, SIGNAL = 0.89; EXPRESSED IN PLACENTA, SIGNAL = 2.8; EXPRESSED IN LUNG, SIGNAL =   1; EXPRESSED IN FETAL LIVER, SIGNAL = 0.85; EXPRESSED IN BRAIN, SIGNAL = 0.85; SWISSPROT HIT: P08547, EVALUE 9.00e-06; NT HIT: AJ004799.1, EVALUE 2.00e-05; EST_HUMAN HIT: AA459581.1, EVALUE 4.00e-05
tctcctgaatttccaaatgaatttttggaccagttcatcaatttctgtaagcaagccaactgggattttgataaggattatgttgaatctgtgggtcaatttcagaagtactgtcatcttaacaatgacaaatctgatttatgaggatggggtgtctact

SEQ ID NO: 28199 - DNA, 452 bp, Homo sapiens; identical to SEQ ID NO: 11614
  MAP TO AC004860.1; EXPRESSED IN PLACENTA, SIGNAL = 1.1; EXPRESSED IN LUNG, SIGNAL =   1; EXPRESSED IN FETAL LIVER, SIGNAL = 1.2; EXPRESSED IN ADULT LIVER, SIGNAL =   1; EXPRESSED IN BRAIN, SIGNAL = 1.2; EXPRESSED IN BONE MARROW, SIGNAL =   1; EST_HUMAN HIT: AW087668.1, EVALUE 4.20e-01; NT HIT: U05633.1, EVALUE 2.80e-01; SWISSPROT HIT: P11717, EVALUE 4.70e+00

SEQ ID NO: 28200 - DNA, 115 bp, Homo sapiens
  MAP TO AC006375.2; EXPRESSED IN PLACENTA, SIGNAL = 1.1; EXPRESSED IN LUNG, SIGNAL = 1.2; EXPRESSED IN FETAL LIVER, SIGNAL = 0.96; EXPRESSED IN BONE MARROW, SIGNAL = 0.95; EXPRESSED IN BRAIN, SIGNAL = 1.3; EXPRESSED IN ADULT LIVER, SIGNAL = 1.1; EST_HUMAN HIT: AW887542.1, EVALUE 7.00e-18; NT HIT: AF036405.1, EVALUE 3.00e-10; SWISSPROT HIT: P29381, EVALUE 2.40e+00
agcaccccaaaacatgttgccatgacctttgctcttgaccagtctacttttgctttgattcgaccactcccaccttttggtaaccatattggtaaccattgctttggtcatgctt

SEQ ID NO: 28201 - DNA, 162 bp, Homo sapiens
  MAP TO AC004954.1; EXPRESSED IN PLACENTA, SIGNAL = 0.83; EXPRESSED IN LUNG, SIGNAL = 0.79; EXPRESSED IN BRAIN, SIGNAL = 0.68; EXPRESSED IN BONE MARROW, SIGNAL = 0.72; EXPRESSED IN ADULT LIVER, SIGNAL = 0.77; NT HIT: gi6753791, EVALUE 1.50e+00; SWISSPROT HIT: P54422, EVALUE 2.00e-01; EST_HUMAN HIT: AA136945.1, EVALUE 5.50e-01
acatcgattctatggccttagacttaaaattctctgggatcactcacccacagtatgtgaaaaagaaggagaaaaaaattcatgtgggccaagagggacagcagcccaaggctctttacttctaccccagccaggtcccagagtaacagacctgcttggtgt

SEQ ID NO: 28202 - DNA, 86 bp, Homo sapiens
  MAP TO AC005273.1; EXPRESSED IN PLACENTA, SIGNAL = 0.81; EXPRESSED IN LUNG, SIGNAL = 0.82; EXPRESSED IN BRAIN, SIGNAL = 0.7; EXPRESSED IN ADULT LIVER, SIGNAL = 0.67; EST_HUMAN HIT: AA088738.1, EVALUE 2.60e-01; NT HIT: AP001511.1, EVALUE 1.80e-01
ttacatttctgagcccattcccttattcttgatcaatatttctttttttatgatttgtgacatgaacagcatctgtatgaatgtcg

SEQ ID NO: 28203 - DNA, 112 bp, Homo sapiens
  MAP TO AC003077.1; EXPRESSED IN LUNG, SIGNAL = 0.7; EXPRESSED IN BRAIN, SIGNAL = 0.64; EXPRESSED IN BONE MARROW, SIGNAL = 0.71; EXPRESSED IN PLACENTA, SIGNAL = 0.62; EXPRESSED IN ADULT LIVER, SIGNAL = 0.68; NT HIT: gi7662263, EVALUE 8.00e-57; SWISSPROT HIT: Q14156, EVALUE 9.30e+00
ctaagctcgacttcatcacaaagaattggtcaaccagctttttgtgaaggggtctcatatcttgaggtacaaacttctcatgcacggccaaaccaaattccagaatctgtgc

SEQ ID NO: 28204 - DNA, 103 bp, Homo sapiens
  MAP TO AC004896.1; EXPRESSED IN ADULT LIVER, SIGNAL = 0.88; EXPRESSED IN PLACENTA, SIGNAL = 1.3; EXPRESSED IN LUNG, SIGNAL = 1.6; EXPRESSED IN BRAIN, SIGNAL = 1.1; EXPRESSED IN FETAL LIVER, SIGNAL =   1; EXPRESSED IN BONE MARROW, SIGNAL = 0.91; SWISSPROT HIT: P06264, EVALUE 7.20e+00; NT HIT: gi7662349, EVALUE 2.00e-51
actttcagaggccccagaggtccgctgccatcaggatctatccagtaataatttgatgtctgtcctaggtgtttgtaggcttcacaggaaggctcgtagatag

SEQ ID NO: 28205 - DNA, 158 bp, Homo sapiens
  MAP TO AC004994.1; EXPRESSED IN LUNG, SIGNAL = 0.68; EXPRESSED IN FETAL LIVER, SIGNAL =   4; EXPRESSED IN BRAIN, SIGNAL =   1; EXPRESSED IN BONE MARROW, SIGNAL = 0.72; EXPRESSED IN ADULT LIVER, SIGNAL = 0.67; EXPRESSED IN PLACENTA, SIGNAL = 0.78; NT HIT: U68544.1, EVALUE 1.40e+00; EST_HUMAN HIT: BE296457.1, EVALUE 2.10e+00; SWISSPROT HIT: P24540, EVALUE 1.30e+00
ataagggacccaaagcccaagatcccacagctaagaagtatcacaaccaagactggcaccaatctagctcttcaccagtgcacagggctgcttttcataacatggtctgtatgtatctggataaaaaaactgaatactcttcagcaggtgttaacaag

SEQ ID NO: 28206 - DNA, 89 bp, Homo sapiens
  MAP TO AC004864.1; EXPRESSED IN LUNG, SIGNAL = 0.52; EXPRESSED IN BRAIN, SIGNAL = 0.66; EXPRESSED IN BONE MARROW, SIGNAL = 0.53; EXPRESSED IN ADULT LIVER, SIGNAL = 0.45; EXPRESSED IN PLACENTA, SIGNAL = 0.69; NT HIT: Z14133.1, EVALUE 7.30e-01; EST_HUMAN HIT: AA584905.1, EVALUE 4.30e+00
acagatgtgattaagtctgattaatctgattagtcttgggacgggattatccttggctatccaggtggtcctagtgtagtcacaagttc

SEQ ID NO: 28207 - DNA, 115 bp, Homo sapiens
  MAP TO AC005968.1; EXPRESSED IN BRAIN, SIGNAL = 0.64; EXPRESSED IN BONE MARROW, SIGNAL = 0.52; EXPRESSED IN ADULT LIVER, SIGNAL = 0.46; EXPRESSED IN LUNG, SIGNAL = 0.49; NT HIT: AL162757.2, EVALUE 6.40e-02; SWISSPROT HIT: P23715, EVALUE 9.30e+00
aaatcagggttttcgcctttctcagcttctgaaaacaaatccaaaccttcataaatgcattttctattgatccggtggttatgaaaacctttacattttcactagggtctaccat

SEQ ID NO: 28208 - DNA, 187 bp, Homo sapiens
  MAP TO AC005078.1; EXPRESSED IN PLACENTA, SIGNAL = 0.59; EXPRESSED IN BONE MARROW, SIGNAL = 0.58; EXPRESSED IN ADULT LIVER, SIGNAL = 0.62; EXPRESSED IN LUNG, SIGNAL = 0.64; EXPRESSED IN BRAIN, SIGNAL = 0.62; EST_HUMAN HIT: BF369731.1, EVALUE 2.00e-96; NT HIT: gi6753651, EVALUE 4.00e-23; SWISSPROT HIT: P39057, EVALUE 5.00e-19
acagagacagctcgtcttagatatttcatggagttgttgcttgagaaaggaaaacctctaatgctagtaggaaatgcaggagtgggaaaaacagtctttgtaggtgacacattggcaagtctctctgaggattacatagtatcccgtgtgcctttcaactactacacgacatccacagctctgcaaa

SEQ ID NO: 28209 - DNA, 162 bp, Homo sapiens
  MAP TO AC004028.1; EXPRESSED IN PLACENTA, SIGNAL = 0.61; EXPRESSED IN LUNG, SIGNAL = 0.77; EXPRESSED IN BRAIN, SIGNAL = 0.57; EXPRESSED IN ADULT LIVER, SIGNAL = 0.59; EXPRESSED IN BONE MARROW, SIGNAL = 0.63; EST_HUMAN HIT: AI242219.1, EVALUE 9.00e-03; SWISSPROT HIT: Q55610, EVALUE 4.00e+00
gatgctatatgtatgaatgatcatgttaaagctttgaaaactgtttttggaattgagaaaatgaaacaccgtttagctctacttcacagaattcttcttactgtacttatcaaggaaaaaacgaaatttaagcagaatctcagaatgttttgcccttatagt

SEQ ID NO: 28210 - DNA, 84 bp, Homo sapiens
  MAP TO AC005083.1; EXPRESSED IN PLACENTA, SIGNAL = 0.78; EXPRESSED IN BRAIN, SIGNAL = 0.69; EXPRESSED IN BONE MARROW, SIGNAL = 0.61; EXPRESSED IN ADULT LIVER, SIGNAL = 0.62; EXPRESSED IN LUNG, SIGNAL = 0.78; NT HIT: AF231022.1, EVALUE 6.80e-01; EST_HUMAN HIT: AA196149.1, EVALUE 2.60e-01
gcagcagcaataaatatttgctggttctcgaaaggagggtcaaagcttccaacttcggagccctcagtagcagcagtagctagt

SEQ ID NO: 28211 - DNA, 426 bp, Homo sapiens
  MAP TO AC004957.1; EXPRESSED IN BRAIN, SIGNAL = 0.58; EXPRESSED IN ADULT LIVER, SIGNAL = 0.63; EXPRESSED IN PLACENTA, SIGNAL = 0.63; EXPRESSED IN LUNG, SIGNAL = 0.66; EXPRESSED IN BONE MARROW, SIGNAL = 0.66; EST_HUMAN HIT: BF229235.1, EVALUE 0.00e+00; SWISSPROT HIT: O95025, EVALUE 2.00e-80; NT HIT: U28240.1, EVALUE 1.00e-21
ctacgtggctacagctctagggagctcatccaggtctctgtgatgtcttcgatttcgtttcttcttcatttcctgcatgtgcttccactttgggccccccttgtttctctgtctccgcttctccctgtgccacatctgttcgcagtactggtcgaggctgaagtttgggctgctaaggatttggatgtagtctttgtatctcaaccgtgactcagccaatagatccttgaccttcccctcctcatgctctgccctctgggtattttccatctgttcattctcaatgacattcaaagtcagcttcactatggtgtggatgaaagtgtgctcctgggctttgcagtaatacatcccagaatccttcttctgcaaacttcgaatcagtagcccatattccgttttgatgattctttcatcgggcttcaa

SEQ ID NO: 28212 - DNA, 107 bp, Homo sapiens
  MAP TO AC004849.1; EXPRESSED IN PLACENTA, SIGNAL = 0.67; EXPRESSED IN ADULT LIVER, SIGNAL = 0.62; EXPRESSED IN LUNG, SIGNAL = 0.64; EXPRESSED IN BRAIN, SIGNAL = 0.68; EXPRESSED IN BONE MARROW, SIGNAL = 0.66; EST_HUMAN HIT: BE883178.1, EVALUE 4.00e-44; SWISSPROT HIT: P36667, EVALUE 5.50e+00; NT HIT: AL139075.2, EVALUE 9.10e-01
cttgtatctgaacatgcctttgaaattccagacaatgttagacctggacaccttattaaagaactttctaaagtaattcgagcaatagaggtaagagtggaaactgt

SEQ ID NO: 28213 - DNA, 238 bp, Homo sapiens
  MAP TO AC004804.1; EXPRESSED IN BONE MARROW, SIGNAL = 0.81; EXPRESSED IN PLACENTA, SIGNAL = 0.91; EXPRESSED IN LUNG, SIGNAL = 0.81; EXPRESSED IN FETAL LIVER, SIGNAL = 0.73; EXPRESSED IN ADULT LIVER, SIGNAL = 0.9; EXPRESSED IN BRAIN, SIGNAL = 0.8; SWISSPROT HIT: Q61982, EVALUE 3.90e-01; NT HIT: gi8922570, EVALUE 9.00e-03; EST_HUMAN HIT: AA365112.1, EVALUE 2.10e-01
gcagctagtggcaagaggcctctgttcctctccaccgggctgcttgagtgtcattacaacacggaggctggctctcaccagggcaagtgattcaggagtgcaaggcagttgcatcagtatcttttgtgatgtagcttcagaagccggcgccatcacttctgccttcttgtacggttcatacagaccaatcctgacagggtgcgggagaggactacacaagggcatgaacgccaggagg

SEQ ID NO: 28214 - DNA, 458 bp, Homo sapiens
  MAP TO AC002044.1; EXPRESSED IN BRAIN, SIGNAL = 0.67; EXPRESSED IN HELA, SIGNAL = 2.2; EXPRESSED IN PLACENTA, SIGNAL = 0.8; EXPRESSED IN LUNG, SIGNAL = 0.83; EXPRESSED IN BONE MARROW, SIGNAL = 0.81; EXPRESSED IN ADULT LIVER, SIGNAL = 0.71; EXPRESSED IN FETAL LIVER, SIGNAL = 0.82; SWISSPROT HIT: P28167, EVALUE 2.00e-29; NT HIT: L32832.1, EVALUE 0.00e+00; EST_HUMAN HIT: AW296207.1, EVALUE 6.00e-25
ggcagctggtgtcagaggagctgatgaacctgggcgagagcttcatccagaccaacgacccgtcgctgaagctcttccagtgcgccgtctgcaacaagttcacgacggacaacctggacatgctgggcctgcacatgaacgtggagcgcagcctgtcggaggacgagtggaaggcggtgatgggggactcataccagtgcaagctctgccgctacaacacccagctcaagtccaacttccagctgcactgcaagacagacaagcacgtgcagaagtaccagctggtggcccacatcaaggagggcggcaaggccaacgagtggaggctcaagtgtgtggccatcggcaaccccgtgcacctcaagtgcaacgcctgtgactactacaccaacagcctggagaagctgcggctgcacacggtcaactccaggcacgaggccagcctgaagttgtacaag

SEQ ID NO: 28215 - DNA, 154 bp, Homo sapiens
  MAP TO AC004811.2; EXPRESSED IN LUNG, SIGNAL = 0.99; EXPRESSED IN BONE MARROW, SIGNAL = 1.1; EXPRESSED IN ADULT LIVER, SIGNAL = 0.95; EXPRESSED IN PLACENTA, SIGNAL = 0.9; EXPRESSED IN FETAL LIVER, SIGNAL = 1.1; EXPRESSED IN BRAIN, SIGNAL = 0.81; EST_HUMAN HIT: BF380737.1, EVALUE 2.00e-22; NT HIT: AF086824.1, EVALUE 2.00e-24; SWISSPROT HIT: P53894, EVALUE 8.00e-05
agttacgaatgttgttccagtcaattttagagaagaaaggatggcagcaaagaccttcaaacttcagtctctctttctggccgcacaacaagctttgaatcagatcaagaaagtcactgctcactttggggtcatctggaaatttcaaaaaccg

SEQ ID NO: 28216 - DNA, 219 bp, Homo sapiens
  MAP TO AC006324.2; EXPRESSED IN PLACENTA, SIGNAL = 0.58; EXPRESSED IN ADULT LIVER, SIGNAL = 0.73; EXPRESSED IN LUNG, SIGNAL = 0.67; EXPRESSED IN BRAIN, SIGNAL = 0.65; EXPRESSED IN BONE MARROW, SIGNAL = 0.56; EST_HUMAN HIT: AW892554.1, EVALUE 2.00e-04; SWISSPROT HIT: P08548, EVALUE 1.00e-10; NT HIT: AF111167.2, EVALUE 8.00e-03
catctgccagtgattgaaaaaccaagcaagcaggacatcagtaaggatatagttgactcgaatagcaccacgaatcagtttaacctaattgacatttatacaatagtccatctaacaagagcaagcgatatgttcttctcaaactcacctggaacagtcatcaagatagaccacattgtgggctataaaatgcactttaataaaatgatagaactcatg

SEQ ID NO: 28217 - DNA, 240 bp, Homo sapiens
  MAP TO AC004770.1; EXPRESSED IN PLACENTA, SIGNAL = 1.3; EXPRESSED IN ADULT LIVER, SIGNAL = 1.4; EXPRESSED IN LUNG, SIGNAL = 1.3; EXPRESSED IN FETAL LIVER, SIGNAL = 1.7; EXPRESSED IN BRAIN, SIGNAL = 1.2; EXPRESSED IN BONE MARROW, SIGNAL = 1.1; NT HIT: AF084558.1, EVALUE 1.00e-108; SWISSPROT HIT: O25686, EVALUE 3.50e+00; EST_HUMAN HIT: BE252607.1, EVALUE 1.00e-108
aaagagctgacagatgagttccgggagctgcgggccacagtggagcggatggggctcatgaaggccaaccatgtcttcttcctgctgtacctgctgcacatcttgctgctggatggtgcagcctggctcaccctttgggtctttgggacgtcctttttgcccttcctcctctgtgcggtgctgctcagtgcagttcaggtgagagcctttggcttgtcaagtgcacagcaatgctcagca

SEQ ID NO: 28218 - DNA, 327 bp, Homo sapiens
  MAP TO AC000005.1; EXPRESSED IN BRAIN, SIGNAL = 0.65; EXPRESSED IN PLACENTA, SIGNAL = 0.58; EXPRESSED IN LUNG, SIGNAL = 0.49; EXPRESSED IN BONE MARROW, SIGNAL = 0.55; EXPRESSED IN ADULT LIVER, SIGNAL = 0.54; SWISSPROT HIT: O52055, EVALUE 4.80e+00; EST_HUMAN HIT: AJ003536.1, EVALUE 2.00e-24
agtgtcagcttcaaggagcaagggaagctcagttcttccagtcctggggcacgaggaggaggagggagggcgaggaagggaagcctagcggccgcacacttgtcatagtctctctcacagctaacattgtggagcgggagcctctgcaaaatgggctttttttctgccccctgcttggaatcattggaggaggccccatttcagaatgggagtgtgggtgggtactgaaggaacacacgtggctggaggaaggtgggatggatgagcacacgctgggattcctcacagccttcatctcctccatggtgtggaggggacccaggatcc

SEQ ID NO: 28219 - DNA, 360 bp, Homo sapiens
  MAP TO AC004816.1; EXPRESSED IN PLACENTA, SIGNAL = 1.2; EXPRESSED IN LUNG, SIGNAL = 1.3; EXPRESSED IN FETAL LIVER, SIGNAL = 1.2; EXPRESSED IN ADULT LIVER, SIGNAL = 1.2; EXPRESSED IN BRAIN, SIGNAL = 1.4; EXPRESSED IN BONE MARROW, SIGNAL = 1.4; EST_HUMAN HIT: T12113.1, EVALUE 5.20e+00; NT HIT: AE000906.1, EVALUE 8.90e-01; SWISSPROT HIT: P16724, EVALUE 1.70e-01
atgaggacagtgaaggcccagggagtggagagagtcgcctacagcattcacccagccagtcctacctctgtatcccattccctcgtggagaggatggcgatggcccctccagtgatggaatccatgaggagcccaccccagtcaactcggccacgagtacccctcagctgacgccaaccaacagcctcaagcggggcggtgcccaccaccgccgctgcgaggtggctctgctcggctgtggggctgttctggcagccacaggcctagggtttgacttgctggaagctggcaagtgccagctgcttcccctggaggagcctgagccaccagcccgggaggagaagaaaagacgggagggtc

SEQ ID NO: 28220 - DNA, 168 bp, Homo sapiens
  MAP TO AC006251.3; EXPRESSED IN FETAL LIVER, SIGNAL = 0.99; EXPRESSED IN PLACENTA, SIGNAL = 0.98; EXPRESSED IN LUNG, SIGNAL =   1; EXPRESSED IN BRAIN, SIGNAL = 0.77; EXPRESSED IN BONE MARROW, SIGNAL = 0.94; EXPRESSED IN ADULT LIVER, SIGNAL = 0.93; NT HIT: X54133.1, EVALUE 9.80e-02; SWISSPROT HIT: P44427, EVALUE 3.90e+00
caggattggttcaccactcagtgttttaatcagggccccagagtgtctcctctccatgctcaccatctttaatctgttggcttttgtccccatacttgttcctgtgtggctggttccttttagctgccaaactttagacatcacttccacctgcagggcaggaagaag

SEQ ID NO: 28221 - DNA, 127 bp, Homo sapiens
  MAP TO AC004861.1; EXPRESSED IN BONE MARROW, SIGNAL = 0.77; EXPRESSED IN LUNG, SIGNAL = 0.43; EXPRESSED IN BRAIN, SIGNAL = 0.58; SWISSPROT HIT: O75841, EVALUE 9.20e+00; NT HIT: X69980.1, EVALUE 2.80e-01
cttttagtctctgttgtagcggcttttggtagatattaaaatcttggcatctttgcttgatatccttacgtgtcctctctttttccatatatgctgcattaacaatttcctgcttcactgctccttc

SEQ ID NO: 28222 - DNA, 76 bp, Homo sapiens
  MAP TO AC005063.1; EXPRESSED IN FETAL LIVER, SIGNAL = 0.8; EXPRESSED IN BONE MARROW, SIGNAL = 0.83; EXPRESSED IN LUNG, SIGNAL = 0.68; EXPRESSED IN BRAIN, SIGNAL = 0.86; EXPRESSED IN ADULT LIVER, SIGNAL = 0.82; EXPRESSED IN PLACENTA, SIGNAL = 0.99; SWISSPROT HIT: Q01410, EVALUE 7.40e+00; NT HIT: AB033105.1, EVALUE 1.00e-35; EST_HUMAN HIT: AA385200.1, EVALUE 2.00e-35
tgaaagagaagaaattgaaactgcacaggcttacctagagtcatcagaagcactatataatcagtatatgaaagag

SEQ ID NO: 28223 - DNA, 94 bp, Homo sapiens
  MAP TO AC006375.2; EXPRESSED IN PLACENTA, SIGNAL = 0.7; EXPRESSED IN LUNG, SIGNAL = 0.57; EXPRESSED IN BRAIN, SIGNAL = 0.73; EXPRESSED IN ADULT LIVER, SIGNAL = 0.68; EXPRESSED IN BONE MARROW, SIGNAL = 0.62; EST_HUMAN HIT: T05124.1, EVALUE 5.00e-03
tatcaccaggtagaaggaagaggccaggagggtgatgtggaagacgatgggttacagaagacagataaagccacagtaattatcacagagcagg

SEQ ID NO: 28224 - DNA, 103 bp, Homo sapiens
  MAP TO AC004911.1; EXPRESSED IN PLACENTA, SIGNAL = 0.62; EXPRESSED IN ADULT LIVER, SIGNAL = 0.66; EXPRESSED IN LUNG, SIGNAL = 0.73; EXPRESSED IN BRAIN, SIGNAL = 0.63; EXPRESSED IN BONE MARROW, SIGNAL = 0.59; NT HIT: AE000035.2, EVALUE 2.20e-01; SWISSPROT HIT: P17652, EVALUE 9.40e+00; EST_HUMAN HIT: BE968333.1, EVALUE 3.30e-01
agaaaattattgccacactgacaagaaaaagttggatatcttccaaaatcatgattattttaagcccatcagagagctgatgtcacaaaataaccaaatgaac

SEQ ID NO: 28225 - DNA, 148 bp, Homo sapiens
  MAP TO AC004686.1; EXPRESSED IN PLACENTA, SIGNAL = 0.69; EXPRESSED IN LUNG, SIGNAL = 0.55; EXPRESSED IN FETAL LIVER, SIGNAL = 0.77; EXPRESSED IN BRAIN, SIGNAL = 0.58; EXPRESSED IN ADULT LIVER, SIGNAL = 0.59; EXPRESSED IN BONE MARROW, SIGNAL = 0.58; EST_HUMAN HIT: BE514195.1, EVALUE 5.00e-78; NT HIT: gi4506736, EVALUE 4.00e-78; SWISSPROT HIT: P21425, EVALUE 4.00e-22
cactgagatactcaaggatgaggtagagttttccaccagtctgaaaggcataaattaaatccacgatgaagggatgctttacttcctccagaatattccgttctgcttttgtatgagctgtatctttagcatttcttactatcattgc

SEQ ID NO: 28226 - DNA, 313 bp, Homo sapiens; identical to SEQ ID NO: 25335
  MAP TO AC000097.1; EXPRESSED IN PLACENTA, SIGNAL = 0.9; EXPRESSED IN LUNG, SIGNAL =   1; EXPRESSED IN FETAL LIVER, SIGNAL = 0.98; EXPRESSED IN BRAIN, SIGNAL = 1.2; EXPRESSED IN BONE MARROW, SIGNAL = 1.2; EXPRESSED IN ADULT LIVER, SIGNAL = 0.79; EST_HUMAN HIT: BF306996.1, EVALUE 0.00e+00; SWISSPROT HIT: P35085, EVALUE 3.60e-01

SEQ ID NO: 28227 - DNA, 246 bp, Homo sapiens
  MAP TO AC005209.1; EXPRESSED IN ADULT LIVER, SIGNAL = 0.89; EXPRESSED IN PLACENTA, SIGNAL = 0.9; EXPRESSED IN LUNG, SIGNAL = 1.1; EXPRESSED IN FETAL LIVER, SIGNAL = 0.85; EXPRESSED IN BRAIN, SIGNAL =   1; EXPRESSED IN BONE MARROW, SIGNAL = 0.98; SWISSPROT HIT: P23098, EVALUE 1.00e-30; EST_HUMAN HIT: AI286148.1, EVALUE 3.00e-25; NT HIT: AF257737.1, EVALUE 1.00e-126
aacattcacctggtggccaagtggctcagcaccctggagaagaagctggaggagcacagtgagaacagccacccagagttcagggtcttcatgagtgcagagccagcaccctcccctgagggccacatcatcccccagggcatcctggagaactccattaagatcaccaatgagccccccacgggcatgcatgccaacctgcacaaggccctggacaacttcactcaggtacggccccgggaggga

SEQ ID NO: 28228 - DNA, 81 bp, Homo sapiens
  MAP TO AC003119.1; EXPRESSED IN LUNG, SIGNAL = 0.57; EXPRESSED IN BRAIN, SIGNAL = 0.55; EXPRESSED IN BONE MARROW, SIGNAL = 0.55; EXPRESSED IN ADULT LIVER, SIGNAL = 0.46; SWISSPROT HIT: P36508, EVALUE 4.30e+00; NT HIT: L13452.1, EVALUE 6.50e-01; EST_HUMAN HIT: N48732.1, EVALUE 2.40e-01
gaagacggggtgggggtgaagaaccctatcgtgcaggtgaagaaacgtgttcaaaaccttacactactaggtaagggtcac

SEQ ID NO: 28229 - DNA, 206 bp, Homo sapiens
  MAP TO AC004228.2; EXPRESSED IN PLACENTA, SIGNAL = 0.73; EXPRESSED IN LUNG, SIGNAL = 1.6; EXPRESSED IN FETAL LIVER, SIGNAL = 1.1; EXPRESSED IN BRAIN, SIGNAL = 0.84; EXPRESSED IN ADULT LIVER, SIGNAL = 1.1; EXPRESSED IN BONE MARROW, SIGNAL = 0.68; EST_HUMAN HIT: BF528912.1, EVALUE 1.00e-108; NT HIT: AF084559.1, EVALUE 1.00e-108; SWISSPROT HIT: Q89420, EVALUE 6.50e+00
tcaaagatcactgaggacttccgggccctgaggaagacggctgaggacatgaacctgttcaagaccaaccacgtgttcttcctcctcctcctggcccacatcatcgccctggagagcattgcatggttcactgtcttttactttggcaatggctggattcctaccctcatcacggcctttgtccttgctacctctcaggtgaggcg

SEQ ID NO: 28230 - DNA, 247 bp, Homo sapiens
  MAP TO AC006347.2; EXPRESSED IN ADULT LIVER, SIGNAL = 1.3; EXPRESSED IN PLACENTA, SIGNAL = 1.1; EXPRESSED IN LUNG, SIGNAL = 1.1; EXPRESSED IN BRAIN, SIGNAL = 0.92; EXPRESSED IN FETAL LIVER, SIGNAL = 1.5; EXPRESSED IN BONE MARROW, SIGNAL = 1.2; EST_HUMAN HIT: AU118767.1, EVALUE 0.00e+00; NT HIT: X65187.1, EVALUE 0.00e+00; SWISSPROT HIT: P15056, EVALUE 1.00e-16
tgggcaggaagactctaacgataggtttttgtggtgacttggggttgctccgtgccacatctgtgggattttgaaaaactgaaagagatgaaggtagcactgaaaggctagaagaggaagaagatgtaacggtatccattgatgcagagctagaaacagaaaaatcagttccgttccccagagattccaataactgttgttctctttgttggagtgcatctagcttgctggtgtattcttcataggc

SEQ ID NO: 28231 - DNA, 220 bp, Homo sapiens
  MAP TO AC005215.1; EXPRESSED IN PLACENTA, SIGNAL = 0.63; EXPRESSED IN LUNG, SIGNAL = 0.55; EXPRESSED IN BRAIN, SIGNAL = 0.63; EXPRESSED IN ADULT LIVER, SIGNAL = 0.53; NT HIT: AF124162.1, EVALUE 3.30e-02; SWISSPROT HIT: P16479, EVALUE 2.70e+00
ggccatggtccttcagaagagtccagagagcctcaaggcactacaggctgttcagtgcgtgcaagaaatctgtggttaatcacttcaacctgctttacttcaacagattttcggagacctgtttattgttccactgcttggctactctggagttatctatgaccgaagtcttacatttgtttgcagagcagaagaaggtatatttttattctcacatccc

SEQ ID NO: 28232 - DNA, 133 bp, Homo sapiens
  MAP TO AC006354.2; EXPRESSED IN LUNG, SIGNAL = 0.49; EXPRESSED IN BRAIN, SIGNAL = 0.65; EXPRESSED IN BONE MARROW, SIGNAL = 0.55; EXPRESSED IN PLACENTA, SIGNAL = 0.7; EXPRESSED IN ADULT LIVER, SIGNAL = 0.57; EST_HUMAN HIT: D59641.1, EVALUE 6.90e+00; NT HIT: AE001862.1, EVALUE 1.20e+00; SWISSPROT HIT: O47477, EVALUE 8.10e-01
gaactccaggagaaaatgtagtcttatgccagaactgacgctgctgctgatgataatctggatacatttgaaggggtgcagggaaattacactgggtgcctctctgaacatcctgagaagcacaacctactgg

SEQ ID NO: 28233 - DNA, 178 bp, Homo sapiens
  MAP TO AC006388.3; EXPRESSED IN PLACENTA, SIGNAL = 0.76; EXPRESSED IN LUNG, SIGNAL = 0.72; EXPRESSED IN FETAL LIVER, SIGNAL = 1.7; EXPRESSED IN ADULT LIVER, SIGNAL = 1.5; EXPRESSED IN BRAIN, SIGNAL =   2; EXPRESSED IN BONE MARROW, SIGNAL = 0.7; SWISSPROT HIT: P35214, EVALUE 2.00e-27; EST_HUMAN HIT: AW161075.1, EVALUE 8.00e-96; NT HIT: AB024334.1, EVALUE 5.00e-96
gtgacagagctgaatgagccactgtcgaatgaggaacgaaaccttctgtctgtggcctacaagaacgttgtgggggcacgccgctcttcctggagggtcatcagtagcattgagcagaagacatctgcagacggcaatgagaagaagattgagatggtccgtgcgtaccgggagaaga

SEQ ID NO: 28234 - DNA, 178 bp, Homo sapiens
  MAP TO AC005219.1; EXPRESSED IN ADULT LIVER, SIGNAL = 1.4; EXPRESSED IN LUNG, SIGNAL = 0.61; EXPRESSED IN FETAL LIVER, SIGNAL = 1.8; EXPRESSED IN BRAIN, SIGNAL = 0.67; EXPRESSED IN BONE MARROW, SIGNAL = 0.69; EXPRESSED IN PLACENTA, SIGNAL = 0.76; SWISSPROT HIT: Q15582, EVALUE 2.00e-08; EST_HUMAN HIT: AA853319.1, EVALUE 1.00e-51; NT HIT: gi11416585, EVALUE 8.00e-52
gccacatgaagaaaaggactggctgcagagtcagtggggatgcgacacttacctggaggctgcagaacattggtgatgacatggaccacgccatttgtggccatgatgtcaggctcggcaacaggctccttgttgacactcaccacattgtttttctaaaagaaaaacagagtagtgg

SEQ ID NO: 28235 - DNA, 91 bp, Homo sapiens
  MAP TO AC003667.1; EXPRESSED IN FETAL LIVER, SIGNAL = 0.74; EXPRESSED IN BONE MARROW, SIGNAL = 0.78; EXPRESSED IN LUNG, SIGNAL = 0.83; EXPRESSED IN BRAIN, SIGNAL =   1; EXPRESSED IN ADULT LIVER, SIGNAL = 0.85; EXPRESSED IN PLACENTA, SIGNAL = 0.8; NT HIT: AF052730.1, EVALUE 7.50e-01
catcatcaacttaaataccacagttatttcaacagctgagtcagtgcttatgaaacatattagctggaatgcaaccaagaccataagcttc

SEQ ID NO: 28236 - DNA, 440 bp, Homo sapiens
  MAP TO AC005225.2; EXPRESSED IN PLACENTA, SIGNAL = 0.66; EXPRESSED IN LUNG, SIGNAL = 0.8; EXPRESSED IN BRAIN, SIGNAL = 0.68; EXPRESSED IN FETAL LIVER, SIGNAL = 0.68; EXPRESSED IN BONE MARROW, SIGNAL = 0.63; EXPRESSED IN ADULT LIVER, SIGNAL = 0.64; SWISSPROT HIT: Q15477, EVALUE 4.00e-01; EST_HUMAN HIT: W28834.1, EVALUE 2.00e-09; NT HIT: gi6978424, EVALUE 2.80e-01
ctctcatccatcatccctgcatgcatccagatatgctgggtcggccaccttctctagatgtgaacctggaggaaagagaagcctggcttctgcctcctgagaaggaggccagagcgtgggaggccactgtgctggaaaagctgaacgagcgcacagcccgatggatccagagcaagcgtcctcgaaggcctggggcatcccccaacaagtggcagagcttcctgcgccagcagtacgactggagtcacattcgggatgagcttacctctgccagtgacctggagctcctgaaacagctggaggcagaagagacagcagagtttgaggatcaaagtgtcatcctgcccccacaggaaaagaagaagccagaactgctgcttcccgtttactacaggtatactggccagggcctcaagtgcacctttgataatccctgactc

SEQ ID NO: 28237 - DNA, 120 bp, Homo sapiens
  MAP TO AC004977.1; EXPRESSED IN PLACENTA, SIGNAL = 0.85; EXPRESSED IN BRAIN, SIGNAL = 0.74; EXPRESSED IN BONE MARROW, SIGNAL = 0.68; EXPRESSED IN ADULT LIVER, SIGNAL = 0.79; EXPRESSED IN LUNG, SIGNAL = 0.79; EST_HUMAN HIT: BE145370.1, EVALUE 9.90e-02; NT HIT: X92109.1, EVALUE 4.00e-03
attttgcagagcggggaagggtcgactctggaaacgtttcatttgtctattggccatttggatttcttctgtgaagtgccttttcatgactatcatctatattctcttaagtttgtcctt

SEQ ID NO: 28238 - DNA, 102 bp, Homo sapiens
  MAP TO AC006262.1; EXPRESSED IN PLACENTA, SIGNAL = 0.64; EXPRESSED IN LUNG, SIGNAL = 0.71; EXPRESSED IN BRAIN, SIGNAL = 0.78; EXPRESSED IN ADULT LIVER, SIGNAL = 0.63; EXPRESSED IN BONE MARROW, SIGNAL = 0.81; SWISSPROT HIT: P40594, EVALUE 5.50e+00; NT HIT: AE000591.1, EVALUE 8.60e-01
tgtcatgttctcagacagctcaaaactcagggcatgaaggacattttctccggtattcactgtgagaacctcatagggttcctggaggtaaaactcttagaa

SEQ ID NO: 28239 - DNA, 234 bp, Homo sapiens
  MAP TO AC005015.2; EXPRESSED IN PLACENTA, SIGNAL =   1; EXPRESSED IN LUNG, SIGNAL = 0.87; EXPRESSED IN FETAL LIVER, SIGNAL = 0.78; EXPRESSED IN ADULT LIVER, SIGNAL = 0.8; EXPRESSED IN BRAIN, SIGNAL = 2.5; EXPRESSED IN BONE MARROW, SIGNAL = 0.78; EST_HUMAN HIT: AA077633.1, EVALUE 1.00e-115; SWISSPROT HIT: O42184, EVALUE 1.00e-11; NT HIT: AF041056.1, EVALUE 1.00e-129
caggccactgcggctgggccgaccccccacggaggaggccacagagctgacggagctgatggaggaactgctgggactgtgggtcagtgctgacacacccatggccatacgcttggtcttcttggccttggctgggctggtagatgggaagccgatacggatcactttgtggatgggcgcgaagagaccaaacttgggtgggcactggaagtacctgtggaagcaggagagacc

SEQ ID NO: 28240 - DNA, 151 bp, Homo sapiens
  MAP TO AC005875.1; EXPRESSED IN BRAIN, SIGNAL = 0.72; EXPRESSED IN BONE MARROW, SIGNAL = 0.61; EXPRESSED IN ADULT LIVER, SIGNAL = 0.75; EXPRESSED IN PLACENTA, SIGNAL = 0.68; EXPRESSED IN LUNG, SIGNAL = 0.82; EST_HUMAN HIT: AA868017.1, EVALUE 3.00e-30; NT HIT: AL163202.2, EVALUE 2.00e-39; SWISSPROT HIT: P16157, EVALUE 1.80e-02
caccacgtgacagcagttttgccaccactgacaaattctcactataaacagcataatggagagccatgttgccatacacatctacaatatttggactgggaccagaatctaccagaatatttgcacaagcctccctccagcattgtagagc

SEQ ID NO: 28241 - DNA, 204 bp, Homo sapiens
  MAP TO AC005020.1; EXPRESSED IN LUNG, SIGNAL = 0.83; EXPRESSED IN BONE MARROW, SIGNAL = 0.58; EXPRESSED IN ADULT LIVER, SIGNAL =  13; EXPRESSED IN PLACENTA, SIGNAL = 0.7; EXPRESSED IN FETAL LIVER, SIGNAL = 3.5; EXPRESSED IN BRAIN, SIGNAL = 0.62; NT HIT: gi4503230, EVALUE 1.00e-111; SWISSPROT HIT: P20815, EVALUE 3.00e-35; EST_HUMAN HIT: AI761228.1, EVALUE 1.00e-111
ggtacagatggagtaccttgacatggtggtgaatgaaacactcagattattcccagttgctattagacttgagaggacttgcaagaaagatgttgaaatcaatggggtattcattcccaaagggtcaatggtggtgattccaacttatgctcttcaccatgacccaaagtactggacagagcctgaggagttccgccctgaaag

SEQ ID NO: 28242 - DNA, 183 bp, Homo sapiens
  MAP TO AC006212.1; EXPRESSED IN PLACENTA, SIGNAL = 0.85; EXPRESSED IN ADULT LIVER, SIGNAL = 4.7; EXPRESSED IN LUNG, SIGNAL = 0.79; EXPRESSED IN FETAL LIVER, SIGNAL = 2.4; EXPRESSED IN BRAIN, SIGNAL = 0.76; EXPRESSED IN BONE MARROW, SIGNAL = 0.78; EST_HUMAN HIT: AW178398.1, EVALUE 1.00e-02; NT HIT: AL161566.2, EVALUE 4.00e-04
acttattcggtgcctttggacagtgtatccaatgcctccagtttctatgtcctcatttatgaaatagccacagtaatagaacatagcaagcactgcataaacactatggtcttcctcatcaccatcctcatcttcatcctcaccatcaccgtcgccaatcagagcaatggaaaagcacattaa

SEQ ID NO: 28243 - DNA, 105 bp, Homo sapiens
  MAP TO AC005704.1; EXPRESSED IN PLACENTA, SIGNAL = 0.72; EXPRESSED IN LUNG, SIGNAL = 0.71; EXPRESSED IN BONE MARROW, SIGNAL = 0.68; EXPRESSED IN BRAIN, SIGNAL = 0.69; EXPRESSED IN ADULT LIVER, SIGNAL = 0.78; SWISSPROT HIT: P36372, EVALUE 7.20e+00; NT HIT: D78003.1, EVALUE 5.70e-02
gaattactgccaggattctggaagccagccagccccaggaggccgaactgcccctatagatttttatgctttgagcagagagctaccaacaggtggcgacaaact

SEQ ID NO: 28244 - DNA, 159 bp, Homo sapiens
  MAP TO AC006305.1; EXPRESSED IN BONE MARROW, SIGNAL = 0.81; EXPRESSED IN PLACENTA, SIGNAL = 0.59; EXPRESSED IN LUNG, SIGNAL = 0.45; EXPRESSED IN BRAIN, SIGNAL = 0.55; EXPRESSED IN ADULT LIVER, SIGNAL = 0.55; SWISSPROT HIT: P47281, EVALUE 3.50e-01
gcctctcctaacctgctcaaaaaggccctccagcaggcaattggggtatactatagaatcaaccaacagaaacgcaaagctatctccaccgtggctacaaatgatatcacaatgaggcgtgcatctgctttgctgaggatacctgtgattgttaataaa

SEQ ID NO: 28245 - DNA, 153 bp, Homo sapiens
  MAP TO AC005066.1; EXPRESSED IN ADULT LIVER, SIGNAL = 0.7; EXPRESSED IN PLACENTA, SIGNAL = 0.71; EXPRESSED IN LUNG, SIGNAL = 0.76; EXPRESSED IN BRAIN, SIGNAL = 0.57; EXPRESSED IN BONE MARROW, SIGNAL = 0.86; EST_HUMAN HIT: H30876.1, EVALUE 5.20e-01; SWISSPROT HIT: P08240, EVALUE 1.80e+00; NT HIT: D17520.1, EVALUE 8.80e-02
acatcaggctacactgccttaggccttgctgggttcctagatgagtgtgacagaggaattggggaagagatgaaacactttgcacacaacagatcaaaggctgaggggctgtcaaaggaaggcactgggggaccactagtagtggccaaagga

SEQ ID NO: 28246 - DNA, 126 bp, Homo sapiens
  MAP TO AC006377.3; EXPRESSED IN ADULT LIVER, SIGNAL = 0.67; EXPRESSED IN PLACENTA, SIGNAL = 0.65; EXPRESSED IN LUNG, SIGNAL = 0.68; EXPRESSED IN BRAIN, SIGNAL = 0.97; EXPRESSED IN BONE MARROW, SIGNAL = 0.58; SWISSPROT HIT: Q14123, EVALUE 1.00e-17; EST_HUMAN HIT: N59154.1, EVALUE 9.00e-61; NT HIT: U40372.1, EVALUE 4.00e-65
cagtcatcctttgagaggttaatcaaaatattcatttcctcgtcatcttgcagaaggcgataagctgcacttaaatggtgattctccagtacagatctgtcattatacagaatagctggatcagac

SEQ ID NO: 28247 - DNA, 212 bp, Homo sapiens
  MAP TO AC005195.1; EXPRESSED IN PLACENTA, SIGNAL = 0.96; EXPRESSED IN LUNG, SIGNAL = 0.82; EXPRESSED IN BRAIN, SIGNAL = 0.92; EXPRESSED IN BONE MARROW, SIGNAL = 0.85; EXPRESSED IN FETAL LIVER, SIGNAL = 0.77; EXPRESSED IN ADULT LIVER, SIGNAL = 0.84; EST_HUMAN HIT: N52447.1, EVALUE 3.00e+00; SWISSPROT HIT: P07566, EVALUE 2.00e+00
atatgttaattctcagaggttcagtggctgcctgatggtgaaagaagagaaattgttggggaggagggggaataggggcagaactcatctctccccacagaaggtcaagaggccacccaccgcccagccccagaagaccacctcaaactctgctgccctccaggaggaggggatgcctcctctgatgtgacgttgtctgctttggccttcca

SEQ ID NO: 28248 - DNA, 138 bp, Homo sapiens
  MAP TO AC005029.1; EXPRESSED IN PLACENTA, SIGNAL = 0.95; EXPRESSED IN LUNG, SIGNAL = 0.86; EXPRESSED IN FETAL LIVER, SIGNAL = 1.3; EXPRESSED IN BRAIN, SIGNAL = 1.1; EXPRESSED IN BONE MARROW, SIGNAL = 1.1; EXPRESSED IN ADULT LIVER, SIGNAL = 0.98; SWISSPROT HIT: Q45755, EVALUE 1.00e+00; EST_HUMAN HIT: BE258069.1, EVALUE 7.20e+00; NT HIT: AP000004.1, EVALUE 2.00e-02
accccctcccatcttcatttcccttcccttcgccatggctgacaggcataactttccattctttctgaatgcttatcccaaagtagccatgagtgactttcctgatactgcttcgggggtgggataagttcagaagaa

SEQ ID NO: 28249 - DNA, 237 bp, Homo sapiens
  MAP TO AC006238.1; EXPRESSED IN LUNG, SIGNAL = 0.82; EXPRESSED IN FETAL LIVER, SIGNAL = 1.1; EXPRESSED IN BRAIN, SIGNAL = 0.92; EXPRESSED IN PLACENTA, SIGNAL = 2.4; EXPRESSED IN BONE MARROW, SIGNAL = 2.6; EXPRESSED IN ADULT LIVER, SIGNAL = 0.95; EST_HUMAN HIT: AA630331.1, EVALUE 1.00e-124; SWISSPROT HIT: Q13636, EVALUE 4.00e-10; NT HIT: gi11425910, EVALUE 1.00e-117
ccagtgtgctcactcttctcaaagtgaggtgccaggccaccgagcgtagggtccttcagcagtgcacaggatgtgggctctggcttcttcaagtaccgtggaccacggcccttgggtcaacagcaccggcggctggcttgcatggttggcttctcaactttgattgttccattgtttccattttcatgggggtccaagggtgggatctggcggcctgcaacaaaaaggaggccaagg

SEQ ID NO: 28250 - DNA, 202 bp, Homo sapiens
  MAP TO AC005728.1; EXPRESSED IN BONE MARROW, SIGNAL = 0.75; EXPRESSED IN BRAIN, SIGNAL = 0.71; EXPRESSED IN ADULT LIVER, SIGNAL = 0.9; EXPRESSED IN PLACENTA, SIGNAL = 0.72; EXPRESSED IN LUNG, SIGNAL = 0.82; EXPRESSED IN FETAL LIVER, SIGNAL = 0.79; NT HIT: AF213884.1, EVALUE 1.00e-32; EST_HUMAN HIT: AI749952.1, EVALUE 3.00e-37
atataagatggcaaacttaatcgattgtgttctgactgctccaccgaccagcccttcttccatctctctccctctcctcaggcctccctatttccggagacacaacaatattgaaattaggccaattaataaccctaccatggcctctaagtattcaagtgaaaggaagagtcacatatctctcactttaaatcaaaagcta

SEQ ID NO: 28251 - DNA, 212 bp, Homo sapiens
  MAP TO AC004905.1; EXPRESSED IN PLACENTA, SIGNAL = 0.66; EXPRESSED IN LUNG, SIGNAL = 0.67; EXPRESSED IN BONE MARROW, SIGNAL = 0.54; EXPRESSED IN ADULT LIVER, SIGNAL = 0.57; EXPRESSED IN BRAIN, SIGNAL = 0.57; NT HIT: AF020551.1, EVALUE 5.00e-01; SWISSPROT HIT: P02832, EVALUE 4.00e-01; EST_HUMAN HIT: BF216650.1, EVALUE 1.20e-02
tgggaaatgaggagaggggctggggggaagataatatcaacccaggcctcaaaatatttctgttagtgttcaaatctagtatcccacaaataataaaaaatagtgtggcctatgaagagacaacacattatgaacccaaaccagcaaaaacagcagagaacagaaacagacttggagggaattccaatattgaggctatcagacacagactg

SEQ ID NO: 28252 - DNA, 146 bp, Homo sapiens
  MAP TO AC006320.2; EXPRESSED IN LUNG, SIGNAL = 0.76; EXPRESSED IN FETAL LIVER, SIGNAL = 0.95; EXPRESSED IN BRAIN, SIGNAL = 0.75; EXPRESSED IN BONE MARROW, SIGNAL = 0.86; EXPRESSED IN PLACENTA, SIGNAL = 0.87; EXPRESSED IN ADULT LIVER, SIGNAL = 0.94; SWISSPROT HIT: Q01168, EVALUE 2.70e-01; NT HIT: U20734.1, EVALUE 1.30e+00
ctcagtttctcccggagcccaggagctggcttggaccgcagctcctgcagttctggaggctggagaagcctgcgggcgctgcaagccatcccaggagccggctgggggctgccgtagaccatcgggggccaggattccccgccagg

SEQ ID NO: 28253 - DNA, 144 bp, Homo sapiens
  MAP TO AC004958.1; EXPRESSED IN PLACENTA, SIGNAL =   1; EXPRESSED IN LUNG, SIGNAL = 0.97; EXPRESSED IN FETAL LIVER, SIGNAL = 0.94; EXPRESSED IN ADULT LIVER, SIGNAL = 1.1; EXPRESSED IN BRAIN, SIGNAL = 0.86; EXPRESSED IN BONE MARROW, SIGNAL = 0.97; SWISSPROT HIT: Q09461, EVALUE 1.00e-07; NT HIT: gi11419212, EVALUE 8.00e-76; EST_HUMAN HIT: AV706728.1, EVALUE 1.00e-75
cagtaggagcccagcccctccaaagggaaatccaaccatcttcagatactttcttgctgacaaatcgatgcagttccacgtaagaaaacttcttggactgcatcttggttctaatcaattctagtggacttatcacagttactg

SEQ ID NO: 28254 - DNA, 87 bp, Homo sapiens
  MAP TO AC004870.2; EXPRESSED IN PLACENTA, SIGNAL = 1.3; EXPRESSED IN LUNG, SIGNAL = 1.5; EXPRESSED IN FETAL LIVER, SIGNAL = 1.3; EXPRESSED IN BONE MARROW, SIGNAL = 1.5; EXPRESSED IN ADULT LIVER, SIGNAL = 1.3; EXPRESSED IN BRAIN, SIGNAL = 1.1; SWISSPROT HIT: P75080, EVALUE 5.60e+00
catcaggaggtacatgacttgatatgcctcaggatgggtgaggttgactttgatcatgtggttcaggtagtgttggatgggctcctc

SEQ ID NO: 28255 - DNA, 202 bp, Homo sapiens
  MAP TO AC004231.1; EXPRESSED IN ADULT LIVER, SIGNAL = 0.85; EXPRESSED IN PLACENTA, SIGNAL = 0.96; EXPRESSED IN LUNG, SIGNAL = 1.1; EXPRESSED IN BRAIN, SIGNAL = 0.83; EXPRESSED IN BONE MARROW, SIGNAL =   1; EXPRESSED IN FETAL LIVER, SIGNAL = 1.1; NT HIT: gi11425625, EVALUE 1.00e-110; SWISSPROT HIT: P19001, EVALUE 3.00e-03; EST_HUMAN HIT: AU137923.1, EVALUE 1.00e-110
atgaactccggacacagcttcagccagaccccctcggcctccttccatggcgccggaggtggctggggccggcccaggagcttccccagggctcccaccgtccatggcggtgcggggggagcccgcatctccctgtccttcaccacgcggagctgcccaccccctggagggtcttggggttctggaagaagcagccccctac

SEQ ID NO: 28256 - DNA, 149 bp, Homo sapiens
  MAP TO AC005013.1; EXPRESSED IN FETAL LIVER, SIGNAL = 0.89; EXPRESSED IN BONE MARROW, SIGNAL = 0.84; EXPRESSED IN PLACENTA, SIGNAL = 0.63; EXPRESSED IN BRAIN, SIGNAL = 0.79; EXPRESSED IN ADULT LIVER, SIGNAL = 1.1; NT HIT: gi11421735, EVALUE 9.00e-79; SWISSPROT HIT: P04937, EVALUE 9.00e+00; EST_HUMAN HIT: AW151127.1, EVALUE 1.00e-78
ctcctgctagtcctgtcccagcttgctcccagcaacaagtcatccagcataataccatcactacttcctcatcggtcagcgaggtggtaggaagctccaccctcagccagctcaccactcacagaacagacctgaatccgattctttaa

SEQ ID NO: 28257 - DNA, 110 bp, Homo sapiens
  MAP TO AC005873.2; EXPRESSED IN PLACENTA, SIGNAL = 2.4; EXPRESSED IN BRAIN, SIGNAL = 0.6; EXPRESSED IN BONE MARROW, SIGNAL = 0.67; EXPRESSED IN ADULT LIVER, SIGNAL = 0.79; EXPRESSED IN LUNG, SIGNAL = 0.74; EST_HUMAN HIT: AW204958.1, EVALUE 9.00e-05; NT HIT: AF181897.1, EVALUE 2.00e-04
gatcaaggcaccagtaggttcagtgtcttgcaagggcactcatcctactttgcacatggctgtcttctcattgtaccctcacgtggcaaagagcaaagagcaggagccag

SEQ ID NO: 28258 - DNA, 355 bp, Homo sapiens
  MAP TO AC004127.1; EXPRESSED IN BONE MARROW, SIGNAL = 0.59; EXPRESSED IN LUNG, SIGNAL = 0.47; EXPRESSED IN BRAIN, SIGNAL = 0.61; SWISSPROT HIT: Q15034, EVALUE 6.00e-04
gcccagttccccaaaggtcggtgatgggccccagctgatggtgctctcatcggctgccacaatgatgctgctcttcccacaagccaggctccagattctccagctgcagaggtcctgcactgcttttgggtacatggtagattcatgggaggtgttggtggccccccagaaaaacagaccacccacttcactgacggcaaaggagcaggtgtaaccagcatagatctgggaagccccatgcccagggaagtcaaatagcttcaccaggcgggggaccatctcatccttctgctctgtgtagcccagccagccatagccactgaagccccaggagaagactcacttctgggagtcc

SEQ ID NO: 28259 - DNA, 207 bp, Homo sapiens
  MAP TO AC004928.2; EXPRESSED IN PLACENTA, SIGNAL = 0.89; EXPRESSED IN LUNG, SIGNAL = 1.1; EXPRESSED IN FETAL LIVER, SIGNAL = 1.1; EXPRESSED IN BRAIN, SIGNAL = 1.3; EXPRESSED IN BONE MARROW, SIGNAL =   1; EXPRESSED IN ADULT LIVER, SIGNAL =   1; NT HIT: AL161579.2, EVALUE 7.60e+00; SWISSPROT HIT: P14616, EVALUE 8.60e-02
tctctccctggaaggcctgcaattcactaggagtatggtctttggcattcctttcatttagaatgatatacttggctgttaagacccctgacttgtgcctttttgtttgcttgctttttctgggtaaaaagtgacttttggaattggaagtactaaggagcttatgcatgacagctgtatctgcaggcccctaatgatgagggggaa

SEQ ID NO: 28260 - DNA, 347 bp, Homo sapiens; identical to SEQ ID NO: 11682
  MAP TO AC006065.3; EXPRESSED IN FETAL LIVER, SIGNAL =   1; EXPRESSED IN BONE MARROW, SIGNAL = 0.9; EXPRESSED IN ADULT LIVER, SIGNAL = 1.5; EXPRESSED IN PLACENTA, SIGNAL = 0.99; EXPRESSED IN BRAIN, SIGNAL = 1.3; EXPRESSED IN LUNG, SIGNAL = 1.1; SWISSPROT HIT: Q07103, EVALUE 9.20e+00; EST_HUMAN HIT: AI692681.1, EVALUE 8.10e-02; NT HIT: AL163268.2, EVALUE 8.50e-01

SEQ ID NO: 28261 - DNA, 138 bp, Homo sapiens
  MAP TO AC005026.1; EXPRESSED IN LUNG, SIGNAL = 0.59; EXPRESSED IN FETAL LIVER, SIGNAL = 0.76; EXPRESSED IN BONE MARROW, SIGNAL = 0.75; EXPRESSED IN BRAIN, SIGNAL = 0.59; EXPRESSED IN ADULT LIVER, SIGNAL = 0.68; NT HIT: X82086.1, EVALUE 1.20e+00; EST_HUMAN HIT: BF246361.1, EVALUE 3.00e-02
tgaggcctgatgaaatgatgatggtggtgatgatgatgatgatgatgatggtggtgatgatgatgatttgagaagaattagcacctgatttgaaggaataattttgtttcccatcattacccagtggcagtacagtgt

SEQ ID NO: 28262 - DNA, 121 bp, Homo sapiens
  MAP TO AC004932.1; EXPRESSED IN PLACENTA, SIGNAL = 0.87; EXPRESSED IN FETAL LIVER, SIGNAL = 1.2; EXPRESSED IN BRAIN, SIGNAL = 1.1; EXPRESSED IN BONE MARROW, SIGNAL = 1.2; EXPRESSED IN ADULT LIVER, SIGNAL = 1.2; EXPRESSED IN LUNG, SIGNAL = 1.1; SWISSPROT HIT: P46639, EVALUE 7.10e+00; EST_HUMAN HIT: BF371227.1, EVALUE 9.00e-27; NT HIT: D12511.1, EVALUE 2.70e-01
gcccccaaacaacagctcctccactatccctccacgcttctcctctctcaaaaccatctccttccaccactctctcctctcaccattcatgtcttctctgacatatgggactccacaaaca

SEQ ID NO: 28263 - DNA, 226 bp, Homo sapiens
  MAP TO AC005038.1; EXPRESSED IN LUNG, SIGNAL = 1.1; EXPRESSED IN ADULT LIVER, SIGNAL = 0.49; EXPRESSED IN BRAIN, SIGNAL = 0.97; EXPRESSED IN BONE MARROW, SIGNAL = 0.56; EST_HUMAN HIT: BE274034.1, EVALUE 9.00e-81; SWISSPROT HIT: P29805, EVALUE 6.60e+00; NT HIT: AF038660.1, EVALUE 6.00e-81
tagaggcggtggcgttgggccgggagcagttgctgctgctgctgctgctgctagcagctgggtggagggcatgggcagggcctcgggcactgaagcggctgaagaaggccaggtgctgggcgtagacgtcaaagtagaggatgacggccacgaggaagtgcagcaggcagagaaggagcacagccttgcagacgcgctccagcgtcccccccagcagtctgctcat

SEQ ID NO: 28264 - DNA, 76 bp, Homo sapiens
  MAP TO AC005988.1; EXPRESSED IN PLACENTA, SIGNAL = 0.88; EXPRESSED IN BRAIN, SIGNAL =   2; EXPRESSED IN LUNG, SIGNAL = 1.2; EXPRESSED IN BONE MARROW, SIGNAL = 0.96; EXPRESSED IN FETAL LIVER, SIGNAL =   1; EXPRESSED IN ADULT LIVER, SIGNAL =   1; EST_HUMAN HIT: AU120189.1, EVALUE 8.90e-01; NT HIT: AF299073.1, EVALUE 1.50e-01
tctctgggcagagccagaccatccagtgtaccccagaggccagtaggttcctgcccattttcctctctggcttcct

SEQ ID NO: 28265 - DNA, 213 bp, Homo sapiens
  MAP TO AC004952.1; EXPRESSED IN PLACENTA, SIGNAL = 0.73; EXPRESSED IN LUNG, SIGNAL = 0.64; EXPRESSED IN FETAL LIVER, SIGNAL =   1; EXPRESSED IN BONE MARROW, SIGNAL = 0.77; EXPRESSED IN ADULT LIVER, SIGNAL = 0.85; EXPRESSED IN BRAIN, SIGNAL = 0.84; SWISSPROT HIT: P23468, EVALUE 3.00e-04; NT HIT: AE004896.1, EVALUE 1.30e-01; EST_HUMAN HIT: BE391867.1, EVALUE 1.90e-01
atgtcacctgcctgcagggtaccagattgcctaccgcctggccagcagcagcccccacaccttcaccaccgtggaggtcggcgccacagtgaggcagttcacagccaccgacctggccccggagtccgcatacatcttcaggctgtccgccaagacgaggcagggctggggggagccactggaggccaccgtcatcaccaccgagaagagagg

SEQ ID NO: 28266 - DNA, 391 bp, Homo sapiens; identical to SEQ ID NO: 11688
  MAP TO AC006011.2; EXPRESSED IN BONE MARROW, SIGNAL = 0.85; EXPRESSED IN FETAL LIVER, SIGNAL = 1.1; EXPRESSED IN BRAIN, SIGNAL = 0.66; EXPRESSED IN ADULT LIVER, SIGNAL =   1; EXPRESSED IN PLACENTA, SIGNAL = 0.91; EXPRESSED IN LUNG, SIGNAL = 0.98; EST_HUMAN HIT: BE738126.1, EVALUE 1.00e-31; NT HIT: gi11430822, EVALUE 9.00e-32

SEQ ID NO: 28267 - DNA, 114 bp, Homo sapiens
  MAP TO AC002087.1; EXPRESSED IN LUNG, SIGNAL = 0.8; EXPRESSED IN BRAIN, SIGNAL = 0.76; EXPRESSED IN BONE MARROW, SIGNAL = 0.73; EXPRESSED IN PLACENTA, SIGNAL = 0.77; EXPRESSED IN ADULT LIVER, SIGNAL = 0.62; EST_HUMAN HIT: AI003254.1, EVALUE 1.50e+00; SWISSPROT HIT: P08863, EVALUE 4.10e+00
gcatcagccttcagattgtcccagtccaggtgttccatttcccagtcacggacatctgagatgtcatgggacagagaagtgtcatctgctgtggacttcctgagttcctgagcc

SEQ ID NO: 28268 - DNA, 115 bp, Homo sapiens
  MAP TO AC006287.1; EXPRESSED IN BRAIN, SIGNAL = 0.83; EXPRESSED IN ADULT LIVER, SIGNAL = 0.63; EXPRESSED IN PLACENTA, SIGNAL = 0.62; EXPRESSED IN LUNG, SIGNAL = 0.74; EXPRESSED IN BONE MARROW, SIGNAL = 0.68; NT HIT: AL161506.2, EVALUE 2.50e-01; EST_HUMAN HIT: AI167226.1, EVALUE 1.50e+00
ttgcctacatctaaactcagccttcaggaccctgaatccgaatttcagattccttaaccagtttactagacatgagcatcctgaggagtggagagaggatgacgaagaggttagg

SEQ ID NO: 28269 - DNA, 185 bp, Homo sapiens
  MAP TO AC006321.1; EXPRESSED IN BRAIN, SIGNAL = 0.61; NT HIT: U51002.1, EVALUE 4.30e-01; EST_HUMAN HIT: AV761450.1, EVALUE 2.50e+00; SWISSPROT HIT: P01870, EVALUE 2.20e+00
cgggcatggctgcgggaggccaagtgggacgagaagcgaatccctgccgtaaaactgttcccagccgagtggaggagagagggtgtgaacacactctcaggacgctgtgctgtgactggggttttagtgcagcagattgagaaagggaaaaaacgtggcaggtgggaaaccccctgggtaagtcc

SEQ ID NO: 28270 - DNA, 329 bp, Homo sapiens
  MAP TO AC004934.1; EXPRESSED IN PLACENTA, SIGNAL = 1.2; EXPRESSED IN BRAIN, SIGNAL = 1.2; EXPRESSED IN ADULT LIVER, SIGNAL = 1.2; EXPRESSED IN LUNG, SIGNAL = 1.4; EXPRESSED IN FETAL LIVER, SIGNAL = 1.2; EXPRESSED IN BONE MARROW, SIGNAL = 1.2; NT HIT: AF008210.1, EVALUE 8.10e-01; EST_HUMAN HIT: AW854327.1, EVALUE 5.00e-03
attcctccttgaccttgactttccccaaccagaatatctatccctgttcccattctttatatttctttatgacttttttgccagctatttatttctttgttttagtttttttgttgttgtcattgttgttgttgtgcttttgttttatctcctgccattagaatataatttccatgagagtaagaactttatctgttttactgataaagttttactttctaaaacagtgcttgatgcatagaaggtgctcaataaacatgaaagtagtgaaaaattggatgagactgaagtgagtagagctttcctgcatagactagttgagctcaaat

SEQ ID NO: 28271 - DNA, 81 bp, Homo sapiens
  MAP TO AC005549.1; EXPRESSED IN PLACENTA, SIGNAL =  20; EXPRESSED IN LUNG, SIGNAL = 0.85; EXPRESSED IN BONE MARROW, SIGNAL = 0.7; EXPRESSED IN ADULT LIVER, SIGNAL = 0.66; EXPRESSED IN BRAIN, SIGNAL = 0.66; NT HIT: L02110.1, EVALUE 4.10e-02
acttgcaggccaagaaactaacaggcaaggagaggaagaggtcactatccgggccagggtaatgggccctggtcatcagaa

SEQ ID NO: 28272 - DNA, 105 bp, Homo sapiens
  MAP TO AC004949.1; EXPRESSED IN LUNG, SIGNAL = 0.97; EXPRESSED IN FETAL LIVER, SIGNAL = 0.84; EXPRESSED IN PLACENTA, SIGNAL = 0.86; EXPRESSED IN BRAIN, SIGNAL = 0.7; EXPRESSED IN BONE MARROW, SIGNAL = 0.71; EXPRESSED IN ADULT LIVER, SIGNAL = 0.73; SWISSPROT HIT: P04275, EVALUE 3.20e+00
agaatgcttgtccccagtgaaatgctcctgtttgtccccaatgaaatgctgctgttctaccttgcttttgcccttcttgcagggtgaagacttctttctctcatg

SEQ ID NO: 28273 - DNA, 125 bp, Homo sapiens
  MAP TO AC005772.1; EXPRESSED IN BRAIN, SIGNAL = 0.84; EXPRESSED IN ADULT LIVER, SIGNAL = 0.74; EXPRESSED IN PLACENTA, SIGNAL = 0.68; EXPRESSED IN LUNG, SIGNAL = 0.66; EXPRESSED IN BONE MARROW, SIGNAL = 0.6; SWISSPROT HIT: P33915, EVALUE 2.10e-01; NT HIT: Y19187.1, EVALUE 7.00e-02
atgaggatgaggatgggatccaaagaagagcttctaacgacccccgaggaatgctgagtgaccgagcaaggtacccactgaacccaattgtgtccgttgatctcttggagcagccagggatcctg

SEQ ID NO: 28274 - DNA, 360 bp, Homo sapiens
  MAP TO AC003685.1; EXPRESSED IN BONE MARROW, SIGNAL = 0.98; EXPRESSED IN PLACENTA, SIGNAL = 1.1; EXPRESSED IN LUNG, SIGNAL = 0.99; EXPRESSED IN FETAL LIVER, SIGNAL = 0.81; EXPRESSED IN ADULT LIVER, SIGNAL = 0.93; EXPRESSED IN BRAIN, SIGNAL = 0.94; EST_HUMAN HIT: AA431529.1, EVALUE 4.00e-13
caacaatttgttcttcctcttcctcttcttcttcttcctcttcctcttcttctgtttcttctccttctcctcctcctcctccttcttctccttcttctcctcctccttcttcttctccttcttcttcctcctcttctttctcctcctcctcctccttctcttcctcctcttcgtcttctactactattacttctgctgctgctgctgcggcttctgctgctgctgcggcttctgctgctgctgctgcggcttctgcttcttctgcttcatcatctttctgcttctctgcgatgtattctttaaggacattcagcaacttccgagtatgtctataatcacgtttctgcctgtaacacataa

SEQ ID NO: 28275 - DNA, 203 bp, Homo sapiens
  MAP TO AC005031.1; EXPRESSED IN PLACENTA, SIGNAL = 0.83; EXPRESSED IN LUNG, SIGNAL = 0.7; EXPRESSED IN FETAL LIVER, SIGNAL = 1.1; EXPRESSED IN BRAIN, SIGNAL = 0.6; EXPRESSED IN BONE MARROW, SIGNAL = 0.8; EXPRESSED IN ADULT LIVER, SIGNAL = 0.8; SWISSPROT HIT: P97329, EVALUE 6.50e+00; NT HIT: U80017.1, EVALUE 1.00e-111; EST_HUMAN HIT: AA490188.1, EVALUE 4.00e-58
ccagagaggagtgaacaaaataagctactgccaagtcgcggcagggcctccactcaacgctatcaaggagcccaaactgctcgaggaaggagcttgcggatgtggttcgcagggaacggagtgggaaaagacgtagaaaaacgcggaccacaactccagtgagcggatcgacttgatgctgtcccgaggctgcggaaggagag

SEQ ID NO: 28276 - DNA, 125 bp, Homo sapiens
  MAP TO AC003070.1; EXPRESSED IN BONE MARROW, SIGNAL = 0.81; EXPRESSED IN PLACENTA, SIGNAL = 0.68; EXPRESSED IN LUNG, SIGNAL = 0.81; EXPRESSED IN FETAL LIVER, SIGNAL = 0.84; EXPRESSED IN BRAIN, SIGNAL = 0.65; EXPRESSED IN ADULT LIVER, SIGNAL = 0.8; NT HIT: AE001222.1, EVALUE 4.30e+00
caatgcagtaattggcaactactactgctactattactactactactactactactattactaccaccaccaaacaccaccaacaagaacaacaacaacaacaacaacagttacagcctctatgt

SEQ ID NO: 28277 - DNA, 123 bp, Homo sapiens
  MAP TO AC006500.4; EXPRESSED IN LUNG, SIGNAL = 0.7; EXPRESSED IN BRAIN, SIGNAL = 0.61; EXPRESSED IN PLACENTA, SIGNAL = 0.87; EXPRESSED IN BONE MARROW, SIGNAL = 0.67; EXPRESSED IN ADULT LIVER, SIGNAL = 0.55; EST_HUMAN HIT: BF515487.1, EVALUE 6.30e+00; SWISSPROT HIT: Q05195, EVALUE 3.60e-01; NT HIT: AF164967.1, EVALUE 6.90e-02
accacaaatgaaggggtcaacttctacttagcaacagctgtgaatgccatgataaatgtgggcccagtattgccagctcttccaatttttcaagacaagcaaaaaaatgtgataaatgtgatt

SEQ ID NO: 28278 - DNA, 220 bp, Homo sapiens
  MAP TO AC006515.7; EXPRESSED IN PLACENTA, SIGNAL = 0.71; EXPRESSED IN LUNG, SIGNAL = 0.77; EXPRESSED IN FETAL LIVER, SIGNAL = 0.7; EXPRESSED IN BRAIN, SIGNAL = 0.72; EXPRESSED IN BONE MARROW, SIGNAL = 0.72; EXPRESSED IN ADULT LIVER, SIGNAL = 0.63; EST_HUMAN HIT: BF445140.1, EVALUE 4.00e-12; NT HIT: AJ133269.1, EVALUE 1.00e-07; SWISSPROT HIT: Q09208, EVALUE 1.60e+00
agaaatgcatcattagaccattttgttgttgtacaaacctcataaagaatactcacacaaatctagatggtatagcctactacatacctaggtatacagcatagcctagtgctcctaggctaaacctgttcagcatgttaactacatggaaaactgtaggcaactgtaatacaatggtaagtatttgtatatctaaacatagaaaaaggcatagtaaaaa

SEQ ID NO: 28279 - DNA, 226 bp, Homo sapiens
  MAP TO AC004945.1; EXPRESSED IN PLACENTA, SIGNAL = 0.95; EXPRESSED IN ADULT LIVER, SIGNAL = 1.2; EXPRESSED IN LUNG, SIGNAL = 0.7; EXPRESSED IN FETAL LIVER, SIGNAL = 1.9; EXPRESSED IN BRAIN, SIGNAL = 1.2; EXPRESSED IN BONE MARROW, SIGNAL = 0.82; EST_HUMAN HIT: BF696985.1, EVALUE 2.00e-01; SWISSPROT HIT: P13798, EVALUE 6.60e+00; NT HIT: U85645.1, EVALUE 1.40e-01
gctaccaggagaaatgaagacagtagcaggcattgaaacttacctttattatatccttatcccaaatctattttcccaggcttgtagaactccagcacaacttaaaattggaaatctatcagatgtgatgaaggatgagattgttgtgtgggttgtttttagtgatgcatgtagaatatgtaatgtacatgcacatcgatacatatgtgtgtttattgcttttcag

SEQ ID NO: 28280 - DNA, 190 bp, Homo sapiens
  MAP TO AC004382.1; EXPRESSED IN BRAIN, SIGNAL = 1.1; EXPRESSED IN PLACENTA, SIGNAL = 1.3; EXPRESSED IN LUNG, SIGNAL = 1.1; EXPRESSED IN BONE MARROW, SIGNAL = 1.1; EXPRESSED IN ADULT LIVER, SIGNAL = 1.4; EXPRESSED IN FETAL LIVER, SIGNAL = 1.1; SWISSPROT HIT: O65992, EVALUE 5.80e-01; EST_HUMAN HIT: BE313458.1, EVALUE 4.00e-98; NT HIT: gi11431271, EVALUE 2.00e-98
gaaggtaaagcgtgtggcatcccggccatagcggcgcagtgagcagaggggccacgagacgagcttcacacgggggttgtggatgtcccagaggtagatgttctcgtgggtgatctgcagcttgcactcgccatacacgtccaggttggggcagggcagcaggaagacattgaagcgatctggagtgggg

SEQ ID NO: 28281 - DNA, 163 bp, Homo sapiens
  MAP TO AC004542.1; EXPRESSED IN PLACENTA, SIGNAL =   1; EXPRESSED IN LUNG, SIGNAL =   1; EXPRESSED IN BONE MARROW, SIGNAL = 1.2; EXPRESSED IN FETAL LIVER, SIGNAL = 1.2; EXPRESSED IN BRAIN, SIGNAL = 1.2; EXPRESSED IN ADULT LIVER, SIGNAL = 1.3; SWISSPROT HIT: Q14149, EVALUE 2.00e-03; NT HIT: gi11417977, EVALUE 1.00e-74; EST_HUMAN HIT: BF691300.1, EVALUE 5.60e-01
atgcccccttccagctgtgggcccactttctcatacattttgatcagtcggctacagttgtagatgaacatgccatccagatcccggtgttcaatgttgacaccaaaaacaaaattcagttccttaggttctttaagtgctctaagaagacaaaaaaactcaa

SEQ ID NO: 28282 - DNA, 112 bp, Homo sapiens
  MAP TO AC005039.1; EXPRESSED IN FETAL LIVER, SIGNAL = 0.78; EXPRESSED IN BONE MARROW, SIGNAL = 0.79; EXPRESSED IN PLACENTA, SIGNAL = 0.88; EXPRESSED IN LUNG, SIGNAL = 0.97; EXPRESSED IN BRAIN, SIGNAL =   1; EXPRESSED IN ADULT LIVER, SIGNAL = 0.86; NT HIT: U41453.1, EVALUE 6.20e-02; SWISSPROT HIT: O13368, EVALUE 9.30e+00
tggaggctggaaagtctgagaacaaggcccaggcagattcaatgtctgaagaggacctgtgctctcactctcactcagacacagcttcttttcattgtgtcctcacaaagta

SEQ ID NO: 28283 - DNA, 148 bp, Homo sapiens
  MAP TO AC003957.1; EXPRESSED IN LUNG, SIGNAL = 1.1; EXPRESSED IN BRAIN, SIGNAL = 0.86; EXPRESSED IN BONE MARROW, SIGNAL = 0.99; EXPRESSED IN PLACENTA, SIGNAL =   1; EXPRESSED IN FETAL LIVER, SIGNAL = 0.86; EXPRESSED IN ADULT LIVER, SIGNAL = 0.88; EST_HUMAN HIT: BF353855.1, EVALUE 5.00e-01; NT HIT: U08813.1, EVALUE 1.00e-19; SWISSPROT HIT: P31636, EVALUE 1.40e+00
ccatatgcccacggccacgttcagagcaaaatacacagtgatgacgatgatgtcagccacgctcagctgcgtcccgggagtgtggaggtcgctggtggagttggcggccatggctgtcctgccgcaggcactaggtatgagcccgagg

SEQ ID NO: 28284 - DNA, 129 bp, Homo sapiens
  MAP TO AC003083.1; EXPRESSED IN LUNG, SIGNAL = 1.1; EXPRESSED IN FETAL LIVER, SIGNAL = 0.99; EXPRESSED IN PLACENTA, SIGNAL = 0.99; EXPRESSED IN BRAIN, SIGNAL =   1; EXPRESSED IN BONE MARROW, SIGNAL = 1.1; EXPRESSED IN ADULT LIVER, SIGNAL = 1.1; EST_HUMAN HIT: AV706427.1, EVALUE 1.00e-66; NT HIT: gi11419212, EVALUE 7.00e-67; SWISSPROT HIT: Q09461, EVALUE 2.00e-05
agatgcagtccaagaagttttcttacgtggaactgcatcgatttgtcagcaagaaagtatctgaagatggttggatttccctttggaggggctgggctcctactgttcttagagatgtacctttctcag

SEQ ID NO: 28285 - DNA, 326 bp, Homo sapiens
  MAP TO AC004993.1; EXPRESSED IN PLACENTA, SIGNAL = 0.9; EXPRESSED IN LUNG, SIGNAL = 1.2; EXPRESSED IN FETAL LIVER, SIGNAL = 1.1; EXPRESSED IN BONE MARROW, SIGNAL = 1.1; EXPRESSED IN ADULT LIVER, SIGNAL = 1.2; EXPRESSED IN BRAIN, SIGNAL = 0.79; EST_HUMAN HIT: BF512808.1, EVALUE 2.00e-60; SWISSPROT HIT: P50533, EVALUE 8.00e-04; NT HIT: AL163201.2, EVALUE 6.00e-57
aactaaataagataccaggaactaaccttggagaaacagagatatgtgaactttcagacagagaattcaaagtaactgttgaggaattcaaagaaattcaagataacagagagaagaaattcagaattctatcagataaacttaacaaagagactgaaataattaaaaagaatcaagcagaaattctggagctgaaaaatcctactgacatactgaagaaggcatcagagtcccttaatagcagaatggatcaagcagaagaaagaattaatgatcttgaagacaaacaatttgaaaatacccagtcagaggagacaagagaaaaa

SEQ ID NO: 28286 - DNA, 234 bp, Homo sapiens
  MAP TO AC004547.1; EXPRESSED IN PLACENTA, SIGNAL = 0.94; EXPRESSED IN BRAIN, SIGNAL =   1; EXPRESSED IN BONE MARROW, SIGNAL = 1.1; EXPRESSED IN ADULT LIVER, SIGNAL = 0.77; EXPRESSED IN LUNG, SIGNAL = 0.75; EXPRESSED IN FETAL LIVER, SIGNAL = 0.86; NT HIT: Y11842.1, EVALUE 1.20e-01; EST_HUMAN HIT: BE143078.1, EVALUE 3.60e-02
tgcctggtacaccatcaccatcatcaccactaccaccaccattatcactgtcaccatcaatatcatcatcaccaccatcgtcatcataactactaccatcaccaccactatcattatcttcactactatcactatcaccatcatcatctttctcctactcatcatcatagccaaagcttgtcatgtaccagacactgttctaaataagtacaaagtaagtgctagctttcacca

SEQ ID NO: 28287 - DNA, 76 bp, Homo sapiens
  MAP TO AC005004.1; EXPRESSED IN LUNG, SIGNAL = 1.1; EXPRESSED IN BRAIN, SIGNAL = 1.2; EXPRESSED IN BONE MARROW, SIGNAL = 0.94; EXPRESSED IN PLACENTA, SIGNAL = 0.91; EXPRESSED IN FETAL LIVER, SIGNAL = 0.98; EXPRESSED IN ADULT LIVER, SIGNAL =   1; EST_HUMAN HIT: AW296309.1, EVALUE 8.90e-01; NT HIT: gi11418002, EVALUE 1.00e-35
ttgtgaaccccaaagtgttccctcacatcaagcttggagacattgtagagattgcacaccccaacgatgaatacag

SEQ ID NO: 28288 - DNA, 311 bp, Homo sapiens
  MAP TO AC004551.1; EXPRESSED IN PLACENTA, SIGNAL = 1.3; EXPRESSED IN BRAIN, SIGNAL = 1.3; EXPRESSED IN ADULT LIVER, SIGNAL = 1.3; EXPRESSED IN LUNG, SIGNAL = 1.4; EXPRESSED IN FETAL LIVER, SIGNAL = 1.3; EXPRESSED IN BONE MARROW, SIGNAL = 1.3; EST_HUMAN HIT: AA126109.1, EVALUE 1.00e-55; NT HIT: gi11436439, EVALUE 1.00e-123; SWISSPROT HIT: P29728, EVALUE 3.00e-42
gagatctcattccaaagaggtatgcctggcatgcggatgatgaggtacagggatagggtgtgagaagcttggcacctcgctgattggagctggtgcagcaggatgttcctgatggtctcatcttcaaagttgtagttgaccatccaatagatacacagcttctcctggcatttgatcagctccagtacggttctgacgccttcagcaatgtcaaagttgtcttttctgcacccctgttcccaggcatacaccgtaagcagctccagggcatacggagacagcgagggtaaatccttgatttttttctggca

SEQ ID NO: 28289 - DNA, 272 bp, Homo sapiens
  MAP TO AC005230.1; EXPRESSED IN ADULT LIVER, SIGNAL =   1; EXPRESSED IN PLACENTA, SIGNAL = 1.3; EXPRESSED IN LUNG, SIGNAL = 0.98; EXPRESSED IN BRAIN, SIGNAL = 1.1; EXPRESSED IN FETAL LIVER, SIGNAL =   1; EXPRESSED IN BONE MARROW, SIGNAL = 1.1; EST_HUMAN HIT: U74315.1, EVALUE 0.00e+00; SWISSPROT HIT: P18490, EVALUE 2.00e-36; NT HIT: AB018348.1, EVALUE 0.00e+00
tgccaggttgacactatgaagttcctgatatttcccaagctgataggacccccaagaatgtctttaagctgttcgtggctgtcagagtaagaagttgtcaggggtgagacaaagattgggtagccaataggttgatcacaagatgagtttatcatgtttctcagggcttgctttgcattttggatgctacctctctctgggttacggttacgtagaaaaacaagctcctgctgttgccctgcccaaagacctcggacacattccttattcac

SEQ ID NO: 28290 - DNA, 82 bp, Homo sapiens
  MAP TO AC004417.1; EXPRESSED IN PLACENTA, SIGNAL = 1.1; EXPRESSED IN BRAIN, SIGNAL = 1.2; EXPRESSED IN BONE MARROW, SIGNAL = 0.99; EXPRESSED IN ADULT LIVER, SIGNAL = 1.2; EXPRESSED IN LUNG, SIGNAL = 1.1; EXPRESSED IN FETAL LIVER, SIGNAL = 1.1; EST_HUMAN HIT: BF034016.1, EVALUE 9.80e-01
gcatcataacctgtggcatgctgctagtgctgctgacattcaacagccaggaatgtcttcccttcagggcaggggtaggcag

SEQ ID NO: 28291 - DNA, 495 bp, Homo sapiens
  MAP TO AC004553.1; EXPRESSED IN PLACENTA, SIGNAL = 0.69; EXPRESSED IN BONE MARROW, SIGNAL = 0.69; EXPRESSED IN ADULT LIVER, SIGNAL = 0.68; EXPRESSED IN FETAL LIVER, SIGNAL = 0.82; EXPRESSED IN LUNG, SIGNAL = 0.64; EXPRESSED IN BRAIN, SIGNAL = 0.67; SWISSPROT HIT: P04929, EVALUE 8.00e-01; EST_HUMAN HIT: BF375909.1, EVALUE 1.00e-07; NT HIT: gi7657147, EVALUE 2.00e-05
aggacttgccagcgagatcggggcagggcagatgtctctgaggaaatccactcctccaacgcctgatcctcgtctaacaaacactgatcatggttggtgccaccgcatcgtggacacatccgaggctgttcttcctcctccccttcctcctccatctcttcttcttcctcctccctttctgtctcctctcccactaacgggtaaccaaataaaccttcacccatgctttcaagttcgacgtcttcacttgaactttctgagtctgtgttttgattttctgtgctggcatcgttcaggaaaccaccatccctggtatcaccaccatctccggtcgatggctctgtggctgccatttcaatgtctgaggaggccgccgtcaccgctgctactccagactgctcctctgggctgctgaacaggctttcagtcactaagtctggtaagccacctgtgctgccctcttggtgggacatctcgaacgatgtttgctgtagc

SEQ ID NO: 28292 - DNA, 159 bp, Homo sapiens
  MAP TO AC006477.2; EXPRESSED IN FETAL LIVER, SIGNAL = 0.85; EXPRESSED IN BONE MARROW, SIGNAL = 0.98; EXPRESSED IN ADULT LIVER, SIGNAL = 0.91; EXPRESSED IN PLACENTA, SIGNAL =   1; EXPRESSED IN LUNG, SIGNAL = 1.1; EXPRESSED IN BRAIN, SIGNAL = 0.94; EST_HUMAN HIT: AI572532.1, EVALUE 1.00e-51; NT HIT: AB014475.1, EVALUE 9.20e-02; SWISSPROT HIT: Q91474, EVALUE 4.00e+00
gttctattattgtcaaggtcccatcttcacttcaagctcatttacagttatcagggaaagaggttgatgtgaactcagaagtccatgttcaggaaatggctgaagttcgtaaagatgatgttgtaacagtgactggtaaggaggctgcattttgctctg

SEQ ID NO: 28293 - DNA, 295 bp, Homo sapiens
  MAP TO AC003689.1; EXPRESSED IN LUNG, SIGNAL = 1.2; EXPRESSED IN PLACENTA, SIGNAL = 1.3; EXPRESSED IN FETAL LIVER, SIGNAL = 1.6; EXPRESSED IN BRAIN, SIGNAL = 0.79; EXPRESSED IN BONE MARROW, SIGNAL = 1.1; EXPRESSED IN ADULT LIVER, SIGNAL = 0.75; SWISSPROT HIT: P31500, EVALUE 1.80e+00; EST_HUMAN HIT: AI591065.1, EVALUE 3.00e-07; NT HIT: M17262.1, EVALUE 2.00e-04
agcccaggagatccaggctgcagtgagctatgatcgtatcactgtgtatcatgcccctgcagggtcagagcaagaccctctttctacaagaaaacaaacacaagcacaacaagaatatgaagaggtggggaaaatggatgtggacgggatggagaaatagtcaaacaggttgctttgataagaagtgagctccctgtcagtggaggcattcaagcagaagcagctggttggctccttgggggagactgtggtagcagaggggcttccaacattcaatcgtccaccgtgtcgtgca

SEQ ID NO: 28294 - DNA, 213 bp, Homo sapiens
  MAP TO AC004626.1; EXPRESSED IN PLACENTA, SIGNAL = 0.84; EXPRESSED IN LUNG, SIGNAL = 0.75; EXPRESSED IN BRAIN, SIGNAL = 0.75; EXPRESSED IN BONE MARROW, SIGNAL = 0.66; EXPRESSED IN ADULT LIVER, SIGNAL = 0.73; SWISSPROT HIT: P74764, EVALUE 4.50e+00; NT HIT: AL161549.2, EVALUE 5.00e-01
tttcacaggctcaggtgacccattgacattgaccaggaactcttcttcaaagtttcccaggatggtagagctgaaggagatctggatagcttggactccacttggttcaatgatgccttccttgggactgaaaacaaagcaggcccccaaagctgaagttggaggggtcatgttgaagagagcatcgatgctgtctttgttgtacagtatcgc

SEQ ID NO: 28295 - DNA, 147 bp, Homo sapiens
  MAP TO AC005229.1; EXPRESSED IN PLACENTA, SIGNAL = 0.82; EXPRESSED IN LUNG, SIGNAL =   1; EXPRESSED IN FETAL LIVER, SIGNAL = 0.92; EXPRESSED IN ADULT LIVER, SIGNAL = 1.2; EXPRESSED IN BRAIN, SIGNAL = 1.1; EXPRESSED IN BONE MARROW, SIGNAL = 0.91; NT HIT: gi11420159, EVALUE 1.00e-77; SWISSPROT HIT: Q13616, EVALUE 5.00e-23; EST_HUMAN HIT: BE813698.1, EVALUE 1.00e-72
gaagatgatgcatttgcaaagggccctacgttaacagtgtataaagaatcctttgaatctcaatttttggctgacacagagagattttataccagagagagtactgaattcttgcagcagaacccagttactgaatatatgaaaaag

SEQ ID NO: 28296 - DNA, 203 bp, Homo sapiens
  MAP TO AC005069.2; EXPRESSED IN LUNG, SIGNAL =   1; EXPRESSED IN FETAL LIVER, SIGNAL = 0.87; EXPRESSED IN BONE MARROW, SIGNAL = 0.78; EXPRESSED IN PLACENTA, SIGNAL = 1.1; EXPRESSED IN BRAIN, SIGNAL = 0.78; EXPRESSED IN ADULT LIVER, SIGNAL = 0.88; EST_HUMAN HIT: AW087437.1, EVALUE 7.10e-01; NT HIT: AL163209.2, EVALUE 4.80e-01
tgaatgaatttttagcttttgagggtcccatcttgttggatatgagaattaaacatctaatcaaaacaaatcagttaagtcaagcaactgctctagcaaagctgtgttctgaccatccagagattggcataaaaggtagttttaagcaaacttaccttgtctgtctttgtacatcatcaccaaatggaaagttaatcgaagag

SEQ ID NO: 28297 - DNA, 187 bp, Homo sapiens
  MAP TO AC005094.1; EXPRESSED IN LUNG, SIGNAL = 0.78; EXPRESSED IN BONE MARROW, SIGNAL = 0.89; EXPRESSED IN PLACENTA, SIGNAL = 0.99; EXPRESSED IN FETAL LIVER, SIGNAL = 0.96; EXPRESSED IN BRAIN, SIGNAL = 0.84; EXPRESSED IN ADULT LIVER, SIGNAL = 0.9; EST_HUMAN HIT: AI799882.1, EVALUE 6.50e-01; SWISSPROT HIT: Q04174, EVALUE 7.60e-01
actcagctttatagattatgaaaaaaacatgcataaatactgccaagatatatattttcttttgcaaaagcttcccttttactctgttttcagagaagaaaaatacgtacttcttgttttggaaatggagattgtcatggtccttgttctccttactgatcacagacttttctttcatgtaatacat

SEQ ID NO: 28298 - DNA, 82 bp, Homo sapiens
  MAP TO AC000117.1; EXPRESSED IN LUNG, SIGNAL = 1.6; EXPRESSED IN BRAIN, SIGNAL = 0.67; SWISSPROT HIT: Q04705, EVALUE 5.60e+00; NT HIT: X95159.1, EVALUE 2.00e-07; EST_HUMAN HIT: AI937371.1, EVALUE 2.00e-05
ctcttcacttaaatgacgcacttcatggcttttctttggcgtatttgaattgcaagcatcactacacttgtactttggtgcc

SEQ ID NO: 28299 - DNA, 469 bp, Homo sapiens
  MAP TO AC002091.1; EXPRESSED IN LUNG, SIGNAL = 0.45; EXPRESSED IN ADULT LIVER, SIGNAL = 0.49; EXPRESSED IN BRAIN, SIGNAL = 2.3; NT HIT: gi7657432, EVALUE 0.00e+00; SWISSPROT HIT: O02696, EVALUE 1.00e-43; EST_HUMAN HIT: AW672785.1, EVALUE 0.00e+00
atactggttcgtccagggggctgcagaggctccctgcccgcctcaggggcagggccgtgtccgagctgccctccaggctccgagagtccctccgcagtaccagctggctggtgctcttgaagagtttatagatcctgatgaacttctgcccaggcctgcggtggcctcggcgttcctggctgccacgcctccaaggccactcggaggagctctcctcgctgtcctccacgtagccgctgtccatgccatcagagaggcctgagacaaaggaagtcagcagatggcgcgagagggccggccccgaggcctgggaggatgcaagggacagggtggagtcatgggacgccaaagagctggtggagagcagggaatctctctcggcacagtgcccgtcagtttccaagtcctcctccacctcctcctcctcctcttcctcctcttcatcatctcccaggatccctggctggag

SEQ ID NO: 28300 - DNA, 207 bp, Homo sapiens
  MAP TO AC000120.1; EXPRESSED IN LUNG, SIGNAL = 0.49; EXPRESSED IN BRAIN, SIGNAL = 0.56; EXPRESSED IN ADULT LIVER, SIGNAL = 0.5; NT HIT: gi4758657, EVALUE 1.00e-113; EST_HUMAN HIT: AW958960.1, EVALUE 1.00e-113; SWISSPROT HIT: P55268, EVALUE 7.50e-01
cttagtttccatgttgaggagatgaagtccttttatattcactcctacatacacagggatgactttatgattgctggggcttgcctttgtaaatatctgtcctgtgaaaaatgctgctccataagtaggaatttcccagcaattctgtaagaacatgcgctgaaggtgatgcatttctttactgacaccttcacttgtactgagatt

SEQ ID NO: 28301 - DNA, 198 bp, Homo sapiens
  MAP TO AC005209.1; EXPRESSED IN LUNG, SIGNAL = 0.55; EXPRESSED IN FETAL LIVER, SIGNAL = 1.3; EXPRESSED IN BONE MARROW, SIGNAL = 0.67; EXPRESSED IN PLACENTA, SIGNAL = 0.76; EXPRESSED IN BRAIN, SIGNAL = 0.58; EXPRESSED IN ADULT LIVER, SIGNAL = 0.55; SWISSPROT HIT: P23098, EVALUE 6.00e-20; NT HIT: AF257737.1, EVALUE 2.00e-99
gtcaaggcacttctggaagaaatattggagcgggtgacagacgagtttaacatcccagaactgatggccaaagtggaggagcgcaccccttacattgtagttgccttccaggagtgtggccggatgaatatcctcaccagagagattcagcgctcactgagggagctggagctcggcttaaaggtgagcgcggtcttg

SEQ ID NO: 28302 - DNA, 157 bp, Homo sapiens
  MAP TO AC005243.1; EXPRESSED IN BONE MARROW, SIGNAL = 0.74; EXPRESSED IN PLACENTA, SIGNAL = 0.95; EXPRESSED IN LUNG, SIGNAL = 1.2; EXPRESSED IN FETAL LIVER, SIGNAL = 0.89; EXPRESSED IN ADULT LIVER, SIGNAL = 0.87; EXPRESSED IN BRAIN, SIGNAL = 0.79; SWISSPROT HIT: P70402, EVALUE 3.00e+00; NT HIT: AP000061.1, EVALUE 9.10e-02
agggcagcagttgagcaggaaggggaactctacgtggattcctgtgaaccccaggaatgaaagcctaggacacaccaaggtgcctctgatgatcacaattactacccttcctgaacagggaagtattttaaaaacaaatcttccttctgtagacctt

SEQ ID NO: 28303 - DNA, 156 bp, Homo sapiens
  MAP TO AC004801.1; EXPRESSED IN PLACENTA, SIGNAL = 0.75; EXPRESSED IN LUNG, SIGNAL = 0.73; EXPRESSED IN BRAIN, SIGNAL =   1; EXPRESSED IN BONE MARROW, SIGNAL = 0.56; EXPRESSED IN ADULT LIVER, SIGNAL = 0.65; EST_HUMAN HIT: AV704090.1, EVALUE 2.00e-68; SWISSPROT HIT: P22917, EVALUE 1.40e+00; NT HIT: gi11436716, EVALUE 1.00e-68
agattgcaggagcgggaacattcagtacatgattcagtagaactacatcttcgtgtacctcttgaaaaggagattcctgttactgttgtccaagaaacacaaaaaaaaggtcataaattaactgatagtgaagatgaatttcctgaaattacagag

SEQ ID NO: 28304 - DNA, 184 bp, Homo sapiens
  MAP TO AC005077.1; EXPRESSED IN LUNG, SIGNAL = 2.2; EXPRESSED IN FETAL LIVER, SIGNAL = 1.4; EXPRESSED IN BRAIN, SIGNAL = 1.3; EXPRESSED IN BONE MARROW, SIGNAL = 1.3; EXPRESSED IN PLACENTA, SIGNAL = 1.2; EXPRESSED IN ADULT LIVER, SIGNAL = 1.3; EST_HUMAN HIT: AW473840.1, EVALUE 4.10e-02; NT HIT: AL163281.2, EVALUE 1.00e-07; SWISSPROT HIT: P22144, EVALUE 2.30e+00
ttcaggaagctggcaagttcaagatcaagaagtcaacagatgttggtgtctggtggttcattgaaggtaccttctccctgtgtcctcacatggctaggctctctgcggtctcttctaagtgcactaatcccaatcatgagggctccactttcatgaactaatcacctcccacaggctccacctc

SEQ ID NO: 28305 - DNA, 137 bp, Homo sapiens
  MAP TO AC004664.1; EXPRESSED IN PLACENTA, SIGNAL = 0.7; EXPRESSED IN ADULT LIVER, SIGNAL = 0.71; EXPRESSED IN LUNG, SIGNAL = 0.68; EXPRESSED IN FETAL LIVER, SIGNAL = 1.2; EXPRESSED IN BRAIN, SIGNAL = 0.77; EXPRESSED IN BONE MARROW, SIGNAL = 0.56; EST_HUMAN HIT: BE294176.1, EVALUE 4.60e-01; NT HIT: gi4885390, EVALUE 3.10e-01; SWISSPROT HIT: P79928, EVALUE 4.00e+00
cttgaggtagctgagccatcccaccagggttccctgcaggtgtcatggcatccactcgagctcaatgagggtttggaagttgtcatggtcagagatgggcaaactacggctcttggccaaatccagccctgggccag

SEQ ID NO: 28306 - DNA, 131 bp, Homo sapiens
  MAP TO AC006534.2; EXPRESSED IN LUNG, SIGNAL = 0.76; EXPRESSED IN FETAL LIVER, SIGNAL = 0.92; EXPRESSED IN BRAIN, SIGNAL = 0.66; EXPRESSED IN PLACENTA, SIGNAL = 0.84; EXPRESSED IN BONE MARROW, SIGNAL = 0.72; EXPRESSED IN ADULT LIVER, SIGNAL = 0.78; EST_HUMAN HIT: AV717910.1, EVALUE 6.00e-68; NT HIT: gi7661683, EVALUE 4.00e-68
aatgatggttctgctttacacctttccagaagtcctgttactgtgtccccaatgacagtatgaaagtcaggtgtctgcttcagagccaaaaatttccgtacttctacttcaatgtgtttttctgaatcttt

SEQ ID NO: 28307 - DNA, 112 bp, Homo sapiens
  MAP TO AC003964.1; EXPRESSED IN PLACENTA, SIGNAL = 0.69; EXPRESSED IN LUNG, SIGNAL = 0.69; EXPRESSED IN ADULT LIVER, SIGNAL = 0.55; EXPRESSED IN BRAIN, SIGNAL = 0.55; EXPRESSED IN BONE MARROW, SIGNAL = 0.63; SWISSPROT HIT: P24230, EVALUE 1.40e+00; EST_HUMAN HIT: AU128584.1, EVALUE 1.00e-10; NT HIT: U09588.1, EVALUE 2.40e-01
ccgtggttaccgtggcaacggacggcaacagctcgggcggcgcatggagagtgcgggcggcttcaagctgggtatggagcccctcagcggcggcggggtctgtgagttggac

SEQ ID NO: 28308 - DNA, 122 bp, Homo sapiens
  MAP TO AC005079.1; EXPRESSED IN PLACENTA, SIGNAL = 0.6; EXPRESSED IN LUNG, SIGNAL = 0.74; EXPRESSED IN BONE MARROW, SIGNAL = 0.64; EXPRESSED IN BRAIN, SIGNAL = 0.63; EXPRESSED IN ADULT LIVER, SIGNAL = 0.74; NT HIT: U16856.1, EVALUE 6.80e-02; EST_HUMAN HIT: BF061085.1, EVALUE 1.00e-01
tggcggggcctacctcataagactgctctaagagcaccctctgcatactgtagtgcctatgcctagtgctgctgtctttgattgggcccttcagaaagttgatcctgaagcaagcccagggc

SEQ ID NO: 28309 - DNA, 265 bp, Homo sapiens
  MAP TO AC005220.1; EXPRESSED IN PLACENTA, SIGNAL = 0.7; EXPRESSED IN LUNG, SIGNAL = 1.3; EXPRESSED IN BONE MARROW, SIGNAL = 0.73; EXPRESSED IN BRAIN, SIGNAL =   2; EXPRESSED IN ADULT LIVER, SIGNAL = 0.68; NT HIT: AF041260.1, EVALUE 0.00e+00; SWISSPROT HIT: P22942, EVALUE 1.80e-02; EST_HUMAN HIT: AI825504.1, EVALUE 0.00e+00
acatcagactccacagaaaagactatcacaccgccagagcctgaaccaacaggagcaccacagaagggtaaagagggctcctcgaaggacaagaagtcagcagccgagatgaacaagcagaagagcaacaagcaggaagccaaagaaccagcccagtgcacagagcaggccacggtggacacgaactcactgcagaatggggacaagctccaaaagagacctgagaagcggcagcagtcccttgggggcttctttaaaggcctgg

SEQ ID NO: 28310 - DNA, 187 bp, Homo sapiens
  MAP TO AC005225.2; EXPRESSED IN PLACENTA, SIGNAL = 0.66; EXPRESSED IN LUNG, SIGNAL = 0.76; EXPRESSED IN ADULT LIVER, SIGNAL = 0.55; EXPRESSED IN BRAIN, SIGNAL = 0.72; EXPRESSED IN BONE MARROW, SIGNAL = 0.66; SWISSPROT HIT: P54918, EVALUE 2.20e+00
tgggacagattgggcaagtaagtcccgagctgacggatcttctgctctgggctatccactatgaagagtcaccaggtgtacggctggaagcttgccgtagcatcctagccctgaaacttcaaggggaccgggtcagggacaccttcctagacgtgctgctcctggagaaccacgatgctgttctaaa

SEQ ID NO: 28311 - DNA, 233 bp, Homo sapiens
  MAP TO AC004682.1; EXPRESSED IN ADULT LIVER, SIGNAL = 0.81; EXPRESSED IN PLACENTA, SIGNAL = 1.1; EXPRESSED IN LUNG, SIGNAL = 0.89; EXPRESSED IN BRAIN, SIGNAL = 0.97; EXPRESSED IN FETAL LIVER, SIGNAL = 0.93; EXPRESSED IN BONE MARROW, SIGNAL = 0.89; SWISSPROT HIT: Q92620, EVALUE 2.00e-26; EST_HUMAN HIT: AW852053.1, EVALUE 9.00e-84; NT HIT: AF038391.1, EVALUE 6.00e-84
ctgctgcttccccacgtgctctacctccagctctgaatctgctccaacttctgcaggcagcctcacctcattgatctgtctccgctgagctgaaatgcgcttctgcttctgtttatgcaggtgctgctcccgcctcctcacgtagtcctcggaggagtaggccagcgggttgtggaactcgtcatagccctcgtccatcatgtaccaatcccgatcggcttgctgcagggcag

SEQ ID NO: 28312 - DNA, 75 bp, Homo sapiens
  MAP TO AC005185.1; EXPRESSED IN PLACENTA, SIGNAL = 0.81; EXPRESSED IN BRAIN, SIGNAL = 0.56; EXPRESSED IN BONE MARROW, SIGNAL = 0.64; EXPRESSED IN ADULT LIVER, SIGNAL = 0.57; EXPRESSED IN LUNG, SIGNAL = 0.66; NT HIT: AE003975.1, EVALUE 3.70e-02
attcatctagccagagagagaagctgaaggagaagttggaaaggctcttggtccagctggtaccccacaccaacc

SEQ ID NO: 28313 - DNA, 117 bp, Homo sapiens
  MAP TO AC004655.1; EXPRESSED IN PLACENTA, SIGNAL = 0.89; EXPRESSED IN LUNG, SIGNAL = 0.96; EXPRESSED IN BRAIN, SIGNAL = 1.1; EXPRESSED IN BONE MARROW, SIGNAL = 0.99; EXPRESSED IN ADULT LIVER, SIGNAL = 0.88; EXPRESSED IN FETAL LIVER, SIGNAL = 0.76; NT HIT: gi11420841, EVALUE 8.00e-60; SWISSPROT HIT: P19836, EVALUE 7.00e-15; EST_HUMAN HIT: BF677330.1, EVALUE 3.00e-20
ctcctaccaacaagtagctgttgggaaacagtgtttttgcttgcataagggctcttgcatgacctgagtggaagaggtcaaatattccatcggcgtatactctgacaggcctgtcag

SEQ ID NO: 28314 - DNA, 502 bp, Homo sapiens
  MAP TO AC006077.1; EXPRESSED IN BRAIN, SIGNAL = 1.1; EXPRESSED IN BONE MARROW, SIGNAL = 0.96; EXPRESSED IN FETAL LIVER, SIGNAL =   1; EXPRESSED IN ADULT LIVER, SIGNAL = 1.1; EXPRESSED IN PLACENTA, SIGNAL = 0.88; EXPRESSED IN LUNG, SIGNAL = 1.1; EST_HUMAN HIT: N76126.1, EVALUE 0.00e+00; NT HIT: AF027330.1, EVALUE 2.00e-02; SWISSPROT HIT: P21228, EVALUE 2.00e-03
aaaatgatgcatcctgttgccagcagtaatccagctttctgtgggcctggcaagccttcctgcctcaatgaagatgccatgagagctgctgatcagtttgacatatattcctcccagcaaagcaaatacagccacacagtcaaccacaaaccaatggtttgtcagaggcaagacccattaaatgaaacacacttgcagactacaagtggcagaagcatagaaataaaagatgaactaaagaaaaagaagaatctcaaccgatctggtaagcgtggccggccttcgggaaccaccaaatcagcaggataccggaccagcacaggcagacccctgggaaccaccaaagcagctggatttaagacaagtccaggcagacctttggggacaactaaagctgcgggatacaaagtcagcccaggcagacctccaggtagcattaaagctctatcccgtcttgccgatcttggttatggctgtggcactgctgcttttccttacccta

SEQ ID NO: 28315 - DNA, 313 bp, Homo sapiens; identical to SEQ ID NO: 23071
  MAP TO AC006094.1; EXPRESSED IN FETAL LIVER, SIGNAL = 0.86; EXPRESSED IN PLACENTA, SIGNAL = 0.76; EXPRESSED IN LUNG, SIGNAL = 0.9; EXPRESSED IN BRAIN, SIGNAL = 0.69; EXPRESSED IN BONE MARROW, SIGNAL = 0.9; EXPRESSED IN ADULT LIVER, SIGNAL = 0.8; SWISSPROT HIT: P04052, EVALUE 3.40e+00

SEQ ID NO: 28316 - DNA, 365 bp, Homo sapiens
  MAP TO AC002465.1; EXPRESSED IN LUNG, SIGNAL = 0.6; EXPRESSED IN BRAIN, SIGNAL = 0.62; EXPRESSED IN BONE MARROW, SIGNAL = 0.64; EXPRESSED IN ADULT LIVER, SIGNAL = 0.65; EST_HUMAN HIT: AU136463.1, EVALUE 1.00e-126; NT HIT: gi11422157, EVALUE 1.00e-126; SWISSPROT HIT: P09544, EVALUE 8.00e-42
cagggacaatgacgcccaactgaacaaacttctgatggaataaaatgcaatagaagataagcagggtctttgaagatggagtgagggagctgtgcatgagtggagagccatagggctgggtgaaggcaggagacttacttcggagtaggaccctgccaaaaaggctgtgatccctgtccagggtgttgcaattccagcggtgctggcggaactggtgctggcattctgctgtccactcggccacgccctggctaatggcacgcatcacatctggatgtcggtgacacagctgccgctggctgctcaccaggcctggcacattatcgcacatcaccctggaggagccacctgtagctctcatgtac

SEQ ID NO: 28317 - DNA, 140 bp, Homo sapiens
  MAP TO AC004920.1; EXPRESSED IN BRAIN, SIGNAL = 0.56; EXPRESSED IN ADULT LIVER, SIGNAL = 0.44; EXPRESSED IN LUNG, SIGNAL = 0.42; SWISSPROT HIT: O06314, EVALUE 5.30e+00; NT HIT: J05218.1, EVALUE 1.20e+00
aaacaagagtgggcacgtgtcttcactccacaatcgagcacacaggatccctgggactagaatcccagggctcacagccattcctgactctccagatgatgccacccaagatggtggtgacagctatgataactgtactc

SEQ ID NO: 28318 - DNA, 235 bp, Homo sapiens
  MAP TO AC005162.1; EXPRESSED IN LUNG, SIGNAL = 0.77; EXPRESSED IN PLACENTA, SIGNAL = 0.86; EXPRESSED IN BRAIN, SIGNAL = 0.84; EXPRESSED IN BONE MARROW, SIGNAL = 0.7; EXPRESSED IN ADULT LIVER, SIGNAL = 0.7; NT HIT: gi4503534, EVALUE 5.60e-01; SWISSPROT HIT: Q10606, EVALUE 4.90e-01
atgctagaatccctcagcatggtacacatgaaaacgtagcaaccagtcattgccagctctcatggtatgtttcccgctgtcgaacttctgtccccagagacgcttgtcatcacctgctgtctactccaaatgccaagttgttttcttcacttggtggctttgggcagagggggagaaatggctcatcacaaagaccagcagcaccttgggcttcaaaggtgggggttacacctgc

SEQ ID NO: 28319 - DNA, 136 bp, Homo sapiens
  MAP TO AC005084.1; EXPRESSED IN BONE MARROW, SIGNAL = 0.84; EXPRESSED IN ADULT LIVER, SIGNAL = 0.89; EXPRESSED IN PLACENTA, SIGNAL = 0.8; EXPRESSED IN FETAL LIVER, SIGNAL = 0.72; EXPRESSED IN BRAIN, SIGNAL = 0.75; EXPRESSED IN LUNG, SIGNAL = 0.88; SWISSPROT HIT: Q14168, EVALUE 2.10e-01; EST_HUMAN HIT: BF060842.1, EVALUE 7.00e-71; NT HIT: gi11526445, EVALUE 5.00e-71
ttttgtgaataccaagaatacgaatggcatctactggtaataactgattattgatagaagaattattcatttctgggcttgatggaggtgaatcataacactttgatgccacaatatcatgggcctccaacagtga

SEQ ID NO: 28320 - DNA, 158 bp, Homo sapiens
  MAP TO AC005091.1; EXPRESSED IN PLACENTA, SIGNAL =   1; EXPRESSED IN BRAIN, SIGNAL = 0.72; EXPRESSED IN BONE MARROW, SIGNAL = 0.87; EXPRESSED IN ADULT LIVER, SIGNAL = 0.79; EXPRESSED IN LUNG, SIGNAL = 0.83; EXPRESSED IN FETAL LIVER, SIGNAL = 0.68; SWISSPROT HIT: P19901, EVALUE 4.00e+00; NT HIT: U39073.1, EVALUE 9.10e-02
cttgaaggacaaaatgaggagccatctatttttgttatccaaataatacttctctgacatgaaaatatctttcttctctgtaatcccatctctctgaccattcccacatcccaccataggaaatccatacacctcagggactgtacagtcaggtctgc

SEQ ID NO: 28321 - DNA, 115 bp, Homo sapiens
  MAP TO AC005229.1; EXPRESSED IN PLACENTA, SIGNAL = 0.96; EXPRESSED IN FETAL LIVER, SIGNAL = 0.9; EXPRESSED IN BRAIN, SIGNAL = 0.86; EXPRESSED IN LUNG, SIGNAL =   1; EXPRESSED IN BONE MARROW, SIGNAL = 1.1; EXPRESSED IN ADULT LIVER, SIGNAL = 0.86; SWISSPROT HIT: P26675, EVALUE 7.10e+00; NT HIT: AL161508.2, EVALUE 1.60e-02; EST_HUMAN HIT: W96039.1, EVALUE 9.40e-02
tgtgggggatggtggagaagaaaaattccagactgattcttctgacttctctcattttaaatacgtaaaatctttaaaacgtttgcttgccattttatcttacatgcaataataa

SEQ ID NO: 28322 - DNA, 186 bp, Homo sapiens
  MAP TO AC005304.1; EXPRESSED IN PLACENTA, SIGNAL = 0.96; EXPRESSED IN FETAL LIVER, SIGNAL = 0.76; EXPRESSED IN LUNG, SIGNAL = 1.1; EXPRESSED IN BRAIN, SIGNAL = 0.75; EXPRESSED IN BONE MARROW, SIGNAL = 1.4; EXPRESSED IN ADULT LIVER, SIGNAL = 0.85; NT HIT: gi6981261, EVALUE 4.30e-01; SWISSPROT HIT: O42832, EVALUE 5.10e+00; EST_HUMAN HIT: AI470723.1, EVALUE 2.00e-16
ctagtagctcccttgtacgtgagggcaactggccgggaccactgtctggtgctgtctgaaggccaaggaatgaacaaggatgactgcccggcccaaaaaaggaaaagactattttctaccctttctagttatagtccctggtccctacgtgtgatgcagcgggcagtggcagcttgtccagggtga

SEQ ID NO: 28323 - DNA, 136 bp, Homo sapiens
  MAP TO AC005527.3; EXPRESSED IN PLACENTA, SIGNAL = 1.3; EXPRESSED IN FETAL LIVER, SIGNAL = 0.93; EXPRESSED IN LUNG, SIGNAL = 1.1; EXPRESSED IN BRAIN, SIGNAL = 0.97; EXPRESSED IN BONE MARROW, SIGNAL = 1.1; EXPRESSED IN ADULT LIVER, SIGNAL = 0.89; NT HIT: L18972.1, EVALUE 1.00e-59; EST_HUMAN HIT: BE256814.1, EVALUE 1.00e-59
ctgcatgatgctgttgaggcggggctggaggctgctcaggtactccttcttcacctcaatctccttgagaatcttctccttgttagataggcactctcggtacttctctgccagcctgttgggggaggaaagagca

SEQ ID NO: 28324 - DNA, 114 bp, Homo sapiens
  MAP TO AC005138.1; EXPRESSED IN LUNG, SIGNAL = 0.72; EXPRESSED IN BRAIN, SIGNAL = 0.56; EXPRESSED IN PLACENTA, SIGNAL = 0.8; EXPRESSED IN BONE MARROW, SIGNAL = 0.56; EXPRESSED IN ADULT LIVER, SIGNAL = 0.71; SWISSPROT HIT: P19835, EVALUE 6.30e-01; NT HIT: AF060179.1, EVALUE 1.60e-02; EST_HUMAN HIT: AU122079.1, EVALUE 4.00e-04
gactctgctccccacattccagcacagtgctcctctgctgccccagcagttgctcaaacaggcccagatgtggctcctgccacagctctggagggtgaaagcggtaagccttgg

SEQ ID NO: 28325 - DNA, 81 bp, Homo sapiens
  MAP TO AC004140.1; EXPRESSED IN BONE MARROW, SIGNAL = 1.3; EXPRESSED IN PLACENTA, SIGNAL = 1.5; EXPRESSED IN LUNG, SIGNAL = 1.6; EXPRESSED IN FETAL LIVER, SIGNAL = 1.6; EXPRESSED IN ADULT LIVER, SIGNAL = 1.5; EXPRESSED IN BRAIN, SIGNAL = 1.5; NT HIT: gi7770078, EVALUE 2.00e-38; SWISSPROT HIT: P06767, EVALUE 1.30e-01; EST_HUMAN HIT: AV721103.1, EVALUE 2.00e-38
aaatgaagctgaataaataatgttaggtagtttattaacgtcttctttcataattctgcattgcactcctttcataagcca

SEQ ID NO: 28326 - DNA, 174 bp, Homo sapiens
  MAP TO AC002492.1; EXPRESSED IN BRAIN, SIGNAL = 0.65; EXPRESSED IN BONE MARROW, SIGNAL = 0.51; NT HIT: gi6681210, EVALUE 6.30e+00; EST_HUMAN HIT: AA399149.1, EVALUE 6.00e-01; SWISSPROT HIT: P50070, EVALUE 4.50e-01
cagcaaaaatgacagcccagggtattccaggcagctgcttctccagctccaggcagatgattctggccctgccttgcaacagaaatggaatcgtttcgaggggatggtctccttgctctggatccagcagcagcagatgctccagccgaagacgtgtgtccactctgagcaagg

SEQ ID NO: 28327 - DNA, 112 bp, Homo sapiens
  MAP TO AC005154.1; EXPRESSED IN PLACENTA, SIGNAL = 0.68; EXPRESSED IN FETAL LIVER, SIGNAL = 1.1; EXPRESSED IN BONE MARROW, SIGNAL = 0.97; EXPRESSED IN LUNG, SIGNAL = 0.86; EXPRESSED IN BRAIN, SIGNAL = 0.91; EXPRESSED IN ADULT LIVER, SIGNAL = 0.96; NT HIT: AF229644.1, EVALUE 2.40e-01; EST_HUMAN HIT: AA219019.1, EVALUE 1.40e+00; SWISSPROT HIT: P32641, EVALUE 4.20e+00
cctggagatgccatcctctggccatacttgccatttcacggagctgccacagctctcaagcttctccattttccttgacccatcccagtttgtcctcttgaccaactctgac

SEQ ID NO: 28328 - DNA, 95 bp, Homo sapiens
  MAP TO AC005273.1; EXPRESSED IN PLACENTA, SIGNAL = 1.1; EXPRESSED IN LUNG, SIGNAL = 1.2; EXPRESSED IN FETAL LIVER, SIGNAL = 1.1; EXPRESSED IN BRAIN, SIGNAL = 0.94; EXPRESSED IN ADULT LIVER, SIGNAL = 1.1; EXPRESSED IN BONE MARROW, SIGNAL =   1; SWISSPROT HIT: P44857, EVALUE 9.50e+00; NT HIT: AF303225.1, EVALUE 3.10e+00
gaatcatagcattcgcactccttagcctgacacatttcttcataatcacgtccttgctgtccagtcttatattccattacttctccgtggacatg

SEQ ID NO: 28329 - DNA, 102 bp, Homo sapiens
  MAP TO AC005536.2; EXPRESSED IN LUNG, SIGNAL = 0.69; EXPRESSED IN BRAIN, SIGNAL = 0.66; EXPRESSED IN BONE MARROW, SIGNAL = 0.5; EXPRESSED IN ADULT LIVER, SIGNAL = 0.62; EXPRESSED IN PLACENTA, SIGNAL = 0.71; NT HIT: AB024553.1, EVALUE 2.20e-01
actatgttgtcaattatttcacacttcagaaaaataatacacatttgaaatctggcaagcatgaaaaaggtcacgtggaaaagaactctgctacagatgaag

SEQ ID NO: 28330 - DNA, 138 bp, Homo sapiens
  MAP TO AC004108.1; EXPRESSED IN BRAIN, SIGNAL = 0.91; EXPRESSED IN ADULT LIVER, SIGNAL = 0.74; EXPRESSED IN HELA, SIGNAL = 2.2; EXPRESSED IN BONE MARROW, SIGNAL = 0.78; EXPRESSED IN PLACENTA, SIGNAL = 0.78; EXPRESSED IN LUNG, SIGNAL = 0.82; EXPRESSED IN FETAL LIVER, SIGNAL = 0.86; EST_HUMAN HIT: AA493577.1, EVALUE 4.60e-01; SWISSPROT HIT: O61309, EVALUE 2.40e+00; NT HIT: gi9633809, EVALUE 4.80e+00
cagtagatagtacacttcagttcttccacgtgtatatagcactttataatttccatccgcagtataaaaaggtcatagaaaatccacagaaacctcaggcctcccaggagctgaaaggccattctactgggcaggccc

SEQ ID NO: 28331 - DNA, 257 bp, Homo sapiens
  MAP TO AC005539.1; EXPRESSED IN PLACENTA, SIGNAL = 5.1; EXPRESSED IN BONE MARROW, SIGNAL = 0.68; EXPRESSED IN LUNG, SIGNAL = 0.9; EXPRESSED IN FETAL LIVER, SIGNAL = 0.8; EXPRESSED IN BRAIN, SIGNAL = 0.81; EXPRESSED IN ADULT LIVER, SIGNAL = 0.8; SWISSPROT HIT: P11369, EVALUE 3.00e-13; EST_HUMAN HIT: BE144526.1, EVALUE 1.00e-24; NT HIT: AL163213.2, EVALUE 1.00e-17
atttatcccagggatgcaatcatggttccaacatatgcaaaataatcaatgtgatacattatatcaacagtatgaaggacaaaaaccatacaatcatttccatcaatgctgaaaacccatttgacaaaattcagcatctcttcatgaaagaaaaccctcaaaaaactgggtacagaaggaacatacgtcaacctaataaaagccatatacaaaagatccatagcagatgtcatactaactggggggtgagggggtac

SEQ ID NO: 28332 - DNA, 103 bp, Homo sapiens
  MAP TO AC004056.1; EXPRESSED IN PLACENTA, SIGNAL = 0.58; EXPRESSED IN LUNG, SIGNAL = 0.56; EXPRESSED IN BRAIN, SIGNAL = 0.57; EXPRESSED IN ADULT LIVER, SIGNAL = 0.52; EXPRESSED IN BONE MARROW, SIGNAL = 0.6; EST_HUMAN HIT: AV743341.1, EVALUE 8.20e-02; SWISSPROT HIT: P02831, EVALUE 2.40e+00; NT HIT: AJ001121.1, EVALUE 2.20e-01
acagatccctgctgaagctgggaaccagagggctgagtcactctcccctgctgtttatccgggtcccacaccagcttgctgtcctttctcatcatctcacttt

SEQ ID NO: 28333 - DNA, 88 bp, Homo sapiens
  MAP TO AC004123.1; EXPRESSED IN BRAIN, SIGNAL = 0.94; EXPRESSED IN BONE MARROW, SIGNAL = 0.86; EXPRESSED IN ADULT LIVER, SIGNAL = 0.9; EXPRESSED IN PLACENTA, SIGNAL = 0.72; EXPRESSED IN FETAL LIVER, SIGNAL = 0.92; EXPRESSED IN LUNG, SIGNAL = 0.85; EST_HUMAN HIT: AA351121.1, EVALUE 2.70e-01
aatttcagatccaaaaagccatcacagtcatcattctctctctttccaccactcaagtggaatgactgtattgatcaagattcttttg

SEQ ID NO: 28334 - DNA, 77 bp, Homo sapiens
  MAP TO AC005350.1; EXPRESSED IN BONE MARROW, SIGNAL = 0.71; EXPRESSED IN PLACENTA, SIGNAL = 0.79; EXPRESSED IN LUNG, SIGNAL = 0.88; EXPRESSED IN FETAL LIVER, SIGNAL = 0.71; EXPRESSED IN BRAIN, SIGNAL = 0.81; EXPRESSED IN ADULT LIVER, SIGNAL = 0.64; NT HIT: U46560.1, EVALUE 1.50e-01
ctacttcgatctccgatcggcccagccaaaccatgagaacagctctcttgaaggtcaccaatgcccatcatttggct

SEQ ID NO: 28335 - DNA, 431 bp, Homo sapiens
  MAP TO AC002536.1; EXPRESSED IN PLACENTA, SIGNAL = 0.92; EXPRESSED IN FETAL LIVER, SIGNAL =   1; EXPRESSED IN BONE MARROW, SIGNAL = 1.1; EXPRESSED IN ADULT LIVER, SIGNAL = 0.97; EXPRESSED IN LUNG, SIGNAL =   1; EXPRESSED IN BRAIN, SIGNAL = 1.1; SWISSPROT HIT: Q02877, EVALUE 1.00e-63; EST_HUMAN HIT: AV758467.1, EVALUE 0.00e+00; NT HIT: gi11440635, EVALUE 0.00e+00
aagttcttctttatatttgcctttctcttttccaacttgttgagacttggctttgcgttcaagaatttttttccgatccttgtccagttttagcctggtgataaccaccttgcttgggtgaatgcccacgtggacagtcgtgccgttggccttctcacgctgcacccgctcgatgtagatgacatatttctttctgtacacctggattaccttgccaatttgctgacctttgtagtgtcctcgaactacctggacctcgtcgtccttgcggatgggcatggagcggacattgtacttctgccgcagctccttggagagcggggatgacatgatcttcctgcgcacgtgtgagggggcattgaagtaacgtttgcggtttttactgcggtccgaggtaacgaagggattgaacttcatggtgaccctccggc

SEQ ID NO: 28336 - DNA, 269 bp, Homo sapiens
  MAP TO AC004808.1; EXPRESSED IN HELA, SIGNAL = 2.3; EXPRESSED IN PLACENTA, SIGNAL = 0.76; EXPRESSED IN BRAIN, SIGNAL = 1.2; EXPRESSED IN ADULT LIVER, SIGNAL = 0.76; EXPRESSED IN LUNG, SIGNAL = 0.85; EXPRESSED IN FETAL LIVER, SIGNAL = 0.81; EXPRESSED IN BONE MARROW, SIGNAL = 0.88; NT HIT: gi6912461, EVALUE 0.00e+00; EST_HUMAN HIT: AA883236.1, EVALUE 1.00e-130
ttatagtggatccagactcaggcctgttcagggagctgatgatgacaaagccgaagccctcattctctttgcggtgaatgaccacatcactggtctgcaggctgtgggaggcgaagccttcagggggagaggcattgctactgggggcagcgtggttgctgttggtgtaggttgcgtagtcactgcgtggagagctgtggtgggtggatacagagcctggacttctcccgttctctgggcagggctcccctgcaaaatataccacacac

SEQ ID NO: 28337 - DNA, 262 bp, Homo sapiens
  MAP TO AC002540.1; EXPRESSED IN PLACENTA, SIGNAL = 0.71; EXPRESSED IN LUNG, SIGNAL = 0.5; EXPRESSED IN BRAIN, SIGNAL = 0.86; EXPRESSED IN BONE MARROW, SIGNAL = 0.68; EXPRESSED IN ADULT LIVER, SIGNAL = 0.42; SWISSPROT HIT: P33908, EVALUE 7.20e+00; NT HIT: AL161535.2, EVALUE 4.00e-02
gcattataggaagcatgacaacattctgaaggttttacctgtggaagaaaaacaacaacaaaacaacaacaacaacaacaacaaatatccgaagaaagagttaattcacaaagacctaaagatgaatagtcttcttcacatttgtattaaaatcttatcatccttctttcctcagaaatcttttcgccttatttttttccctactatttggaacaatctatttctctgcccaaaagatggagaaaatgctaaaaacgctggt

SEQ ID NO: 28338 - DNA, 159 bp, Homo sapiens
  MAP TO AC004129.1; EXPRESSED IN LUNG, SIGNAL = 0.68; EXPRESSED IN BRAIN, SIGNAL = 0.98; EXPRESSED IN FETAL LIVER, SIGNAL = 1.8; EXPRESSED IN BONE MARROW, SIGNAL = 1.2; EXPRESSED IN ADULT LIVER, SIGNAL = 1.7; EXPRESSED IN PLACENTA, SIGNAL =   1; EST_HUMAN HIT: AI305192.1, EVALUE 1.40e-01; SWISSPROT HIT: Q46509, EVALUE 2.30e+00; NT HIT: AF061944.1, EVALUE 3.60e-01
ggagagcgagagggcaatggcagcaggctgatggaggaacggagccagcagggagccaggggttatacatcactgcagtcggtgacttctctgatgcatgaggcactcacttgccaatcaaacctgatacagcttttaccttgtggggttatgcgtgac

SEQ ID NO: 28339 - DNA, 200 bp, Homo sapiens
  MAP TO AC005224.1; EXPRESSED IN LUNG, SIGNAL = 0.5; EXPRESSED IN ADULT LIVER, SIGNAL = 0.48; EXPRESSED IN BRAIN, SIGNAL = 0.63; EXPRESSED IN BONE MARROW, SIGNAL = 0.55; NT HIT: AF003530.1, EVALUE 1.90e+00; SWISSPROT HIT: P24499, EVALUE 7.50e-01; EST_HUMAN HIT: AW854328.1, EVALUE 3.00e-12
tagacttttttgacaaagactttaagacaactgcattaagtatgtccgaagggctaaaggagaacacagaaaatgaaatcaggaaaacaatgtttgaacaaaatgagaatatcattaaagagaaaggaattataaaggggaaacagacagaaaatctggagaagaaaagtacaataacttaaattaaaaaaaaatcagaa

SEQ ID NO: 28340 - DNA, 245 bp, Homo sapiens
  MAP TO AC005084.1; EXPRESSED IN LUNG, SIGNAL = 0.61; EXPRESSED IN BRAIN, SIGNAL = 0.69; EXPRESSED IN BONE MARROW, SIGNAL = 0.66; EXPRESSED IN ADULT LIVER, SIGNAL = 0.5; EST_HUMAN HIT: AI806483.1, EVALUE 1.00e-126; SWISSPROT HIT: Q14168, EVALUE 1.00e-25; NT HIT: gi11526445, EVALUE 1.00e-126
ctgttgaggagtaatggtatctctataacttggtaagatttttagggtgacacttccactaatatttttcagtaattcttgtaattcctttggattatttccaacctcatggccattgacttctttaattatatctcccacatgaagtagaccttgtcgatctatcattcccccatggaggattcgggcaattaccagatcattattttcaaccctaaatgtcacaccctatgaaaaataagaaa

SEQ ID NO: 28341 - DNA, 93 bp, Homo sapiens
  MAP TO AC005229.1; EXPRESSED IN LUNG, SIGNAL = 0.93; EXPRESSED IN BRAIN, SIGNAL = 0.98; EXPRESSED IN BONE MARROW, SIGNAL = 0.87; EXPRESSED IN ADULT LIVER, SIGNAL = 0.86; EXPRESSED IN PLACENTA, SIGNAL = 0.79; EXPRESSED IN FETAL LIVER, SIGNAL = 1.1; NT HIT: AE002301.2, EVALUE 7.70e-01; EST_HUMAN HIT: BE880044.1, EVALUE 1.00e-03
ttagtgtttgggcatcttttggtcacccagtcctgttctctcttctcttttttcgctttcctgcctgccacatttcctgatggcaaagaaaac

SEQ ID NO: 28342 - DNA, 117 bp, Homo sapiens
  MAP TO AC004038.1; EXPRESSED IN LUNG, SIGNAL = 1.3; EXPRESSED IN FETAL LIVER, SIGNAL = 0.9; EXPRESSED IN BRAIN, SIGNAL = 0.58; EXPRESSED IN BONE MARROW, SIGNAL = 1.3; EXPRESSED IN ADULT LIVER, SIGNAL = 0.88; EXPRESSED IN PLACENTA, SIGNAL = 1.3; NT HIT: AF223391.1, EVALUE 5.00e-24; SWISSPROT HIT: P16287, EVALUE 4.10e+00; EST_HUMAN HIT: AI911076.1, EVALUE 3.00e-20
atcaatatcactgtcttccacctccatgttttgtgccactggaaactcttcaggggcaaaaacacatatggaactgtcctctcctgtgataacaatgcctccttctggaatacctcc

SEQ ID NO: 28343 - DNA, 157 bp, Homo sapiens
  MAP TO AC006324.2; EXPRESSED IN LUNG, SIGNAL = 0.54; EXPRESSED IN ADULT LIVER, SIGNAL = 0.49; EXPRESSED IN BRAIN, SIGNAL = 0.59; SWISSPROT HIT: Q90069, EVALUE 4.60e-01; EST_HUMAN HIT: AI032107.1, EVALUE 2.10e+00
agatgacataggctttcagtttagcagtgaactttgtgtcacattgatgctgcagcctgtttctaagactccccagatgtgtgtgacagttcttattatgcttctccagaacagggaccctcaacatcatggtgtcatttgtagagtttgttatgag

SEQ ID NO: 28344 - DNA, 211 bp, Homo sapiens
  MAP TO AC005294.1; EXPRESSED IN PLACENTA, SIGNAL = 0.92; EXPRESSED IN LUNG, SIGNAL = 0.9; EXPRESSED IN FETAL LIVER, SIGNAL = 0.85; EXPRESSED IN BRAIN, SIGNAL = 0.64; EXPRESSED IN ADULT LIVER, SIGNAL = 0.9; EXPRESSED IN BONE MARROW, SIGNAL = 0.82; SWISSPROT HIT: P22614, EVALUE 4.30e-01; NT HIT: gi11424049, EVALUE 3.20e-02; EST_HUMAN HIT: AW176337.1, EVALUE 4.80e-02
ttctgaggataatgcatcccaagcagaggaaactgcaagttcaaagctgtggggtgaggagatacttggcctgttcagggaaggggagaagccagagaagagctcaacaaggtgaggggagaccaggccatggagagcatttgcggcccctgcaaggcctttgactgctaccatgcagggtggaaaagccactgggaagtttgagaatgga

SEQ ID NO: 28345 - DNA, 147 bp, Homo sapiens
  MAP TO AC005509.1; EXPRESSED IN BONE MARROW, SIGNAL = 0.69; EXPRESSED IN PLACENTA, SIGNAL = 0.71; EXPRESSED IN LUNG, SIGNAL = 0.9; EXPRESSED IN FETAL LIVER, SIGNAL = 0.78; EXPRESSED IN BRAIN, SIGNAL = 0.69; EXPRESSED IN ADULT LIVER, SIGNAL = 0.62; SWISSPROT HIT: P01133, EVALUE 9.00e-23; NT HIT: X04571.1, EVALUE 1.00e-77; EST_HUMAN HIT: AI678202.1, EVALUE 9.00e-52
tagccagctctgatctaatctggcccagtggaataacgattgacttcttaactgacaagttgtactggtgcgatgccaagcagtctgtgattgaaatggccaatctggatggttcaaaacgccgaagacttacccagaatgatgtag

SEQ ID NO: 28346 - DNA, 79 bp, Homo sapiens
  MAP TO AC005304.1; EXPRESSED IN LUNG, SIGNAL = 0.94; EXPRESSED IN BRAIN, SIGNAL = 0.7; EXPRESSED IN BONE MARROW, SIGNAL = 0.85; EXPRESSED IN ADULT LIVER, SIGNAL = 0.88; EXPRESSED IN PLACENTA, SIGNAL = 0.8; EXPRESSED IN FETAL LIVER, SIGNAL = 0.87; EST_HUMAN HIT: AW827327.1, EVALUE 6.00e-02; NT HIT: AB000381.1, EVALUE 4.00e-02
ccatcctgtggtcaaaagacttagagccaaaaatcttacagccaatttcatcattccagacaggaacggaggtggacag

SEQ ID NO: 28347 - DNA, 234 bp, Homo sapiens
  MAP TO AC002059.3; EXPRESSED IN PLACENTA, SIGNAL = 0.94; EXPRESSED IN ADULT LIVER, SIGNAL = 1.1; EXPRESSED IN LUNG, SIGNAL = 1.1; EXPRESSED IN FETAL LIVER, SIGNAL = 1.1; EXPRESSED IN BRAIN, SIGNAL = 1.3; EXPRESSED IN BONE MARROW, SIGNAL = 0.98; SWISSPROT HIT: P19474, EVALUE 1.00e-08
gacatggggacaggcaaataatgggatttgggtgcctgcaaagaatctgttaatcgacaagagaattgtgtggtcttcagaacttggcttctggactgtgggtatgaggaaagaaaagctctttgcagccagcactgtgcctttaaccaccctctgggtgagtccggggctatgcagggtaggcattttcctggatatgggtatgacaatgatttccttttataacattaatga

SEQ ID NO: 28348 - DNA, 167 bp, Homo sapiens
  MAP TO AC005600.1; EXPRESSED IN ADULT LIVER, SIGNAL = 0.63; EXPRESSED IN PLACENTA, SIGNAL = 3.6; EXPRESSED IN LUNG, SIGNAL = 0.64; EXPRESSED IN BRAIN, SIGNAL = 0.72; EXPRESSED IN BONE MARROW, SIGNAL = 0.61; NT HIT: L48524.1, EVALUE 4.00e-87; SWISSPROT HIT: P49815, EVALUE 9.00e-21; EST_HUMAN HIT: H19298.1, EVALUE 5.70e-01
gccatggcatgtccgaacgaggtggtgtcctatgagatcgtcctgtccatcaccaggctcatcaagaagtataggaaggagctccaggtggtggcgtgggacattctgctgaacatcatcgaacggctccttcagcagctccaggtggggtgggggcaggagctccg

SEQ ID NO: 28349 - DNA, 216 bp, Homo sapiens
  MAP TO AC006409.2; EXPRESSED IN LUNG, SIGNAL = 0.63; EXPRESSED IN BRAIN, SIGNAL = 0.67; EXPRESSED IN ADULT LIVER, SIGNAL = 0.6; SWISSPROT HIT: P46097, EVALUE 3.00e-17; EST_HUMAN HIT: BE263297.1, EVALUE 1.00e-109; NT HIT: AF038535.1, EVALUE 1.00e-104
acccctacgtgaaggtatggctgatgtacaaggacaagcgggtggagaagaagaagacggtgacgatgaagaggaacctgaaccccatcttcaatgagtccttcgccttcgatatccccacggagaagctgagggagacgaccatcatcatcactgtcatggacaaggacaagctcagccgcaatgacgtcatcggcaaggtaggggcgaggcagg

SEQ ID NO: 28350 - DNA, 322 bp, Homo sapiens
  MAP TO AC005610.1; EXPRESSED IN BONE MARROW, SIGNAL = 0.61; EXPRESSED IN ADULT LIVER, SIGNAL = 0.64; EXPRESSED IN LUNG, SIGNAL = 0.73; EXPRESSED IN BRAIN, SIGNAL = 0.84; SWISSPROT HIT: P55982, EVALUE 3.60e+00; EST_HUMAN HIT: T05552.1, EVALUE 3.00e-01; NT HIT: V00726.1, EVALUE 2.00e-01
ccatgtggagctcagtttctagaggggaagacagatgaagcaaatcagcagacgtaagtgcttgaggcactgtagatgtaggtgaagaatattgagagctggtgggaagggacacgctctctgaaggggaagcagagggaggacctttgggaagtgggtatggatccctaggggaagagagctctaggcaagggaacaagtggtgcaaagaccatgagctagggtcatgcctgacgtgcttcaggaacagcagtagggcccataaggctggaccagatctgcggagacagacaggaacacgtgcagcaaactgaggaggagc

SEQ ID NO: 28351 - DNA, 123 bp, Homo sapiens
  MAP TO AC006241.1; EXPRESSED IN ADULT LIVER, SIGNAL = 0.64; EXPRESSED IN LUNG, SIGNAL = 0.95; EXPRESSED IN PLACENTA, SIGNAL = 0.96; EXPRESSED IN FETAL LIVER, SIGNAL = 0.89; EXPRESSED IN BRAIN, SIGNAL = 0.87; EXPRESSED IN BONE MARROW, SIGNAL = 0.82; EST_HUMAN HIT: BE311851.1, EVALUE 3.00e-63; NT HIT: AB046844.1, EVALUE 2.00e-63; SWISSPROT HIT: O14709, EVALUE 7.10e+00
caccagaagctggtacccagttaccaaagatcatcttcagcagggatgagaaagtccttggtcagagccaggagcctaatgttaaccctgcttcagcaggcaaccagacccagaagacacaag

SEQ ID NO: 28352 - DNA, 120 bp, Homo sapiens
  MAP TO AC005536.2; EXPRESSED IN BRAIN, SIGNAL = 0.62; EXPRESSED IN BONE MARROW, SIGNAL = 0.64; EXPRESSED IN ADULT LIVER, SIGNAL = 0.58; EXPRESSED IN PLACENTA, SIGNAL = 0.64; EXPRESSED IN LUNG, SIGNAL = 0.75; SWISSPROT HIT: Q9VDD9, EVALUE 9.30e+00; NT HIT: AB041523.1, EVALUE 4.10e+00
aacgctgtgattatctaagggcttgtttaaaataccagaacatgcagcaacttgagagtcaggaaatctggatccaatggctcacaaatgaccacaagccatgtaagactcttgggcctt

SEQ ID NO: 28353 - DNA, 114 bp, Homo sapiens
  MAP TO AC005510.3; EXPRESSED IN BRAIN, SIGNAL = 0.6; EXPRESSED IN ADULT LIVER, SIGNAL = 0.66; EXPRESSED IN PLACENTA, SIGNAL = 0.69; EXPRESSED IN BONE MARROW, SIGNAL = 0.71; EXPRESSED IN LUNG, SIGNAL = 0.68; EST_HUMAN HIT: T66802.1, EVALUE 3.70e-01; SWISSPROT HIT: P43465, EVALUE 5.40e+00
ctacaacaaaatgctagtccagacaaatttcaaatggtcacatatacattttcacagatttccatgacatgtgaaatgtgcctaacaacgacagaagtaagtgtgccaagactc

SEQ ID NO: 28354 - DNA, 93 bp, Homo sapiens
  MAP TO AC004098.1; EXPRESSED IN BRAIN, SIGNAL = 0.61; EXPRESSED IN BONE MARROW, SIGNAL = 0.77; EXPRESSED IN ADULT LIVER, SIGNAL = 0.76; EXPRESSED IN PLACENTA, SIGNAL = 0.59; EXPRESSED IN LUNG, SIGNAL = 0.45; NT HIT: gi11079227, EVALUE 5.00e-36; SWISSPROT HIT: P46460, EVALUE 3.00e-08; EST_HUMAN HIT: AL118621.1, EVALUE 7.00e-36
attgaagtaggactggttgttggaaacagtcaagttgcatttgaaaaagcagaaaattcgtcacttaatcttattggtaagatttacagtttt

SEQ ID NO: 28355 - DNA, 183 bp, Homo sapiens
  MAP TO AC005324.1; EXPRESSED IN LUNG, SIGNAL = 0.71; EXPRESSED IN BRAIN, SIGNAL = 0.66; EXPRESSED IN BONE MARROW, SIGNAL = 0.65; EXPRESSED IN ADULT LIVER, SIGNAL = 0.5; SWISSPROT HIT: Q09855, EVALUE 2.60e-01; NT HIT: Y09798.2, EVALUE 6.70e+00
catccactattccgggggagatctgatagctgtgtcatctaatcgaaagatccatcttctggacatcatacaagtgaaagcgatacccgttgaattccgaggccatgctgggagtgtccgggccctcttcctgtgtgaggaggaaaactttctcctaagcgggagctatgacctaagtatcag

SEQ ID NO: 28356 - DNA, 143 bp, Homo sapiens
  MAP TO AC003682.1; EXPRESSED IN LUNG, SIGNAL = 0.41; EXPRESSED IN BONE MARROW, SIGNAL = 0.51; EXPRESSED IN BRAIN, SIGNAL = 0.61; EXPRESSED IN ADULT LIVER, SIGNAL = 0.41; EST_HUMAN HIT: AA573446.1, EVALUE 5.00e-75; SWISSPROT HIT: Q57809, EVALUE 1.00e+00; NT HIT: AL163281.2, EVALUE 1.00e-06
cttctatctcggcttctggtagccccgtgtgttccttggcttgaagatgttcttcctgtgtcttcacatcgtcttccctctgtacatctgcctctgtgaccaaatttcccatttttctaaggacacagtcatagtcaattagg

SEQ ID NO: 28357 - DNA, 151 bp, Homo sapiens
  MAP TO AC003043.1; EXPRESSED IN PLACENTA, SIGNAL = 0.67; EXPRESSED IN LUNG, SIGNAL = 0.69; EXPRESSED IN BONE MARROW, SIGNAL = 0.49; EXPRESSED IN BRAIN, SIGNAL = 0.66; EXPRESSED IN ADULT LIVER, SIGNAL = 0.56; NT HIT: X04252.1, EVALUE 3.00e-32; EST_HUMAN HIT: BE069882.1, EVALUE 8.00e-34; SWISSPROT HIT: P39188, EVALUE 8.00e-03
gtcccagctacttgggaggctgaagcaggaggattgcttgaggcccgtcctggactgtagtgcgctatgcagatcgggtgtccacactaagttcagcatcgatatagtgacctcccaggagtgggggaccaacaggttgcctaaggtggag

SEQ ID NO: 28358 - DNA, 199 bp, Homo sapiens
  MAP TO AC002073.1; EXPRESSED IN ADULT LIVER, SIGNAL = 0.61; EXPRESSED IN LUNG, SIGNAL = 0.64; EXPRESSED IN BRAIN, SIGNAL = 0.6; EXPRESSED IN BONE MARROW, SIGNAL = 0.59; SWISSPROT HIT: Q09463, EVALUE 5.00e-07; EST_HUMAN HIT: AW410961.1, EVALUE 1.00e-107; NT HIT: AF053958.1, EVALUE 3.00e-05
accagaagaggtggccacacaggctgatgacggcatccttggctgtgtccaagcagatgttgcactcgaaagtgctgtcctgccctccgctctcgccagcgccattgctgctcccactgggcccccctgcactggagttctcaggagatgcagaggccgagggccccttgcttgccatccttggctgtcagcgaagctc

SEQ ID NO: 28359 - DNA, 231 bp, Homo sapiens
  MAP TO AC003007.1; EXPRESSED IN ADULT LIVER, SIGNAL = 0.58; EXPRESSED IN LUNG, SIGNAL = 0.67; EXPRESSED IN BRAIN, SIGNAL = 0.64; EXPRESSED IN BONE MARROW, SIGNAL = 0.6; SWISSPROT HIT: P19711, EVALUE 9.30e+00; NT HIT: AB040413.1, EVALUE 8.00e-34; EST_HUMAN HIT: AW996292.1, EVALUE 1.00e-127
gttgttgctgtagcccgtgctgtttatcaagcagtgctcagcttgaagaatattcctgttttggagactgcctataagttaatattgggagaaatgacttgtgccctaaacaacctcctgcacagtctgcagcttcctgagtcctgttctgaaataaaacatgaggcttttaagaatcatgtgttcaatgtagacaatgcaaaatttgtagttaaatttgacctcaattga

SEQ ID NO: 28360 - DNA, 287 bp, Homo sapiens
  MAP TO AC000384.1; EXPRESSED IN LUNG, SIGNAL = 0.66; EXPRESSED IN BRAIN, SIGNAL = 0.67; EXPRESSED IN BONE MARROW, SIGNAL = 0.62; EXPRESSED IN ADULT LIVER, SIGNAL = 0.67; NT HIT: gi11545923, EVALUE 1.00e-128; EST_HUMAN HIT: AL134734.1, EVALUE 6.60e-02; SWISSPROT HIT: P45844, EVALUE 6.00e-14
cccttttgcgccagcagggcccctcccgcacggaataggacagctccacgaactcgatgtccacggctgagcgcttgggcaggtgggagaagcgctgggcttcagtgatgtggttctccaccttcttcaggtgcgtggtcagcacagggggttccgccccgtcctccagcgtcacggccatggccacagcccccggccctagtccacagcccacggcctccagcgccttctccgccatcacgccgccgacctgcaaggggagggcctgctcagtttggggcagacca

SEQ ID NO: 28361 - DNA, 172 bp, Homo sapiens
  MAP TO AC005630.1; EXPRESSED IN ADULT LIVER, SIGNAL = 0.41; EXPRESSED IN LUNG, SIGNAL = 0.45; EXPRESSED IN BRAIN, SIGNAL = 0.71; EXPRESSED IN BONE MARROW, SIGNAL = 0.52; SWISSPROT HIT: P49311, EVALUE 4.50e-01; NT HIT: L31397.1, EVALUE 7.00e-06; EST_HUMAN HIT: BF373329.1, EVALUE 2.00e-59
gacttctaagtctaacagggcagcctcaactggttggcggggggctgcaggttacataggtgaggctgggcccttcctgctgggaaaagcagaagagggagactccgcggcaggaaagggaagtgagctctctaggtggagctcagctgggccagcagcactattggctgaa

SEQ ID NO: 28362 - DNA, 120 bp, Homo sapiens
  MAP TO AC003082.1; EXPRESSED IN PLACENTA, SIGNAL = 0.66; EXPRESSED IN LUNG, SIGNAL = 0.58; EXPRESSED IN BRAIN, SIGNAL = 0.71; EXPRESSED IN BONE MARROW, SIGNAL = 0.63; EXPRESSED IN ADULT LIVER, SIGNAL = 0.51; NT HIT: L01081.1, EVALUE 2.70e-01
attccaggtcaaaaagaataaaacatctggaattgtactagttttattgtctggtgaattaaaaaaggaggaggaggagaggacaaataagaaaaatgaaagaggaggaggggaacagaa

SEQ ID NO: 28363 - DNA, 175 bp, Homo sapiens
  MAP TO AC005683.2; EXPRESSED IN LUNG, SIGNAL = 0.58; EXPRESSED IN PLACENTA, SIGNAL = 0.63; EXPRESSED IN BRAIN, SIGNAL = 1.7; EXPRESSED IN BONE MARROW, SIGNAL = 0.52; EXPRESSED IN ADULT LIVER, SIGNAL = 0.4; NT HIT: gi4826863, EVALUE 3.00e-94; SWISSPROT HIT: P35331, EVALUE 8.00e-20; EST_HUMAN HIT: AL138036.1, EVALUE 5.00e-94
tcatccacagttgttactgcttcctctgtaatttgacttcctgatcctgctgatgtttgtgcatagaaataaaacttatatcgagtgctgaaatttaaattttttaaagtccaccgtgtcttgttggcaggaattttcaaatctaccagagggcctaattcatgtgtgctgttaa

SEQ ID NO: 28364 - DNA, 85 bp, Homo sapiens
  MAP TO AC003684.1; EXPRESSED IN LUNG, SIGNAL = 0.47; EXPRESSED IN PLACENTA, SIGNAL = 0.58; EXPRESSED IN BRAIN, SIGNAL = 0.65; EXPRESSED IN ADULT LIVER, SIGNAL = 1.2; NT HIT: AF248863.1, EVALUE 6.90e-01; SWISSPROT HIT: P41212, EVALUE 7.30e+00
ctgctgtgcggggaactggcgtggtccacatccagcttcagattctctcctacataatccccaaagcagagaagttttgcacgca

SEQ ID NO: 28365 - DNA, 144 bp, Homo sapiens
  MAP TO AC003002.1; EXPRESSED IN BRAIN, SIGNAL = 0.63; EXPRESSED IN BONE MARROW, SIGNAL = 0.57; EXPRESSED IN ADULT LIVER, SIGNAL = 0.91; EXPRESSED IN LUNG, SIGNAL = 0.56; SWISSPROT HIT: Q60696, EVALUE 4.10e-02; EST_HUMAN HIT: BE670351.1, EVALUE 3.00e-27; NT HIT: AF071491.1, EVALUE 8.20e-02
cgccgatgaacctgactgaggtgggtgccgcgtcccagggcgccccgcccgatccctcctccgagtgccgaagccccgaggaggggccctgcaggtcaggcccctgtgtcccaaagagaggagcgttcttgtgtggggtaccgg

SEQ ID NO: 28366 - DNA, 140 bp, Homo sapiens
  MAP TO AC005703.1; EXPRESSED IN BRAIN, SIGNAL = 0.69; EXPRESSED IN PLACENTA, SIGNAL =   1; EXPRESSED IN LUNG, SIGNAL = 0.58; EXPRESSED IN BONE MARROW, SIGNAL = 0.59; EXPRESSED IN ADULT LIVER, SIGNAL = 0.6; NT HIT: M94048.1, EVALUE 2.00e-73; EST_HUMAN HIT: AL121482.1, EVALUE 3.00e-73; SWISSPROT HIT: Q01453, EVALUE 6.00e-22
ctgcggccatctacacggtgaggcacccggagtggcatctcaactcggattactcctacggtttcgcctacatcctggcctgggtggccttccccctggcccttctcagcggtgtcatctatgtgatcttgcggaaacgc

SEQ ID NO: 28367 - DNA, 90 bp, Homo sapiens
  MAP TO AC004384.1; EXPRESSED IN PLACENTA, SIGNAL = 0.62; EXPRESSED IN ADULT LIVER, SIGNAL = 0.49; EXPRESSED IN LUNG, SIGNAL = 0.48; EXPRESSED IN BRAIN, SIGNAL = 0.58; EXPRESSED IN BONE MARROW, SIGNAL = 0.51; EST_HUMAN HIT: AW593494.1, EVALUE 3.00e+00; NT HIT: gi4502902, EVALUE 2.50e+00
atgagaaatttccaatactcagatggacagtgtcaacaaaaaaggagattcccatccccggagataatcagtaagaggcaaaacttttta

SEQ ID NO: 28368 - DNA, 165 bp, Homo sapiens
  MAP TO AC004169.3; EXPRESSED IN LUNG, SIGNAL = 0.46; EXPRESSED IN BRAIN, SIGNAL = 0.73; EXPRESSED IN ADULT LIVER, SIGNAL = 0.54; EXPRESSED IN BONE MARROW, SIGNAL = 0.77; SWISSPROT HIT: O54861, EVALUE 1.00e-02; NT HIT: AB037750.1, EVALUE 2.00e-73; EST_HUMAN HIT: BE067923.1, EVALUE 6.00e-41
cacaggaagtccgagtcccggcactcgcacacgcgggacgtgagcgccgacgtgaagctcctccccttgatgcaccaggacgtggactttcttttccggaaacttctctgctggcccatgatacagcggtcgccctgcagcaggaacatcagggtaaggagctgc

SEQ ID NO: 28369 - DNA, 190 bp, Homo sapiens
  MAP TO AC005831.1; EXPRESSED IN LUNG, SIGNAL = 0.68; EXPRESSED IN BONE MARROW, SIGNAL = 0.62; EXPRESSED IN ADULT LIVER, SIGNAL = 0.61; EXPRESSED IN BRAIN, SIGNAL = 0.62; SWISSPROT HIT: P17964, EVALUE 6.00e-03; EST_HUMAN HIT: AI217354.1, EVALUE 2.60e+00
gaagctgtgggagaccgggtgcctgttcttctgctgggtaataagcttgacaacgagaaggagcgggaagtcccccggggcctcggagagcagcttgccacggtaaagagcaagcatttccatctctctggacagagtgtgaccccgagggaagttgggcaagtgcccaagagccttggtggggactttc

SEQ ID NO: 28370 - DNA, 184 bp, Homo sapiens
  MAP TO AC004053.1; EXPRESSED IN ADULT LIVER, SIGNAL = 0.48; EXPRESSED IN PLACENTA, SIGNAL =   1; EXPRESSED IN LUNG, SIGNAL = 1.1; EXPRESSED IN BRAIN, SIGNAL = 0.74; EXPRESSED IN FETAL LIVER, SIGNAL = 0.75; EXPRESSED IN BONE MARROW, SIGNAL = 1.2; EST_HUMAN HIT: AU136525.1, EVALUE 1.60e-01; SWISSPROT HIT: Q04733, EVALUE 3.00e+00; NT HIT: U49793.1, EVALUE 1.70e+00
aaaattctatgaaaaaaagaatgtgtattccaaaaaacggcacatgaacgggtgccttaaggaaaagctgagtatcccagaggagaagagcaactcaaaccttgtagatctattggttagagatgcccccaatgattgccatgagttgtcccagggaaagagcaatgttaggtacagggttgtc

SEQ ID NO: 28371 - DNA, 157 bp, Homo sapiens
  MAP TO AC004066.1; EXPRESSED IN PLACENTA, SIGNAL = 0.58; EXPRESSED IN LUNG, SIGNAL = 0.76; EXPRESSED IN BRAIN, SIGNAL = 0.64; EXPRESSED IN BONE MARROW, SIGNAL = 0.52; EXPRESSED IN ADULT LIVER, SIGNAL = 0.47; SWISSPROT HIT: P54271, EVALUE 2.00e-01; NT HIT: AB026722.1, EVALUE 4.00e-81; EST_HUMAN HIT: BF105097.1, EVALUE 2.00e-83
taaagaagaggcggtaattctgcgagcagggctggccgcgctcctcagtgtggtacagggccatagcacggcgcgacccggtccctgcactggtccccaaccgcaggcacgcagcggctggggcacccgtgcgcagcagccgcagcagcgcgctcat

SEQ ID NO: 28372 - DNA, 199 bp, Homo sapiens
  MAP TO AC002477.1; EXPRESSED IN BRAIN, SIGNAL = 1.7; EXPRESSED IN PLACENTA, SIGNAL = 2.1; EXPRESSED IN LUNG, SIGNAL = 0.46; EXPRESSED IN HELA, SIGNAL = 2.2; EXPRESSED IN BONE MARROW, SIGNAL = 2.1; EXPRESSED IN ADULT LIVER, SIGNAL = 1.9; EXPRESSED IN FETAL LIVER, SIGNAL = 1.9; SWISSPROT HIT: P11161, EVALUE 8.60e+00; NT HIT: M95823.1, EVALUE 4.70e-01; EST_HUMAN HIT: BE535227.1, EVALUE 1.00e-108
agcggtaggactggtttcgggagccttggctgaggccacccagctgatgggtgagtccattccggtccccggaccgagagcaagagtgcgagcgagagcggcggccccgcggggagcgggcagatttgctgggcttcggactcttcgacgaactgcgacgtcttccccccgagcccgaggcctccctatccgggctgcg

SEQ ID NO: 28373 - DNA, 155 bp, Homo sapiens
  MAP TO AC005884.1; EXPRESSED IN BRAIN, SIGNAL = 0.85; EXPRESSED IN PLACENTA, SIGNAL = 0.8; EXPRESSED IN LUNG, SIGNAL = 0.99; EXPRESSED IN BONE MARROW, SIGNAL = 0.89; EXPRESSED IN ADULT LIVER, SIGNAL = 0.87; EXPRESSED IN FETAL LIVER, SIGNAL = 0.71; NT HIT: gi8923130, EVALUE 2.00e-82; EST_HUMAN HIT: BF001692.1, EVALUE 4.00e-82; SWISSPROT HIT: P71571, EVALUE 1.40e+00
gatcatctgtatcaaaatccaaaagaggctgtggcgtgtcactcggaccatgagactgcaacacagatgaactggatgagataactgtggtttggcctgagggatggatggttttgaactggaactgtggacccatccacagacgtctatggggt

SEQ ID NO: 28374 - DNA, 285 bp, Homo sapiens
  MAP TO AC002364.1; EXPRESSED IN BRAIN, SIGNAL = 0.55; EXPRESSED IN ADULT LIVER, SIGNAL = 0.57; EXPRESSED IN LUNG, SIGNAL = 0.48; SWISSPROT HIT: P34152, EVALUE 2.20e+00; EST_HUMAN HIT: BE515100.1, EVALUE 1.00e-125; NT HIT: AB033106.1, EVALUE 1.00e-125
tcatgcaggtcttccctggctgagctcatggcccgcacctccctggacttggagctggatctccaggcgtcgagaacacggcagaggcagctgaatgaggagctctgcgccctccgtgagctgcggcagcggttggaggacgcccagctccgtggccagactgacctcccaccctgggtgcttcgggacgagcggctccgtggcctgctgcgggaggccgagcggcaggtgggggtcccctgtggccagctcccgcctgcacctcactgctccctgctccaggct

SEQ ID NO: 28375 - DNA, 125 bp, Homo sapiens
  MAP TO AC006075.1; EXPRESSED IN PLACENTA, SIGNAL = 0.67; EXPRESSED IN BRAIN, SIGNAL = 0.7; EXPRESSED IN ADULT LIVER, SIGNAL = 0.48; EXPRESSED IN LUNG, SIGNAL = 0.5; EXPRESSED IN BONE MARROW, SIGNAL = 0.57; EST_HUMAN HIT: Z25303.1, EVALUE 9.00e-61; NT HIT: gi11431054, EVALUE 2.00e-64; SWISSPROT HIT: P54537, EVALUE 1.40e+00
cgacggatggccagccccagacacaaccttctgaaaacacggaaaacaagtctcagcccaagcggctgcatgtctccaatatccccttcaggttccgggatccggacctcagacaaatgtttggt

SEQ ID NO: 28376 - DNA, 100 bp, Homo sapiens
  MAP TO AC004844.1; EXPRESSED IN LUNG, SIGNAL = 0.56; EXPRESSED IN BRAIN, SIGNAL = 0.63; EXPRESSED IN BONE MARROW, SIGNAL = 0.51; EXPRESSED IN ADULT LIVER, SIGNAL = 0.52; EXPRESSED IN PLACENTA, SIGNAL = 0.57; NT HIT: AF051142.1, EVALUE 8.40e-01; EST_HUMAN HIT: AA478654.1, EVALUE 1.20e+00
tgggctgagctctgtgctatgtctgagcagggatcccaccatcaaccacatgcagcttcagctcctgaagcttttcctgcaatgtgagttccccaaacgg

SEQ ID NO: 28377 - DNA, 177 bp, Homo sapiens
  MAP TO AC002070.1; EXPRESSED IN ADULT LIVER, SIGNAL = 0.51; EXPRESSED IN LUNG, SIGNAL = 0.53; EXPRESSED IN BRAIN, SIGNAL = 0.65; EXPRESSED IN BONE MARROW, SIGNAL = 0.65; SWISSPROT HIT: Q05421, EVALUE 2.60e-01; EST_HUMAN HIT: BE280109.1, EVALUE 6.10e-01; NT HIT: AJ011400.1, EVALUE 1.00e-01
ggggacatccctgggctccattccccaagcccttcttatctgtgtccacagccgcactaattgtgacatcaacatccactacaagagtggggtgtgtaacaccatgagggccaagttttacagcgtagcccaggaggctggcttctgcctgcaggacaagatggaaatcctcatgaa

SEQ ID NO: 28378 - DNA, 99 bp, Homo sapiens
  MAP TO AC002490.1; EXPRESSED IN PLACENTA, SIGNAL = 0.69; EXPRESSED IN LUNG, SIGNAL = 0.78; EXPRESSED IN BRAIN, SIGNAL = 0.9; EXPRESSED IN ADULT LIVER, SIGNAL = 0.7; EXPRESSED IN BONE MARROW, SIGNAL = 0.71; EST_HUMAN HIT: D52435.1, EVALUE 6.00e-49; NT HIT: gi7662209, EVALUE 4.00e-49; SWISSPROT HIT: Q61292, EVALUE 5.50e+00
gccatagcaccgcaaccgtgtgagcagcaggctcatcccgtggaccggtggtgggaacgtgaggtgatgcctttgggattacagcttgagttctgtcac

SEQ ID NO: 28379 - DNA, 87 bp, Homo sapiens
  MAP TO AC000121.1; EXPRESSED IN LUNG, SIGNAL = 0.55; EXPRESSED IN BRAIN, SIGNAL = 0.57; EXPRESSED IN BONE MARROW, SIGNAL = 0.51; EXPRESSED IN ADULT LIVER, SIGNAL = 0.44; SWISSPROT HIT: P76008, EVALUE 3.20e+00; NT HIT: gi4826977, EVALUE 5.00e-42
gggccatatggttcacagaaggtgacggcattgccatgcataatcgcgccacactgttctccagtctcacagttgttacattcaacc

SEQ ID NO: 28380 - DNA, 92 bp, Homo sapiens
  MAP TO AC006456.2; EXPRESSED IN BRAIN, SIGNAL = 0.61; EXPRESSED IN BONE MARROW, SIGNAL = 0.61; EXPRESSED IN ADULT LIVER, SIGNAL = 0.47
cctcttccttcttttcccccttccctttcatcctctccctttcctcctcctcatcttctttttcttcttcttcttctggtttaatattgatg

SEQ ID NO: 28381 - DNA, 123 bp, Homo sapiens
  MAP TO AC006322.2; EXPRESSED IN ADULT LIVER, SIGNAL = 0.46; EXPRESSED IN LUNG, SIGNAL = 0.54; EXPRESSED IN BRAIN, SIGNAL = 0.56; EST_HUMAN HIT: BF667677.1, EVALUE 3.00e-63; SWISSPROT HIT: Q14563, EVALUE 1.00e-18; NT HIT: gi11421514, EVALUE 2.00e-63
cctgaagagagaatcatctatggtgtagagaatagtagcacatttttggaatgcagtccgaagtcgcagagagcgctggtctattggcaattccagaggcgaaatgaagagcgaaaagaagag

SEQ ID NO: 28382 - DNA, 218 bp, Homo sapiens
  MAP TO AC003104.1; EXPRESSED IN PLACENTA, SIGNAL = 0.6; EXPRESSED IN LUNG, SIGNAL = 0.51; EXPRESSED IN BRAIN, SIGNAL = 0.67; EXPRESSED IN BONE MARROW, SIGNAL = 0.63; EXPRESSED IN ADULT LIVER, SIGNAL = 0.44; NT HIT: AB046840.1, EVALUE 1.30e-01; SWISSPROT HIT: Q44427, EVALUE 3.60e+00; EST_HUMAN HIT: AU116850.1, EVALUE 1.00e-106
gtgcacctggtgacccagcatggtgaagagttcaggcgcatgctggatggacgctggaccgtgacaaccctgagtggggacatgggaccacgtgctggctttggccacctggcccggtgccatgacctgctcatctgcacagcagagcttctgcagatggcactgaccagccccgaggaggaggagcacgtggagctcactggtgagggccatggccg

SEQ ID NO: 28383 - DNA, 99 bp, Homo sapiens
  MAP TO AC004682.1; EXPRESSED IN BRAIN, SIGNAL = 0.56; EXPRESSED IN PLACENTA, SIGNAL = 0.6; EXPRESSED IN LUNG, SIGNAL = 0.58; EXPRESSED IN BONE MARROW, SIGNAL = 0.53; EXPRESSED IN ADULT LIVER, SIGNAL = 0.47; NT HIT: gi6981175, EVALUE 3.30e+00; SWISSPROT HIT: Q61576, EVALUE 1.40e+00; EST_HUMAN HIT: BE787646.1, EVALUE 1.20e+00
tcatgtgactcttcttggcgtggcacccaatgaactaaaagaagttatctttcctccctttctcgcttcactactacttatactgcagcgaagcaagct

SEQ ID NO: 28384 - DNA, 206 bp, Homo sapiens
  MAP TO AC004877.1; EXPRESSED IN PLACENTA, SIGNAL = 0.71; EXPRESSED IN LUNG, SIGNAL = 0.59; EXPRESSED IN BRAIN, SIGNAL = 0.58; EXPRESSED IN ADULT LIVER, SIGNAL = 0.55; EXPRESSED IN BONE MARROW, SIGNAL = 0.57; NT HIT: AF180338.1, EVALUE 7.60e+00; EST_HUMAN HIT: BE794607.1, EVALUE 4.00e-64; SWISSPROT HIT: Q9UL59, EVALUE 1.70e-02
cgacactcgtgggcttcacgtggctggcccctgctcccagggctcttgagatgctgcctctgactgcagctcctgccacactggcacctgtgtggccgctgctcccctctgcacctgggaatagctgcccagagacttcctgttttgaaccttttgccttgctcaggcagccagcaagggccctggcactcacaacagaagggccc

SEQ ID NO: 28385 - DNA, 121 bp, Homo sapiens
  MAP TO AC006299.1; EXPRESSED IN LUNG, SIGNAL = 0.46; EXPRESSED IN BRAIN, SIGNAL = 0.62; EXPRESSED IN BONE MARROW, SIGNAL = 0.82; EXPRESSED IN ADULT LIVER, SIGNAL = 0.53; SWISSPROT HIT: P08548, EVALUE 2.80e-01; EST_HUMAN HIT: AW862126.1, EVALUE 2.00e-09; NT HIT: AF149773.1, EVALUE 5.00e-06
ttactccttttcaatatgtattttttgaatttcctttgcttgttttattgcactggctagaactcctagcattatgttgaataccagtgatgagagtacacatccttgccttgtttctatt

SEQ ID NO: 28386 - DNA, 165 bp, Homo sapiens
  MAP TO AC006319.2; EXPRESSED IN LUNG, SIGNAL = 0.56; EXPRESSED IN BRAIN, SIGNAL = 0.71; EXPRESSED IN BONE MARROW, SIGNAL = 0.58; EXPRESSED IN ADULT LIVER, SIGNAL = 0.59; NT HIT: AF109907.1, EVALUE 1.50e+00; EST_HUMAN HIT: AI884398.1, EVALUE 7.00e-13
gccagaaacctctgtggccagcgttgcctctgcttcagtttttctcattcctgctgggctcattccacccactctgcccgacaggctgcgctcagcttgtgctaccaacctcggtcctacgccaagggtgagccacatgcagagtggcaaggattgtgtgagcaa

SEQ ID NO: 28387 - DNA, 114 bp, Homo sapiens
  MAP TO AC006458.2; EXPRESSED IN LUNG, SIGNAL = 0.44; EXPRESSED IN BRAIN, SIGNAL = 0.56; EXPRESSED IN ADULT LIVER, SIGNAL = 0.48; NT HIT: AL163248.2, EVALUE 9.90e-01; EST_HUMAN HIT: AW511326.1, EVALUE 3.70e-01; SWISSPROT HIT: P42935, EVALUE 7.10e+00
gctgcattatctgaccctttgacagccattggggaagtcggttccatgccatgtggtgcagtatttcatctggaagtggtgggaggatcacaagactctgagcatcagtctcag

SEQ ID NO: 28388 - DNA, 330 bp, Homo sapiens
  MAP TO AC006463.3; EXPRESSED IN LUNG, SIGNAL = 0.46; EXPRESSED IN BRAIN, SIGNAL = 0.63; EXPRESSED IN ADULT LIVER, SIGNAL = 0.51; EXPRESSED IN PLACENTA, SIGNAL = 0.66; SWISSPROT HIT: O87667, EVALUE 2.80e+00; NT HIT: AB046811.1, EVALUE 2.00e-35; EST_HUMAN HIT: W52673.1, EVALUE 0.00e+00
tttctaaagagtgaccgagtggccagaatggtacagagtggagggtgttctgctaatgacttcagagaagtatttaagaaaaacatagaaaaacgtgtgcggagtttgccagaaatagatggcttgagcaaagagacagtgttgagctcatggatagccaaatatgatgccatttacagaggtgaagaggacttgtgcaaacagccaaatagaatggccctaagtgcagtgtctgaacttattctgagcaaggaacaactctatgaaatgtttcagcagattctgggtattaaaaaactggaacaccagctcctttataatgcatgtcag

SEQ ID NO: 28389 - DNA, 208 bp, Homo sapiens
  MAP TO AC005028.1; EXPRESSED IN BRAIN, SIGNAL = 0.64; EXPRESSED IN ADULT LIVER, SIGNAL = 0.46; NT HIT: AL163203.2, EVALUE 1.00e-07; SWISSPROT HIT: P42628, EVALUE 5.70e-01; EST_HUMAN HIT: R83532.1, EVALUE 3.00e-03
tactgacatccaaccatcgaaataatcatggctcaataatccaacatcacctgaagcatatgatcctccttctgatgtattgtcagaaggtcagtggtaccctactgctctgtcacaatgcctacatcattcacctcacttcctttcataggcacggtatcacctcacatcatcacaagaaaaagaagtaaagaagtagagtacaata

SEQ ID NO: 28390 - DNA, 247 bp, Homo sapiens
  MAP TO AC005042.1; EXPRESSED IN BRAIN, SIGNAL = 0.65; NT HIT: gi6806894, EVALUE 1.00e-105; EST_HUMAN HIT: BE782375.1, EVALUE 1.00e-104; SWISSPROT HIT: P30999, EVALUE 1.00e-06
aatacgccatgcgagacctggtcaaccggctccccggcggcaatggccccagtgtcttgtctgatgagaccatggcagccatctgctgtgctctgcacgaggtcaccagcaaaaacatggagaacgcaaaagccctggccgactcaggaggcatagagaagctggtgaacataaccaaaggcaggggcgacaggcaagtctgcggcaaggaggtgcaagcagtgctcttattcctgagattgtcctg

SEQ ID NO: 28391 - DNA, 122 bp, Homo sapiens
  MAP TO AC004656.1; EXPRESSED IN LUNG, SIGNAL = 0.76; EXPRESSED IN BRAIN, SIGNAL = 0.91; EXPRESSED IN BONE MARROW, SIGNAL = 0.73; EXPRESSED IN PLACENTA, SIGNAL = 1.8; EXPRESSED IN ADULT LIVER, SIGNAL = 0.56; NT HIT: gi4885544, EVALUE 9.00e-63; EST_HUMAN HIT: AA156158.1, EVALUE 1.00e-56; SWISSPROT HIT: Q15120, EVALUE 3.00e-18
aggagtgattgaatacaaggagaagtttgggtttgatcctttcattagcactaacatccaatattttctggatcggttttataccaaccgcatctctttccgcatgcttattaatcagcaca

SEQ ID NO: 28392 - DNA, 245 bp, Homo sapiens
  MAP TO AC002480.1; EXPRESSED IN PLACENTA, SIGNAL = 1.3; EXPRESSED IN LUNG, SIGNAL = 0.65; EXPRESSED IN BRAIN, SIGNAL = 0.66; EXPRESSED IN BONE MARROW, SIGNAL = 0.61; EXPRESSED IN ADULT LIVER, SIGNAL = 0.54; EST_HUMAN HIT: AI183583.1, EVALUE 5.60e-02; NT HIT: Z98266.1, EVALUE 9.20e+00
agaaagaagaggccctgtgaagggagacccgagggtatggagagttgttggctccagcttgggcgcactcgttctctctttctgtttctttcttccctcttcccttctgttctcttttccccttccgcctcctcttcctccccctcctcctcctcttcctcctccccctcctcctcctccttcttcttcttcttctctctctctctccctttctccctccctccctccctccctccctcctctct

SEQ ID NO: 28393 - DNA, 173 bp, Homo sapiens
  MAP TO AC005079.1; EXPRESSED IN PLACENTA, SIGNAL = 0.87; EXPRESSED IN LUNG, SIGNAL = 0.59; EXPRESSED IN BRAIN, SIGNAL = 0.76; EXPRESSED IN ADULT LIVER, SIGNAL = 0.47; EST_HUMAN HIT: BF029120.1, EVALUE 1.50e-01; NT HIT: gi6912455, EVALUE 3.00e-79; SWISSPROT HIT: P46019, EVALUE 1.70e+00
ttttctgccacgtgtatataacagagcactcctatgtcagtgtgaaggcaaaagtttccagtatagcccaagagatcctaaaagtcgtggcagaaaagatccagtatgcagaagaggatctggctctggtggccatcacattctctgggggtaagttgttttctacccttgaa

SEQ ID NO: 28394 - DNA, 169 bp, Homo sapiens
  MAP TO AC005319.1; EXPRESSED IN LUNG, SIGNAL = 0.54; EXPRESSED IN BRAIN, SIGNAL = 0.64; EXPRESSED IN ADULT LIVER, SIGNAL = 0.66; EXPRESSED IN BONE MARROW, SIGNAL = 0.67; SWISSPROT HIT: P14289, EVALUE 2.30e+00; EST_HUMAN HIT: BF037381.1, EVALUE 2.30e+00; NT HIT: AB039887.1, EVALUE 1.50e+00
gtctgttgaccttttttgtgaagcaaacagatggccacatcttgttccagctgcaaacgccatgcagccttctgcgaggccggctggtgtgtgcctcaggacaagtctgcatggatgtgctggtgaggctaggccatctcagcaaggcctttgtccatggaagggagcc

SEQ ID NO: 28395 - DNA, 213 bp, Homo sapiens
  MAP TO AC002091.1; EXPRESSED IN FETAL LIVER, SIGNAL = 0.72; EXPRESSED IN BRAIN, SIGNAL = 0.66; SWISSPROT HIT: P27546, EVALUE 4.00e-01; EST_HUMAN HIT: AV729923.1, EVALUE 3.00e+00
atgtattttacaagtttagcctcaagcagaccaagtgccagctttggtagacatgtccaaagggattttgaccctggactagtggttctcaatggagatgctattgttcatttagagatttggggggtcgtggctttggctgtcatagtgattggcagtcactactaccatttagttgtcagggaccagaggtactatatgtcgtcaatgcat

SEQ ID NO: 28396 - DNA, 146 bp, Homo sapiens
  MAP TO AC002553.1; EXPRESSED IN BRAIN, SIGNAL = 0.59; SWISSPROT HIT: P81274, EVALUE 4.60e-01; EST_HUMAN HIT: BE256147.1, EVALUE 8.00e-77; NT HIT: gi8923319, EVALUE 5.00e-77
gcagctagattactgagtaccatgtgtagctcaggatgatttatctgtcttgccagatctgatgccctttgcatataaatataggcctcatcaaagcggccctgtgcatccagggtagtagccaggtcactcatcagcacaatggt

SEQ ID NO: 28397 - DNA, 156 bp, Homo sapiens
  MAP TO AC003663.1; EXPRESSED IN BRAIN, SIGNAL = 0.73; EXPRESSED IN BONE MARROW, SIGNAL = 0.55; NT HIT: U09559.1, EVALUE 1.00e-65; SWISSPROT HIT: P52292, EVALUE 3.00e-18; EST_HUMAN HIT: AA316632.1, EVALUE 5.00e-72
aggaaacgaggcgtcacagaatagaggtcaatgtggagctgaggaaagctaagaaggatgaccagatgctgaagaggagaaatgtaagctcatttcctgatgatgctacttctccgctgcaggaaaactgcaacaaccaggtaaaaaaatatattt

SEQ ID NO: 28398 - DNA, 125 bp, Homo sapiens
  MAP TO AC003007.1; EXPRESSED IN BRAIN, SIGNAL = 0.65; EXPRESSED IN BONE MARROW, SIGNAL = 0.56; EXPRESSED IN ADULT LIVER, SIGNAL = 0.53; SWISSPROT HIT: P94464, EVALUE 4.10e+00; NT HIT: D86974.1, EVALUE 1.00e-55; EST_HUMAN HIT: AW606785.1, EVALUE 2.00e-64
tccactcttcggcgaagctttacgttcatgtaaacagcatgacgtgaggccgtggatgcaggcattaaggtatactgtgtaccagaatcagttgttggagaaaattaaagttaagtggttttcct

SEQ ID NO: 28399 - DNA, 189 bp, Homo sapiens
  MAP TO AC002523.1; EXPRESSED IN BONE MARROW, SIGNAL = 0.53; EXPRESSED IN ADULT LIVER, SIGNAL = 0.44; EXPRESSED IN LUNG, SIGNAL = 0.51; EXPRESSED IN BRAIN, SIGNAL =   2; EXPRESSED IN PLACENTA, SIGNAL = 1.6; EXPRESSED IN FETAL LIVER, SIGNAL = 1.6; EXPRESSED IN HELA, SIGNAL = 1.7; SWISSPROT HIT: P48778, EVALUE 3.90e-02; NT HIT: L41589.1, EVALUE 6.90e+00
acttttcaaaggagaaaactgaagcctcaccacaagacttcccaggccaagaggctgtcatgccccatttggacacagaaggatgtcttaaggcctctggcccccagtgccccagatatccctaagaggaagccctataagaagaatgggaagctcagagtttctctgccccctcccctctacaaatcc

SEQ ID NO: 28400 - DNA, 215 bp, Homo sapiens
  MAP TO AC006208.3; EXPRESSED IN LUNG, SIGNAL = 0.85; EXPRESSED IN BRAIN, SIGNAL = 0.86; EST_HUMAN HIT: BF685272.1, EVALUE 1.00e-118; NT HIT: gi6005787, EVALUE 1.00e-118; SWISSPROT HIT: P06914, EVALUE 9.30e-01
ggaagatggagaactacgagctgatccactctagtcgcgtcaagtttacctaccccagtgaggaggagattggggacctgacgttcactgtggcccaaaagatggctgagccagagaaggccccagccctcagcatcctgctgtacgtgcaggccttccaggtgggcatgccaccccctgggtgctgcaggggccccctgcgccccaagacactc

SEQ ID NO: 28401 - DNA, 319 bp, Homo sapiens
  MAP TO AB019438.1; EXPRESSED IN BRAIN, SIGNAL = 0.56; NT HIT: U03896.1, EVALUE 0.00e+00; EST_HUMAN HIT: AW402332.1, EVALUE 0.00e+00; SWISSPROT HIT: P06331, EVALUE 3.00e-36
gggtcctgtcccaggtgcagctgcaggagtcgggcccaggactggtgaagccttcggagaccctgtccctcacctgcactgtctctggtggctccatcagtagttactactggagctggatccggcagcccccagggaagggactggagtggattgggtatatctattacagtgggagcaccaactacaacccctccctcaagagtcgagtcaccatatcagtagacacgtccaagaaccagttctccctgaagctgagctctgtgaccgctgcggacacggccgtgtattactgtgcgagagacacagtgaggggagg

SEQ ID NO: 28402 - DNA, 295 bp, Homo sapiens
  MAP TO AC005297.1; EXPRESSED IN PLACENTA, SIGNAL = 0.68; EXPRESSED IN ADULT LIVER, SIGNAL = 0.63; EXPRESSED IN FETAL LIVER, SIGNAL = 0.52; EXPRESSED IN BRAIN, SIGNAL = 0.65; EXPRESSED IN BONE MARROW, SIGNAL = 0.51; SWISSPROT HIT: P38742, EVALUE 5.30e-02; EST_HUMAN HIT: BE866980.1, EVALUE 6.80e-02; NT HIT: X84705.1, EVALUE 2.80e+00
ggtgtggaaactatattatcccagaaaaaatagatccctgaagctcaacaaaaattataaacctagtgctttagcttcatgcaacaggataaaggagcacaattacaaagaaatcaagagaaacaaggagctcaatgacttgcccagagaatctgacagacacaagcatgagtattatcacacaattctagtttcaattaaatcaaatgagcaggatagcctgagaactgagtgggatgagtacaatgattacaagctttcgaaaaaattgtacgaaaatccaaggatgccatga

SEQ ID NO: 28403 - DNA, 344 bp, Homo sapiens
  MAP TO AC006385.3; EXPRESSED IN BRAIN, SIGNAL = 0.76; NT HIT: gi11429264, EVALUE 0.00e+00; SWISSPROT HIT: P11137, EVALUE 7.00e-47; EST_HUMAN HIT: AA760692.1, EVALUE 0.00e+00
ggtcagagccaattcgcagagcagggaagagtggtacctcaacacccactacccctgggtctactgccatcactcctggcaccccaccaagttattcttcacgcacaccaggcactcctggaacccctagctatcccaggacccctcacacaccaggaacccccaagtctgccatcttggtgccgagtgagaagaaggtcgccatcatacgtactcctccaaaatctcctgcgactcccaagcagcttcggcttattaaccaaccactgccagacctgaagaatgtcaaatccaaaatcggatcaacagacaacatcaaataccagcctaaaggggggcaggta

SEQ ID NO: 28404 - DNA, 149 bp, Homo sapiens
  MAP TO AC006329.2; EXPRESSED IN BRAIN, SIGNAL = 0.55; EST_HUMAN HIT: AU122163.1, EVALUE 1.00e-78; SWISSPROT HIT: P41453, EVALUE 9.00e+00; NT HIT: AF255058.1, EVALUE 1.30e+00
ctaggtcataattgacatctcctccctgtctctgctctcagacatggagttgattatgctttttaaatactttatgaattccatccggatctcctcagggtcatcttccaggtttgagtgcaccagcttcagcttgttcaagggtggcg

SEQ ID NO: 28405 - DNA, 166 bp, Homo sapiens
  MAP TO AC000380.1; EXPRESSED IN BRAIN, SIGNAL = 0.56; EST_HUMAN HIT: BE298543.1, EVALUE 2.00e-19; SWISSPROT HIT: Q05925, EVALUE 2.00e-01; NT HIT: AB014520.1, EVALUE 6.00e-68
tgggtactcctggcgcacatcgatctcggaaggcaggacggtcatggcaggacagcggctggggccctcgctggcactggtccagaaatgctgctggctggaattggtgcagtcctgctgcaaggtgcacctggggtggcaccgcagggtcaggacccaggtcagc

SEQ ID NO: 28406 - DNA, 197 bp, Homo sapiens
  MAP TO AC013597.3; EXPRESSED IN ADULT LIVER, SIGNAL = 0.64; EXPRESSED IN BRAIN, SIGNAL = 0.73; EXPRESSED IN BONE MARROW, SIGNAL = 0.64; EXPRESSED IN PLACENTA, SIGNAL = 0.61; EXPRESSED IN FETAL LIVER, SIGNAL = 0.63; SWISSPROT HIT: P39635, EVALUE 2.90e+00; EST_HUMAN HIT: AW088191.1, EVALUE 2.70e+00
gatggtcagggtggtcaacttatcaagtgacatttgaacaaatgcttgaaagagataaaggaggcaaatggatattcgggagaatacccatccaggcagaggaaatgccagtacacacgggctcttatatgacaacgtgccttggaaattttcagacagcagagaaccctagtgaattgaacagaggaagcaagaag

SEQ ID NO: 28407 - DNA, 122 bp, Homo sapiens
  MAP TO AC015785.3; EXPRESSED IN LUNG, SIGNAL =   1; EXPRESSED IN PLACENTA, SIGNAL = 0.89; EXPRESSED IN BONE MARROW, SIGNAL = 0.91; EXPRESSED IN FETAL LIVER, SIGNAL = 0.97; EXPRESSED IN BRAIN, SIGNAL = 0.98; EXPRESSED IN ADULT LIVER, SIGNAL = 1.1; NT HIT: U21854.1, EVALUE 1.70e-02; EST_HUMAN HIT: AW799379.1, EVALUE 4.00e-01
ggactccaggatgatggagtggagcgtgtgggtgaggatgcaggggcaaaactgtgggagggagaggtggtggtggagcaggtggagcagcggcttcggttcttggcaggcctgcagtcgtg

SEQ ID NO: 28408 - DNA, 94 bp, Homo sapiens
  MAP TO AL158206.3; EXPRESSED IN BRAIN, SIGNAL = 0.69; EXPRESSED IN PLACENTA, SIGNAL = 0.75; EXPRESSED IN ADULT LIVER, SIGNAL = 0.58; EXPRESSED IN BONE MARROW, SIGNAL = 0.64; EXPRESSED IN FETAL LIVER, SIGNAL = 0.68; EST_HUMAN HIT: BE384876.1, EVALUE 1.10e+00
tcttctacccttcctcagctgaatcaccaccgtcttcctctttacctcattttgctctctctttgcctggtccaggagcatagaggccatcacc

SEQ ID NO: 28409 - DNA, 251 bp, Homo sapiens
  MAP TO AL133352.10; EXPRESSED IN BONE MARROW, SIGNAL = 0.85; EXPRESSED IN PLACENTA, SIGNAL = 0.67; EXPRESSED IN ADULT LIVER, SIGNAL = 0.57; EXPRESSED IN FETAL LIVER, SIGNAL = 0.93; EXPRESSED IN BRAIN, SIGNAL = 0.72; EST_HUMAN HIT: BF309962.1, EVALUE 0.00e+00; NT HIT: gi8923568, EVALUE 0.00e+00; SWISSPROT HIT: P15651, EVALUE 9.80e-01
gagcctgtggtgctgaccgacacaaatcttgtgtatcctgccctgaaatgggaccttgaatacctgcaagagaatattggcaatggagacttctctgtgtacagtgccagcacccacaagttcttgtactatgatgagaagaagatggccaatttccagaactttaagccgaggtccaacagggaagaaatgaaatttcatgagttcgttgagaaactgcaggatatacagcagcgaggaggggaagagag

SEQ ID NO: 28410 - DNA, 95 bp, Homo sapiens
  MAP TO AC008164.3; EXPRESSED IN PLACENTA, SIGNAL = 0.58; EXPRESSED IN FETAL LIVER, SIGNAL = 0.72; EXPRESSED IN BRAIN, SIGNAL = 0.52; EXPRESSED IN BONE MARROW, SIGNAL = 0.48; EST_HUMAN HIT: AI672939.1, EVALUE 7.40e-02; SWISSPROT HIT: O43914, EVALUE 7.20e+00
ccccaacacaaggatgtttaagttctgcacatagtgctcccatctgctcacgtcttctcctatcgccatggttactggcccagagtggtctctgt

SEQ ID NO: 28411 - DNA, 181 bp, Homo sapiens
  MAP TO AC010503.3; EXPRESSED IN ADULT LIVER, SIGNAL = 0.69; EXPRESSED IN FETAL LIVER, SIGNAL = 0.6; EXPRESSED IN BRAIN, SIGNAL = 1.2; EXPRESSED IN BONE MARROW, SIGNAL = 0.51; SWISSPROT HIT: P40464, EVALUE 3.00e-05; EST_HUMAN HIT: AW379976.1, EVALUE 1.00e-97
ctggacgtgacccccaaggcctgcttcatgttctcgtagaccacataggagatgctcacagctggaataaccttcatgaagttgggggcgatcccccggtagaggccccgcatgccctcctgggacaggatgtgacgtagcagacccagcatggacagctgggggccaccctcgatggagg

SEQ ID NO: 28412 - DNA, 149 bp, Homo sapiens
  MAP TO AC008958.3; EXPRESSED IN PLACENTA, SIGNAL = 1.1; EXPRESSED IN ADULT LIVER, SIGNAL = 1.1; EXPRESSED IN FETAL LIVER, SIGNAL = 1.1; EXPRESSED IN BRAIN, SIGNAL = 0.94; EXPRESSED IN BONE MARROW, SIGNAL = 0.93; EXPRESSED IN LUNG, SIGNAL = 1.1; SWISSPROT HIT: O60809, EVALUE 5.00e-20; NT HIT: gi11417832, EVALUE 9.00e-08; EST_HUMAN HIT: AA634290.1, EVALUE 2.00e-09
ttgctcagcccgcctgtgtgacacagcaggtctttcagagcattcatggaggtctcgtttccatgaaagtagaaggtggtgagctgggagcagtggctcagggcaggcaggaggagcctgagttgggagtcctggatctgacagtcctt

SEQ ID NO: 28413 - DNA, 178 bp, Homo sapiens
  MAP TO AL133377.4; EXPRESSED IN PLACENTA, SIGNAL = 0.77; EXPRESSED IN BRAIN, SIGNAL = 0.83; EXPRESSED IN BONE MARROW, SIGNAL = 0.61; EXPRESSED IN FETAL LIVER, SIGNAL = 0.66; EST_HUMAN HIT: BE154670.1, EVALUE 3.00e-03; NT HIT: AB038620.1, EVALUE 4.10e-01; SWISSPROT HIT: P21945, EVALUE 7.70e-01
actcgaaactgtgtatctcatttgtacaccgacatccacagcagcctcattcacagtaactacaacatggaagcaaccccagtgcccactgacaaaggggtgggcaagcacgtgtgtttcatcatacggtgcagtagcatccaccttaagaaggacacagacatatctaccatgtgga

SEQ ID NO: 28414 - DNA, 78 bp, Homo sapiens
  MAP TO AC021237.3; EXPRESSED IN FETAL LIVER, SIGNAL = 0.82; EXPRESSED IN PLACENTA, SIGNAL = 0.97; EXPRESSED IN BONE MARROW, SIGNAL = 0.82; EXPRESSED IN LUNG, SIGNAL = 0.97; EXPRESSED IN ADULT LIVER, SIGNAL = 0.95; EXPRESSED IN BRAIN, SIGNAL = 0.8; EST_HUMAN HIT: BF242748.1, EVALUE 5.90e-02
tcatcttttgttggcattatttttcagaatggttgttgtcttgagaatgctgaagaacagatccatgttacgtatcat

SEQ ID NO: 28415 - DNA, 163 bp, Homo sapiens
  MAP TO AL118520.12; EXPRESSED IN FETAL LIVER, SIGNAL = 0.67; EXPRESSED IN BRAIN, SIGNAL = 1.1; EXPRESSED IN BONE MARROW, SIGNAL = 0.66; EXPRESSED IN PLACENTA, SIGNAL = 0.66; EXPRESSED IN ADULT LIVER, SIGNAL = 0.65; NT HIT: U05784.1, EVALUE 5.00e-16; EST_HUMAN HIT: BE712961.1, EVALUE 7.00e-87; SWISSPROT HIT: Q62625, EVALUE 4.00e-20
gcgccgcctgcagctgaaccccacgcaggccttcttcctgctggtgaaccagcacagcatggtgagtgtgtccacgcccatcgcggacatctacgagcaggagaaagacgaggacggcttcctctatatggtctacgcctcccaggaaaccttcggcttctga

SEQ ID NO: 28416 - DNA, 126 bp, Homo sapiens
  MAP TO AC018583.3; EXPRESSED IN PLACENTA, SIGNAL = 0.83; EXPRESSED IN FETAL LIVER, SIGNAL = 0.81; EXPRESSED IN BONE MARROW, SIGNAL = 0.78; EXPRESSED IN ADULT LIVER, SIGNAL = 0.74; EXPRESSED IN BRAIN, SIGNAL = 1.9; EST_HUMAN HIT: AU127993.1, EVALUE 6.00e-65; SWISSPROT HIT: Q99435, EVALUE 2.00e-21; NT HIT: gi5453765, EVALUE 4.00e-65
acatcgatgagtgtgctgaagggcgccattactgtcgtgaaaatacaatgtgtgtcaacaccccgggttcttttatgtgcatctgcaaaactggatacatcagaattgatgattattcatgtacag

SEQ ID NO: 28417 - DNA, 157 bp, Homo sapiens
  MAP TO AC011938.3; EXPRESSED IN PLACENTA, SIGNAL = 0.63; EXPRESSED IN FETAL LIVER, SIGNAL = 0.53; EXPRESSED IN BONE MARROW, SIGNAL = 0.55; EXPRESSED IN ADULT LIVER, SIGNAL = 0.65; EXPRESSED IN BRAIN, SIGNAL = 0.78; NT HIT: AB001025.1, EVALUE 2.00e-83; SWISSPROT HIT: P30957, EVALUE 7.00e-17
ctttgatgcccggaaagagaaagctgtggacttggtgtctgactttgcccggtcttgcagtataaggccttggtcttctgtcaaggccaggtagtggcctgtggtgagatgccggagtcggaaagcctggccccatctgatgttactgccactccag

SEQ ID NO: 28418 - DNA, 90 bp, Homo sapiens
  MAP TO AP001537.1; EXPRESSED IN LUNG, SIGNAL = 1.1; EXPRESSED IN PLACENTA, SIGNAL = 1.3; EXPRESSED IN BRAIN, SIGNAL = 1.2; EXPRESSED IN ADULT LIVER, SIGNAL = 1.1; EXPRESSED IN FETAL LIVER, SIGNAL =   1; EXPRESSED IN BONE MARROW, SIGNAL =   1; NT HIT: AL161551.2, EVALUE 7.40e-01; SWISSPROT HIT: Q9Z972, EVALUE 1.90e+00
caacctcatttggatggagcagcaaagtgccaactggaagacgtggaatcccagcttctcttacagtgtgtggtggcccctgacaagaag

SEQ ID NO: 28419 - DNA, 228 bp, Homo sapiens
  MAP TO AL117341.26; EXPRESSED IN PLACENTA, SIGNAL = 0.62; EXPRESSED IN BRAIN, SIGNAL = 0.63; EXPRESSED IN BONE MARROW, SIGNAL = 0.67; EXPRESSED IN ADULT LIVER, SIGNAL = 0.79; EXPRESSED IN FETAL LIVER, SIGNAL = 0.81; EST_HUMAN HIT: AA746811.1, EVALUE 4.00e-18; SWISSPROT HIT: P08548, EVALUE 9.00e-13; NT HIT: M60675.1, EVALUE 1.00e-07
caacaggatgttttaaatttcaccataaaaactgtcaaattaagtataacttaccccaacaaaataagggtcatacatgaaaagcccatagctaacatcatactcaatggagaaaaactgaaagcttttcctctaagatctggaatacacaagaatgccccacactcactacttctattcaatatggtacgagacgtcccagccagagcaatgaggcaagaaaagata

SEQ ID NO: 28420 - DNA, 75 bp, Homo sapiens
  MAP TO AC013332.4; EXPRESSED IN BRAIN, SIGNAL = 0.59; EXPRESSED IN PLACENTA, SIGNAL = 0.53; EXPRESSED IN FETAL LIVER, SIGNAL = 0.72; EXPRESSED IN ADULT LIVER, SIGNAL = 0.74; EXPRESSED IN BONE MARROW, SIGNAL = 0.66; EST_HUMAN HIT: AA495747.1, EVALUE 4.00e-09; NT HIT: U82671.2, EVALUE 2.00e-03
atgaagcagagagagccttcaccagaccctgaatctgccgacaccctgatcttggacttctcaagctccagaagt

SEQ ID NO: 28421 - DNA, 120 bp, Homo sapiens
  MAP TO AC013597.3; EXPRESSED IN BONE MARROW, SIGNAL =   1; EXPRESSED IN ADULT LIVER, SIGNAL = 0.82; EXPRESSED IN PLACENTA, SIGNAL = 0.74; EXPRESSED IN FETAL LIVER, SIGNAL = 0.63; EXPRESSED IN BRAIN, SIGNAL = 0.55; NT HIT: X62695.1, EVALUE 6.70e-02; EST_HUMAN HIT: R20978.1, EVALUE 6.10e+00
gtacccctagtagttgtgatttctccaaaacttctaacttgctacaaaggaggacaacagagattatccagccagagaagttcttacataaagaaatgcagggcctgtgtgctcagcatg

SEQ ID NO: 28422 - DNA, 105 bp, Homo sapiens
  MAP TO U82670.2; EXPRESSED IN PLACENTA, SIGNAL = 0.52; EXPRESSED IN FETAL LIVER, SIGNAL = 0.58; EXPRESSED IN BONE MARROW, SIGNAL = 0.6; EXPRESSED IN ADULT LIVER, SIGNAL = 0.72; EXPRESSED IN BRAIN, SIGNAL = 0.71; SWISSPROT HIT: P77277, EVALUE 7.20e+00; NT HIT: AL161558.2, EVALUE 2.30e-01; EST_HUMAN HIT: AW452606.1, EVALUE 1.30e+00
ctttgcagagaggaacaagattacaaatctcaccgcagtgctcagcagttcaggctcccctgtggctcccaccaatgactgggcagacattgcaagactcgggat

SEQ ID NO: 28423 - DNA, 263 bp, Homo sapiens
  MAP TO AC010492.4; EXPRESSED IN ADULT LIVER, SIGNAL = 0.91; EXPRESSED IN PLACENTA, SIGNAL = 0.91; EXPRESSED IN BRAIN, SIGNAL = 1.1; EXPRESSED IN LUNG, SIGNAL = 0.99; EXPRESSED IN FETAL LIVER, SIGNAL = 1.1; EXPRESSED IN BONE MARROW, SIGNAL = 1.7; EST_HUMAN HIT: BF516168.1, EVALUE 3.00e-90; NT HIT: AJ133131.1, EVALUE 1.60e-01; SWISSPROT HIT: Q59098, EVALUE 6.30e-01
gtggagctggaggagacagtggtgcggcgccaggctgcggtgcggacgctgggccagcaagccagggtttggttggtgcgggtgctgctcaacctgctggtggtcgcgctcctgggggcagccttctatggcgtctactgggctacggggtgcaccgtggagctgcaggtgcggacggtcttggaagaggaagccagggggtcctggaacctacatttccaacggtggagggaggggacggaagtttgggatgccagagatct

SEQ ID NO: 28424 - DNA, 458 bp, Homo sapiens
  MAP TO AC026212.1; EXPRESSED IN PLACENTA, SIGNAL = 0.49; EXPRESSED IN ADULT LIVER, SIGNAL = 0.67; EXPRESSED IN BRAIN, SIGNAL = 0.64; EXPRESSED IN FETAL LIVER, SIGNAL =   2; EXPRESSED IN BONE MARROW, SIGNAL = 0.64; EST_HUMAN HIT: AU133187.1, EVALUE 0.00e+00; SWISSPROT HIT: P46804, EVALUE 4.80e-02
ctcctgcagacgctccagcagcagctccgcctgggtcttcatcagagagtcctcctggagatttgggttctctctatagccattgaagcgcagcatgtgcaccgcagaccgccggcgggcaaggcgggccaggctctcttggagtgtctcctcatcggcgtcccggacgcccgggccgggaaagagttgctgcaccaggtggtaacgagctgcatccccgagggcccggttctccagcaggcgcagagagagcaggacgtcacagtgaccgagggcctggaagttcgctaatcccggaactggaccccgcccaaagccgccctcttgcctccactggttgtgcagccgccgctccagagccgtgcgaatggggccatgccgaccaaagcgccgatggatgtggcgcaggtagcgcgcccactgcaaggcccggcgcacggtggcggggtcccaggtgc

SEQ ID NO: 28425 - DNA, 187 bp, Homo sapiens
  MAP TO AC015842.4; EXPRESSED IN LUNG, SIGNAL = 0.97; EXPRESSED IN ADULT LIVER, SIGNAL = 1.2; EXPRESSED IN BRAIN, SIGNAL = 0.91; EXPRESSED IN BONE MARROW, SIGNAL = 0.81; EXPRESSED IN PLACENTA, SIGNAL = 1.1; EXPRESSED IN FETAL LIVER, SIGNAL = 0.96; NT HIT: AF021335.1, EVALUE 1.70e+00; SWISSPROT HIT: P70478, EVALUE 2.90e+00
atgcttcgtcctgctgttactcaccccacatctgtgagggctctggatggaggctgctgtcctacgtgtagaatgggatcagtgttgggcttcaccagacctctgatttttgtgtgtgtatgtctgctgttcttcaggcagcagaggaaggaatcctggagttggagtcagccattggagttgcaag

SEQ ID NO: 28426 - DNA, 82 bp, Homo sapiens
  MAP TO AC009597.4; EXPRESSED IN ADULT LIVER, SIGNAL = 0.79; EXPRESSED IN BRAIN, SIGNAL = 0.8; EXPRESSED IN BONE MARROW, SIGNAL = 0.62; EXPRESSED IN PLACENTA, SIGNAL = 0.51; EXPRESSED IN FETAL LIVER, SIGNAL = 0.7; EST_HUMAN HIT: BE960712.1, EVALUE 2.50e-01
ttggtgtgatgacttgtcagctgtgtggacctccagtagttctcagtactcatggaaggattcacaaggccagaggtaaagg

SEQ ID NO: 28427 - DNA, 144 bp, Homo sapiens
  MAP TO AC013629.3; EXPRESSED IN PLACENTA, SIGNAL = 0.52; EXPRESSED IN ADULT LIVER, SIGNAL = 0.57; EXPRESSED IN BRAIN, SIGNAL = 0.51; EXPRESSED IN BONE MARROW, SIGNAL = 0.44; EST_HUMAN HIT: AI262859.1, EVALUE 4.80e-01; NT HIT: AJ277661.1, EVALUE 3.20e-01; SWISSPROT HIT: P42961, EVALUE 3.10e+00
caggctggcagaagtttgcttaaaaggtgcaggggtgagggtggaggagccaatgtgcttgcttttcctgccaatgaaaactaggaggtacgttatttttaagagtctctgccagtcctccccactccgtctgcaccagcccat

SEQ ID NO: 28428 - DNA, 192 bp, Homo sapiens
  MAP TO AF241727.1; EXPRESSED IN PLACENTA, SIGNAL = 0.55; EXPRESSED IN BONE MARROW, SIGNAL = 0.47; EXPRESSED IN FETAL LIVER, SIGNAL = 0.75; EXPRESSED IN BRAIN, SIGNAL = 7.2; EST_HUMAN HIT: BE742610.1, EVALUE 1.00e-70; SWISSPROT HIT: P41732, EVALUE 2.00e-28; NT HIT: AJ250566.1, EVALUE 9.00e-92
ctgagctgctgtggtgtgcagaactacaccaactggagcaccagcccctacttcctggagcatggcatcccccccagctgctgcatgaacgaaactgattgtaatccccaggatctacacaatctgactgtggccgccaccaaagttaaccagaaggtacccgctttctcctggcccagatgggaccagtgg

SEQ ID NO: 28429 - DNA, 279 bp, Homo sapiens
  MAP TO AL161777.1; EXPRESSED IN LUNG, SIGNAL = 1.1; EXPRESSED IN PLACENTA, SIGNAL = 0.93; EXPRESSED IN FETAL LIVER, SIGNAL = 0.87; EXPRESSED IN BONE MARROW, SIGNAL = 1.1; EXPRESSED IN BRAIN, SIGNAL = 0.97; EXPRESSED IN ADULT LIVER, SIGNAL = 1.1; NT HIT: X12556.1, EVALUE 1.00e-105; SWISSPROT HIT: P10911, EVALUE 7.00e-33; EST_HUMAN HIT: AU121623.1, EVALUE 6.40e-02
gctcgtcaatgctgtgatgaaggggaatgtcttctagctaatcaggaaatagataagtttcagtctaaagaagatgctcagaaagctctccaagacattgaaaattttcttgaaatggctctaccctttataaattatgaacctgaaacactgcagtatgaatttgatgtaatattatctcctgagcttaaggtagaggcttttttattttcaaataaatatttaaagaaaattataattgcagtactgtgggtaggaggagttttactacctcacagc

SEQ ID NO: 28430 - DNA, 108 bp, Homo sapiens
  MAP TO AL158150.2; EXPRESSED IN PLACENTA, SIGNAL = 0.56; EXPRESSED IN FETAL LIVER, SIGNAL = 0.46; EXPRESSED IN BRAIN, SIGNAL = 0.45; EST_HUMAN HIT: AA284532.1, EVALUE 8.70e-02; NT HIT: AJ296899.1, EVALUE 9.20e-01
ctagcttgagaatttgcaacccagattctcgtaatagacagggaagagggactccataagggcctgcttaaagcagtattttatgtcatattcattcatgttattcat

SEQ ID NO: 28431 - DNA, 88 bp, Homo sapiens
  MAP TO AL133260.7; EXPRESSED IN LUNG, SIGNAL = 0.88; EXPRESSED IN PLACENTA, SIGNAL = 0.66; EXPRESSED IN ADULT LIVER, SIGNAL = 0.71; EXPRESSED IN FETAL LIVER, SIGNAL = 0.95; EXPRESSED IN BRAIN, SIGNAL = 0.68; EXPRESSED IN BONE MARROW, SIGNAL = 0.86; NT HIT: Z68128.1, EVALUE 7.20e-01; EST_HUMAN HIT: AA013147.1, EVALUE 2.70e-01
tgaacctcctgagagcagacacctcgcccatcatctttgcattctcagggctgggtgcagggtctgccacatcgtggtgctctataaa

SEQ ID NO: 28432 - DNA, 141 bp, Homo sapiens
  MAP TO AC011272.3; EXPRESSED IN PLACENTA, SIGNAL = 0.75; EXPRESSED IN BONE MARROW, SIGNAL = 0.59; EXPRESSED IN ADULT LIVER, SIGNAL = 0.68; EXPRESSED IN FETAL LIVER, SIGNAL = 0.52; EXPRESSED IN BRAIN, SIGNAL = 0.63; NT HIT: AJ291455.1, EVALUE 1.30e+00; SWISSPROT HIT: P77795, EVALUE 9.10e+00; EST_HUMAN HIT: T11414.1, EVALUE 4.70e-01
atgctctgcagagtgggtctttttgtggcaatcaaagacggagcctacttttctatcttagccttctgtggaccagggagcaatatagagctgataaaacgagccattaactgtgaaaaacccaaagatgaccggggcaag

SEQ ID NO: 28433 - DNA, 207 bp, Homo sapiens
  MAP TO AL161441.2; EXPRESSED IN ADULT LIVER, SIGNAL = 0.61; EXPRESSED IN PLACENTA, SIGNAL = 0.57; EXPRESSED IN BRAIN, SIGNAL = 0.67; EXPRESSED IN BONE MARROW, SIGNAL = 0.61; EXPRESSED IN FETAL LIVER, SIGNAL = 0.67; SWISSPROT HIT: P05844, EVALUE 2.90e+00; NT HIT: AL161583.2, EVALUE 7.60e+00
cttgtttaacaactgttttctcctccttactccttcccacaacttgccccacccccatggtagttttgcagctgcttctgcatctatatctgtgtttttctatttctctagatgagaaaccccatgtaagtcgtaacttgcagcatttgtcagcaacaattttctttggtttcctttcataaacatcatgcagtctaagtccagccc

SEQ ID NO: 28434 - DNA, 183 bp, Homo sapiens
  MAP TO AL162261.1; EXPRESSED IN PLACENTA, SIGNAL =   1; EXPRESSED IN BONE MARROW, SIGNAL = 1.1; EXPRESSED IN ADULT LIVER, SIGNAL =   1; EXPRESSED IN FETAL LIVER, SIGNAL = 0.84; EXPRESSED IN BRAIN, SIGNAL =   1; EXPRESSED IN LUNG, SIGNAL = 0.99; SWISSPROT HIT: Q10785, EVALUE 3.90e+00; NT HIT: AF006493.1, EVALUE 1.70e+00; EST_HUMAN HIT: AW975598.1, EVALUE 2.00e-53
cccgaagtagccattccgcagaggtggagagactcgcgtgtagctcaatgcccacgcacttagccaatgggaaattacgaattgatgaccagttggctcttggatctgaggaaaaaactccagagtcagagggaactctcgaagttttgcccggagcaaacggaagggtggcgttgccatcgc

SEQ ID NO: 28435 - DNA, 76 bp, Homo sapiens
  MAP TO AC019281.4; EXPRESSED IN BRAIN, SIGNAL = 0.45; NT HIT: AL161579.2, EVALUE 2.40e+00; EST_HUMAN HIT: AV723718.1, EVALUE 2.00e-35
gtcaagcccaaaatcacaaaagatagcatcttcccatgtccagatggactgctctatatgcctggtcctcacctgg

SEQ ID NO: 28436 - DNA, 229 bp, Homo sapiens
  MAP TO AL157392.2; EXPRESSED IN PLACENTA, SIGNAL = 0.73; EXPRESSED IN ADULT LIVER, SIGNAL = 0.73; EXPRESSED IN FETAL LIVER, SIGNAL = 0.92; EXPRESSED IN BRAIN, SIGNAL = 0.76; EXPRESSED IN BONE MARROW, SIGNAL = 0.92; SWISSPROT HIT: P55972, EVALUE 2.00e-01; EST_HUMAN HIT: BF023607.1, EVALUE 1.00e-122; NT HIT: AB037715.1, EVALUE 1.00e-126
cgtctatgatcagcgaagccctctgggtgggtttcttcccagacttgatgcggttctcattgattgcattttcaatctcctgcagtttcttcagtgcattcagatacgaggttttcctttgtttcttcagttttttgctgacgttggggtcactggctaggcggcgggcggcctccgtaatctgggactgaatggcaaactctcgttccaggcgttccagctcagcttc

SEQ ID NO: 28437 - DNA, 166 bp, Homo sapiens
  MAP TO AC010397.3; EXPRESSED IN FETAL LIVER, SIGNAL = 0.51; EXPRESSED IN BRAIN, SIGNAL = 0.57; EXPRESSED IN BONE MARROW, SIGNAL = 0.57; EXPRESSED IN PLACENTA, SIGNAL = 0.68; EXPRESSED IN ADULT LIVER, SIGNAL = 0.52; EST_HUMAN HIT: AI057425.1, EVALUE 1.00e-88; NT HIT: gi11417118, EVALUE 7.00e-89; SWISSPROT HIT: P18963, EVALUE 1.80e+00
ccaccagaaaggcagattgtggttggaatatgttccatggcaaagaaatccaaatccaaaccaatgaaggaaattcttgaacggatctccttatttaaatatatcacagtagtagtatttgaagaggaggttattttgaatgaaccagtggaaaactggcctttat

SEQ ID NO: 28438 - DNA, 192 bp, Homo sapiens
  MAP TO AC022882.3; EXPRESSED IN ADULT LIVER, SIGNAL = 0.72; EXPRESSED IN BONE MARROW, SIGNAL = 0.51; EXPRESSED IN BRAIN, SIGNAL = 0.56; EXPRESSED IN PLACENTA, SIGNAL = 0.59; EXPRESSED IN FETAL LIVER, SIGNAL = 0.66; EST_HUMAN HIT: BE297698.1, EVALUE 4.30e-02; SWISSPROT HIT: P37072, EVALUE 2.00e-11; NT HIT: AF281061.1, EVALUE 4.50e-01
tcagaggaaaaagtacatgggggtttgaagttgagggtcaacactggtgagggtgatgatgcccaggttccctgccacggtcagcaaatagagcaccaggaagaccaggaagaggggaatctggagctccggatcatctgagactcccacaagaatgaactccgtcacccatgtgagatttcctgaagccat

SEQ ID NO: 28439 - DNA, 84 bp, Homo sapiens
  MAP TO AL136313.3; EXPRESSED IN BRAIN, SIGNAL = 0.5; EXPRESSED IN PLACENTA, SIGNAL = 0.64; EXPRESSED IN ADULT LIVER, SIGNAL = 0.6; EXPRESSED IN FETAL LIVER, SIGNAL = 0.59; EXPRESSED IN BONE MARROW, SIGNAL = 0.44; NT HIT: AE003991.1, EVALUE 1.70e-01; EST_HUMAN HIT: AU127831.1, EVALUE 4.00e-40
gaattggcaacaagctcatttcactggtgggtttgctgaagcattatcacaagacagtcagaatgactgatgagtgctcttcag

SEQ ID NO: 28440 - DNA, 147 bp, Homo sapiens
  MAP TO AC018583.3; EXPRESSED IN BRAIN, SIGNAL = 0.83; EXPRESSED IN PLACENTA, SIGNAL = 0.66; EXPRESSED IN FETAL LIVER, SIGNAL = 0.57; EXPRESSED IN BONE MARROW, SIGNAL = 0.55; EXPRESSED IN ADULT LIVER, SIGNAL = 0.77; NT HIT: AF274581.1, EVALUE 1.00e-03; EST_HUMAN HIT: M85312.1, EVALUE 2.00e-03; SWISSPROT HIT: Q9ZM35, EVALUE 6.90e+00
ctgttcaagaaggattcaatgtgataatccacactaagcaagatgcctgaaacatagcaagcactcagtaaatggtaactatttttattattggtcaataatcccaatttggcatcatttataaggtccagattcttaaggctgatt

SEQ ID NO: 28441 - DNA, 169 bp, Homo sapiens
  MAP TO AC011938.3; EXPRESSED IN BRAIN, SIGNAL = 0.44; SWISSPROT HIT: P30957, EVALUE 7.00e-15; EST_HUMAN HIT: AA112796.1, EVALUE 1.50e-01; NT HIT: gi4506758, EVALUE 5.00e-90
cggaaacaatcgcacagctgcccccatcaccctgcctatagaagaagtcctgcagaccctacaggacttgatcgcctacttccagcccccagaggaggagatgcgacatgaagacaagcagaacaagctccgctcactcaaaaacagacaaaatcttttcaaggaagag

SEQ ID NO: 28442 - DNA, 115 bp, Homo sapiens
  MAP TO AC018787.3; EXPRESSED IN PLACENTA, SIGNAL = 0.75; EXPRESSED IN FETAL LIVER, SIGNAL = 0.69; EXPRESSED IN BONE MARROW, SIGNAL = 0.57; EXPRESSED IN ADULT LIVER, SIGNAL = 0.74; EXPRESSED IN BRAIN, SIGNAL = 0.72; SWISSPROT HIT: O78262, EVALUE 9.30e+00; EST_HUMAN HIT: AW813007.1, EVALUE 2.40e-02
tcagttagccctctttaggccgaagtccttgcagccctctttgattatttcctttctctcatatcccatatccacgctattattcaaacatgtcctgcaaatttccacatcagag

SEQ ID NO: 28443 - DNA, 100 bp, Homo sapiens
  MAP TO AL122058.19; EXPRESSED IN LUNG, SIGNAL = 0.91; EXPRESSED IN PLACENTA, SIGNAL =   1; EXPRESSED IN ADULT LIVER, SIGNAL = 1.1; EXPRESSED IN BONE MARROW, SIGNAL = 0.9; EXPRESSED IN BRAIN, SIGNAL = 0.79; EXPRESSED IN FETAL LIVER, SIGNAL = 0.88; NT HIT: AF111168.2, EVALUE 3.30e+00; SWISSPROT HIT: P25653, EVALUE 9.50e+00; EST_HUMAN HIT: N99553.1, EVALUE 4.90e+00
ccctctgaaaaggctactcaggaagctgacctggcacatcctgagaaggcagctcaaaaccagaactcatgccctggggctgaggtgtagtggcaagggg

SEQ ID NO: 28444 - DNA, 119 bp, Homo sapiens
  MAP TO AC019221.3; EXPRESSED IN PLACENTA, SIGNAL =   1; EXPRESSED IN FETAL LIVER, SIGNAL = 0.79; EXPRESSED IN BONE MARROW, SIGNAL = 0.73; EXPRESSED IN LUNG, SIGNAL = 0.93; EXPRESSED IN ADULT LIVER, SIGNAL = 1.5; EXPRESSED IN BRAIN, SIGNAL =   1; EST_HUMAN HIT: AA583968.1, EVALUE 8.00e-61; NT HIT: U83736.1, EVALUE 1.00e+00; SWISSPROT HIT: P29040, EVALUE 1.10e+00
gccatgaccttgcctcctttcctggagttcggtgtcccgtccccagcccacctcagagcctggacggtggagaggaagcgcccaggcaggcttttacgaactgaccggcagccactcag

SEQ ID NO: 28445 - DNA, 221 bp, Homo sapiens
  MAP TO AC009597.4; EXPRESSED IN LUNG, SIGNAL = 1.1; EXPRESSED IN PLACENTA, SIGNAL = 1.1; EXPRESSED IN ADULT LIVER, SIGNAL = 1.2; EXPRESSED IN FETAL LIVER, SIGNAL = 1.3; EXPRESSED IN BRAIN, SIGNAL = 1.2; EXPRESSED IN BONE MARROW, SIGNAL = 1.1; EST_HUMAN HIT: BE465780.1, EVALUE 3.00e-09; SWISSPROT HIT: P09917, EVALUE 4.90e+00; NT HIT: AJ250877.2, EVALUE 3.40e-02
aacgcgactttatttggaaaactgaagaagaagatgttgaaagtgaagataatctcacttaggcatgtcagccaggaaatccagtcagagaactgggtttttgatatcagtgaaatccaaacagaaatagaaaaattacctatggtcgatcatagtgttatcatcattggccagagaaggaatttccaggtacatttggctcagatagtttgtgcaaacag

SEQ ID NO: 28446 - DNA, 121 bp, Homo sapiens
  MAP TO AC011280.3; EXPRESSED IN BRAIN, SIGNAL = 0.61; EXPRESSED IN BONE MARROW, SIGNAL = 0.56; EXPRESSED IN PLACENTA, SIGNAL = 0.58; EXPRESSED IN FETAL LIVER, SIGNAL = 0.5; NT HIT: AB031010.1, EVALUE 1.00e-03; SWISSPROT HIT: P19361, EVALUE 5.40e+00; EST_HUMAN HIT: BF108755.1, EVALUE 7.00e-09
cactatctttcatttccatatcttgtccagttggaaggtcttcagagacaatgacatgtatggagctcttttctcctataataacaacgccgtcttctggaatagctcctggagaacctgc

SEQ ID NO: 28447 - DNA, 185 bp, Homo sapiens
  MAP TO AC011181.5; EXPRESSED IN PLACENTA, SIGNAL = 0.51; EXPRESSED IN FETAL LIVER, SIGNAL =   7; EXPRESSED IN BONE MARROW, SIGNAL = 0.79; EXPRESSED IN ADULT LIVER, SIGNAL = 0.94; EXPRESSED IN BRAIN, SIGNAL = 0.81; EST_HUMAN HIT: BF434359.1, EVALUE 1.00e-51; NT HIT: U77952.1, EVALUE 1.70e+00; SWISSPROT HIT: P10265, EVALUE 2.00e-17
gagtcattgattccgattacaatggagaaattcaaattgttatatctacttctgttccctggaaagcagagccaggagagcacatagcacagctcctgatggtgccgtatgtgggaatgggaaaaagtgaaattaaacgaacaggaggatttgcaagcacaaataaacaaggcaaagcaacttat

SEQ ID NO: 28448 - DNA, 85 bp, Homo sapiens
  MAP TO AC011255.3; EXPRESSED IN ADULT LIVER, SIGNAL = 1.4; EXPRESSED IN PLACENTA, SIGNAL = 1.3; EXPRESSED IN FETAL LIVER, SIGNAL = 1.2; EXPRESSED IN BONE MARROW, SIGNAL = 1.2; EXPRESSED IN LUNG, SIGNAL = 1.5; EXPRESSED IN BRAIN, SIGNAL = 1.1; SWISSPROT HIT: Q01012, EVALUE 2.50e+00; EST_HUMAN HIT: BE144331.1, EVALUE 2.60e-01
aaagatcactctgactgctacatggaaaatgtgctggggagaaacaagactgcaggaaataagagcagtgaacaagctcttgctg

SEQ ID NO: 28449 - DNA, 148 bp, Homo sapiens
  MAP TO AC018421.3; EXPRESSED IN ADULT LIVER, SIGNAL = 0.61; EXPRESSED IN BONE MARROW, SIGNAL = 0.54; EXPRESSED IN PLACENTA, SIGNAL = 0.48; EXPRESSED IN BRAIN, SIGNAL = 0.49; EXPRESSED IN FETAL LIVER, SIGNAL = 0.51; NT HIT: AE000493.1, EVALUE 3.40e-01; EST_HUMAN HIT: AA100645.1, EVALUE 7.80e+00
gagtggtgcgctttctactttcaactacgtgtttccaccccctggtctagtaactgcagcaggcattggaaacgagtgcaaagcagggcatatgtatttccttgacatccgtgacgctaaagataaagaacatttcatcatcaatatt

SEQ ID NO: 28450 - DNA, 90 bp, Homo sapiens
  MAP TO AC019263.4; EXPRESSED IN BRAIN, SIGNAL = 0.77; EXPRESSED IN LUNG, SIGNAL = 1.2; EXPRESSED IN PLACENTA, SIGNAL = 1.1; EXPRESSED IN ADULT LIVER, SIGNAL = 1.1; EXPRESSED IN FETAL LIVER, SIGNAL = 0.84; EXPRESSED IN BONE MARROW, SIGNAL = 0.87; EST_HUMAN HIT: AI125264.1, EVALUE 7.10e-02; NT HIT: gi11439807, EVALUE 7.40e-01; SWISSPROT HIT: P30168, EVALUE 9.50e+00
ttcatgccaattcttccttacatcttcccaattatgaagatgttgactttctgttacataatggagaaaggaagaatatgtttgacactc

SEQ ID NO: 28451 - DNA, 112 bp, Homo sapiens
  MAP TO AC022036.3; EXPRESSED IN PLACENTA, SIGNAL = 0.97; EXPRESSED IN FETAL LIVER, SIGNAL = 0.77; EXPRESSED IN ADULT LIVER, SIGNAL =   1; EXPRESSED IN BRAIN, SIGNAL = 0.78; EXPRESSED IN BONE MARROW, SIGNAL = 0.78; EXPRESSED IN LUNG, SIGNAL = 0.92; SWISSPROT HIT: P39188, EVALUE 4.20e+00; EST_HUMAN HIT: AA577812.1, EVALUE 1.00e-13; NT HIT: AF111168.2, EVALUE 7.00e-08
ctttttatactttttatttaaaatagttttaaaataggccaaggtgggaggattgcatgaaaccaggagtttgaggttacagtgagctgtgatgacactgttgtgctccagc

SEQ ID NO: 28452 - DNA, 97 bp, Homo sapiens
  MAP TO AC018528.3; EXPRESSED IN ADULT LIVER, SIGNAL = 1.2; EXPRESSED IN BONE MARROW, SIGNAL = 1.1; EXPRESSED IN LUNG, SIGNAL = 1.1; EXPRESSED IN BRAIN, SIGNAL = 0.75; EXPRESSED IN PLACENTA, SIGNAL = 1.1; EXPRESSED IN FETAL LIVER, SIGNAL = 0.84; EST_HUMAN HIT: AI383720.1, EVALUE 1.20e+00; NT HIT: AF022713.2, EVALUE 8.10e-01
tctgtttttctgcaaatgtctccgaattggcctgttttagatctgttcctgtgaagaaaatttgacgcttaacttgtaatttctcgtaattaagtat

SEQ ID NO: 28453 - DNA, 348 bp, Homo sapiens
  MAP TO AC011686.3; EXPRESSED IN ADULT LIVER, SIGNAL = 0.76; EXPRESSED IN BRAIN, SIGNAL = 0.82; EXPRESSED IN PLACENTA, SIGNAL = 0.61; EXPRESSED IN FETAL LIVER, SIGNAL = 0.85; EXPRESSED IN BONE MARROW, SIGNAL = 0.87; EST_HUMAN HIT: BE313013.1, EVALUE 0.00e+00; SWISSPROT HIT: Q53317, EVALUE 6.90e-01
gtgaaaagcgaaatcccaaaggtgccgaagcagcctctggtgctccatcacccgcgcatgacgacaaccaagtctccctcaaaggatatgctagagccagaggcagagctggctgaagatctgcccactaccaaaagcacttctgtggagtcagagatgcccactgagaacctggaaggccattccccgtcttgccggaccttcgtgccactgcctcccatctgctccaactccactgtgcatagtgaagagaccctgtcccacctgagtgacacaactgtccgcctcagcccagagcgcccatcagatgaggactccaagagcacagagtccatcttcctgacccag

SEQ ID NO: 28454 - DNA, 187 bp, Homo sapiens
  MAP TO AL139819.2; EXPRESSED IN PLACENTA, SIGNAL = 0.74; EXPRESSED IN ADULT LIVER, SIGNAL = 0.77; EXPRESSED IN FETAL LIVER, SIGNAL = 0.98; EXPRESSED IN BRAIN, SIGNAL = 0.84; EXPRESSED IN BONE MARROW, SIGNAL = 1.1; EST_HUMAN HIT: BE275821.1, EVALUE 1.00e-101; NT HIT: gi8922811, EVALUE 1.00e-101; SWISSPROT HIT: P29035, EVALUE 5.80e-01
gtcgtaaaggtatcttcactggaagctcggggctgcagattgtgtacctcagtgggacagaatccttaaatgagccagtaccaggttatagttttagtcccaaggatgtgtcttctctgagaatgatgctgtgtacaacctcccagtttaagggtgttgatatcttgctcacatccccatggcccaa

SEQ ID NO: 28455 - DNA, 120 bp, Homo sapiens
  MAP TO AC015772.5; EXPRESSED IN ADULT LIVER, SIGNAL = 0.52; EXPRESSED IN PLACENTA, SIGNAL = 0.69; EXPRESSED IN FETAL LIVER, SIGNAL = 0.65; EXPRESSED IN BRAIN, SIGNAL = 0.93; EXPRESSED IN BONE MARROW, SIGNAL = 0.65; EST_HUMAN HIT: AW103088.1, EVALUE 9.90e-02; SWISSPROT HIT: P38370, EVALUE 7.10e+00; NT HIT: AF024622.1, EVALUE 1.00e+00
tctaaggcaggcacacttctgagggctgtacattaaatactttattctcaaagcagtccgaaggtaggtgctattcttaacccattcttcagatgcaggaacaaagagagcttgaatatc

SEQ ID NO: 28456 - DNA, 365 bp, Homo sapiens
  MAP TO AC016498.4; EXPRESSED IN BONE MARROW, SIGNAL = 0.5; EXPRESSED IN PLACENTA, SIGNAL = 0.79; EXPRESSED IN BRAIN, SIGNAL = 0.67; SWISSPROT HIT: P05310, EVALUE 1.50e+00; NT HIT: U07000.1, EVALUE 2.30e-01; EST_HUMAN HIT: AU131881.1, EVALUE 1.00e-123
atggacacccgctccgggagccagtgttccgtcaccccagaagccatactcaataatgaaaagctggtcttgccgccccgcatctccagagtgaacggctggtcgttacccctgcactacttccaggtggtgacctgggctgtcttcgtgggcctttcctcggccaccttcgggatcttcattcccttcctgcctcacgcgtggaaatacattgcctacgtggtatccttttcatcgtggcatggtctaagcgggaggggttcctggaggaacttgcgatggacctggctgtggggtctgggccatggctgcccggtggcaccagtcacctgccctgggccagactatgtcccctgagcctgcag

SEQ ID NO: 28457 - DNA, 111 bp, Homo sapiens
  MAP TO AC015662.4; EXPRESSED IN LUNG, SIGNAL = 0.89; EXPRESSED IN PLACENTA, SIGNAL =   1; EXPRESSED IN ADULT LIVER, SIGNAL = 1.2; EXPRESSED IN FETAL LIVER, SIGNAL = 0.89; EXPRESSED IN BRAIN, SIGNAL = 1.6; EXPRESSED IN BONE MARROW, SIGNAL = 0.81; SWISSPROT HIT: P12374, EVALUE 1.80e+00; NT HIT: gi10834856, EVALUE 3.80e+00; EST_HUMAN HIT: AW869223.1, EVALUE 2.00e-06
atgattagacagagagaagaaagaggaggcattgtgatcatggaaacagagatggcagtgatgcagccacatgccaagcacttccagaaaccaacagatgccaaaacagac

SEQ ID NO: 28458 - DNA, 179 bp, Homo sapiens
  MAP TO AC017086.3; EXPRESSED IN PLACENTA, SIGNAL = 0.51; EXPRESSED IN ADULT LIVER, SIGNAL = 0.85; EXPRESSED IN FETAL LIVER, SIGNAL = 0.65; EXPRESSED IN BRAIN, SIGNAL = 0.6; EXPRESSED IN BONE MARROW, SIGNAL = 0.53; NT HIT: AL163207.2, EVALUE 4.00e-07; EST_HUMAN HIT: AV657389.1, EVALUE 1.00e-05; SWISSPROT HIT: P12812, EVALUE 8.90e-02
ttctgaaggctggaagtccaagatcaaggtgttggcagcactgattccttctgagggctatgaggaagaatctgtgccattcctctccttagtttctgatgatttgctggtgctgtggactgaaaatttgtgtccctccaaaattcatatgttgaaacccaatcctcaatgtaatagta

SEQ ID NO: 28459 - DNA, 123 bp, Homo sapiens
  MAP TO AC018537.3; EXPRESSED IN PLACENTA, SIGNAL = 0.51; EXPRESSED IN ADULT LIVER, SIGNAL = 0.51; EXPRESSED IN FETAL LIVER, SIGNAL = 0.46; EXPRESSED IN BRAIN, SIGNAL = 0.44; SWISSPROT HIT: P34342, EVALUE 9.20e+00; EST_HUMAN HIT: BF092634.1, EVALUE 4.00e-01
atatttggtaccggggtcctagtgaaattctgcaaatacccaaaggatatggtcaataaaataaaaagccaggttctcctgaaaatgctggaccaattgactattatcttcccagttcattaa

SEQ ID NO: 28460 - DNA, 110 bp, Homo sapiens
  MAP TO AC022860.3; EXPRESSED IN BONE MARROW, SIGNAL = 0.97; EXPRESSED IN ADULT LIVER, SIGNAL = 0.76; EXPRESSED IN LUNG, SIGNAL = 1.7; EXPRESSED IN PLACENTA, SIGNAL = 0.6; EXPRESSED IN FETAL LIVER, SIGNAL =   1; EXPRESSED IN BRAIN, SIGNAL = 1.1; SWISSPROT HIT: P34110, EVALUE 7.00e-04; NT HIT: AF175265.1, EVALUE 1.00e-43; EST_HUMAN HIT: AU121505.1, EVALUE 2.00e-43
ctatcaattaaagcaatgattatgtttttcacgtttacattctggtgtaactcagcacaggttcgaagaaagggattcaaagtctggaggtgaaattcatcagggaaaac

SEQ ID NO: 28461 - DNA, 123 bp, Homo sapiens
  MAP TO AC013685.3; EXPRESSED IN BONE MARROW, SIGNAL = 0.63; EXPRESSED IN ADULT LIVER, SIGNAL = 0.69; EXPRESSED IN PLACENTA, SIGNAL = 0.69; EXPRESSED IN FETAL LIVER, SIGNAL = 0.53; EXPRESSED IN BRAIN, SIGNAL = 0.65; EST_HUMAN HIT: AA861091.1, EVALUE 1.00e-01; SWISSPROT HIT: P51123, EVALUE 7.10e+00; NT HIT: AF260968.1, EVALUE 2.70e-01
gttccacatctcagctcctgacattgctttaagttcttctgagtttggtgcccttgtctcagcccttcattcccaccatgctctcaagacttcagtattcagtctctcacaccagatctccag

SEQ ID NO: 28462 - DNA, 123 bp, Homo sapiens
  MAP TO AL136171.3; EXPRESSED IN BONE MARROW, SIGNAL = 0.55; EXPRESSED IN LUNG, SIGNAL = 0.84; EXPRESSED IN PLACENTA, SIGNAL = 0.6; EXPRESSED IN ADULT LIVER, SIGNAL = 0.71; EXPRESSED IN FETAL LIVER, SIGNAL = 0.5; EXPRESSED IN BRAIN, SIGNAL = 0.54; EST_HUMAN HIT: AA249072.1, EVALUE 1.00e-53
ggatgtgtcctacaatcaccatcagccaggaagtggtcaggatgcagtggttataactggattattttccctggcctggctgaccatctgcaaccccctggtgtttcaatgtacaaactattt

SEQ ID NO: 28463 - DNA, 237 bp, Homo sapiens
  MAP TO AP001432.1; EXPRESSED IN PLACENTA, SIGNAL = 0.72; EXPRESSED IN BRAIN, SIGNAL = 0.84; EXPRESSED IN BONE MARROW, SIGNAL = 0.88; EXPRESSED IN ADULT LIVER, SIGNAL = 0.88; EXPRESSED IN FETAL LIVER, SIGNAL = 0.8; EST_HUMAN HIT: BF026628.1, EVALUE 0.00e+00; NT HIT: AF201660.1, EVALUE 1.40e-01; SWISSPROT HIT: Q05319, EVALUE 7.60e+00
tgacagcccaccagcttcctcggagccttcctgctgcagccgctcagggagagcaggcctttcctccagccctgtggcctgcacagacctcctcagctgggcctccaaggaggagcaggagggtactaacatttggaacctgccttcaaggcacgtattcatgctttttaagcatttatagtttaacatcagtggctcggagaagacccatgacttaggaagtgaatctcttaagta

SEQ ID NO: 28464 - DNA, 221 bp, Homo sapiens
  MAP TO AC013490.3; EXPRESSED IN LUNG, SIGNAL = 1.4; EXPRESSED IN PLACENTA, SIGNAL = 1.1; EXPRESSED IN HELA, SIGNAL = 2.4; EXPRESSED IN FETAL LIVER, SIGNAL = 1.9; EXPRESSED IN BONE MARROW, SIGNAL = 1.6; EXPRESSED IN ADULT LIVER, SIGNAL = 1.4; EXPRESSED IN BRAIN, SIGNAL = 2.1; SWISSPROT HIT: P47869, EVALUE 3.00e-39; EST_HUMAN HIT: R60404.1, EVALUE 2.00e-10; NT HIT: gi11436217, EVALUE 1.00e-121
gaatatacaattgatgttttctttcgacaaaaatggaaagatgaacgtttaaaatttaaaggtcctatgaatatccttcgactaaacaatttaatggctagcaaaatctggactccagataccttttttcacaatgggaaaaaatcagtagctcataatatgacaatgccaaataagttgcttcgaattcaggatgatgggactctgctgtataccatgag

SEQ ID NO: 28465 - DNA, 189 bp, Homo sapiens
  MAP TO AC021701.3; EXPRESSED IN LUNG, SIGNAL = 0.86; EXPRESSED IN ADULT LIVER, SIGNAL = 0.97; EXPRESSED IN FETAL LIVER, SIGNAL = 0.91; EXPRESSED IN PLACENTA, SIGNAL = 0.9; EXPRESSED IN BRAIN, SIGNAL = 0.82; EXPRESSED IN BONE MARROW, SIGNAL = 0.91; SWISSPROT HIT: P38360, EVALUE 3.40e-01; NT HIT: U53216.1, EVALUE 1.70e+00; EST_HUMAN HIT: BF333058.1, EVALUE 3.00e-03
atgtcaacagcattatttctcctttctttggacatgcctatttctttggaatatccaaatattcatgaagctgttgtggcctatttggaacagctgaattctgaaaactacagtatttataaacgaactgcagaggccgtttattcaattgaatgcacctgtaacttcctgtctgatattgggaaagag

SEQ ID NO: 28466 - DNA, 83 bp, Homo sapiens
  MAP TO AC016201.5; EXPRESSED IN LUNG, SIGNAL = 0.92; EXPRESSED IN PLACENTA, SIGNAL = 0.98; EXPRESSED IN ADULT LIVER, SIGNAL =   1; EXPRESSED IN FETAL LIVER, SIGNAL = 1.1; EXPRESSED IN BRAIN, SIGNAL = 1.1; EXPRESSED IN BONE MARROW, SIGNAL = 1.2; EST_HUMAN HIT: AA078318.1, EVALUE 3.00e-25; NT HIT: AL163209.2, EVALUE 4.00e-27; SWISSPROT HIT: P04025, EVALUE 2.50e+00
atatcacactggtccattacattgatgacattatgctgattggttccagtgagcaagaagtagcaaacatactagacttatta

SEQ ID NO: 28467 - DNA, 96 bp, Homo sapiens
  MAP TO AC008528.4; EXPRESSED IN ADULT LIVER, SIGNAL = 0.58; EXPRESSED IN BRAIN, SIGNAL = 0.7; EXPRESSED IN BONE MARROW, SIGNAL = 0.49; EXPRESSED IN PLACENTA, SIGNAL = 0.57; EXPRESSED IN FETAL LIVER, SIGNAL = 0.63; NT HIT: AL114166.1, EVALUE 1.30e-02; SWISSPROT HIT: Q9TT92, EVALUE 4.00e-03; EST_HUMAN HIT: BE538919.1, EVALUE 3.00e-01
atggttccctccaagctgccagggatgacatacactgctgatgaacaatgccagatcctttttgggccattggcttctttttgtcaggagatgcag

SEQ ID NO: 28468 - DNA, 164 bp, Homo sapiens
  MAP TO AC019223.2; EXPRESSED IN ADULT LIVER, SIGNAL = 0.61; EXPRESSED IN BRAIN, SIGNAL = 0.5; EXPRESSED IN PLACENTA, SIGNAL = 0.57; EXPRESSED IN FETAL LIVER, SIGNAL = 0.6; EXPRESSED IN BONE MARROW, SIGNAL = 0.58; EST_HUMAN HIT: AA723204.1, EVALUE 3.60e-02; SWISSPROT HIT: Q07687, EVALUE 3.90e+00; NT HIT: M16780.1, EVALUE 2.40e-02
gcacatctacaaggtgcacctgtgctctggcccaggtggtggtggtgaggaggtggtgtctgatttccaagaagacggaccataggaacttccaggataatgttgccttggacaccacagtctgtgtgaacagcaggaccgaagttgtgagagttgccatgatg

SEQ ID NO: 28469 - DNA, 159 bp, Homo sapiens
  MAP TO AC010802.4; EXPRESSED IN ADULT LIVER, SIGNAL = 0.86; EXPRESSED IN PLACENTA, SIGNAL = 1.4; EXPRESSED IN BRAIN, SIGNAL = 0.91; EXPRESSED IN BONE MARROW, SIGNAL = 0.98; EXPRESSED IN FETAL LIVER, SIGNAL = 0.73; NT HIT: AL163246.2, EVALUE 4.00e-50; EST_HUMAN HIT: BE064410.1, EVALUE 1.00e-60; SWISSPROT HIT: P14350, EVALUE 1.00e-04
atggactcacagaatgccttatccaccgtcatggtattccacacagcattgcctctgaccaaggcacttactttacagctaaagaagtgcagcagtgggctcatgctcatggaattcactggtcttaccatgttccccatcatcctgaagcagctgtat

SEQ ID NO: 28470 - DNA, 496 bp, Homo sapiens
  MAP TO AL138934.2; EXPRESSED IN PLACENTA, SIGNAL = 0.55; EXPRESSED IN FETAL LIVER, SIGNAL = 0.51; EXPRESSED IN BONE MARROW, SIGNAL = 0.52; EXPRESSED IN BRAIN, SIGNAL = 0.45; EST_HUMAN HIT: AA017021.1, EVALUE 0.00e+00; NT HIT: AF091886.1, EVALUE 0.00e+00; SWISSPROT HIT: Q92729, EVALUE 4.00e-06
catttagttccgctggtggagaccattctacatgaagttctgtagaactgattttctgcatcttaggtggacttagtctttggggaggggcctgggctgtggtcactgtaatgggcaagctgtgtaaacagcccccgctagtacacgcctgtacagaaaaatcgtacttggcaaatggaaccagattccagatggtagctgaggtttcatgaccttcgtaggaaacacatggctgaccaccagccaaaggggcacaggacaaaatatatttctctatgggaccagattgatttgagagtgttgtccaggtaagtgtcacagagtctgagccaataggaatgatataacttaaagtcaagtttccctctgggacccctggttttgtcttgtaagtgacagctacactccttgttgaaccatgcacattggtggtctcaatgtaataggaatatttggtatatggtaacaggtctgtgtctaagaagtattgaaatac

SEQ ID NO: 28471 - DNA, 358 bp, Homo sapiens
  MAP TO AL139117.3; EXPRESSED IN ADULT LIVER, SIGNAL = 0.7; EXPRESSED IN PLACENTA, SIGNAL = 0.59; EXPRESSED IN FETAL LIVER, SIGNAL = 0.68; EXPRESSED IN BONE MARROW, SIGNAL = 0.74; EXPRESSED IN BRAIN, SIGNAL = 0.69; NT HIT: AF224669.1, EVALUE 2.00e-07; EST_HUMAN HIT: AW014570.1, EVALUE 4.00e-07; SWISSPROT HIT: P08547, EVALUE 6.00e-08
ctagaaggcggaatagtttttcgctgtgtttatactgagcgcttcattttctgtatccattcgcctgctgatggacgcttggccgggttccatgtcttggttatggtggctaaagctgtcatgaacatgggagggcgggcatctcttcaacgtactgattccatttcctttagatacacacccagcagtgaaattgttgaaacacagggtagctctgatcattaacttctgaaaaacatctatagtatttttgtggtcattgtactcatttacattaccactagcggagggcagcggttctattttttctacattctcgctaacacttgttattctactctttttcatagtaaccatc

SEQ ID NO: 28472 - DNA, 75 bp, Homo sapiens
  MAP TO AC018909.3; EXPRESSED IN PLACENTA, SIGNAL = 0.53; EXPRESSED IN FETAL LIVER, SIGNAL = 0.47; EXPRESSED IN BONE MARROW, SIGNAL = 0.52; EXPRESSED IN ADULT LIVER, SIGNAL = 0.68; EXPRESSED IN BRAIN, SIGNAL = 0.58; EST_HUMAN HIT: BF195585.1, EVALUE 1.00e-15; NT HIT: AF078779.1, EVALUE 3.00e-30
ttgtttaagcttctttaggtcttcatcaagttctaagttgtccaaaataacagcaacaaacaaactcaggaggat

SEQ ID NO: 28473 - DNA, 171 bp, Homo sapiens
  MAP TO AC023114.3; EXPRESSED IN LUNG, SIGNAL = 0.89; EXPRESSED IN PLACENTA, SIGNAL = 0.99; EXPRESSED IN ADULT LIVER, SIGNAL =   1; EXPRESSED IN FETAL LIVER, SIGNAL = 0.78; EXPRESSED IN BRAIN, SIGNAL = 0.92; EXPRESSED IN BONE MARROW, SIGNAL = 0.8; NT HIT: U79415.1, EVALUE 3.90e-01; EST_HUMAN HIT: AW469991.1, EVALUE 2.30e+00; SWISSPROT HIT: P03589, EVALUE 8.80e+00
atgactcaaaatatgaaaagcacggtcaagggtccaacacctaagattatccaatctcaaactgcagcttcagtgggagaaaggagccgtctcacagaaatgcccactgcagtcgaaatccacattgttaccgtcatctttcagagcggtgggaacagaacagcacccaca

SEQ ID NO: 28474 - DNA, 366 bp, Homo sapiens
  MAP TO AC013751.3; EXPRESSED IN BONE MARROW, SIGNAL = 0.53; EXPRESSED IN PLACENTA, SIGNAL = 0.69; EXPRESSED IN ADULT LIVER, SIGNAL =  12; EXPRESSED IN BRAIN, SIGNAL = 0.6; EST_HUMAN HIT: AI628820.1, EVALUE 2.00e-12; NT HIT: gi8923839, EVALUE 2.00e-81; SWISSPROT HIT: P39061, EVALUE 2.30e-01
ggtgaaggtgacagtggacccagacccttccctggtctaccgacctgaagtggaccaagaggctgccaaagacaaggctggcttccagagctacgtgtcgggtcccctcctggaccacgtctttaccaccgacaagctcatgaacatgcaccacacagtggatttcgtcaggagcaagcacgcctggtttggggacttttcctacaagaaaatgaaggtcatggaggccgtggacctgctgcatgggctggtggacgaatcagactcaggtgtagacttctcccactccttccaagccttccagatggcggagggcatccgaaagctcacccaggcaaggactggttccagcttgttgggcttcta

SEQ ID NO: 28475 - DNA, 246 bp, Homo sapiens
  MAP TO AL133352.10; EXPRESSED IN PLACENTA, SIGNAL = 0.71; EXPRESSED IN FETAL LIVER, SIGNAL = 0.49; EXPRESSED IN ADULT LIVER, SIGNAL = 0.73; EXPRESSED IN BRAIN, SIGNAL = 0.59; EXPRESSED IN BONE MARROW, SIGNAL = 0.6; EST_HUMAN HIT: BF431610.1, EVALUE 1.00e-05; NT HIT: X87344.1, EVALUE 4.00e-14; SWISSPROT HIT: P08547, EVALUE 1.00e-12
atggctacattaatatcagataaggtctaccttagagcaaagaaaattatctcagatggagagggacgtgatgtaattataacagtgtcaatccatcaagaagacataacaatcctaaatgtctatgcaccaagcaacagagttgcaaaatatgtgaagcaaaacctgatagaactgaaggaagaaacagacaaatacatagttgaggacttcaacacaccctcaacaattgatagaactaaatag

SEQ ID NO: 28476 - DNA, 148 bp, Homo sapiens
  MAP TO AP001426.1; EXPRESSED IN FETAL LIVER, SIGNAL = 0.67; EXPRESSED IN PLACENTA, SIGNAL = 0.79; EXPRESSED IN ADULT LIVER, SIGNAL = 0.87; EXPRESSED IN BONE MARROW, SIGNAL = 0.97; EXPRESSED IN BRAIN, SIGNAL = 0.88; EST_HUMAN HIT: BE272339.1, EVALUE 1.30e-01; SWISSPROT HIT: P32448, EVALUE 1.00e+00
taaagagaagcctgacgtttcacaggaattaaatgaagttgctgcatcacaggtgctccctgccacagggctccgtgtggcagcagcaaacagaactcctcgctgcttaggtgtagtccttaggaatgaaaatctgaacgtagtacgt

SEQ ID NO: 28477 - DNA, 83 bp, Homo sapiens
  MAP TO AL139245.2; EXPRESSED IN ADULT LIVER, SIGNAL = 0.84; EXPRESSED IN BONE MARROW, SIGNAL = 0.62; EXPRESSED IN PLACENTA, SIGNAL = 0.75; EXPRESSED IN BRAIN, SIGNAL = 0.62; EXPRESSED IN FETAL LIVER, SIGNAL = 0.54; SWISSPROT HIT: P41655, EVALUE 1.90e+00; NT HIT: AF150669.1, EVALUE 1.70e-01; EST_HUMAN HIT: AA420767.1, EVALUE 3.90e+00
ataaagatgagatggcaaacacatctgtgactgtcaggcctgttttggcctccagaggtccgtgctgctggtggtcagcagcc

SEQ ID NO: 28478 - DNA, 184 bp, Homo sapiens
  MAP TO AC011055.6; EXPRESSED IN PLACENTA, SIGNAL = 1.6; EXPRESSED IN BRAIN, SIGNAL = 0.5; EXPRESSED IN LUNG, SIGNAL =   1; EXPRESSED IN ADULT LIVER, SIGNAL = 0.8; EXPRESSED IN BONE MARROW, SIGNAL = 0.48; EXPRESSED IN FETAL LIVER, SIGNAL = 1.4; NT HIT: U67492.1, EVALUE 1.10e-01; EST_HUMAN HIT: N76342.1, EVALUE 6.40e-01; SWISSPROT HIT: P40226, EVALUE 3.90e+00
aagccctaccaccatatccttcgctatcaaaacctccatctgtggtgtggtctttgttttcatgtgctggctcagaacagctcaggccgctgcagcagaagccattatccctcccacatcgtcgcacatatccccatcctttgtgcttcttcccagggccaaaggccagtgcacagtatcttcc

SEQ ID NO: 28479 - DNA, 237 bp, Homo sapiens
  MAP TO AC015496.3; EXPRESSED IN BONE MARROW, SIGNAL = 0.51; EXPRESSED IN ADULT LIVER, SIGNAL = 0.57; EXPRESSED IN PLACENTA, SIGNAL = 0.55; EXPRESSED IN BRAIN, SIGNAL = 0.5; EXPRESSED IN FETAL LIVER, SIGNAL = 0.57; NT HIT: AJ251835.1, EVALUE 5.70e-01; SWISSPROT HIT: P48436, EVALUE 2.00e+00; EST_HUMAN HIT: BE048800.1, EVALUE 8.40e-01
tgacatatctttccccagctcagaggtcttttgtgatgccagatgccgataaggaacttgtgcctggtgttcacaggcagcacaacgcaacatgccctccgctgaactggctgcttccaccttaatctcttcccacaaaattccctttttagtgatcgtgaaatacacctgccatgcaccctgcagagaaacttgggtcattgtcccagaattttcatgattccccacccctgaatg

SEQ ID NO: 28480 - DNA, 169 bp, Homo sapiens
  MAP TO AC010492.4; EXPRESSED IN LUNG, SIGNAL = 1.2; EXPRESSED IN PLACENTA, SIGNAL = 1.3; EXPRESSED IN ADULT LIVER, SIGNAL = 1.4; EXPRESSED IN FETAL LIVER, SIGNAL = 1.6; EXPRESSED IN BRAIN, SIGNAL = 1.4; EXPRESSED IN BONE MARROW, SIGNAL = 1.6; SWISSPROT HIT: P55201, EVALUE 1.70e+00; EST_HUMAN HIT: BF513783.1, EVALUE 6.00e-41; NT HIT: X54816.1, EVALUE 6.10e+00
tcaaaatctgcaaactcccgacccgtggaacctcctctgaatccgccgcgaaatcctcaaggggtggtcaaggtaccacttctgccaccacgccctctgccaccatggaaaccaagacctccctctgcctctgtatcccccatggccacggtttggacaaagtgggatt

SEQ ID NO: 28481 - DNA, 83 bp, Homo sapiens
  MAP TO AC022045.2; EXPRESSED IN LUNG, SIGNAL =   2; EXPRESSED IN BRAIN, SIGNAL = 1.6; EXPRESSED IN PLACENTA, SIGNAL = 1.5; EXPRESSED IN FETAL LIVER, SIGNAL = 1.7; EXPRESSED IN ADULT LIVER, SIGNAL = 1.4; EXPRESSED IN BONE MARROW, SIGNAL = 1.3; NT HIT: AF029701.2, EVALUE 7.00e-10; EST_HUMAN HIT: AI734108.1, EVALUE 7.00e-05
ttgcctcaggccatccggatgtatacctgcgggcttgagctcagaagccttacagtaatgttatgccagagtcagactggaaa

SEQ ID NO: 28482 - DNA, 87 bp, Homo sapiens
  MAP TO AC019099.3; EXPRESSED IN ADULT LIVER, SIGNAL = 1.1; EXPRESSED IN FETAL LIVER, SIGNAL = 1.2; EXPRESSED IN BRAIN, SIGNAL = 1.2; EXPRESSED IN BONE MARROW, SIGNAL =   1; EXPRESSED IN LUNG, SIGNAL = 1.3; EXPRESSED IN PLACENTA, SIGNAL = 1.2; NT HIT: gi11496990, EVALUE 2.00e-29; SWISSPROT HIT: Q14624, EVALUE 2.50e+00; EST_HUMAN HIT: BE867157.1, EVALUE 2.00e-29
attaaagagaaggaagaagcccagtcagagtaccgaggagcagtgacccagggccatggcgcttacctgatgagtcaggatgctcca

SEQ ID NO: 28483 - DNA, 162 bp, Homo sapiens
  MAP TO AC020719.3; EXPRESSED IN PLACENTA, SIGNAL = 0.91; EXPRESSED IN FETAL LIVER, SIGNAL = 0.82; EXPRESSED IN BRAIN, SIGNAL = 0.78; EXPRESSED IN LUNG, SIGNAL = 0.91; EXPRESSED IN ADULT LIVER, SIGNAL = 0.8; EXPRESSED IN BONE MARROW, SIGNAL = 0.78; NT HIT: AE002025.1, EVALUE 1.50e+00; SWISSPROT HIT: P01228, EVALUE 6.00e-01; EST_HUMAN HIT: H29951.1, EVALUE 3.50e-02
atgctgcaaattgatataagtcttgcaaaagatgcaggctttcacggtgccagtgaaagtgacgttggtggatctgctggaattgcaggcaaagccattccatatcctgccctggaggtgtctaaacagacagctgcagagagggactgcctagggccccag

SEQ ID NO: 28484 - DNA, 110 bp, Homo sapiens
  MAP TO AC011207.3; EXPRESSED IN LUNG, SIGNAL = 1.2; EXPRESSED IN ADULT LIVER, SIGNAL = 1.3; EXPRESSED IN BRAIN, SIGNAL = 1.6; EXPRESSED IN BONE MARROW, SIGNAL = 1.3; EXPRESSED IN PLACENTA, SIGNAL = 1.7; EXPRESSED IN FETAL LIVER, SIGNAL = 2.1; NT HIT: gi11432994, EVALUE 1.00e-55; EST_HUMAN HIT: AI307288.1, EVALUE 2.00e-55; SWISSPROT HIT: Q63622, EVALUE 3.00e-14
ggcaaacactgtatacttgatgtatcaggaaatgctatcaagcggttacaagttgcccagctctatcccattgccatcttcataaaacccaggtctctggaacctcttat

SEQ ID NO: 28485 - DNA, 109 bp, Homo sapiens
  MAP TO AL161445.2; EXPRESSED IN FETAL LIVER, SIGNAL = 0.65; EXPRESSED IN BRAIN, SIGNAL = 0.72; EXPRESSED IN BONE MARROW, SIGNAL = 0.74; EST_HUMAN HIT: AW471308.1, EVALUE 7.00e-55; SWISSPROT HIT: Q99933, EVALUE 3.20e-02; NT HIT: gi11526491, EVALUE 5.00e-55
ctgctggattccagtaagctctttattcaactcttccagctggtcagctatcttctccacagacttctccaaatgtttcaacttctttagttcaacctcttcctgtgga

SEQ ID NO: 28486 - DNA, 155 bp, Homo sapiens
  MAP TO AL161724.2; EXPRESSED IN ADULT LIVER, SIGNAL = 1.1; EXPRESSED IN LUNG, SIGNAL = 1.1; EXPRESSED IN BRAIN, SIGNAL = 0.95; EXPRESSED IN BONE MARROW, SIGNAL = 0.89; EXPRESSED IN PLACENTA, SIGNAL =   1; EXPRESSED IN FETAL LIVER, SIGNAL =   1; EST_HUMAN HIT: AA630453.1, EVALUE 1.00e-04; SWISSPROT HIT: P51356, EVALUE 6.80e+00
aacttggtaagtttgaaaatgagtatacacccatgaaatcatcactgtaatttatgtcataaatccatggatcacctccaaaactttctcctgccttcttatttatgatgatgacgatgatgatgatgatgttgatgatgatgatgatgatgaca

SEQ ID NO: 28487 - DNA, 164 bp, Homo sapiens
  MAP TO AC008572.6; EXPRESSED IN PLACENTA, SIGNAL = 0.47; EXPRESSED IN FETAL LIVER, SIGNAL = 0.53; EXPRESSED IN BONE MARROW, SIGNAL = 0.51; EXPRESSED IN ADULT LIVER, SIGNAL = 0.67; EXPRESSED IN BRAIN, SIGNAL = 0.46; SWISSPROT HIT: O14053, EVALUE 1.40e-02; EST_HUMAN HIT: BE537764.1, EVALUE 2.00e-37
aggaagctcgtgaaagtgactgggatggtatcattgcttgccatcaaggtaagctatcttgctcaacctggaattatcagaaatctacaataggcgcttactttctcaagccaaaagagttgaagaaagatgacataactgcaacagtaagtgagcttgtttat

SEQ ID NO: 28488 - DNA, 196 bp, Homo sapiens
  MAP TO AC026213.2; EXPRESSED IN LUNG, SIGNAL = 0.84; EXPRESSED IN ADULT LIVER, SIGNAL =   1; EXPRESSED IN FETAL LIVER, SIGNAL = 0.91; EXPRESSED IN BRAIN, SIGNAL = 0.87; EXPRESSED IN PLACENTA, SIGNAL = 0.82; EXPRESSED IN BONE MARROW, SIGNAL = 0.83; SWISSPROT HIT: Q59293, EVALUE 3.80e+00; NT HIT: AF129279.1, EVALUE 2.90e-02
tcatcaggagcatccaggagaactctgcctatggtattcctcagaaggttctctaccatggcttagatggcattgagggccttggaaccttcataaaagccttatcccaggttgcttggctaaatgacacttcagttaacctgctgcttcccctcagaactgtcagagattttttcaaacaaagacccaaaaggag

SEQ ID NO: 28489 - DNA, 75 bp, Homo sapiens
  MAP TO AC016282.3; EXPRESSED IN ADULT LIVER, SIGNAL = 0.61; EXPRESSED IN BONE MARROW, SIGNAL = 0.46; EXPRESSED IN PLACENTA, SIGNAL = 0.48; EXPRESSED IN FETAL LIVER, SIGNAL = 0.57; EXPRESSED IN BRAIN, SIGNAL = 0.46; NT HIT: D90911.1, EVALUE 5.90e-01; EST_HUMAN HIT: AA702143.1, EVALUE 3.50e+00
aatgggtaacaactggatcttcagaagaaacaacaacagcaacaacaacaaccctgatttgtggtttttgtccat

SEQ ID NO: 28490 - DNA, 102 bp, Homo sapiens
  MAP TO AL157396.2; EXPRESSED IN ADULT LIVER, SIGNAL = 0.95; EXPRESSED IN LUNG, SIGNAL = 1.3; EXPRESSED IN PLACENTA, SIGNAL = 0.99; EXPRESSED IN FETAL LIVER, SIGNAL = 0.66; EXPRESSED IN BRAIN, SIGNAL = 0.77; EXPRESSED IN BONE MARROW, SIGNAL = 0.75; EST_HUMAN HIT: AA912623.1, EVALUE 1.00e-06; NT HIT: Z97339.2, EVALUE 1.00e-05
cgcagggtctggcacattataaggatgtgttaaaggttggttattgttgttgtcgtcattgtcattgtcatcatcatcatgaattacattgtttttcctttg

SEQ ID NO: 28491 - DNA, 142 bp, Homo sapiens
  MAP TO AC018389.3; EXPRESSED IN BONE MARROW, SIGNAL = 1.9; EXPRESSED IN LUNG, SIGNAL = 1.1; EXPRESSED IN PLACENTA, SIGNAL = 1.1; EXPRESSED IN ADULT LIVER, SIGNAL = 0.95; EXPRESSED IN FETAL LIVER, SIGNAL = 1.1; EXPRESSED IN BRAIN, SIGNAL = 0.92; NT HIT: U39559.1, EVALUE 3.20e-01; SWISSPROT HIT: P10272, EVALUE 2.00e-08
atggaaactacattcggtgtggagacctcaatcttccggacagatggaaagaatgaatctaacactgaaaacaatcattgccaaactgtgctgggaaacccagttaaagggaattcaggtactcggcattgcactgctccgg

SEQ ID NO: 28492 - DNA, 254 bp, Homo sapiens
  MAP TO AL162171.1; EXPRESSED IN ADULT LIVER, SIGNAL = 1.1; EXPRESSED IN BRAIN, SIGNAL = 0.84; EXPRESSED IN LUNG, SIGNAL = 1.2; EXPRESSED IN PLACENTA, SIGNAL = 1.3; EXPRESSED IN FETAL LIVER, SIGNAL = 1.1; EXPRESSED IN BONE MARROW, SIGNAL = 1.1; SWISSPROT HIT: P57458, EVALUE 2.30e+00; EST_HUMAN HIT: X85597.1, EVALUE 2.00e-60
ctttctcaacgtttctaaggaagccgattatttttacatcagtagttcttgactgtgattcagtatcttcttcttgatcttcaaactgtctgttgcattcatatgttgttgaatattcattcattttaacctccaaagatgaaatttttgcttcattcttggacactctaacatttagatcaaaaagatttgcttccactgtcaaaatagctgctttcattcctttaatttcattgatatcagctgatattttc

SEQ ID NO: 28493 - DNA, 146 bp, Homo sapiens
  MAP TO AC021383.3; EXPRESSED IN ADULT LIVER, SIGNAL = 0.66; EXPRESSED IN FETAL LIVER, SIGNAL = 0.72; EXPRESSED IN BRAIN, SIGNAL = 0.67; EXPRESSED IN BONE MARROW, SIGNAL = 0.76; EXPRESSED IN PLACENTA, SIGNAL = 0.64; NT HIT: AJ242586.1, EVALUE 1.30e+00; SWISSPROT HIT: Q02369, EVALUE 1.20e-01
agtcttttaacatctggacctgtggcagcttctctcctgttgcccccttcactcctgatctctgactgtcatctgacctgtgtggcccaggactccctaagcatgcgttcccattgcaactcttgtgccagaatatcctcctttcc

SEQ ID NO: 28494 - DNA, 162 bp, Homo sapiens
  MAP TO AC009334.3; EXPRESSED IN PLACENTA, SIGNAL = 0.58; EXPRESSED IN ADULT LIVER, SIGNAL = 0.65; EXPRESSED IN FETAL LIVER, SIGNAL = 0.6; EXPRESSED IN BRAIN, SIGNAL = 0.69; EXPRESSED IN BONE MARROW, SIGNAL = 0.77; SWISSPROT HIT: Q99698, EVALUE 1.00e-24; NT HIT: U84744.1, EVALUE 2.00e-86; EST_HUMAN HIT: BF575699.1, EVALUE 2.00e-44
aacttgtctgtggaaagtatattatttgaaatgagggaccatctttcccagtcaaaggtgattgaaacacaactagcaaagcctttatttgatgccctgcttcgagttgccctcgggaattattcagcagattttgaacataatgatgctatgactgagaag

SEQ ID NO: 28495 - DNA, 359 bp, Homo sapiens
  MAP TO AL118505.13; EXPRESSED IN ADULT LIVER, SIGNAL = 0.77; EXPRESSED IN FETAL LIVER, SIGNAL = 0.77; EXPRESSED IN BRAIN, SIGNAL = 0.74; EXPRESSED IN PLACENTA, SIGNAL = 0.56; EXPRESSED IN BONE MARROW, SIGNAL = 0.74; SWISSPROT HIT: P46060, EVALUE 4.40e-02; EST_HUMAN HIT: AW674581.1, EVALUE 0.00e+00; NT HIT: gi11421630, EVALUE 0.00e+00
gttttggctccattattcagctataccctggaggaggacctgttcgggcagcaacagcatgttttggatttcccaaatcttttctcagtggtctttatgaattccctctcaacaaagtggacagtcttctacatggaacattttctgccaagatgttatcttcagagccaaaagacagtgctttggttgaagaaagtaatggcacactggaggaaaaacaggcttctgaacaagagaatgaagacagcatggcagaggccccagagagcaaccacccagaagaccaggaaacaatggaaacaatttctcaagatccagaacataaggggcctaaagagagaggaagcaaaaaagattat

SEQ ID NO: 28496 - DNA, 172 bp, Homo sapiens
  MAP TO AC022843.3; EXPRESSED IN ADULT LIVER, SIGNAL = 1.1; EXPRESSED IN BONE MARROW, SIGNAL = 0.8; EXPRESSED IN PLACENTA, SIGNAL = 0.73; EXPRESSED IN FETAL LIVER, SIGNAL = 0.99; EXPRESSED IN BRAIN, SIGNAL =   1; EST_HUMAN HIT: AF136413.1, EVALUE 5.90e-01; SWISSPROT HIT: P01496, EVALUE 2.30e+00; NT HIT: AB016625.1, EVALUE 4.00e-01
attaggagtgccctgttcctgttctcatggctttctcttccaaggctgcacatttgtcatggggaaaaggctaaacagagctggtgttggtttattcatcagtcacatcaatgttgttgctaccagcttaaatattcacagcctttccccacacagaaccatctgctggtgc

SEQ ID NO: 28497 - DNA, 410 bp, Homo sapiens
  MAP TO AL122007.7; EXPRESSED IN PLACENTA, SIGNAL = 0.58; EXPRESSED IN FETAL LIVER, SIGNAL = 0.54; EXPRESSED IN BRAIN, SIGNAL = 0.48; EXPRESSED IN BONE MARROW, SIGNAL = 0.54; EXPRESSED IN ADULT LIVER, SIGNAL = 0.7; SWISSPROT HIT: P26809, EVALUE 2.00e-10; EST_HUMAN HIT: AA435819.1, EVALUE 3.00e-08
atgtacatcaagttcaaatgggcacccctgatcaattacttgtaaggcctgtgtttgctgaatggcccacttggcggccagaaggtctgttccagcttcattatcccaatcccaggtagcccctttttttgataacccatacaatggttttatcatttgagccaaatggggcacaaatggccgccaatactccaagaggcctacaaaagtctgcagctgcttcatcgtggtgggtcgggggtatgcctggattttctcaatgatggcctctggtatggcctttgtcttactcaaccaaataactcctaagaatttcgcagataatccaggccattggaccttggatttgttgatggcccaaccacatgctgccaaatgttgccacaagaggggcactgccacttttaaat

SEQ ID NO: 28498 - DNA, 160 bp, Homo sapiens
  MAP TO AC011255.3; EXPRESSED IN PLACENTA, SIGNAL = 0.51; EXPRESSED IN ADULT LIVER, SIGNAL = 0.67; EXPRESSED IN FETAL LIVER, SIGNAL = 0.67; EXPRESSED IN BRAIN, SIGNAL = 0.62; EXPRESSED IN BONE MARROW, SIGNAL = 0.69; EST_HUMAN HIT: H92947.1, EVALUE 6.00e-04; SWISSPROT HIT: P24783, EVALUE 3.00e+00
ctgattaccagctcctctattaccccacccttcatccctgttttctctgccatatagatgcctaattttagttggtcagaaagaagaatttgagactgatctcctattctctgctgcagcacttgaacaaagacttcttccattggaaaactcatcatct

SEQ ID NO: 28499 - DNA, 254 bp, Homo sapiens
  MAP TO AC022470.3; EXPRESSED IN PLACENTA, SIGNAL = 0.85; EXPRESSED IN ADULT LIVER, SIGNAL = 0.83; EXPRESSED IN BONE MARROW, SIGNAL = 0.92; EXPRESSED IN BRAIN, SIGNAL = 1.4; EXPRESSED IN FETAL LIVER, SIGNAL = 0.83; EST_HUMAN HIT: AW387131.1, EVALUE 0.00e+00; SWISSPROT HIT: P03255, EVALUE 2.00e-01; NT HIT: U44953.1, EVALUE 0.00e+00
cgattgccactgacatgttggctgaatcggggagtgtaactttccccctgctcatcctcatcttcctcagggggaaagccatattggggctcgaagtatggattgtcatagattcgccggcgcactgacccctctccaatttctgcctgacgtctgtccacgttcgatttgccaatgctgggaggcacggaagggaggggcttggagacgcctactgctgccttatcatccatctccgtagagtcagcaggttc

SEQ ID NO: 28500 - DNA, 192 bp, Homo sapiens
  MAP TO AL160281.2; EXPRESSED IN BRAIN, SIGNAL = 0.82; EXPRESSED IN BONE MARROW, SIGNAL = 0.89; EXPRESSED IN PLACENTA, SIGNAL = 0.8; EXPRESSED IN FETAL LIVER, SIGNAL = 0.68; EST_HUMAN HIT: AI733032.1, EVALUE 4.00e-67; NT HIT: X60155.2, EVALUE 9.00e-24; SWISSPROT HIT: Q06730, EVALUE 1.00e-12
aacttcacaggatggttgtccttacccactgagagcaggtggctgtagttctccaacattacatcctggtacaggcgtctttgagtagagtccagttgctgccactcctctctactgaagtccacagtcacatcctcaaatgacactgatacctgtaacaacacaatcttgttcaaggcaacatgatcagca

SEQ ID NO: 28501 - DNA, 373 bp, Homo sapiens
  MAP TO AL161627.2; EXPRESSED IN PLACENTA, SIGNAL = 0.64; EXPRESSED IN FETAL LIVER, SIGNAL = 0.53; EXPRESSED IN BRAIN, SIGNAL = 0.73; EXPRESSED IN ADULT LIVER, SIGNAL = 0.69; EXPRESSED IN BONE MARROW, SIGNAL = 0.62; NT HIT: AB020691.1, EVALUE 0.00e+00; EST_HUMAN HIT: BF695687.1, EVALUE 1.00e-121; SWISSPROT HIT: P53814, EVALUE 1.40e+00
atgagaccaaagccacattatgtcatgataaagaaagatgctgaaaccaatgaagcaatctattgtacaaaggagcctttcattaaggctcgtgttattgtcattcgttggctggtttctttctggctggagccaaaaccacatacaggacctcatattcctgggatggaaggtgaagtcttgccaaagaatattcagagagcagctgctagtttagtatccagagaagaaagcaaaaatgataatgctgataaagcagacagaactacagaacccgaacagtctcattccaatacaagcactctcacggagcgagaacctagctcatctagtctctgtagtattgatgaagaacatctcacagacattgaaa

SEQ ID NO: 28502 - DNA, 186 bp, Homo sapiens
  MAP TO AL121910.19; EXPRESSED IN PLACENTA, SIGNAL = 0.53; EXPRESSED IN ADULT LIVER, SIGNAL = 0.75; EXPRESSED IN BRAIN, SIGNAL = 0.51; EXPRESSED IN BONE MARROW, SIGNAL = 0.51; EXPRESSED IN FETAL LIVER, SIGNAL = 0.55; EST_HUMAN HIT: BE244087.1, EVALUE 1.60e-01; SWISSPROT HIT: Q03133, EVALUE 1.00e+00
ccctggctctgagcccatgggtttggattctatcgctggtctaggcagctgactccgctcacacttctgattctcccatcgatggtgccacctgctctgctctggaagcttctggttccttgtctgccagcagagacattcacacctgcaccacaggtgcacccacatgaagaggaggctgctcat

SEQ ID NO: 28503 - DNA, 122 bp, Homo sapiens
  MAP TO AC016471.4; EXPRESSED IN FETAL LIVER, SIGNAL = 0.51; EXPRESSED IN BRAIN, SIGNAL = 0.53; EXPRESSED IN ADULT LIVER, SIGNAL = 0.63; EXPRESSED IN BONE MARROW, SIGNAL = 0.52; SWISSPROT HIT: P57143, EVALUE 4.10e+00; NT HIT: AF048820.1, EVALUE 2.70e-01; EST_HUMAN HIT: BF155161.1, EVALUE 4.00e-01
tataccagtatatccaatacctgcgtcaagaaataaatcaatattggcataagcagaacttgctctatgtcacttcccagaccacagcattcctcaaaaataatgactatcctagttcttaa

SEQ ID NO: 28504 - DNA, 272 bp, Homo sapiens
  MAP TO AC024575.1; EXPRESSED IN LUNG, SIGNAL = 1.1; EXPRESSED IN BONE MARROW, SIGNAL = 1.1; EXPRESSED IN PLACENTA, SIGNAL = 0.86; EXPRESSED IN ADULT LIVER, SIGNAL =   1; EXPRESSED IN FETAL LIVER, SIGNAL = 0.97; EXPRESSED IN BRAIN, SIGNAL = 1.6; NT HIT: AE004460.1, EVALUE 1.70e-01; SWISSPROT HIT: Q10022, EVALUE 4.00e-03; EST_HUMAN HIT: BE388421.1, EVALUE 0.00e+00
gggtctactccttcggcctcttcaccacgaccatcttcgccaacgcggggcaggtggtgaccggcaatcccacgccacacttcctgtccgtgtgccgccccaactacacggccctgggctgcctgccaccttctccggatcggccaggtcccgaccgctttgtcactgaccagggtgcctgcgctggcagtcccagcctcgtggccgccgcgcgccgcgccttcccctgcaaggatgcggccctctgcgcctacgcggtcacctacacagcg

SEQ ID NO: 28505 - DNA, 93 bp, Homo sapiens
  MAP TO AL139423.2; EXPRESSED IN PLACENTA, SIGNAL = 0.7; EXPRESSED IN ADULT LIVER, SIGNAL = 0.75; EXPRESSED IN FETAL LIVER, SIGNAL = 0.71; EXPRESSED IN BONE MARROW, SIGNAL = 0.57; EXPRESSED IN BRAIN, SIGNAL = 0.77; EST_HUMAN HIT: BE206758.1, EVALUE 2.00e-45; NT HIT: gi11422236, EVALUE 1.00e-45; SWISSPROT HIT: O75381, EVALUE 2.00e-10
gaaccacctgtgtggctgggcccaaggacgaaggctcatcggcagcagtgcccgactgctggaaggccatatcaatctcttcatctgtcagcc

SEQ ID NO: 28506 - DNA, 187 bp, Homo sapiens
  MAP TO AC013657.3; EXPRESSED IN PLACENTA, SIGNAL = 1.1; EXPRESSED IN ADULT LIVER, SIGNAL = 1.3; EXPRESSED IN BRAIN, SIGNAL = 1.1; EXPRESSED IN BONE MARROW, SIGNAL = 1.2; EXPRESSED IN LUNG, SIGNAL = 1.1; EXPRESSED IN FETAL LIVER, SIGNAL = 1.3; NT HIT: gi6755715, EVALUE 1.70e+00
gattccaacggcatgtccctttgttccgtgtcgtcacgttgtccccgctggcgtggcggttcctcccttcctggctcttccctgccctccttgtgcagtaagcacgtgggcatcacttcaaagcaaaaggagcccttgtccatcactgttgaggtgaggaggaccatcaccaaagccccaggacagg

SEQ ID NO: 28507 - DNA, 232 bp, Homo sapiens
  MAP TO AC016498.4; EXPRESSED IN LUNG, SIGNAL = 1.2; EXPRESSED IN PLACENTA, SIGNAL = 1.1; EXPRESSED IN ADULT LIVER, SIGNAL = 1.3; EXPRESSED IN FETAL LIVER, SIGNAL = 1.2; EXPRESSED IN BRAIN, SIGNAL = 1.4; EXPRESSED IN BONE MARROW, SIGNAL = 1.3; EST_HUMAN HIT: AU135734.1, EVALUE 3.00e-71; NT HIT: U46733.1, EVALUE 8.60e+00
attatgccgacaagcccctggagaagcctctaaagctagtcctgaaggtcggaggaagtgaagtgactgaactctcaggatccggccacgactccagttactatgatgacaggtcagaccatgagcgagagaggcacaaagaaaagaaaaagaagaagaagaagaagtccgagaaggagaagcatctggacgatgaggaaagaaggaagcgaaaggtaaaggagcagcggcg

SEQ ID NO: 28508 - DNA, 84 bp, Homo sapiens
  MAP TO AL161724.2; EXPRESSED IN PLACENTA, SIGNAL = 0.62; EXPRESSED IN FETAL LIVER, SIGNAL = 0.55; EXPRESSED IN BRAIN, SIGNAL = 0.52; EXPRESSED IN BONE MARROW, SIGNAL = 0.47; EST_HUMAN HIT: BE084738.1, EVALUE 2.00e-08; NT HIT: AL163302.2, EVALUE 1.00e-08
aagggattctcaatgaaattatcagcagatttgtcatcagaaactttggaagcccgaaggcaatgagccaatatagacacattg

SEQ ID NO: 28509 - DNA, 75 bp, Homo sapiens
  MAP TO AC024259.5; EXPRESSED IN PLACENTA, SIGNAL = 0.66; EXPRESSED IN FETAL LIVER, SIGNAL = 0.66; EXPRESSED IN BONE MARROW, SIGNAL = 0.65; EXPRESSED IN ADULT LIVER, SIGNAL = 0.65; EXPRESSED IN BRAIN, SIGNAL = 0.62; EST_HUMAN HIT: AW897335.1, EVALUE 8.70e-01
agttaatagtgagatttggagtatgtcgtagaaaaattgtgtggttacctaccacgtttaaacttgctagacaat

SEQ ID NO: 28510 - DNA, 102 bp, Homo sapiens
  MAP TO AC018993.3; EXPRESSED IN ADULT LIVER, SIGNAL = 0.78; EXPRESSED IN BONE MARROW, SIGNAL = 0.51; EXPRESSED IN PLACENTA, SIGNAL = 0.56; EXPRESSED IN FETAL LIVER, SIGNAL = 0.54; EXPRESSED IN BRAIN, SIGNAL = 0.55; NT HIT: AF077837.1, EVALUE 8.60e-01; EST_HUMAN HIT: N91585.1, EVALUE 1.30e+00
tccatagttctagtaatgagcgcaccacaaaattgataattccatcagattatcatggaaaacgagcattgttgtatgaacgtttttgtgactactgcaaag

SEQ ID NO: 28511 - DNA, 286 bp, Homo sapiens
  MAP TO AC007957.34; EXPRESSED IN LUNG, SIGNAL = 1.1; EXPRESSED IN PLACENTA, SIGNAL = 0.84; EXPRESSED IN ADULT LIVER, SIGNAL = 0.9; EXPRESSED IN FETAL LIVER, SIGNAL = 0.87; EXPRESSED IN BONE MARROW, SIGNAL = 0.92; EXPRESSED IN BRAIN, SIGNAL = 1.1; EST_HUMAN HIT: W95278.1, EVALUE 0.00e+00; SWISSPROT HIT: O70138, EVALUE 7.40e-01; NT HIT: D00591.1, EVALUE 1.80e-01
ctcgcctgccacatcttgcacatccccgaggcaactttcgatctgctgcactcggtcacccgtactgcccaggcaagggctgcccatacgcactctggacaggctgagtgtcctgccctgtcccccacataaggctgccggccatggcttctgcacctgggtgggatgcagacacgctgacctgcctttctctgcggggcagtggggatgaacccaggttggactgtggccttggccaagtgacctgtatatgaaactgggacaaagcccatctttggcacgtagc

SEQ ID NO: 28512 - DNA, 195 bp, Homo sapiens
  MAP TO AC009943.4; EXPRESSED IN ADULT LIVER, SIGNAL = 0.75; EXPRESSED IN BRAIN, SIGNAL = 0.71; EXPRESSED IN BONE MARROW, SIGNAL = 0.76; EXPRESSED IN PLACENTA, SIGNAL = 0.63; EXPRESSED IN FETAL LIVER, SIGNAL = 0.77; NT HIT: AF005273.1, EVALUE 2.00e-28; SWISSPROT HIT: Q02817, EVALUE 7.00e-04; EST_HUMAN HIT: R97021.1, EVALUE 6.80e-01
gatcagaatattgtcttgcaagacggtaaagtaacagcagtcaaatctacagaaagtaagaaatgtgaactcaatgcaaatgcatactccatacatactgttggcctgtacttaattctgaaatttcaaaatggaataatcgtgatttgggacaaaaatacaagactgtctgttattctggatccaaactggaat

SEQ ID NO: 28513 - DNA, 127 bp, Homo sapiens
  MAP TO AC016205.4; EXPRESSED IN ADULT LIVER, SIGNAL = 0.94; EXPRESSED IN FETAL LIVER, SIGNAL = 0.78; EXPRESSED IN BRAIN, SIGNAL = 0.82; EXPRESSED IN BONE MARROW, SIGNAL = 0.91; EXPRESSED IN LUNG, SIGNAL = 0.87; EXPRESSED IN PLACENTA, SIGNAL = 0.99; SWISSPROT HIT: P08548, EVALUE 2.40e-02; EST_HUMAN HIT: AA256200.1, EVALUE 7.00e-09; NT HIT: AF224669.1, EVALUE 1.10e+00
tttgagtatgatgtaagtcctgtgttcttcatagatactctttaccagtttgaggatgtttccttccatttctagtttgttgtgtgtttttatcacaaaagggcattggttttgccaaatgcttttc

SEQ ID NO: 28514 - DNA, 467 bp, Homo sapiens
  MAP TO AC006038.2; EXPRESSED IN LUNG, SIGNAL = 1.2; EXPRESSED IN PLACENTA, SIGNAL = 0.93; EXPRESSED IN ADULT LIVER, SIGNAL = 0.53; EXPRESSED IN FETAL LIVER, SIGNAL = 1.4; EXPRESSED IN BRAIN, SIGNAL = 0.67; EXPRESSED IN BONE MARROW, SIGNAL = 0.95; NT HIT: gi11430809, EVALUE 0.00e+00; SWISSPROT HIT: Q09028, EVALUE 2.50e-01; EST_HUMAN HIT: AU134114.1, EVALUE 0.00e+00
gcgaagggtcttgctggtcctccagaagggtggctttggcctgctccttgcttatctcgttgcatggctcttcataaagaggctcaccaaggtctccgctgccctcttcactctcctcctcgctgtggtcttcacttggctccacagtttgttccaggctgttctccagaagtgtgggagaactgcttattctactttcctcttcagctgtctcatttaagggctgagaaggaggcggtgtgggagtattagattggatgacactttcagtggaagagacgggggctttggttagagtagtatccgctacagtctcattctgaggcaaagataacttttccacaagtttccactgaatgatgctcatgtcttttccaccagttgatatcaggtgactgtcattgtgagtaaaactgacattggtgacatggctgctgtgggcactgtacttgtgactgggagcctat

SEQ ID NO: 28515 - DNA, 179 bp, Homo sapiens
  MAP TO AC022813.3; EXPRESSED IN LUNG, SIGNAL = 0.93; EXPRESSED IN ADULT LIVER, SIGNAL =   1; EXPRESSED IN BRAIN, SIGNAL = 1.1; EXPRESSED IN PLACENTA, SIGNAL = 1.2; EXPRESSED IN FETAL LIVER, SIGNAL = 0.99; EXPRESSED IN BONE MARROW, SIGNAL = 0.77; SWISSPROT HIT: P29475, EVALUE 8.90e-02; NT HIT: AF275948.1, EVALUE 1.10e-01; EST_HUMAN HIT: AA338125.1, EVALUE 9.70e+00
agttccatgtggtagctgtttgtatcaccattttacagatgaaggacttcagccacagaaaagtcaagcacttccccggggcctcacagcttgaagacaaagaactgggattcaaactcatgtttagacagttgcttgcatttgccaacttttaccagccaactttgctctctgtataa

SEQ ID NO: 28516 - DNA, 123 bp, Homo sapiens
  MAP TO AL138956.3; EXPRESSED IN ADULT LIVER, SIGNAL = 0.88; EXPRESSED IN BONE MARROW, SIGNAL = 1.2; EXPRESSED IN LUNG, SIGNAL = 1.2; EXPRESSED IN BRAIN, SIGNAL = 1.1; EXPRESSED IN PLACENTA, SIGNAL = 1.1; EXPRESSED IN FETAL LIVER, SIGNAL = 1.1; EST_HUMAN HIT: BE384883.1, EVALUE 1.60e+00; SWISSPROT HIT: P54679, EVALUE 7.10e+00; NT HIT: U12022.1, EVALUE 6.90e-02
tgcagaaggccccttggtaccagctcacagaaatcctgcaggaggctgtagcttcagcttctctagctctgtctgttgggcttactgcagctggctccaatgccagtactggagagacaccac

SEQ ID NO: 28517 - DNA, 78 bp, Homo sapiens
  MAP TO AC007956.5; EXPRESSED IN PLACENTA, SIGNAL = 0.76; EXPRESSED IN FETAL LIVER, SIGNAL = 1.2; EXPRESSED IN LUNG, SIGNAL = 1.1; EXPRESSED IN BONE MARROW, SIGNAL = 1.2; EXPRESSED IN ADULT LIVER, SIGNAL = 1.3; EXPRESSED IN BRAIN, SIGNAL = 1.3; NT HIT: AB033168.1, EVALUE 1.00e-29; EST_HUMAN HIT: AA420467.1, EVALUE 1.00e-36
cagactgattgggagaagatcacagatgaaagtggtcacctggctgaaaaagccctcaatcgaaccaaatatatatga

SEQ ID NO: 28518 - DNA, 210 bp, Homo sapiens
  MAP TO AC009079.4; EXPRESSED IN BONE MARROW, SIGNAL = 1.2; EXPRESSED IN PLACENTA, SIGNAL = 0.99; EXPRESSED IN ADULT LIVER, SIGNAL = 1.1; EXPRESSED IN BRAIN, SIGNAL = 0.96; EXPRESSED IN LUNG, SIGNAL = 1.2; EXPRESSED IN FETAL LIVER, SIGNAL = 1.1; SWISSPROT HIT: P21303, EVALUE 1.50e-01; NT HIT: AJ243796.1, EVALUE 2.00e+00; EST_HUMAN HIT: BF353221.1, EVALUE 7.40e-01
tgcctcttcccatccagttccaataataaactctttggctttttcatcttgttcaagcgtaatgtcactgacatcgagaagacaataaacatgatttttttcactttttccatctggacaagtataggttggttctgtttcttctgtgaactgaatttcattattttcagcattttctaagtcagtctcatttttctgacagagatccat

SEQ ID NO: 28519 - DNA, 78 bp, Homo sapiens
  MAP TO AL139248.2; EXPRESSED IN PLACENTA, SIGNAL = 0.6; EXPRESSED IN FETAL LIVER, SIGNAL = 0.56; EXPRESSED IN BRAIN, SIGNAL = 0.79; EXPRESSED IN BONE MARROW, SIGNAL = 0.63; EXPRESSED IN ADULT LIVER, SIGNAL = 0.81; EST_HUMAN HIT: AA435869.1, EVALUE 2.30e-01; NT HIT: AJ229041.1, EVALUE 3.90e-02
ttccttttcctcccgggcacccagagagactgtatttcccagtttttgctgcagtttgacggggtccatatcaatgga

SEQ ID NO: 28520 - DNA, 129 bp, Homo sapiens
  MAP TO AC018425.3; EXPRESSED IN ADULT LIVER, SIGNAL = 0.64; EXPRESSED IN FETAL LIVER, SIGNAL = 0.57; EXPRESSED IN BRAIN, SIGNAL = 0.59; EXPRESSED IN PLACENTA, SIGNAL = 0.61; EXPRESSED IN BONE MARROW, SIGNAL = 0.54; NT HIT: U08027.1, EVALUE 4.50e+00; EST_HUMAN HIT: BF530630.1, EVALUE 1.70e+00
atacatggtgatggcttgcagagtcgtaaacaaaagaagacacatgggacttcaacaactttcatcattcgcggaaacaggaagaactttcctaggcccactaaaatcatccaaatttattatagatga

SEQ ID NO: 28521 - DNA, 544 bp, Homo sapiens
  MAP TO AC013611.3; EXPRESSED IN LUNG, SIGNAL = 2.2; EXPRESSED IN PLACENTA, SIGNAL = 0.95; EXPRESSED IN BRAIN, SIGNAL = 0.95; EXPRESSED IN FETAL LIVER, SIGNAL = 2.4; EXPRESSED IN BONE MARROW, SIGNAL = 1.7; SWISSPROT HIT: P02746, EVALUE 2.00e-79; NT HIT: X03084.1, EVALUE 0.00e+00; EST_HUMAN HIT: BF525534.1, EVALUE 0.00e+00
ggcttccagggctggctggagaccatggtgagttcggagagaagggagacccagggattcctgggaatccaggaaaagtcggccccaagggccccatgggccctaaaggtggcccaggggcccctggagccccaggccccaaaggtgaatcgggagactacaaggccacccagaaaatcgccttctctgccacaagaaccatcaacgtccccctgcgccgggaccagaccatccgcttcgaccacgtgatcaccaacatgaacaacaattatgagccccgcagtggcaagttcacctgcaaggtgcccggtctctactacttcacctaccacgccagctctcgagggaacctgtgcgtgaacctcatgcgtggccgggagcgtgcacagaaggtggtcaccttctgtgactatgcctacaacaccttccaggtcaccaccggtggcatggtcctcaagctggagcagggggagaacgtcttcctgcaggccaccgacaagaactcactactgggcatggagggtgccaacagcatcttttccgg

SEQ ID NO: 28522 - DNA, 150 bp, Homo sapiens
  MAP TO AC013291.4; EXPRESSED IN PLACENTA, SIGNAL = 0.56; EXPRESSED IN BONE MARROW, SIGNAL = 0.66; EXPRESSED IN ADULT LIVER, SIGNAL = 0.59; EXPRESSED IN FETAL LIVER, SIGNAL = 0.76; EXPRESSED IN BRAIN, SIGNAL = 0.62; NT HIT: gi11427428, EVALUE 8.60e-02; EST_HUMAN HIT: AV651712.1, EVALUE 1.30e-01; SWISSPROT HIT: Q11047, EVALUE 3.10e+00
ctttgctttgatttccatttttaatatggagccaatgattgtcattaggtcgctgataatcaccaggacataccagccgttgatgaactcccactggtcggtgtcacacacaggccgcttgtacttctccaggaagaaatttagaaatct

SEQ ID NO: 28523 - DNA, 109 bp, Homo sapiens
  MAP TO AL139340.3; EXPRESSED IN PLACENTA, SIGNAL = 0.82; EXPRESSED IN ADULT LIVER, SIGNAL = 0.69; EXPRESSED IN FETAL LIVER, SIGNAL = 0.65; EXPRESSED IN BRAIN, SIGNAL = 0.71; EXPRESSED IN BONE MARROW, SIGNAL = 0.67; NT HIT: X77087.1, EVALUE 9.30e-01; EST_HUMAN HIT: BF358871.1, EVALUE 3.50e-01
ggaacaaattccctcttggcattaatgtggctgagcagcctattgttcaaggcatccttctagatctcagcatttggatggtccaggtcattaccatccgttctcttat

SEQ ID NO: 28524 - DNA, 312 bp, Homo sapiens
  MAP TO AC022333.11; EXPRESSED IN PLACENTA, SIGNAL = 0.5; EXPRESSED IN ADULT LIVER, SIGNAL = 0.78; EXPRESSED IN FETAL LIVER, SIGNAL = 0.66; EXPRESSED IN BONE MARROW, SIGNAL = 0.51; EXPRESSED IN BRAIN, SIGNAL = 0.6; SWISSPROT HIT: P42757, EVALUE 1.50e+00; NT HIT: AF151875.1, EVALUE 9.00e-13; EST_HUMAN HIT: AA352487.1, EVALUE 3.00e-13
gcagatgcagcaagattgctgtgactgtgaagccctgagtggtaatgcaggtgcgtgtcatgagctgaaagcactggctatggccctggtggaagcagtagaagaggctgtaggtaagggtgatggccttgctcaggcaacctatgggtactgttgggttcttgcatgtctttgcaaaggaacttttccttgaaaccttctggattgctgcagtggggctaaacccctcaatgactgcaggctgcgacagttcaaagggtgcccccggagtcacagggctgggattcaccatgggcaactgtggagagaaaa

SEQ ID NO: 28525 - DNA, 147 bp, Homo sapiens
  MAP TO AL158135.1; EXPRESSED IN PLACENTA, SIGNAL = 0.64; EXPRESSED IN ADULT LIVER, SIGNAL = 0.65; EXPRESSED IN BRAIN, SIGNAL = 0.55; EXPRESSED IN BONE MARROW, SIGNAL = 0.92; EXPRESSED IN FETAL LIVER, SIGNAL = 0.92; EST_HUMAN HIT: AI678101.1, EVALUE 4.00e-29; SWISSPROT HIT: P08125, EVALUE 9.00e+00; NT HIT: U93163.1, EVALUE 2.00e-27
gcaggtccttcaggagacatttcagaagaaggcaccgttatcataggagatgacagccccatgcatgttcttgttcctggagaccttccagggggacaagaggtggatgtggaagacagtgatattgatgatcctgaccctgtgtag

SEQ ID NO: 28526 - DNA, 110 bp, Homo sapiens
  MAP TO AC015999.3; EXPRESSED IN PLACENTA, SIGNAL = 0.93; EXPRESSED IN ADULT LIVER, SIGNAL = 1.2; EXPRESSED IN BRAIN, SIGNAL = 0.89; EXPRESSED IN BONE MARROW, SIGNAL = 1.3; EXPRESSED IN LUNG, SIGNAL = 1.2; EXPRESSED IN FETAL LIVER, SIGNAL = 0.97; SWISSPROT HIT: Q01844, EVALUE 9.30e+00; NT HIT: AF224492.1, EVALUE 1.00e-55; EST_HUMAN HIT: BE890669.1, EVALUE 6.00e-40
ctctccttgaattgcagactcacagatgaatgcttctcacccggaaacaaacttgccagttgggtatcctcctcagtatccaccgacagcattccaaggtaaagcagttg

SEQ ID NO: 28527 - DNA, 227 bp, Homo sapiens
  MAP TO AC018578.3; EXPRESSED IN PLACENTA, SIGNAL = 0.81; EXPRESSED IN ADULT LIVER, SIGNAL = 0.98; EXPRESSED IN FETAL LIVER, SIGNAL = 0.72; EXPRESSED IN BRAIN, SIGNAL = 0.83; EXPRESSED IN BONE MARROW, SIGNAL = 0.76; EST_HUMAN HIT: BE562964.1, EVALUE 3.00e-06; NT HIT: gi11429432, EVALUE 8.40e+00; SWISSPROT HIT: P20721, EVALUE 4.00e+00
tcacaaattcttttggcagaagtcacaaatctggcatgcagtgggaccttctgcaccagaaacataaagtcctttgctttgtccacagtccatgatggtggccatgttgctgtgtctgggaagatgagagatcatggtggcaatggcagcaatctggacattgtagaccccatcaaaagcttgattgcagcccgtctcatcagagcacagacccttactgtgggcac

SEQ ID NO: 28528 - DNA, 245 bp, Homo sapiens
  MAP TO AC016847.3; EXPRESSED IN BONE MARROW, SIGNAL = 0.71; EXPRESSED IN PLACENTA, SIGNAL =   1; EXPRESSED IN ADULT LIVER, SIGNAL = 1.1; EXPRESSED IN FETAL LIVER, SIGNAL = 0.97; EXPRESSED IN LUNG, SIGNAL =   1; EXPRESSED IN BRAIN, SIGNAL = 0.76; EST_HUMAN HIT: BE064410.1, EVALUE 6.00e-05; SWISSPROT HIT: P34919, EVALUE 3.70e+00; NT HIT: AL163213.2, EVALUE 1.00e-02
tggcttcttgattcactggcatgaggagtcgaagtggccgggtagctgtttcaacttccaatttaatagaactattgccatggacactagagttagcattgtaccattgggaactaagagctctggaccaacatagcccaatgtcttgggagtcagaagcacagattttgctagttgaatcatagatagtgagttgagaggaaccacttccatttccaccccttgatttccagaccatgagacat

SEQ ID NO: 28529 - DNA, 125 bp, Homo sapiens
  MAP TO AL138956.3; EXPRESSED IN PLACENTA, SIGNAL = 0.66; EXPRESSED IN ADULT LIVER, SIGNAL = 0.64; EXPRESSED IN FETAL LIVER, SIGNAL = 0.75; EXPRESSED IN BRAIN, SIGNAL = 0.72; EXPRESSED IN BONE MARROW, SIGNAL = 0.72; EST_HUMAN HIT: AW501124.1, EVALUE 6.00e-62; NT HIT: L12389.1, EVALUE 7.00e-02
ctatctgtgacgggcactgtgcacataagtcagacactcagaggccagtttttcccactgtccatattctgacccaaagtgctcacaattttctactttgtcctttggatgaagtgccagaaaaa

SEQ ID NO: 28530 - DNA, 168 bp, Homo sapiens
  MAP TO AC020991.3; EXPRESSED IN ADULT LIVER, SIGNAL = 0.78; EXPRESSED IN PLACENTA, SIGNAL = 0.66; EXPRESSED IN FETAL LIVER, SIGNAL = 0.66; EXPRESSED IN BRAIN, SIGNAL = 0.64; EXPRESSED IN BONE MARROW, SIGNAL = 0.59; EST_HUMAN HIT: AI280051.1, EVALUE 5.80e-01; SWISSPROT HIT: O13710, EVALUE 5.10e+00
atgtctcttacatgctgtcagtggaataagcacatgggggaaaaagtggttatatctgactggtgtgttctagaaaagcgtcacagaagagatacaatttttatagacattgtggagaaagaggcagcccagatgggcagaaagattacaataaatgaagacatagag

SEQ ID NO: 28531 - DNA, 139 bp, Homo sapiens
  MAP TO AC026273.2; EXPRESSED IN ADULT LIVER, SIGNAL = 0.56; EXPRESSED IN BRAIN, SIGNAL = 0.48; EXPRESSED IN BONE MARROW, SIGNAL = 0.43; EXPRESSED IN PLACENTA, SIGNAL = 0.51; SWISSPROT HIT: P40985, EVALUE 3.10e+00; NT HIT: AF070485.1, EVALUE 4.90e+00
atgactgctaaaattatgcacaaagaaaaagcgcatttgaatccagagatgtatctctctgaatctggatatatggatcctggcagcctgttcagtagccatttcccagaaatccagtcctctggaaaagcagcagcag

SEQ ID NO: 28532 - DNA, 103 bp, Homo sapiens
  MAP TO AF241726.1; EXPRESSED IN PLACENTA, SIGNAL = 2.7; EXPRESSED IN FETAL LIVER, SIGNAL = 0.84; EXPRESSED IN ADULT LIVER, SIGNAL = 0.75; EXPRESSED IN BRAIN, SIGNAL =   1; EXPRESSED IN BONE MARROW, SIGNAL =   1; EXPRESSED IN LUNG, SIGNAL = 0.97; SWISSPROT HIT: Q10663, EVALUE 9.40e+00; NT HIT: Z49933.1, EVALUE 2.20e-01; EST_HUMAN HIT: R36180.1, EVALUE 1.30e+00
tcgctctgctttgagtacttggtgcttcctaaaagagcacagcaagtgttctttgcaggtgatattgttcatgccctcaccttgtttagactctaaatggtac

SEQ ID NO: 28533 - DNA, 129 bp, Homo sapiens
  MAP TO AL121723.35; EXPRESSED IN PLACENTA, SIGNAL = 0.76; EXPRESSED IN FETAL LIVER, SIGNAL = 0.75; EXPRESSED IN BONE MARROW, SIGNAL = 0.63; EXPRESSED IN ADULT LIVER, SIGNAL = 0.78; EXPRESSED IN BRAIN, SIGNAL = 0.57; SWISSPROT HIT: P46526, EVALUE 7.00e+00; NT HIT: AE004596.1, EVALUE 2.90e-01; EST_HUMAN HIT: T12238.1, EVALUE 2.00e-06
ctgtgctgcaggcctcagcaacatggccactccatgggtgccactcatcaaacaccagtgccaccagcactacaagcaagccacaagacaggttcagtgtcaagagggattcatgcagccacaatttcc

SEQ ID NO: 28534 - DNA, 171 bp, Homo sapiens
  MAP TO AC026707.2; EXPRESSED IN PLACENTA, SIGNAL = 0.55; EXPRESSED IN FETAL LIVER, SIGNAL = 0.68; EXPRESSED IN BONE MARROW, SIGNAL = 0.56; EXPRESSED IN ADULT LIVER, SIGNAL = 0.67; EXPRESSED IN BRAIN, SIGNAL = 0.55; NT HIT: gi11416961, EVALUE 8.00e-92; SWISSPROT HIT: P52225, EVALUE 7.80e-01; EST_HUMAN HIT: BE221323.1, EVALUE 1.00e-91
aggcagcaggccccaggaggggacccagacaacagcgtgagagggaagggcatggactgcgccaccctcacatgcatggtgcagctggctcagatcctggtcggaggtggcctgggctttctggtcaacacagccgggaccgttgtcgtcgtggtgatcacagcgtctgcg

SEQ ID NO: 28535 - DNA, 339 bp, Homo sapiens
  MAP TO AC015599.3; EXPRESSED IN PLACENTA, SIGNAL = 0.8; EXPRESSED IN ADULT LIVER, SIGNAL = 0.9; EXPRESSED IN BRAIN, SIGNAL = 0.73; EXPRESSED IN BONE MARROW, SIGNAL = 0.82; EXPRESSED IN LUNG, SIGNAL = 0.89; EXPRESSED IN FETAL LIVER, SIGNAL = 0.77; NT HIT: AB040918.1, EVALUE 4.00e-43; EST_HUMAN HIT: AA278868.1, EVALUE 1.00e-111; SWISSPROT HIT: Q01611, EVALUE 1.50e-01
cttgaaggagacatgctgttccatgtgccgcagcagctgtggcttctgggccgctgtgtagtcacacaccgtgcacttaaactgcttccctggaaagaagcggaggacaagatgagcgtcgccaggccaacagctcccactgtgaatgaagtgccaggcatggagccaggtacacaaaggtgttccttgccatgtgaggatcagaatctcagaagggaacagcgacgaggtgcacaggcacaatgcagcatgctcagtcttcaacaggtgggagtggagaggcactccccagggagggagaggcacagccagctccacctggggaggccccatgagcaa

SEQ ID NO: 28536 - DNA, 208 bp, Homo sapiens
  MAP TO AL139115.2; EXPRESSED IN ADULT LIVER, SIGNAL = 0.88; EXPRESSED IN BRAIN, SIGNAL =   1; EXPRESSED IN PLACENTA, SIGNAL = 0.81; EXPRESSED IN FETAL LIVER, SIGNAL = 0.89; EXPRESSED IN BONE MARROW, SIGNAL = 0.82; EST_HUMAN HIT: BF344171.1, EVALUE 2.90e+00
tgaactaaagcagaacgaatgcaaagataggaaaggggaaggggaaggggaaggggaaggggaaggggaaggggaaggggaaggaaaggaaaggaaaggaaaggaaaggaaaggaaaggaaaggaacggaaaggaaaggaaagggaaggaaacgaaaggaaaagggagggaggaagggaaggaagaagcaaggaaggagcaggtataa

SEQ ID NO: 28537 - DNA, 76 bp, Homo sapiens
  MAP TO AC025863.2; EXPRESSED IN LUNG, SIGNAL = 1.1; EXPRESSED IN PLACENTA, SIGNAL = 1.1; EXPRESSED IN FETAL LIVER, SIGNAL = 0.99; EXPRESSED IN BRAIN, SIGNAL = 0.91; EXPRESSED IN ADULT LIVER, SIGNAL = 1.2; EXPRESSED IN BONE MARROW, SIGNAL = 0.86; SWISSPROT HIT: Q9Z0Y8, EVALUE 9.70e+00; NT HIT: AF130990.1, EVALUE 9.30e+00
cctggaggacaggggacacatctggatgaatgcccaggcccatgcaaacaacctctaccaacaagatgttgctcat

SEQ ID NO: 28538 - DNA, 150 bp, Homo sapiens
  MAP TO AL136172.12; EXPRESSED IN LUNG, SIGNAL = 1.2; EXPRESSED IN FETAL LIVER, SIGNAL = 1.2; EXPRESSED IN BRAIN, SIGNAL = 1.1; EXPRESSED IN PLACENTA, SIGNAL = 1.1; EXPRESSED IN ADULT LIVER, SIGNAL = 1.1; EXPRESSED IN BONE MARROW, SIGNAL = 1.1; NT HIT: gi4506442, EVALUE 2.00e-79; SWISSPROT HIT: P28749, EVALUE 4.00e-15; EST_HUMAN HIT: BE882582.1, EVALUE 2.00e-59
gctgtagttgcctcggatggcagtaaagtcgtccagggcttcggccgcgctcccctcgtccaggttcagctcctggcacagggcctgtagcgcctccccggctgcggcgaccaccgccgccccctcagcgtggggcttgtcctcgaacat

SEQ ID NO: 28539 - DNA, 140 bp, Homo sapiens
  MAP TO AL121772.12; EXPRESSED IN BRAIN, SIGNAL = 0.55; EXPRESSED IN BONE MARROW, SIGNAL = 0.57; EXPRESSED IN PLACENTA, SIGNAL = 0.56; EXPRESSED IN ADULT LIVER, SIGNAL = 0.86; EXPRESSED IN FETAL LIVER, SIGNAL = 0.53; EST_HUMAN HIT: AI810505.1, EVALUE 7.00e-68; NT HIT: AL163281.2, EVALUE 4.90e+00
atggagagctttgtgcttggcaagaggtggcggttggtcatgaagacatttaatggattctctgaagtggtggcaaggtggcaaggagagtccaacctgaagctgcagagcctgggattgcgctgcatggagaagaaagg

SEQ ID NO: 28540 - DNA, 162 bp, Homo sapiens
  MAP TO AL133465.28; EXPRESSED IN PLACENTA, SIGNAL = 0.65; EXPRESSED IN ADULT LIVER, SIGNAL = 0.71; EXPRESSED IN FETAL LIVER, SIGNAL = 0.65; EXPRESSED IN BRAIN, SIGNAL = 0.58; EXPRESSED IN BONE MARROW, SIGNAL = 0.69; EST_HUMAN HIT: BE301560.1, EVALUE 2.20e+00; SWISSPROT HIT: P01618, EVALUE 4.00e+00
aattggcaaaatcagaaagatgcattgccccccagaatgctcgatgaggacgacttttgcaggacttctggtttttcgggagatgaggatcacagtagtggaagtttacacgttcactactctcattatcagtttaaaaaaaaagaagaagaagaaaaatag

SEQ ID NO: 28541 - DNA, 173 bp, Homo sapiens
  MAP TO AC015861.5; EXPRESSED IN LUNG, SIGNAL = 0.91; EXPRESSED IN BONE MARROW, SIGNAL = 0.79; EXPRESSED IN BRAIN, SIGNAL = 0.7; EXPRESSED IN PLACENTA, SIGNAL = 0.79; EXPRESSED IN ADULT LIVER, SIGNAL =   1; EXPRESSED IN FETAL LIVER, SIGNAL = 0.79; EST_HUMAN HIT: BE165980.1, EVALUE 5.00e-20; NT HIT: U08988.1, EVALUE 5.00e-16
tcagtagttccatcacatctttagtctcaacttctaattccagttttcttgctacttccaccacacctgaagttacttcctccactgaaatattagacctctcaaagtcatacacgagggttggaatcagcttcttccaaactcctgtttatgttgatatggcatctagaatg

SEQ ID NO: 28542 - DNA, 100 bp, Homo sapiens
  MAP TO AC013317.4; EXPRESSED IN FETAL LIVER, SIGNAL = 0.53; EXPRESSED IN BRAIN, SIGNAL = 0.45; EXPRESSED IN BONE MARROW, SIGNAL = 0.42; SWISSPROT HIT: Q90607, EVALUE 9.50e+00; EST_HUMAN HIT: AV703223.1, EVALUE 4.00e-22; NT HIT: AF111102.1, EVALUE 1.40e-02
ttactccatatgcccaaatttaacccatccatttttatttacctcattgtccacttcctccttccttccatcctttctttctctcttcatcacctccttc

SEQ ID NO: 28543 - DNA, 96 bp, Homo sapiens
  MAP TO AL136365.3; EXPRESSED IN BONE MARROW, SIGNAL = 0.85; EXPRESSED IN ADULT LIVER, SIGNAL = 0.92; EXPRESSED IN LUNG, SIGNAL = 1.1; EXPRESSED IN PLACENTA, SIGNAL =   1; EXPRESSED IN FETAL LIVER, SIGNAL = 0.84; EXPRESSED IN BRAIN, SIGNAL = 0.91; EST_HUMAN HIT: AA377985.1, EVALUE 8.00e-45; NT HIT: M58601.1, EVALUE 8.00e-01
acagtccgcctttcccaggcccctgctggcttagccgatgaacagggcgtagaccctgccattgcagatctcatgattaccaggaaaggtggccat

SEQ ID NO: 28544 - DNA, 186 bp, Homo sapiens
  MAP TO AC006319.3; EXPRESSED IN PLACENTA, SIGNAL = 0.63; EXPRESSED IN ADULT LIVER, SIGNAL = 0.83; EXPRESSED IN BONE MARROW, SIGNAL = 0.75; EXPRESSED IN FETAL LIVER, SIGNAL = 0.68; EXPRESSED IN BRAIN, SIGNAL = 0.76; NT HIT: AF109907.1, EVALUE 3.00e-05; EST_HUMAN HIT: AI884398.1, EVALUE 8.00e-13
ctcacacaatccttgccactctgcatgtggctcacccttggcgtaggaccgaggttggtagcacaagctgagcgcagcctgtcgggcagagtgggtggaatgagcccagcaggaatgagaaaaactgaagcagaggcaacgctggccacagaggtttctggctgacgaagtgacaccctaaggatc

SEQ ID NO: 28545 - DNA, 205 bp, Homo sapiens
  MAP TO AC015873.2; EXPRESSED IN PLACENTA, SIGNAL = 0.8; EXPRESSED IN FETAL LIVER, SIGNAL = 0.56; EXPRESSED IN BRAIN, SIGNAL = 0.63; EXPRESSED IN BONE MARROW, SIGNAL = 0.56; SWISSPROT HIT: Q24278, EVALUE 2.20e+00; NT HIT: AL163204.2, EVALUE 1.00e-94; EST_HUMAN HIT: BF360942.1, EVALUE 2.00e-44
ctaatgtataagatggaatagttgcaattattttaaacttcaattcaatattaactggccttttaacataaacacttactttgtcaaacagcgagaaatagtgtaatcttctgcatcttgtccacacgtcttgagtaaagacattaatattttgtttaagaaggatgttgacaatacccggtgagtcatagtgcacagcaagcat

SEQ ID NO: 28546 - DNA, 212 bp, Homo sapiens
  MAP TO AC022860.3; EXPRESSED IN ADULT LIVER, SIGNAL = 0.61; EXPRESSED IN BRAIN, SIGNAL = 0.5; EXPRESSED IN PLACENTA, SIGNAL = 0.49; EXPRESSED IN BONE MARROW, SIGNAL = 0.5; SWISSPROT HIT: P05489, EVALUE 1.50e+00; EST_HUMAN HIT: AW973537.1, EVALUE 1.00e-58; NT HIT: AF291499.1, EVALUE 2.00e-12
cgttttcatcacgctgattatctttttatcagatctgagtagcacaaaaggactgacagtggcatacacattgcccacaagcctctggacacccaggacaacagggtcatatgcccatagcaaggttgaggtgaataagatgatgaaatcaacccagtagatgaccacaaagatactcactaggagcaggatggtctgagtggcacttttct

SEQ ID NO: 28547 - DNA, 351 bp, Homo sapiens
  MAP TO AL137141.7; EXPRESSED IN ADULT LIVER, SIGNAL = 0.66; EXPRESSED IN BRAIN, SIGNAL = 0.48; EXPRESSED IN BONE MARROW, SIGNAL = 5.4; EXPRESSED IN LUNG, SIGNAL = 1.8; EXPRESSED IN PLACENTA, SIGNAL = 0.61; EXPRESSED IN FETAL LIVER, SIGNAL = 1.5; NT HIT: J02923.1, EVALUE 1.00e-108; EST_HUMAN HIT: AW408694.1, EVALUE 1.00e-108; SWISSPROT HIT: P13796, EVALUE 1.00e-34
atgtgctgttattaagtgtctgcctgagataaacactaatgatttcagtgagattcccatttcttttcacattatgcaatctgctttgtgcatggagagccttgacccagccctgagacatccttttgcattgcaggagaaggatgacatccagagggcagaatgcatgctgcagcaggcggagaggctgggctgccggcagtttgtcacagccacagatgttgtccgagggaaccccaagttgaacttggcttttattgccaacctctttaacagataccctgccctgcacaaaccagagaaccaggacattgactggggggctcttgaaggtaactgtaaacgatttgc

SEQ ID NO: 28548 - DNA, 142 bp, Homo sapiens
  MAP TO AC015578.4; EXPRESSED IN PLACENTA, SIGNAL = 0.98; EXPRESSED IN FETAL LIVER, SIGNAL = 0.81; EXPRESSED IN BONE MARROW, SIGNAL = 0.9; EXPRESSED IN LUNG, SIGNAL = 0.92; EXPRESSED IN ADULT LIVER, SIGNAL = 0.95; EXPRESSED IN BRAIN, SIGNAL = 0.93; SWISSPROT HIT: P11369, EVALUE 1.80e+00
gaatttcagtacggtgttacacaaaagtggcaagagtaggtacttgccttgtatcagagtacagaggcaaagttttcggttattcctaatggattatgatgttagctataagcgttttatgaatggtctttactgtattgag

SEQ ID NO: 28549 - DNA, 84 bp, Homo sapiens
  MAP TO AL121890.13; EXPRESSED IN LUNG, SIGNAL = 0.95; EXPRESSED IN ADULT LIVER, SIGNAL = 0.97; EXPRESSED IN BRAIN, SIGNAL = 0.81; EXPRESSED IN BONE MARROW, SIGNAL = 0.9; EXPRESSED IN PLACENTA, SIGNAL = 0.97; EXPRESSED IN FETAL LIVER, SIGNAL = 0.97; NT HIT: AJ249265.1, EVALUE 2.70e+00; EST_HUMAN HIT: AA309457.1, EVALUE 2.00e-20
gtgaatggcaatggagtagttgtccgagggtactcaatactcaagagtcagctgatcatgtccttagatgcaccagaaatgatg

SEQ ID NO: 28550 - DNA, 79 bp, Homo sapiens
  MAP TO AC016487.4; EXPRESSED IN PLACENTA, SIGNAL = 0.77; EXPRESSED IN ADULT LIVER, SIGNAL = 0.75; EXPRESSED IN BRAIN, SIGNAL = 0.87; EXPRESSED IN BONE MARROW, SIGNAL = 0.66; EXPRESSED IN FETAL LIVER, SIGNAL = 0.76; NT HIT: U38243.1, EVALUE 1.60e-01; EST_HUMAN HIT: BE881889.1, EVALUE 9.40e-01
ctggtccttaatttggctttgtcaaaataacctttgtctgtgaggaaagtcttctttaacttgtcagactgattaagct

SEQ ID NO: 28551 - DNA, 102 bp, Homo sapiens
  MAP TO AL160281.2; EXPRESSED IN LUNG, SIGNAL = 0.85; EXPRESSED IN ADULT LIVER, SIGNAL = 0.74; EXPRESSED IN BRAIN, SIGNAL = 0.63; EXPRESSED IN BONE MARROW, SIGNAL = 0.69; EXPRESSED IN PLACENTA, SIGNAL = 0.87; EXPRESSED IN FETAL LIVER, SIGNAL = 0.77; EST_HUMAN HIT: AW977783.1, EVALUE 8.10e-02; SWISSPROT HIT: P57447, EVALUE 1.90e+00; NT HIT: AF170911.1, EVALUE 5.50e-02
cgagagggacacatcacccatgtagttttcttttccaagtcgtttggcctgaatccgtttttgagaaaacagaaatgcagaaccatctgtaactgtaaccat

SEQ ID NO: 28552 - DNA, 115 bp, Homo sapiens
  MAP TO AL138702.3; EXPRESSED IN PLACENTA, SIGNAL = 0.74; EXPRESSED IN ADULT LIVER, SIGNAL = 0.76; EXPRESSED IN FETAL LIVER, SIGNAL = 0.78; EXPRESSED IN BRAIN, SIGNAL = 0.76; EXPRESSED IN BONE MARROW, SIGNAL = 0.72; EST_HUMAN HIT: AW954556.1, EVALUE 3.70e-01; NT HIT: AJ277662.1, EVALUE 1.60e-02
cttttacctctttcaaatcttacagcaagaaacagagatgatagagtagattcaaactgcaggctccagcccccaggtcaggatggagatgaggggcagaaggtgccggttaaat

SEQ ID NO: 28553 - DNA, 120 bp, Homo sapiens
  MAP TO AC016282.3; EXPRESSED IN LUNG, SIGNAL = 0.96; EXPRESSED IN ADULT LIVER, SIGNAL =   1; EXPRESSED IN FETAL LIVER, SIGNAL = 0.85; EXPRESSED IN BRAIN, SIGNAL = 0.89; EXPRESSED IN PLACENTA, SIGNAL = 0.9; EXPRESSED IN BONE MARROW, SIGNAL = 0.91; EST_HUMAN HIT: BE887446.1, EVALUE 1.50e+00
atgctactgcctgggtttaatgattgccatgttccccatccactctttggcgaaggagtttctgcagcatttgatgcagtgcttcagctcagtgttaattatgagatcagctcaatgcct

SEQ ID NO: 28554 - DNA, 183 bp, Homo sapiens
  MAP TO AC016057.3; EXPRESSED IN ADULT LIVER, SIGNAL = 0.72; EXPRESSED IN PLACENTA, SIGNAL = 0.59; EXPRESSED IN BRAIN, SIGNAL = 0.53; EXPRESSED IN BONE MARROW, SIGNAL = 0.52; SWISSPROT HIT: P35120, EVALUE 1.70e+00; NT HIT: gi6601589, EVALUE 6.00e-99; EST_HUMAN HIT: BF570694.1, EVALUE 3.00e-83
aagtaaattcatgaggacaattgggacaaatattgtgaaggaaacaagttgtgcaaaggacagaactggatgtgccaattcatttctcagatatggttctaggaaggactctcgataattgatatctcctagcatcatgctgaaggtctggattatagaaagcaatggagagctgaagggatc

SEQ ID NO: 28555 - DNA, 100 bp, Homo sapiens
  MAP TO AL133417.9; EXPRESSED IN PLACENTA, SIGNAL = 1.2; EXPRESSED IN FETAL LIVER, SIGNAL = 1.1; EXPRESSED IN BONE MARROW, SIGNAL =   1; EXPRESSED IN LUNG, SIGNAL =   1; EXPRESSED IN ADULT LIVER, SIGNAL = 1.1; EXPRESSED IN BRAIN, SIGNAL = 0.88; SWISSPROT HIT: P39804, EVALUE 5.50e+00; NT HIT: Z99116.1, EVALUE 5.40e-02; EST_HUMAN HIT: BE544979.1, EVALUE 1.20e+00
caccctggttgataagatgatcagcaggtcagctgataatattaacttcagagatggaaaatcctaccagtttaaagacttttttcaagaaattgatgac

SEQ ID NO: 28556 - DNA, 142 bp, Homo sapiens
  MAP TO AC022813.3; EXPRESSED IN PLACENTA, SIGNAL = 0.48; EXPRESSED IN BRAIN, SIGNAL = 0.48; EXPRESSED IN BONE MARROW, SIGNAL = 0.48; EST_HUMAN HIT: BF679706.1, EVALUE 3.00e-02; SWISSPROT HIT: P40963, EVALUE 6.90e+00
tttttccattgcacagctcttcttttgcttgtgtgtttgtctattctctgcaggatgttctcaactttatcttctgtccattcaattgtatttcgaatttcttcatccacatatttaatttccaaaatcattttcatattct

SEQ ID NO: 28557 - DNA, 100 bp, Homo sapiens
  MAP TO AL121931.9; EXPRESSED IN BRAIN, SIGNAL = 0.64; EXPRESSED IN BONE MARROW, SIGNAL = 0.56; EXPRESSED IN PLACENTA, SIGNAL = 0.54; EXPRESSED IN FETAL LIVER, SIGNAL = 0.85; NT HIT: AF224669.1, EVALUE 1.00e-08; EST_HUMAN HIT: AW836843.1, EVALUE 2.00e-08
atgtgtcatgtctcttcacatgacaacttcactgctagcacaatccggattccagaaaaccagtgcactaaacaacattgggggatgctgggagaaggtt

SEQ ID NO: 28558 - DNA, 130 bp, Homo sapiens
  MAP TO AC015474.3; EXPRESSED IN PLACENTA, SIGNAL = 0.88; EXPRESSED IN ADULT LIVER, SIGNAL = 0.88; EXPRESSED IN BRAIN, SIGNAL = 0.69; EXPRESSED IN FETAL LIVER, SIGNAL = 0.81; EXPRESSED IN BONE MARROW, SIGNAL = 0.77; EST_HUMAN HIT: BE703320.1, EVALUE 1.10e-01; SWISSPROT HIT: P11543, EVALUE 1.80e+00; NT HIT: U37091.1, EVALUE 1.80e-02
atctgacttttctctttcccctctgttgctgtcttgggtcaggtgcccatcaccattcacttgggcttcgtcatagatgtctttgtcaaagaggcctccagtctcatctttttccagctcatcgtccatc

SEQ ID NO: 28559 - DNA, 110 bp, Homo sapiens
  MAP TO AC009699.6; EXPRESSED IN PLACENTA, SIGNAL = 0.76; EXPRESSED IN ADULT LIVER, SIGNAL = 0.85; EXPRESSED IN FETAL LIVER, SIGNAL = 0.69; EXPRESSED IN BRAIN, SIGNAL = 0.72; EXPRESSED IN BONE MARROW, SIGNAL = 0.7; SWISSPROT HIT: O31284, EVALUE 4.20e+00; NT HIT: Y14573.1, EVALUE 9.40e-01; EST_HUMAN HIT: BF701665.1, EVALUE 8.90e-02
cttcgaagtccttcaatgctttccattagtataaatttgaaatgccaagcacgccaagccatctgccaggctccatgatggatgaacccctccaggagctggatgatgtt

SEQ ID NO: 28560 - DNA, 150 bp, Homo sapiens
  MAP TO AC021970.2; EXPRESSED IN LUNG, SIGNAL = 0.9; EXPRESSED IN PLACENTA, SIGNAL = 0.76; EXPRESSED IN ADULT LIVER, SIGNAL = 0.89; EXPRESSED IN BRAIN, SIGNAL = 0.81; EXPRESSED IN FETAL LIVER, SIGNAL = 0.65; EXPRESSED IN BONE MARROW, SIGNAL = 0.81; SWISSPROT HIT: P77154, EVALUE 2.70e-01; NT HIT: U60168.1, EVALUE 8.60e-02; EST_HUMAN HIT: BF370160.1, EVALUE 2.00e+00
gagagcgaagatgaacaccatctggcctgctttccaaaacagttggtcatcacagctgatgttaatttgaacattcatttcttctgaaatgaggtgggggctgtattcttgctctccaacaatgtccttaagttccagtctttgattcat

SEQ ID NO: 28561 - DNA, 183 bp, Homo sapiens
  MAP TO AC007923.2; EXPRESSED IN LUNG, SIGNAL = 1.1; EXPRESSED IN PLACENTA, SIGNAL = 0.7; EXPRESSED IN BRAIN, SIGNAL = 0.73; EXPRESSED IN FETAL LIVER, SIGNAL = 0.96; EXPRESSED IN ADULT LIVER, SIGNAL = 1.5; EXPRESSED IN BONE MARROW, SIGNAL = 1.5; NT HIT: X57147.1, EVALUE 4.00e-66; SWISSPROT HIT: P11227, EVALUE 8.00e-09; EST_HUMAN HIT: BE168410.1, EVALUE 5.00e-51
atggcccaagatctagaccacttctcaagtccaggcactctggttcttcagtatgtggatgatttacttttggctaccagtttggaagcctcatgtcagcaggctactctagatctcttgaactttctagctaatcaagggtacaaggcatctaggtcgaaggctcagctttacctacagcag

SEQ ID NO: 28562 - DNA, 180 bp, Homo sapiens
  MAP TO AC022216.3; EXPRESSED IN PLACENTA, SIGNAL = 1.1; EXPRESSED IN FETAL LIVER, SIGNAL = 0.84; EXPRESSED IN BRAIN, SIGNAL = 0.57; EXPRESSED IN ADULT LIVER, SIGNAL = 0.83; EXPRESSED IN BONE MARROW, SIGNAL = 0.68; EST_HUMAN HIT: AL041786.1, EVALUE 1.00e-26; SWISSPROT HIT: P24043, EVALUE 3.00e-29; NT HIT: gi4557708, EVALUE 4.00e-97
tcttctggtgacaatggggtcaatttctcttgggtctttgtgagcaaacatcatcaagtcagcattcagtgtgcggatcctctgaaatctcaggcgaatatagcgagcggaggtaaattctagcagttctggagaaggatcatcggcacttggtctcccattgattaaagagatgtgaat

SEQ ID NO: 28563 - DNA, 119 bp, Homo sapiens
  MAP TO AC005481.3; EXPRESSED IN ADULT LIVER, SIGNAL = 0.63; EXPRESSED IN BRAIN, SIGNAL = 0.64; EXPRESSED IN FETAL LIVER, SIGNAL = 0.67; EXPRESSED IN BONE MARROW, SIGNAL = 0.62; SWISSPROT HIT: Q10441, EVALUE 9.30e+00; NT HIT: X82641.1, EVALUE 2.60e-01
cctccatcctgctctgtgtggatttatggcatcgatggtgggcagctcctgtgttctgcacagagggatccccaggttgaaggatgacgtggaagcaatgacgtcgtggtcagggacgt

SEQ ID NO: 28564 - DNA, 279 bp, Homo sapiens
  MAP TO AC010162.6; EXPRESSED IN LUNG, SIGNAL = 1.2; EXPRESSED IN ADULT LIVER, SIGNAL = 0.87; EXPRESSED IN BRAIN, SIGNAL =   1; EXPRESSED IN BONE MARROW, SIGNAL =   1; EXPRESSED IN PLACENTA, SIGNAL = 1.9; EXPRESSED IN FETAL LIVER, SIGNAL = 1.3; SWISSPROT HIT: P56117, EVALUE 4.10e-01; EST_HUMAN HIT: AA122270.1, EVALUE 1.00e-03; NT HIT: AJ277557.1, EVALUE 1.70e-01
ttatgccgttggtgtgacatctaagaaaccattgcttaatcgagggtcatgaagatatattcttatgttgtcctccaggaatgttagttttagctctgacattgaggtcttgatctgctttgagtaaagttctgcatatggtgtgaggtaggggtcccattcagccagttgtcccagtgtttgctttgtgctttgcagaagctgagctgtggagagctgggctgggtagagcaaaattagagcttcacgccagacttcttgcatttggaaactaacatt

SEQ ID NO: 28565 - DNA, 84 bp, Homo sapiens
  MAP TO AL121988.10; EXPRESSED IN PLACENTA, SIGNAL = 0.74; EXPRESSED IN ADULT LIVER, SIGNAL = 0.7; EXPRESSED IN FETAL LIVER, SIGNAL = 0.8; EXPRESSED IN BONE MARROW, SIGNAL = 0.66; EXPRESSED IN BRAIN, SIGNAL = 0.6; NT HIT: U15947.1, EVALUE 2.70e+00
agtgtgatcaaagcacatagtgtaatagtggtacataaagtttttcaagtgagtggtggctaaaaacattgtgatactgtaaca

SEQ ID NO: 28566 - DNA, 137 bp, Homo sapiens
  MAP TO AL161426.2; EXPRESSED IN PLACENTA, SIGNAL = 0.82; EXPRESSED IN BONE MARROW, SIGNAL = 0.76; EXPRESSED IN ADULT LIVER, SIGNAL = 0.76; EXPRESSED IN FETAL LIVER, SIGNAL = 0.87; EXPRESSED IN BRAIN, SIGNAL = 0.69; NT HIT: AF105267.1, EVALUE 1.00e-71; EST_HUMAN HIT: N87558.1, EVALUE 1.00e-66; SWISSPROT HIT: Q9Y625, EVALUE 1.00e-23
tcagcctgatttgccaagcagcccttcatgacgttgagacagtagttgttgcagggcctcacagtgggaagcccccgacagtatgggcagtacagcatcttcatgagggcacggatacaccctggggttgggctgac

SEQ ID NO: 28567 - DNA, 106 bp, Homo sapiens
  MAP TO AC018730.3; EXPRESSED IN PLACENTA, SIGNAL = 0.5; EXPRESSED IN BONE MARROW, SIGNAL = 0.52; EXPRESSED IN ADULT LIVER, SIGNAL = 0.54; EXPRESSED IN BRAIN, SIGNAL = 0.47; NT HIT: M10376.1, EVALUE 3.60e+00; EST_HUMAN HIT: BE439524.1, EVALUE 2.00e-18; SWISSPROT HIT: O75880, EVALUE 7.20e+00
ggtaccatctgtgggtcttttccagcatatcttctggattcccatccagattctcaggggatcctctggaccccgttgggaccatggacatggttttctccctcat

SEQ ID NO: 28568 - DNA, 178 bp, Homo sapiens
  MAP TO AL133377.4; EXPRESSED IN BONE MARROW, SIGNAL =   1; EXPRESSED IN PLACENTA, SIGNAL = 1.1; EXPRESSED IN ADULT LIVER, SIGNAL = 1.2; EXPRESSED IN FETAL LIVER, SIGNAL =   1; EXPRESSED IN LUNG, SIGNAL = 1.2; EXPRESSED IN BRAIN, SIGNAL = 0.92; NT HIT: gi10946623, EVALUE 1.60e+00; EST_HUMAN HIT: BE158936.1, EVALUE 8.00e-19
ttagcaacttgtcctgttacagaaatcatcttcctcctttcttctttcttcttcctcctcctcttcttcctcctctttcttctctttctcctcctcctccttcatcttcttcttcttcatcttcatcttattgttgagtaccagtagagtactgaacatagctgattctgctcccacc

SEQ ID NO: 28569 - DNA, 130 bp, Homo sapiens
  MAP TO AC019194.2; EXPRESSED IN ADULT LIVER, SIGNAL = 0.55; EXPRESSED IN BRAIN, SIGNAL = 0.48; EXPRESSED IN BONE MARROW, SIGNAL = 0.49; EXPRESSED IN PLACENTA, SIGNAL = 0.64; SWISSPROT HIT: O27719, EVALUE 1.40e+00; NT HIT: AJ237937.1, EVALUE 2.90e-01; EST_HUMAN HIT: AI271989.1, EVALUE 1.70e+00
caggcatagggtcatagctggggatcttatcactgctgttccgaacagactgaaagacagcccagaggaattctttagtgggcagggtcctggccatcttggaagctgcttgcagaaggatctcaggaaa

SEQ ID NO: 28570 - DNA, 207 bp, Homo sapiens
  MAP TO AC021498.4; EXPRESSED IN LUNG, SIGNAL = 0.93; EXPRESSED IN ADULT LIVER, SIGNAL = 1.1; EXPRESSED IN FETAL LIVER, SIGNAL = 0.76; EXPRESSED IN BRAIN, SIGNAL = 0.89; EXPRESSED IN BONE MARROW, SIGNAL = 0.82; EXPRESSED IN PLACENTA, SIGNAL = 0.98; NT HIT: Z21489.1, EVALUE 7.60e+00
cctaaaatagaagccatcaaggtagcaccagtgattgtgactgccaagcacaagacaataaattcagatttggctgatgggaaatgcttaaaagcccccaatattcaaatagaaaaaaaaattaatgaaaaaaagggagttgtgatggaaattagagtaaacaataaaatatggaggctggaaaaacaagttaaaaaggagaagatg

SEQ ID NO: 28571 - DNA, 98 bp, Homo sapiens
  MAP TO AC016109.3; EXPRESSED IN PLACENTA, SIGNAL = 0.6; EXPRESSED IN FETAL LIVER, SIGNAL = 0.65; EXPRESSED IN BRAIN, SIGNAL = 0.47; EXPRESSED IN BONE MARROW, SIGNAL = 0.53; SWISSPROT HIT: P05034, EVALUE 9.50e+00; EST_HUMAN HIT: BF367909.1, EVALUE 4.80e+00
ctgatctttgtgcaaaggtggagtaatagtggtgagcttggcattgtctctccctgtgagatgcccagagtttggcacatctgtgatttctgtttcat

SEQ ID NO: 28572 - DNA, 226 bp, Homo sapiens
  MAP TO AL139824.7; EXPRESSED IN LUNG, SIGNAL = 0.84; EXPRESSED IN PLACENTA, SIGNAL = 0.81; EXPRESSED IN ADULT LIVER, SIGNAL = 0.73; EXPRESSED IN BRAIN, SIGNAL = 0.57; EXPRESSED IN BONE MARROW, SIGNAL = 0.73; EXPRESSED IN FETAL LIVER, SIGNAL = 0.7; NT HIT: gi6753513, EVALUE 1.40e-01; SWISSPROT HIT: P48128, EVALUE 6.60e+00; EST_HUMAN HIT: BE858026.1, EVALUE 2.00e-16
ctgtgctgtgcaccttgacttctgctgtcttctgcctctggagccctcagatctagttttcctttctagggcctcaaactgaagcttgggggaaaaaaggtgcctcagaaggatgtatggactcattgaattagtcccaggtggctcttgccaaattgtagccagcagctggtggggcagcccctctgttgcttccctatcataagctgtgggaccatgtcctcct

SEQ ID NO: 28573 - DNA, 95 bp, Homo sapiens
  MAP TO AL157997.2; EXPRESSED IN LUNG, SIGNAL =   1; EXPRESSED IN PLACENTA, SIGNAL = 0.75; EXPRESSED IN BRAIN, SIGNAL = 0.94; EXPRESSED IN FETAL LIVER, SIGNAL = 0.89; EXPRESSED IN ADULT LIVER, SIGNAL = 1.1; EXPRESSED IN BONE MARROW, SIGNAL = 1.2; EST_HUMAN HIT: BF217743.1, EVALUE 2.90e-01; NT HIT: AF032973.1, EVALUE 7.90e-01
ctagaagtgtccatacacatggtgcagcttcctggtctcagccaacaaggacaccttgctttgcatcactccattctccacacaggcatttcctt

SEQ ID NO: 28574 - DNA, 213 bp, Homo sapiens
  MAP TO AL121713.24; EXPRESSED IN ADULT LIVER, SIGNAL = 0.99; EXPRESSED IN BONE MARROW, SIGNAL = 1.6; EXPRESSED IN BRAIN, SIGNAL = 1.6; EXPRESSED IN LUNG, SIGNAL = 1.2; EXPRESSED IN PLACENTA, SIGNAL = 0.78; EXPRESSED IN FETAL LIVER, SIGNAL = 1.6; SWISSPROT HIT: Q9Z9L3, EVALUE 5.90e+00; NT HIT: AF249273.1, EVALUE 3.00e-79; EST_HUMAN HIT: AA505715.1, EVALUE 5.00e-79
cttttcttccttgcgtctgtccttcttttcttcattattttccatggtctcttcttcatcttcaacaatcccatccccttggtatttgtcatgagtccatttaggactgctacctgattttttgaagttaaagcgccctctgccacgttgaaaagtaccacgacctcttcctcttttggcccaataatccacaccatcatctctgtcgtcatg

SEQ ID NO: 28575 - DNA, 177 bp, Homo sapiens
  MAP TO AC021880.2; EXPRESSED IN FETAL LIVER, SIGNAL = 0.6; EXPRESSED IN BRAIN, SIGNAL = 0.5; EXPRESSED IN ADULT LIVER, SIGNAL = 0.6; EXPRESSED IN BONE MARROW, SIGNAL = 0.68; SWISSPROT HIT: Q94890, EVALUE 6.70e+00; NT HIT: gi4758365, EVALUE 1.00e-01; EST_HUMAN HIT: M79229.1, EVALUE 1.50e-01
atgggggtggtgatggatagatcaggcagccagcaccagaacctgcccatcaaccacagcaagaaagacccccaccaaggcatgagggaccctggagtgaggcaactggaagtgcacagaaacacctacctagagaggaatcatgccgaaaattttaatccaaatcaaccaaatctc

SEQ ID NO: 28576 - DNA, 121 bp, Homo sapiens
  MAP TO AC009487.3; EXPRESSED IN PLACENTA, SIGNAL = 1.1; EXPRESSED IN ADULT LIVER, SIGNAL = 1.1; EXPRESSED IN FETAL LIVER, SIGNAL = 0.95; EXPRESSED IN BONE MARROW, SIGNAL = 0.93; EXPRESSED IN LUNG, SIGNAL = 1.1; EXPRESSED IN BRAIN, SIGNAL = 1.1; SWISSPROT HIT: P43588, EVALUE 2.00e-04; NT HIT: gi11429973, EVALUE 4.00e-62; EST_HUMAN HIT: AW383989.1, EVALUE 5.00e-62
gctaaatttgcataagaagagttggatggaaggtttgacacttcaggactacagtgaacattgtaaacacaatgaatcagtggtaaaagagatgttggaattagccaagaattacaataag

SEQ ID NO: 28577 - DNA, 78 bp, Homo sapiens
  MAP TO AC009466.2; EXPRESSED IN PLACENTA, SIGNAL = 0.68; EXPRESSED IN BRAIN, SIGNAL = 0.61; EXPRESSED IN BONE MARROW, SIGNAL = 0.48; EXPRESSED IN FETAL LIVER, SIGNAL = 0.73; NT HIT: gi11438643, EVALUE 1.00e-36; EST_HUMAN HIT: AU141688.1, EVALUE 1.00e-36
catccgccaagactttgttttcccttcttctcttggctcgttcctttgcatccttctccacagatgccaagaaggcct

SEQ ID NO: 28578 - DNA, 315 bp, Homo sapiens
  MAP TO AL136528.9; EXPRESSED IN PLACENTA, SIGNAL = 0.68; EXPRESSED IN FETAL LIVER, SIGNAL = 0.65; EXPRESSED IN BONE MARROW, SIGNAL = 0.67; EXPRESSED IN ADULT LIVER, SIGNAL = 0.83; EXPRESSED IN BRAIN, SIGNAL = 0.68; SWISSPROT HIT: Q9ZH76, EVALUE 2.00e-04; EST_HUMAN HIT: AW072395.1, EVALUE 0.00e+00; NT HIT: AL163268.2, EVALUE 3.00e-03
aaatgcctcttcaaagcattatgggacaacacacccacccagtttctgtaccgtggagcttcttggggaagtttcagactaggaaacaatggggctcaggacacatcaccccaaagtatgactgtaggagaccagaatacgccacccctaaatatgactataggagaccagaatacgtcaccccaaaatatgactgtaggagaccagaatacgccaccccaaaatatgactgtaggagaccagaatacgccaccccaaaatatgactgtaggagaccagaatacgccacccctaaatatgactgtaggagactag

SEQ ID NO: 28579 - DNA, 229 bp, Homo sapiens
  MAP TO AC009311.2; EXPRESSED IN BONE MARROW, SIGNAL =   1; EXPRESSED IN LUNG, SIGNAL = 1.1; EXPRESSED IN ADULT LIVER, SIGNAL = 0.69; EXPRESSED IN BRAIN, SIGNAL = 0.99; EXPRESSED IN PLACENTA, SIGNAL = 0.8; EXPRESSED IN FETAL LIVER, SIGNAL = 0.85; SWISSPROT HIT: P98066, EVALUE 6.00e-43; NT HIT: gi11431062, EVALUE 1.00e-126; EST_HUMAN HIT: AA483368.1, EVALUE 1.00e-126
cttcccacaaagccatggacatcatcgtaactgtcatatatttcaacataatcagccaagcaacctgggtcatcttcaaggtcaaaatctaaaaaactcaggtgaatacgctgaccatacttgagtctaatgtgccagtagcagatttggttatcttcgtactcatttgggaagcctggagatttaaaaatttgctttggatctgtaaagacgccaccacactcctttg

SEQ ID NO: 28580 - DNA, 87 bp, Homo sapiens
  MAP TO AC025539.2; EXPRESSED IN PLACENTA, SIGNAL = 0.69; EXPRESSED IN FETAL LIVER, SIGNAL = 0.48; EXPRESSED IN BRAIN, SIGNAL = 0.51; EXPRESSED IN BONE MARROW, SIGNAL = 0.52; EXPRESSED IN ADULT LIVER, SIGNAL = 0.64; EST_HUMAN HIT: R39257.1, EVALUE 2.70e-01; SWISSPROT HIT: Q9VMS8, EVALUE 9.60e+00
ccagtcatcatcatcatcatcatcaacaataaaacaacaatgcaaagtatctttggtgatattttcacagcccatcttataatatga

SEQ ID NO: 28581 - DNA, 116 bp, Homo sapiens
  MAP TO AL136111.8; EXPRESSED IN ADULT LIVER, SIGNAL = 0.69; EXPRESSED IN BONE MARROW, SIGNAL = 0.69; EXPRESSED IN BRAIN, SIGNAL = 0.8; EXPRESSED IN PLACENTA, SIGNAL = 0.6; EXPRESSED IN FETAL LIVER, SIGNAL = 0.69; NT HIT: AF055066.1, EVALUE 2.50e-01; SWISSPROT HIT: P05143, EVALUE 7.20e-02
ggtccagccagaattgtgcctctgcagtcctccaggtgtatgtgggggaatgtctgtggggctctgaagatgtggagatgctggttctgctgggcctgaaggcaaactataatcag

SEQ ID NO: 28582 - DNA, 204 bp, Homo sapiens
  MAP TO AC024060.2; EXPRESSED IN PLACENTA, SIGNAL = 0.63; EXPRESSED IN FETAL LIVER, SIGNAL = 0.89; EXPRESSED IN BONE MARROW, SIGNAL = 0.55; EXPRESSED IN BRAIN, SIGNAL = 0.62; NT HIT: gi11431896, EVALUE 1.00e-111; SWISSPROT HIT: P36774, EVALUE 4.00e-03; EST_HUMAN HIT: AW844661.1, EVALUE 1.00e-110
tacctaggtgctgatatggaagaatttcatggcaggactttgcacgatgacgacagctgtcaggtgattccagttcttccacaagtgatgatgatcctgattcccggacagacattacctcttcagctttttcaccctcaagaagtcagtatggtgcggaatttaattcagaaagatagaacctttgctgttcttgcatacagg

SEQ ID NO: 28583 - DNA, 86 bp, Homo sapiens
  MAP TO AC011660.4; EXPRESSED IN FETAL LIVER, SIGNAL = 0.53; EXPRESSED IN BONE MARROW, SIGNAL = 0.48; EXPRESSED IN ADULT LIVER, SIGNAL = 0.58; EXPRESSED IN BRAIN, SIGNAL = 0.56; EST_HUMAN HIT: H54244.1, EVALUE 7.10e-01; NT HIT: AJ276590.1, EVALUE 2.30e+00
ggtaaaaaatgacaagcactattgtgtgaagtctaaacttattgagctgaacacgatcagagcaacttctggacaggttatcacag

SEQ ID NO: 28584 - DNA, 390 bp, Homo sapiens
  MAP TO AL121586.28; EXPRESSED IN PLACENTA, SIGNAL = 1.1; EXPRESSED IN FETAL LIVER, SIGNAL = 1.1; EXPRESSED IN LUNG, SIGNAL = 1.3; EXPRESSED IN BONE MARROW, SIGNAL = 1.1; EXPRESSED IN ADULT LIVER, SIGNAL = 1.1; EXPRESSED IN BRAIN, SIGNAL = 1.1; NT HIT: gi11421722, EVALUE 0.00e+00; EST_HUMAN HIT: AA811174.1, EVALUE 6.00e-03
ctggctcaaggccccagacggaaggagcagagtctcccccaccactcagctcaggcctgctctcacaaacagaccccagggcctgctgcagggcagagtagaggctggccagctgggcctgggcctgggcctggttcccgggctgctgctctgcggccagcgcttctagctggctctctgtgctgcgcagtcgcagctgtagttgggctgccttggcttcctgggcccacaaggaggctcgcagctgctgctccgtgatatgagacgcctccagctcctccagcagctgtgcttcctgggccagaaagtcagcctccttttccttcacctcttgccttagtaattccatctgtcaaggaagaattttacataatataagcaggaagcgga

SEQ ID NO: 28585 - DNA, 286 bp, Homo sapiens
  MAP TO AL161627.2; EXPRESSED IN ADULT LIVER, SIGNAL = 0.64; EXPRESSED IN PLACENTA, SIGNAL = 0.57; EXPRESSED IN FETAL LIVER, SIGNAL = 0.75; EXPRESSED IN BRAIN, SIGNAL = 1.1; EXPRESSED IN BONE MARROW, SIGNAL = 0.83; NT HIT: AB038490.1, EVALUE 0.00e+00; EST_HUMAN HIT: W01616.1, EVALUE 0.00e+00; SWISSPROT HIT: P97739, EVALUE 9.70e-01
atgcttagaagatataaccgtaaaagatggactttccagtttaaaagatttagagaaactgtaccaacttgggatacaataagagatgaagaagatgctcttgatgaactcttgcagtatttgggtgttactagtcctgaatgcttacagagaactggaatctcacttaatattcctgctccacaacctgtgtgcatttctgaaaaacaagaaagtgatgttattaatgctatccttaagcaacatacagaagaaaaagaatttgttgagaagcactttaatgact

SEQ ID NO: 28586 - DNA, 174 bp, Homo sapiens
  MAP TO AL121889.3; EXPRESSED IN LUNG, SIGNAL = 1.2; EXPRESSED IN PLACENTA, SIGNAL = 1.3; EXPRESSED IN ADULT LIVER, SIGNAL = 1.5; EXPRESSED IN FETAL LIVER, SIGNAL = 1.5; EXPRESSED IN BRAIN, SIGNAL = 1.2; EXPRESSED IN BONE MARROW, SIGNAL = 1.6; EST_HUMAN HIT: BF314682.1, EVALUE 5.00e-91; NT HIT: M77667.1, EVALUE 1.60e+00; SWISSPROT HIT: Q08234, EVALUE 3.00e+00
ctgtaggtgattgcagtggtcatggacgtgttcacagacatcgacatcttcagagacctgcaagaaatatgcaggaaacagggagttgctgtgtatatccttctggaccaggctctcctctctcaatttctggatatgtgcatggatctgaaagttcatcctgaacaggaaaag

SEQ ID NO: 28587 - DNA, 179 bp, Homo sapiens
  MAP TO AC018780.3; EXPRESSED IN BONE MARROW, SIGNAL = 1.4; EXPRESSED IN LUNG, SIGNAL = 1.2; EXPRESSED IN PLACENTA, SIGNAL = 0.9; EXPRESSED IN ADULT LIVER, SIGNAL =   1; EXPRESSED IN BRAIN, SIGNAL = 1.2; EXPRESSED IN FETAL LIVER, SIGNAL = 0.9; NT HIT: gi7661803, EVALUE 1.00e-96; SWISSPROT HIT: Q06245, EVALUE 3.00e+00; EST_HUMAN HIT: AA400689.1, EVALUE 2.00e-96
cttcacatctacacctttctctaggcggctctctggctctgacttcatcagccagtggctgcttagattcttcaaacagtttttagtggctgaagtcttctgagggttggagtcctccactttagctaatgcctcacctgagttctcagttttggtgcgttttcctgatagtcccttgt

SEQ ID NO: 28588 - DNA, 80 bp, Homo sapiens
  MAP TO AL139352.8; EXPRESSED IN ADULT LIVER, SIGNAL = 0.89; EXPRESSED IN PLACENTA, SIGNAL = 1.1; EXPRESSED IN FETAL LIVER, SIGNAL = 0.84; EXPRESSED IN BRAIN, SIGNAL = 1.2; EXPRESSED IN LUNG, SIGNAL = 0.96; EXPRESSED IN BONE MARROW, SIGNAL = 0.7; NT HIT: AP000058.1, EVALUE 1.60e-01; EST_HUMAN HIT: BE546032.1, EVALUE 1.00e-37
atgctgtctccagggccagagatcttcctctcatcccgcactatctgcagtcctctctggtgtgtgtggggcgcagtcat

SEQ ID NO: 28589 - DNA, 100 bp, Homo sapiens
  MAP TO AC018584.3; EXPRESSED IN BRAIN, SIGNAL = 0.48; EXPRESSED IN PLACENTA, SIGNAL = 0.81; EXPRESSED IN FETAL LIVER, SIGNAL =   1; NT HIT: Z78995.1, EVALUE 5.40e-02; SWISSPROT HIT: P00956, EVALUE 1.90e+00; EST_HUMAN HIT: AW855907.1, EVALUE 5.00e-03
aacatctccagcagcagctgggatgatgaagcatcttctcttggcaaagaagaacaccaaaatcagagaggccagttaggaggctactgcaatatttcag

SEQ ID NO: 28590 - DNA, 90 bp, Homo sapiens
  MAP TO AC018367.3; EXPRESSED IN ADULT LIVER, SIGNAL = 0.86; EXPRESSED IN BRAIN, SIGNAL = 0.64; EXPRESSED IN BONE MARROW, SIGNAL = 0.73; EXPRESSED IN PLACENTA, SIGNAL = 0.91; EXPRESSED IN FETAL LIVER, SIGNAL = 0.75; NT HIT: AL161510.2, EVALUE 2.90e+00; EST_HUMAN HIT: AI478339.1, EVALUE 1.10e+00
ctgggattcttcatgtactggcagccatcaagaagcttgactggtatgagatgatccaagatggccttgctcacatgtgtgatgttggtg

SEQ ID NO: 28591 - DNA, 135 bp, Homo sapiens
  MAP TO AC025221.2; EXPRESSED IN PLACENTA, SIGNAL = 0.66; EXPRESSED IN ADULT LIVER, SIGNAL = 0.61; EXPRESSED IN FETAL LIVER, SIGNAL = 0.75; EXPRESSED IN BONE MARROW, SIGNAL = 0.45; EXPRESSED IN BRAIN, SIGNAL = 0.5; EST_HUMAN HIT: BE093554.1, EVALUE 3.00e-70; NT HIT: gi11423599, EVALUE 2.00e-70; SWISSPROT HIT: P35573, EVALUE 1.00e-19
agttagtcttgatccacatgcacaagtcgctgttggaattcttcgaaatcatctgacacaattcagtcctcactttaaatctggcagcctagctgttgacaatgcagatcctatattaaaaattccttttgcttc

SEQ ID NO: 28592 - DNA, 120 bp, Homo sapiens
  MAP TO AC011294.3; EXPRESSED IN ADULT LIVER, SIGNAL = 0.74; EXPRESSED IN PLACENTA, SIGNAL = 0.75; EXPRESSED IN FETAL LIVER, SIGNAL = 0.68; EXPRESSED IN BRAIN, SIGNAL = 0.58; EXPRESSED IN BONE MARROW, SIGNAL = 0.64; SWISSPROT HIT: P98167, EVALUE 3.60e-01; EST_HUMAN HIT: BF574379.1, EVALUE 3.90e-01
ataatggcatttagaatggcatcagatttctcatcagcaaaagcaaatgccacatggtagccagtaatatccacgggcttttccgcagaagttccgtgaaccctcaacagtgccagtgac

SEQ ID NO: 28593 - DNA, 82 bp, Homo sapiens
  MAP TO AL136962.6; EXPRESSED IN ADULT LIVER, SIGNAL = 1.2; EXPRESSED IN LUNG, SIGNAL = 1.5; EXPRESSED IN PLACENTA, SIGNAL = 1.2; EXPRESSED IN FETAL LIVER, SIGNAL = 1.1; EXPRESSED IN BONE MARROW, SIGNAL = 1.3; EXPRESSED IN BRAIN, SIGNAL = 1.1; NT HIT: AL163303.2, EVALUE 2.00e-04; EST_HUMAN HIT: AA505582.1, EVALUE 7.00e-05
tcaacattgagttttggaggggatattcaaagcatagcagatgatatttgtgatgatgacaataatgatgatggtctttgtt

SEQ ID NO: 28594 - DNA, 309 bp, Homo sapiens
  MAP TO AL138914.5; EXPRESSED IN BRAIN, SIGNAL = 1.3; EXPRESSED IN BONE MARROW, SIGNAL = 1.1; EXPRESSED IN LUNG, SIGNAL = 1.2; EXPRESSED IN PLACENTA, SIGNAL = 1.3; EXPRESSED IN ADULT LIVER, SIGNAL = 1.3; EXPRESSED IN FETAL LIVER, SIGNAL = 1.4; EST_HUMAN HIT: AA033745.1, EVALUE 5.00e-12; SWISSPROT HIT: P08547, EVALUE 4.00e-11; NT HIT: AL163213.2, EVALUE 2.00e-07
gagcaagacaagaatgcccactcttaccacttttattcaaaatggcattggaaggcctaccaagataaaatagtagaaaaatatataaataaaatcatccaagttggaaaggaagaagtaaaattatctcttttcacagatgagataaacttacacataaaaatccctaaagattctaccaaaaaaattgttagaactaataaaaacaaattcggtaaagttgaagaataccaaatgaactctcagaaatcagttgtgtttctatgtgctaacaacaaacaacctaaaaatgaagaacaatctcagtta

SEQ ID NO: 28595 - DNA, 86 bp, Homo sapiens
  MAP TO AC013396.4; EXPRESSED IN LUNG, SIGNAL = 1.2; EXPRESSED IN ADULT LIVER, SIGNAL =   1; EXPRESSED IN FETAL LIVER, SIGNAL = 1.1; EXPRESSED IN BRAIN, SIGNAL = 0.8; EXPRESSED IN BONE MARROW, SIGNAL = 1.2; EXPRESSED IN PLACENTA, SIGNAL = 1.1; NT HIT: AJ271735.1, EVALUE 6.00e-20; EST_HUMAN HIT: BE156613.1, EVALUE 3.00e-22
acaagaaagaattagtcagcttgaagacaggctatttgaaatacacagtcagaggagacaagagaataaagaataaaaagcaatga

SEQ ID NO: 28596 - DNA, 152 bp, Homo sapiens
  MAP TO AL121905.10; EXPRESSED IN PLACENTA, SIGNAL = 0.67; EXPRESSED IN ADULT LIVER, SIGNAL = 0.99; EXPRESSED IN BRAIN, SIGNAL = 2.8; EXPRESSED IN BONE MARROW, SIGNAL = 1.2; EXPRESSED IN LUNG, SIGNAL =   1; EXPRESSED IN FETAL LIVER, SIGNAL = 1.2; NT HIT: gi11421211, EVALUE 1.00e-80; SWISSPROT HIT: P18433, EVALUE 3.00e-25; EST_HUMAN HIT: BE159045.1, EVALUE 2.00e-80
gagaataagagccggcagatccggcagttccacttccatggctggcctgaagtgggcatccccagtgacggaaagggcatgatcagcatcatcgccgccgtgcagaagcagcagcagcagtcagggaaccaccccatcaccgtgcactgcag

SEQ ID NO: 28597 - DNA, 162 bp, Homo sapiens
  MAP TO AC025115.2; EXPRESSED IN PLACENTA, SIGNAL = 0.77; EXPRESSED IN FETAL LIVER, SIGNAL = 0.63; EXPRESSED IN BRAIN, SIGNAL = 0.56; EXPRESSED IN BONE MARROW, SIGNAL = 0.49; EXPRESSED IN ADULT LIVER, SIGNAL = 0.59; NT HIT: X94742.1, EVALUE 1.00e-07; EST_HUMAN HIT: AW573021.1, EVALUE 1.00e-08; SWISSPROT HIT: Q95155, EVALUE 7.00e-13
atgtatgcacaacccagtgccatcttcttcatggagcaaagtaaaatagtgtccatattctacactatggtcatccccatgctgaatcccctgatatacagcctgaggaacaaagaggtcaagcaggctctgagacggagcatgcagaagctgtctttgtga

SEQ ID NO: 28598 - DNA, 150 bp, Homo sapiens
  MAP TO AL137225.7; EXPRESSED IN FETAL LIVER, SIGNAL = 0.51; EXPRESSED IN PLACENTA, SIGNAL = 0.68; EXPRESSED IN BONE MARROW, SIGNAL = 0.55; EXPRESSED IN ADULT LIVER, SIGNAL = 0.77; EXPRESSED IN BRAIN, SIGNAL = 0.6; SWISSPROT HIT: P52907, EVALUE 1.40e+00; NT HIT: Y14930.1, EVALUE 3.40e-01
cttcatgggagggaacatggagatcatcgtggccctgaacatcacagccaccaaccggcttctgcgggatgaggagacaggcctccccgtgttcaagagtgagggctgtgaggtcatcctggtcaatgtgaagactaacctgcctagcaa

SEQ ID NO: 28599 - DNA, 150 bp, Homo sapiens
  MAP TO AL136962.6; EXPRESSED IN BRAIN, SIGNAL = 0.51; EXPRESSED IN FETAL LIVER, SIGNAL = 0.47; EXPRESSED IN BONE MARROW, SIGNAL = 0.56; EST_HUMAN HIT: BE562528.1, EVALUE 1.30e-01; NT HIT: gi11433542, EVALUE 1.30e+00; SWISSPROT HIT: P38931, EVALUE 4.00e+00
tcaaggtgtgggcttgaggtggtggcagttgaggtttttgtcttgcttcctctccttttcaggtcccaccctgagagggttgtgctcggagttgtaccactccaggagctgtgcaggagcagtcatctgaatctgagaaaagccatgtct

SEQ ID NO: 28600 - DNA, 114 bp, Homo sapiens
  MAP TO AL161743.2; EXPRESSED IN LUNG, SIGNAL = 1.2; EXPRESSED IN ADULT LIVER, SIGNAL = 1.5; EXPRESSED IN FETAL LIVER, SIGNAL = 1.1; EXPRESSED IN BRAIN, SIGNAL =   1; EXPRESSED IN PLACENTA, SIGNAL = 1.1; EXPRESSED IN BONE MARROW, SIGNAL = 1.1; NT HIT: AF029308.1, EVALUE 7.00e-08; EST_HUMAN HIT: AW408990.1, EVALUE 1.00e-10
atgaggccaacagatcaggagacagctgccattgaaaagagtttgttactcacagttcccaagggctgggacatgccatgctatgccaggccacatggcgatgcaccagcattg

SEQ ID NO: 28601 - DNA, 176 bp, Homo sapiens
  MAP TO AC016648.3; EXPRESSED IN PLACENTA, SIGNAL = 0.9; EXPRESSED IN FETAL LIVER, SIGNAL = 0.74; EXPRESSED IN ADULT LIVER, SIGNAL = 0.92; EXPRESSED IN BRAIN, SIGNAL = 0.78; EXPRESSED IN BONE MARROW, SIGNAL = 0.73; EST_HUMAN HIT: BE394211.1, EVALUE 1.00e-79; SWISSPROT HIT: P10567, EVALUE 1.70e+00
ctagtttgcatcagtggagactggaattgggacagtctaagtctcaggtaagcgaggcaaaaattcatctggtgcaagagaaacaccaccaacagaaaatacttggttcccaggacactaaagcgaaagaaattcttcacctgcaaatgtacctgctggggcggcaggggcacttc

SEQ ID NO: 28602 - DNA, 129 bp, Homo sapiens
  MAP TO AL158150.2; EXPRESSED IN FETAL LIVER, SIGNAL = 0.58; EXPRESSED IN PLACENTA, SIGNAL = 0.69; EXPRESSED IN BONE MARROW, SIGNAL = 0.56; EXPRESSED IN ADULT LIVER, SIGNAL = 0.85; EXPRESSED IN BRAIN, SIGNAL = 0.61; EST_HUMAN HIT: AI750970.1, EVALUE 6.00e-59; NT HIT: AF195953.1, EVALUE 4.50e+00; SWISSPROT HIT: P22239, EVALUE 4.10e+00
gaaagccactagtgaaaacgtcacgaatgacagtgatcaacacggagaagcctgcagtcacagtcgatataggaagcaccatcaaaacagtgcagggagtgaatgtgacaatcaactgccaggttgcag

SEQ ID NO: 28603 - DNA, 231 bp, Homo sapiens
  MAP TO AC024972.2; EXPRESSED IN PLACENTA, SIGNAL = 0.82; EXPRESSED IN FETAL LIVER, SIGNAL =   1; EXPRESSED IN BONE MARROW, SIGNAL = 0.77; EXPRESSED IN ADULT LIVER, SIGNAL = 0.65; EXPRESSED IN BRAIN, SIGNAL = 1.3; NT HIT: gi11431978, EVALUE 1.00e-85; SWISSPROT HIT: P04279, EVALUE 6.20e-01; EST_HUMAN HIT: BE439625.1, EVALUE 1.00e-92
catacaggtttctcccccctccccccaccccgtcatgtacagctgaatcacgtagaatttgaagatcaagatgatgaagccagagttcagtatgatggttttcgacctgggatgtacatccgcgttgagattgaaaatgttccctgtgaatttgtgcagaactttgacccccattaccccattatcctgggtggcttgggcaacagcgagggaaatgttggacacgtgcag

SEQ ID NO: 28604 - DNA, 114 bp, Homo sapiens
  MAP TO AL137022.6; EXPRESSED IN PLACENTA, SIGNAL = 0.56; EXPRESSED IN BRAIN, SIGNAL = 0.62; EXPRESSED IN BONE MARROW, SIGNAL = 0.6; EXPRESSED IN ADULT LIVER, SIGNAL = 0.67; EXPRESSED IN FETAL LIVER, SIGNAL = 0.52; NT HIT: U18675.1, EVALUE 2.50e-01; EST_HUMAN HIT: AW566007.1, EVALUE 9.30e-02
tctggaggagaaaacaaaagttgtaacaacaacaacaacagtgacagctgtcagtgtttctgctctatgcaggcattactgaattatttccaatcctccctgaagcactgcaag

SEQ ID NO: 28605 - DNA, 231 bp, Homo sapiens
  MAP TO AC018993.3; EXPRESSED IN BONE MARROW, SIGNAL = 0.55; EXPRESSED IN PLACENTA, SIGNAL = 0.54; EXPRESSED IN ADULT LIVER, SIGNAL = 0.59; EXPRESSED IN FETAL LIVER, SIGNAL = 0.56; EXPRESSED IN BRAIN, SIGNAL = 0.65; NT HIT: AF223391.1, EVALUE 9.00e-03; EST_HUMAN HIT: AW969001.1, EVALUE 1.30e-02; SWISSPROT HIT: P08776, EVALUE 3.60e-01
ttttctccaatcattttttactttctgttcctcagactcagtaatttcaataggtaaaaatcttgacctatcttcaagctcagtagttcttcctcctgtctgctcagttctgtattttattccctctagtaaatttttcatgttagttattttatttttcagctctagaacttgtttgcaatttttaagattttctacgtctttgttgctatttccattttgttcattcat

SEQ ID NO: 28606 - DNA, 95 bp, Homo sapiens
  MAP TO AC016575.4; EXPRESSED IN PLACENTA, SIGNAL = 0.82; EXPRESSED IN ADULT LIVER, SIGNAL = 1.1; EXPRESSED IN FETAL LIVER, SIGNAL = 0.82; EXPRESSED IN BRAIN, SIGNAL = 0.84; EXPRESSED IN BONE MARROW, SIGNAL = 0.77; EXPRESSED IN LUNG, SIGNAL =   1; EST_HUMAN HIT: H00036.1, EVALUE 1.20e+00; NT HIT: M26434.1, EVALUE 5.10e-02
attccagagttcacagaaaggatcagcttgctcacagactcaacaacagtcaactcaagtgccaagaaagtggggcaaggctggatgaagcccag

SEQ ID NO: 28607 - DNA, 481 bp, Homo sapiens
  MAP TO AL121713.24; EXPRESSED IN BONE MARROW, SIGNAL = 1.1; EXPRESSED IN PLACENTA, SIGNAL = 0.53; EXPRESSED IN ADULT LIVER, SIGNAL = 0.56; EXPRESSED IN FETAL LIVER, SIGNAL = 1.5; EXPRESSED IN BRAIN, SIGNAL = 0.95; EST_HUMAN HIT: AI367350.1, EVALUE 0.00e+00; SWISSPROT HIT: P41695, EVALUE 5.90e-01; NT HIT: gi11418871, EVALUE 0.00e+00
ctgctcaggtgactgagtttctttctttactgttattctttcagaatttttgtcttcttctttgtgcttatcttttgtagtgctaggcctttccactacatatccagtctctttaagtttataatttttttcttctctaaatccatcactttctctattgcctttcagtgaaactttggacttgtacttgagtccttcctcctcagtattccggtgagatgcagtagcaaaacttttaccctgatctgcgaggactgacttcctgaactgtctataatcctctgtctcctctgtgtcatccccttctgaatcattaaacttttgttttccagactctttatcactgaagtaatctagagcttcctgatcttcccattctccctctgccctccctttctctgatcctttctcttttgaagcctctttatccctggtattacccctatcaagcaggaatactctagactcttcatctgtgaac

SEQ ID NO: 28608 - DNA, 193 bp, Homo sapiens
  MAP TO AC026412.1; EXPRESSED IN PLACENTA, SIGNAL = 1.2; EXPRESSED IN FETAL LIVER, SIGNAL = 1.1; EXPRESSED IN BONE MARROW, SIGNAL = 1.1; EXPRESSED IN LUNG, SIGNAL = 1.2; EXPRESSED IN ADULT LIVER, SIGNAL = 1.2; EXPRESSED IN BRAIN, SIGNAL = 1.1; EST_HUMAN HIT: AV722329.1, EVALUE 3.00e-86; SWISSPROT HIT: P04474, EVALUE 3.90e-02; NT HIT: AB037824.1, EVALUE 4.50e-01
gtcaccgttcaccctgagagacgctggctttggggctcacacgcctgctgtggggcagccccaggagatggccaccctgtttctcctggagctggagctgcgtgtgttctcagaaactgtggtggctgttctcttttgtttgcatcttataaacctttacctgattacattttcctcttcaatttagctggta

SEQ ID NO: 28609 - DNA, 392 bp, Homo sapiens
  MAP TO AC019083.5; EXPRESSED IN PLACENTA, SIGNAL = 0.64; EXPRESSED IN ADULT LIVER, SIGNAL = 0.54; EXPRESSED IN FETAL LIVER, SIGNAL = 0.52; EXPRESSED IN BRAIN, SIGNAL = 0.54; EXPRESSED IN BONE MARROW, SIGNAL = 0.57; EST_HUMAN HIT: AW511032.1, EVALUE 1.40e+00; SWISSPROT HIT: Q92350, EVALUE 2.00e-03; NT HIT: AB032409.1, EVALUE 9.70e-01
ataactatctcatcaaggccttgacatgtgtggacatgacctcacccatggtggtttccaggatttggatgggaaccagtttccgcctatttcaccacctcaggagaaatgcgaggtattcttcccgggggcacccagtcagcgctgcatctacccgagagtccctgcccagccatgcaatcatttctgaaactaatgagatcagcagcttttcacgaaaccatgagtcatacctattggtgaggctttccaggcttgaggagtgccttgaagtgccggcttcaccagatgttctggcatcaccaatccttcccctaattctgagtgccacatctgacccactgccaacggtcacaaggtcgccagcggccaaaaatcaccttgggcttcag

SEQ ID NO: 28610 - DNA, 118 bp, Homo sapiens
  MAP TO AL118520.12; EXPRESSED IN BONE MARROW, SIGNAL = 1.2; EXPRESSED IN ADULT LIVER, SIGNAL =   1; EXPRESSED IN BRAIN, SIGNAL = 0.98; EXPRESSED IN LUNG, SIGNAL =   1; EXPRESSED IN PLACENTA, SIGNAL = 0.91; EXPRESSED IN FETAL LIVER, SIGNAL = 1.3; SWISSPROT HIT: Q04047, EVALUE 9.30e+00; EST_HUMAN HIT: AW967073.1, EVALUE 1.00e-44
ctttgtactctcctttcagggccttaccttttatcgtagtcaaaatgaagaaagcaatgagggtgttgttgatggcacaggtagacttggcaacacaagacaaaatcgtgtaaggatt

SEQ ID NO: 28611 - DNA, 142 bp, Homo sapiens
  MAP TO AC026405.1; EXPRESSED IN PLACENTA, SIGNAL = 0.67; EXPRESSED IN ADULT LIVER, SIGNAL = 0.56; EXPRESSED IN FETAL LIVER, SIGNAL = 0.51; EXPRESSED IN BRAIN, SIGNAL = 0.45; EXPRESSED IN BONE MARROW, SIGNAL = 0.45; NT HIT: AJ231001.1, EVALUE 3.20e-01; SWISSPROT HIT: P04052, EVALUE 9.10e+00; EST_HUMAN HIT: BF664424.1, EVALUE 7.40e+00
ggctgaatttcctgcatatttccctgctctggctagtctcctgccatgggagccgatgcagaacagcaccacctctctttttaactcgcccacctttcctgaccacattcctctcggcctcctcacgtttgtaggtcaaacc

SEQ ID NO: 28612 - DNA, 119 bp, Homo sapiens
  MAP TO AC010905.3; EXPRESSED IN PLACENTA, SIGNAL = 1.1; EXPRESSED IN ADULT LIVER, SIGNAL = 1.4; EXPRESSED IN FETAL LIVER, SIGNAL = 1.1; EXPRESSED IN LUNG, SIGNAL = 1.3; EXPRESSED IN BRAIN, SIGNAL = 5.2; EXPRESSED IN BONE MARROW, SIGNAL = 1.2; NT HIT: L78833.1, EVALUE 7.00e-11; EST_HUMAN HIT: N68451.1, EVALUE 3.00e-17; SWISSPROT HIT: P54824, EVALUE 4.10e+00
gtgacaatgtgctagcagccctcactctcggcacctcctcggcctcggcgtccactctggctgcactcgaggagcccttcagcctgctgctgcatctggtggaggcctttgaggctggc

SEQ ID NO: 28613 - DNA, 171 bp, Homo sapiens
  MAP TO AL158088.6; EXPRESSED IN PLACENTA, SIGNAL = 0.86; EXPRESSED IN ADULT LIVER, SIGNAL = 0.82; EXPRESSED IN FETAL LIVER, SIGNAL = 0.76; EXPRESSED IN BRAIN, SIGNAL = 0.76; EXPRESSED IN BONE MARROW, SIGNAL = 0.64; SWISSPROT HIT: O13018, EVALUE 7.80e-01; NT HIT: L21948.1, EVALUE 4.00e-44
agagagagagagaaagagaagaagaaggaggaggaggaggacgaggaggaggaggagagagattgtattattcaattacagcagacactgttagttttctgtgtaatacccacttttacttctttgttaacaatgaaatctcaattttatttgggatggaaatgtacccag

SEQ ID NO: 28614 - DNA, 166 bp, Homo sapiens
  MAP TO AL157396.2; EXPRESSED IN PLACENTA, SIGNAL = 0.58; EXPRESSED IN ADULT LIVER, SIGNAL = 0.61; EXPRESSED IN BRAIN, SIGNAL = 0.5; EXPRESSED IN BONE MARROW, SIGNAL = 0.48; EST_HUMAN HIT: AA321662.1, EVALUE 3.00e-21; SWISSPROT HIT: P02977, EVALUE 6.00e-01; NT HIT: AJ010770.1, EVALUE 2.00e-21
cctcatggtaaccacaatgcaaaaacctgtaatagattcactaaaaataaaaagcaacaaattaaaacatactaccagagaaaatctcttaaccacaaaggaagacagtaagaaaagaagcaaggagttacaaaacaatcagaaaataagcaacgaaatgacaata

SEQ ID NO: 28615 - DNA, 220 bp, Homo sapiens
  MAP TO AL133372.2; EXPRESSED IN LUNG, SIGNAL = 0.83; EXPRESSED IN PLACENTA, SIGNAL = 0.66; EXPRESSED IN ADULT LIVER, SIGNAL = 0.7; EXPRESSED IN BRAIN, SIGNAL = 0.64; EXPRESSED IN BONE MARROW, SIGNAL = 0.6; SWISSPROT HIT: P39946, EVALUE 9.30e-01; EST_HUMAN HIT: AW103481.1, EVALUE 2.00e-01; NT HIT: gi11421556, EVALUE 1.30e-01
aaatgtagtgatgtataaacaagacaaatttctcagagccatagttctgaatgatggctgtgggatacaatcccccatgacctgcccccttatacttatggctgtaataaatgagaaaattcccacaaaggtgctgcatgggtaagcagcacctggccagggaaaataggactgtaaggtaccagtggtcagggagcgggaatggggaggcgggctgaag

SEQ ID NO: 28616 - DNA, 207 bp, Homo sapiens
  MAP TO AC025516.2; EXPRESSED IN PLACENTA, SIGNAL =   1; EXPRESSED IN ADULT LIVER, SIGNAL = 1.1; EXPRESSED IN FETAL LIVER, SIGNAL = 0.82; EXPRESSED IN BRAIN, SIGNAL = 0.74; EXPRESSED IN LUNG, SIGNAL = 0.94; EXPRESSED IN BONE MARROW, SIGNAL = 0.87; SWISSPROT HIT: Q9WUQ1, EVALUE 5.00e-07; EST_HUMAN HIT: AA577904.1, EVALUE 1.80e-01; NT HIT: AF026248.1, EVALUE 1.20e-01
aattgacattagagtcagtatatagttttgcaaattcgatccatgagcagaaaccactttagcatcagctgtaaccataatttcaatgtatcttggatatgatataagacgttttttcctggaatgtcttctttcatctttcaatggtacattttttgatgtgtgtcctaaaactctttctttcattacattaagatcttcattcat

SEQ ID NO: 28617 - DNA, 92 bp, Homo sapiens
  MAP TO AL133386.3; EXPRESSED IN PLACENTA, SIGNAL = 1.1; EXPRESSED IN ADULT LIVER, SIGNAL = 0.82; EXPRESSED IN BRAIN, SIGNAL = 0.73; EXPRESSED IN BONE MARROW, SIGNAL = 0.66; EXPRESSED IN LUNG, SIGNAL = 0.84; EXPRESSED IN FETAL LIVER, SIGNAL = 0.51; EST_HUMAN HIT: N85106.1, EVALUE 8.00e-45; NT HIT: gi11418704, EVALUE 5.00e-45
tcgatccgtgagagcagccaacaaacgaaaaaatcaaaaccgcaataaatccagctctcatcaggactcctccagaatgtccagtgttggag

SEQ ID NO: 28618 - DNA, 127 bp, Homo sapiens
  MAP TO AC018761.2; EXPRESSED IN BONE MARROW, SIGNAL = 2.2; EXPRESSED IN PLACENTA, SIGNAL = 0.66; EXPRESSED IN ADULT LIVER, SIGNAL = 0.67; EXPRESSED IN FETAL LIVER, SIGNAL = 0.56; EXPRESSED IN BRAIN, SIGNAL = 0.56; SWISSPROT HIT: P78706, EVALUE 1.80e+00; NT HIT: AE003902.1, EVALUE 2.80e-01; EST_HUMAN HIT: BE732118.1, EVALUE 1.00e-65
gctctattgattccagtatccgctgttgggattgccgctcacggaggcctgagccagtgcagacgctggatgaggccagagatggcgtgtccagtgtgaaggtgtcagaccacgagatcctggcagg

SEQ ID NO: 28619 - DNA, 179 bp, Homo sapiens
  MAP TO AC007957.34; EXPRESSED IN ADULT LIVER, SIGNAL = 0.74; EXPRESSED IN FETAL LIVER, SIGNAL = 0.61; EXPRESSED IN BRAIN, SIGNAL = 0.7; EXPRESSED IN BONE MARROW, SIGNAL = 0.56; EXPRESSED IN PLACENTA, SIGNAL = 0.78; EST_HUMAN HIT: AU125898.1, EVALUE 5.00e-57; NT HIT: gi11427757, EVALUE 3.00e-57; SWISSPROT HIT: P34245, EVALUE 7.70e-01
gccccgggaggagagggcgccgctagggtgcccggtgacactcgcacgtcacagggccagggtaagacagacgaggcaaggcacctagacaagaagaagagctccgaagacaaaagcagttccctggacagtgacaaggacctggacacagccatcaaggacttgttaaggtccaagtg

SEQ ID NO: 28620 - DNA, 131 bp, Homo sapiens
  MAP TO AL138934.2; EXPRESSED IN BONE MARROW, SIGNAL = 1.2; EXPRESSED IN LUNG, SIGNAL = 1.1; EXPRESSED IN ADULT LIVER, SIGNAL = 1.3; EXPRESSED IN FETAL LIVER, SIGNAL = 0.94; EXPRESSED IN BRAIN, SIGNAL = 1.2; EXPRESSED IN PLACENTA, SIGNAL = 1.1; SWISSPROT HIT: P19137, EVALUE 2.00e-03; NT HIT: AF273674.1, EVALUE 7.40e-02
ctgaggatcaaaaagaaaataaagacgtcccttcttcaactgaagtgcaaaatactcttcctgattgccaggtgatgctgcaaagacaatcaaaccttcaggcacttttgttcgaaagctggccttaatgc

SEQ ID NO: 28621 - DNA, 106 bp, Homo sapiens
  MAP TO AP001434.1; EXPRESSED IN BRAIN, SIGNAL = 0.47; EST_HUMAN HIT: BF449010.1, EVALUE 3.40e-01
cacgcctgtactgatgccacagtggacagcctttgatgccacaggaccacagctcaatctcctgattgtgaggagaagagtgggggtgttctcactgccccagggc

SEQ ID NO: 28622 - DNA, 120 bp, Homo sapiens
  MAP TO AC015592.4; EXPRESSED IN PLACENTA, SIGNAL = 0.83; EXPRESSED IN FETAL LIVER, SIGNAL = 0.94; EXPRESSED IN BONE MARROW, SIGNAL = 0.74; EXPRESSED IN ADULT LIVER, SIGNAL = 0.86; EXPRESSED IN BRAIN, SIGNAL = 0.8; SWISSPROT HIT: Q13336, EVALUE 8.20e-01; NT HIT: AL161552.2, EVALUE 2.70e-01; EST_HUMAN HIT: AA306682.1, EVALUE 3.90e-01
tgtgaagataaggaaagcaagaccaaggctaactgcaccagctggtcatacccattctacaccacaccagcacctttctcctcagcatattatctctcctatactacacattacaactga

SEQ ID NO: 28623 - DNA, 439 bp, Homo sapiens; identical to SEQ ID NO: 17100
  MAP TO AP001429.1; EXPRESSED IN LUNG, SIGNAL = 0.95; EXPRESSED IN FETAL LIVER, SIGNAL = 1.7; EXPRESSED IN BONE MARROW, SIGNAL = 1.4; EXPRESSED IN PLACENTA, SIGNAL = 0.84; EXPRESSED IN ADULT LIVER, SIGNAL = 1.6; EXPRESSED IN BRAIN, SIGNAL = 3.2; EST_HUMAN HIT: AA403192.1, EVALUE 0.00e+00; SWISSPROT HIT: P53804, EVALUE 4.00e-80; NT HIT: gi11526252, EVALUE 0.00e+00

SEQ ID NO: 28624 - DNA, 144 bp, Homo sapiens
  MAP TO AC026707.2; EXPRESSED IN ADULT LIVER, SIGNAL = 0.73; EXPRESSED IN BRAIN, SIGNAL = 0.67; EXPRESSED IN BONE MARROW, SIGNAL = 0.64; EXPRESSED IN PLACENTA, SIGNAL = 0.69; EXPRESSED IN FETAL LIVER, SIGNAL = 0.81; SWISSPROT HIT: Q03411, EVALUE 4.00e+00; EST_HUMAN HIT: AI954540.1, EVALUE 1.00e-75; NT HIT: gi11416961, EVALUE 8.00e-76
ctggcccatgaaatctgtgaagaacagcatgttggacaggaaggccgtccatccaatgaggtggctgatgcaaaggtagcggtagtgaggaggcatgttcaccagtgctctcagcagtgactttaatgtcattgccctgcgagt

SEQ ID NO: 28625 - DNA, 165 bp, Homo sapiens
  MAP TO AC021970.2; EXPRESSED IN PLACENTA, SIGNAL = 0.54; EXPRESSED IN FETAL LIVER, SIGNAL = 0.49; EXPRESSED IN BONE MARROW, SIGNAL = 0.45; EXPRESSED IN BRAIN, SIGNAL = 0.86; EST_HUMAN HIT: N56710.1, EVALUE 2.20e+00; SWISSPROT HIT: Q9ZMW2, EVALUE 1.00e+00; NT HIT: M81385.1, EVALUE 3.80e-01
gtgcagctatggttgactcactgctgcctgaagcttttgcaatccatgctaatgggagatgtgttggaggggaaccttatgcaatgtgtagaaaaggaggcaaagacgttgaacccagacctggtcattctcagcaggagttcacaattgcaatttgtggatgct

SEQ ID NO: 28626 - DNA, 131 bp, Homo sapiens
  MAP TO AC009549.3; EXPRESSED IN ADULT LIVER, SIGNAL = 0.83; EXPRESSED IN BRAIN, SIGNAL = 0.96; EXPRESSED IN LUNG, SIGNAL =   1; EXPRESSED IN PLACENTA, SIGNAL = 0.95; EXPRESSED IN FETAL LIVER, SIGNAL = 0.91; EXPRESSED IN BONE MARROW, SIGNAL = 0.92; EST_HUMAN HIT: AA814519.1, EVALUE 5.00e-04; NT HIT: AB018490.1, EVALUE 4.50e+00
ctggagactgttggtaatcctggtactgctactgatgatggtaatgggaggctgatggtggtagttgtgatagtgatagtgatggtgatggttaacgtgtattgaatgcttaatatttgccagatactagt

SEQ ID NO: 28627 - DNA, 193 bp, Homo sapiens
  MAP TO AC022313.2; EXPRESSED IN LUNG, SIGNAL = 1.1; EXPRESSED IN PLACENTA, SIGNAL = 1.1; EXPRESSED IN ADULT LIVER, SIGNAL = 1.4; EXPRESSED IN FETAL LIVER, SIGNAL = 0.97; EXPRESSED IN BRAIN, SIGNAL = 0.86; EXPRESSED IN BONE MARROW, SIGNAL = 0.87; EST_HUMAN HIT: AA609012.1, EVALUE 6.70e-01; SWISSPROT HIT: Q04719, EVALUE 3.80e+00; NT HIT: M32661.1, EVALUE 4.50e-01
atattggaggacattaagtgacgggcactggcagtgctgttggtgttcaagacccagatcattaaagctatttcaaaagaacttctttgaccacctgagacactggttgtcacttcaccaatttctattattgcaccaattacagtttgtttatctacgccttttattagactatcaactgtgtgaaggttca

SEQ ID NO: 28628 - DNA, 146 bp, Homo sapiens
  MAP TO AC013317.4; EXPRESSED IN ADULT LIVER, SIGNAL = 0.74; EXPRESSED IN BRAIN, SIGNAL = 0.73; EXPRESSED IN BONE MARROW, SIGNAL = 0.61; EXPRESSED IN PLACENTA, SIGNAL = 0.66; EXPRESSED IN FETAL LIVER, SIGNAL = 0.9; SWISSPROT HIT: P31101, EVALUE 9.00e+00; EST_HUMAN HIT: AI832681.1, EVALUE 1.20e-01; NT HIT: AF223391.1, EVALUE 3.30e-01
gtggcagatctaggcttcaaatcaggcagtctgaccccaaaactcattattttaactaccattttatactgcttctctgtaagaattctgtctgttgtaacggccattcctcctgcttccctacaggcactgaccaattcacaaac

SEQ ID NO: 28629 - DNA, 138 bp, Homo sapiens
  MAP TO AC015638.4; EXPRESSED IN PLACENTA, SIGNAL = 0.63; EXPRESSED IN ADULT LIVER, SIGNAL = 0.65; EXPRESSED IN FETAL LIVER, SIGNAL = 0.55; EXPRESSED IN BRAIN, SIGNAL = 0.67; EXPRESSED IN BONE MARROW, SIGNAL = 0.56; EST_HUMAN HIT: BE707484.1, EVALUE 4.60e-01; SWISSPROT HIT: Q02294, EVALUE 1.40e-02; NT HIT: AF078779.1, EVALUE 2.00e-39
gcatttatgtccatgttccagatcctcacccaggaaggatgggtggacgtaatggaccaaactctaaatgctgtgggacatatgtgggcacccgtggttgccatctatttcattctctatcatctttttgccactctg

SEQ ID NO: 28630 - DNA, 168 bp, Homo sapiens
  MAP TO AC021811.2; EXPRESSED IN PLACENTA, SIGNAL = 1.1; EXPRESSED IN ADULT LIVER, SIGNAL = 0.97; EXPRESSED IN FETAL LIVER, SIGNAL = 1.1; EXPRESSED IN BRAIN, SIGNAL = 0.95; EXPRESSED IN LUNG, SIGNAL = 1.2; EXPRESSED IN BONE MARROW, SIGNAL =   1; SWISSPROT HIT: P53891, EVALUE 1.70e+00; EST_HUMAN HIT: BE884799.1, EVALUE 1.50e-01; NT HIT: X77114.1, EVALUE 3.90e-01
aagaatgtagctgttacctgcaatacctgggaagtctggaacacccatggtaaccagttcaatcggatccatgaagaaggcccccatcatgctggccaaggtgaagtcaaccagagtgcccagaattctacaggggatgatggagccaaagatacccaaacatgctag

SEQ ID NO: 28631 - DNA, 95 bp, Homo sapiens
  MAP TO AC009334.3; EXPRESSED IN ADULT LIVER, SIGNAL = 0.65; EXPRESSED IN BRAIN, SIGNAL = 0.51; EXPRESSED IN BONE MARROW, SIGNAL = 0.77; EXPRESSED IN PLACENTA, SIGNAL = 0.63; EXPRESSED IN FETAL LIVER, SIGNAL = 0.55; NT HIT: M63498.1, EVALUE 3.00e-03
atatttttgctgttacggatttcttccttcttataattctgtactttaatgctatgagttttcagtagtacacagaagcaagtgtatatatccat

SEQ ID NO: 28632 - DNA, 288 bp, Homo sapiens
  MAP TO AL118502.29; EXPRESSED IN ADULT LIVER, SIGNAL =   1; EXPRESSED IN BRAIN, SIGNAL =   1; EXPRESSED IN BONE MARROW, SIGNAL = 1.1; EXPRESSED IN LUNG, SIGNAL = 1.4; EXPRESSED IN PLACENTA, SIGNAL =   1; EXPRESSED IN FETAL LIVER, SIGNAL = 1.2; EST_HUMAN HIT: AI908256.1, EVALUE 1.00e-31; NT HIT: AB038162.1, EVALUE 2.00e-50; SWISSPROT HIT: P39320, EVALUE 1.70e+00
gatcatggccatttcacagacaactacccaaaaacatccacagacagcgttactgctacagttaatccaagaccagaaaactctgtcccctcatcagcaggaagtagccagaaagaacaccctgcctttcatcctttttataactataaggtctggattgacagagcaggagcattgccatcttggacaagcactgccattctaaagttccccttgatcaaaaaccacctaaatccaaagggcatcagcctaatggctaaggtcagcatgaccataaaccacaaatga

SEQ ID NO: 28633 - DNA, 187 bp, Homo sapiens
  MAP TO AL158138.1; EXPRESSED IN ADULT LIVER, SIGNAL = 0.6; EXPRESSED IN BRAIN, SIGNAL = 0.67; EXPRESSED IN LUNG, SIGNAL = 1.1; EXPRESSED IN BONE MARROW, SIGNAL = 0.83; EXPRESSED IN PLACENTA, SIGNAL = 0.71; EXPRESSED IN FETAL LIVER, SIGNAL = 0.66; SWISSPROT HIT: P15260, EVALUE 4.00e-31; NT HIT: J03143.1, EVALUE 1.00e-101; EST_HUMAN HIT: AW630070.1, EVALUE 1.00e-101
cttttatactgctattgaaaatggtaatacaaacttcttttgacttttcagttgtaacaccccacacatgtaagactccttctgctgaaacacagtactgagaattcagtgaggatactggaatcgctaactggcactgaatctcgtcacaatcatcttccttctgcgtgagtattttatactggat

SEQ ID NO: 28634 - DNA, 129 bp, Homo sapiens
  MAP TO AC013451.7; EXPRESSED IN BONE MARROW, SIGNAL = 0.69; EXPRESSED IN FETAL LIVER, SIGNAL = 0.8; EXPRESSED IN LUNG, SIGNAL = 0.93; EXPRESSED IN PLACENTA, SIGNAL = 0.7; EXPRESSED IN ADULT LIVER, SIGNAL = 0.72; EXPRESSED IN BRAIN, SIGNAL = 0.59; NT HIT: gi4557732, EVALUE 7.00e-67; SWISSPROT HIT: P35556, EVALUE 7.00e-06; EST_HUMAN HIT: BF338124.1, EVALUE 1.10e-01
cttgacactcctgtgtcgcccctgaggtggccagagtgtagccagggtagcagaagcaggagtaggaccccacgcggttgatgcagcgcccttttcccttgcaggggtccctcagacactcgttgtcat

SEQ ID NO: 28635 - DNA, 173 bp, Homo sapiens
  MAP TO AL161747.1; EXPRESSED IN PLACENTA, SIGNAL = 0.88; EXPRESSED IN LUNG, SIGNAL = 0.96; EXPRESSED IN ADULT LIVER, SIGNAL = 0.91; EXPRESSED IN BRAIN, SIGNAL = 0.81; EXPRESSED IN BONE MARROW, SIGNAL = 0.92; EXPRESSED IN FETAL LIVER, SIGNAL =   1; NT HIT: AF091029.1, EVALUE 9.00e-27; EST_HUMAN HIT: R18214.1, EVALUE 9.00e-31; SWISSPROT HIT: Q39570, EVALUE 8.00e-07
tttatccccaccattagttccaccctcatcgcccctttcctttgcatcagcttttcttgttatacttggatattggtcagagactaaattattttgtactctcaccgtatcccagatttgcagtttgatttgttttccatcaatgttgaccatacgagctccaaactccacac

SEQ ID NO: 28636 - DNA, 118 bp, Homo sapiens
  MAP TO AL139001.3; EXPRESSED IN PLACENTA, SIGNAL = 0.75; EXPRESSED IN ADULT LIVER, SIGNAL = 0.79; EXPRESSED IN FETAL LIVER, SIGNAL = 0.78; EXPRESSED IN BRAIN, SIGNAL = 0.66; EXPRESSED IN BONE MARROW, SIGNAL = 0.7; SWISSPROT HIT: P38931, EVALUE 5.40e+00; NT HIT: AF224669.1, EVALUE 6.00e-27; EST_HUMAN HIT: BE350127.1, EVALUE 6.00e-31
tcagaagaaggcattgttatcataggagatgacagctacatgtgtgttattgcccttgaacaacttccagtgagacaagatgtggaggtgaaggacagtgatattgatgatcctgacc

SEQ ID NO: 28637 - DNA, 137 bp, Homo sapiens
  MAP TO AC026705.2; EXPRESSED IN PLACENTA, SIGNAL = 0.72; EXPRESSED IN ADULT LIVER, SIGNAL = 0.81; EXPRESSED IN BRAIN, SIGNAL = 0.68; EXPRESSED IN FETAL LIVER, SIGNAL = 0.68; EXPRESSED IN BONE MARROW, SIGNAL = 0.6; SWISSPROT HIT: P07683, EVALUE 1.40e+00; EST_HUMAN HIT: AW160511.1, EVALUE 1.80e+00
atacagtttcagtttacgtgagttatgattttgattgtaactgcacattggagtctggtccagctttcctgttgaataggaaggaagatattttcctacaggaacaagaaatagtcctaaacacctcccagctctaa

SEQ ID NO: 28638 - DNA, 129 bp, Homo sapiens
  MAP TO AC019042.3; EXPRESSED IN BRAIN, SIGNAL = 0.49; EXPRESSED IN BONE MARROW, SIGNAL = 0.45; EXPRESSED IN PLACENTA, SIGNAL = 0.53; SWISSPROT HIT: P03303, EVALUE 9.20e+00; NT HIT: AF197456.1, EVALUE 2.90e-01
ctctttgaacacttgtttttcattgaaactcttctcccttgacccccaggataataatttctctgtagctacccaatctttatctgattttaaacctttggtgtctcctagaacctcctctttgcccat

SEQ ID NO: 28639 - DNA, 506 bp, Homo sapiens
  MAP TO AL118502.29; EXPRESSED IN BONE MARROW, SIGNAL = 0.53; EXPRESSED IN FETAL LIVER, SIGNAL = 0.62; EXPRESSED IN PLACENTA, SIGNAL = 0.56; EXPRESSED IN ADULT LIVER, SIGNAL = 0.69; EXPRESSED IN BRAIN, SIGNAL = 0.61; NT HIT: gi11426974, EVALUE 8.10e-02; SWISSPROT HIT: P51436, EVALUE 1.90e+00; EST_HUMAN HIT: BE882375.1, EVALUE 4.80e-01
ctgttaggcaggaacatggagaccaacgaggcaagagggttggccacaatgctgagggtggcagccaggtggtaggcaactggcccataggacaggcaggagtaggtctgcacagagggcagcatgccgttggtgagcgcgttgacgaaggccaccagggtatagatgaaggccaggtgcgccgggcagcagggggctgctttctcctctagatacccctggccctggctgctgtccaccgtgcctgcagggcccaagtcattctcttcccgcggccggatggagtggagggtgacctggtcattgaggaggtcttccacggaagcctcccagcacctgggttgacgctggaggacaaagaacgccacgaggcagcaggccatcatgatggataggaggaggaagaagaccaggggtgagaagtgggcgggaaggtagcggctctccaggtgggacaagggtgcttccattccggggagggcggacaccaaagctctgggaactcc

SEQ ID NO: 28640 - DNA, 216 bp, Homo sapiens
  MAP TO AL121908.7; EXPRESSED IN BONE MARROW, SIGNAL = 0.77; EXPRESSED IN LUNG, SIGNAL = 0.85; EXPRESSED IN FETAL LIVER, SIGNAL = 0.82; EXPRESSED IN PLACENTA, SIGNAL =   1; EXPRESSED IN ADULT LIVER, SIGNAL = 0.83; EXPRESSED IN BRAIN, SIGNAL = 0.81; SWISSPROT HIT: P39991, EVALUE 3.60e+00; EST_HUMAN HIT: AI929032.1, EVALUE 3.00e-03; NT HIT: gi6005855, EVALUE 2.00e-03
gtggctttgtttcctgtatggggtctgaaggtgagcagtacctttgtttcctgtatggggtctgttctgtgttcagaagcaggactcagggctgctggagctggagctggagcctctgagtcctcagggttctccacagctctcctgaccagctctgctagagcgatgtctctggcagatgccttttccctgttgccctgtggtctggcctttctg

SEQ ID NO: 28641 - DNA, 327 bp, Homo sapiens
  MAP TO AL137853.3; EXPRESSED IN BONE MARROW, SIGNAL = 0.53; EXPRESSED IN LUNG, SIGNAL = 1.8; EXPRESSED IN PLACENTA, SIGNAL = 0.5; EXPRESSED IN FETAL LIVER, SIGNAL = 0.5; EXPRESSED IN ADULT LIVER, SIGNAL = 0.85; EXPRESSED IN BRAIN, SIGNAL = 0.55; EST_HUMAN HIT: BE837593.1, EVALUE 0.00e+00; NT HIT: AB029290.1, EVALUE 0.00e+00; SWISSPROT HIT: P11533, EVALUE 1.70e-01
gctctggaagaagacatagaaaaccatgcaacagatgtgcaccaggcagtcaaaattgggcagtccctctcctccctgacatctcctgcagaacagggtgtgctgtcagaaaagatagactcattgcaggcccgatacagtgaaattcaagaccgctgttgtcggaaggcagccctacttgaccaagctctgtctaatgctaggctgtttggggaggatgaggtggaggtgctcaactggctggctgaggttgaggacaagctcagttcagtgttcgtaaaggatttcaaacaggatgtcctgcacaggcagcatgctgaccacctg

SEQ ID NO: 28642 - DNA, 149 bp, Homo sapiens
  MAP TO AC024570.2; EXPRESSED IN PLACENTA, SIGNAL = 0.52; EXPRESSED IN FETAL LIVER, SIGNAL = 0.56; EXPRESSED IN ADULT LIVER, SIGNAL = 0.53; EXPRESSED IN BRAIN, SIGNAL = 0.49; EXPRESSED IN BONE MARROW, SIGNAL = 0.5; EST_HUMAN HIT: AI745065.1, EVALUE 8.00e-77; NT HIT: gi11417260, EVALUE 9.00e-79; SWISSPROT HIT: P26639, EVALUE 9.00e-21
ttgttggtgaaaaagagaaaatcagtggcactgttaatatccgcacaagagacaataaggtccacggggaacgcaccatttctgaaactatcgagcggctacagcagctcaaagagttccgcagcaaacaggcagaagaagaattttaa

SEQ ID NO: 28643 - DNA, 135 bp, Homo sapiens
  MAP TO AL121888.20; EXPRESSED IN BONE MARROW, SIGNAL = 0.57; EXPRESSED IN LUNG, SIGNAL = 0.89; EXPRESSED IN PLACENTA, SIGNAL = 0.78; EXPRESSED IN ADULT LIVER, SIGNAL = 0.77; EXPRESSED IN FETAL LIVER, SIGNAL = 0.6; EXPRESSED IN BRAIN, SIGNAL = 0.72; SWISSPROT HIT: Q06330, EVALUE 4.10e+00; EST_HUMAN HIT: BF697362.1, EVALUE 9.00e-18; NT HIT: AL163210.2, EVALUE 6.00e-18
ccctgcatacctcaggactatgcagagagtccccaccagcaagaaggccctcaccagacacagcaccttgaccttggacttctcagtttccattattataagaaagaaattctttttctttataaattacccagt

SEQ ID NO: 28644 - DNA, 114 bp, Homo sapiens
  MAP TO AL158046.1; EXPRESSED IN PLACENTA, SIGNAL = 0.68; EXPRESSED IN ADULT LIVER, SIGNAL = 0.75; EXPRESSED IN FETAL LIVER, SIGNAL = 0.74; EXPRESSED IN BRAIN, SIGNAL = 0.7; EXPRESSED IN BONE MARROW, SIGNAL = 0.76; NT HIT: AB046837.1, EVALUE 5.00e-58; EST_HUMAN HIT: BF377516.1, EVALUE 9.30e-02
atgtgggattggaggacactgaatcctatgaccagtggttgttttacttggattacagacttcgaccagttggttggtgtcaagagaataaatacagaatggacccaccttcag

SEQ ID NO: 28645 - DNA, 127 bp, Homo sapiens
  MAP TO AC010349.6; EXPRESSED IN ADULT LIVER, SIGNAL = 1.3; EXPRESSED IN BRAIN, SIGNAL = 1.1; EXPRESSED IN PLACENTA, SIGNAL = 1.4; EXPRESSED IN BONE MARROW, SIGNAL = 1.2; EXPRESSED IN LUNG, SIGNAL = 1.3; EXPRESSED IN FETAL LIVER, SIGNAL = 1.2; NT HIT: D84476.1, EVALUE 2.80e-01; SWISSPROT HIT: Q00267, EVALUE 1.80e+00; EST_HUMAN HIT: AI377036.1, EVALUE 2.70e-02
gtgctatgaaagacttcttccagtattatggcattgattcttcttctgaacacttacagcacctctttcccttaccccattggcccaattcacattttgtggccaagcaagaacttaaaaaggaaag

SEQ ID NO: 28646 - DNA, 129 bp, Homo sapiens
  MAP TO AC019078.3; EXPRESSED IN PLACENTA, SIGNAL = 0.93; EXPRESSED IN BONE MARROW, SIGNAL =   1; EXPRESSED IN FETAL LIVER, SIGNAL = 0.77; EXPRESSED IN BRAIN, SIGNAL = 1.2; EST_HUMAN HIT: BE064410.1, EVALUE 4.00e-32; NT HIT: AL163246.2, EVALUE 6.00e-21; SWISSPROT HIT: P03360, EVALUE 5.40e-02
atggtattccacatagcattgcctctgaccaaggcactcactttagagctaaagaagtgcagcagtgggcttgtgctcatgaaacccactggtctcaccatgttccccatcaccctaaagcagctggac

SEQ ID NO: 28647 - DNA, 419 bp, Homo sapiens
  MAP TO AL137225.7; EXPRESSED IN BONE MARROW, SIGNAL = 0.77; EXPRESSED IN LUNG, SIGNAL = 1.2; EXPRESSED IN PLACENTA, SIGNAL = 1.1; EXPRESSED IN FETAL LIVER, SIGNAL =   1; EXPRESSED IN ADULT LIVER, SIGNAL = 1.2; EXPRESSED IN BRAIN, SIGNAL = 0.97; SWISSPROT HIT: P08547, EVALUE 5.50e-02; NT HIT: X60660.1, EVALUE 3.00e-22
cccgtgatgccttgcacggtgctgaggatgccaccctcgccgagcacgcccaagacaccccatcctccaagaagtcctccatcaccaaggagaccacctccgccgagcaggccaccttggcctgcgaggatgccatcagctgccagcatgcctccagtgcccagcaaaccacctgggcccaccgccccagtggcaactccaggtgggatttctccaggctgcagctctcgccggtgaagcctgcccacaggtgctgccctgtatcgcccgaggcccctgtggcctccatatgcattctcggcactgcgatagccactgtttcggaggtccctgatgcttccctcggactcaaggatctcaccatatcggtatttgccccccagctgagcagtgttgtcgttggtctcaatgtgaccata

SEQ ID NO: 28648 - DNA, 115 bp, Homo sapiens
  MAP TO AL139824.7; EXPRESSED IN BONE MARROW, SIGNAL = 0.69; EXPRESSED IN PLACENTA, SIGNAL = 0.68; EXPRESSED IN FETAL LIVER, SIGNAL = 0.76; EXPRESSED IN LUNG, SIGNAL = 0.86; EXPRESSED IN ADULT LIVER, SIGNAL = 0.79; EXPRESSED IN BRAIN, SIGNAL = 0.65; NT HIT: AF020585.1, EVALUE 3.90e+00; EST_HUMAN HIT: AA902912.1, EVALUE 3.70e-01
tattttagatgtgactaaaatagccatattctcatatccagtcattcaggtttacacatataaaatacaggacactaaaactactgactttaaatctgaatttattgagaagtaa

SEQ ID NO: 28649 - DNA, 146 bp, Homo sapiens
  MAP TO AC022542.3; EXPRESSED IN BONE MARROW, SIGNAL = 0.81; EXPRESSED IN PLACENTA, SIGNAL =   1; EXPRESSED IN FETAL LIVER, SIGNAL = 0.8; EXPRESSED IN LUNG, SIGNAL =   1; EXPRESSED IN ADULT LIVER, SIGNAL =   1; EXPRESSED IN BRAIN, SIGNAL = 0.86; NT HIT: AJ006565.1, EVALUE 8.30e-02; EST_HUMAN HIT: AU136679.1, EVALUE 2.00e-03; SWISSPROT HIT: P44450, EVALUE 6.90e+00
tttccctgtgcctcagtgtcctccctaaaaacatagccttcaaattgctttggcaaaggcagagagctgatgatgaaagggcacacgggcagcagaccctggagggtgcagggaccacagtagtcggtcctggaccaccattcttc

SEQ ID NO: 28650 - DNA, 401 bp, Homo sapiens
  MAP TO AC008812.4; EXPRESSED IN LUNG, SIGNAL = 0.88; EXPRESSED IN FETAL LIVER, SIGNAL = 0.87; EXPRESSED IN BONE MARROW, SIGNAL = 1.1; EXPRESSED IN PLACENTA, SIGNAL = 1.3; EXPRESSED IN ADULT LIVER, SIGNAL = 0.8; EXPRESSED IN BRAIN, SIGNAL = 0.88; EST_HUMAN HIT: AW138646.1, EVALUE 3.00e-69; SWISSPROT HIT: P10263, EVALUE 2.00e-01; NT HIT: AF114156.1, EVALUE 2.00e-45
gcaggcactcttgatgtggaaaactggaacagagcgggagaaggattgaaacatgctcatcaaaaaggtcttaaagttgattcttctgctttctgtacttgcagtctaattcgtactgtacttatgccgttatctccttattattctgcgggacagcaggctgagtctaaaaatctgaaagaatctgttgtcccacccacagcttcaattgaaaataaaaaacaggagagggaggataaaaattggcctatactgcctcctccagttgcagaaacatctgtgccgcctccttcggtagcaggaatagagaccccaatacaaagaattttacgctctgctgccatagctggagagccctcaggaccttgtgcttttcctatttccgtaaggcccgattcaaa

SEQ ID NO: 28651 - DNA, 172 bp, Homo sapiens
  MAP TO AC013642.3; EXPRESSED IN PLACENTA, SIGNAL = 0.5; EXPRESSED IN FETAL LIVER, SIGNAL = 0.52; EXPRESSED IN BONE MARROW, SIGNAL = 0.48; EXPRESSED IN BRAIN, SIGNAL = 0.51; NT HIT: Y13192.1, EVALUE 4.00e-01; SWISSPROT HIT: O35453, EVALUE 3.00e-12
gttgtggtaaacgagttgttccattaaacgtcaacagaatagcatctggagtcattgcacccaaggcggcctggccttggcaagcttcccttcagtatgataacatccatcagtgtggggccaccttgattagtaacacatggcttgtcactgcagcacactgcttccagaa

SEQ ID NO: 28652 - DNA, 117 bp, Homo sapiens
  MAP TO AL161752.1; EXPRESSED IN ADULT LIVER, SIGNAL = 0.6; EXPRESSED IN PLACENTA, SIGNAL = 0.65; EXPRESSED IN BRAIN, SIGNAL = 0.6; EXPRESSED IN BONE MARROW, SIGNAL = 0.65; EXPRESSED IN FETAL LIVER, SIGNAL = 0.61; EST_HUMAN HIT: AU137084.1, EVALUE 9.60e-02; NT HIT: S62554.1, EVALUE 1.00e+00
ctaagtgttcttctttatcttcttgcacgttttacatttcaatgtctggatagaaaaccttatttcttttgtaaaaatcttcagttcaatgaaatgaagatggtcatagataaagta

SEQ ID NO: 28653 - DNA, 177 bp, Homo sapiens
  MAP TO AL161744.1; EXPRESSED IN BRAIN, SIGNAL = 0.55; EST_HUMAN HIT: AW157233.1, EVALUE 3.00e-95; NT HIT: M87664.1, EVALUE 6.40e+00; SWISSPROT HIT: Q10022, EVALUE 8.00e-03
cagaaatactgctatagatattccaaccagaaagcctgctataacatctgaccaatgatttcgatattctgctactctgttgagtccagtaagaaatgccaaacacattaagcccaagcatagaactggcttagcaagtctggttcccttggctttgattgtgttggtgatgtacat

SEQ ID NO: 28654 - DNA, 167 bp, Homo sapiens
  MAP TO AC021880.2; EXPRESSED IN LUNG, SIGNAL = 3.5; EXPRESSED IN ADULT LIVER, SIGNAL = 0.84; EXPRESSED IN BONE MARROW, SIGNAL = 0.52; EXPRESSED IN BRAIN, SIGNAL = 0.47; EST_HUMAN HIT: AI065061.1, EVALUE 5.70e-01; SWISSPROT HIT: P26640, EVALUE 1.30e+00; NT HIT: M21001.1, EVALUE 1.50e+00
atgtgtacagatgggccaagaccaagaggaataagtggaaaatcgatacaagcaatcctcagtagccaaatccatccagctcccgagttcagacagggaagggtgccaaatgatccagatccacgtgattgtggagttggggacgtcaagcggcaagagttcgccaa

SEQ ID NO: 28655 - DNA, 294 bp, Homo sapiens
  MAP TO AL139008.3; EXPRESSED IN ADULT LIVER, SIGNAL = 0.56; EXPRESSED IN BRAIN, SIGNAL = 0.49; EXPRESSED IN PLACENTA, SIGNAL = 0.58; EXPRESSED IN BONE MARROW, SIGNAL = 0.56; SWISSPROT HIT: Q14690, EVALUE 4.00e+00; NT HIT: AL163204.2, EVALUE 2.00e-84; EST_HUMAN HIT: AF109301.1, EVALUE 7.00e-73
tttaaaaactaacctgtaaatggatttttctaatttttttattgcctgcattgccctttcatccagctcgattttatattcttgtactttaccaagttttaccatatctttttccatatgtgtcttaagatttaatactttttcttccaacatctttttatccttctcaagtttttcacatttctcttgtacttttcccatagataataactcctgatgaagaacttcattgtctttggccaaattgacacattttgaagatacagcttccttctcggccataagatcatcaaa

SEQ ID NO: 28656 - DNA, 278 bp, Homo sapiens
  MAP TO AC010458.2; EXPRESSED IN PLACENTA, SIGNAL = 0.93; EXPRESSED IN FETAL LIVER, SIGNAL = 0.76; EXPRESSED IN BONE MARROW, SIGNAL = 0.7; EXPRESSED IN ADULT LIVER, SIGNAL = 1.1; EXPRESSED IN BRAIN, SIGNAL = 1.3; EST_HUMAN HIT: AI884477.1, EVALUE 0.00e+00; SWISSPROT HIT: P28798, EVALUE 8.10e+00; NT HIT: AF065214.1, EVALUE 0.00e+00
ccacacgcttcatggccttgagttcaccttggctgtcctaacagggccaatcaccagtgaccagctagactgtgattttgatagcgtcattcagaagaaggcgtccaaggagctgaaggtggtgaaatttgtcctgcaggtccctcgggagatcctggagctggagcatgagtgtctgacaatcagaagcatcatgtccaatgtccagatggccagaatgaatgtgatagttcagaccaatgccttccactgctcctttatgactgcacttctagcca

SEQ ID NO: 28657 - DNA, 99 bp, Homo sapiens
  MAP TO AC008750.4; EXPRESSED IN ADULT LIVER, SIGNAL = 0.68; EXPRESSED IN BRAIN, SIGNAL = 0.85; EXPRESSED IN LUNG, SIGNAL = 0.85; EXPRESSED IN PLACENTA, SIGNAL = 0.92; EXPRESSED IN FETAL LIVER, SIGNAL = 0.87; EXPRESSED IN BONE MARROW, SIGNAL = 0.87; NT HIT: AL163280.2, EVALUE 1.30e-02; EST_HUMAN HIT: AI688474.1, EVALUE 1.00e-09
ggaccaacacaggaacttaacaggaaaactggaagaaaccacagacctttctaaagaaacggtgggcagcagcctacaccacgagccagacagaaaact

SEQ ID NO: 28658 - DNA, 336 bp, Homo sapiens
  MAP TO AC024972.2; EXPRESSED IN FETAL LIVER, SIGNAL = 0.93; EXPRESSED IN BRAIN, SIGNAL = 1.3; EXPRESSED IN LUNG, SIGNAL = 0.92; EXPRESSED IN PLACENTA, SIGNAL = 0.71; EXPRESSED IN ADULT LIVER, SIGNAL = 0.83; EXPRESSED IN BONE MARROW, SIGNAL = 0.85; EST_HUMAN HIT: AA502294.1, EVALUE 0.00e+00; NT HIT: gi7661979, EVALUE 2.00e-78; SWISSPROT HIT: P03299, EVALUE 3.80e+00
tatggatatgaatcttcttttgaaaatgttaaagtaaattacctcttttcagatattgtcttcatgcgaacttggtatcctgtttccatcccagccttctataacccagtaacatctttgttgaaaccagtgggtgagaaagacacctggtcaggaatgtggaccacgggccacctcgggctcgcccatggtgtcagactaaagacaaacaaggactctctgtataaggtactggtcgtgtgtgtgttagtggagatgaagcctgtgccctacagacagggagtcacgcagacacttttctataatttcttacgtactttgaatgttcaagtataa

SEQ ID NO: 28659 - DNA, 222 bp, Homo sapiens
  MAP TO AC008269.3; EXPRESSED IN PLACENTA, SIGNAL = 0.8; EXPRESSED IN FETAL LIVER, SIGNAL = 0.72; EXPRESSED IN BRAIN, SIGNAL = 0.7; EXPRESSED IN BONE MARROW, SIGNAL = 0.67; SWISSPROT HIT: P04492, EVALUE 2.50e-01; NT HIT: L11160.1, EVALUE 8.20e+00
tttgctttgaaaagcagcagattagctagagcacaagattgtctatgatcagctgagcggcaaggatcactgacacagcgagagggcagggaggacgagtcatttgtcttttcagcaggcacacacaaatgatcctttcctgccatatgttccagagaattcttttccttcccttcaggtacttgaccccctattggatagaggcattgatcaaagttgaag

SEQ ID NO: 28660 - DNA, 415 bp, Homo sapiens
  MAP TO AC008688.4; EXPRESSED IN PLACENTA, SIGNAL = 0.66; EXPRESSED IN ADULT LIVER, SIGNAL = 0.72; EXPRESSED IN BRAIN, SIGNAL = 0.59; EXPRESSED IN BONE MARROW, SIGNAL = 0.57; EXPRESSED IN FETAL LIVER, SIGNAL = 0.64; NT HIT: gi11416799, EVALUE 0.00e+00; SWISSPROT HIT: P33450, EVALUE 2.00e-17; EST_HUMAN HIT: AU127985.1, EVALUE 2.00e-06
gcggctgtgcaaattctggtgcattgtcgtttatatctaagacctggatgtttatctgggctgtcccagaccgagggggagagccgccgtccagcgcggtgagcgttaagctgagttccggctgctcctcccgatcgagcgctttatccagtactagttccgggtacttccttccgtccctacgactgcgagtgagtacgtggaagtgggaattcggagtgatagtgtagttttggaggctgtttcttcccacatccaagtcctcagcatttcccaaaggaattactgttcctggcagagtgctttctaggattttcagatgcatttcattttcaaagaataccggagaatggtcatttacatctatgatacggagctcgtttgtaacgaattgcaaagggttttgcagtaatat

SEQ ID NO: 28661 - DNA, 211 bp, Homo sapiens
  MAP TO AL157911.2; EXPRESSED IN PLACENTA, SIGNAL =   1; EXPRESSED IN ADULT LIVER, SIGNAL = 0.67; EXPRESSED IN BRAIN, SIGNAL = 0.96; EXPRESSED IN FETAL LIVER, SIGNAL = 0.82; EXPRESSED IN BONE MARROW, SIGNAL = 0.99; EXPRESSED IN LUNG, SIGNAL = 0.97; NT HIT: AF208541.1, EVALUE 7.00e-31; EST_HUMAN HIT: AW844997.1, EVALUE 4.00e-18; SWISSPROT HIT: P21443, EVALUE 1.70e+00
ggtctggattgacagagcaggagcatcaccctcttcgacttcgacgaggaccatcattttaagtttcaccttgatcaaaacccaccaaaatccaaagggcatcagccttatggttaaggtcagcatgaacataaatcacacaacatctctgaccagaaacattcgaaacccctcccggaccagagacatgccagccccgagataaccttcc

SEQ ID NO: 28662 - DNA, 219 bp, Homo sapiens
  MAP TO AC010290.4; EXPRESSED IN ADULT LIVER, SIGNAL =   1; EXPRESSED IN FETAL LIVER, SIGNAL = 0.8; EXPRESSED IN BRAIN, SIGNAL = 0.85; EXPRESSED IN BONE MARROW, SIGNAL = 0.75; EXPRESSED IN PLACENTA, SIGNAL = 0.9; SWISSPROT HIT: Q91739, EVALUE 1.90e-01; NT HIT: AB033057.1, EVALUE 1.00e-120
gagcaatttgatgaggctgaaccagccactctgaatgggctggatcaaccagaacagaccactatcccaatccctcagctgccacaggaaacccagtcttccctggaacatgaaccagaaactcacaccctgcacctgcagccgcagcatgaagagagcgtggtgcccacccagagcacgctgacagccgacgacatgcgcagagccaagcgcatccga

SEQ ID NO: 28663 - DNA, 99 bp, Homo sapiens
  MAP TO AC022758.3; EXPRESSED IN BONE MARROW, SIGNAL = 0.5; EXPRESSED IN PLACENTA, SIGNAL = 0.68; EXPRESSED IN ADULT LIVER, SIGNAL = 0.7; EXPRESSED IN FETAL LIVER, SIGNAL = 0.54; EXPRESSED IN BRAIN, SIGNAL = 0.7; NT HIT: U10098.1, EVALUE 5.30e-02; EST_HUMAN HIT: AV709303.1, EVALUE 1.20e+00
agggttgagatgtagatatctcagtgggtggagggtgatcctgcccacatcagcatcaattccagttatactcatttttagacttctgatgctgatcat

SEQ ID NO: 28664 - DNA, 390 bp, Homo sapiens
  MAP TO AC026412.1; EXPRESSED IN FETAL LIVER, SIGNAL = 1.3; EXPRESSED IN BRAIN, SIGNAL =   1; EXPRESSED IN PLACENTA, SIGNAL = 0.52; EXPRESSED IN ADULT LIVER, SIGNAL = 0.69; EXPRESSED IN BONE MARROW, SIGNAL = 0.99; NT HIT: gi9790172, EVALUE 0.00e+00; EST_HUMAN HIT: AI580780.1, EVALUE 0.00e+00; SWISSPROT HIT: P32583, EVALUE 1.10e+00
tcttttatgatatcaagagaaatgatcccggaaagaaaaaatcaagaaaaagaatctgatgcctcaactgtgaatgaagagacttctgaggaaaataatcaaatggaggaatctgatgtgtctcaagctgagaaagatttactacattccgaaggtaatgaaaacgaaggccctgaaagtagtggttcttctgactgccgtgaaacagaagaattagtaggatccaattccagtaaaactggagagattctttcagaatcatccatggaaaatgatgacgaagccacagaagtcaccgatgaaccaatggaacaagattatttagaaacatttagatgcagtattttacgtacagttctggttttaacgccgtataaaacttttatgtaa

SEQ ID NO: 28665 - DNA, 100 bp, Homo sapiens
  MAP TO AL133226.16; EXPRESSED IN PLACENTA, SIGNAL = 0.69; EXPRESSED IN FETAL LIVER, SIGNAL = 0.57; EXPRESSED IN ADULT LIVER, SIGNAL = 0.59; EXPRESSED IN BRAIN, SIGNAL = 0.53; EXPRESSED IN BONE MARROW, SIGNAL = 0.59; SWISSPROT HIT: P11369, EVALUE 1.10e+00; EST_HUMAN HIT: BE094021.1, EVALUE 1.00e-03; NT HIT: AL163280.2, EVALUE 9.00e-07
ccattctaactgggatcagatgataactcactgtgattttgatttgcattacctcataataagtgatattgagcattttttcatttgtatatcttctttt

SEQ ID NO: 28666 - DNA, 318 bp, Homo sapiens
  MAP TO AC007981.43; EXPRESSED IN FETAL LIVER, SIGNAL = 1.3; EXPRESSED IN PLACENTA, SIGNAL = 0.61; EXPRESSED IN ADULT LIVER, SIGNAL = 0.7; EXPRESSED IN BONE MARROW, SIGNAL = 0.63; EXPRESSED IN BRAIN, SIGNAL = 0.56; SWISSPROT HIT: Q04503, EVALUE 1.00e-03; EST_HUMAN HIT: AI904151.1, EVALUE 1.00e-117; NT HIT: AF225925.1, EVALUE 7.80e-01
acgaggacgctgtatatgacatcgctaatgaggacgttgtatatgacatcgctaatgaggatgctttacaagacatagctaatgaggttgctgtatatgacatcgctaatgaggacattgtatatgacatcgctaatgaggacgctctatacgacatcattaatgaggacgctgtatacaacatcgctaatgaggacgctgtatatggcatcgctaatgaggatgctgtatacgaattcgctaataaggacgctgtatatgacattgctaatgaggacactgtacaagacatctgtaaaaaagaagatgctgccaatg

SEQ ID NO: 28667 - DNA, 105 bp, Homo sapiens
  MAP TO AC008919.4; EXPRESSED IN PLACENTA, SIGNAL = 0.91; EXPRESSED IN FETAL LIVER, SIGNAL = 0.75; EXPRESSED IN BONE MARROW, SIGNAL = 1.1; EXPRESSED IN LUNG, SIGNAL = 0.89; EXPRESSED IN ADULT LIVER, SIGNAL = 0.9; EXPRESSED IN BRAIN, SIGNAL = 0.78; NT HIT: AF089851.1, EVALUE 8.90e-01; EST_HUMAN HIT: AW834834.1, EVALUE 2.00e-45
atgtgtaggtctgcgttggaatctcctagaaaagttgtgattttcgagccatatccttctgtggtagatcctaatgatcctcagatgttggccttcaaccccagg

SEQ ID NO: 28668 - DNA, 214 bp, Homo sapiens
  MAP TO AC007687.16; EXPRESSED IN PLACENTA, SIGNAL = 0.9; EXPRESSED IN LUNG, SIGNAL = 0.92; EXPRESSED IN FETAL LIVER, SIGNAL =   1; EXPRESSED IN BONE MARROW, SIGNAL = 0.94; EXPRESSED IN ADULT LIVER, SIGNAL = 0.98; EXPRESSED IN BRAIN, SIGNAL =   1; EST_HUMAN HIT: AI090876.1, EVALUE 2.00e-84; SWISSPROT HIT: P50542, EVALUE 3.00e-11; NT HIT: AJ245503.1, EVALUE 2.00e-89
ctctgttctggaaggggtgaaggaattatatctggaagctgcccaccaaaatggagatatgatcgacccagacctgcagacaggtctaggggttctgttccacctgagtggagaatttaatagagcaatagatgcatttaacgctgccttaactgttcggccagaggtaagacagcacagcacagcaagaaaccacagcgttctctgtaacaaa

SEQ ID NO: 28669 - DNA, 78 bp, Homo sapiens
  MAP TO AC018529.4; EXPRESSED IN ADULT LIVER, SIGNAL = 0.76; EXPRESSED IN BRAIN, SIGNAL = 0.78; EXPRESSED IN LUNG, SIGNAL = 1.2; EXPRESSED IN PLACENTA, SIGNAL = 0.92; EXPRESSED IN BONE MARROW, SIGNAL = 0.93; EXPRESSED IN FETAL LIVER, SIGNAL = 0.84; SWISSPROT HIT: P06601, EVALUE 8.50e-01; NT HIT: U17575.1, EVALUE 2.40e+00
gtaacaatcacaagagacacttcatcatagataggctccaccatactgcggatgaggggtgcagtggggagcgggact

SEQ ID NO: 28670 - DNA, 189 bp, Homo sapiens
  MAP TO AL121914.16; EXPRESSED IN BONE MARROW, SIGNAL = 0.67; EXPRESSED IN ADULT LIVER, SIGNAL = 0.96; EXPRESSED IN BRAIN, SIGNAL = 0.91; EXPRESSED IN PLACENTA, SIGNAL = 0.9; EXPRESSED IN FETAL LIVER, SIGNAL =   2; NT HIT: AJ400877.1, EVALUE 2.00e-03; EST_HUMAN HIT: BF379803.1, EVALUE 2.60e+00; SWISSPROT HIT: P77888, EVALUE 1.70e+00
atgagtgctggctgctgctattgcaatgtccagtgctccctgcacgcccagcctgaccataacagcctgagcccagccaaaagtggggtggtcaggggcagcctctgcaaaggggtgactcgagctgagacccagaggaggaggatctggcggaagagagttctgggcagaaggaacagcaaagaaaag

SEQ ID NO: 28671 - DNA, 164 bp, Homo sapiens
  MAP TO AC015823.3; EXPRESSED IN PLACENTA, SIGNAL = 0.7; EXPRESSED IN BRAIN, SIGNAL = 0.69; EXPRESSED IN ADULT LIVER, SIGNAL = 0.63; EXPRESSED IN FETAL LIVER, SIGNAL = 0.63; EXPRESSED IN BONE MARROW, SIGNAL = 0.65; SWISSPROT HIT: O93995, EVALUE 1.30e+00; NT HIT: AB005546.1, EVALUE 9.50e-02; EST_HUMAN HIT: AF150190.1, EVALUE 3.00e-61
cttggactgcagggtcccttctgttccttcctcccttgaggagctataaaaactctgcatcaaaaacgtgggggggacaagcaaaaggcttgagttccacttctgagtctgccactgaccatgttcaggcaggttcttcacttttctgggtcttgctgtctcct

SEQ ID NO: 28672 - DNA, 109 bp, Homo sapiens
  MAP TO AC010767.3; EXPRESSED IN LUNG, SIGNAL = 3.9; EXPRESSED IN PLACENTA, SIGNAL = 0.46; EXPRESSED IN BONE MARROW, SIGNAL = 0.52; EXPRESSED IN FETAL LIVER, SIGNAL = 0.57; EXPRESSED IN BRAIN, SIGNAL = 0.54; SWISSPROT HIT: P97698, EVALUE 9.40e+00; NT HIT: gi11466495, EVALUE 6.00e-02
agggaatggacaccttcatgtattgctggtaggtgacagatattttggcaatgaacaccaaaaccttaaacattggcatacttttggactttattctgtggattttatc

SEQ ID NO: 28673 - DNA, 105 bp, Homo sapiens
  MAP TO AC026192.1; EXPRESSED IN ADULT LIVER, SIGNAL = 0.87; EXPRESSED IN BRAIN, SIGNAL = 0.71; EXPRESSED IN LUNG, SIGNAL = 1.7; EXPRESSED IN PLACENTA, SIGNAL = 0.92; EXPRESSED IN FETAL LIVER, SIGNAL =   1; EXPRESSED IN BONE MARROW, SIGNAL = 1.1; NT HIT: AF259667.1, EVALUE 8.90e-01
aaggttcccccttattgcccatgctggggggtggactgctccctggttggcccttgataagccactggtaagctgcatccttcagcgtgtctgcctgaaggattt

SEQ ID NO: 28674 - DNA, 91 bp, Homo sapiens
  MAP TO AC019275.3; EXPRESSED IN PLACENTA, SIGNAL = 0.7; EXPRESSED IN ADULT LIVER, SIGNAL = 0.82; EXPRESSED IN FETAL LIVER, SIGNAL = 0.85; EXPRESSED IN BRAIN, SIGNAL = 0.67; EXPRESSED IN BONE MARROW, SIGNAL = 0.72; NT HIT: gi7706370, EVALUE 2.00e-44; EST_HUMAN HIT: AA150158.1, EVALUE 3.00e-44; SWISSPROT HIT: P22213, EVALUE 1.00e-05
ctggcacattctgtcaatattttcttcagttggcattacaaagtatactgcaggaacatctggaataggatctcgatcagagtgtaaaagc

SEQ ID NO: 28675 - DNA, 156 bp, Homo sapiens
  MAP TO AF240628.1; EXPRESSED IN PLACENTA, SIGNAL = 0.62; EXPRESSED IN FETAL LIVER, SIGNAL = 1.2; EXPRESSED IN BRAIN, SIGNAL = 0.73; EXPRESSED IN BONE MARROW, SIGNAL = 0.66; SWISSPROT HIT: P14324, EVALUE 1.00e-20; NT HIT: J05262.1, EVALUE 3.00e-57; EST_HUMAN HIT: BE799213.1, EVALUE 4.00e-57
ctgatacttgcctccactggcgttgtactccaggacctccttgagctgggcaatagcatctcctgtctgtgggtgccccatctcatcctcagtcagcactctaaagatctgggagaagtgccgaatgaaatcctgcttttcttgggcataaatatc

SEQ ID NO: 28676 - DNA, 110 bp, Homo sapiens
  MAP TO AL121935.12; EXPRESSED IN PLACENTA, SIGNAL = 0.75; EXPRESSED IN ADULT LIVER, SIGNAL = 0.89; EXPRESSED IN FETAL LIVER, SIGNAL = 0.81; EXPRESSED IN BONE MARROW, SIGNAL = 0.7; EXPRESSED IN BRAIN, SIGNAL = 0.68; EST_HUMAN HIT: BF573724.1, EVALUE 2.30e-02; NT HIT: U29397.1, EVALUE 1.00e-03; SWISSPROT HIT: P51592, EVALUE 1.80e+00
ctgcttcctcctcctccctcttctccctctgtagacagagatgcctcttgcctggaagggctgccttggcatctaggagcaaagggaaactctctggggctgatttccat

SEQ ID NO: 28677 - DNA, 179 bp, Homo sapiens
  MAP TO AC009943.4; EXPRESSED IN PLACENTA, SIGNAL = 0.46; EXPRESSED IN ADULT LIVER, SIGNAL = 0.53; EXPRESSED IN BRAIN, SIGNAL = 0.48; EXPRESSED IN BONE MARROW, SIGNAL = 0.62; EXPRESSED IN FETAL LIVER, SIGNAL = 0.48; SWISSPROT HIT: P75080, EVALUE 2.30e+00; EST_HUMAN HIT: BE178563.1, EVALUE 6.00e-66; NT HIT: AF017062.1, EVALUE 1.10e-01
ctacagctgagctttgaaaataaggaacgaaaaacacaaacctgattcatttagaaagtgaactgcgtgaggaagctcattttcatctaactgcagctgattttctctcactagttgtaataatcgtttccggtcaattacgggaaattcaattggcacatttttacgctccgataaaa

SEQ ID NO: 28678 - DNA, 513 bp, Homo sapiens
  MAP TO AC016549.4; EXPRESSED IN PLACENTA, SIGNAL = 0.61; EXPRESSED IN FETAL LIVER, SIGNAL = 0.61; EXPRESSED IN BONE MARROW, SIGNAL = 0.55; EXPRESSED IN ADULT LIVER, SIGNAL = 0.65; EXPRESSED IN BRAIN, SIGNAL = 0.72; NT HIT: AF091395.1, EVALUE 0.00e+00; SWISSPROT HIT: O75962, EVALUE 6.00e-96; EST_HUMAN HIT: AW245765.1, EVALUE 0.00e+00
acaaatatggtctctttagaaggccttaccaaagtagttgatccttctcagctaactcctgagtttgatggctgcctggaatacaaccacgaagaatggattgaaatcagagttgcttttgaagactacattagcaatgccacccacatgctgtctcggctggaggaacttcaggacatcctagctaagaaggagctgcctcaggatttagagggggctcggaatatgatcgaggaacattctcagctgaagaagaaggtgattaaggcccccatcgaggacctggatttggagggacagaagctgcttcagaggatacagagcagtgaaagctttcccaaaaagaactcaggctcaggcaatgcggacctgcagaacctcttgcccaaggtgtccaccatgctggaccggctgcactcgacacggcagcatctgcaccagatgtggcatgtgaggaagctgaagctggaccagtgcttccagctgaggctgtttgaacaggatgctgagaag

SEQ ID NO: 28679 - DNA, 86 bp, Homo sapiens
  MAP TO AC016202.4; EXPRESSED IN BONE MARROW, SIGNAL = 0.45; EXPRESSED IN PLACENTA, SIGNAL = 0.73; EXPRESSED IN BRAIN, SIGNAL = 0.47; NT HIT: Z69849.1, EVALUE 7.00e-01; EST_HUMAN HIT: AW082688.1, EVALUE 6.70e-02
gctctgtaatgctaagtacgatcaagatcaccattggtgctaacacctctaacaaactgtccttgactatcaacagcaatcactga

SEQ ID NO: 28680 - DNA, 175 bp, Homo sapiens
  MAP TO AC008688.4; EXPRESSED IN ADULT LIVER, SIGNAL = 0.66; EXPRESSED IN BONE MARROW, SIGNAL = 0.59; EXPRESSED IN BRAIN, SIGNAL = 1.3; EXPRESSED IN PLACENTA, SIGNAL = 0.59; EXPRESSED IN FETAL LIVER, SIGNAL = 0.54; NT HIT: AF169689.1, EVALUE 6.00e-37; EST_HUMAN HIT: R55115.1, EVALUE 6.00e-32
tggtcactgttgtcagtcgtgctgttccctttctcttttttctcctgggtcttgttacccttcttctttttcttctttttcttggtctcctcctttttgccgaaggttatgaagtcacttttgtcaatttggctgttagtaggctcctgccggatggagatgattgcaggagatc

SEQ ID NO: 28681 - DNA, 435 bp, Homo sapiens
  MAP TO AL121944.10; EXPRESSED IN FETAL LIVER, SIGNAL = 0.6; EXPRESSED IN BONE MARROW, SIGNAL = 0.52; EXPRESSED IN ADULT LIVER, SIGNAL = 0.54; EXPRESSED IN BRAIN, SIGNAL = 0.59; EXPRESSED IN PLACENTA, SIGNAL = 0.61; SWISSPROT HIT: P49910, EVALUE 3.00e-77; EST_HUMAN HIT: BF674298.1, EVALUE 6.00e-28; NT HIT: U88084.1, EVALUE 0.00e+00
ttagatctcccatcccctgtgcacctggagtactgcttcatcagtgcctctctccaaatcttctagtatggtcactgcctcctctccactctctgggtaatgttcatgtacccaggcctgcaaatctcctggcaggatggtcaggaactgctctagcaccagcagttccagaatctgttccttggtatggatctctggcttcagccactgacagcagagctcccggaggcggctcagtgcctcgcgaggtccaggagaatcctggtagcagaactgcctaaaaagctgcctgcagagctcctgcttaaggagttcacttctctgtaagcaagtgtcctgcccatggataaattcttcctcttctatcttcactatcagaagtccttcatcctctggagagttctgggctgcagctttctttggttctgtagccat

SEQ ID NO: 28682 - DNA, 115 bp, Homo sapiens
  MAP TO AC025221.2; EXPRESSED IN FETAL LIVER, SIGNAL = 0.86; EXPRESSED IN BRAIN, SIGNAL = 0.69; EXPRESSED IN PLACENTA, SIGNAL = 0.57; EXPRESSED IN ADULT LIVER, SIGNAL = 0.87; EXPRESSED IN BONE MARROW, SIGNAL = 0.53; NT HIT: M15205.1, EVALUE 2.50e-01; SWISSPROT HIT: P31752, EVALUE 5.40e+00; EST_HUMAN HIT: H78376.1, EVALUE 2.40e-02
atatcatattcattttactatgaggaaacaggttcagagacccccagatcacaaagttaggggtggagtttatcttcaaatcctgggtcatctgattccacagcaccacattgcc

SEQ ID NO: 28683 - DNA, 218 bp, Homo sapiens
  MAP TO AC021774.3; EXPRESSED IN BRAIN, SIGNAL = 1.4; EXPRESSED IN LUNG, SIGNAL = 0.99; EXPRESSED IN PLACENTA, SIGNAL = 1.1; EXPRESSED IN ADULT LIVER, SIGNAL = 1.2; EXPRESSED IN FETAL LIVER, SIGNAL = 1.2; EXPRESSED IN BONE MARROW, SIGNAL = 1.1; SWISSPROT HIT: P79944, EVALUE 3.60e+00; EST_HUMAN HIT: AI148288.1, EVALUE 1.00e-18; NT HIT: AJ271735.1, EVALUE 1.00e-17
attctgggggtacatgtgcaggtttgttacatgggtatactgcatgatgctgaggtttggggtatgatttatctggccatccaggtagtgaacacagtacctacacaatggttagtttttcaacccttgctctcctccctccctcccctcctagtaatccccagtgtctattgttgccatcttcatgtccgtgagtacctagtgtttagctcctacgt

SEQ ID NO: 28684 - DNA, 255 bp, Homo sapiens
  MAP TO AL096863.10; EXPRESSED IN PLACENTA, SIGNAL = 0.62; EXPRESSED IN BONE MARROW, SIGNAL = 0.68; EXPRESSED IN FETAL LIVER, SIGNAL = 0.65; EXPRESSED IN ADULT LIVER, SIGNAL = 0.56; EXPRESSED IN BRAIN, SIGNAL = 0.62; EST_HUMAN HIT: AA150482.1, EVALUE 6.00e-05; SWISSPROT HIT: P20343, EVALUE 6.80e+00; NT HIT: AF205407.1, EVALUE 2.00e-04
ttaacaagctggatcttggcagtgtatgtgagcttcagggccagggaaggggcactgtggagaggcatggacttcatagccccaggtgatgaatgcatcttcattccctcccctgtgtgctaccccaccaccaccaccaacaacaacaaagcccacagaattacagaggaatacatgttgatatctcatagcagatttggcccatctgttatctccaagaagggcattctgagaggacaaaacttgctcagtact

SEQ ID NO: 28685 - DNA, 231 bp, Homo sapiens
  MAP TO AC012662.5; EXPRESSED IN PLACENTA, SIGNAL = 0.55; EXPRESSED IN ADULT LIVER, SIGNAL = 0.62; EXPRESSED IN BRAIN, SIGNAL = 0.59; EXPRESSED IN BONE MARROW, SIGNAL = 0.58; NT HIT: gi4557025, EVALUE 2.20e+00; SWISSPROT HIT: P26663, EVALUE 2.40e+00; EST_HUMAN HIT: BE263145.1, EVALUE 8.20e-01
cttatttggtaggtcacccacagatttccacaaggtaatacttacactatgtgctccttgaatggtgcggactaaattgagccctttccagacatagatgtcaccatttaaagcaccagagtaggtgatgtcttctttggcacatgcaaggcaaaggatggtctgaagatcccctgttttgccaaatatccctctttttgcagtcagggcatttccacacagtgtccaaaa

SEQ ID NO: 28686 - DNA, 160 bp, Homo sapiens
  MAP TO AC013291.4; EXPRESSED IN ADULT LIVER, SIGNAL = 0.61; EXPRESSED IN BRAIN, SIGNAL =   1; EXPRESSED IN BONE MARROW, SIGNAL = 0.66; EXPRESSED IN FETAL LIVER, SIGNAL = 0.66; EST_HUMAN HIT: AI791766.1, EVALUE 5.50e-01; SWISSPROT HIT: O31616, EVALUE 2.30e+00
ctgtgtggtgaccatgactatcttcaaaatctgcaaacccagtttccacggaatctggcgtctggctcggtatttttcacaagggctcatgaagtaaaacttcaggtcttcccttagacattcttctttcatctcagaatcacgatgtgccattgcattt

SEQ ID NO: 28687 - DNA, 208 bp, Homo sapiens
  MAP TO AL121673.27; EXPRESSED IN LUNG, SIGNAL = 0.98; EXPRESSED IN PLACENTA, SIGNAL = 1.1; EXPRESSED IN BONE MARROW, SIGNAL = 0.99; EXPRESSED IN ADULT LIVER, SIGNAL = 1.1; EXPRESSED IN FETAL LIVER, SIGNAL = 0.92; EXPRESSED IN BRAIN, SIGNAL = 0.99; SWISSPROT HIT: P48526, EVALUE 6.50e+00; EST_HUMAN HIT: BE882109.1, EVALUE 1.90e-01; NT HIT: J03956.1, EVALUE 1.20e-01
atgggcacggtttccagtccagtccaggccagctgtggtggggctcagacccgtccagacactgggagccagtcacccccagaataacgagctgggcctcgagttccaagtcatctttgagcagccgtgtgtcagcaccgctgtccctgaccaccccgtgccggtctgcctccgtctcctccttctcgctgtaccccaggtcgggagc

SEQ ID NO: 28688 - DNA, 97 bp, Homo sapiens
  MAP TO AL161940.3; EXPRESSED IN ADULT LIVER, SIGNAL = 0.69; EXPRESSED IN BONE MARROW, SIGNAL = 0.49; EXPRESSED IN BRAIN, SIGNAL = 0.53; EXPRESSED IN PLACENTA, SIGNAL = 0.58; NT HIT: Z18859.1, EVALUE 8.00e-04; EST_HUMAN HIT: AW856972.1, EVALUE 5.00e-06; SWISSPROT HIT: P23917, EVALUE 2.80e-01
ggtcatttggaaatggctggagacagttttgattgccgcaagtgcagggcagctgctgccggcatctggcgaatgaaagccagggacgcaggttcat

SEQ ID NO: 28689 - DNA, 155 bp, Homo sapiens
  MAP TO AC016575.4; EXPRESSED IN ADULT LIVER, SIGNAL = 0.79; EXPRESSED IN BRAIN, SIGNAL = 0.63; EXPRESSED IN PLACENTA, SIGNAL = 0.77; EXPRESSED IN FETAL LIVER, SIGNAL = 0.61; EXPRESSED IN BONE MARROW, SIGNAL = 0.58; NT HIT: AF051561.1, EVALUE 3.50e-01; SWISSPROT HIT: P08199, EVALUE 2.30e+00; EST_HUMAN HIT: AI906755.1, EVALUE 8.20e+00
atggctttatctgacaacaacagtaagaagtcattgaagcaggggtgtgatatgaaaaatattacattttcaaaatactactctggcaactctggggaaaataagagtcagagtggcttcagagagaccagccagaggctcttgcagcacttcag

SEQ ID NO: 28690 - DNA, 89 bp, Homo sapiens
  MAP TO AC013497.4; EXPRESSED IN BONE MARROW, SIGNAL = 0.79; EXPRESSED IN FETAL LIVER, SIGNAL = 0.91; EXPRESSED IN PLACENTA, SIGNAL = 0.46; EXPRESSED IN ADULT LIVER, SIGNAL = 0.87; EXPRESSED IN BRAIN, SIGNAL = 0.91; NT HIT: AF226688.1, EVALUE 1.80e-01; EST_HUMAN HIT: AW905327.1, EVALUE 1.80e-02
ttcgctgctgtatctccaaagcctaaaacagtgtccagcacagagtagtcagtgagaaattctttattgaagaaatcaacaaagttacc

SEQ ID NO: 28691 - DNA, 294 bp, Homo sapiens
  MAP TO AL161644.1; EXPRESSED IN BONE MARROW, SIGNAL = 0.46; EXPRESSED IN ADULT LIVER, SIGNAL = 0.55; EXPRESSED IN BRAIN, SIGNAL = 0.44; SWISSPROT HIT: P48634, EVALUE 1.80e+00; EST_HUMAN HIT: AA477629.1, EVALUE 4.20e+00; NT HIT: AF289664.1, EVALUE 2.80e+00
gggttccctctttggccagctcctgcctgcctgcctgcagcaccacgtggctggaggtgatgacggtgaagctgtacaagggtcggttaccaaccaggtatccctctgccactggcaccgctctgcaggggcagggacagctgggcagagagcaggagcctccagtgcagccgtggggctggccacattcacaggggccactgtctcagctttgcactccgccaggtccacagtgagaagggaccgagcagctgtctggggctgcagcctggaggcggtggctgctgctccctc

SEQ ID NO: 28692 - DNA, 155 bp, Homo sapiens
  MAP TO AL121888.20; EXPRESSED IN LUNG, SIGNAL = 1.1; EXPRESSED IN PLACENTA, SIGNAL = 1.1; EXPRESSED IN ADULT LIVER, SIGNAL = 0.97; EXPRESSED IN BRAIN, SIGNAL = 0.94; EXPRESSED IN BONE MARROW, SIGNAL = 0.87; EXPRESSED IN FETAL LIVER, SIGNAL = 0.74; NT HIT: AJ298105.1, EVALUE 2.30e-02; SWISSPROT HIT: Q49736, EVALUE 1.40e+00; EST_HUMAN HIT: AL036069.1, EVALUE 1.30e-01
atgaggatgaagccaagcacagagagatcaagtaacttgtccaagtatccaaatccagacattgtagtgatgatgactccaacctcaggagtctggagcctgagctcccacatggaaccactaggctgtactgcctgggtggggtttcagaaatg

SEQ ID NO: 28693 - DNA, 119 bp, Homo sapiens
  MAP TO AC010829.5; EXPRESSED IN PLACENTA, SIGNAL = 0.77; EXPRESSED IN ADULT LIVER, SIGNAL = 0.99; EXPRESSED IN FETAL LIVER, SIGNAL = 0.72; EXPRESSED IN BRAIN, SIGNAL = 0.84; EXPRESSED IN BONE MARROW, SIGNAL = 0.67; EST_HUMAN HIT: AA487299.1, EVALUE 3.90e-01; NT HIT: AF006055.1, EVALUE 6.60e-02
cgtattttgaaatcttgtggagttgatacgttcctttttctgcaaatttctcttcaacatccagagagcatgccttttggcaggctcaactctgcccagtttcacatggaaacaggctc

SEQ ID NO: 28694 - DNA, 100 bp, Homo sapiens
  MAP TO AC011686.3; EXPRESSED IN ADULT LIVER, SIGNAL = 0.56; EXPRESSED IN BRAIN, SIGNAL = 0.45; EXPRESSED IN BONE MARROW, SIGNAL = 0.69; EXPRESSED IN LUNG, SIGNAL = 0.92; EXPRESSED IN FETAL LIVER, SIGNAL = 0.81; SWISSPROT HIT: Q9Z1D8, EVALUE 9.50e+00; NT HIT: M88503.1, EVALUE 3.30e+00; EST_HUMAN HIT: AA019103.1, EVALUE 2.00e-30
cttggctttgttgcctggaactgctctgactctgctcttcgctctttcctgggctgtgtcactacagctctgactcctttccaccttggagtttagcttc

SEQ ID NO: 28695 - DNA, 145 bp, Homo sapiens
  MAP TO AC019141.3; EXPRESSED IN LUNG, SIGNAL = 0.86; EXPRESSED IN ADULT LIVER, SIGNAL = 0.66; EXPRESSED IN BRAIN, SIGNAL = 0.85; EXPRESSED IN BONE MARROW, SIGNAL = 0.83; EXPRESSED IN PLACENTA, SIGNAL = 1.1; EXPRESSED IN FETAL LIVER, SIGNAL = 0.85; SWISSPROT HIT: P51784, EVALUE 1.00e+00; NT HIT: X87344.1, EVALUE 1.30e+00
gtacacaaataactgctacatgaatgaaagtaattatacaatgagaattgtgactttttttctgaacaggtacacaaataactgctacatgaatgaaagtaattatactatgaaaattagacaattctcaattgaactctcaaag

SEQ ID NO: 28696 - DNA, 163 bp, Homo sapiens
  MAP TO AC022853.4; EXPRESSED IN PLACENTA, SIGNAL = 1.2; EXPRESSED IN ADULT LIVER, SIGNAL = 0.64; EXPRESSED IN FETAL LIVER, SIGNAL = 1.5; EXPRESSED IN BRAIN, SIGNAL = 1.6; EXPRESSED IN BONE MARROW, SIGNAL = 1.3; EXPRESSED IN LUNG, SIGNAL = 0.84; SWISSPROT HIT: P36041, EVALUE 2.30e+00; NT HIT: AJ229043.1, EVALUE 3.00e-23; EST_HUMAN HIT: AW962076.1, EVALUE 3.00e-24
gaagacagttgctcctgtcacaagtaaaatctccctgatgccttcccagaacctgatgccgccatgcttcctgtacagcctgcaaaccctgaaccaattaaacctcttttctttatcaattacccagtgtcaaatatttctttatagcaatgtgataatggac

SEQ ID NO: 28697 - DNA, 471 bp, Homo sapiens
  MAP TO AC008103.27; EXPRESSED IN PLACENTA, SIGNAL = 1.5; EXPRESSED IN ADULT LIVER, SIGNAL = 0.66; EXPRESSED IN FETAL LIVER, SIGNAL = 1.5; EXPRESSED IN BRAIN, SIGNAL = 0.98; EXPRESSED IN BONE MARROW, SIGNAL =   1; NT HIT: AF225925.1, EVALUE 1.20e+00; EST_HUMAN HIT: AI904151.1, EVALUE 1.00e-116; SWISSPROT HIT: Q04503, EVALUE 7.00e-04
gtcttacattggcagcatcttcttttttacagatgtcttgtacagtgtcctcattagcaatgtcatatacagcgtccttattagcgaattcgtatacagcatcctcattagcgatgccatatacagcgtcctcattagcgatgttgtatacagcgtcctcattaatgatgtcgtatagagcgtcctcattagcgatgtcatatacaatgtcctcattagcgatgtcatatacagcaacctcattagctatgtcttgtaaagcatcctcattagcgatgtcatatacaacgtcctcattagcgatgtcgtatacagcgtcctcgttagcgatgtcttgtacggtgtccttataagcaatgtcgtctacagcgtcctcgttagcatgccttgtggatgccattagcgatgtcatatacagcatcctcattggtgatgtcttatatggtgtcctcattagcgatgttgtgtaca

SEQ ID NO: 28698 - DNA, 240 bp, Homo sapiens
  MAP TO AL138702.3; EXPRESSED IN BONE MARROW, SIGNAL = 0.6; EXPRESSED IN PLACENTA, SIGNAL = 0.56; EXPRESSED IN ADULT LIVER, SIGNAL = 0.7; EXPRESSED IN BRAIN, SIGNAL = 0.56; EXPRESSED IN FETAL LIVER, SIGNAL = 0.55; NT HIT: AJ277047.1, EVALUE 9.00e+00; SWISSPROT HIT: P24557, EVALUE 3.50e+00
gtgaggtgagaccacatggagaattctgaccagtgaaatgtgcgtataaatgccttgtgtttcctccctgatgaggggtaacacatcattgagagctgcggggtcatcttcctctctctcttcctgaaacagcaaccctggagatatggacttttcttctaacccactgacattttgtgatctatctgctagtgcagcaaaacataggttatccttcctggagccatactctgtgtccag

SEQ ID NO: 28699 - DNA, 75 bp, Homo sapiens
  MAP TO AC015638.4; EXPRESSED IN BRAIN, SIGNAL = 0.48; EXPRESSED IN BONE MARROW, SIGNAL = 0.44; EXPRESSED IN PLACENTA, SIGNAL = 0.45; EXPRESSED IN FETAL LIVER, SIGNAL = 0.5; EST_HUMAN HIT: BF195585.1, EVALUE 1.00e-15; NT HIT: AF078779.1, EVALUE 3.00e-30
atcctcctgagtttgtttgttgctgttattttggacaacttagaacttgatgaagacctaaagaagcttaaacaa

SEQ ID NO: 28700 - DNA, 196 bp, Homo sapiens
  MAP TO AL117383.18; EXPRESSED IN LUNG, SIGNAL = 0.96; EXPRESSED IN PLACENTA, SIGNAL = 0.88; EXPRESSED IN FETAL LIVER, SIGNAL = 1.1; EXPRESSED IN BRAIN, SIGNAL = 0.82; EXPRESSED IN BONE MARROW, SIGNAL = 1.9; EXPRESSED IN ADULT LIVER, SIGNAL =   1; SWISSPROT HIT: P09593, EVALUE 5.00e-07
atgaggtggaccagggagcacaggaccattgagatgagacggggcagggagcacgggatcatggagacaagacggaccaaggagcacgggaccacggagacgagatggaccagggagcacagggccattgagatgagacagagcagggagcacaaggccactgagatgaaacggagcagggagcacaagaccatgg

SEQ ID NO: 28701 - DNA, 220 bp, Homo sapiens
  MAP TO AC013657.3; EXPRESSED IN BONE MARROW, SIGNAL = 1.3; EXPRESSED IN LUNG, SIGNAL = 1.6; EXPRESSED IN PLACENTA, SIGNAL = 1.1; EXPRESSED IN ADULT LIVER, SIGNAL = 1.3; EXPRESSED IN FETAL LIVER, SIGNAL =   1; EXPRESSED IN BRAIN, SIGNAL =   1; SWISSPROT HIT: P19901, EVALUE 2.70e+00; EST_HUMAN HIT: BF108927.1, EVALUE 7.80e-01
ttttttagacaataggccaatgattgtagggtttgttctagccttgaaaccaactctctgcagagcaattcctgtttccacaaagggtgcatcaggatgcatgggacccccggatcacaggccccacgtgtgaacgaagcaacacagaccatggataacagagacctctctagggtgagttctcttgagatgcagggcacgatcaacaggacgaacaagc

SEQ ID NO: 28702 - DNA, 122 bp, Homo sapiens
  MAP TO AC009699.6; EXPRESSED IN LUNG, SIGNAL = 1.1; EXPRESSED IN PLACENTA, SIGNAL = 0.96; EXPRESSED IN FETAL LIVER, SIGNAL = 0.83; EXPRESSED IN ADULT LIVER, SIGNAL = 1.3; EXPRESSED IN BRAIN, SIGNAL = 0.96; EXPRESSED IN BONE MARROW, SIGNAL = 0.94; NT HIT: D50438.1, EVALUE 2.70e-01; EST_HUMAN HIT: AW189797.1, EVALUE 1.00e-01
atgcacaggatacagaaactcttcaacggtctagtcatttcacactacgtcgaagcaaaccacaaaagcaggcccaggaaattagatttctccagggatggacccagacgactcagcctgaa

SEQ ID NO: 28703 - DNA, 108 bp, Homo sapiens
  MAP TO AC018993.3; EXPRESSED IN BRAIN, SIGNAL = 0.47; EXPRESSED IN PLACENTA, SIGNAL = 0.62; EXPRESSED IN FETAL LIVER, SIGNAL = 0.6; EXPRESSED IN BONE MARROW, SIGNAL = 0.54; NT HIT: U57999.1, EVALUE 2.30e-01; EST_HUMAN HIT: BE389948.1, EVALUE 1.40e+00; SWISSPROT HIT: O27494, EVALUE 9.40e+00
tcagtgtttggtaataccagtgtcagagctctgaaatgagtgtggatattccagaagggcaggatttggcagcagatgcgtgatgatgataatgatgatgatagccat

SEQ ID NO: 28704 - DNA, 175 bp, Homo sapiens
  MAP TO AC012571.3; EXPRESSED IN PLACENTA, SIGNAL = 0.68; EXPRESSED IN ADULT LIVER, SIGNAL = 0.79; EXPRESSED IN FETAL LIVER, SIGNAL = 0.53; EXPRESSED IN BRAIN, SIGNAL = 0.56; EXPRESSED IN BONE MARROW, SIGNAL = 0.56; SWISSPROT HIT: O15393, EVALUE 4.00e-06; NT HIT: U87278.1, EVALUE 1.60e+00; EST_HUMAN HIT: AI990128.1, EVALUE 2.40e+00
atttaagtgctccccatccagtgacaaacactttactcttaggcaaggcttcaaaagtagcttctggaagacagactctgtgcacctcattggaaaatatgatgggggtgaagagcttcactacagcgatatcatcctcgtgtttatgggcagcatagttctcatgaataataat

SEQ ID NO: 28705 - DNA, 102 bp, Homo sapiens
  MAP TO AC015785.3; EXPRESSED IN PLACENTA, SIGNAL = 0.69; EXPRESSED IN ADULT LIVER, SIGNAL = 1.4; EXPRESSED IN BRAIN, SIGNAL = 1.2; EXPRESSED IN LUNG, SIGNAL = 1.1; EXPRESSED IN BONE MARROW, SIGNAL = 1.1; EXPRESSED IN FETAL LIVER, SIGNAL = 1.2; NT HIT: AF252549.1, EVALUE 8.60e-01; EST_HUMAN HIT: BF246771.1, EVALUE 3.20e-01
gctctgatgtggcacttggctctagacaagtggagaaggttctggctggtgatacaactcgaaaatctgagttgatagcgacaggggttaagtctccgcatt

SEQ ID NO: 28706 - DNA, 101 bp, Homo sapiens
  MAP TO AC012662.5; EXPRESSED IN PLACENTA, SIGNAL = 0.68; EXPRESSED IN ADULT LIVER, SIGNAL = 1.4; EXPRESSED IN FETAL LIVER, SIGNAL = 0.51; EXPRESSED IN BRAIN, SIGNAL = 0.67; EXPRESSED IN BONE MARROW, SIGNAL = 0.57; NT HIT: AJ243213.1, EVALUE 8.50e-01; SWISSPROT HIT: P33295, EVALUE 2.40e+00
ctgcttgttgccagaatttgatgtgttttatcccaactgtaaccagtttgtcaacatggtgtgggttacactttaccacaaatatcttatctttatgtcct

SEQ ID NO: 28707 - DNA, 123 bp, Homo sapiens
  MAP TO AL139258.2; EXPRESSED IN BONE MARROW, SIGNAL = 0.71; EXPRESSED IN PLACENTA, SIGNAL = 0.73; EXPRESSED IN ADULT LIVER, SIGNAL = 0.87; EXPRESSED IN LUNG, SIGNAL = 0.89; EXPRESSED IN FETAL LIVER, SIGNAL = 0.77; EXPRESSED IN BRAIN, SIGNAL = 0.71; EST_HUMAN HIT: AA860946.1, EVALUE 2.60e-02; SWISSPROT HIT: Q61066, EVALUE 1.40e+00
atgaggccttggaagcacaagaaagggaaaaccaacagctgggctcaggagaacccccgcagcctggccagccctgaggccttctctgccaataataaatctaggggtgccgcagtccacaaa

SEQ ID NO: 28708 - DNA, 362 bp, Homo sapiens
  MAP TO AL121917.12; EXPRESSED IN PLACENTA, SIGNAL = 0.7; EXPRESSED IN ADULT LIVER, SIGNAL = 0.73; EXPRESSED IN FETAL LIVER, SIGNAL = 0.7; EXPRESSED IN BONE MARROW, SIGNAL =   1; EXPRESSED IN BRAIN, SIGNAL = 0.66; SWISSPROT HIT: P93329, EVALUE 2.20e-01; NT HIT: AJ251760.1, EVALUE 0.00e+00
gcctggtctggcaccactgaaggctccgggctccatgagtgctgggccgaaggcctcaaggcctgcatggaccccactggggaatccaggctgctccagtgtaggccagaagcctcccaagctgggctgttcagcctcgaagggcattgcttcctcaggaggtgggctgtagcttccatgggctccagcttccctgaatgccgggttgaggacctgaaagttgggtctggagacctctgggggtccacaggcctcgccatcattctcgacggggatgggctcgttgtgaggcggttcggtctccatctcttcggctgggctaggcccagcaccgggggcagctgcccctggggcctccaaag

SEQ ID NO: 28709 - DNA, 160 bp, Homo sapiens
  MAP TO AC019194.2; EXPRESSED IN PLACENTA, SIGNAL = 0.48; EXPRESSED IN ADULT LIVER, SIGNAL =   1; EXPRESSED IN FETAL LIVER, SIGNAL = 0.78; EXPRESSED IN BRAIN, SIGNAL = 0.74; EXPRESSED IN BONE MARROW, SIGNAL = 1.1; EST_HUMAN HIT: BE379967.1, EVALUE 4.00e-85; SWISSPROT HIT: P27680, EVALUE 3.10e-02; NT HIT: gi11525829, EVALUE 3.00e-85
aatacggggttccagtatgatgtcatcagctgcctgaacttgctggaccgctgtgatcagcccctgactttgttaaaagatatcagaagtgtcttggagccaactagaggcagggtcatccttgcccttgtcctcccctttcatccctatgtggaaaacg

SEQ ID NO: 28710 - DNA, 167 bp, Homo sapiens
  MAP TO AC021498.4; EXPRESSED IN PLACENTA, SIGNAL = 0.54; EXPRESSED IN FETAL LIVER, SIGNAL = 0.48; EXPRESSED IN BRAIN, SIGNAL = 0.5; EXPRESSED IN BONE MARROW, SIGNAL = 0.44; NT HIT: AF031826.1, EVALUE 1.50e+00; EST_HUMAN HIT: AA424181.1, EVALUE 2.30e+00; SWISSPROT HIT: Q9Y5T5, EVALUE 1.00e+00
gatatgctgatgagtcaacatcagagaggagatacaactgtttcctggatctcctagaaggcttgcaaagcaagcagttagaactgagggttaaaatggaacctgcagattatctgagggtttcaattatctttgttaccctcattctatcttgcatagagaattga

SEQ ID NO: 28711 - DNA, 128 bp, Homo sapiens
  MAP TO AL133293.14; EXPRESSED IN PLACENTA, SIGNAL = 0.76; EXPRESSED IN ADULT LIVER, SIGNAL = 1.3; EXPRESSED IN FETAL LIVER, SIGNAL = 0.75; EXPRESSED IN BRAIN, SIGNAL = 0.8; EXPRESSED IN BONE MARROW, SIGNAL = 0.75; NT HIT: gi6678943, EVALUE 1.80e-02; EST_HUMAN HIT: BF064192.1, EVALUE 1.10e-01; SWISSPROT HIT: P70483, EVALUE 4.10e+00
acccaccggggctgcagccaggagcccggactcatctttgactcttccagtggcctgccgcccaccacccatctgtcccattttctgccgactgtcctccggggccctttcctgggccaccaccttcg

SEQ ID NO: 28712 - DNA, 84 bp, Homo sapiens
  MAP TO AL121920.7; EXPRESSED IN PLACENTA, SIGNAL = 0.69; EXPRESSED IN FETAL LIVER, SIGNAL = 0.74; EXPRESSED IN ADULT LIVER, SIGNAL = 0.9; EXPRESSED IN BRAIN, SIGNAL = 0.73; EXPRESSED IN BONE MARROW, SIGNAL = 0.9; NT HIT: AF293359.1, EVALUE 4.30e-02
atggagggccagaaagacctgggaagtattttgaaggcggagctgacagaacttgctgatgagttggatgggctcaggagcagg

SEQ ID NO: 28713 - DNA, 92 bp, Homo sapiens
  MAP TO AC013634.3; EXPRESSED IN PLACENTA, SIGNAL = 0.6; EXPRESSED IN ADULT LIVER, SIGNAL = 0.63; EXPRESSED IN FETAL LIVER, SIGNAL = 0.47; EXPRESSED IN BRAIN, SIGNAL = 0.51; EXPRESSED IN BONE MARROW, SIGNAL = 0.49; SWISSPROT HIT: P18200, EVALUE 5.50e+00; EST_HUMAN HIT: AA911629.1, EVALUE 2.80e-01
aaaaaaccatctcaaaggccatctcttccaggaggaggctatgccagagtcctccttcatggtgctacctccatcatcgcaccaaccatctg

SEQ ID NO: 28714 - DNA, 543 bp, Homo sapiens
  MAP TO AC015493.4; EXPRESSED IN PLACENTA, SIGNAL = 0.66; EXPRESSED IN ADULT LIVER, SIGNAL = 0.71; EXPRESSED IN FETAL LIVER, SIGNAL = 0.64; EXPRESSED IN BRAIN, SIGNAL = 0.9; EXPRESSED IN BONE MARROW, SIGNAL = 0.71; SWISSPROT HIT: P53327, EVALUE 2.70e+00; NT HIT: AE004787.1, EVALUE 8.70e-02
cttggcagctcttgggtacaccagagtctggtagataacaattgggcctggggtcttcacagagccatcgttgaatgagtaccagttgtggaagctgctgctgttctgtacagactggctgtctgctccagcactccagtaggtgtagaggccgtctgtgggtttggcgggggtggctgactgggctctcccacaggcctccagacccaccttggccttcttgtcagtgttgctgaaggacaacatggaggagcttcgctggtatatgtgctggttgccgaggctgtgggtgctgaaagtgaccttcctggcaatcattgtttctgagtgcacggggtagggggagggcagggagtcccctgaggagcgtaccttcttgggccctgtggggaagagctcatggatggcactggaaagctcaacaaagtccaagggcacgtagtttattgagtgcagccggagctgtgggtcaggcctgtaggtggtctggatgccgtcctcgatctggtccaccaggatcttggctgactgcaggaatgccac

SEQ ID NO: 28715 - DNA, 162 bp, Homo sapiens
  MAP TO AP000475.3; EXPRESSED IN BRAIN, SIGNAL = 0.47; EXPRESSED IN BONE MARROW, SIGNAL = 0.53; EXPRESSED IN FETAL LIVER, SIGNAL = 0.54; NT HIT: AL163227.2, EVALUE 2.00e-86; SWISSPROT HIT: P28191, EVALUE 5.20e+00
ctgaagcaaagaagtgaagttttcaacatttatatgatttttaaggctatggaaatgggtaggattaccaaaaaagtcattataagtacagcaaagataactcaaggctcagctctggacatgaaaactttagaagaagaatcagcaaaagtgcctgaaagg

SEQ ID NO: 28716 - DNA, 145 bp, Homo sapiens
  MAP TO AC025812.4; EXPRESSED IN LUNG, SIGNAL = 0.87; EXPRESSED IN PLACENTA, SIGNAL = 0.66; EXPRESSED IN FETAL LIVER, SIGNAL = 0.66; EXPRESSED IN ADULT LIVER, SIGNAL = 0.92; EXPRESSED IN BRAIN, SIGNAL = 0.6; EXPRESSED IN BONE MARROW, SIGNAL = 0.66; NT HIT: gi9790238, EVALUE 2.10e-02; SWISSPROT HIT: P78586, EVALUE 5.30e+00
atggaatctgtccatcataacagtagccatcctgagtatccagatgtcagggagtttctgccaggaagggaagacagctgtttggaatgggaagggagtagaggatactgcaaaacatgtcaagagttttatcaggggagtgaga

SEQ ID NO: 28717 - DNA, 226 bp, Homo sapiens
  MAP TO AC022015.2; EXPRESSED IN PLACENTA, SIGNAL =   1; EXPRESSED IN FETAL LIVER, SIGNAL = 0.62; EXPRESSED IN BRAIN, SIGNAL = 0.62; EXPRESSED IN BONE MARROW, SIGNAL = 0.66; NT HIT: AF198490.1, EVALUE 1.40e-01; SWISSPROT HIT: P48998, EVALUE 3.30e-02; EST_HUMAN HIT: T64942.1, EVALUE 4.00e-09
gccccaccagaatatgagtttcaggaggacactggatttcccgaatatgggtttcctgaatatgagtttcaggaagacactgggtttcaggaatatgggtttcaggaggacactgggtttcaggaatatgagtttcaggaggacactgggtttcaggaatatgagtttcctgtccacactgtatccccagcaccctacacagggcctagtgcaaacagcatccctg

SEQ ID NO: 28718 - DNA, 136 bp, Homo sapiens
  MAP TO AC010290.4; EXPRESSED IN PLACENTA, SIGNAL = 0.56; EXPRESSED IN FETAL LIVER, SIGNAL = 0.69; EXPRESSED IN ADULT LIVER, SIGNAL = 0.85; EXPRESSED IN BRAIN, SIGNAL = 0.61; EXPRESSED IN BONE MARROW, SIGNAL = 0.61; EST_HUMAN HIT: BE743149.1, EVALUE 7.00e-71; NT HIT: gi5453777, EVALUE 5.00e-71
cctcagtgggttgggccgcaacatcatcctcacaactatgccagcaggcactaagctcattgctggcaataagcctgttagtttcctcactgctcagcagttgcagcagcttcagcagcaaggtcaggccacacag

SEQ ID NO: 28719 - DNA, 171 bp, Homo sapiens
  MAP TO AL139248.2; EXPRESSED IN PLACENTA, SIGNAL = 0.71; EXPRESSED IN ADULT LIVER, SIGNAL = 0.9; EXPRESSED IN BONE MARROW, SIGNAL = 0.66; EXPRESSED IN FETAL LIVER, SIGNAL = 0.67; EXPRESSED IN BRAIN, SIGNAL = 0.58; EST_HUMAN HIT: BE389442.1, EVALUE 1.00e-91; NT HIT: gi11426569, EVALUE 8.00e-92; SWISSPROT HIT: Q02181, EVALUE 1.80e-02
gccctggatccaatggaactgaagggtgaaggtcttgtcctttccctggaagaacagctcagtgctttgaccttgtcagaactccgtgactcagagccatcttccactgtttcccttaacggcaccttcttcaagatggagctttttgaaggcatgcgagagagcaccaag

SEQ ID NO: 28720 - DNA, 96 bp, Homo sapiens
  MAP TO AC013597.3; EXPRESSED IN ADULT LIVER, SIGNAL = 1.4; EXPRESSED IN HELA, SIGNAL = 2.2; EXPRESSED IN FETAL LIVER, SIGNAL = 1.2; EXPRESSED IN BRAIN, SIGNAL = 0.98; EXPRESSED IN BONE MARROW, SIGNAL =   1; EXPRESSED IN LUNG, SIGNAL = 1.2; EXPRESSED IN PLACENTA, SIGNAL = 1.2; NT HIT: Y11095.1, EVALUE 8.00e-01
cttggatgtttgcttctggagcgcctgtcttgaggtaaggcatcttactttgcctagtcagaggcactggctttgtgtccagggaatgcagaagtc

SEQ ID NO: 28721 - DNA, 300 bp, Homo sapiens
  MAP TO AL139117.3; EXPRESSED IN ADULT LIVER, SIGNAL = 0.65; EXPRESSED IN BRAIN, SIGNAL = 0.68; EXPRESSED IN BONE MARROW, SIGNAL = 1.8; EXPRESSED IN LUNG, SIGNAL = 0.84; EXPRESSED IN PLACENTA, SIGNAL = 0.76; EXPRESSED IN FETAL LIVER, SIGNAL = 1.1; SWISSPROT HIT: Q14943, EVALUE 9.00e-17; NT HIT: U82979.1, EVALUE 0.00e+00; EST_HUMAN HIT: BF338407.1, EVALUE 3.00e-56
gagcctacagtaaacccaccctttcagccctgccgagtcctcttgtgacctcaggaaagagcgtgaccctgctgtgtcagtcacggagcccaatggacactttccttctgatcaaggagcgggcagcccatcccctactgcatctgagatcagagcacggagctcagcagcaccaggctgaattccccatgagtcctgtgacctcagtgcacggggggacctacaggtgcttcagctcacacggcttctcccactacctgctgtcacaccccagtgaccccctggagctcatagtctcag

SEQ ID NO: 28722 - DNA, 154 bp, Homo sapiens
  MAP TO AL157773.3; EXPRESSED IN PLACENTA, SIGNAL = 0.76; EXPRESSED IN ADULT LIVER, SIGNAL = 0.97; EXPRESSED IN FETAL LIVER, SIGNAL = 0.6; EXPRESSED IN BONE MARROW, SIGNAL = 0.75; EXPRESSED IN LUNG, SIGNAL = 1.1; EXPRESSED IN BRAIN, SIGNAL = 0.81; NT HIT: AL163208.2, EVALUE 1.00e-07; EST_HUMAN HIT: AW877214.1, EVALUE 2.00e-16; SWISSPROT HIT: P18901, EVALUE 1.60e-01
ttaggccatgaaggctctgccttcatcagtgacatttgtgccttcataaaagaggcttgaagatgcagctggaaggcaatatctatgaagaatggggccctcgccagacaccaaatctgctggcgccttgatcttggacttcccagcttccaga

SEQ ID NO: 28723 - DNA, 147 bp, Homo sapiens
  MAP TO AL136146.5; EXPRESSED IN ADULT LIVER, SIGNAL = 0.87; EXPRESSED IN BRAIN, SIGNAL = 0.82; EXPRESSED IN PLACENTA, SIGNAL = 0.86; EXPRESSED IN FETAL LIVER, SIGNAL = 0.9; EXPRESSED IN BONE MARROW, SIGNAL = 0.75; NT HIT: L34049.1, EVALUE 1.30e+00; SWISSPROT HIT: P98157, EVALUE 7.00e-08; EST_HUMAN HIT: AI362707.1, EVALUE 2.00e-77
agagccagctgctccccgggaacaacttcaccaatgagtgcaacataccaggcaacttcatgtgcagcaatggacggtgcatcccgggcgcctggcagtgtgacgggctgcctgactgcttcgacaagagtgatgagaaggagtgcc

SEQ ID NO: 28724 - DNA, 228 bp, Homo sapiens
  MAP TO AC015908.4; EXPRESSED IN FETAL LIVER, SIGNAL = 2.3; EXPRESSED IN BONE MARROW, SIGNAL = 1.4; EXPRESSED IN PLACENTA, SIGNAL = 0.7; EXPRESSED IN ADULT LIVER, SIGNAL = 1.1; EXPRESSED IN BRAIN, SIGNAL = 1.1; EXPRESSED IN LUNG, SIGNAL = 0.94; EST_HUMAN HIT: AW371924.1, EVALUE 1.00e-123; SWISSPROT HIT: P50606, EVALUE 9.00e-36; NT HIT: gi6006021, EVALUE 1.00e-97
atgatcagaaaagaggcttatgtacataaaagtatgatggaggaactgaagagtataattgatgacagtgaaattaccaaagaggatgatgcgttatggcctcctcccaaccgagtgggccggcaggagcttgaaatcattattggagatgaacacatttcttttacaacatcaaaaattggttcccttattgatgtcagtcaatccaaggatccagaaggcttatga

SEQ ID NO: 28725 - DNA, 116 bp, Homo sapiens
  MAP TO AC011023.3; EXPRESSED IN PLACENTA, SIGNAL = 3.6; EXPRESSED IN FETAL LIVER, SIGNAL = 1.4; EXPRESSED IN ADULT LIVER, SIGNAL =   1; EXPRESSED IN BRAIN, SIGNAL = 1.1; EXPRESSED IN BONE MARROW, SIGNAL = 1.1; EXPRESSED IN LUNG, SIGNAL = 0.98; NT HIT: L17318.1, EVALUE 1.00e-03; EST_HUMAN HIT: BF240712.1, EVALUE 4.00e-04
atgaatgttaactatgttggcagaaagggggaggaggaggaggaggaggaagttggtgatggtgatgatgacgatgatgctgctgatgttattgcagtagacagggtagagggaaa

SEQ ID NO: 28726 - DNA, 181 bp, Homo sapiens
  MAP TO AC013764.3; EXPRESSED IN PLACENTA, SIGNAL = 0.75; EXPRESSED IN ADULT LIVER, SIGNAL = 0.56; EXPRESSED IN FETAL LIVER, SIGNAL = 0.61; EXPRESSED IN BRAIN, SIGNAL = 0.5; EXPRESSED IN BONE MARROW, SIGNAL = 0.45; NT HIT: AF245513.1, EVALUE 1.70e+00; SWISSPROT HIT: P25443, EVALUE 3.90e+00
gaaactccctgcagatgtggagaagccctcagttactgaccccttgttaaaagaaacagccagaaaccagaaacatgaccaggaagataaacagctgttgaggtctcagctgctctccagagtggcatcatcttcggaaataagccttgcattcatcttcaccgaggaaattgggccttga

SEQ ID NO: 28727 - DNA, 153 bp, Homo sapiens
  MAP TO AC011938.3; EXPRESSED IN PLACENTA, SIGNAL = 0.74; EXPRESSED IN FETAL LIVER, SIGNAL = 0.64; EXPRESSED IN BONE MARROW, SIGNAL = 0.64; EXPRESSED IN ADULT LIVER, SIGNAL = 0.72; EXPRESSED IN BRAIN, SIGNAL = 0.55; SWISSPROT HIT: P30957, EVALUE 1.00e-15; NT HIT: gi4506758, EVALUE 5.00e-62
atgtccaaatttgatgtttgtggcattcatgtaggtatcttggaagttttgcactgcatcttaactgaaagcccagaagccttaaatctgatagcggagggccacatcaagtcgatcatctccctgttggataagcacgggcggaatcacaag

SEQ ID NO: 28728 - DNA, 103 bp, Homo sapiens
  MAP TO AL161422.3; EXPRESSED IN BRAIN, SIGNAL = 0.54; EXPRESSED IN BONE MARROW, SIGNAL = 0.49; EXPRESSED IN PLACENTA, SIGNAL = 0.61; EXPRESSED IN ADULT LIVER, SIGNAL = 0.63; EST_HUMAN HIT: BF694734.1, EVALUE 1.30e+00; NT HIT: AJ132918.1, EVALUE 2.20e-01
ggcagccccagtgtcctcatcagtgatacggatatcttagcattcaagatagctgtccctaaaggagaagacgaggagatcattcacaacctgggagagatgt

SEQ ID NO: 28729 - DNA, 78 bp, Homo sapiens
  MAP TO AC021000.3; EXPRESSED IN FETAL LIVER, SIGNAL = 0.76; EXPRESSED IN BRAIN, SIGNAL = 0.95; EXPRESSED IN PLACENTA, SIGNAL = 0.86; EXPRESSED IN BONE MARROW, SIGNAL = 0.93; EST_HUMAN HIT: D12367.1, EVALUE 3.60e+00; NT HIT: AJ277546.2, EVALUE 9.60e+00
gcagagacggtctctgcctcccaggcattccagactgttcctggccttggctcctggtctccctctgagggctgtcat

SEQ ID NO: 28730 - DNA, 206 bp, Homo sapiens
  MAP TO AL139008.3; EXPRESSED IN LUNG, SIGNAL = 0.97; EXPRESSED IN PLACENTA, SIGNAL = 0.95; EXPRESSED IN FETAL LIVER, SIGNAL = 0.82; EXPRESSED IN ADULT LIVER, SIGNAL = 0.94; EXPRESSED IN BRAIN, SIGNAL = 1.1; EXPRESSED IN BONE MARROW, SIGNAL = 0.97; SWISSPROT HIT: P54258, EVALUE 3.30e-01; NT HIT: AL163204.2, EVALUE 2.00e-09; EST_HUMAN HIT: AA114270.1, EVALUE 2.00e-69
ctgtcttttctgtcgcggacgtccaagtcccggaacctgcgcgtcaggcagtgctccacctctgcggcgtcgcccttgatggccgccctgtggatcttccgcagttcccagtcccgaatgtggtacccccgacccgcatactcttggtccatggagctcaggagcgcctggcccaggcgtctcccaaaactgaggagcttcctcat

SEQ ID NO: 28731 - DNA, 176 bp, Homo sapiens
  MAP TO AC026206.1; EXPRESSED IN ADULT LIVER, SIGNAL =   1; EXPRESSED IN BONE MARROW, SIGNAL = 0.77; EXPRESSED IN LUNG, SIGNAL =   1; EXPRESSED IN PLACENTA, SIGNAL = 0.89; EXPRESSED IN FETAL LIVER, SIGNAL = 0.82; EXPRESSED IN BRAIN, SIGNAL = 0.88; SWISSPROT HIT: P14781, EVALUE 2.00e-10; NT HIT: gi11432889, EVALUE 3.00e-82; EST_HUMAN HIT: T78768.1, EVALUE 4.00e-08
agagaactgtcattaccgtcccaccttccaaaatggatgttacagttggcgagagtatagtgctaccatgccaggtgtcccatgacccctccattgaagtggtatttgtatggtttttcaatggagatgtcatagacttaaaaaaaggagtggctcattttgaaaggattggagga

SEQ ID NO: 28732 - DNA, 130 bp, Homo sapiens
  MAP TO AC026707.2; EXPRESSED IN BONE MARROW, SIGNAL = 0.83; EXPRESSED IN LUNG, SIGNAL = 1.1; EXPRESSED IN ADULT LIVER, SIGNAL = 1.4; EXPRESSED IN BRAIN, SIGNAL = 0.82; EXPRESSED IN PLACENTA, SIGNAL = 1.1; EXPRESSED IN FETAL LIVER, SIGNAL = 0.96; NT HIT: U29581.1, EVALUE 2.90e-01; SWISSPROT HIT: P98087, EVALUE 2.70e-01; EST_HUMAN HIT: AA334609.1, EVALUE 2.00e-67
attgcattcatggcttctctggcaacccacttcagcaatcagaacagtgggattatcttcagcagtgttgagaccaacattggaaacttctttgatgtcatgactggtagatttggggccccagtatcag

SEQ ID NO: 28733 - DNA, 164 bp, Homo sapiens
  MAP TO AL050342.42; EXPRESSED IN PLACENTA, SIGNAL = 0.85; EXPRESSED IN FETAL LIVER, SIGNAL = 0.69; EXPRESSED IN BONE MARROW, SIGNAL = 0.74; EXPRESSED IN LUNG, SIGNAL = 0.83; EXPRESSED IN ADULT LIVER, SIGNAL = 0.8; EXPRESSED IN BRAIN, SIGNAL = 0.83; SWISSPROT HIT: Q52728, EVALUE 4.50e-01
gggaaggtgggagacatggctggaggaaggggcaggggcgtgggagaagggaaggtgggagacatggctggaggaaggggcaggggcgtgggagaagggaaggtgggagacatggctggaggaaggggcagggacatgggataagggaaggtggaagacatagc

SEQ ID NO: 28734 - DNA, 195 bp, Homo sapiens
  MAP TO AC009943.4; EXPRESSED IN ADULT LIVER, SIGNAL = 0.63; EXPRESSED IN PLACENTA, SIGNAL = 0.6; EXPRESSED IN FETAL LIVER, SIGNAL = 0.68; EXPRESSED IN BRAIN, SIGNAL = 0.55; EXPRESSED IN BONE MARROW, SIGNAL = 0.78; SWISSPROT HIT: P21827, EVALUE 5.00e+00; EST_HUMAN HIT: BE177830.1, EVALUE 8.00e-90
gtctttgacattttgaattcagctgaattagtctgtctgacgagacgcattttattacctaaaaacgtaattgttgaatgcatggttgctacacatcacaacagcaggaatgcaagcatttggctgggctgtgggcacaccgacagaggacagctctcatttcttgacttaaatactgaaggatacacttctgag

SEQ ID NO: 28735 - DNA, 103 bp, Homo sapiens
  MAP TO AC022863.3; EXPRESSED IN LUNG, SIGNAL = 0.99; EXPRESSED IN PLACENTA, SIGNAL =   1; EXPRESSED IN ADULT LIVER, SIGNAL = 0.95; EXPRESSED IN BRAIN, SIGNAL = 0.86; EXPRESSED IN FETAL LIVER, SIGNAL = 0.89; EXPRESSED IN BONE MARROW, SIGNAL = 0.87; SWISSPROT HIT: Q63931, EVALUE 5.50e+00; NT HIT: Z95558.1, EVALUE 3.40e+00; EST_HUMAN HIT: BE974280.1, EVALUE 1.30e+00
cctgtgaactgctcgccagacctgctggaaggggatgaaaagcctgacggcaggccccgtgaggccattgttgataaggaagggcacaacattctcaagttag

SEQ ID NO: 28736 - DNA, 149 bp, Homo sapiens
  MAP TO AL122006.5; EXPRESSED IN PLACENTA, SIGNAL = 0.71; EXPRESSED IN FETAL LIVER, SIGNAL = 0.88; EXPRESSED IN BONE MARROW, SIGNAL = 0.64; EXPRESSED IN ADULT LIVER, SIGNAL = 1.3; EXPRESSED IN BRAIN, SIGNAL = 0.72; NT HIT: L04690.1, EVALUE 3.40e-01; SWISSPROT HIT: P40589, EVALUE 4.00e+00; EST_HUMAN HIT: H73802.1, EVALUE 7.90e+00
aattgaaaggagactctgaggctttccagaacaaagaagcctgcaaaaattgcatgttggacgtatgcgaaaaccaaggcagctctttcaaactccaaaatacctacaaagagcttccccaaatatatttggagaaagaagacaggtag

SEQ ID NO: 28737 - DNA, 468 bp, Homo sapiens
  MAP TO AL161668.1; EXPRESSED IN BONE MARROW, SIGNAL = 0.96; EXPRESSED IN ADULT LIVER, SIGNAL = 1.1; EXPRESSED IN LUNG, SIGNAL = 1.1; EXPRESSED IN PLACENTA, SIGNAL =   1; EXPRESSED IN FETAL LIVER, SIGNAL = 0.85; EXPRESSED IN BRAIN, SIGNAL =   1; EST_HUMAN HIT: AU155130.1, EVALUE 5.00e-16; NT HIT: AF155195.1, EVALUE 1.00e-03; SWISSPROT HIT: O46530, EVALUE 1.00e-39
atggcaccggccagagcaggattctgcccccttctgctgcttctgctgctggggctgtgggtggcagagatcccagtcagtgccaagcccaagggcatgacctcatcacagtggtttaaaattcagcacatgcagcccagccctcaagcatgcaactcagccatgaaaaacattaacaagcacacaaaacggtgcaaagacctcaacaccttcctgcacgagcctttctccagtgtggccgccacctgccagacccccaaaatagcctgcaagaatggcgataaaaactgccaccagagccacggggccgtgtccctgaccatgtgtaagctcacctcagggaagcatccgaactgcaggtacaaagagaagcgacagaacaagtcttacgtagtggcctgtaagcctccccagaaaaaggactctcagcaattccacctggttcctgtacacttggacagagtcctt

SEQ ID NO: 28738 - DNA, 189 bp, Homo sapiens
  MAP TO AC011778.3; EXPRESSED IN PLACENTA, SIGNAL = 0.58; EXPRESSED IN FETAL LIVER, SIGNAL = 0.64; EXPRESSED IN BONE MARROW, SIGNAL = 0.58; EXPRESSED IN ADULT LIVER, SIGNAL = 0.72; EXPRESSED IN BRAIN, SIGNAL = 0.52; SWISSPROT HIT: Q56273, EVALUE 8.60e+00; EST_HUMAN HIT: AV704700.1, EVALUE 6.60e-01
atggtggcatatttcaatgatgtcagtagatttccaggactttacattagtgttcacttcatccctgcagatgatccatcaattttattttctaatgacgtacctgcaatggcactctttcttacagtatatgtctctaagtacagaattccttgtagctcagtgctctcatcttatgttaccaaaaat

SEQ ID NO: 28739 - DNA, 305 bp, Homo sapiens
  MAP TO AL121586.28; EXPRESSED IN BONE MARROW, SIGNAL = 1.2; EXPRESSED IN PLACENTA, SIGNAL = 0.81; EXPRESSED IN ADULT LIVER, SIGNAL = 0.82; EXPRESSED IN BRAIN, SIGNAL = 0.88; EXPRESSED IN FETAL LIVER, SIGNAL = 0.88; EST_HUMAN HIT: AL037087.2, EVALUE 1.00e-126; NT HIT: AF022655.1, EVALUE 0.00e+00; SWISSPROT HIT: P13290, EVALUE 8.50e-01
ctacctggaggcggcttgggtagtgctggggctggggtgtagcaggactggccctggggatgtcagactttgagtcagggactcatccagcctgcgggtctctgcctccaggacagtggcctcaggggcctgggccacggcaagaagtgagtgtgagaggctgtggtgcaggcctgctagctcacggctggtctgtgctgagcgggtgatgtagtcctgcttctgcttccgctccaaagtcagctgagcttgcagcaggaccacctggtgggcaggaaaaaaaaaaaaaagggagagcagctgag

SEQ ID NO: 28740 - DNA, 362 bp, Homo sapiens
  MAP TO AP001432.1; EXPRESSED IN PLACENTA, SIGNAL = 0.67; EXPRESSED IN FETAL LIVER, SIGNAL = 0.89; EXPRESSED IN LUNG, SIGNAL = 1.5; EXPRESSED IN BRAIN, SIGNAL = 2.3; EXPRESSED IN ADULT LIVER, SIGNAL = 0.93; EXPRESSED IN BONE MARROW, SIGNAL = 0.68; SWISSPROT HIT: P53804, EVALUE 9.00e-51; EST_HUMAN HIT: AU131671.1, EVALUE 0.00e+00; NT HIT: gi11526252, EVALUE 0.00e+00
gttcatcccgagttactccctgagtcttcaggcgacgatggccaagggcttgtgacttctgcaagcgacgtgactggaaaccacgcagcacttcacagggatcctagtgtgttctctgctggtgattccccaggggaggctccttctgcgctgttgccagggccaccccctggtcagcctgaagccactcagctgacagggccaaaacgggctggccaggcagctctgtcagaacgaagccctgtggctgatcggaagcagcctgttcctccaggacgtgctgcgcgttcaagccagtctccaaaaaagccgttcaatagtattattgagcacctgtcagtggtattcccatgttacaacag

SEQ ID NO: 28741 - DNA, 151 bp, Homo sapiens
  MAP TO AC013705.3; EXPRESSED IN PLACENTA, SIGNAL = 0.84; EXPRESSED IN ADULT LIVER, SIGNAL = 0.81; EXPRESSED IN BRAIN, SIGNAL = 0.63; EXPRESSED IN FETAL LIVER, SIGNAL = 0.73; EXPRESSED IN BONE MARROW, SIGNAL = 0.62; SWISSPROT HIT: O14978, EVALUE 9.00e+00; EST_HUMAN HIT: AW806881.1, EVALUE 5.10e-01
aactcaagaacaaagacgacggtgatggtagtggtggcatcatacgaacaatagcaactaacatttatgggactgctctgtgtgccaggcagtgttcaaagtgccttacatgtagtcattcatgtcatgctcacaaaaaaaccccagtgag

SEQ ID NO: 28742 - DNA, 312 bp, Homo sapiens
  MAP TO AC020760.3; EXPRESSED IN PLACENTA, SIGNAL = 0.62; EXPRESSED IN ADULT LIVER, SIGNAL = 0.61; EXPRESSED IN FETAL LIVER, SIGNAL = 0.47; EXPRESSED IN BRAIN, SIGNAL = 0.79; SWISSPROT HIT: P32391, EVALUE 4.00e-36; NT HIT: gi9966912, EVALUE 3.00e-74; EST_HUMAN HIT: AU123641.1, EVALUE 4.00e-74
tcaaaccccttgaaagaacaacattcttatacagtggacaatgcacatcaatgggacagttttgtattcatcaacaacattcaagacggattccataaagtctgggttggcaaactctgggtaaaaaaatatttcaggttgcaggaaccttttgtaaccaacatctattatgaacttctcctggttgatcacattgatacctgtgtactgtttgatccacttccagggatccacatcatacttagcaaattccttgactatatcagggcaaatgtaacagtatttctccttaatggcttttgtggtctccag

SEQ ID NO: 28743 - DNA, 208 bp, Homo sapiens
  MAP TO AC016201.5; EXPRESSED IN FETAL LIVER, SIGNAL = 6.6; EXPRESSED IN BRAIN, SIGNAL = 1.3; EXPRESSED IN BONE MARROW, SIGNAL = 1.1; EXPRESSED IN PLACENTA, SIGNAL =   1; EST_HUMAN HIT: BE064410.1, EVALUE 5.00e-48; NT HIT: AL163246.2, EVALUE 1.00e-38; SWISSPROT HIT: P03360, EVALUE 1.50e-01
tgtggatatgggcttgcctatcctgcatccagtgcttttcccaagactaccatccatggactcgtggaatgcctcatccgctgacatggtattcctcacagcattgcctctgacaaaggcactcactatatggctaaagaagcgtggcagtaggctcatgcccatagacttcactagttttaccatattccccatcatcctgaagcag

SEQ ID NO: 28744 - DNA, 101 bp, Homo sapiens
  MAP TO AL121910.19; EXPRESSED IN LUNG, SIGNAL = 1.2; EXPRESSED IN BONE MARROW, SIGNAL = 0.88; EXPRESSED IN PLACENTA, SIGNAL = 1.1; EXPRESSED IN ADULT LIVER, SIGNAL = 1.4; EXPRESSED IN FETAL LIVER, SIGNAL = 0.81; EXPRESSED IN BRAIN, SIGNAL = 0.93; EST_HUMAN HIT: BE161653.1, EVALUE 6.00e-09; NT HIT: X83212.1, EVALUE 5.50e-02; SWISSPROT HIT: P08547, EVALUE 9.60e-02
tggctgttctgggtcttttgcttctccacataaattttagattcagtttgttgatttctacaaaagagcttgccaagattttgattgggtttgaattgatt

SEQ ID NO: 28745 - DNA, 120 bp, Homo sapiens
  MAP TO AC025752.2; EXPRESSED IN LUNG, SIGNAL = 1.1; EXPRESSED IN PLACENTA, SIGNAL = 1.1; EXPRESSED IN FETAL LIVER, SIGNAL = 1.1; EXPRESSED IN BONE MARROW, SIGNAL = 0.89; EXPRESSED IN ADULT LIVER, SIGNAL = 1.5; EXPRESSED IN BRAIN, SIGNAL = 0.88; EST_HUMAN HIT: BE562153.1, EVALUE 1.50e+00; NT HIT: U42720.2, EVALUE 1.00e+00; SWISSPROT HIT: P27467, EVALUE 3.10e+00
accttccattaggccaaaagcacctccaccaaagatcagttgagcaacgcctccactcccagccactcccaggctctgatctgacactaggtaggaaagtccttggaaccctttacccat

SEQ ID NO: 28746 - DNA, 123 bp, Homo sapiens
  MAP TO AC006457.3; EXPRESSED IN PLACENTA, SIGNAL = 0.61; EXPRESSED IN FETAL LIVER, SIGNAL = 0.55; EXPRESSED IN BONE MARROW, SIGNAL = 0.63; EXPRESSED IN ADULT LIVER, SIGNAL = 0.59; EXPRESSED IN BRAIN, SIGNAL = 0.63; SWISSPROT HIT: Q03923, EVALUE 7.00e-15; NT HIT: gi10567821, EVALUE 2.00e-29; EST_HUMAN HIT: BE252748.1, EVALUE 4.00e-29
tgttgacattcagagacatagctatagaattctctctggaggaatggcaatgcctggattgtgctcagcggaatttatatagagatgtgatgttagagaactacagaaacttggtctccctgg

SEQ ID NO: 28747 - DNA, 192 bp, Homo sapiens
  MAP TO AC019042.3; EXPRESSED IN ADULT LIVER, SIGNAL = 0.63; EXPRESSED IN BRAIN, SIGNAL = 0.63; EXPRESSED IN FETAL LIVER, SIGNAL = 0.62; EXPRESSED IN PLACENTA, SIGNAL = 2.9; EXPRESSED IN BONE MARROW, SIGNAL = 0.61; SWISSPROT HIT: Q60401, EVALUE 6.00e-05; EST_HUMAN HIT: W24885.1, EVALUE 4.30e-02; NT HIT: gi5453649, EVALUE 2.90e-02
ctatacagactggtgggctgggctgccagaagtaccgattttctacctgaatgcaggttattctttcctctccttgaagttcatatcctgggtcacattgaaaaacaacagtgtccccaggttctcttccatccccatttcgagtcccattcatggggacccctgggtcacgacacgcagtggcaacagaac

SEQ ID NO: 28748 - DNA, 101 bp, Homo sapiens
  MAP TO AC016057.3; EXPRESSED IN ADULT LIVER, SIGNAL = 0.65; EXPRESSED IN FETAL LIVER, SIGNAL = 0.73; EXPRESSED IN BRAIN, SIGNAL = 0.71; EXPRESSED IN BONE MARROW, SIGNAL = 0.61; EXPRESSED IN PLACENTA, SIGNAL = 0.66; NT HIT: gi6601589, EVALUE 3.00e-50
ctgcataaattcaggtcgcagattttttaatccataaggttgctgtacagttaaatgcagaaaattacgtccaaaattatcttttatgtctacttgggcac

SEQ ID NO: 28749 - DNA, 387 bp, Homo sapiens
  MAP TO AL139248.2; EXPRESSED IN PLACENTA, SIGNAL = 0.64; EXPRESSED IN FETAL LIVER, SIGNAL = 0.6; EXPRESSED IN BONE MARROW, SIGNAL = 0.81; EXPRESSED IN ADULT LIVER, SIGNAL = 0.62; EXPRESSED IN BRAIN, SIGNAL = 0.65; EST_HUMAN HIT: AW440431.1, EVALUE 1.00e-105; NT HIT: gi11426572, EVALUE 0.00e+00; SWISSPROT HIT: Q62786, EVALUE 1.00e-05
ctgctggcttcctcaggtgcacgtggctgtctggtgactgctttctctgaagcacctgccaggaacctgtgcgtgttttcatgacctctgctaccacacatctgtaggcgccttcatcctctgggcccagagagaagatcttgagagagaaagccttggggcctaactttgaaacctggagctctccttgacttgctctctctttgtagtcattcttcaggcccaggactccaccagcatcaatgtgagcaatttcagtcccattgaagaaccaaatgccttgaagctgtgggtcacggccactgcttacaaccaggcaaaccagttctaagggtttcccttcagcaaacaagctgtcagctgtaatgttgacttgaaaatctttca

SEQ ID NO: 28750 - DNA, 145 bp, Homo sapiens
  MAP TO AC022882.3; EXPRESSED IN PLACENTA, SIGNAL = 0.63; EXPRESSED IN FETAL LIVER, SIGNAL = 0.59; EXPRESSED IN BONE MARROW, SIGNAL = 0.5; EXPRESSED IN BRAIN, SIGNAL = 0.48; EST_HUMAN HIT: AI246187.1, EVALUE 3.10e-02; SWISSPROT HIT: P37071, EVALUE 5.00e-09; NT HIT: U02974.1, EVALUE 3.30e-01
gcaatttagggctggttgtaccgatcattggggatttctggcttcacagcccaatgtactattttcttggtgttttatcattcttggatgtctgctattctacagttgtcactccaaaaatgttggtcaatttcctggcaaaaaa

SEQ ID NO: 28751 - DNA, 171 bp, Homo sapiens
  MAP TO AC015737.4; EXPRESSED IN BONE MARROW, SIGNAL = 1.7; EXPRESSED IN PLACENTA, SIGNAL = 1.3; EXPRESSED IN ADULT LIVER, SIGNAL = 1.2; EXPRESSED IN FETAL LIVER, SIGNAL = 1.2; EXPRESSED IN BRAIN, SIGNAL = 1.3; EXPRESSED IN LUNG, SIGNAL = 0.95; EST_HUMAN HIT: BE062744.1, EVALUE 1.00e-17; SWISSPROT HIT: P38623, EVALUE 7.80e-01; NT HIT: L78810.1, EVALUE 1.00e-10
ggtctttcagtttttaaggatgtcttaaactacatctttaagacagtagttctgtataatagtatttgtctagaagaccaccacatggcctttcttagagaaagttttgtgtccagaattgatgggttcttggtcttgctgacttcaagaatgaagccacggactctcgca

SEQ ID NO: 28752 - DNA, 87 bp, Homo sapiens
  MAP TO AP000431.3; EXPRESSED IN FETAL LIVER, SIGNAL = 0.52; EXPRESSED IN BONE MARROW, SIGNAL = 0.53; EXPRESSED IN ADULT LIVER, SIGNAL = 0.61; EXPRESSED IN BRAIN, SIGNAL = 0.61; NT HIT: AF069070.1, EVALUE 1.80e-01; EST_HUMAN HIT: AA001613.1, EVALUE 1.00e-03
tgcttctatatctctatgcacttatgttggctggttttatattgggctgtatggttcaaactacagactaccagattgagccgatgg

SEQ ID NO: 28753 - DNA, 94 bp, Homo sapiens
  MAP TO AC010283.5; EXPRESSED IN ADULT LIVER, SIGNAL = 0.77; EXPRESSED IN BONE MARROW, SIGNAL = 0.77; EXPRESSED IN PLACENTA, SIGNAL = 0.82; EXPRESSED IN FETAL LIVER, SIGNAL = 0.66; EXPRESSED IN BRAIN, SIGNAL = 0.84; EXPRESSED IN LUNG, SIGNAL = 0.86; NT HIT: AF061443.1, EVALUE 3.10e+00; EST_HUMAN HIT: AU150910.1, EVALUE 2.90e-01
ttacactacaatcccaaatttctcaaagcctgctttgacattttactgacaataaccactgaatgcaaagcactcagtccaaactatgtatatg

SEQ ID NO: 28754 - DNA, 213 bp, Homo sapiens
  MAP TO AC022939.2; EXPRESSED IN LUNG, SIGNAL = 0.93; EXPRESSED IN PLACENTA, SIGNAL = 0.87; EXPRESSED IN ADULT LIVER, SIGNAL =   1; EXPRESSED IN FETAL LIVER, SIGNAL = 0.71; EXPRESSED IN BRAIN, SIGNAL = 0.83; EXPRESSED IN BONE MARROW, SIGNAL = 0.74; NT HIT: AF124250.1, EVALUE 1.00e-104; EST_HUMAN HIT: BF509244.1, EVALUE 1.00e-104; SWISSPROT HIT: O08791, EVALUE 6.80e-01
agtccacatgtgttcccccaaacaatgtatcagtcccactgctgatgccgcttgtgacgttaatggagcgccaggctgtgacttttgaaggaaccgacatgtgggaaaaaaacgaccagagctgtgaaatcatgctgaaccatttggcaacagcgcgattcatggccgaggctgcagacagctaccggatgaatgctgagaggatcctggcag

SEQ ID NO: 28755 - DNA, 80 bp, Homo sapiens
  MAP TO AC021786.2; EXPRESSED IN PLACENTA, SIGNAL = 1.2; EXPRESSED IN ADULT LIVER, SIGNAL = 1.3; EXPRESSED IN FETAL LIVER, SIGNAL = 0.97; EXPRESSED IN BONE MARROW, SIGNAL = 0.98; EXPRESSED IN LUNG, SIGNAL = 1.3; EXPRESSED IN BRAIN, SIGNAL =   1; EST_HUMAN HIT: BF242794.1, EVALUE 2.40e-01; SWISSPROT HIT: P45576, EVALUE 7.30e+00; NT HIT: gi11421330, EVALUE 2.50e+00
agaaagcaccatcatcctgaagcatcagattgggagaaaagtccgctctcgagagcatcaactatgtagaaaggggacca

SEQ ID NO: 28756 - DNA, 199 bp, Homo sapiens
  MAP TO AC016623.2; EXPRESSED IN LUNG, SIGNAL = 1.1; EXPRESSED IN ADULT LIVER, SIGNAL = 0.92; EXPRESSED IN BRAIN, SIGNAL = 1.1; EXPRESSED IN PLACENTA, SIGNAL =   1; EXPRESSED IN FETAL LIVER, SIGNAL = 0.83; EXPRESSED IN BONE MARROW, SIGNAL = 0.81; EST_HUMAN HIT: BF528825.1, EVALUE 1.80e-01; NT HIT: AJ271736.1, EVALUE 1.20e-01; SWISSPROT HIT: Q38773, EVALUE 1.30e+00
tgccatctttcagttccagctgttaagtatacagatggatgggcatgaggacagctgcccagaatgtagtggtcctgagcatggaaaactaaacttcctgtgcctcaaagagatcaaggacatatctgagaagaaaacagtggatctaaagaggcttcatgacatgggggttggaagccttgtggaacacaggttttag

SEQ ID NO: 28757 - DNA, 173 bp, Homo sapiens
  MAP TO AC011207.3; EXPRESSED IN BONE MARROW, SIGNAL = 0.56; EXPRESSED IN PLACENTA, SIGNAL = 0.73; EXPRESSED IN ADULT LIVER, SIGNAL = 0.79; EXPRESSED IN FETAL LIVER, SIGNAL = 0.68; EXPRESSED IN BRAIN, SIGNAL =   1; SWISSPROT HIT: Q15700, EVALUE 7.00e-29; NT HIT: gi4557526, EVALUE 5.00e-93; EST_HUMAN HIT: R17787.1, EVALUE 1.00e-88
atgttcgactacgacaagagcaaggacagtgggctgccaagtcaaggacttagttttaaatatggagatattctccacgttatcaatgcctctgatgatgagtggtggcaagccaggagagtcatgctggagggagacagtgaggagatgggggtcatccccagcaaaaggag

SEQ ID NO: 28758 - DNA, 93 bp, Homo sapiens
  MAP TO AP001439.1; EXPRESSED IN BONE MARROW, SIGNAL = 0.85; EXPRESSED IN LUNG, SIGNAL = 0.84; EXPRESSED IN PLACENTA, SIGNAL = 0.9; EXPRESSED IN ADULT LIVER, SIGNAL = 0.95; EXPRESSED IN FETAL LIVER, SIGNAL = 0.88; EXPRESSED IN BRAIN, SIGNAL = 0.96; EST_HUMAN HIT: AA926685.1, EVALUE 5.00e-06; SWISSPROT HIT: P03600, EVALUE 4.20e+00; NT HIT: D87675.1, EVALUE 1.00e-45
gatattacaaaggacacacagatgaacagccagatggaagagatgcacggggtgaggtgcggctgaagagaaaacgagattccatgccctttc

SEQ ID NO: 28759 - DNA, 330 bp, Homo sapiens
  MAP TO AC021486.3; EXPRESSED IN PLACENTA, SIGNAL = 0.91; EXPRESSED IN BRAIN, SIGNAL = 0.93; EXPRESSED IN BONE MARROW, SIGNAL = 0.91; EXPRESSED IN ADULT LIVER, SIGNAL = 0.99; EXPRESSED IN FETAL LIVER, SIGNAL = 0.92; NT HIT: AP001517.1, EVALUE 8.10e-01; EST_HUMAN HIT: AI432684.1, EVALUE 1.20e+00; SWISSPROT HIT: P11055, EVALUE 9.60e-01
ggaaggcacaatctgctcaccctccagctcttccccctccaggggaagcagttggtaagcctggaccctcccaaagccaggggctgttatgcagagcgtgactggatcccaattattcaagaagaagcagtgcataaattagtagatcgtgtttctaaagctgtcatggataaattgttcttatttcctgaaactgtcataggaaaggagtgggattctaagatagctttgacacccctgttgctccttgaagacaaagaagccctaatgtctcctgcaaggtctgagcctggaacaggcttacaacaggccaaagtcaaaatgaagatt

SEQ ID NO: 28760 - DNA, 185 bp, Homo sapiens
  MAP TO AC022020.3; EXPRESSED IN PLACENTA, SIGNAL = 0.58; EXPRESSED IN BRAIN, SIGNAL = 0.51; EXPRESSED IN BONE MARROW, SIGNAL = 0.49; NT HIT: AF281074.1, EVALUE 7.00e-03; EST_HUMAN HIT: BF238031.1, EVALUE 4.10e-02; SWISSPROT HIT: Q15848, EVALUE 7.60e-01
ttcagctcttgcattgcctctctccctgggacacccatcttgggaaggagctgctgtgtgtggtgcggctgggcagttggaagcccagcctctgcagactcctgactcccagctccatctgtctcaggggcttggcttttaccctgggcgagtggcttcattgtctcatacctcagtttcctcat

SEQ ID NO: 28761 - DNA, 189 bp, Homo sapiens
  MAP TO AC019078.3; EXPRESSED IN PLACENTA, SIGNAL = 0.79; EXPRESSED IN ADULT LIVER, SIGNAL = 0.75; EXPRESSED IN BRAIN, SIGNAL = 0.71; EXPRESSED IN BONE MARROW, SIGNAL = 0.74; EXPRESSED IN FETAL LIVER, SIGNAL = 0.86; NT HIT: U83590.1, EVALUE 1.70e+00; EST_HUMAN HIT: AW795781.1, EVALUE 1.70e-01; SWISSPROT HIT: P43446, EVALUE 1.50e-01
atactccatgaagtttatagctttcataagaatgtataaggagaccaaggctaagatggagcagaagctgcctgggaggaagagcggaggacatgaggagcgttttgaaaggatccagtggcagcaggtgtcagagagcatcagcaaaaatacacgttcttcagggaagtctttccctgatgtgccaac

SEQ ID NO: 28762 - DNA, 92 bp, Homo sapiens
  MAP TO AL137026.10; EXPRESSED IN PLACENTA, SIGNAL = 1.1; EXPRESSED IN FETAL LIVER, SIGNAL = 0.88; EXPRESSED IN BONE MARROW, SIGNAL = 0.91; EXPRESSED IN ADULT LIVER, SIGNAL = 1.2; EXPRESSED IN BRAIN, SIGNAL = 0.8; NT HIT: AE002309.1, EVALUE 4.90e-02; EST_HUMAN HIT: AA526196.1, EVALUE 2.80e-01
catcatcatgaccatcatgactgatcagaccatggccacagggattttaactccagtgatgacgggcagtgaggtcagctacatctcaaatc

SEQ ID NO: 28763 - DNA, 181 bp, Homo sapiens
  MAP TO AC018529.4; EXPRESSED IN PLACENTA, SIGNAL = 0.55; EXPRESSED IN BRAIN, SIGNAL = 0.49; EST_HUMAN HIT: AW375872.1, EVALUE 4.00e-02; SWISSPROT HIT: P49844, EVALUE 1.70e+00; NT HIT: S43442.1, EVALUE 2.70e-02
gacaatgcctgggatatgggcagaacggtgaccatcaccatctaccgggaagacactgaggaacacacagccagcaagttgcagaggctgagcccaggaggcccggccctcacacgggcccctgagtgtcatgatatacggcatctctgcacaagcagcgacaaaaatcactttcacctga

SEQ ID NO: 28764 - DNA, 104 bp, Homo sapiens
  MAP TO AC005103.2; EXPRESSED IN PLACENTA, SIGNAL = 0.83; EXPRESSED IN ADULT LIVER, SIGNAL = 0.83; EXPRESSED IN FETAL LIVER, SIGNAL = 0.57; EXPRESSED IN BRAIN, SIGNAL = 0.61; EXPRESSED IN BONE MARROW, SIGNAL = 0.81; EST_HUMAN HIT: AW993777.1, EVALUE 4.00e-47; SWISSPROT HIT: P35824, EVALUE 5.50e+00; NT HIT: gi5174724, EVALUE 2.20e-01
ccttttctatcacaaggactggaaggaatatgtgttcatctataaaagtaaccaaaggaacgatgccgtgttgatggttatatggttcatcttcagatgagatg

SEQ ID NO: 28765 - DNA, 180 bp, Homo sapiens
  MAP TO AC013593.3; EXPRESSED IN PLACENTA, SIGNAL = 0.82; EXPRESSED IN LUNG, SIGNAL = 2.8; EXPRESSED IN FETAL LIVER, SIGNAL = 0.73; EXPRESSED IN BRAIN, SIGNAL = 0.75; EXPRESSED IN BONE MARROW, SIGNAL = 0.78; EXPRESSED IN ADULT LIVER, SIGNAL = 0.85; NT HIT: gi11423233, EVALUE 4.00e-97; EST_HUMAN HIT: AA780473.1, EVALUE 8.00e-62; SWISSPROT HIT: P13584, EVALUE 3.00e-18
ctcgagggcatgtccaaaaagccagtgggtgggaggccctgggaatttgtccatagccttagccaacgtctgcctccgcagcagcaggtggatgagcttgagaaagcctaagaccaagatcagcccagaagcccacaggcccaaggaggagaagctcagggagaggaagctgggcaccat

SEQ ID NO: 28766 - DNA, 167 bp, Homo sapiens
  MAP TO AC013317.4; EXPRESSED IN LUNG, SIGNAL = 0.99; EXPRESSED IN PLACENTA, SIGNAL = 1.1; EXPRESSED IN ADULT LIVER, SIGNAL = 0.82; EXPRESSED IN BONE MARROW, SIGNAL = 0.79; EXPRESSED IN BRAIN, SIGNAL =   1; EXPRESSED IN FETAL LIVER, SIGNAL = 1.1; SWISSPROT HIT: P23792, EVALUE 6.70e+00; NT HIT: gi11441264, EVALUE 3.80e-01
gtaaaagcaacagtcttcttagaaaagatgatgattttgtttttgaccgtggtgtacatgaaggcactatgtgacatccaaggtcagatgttcgtgggttgtgggaataaggttctggaagacagggagaaatctgggctcaagcgagagattcagaacacgggcat

SEQ ID NO: 28767 - DNA, 246 bp, Homo sapiens
  MAP TO AC015638.4; EXPRESSED IN PLACENTA, SIGNAL = 0.65; EXPRESSED IN FETAL LIVER, SIGNAL = 0.52; EXPRESSED IN ADULT LIVER, SIGNAL = 0.63; EXPRESSED IN BRAIN, SIGNAL = 0.48; EXPRESSED IN BONE MARROW, SIGNAL = 0.49; SWISSPROT HIT: P00750, EVALUE 1.60e+00; NT HIT: AF078779.1, EVALUE 9.00e-31; EST_HUMAN HIT: AU124028.1, EVALUE 3.50e+00
ttagggaggtccatctaacacctcagagcaggttgatgtggagtaaaatgagactggaaacaggactgagcagaactgaaccaaactgaaataatcagctgaaatcaacttgacttctatgcttaccaggagggcaaagtgaagcaccacccatacaacgccaagcgacgtcaccaggagatcgtatcggtttcttctgctttgccagaagccagcaggcgacattgctatgatcttcatggtaac

SEQ ID NO: 28768 - DNA, 223 bp, Homo sapiens
  MAP TO AC007595.3; EXPRESSED IN FETAL LIVER, SIGNAL = 0.74; EXPRESSED IN BONE MARROW, SIGNAL = 0.76; EXPRESSED IN PLACENTA, SIGNAL = 0.64; EXPRESSED IN BRAIN, SIGNAL = 0.47; NT HIT: AF129231.1, EVALUE 1.30e-01; EST_HUMAN HIT: BE387950.1, EVALUE 1.00e-106; SWISSPROT HIT: P29760, EVALUE 1.30e+00
gatctccgtacctgagacctgggccaagttcagtaacgacaacatcaaacactctcagaacatgcgggccaactccatccagctgcgggaggaggcggagcacctctttgagaccttgtcggatcagatgtggaggcagttcacagacaccaacctggccttcaacgcccgcatctctgaggtgacggatgtgaagaataagctgcagacgcagctggcgaag

SEQ ID NO: 28769 - DNA, 80 bp, Homo sapiens
  MAP TO AL121582.14; EXPRESSED IN BONE MARROW, SIGNAL = 0.85; EXPRESSED IN PLACENTA, SIGNAL = 1.1; EXPRESSED IN ADULT LIVER, SIGNAL = 1.1; EXPRESSED IN FETAL LIVER, SIGNAL = 0.77; EXPRESSED IN BRAIN, SIGNAL = 0.88; EST_HUMAN HIT: BF475330.1, EVALUE 9.50e-01; NT HIT: Z99119.1, EVALUE 1.60e-01
ctttataatttataaccaggatgatttctgtggcctttaaatgtccacagtgcttgataatttcttccttgttcatggtc

SEQ ID NO: 28770 - DNA, 210 bp, Homo sapiens
  MAP TO AC016498.4; EXPRESSED IN LUNG, SIGNAL = 1.1; EXPRESSED IN BONE MARROW, SIGNAL = 0.78; EXPRESSED IN PLACENTA, SIGNAL =   1; EXPRESSED IN ADULT LIVER, SIGNAL = 0.9; EXPRESSED IN FETAL LIVER, SIGNAL = 0.93; EXPRESSED IN BRAIN, SIGNAL = 0.83; SWISSPROT HIT: O15534, EVALUE 7.40e-01; EST_HUMAN HIT: BF346266.1, EVALUE 7.40e-01
cgcctgccggcagccaaggctgtgcccttgtcccagactgtgccgcacaagcgggctgactttgggcagccagcattggcagggggcttctttgttgctgtggggcagatgcacactcctgaactgctcgcttctgtgtctgtgtagacgctggagtggagcaggtgcaggcctgtggtcaggaaggtgtggatgctgcgggggaagcag

SEQ ID NO: 28771 - DNA, 303 bp, Homo sapiens
  MAP TO AC010492.4; EXPRESSED IN PLACENTA, SIGNAL = 0.54; EXPRESSED IN ADULT LIVER, SIGNAL = 0.52; EXPRESSED IN FETAL LIVER, SIGNAL = 0.85; EXPRESSED IN BRAIN, SIGNAL = 0.52; EXPRESSED IN BONE MARROW, SIGNAL = 1.4; EST_HUMAN HIT: AW748728.1, EVALUE 2.00e-26; NT HIT: gi11424387, EVALUE 0.00e+00; SWISSPROT HIT: Q64281, EVALUE 7.00e-17
gattctacaacaaacccaccctctcagccctgcccagccctgtggtggcctcaggggggaatatgaccctccgatgtggctcacagaagggatatcaccattttgttctgatgaaggaaggagaacaccagctcccccggaccctggactcacagcagctccacagtggggggttccaggccctgttccctgtgggccccgtgacccccagccacaggtggaggttcacatgctattactattatacaaacaccccccgggtgtggtcccaccccagtgaccccctggagattctgccctcag

SEQ ID NO: 28772 - DNA, 85 bp, Homo sapiens
  MAP TO AC020693.3; EXPRESSED IN PLACENTA, SIGNAL = 0.48; EXPRESSED IN ADULT LIVER, SIGNAL = 0.54; EXPRESSED IN BRAIN, SIGNAL = 0.48; EXPRESSED IN BONE MARROW, SIGNAL = 0.48; NT HIT: D12922.1, EVALUE 5.90e-01; EST_HUMAN HIT: AI096515.1, EVALUE 2.80e+00
atgtgaaggagtgaactaatatttaaagatctgtaaaccaagttcaatctgatgtaagatttgttgttggtcataaaaagggaag

SEQ ID NO: 28773 - DNA, 189 bp, Homo sapiens
  MAP TO AC008616.2; EXPRESSED IN PLACENTA, SIGNAL = 0.85; EXPRESSED IN ADULT LIVER, SIGNAL = 0.98; EXPRESSED IN FETAL LIVER, SIGNAL = 0.78; EXPRESSED IN BRAIN, SIGNAL = 1.1; EXPRESSED IN BONE MARROW, SIGNAL = 0.82; EXPRESSED IN LUNG, SIGNAL = 0.92; EST_HUMAN HIT: BF529115.1, EVALUE 5.00e-94; NT HIT: gi6677938, EVALUE 8.00e-15; SWISSPROT HIT: P41110, EVALUE 7.60e-01
ctgcaaacgccctggagatgtggtctttcttccactcccagggctgatcatactcatctgctggccgttcatcttcctggggcatccggctctgccgaggcttctgcccagaagggggtccatctgctgtctctgggtcctgttcctcataaggggtgtcatagagctgcacccctctgccgggaagtt

SEQ ID NO: 28774 - DNA, 200 bp, Homo sapiens
  MAP TO AC021000.3; EXPRESSED IN ADULT LIVER, SIGNAL = 0.7; EXPRESSED IN FETAL LIVER, SIGNAL = 0.64; EXPRESSED IN PLACENTA, SIGNAL = 0.69; EXPRESSED IN BRAIN, SIGNAL = 0.91; EXPRESSED IN BONE MARROW, SIGNAL = 0.7; SWISSPROT HIT: Q15696, EVALUE 3.90e-02; EST_HUMAN HIT: AW996160.1, EVALUE 1.10e-02
gatgttactggaggattttcttcagcaaaatgaggaggctaagagtgtggaagacatgggagccaaagaaaggtggatccagggtgaccgagagaagcaggagtaccaggatgccgctttgcagcaggcctggaagcagcagtccagacagaagaaagaaaacagaggctccaacagggaggcatttagcaaaaaatggt

SEQ ID NO: 28775 - DNA, 140 bp, Homo sapiens
  MAP TO AL161646.3; EXPRESSED IN ADULT LIVER, SIGNAL = 0.83; EXPRESSED IN BRAIN, SIGNAL = 0.66; EXPRESSED IN BONE MARROW, SIGNAL = 0.74; EXPRESSED IN PLACENTA, SIGNAL = 0.74; EXPRESSED IN FETAL LIVER, SIGNAL = 0.79; EST_HUMAN HIT: BF353889.1, EVALUE 3.00e-02; SWISSPROT HIT: P70545, EVALUE 2.40e+00
aagcaagcctggtcggctgctgcaggtttctgccaggcactgctgccctggcctgccaccgggccatctgtgtatttctgcctctgctggatatcaccacatctgcagggcactgctgcttccccatacttcactgccat

SEQ ID NO: 28776 - DNA, 227 bp, Homo sapiens
  MAP TO AC019159.3; EXPRESSED IN PLACENTA, SIGNAL = 0.79; EXPRESSED IN ADULT LIVER, SIGNAL = 0.76; EXPRESSED IN FETAL LIVER, SIGNAL = 0.56; EXPRESSED IN BRAIN, SIGNAL = 0.68; EXPRESSED IN BONE MARROW, SIGNAL = 0.57; NT HIT: AF002169.1, EVALUE 8.40e+00; EST_HUMAN HIT: H41843.1, EVALUE 3.20e+00; SWISSPROT HIT: P34687, EVALUE 4.10e-02
tgtggtcatgcatgcagaggccttacccggcgtgttgagcaggcgggacctcctgcagtggtaggccacctcctgctcacagtgctcagagccgtcgatcacggcctccagctgttccatgctgcccccgtagtccaaggccatggcatagggcttctcagggttagcgccccgcactcgggtcagctctgtattgttgtgctgcactgatgtccagatcttgtcct

SEQ ID NO: 28777 - DNA, 168 bp, Homo sapiens
  MAP TO AC006038.2; EXPRESSED IN LUNG, SIGNAL =   1; EXPRESSED IN ADULT LIVER, SIGNAL = 1.1; EXPRESSED IN BRAIN, SIGNAL = 0.84; EXPRESSED IN BONE MARROW, SIGNAL = 1.1; EXPRESSED IN PLACENTA, SIGNAL = 1.1; EXPRESSED IN FETAL LIVER, SIGNAL = 1.1; SWISSPROT HIT: Q92542, EVALUE 8.80e+00; NT HIT: K02138.1, EVALUE 1.50e+00
gtctggacttccatttatttcactgcgctcaccaaattcttcccagccaattgaaaacctcaaattcttagcaactttgcccataatagggttagtcatgtggcaaagtacaacacaggccatttcatgtgcccagcaatttacaagattggatttcctgtttcctgt

SEQ ID NO: 28778 - DNA, 181 bp, Homo sapiens
  MAP TO AC008156.3; EXPRESSED IN PLACENTA, SIGNAL = 0.96; EXPRESSED IN BONE MARROW, SIGNAL = 1.2; EXPRESSED IN LUNG, SIGNAL = 0.97; EXPRESSED IN ADULT LIVER, SIGNAL = 0.93; EXPRESSED IN BRAIN, SIGNAL = 0.98; EXPRESSED IN FETAL LIVER, SIGNAL = 0.94; EST_HUMAN HIT: BF508546.1, EVALUE 2.00e-41; SWISSPROT HIT: P35320, EVALUE 2.00e-01; NT HIT: AL163209.2, EVALUE 1.00e-44
gcctgttgacttaaacgtaggaggagaccaaagtatccagttcgcaatcttaacttccagtttaatggaatcattgttgtgtctcccagtggcagtgttcctccctctggaactaagacctctaggccagcagaatgtaatgttgcgggaacagaagcaaaaaaatttgctagtggatcac

SEQ ID NO: 28779 - DNA, 317 bp, Homo sapiens
  MAP TO AC021037.4; EXPRESSED IN FETAL LIVER, SIGNAL = 0.62; EXPRESSED IN BRAIN, SIGNAL = 0.49; EXPRESSED IN BONE MARROW, SIGNAL = 0.61; NT HIT: gi7662059, EVALUE 0.00e+00; SWISSPROT HIT: O88553, EVALUE 4.00e-10; EST_HUMAN HIT: AI640190.1, EVALUE 0.00e+00
aatgttctttgtgcaaagttataacatgtcttacaaggtgttctctcctggtggcaccatagctacaatattgacaagtgaagggaaaagtaccagaatgaatatgaaggtgcttctgaagctctcctttggtaaaacatacatgatgacatttaccacacttataatgaatttcattatgtctatgaatgtgctgaacaaatgtgccaacatcctgggtggagaacttacacttttcacattgaaaattaccattaacacaatgtgtggatgtgaaatgctttgtcaagttcagtaaagtatatacactctcattg

SEQ ID NO: 28780 - DNA, 267 bp, Homo sapiens
  MAP TO AC013772.3; EXPRESSED IN FETAL LIVER, SIGNAL = 0.58; EXPRESSED IN BRAIN, SIGNAL = 0.47; EXPRESSED IN BONE MARROW, SIGNAL = 0.57; EST_HUMAN HIT: BF678275.1, EVALUE 2.40e-01; SWISSPROT HIT: P21978, EVALUE 2.10e+00; NT HIT: gi9055295, EVALUE 6.40e-01
atgatatgtgaaggggaaagaattgtcaaatgtcacacagccactaagggttacatagggacttggaccttgtatggggaaagccggtggagaacgaagggtaagcatgatacgcagatgatctcaggcccaggctgtggttcaaataaggcagatcattcgagtggaattcctttggccaggaaggataaaagggcaggcggtcttagtacaggggctcagatgacatattttgacaacaacaacaacaacaacaacaacaaaaag

SEQ ID NO: 28781 - DNA, 134 bp, Homo sapiens
  MAP TO AL139340.3; EXPRESSED IN LUNG, SIGNAL =   1; EXPRESSED IN BONE MARROW, SIGNAL = 1.1; EXPRESSED IN PLACENTA, SIGNAL = 1.6; EXPRESSED IN ADULT LIVER, SIGNAL = 1.3; EXPRESSED IN FETAL LIVER, SIGNAL =   1; EXPRESSED IN BRAIN, SIGNAL = 1.1; NT HIT: AF003528.1, EVALUE 8.00e-08; EST_HUMAN HIT: AI268340.1, EVALUE 1.00e-10; SWISSPROT HIT: P08547, EVALUE 1.00e-09
attcccaccatcagtgtaaaagtgttcccttttcaccacattgcccccaacatctactttttttttatgatggccattcttgcaggagtaaggtggtattgcattatagtttagatttgcattttcctgatcat

SEQ ID NO: 28782 - DNA, 293 bp, Homo sapiens
  MAP TO AC011226.3; EXPRESSED IN PLACENTA, SIGNAL = 1.3; EXPRESSED IN ADULT LIVER, SIGNAL = 0.78; EXPRESSED IN FETAL LIVER, SIGNAL = 0.8; EXPRESSED IN BRAIN, SIGNAL = 0.8; EXPRESSED IN LUNG, SIGNAL =   1; EXPRESSED IN BONE MARROW, SIGNAL = 0.76; NT HIT: AL163246.2, EVALUE 1.00e-54; SWISSPROT HIT: P03363, EVALUE 4.00e-05; EST_HUMAN HIT: H47959.1, EVALUE 2.00e-70
ctaccatcatggtattccacacagcattgcctctgaccaaagcactcactttgcagctgaagaagtgtagcagtgggctcatgctcatggaattcactgttattatgtttcccatcaccctgaagcagctggattgatagaacggtggaatggccttttgaagtcacaattacaatgccaactaggtgacaatactttgcaggcctgggacaaagttctccagaaggccatgtatgctctgaatcagcattcaatatatggtactgtttctcttgtagcccagattcacgggt

SEQ ID NO: 28783 - DNA, 80 bp, Homo sapiens
  MAP TO AL138956.3; EXPRESSED IN ADULT LIVER, SIGNAL = 0.78; EXPRESSED IN BRAIN, SIGNAL = 0.57; EXPRESSED IN BONE MARROW, SIGNAL = 1.9; EXPRESSED IN PLACENTA, SIGNAL = 0.6; EXPRESSED IN FETAL LIVER, SIGNAL = 0.95; EST_HUMAN HIT: BE971853.1, EVALUE 6.10e-02; SWISSPROT HIT: Q80961, EVALUE 4.30e+00
gcccagcagcacttggaaaatggacccaaggaaccatatgttactccagccctggcagaactgctagagggtacgaaccc

SEQ ID NO: 28784 - DNA, 237 bp, Homo sapiens
  MAP TO AC007956.5; EXPRESSED IN PLACENTA, SIGNAL = 0.93; EXPRESSED IN ADULT LIVER, SIGNAL = 1.1; EXPRESSED IN FETAL LIVER, SIGNAL = 0.94; EXPRESSED IN BRAIN, SIGNAL = 1.2; EXPRESSED IN BONE MARROW, SIGNAL = 1.2; EXPRESSED IN LUNG, SIGNAL = 1.1; SWISSPROT HIT: P12304, EVALUE 1.30e+00; EST_HUMAN HIT: BE615150.1, EVALUE 1.00e-119; NT HIT: AB033168.1, EVALUE 5.00e-26
gaacagcagcagtattggtatcgacagcacttgcttagtttgcaacagaggacaaaagttcatttgccaggacacaaaaagggtcctgtggtagcaaaggatacaccagagccggtaaaagaagaagttacagtacctgccaccagtcaagttccagaatctccttcttctgaggagcccccattgccacctccaaatgaggaagtgccacctcctctcccacctgaggaaccccag

SEQ ID NO: 28785 - DNA, 440 bp, Homo sapiens
  MAP TO AL133320.8; EXPRESSED IN PLACENTA, SIGNAL = 0.82; EXPRESSED IN ADULT LIVER, SIGNAL = 0.86; EXPRESSED IN FETAL LIVER, SIGNAL = 0.69; EXPRESSED IN BRAIN, SIGNAL = 0.68; EXPRESSED IN BONE MARROW, SIGNAL = 0.65; SWISSPROT HIT: P38427, EVALUE 1.20e+00
tcaaattttccagtttgggcactcatttcatgaataacagctttatcaaggtaacccacaaattgttttgttaggctagaaaaattctgtgagaaattatagagtgtattccaagatctgttttctagtgtctgcttattagttttcttctttagtttatcatctacagttgtgtggcccgctttaaaagacatagggatctgtatatcttttctctgtactgtaggcatagttttttggggtttgaaaagagaaatagattgattgccaattatagatttgaggatttcacaatttctttctaaaatgaaatttgttcttttatgtgggtaaatgttttcattttccaaaggatgagaagaaaatctattttttgtcaaaagtaacattcgtacatattctgtgtcatggaaaattatgggatttgtgtccttttgttc

SEQ ID NO: 28786 - DNA, 496 bp, Homo sapiens
  MAP TO AL157879.2; EXPRESSED IN BRAIN, SIGNAL = 0.76; EXPRESSED IN BONE MARROW, SIGNAL = 3.2; EXPRESSED IN FETAL LIVER, SIGNAL = 1.8; NT HIT: U21556.1, EVALUE 0.00e+00; EST_HUMAN HIT: BF377897.1, EVALUE 0.00e+00; SWISSPROT HIT: P03200, EVALUE 3.10e-02
aagcacccactatggatgcacagccggacaaactcaagtcccaagactgcctgggcctagtggccgccctagcatctgctacagaggtctcctctacagctcccatgtctgggaagaagcacagaccaccaggacccctgttctcctcctcagatccccttcctgccacctcttcccactcccaggactcagcccaggtcacctcgatgattcctgcccccttcacagctgcaagcagggatgccagcatgagaagaacaaggcctggcacctcggctcctgcagctgccgcagcagcccctcccccctccacattgaaccccacgtcggggtcactactcaatgcagtggatgaaggcccctcacatttcttggcctcagccacagctgcagcacgtgcccggaggtcacaagtgagatataaccagagatcccagacctcccggaccagatcctgcctcaaacgaaatgccagctccagctcccacagctctac

SEQ ID NO: 28787 - DNA, 106 bp, Homo sapiens
  MAP TO AC011055.6; EXPRESSED IN PLACENTA, SIGNAL = 0.61; EXPRESSED IN ADULT LIVER, SIGNAL = 0.54; EXPRESSED IN FETAL LIVER, SIGNAL = 0.76; EXPRESSED IN BRAIN, SIGNAL = 0.67; EXPRESSED IN BONE MARROW, SIGNAL = 0.59; NT HIT: AL163283.2, EVALUE 5.80e-02
cctggcctgttggttctcatcttcaaggcctgcatcacattctaacatactgtagaactcactcatttggtgtatttccttttttgttgttgtatgactgttccca

SEQ ID NO: 28788 - DNA, 92 bp, Homo sapiens
  MAP TO AC010290.4; EXPRESSED IN ADULT LIVER, SIGNAL = 0.6; EXPRESSED IN FETAL LIVER, SIGNAL = 0.7; EXPRESSED IN BRAIN, SIGNAL = 0.55; EXPRESSED IN PLACENTA, SIGNAL = 0.55; EXPRESSED IN BONE MARROW, SIGNAL = 0.7; EST_HUMAN HIT: AW887037.1, EVALUE 5.00e-12; NT HIT: AF224669.1, EVALUE 8.00e-07
tcaggacttctggttagccaggatgttgcaggcagtggtattagctgtttttttgttgttgttgttgtcatcgttgttgttgttattcattt

SEQ ID NO: 28789 - DNA, 192 bp, Homo sapiens
  MAP TO AL137141.7; EXPRESSED IN LUNG, SIGNAL = 1.6; EXPRESSED IN PLACENTA, SIGNAL = 1.1; EXPRESSED IN BONE MARROW, SIGNAL = 5.7; EXPRESSED IN ADULT LIVER, SIGNAL = 0.86; EXPRESSED IN FETAL LIVER, SIGNAL =   2; EXPRESSED IN BRAIN, SIGNAL = 0.73; SWISSPROT HIT: P13796, EVALUE 2.00e-19; EST_HUMAN HIT: AA356733.1, EVALUE 4.00e-64; NT HIT: gi11434008, EVALUE 2.00e-64
gacccgaagattagtacaagtctgcctgttctggacctcatcgatgccatccaaccaggttccattaactatgaccttctgaagacagaaaatctgaatgatgatgagaaactcaacaatgcaaagtacgtaaataaaaataaacctcagattgggagggaaggacccaactggcagctggatggttgtaaa

SEQ ID NO: 28790 - DNA, 155 bp, Homo sapiens
  MAP TO AC016948.4; EXPRESSED IN PLACENTA, SIGNAL = 0.58; EXPRESSED IN BONE MARROW, SIGNAL = 0.47; EXPRESSED IN ADULT LIVER, SIGNAL = 0.57; EXPRESSED IN BRAIN, SIGNAL = 0.45; EST_HUMAN HIT: AI335973.1, EVALUE 2.10e+00; NT HIT: gi7657340, EVALUE 2.00e-82; SWISSPROT HIT: Q14149, EVALUE 8.00e-03
tgatgccggtgtccttacagtactggaccaagtactgtcccatgacttttagtagatgattatactcttggacattgagaaattcctgtttattatgggatggttccatgacctccaagggtatattaacaattccaaccacgcctgcgccaagt

SEQ ID NO: 28791 - DNA, 149 bp, Homo sapiens
  MAP TO AL121918.15; EXPRESSED IN PLACENTA, SIGNAL = 0.66; EXPRESSED IN FETAL LIVER, SIGNAL = 0.64; EXPRESSED IN BONE MARROW, SIGNAL = 0.59; EXPRESSED IN ADULT LIVER, SIGNAL = 0.69; EXPRESSED IN BRAIN, SIGNAL = 0.71; EST_HUMAN HIT: BF107848.1, EVALUE 5.00e-01; SWISSPROT HIT: P46136, EVALUE 5.20e+00
ctgggccagaaataacaaggctcagcattttgcatcttcgtggtcatgaaaaaagggcaacgtcccacagtgatcgcagtttcctgtttcttcaccccttcactctcccgctccactgatgcatgtttaccttcctctcccatgatcat

SEQ ID NO: 28792 - DNA, 184 bp, Homo sapiens
  MAP TO AC021401.4; EXPRESSED IN BRAIN, SIGNAL = 0.54; EST_HUMAN HIT: AA306361.1, EVALUE 1.00e-02; SWISSPROT HIT: P14078, EVALUE 3.00e+00; NT HIT: AB035256.1, EVALUE 2.00e-03
gtgctccatcatttcctcttcctcctccatcaaacatcagttcccaaaagagcttgtggaattgcctccactcagggccactacgtagacactggccaaatgaccctttggtatcaatcagaaaaggcacccttccttccttcctcaattgagttaaaatgctgattttgttaaagaatgccat

SEQ ID NO: 28793 - DNA, 144 bp, Homo sapiens
  MAP TO AC016282.3; EXPRESSED IN BONE MARROW, SIGNAL = 0.63; EXPRESSED IN PLACENTA, SIGNAL = 0.86; EXPRESSED IN ADULT LIVER, SIGNAL = 0.85; EXPRESSED IN FETAL LIVER, SIGNAL = 0.69; EXPRESSED IN BRAIN, SIGNAL = 0.84; EXPRESSED IN LUNG, SIGNAL = 0.87; SWISSPROT HIT: P17053, EVALUE 6.90e+00; NT HIT: U51026.1, EVALUE 3.20e-01
atgtgtcacattgtcattcgaatgtgtctctggcacagaagacactggctgtgtatcagctgtggcaataacaacatgtttagtggttgccaagccaagagggaaaaaagattaaatgaagaaggtgtagaaagatcagttaat

SEQ ID NO: 28794 - DNA, 102 bp, Homo sapiens
  MAP TO AC026273.2; EXPRESSED IN PLACENTA, SIGNAL = 0.7; EXPRESSED IN ADULT LIVER, SIGNAL = 0.65; EXPRESSED IN BRAIN, SIGNAL = 0.65; EXPRESSED IN BONE MARROW, SIGNAL = 0.55; EXPRESSED IN FETAL LIVER, SIGNAL = 0.7; EST_HUMAN HIT: AI791154.1, EVALUE 9.00e-51; SWISSPROT HIT: Q04609, EVALUE 7.00e-09; NT HIT: AJ012370.1, EVALUE 9.00e-44
ctctggcatgccttgggctgagaaagcattatatggtggcacaatatttgtaacattctcatagccatctggtggtggttcgaggtatgacattttgaaaat

SEQ ID NO: 28795 - DNA, 289 bp, Homo sapiens
  MAP TO AP001505.1; EXPRESSED IN ADULT LIVER, SIGNAL = 0.55; EXPRESSED IN FETAL LIVER, SIGNAL = 0.55; EXPRESSED IN BRAIN, SIGNAL = 0.59; EXPRESSED IN BONE MARROW, SIGNAL = 0.45; NT HIT: AL163301.2, EVALUE 0.00e+00; SWISSPROT HIT: Q07436, EVALUE 2.60e-01
agtgaactggcccgtaaccttctgttccaatttcatattctggggcagcagagggttcctcctggctggtatccggccctggctgaacagaggcctgccctgcagctcaggagtcgtgtctctgacgccttggggttgcaggttttcagcagtgtcactgaagttgcagccagtagggacggggacgtgcttgccggccacctccctgcccctgccctgcccttggcaggtggtcccccaaagcgggaccccaccctgcctgccctgctgctccccggcctggtgcgca

SEQ ID NO: 28796 - DNA, 117 bp, Homo sapiens
  MAP TO AC019078.3; EXPRESSED IN ADULT LIVER, SIGNAL = 0.71; EXPRESSED IN FETAL LIVER, SIGNAL = 0.93; EXPRESSED IN BRAIN, SIGNAL = 0.66; EXPRESSED IN PLACENTA, SIGNAL = 0.71; EXPRESSED IN BONE MARROW, SIGNAL = 0.78; NT HIT: gi9994184, EVALUE 1.00e-49; SWISSPROT HIT: Q9Y580, EVALUE 6.00e-16; EST_HUMAN HIT: BE535767.1, EVALUE 2.00e-49
gcagatagacattatagccgggaacagcgttacactgatcatgggtctgaccatcattacagaggaaagagatgatttcttctatgaagataggaatcatgatggctggagccatga

SEQ ID NO: 28797 - DNA, 101 bp, Homo sapiens
  MAP TO AC021970.2; EXPRESSED IN LUNG, SIGNAL = 0.84; EXPRESSED IN PLACENTA, SIGNAL = 0.77; EXPRESSED IN FETAL LIVER, SIGNAL = 0.69; EXPRESSED IN ADULT LIVER, SIGNAL = 0.79; EXPRESSED IN BRAIN, SIGNAL = 0.7; EXPRESSED IN BONE MARROW, SIGNAL = 0.68; SWISSPROT HIT: P31704, EVALUE 5.50e+00; NT HIT: U65406.1, EVALUE 3.40e+00
agtacttggcagtgggggagacggtgatgacaggcaaagatgtgtcgtacaagaggaggaaacagccctgtggcttcagccagctgttgccatggtggaat

SEQ ID NO: 28798 - DNA, 203 bp, Homo sapiens
  MAP TO AL132866.21; EXPRESSED IN ADULT LIVER, SIGNAL = 0.89; EXPRESSED IN FETAL LIVER, SIGNAL = 0.82; EXPRESSED IN BRAIN, SIGNAL = 0.79; EXPRESSED IN LUNG, SIGNAL = 0.92; EXPRESSED IN PLACENTA, SIGNAL = 0.96; EXPRESSED IN BONE MARROW, SIGNAL = 0.77; EST_HUMAN HIT: AW027545.1, EVALUE 3.00e-09; NT HIT: gi11420516, EVALUE 1.00e-111; SWISSPROT HIT: Q60591, EVALUE 3.00e-34
ctccatggctacatggaaaacaagcctctgggacttcagatcttcattgggacagctgatgagcggatccttaagccgcacgccttctaccaggtgcaccgaatcacggggaaaactgtcaccaccaccagctatgagaagatagtgggcaacaccaaagtcctggagatacccttggagcccaaaaacaacatgagggcaac

SEQ ID NO: 28799 - DNA, 225 bp, Homo sapiens
  MAP TO AL161756.1; EXPRESSED IN LUNG, SIGNAL = 1.2; EXPRESSED IN PLACENTA, SIGNAL = 0.71; EXPRESSED IN FETAL LIVER, SIGNAL = 1.4; EXPRESSED IN BONE MARROW, SIGNAL = 1.3; EXPRESSED IN ADULT LIVER, SIGNAL = 1.1; EXPRESSED IN BRAIN, SIGNAL = 1.3; NT HIT: gi9790272, EVALUE 6.00e-04; SWISSPROT HIT: P27766, EVALUE 7.00e-03; EST_HUMAN HIT: AW813711.1, EVALUE 4.00e-24
gacaaaacaattgaagagctcaggcaatctttagcaaatgttgaaaggatgaaagagaaggcaaatgttgaaacgatgaaagagaaggcagttgtgaaaacagaaaacttgaaaactacattagactctgcagagcaaaaggcaagatcagacaaagagaagacccagcagatgttagatgctgtcacttctgagcccccaacagcaaagagcgcacctgaagaa

SEQ ID NO: 28800 - DNA, 236 bp, Homo sapiens
  MAP TO AL121914.16; EXPRESSED IN PLACENTA, SIGNAL = 0.53; EXPRESSED IN ADULT LIVER, SIGNAL = 0.51; EXPRESSED IN BRAIN, SIGNAL = 0.45; EXPRESSED IN FETAL LIVER, SIGNAL = 0.98; EXPRESSED IN BONE MARROW, SIGNAL = 0.9; NT HIT: AF008551.1, EVALUE 1.00e-130; EST_HUMAN HIT: BE397008.1, EVALUE 1.00e-128; SWISSPROT HIT: P54269, EVALUE 6.90e-02
gctacagctccagttggaggtccaaaacgtgttctcgtgactcagcaatttccttgtcagaatccattacctgtaaatagtggccaggctcagcgggtcttgtgtccttcaaattcttcccagcgcattcctttgcaagcacaaaagcttgtctccagtcacaagccggttcagaatcagaagcagaagcaattgcaggcaaccagtgtacctcatcctgtctccaggccactgaa

SEQ ID NO: 28801 - DNA, 153 bp, Homo sapiens
  MAP TO AL121901.10; EXPRESSED IN PLACENTA, SIGNAL = 0.75; EXPRESSED IN FETAL LIVER, SIGNAL = 0.69; EXPRESSED IN BONE MARROW, SIGNAL = 0.64; EXPRESSED IN ADULT LIVER, SIGNAL = 0.77; EXPRESSED IN BRAIN, SIGNAL = 0.66; EST_HUMAN HIT: AA668391.1, EVALUE 5.20e-01; SWISSPROT HIT: P07743, EVALUE 3.00e-06; NT HIT: S81230.1, EVALUE 3.50e-01
gcccatcattggccagattatcaacctgaaagcctccttggacctcctgaccgcagtcacaattgaaactgatccccagacacaccagcctgttgccgtcctgggagaatgcgccagtgacccaaccagcatctcactttccttgctggacaa

SEQ ID NO: 28802 - DNA, 99 bp, Homo sapiens
  MAP TO AC007492.2; EXPRESSED IN ADULT LIVER, SIGNAL = 0.95; EXPRESSED IN BRAIN, SIGNAL = 0.87; EXPRESSED IN FETAL LIVER, SIGNAL = 1.2; EXPRESSED IN BONE MARROW, SIGNAL = 0.75; EST_HUMAN HIT: BE175575.1, EVALUE 2.00e-08; NT HIT: AB042815.1, EVALUE 4.00e-12
ctcatcaatatctatatacttaacagtggggtttccaccatgaatgaaataaagaatgattcccaagttgttacagaaacttttgccagtatgttgagc

SEQ ID NO: 28803 - DNA, 182 bp, Homo sapiens
  MAP TO AL133414.3; EXPRESSED IN PLACENTA, SIGNAL = 0.8; EXPRESSED IN ADULT LIVER, SIGNAL = 0.67; EXPRESSED IN FETAL LIVER, SIGNAL = 0.62; EXPRESSED IN BRAIN, SIGNAL = 0.58; EXPRESSED IN BONE MARROW, SIGNAL = 0.57; NT HIT: L76666.1, EVALUE 2.00e-98; SWISSPROT HIT: P43630, EVALUE 6.00e-32
gtggtcaggacaaacccttcctgtctgcccggcccagcactgtggtgcctcgaggaggacacgtggctcttcagtgtcactatcgtcgtgggtttaacaatttcatgctgtacaaagaagacagaagccacgttcccatcttccacggcagaatattccaggagagcttcatcatgggccct

SEQ ID NO: 28804 - DNA, 162 bp, Homo sapiens
  MAP TO AC013642.3; EXPRESSED IN ADULT LIVER, SIGNAL = 0.53; EXPRESSED IN BRAIN, SIGNAL = 0.49; EXPRESSED IN PLACENTA, SIGNAL = 0.52; EXPRESSED IN BONE MARROW, SIGNAL = 0.49; SWISSPROT HIT: P98064, EVALUE 8.00e-14; EST_HUMAN HIT: U77054.1, EVALUE 6.00e-47; NT HIT: X59958.1, EVALUE 6.00e-03
ggtgattctgggggacctttagtcacaagggatctgaaagatacgtggtatctcattggaattgtaagctggggagataactgtggtcaaaaggacaagcctggagtctacacacaagtgacttattaccgaaactggattgcttcaaaaacaggcatctaa

SEQ ID NO: 28805 - DNA, 226 bp, Homo sapiens
  MAP TO AC016623.2; EXPRESSED IN LUNG, SIGNAL = 1.2; EXPRESSED IN FETAL LIVER, SIGNAL = 1.1; EXPRESSED IN BRAIN, SIGNAL = 0.97; EXPRESSED IN PLACENTA, SIGNAL = 1.1; EXPRESSED IN ADULT LIVER, SIGNAL = 1.2; EXPRESSED IN BONE MARROW, SIGNAL = 0.99; EST_HUMAN HIT: AA035198.1, EVALUE 2.00e-07; NT HIT: AL161535.2, EVALUE 5.40e-01; SWISSPROT HIT: P28284, EVALUE 1.00e-05
ctgtttggaaaaagactctagaaataattgtccgacacaatgggcatggagtgcttgaaggattgtctttggccagagtccgtaagcagggctcacagaagatgtgatggcaagggtaacacatataagggttgaaataaacgtccagacacactgcacagatgtagctatccttttcttctgcatattcattgtcttcatctgtactcatctcattattcaaagt

SEQ ID NO: 28806 - DNA, 186 bp, Homo sapiens
  MAP TO AL110292.4; EXPRESSED IN FETAL LIVER, SIGNAL = 0.51; EXPRESSED IN BRAIN, SIGNAL = 0.64; EST_HUMAN HIT: AA301233.1, EVALUE 3.00e-61; NT HIT: AF030032.1, EVALUE 4.30e-01; SWISSPROT HIT: P09259, EVALUE 2.90e+00
aattcttcctgcttctccgaaaactcatcctttgctttattactcttcatgggaataaggaaacagctgtgcagtataagttatgtgctctttcttttcttcttgacaactattatcaactcattcttaccgaaaaatgacttaataaacttctctcttctagcctcttttaaaagatctatgtag

SEQ ID NO: 28807 - DNA, 113 bp, Homo sapiens
  MAP TO AL133227.7; EXPRESSED IN PLACENTA, SIGNAL = 0.75; EXPRESSED IN FETAL LIVER, SIGNAL = 0.83; EXPRESSED IN BONE MARROW, SIGNAL = 0.74; EXPRESSED IN ADULT LIVER, SIGNAL = 0.8; EXPRESSED IN BRAIN, SIGNAL = 0.68; NT HIT: AF266285.1, EVALUE 3.90e+00; EST_HUMAN HIT: AI685380.1, EVALUE 2.30e-02
tccagtatcatcagggctgtgcatacatatgaggcactctgggaccacagaggaaggaacaatttattctgtctaggggaaccccagaaagctgcccctgaaaacaatgatat

SEQ ID NO: 28808 - DNA, 189 bp, Homo sapiens
  MAP TO AC016212.3; EXPRESSED IN BONE MARROW, SIGNAL = 0.6; EXPRESSED IN PLACENTA, SIGNAL = 0.5; EXPRESSED IN ADULT LIVER, SIGNAL = 0.54; EXPRESSED IN FETAL LIVER, SIGNAL = 0.58; EXPRESSED IN BRAIN, SIGNAL = 0.47; SWISSPROT HIT: Q07630, EVALUE 1.70e+00; NT HIT: L39123.1, EVALUE 4.40e-01; EST_HUMAN HIT: AW992873.1, EVALUE 1.70e-01
gcctccctgttggacttgaaatccacatggaagagcctgatgtcacaaagcagcagaaacctgatagtaggggcagcaaaggaaggtgttatgagaagttccaccagaagagagagctctggtaaaccctgcatgggcaacaggccgagccacactaggacttcaggggtcctaggcacttttgccatg

SEQ ID NO: 28809 - DNA, 261 bp, Homo sapiens
  MAP TO AL161747.1; EXPRESSED IN ADULT LIVER, SIGNAL = 0.51; EXPRESSED IN BRAIN, SIGNAL = 0.53; EXPRESSED IN LUNG, SIGNAL =  10; EXPRESSED IN FETAL LIVER, SIGNAL = 0.63; EXPRESSED IN BONE MARROW, SIGNAL = 0.63; SWISSPROT HIT: P47820, EVALUE 8.10e-01; NT HIT: gi11437457, EVALUE 0.00e+00; EST_HUMAN HIT: AI458722.1, EVALUE 0.00e+00
gacttggaccactctataggaactcagtatagtgccaacccacctgttacaattgatgtaccaatgacagacatgacatctggcttgatggggcatagccagttgaccaccattgatcagtcagaactgagttcccagctgggtttgagcctagggggtggcaccatcctgccacctgcccagtcacctgaagatcgtctttcaaccaccccttcacctactagttcacttcacgaggatggtgttgaggatttccggagg

SEQ ID NO: 28810 - DNA, 152 bp, Homo sapiens; identical to SEQ ID NO: 28596
  MAP TO AL160414.4; EXPRESSED IN PLACENTA, SIGNAL = 0.76; EXPRESSED IN ADULT LIVER, SIGNAL = 0.73; EXPRESSED IN FETAL LIVER, SIGNAL = 0.96; EXPRESSED IN LUNG, SIGNAL = 0.98; EXPRESSED IN BRAIN, SIGNAL = 1.7; EXPRESSED IN BONE MARROW, SIGNAL = 0.92; NT HIT: gi11421211, EVALUE 1.00e-80; SWISSPROT HIT: P18433, EVALUE 3.00e-25; EST_HUMAN HIT: BE159045.1, EVALUE 2.00e-80

SEQ ID NO: 28811 - DNA, 185 bp, Homo sapiens
  MAP TO AC008269.3; EXPRESSED IN BONE MARROW, SIGNAL = 0.51; EXPRESSED IN ADULT LIVER, SIGNAL = 0.65; EXPRESSED IN FETAL LIVER, SIGNAL = 0.49; EXPRESSED IN BRAIN, SIGNAL = 0.59; EXPRESSED IN PLACENTA, SIGNAL = 0.66; SWISSPROT HIT: P53530, EVALUE 3.90e+00; NT HIT: X69063.1, EVALUE 1.70e+00
tcttaattgccaggttccaaggacagagctgtggaacaacacaagaaaatccccatcatacaagttggaaccgatacgacttgataattgattggcttagtggtgaggaagatgcccagattcttggcttaggccagaagacaggagaaggagtggcattaatacttgaatatgcaagtaggaag

SEQ ID NO: 28812 - DNA, 125 bp, Homo sapiens
  MAP TO AL161744.1; EXPRESSED IN FETAL LIVER, SIGNAL = 0.53; EXPRESSED IN BRAIN, SIGNAL = 0.55; EXPRESSED IN BONE MARROW, SIGNAL = 0.49; NT HIT: gi4503950, EVALUE 3.70e+00; EST_HUMAN HIT: BE001984.1, EVALUE 4.40e+00
tggtgagagggacaccagcatcacccagaagttcagtgatacctttcctctgcaggtcagggctgatggtaggggaagctgtcacaaagctgggtgtcttaatatccatggggattacagcatcc

SEQ ID NO: 28813 - DNA, 75 bp, Homo sapiens
  MAP TO AC011815.2; EXPRESSED IN PLACENTA, SIGNAL = 0.57; EXPRESSED IN FETAL LIVER, SIGNAL = 0.49; EXPRESSED IN BONE MARROW, SIGNAL = 0.51; EXPRESSED IN ADULT LIVER, SIGNAL = 0.58; EXPRESSED IN BRAIN, SIGNAL = 0.93; EST_HUMAN HIT: W45265.1, EVALUE 8.00e-35; NT HIT: X94232.1, EVALUE 6.00e-35
gagggccacacagaagagccggaagcagaggagcaagcccacgaacagcagcccccgcagcaggaagagtactga

SEQ ID NO: 28814 - DNA, 302 bp, Homo sapiens
  MAP TO AL161732.1; EXPRESSED IN PLACENTA, SIGNAL = 1.4; EXPRESSED IN FETAL LIVER, SIGNAL = 0.64; EXPRESSED IN BONE MARROW, SIGNAL = 0.64; EXPRESSED IN ADULT LIVER, SIGNAL = 0.9; EXPRESSED IN BRAIN, SIGNAL = 0.76; SWISSPROT HIT: P20127, EVALUE 1.10e+00; NT HIT: U87960.1, EVALUE 7.40e-01; EST_HUMAN HIT: BF217026.1, EVALUE 1.10e+00
caaactccagatgttgctaaggagaatgccccatcattacatctattgaccagagcagtgctctttgctgcccaacaacaggacgttctctggaagctcattctaatgagaaactgggttattgtggacttcttcaccaaggaacacagtcgaggtgctatagcccaggtagaacttgcagctacaaatgcatatattcagggttactgtgagatctttggagaagttttcctctctctcacagaagttggctttctgctttatatattggatgtttccaatctaatcaaacagaaatacat

SEQ ID NO: 28815 - DNA, 201 bp, Homo sapiens
  MAP TO AC007940.2; EXPRESSED IN LUNG, SIGNAL = 0.89; EXPRESSED IN ADULT LIVER, SIGNAL = 0.98; EXPRESSED IN FETAL LIVER, SIGNAL = 0.77; EXPRESSED IN BRAIN, SIGNAL = 0.91; EXPRESSED IN BONE MARROW, SIGNAL = 0.88; EXPRESSED IN PLACENTA, SIGNAL = 0.94; SWISSPROT HIT: P38652, EVALUE 9.80e-01; EST_HUMAN HIT: AW510690.1, EVALUE 2.80e+00
atccccagagacgtgaagatgcatggaataacacgtgaagagaggaaacttcgggcctgtggtcaaaatgtgttcaccacggcagacaactgcttgggtgacagctttggcctctggatgaattctccttggcgagcaatcgtcccacctgtaggtgccttcatgatcgtctgtgtgcagggcaccaagcaggccatctaa

SEQ ID NO: 28816 - DNA, 201 bp, Homo sapiens
  MAP TO AC019263.4; EXPRESSED IN ADULT LIVER, SIGNAL = 0.85; EXPRESSED IN BRAIN, SIGNAL = 0.62; EXPRESSED IN BONE MARROW, SIGNAL = 0.64; EXPRESSED IN PLACENTA, SIGNAL = 0.77; EXPRESSED IN FETAL LIVER, SIGNAL = 0.85; SWISSPROT HIT: P00607, EVALUE 7.50e-01; EST_HUMAN HIT: AI419754.1, EVALUE 1.80e-01; NT HIT: X15191.1, EVALUE 1.20e-01
ttaattaagataataagaaaaccagttagggaaattgtacagttcaggattgtgtggcttcagctgcaactgaatgcaggtgtttgtgatgcagtcacatccctgccttttacaatatctcttagcttcatttttctctgtgtgtttcaacttttggtactcctgccacatgatggagcagggccaaagatccactatctt

SEQ ID NO: 28817 - DNA, 228 bp, Homo sapiens
  MAP TO AC010349.6; EXPRESSED IN PLACENTA, SIGNAL = 0.48; EXPRESSED IN FETAL LIVER, SIGNAL = 0.53; EXPRESSED IN BRAIN, SIGNAL = 0.99; EXPRESSED IN BONE MARROW, SIGNAL = 0.43; SWISSPROT HIT: P94661, EVALUE 4.00e+00; EST_HUMAN HIT: BE562247.1, EVALUE 2.00e-01; NT HIT: D17346.1, EVALUE 5.40e-01
catgctctggccaggttgatctttcttgaaaaatgcctctagccctctttttccatctctttccctctttcccctcatggtcttggtacttccagttctcttagcatagaaatttttctgcatatttatgcatagctggtccctgcttttctgtcctttgctcacatagcatcttctcaaagggcatttctggacgacctgatctaaaatcgtctctttcctcaccat

SEQ ID NO: 28818 - DNA, 319 bp, Homo sapiens
  MAP TO AL132654.12; EXPRESSED IN BRAIN, SIGNAL = 0.86; EXPRESSED IN BONE MARROW, SIGNAL = 0.7; EXPRESSED IN LUNG, SIGNAL = 0.83; EXPRESSED IN PLACENTA, SIGNAL = 0.84; EXPRESSED IN ADULT LIVER, SIGNAL = 0.81; EXPRESSED IN FETAL LIVER, SIGNAL = 2.5; EST_HUMAN HIT: AL449770.1, EVALUE 0.00e+00; SWISSPROT HIT: O05909, EVALUE 2.10e+00; NT HIT: AB037756.1, EVALUE 0.00e+00
gtagttattgcaggttcagactgatcagaaaatggacctggaccaggcttgtcctcagctaaagtgtctgttttcacatcatggctactcggcttgtcttccgcagtcttttcagtcactgccgtaccacttttcgttgtgcttgatagagacgccggagcagtggaagtgcaggtggttgccatgggtggactgaggagtcccccaacaccaaacatctggggcacagcagccatgcctggcagcatcatgggcagcatgctcagggtacttttgacctcttcacctgttggcatcgtggcaaagccagctggaaacc

SEQ ID NO: 28819 - DNA, 202 bp, Homo sapiens
  MAP TO AC011790.4; EXPRESSED IN BONE MARROW, SIGNAL = 0.85; EXPRESSED IN LUNG, SIGNAL = 1.1; EXPRESSED IN PLACENTA, SIGNAL = 1.1; EXPRESSED IN ADULT LIVER, SIGNAL = 0.95; EXPRESSED IN FETAL LIVER, SIGNAL = 0.78; EXPRESSED IN BRAIN, SIGNAL = 0.93; NT HIT: AF162664.1, EVALUE 1.90e+00; SWISSPROT HIT: P34262, EVALUE 6.50e+00; EST_HUMAN HIT: BE074185.1, EVALUE 7.10e-01
aggtttcatagcaccttctcttaaacaagtccctgattattatgttttgggtcatcccacaaacaccatgtagcttggtgtttgtccctctctgccagttctgctgaagatctctgctaactgtgcatcttgtcttggagatgtcattgcccatgactggaatgccggtgtctatgaagacagtgatattggtgtattactc

SEQ ID NO: 28820 - DNA, 126 bp, Homo sapiens
  MAP TO AC011930.3; EXPRESSED IN LUNG, SIGNAL = 0.85; EXPRESSED IN PLACENTA, SIGNAL = 0.86; EXPRESSED IN ADULT LIVER, SIGNAL = 1.1; EXPRESSED IN FETAL LIVER, SIGNAL = 0.75; EXPRESSED IN BRAIN, SIGNAL = 0.71; EXPRESSED IN BONE MARROW, SIGNAL = 0.63; EST_HUMAN HIT: BE222681.1, EVALUE 1.60e+00; NT HIT: AB003088.1, EVALUE 1.10e+00
tacaatgcactcatccttcttcgtcttgtgattcatcagtctgataaccaagattgctatactaagtgatgaatgggcacgtatcatatgcagcatgggtaagctagacatagcatgattcacgtc

SEQ ID NO: 28821 - DNA, 108 bp, Homo sapiens
  MAP TO AC022918.2; EXPRESSED IN PLACENTA, SIGNAL = 0.67; EXPRESSED IN FETAL LIVER, SIGNAL = 0.56; EXPRESSED IN ADULT LIVER, SIGNAL = 0.52; EXPRESSED IN BRAIN, SIGNAL = 0.49; EXPRESSED IN BONE MARROW, SIGNAL = 0.56; EST_HUMAN HIT: AI793091.1, EVALUE 3.40e-01; NT HIT: X57331.1, EVALUE 2.00e-04; SWISSPROT HIT: P51795, EVALUE 7.20e+00
cttctgatggtttgctggcaacctttggtgttccttggccagcagctgcgtaactccaatctctaccttcatctccccatgtatgtgtcctataaggacatcagtcat

SEQ ID NO: 28822 - DNA, 156 bp, Homo sapiens
  MAP TO AC018530.4; EXPRESSED IN LUNG, SIGNAL = 1.2; EXPRESSED IN PLACENTA, SIGNAL = 1.2; EXPRESSED IN ADULT LIVER, SIGNAL =   1; EXPRESSED IN FETAL LIVER, SIGNAL = 1.6; EXPRESSED IN BRAIN, SIGNAL = 1.4; EXPRESSED IN BONE MARROW, SIGNAL = 1.6; SWISSPROT HIT: P10180, EVALUE 2.30e+00; EST_HUMAN HIT: AA664886.1, EVALUE 3.40e-02; NT HIT: AB012086.1, EVALUE 5.60e+00
ctgaatcttctagtggctcccagggaccacggagcaataattcaaagtggcatggtagagagatccatggcagagggccagttctcccttccaatagttcaacccaaaaagaatgggaggagaaaaatagagcaccctggaggaaagaatgcttga

SEQ ID NO: 28823 - DNA, 92 bp, Homo sapiens
  MAP TO AC018389.3; EXPRESSED IN LUNG, SIGNAL = 1.1; EXPRESSED IN PLACENTA, SIGNAL = 0.97; EXPRESSED IN FETAL LIVER, SIGNAL = 0.7; EXPRESSED IN BONE MARROW, SIGNAL = 0.8; EXPRESSED IN ADULT LIVER, SIGNAL = 0.86; EXPRESSED IN BRAIN, SIGNAL = 0.71; EST_HUMAN HIT: AA628447.1, EVALUE 2.80e-01; SWISSPROT HIT: Q07300, EVALUE 5.50e+00; NT HIT: AL161559.2, EVALUE 4.90e-02
tggtagattggtagatttggcaatgggaacgtggggaaatatttttctgtttgcttccgtattctcagttcgataagaagtgaggtcatcag

SEQ ID NO: 28824 - DNA, 107 bp, Homo sapiens
  MAP TO AC019222.3; EXPRESSED IN ADULT LIVER, SIGNAL = 1.3; EXPRESSED IN BRAIN, SIGNAL = 0.9; EXPRESSED IN LUNG, SIGNAL = 1.2; EXPRESSED IN PLACENTA, SIGNAL =   1; EXPRESSED IN FETAL LIVER, SIGNAL = 0.85; EXPRESSED IN BONE MARROW, SIGNAL = 0.88; EST_HUMAN HIT: AV750211.1, EVALUE 5.00e-37
atgcaggtcactgcaatcaaccaatcaccaactgtagaagaaataatggagatgacattgatcagtggtcttctaactttgatttgtttgttcttaatggcagaatc

SEQ ID NO: 28825 - DNA, 122 bp, Homo sapiens
  MAP TO AL121889.3; EXPRESSED IN PLACENTA, SIGNAL = 0.54; EXPRESSED IN FETAL LIVER, SIGNAL = 0.71; EXPRESSED IN BRAIN, SIGNAL = 0.5; EXPRESSED IN BONE MARROW, SIGNAL = 0.66; EST_HUMAN HIT: AA280050.1, EVALUE 1.00e-62
atgacagttcggactatcacaggaaatatctactatgcaaggtcaggaactaagattattgggaaggttcacgaaaagttcacgttgattgatggcatccgcgtggcaacaggctcctacag

SEQ ID NO: 28826 - DNA, 140 bp, Homo sapiens
  MAP TO AC022268.3; EXPRESSED IN PLACENTA, SIGNAL = 0.73; EXPRESSED IN FETAL LIVER, SIGNAL = 0.63; EXPRESSED IN BONE MARROW, SIGNAL = 0.54; EXPRESSED IN ADULT LIVER, SIGNAL = 0.67; EXPRESSED IN BRAIN, SIGNAL = 0.65; SWISSPROT HIT: P53832, EVALUE 6.10e-01; EST_HUMAN HIT: AV729428.1, EVALUE 3.00e-73; NT HIT: AF193276.1, EVALUE 8.00e-02
ctttttcgtttccatttgcataatttggaggcttgtttttgtcaatgctgttaaagctctgacttctcctatttaaattagaggctccctggaccttgctgctgcttcctgcagcaggcaccctagagggccctggaagc

SEQ ID NO: 28827 - DNA, 154 bp, Homo sapiens
  MAP TO AC013726.3; EXPRESSED IN LUNG, SIGNAL = 0.92; EXPRESSED IN PLACENTA, SIGNAL = 1.4; EXPRESSED IN ADULT LIVER, SIGNAL = 0.76; EXPRESSED IN FETAL LIVER, SIGNAL = 0.83; EXPRESSED IN BRAIN, SIGNAL = 0.59; EXPRESSED IN BONE MARROW, SIGNAL = 0.52; SWISSPROT HIT: Q14764, EVALUE 2.70e-01; NT HIT: AL161556.2, EVALUE 1.40e+00
ggctgggctctgccatcgctgaccacggggtgttgatcctcccagccaaagctgagccagttggattctccttcccaataactgcccactgggaccaagagacgcagagctgggaacgtatggtgctgagctgcatgaagagccgccctggaga

SEQ ID NO: 28828 - DNA, 104 bp, Homo sapiens
  MAP TO AC020704.3; EXPRESSED IN ADULT LIVER, SIGNAL = 0.54; EXPRESSED IN BRAIN, SIGNAL = 0.48; EXPRESSED IN FETAL LIVER, SIGNAL = 0.49; SWISSPROT HIT: P41641, EVALUE 3.20e+00; EST_HUMAN HIT: AU126115.1, EVALUE 3.30e-01
gaggggaagggctgtgccatcatcctccaaaagaaggtggaaaaggcaaaagatggaaagaagataccactttctcgtggaaaggcgggaggagaagagaagga

SEQ ID NO: 28829 - DNA, 132 bp, Homo sapiens
  MAP TO AC018731.3; EXPRESSED IN PLACENTA, SIGNAL = 1.1; EXPRESSED IN ADULT LIVER, SIGNAL =   1; EXPRESSED IN FETAL LIVER, SIGNAL =   1; EXPRESSED IN BRAIN, SIGNAL = 0.84; EXPRESSED IN LUNG, SIGNAL = 0.97; EXPRESSED IN BONE MARROW, SIGNAL = 0.74; EST_HUMAN HIT: AA056427.1, EVALUE 4.40e-01; SWISSPROT HIT: Q12815, EVALUE 6.20e-01
atggacaaggtggtgagctctctgctggcagggacctggcgctctcatcctgtgtccttagcacccggcagaggtccaagagggctcctggtctgggctgggaaggtgaccaacacggcgttgggggttgag

SEQ ID NO: 28830 - DNA, 255 bp, Homo sapiens
  MAP TO AC010789.7; EXPRESSED IN LUNG, SIGNAL = 1.8; EXPRESSED IN ADULT LIVER, SIGNAL = 1.6; EXPRESSED IN BRAIN, SIGNAL = 1.6; EXPRESSED IN BONE MARROW, SIGNAL = 2.4; EXPRESSED IN PLACENTA, SIGNAL = 1.1; EXPRESSED IN FETAL LIVER, SIGNAL = 1.8; SWISSPROT HIT: P26831, EVALUE 2.00e-01; NT HIT: AB014579.1, EVALUE 0.00e+00; EST_HUMAN HIT: BE278917.1, EVALUE 0.00e+00
tcatcactacatcttttctcactccattcatgtttgatttgtaccaggtggcaagggtgtggatagcaacgtagttggcttcaaattcacaatttggattagtgaggactccttttaaccgtgggatgagttctgtggatcttcctttgtacgggcccagaaacagtctcttctgatcataatcattagcatgaatgttatcccagattactggagctctcttaataatcttagaaacctcttcgatggactcta

SEQ ID NO: 28831 - DNA, 161 bp, Homo sapiens
  MAP TO AC022939.2; EXPRESSED IN BONE MARROW, SIGNAL = 0.46; EXPRESSED IN ADULT LIVER, SIGNAL = 0.74; EXPRESSED IN BRAIN, SIGNAL = 0.58; EXPRESSED IN PLACENTA, SIGNAL = 0.55; EXPRESSED IN FETAL LIVER, SIGNAL = 0.55; NT HIT: gi8923248, EVALUE 2.00e-79; SWISSPROT HIT: P09081, EVALUE 3.00e+00; EST_HUMAN HIT: AA182952.1, EVALUE 4.00e-79
agaaaatcataccatcaaaagggtagatagctttgcagtgtccaatagcaggcaagggatcatcatcctcaaattcatcatcaaactcattgtggtgaccatgctgctggggtggcccacggacttcctggtttgcatcatcagtgtaacttccctcagga

SEQ ID NO: 28832 - DNA, 227 bp, Homo sapiens
  MAP TO AL136438.8; EXPRESSED IN LUNG, SIGNAL = 1.3; EXPRESSED IN ADULT LIVER, SIGNAL = 1.2; EXPRESSED IN BRAIN, SIGNAL = 1.1; EXPRESSED IN BONE MARROW, SIGNAL = 1.1; EXPRESSED IN PLACENTA, SIGNAL = 1.1; EXPRESSED IN FETAL LIVER, SIGNAL = 1.1; SWISSPROT HIT: P22199, EVALUE 4.00e+00; EST_HUMAN HIT: AW242647.1, EVALUE 8.10e-01
caacaggtgaagtggatgaaactgatcaacttgttgaaagctctagaacaaatcactgtggtactctttcagtggtgctgctggacatctcaggacacatttgtctaaaattccttcaggcgtttcctgtcccacacatgccagaacctgatgatacatctaccattacaaatgaaacatgtggccggcaaatccacatgcagaagtgcagctctgctcccatactt

SEQ ID NO: 28833 - DNA, 76 bp, Homo sapiens
  MAP TO AL133544.5; EXPRESSED IN ADULT LIVER, SIGNAL = 0.57; EXPRESSED IN BRAIN, SIGNAL = 0.56; EXPRESSED IN PLACENTA, SIGNAL = 0.58; EXPRESSED IN BONE MARROW, SIGNAL = 0.46; EST_HUMAN HIT: AW090541.1, EVALUE 2.30e-01; NT HIT: L27220.1, EVALUE 6.00e-01
gctgagtgcctttgttatcattaatcttttcccgggacttgataaaccctttgacctgcagagtcttatcattctt

SEQ ID NO: 28834 - DNA, 203 bp, Homo sapiens
  MAP TO AC013726.3; EXPRESSED IN PLACENTA, SIGNAL = 0.64; EXPRESSED IN ADULT LIVER, SIGNAL = 0.84; EXPRESSED IN BRAIN, SIGNAL = 0.73; EXPRESSED IN FETAL LIVER, SIGNAL = 0.89; EXPRESSED IN BONE MARROW, SIGNAL = 0.83; SWISSPROT HIT: O15736, EVALUE 2.00e-06; EST_HUMAN HIT: BE907639.1, EVALUE 1.00e-110; NT HIT: AK024453.1, EVALUE 1.00e-111
ctggagtctttttcattctctgcattaagccgattggcttcctgggctttctcagccatccatctggtgaccagctcctggttctcttccgtagttttcctcagttttccctccaaggcagtaaaagtgatctgcagggcatcatattcatccttcagggtctggttggctctttcaaggtcacaaagcttagtgcgcaggtc

SEQ ID NO: 28835 - DNA, 138 bp, Homo sapiens
  MAP TO AL132775.14; EXPRESSED IN PLACENTA, SIGNAL = 0.9; EXPRESSED IN LUNG, SIGNAL = 1.1; EXPRESSED IN ADULT LIVER, SIGNAL = 0.92; EXPRESSED IN BRAIN, SIGNAL = 0.98; EXPRESSED IN BONE MARROW, SIGNAL = 0.96; EXPRESSED IN FETAL LIVER, SIGNAL = 0.87; EST_HUMAN HIT: H69214.1, EVALUE 2.00e-24; NT HIT: AL163283.2, EVALUE 9.00e-14
ttattcgtggattttttttccaataaaagtatagggtgtgtctgcctctcctgctttcccttccacctcttccacctcttctgcctctgccacccctaagacagcaagaccaatctcctctacctcctcctcctcagt

SEQ ID NO: 28836 - DNA, 474 bp, Homo sapiens
  MAP TO AL139395.2; EXPRESSED IN PLACENTA, SIGNAL = 0.53; EXPRESSED IN BRAIN, SIGNAL = 0.53; EXPRESSED IN FETAL LIVER, SIGNAL = 0.49; SWISSPROT HIT: O60673, EVALUE 6.60e-02; EST_HUMAN HIT: BE900630.1, EVALUE 4.40e-01
gcgactacagtccttgatctcacccatagcatcatatgagatctcaatgaaggaactatcatcactgaaactccctgatgtctccagggaattagcaagatggccctgctttggattcttaagttgctctacttcagtcccactgcatggtttatttaaggcaggcttttctccattatcctttccatctttcttctctacacctttgtcttcctgtccttcctctttgcctttcttcttgtccaagtttttatcttcctccccccagatgatgctcacatcagggaccttgaattgggaaaaatcactgctctgcttcagggccccactcttagactctcgcttggggcaggtagtaaagacgctgggaaaaaagttgaattgggcatcttcctgcatcaaaagagtagtcttgtctcgaacattgtcctgaaaggattcatatcgaattttcagggagcagacatcactgcc

SEQ ID NO: 28837 - DNA, 174 bp, Homo sapiens
  MAP TO AC023296.2; EXPRESSED IN LUNG, SIGNAL = 1.1; EXPRESSED IN PLACENTA, SIGNAL = 0.96; EXPRESSED IN FETAL LIVER, SIGNAL = 0.94; EXPRESSED IN BRAIN, SIGNAL =   1; EXPRESSED IN BONE MARROW, SIGNAL = 0.89; EXPRESSED IN ADULT LIVER, SIGNAL =   1; NT HIT: D90906.1, EVALUE 1.60e+00; SWISSPROT HIT: P33730, EVALUE 6.00e-10
ctcgacacgtgggcagagggctactccactggccgttgctccgacactgggctcgagacacgccctgcagcaaatagcccgtgttgcaggtgaaattcacgacatcattcaggttgaactcactgccattagtgaatccgtgggcagggtttccagggtgaccacatgtgatgg

SEQ ID NO: 28838 - DNA, 164 bp, Homo sapiens
  MAP TO AL139117.3; EXPRESSED IN ADULT LIVER, SIGNAL = 0.57; EXPRESSED IN BRAIN, SIGNAL = 0.57; EXPRESSED IN PLACENTA, SIGNAL = 0.6; EXPRESSED IN FETAL LIVER, SIGNAL = 0.62; EXPRESSED IN BONE MARROW, SIGNAL = 0.67; NT HIT: AJ223498.1, EVALUE 3.80e-01; EST_HUMAN HIT: AI436093.1, EVALUE 1.40e-01; SWISSPROT HIT: Q15031, EVALUE 6.80e+00
aacgctgcggtcaactagacaacactaaagggctgcatgagacagtctattctgattactgccttgattctgctttccattatgatcaccacacccagttctatgataaccacacccaattcaacacaccagattctcacctttgtcgactgacttctgacact

SEQ ID NO: 28839 - DNA, 99 bp, Homo sapiens
  MAP TO AC015750.4; EXPRESSED IN PLACENTA, SIGNAL = 0.93; EXPRESSED IN FETAL LIVER, SIGNAL = 1.5; EXPRESSED IN BONE MARROW, SIGNAL = 1.3; EXPRESSED IN BRAIN, SIGNAL = 0.71; EST_HUMAN HIT: BE897947.1, EVALUE 7.80e-02
gcatctttcaaacacttcacttgataatgtagacacaaccatagaaaggcctgatactctctttagagaaaatggaagtgaagagtatcccaggagcaa

SEQ ID NO: 28840 - DNA, 109 bp, Homo sapiens
  MAP TO AC013497.4; EXPRESSED IN ADULT LIVER, SIGNAL =   1; EXPRESSED IN BRAIN, SIGNAL = 0.87; EXPRESSED IN PLACENTA, SIGNAL = 0.86; EXPRESSED IN FETAL LIVER, SIGNAL = 0.96; EXPRESSED IN LUNG, SIGNAL = 0.93; EXPRESSED IN BONE MARROW, SIGNAL = 0.83; EST_HUMAN HIT: N42165.1, EVALUE 3.00e-14; NT HIT: AF109774.1, EVALUE 9.30e-01; SWISSPROT HIT: Q37711, EVALUE 9.40e+00
aggacacgatctgagctggagaattgaagttactgttaggaacgtagttgaaatcactgatgagtgtggctttatgacaaggagtaaaggagcagataccattaatatg

SEQ ID NO: 28841 - DNA, 172 bp, Homo sapiens
  MAP TO AL137225.7; EXPRESSED IN ADULT LIVER, SIGNAL = 1.1; EXPRESSED IN PLACENTA, SIGNAL = 0.83; EXPRESSED IN FETAL LIVER, SIGNAL = 0.72; EXPRESSED IN BRAIN, SIGNAL = 0.7; EXPRESSED IN BONE MARROW, SIGNAL = 0.7; NT HIT: gi11420709, EVALUE 7.00e-06; EST_HUMAN HIT: BE439894.1, EVALUE 1.00e-05; SWISSPROT HIT: Q08623, EVALUE 2.00e-03
tcagccccctggcatgagcgctgcagtggggaacacatcccttggcctgtcttggctttcttccaacagctcttccaccaggagctgcaggacatccacgaccacctgcgccacctccaacgccttcttacccatgaccagggacttcacatccccggtgtattccttttca

SEQ ID NO: 28842 - DNA, 107 bp, Homo sapiens; identical to SEQ ID NO: 24325
  MAP TO AC024038.3; EXPRESSED IN ADULT LIVER, SIGNAL = 0.99; EXPRESSED IN FETAL LIVER, SIGNAL = 0.88; EXPRESSED IN BONE MARROW, SIGNAL = 0.92; EXPRESSED IN LUNG, SIGNAL = 0.91; EXPRESSED IN PLACENTA, SIGNAL = 0.89; EXPRESSED IN BRAIN, SIGNAL = 0.79; EST_HUMAN HIT: AI927629.1, EVALUE 1.30e+00; SWISSPROT HIT: Q99189, EVALUE 5.50e+00

SEQ ID NO: 28843 - DNA, 222 bp, Homo sapiens
  MAP TO AL136365.3; EXPRESSED IN FETAL LIVER, SIGNAL = 0.55; EXPRESSED IN PLACENTA, SIGNAL = 0.6; EXPRESSED IN BONE MARROW, SIGNAL = 0.56; EXPRESSED IN ADULT LIVER, SIGNAL = 0.63; EXPRESSED IN BRAIN, SIGNAL = 0.65; NT HIT: AJ276801.1, EVALUE 1.00e-122; SWISSPROT HIT: P75343, EVALUE 7.40e-01
tcacaggggatcccccgaggggatttcccacctccccagaagcagaatcagcagccaaggccatggagtactgcgggcagttgtatagattgttgtaataaggaaacagagacggctggtagaagctgctgtagtaggtggagtctgaaaccaggtcaggtgtgttctccacatgccctctgctggtgacagcaggaatatcctggatgaccatacgtccct

SEQ ID NO: 28844 - DNA, 229 bp, Homo sapiens
  MAP TO AL136313.3; EXPRESSED IN LUNG, SIGNAL = 0.95; EXPRESSED IN BONE MARROW, SIGNAL = 0.84; EXPRESSED IN ADULT LIVER, SIGNAL = 0.94; EXPRESSED IN PLACENTA, SIGNAL = 0.91; EXPRESSED IN FETAL LIVER, SIGNAL = 0.82; EXPRESSED IN BRAIN, SIGNAL = 0.86; NT HIT: gi6678709, EVALUE 5.50e-01; SWISSPROT HIT: Q9Y2E4, EVALUE 6.00e-01; EST_HUMAN HIT: AL040537.1, EVALUE 2.10e-01
gctccgtgcaaagacactttgcataccttaattcacttaatactcaggaaaaccctgtgagaaaaattttagagctgtggaaactctcagcctttgaggatttggataacctgcccaaggccactttgaatctaataaatgctccttggtccaatcgaagttgcttctcactattacacaccctacactcctataagatgctaatggaattgatcctgccatgctctag

SEQ ID NO: 28845 - DNA, 143 bp, Homo sapiens
  MAP TO AC012571.3; EXPRESSED IN ADULT LIVER, SIGNAL = 0.79; EXPRESSED IN FETAL LIVER, SIGNAL = 0.57; EXPRESSED IN BONE MARROW, SIGNAL = 0.6; EXPRESSED IN LUNG, SIGNAL = 0.85; EXPRESSED IN PLACENTA, SIGNAL = 0.9; EXPRESSED IN BRAIN, SIGNAL = 0.63; SWISSPROT HIT: O15393, EVALUE 4.00e-08; EST_HUMAN HIT: BE181019.1, EVALUE 1.00e-04; NT HIT: gi7661557, EVALUE 8.00e-05
cttacatgcatctatttttccttccatgaatccagcacataacattcctggagttatcaggccatcatacacatcctttctgttacacacatcagtgcttatggtttccactctggcttgccgaagtgtattttgtataggtc

SEQ ID NO: 28846 - DNA, 125 bp, Homo sapiens
  MAP TO AC024736.2; EXPRESSED IN FETAL LIVER, SIGNAL = 0.78; EXPRESSED IN PLACENTA, SIGNAL = 0.93; EXPRESSED IN BRAIN, SIGNAL = 0.83; EXPRESSED IN ADULT LIVER, SIGNAL =   1; EXPRESSED IN BONE MARROW, SIGNAL = 0.73; SWISSPROT HIT: P40379, EVALUE 5.40e+00
tgcctatcgaaaatggtgaacagaagagggagaatgaaaattggcttgtatcgtcttcttttgtggctacagaaaggctaactttagctttggctttcatggattgtaaacgtgcactggcacct

SEQ ID NO: 28847 - DNA, 83 bp, Homo sapiens
  MAP TO AC022050.2; EXPRESSED IN LUNG, SIGNAL = 1.3; EXPRESSED IN PLACENTA, SIGNAL = 1.3; EXPRESSED IN BRAIN, SIGNAL =   1; EXPRESSED IN BONE MARROW, SIGNAL = 0.95; EXPRESSED IN ADULT LIVER, SIGNAL = 1.2; EXPRESSED IN FETAL LIVER, SIGNAL = 0.98; EST_HUMAN HIT: W27168.1, EVALUE 6.40e-02; NT HIT: X55322.1, EVALUE 4.30e-02
tcaactaaaattggcagctacaagtctttcaatgcggattctttctataccactgtgacacatgaacaggccacactttacaa

SEQ ID NO: 28848 - DNA, 117 bp, Homo sapiens
  MAP TO AC010769.3; EXPRESSED IN PLACENTA, SIGNAL = 0.48; EXPRESSED IN FETAL LIVER, SIGNAL = 1.8; EXPRESSED IN BRAIN, SIGNAL = 0.8; EXPRESSED IN BONE MARROW, SIGNAL = 1.5; EXPRESSED IN ADULT LIVER, SIGNAL = 0.81; SWISSPROT HIT: P49049, EVALUE 5.00e-03; EST_HUMAN HIT: AW103839.1, EVALUE 7.00e-55
aggcaacaactgaggcaataataagtgtgcaagttactaaatagaggagagcaggttgcccctttttcatcagcaccagaacaacaaatgtaagtatcatgccaatagcataggcaa

SEQ ID NO: 28849 - DNA, 156 bp, Homo sapiens
  MAP TO AL158849.5; EXPRESSED IN ADULT LIVER, SIGNAL = 0.87; EXPRESSED IN FETAL LIVER, SIGNAL = 1.3; EXPRESSED IN BRAIN, SIGNAL =   1; EXPRESSED IN BONE MARROW, SIGNAL = 0.95; EXPRESSED IN PLACENTA, SIGNAL =   1; EST_HUMAN HIT: AU135384.1, EVALUE 7.00e-59; NT HIT: gi11421778, EVALUE 5.00e-59; SWISSPROT HIT: P49413, EVALUE 2.30e+00
gtaaccatgaaggataacattaatacctttgtttctaggattatagaattatgtctccagttccctcatggaatcacagaccaagtaattcagaatgaaatgcctcatatagaagcccagcagcgggcagtagccatcaataggttgttgtctatg

SEQ ID NO: 28850 - DNA, 146 bp, Homo sapiens
  MAP TO AC018425.3; EXPRESSED IN ADULT LIVER, SIGNAL = 1.5; EXPRESSED IN FETAL LIVER, SIGNAL = 1.5; EXPRESSED IN BONE MARROW, SIGNAL = 1.1; EXPRESSED IN LUNG, SIGNAL = 1.4; EXPRESSED IN PLACENTA, SIGNAL = 1.2; EXPRESSED IN BRAIN, SIGNAL =   1; NT HIT: D90723.1, EVALUE 5.00e-03; EST_HUMAN HIT: AA586456.1, EVALUE 8.00e-03; SWISSPROT HIT: P18615, EVALUE 5.30e+00
cttctgagcataggtccttgtgcagctgtacaagtcacacacctgtgaagctggccctgattagtagtactgtttatgttcttctttttgcttgtcagtattgcattgcttgtacgtcttactttggtaataagaaaaatgataaa

SEQ ID NO: 28851 - DNA, 203 bp, Homo sapiens
  MAP TO AL158206.3; EXPRESSED IN ADULT LIVER, SIGNAL = 0.53; EXPRESSED IN BRAIN, SIGNAL = 1.6; SWISSPROT HIT: Q01981, EVALUE 6.50e+00; NT HIT: AF177987.1, EVALUE 1.00e-111
tgccctggctcctgtacaccgtcattcacagattccagccagtggctgtcagcagcaatggccttttctgtgccatcgtccttctcttcatcatgctgctcttcgtcatcctctctatcgccctctgcaagtggcgaatgaacaaaatcctgggcttcatcatgtttggcctctactttgtgttcctggtggtgagcgttctc

SEQ ID NO: 28852 - DNA, 151 bp, Homo sapiens
  MAP TO AC009924.4; EXPRESSED IN PLACENTA, SIGNAL = 0.82; EXPRESSED IN ADULT LIVER, SIGNAL = 0.8; EXPRESSED IN FETAL LIVER, SIGNAL = 0.75; EXPRESSED IN BRAIN, SIGNAL = 0.82; EXPRESSED IN BONE MARROW, SIGNAL = 0.77; SWISSPROT HIT: Q9ZKY2, EVALUE 1.40e+00; NT HIT: X79468.1, EVALUE 2.20e-02; EST_HUMAN HIT: BF666439.1, EVALUE 5.10e-01
atatttaagtacttattcttctccaccttcctctctaaatcagctttatattcttctaggaagttctcactgttactttttgagttattccaagttttttccacactgtcaagcttggccttatcattccagtagaataaaacatctgctt

SEQ ID NO: 28853 - DNA, 109 bp, Homo sapiens
  MAP TO AL158135.1; EXPRESSED IN PLACENTA, SIGNAL = 1.1; EXPRESSED IN FETAL LIVER, SIGNAL = 1.1; EXPRESSED IN BONE MARROW, SIGNAL = 0.95; EXPRESSED IN LUNG, SIGNAL = 0.87; EXPRESSED IN ADULT LIVER, SIGNAL = 0.99; EXPRESSED IN BRAIN, SIGNAL =   1; NT HIT: AF061981.1, EVALUE 9.30e-01; SWISSPROT HIT: P17589, EVALUE 7.20e+00
aattgacagaaagtctgctaaagattttactcaggaccacaggattttgaataacctggtgtggaagtacgggggaggggggaagggtgggaagttttctgattatatt

SEQ ID NO: 28854 - DNA, 122 bp, Homo sapiens
  MAP TO AL158175.6; EXPRESSED IN ADULT LIVER, SIGNAL = 0.93; EXPRESSED IN BRAIN, SIGNAL = 0.75; EXPRESSED IN LUNG, SIGNAL = 0.85; EXPRESSED IN FETAL LIVER, SIGNAL = 0.78; EXPRESSED IN BONE MARROW, SIGNAL = 1.4; EXPRESSED IN PLACENTA, SIGNAL = 0.87; NT HIT: S80750.1, EVALUE 1.10e+00; EST_HUMAN HIT: F22058.1, EVALUE 1.60e+00
ctgtgttcatcttcagccatgaggggcagattgctgtaaattgacaacttcccattcaagcccttgtctctgcctgagggcttccccatcacaggagcctgcttcactgtgaatgtacttac

SEQ ID NO: 28855 - DNA, 164 bp, Homo sapiens
  MAP TO AC007458.13; EXPRESSED IN ADULT LIVER, SIGNAL = 1.4; EXPRESSED IN BRAIN, SIGNAL = 1.3; EXPRESSED IN LUNG, SIGNAL = 1.4; EXPRESSED IN PLACENTA, SIGNAL = 1.3; EXPRESSED IN FETAL LIVER, SIGNAL = 1.1; EXPRESSED IN BONE MARROW, SIGNAL = 1.5; EST_HUMAN HIT: BE154636.1, EVALUE 5.60e-01; SWISSPROT HIT: P44135, EVALUE 3.90e+00; NT HIT: AL163279.2, EVALUE 3.80e-01
cacttcatgtactttcactacccctgttctgggatcagccaattctccaaggagttctggttcattctagcaaagaatggtatttagaagtcaagatatgggtgatcagtgttctcattgttatcgagatgttactactcccaggccccctcaatggacagagt

SEQ ID NO: 28856 - DNA, 198 bp, Homo sapiens
  MAP TO AC009933.5; EXPRESSED IN BRAIN, SIGNAL = 0.67; EXPRESSED IN BONE MARROW, SIGNAL = 0.66; EXPRESSED IN ADULT LIVER, SIGNAL = 0.79; EXPRESSED IN PLACENTA, SIGNAL = 0.7; EXPRESSED IN FETAL LIVER, SIGNAL = 0.69; NT HIT: M64239.1, EVALUE 1.20e-01; EST_HUMAN HIT: C04803.1, EVALUE 1.10e-02
gaatgccaaaacaaagtctcaaaaaaatagtaaatctaactggctaacacgaccaccacagatgccctacgggattctcctccttctcttccccctctgtctcctctccatcatcattatcatcttcatcatcatcatcatcatcactaccaccaccaccactatcatcatctctagcttccctctttgacttggctg

SEQ ID NO: 28857 - DNA, 79 bp, Homo sapiens
  MAP TO AC011686.3; EXPRESSED IN PLACENTA, SIGNAL = 0.92; EXPRESSED IN ADULT LIVER, SIGNAL = 0.73; EXPRESSED IN FETAL LIVER, SIGNAL = 0.93; EXPRESSED IN BRAIN, SIGNAL = 0.81; EXPRESSED IN BONE MARROW, SIGNAL = 0.82; EST_HUMAN HIT: R66209.1, EVALUE 3.70e+00; SWISSPROT HIT: Q91713, EVALUE 2.50e-02; NT HIT: Z12401.1, EVALUE 6.30e-01
ctctgagcaggtacagcgcaggcagtacatcaggccttgtggctccaagtaggggtgccagctctcgccgggggagtat

SEQ ID NO: 28858 - DNA, 179 bp, Homo sapiens
  MAP TO AC012241.4; EXPRESSED IN LUNG, SIGNAL = 1.1; EXPRESSED IN PLACENTA, SIGNAL = 0.77; EXPRESSED IN ADULT LIVER, SIGNAL =   1; EXPRESSED IN FETAL LIVER, SIGNAL = 0.65; EXPRESSED IN BRAIN, SIGNAL = 0.63; EXPRESSED IN BONE MARROW, SIGNAL = 0.71; NT HIT: gi6981363, EVALUE 4.20e-01; SWISSPROT HIT: P15989, EVALUE 3.00e+00; EST_HUMAN HIT: R13673.1, EVALUE 1.60e-01
agggtgtgacacagagggagcaccgcaacatcttttactccacagaaatgaagaggaacatgtaggtcatgtgataaaaactgattggcgttttctggacagatcattaactgaaataaatgatttggatttccacaaaattctaccacacactttcttttttggatatcagttttcat

SEQ ID NO: 28859 - DNA, 135 bp, Homo sapiens
  MAP TO AL157392.2; EXPRESSED IN PLACENTA, SIGNAL = 0.69; EXPRESSED IN ADULT LIVER, SIGNAL = 0.69; EXPRESSED IN FETAL LIVER, SIGNAL = 0.82; EXPRESSED IN BRAIN, SIGNAL = 0.51; EXPRESSED IN BONE MARROW, SIGNAL = 0.74; EST_HUMAN HIT: AA092475.1, EVALUE 4.50e-01; NT HIT: AF141676.1, EVALUE 3.00e-01
cttgcggaaaggacagtcatccctcgcccgcgcctgctcaccgtcttgacattccgcaaagggacttatctccctgactaatgtgcagcatttttgtttgcatcccttggcctcatcattaatcaccgaaactct

SEQ ID NO: 28860 - DNA, 98 bp, Homo sapiens
  MAP TO AC015525.3; EXPRESSED IN PLACENTA, SIGNAL = 0.65; EXPRESSED IN FETAL LIVER, SIGNAL = 0.52; EXPRESSED IN BRAIN, SIGNAL = 0.76; EXPRESSED IN BONE MARROW, SIGNAL = 0.49; NT HIT: gi4758695, EVALUE 1.00e-48; EST_HUMAN HIT: BE935648.1, EVALUE 1.00e-43
aaccccatgcagtttgaagaatcggactgtgactcttcagatggggagtgttctgatgccacagttaggaccaataaacactacagctctgctacctg

SEQ ID NO: 28861 - DNA, 96 bp, Homo sapiens
  MAP TO AL157396.2; EXPRESSED IN ADULT LIVER, SIGNAL = 0.73; EXPRESSED IN BRAIN, SIGNAL = 0.71; EXPRESSED IN PLACENTA, SIGNAL = 0.77; EXPRESSED IN FETAL LIVER, SIGNAL = 0.56; EXPRESSED IN BONE MARROW, SIGNAL = 0.59; NT HIT: U65981.1, EVALUE 8.00e-01; EST_HUMAN HIT: AW963796.1, EVALUE 3.00e-47; SWISSPROT HIT: P38671, EVALUE 7.20e+00
gacagttgaagatgacttactgctccaaaaaccatttcagaaagaaaaacatggaaaggtggcccataaacaagttgcagcagaattgctggatag

SEQ ID NO: 28862 - DNA, 288 bp, Homo sapiens
  MAP TO AC009467.3; EXPRESSED IN PLACENTA, SIGNAL = 0.67; EXPRESSED IN ADULT LIVER, SIGNAL = 0.84; EXPRESSED IN FETAL LIVER, SIGNAL = 0.61; EXPRESSED IN BRAIN, SIGNAL = 0.66; EXPRESSED IN BONE MARROW, SIGNAL = 0.71; SWISSPROT HIT: Q16478, EVALUE 8.80e-02; EST_HUMAN HIT: BF351951.1, EVALUE 1.00e-74
attttgccttgggttagattctcttctacacgtttctaaagacccaggtctcttatctttttcatcaccaataaatttttcattattgctattttttgcagtatctgttgtagcatatctatcccttgaactgttaccatattttactaagtctgattctctactttcttgacaattttgtgctttatctgaatatgtgggtttcctccaccgttcccgtctataatcttctttcgtggatgcagctttttcagcatcttctaattttgactgaaatatttccattga

SEQ ID NO: 28863 - DNA, 114 bp, Homo sapiens
  MAP TO AC019099.3; EXPRESSED IN ADULT LIVER, SIGNAL = 0.98; EXPRESSED IN BRAIN, SIGNAL = 0.6; EXPRESSED IN BONE MARROW, SIGNAL = 0.61; EXPRESSED IN LUNG, SIGNAL = 0.99; EXPRESSED IN PLACENTA, SIGNAL =   1; EXPRESSED IN FETAL LIVER, SIGNAL = 0.59; SWISSPROT HIT: P08547, EVALUE 7.20e-02; NT HIT: AF047741.1, EVALUE 2.00e-05; EST_HUMAN HIT: AA772497.1, EVALUE 2.00e-06
atggaagacattactattaagatgacagcactccacaaattgatctacatattcaactcagttcctatcaaaatcctagcttctctttttgcagaaattgacttgctgatctaa

SEQ ID NO: 28864 - DNA, 409 bp, Homo sapiens
  MAP TO AC025324.2; EXPRESSED IN ADULT LIVER, SIGNAL = 1.3; EXPRESSED IN BRAIN, SIGNAL = 1.1; EXPRESSED IN LUNG, SIGNAL = 1.2; EXPRESSED IN PLACENTA, SIGNAL = 1.4; EXPRESSED IN FETAL LIVER, SIGNAL = 0.94; EXPRESSED IN BONE MARROW, SIGNAL = 1.2; EST_HUMAN HIT: AL043810.1, EVALUE 4.00e-13; NT HIT: AL163301.2, EVALUE 1.00e-03; SWISSPROT HIT: P03390, EVALUE 4.10e-02
tgcttccttcccgctgggacagccgagcccatcccagtggtgatggtggtggcagcccatctggaacagccactgtggagatgccagctgagtgggggaggcatggccagggctgcatactctgtggagctggtgggggccgagagcaggtgggagcccctccccctactgagttggcagtgcaggagccccacactcctgggcacagctgcagccacccagctgtggctctagacctgggcatccctgcactctcaggagcctgggaagcccctgctcccacaggcttggaagtgcctgctcctgctccctggcctctccccactcctagcacctgcatgaagacaggtgatgagccagtgcagagcaaagttgtggccaagtctgagtgctgttgcaacccagccag

SEQ ID NO: 28865 - DNA, 147 bp, Homo sapiens
  MAP TO AC011280.3; EXPRESSED IN LUNG, SIGNAL = 0.84; EXPRESSED IN BONE MARROW, SIGNAL =   1; EXPRESSED IN ADULT LIVER, SIGNAL = 0.81; EXPRESSED IN BRAIN, SIGNAL =   1; EXPRESSED IN PLACENTA, SIGNAL = 1.1; EXPRESSED IN FETAL LIVER, SIGNAL = 1.1; SWISSPROT HIT: Q03691, EVALUE 9.00e+00; NT HIT: AF218890.1, EVALUE 8.40e-02
tgctataataaaaccatggtgctgatttatgatgaacgtggagatgtaccacctagatttctcttcaaggaaggacttgtttcctctgctgatggaattcctgtcaacagagacctttcaggtgccagtgacttggagaaggcctga

SEQ ID NO: 28866 - DNA, 109 bp, Homo sapiens
  MAP TO AL122007.7; EXPRESSED IN LUNG, SIGNAL =   1; EXPRESSED IN BONE MARROW, SIGNAL = 1.1; EXPRESSED IN PLACENTA, SIGNAL = 0.95; EXPRESSED IN ADULT LIVER, SIGNAL = 1.4; EXPRESSED IN FETAL LIVER, SIGNAL = 1.1; EXPRESSED IN BRAIN, SIGNAL = 1.2; SWISSPROT HIT: P78559, EVALUE 1.10e+00; NT HIT: AL163303.2, EVALUE 2.00e-23; EST_HUMAN HIT: AW880885.1, EVALUE 2.00e-18
aagagaacttgaattagaagtgaagcctgaagatgtgactgaattgctgcaatctcgagagaaaactttaatgcataaggagctgctttttacggatgagcaaacaaag

SEQ ID NO: 28867 - DNA, 85 bp, Homo sapiens
  MAP TO AC021774.3; EXPRESSED IN ADULT LIVER, SIGNAL =   1; EXPRESSED IN BRAIN, SIGNAL = 0.75; EXPRESSED IN BONE MARROW, SIGNAL = 0.81; EXPRESSED IN LUNG, SIGNAL =   1; EXPRESSED IN PLACENTA, SIGNAL = 0.94; EXPRESSED IN FETAL LIVER, SIGNAL = 0.68; NT HIT: AF217413.1, EVALUE 1.70e-01; EST_HUMAN HIT: AI472562.1, EVALUE 1.00e+00
ttatgcagtctctgtgttcttcatgccctttgttgattctccagattctggactgggggcctcgtggtcctgttggtaggtgata

SEQ ID NO: 28868 - DNA, 111 bp, Homo sapiens
  MAP TO AC013823.3; EXPRESSED IN FETAL LIVER, SIGNAL = 0.47; EXPRESSED IN PLACENTA, SIGNAL = 0.92; EXPRESSED IN ADULT LIVER, SIGNAL = 0.85; EXPRESSED IN BONE MARROW, SIGNAL = 0.51; EXPRESSED IN BRAIN, SIGNAL = 0.59; EST_HUMAN HIT: AV710874.1, EVALUE 1.40e+00; SWISSPROT HIT: P80958, EVALUE 1.40e+00; NT HIT: L81138.1, EVALUE 9.60e-01
tccagtgactctttagactcaggtacagcaggacccgcatccttgctctcccaagttcttcctgtggaaactccaccaggttcttgaacctctttaaatacctttcctcat

SEQ ID NO: 28869 - DNA, 167 bp, Homo sapiens
  MAP TO AC007957.34; EXPRESSED IN ADULT LIVER, SIGNAL = 1.3; EXPRESSED IN BRAIN, SIGNAL = 2.9; EXPRESSED IN LUNG, SIGNAL = 1.4; EXPRESSED IN PLACENTA, SIGNAL = 1.1; EXPRESSED IN FETAL LIVER, SIGNAL = 1.5; EXPRESSED IN BONE MARROW, SIGNAL = 1.7; NT HIT: AF012872.1, EVALUE 4.00e-78; EST_HUMAN HIT: AL042025.1, EVALUE 6.00e-78; SWISSPROT HIT: P42356, EVALUE 8.00e-22
ttgaagcggggcccgatggccgccacgtgccggttcatgctccccttggccctgccgatgttcagggacatggagcgctgcagcaggctggagaagatctccacttggtcagagctgcagtacttggcgatctcaaaccgctgcaccaggaactgagcgaaaagagg

SEQ ID NO: 28870 - DNA, 78 bp, Homo sapiens
  MAP TO AC016057.3; EXPRESSED IN FETAL LIVER, SIGNAL = 0.54; EXPRESSED IN PLACENTA, SIGNAL = 0.7; EXPRESSED IN ADULT LIVER, SIGNAL = 0.63; EXPRESSED IN BONE MARROW, SIGNAL = 0.54; EXPRESSED IN BRAIN, SIGNAL = 0.52; NT HIT: AF034411.1, EVALUE 6.20e-01; EST_HUMAN HIT: AW371245.1, EVALUE 9.20e-01
gtagagggtgatgttcaatgtctgcctcagacaggtggaggtgctatttgcaagaataaagaacagaagcagcatcag

SEQ ID NO: 28871 - DNA, 150 bp, Homo sapiens
  MAP TO AL139805.2; EXPRESSED IN BONE MARROW, SIGNAL = 0.98; EXPRESSED IN LUNG, SIGNAL =   1; EXPRESSED IN PLACENTA, SIGNAL = 0.97; EXPRESSED IN ADULT LIVER, SIGNAL = 0.93; EXPRESSED IN FETAL LIVER, SIGNAL = 0.77; EXPRESSED IN BRAIN, SIGNAL = 1.2; EST_HUMAN HIT: BF530021.1, EVALUE 1.00e-26; NT HIT: D86984.1, EVALUE 7.00e-27
atggaggtgctaagcctggagcagaccctggaggtgaagctgccgtctgccgtctcacagctggtcaacctcaaagatgtggaccattcatctctggtagtagaccatcctgcactggctttttggagcagaattttaaaatcctctgcc

SEQ ID NO: 28872 - DNA, 106 bp, Homo sapiens
  MAP TO AC016847.3; EXPRESSED IN PLACENTA, SIGNAL = 0.85; EXPRESSED IN ADULT LIVER, SIGNAL = 0.54; EXPRESSED IN FETAL LIVER, SIGNAL = 0.51; EXPRESSED IN BRAIN, SIGNAL = 0.65; EXPRESSED IN BONE MARROW, SIGNAL = 0.69; EST_HUMAN HIT: BF371416.1, EVALUE 4.00e-53; NT HIT: gi10835090, EVALUE 3.00e-53; SWISSPROT HIT: P22003, EVALUE 5.00e-14
ttatctcggacgactcctctgaccacccagagtcctcctctagccagcctccatgataccaactttctgaatgatgctgacatggtcatgagctttgtcaacttag

SEQ ID NO: 28873 - DNA, 142 bp, Homo sapiens
  MAP TO AC025644.2; EXPRESSED IN ADULT LIVER, SIGNAL = 0.84; EXPRESSED IN BRAIN, SIGNAL = 0.59; EXPRESSED IN PLACENTA, SIGNAL = 0.76; EXPRESSED IN FETAL LIVER, SIGNAL = 0.57; EXPRESSED IN BONE MARROW, SIGNAL = 0.57
tctgcacaattgacctcttcttcttcctctttatcctcttctttttcttcccctcccctcttccttctctttctcctcctgttctcgtttcatcatcatcatcatcatcatcatcatcatcatcatcatcagctatgaatgg

SEQ ID NO: 28874 - DNA, 121 bp, Homo sapiens
  MAP TO AL121828.6; EXPRESSED IN PLACENTA, SIGNAL = 0.83; EXPRESSED IN ADULT LIVER, SIGNAL = 0.83; EXPRESSED IN FETAL LIVER, SIGNAL = 0.73; EXPRESSED IN BRAIN, SIGNAL = 0.81; EXPRESSED IN BONE MARROW, SIGNAL = 0.73; EXPRESSED IN LUNG, SIGNAL = 1.2; NT HIT: gi4557848, EVALUE 4.20e+00; SWISSPROT HIT: P09175, EVALUE 1.40e+00; EST_HUMAN HIT: AW177011.1, EVALUE 3.90e-01
agatgtggaactgtttattactacggcatgacctggccccgtctgactgatacagagaaactggtacactcatgggaaaaacaaccaccaaacatggcatcggctaaagagctggcaccag

SEQ ID NO: 28875 - DNA, 496 bp, Homo sapiens
  MAP TO AP000404.2; EXPRESSED IN ADULT LIVER, SIGNAL = 0.85; EXPRESSED IN BONE MARROW, SIGNAL = 0.86; EXPRESSED IN BRAIN, SIGNAL = 1.1; EXPRESSED IN PLACENTA, SIGNAL = 0.98; EXPRESSED IN FETAL LIVER, SIGNAL = 0.9; SWISSPROT HIT: P53810, EVALUE 7.00e+00; NT HIT: gi11526138, EVALUE 0.00e+00; EST_HUMAN HIT: AU140704.1, EVALUE 0.00e+00
gcctctggactagagattgtctcttcttttttctgtgcctggttgtgactatgaggccacaatacactgttacgacataaagtggcacctgaatcttgtaacatagaaagtccaaagtctgtattttccctctgctccaaaattctttgtgtacagttagagatgccacctgcacttccatctatccattttgcagaatattttggtacttgggagtcaaactgtgggagtaatttttcttctggcttatgcctgaaattaaacagatgatgctgggggtttttagaacattcagaatctgaatccagatccttattttgtgcatactgcacaatccagtttatcttcttactcaaaatggttttaacttcttcataagtactttttgaaagcttagatcgaggacaaccctggtttgcaattaaatggtatttttcaaagcagtctttatggccccttaatgatttggtgtgcaagagatcagactttggtaccc

SEQ ID NO: 28876 - DNA, 99 bp, Homo sapiens
  MAP TO AC013751.3; EXPRESSED IN BRAIN, SIGNAL = 0.47; EXPRESSED IN BONE MARROW, SIGNAL = 0.53; EXPRESSED IN PLACENTA, SIGNAL = 0.47; EXPRESSED IN FETAL LIVER, SIGNAL = 0.46; NT HIT: gi11425374, EVALUE 4.00e-49; SWISSPROT HIT: O75131, EVALUE 6.00e-14; EST_HUMAN HIT: AW026680.1, EVALUE 6.00e-49
gtggagtgttatgattatgacaatgatgggtcacatgatctcattggaacatttcagaccaccatgacaaaactgaaagaagcctccagaagctcacct

SEQ ID NO: 28877 - DNA, 110 bp, Homo sapiens
  MAP TO AC025740.1; EXPRESSED IN FETAL LIVER, SIGNAL = 0.88; EXPRESSED IN PLACENTA, SIGNAL = 0.79; EXPRESSED IN ADULT LIVER, SIGNAL = 0.78; EXPRESSED IN BRAIN, SIGNAL = 0.67; EXPRESSED IN BONE MARROW, SIGNAL = 0.69; SWISSPROT HIT: P24550, EVALUE 3.20e+00; EST_HUMAN HIT: BE621997.1, EVALUE 5.50e+00; NT HIT: M90724.1, EVALUE 9.40e-01
tcttcgcccagctctgtgtaggtacttggggagtatacagaactggaagatgcttcatcccttccggggcttaaaactgagttgctccaagcctctggttctggacacat

SEQ ID NO: 28878 - DNA, 153 bp, Homo sapiens
  MAP TO AP001254.2; EXPRESSED IN HELA, SIGNAL = 6.8; EXPRESSED IN LUNG, SIGNAL = 3.5; EXPRESSED IN PLACENTA, SIGNAL = 4.2; EXPRESSED IN ADULT LIVER, SIGNAL = 2.2; EXPRESSED IN FETAL LIVER, SIGNAL = 7.7; EXPRESSED IN BRAIN, SIGNAL = 0.56; EXPRESSED IN BONE MARROW, SIGNAL = 0.77; SWISSPROT HIT: P05783, EVALUE 5.00e-17; EST_HUMAN HIT: AW664648.1, EVALUE 1.00e-47; NT HIT: X12883.1, EVALUE 2.00e-45
caactcggactccaggtgcatcagggtccccttgggctgctccatttgcagggcatagcgggcctccacctccttcaggctgttctccaagctggccttcagatttctcatcgagtacaggtcgatctccaaggactgaactgtatgtctcat

SEQ ID NO: 28879 - DNA, 119 bp, Homo sapiens
  MAP TO AL121918.15; EXPRESSED IN BONE MARROW, SIGNAL = 0.68; EXPRESSED IN ADULT LIVER, SIGNAL = 0.76; EXPRESSED IN BRAIN, SIGNAL = 0.58; EXPRESSED IN PLACENTA, SIGNAL = 0.82; EXPRESSED IN FETAL LIVER, SIGNAL = 0.7; EST_HUMAN HIT: BF348634.1, EVALUE 3.90e-01
atgaccttgtcactttacattcatgagaatgacaataaaaataatattgaccacgataacaacatccaagggcttcccttggccggtaccattactcttatgttcacgtgcattgaagg

SEQ ID NO: 28880 - DNA, 134 bp, Homo sapiens
  MAP TO AC010767.3; EXPRESSED IN PLACENTA, SIGNAL = 0.82; EXPRESSED IN ADULT LIVER, SIGNAL = 0.92; EXPRESSED IN FETAL LIVER, SIGNAL = 0.95; EXPRESSED IN BRAIN, SIGNAL = 0.8; EXPRESSED IN BONE MARROW, SIGNAL = 0.71; EST_HUMAN HIT: AA699499.1, EVALUE 4.50e-01; SWISSPROT HIT: P25588, EVALUE 7.00e+00; NT HIT: gi7661685, EVALUE 3.00e-01
ttaactggaaatcagaatcttcccactcttcaggatttttgttttgtgctttatattgtttgtttttaaagcaattttctgaattaatgttgtaaagtttgtcttcttagtcatgtgtggtctctgaaatttgt

SEQ ID NO: 28881 - DNA, 141 bp, Homo sapiens
  MAP TO AC022474.3; EXPRESSED IN BRAIN, SIGNAL = 0.45; EXPRESSED IN PLACENTA, SIGNAL = 0.49; EXPRESSED IN ADULT LIVER, SIGNAL = 0.61; EXPRESSED IN BONE MARROW, SIGNAL = 0.44; SWISSPROT HIT: Q14157, EVALUE 4.00e+00
aatgtattttgaaggtctttgcctttctctttgctcgctttcagtttcatctgcttcgtagaaagattctctctaatctgggtactctcagtatactgtgtattttgctgatgagacactgctttaagaacattctggtac

SEQ ID NO: 28882 - DNA, 238 bp, Homo sapiens
  MAP TO AC011957.2; EXPRESSED IN PLACENTA, SIGNAL = 0.62; EXPRESSED IN BONE MARROW, SIGNAL = 0.63; EXPRESSED IN ADULT LIVER, SIGNAL = 0.7; EXPRESSED IN FETAL LIVER, SIGNAL = 0.5; EXPRESSED IN BRAIN, SIGNAL =   2; NT HIT: gi11526464, EVALUE 5.00e-63; EST_HUMAN HIT: AW897155.1, EVALUE 7.00e-63; SWISSPROT HIT: O00507, EVALUE 1.10e+00
atcatcaaggaccagaaactgcttgtgatcgtggggggcatgctgctgatcgacctgtgtatcctgatctgctggcaggctgtggaccccctgcgaaggacagtggagaagtacagcatggaggtaagccctccatgccggcaggagggaagcctgcagatgcagcccctggcacatgaggacagtgaggctgcacagctcccagactgcccagtaccccactgggaacacttcatca

SEQ ID NO: 28883 - DNA, 132 bp, Homo sapiens
  MAP TO AC019040.3; EXPRESSED IN BONE MARROW, SIGNAL = 0.81; EXPRESSED IN ADULT LIVER, SIGNAL =   1; EXPRESSED IN FETAL LIVER, SIGNAL = 0.88; EXPRESSED IN BRAIN, SIGNAL = 0.79; EXPRESSED IN LUNG, SIGNAL = 0.84; EXPRESSED IN PLACENTA, SIGNAL =   1; NT HIT: M88626.1, EVALUE 2.50e-01; EST_HUMAN HIT: AW468908.1, EVALUE 1.20e+00
taagacagtgcatatgctctccttgggaattaatgaaacagaaaatagcaaaagggagacacaggttctgccctcagacaaattactggatgggggtaataagaaggtggctgccatcagagaaaaaggcaa

SEQ ID NO: 28884 - DNA, 138 bp, Homo sapiens
  MAP TO AC015638.4; EXPRESSED IN FETAL LIVER, SIGNAL = 0.53; EXPRESSED IN PLACENTA, SIGNAL = 0.7; EXPRESSED IN ADULT LIVER, SIGNAL = 0.82; EXPRESSED IN BRAIN, SIGNAL = 0.51; EXPRESSED IN BONE MARROW, SIGNAL = 0.58; SWISSPROT HIT: P05512, EVALUE 9.10e+00; NT HIT: gi7706271, EVALUE 1.20e+00
cagtatgttcagtgatgctgatctttactacatatctgctgtaaaatatgaaaagtggattgctagttttgatgttatctaggttatcatttgtgactaaaaagacctgtttgttactctggttcttctccactatgg

SEQ ID NO: 28885 - DNA, 284 bp, Homo sapiens
  MAP TO AC007613.3; EXPRESSED IN PLACENTA, SIGNAL = 0.68; EXPRESSED IN FETAL LIVER, SIGNAL = 0.6; EXPRESSED IN BRAIN, SIGNAL = 0.54; EXPRESSED IN BONE MARROW, SIGNAL = 0.61; EST_HUMAN HIT: R17132.1, EVALUE 0.00e+00; SWISSPROT HIT: P43662, EVALUE 4.90e+00; NT HIT: AL161531.2, EVALUE 1.70e-01
atttattaactccaaggcaagaagcagttcctgttgtctctttaccggcacccagtttttctcatgaagttggaagtgagctggcctcagttcctgttatgcccttaacttctattttgccactacaagtggaagagagcgctctgccatctgcagtgctggcaaatggaggaaagatgcccttcactatgccagaagcttttctagatgatggagatatggtccttggagatgaactagatgacctgcttgattctgcacctgaaactaatgaaactgttatg

SEQ ID NO: 28886 - DNA, 107 bp, Homo sapiens
  MAP TO AC013584.3; EXPRESSED IN BONE MARROW, SIGNAL = 0.49; EXPRESSED IN ADULT LIVER, SIGNAL = 0.6; EXPRESSED IN BRAIN, SIGNAL = 0.51; EXPRESSED IN PLACENTA, SIGNAL = 0.71; EXPRESSED IN FETAL LIVER, SIGNAL = 0.54; EST_HUMAN HIT: BE176618.1, EVALUE 4.00e-44
gatgtgcaaatatatgtcagagctgaagttgaccctcttcctttacaatcacatattactctatcagattctggttttgaaacctgagtttggtagaaagaatatgg

SEQ ID NO: 28887 - DNA, 89 bp, Homo sapiens
  MAP TO AC020991.3; EXPRESSED IN PLACENTA, SIGNAL = 0.73; EXPRESSED IN ADULT LIVER, SIGNAL = 0.8; EXPRESSED IN FETAL LIVER, SIGNAL = 0.49; EXPRESSED IN BRAIN, SIGNAL = 0.46; EXPRESSED IN BONE MARROW, SIGNAL = 0.59; SWISSPROT HIT: P52497, EVALUE 3.20e+00; EST_HUMAN HIT: H74277.1, EVALUE 5.00e-43; NT HIT: AF001032.1, EVALUE 3.00e-03
atgggtctggtagtgatgttcatgaatgtggtttttctggtgttgtataatgtcaacacactggaatacctgcataactcactggacca

SEQ ID NO: 28888 - DNA, 137 bp, Homo sapiens
  MAP TO AC011831.4; EXPRESSED IN ADULT LIVER, SIGNAL = 0.87; EXPRESSED IN BRAIN, SIGNAL = 0.66; EXPRESSED IN BONE MARROW, SIGNAL = 0.6; EXPRESSED IN PLACENTA, SIGNAL = 0.69; EXPRESSED IN FETAL LIVER, SIGNAL = 0.6; EST_HUMAN HIT: AI050027.1, EVALUE 1.20e-01; NT HIT: X78344.1, EVALUE 7.80e-02
gtagctatagatacattcaatgctgaattccaagacagcattgctttcattattatcttgattgaaaagatccttttgatggaagcaacagcccatctggagcagcagctgcaaagacatttgctgcagtggagaag

SEQ ID NO: 28889 - DNA, 152 bp, Homo sapiens
  MAP TO AL157792.2; EXPRESSED IN PLACENTA, SIGNAL = 0.64; EXPRESSED IN FETAL LIVER, SIGNAL = 0.62; EXPRESSED IN BRAIN, SIGNAL = 0.63; EXPRESSED IN BONE MARROW, SIGNAL = 0.58; EXPRESSED IN ADULT LIVER, SIGNAL = 0.76; SWISSPROT HIT: P98160, EVALUE 8.00e-03; EST_HUMAN HIT: BE383245.1, EVALUE 8.00e+00
atctgaggtgatggcaggtatggtcaaagttcctccattcaaaacagtcttttcaggcagagtcccaaaggacctgacccaggtgagagaaggtgcaggctctcctcctgttgtaacacatactaatgttatggcctctccaggatttacaa

SEQ ID NO: 28890 - DNA, 186 bp, Homo sapiens
  MAP TO AC009943.4; EXPRESSED IN PLACENTA, SIGNAL = 0.63; EXPRESSED IN FETAL LIVER, SIGNAL = 0.63; EXPRESSED IN ADULT LIVER, SIGNAL = 0.84; EXPRESSED IN BONE MARROW, SIGNAL = 0.61; EXPRESSED IN BRAIN, SIGNAL = 0.58; NT HIT: AB018302.1, EVALUE 6.80e+00; SWISSPROT HIT: P02533, EVALUE 5.10e-02
atagcaccaacacaagatatggtgctggctttagtagcagtggtgcctctctggatgtgggatttggttgggggatatctgatgaaaagggattggaagtcagtaaagctgatgggagagaaactagaggcagtggatctgctgggggtgaaaccatagtctttggacctgatgcaggtagctcag

SEQ ID NO: 28891 - DNA, 231 bp, Homo sapiens
  MAP TO AC009334.3; EXPRESSED IN ADULT LIVER, SIGNAL = 0.93; EXPRESSED IN FETAL LIVER, SIGNAL = 0.7; EXPRESSED IN BRAIN, SIGNAL = 0.8; EXPRESSED IN BONE MARROW, SIGNAL = 1.1; EXPRESSED IN PLACENTA, SIGNAL = 0.81; EST_HUMAN HIT: AW385095.1, EVALUE 1.00e-123; SWISSPROT HIT: Q99698, EVALUE 3.00e-39; NT HIT: gi11427235, EVALUE 1.00e-127
acatattttggaatggatgtctctgcagttgaagatccagttcagagacgagcgctagaaaccatgataaaaacctacgggcagactccccgtcagctgttccacatggcccatgtgagcagacctggagccaagctcaatattgaaggagagcttccagctgctgtggggttgctagtgcagtttgctttcagggagacccgagaacaggtcaaagaaatcacctatccg

SEQ ID NO: 28892 - DNA, 77 bp, Homo sapiens
  MAP TO AL121901.10; EXPRESSED IN BONE MARROW, SIGNAL = 0.45; EXPRESSED IN ADULT LIVER, SIGNAL = 0.55; EXPRESSED IN BRAIN, SIGNAL = 0.45; EXPRESSED IN PLACENTA, SIGNAL = 0.52; EST_HUMAN HIT: AW964460.1, EVALUE 2.30e-01
ctctactatgtccagctcagccaggttgtaattcatggccagaaagtccgggagtgggagccccacttgaagcacat

SEQ ID NO: 28893 - DNA, 207 bp, Homo sapiens
  MAP TO AC013291.4; EXPRESSED IN PLACENTA, SIGNAL = 0.5; EXPRESSED IN ADULT LIVER, SIGNAL = 0.57; EXPRESSED IN BRAIN, SIGNAL = 0.46; SWISSPROT HIT: Q13563, EVALUE 6.00e-03; EST_HUMAN HIT: N41861.1, EVALUE 5.00e-08; NT HIT: gi8922819, EVALUE 1.00e-113
cttaattgtttcgtatgtatcagtgatcagtgcaatgaaaagacttaaaatcatatatataaagaggctgatgaatgagtagaggtaaattctactaaacagccagactaagtaacttttttgctgcatttttgcaaacgtggcaaacatatcatctccatttatcagagagaaaaggcactcagagaccatgttcagagaacgaaa

SEQ ID NO: 28894 - DNA, 81 bp, Homo sapiens
  MAP TO AC013626.3; EXPRESSED IN PLACENTA, SIGNAL = 0.49; EXPRESSED IN ADULT LIVER, SIGNAL = 0.53; EXPRESSED IN FETAL LIVER, SIGNAL = 0.51; EXPRESSED IN BRAIN, SIGNAL = 0.56; EXPRESSED IN BONE MARROW, SIGNAL = 0.55; EST_HUMAN HIT: F06450.1, EVALUE 2.00e-38; SWISSPROT HIT: Q10332, EVALUE 6.00e-04; NT HIT: Z46606.1, EVALUE 2.00e-38
ttttgtgatgataacttcttgcttctgaccaagtctatggcatctgtcaaagcactgatcttcagcagcaggattccaggc

SEQ ID NO: 28895 - DNA, 104 bp, Homo sapiens
  MAP TO AC025812.4; EXPRESSED IN LUNG, SIGNAL = 0.83; EXPRESSED IN PLACENTA, SIGNAL = 1.4; EXPRESSED IN BONE MARROW, SIGNAL = 0.77; EXPRESSED IN ADULT LIVER, SIGNAL =   1; EXPRESSED IN FETAL LIVER, SIGNAL = 1.2; EXPRESSED IN BRAIN, SIGNAL = 0.75; NT HIT: M81702.1, EVALUE 1.40e-02; SWISSPROT HIT: P20036, EVALUE 9.40e+00
ggcacaatggtttgggtattcaagaaaacaagaataaaagtcatggcatcctgcagaccaaagcaagacctaacccttgtgtgaggtataatcagtatcttgag

SEQ ID NO: 28896 - DNA, 175 bp, Homo sapiens
  MAP TO AL121584.17; EXPRESSED IN LUNG, SIGNAL =   1; EXPRESSED IN PLACENTA, SIGNAL = 1.1; EXPRESSED IN FETAL LIVER, SIGNAL = 0.95; EXPRESSED IN ADULT LIVER, SIGNAL = 1.1; EXPRESSED IN BRAIN, SIGNAL = 0.83; EXPRESSED IN BONE MARROW, SIGNAL = 0.9; SWISSPROT HIT: P09780, EVALUE 1.70e+00; EST_HUMAN HIT: AV759726.1, EVALUE 2.40e+00; NT HIT: gi11437222, EVALUE 1.60e+00
agtgtgtctggaggacctggccaggcgccagtactttgggggtgctcaggaccctggcagctctcctagctttctctccctctgcagccctatagccacaaaccatcaattgcagtgaaaccaccttagcctttttgtaaggcacagcctgaggaatatcctccatgtgattaac

SEQ ID NO: 28897 - DNA, 133 bp, Homo sapiens
  MAP TO AL161722.2; EXPRESSED IN PLACENTA, SIGNAL = 0.59; EXPRESSED IN ADULT LIVER, SIGNAL = 0.73; EXPRESSED IN FETAL LIVER, SIGNAL = 0.47; EXPRESSED IN BRAIN, SIGNAL = 0.51; EXPRESSED IN BONE MARROW, SIGNAL = 0.59; SWISSPROT HIT: P43361, EVALUE 3.00e-05
catagctgaggtccagtttgttgacaagagcatagcagtggttgatgaagtccactttctttatttcagtgtcaaagggtagctccatatgctcagaggctctcctgagcattccagagaagtggtttttgta

SEQ ID NO: 28898 - DNA, 162 bp, Homo sapiens
  MAP TO AC015999.3; EXPRESSED IN LUNG, SIGNAL = 1.5; EXPRESSED IN PLACENTA, SIGNAL = 0.68; EXPRESSED IN FETAL LIVER, SIGNAL = 1.3; EXPRESSED IN BRAIN, SIGNAL = 0.65; EXPRESSED IN ADULT LIVER, SIGNAL = 1.1; EXPRESSED IN BONE MARROW, SIGNAL = 1.5; EST_HUMAN HIT: AW393091.1, EVALUE 3.00e-86; SWISSPROT HIT: P02468, EVALUE 3.00e+00; NT HIT: gi10863876, EVALUE 2.00e-86
atagaaatccaagctcctcctggtgtaccaataggttatgttattcagacttggcacccatgtctaccaaagtttacaattcaaaatgagaaaagagaggatgtactaaaaataagtggtccatgtgttgtgtgcagctgttgtggagatgttgattttgag

SEQ ID NO: 28899 - DNA, 143 bp, Homo sapiens
  MAP TO AL157377.1; EXPRESSED IN ADULT LIVER, SIGNAL =   3; EXPRESSED IN BRAIN, SIGNAL = 0.94; EXPRESSED IN BONE MARROW, SIGNAL = 1.1; EXPRESSED IN LUNG, SIGNAL = 1.1; EXPRESSED IN PLACENTA, SIGNAL = 1.1; EXPRESSED IN FETAL LIVER, SIGNAL = 2.2; EST_HUMAN HIT: BE272325.1, EVALUE 5.00e-75; SWISSPROT HIT: P45808, EVALUE 8.00e-01; NT HIT: U73682.1, EVALUE 6.00e-55
caagatcatctttggcatcatttctactggattccatttctgaaggcattgacctatccattttatccaaagaagtcattttaaaacttctgggttctgctggtccagacagtctttcagaattagaataaaatctgtcttcc

SEQ ID NO: 28900 - DNA, 162 bp, Homo sapiens
  MAP TO AC011023.3; EXPRESSED IN LUNG, SIGNAL = 1.3; EXPRESSED IN BRAIN, SIGNAL = 1.2; EXPRESSED IN PLACENTA, SIGNAL = 1.1; EXPRESSED IN ADULT LIVER, SIGNAL = 1.2; EXPRESSED IN FETAL LIVER, SIGNAL = 1.1; EXPRESSED IN BONE MARROW, SIGNAL = 0.9; EST_HUMAN HIT: BE973370.1, EVALUE 1.40e-01; NT HIT: gi4557526, EVALUE 4.00e-84; SWISSPROT HIT: Q15700, EVALUE 3.00e-27
cttcagaggagaaatatgagactgcaagacatatccatggacattttctatttgagagaggttcttttctgatacatgcacgagttctgggcctcttacttcgtgggttagtcgaggtaaggaatgatcatgtggagcgtcctcatcttgatatcgatactt

SEQ ID NO: 28901 - DNA, 135 bp, Homo sapiens
  MAP TO AC027341.1; EXPRESSED IN FETAL LIVER, SIGNAL = 0.87; EXPRESSED IN BONE MARROW, SIGNAL = 0.96; EXPRESSED IN PLACENTA, SIGNAL =   1; EXPRESSED IN ADULT LIVER, SIGNAL = 1.3; EXPRESSED IN BRAIN, SIGNAL = 0.86; EXPRESSED IN LUNG, SIGNAL = 0.94; NT HIT: U35242.1, EVALUE 4.70e+00; SWISSPROT HIT: Q90352, EVALUE 9.10e+00; EST_HUMAN HIT: AI807474.1, EVALUE 1.10e-01
tatgatggcaccatatctcatcttgcacctcaatgatcatctaacaagaatccttctgcagatcccatctaaaattacatttccaggcattccacataaccggaggaaaaaaaacatggatcctatggaaagtat

SEQ ID NO: 28902 - DNA, 133 bp, Homo sapiens
  MAP TO AL162171.1; EXPRESSED IN PLACENTA, SIGNAL = 0.55; EXPRESSED IN BONE MARROW, SIGNAL = 0.55; EXPRESSED IN ADULT LIVER, SIGNAL = 0.52; EXPRESSED IN FETAL LIVER, SIGNAL = 0.59; EXPRESSED IN BRAIN, SIGNAL = 0.52; NT HIT: AJ229043.1, EVALUE 3.00e-01; EST_HUMAN HIT: AU119634.1, EVALUE 4.00e-69
aaagttgaggtcttcgtcaatgagatcatctggttctggcttaatatcaatcacatcttcagagggtgctggctccctcaaaggtttcactgttgacattagtcgggttgcagctccatcatcgtaagtctgt

SEQ ID NO: 28903 - DNA, 398 bp, Homo sapiens
  MAP TO AC021468.2; EXPRESSED IN FETAL LIVER, SIGNAL = 0.5; EXPRESSED IN BRAIN, SIGNAL = 0.47; EXPRESSED IN BONE MARROW, SIGNAL = 0.46; NT HIT: AF200357.1, EVALUE 1.00e-03; EST_HUMAN HIT: AU128804.1, EVALUE 0.00e+00; SWISSPROT HIT: P48980, EVALUE 8.80e+00
ctttcccatggtttggcatggacattgggggaactctagtaaagctctcgtactttgaacctattgatatcacagcagaggaagagcaagaagaagttgagagtttaaaaagtattcggaaatatttgacttctaacgtggcatatggatccaccggcattcgggatgtacaccttgaactgaaagatttaacactttttggccgaagagggaacttgcactttatcaggtttccaacccaggacctgcctacttttatccaaatgggaagagataaaaacttctcaacattgcagacggtgctatgtgctacaggaggtggtgcttacaagtttgaaaaagattttcgcacagtaggtatcttttactcaaaactgaaaattgatacctgtttttaa

SEQ ID NO: 28904 - DNA, 218 bp, Homo sapiens
  MAP TO AC007009.2; EXPRESSED IN BRAIN, SIGNAL = 0.49; EXPRESSED IN BONE MARROW, SIGNAL = 0.52; SWISSPROT HIT: Q06988, EVALUE 1.60e+00; NT HIT: AL139075.2, EVALUE 8.00e-03; EST_HUMAN HIT: BF306044.1, EVALUE 1.90e-01
cccctgcctacccccaggacacagtcagcccaatgccctccctcctggggcagagaatgcttctgaaagggcatccaaaaagagatgatttaaaacagtacagaggaagccaaattttgattgactcaacatttaaactgaaacaacagaggcttcttaaccttattcaactgacaagtgtagaagaccccatcatgctgctcatgaagaaactgctt

SEQ ID NO: 28905 - DNA, 180 bp, Homo sapiens
  MAP TO AC023134.3; EXPRESSED IN LUNG, SIGNAL = 1.3; EXPRESSED IN PLACENTA, SIGNAL = 1.3; EXPRESSED IN ADULT LIVER, SIGNAL = 1.5; EXPRESSED IN FETAL LIVER, SIGNAL =   1; EXPRESSED IN BRAIN, SIGNAL = 0.97; EXPRESSED IN BONE MARROW, SIGNAL = 1.1; NT HIT: AF016052.1, EVALUE 6.00e-28; EST_HUMAN HIT: BF108755.1, EVALUE 8.00e-25; SWISSPROT HIT: O83222, EVALUE 5.10e+00
aatttattccttcaactcacacacaaaaaagttaactgtaaaagatcctcagatgggtccttcaggaggtattccagaaggcatggttatcatggaagatgacagctccatgtatgttattgcccctgaagaccttccagtgggcaaagatgtggaggtagaagatgatcttgaccctgt

SEQ ID NO: 28906 - DNA, 108 bp, Homo sapiens
  MAP TO AC013618.3; EXPRESSED IN BONE MARROW, SIGNAL = 0.51; EXPRESSED IN PLACENTA, SIGNAL = 0.73; EXPRESSED IN ADULT LIVER, SIGNAL = 0.74; EXPRESSED IN FETAL LIVER, SIGNAL = 0.54; EXPRESSED IN BRAIN, SIGNAL =  11; NT HIT: AL163285.2, EVALUE 7.00e-14; EST_HUMAN HIT: AA383873.1, EVALUE 2.00e-05; SWISSPROT HIT: P56699, EVALUE 7.20e+00
ttaaataatcatgaccaaaatgctgatagtgatattcagagtgaaggcaaggttgatgaggtttaagatggaaatgaggaacttatgggaaactagagcaaaggtcat

SEQ ID NO: 28907 - DNA, 118 bp, Homo sapiens
  MAP TO AC016706.2; EXPRESSED IN LUNG, SIGNAL = 1.1; EXPRESSED IN ADULT LIVER, SIGNAL = 1.1; EXPRESSED IN BRAIN, SIGNAL = 0.58; EXPRESSED IN BONE MARROW, SIGNAL = 0.67; EXPRESSED IN PLACENTA, SIGNAL = 1.3; EXPRESSED IN FETAL LIVER, SIGNAL = 0.52; NT HIT: gi9629198, EVALUE 6.60e-02; EST_HUMAN HIT: AI758625.1, EVALUE 3.80e-01; SWISSPROT HIT: P41695, EVALUE 5.40e+00
atcctttaatttcctttttgctatctctctcccatgcctcaggaaccttgactagcttataaaccacaagcatgcaaaaatagtcctggaaaatgccattttgataattgttgtgacc

SEQ ID NO: 28908 - DNA, 183 bp, Homo sapiens
  MAP TO AC018501.5; EXPRESSED IN BONE MARROW, SIGNAL = 0.64; EXPRESSED IN PLACENTA, SIGNAL = 0.59; EXPRESSED IN ADULT LIVER, SIGNAL = 0.67; EXPRESSED IN FETAL LIVER, SIGNAL = 0.62; EXPRESSED IN BRAIN, SIGNAL = 0.6; EST_HUMAN HIT: AA179296.1, EVALUE 5.00e-94; NT HIT: gi11431994, EVALUE 6.00e-99; SWISSPROT HIT: P11881, EVALUE 3.00e-19
ctggaacagctgtttcattgggcagcctatctacttccaagataaagtcatccttgaagaaaagatagcccactattgagaacaggtaaacgaggatcagagccagaactgctgtcaggatgatggaccgtccattgcgagtgacacttttaatgacattaagcaaagtctcttctctgtaca

SEQ ID NO: 28909 - DNA, 157 bp, Homo sapiens
  MAP TO AC022268.3; EXPRESSED IN LUNG, SIGNAL = 1.2; EXPRESSED IN PLACENTA, SIGNAL = 0.96; EXPRESSED IN FETAL LIVER, SIGNAL = 1.1; EXPRESSED IN ADULT LIVER, SIGNAL = 1.1; EXPRESSED IN BRAIN, SIGNAL = 0.88; EXPRESSED IN BONE MARROW, SIGNAL = 0.95; EST_HUMAN HIT: BE072850.1, EVALUE 2.10e+00; NT HIT: Y14379.1, EVALUE 9.10e-02
gtatttactgaccattaactttgtgcaagacactactccaaacattctagtatcaagaatcaaaaagaacaaggcaggtaacacttcttccctcatcaagcatacattgtttaaaggaaaaaacaacaacaacaaggacaacaaaaacaacaaataa

SEQ ID NO: 28910 - DNA, 132 bp, Homo sapiens
  MAP TO AC009597.4; EXPRESSED IN PLACENTA, SIGNAL = 1.1; EXPRESSED IN FETAL LIVER, SIGNAL = 1.1; EXPRESSED IN ADULT LIVER, SIGNAL = 1.1; EXPRESSED IN BRAIN, SIGNAL =   1; EXPRESSED IN BONE MARROW, SIGNAL =   1; NT HIT: AF225908.1, EVALUE 2.90e-01
actggtctacatgttccaacagtactccatggtgcagacatgcacacccttttagtacttctctttgcagcaaagcctcttaacctgtggcccctgggccctgagtggctcaaggatggttttcagcagctc

SEQ ID NO: 28911 - DNA, 92 bp, Homo sapiens
  MAP TO AC018516.3; EXPRESSED IN PLACENTA, SIGNAL = 0.53; EXPRESSED IN BRAIN, SIGNAL = 0.45; EXPRESSED IN BONE MARROW, SIGNAL = 0.45; EST_HUMAN HIT: AI079946.1, EVALUE 1.10e+00
tttgtcaagagccagaagccttgaatggtctctccagaagtctcagctacgtgacctttcaagtcttccatggcagtctcaatggcccccgg

SEQ ID NO: 28912 - DNA, 266 bp, Homo sapiens
  MAP TO AL133355.12; EXPRESSED IN PLACENTA, SIGNAL = 0.82; EXPRESSED IN ADULT LIVER, SIGNAL = 0.77; EXPRESSED IN BRAIN, SIGNAL = 0.68; EXPRESSED IN BONE MARROW, SIGNAL = 0.75; EXPRESSED IN FETAL LIVER, SIGNAL = 0.75; EST_HUMAN HIT: AW840817.1, EVALUE 1.00e-105; SWISSPROT HIT: P22120, EVALUE 2.20e-01
gcccagtcttctcaatgcctttcccccagacttcaacccaggaagaataccttttgttccactcttctccccatctgaaagtgtttttgctctttattaaaaccacgacagtggtatatgctaggatctccttggagacccaaagaatcctgggactttcagacatcaccagcagagcatcctgctgcttctcaaccaactggaaagacatttcagtggcagacagccggccctctgtgggtccaaacagctctgctttctgcctc

SEQ ID NO: 28913 - DNA, 392 bp, Homo sapiens
  MAP TO AC026707.2; EXPRESSED IN ADULT LIVER, SIGNAL = 1.9; EXPRESSED IN FETAL LIVER, SIGNAL = 1.3; EXPRESSED IN BRAIN, SIGNAL =   1; EXPRESSED IN BONE MARROW, SIGNAL = 0.89; EXPRESSED IN LUNG, SIGNAL = 0.91; EXPRESSED IN PLACENTA, SIGNAL = 0.93; NT HIT: AF158378.1, EVALUE 0.00e+00; SWISSPROT HIT: P70473, EVALUE 2.00e-56; EST_HUMAN HIT: AV714764.1, EVALUE 0.00e+00
cttattactttcaatgattttatctgagttaagctgataaatctcttcgcggctgaatccaaattcttcaagtatctcctcagtgtgttctcctatgaaaggatcccttttgaaagaagggatggctggggtgtttaacagcagaggtgcagggcgggggctcacgtcctgctcctcactggtgataaacgagccccgttccttgttgtgatcatgatgaacaacctcctcaaaagtcagaaccggagtcacacaggcatctgtgccgtcaaagatttgacaccactctgccttcgtcttctttgcaaatacatctgcaaacttcttcttcatttctggccaatcatccatgctcatctgattgggaagttcatcagactttagtccaagtc

SEQ ID NO: 28914 - DNA, 75 bp, Homo sapiens
  MAP TO AL121777.16; EXPRESSED IN PLACENTA, SIGNAL = 0.66; EXPRESSED IN ADULT LIVER, SIGNAL = 0.74; EXPRESSED IN FETAL LIVER, SIGNAL = 0.75; EXPRESSED IN BONE MARROW, SIGNAL = 0.71; EXPRESSED IN BRAIN, SIGNAL = 0.69; EST_HUMAN HIT: AI239456.1, EVALUE 8.70e-01; SWISSPROT HIT: P06655, EVALUE 4.30e+00
ctggaagactagcttggccccagagtcatcagaagtggagggttccaccagcccttctgcaaggccgtgaggtcc

SEQ ID NO: 28915 - DNA, 189 bp, Homo sapiens
  MAP TO AL136984.7; EXPRESSED IN BONE MARROW, SIGNAL = 0.73; EXPRESSED IN PLACENTA, SIGNAL = 1.2; EXPRESSED IN ADULT LIVER, SIGNAL = 0.71; EXPRESSED IN FETAL LIVER, SIGNAL = 0.75; EXPRESSED IN BRAIN, SIGNAL = 0.63; NT HIT: gi11425512, EVALUE 1.00e-102; EST_HUMAN HIT: BE388063.1, EVALUE 1.00e-102; SWISSPROT HIT: Q29076, EVALUE 2.30e-02
ctgtgcgatctgtatgggctgagacagggggatctgcgtcatgggcgtggcagcagaggcggagatggtggctccagcagcactgtgctgctggctggcggagtgctgctgcactgcagcagccagcagctgtgcctgtgcctgtgcctgctggagtagtaactgttgctgggcaggcgtcaaagtaag

SEQ ID NO: 28916 - DNA, 129 bp, Homo sapiens
  MAP TO AC015474.3; EXPRESSED IN PLACENTA, SIGNAL = 0.68; EXPRESSED IN ADULT LIVER, SIGNAL = 0.96; EXPRESSED IN FETAL LIVER, SIGNAL = 0.76; EXPRESSED IN BRAIN, SIGNAL = 0.58; EXPRESSED IN BONE MARROW, SIGNAL = 0.73; NT HIT: gi10835044, EVALUE 7.00e-67; SWISSPROT HIT: O94788, EVALUE 2.00e-20; EST_HUMAN HIT: AW962814.1, EVALUE 1.00e-66
tggaacttccccctgctgatgtttgcctggaaaatagctccagctttgtgctgtggcaatacagtagttattaagccagcagagcaaacaccactcagtgcactctacatgggagccctcatcaaggag

SEQ ID NO: 28917 - DNA, 267 bp, Homo sapiens
  MAP TO AC011778.3; EXPRESSED IN BRAIN, SIGNAL = 0.59; EXPRESSED IN PLACENTA, SIGNAL = 0.74; EXPRESSED IN ADULT LIVER, SIGNAL = 0.78; EXPRESSED IN FETAL LIVER, SIGNAL = 0.64; EXPRESSED IN BONE MARROW, SIGNAL = 0.63; NT HIT: L36861.1, EVALUE 1.60e-01; SWISSPROT HIT: P34531, EVALUE 1.10e+00; EST_HUMAN HIT: T65843.1, EVALUE 2.40e-01
atgtctcatgtccactttgtcagggccttaggagaagtccatgtgtgtcactgggatggaggctttgacttcatgggtaaagtcatctctggtgctggggaagaattcgtttccattgatgaaatcttgggttggggcaatgtcatccaggatgtgggactgaggattgttttcaagtttatgtccactcacattaatgtgggtcttacttttgtggctgtatggtattatagtgacacggagccatttgtgtcatttggaggcaat

SEQ ID NO: 28918 - DNA, 192 bp, Homo sapiens
  MAP TO AL118505.13; EXPRESSED IN PLACENTA, SIGNAL = 0.75; EXPRESSED IN ADULT LIVER, SIGNAL = 0.94; EXPRESSED IN FETAL LIVER, SIGNAL = 0.74; EXPRESSED IN BRAIN, SIGNAL = 0.69; EXPRESSED IN BONE MARROW, SIGNAL = 0.85; EST_HUMAN HIT: BE898012.1, EVALUE 6.00e-97; SWISSPROT HIT: P49735, EVALUE 7.00e-16; NT HIT: U44048.1, EVALUE 1.10e-01
aattctcagaaactgttttggctttattgtaatgtcctccaactggatttgcagcagcaataatggaagttcttgcaggaaggctacaaaccacaccagccttagcaagactaatactttgctgctccatggcttccaacaaggcttgatgttgattccccatcttatcaaattcatcgattccacaaatac

SEQ ID NO: 28919 - DNA, 109 bp, Homo sapiens
  MAP TO AL136962.6; EXPRESSED IN PLACENTA, SIGNAL = 0.96; EXPRESSED IN ADULT LIVER, SIGNAL = 0.82; EXPRESSED IN FETAL LIVER, SIGNAL = 0.82; EXPRESSED IN BRAIN, SIGNAL = 0.81; EXPRESSED IN BONE MARROW, SIGNAL = 0.87; EXPRESSED IN LUNG, SIGNAL = 0.9; NT HIT: U17473.1, EVALUE 6.00e-02; EST_HUMAN HIT: AA778795.1, EVALUE 2.00e-52
gttcaacgtggttagaacaaaagacacaccagatttgaaatctgaagatgtgaatttgagtcccaatattgacatttatgcaatctatggcattcaaaaagtcatttaa

SEQ ID NO: 28920 - DNA, 109 bp, Homo sapiens
  MAP TO AL132866.21; EXPRESSED IN PLACENTA, SIGNAL = 0.89; EXPRESSED IN FETAL LIVER, SIGNAL =   1; EXPRESSED IN ADULT LIVER, SIGNAL = 0.89; EXPRESSED IN BRAIN, SIGNAL = 0.95; EXPRESSED IN BONE MARROW, SIGNAL = 0.91; SWISSPROT HIT: Q59940, EVALUE 1.40e+00; NT HIT: AL161534.2, EVALUE 9.30e-01
cttttttccaaaactcatccccgttcccatctccatggacatttggccagcaagggctctgcggggcggggcggaacagttgaagttttccaaggaaggggaatcccag

SEQ ID NO: 28921 - DNA, 131 bp, Homo sapiens
  MAP TO AC016205.4; EXPRESSED IN BRAIN, SIGNAL = 0.71; EXPRESSED IN BONE MARROW, SIGNAL = 0.61; EXPRESSED IN PLACENTA, SIGNAL = 0.52; EXPRESSED IN FETAL LIVER, SIGNAL = 0.69; SWISSPROT HIT: Q09449, EVALUE 4.10e+00; NT HIT: M25090.1, EVALUE 5.00e-03
aaaactctgattgaaacaggtgggaagggagaaacaaagagagaatcttccatccactgccctgagagcaaacctaattatgtctttacatcccttgctaagactgacagatatgatataaattgtttctg

SEQ ID NO: 28922 - DNA, 213 bp, Homo sapiens
  MAP TO AC015785.3; EXPRESSED IN PLACENTA, SIGNAL = 0.67; EXPRESSED IN ADULT LIVER, SIGNAL = 0.95; EXPRESSED IN FETAL LIVER, SIGNAL = 0.69; EXPRESSED IN BRAIN, SIGNAL = 0.73; EXPRESSED IN BONE MARROW, SIGNAL = 0.7; NT HIT: AF109718.1, EVALUE 3.20e-02; EST_HUMAN HIT: W85857.1, EVALUE 4.80e-02; SWISSPROT HIT: P20938, EVALUE 1.50e+00
gggccacagcaaaaatatgactgtgttagtcatgcattcgtgggattagagctgcctcaggcagggactcagattatggatgaggccaacctcaaaaagaccctggccaattatttttatttctggagcaaggaacatttgaaaacttataatttattcaattatggaaccgggttgccctataacctgctttacatcacccagaatgatttc

SEQ ID NO: 28923 - DNA, 146 bp, Homo sapiens
  MAP TO AC015756.4; EXPRESSED IN PLACENTA, SIGNAL = 0.48; EXPRESSED IN BRAIN, SIGNAL = 0.46; EST_HUMAN HIT: BE965092.2, EVALUE 3.10e-02; NT HIT: D00295.1, EVALUE 5.20e+00; SWISSPROT HIT: O51148, EVALUE 3.10e+00
ggctgggtatcccagcagttctcaaagtgcagttcgtggacctctctgagttcccagcacccttacaggagatctacaaggtcaaaacaatattcataaaaacaataaaacagcgtttgccttttccactgtatttacatttgcac

SEQ ID NO: 28924 - DNA, 245 bp, Homo sapiens
  MAP TO AL050333.18; EXPRESSED IN ADULT LIVER, SIGNAL = 0.95; EXPRESSED IN FETAL LIVER, SIGNAL = 1.3; EXPRESSED IN BRAIN, SIGNAL = 1.1; EXPRESSED IN LUNG, SIGNAL = 0.86; EXPRESSED IN PLACENTA, SIGNAL = 0.9; EXPRESSED IN BONE MARROW, SIGNAL = 1.1; SWISSPROT HIT: Q00416, EVALUE 1.20e+00; EST_HUMAN HIT: AI445866.1, EVALUE 2.00e-82; NT HIT: AB037838.1, EVALUE 1.00e-82
ctactactcaaattactgaagtcgaatttctttgcaacagtttgcaacattcttacaggatcatcttccctaatattttttccttttttacaagatttaggtttgctcttctgcctctcactaactgtttgagcttgattacttttgtaaacttcaaatgcagacttctggttatcatcttcatggaaattcactttattcaaatgagaattcagagttccctgatattcttctgggtttttgtt

SEQ ID NO: 28925 - DNA, 92 bp, Homo sapiens
  MAP TO AC016851.3; EXPRESSED IN LUNG, SIGNAL = 1.8; EXPRESSED IN PLACENTA, SIGNAL = 1.5; EXPRESSED IN ADULT LIVER, SIGNAL = 1.6; EXPRESSED IN BRAIN, SIGNAL = 1.2; EXPRESSED IN BONE MARROW, SIGNAL = 1.3; EXPRESSED IN FETAL LIVER, SIGNAL = 1.4; NT HIT: M14568.1, EVALUE 1.90e-01
atggacactagagcatggagagcatacacatcaaggggtcaagacgaggacactgagaacttcaagttggatccagggatgctggaagggag

SEQ ID NO: 28926 - DNA, 132 bp, Homo sapiens
  MAP TO AL121905.10; EXPRESSED IN LUNG, SIGNAL = 0.99; EXPRESSED IN BRAIN, SIGNAL = 1.6; EXPRESSED IN BONE MARROW, SIGNAL = 1.1; EXPRESSED IN PLACENTA, SIGNAL = 0.87; EXPRESSED IN ADULT LIVER, SIGNAL = 0.93; EXPRESSED IN FETAL LIVER, SIGNAL = 1.1; NT HIT: X54890.1, EVALUE 7.00e-33; SWISSPROT HIT: P18433, EVALUE 4.00e-05; EST_HUMAN HIT: AI360263.1, EVALUE 1.00e-32
aatggctgacttaagccctccattgcacaacacagtaatgacttgttctgttgtcttgatttcagatgagacaccaattattgcggtgatggtggccctgtcctctctgctagtgatcgtgtttattatcat

SEQ ID NO: 28927 - DNA, 147 bp, Homo sapiens
  MAP TO AC019276.3; EXPRESSED IN BONE MARROW, SIGNAL = 0.55; EXPRESSED IN PLACENTA, SIGNAL = 0.57; EXPRESSED IN FETAL LIVER, SIGNAL = 0.52; EXPRESSED IN ADULT LIVER, SIGNAL = 0.88; EXPRESSED IN BRAIN, SIGNAL = 0.58; SWISSPROT HIT: P39057, EVALUE 4.60e-01; EST_HUMAN HIT: R11172.1, EVALUE 1.30e-01
aaactggaccacactggaacatcagctctgggaagggccacttccggtctgtggccatgctggcaaggatgggaaggaagagcgctcccagggaggtggtgtttggcttcccaaaggtctgcagtcatgcggatggcagcagagatg

SEQ ID NO: 28928 - DNA, 541 bp, Homo sapiens
  MAP TO AC019278.3; EXPRESSED IN PLACENTA, SIGNAL = 0.56; EXPRESSED IN FETAL LIVER, SIGNAL = 0.64; EXPRESSED IN BRAIN, SIGNAL = 0.63; EXPRESSED IN BONE MARROW, SIGNAL = 0.67; EXPRESSED IN ADULT LIVER, SIGNAL = 0.63; EST_HUMAN HIT: BE089593.1, EVALUE 9.00e-06; SWISSPROT HIT: Q05859, EVALUE 2.00e-68; NT HIT: X62379.1, EVALUE 4.00e-44
acttttggaatcagaggggccatccgctggcttagaattggaccgttcaaacacagctcttagcgactccttctcatgtctcatcttgcgcttgagagcttccagctcagaggtgtcagctgtggtcccctttctggggggccggatgaatagggctttaaaagcctccagggctgtctctggcgactttggcttgacctcaccaccctgggtttgtggtactccagggccgctctggctctcttggtcagcattgcagcccatctcttctctcctgggcgactcagggtctgctcccttcggttcagttttgggcatgtcaatgttgagcagcagagagagctgctccaggagagtgggagtggccttcggatcagttgctttcttctcactcttcactgtctgcagccctgcctgcactaaggacttctgcacaggctgcgtcaatttgagcaaagctaagtccccatcctttggtttaatttccgtgatggtctctcctccctcagcggtagcccccttcttcagcacacgaagccca

SEQ ID NO: 28929 - DNA, 144 bp, Homo sapiens
  MAP TO AL133405.9; EXPRESSED IN LUNG, SIGNAL = 0.83; EXPRESSED IN ADULT LIVER, SIGNAL = 0.86; EXPRESSED IN BRAIN, SIGNAL = 1.2; EXPRESSED IN PLACENTA, SIGNAL = 0.75; EXPRESSED IN FETAL LIVER, SIGNAL = 1.7; EXPRESSED IN BONE MARROW, SIGNAL = 1.9; NT HIT: AF020503.1, EVALUE 2.00e-33; EST_HUMAN HIT: AI678101.1, EVALUE 2.00e-34; SWISSPROT HIT: P07897, EVALUE 6.90e+00
ctttacacaggtcaggatcatcaatattattgtcttccacctccacatcttgtcccactgggaggtcttcacgggcacaaacaggcatggagctgtcatctcctatgataacaatgccttcttctggaatccctcctgaaggac

SEQ ID NO: 28930 - DNA, 156 bp, Homo sapiens
  MAP TO AC015670.4; EXPRESSED IN PLACENTA, SIGNAL = 0.76; EXPRESSED IN FETAL LIVER, SIGNAL = 0.63; EXPRESSED IN BRAIN, SIGNAL = 0.81; EXPRESSED IN BONE MARROW, SIGNAL = 0.76; EXPRESSED IN ADULT LIVER, SIGNAL = 0.84; EST_HUMAN HIT: BF433956.1, EVALUE 5.30e-01; SWISSPROT HIT: P47481, EVALUE 6.80e+00; NT HIT: X17497.1, EVALUE 5.60e+00
ctacttttccttatgccctattctatccaaacacatatgattcttgaccagtgcatttagcaaatatgggaattgaccattttcaattgttttggcattcatgaggatgttgataaaggtaggggttgggggcagagctgattctttaatgatttt

SEQ ID NO: 28931 - DNA, 152 bp, Homo sapiens
  MAP TO AC022428.3; EXPRESSED IN BONE MARROW, SIGNAL = 0.89; EXPRESSED IN ADULT LIVER, SIGNAL = 0.98; EXPRESSED IN FETAL LIVER, SIGNAL = 0.86; EXPRESSED IN BRAIN, SIGNAL = 0.82; EXPRESSED IN LUNG, SIGNAL = 0.92; EXPRESSED IN PLACENTA, SIGNAL = 0.81; NT HIT: AJ242593.1, EVALUE 8.70e-02; EST_HUMAN HIT: AA226220.1, EVALUE 4.00e-45
gaagattaatttaaacaataacaacaagaacaacaacaacaacaaaatacaacaaaaaatttcccccatgtgccaagagcaaattttgaggtccatttatccagataaagtgttttgttatctgaaccaagaacatgaactttatctttata

SEQ ID NO: 28932 - DNA, 98 bp, Homo sapiens
  MAP TO AC015496.3; EXPRESSED IN PLACENTA, SIGNAL = 0.5; EXPRESSED IN FETAL LIVER, SIGNAL = 0.47; EXPRESSED IN BRAIN, SIGNAL = 0.45; NT HIT: AB022524.1, EVALUE 2.10e-01; EST_HUMAN HIT: AA503975.1, EVALUE 3.10e-01
agatgccaactggaagggtcagcctttgaaagaggatgcttcctgctttgagaggctgggaaaggaagacagatatcgtctggccaaggaaagaacat

SEQ ID NO: 28933 - DNA, 522 bp, Homo sapiens
  MAP TO AL121713.24; EXPRESSED IN FETAL LIVER, SIGNAL = 0.54; EXPRESSED IN BRAIN, SIGNAL = 0.65; EXPRESSED IN BONE MARROW, SIGNAL = 2.2; EST_HUMAN HIT: BF675505.1, EVALUE 0.00e+00; NT HIT: gi11418871, EVALUE 0.00e+00; SWISSPROT HIT: P32583, EVALUE 5.10e-01
agctgaaaggccaggccaaatatcaccggatgtggctgatgacttattaaattcatcgatagactcagatgggtcatgttcaaatgtatctttcggttcctcctgtgatttacttttcaacggactctcttcttggggttccccttcagcttttttggtttgtttttcctgagaccctcgtcttttagaaacaggagatttgctatatggggatgaagaacgagaagaggatgatcttggagacctagaagatctatatgaccggcgagatctgcttctggatctttgagaagaaacggatcttctttttggactcctggaacgtgaacgacctcgtctaggactcctagagtgccttctattccagacaggtctataaccacctcgatgatatctacctcctcctccttgataataccctctaccccttcctctgtacccataaggtcgtctcattcctctattatttctgtaatcgcgacgataatctctagaatacatacgatctctactacgagacct

SEQ ID NO: 28934 - DNA, 366 bp, Homo sapiens
  MAP TO AL133258.13; EXPRESSED IN PLACENTA, SIGNAL = 0.61; EXPRESSED IN ADULT LIVER, SIGNAL = 0.68; EXPRESSED IN FETAL LIVER, SIGNAL = 0.97; EXPRESSED IN BRAIN, SIGNAL = 0.8; EXPRESSED IN BONE MARROW, SIGNAL = 0.92; NT HIT: Z70664.1, EVALUE 8.00e-69; EST_HUMAN HIT: BF058289.1, EVALUE 0.00e+00; SWISSPROT HIT: P21416, EVALUE 5.00e-24
ccccaggtcttgatctcactgatggagtctgtgctccggacccatcggcccacctgggatgactgtcagcagctccttttgaccctttttacctctgaagagagggaacatatccgaagagaggccagaaagtatttcctcacatcagccaataggccagaggaggaagctagagactttcttgaggaggtctttccctctacccggcctaactggcacacgaattcctcgggtaggaagaaagctttggacgattttcaccggtatctccttgcaggtatcaaaggagctgctcagaaacccataaacttgtctaagatgactgaagtcgcacagggcctgatgagtcaccgggagcgtttttag

SEQ ID NO: 28935 - DNA, 184 bp, Homo sapiens
  MAP TO AL109976.21; EXPRESSED IN LUNG, SIGNAL = 0.92; EXPRESSED IN ADULT LIVER, SIGNAL = 0.81; EXPRESSED IN BRAIN, SIGNAL = 0.9; EXPRESSED IN PLACENTA, SIGNAL = 0.94; EXPRESSED IN FETAL LIVER, SIGNAL = 0.88; EXPRESSED IN BONE MARROW, SIGNAL = 0.85; NT HIT: AB020971.1, EVALUE 6.70e+00; SWISSPROT HIT: O16005, EVALUE 5.10e+00
aggcagaccccgggagggcttcccccgcgtccgctttaagtacgcggccggcccctgtctcctcctttcgaccggggacctccgcagggccacgcccgctggctgccccgcctcctgcatttatcccggtagctccggccgcaagtccttctcctcctcctccaggaagcgcgccccgactgac

SEQ ID NO: 28936 - DNA, 204 bp, Homo sapiens
  MAP TO AC018731.3; EXPRESSED IN PLACENTA, SIGNAL = 0.54; EXPRESSED IN FETAL LIVER, SIGNAL = 0.53; EXPRESSED IN ADULT LIVER, SIGNAL = 0.6; EXPRESSED IN BRAIN, SIGNAL = 0.46; EXPRESSED IN BONE MARROW, SIGNAL = 0.52; EST_HUMAN HIT: AV743773.1, EVALUE 7.20e-01; SWISSPROT HIT: O34931, EVALUE 2.90e+00
tcagctagttggtacaattctagtatccattctgttatggagagggaagacttcctggatcttaagctttgtagaagtcttggttccagcagactccactttgcctccatctcttgcctttatacggaggttaaaacccaacctctgacaattaggattcatgtctgcatcagatatagagctccagatggtgatgccattccc

SEQ ID NO: 28937 - DNA, 118 bp, Homo sapiens
  MAP TO AC022882.3; EXPRESSED IN PLACENTA, SIGNAL = 0.57; EXPRESSED IN FETAL LIVER, SIGNAL = 0.45; EXPRESSED IN BRAIN, SIGNAL = 0.47; EXPRESSED IN BONE MARROW, SIGNAL = 0.46; EST_HUMAN HIT: AW025821.1, EVALUE 2.50e-02; NT HIT: X60598.1, EVALUE 2.60e-01
gtacgtctatctccagaatacagtctgctcttctatgtaatggaacaagataattgccagaacagaggacatgaaatggttttatttaaaaaggctgctgcatgcgacaagttgaaat

SEQ ID NO: 28938 - DNA, 81 bp, Homo sapiens
  MAP TO AC011957.2; EXPRESSED IN BONE MARROW, SIGNAL = 1.2; EXPRESSED IN LUNG, SIGNAL =   1; EXPRESSED IN PLACENTA, SIGNAL = 1.3; EXPRESSED IN ADULT LIVER, SIGNAL = 1.7; EXPRESSED IN FETAL LIVER, SIGNAL = 1.4; EXPRESSED IN BRAIN, SIGNAL =   2; EST_HUMAN HIT: AI214087.1, EVALUE 6.00e-36; SWISSPROT HIT: P27206, EVALUE 9.60e+00; NT HIT: AF069755.1, EVALUE 2.00e-38
acagcagggaggtgaaggtgggagagtacaacgctgtggccgacacactggagatcatcaatgacaccatcaggttccaag

SEQ ID NO: 28939 - DNA, 80 bp, Homo sapiens
  MAP TO AC022904.3; EXPRESSED IN PLACENTA, SIGNAL = 0.65; EXPRESSED IN ADULT LIVER, SIGNAL = 0.64; EXPRESSED IN BRAIN, SIGNAL = 0.62; EXPRESSED IN BONE MARROW, SIGNAL = 0.6; EXPRESSED IN FETAL LIVER, SIGNAL = 0.59; NT HIT: Z11860.1, EVALUE 1.60e-01; EST_HUMAN HIT: AW840353.1, EVALUE 1.00e-03
atctgcaatgatccaaatgtttgtgttcccccaagactcctatgttgaaatcctaaccatcaatgtcgtggtagtaggag

SEQ ID NO: 28940 - DNA, 226 bp, Homo sapiens
  MAP TO AL132874.14; EXPRESSED IN ADULT LIVER, SIGNAL =   1; EXPRESSED IN PLACENTA, SIGNAL = 1.2; EXPRESSED IN FETAL LIVER, SIGNAL = 0.88; EXPRESSED IN BRAIN, SIGNAL = 0.99; EXPRESSED IN BONE MARROW, SIGNAL =   1; EXPRESSED IN LUNG, SIGNAL = 1.1; EST_HUMAN HIT: AI891066.1, EVALUE 3.20e+00; SWISSPROT HIT: Q27368, EVALUE 5.80e-01
tatcaaaaattgtaagcacttcactggggaacatgttgaaatattccccgatttccatgttggtctcaaacagagtcatggcattaaccacaactgggtaatgagcatcttcatccctttccttcaagattagaagaatatcattcttatggtattccgaaacatatgactcaaacacttgaccaaccagtgtaacttgatcgctattcatcttgaatctaggtaa

SEQ ID NO: 28941 - DNA, 226 bp, Homo sapiens
  MAP TO AL157997.2; EXPRESSED IN BONE MARROW, SIGNAL = 0.46; EXPRESSED IN PLACENTA, SIGNAL = 0.57; EXPRESSED IN FETAL LIVER, SIGNAL = 0.56; EXPRESSED IN BRAIN, SIGNAL = 0.51; NT HIT: X89514.1, EVALUE 2.10e+00; SWISSPROT HIT: Q20471, EVALUE 5.80e-01; EST_HUMAN HIT: C17016.1, EVALUE 3.20e+00
aattcaacagtttcaccttcaaataatgctgcgaacaggatatcactctctccctaatgatgcttgctacctttacgaatctccactggattcagctggacatcagttttgccttgacatgctccccctctctaatgagttacttcctccagcaaaattcaatatcccaagtcccacagtctgggaaaatagtccacagggtctcctgacagaacaacaatcacag

SEQ ID NO: 28942 - DNA, 145 bp, Homo sapiens
  MAP TO AC008998.2; EXPRESSED IN LUNG, SIGNAL = 1.2; EXPRESSED IN PLACENTA, SIGNAL = 1.1; EXPRESSED IN FETAL LIVER, SIGNAL = 0.98; EXPRESSED IN BRAIN, SIGNAL =   1; EXPRESSED IN BONE MARROW, SIGNAL =   1; EXPRESSED IN ADULT LIVER, SIGNAL = 1.2; SWISSPROT HIT: Q04912, EVALUE 5.30e+00; EST_HUMAN HIT: AA826039.1, EVALUE 5.00e-69; NT HIT: M81233.1, EVALUE 8.30e-02
agagccacgaggacccgaggagggggagccagaggagagacctagcgcagccctcctgggacaggacggacttcaccaaggagaacgcgtgcttccaactcgaacttcagtcctggaagtttttcagatagaggatgactcaggc

SEQ ID NO: 28943 - DNA, 253 bp, Homo sapiens
  MAP TO AL133511.5; EXPRESSED IN PLACENTA, SIGNAL = 0.57; EXPRESSED IN FETAL LIVER, SIGNAL = 0.57; EXPRESSED IN BRAIN, SIGNAL = 0.56; EST_HUMAN HIT: BE145672.1, EVALUE 1.00e-109; SWISSPROT HIT: P08547, EVALUE 7.00e-27; NT HIT: AL163213.2, EVALUE 3.00e-49
cttaacataataaaagccatatatgacagactcacagctagtatcatattgaatgaggaaaaactgaaagcctttcctttaagatctggaaaaagacaagaatgtccactttcaccactgtcattcaacatagtactggaaatcctagctagagtaatcagacaagagaaagaaataaagtgcatccaaattggaaaggaagaagtcaaattattcttgtttgcagatgatatgacctcatatttggagaagc

SEQ ID NO: 28944 - DNA, 220 bp, Homo sapiens
  MAP TO AC009428.4; EXPRESSED IN ADULT LIVER, SIGNAL = 0.84; EXPRESSED IN BRAIN, SIGNAL = 0.58; EXPRESSED IN PLACENTA, SIGNAL = 0.68; EXPRESSED IN FETAL LIVER, SIGNAL = 0.68; EXPRESSED IN BONE MARROW, SIGNAL = 0.58; NT HIT: gi9789956, EVALUE 8.00e-03; SWISSPROT HIT: O08696, EVALUE 2.70e+00
atggcttccaaggaccccctccatctcatggtcgtttctgtctgctttcctctcatctataatcccaaggaactcactcgaagcagcatgcgtggctggctggtgggatcctccttatacatcaccgtctgcctgtaccaacactgtcatcgcctcatgcttcataacaccgggacaccaggcaaaggagctcccaagctgaacctctgcctgccgcaag

SEQ ID NO: 28945 - DNA, 249 bp, Homo sapiens
  MAP TO AC022860.3; EXPRESSED IN ADULT LIVER, SIGNAL = 1.2; EXPRESSED IN FETAL LIVER, SIGNAL = 0.83; EXPRESSED IN BRAIN, SIGNAL = 0.91; EXPRESSED IN LUNG, SIGNAL = 0.88; EXPRESSED IN PLACENTA, SIGNAL = 0.77; EXPRESSED IN BONE MARROW, SIGNAL = 0.94; NT HIT: M30520.1, EVALUE 2.00e-04; EST_HUMAN HIT: AV751001.1, EVALUE 1.00e-58; SWISSPROT HIT: P10266, EVALUE 1.00e-21
tcatatccaattaatgtcgcctagtaatttttgaaagttacttaatgttttcaatcgatccctacatatagttactttctgtggcacaatggtagtgtcatttactaaggtccccaagtaggagtaaggaggagtagtctgaattttgtcaggagctataattaaaccagtgtcagaaattgaattttgcaagtgatcataacactggagtaatatttctcgagtgggggcagcacaagatatatcatc

SEQ ID NO: 28946 - DNA, 149 bp, Homo sapiens
  MAP TO AL139824.7; EXPRESSED IN ADULT LIVER, SIGNAL = 0.6; EXPRESSED IN BRAIN, SIGNAL = 0.49; EXPRESSED IN BONE MARROW, SIGNAL = 0.53; EXPRESSED IN PLACENTA, SIGNAL = 0.72; EXPRESSED IN FETAL LIVER, SIGNAL = 0.62; EST_HUMAN HIT: BE779442.1, EVALUE 7.90e+00; NT HIT: AB034990.1, EVALUE 5.30e+00
aggacactaaaatagacattgtggtggagatgaatgattttcctgtgtggtgttgccatctagtggacctgggagacagtgtgattacaaaagtggacatgaaaacggagcccgttttaccttattacgtggggcccaggctaccttca

SEQ ID NO: 28947 - DNA, 162 bp, Homo sapiens
  MAP TO AC019342.4; EXPRESSED IN PLACENTA, SIGNAL = 0.78; EXPRESSED IN BONE MARROW, SIGNAL = 0.49; EXPRESSED IN ADULT LIVER, SIGNAL = 0.6; EXPRESSED IN FETAL LIVER, SIGNAL = 0.54; EXPRESSED IN BRAIN, SIGNAL = 0.57; NT HIT: AE001125.1, EVALUE 2.40e-02
aacatctctgcaaagcaggacaagggtatgcaaacaactccaaattacaactgcctacatatgatcagacaacttgaccctgtgcacatgacatttgtccccaactccaaacccaaaacctcagacttcccaaggagagacctggtagccattggaatagac

SEQ ID NO: 28948 - DNA, 159 bp, Homo sapiens
  MAP TO AC025324.2; EXPRESSED IN BONE MARROW, SIGNAL = 0.56; EXPRESSED IN PLACENTA, SIGNAL = 0.76; EXPRESSED IN FETAL LIVER, SIGNAL = 0.62; EXPRESSED IN ADULT LIVER, SIGNAL = 0.76; EXPRESSED IN BRAIN, SIGNAL = 0.59; SWISSPROT HIT: P49000, EVALUE 3.00e+00; EST_HUMAN HIT: AW023636.1, EVALUE 1.40e-01; NT HIT: AF003530.1, EVALUE 1.40e+00
gcaattatgtcatctgcaaatagtgacctttctagctttcctgtctgtctcaccaacaccaaaactaaagcagttgtggccatctgctatgcctccctcatgggtggtactggagatgaaaacctccttgttccttcagtgcccaccacacacctggat

SEQ ID NO: 28949 - DNA, 97 bp, Homo sapiens
  MAP TO AC022843.3; EXPRESSED IN PLACENTA, SIGNAL = 0.77; EXPRESSED IN ADULT LIVER, SIGNAL = 0.61; EXPRESSED IN BRAIN, SIGNAL = 0.54; EXPRESSED IN BONE MARROW, SIGNAL = 0.54; EXPRESSED IN FETAL LIVER, SIGNAL = 0.56; EST_HUMAN HIT: AL079581.1, EVALUE 5.00e-12; SWISSPROT HIT: O53175, EVALUE 1.40e+00; NT HIT: U50912.1, EVALUE 9.00e-07
agtttccattttgattatggaccattgctggagagttagtgagaccctttggtggtgtcactacattcggatttttcatggtgtcagaattcttgtg

SEQ ID NO: 28950 - DNA, 193 bp, Homo sapiens
  MAP TO AC022308.7; EXPRESSED IN ADULT LIVER, SIGNAL = 0.83; EXPRESSED IN BRAIN, SIGNAL = 0.86; EXPRESSED IN PLACENTA, SIGNAL = 0.86; EXPRESSED IN FETAL LIVER, SIGNAL = 0.69; EXPRESSED IN BONE MARROW, SIGNAL = 0.78; SWISSPROT HIT: P40605, EVALUE 9.90e-01; NT HIT: AE000218.1, EVALUE 4.50e-01
aagcctgaatgatgcgaaagaacttgccatggaacaatttgggggaagggtgctccaaaccaggggaaaggcattcaaagagcccacagtgggacaaagtgaggtggaaggaaagccagtttggctggagcaaaataatgaagggggagtgataggagttgaggtcacagagctaggttgggacccagtccta

SEQ ID NO: 28951 - DNA, 80 bp, Homo sapiens
  MAP TO AC013314.4; EXPRESSED IN BONE MARROW, SIGNAL = 0.68; EXPRESSED IN PLACENTA, SIGNAL = 0.71; EXPRESSED IN ADULT LIVER, SIGNAL = 0.83; EXPRESSED IN FETAL LIVER, SIGNAL = 0.63; EXPRESSED IN BRAIN, SIGNAL = 0.69; EST_HUMAN HIT: AI190162.1, EVALUE 9.50e-01; NT HIT: U67561.1, EVALUE 9.90e+00
cagcattcctatggtcagtaattccaacactacattcaaggccattgacacattcttcatcatgttcttcaaaattattc

SEQ ID NO: 28952 - DNA, 150 bp, Homo sapiens
  MAP TO AC026156.2; EXPRESSED IN PLACENTA, SIGNAL = 0.69; EXPRESSED IN FETAL LIVER, SIGNAL = 0.99; EXPRESSED IN BONE MARROW, SIGNAL = 1.1; EXPRESSED IN ADULT LIVER, SIGNAL = 0.85; EXPRESSED IN BRAIN, SIGNAL = 1.6; SWISSPROT HIT: P32105, EVALUE 5.20e+00; EST_HUMAN HIT: N41633.1, EVALUE 3.00e-79; NT HIT: gi11432184, EVALUE 2.00e-79
cttttgcagagcgtcaacaaggatcttagaagcatctctgaattgttcagagtcttccccataacgcttcccaatttcatccaaacctgccagctccagtgaatataaatcaggagaatgatccttggctagatgcttatgacgagacag

SEQ ID NO: 28953 - DNA, 137 bp, Homo sapiens
  MAP TO AC018909.3; EXPRESSED IN PLACENTA, SIGNAL = 0.5; EXPRESSED IN ADULT LIVER, SIGNAL = 0.62; EXPRESSED IN BONE MARROW, SIGNAL = 0.5; EXPRESSED IN BRAIN, SIGNAL = 0.64; EST_HUMAN HIT: BF195585.1, EVALUE 2.00e-71; NT HIT: AF078779.1, EVALUE 7.00e-36; SWISSPROT HIT: P47006, EVALUE 5.30e+00
ctgattttaggaactgtaaaatctgaaggaagctttgagattttcaccatttgaggtctgtttggaaatttttcaaagattcgcaggcgtaaagggagcttttctttggtgtccgcatttgcttcactttgctttaa

SEQ ID NO: 28954 - DNA, 123 bp, Homo sapiens
  MAP TO AC007989.2; EXPRESSED IN LUNG, SIGNAL = 1.1; EXPRESSED IN PLACENTA, SIGNAL = 1.1; EXPRESSED IN ADULT LIVER, SIGNAL = 1.3; EXPRESSED IN FETAL LIVER, SIGNAL = 0.98; EXPRESSED IN BRAIN, SIGNAL = 1.2; EXPRESSED IN BONE MARROW, SIGNAL = 0.98; SWISSPROT HIT: Q08879, EVALUE 7.10e+00; NT HIT: U67504.1, EVALUE 1.10e+00; EST_HUMAN HIT: AA323289.1, EVALUE 4.00e-01
aagcttggagggagacgagacataaagaacctggatagttactgcactcttaataagaaacaaatgtcttgtgagtggcacagaagtgccactagaggtggcagccatctctggcattgtcat

SEQ ID NO: 28955 - DNA, 183 bp, Homo sapiens
  MAP TO AC026192.1; EXPRESSED IN ADULT LIVER, SIGNAL = 0.6; EXPRESSED IN BRAIN, SIGNAL = 0.47; EXPRESSED IN BONE MARROW, SIGNAL = 0.56; EXPRESSED IN PLACENTA, SIGNAL = 0.5; EXPRESSED IN FETAL LIVER, SIGNAL = 0.48; SWISSPROT HIT: P12212, EVALUE 7.70e-01; NT HIT: AF050081.1, EVALUE 1.10e-01; EST_HUMAN HIT: T87378.1, EVALUE 1.60e-01
cacaccagcttttctaacttctttcttcccctcctgctgctccttctcaaaatagtgcatgggtacatgaaggtagaggagagagggcctcagactcaacggttgtttgttctctggatccttgctggtttctactactgcgatgggcttatttctggttgggctggatcccactgatgaaat

SEQ ID NO: 28956 - DNA, 116 bp, Homo sapiens
  MAP TO AL133320.8; EXPRESSED IN BONE MARROW, SIGNAL = 0.81; EXPRESSED IN LUNG, SIGNAL =   1; EXPRESSED IN PLACENTA, SIGNAL = 0.81; EXPRESSED IN FETAL LIVER, SIGNAL = 0.75; EXPRESSED IN ADULT LIVER, SIGNAL = 0.99; EXPRESSED IN BRAIN, SIGNAL = 0.78; EST_HUMAN HIT: AA625660.1, EVALUE 2.40e-02; SWISSPROT HIT: P21519, EVALUE 9.30e+00; NT HIT: AJ002483.1, EVALUE 2.50e-01
atgccactcccacaacaggcccagagggcatgtgctcaggggacagggctgcctccacttctatttcaaagggtaagacccctgcccagtggagccatgggtgtgcaactcccgct

SEQ ID NO: 28957 - DNA, 186 bp, Homo sapiens
  MAP TO AL133544.5; EXPRESSED IN FETAL LIVER, SIGNAL = 0.67; EXPRESSED IN PLACENTA, SIGNAL = 0.47; EXPRESSED IN ADULT LIVER, SIGNAL = 0.61; EXPRESSED IN BRAIN, SIGNAL = 0.68; EXPRESSED IN BONE MARROW, SIGNAL = 0.59; NT HIT: gi8923074, EVALUE 1.00e-100; SWISSPROT HIT: Q38859, EVALUE 1.70e+00; EST_HUMAN HIT: AU116951.1, EVALUE 1.00e-100
tgtgacagtttcaagcctctgttttactagctgcatcttcgttgaagaactttcagtgtggacaaattcatcaatctgaaaagagccttgatggggtagttttggacaggtacatagggcatcttgactttggtgtattccaggtaatggaaatgttccattgtagcgtttgaacatttcagcctc

SEQ ID NO: 28958 - DNA, 162 bp, Homo sapiens
  MAP TO AL121918.15; EXPRESSED IN BONE MARROW, SIGNAL = 0.47; EXPRESSED IN PLACENTA, SIGNAL = 0.48; EXPRESSED IN FETAL LIVER, SIGNAL = 0.53; EXPRESSED IN BRAIN, SIGNAL = 0.48; SWISSPROT HIT: O08774, EVALUE 2.30e+00; EST_HUMAN HIT: H83740.1, EVALUE 2.20e+00; NT HIT: AB038516.1, EVALUE 1.50e+00
atgaaggaggtgccagaacaggaaggcctgcagagccactctgtatctgcacccatacccaggaaagcgggccccagaaggatgccctcagccctcctgaacctggaggaagagcagccaggcctgctgtgcttggtgagctcccagaacctgtctacccag

SEQ ID NO: 28959 - DNA, 131 bp, Homo sapiens
  MAP TO AC020610.6; EXPRESSED IN PLACENTA, SIGNAL = 0.75; EXPRESSED IN FETAL LIVER, SIGNAL = 0.74; EXPRESSED IN BONE MARROW, SIGNAL = 0.82; EXPRESSED IN LUNG, SIGNAL = 0.96; EXPRESSED IN ADULT LIVER, SIGNAL = 0.92; EXPRESSED IN BRAIN, SIGNAL = 0.85; EST_HUMAN HIT: AA280762.1, EVALUE 2.80e-02; NT HIT: AF057019.1, EVALUE 2.90e-01; SWISSPROT HIT: O14019, EVALUE 7.00e+00
atgttgcgggagagaagggtggtggggctcaggctggggaaggacggaggctggctttgtccaataatgatggtgacaatgatggtgataataataataatgatggtaataggctgcaagctcttggtgct

SEQ ID NO: 28960 - DNA, 378 bp, Homo sapiens
  MAP TO AL133344.19; EXPRESSED IN PLACENTA, SIGNAL = 0.6; EXPRESSED IN BONE MARROW, SIGNAL = 2.2; EXPRESSED IN ADULT LIVER, SIGNAL = 0.55; EXPRESSED IN BRAIN, SIGNAL = 0.5; EXPRESSED IN FETAL LIVER, SIGNAL = 2.6; NT HIT: gi4557844, EVALUE 0.00e+00; SWISSPROT HIT: P31350, EVALUE 7.00e-60; EST_HUMAN HIT: BE793326.1, EVALUE 0.00e+00
aacgatgccttgtgtcaagaagaaggcagattgggccttgcgctggattggggacaaagaggctacctatggtgaacgtgttgtagcctttgctgcagtagaaggcatcttcttttctggttcttttgcatcgatattctggctcaagaaacgaggaccgatgcctggcctcacgttttccaatgaacttattagcagagaagagggtttacactgtgattttgcttgcttgatgttcaaacacctggtacacaaaccatcggaggagaaagtgagagaaataattatcaatgctgttcagatagaacaagaattcctcaccgaggccttgcctgtgaagctcattgggatgaattgcactctaatgaagcaatacat

SEQ ID NO: 28961 - DNA, 519 bp, Homo sapiens
  MAP TO AL137853.3; EXPRESSED IN LUNG, SIGNAL =   1; EXPRESSED IN FETAL LIVER, SIGNAL = 0.56; EXPRESSED IN BRAIN, SIGNAL = 0.73; EXPRESSED IN BONE MARROW, SIGNAL = 0.46; NT HIT: AB033077.1, EVALUE 0.00e+00; SWISSPROT HIT: P15508, EVALUE 2.00e-06; EST_HUMAN HIT: BE967422.1, EVALUE 4.90e-01
gcccgtcaccaagaattgctgtcccagcagcaaaatttcattctggccacccagtcagctcaggccttcttggatcagcatggccacaatctcacacctgaggagcaacagatgctgcaacagaagctgggagagctaaaggaacaatactctacttccctggcccaatcagaggcagaactgaagcaggtgcagacacttcaggatgagttgcagaaatttctgcaggatcataaagagtttgaaagctggttggaacgatccgagaaagagctggagaacatgcataagggaggcagcagccccgagacccttccctccctgctaaagcggcaaggaagcttctcagaggatgtcatttcccacaaaggagacttgagatttgtgactatctcaggacagaaagtcttggacatggaaaacagttttaaggaaggcaaagaaccatcagaaattggaaacttagtaaaggacaagttgaaggatgcaacagaaagatacactgctctccactcaaag

SEQ ID NO: 28962 - DNA, 116 bp, Homo sapiens
  MAP TO AL137225.7; EXPRESSED IN PLACENTA, SIGNAL = 0.56; EXPRESSED IN FETAL LIVER, SIGNAL = 0.68; EXPRESSED IN BONE MARROW, SIGNAL = 0.59; EXPRESSED IN ADULT LIVER, SIGNAL = 0.69; EXPRESSED IN BRAIN, SIGNAL = 0.69; EST_HUMAN HIT: AI337183.1, EVALUE 1.00e-44; SWISSPROT HIT: P12374, EVALUE 3.20e+00; NT HIT: gi9626821, EVALUE 2.50e-01
ctccggggtctgggattgtgggccacatcttcgagtagggcgcctgggtccccagggctccttgaggaccgtggcatcgatttccttctttaggattggggatggagatgggaact

SEQ ID NO: 28963 - DNA, 120 bp, Homo sapiens
  MAP TO AL035668.15; EXPRESSED IN BONE MARROW, SIGNAL = 0.51; EXPRESSED IN ADULT LIVER, SIGNAL = 0.59; EXPRESSED IN FETAL LIVER, SIGNAL = 0.53; EXPRESSED IN BRAIN, SIGNAL = 0.46; NT HIT: X03216.1, EVALUE 2.70e-01; EST_HUMAN HIT: BE184039.1, EVALUE 1.50e+00
gttggacctggaaatgacatgctggatggtcatagtcttgttagatgaggtgtgcgtgtgatgataagtgggaaacagcttgatttaagggacactttagtccatggccagcacagtaat

SEQ ID NO: 28964 - DNA, 249 bp, Homo sapiens
  MAP TO AL121941.13; EXPRESSED IN LUNG, SIGNAL =   1; EXPRESSED IN PLACENTA, SIGNAL = 0.99; EXPRESSED IN ADULT LIVER, SIGNAL = 0.97; EXPRESSED IN FETAL LIVER, SIGNAL = 0.88; EXPRESSED IN BRAIN, SIGNAL =   1; EXPRESSED IN BONE MARROW, SIGNAL = 0.91; EST_HUMAN HIT: AA190998.1, EVALUE 3.50e+00; SWISSPROT HIT: P73540, EVALUE 8.50e+00
ccggccctcctggccacctggcatagtgctcttgctgtactgtatgcagagaatggtcagcaaatgaggatgactgatttgtctcaattcacaaataaagcagcaactagagggtggcaggggtggatgaggtgggttttcacccatttggcgttgtcttatgggttgaaagagttccaggggccctgtgagaagacccctgccacttgttcagtagagaagttgcgtgtgctgggtatggagcccaag

SEQ ID NO: 28965 - DNA, 129 bp, Homo sapiens
  MAP TO AC019058.3; EXPRESSED IN BONE MARROW, SIGNAL = 0.6; EXPRESSED IN PLACENTA, SIGNAL = 0.81; EXPRESSED IN ADULT LIVER, SIGNAL = 0.88; EXPRESSED IN BRAIN, SIGNAL = 0.65; EXPRESSED IN FETAL LIVER, SIGNAL = 0.71; SWISSPROT HIT: P13470, EVALUE 5.40e+00; NT HIT: M22452.1, EVALUE 2.90e-01; EST_HUMAN HIT: BE973417.1, EVALUE 1.70e+00
gaactacccccagaattgaggtagggggtgtccttaaaggaccacaattggaggctatgtcaaagtggataaacctctttaaggaccagcagaatactaattcctggagcttgctggggataaagaatg

SEQ ID NO: 28966 - DNA, 103 bp, Homo sapiens
  MAP TO AL161743.2; EXPRESSED IN LUNG, SIGNAL = 0.99; EXPRESSED IN PLACENTA, SIGNAL =   1; EXPRESSED IN ADULT LIVER, SIGNAL = 0.97; EXPRESSED IN FETAL LIVER, SIGNAL = 0.95; EXPRESSED IN BRAIN, SIGNAL = 0.96; EXPRESSED IN BONE MARROW, SIGNAL = 0.97; EST_HUMAN HIT: AI361774.1, EVALUE 3.30e-01; NT HIT: gi11037064, EVALUE 2.00e-51
gctccactccgaggataaaaggaagacccctttgaaggtattggaagaatggaagactcacctcatcccctctctgcactgtgctggaggtgaacagaaagag

SEQ ID NO: 28967 - DNA, 315 bp, Homo sapiens
  MAP TO AL161747.1; EXPRESSED IN BONE MARROW, SIGNAL = 0.98; EXPRESSED IN ADULT LIVER, SIGNAL = 0.74; EXPRESSED IN FETAL LIVER, SIGNAL = 1.1; EXPRESSED IN BRAIN, SIGNAL = 0.91; SWISSPROT HIT: Q04503, EVALUE 9.00e-01; NT HIT: AF283991.1, EVALUE 0.00e+00; EST_HUMAN HIT: H73937.1, EVALUE 0.00e+00
cttcttgctctgttgttccttagtggactgttggttcagaaggctctctatctccagatcaacatctgaggcagcatgtttccttgatttcttggctggctcctttgctggttccgatgctgaagagttcagaccagagactaacgaactggcaaaggcagctactgtagtcgagtcctgttctgcacgccgcttctgccctgtgacagtccctgctacctccccagggcccttcttttctgccacagcacccatcatggcagagagcttggaatggtcagcataggttacaagagtaggatgtgcatcatcttg

SEQ ID NO: 28968 - DNA, 92 bp, Homo sapiens
  MAP TO AL136112.9; EXPRESSED IN LUNG, SIGNAL = 1.3; EXPRESSED IN ADULT LIVER, SIGNAL = 1.3; EXPRESSED IN BRAIN, SIGNAL = 1.3; EXPRESSED IN PLACENTA, SIGNAL = 0.83; EXPRESSED IN FETAL LIVER, SIGNAL = 1.4; EXPRESSED IN BONE MARROW, SIGNAL = 1.1; NT HIT: gi11420890, EVALUE 4.00e-15; EST_HUMAN HIT: BF209778.1, EVALUE 4.00e-34; SWISSPROT HIT: P36198, EVALUE 4.90e-01
cttactggcaagtcgccgccgctcgctgtccggccctgaactatacgggcaggcctccgagactgctagacgccagaggggcgggtccggac

SEQ ID NO: 28969 - DNA, 99 bp, Homo sapiens
  MAP TO AC017086.3; EXPRESSED IN ADULT LIVER, SIGNAL = 0.57; EXPRESSED IN PLACENTA, SIGNAL = 0.78; EXPRESSED IN FETAL LIVER, SIGNAL = 0.51; EXPRESSED IN BONE MARROW, SIGNAL = 0.49; EXPRESSED IN BRAIN, SIGNAL = 0.67; EST_HUMAN HIT: AA121605.1, EVALUE 2.00e-11; NT HIT: AL163207.2, EVALUE 1.00e-15
gctgccacaaactgggtggcttaaacaatgagaatttatttcttgcagttctggagtctgggaagttgaagatcaaggtgccagcagattcagttcctg

SEQ ID NO: 28970 - DNA, 199 bp, Homo sapiens
  MAP TO AC019083.5; EXPRESSED IN BONE MARROW, SIGNAL = 0.93; EXPRESSED IN PLACENTA, SIGNAL = 0.77; EXPRESSED IN ADULT LIVER, SIGNAL = 0.99; EXPRESSED IN BRAIN, SIGNAL = 0.75; EXPRESSED IN FETAL LIVER, SIGNAL = 1.1; SWISSPROT HIT: P97360, EVALUE 3.00e-03; EST_HUMAN HIT: AW601860.1, EVALUE 1.00e-106; NT HIT: AF203977.1, EVALUE 1.00e-108
cgttccacttcagatgctgcaagttgctgtagaggagctgccccgccgtccctgccgcccgggtgaactcctgcaaactcatgctgcagaggtgctcgccgttgatgtcgaactcttggaaagggatacaattggcatccagctggttggtgtccaggaggtgctggagccactcccacacctggtacttggtccagta

SEQ ID NO: 28971 - DNA, 207 bp, Homo sapiens
  MAP TO AC008474.4; EXPRESSED IN PLACENTA, SIGNAL = 0.83; EXPRESSED IN FETAL LIVER, SIGNAL = 0.56; EXPRESSED IN BRAIN, SIGNAL = 0.58; EXPRESSED IN BONE MARROW, SIGNAL = 0.87; SWISSPROT HIT: Q02357, EVALUE 3.00e-08; EST_HUMAN HIT: AW838831.1, EVALUE 1.00e-106; NT HIT: gi11345489, EVALUE 1.20e-01
agcccgaacctgaaagtggccctgctggcaggccaggtggagcgggacggcttggtctgcgttcctggcacctgcgttggccccgtgcttcagcaggagggggatgaggtccgcccggccgtgcagggcggcgacatgcagcggggaggagccgtcctggctggtcacgttcacaccaagcccactggcaggaaccttcgccagcct

SEQ ID NO: 28972 - DNA, 123 bp, Homo sapiens
  MAP TO AL121897.15; EXPRESSED IN LUNG, SIGNAL = 1.3; EXPRESSED IN PLACENTA, SIGNAL = 0.94; EXPRESSED IN ADULT LIVER, SIGNAL = 1.3; EXPRESSED IN BRAIN, SIGNAL = 1.3; EXPRESSED IN BONE MARROW, SIGNAL = 1.1; EXPRESSED IN FETAL LIVER, SIGNAL = 1.1; SWISSPROT HIT: O15066, EVALUE 2.00e-16; EST_HUMAN HIT: AW502035.1, EVALUE 3.00e-63; NT HIT: gi11420949, EVALUE 2.00e-63
aaacgtcgagaaagagaaatccagcaacagatggaaagtcgagatgaggagaccttggaacttaaagagacatacagctcattgcagcaagaggtggacatcaagaccaaaaaactcaaaaag

SEQ ID NO: 28973 - DNA, 317 bp, Homo sapiens
  MAP TO AL121585.13; EXPRESSED IN ADULT LIVER, SIGNAL = 0.71; EXPRESSED IN FETAL LIVER, SIGNAL = 0.63; EXPRESSED IN BRAIN, SIGNAL = 0.46; EXPRESSED IN BONE MARROW, SIGNAL = 0.59; EXPRESSED IN PLACENTA, SIGNAL = 0.6; SWISSPROT HIT: Q9WTJ2, EVALUE 7.00e-26; EST_HUMAN HIT: BE612721.1, EVALUE 0.00e+00; NT HIT: gi11421922, EVALUE 0.00e+00
tcacttcctctcctcctcctcactcaggctggtattctcctggtgtgcggatgtcagcttgccctgcagaagggctgccagttttttagatgtctttttgagaaacgagctgcccggatgggcactgttcacgtgcaggtacaggtcctcctgggtggggcccgtgtagccgcaatcctcgcagacgtagagcttgtcccgccgctgcttataggcatactgctgctgcaccccatggattttcttcaggtgggactccagagagcagcgctgggtgaaggctttattgcagacgttgcatttgtagggacgaatgc

SEQ ID NO: 28974 - DNA, 299 bp, Homo sapiens
  MAP TO U82670.2; EXPRESSED IN PLACENTA, SIGNAL = 0.54; EXPRESSED IN ADULT LIVER, SIGNAL = 0.59; EXPRESSED IN BRAIN, SIGNAL = 0.45; EXPRESSED IN FETAL LIVER, SIGNAL = 0.58; EXPRESSED IN BONE MARROW, SIGNAL = 0.52; SWISSPROT HIT: P07760, EVALUE 3.20e-01; NT HIT: M89986.1, EVALUE 0.00e+00; EST_HUMAN HIT: BE315042.1, EVALUE 6.90e-02
aggagccagcatgttgtggcctggccagtggccacagtggaaagtgaagatccagttgccgcccaggcagctcctgcctgtggagatgctgctcaggcctcctcagcccaggaagacaccagccaggctgaccctggcgtggaagatgctgctgagactgctcctgccaccaaagaggccgccaggagcacccctgccattagggaaggtgaaaatgcccctgcaggcctcgaaggagccagagggtcttgtccaggcaggaggccaggaggctgaggagccccccgacccaagggggt

SEQ ID NO: 28975 - DNA, 128 bp, Homo sapiens
  MAP TO AC018395.4; EXPRESSED IN ADULT LIVER, SIGNAL = 0.63; EXPRESSED IN FETAL LIVER, SIGNAL = 0.5; EXPRESSED IN BRAIN, SIGNAL = 0.61; EXPRESSED IN BONE MARROW, SIGNAL = 0.62; EXPRESSED IN PLACENTA, SIGNAL = 0.57; NT HIT: Y17217.1, EVALUE 7.20e-02; EST_HUMAN HIT: AA385933.1, EVALUE 6.60e+00
aaagtatagtatttttgaaaccttaataccaatcactacttctataaaagtgaaacagttctttatgattttcaactttttaatcagttgtcctgatattgttaagcctttgacaactgtgataaact

SEQ ID NO: 28976 - DNA, 123 bp, Homo sapiens
  MAP TO AL157392.2; EXPRESSED IN ADULT LIVER, SIGNAL = 0.52; EXPRESSED IN BRAIN, SIGNAL = 0.52; EXPRESSED IN BONE MARROW, SIGNAL = 0.51; EXPRESSED IN PLACENTA, SIGNAL = 0.48; EXPRESSED IN FETAL LIVER, SIGNAL = 0.46; NT HIT: U28143.2, EVALUE 1.10e+00; SWISSPROT HIT: P25109, EVALUE 9.20e+00; EST_HUMAN HIT: BF224452.1, EVALUE 2.00e-55
ctgagttgagtggtcagagatggcagagacaaagtagaagagctgcagaggtataacctttatgccttgcacaaagtcatgctcccagcaaagtcgatacgtactccagcaaagctgaagaac

SEQ ID NO: 28977 - DNA, 215 bp, Homo sapiens
  MAP TO AC024196.2; EXPRESSED IN PLACENTA, SIGNAL = 0.55; EXPRESSED IN FETAL LIVER, SIGNAL = 0.52; EXPRESSED IN BONE MARROW, SIGNAL = 0.53; EXPRESSED IN ADULT LIVER, SIGNAL = 0.68; EXPRESSED IN BRAIN, SIGNAL = 0.55; EST_HUMAN HIT: AL048474.2, EVALUE 1.00e-118; NT HIT: gi11435592, EVALUE 1.00e-118; SWISSPROT HIT: P04264, EVALUE 6.00e-36
ttgttccggtaatcctccaccatgtcctgcatgttcttcagttccgaatccaaccgagattgatcactcttcagttggtccactctccttcggagattgttgatgaatgactcaaagtagggctctaaattatgggttctagtggaggtatctacctgctgcagcagctcccattttgtttgcagtacctggttctgctgctccaggaacctcac

SEQ ID NO: 28978 - DNA, 141 bp, Homo sapiens
  MAP TO AL137225.7; EXPRESSED IN ADULT LIVER, SIGNAL = 0.62; EXPRESSED IN PLACENTA, SIGNAL = 0.67; EXPRESSED IN FETAL LIVER, SIGNAL = 0.58; EXPRESSED IN BRAIN, SIGNAL = 0.51; EXPRESSED IN BONE MARROW, SIGNAL = 0.49; NT HIT: AL163204.2, EVALUE 3.20e-01; EST_HUMAN HIT: BE843995.1, EVALUE 4.70e-01; SWISSPROT HIT: P48124, EVALUE 6.90e+00
cttgctcgcatgtggatcctagtgaagactggctggcagttctgcaagtcaagagagatttgacccagcttggtctgggagagcacaaaggtagccatgatgttcacgtccactgtggagccactgaggaagccaagcaac

SEQ ID NO: 28979 - DNA, 100 bp, Homo sapiens
  MAP TO AC009597.4; EXPRESSED IN BRAIN, SIGNAL = 0.55; EXPRESSED IN PLACENTA, SIGNAL = 0.51; EXPRESSED IN FETAL LIVER, SIGNAL = 0.61; EXPRESSED IN BONE MARROW, SIGNAL = 0.53; NT HIT: AF260225.1, EVALUE 5.40e-02; EST_HUMAN HIT: AW946222.1, EVALUE 3.10e-01
gtaaggaattactgcaggaaaatagtgctgttctggagactaagcactgtgtgtctcttgggcagtctctgtatttctcagaaaagacagtatatcccct

SEQ ID NO: 28980 - DNA, 124 bp, Homo sapiens
  MAP TO AC022020.3; EXPRESSED IN PLACENTA, SIGNAL = 0.49; EXPRESSED IN BRAIN, SIGNAL = 0.47; SWISSPROT HIT: P18736, EVALUE 7.10e+00; EST_HUMAN HIT: BE388331.1, EVALUE 1.60e+00
cttccccttggcctgccagaaagctgaaagtttccatgcctctgctttccagctctttctctgctacatcagagagcccctttctcatgtcctcaaagtgacaaatgtatgctgccaagcaagg

SEQ ID NO: 28981 - DNA, 126 bp, Homo sapiens
  MAP TO AL158150.2; EXPRESSED IN ADULT LIVER, SIGNAL = 0.67; EXPRESSED IN LUNG, SIGNAL = 0.85; EXPRESSED IN PLACENTA, SIGNAL = 0.91; EXPRESSED IN FETAL LIVER, SIGNAL = 0.87; EXPRESSED IN BRAIN, SIGNAL =   1; EXPRESSED IN BONE MARROW, SIGNAL = 0.74; EST_HUMAN HIT: AA397758.1, EVALUE 2.00e-15; SWISSPROT HIT: P04486, EVALUE 1.40e+00
atgtcttctctccgaatataccgagaactaccctttctatcactcctacctgcccagagagtccttcaagccaaggcgggagtaccagaaagggcctataccaatggaaggcctgactacatcaag

SEQ ID NO: 28982 - DNA, 102 bp, Homo sapiens
  MAP TO AC018528.3; EXPRESSED IN BONE MARROW, SIGNAL = 0.73; EXPRESSED IN FETAL LIVER, SIGNAL = 0.7; EXPRESSED IN BRAIN, SIGNAL = 0.67; EXPRESSED IN PLACENTA, SIGNAL = 0.77; SWISSPROT HIT: P10909, EVALUE 9.40e+00; NT HIT: AJ229042.1, EVALUE 3.40e+00
tcatcaaagacatcatttttcaccaaagagcaggcttctggatttgagctatcctttctctcctcacttgaggagttcaccattgctgctgactctctaaag

SEQ ID NO: 28983 - DNA, 126 bp, Homo sapiens
  MAP TO AL136313.3; EXPRESSED IN PLACENTA, SIGNAL = 0.62; EXPRESSED IN FETAL LIVER, SIGNAL =   1; EXPRESSED IN BRAIN, SIGNAL = 0.81; EXPRESSED IN BONE MARROW, SIGNAL = 1.1; EXPRESSED IN ADULT LIVER, SIGNAL = 0.75; NT HIT: M89637.1, EVALUE 2.80e-01; EST_HUMAN HIT: AI085314.1, EVALUE 6.00e-65; SWISSPROT HIT: Q92781, EVALUE 4.10e+00
actcttttgctatctggaaacccatgtccacctctgacttccactcaaaattgctttcctcacagtctgactgcgagagttgtgaaaaattgggatgtgcttctgaggtgggctgtggaatgccat

SEQ ID NO: 28984 - DNA, 201 bp, Homo sapiens
  MAP TO AC019276.3; EXPRESSED IN BRAIN, SIGNAL = 0.52; EXPRESSED IN PLACENTA, SIGNAL = 0.61; EXPRESSED IN FETAL LIVER, SIGNAL = 0.5; EXPRESSED IN BONE MARROW, SIGNAL = 0.57; EST_HUMAN HIT: AW372624.1, EVALUE 7.00e-01; NT HIT: gi6981501, EVALUE 4.70e-01
ctaagcgttccagttggaccctccacgctggatgatgacaatgatggtggttttggcagtggtgcttgtgacgctgaaagtaacggtggttatggtgatgatggtgatgacagcagctgccatctgccaagcacgcacagtgtggccagatgtgctaggcgctctacaccctttggcctatgtgatcttcacaccaaccct

SEQ ID NO: 28985 - DNA, 226 bp, Homo sapiens
  MAP TO AL121898.10; EXPRESSED IN PLACENTA, SIGNAL = 0.53; EXPRESSED IN FETAL LIVER, SIGNAL = 0.92; EXPRESSED IN BONE MARROW, SIGNAL = 0.83; EXPRESSED IN BRAIN, SIGNAL = 0.73; NT HIT: U29185.1, EVALUE 3.40e-02; EST_HUMAN HIT: BF338078.1, EVALUE 3.00e-03
gtctggggtggggtctgacaacgtgcatttccagcaattcccaggtaatgctgatgctgatggtgacaaccaatgctgtatacccggtcttctggacctatgtcctactatagttctggaatggcatatctatgaatcaactaaaaagaaatctatttatttcactagctacaccatcagtattaataacaataagacaggtcaaaagagaaaatgtcatgattct

SEQ ID NO: 28986 - DNA, 129 bp, Homo sapiens
  MAP TO AC019184.2; EXPRESSED IN PLACENTA, SIGNAL = 0.65; EXPRESSED IN FETAL LIVER, SIGNAL = 0.68; EXPRESSED IN BONE MARROW, SIGNAL = 0.65; EXPRESSED IN ADULT LIVER, SIGNAL = 0.68; EXPRESSED IN BRAIN, SIGNAL = 0.58; SWISSPROT HIT: P19049, EVALUE 7.00e+00; NT HIT: U52111.2, EVALUE 1.00e-03; EST_HUMAN HIT: H80443.1, EVALUE 2.00e-03
atgaaaactatatatgacaccaaaagcacaggcagtaagaaaattaaaaaatcaaacttcatcaaaattaaaaacttttgtccatcagaagacattatcaacagaatgaatggaatccacacaaagaaa

SEQ ID NO: 28987 - DNA, 228 bp, Homo sapiens
  MAP TO AC020906.3; EXPRESSED IN ADULT LIVER, SIGNAL = 0.62; EXPRESSED IN BRAIN, SIGNAL = 0.66; EXPRESSED IN BONE MARROW, SIGNAL = 0.55; EXPRESSED IN PLACENTA, SIGNAL = 0.64; EXPRESSED IN FETAL LIVER, SIGNAL = 0.65; SWISSPROT HIT: P27806, EVALUE 1.20e-01; EST_HUMAN HIT: AA412397.1, EVALUE 1.00e-58; NT HIT: X06777.1, EVALUE 2.10e+00
atgcctctggctttgacccttctgctgctctcgggcttgggcgcccccggaggctggggctgcctgcagtgcgaccccttggtgctggaggccctgggtcacctgcgctccgccctcatccccagtcgcttccagttggagcagctgcaggcgcgcgccggggccgtgctgatgggcatggaggggcctttcttccgggactacgcgctgaacgtgtttgtggggaaa

SEQ ID NO: 28988 - DNA, 306 bp, Homo sapiens
  MAP TO AC024575.1; EXPRESSED IN ADULT LIVER, SIGNAL = 2.4; EXPRESSED IN PLACENTA, SIGNAL = 0.83; EXPRESSED IN FETAL LIVER, SIGNAL = 2.5; EXPRESSED IN BRAIN, SIGNAL =   2; EXPRESSED IN BONE MARROW, SIGNAL = 1.3; EXPRESSED IN LUNG, SIGNAL = 1.5; EST_HUMAN HIT: AI061395.1, EVALUE 0.00e+00; NT HIT: AF263366.1, EVALUE 7.00e-32; SWISSPROT HIT: P21851, EVALUE 6.90e-02
ctagaggctccttatttccagggcaaggccagcgagacagagcccattgctcaggacgcagcccagattgcaaagagaggacagcccatggtagcggaagaaattctggcggagagcactgtacttggggtccttctctcgcagctggcggtagggatcgggaccctggtggctgcctggtacctccccacccaggcctcgctccttctccacggtttgcagggcccacatggcagctgtggtgcggggttccagccagcgggcgttgacagtggccagcgtaaggctcaggaacagcaggtaaag

SEQ ID NO: 28989 - DNA, 264 bp, Homo sapiens
  MAP TO AC016614.3; EXPRESSED IN ADULT LIVER, SIGNAL = 1.1; EXPRESSED IN LUNG, SIGNAL =   1; EXPRESSED IN PLACENTA, SIGNAL = 0.89; EXPRESSED IN FETAL LIVER, SIGNAL = 1.4; EXPRESSED IN BRAIN, SIGNAL = 0.9; EXPRESSED IN BONE MARROW, SIGNAL = 0.77; EST_HUMAN HIT: AU139978.1, EVALUE 2.00e-08; SWISSPROT HIT: Q16620, EVALUE 3.20e-02; NT HIT: AF135416.1, EVALUE 2.50e+00
ttcatcaaattatttgaaaagtaaacacgtgggctgtacagagaacagtgaatcctcccctaccctgagctatcactcctgcttgtggggcacagagaaggcattcagacctgtgcctgccaccaccctacccccagccaacaccacctccagtgtgactgtgcacacaggctccagcaagggcctcctgcccacctctgtaagctgcattgcctctgccactctggtgaacatctgcaaggaggcaggcacccccacacccac

SEQ ID NO: 28990 - DNA, 271 bp, Homo sapiens
  MAP TO AL049870.3; EXPRESSED IN PLACENTA, SIGNAL = 0.46; EXPRESSED IN FETAL LIVER, SIGNAL = 0.52; EXPRESSED IN BRAIN, SIGNAL = 0.54; EXPRESSED IN BONE MARROW, SIGNAL = 0.48; SWISSPROT HIT: Q04652, EVALUE 2.00e-11; EST_HUMAN HIT: N44974.1, EVALUE 1.00e-108; NT HIT: X66698.1, EVALUE 6.50e-01
ttttcttattttgggaatgtacttctctacagattgtaaataagattgtccatcataaccacctaaggcataaagttctcctgcaagtactactactccaagagtacttcggctttcattcattctctctagagaagtccaagtatttgtatcaggattccagcattccactgaattttcatgttttctgatagtgacgccaggacgcacattagttgcaataccacctataacatatactttttggtctaaaacgcatattccaaattca

SEQ ID NO: 28991 - DNA, 223 bp, Homo sapiens
  MAP TO AC018845.3; EXPRESSED IN PLACENTA, SIGNAL = 0.64; EXPRESSED IN ADULT LIVER, SIGNAL =   1; EXPRESSED IN FETAL LIVER, SIGNAL = 0.76; EXPRESSED IN BRAIN, SIGNAL = 0.71; EXPRESSED IN BONE MARROW, SIGNAL = 0.62; NT HIT: U70732.1, EVALUE 4.00e-14; SWISSPROT HIT: P24298, EVALUE 2.00e-14; EST_HUMAN HIT: BF308560.1, EVALUE 2.00e-72
tcgcccatgtagcccttggaggtggagtggaaggaggcgagctccacgttgctggagtactcgggccccatctcgtacagcaccttcttgaaggagtggaatctgcaatctggagagtacacgttgtcctggtacacctgcgggggcacggcagggacggtcaccaaagggtcctcaaagaggctgctgcccagtgtggccaaggcaagggagggcacaggtg

SEQ ID NO: 28992 - DNA, 144 bp, Homo sapiens
  MAP TO AC021782.2; EXPRESSED IN BRAIN, SIGNAL = 0.55; EXPRESSED IN BONE MARROW, SIGNAL = 0.45; NT HIT: AB046764.1, EVALUE 8.00e-76; EST_HUMAN HIT: T06397.1, EVALUE 3.00e-48; SWISSPROT HIT: P50851, EVALUE 2.00e-09
gcacggaagaagatgtagtaaagtcaaagaaaacattcagaagtcaagcaatagtgaaccaaaatgcagagacagaacttatgctggaaggagacgatgatgcagtcagtctgctacaggagaaagaaattgacaaccttgcag

SEQ ID NO: 28993 - DNA, 172 bp, Homo sapiens; identical to SEQ ID NO: 28651
  MAP TO AC012571.3; EXPRESSED IN FETAL LIVER, SIGNAL = 0.56; EXPRESSED IN BRAIN, SIGNAL = 0.52; EXPRESSED IN ADULT LIVER, SIGNAL = 0.73; EXPRESSED IN BONE MARROW, SIGNAL = 0.54; SWISSPROT HIT: O35453, EVALUE 3.00e-12; NT HIT: Y13192.1, EVALUE 4.00e-01

SEQ ID NO: 28994 - DNA, 127 bp, Homo sapiens
  MAP TO AL109915.9; EXPRESSED IN PLACENTA, SIGNAL = 0.55; EXPRESSED IN BRAIN, SIGNAL =   2; NT HIT: gi7662227, EVALUE 1.00e-65; EST_HUMAN HIT: AW984383.1, EVALUE 1.10e-01
ctccaaagagatccacttcagcagtgacagcagtaacagttgtagtagtggaggcagaagctgaggcagttgcaatttcagcagttgtagtaggaggggtaggttctggtgcaaatggatctgaaat

SEQ ID NO: 28995 - DNA, 84 bp, Homo sapiens
  MAP TO AC008433.3; EXPRESSED IN ADULT LIVER, SIGNAL = 0.56; EXPRESSED IN BRAIN, SIGNAL = 0.54; EXPRESSED IN BONE MARROW, SIGNAL = 0.54; EXPRESSED IN PLACENTA, SIGNAL = 0.52; EXPRESSED IN FETAL LIVER, SIGNAL = 0.53; NT HIT: gi5835317, EVALUE 2.30e+00; EST_HUMAN HIT: AW235336.1, EVALUE 2.70e+00
ggttcccatgatcaattaagtactactaaagagtcatgtggtttggattattcagtttaccagattgattttgctgtcattatg

SEQ ID NO: 28996 - DNA, 78 bp, Homo sapiens
  MAP TO AP001256.2; EXPRESSED IN LUNG, SIGNAL = 0.93; EXPRESSED IN FETAL LIVER, SIGNAL = 0.8; EXPRESSED IN BONE MARROW, SIGNAL = 0.63; EXPRESSED IN PLACENTA, SIGNAL = 0.76; EXPRESSED IN ADULT LIVER, SIGNAL = 0.77; EXPRESSED IN BRAIN, SIGNAL = 0.83; EST_HUMAN HIT: AV720225.1, EVALUE 2.30e-01; NT HIT: AF111167.2, EVALUE 1.60e-01; SWISSPROT HIT: P45442, EVALUE 9.60e+00
ggagatggtagaaggcatcacatagggagtgagcacctgagacagagcgagacgctgggggctgactggctttataat

SEQ ID NO: 28997 - DNA, 102 bp, Homo sapiens
  MAP TO AC018501.5; EXPRESSED IN PLACENTA, SIGNAL = 0.54; EXPRESSED IN FETAL LIVER, SIGNAL = 0.5; EXPRESSED IN ADULT LIVER, SIGNAL = 0.59; EXPRESSED IN BRAIN, SIGNAL = 0.54; EXPRESSED IN BONE MARROW, SIGNAL = 0.55; EST_HUMAN HIT: AA483634.1, EVALUE 5.00e+00; NT HIT: AJ250567.1, EVALUE 3.40e+00
aaggtcccgataccttggtctactctggctacttctgtaggacagcatattcgtcgactaacgtggacagtgaaatatcgggggagaacctgcccccccatg

SEQ ID NO: 28998 - DNA, 202 bp, Homo sapiens
  MAP TO AL121673.27; EXPRESSED IN PLACENTA, SIGNAL = 0.83; EXPRESSED IN ADULT LIVER, SIGNAL = 0.86; EXPRESSED IN FETAL LIVER, SIGNAL = 0.83; EXPRESSED IN BONE MARROW, SIGNAL = 0.85; EXPRESSED IN BRAIN, SIGNAL = 0.81; EST_HUMAN HIT: R59160.1, EVALUE 2.80e+00; SWISSPROT HIT: Q62925, EVALUE 3.30e-01; NT HIT: AJ006345.1, EVALUE 7.40e+00
cagcctggggtcctagtcaggcctcaggtagccgactgtctgggccatcctctccagcctgacatccttgtctccccggcagctgtggagggtgcccctgtgcccacctggccagcaccacctgcccagctcagagaaggggctgtggctgccgcctgccacgtagggcagattgcttgcctggaagggctgttcttgactt

SEQ ID NO: 28999 - DNA, 143 bp, Homo sapiens
  MAP TO AL132866.21; EXPRESSED IN ADULT LIVER, SIGNAL = 0.63; EXPRESSED IN BRAIN, SIGNAL = 0.6; EXPRESSED IN BONE MARROW, SIGNAL = 0.64; EXPRESSED IN PLACENTA, SIGNAL = 0.77; EXPRESSED IN FETAL LIVER, SIGNAL = 0.62; SWISSPROT HIT: O35876, EVALUE 6.10e-01; NT HIT: AL163281.2, EVALUE 6.00e-09; EST_HUMAN HIT: AA132611.1, EVALUE 5.00e-75
tgttctggaggccagaagtctgaaatcaaggtgtcagcagggttggttcctgctggagactcaggggagaaaccgccggtgccatccccgccagcttttggtgcctgctggtctccctggccttccttggcttgtggctgcat

SEQ ID NO: 29000 - DNA, 123 bp, Homo sapiens
  MAP TO AP001436.1; EXPRESSED IN ADULT LIVER, SIGNAL = 0.7; EXPRESSED IN PLACENTA, SIGNAL = 0.67; EXPRESSED IN FETAL LIVER, SIGNAL = 0.61; EXPRESSED IN BRAIN, SIGNAL = 0.7; EXPRESSED IN BONE MARROW, SIGNAL = 0.55; EST_HUMAN HIT: BE395946.1, EVALUE 1.60e+00; NT HIT: U22967.1, EVALUE 6.90e-02; SWISSPROT HIT: P37348, EVALUE 3.10e+00
tgctggtctcagttggttgctgaatgggatgaacaccagctgccctatttcttcattaaggggaaagaagtctgtcttgtgcatacactggggactggccttggcccatcacattactgtcct

SEQ ID NO: 29001 - DNA, 82 bp, Homo sapiens
  MAP TO AL121911.10; EXPRESSED IN ADULT LIVER, SIGNAL = 0.56; EXPRESSED IN BRAIN, SIGNAL = 0.53; EXPRESSED IN BONE MARROW, SIGNAL = 0.52; EST_HUMAN HIT: BE244840.1, EVALUE 2.00e-05; NT HIT: L07737.1, EVALUE 4.00e-05
ttacaataagaagacggaaattcgcaaaccaaacactgaatctaccaataccttgatcttggactttgcagcctctaaaact

SEQ ID NO: 29002 - DNA, 160 bp, Homo sapiens
  MAP TO AC008506.4; EXPRESSED IN ADULT LIVER, SIGNAL = 1.2; EXPRESSED IN FETAL LIVER, SIGNAL = 1.2; EXPRESSED IN BONE MARROW, SIGNAL = 0.94; EXPRESSED IN LUNG, SIGNAL = 1.2; EXPRESSED IN PLACENTA, SIGNAL = 1.1; EXPRESSED IN BRAIN, SIGNAL = 0.97; NT HIT: AF076215.1, EVALUE 5.70e+00; SWISSPROT HIT: Q10077, EVALUE 4.00e+00; EST_HUMAN HIT: R62746.1, EVALUE 1.40e-01
tggtttctgagctttgctgtctgacttgggtgttgaggaggggctgctgggaaacctcggtgccctcctcagccttgagcatgttcagggcaggatccttgaagccaggaaggtagctgagcagctgtgtgaagcagatgcttggtgagatggtaatggc

SEQ ID NO: 29003 - DNA, 204 bp, Homo sapiens
  MAP TO AP001425.1; EXPRESSED IN ADULT LIVER, SIGNAL = 0.67; EXPRESSED IN PLACENTA, SIGNAL = 0.65; EXPRESSED IN FETAL LIVER, SIGNAL = 0.62; EXPRESSED IN BRAIN, SIGNAL = 0.68; EXPRESSED IN BONE MARROW, SIGNAL = 0.59; NT HIT: AL163278.2, EVALUE 4.00e-60; SWISSPROT HIT: Q9UKP6, EVALUE 3.30e-01; EST_HUMAN HIT: AW850897.1, EVALUE 1.80e-01
atagttgggcgggaggggctggggcaggcagtcttcattttctgctttcctctttagctgtactttcgagtcctcgtcactgtggtccctagagaaatctcccaactgcatggtgtccagcaggttttcagccatagattttaattggctcatggtatctttcatgacctgttttatttgtgcattcaaaggtttccagctttt

SEQ ID NO: 29004 - DNA, 279 bp, Homo sapiens
  MAP TO AL138956.3; EXPRESSED IN PLACENTA, SIGNAL = 0.98; EXPRESSED IN BONE MARROW, SIGNAL = 0.92; EXPRESSED IN FETAL LIVER, SIGNAL = 0.85; EXPRESSED IN LUNG, SIGNAL = 0.84; EXPRESSED IN ADULT LIVER, SIGNAL = 0.75; EXPRESSED IN BRAIN, SIGNAL = 0.77; EST_HUMAN HIT: AF150195.1, EVALUE 6.40e-02; NT HIT: AL161564.2, EVALUE 1.70e-01
gtcattttgctgaaaaggaggaacgtgggatcaagttctgtgacttcagagaagagttgcgtgtacaaaactttgggagaggatcaccacagagaggtgataagagcctacttgatctttttcttcttcttcttaaaagtgataatatgagcataaaactatttacagctttaaacagcttcagtactaaagcgtgcataacacattcctctcaactgaacaatacacaagcaggcattctggagattttattgcagcagattggtgtgattataagta

SEQ ID NO: 29005 - DNA, 487 bp, Homo sapiens
  MAP TO AC007956.5; EXPRESSED IN PLACENTA, SIGNAL = 0.84; EXPRESSED IN LUNG, SIGNAL = 1.2; EXPRESSED IN FETAL LIVER, SIGNAL = 1.1; EXPRESSED IN BRAIN, SIGNAL = 1.5; EXPRESSED IN BONE MARROW, SIGNAL = 1.4; EXPRESSED IN ADULT LIVER, SIGNAL = 1.3; EST_HUMAN HIT: AU142662.1, EVALUE 0.00e+00; NT HIT: AB033168.1, EVALUE 9.00e-85
cctccagggtcgtatagacctccccctcctatgggcaaaccaccaggttcaattgtaagaccctctgctccaccagcaagatcatctgttcctgtgaccaggccacctgtcccaataccaccacctccacctcctccacctctacctcctcctcctccagtgataaagccacaaacttcagctgtagaacaggaacgatgggatgaagattctttctatgggctctgggatacaaatgatgaacaaggactgaattcagaatttaagtcagaaactgcagcaattccatctgctccagtattaccacccccacctgttcactcttccattccccctcctggcccagtgcctatgggtatgccaccaatgtccaagccaccaccagtacaacagactgttgattatggccatggccgaggtgagtaatgatagtgcacttgtatttgggattctacaggaattgttagcttcagctttagctttctct

SEQ ID NO: 29006 - DNA, 91 bp, Homo sapiens
  MAP TO AC013662.3; EXPRESSED IN PLACENTA, SIGNAL =   1; EXPRESSED IN ADULT LIVER, SIGNAL = 0.84; EXPRESSED IN FETAL LIVER, SIGNAL = 1.3; EXPRESSED IN BRAIN, SIGNAL = 0.95; EXPRESSED IN BONE MARROW, SIGNAL = 0.76; NT HIT: AJ001398.1, EVALUE 4.80e-02
tcagttgggctcatttttcttggcccctccatcgagctgaacttctttggaaaaagaaacagcagcttgtgggttactaaatgccagagag

SEQ ID NO: 29007 - DNA, 263 bp, Homo sapiens
  MAP TO AC025226.2; EXPRESSED IN BRAIN, SIGNAL = 0.85; EXPRESSED IN PLACENTA, SIGNAL = 0.48; SWISSPROT HIT: P33240, EVALUE 3.00e-07
ctaatggaatggaatggaatgcaatggaatggaatcgaatggaatgtaatcgaatggaatggaatcgaatggagtgtaatagtacagtctcgaatggaatggaattgaatggaatggaatcgaatggaatggaatcgaatggaatggaaaggaatggaatggaaccgaatggaatggactggaatggaatggaatcgaatggaatggactcaaagggaatggaatggaatggaatggacacgaatggaatggattcgaattga

SEQ ID NO: 29008 - DNA, 185 bp, Homo sapiens
  MAP TO AF241730.1; EXPRESSED IN BRAIN, SIGNAL = 0.56; EXPRESSED IN BONE MARROW, SIGNAL = 0.51; EXPRESSED IN PLACENTA, SIGNAL = 0.51; EXPRESSED IN ADULT LIVER, SIGNAL = 0.6; EXPRESSED IN FETAL LIVER, SIGNAL = 0.88; EST_HUMAN HIT: BE173783.1, EVALUE 1.00e-02; SWISSPROT HIT: Q02836, EVALUE 3.40e-01; NT HIT: X03273.1, EVALUE 3.00e-05
taaaaaagaaagaactgatgcacaaaacaacatggatgaatctcaaaacttatggtgaagaaaagaagccagatgcaaaggagcacattgaaggggtactaactgtgaacaagcagaaggaaaatttggaagatgatgaggaaatttgccttgttttgattgtggtggtgtttgtatgggtattt

SEQ ID NO: 29009 - DNA, 111 bp, Homo sapiens
  MAP TO AC021486.3; EXPRESSED IN FETAL LIVER, SIGNAL = 0.58; EXPRESSED IN BRAIN, SIGNAL = 0.49; EXPRESSED IN PLACENTA, SIGNAL = 0.58; EXPRESSED IN ADULT LIVER, SIGNAL = 0.59; EXPRESSED IN BONE MARROW, SIGNAL = 0.51; NT HIT: AL139077.2, EVALUE 2.40e-01; EST_HUMAN HIT: BF128792.1, EVALUE 3.60e-01; SWISSPROT HIT: Q9Y0I1, EVALUE 7.10e+00
tttgatgtcttcctcggaatcggaaggcttccctggagcttggtgtgctgggcttgtctgtgctgtggctttcagtctcaggccaggttttacaaattttgtcgcattggt

SEQ ID NO: 29010 - DNA, 120 bp, Homo sapiens
  MAP TO AL139824.7; EXPRESSED IN PLACENTA, SIGNAL = 0.51; EXPRESSED IN FETAL LIVER, SIGNAL = 0.54; EXPRESSED IN BRAIN, SIGNAL = 0.46; EXPRESSED IN BONE MARROW, SIGNAL = 0.55; NT HIT: AF119117.1, EVALUE 4.10e+00; EST_HUMAN HIT: BF217818.1, EVALUE 1.50e+00; SWISSPROT HIT: P75864, EVALUE 9.30e+00
ctctgatttcaacagccgtttgctggacagctcccccagttccgtgggagctcagattcaacttacactgccagggtgccactttaagggtgacgaacacattctgccccagagtcttcc

SEQ ID NO: 29011 - DNA, 182 bp, Homo sapiens
  MAP TO AP001415.1; EXPRESSED IN ADULT LIVER, SIGNAL = 0.62; EXPRESSED IN BRAIN, SIGNAL = 0.74; EXPRESSED IN PLACENTA, SIGNAL = 0.71; EXPRESSED IN FETAL LIVER, SIGNAL = 0.82; EXPRESSED IN BONE MARROW, SIGNAL = 0.77; NT HIT: Y12727.1, EVALUE 1.10e-01; SWISSPROT HIT: P51379, EVALUE 1.70e+00
ttcatgcagctccacagccaacaccccacttcacacggcatgctgaggatgcagcatcacctggccagggttacatctgcttggaggctgttcaggtgctgagaactctggcagtgtcagggaagcccacgacaacctcatagctgtgagccacagctcacacaaaaattgtagtaacatat

SEQ ID NO: 29012 - DNA, 316 bp, Homo sapiens
  MAP TO AC016948.4; EXPRESSED IN PLACENTA, SIGNAL = 1.4; EXPRESSED IN BRAIN, SIGNAL = 0.6; EXPRESSED IN ADULT LIVER, SIGNAL = 0.89; EXPRESSED IN FETAL LIVER, SIGNAL = 0.58; EXPRESSED IN BONE MARROW, SIGNAL = 0.59; SWISSPROT HIT: P08547, EVALUE 6.00e-04; NT HIT: AL163267.2, EVALUE 6.00e-14; EST_HUMAN HIT: BE162737.1, EVALUE 6.00e-21
acagtttttcagcatctcagggagactgcagtggtgatctagttctttcaaagtgtctgtggattctctcgactttcctggtatgtacctgtggtagttcttggagcaaaagtccatgatgtcagtctccacacactgctccatccatctgagcaggagctgcaagctagtcctgcccctctccaccatcctaatccagattgtcttcttattgttgagttttaggagttctttttgtattctggataacagcccttcatcagctatgttttttgcagatattttctcccagttggtggcttgtcttttcattctc

SEQ ID NO: 29013 - DNA, 102 bp, Homo sapiens
  MAP TO AC013332.4; EXPRESSED IN PLACENTA, SIGNAL = 0.69; EXPRESSED IN ADULT LIVER, SIGNAL = 0.73; EXPRESSED IN FETAL LIVER, SIGNAL = 0.68; EXPRESSED IN BONE MARROW, SIGNAL = 0.62; EXPRESSED IN BRAIN, SIGNAL = 0.68; EST_HUMAN HIT: AI660659.1, EVALUE 9.00e-51; SWISSPROT HIT: P36346, EVALUE 9.40e+00; NT HIT: gi11428525, EVALUE 6.00e-51
ctgattcctgatcctcgtgctggccatgggagtcaagtatttatgttctaaataccaggcccgctcctgaaacaccagcttggttccatacaacagacaaaa

SEQ ID NO: 29014 - DNA, 178 bp, Homo sapiens
  MAP TO AC021880.2; EXPRESSED IN BONE MARROW, SIGNAL = 0.89; EXPRESSED IN ADULT LIVER, SIGNAL = 0.85; EXPRESSED IN BRAIN, SIGNAL = 0.98; EXPRESSED IN LUNG, SIGNAL = 0.92; EXPRESSED IN PLACENTA, SIGNAL = 0.84; EXPRESSED IN FETAL LIVER, SIGNAL = 0.81; EST_HUMAN HIT: BF110626.1, EVALUE 1.60e-01; SWISSPROT HIT: P41996, EVALUE 2.30e-02; NT HIT: gi8393699, EVALUE 1.00e-01
ggaagacagcaaggagacttatgctgacggcgatggagaggctcaggcagtcagccatggaaagactcaggcagtcagccatggagagactcaggcagtcagcgatggagagactcaggcagtcagcgatggaagaggctcaggcagtgactggggtgtggctgctaagggacggatc

SEQ ID NO: 29015 - DNA, 125 bp, Homo sapiens
  MAP TO AC011666.18; EXPRESSED IN BONE MARROW, SIGNAL = 0.43; EXPRESSED IN BRAIN, SIGNAL = 0.56; SWISSPROT HIT: Q9Z581, EVALUE 4.10e+00; NT HIT: gi11423508, EVALUE 2.00e-64; EST_HUMAN HIT: AI056693.1, EVALUE 6.00e-62
aatgtccttgttatacaccatgtccctggactggagtgtcacgaccggacagtctgcagccagagactgcgggaactgcaggcccatcatgtccacaacaacagtgggtgtgatgtggcctacaa

SEQ ID NO: 29016 - DNA, 78 bp, Homo sapiens
  MAP TO AC021468.2; EXPRESSED IN PLACENTA, SIGNAL = 0.64; EXPRESSED IN ADULT LIVER, SIGNAL = 0.63; EXPRESSED IN FETAL LIVER, SIGNAL = 0.87; EXPRESSED IN BRAIN, SIGNAL =   1; EXPRESSED IN BONE MARROW, SIGNAL = 0.59; EST_HUMAN HIT: AA372164.1, EVALUE 2.30e-01; NT HIT: AJ235272.1, EVALUE 2.40e+00
accccaagcatcatcatcatcatcatcatcatcatcatcatcatcgctattatttatggagctgccattacatgctag

SEQ ID NO: 29017 - DNA, 177 bp, Homo sapiens
  MAP TO AL136172.12; EXPRESSED IN LUNG, SIGNAL = 1.3; EXPRESSED IN FETAL LIVER, SIGNAL = 1.9; EXPRESSED IN ADULT LIVER, SIGNAL = 0.92; EXPRESSED IN BRAIN, SIGNAL = 1.1; EXPRESSED IN PLACENTA, SIGNAL = 1.5; EXPRESSED IN HELA, SIGNAL = 3.6; EXPRESSED IN BONE MARROW, SIGNAL = 2.5; NT HIT: gi11421795, EVALUE 2.00e-95; EST_HUMAN HIT: BE079722.1, EVALUE 3.00e-95; SWISSPROT HIT: P04844, EVALUE 7.00e-17
gatcaggtcatccagctgatgaacgcgatcttcagcaagaagaactttgagtccctctccgaagccttcagcgtggcctctgcagctgctgtgctctcgcataatcgctaccacgtgccagttgtggttgtgcctgagggctctgcttccgacactcatgaacaggctatcttgcgg

SEQ ID NO: 29018 - DNA, 299 bp, Homo sapiens
  MAP TO AL121772.12; EXPRESSED IN BRAIN, SIGNAL = 1.2; EXPRESSED IN BONE MARROW, SIGNAL = 0.8; EXPRESSED IN ADULT LIVER, SIGNAL = 0.94; EXPRESSED IN LUNG, SIGNAL =   1; EXPRESSED IN PLACENTA, SIGNAL = 0.76; EXPRESSED IN FETAL LIVER, SIGNAL = 0.9; NT HIT: gi11420371, EVALUE 0.00e+00; EST_HUMAN HIT: BE410768.1, EVALUE 0.00e+00; SWISSPROT HIT: Q21815, EVALUE 7.20e-02
cagccgcagcacggtccttggcaaacaaggatgagaaaaatatccaaccacgggagcctgcgggtggcgaaggtggcataccccctggggctgtgtgtgggcgtgttcatctatgttgcctacatcaagtggcaccgggccaccgccacccaggccttcttcagcatcaccagggcagccccgggggcccggtggggtcagcaggcccacagccccctggggacagctgcagacgggcacgaggtcttctacgggatcatgtttgatgcaggaagcactggcacccgagtacacgtctt

SEQ ID NO: 29019 - DNA, 126 bp, Homo sapiens
  MAP TO AL161450.2; EXPRESSED IN LUNG, SIGNAL = 0.89; EXPRESSED IN PLACENTA, SIGNAL = 0.88; EXPRESSED IN FETAL LIVER, SIGNAL = 0.8; EXPRESSED IN BONE MARROW, SIGNAL = 1.3; EXPRESSED IN ADULT LIVER, SIGNAL = 0.77; EXPRESSED IN BRAIN, SIGNAL = 0.63; EST_HUMAN HIT: BE242517.1, EVALUE 6.00e-65; NT HIT: gi11429127, EVALUE 4.00e-65; SWISSPROT HIT: O60674, EVALUE 5.00e-19
aacatactccccagatggaaaggtcagataatctgcctcagatttcccaagggaatggtaaagatacacctgaagaactggatctatttgcttcatagaattggcatttccagaaatatcaccatt

SEQ ID NO: 29020 - DNA, 190 bp, Homo sapiens
  MAP TO AL161662.1; EXPRESSED IN LUNG, SIGNAL = 0.9; EXPRESSED IN PLACENTA, SIGNAL = 0.97; EXPRESSED IN ADULT LIVER, SIGNAL = 0.8; EXPRESSED IN FETAL LIVER, SIGNAL = 1.1; EXPRESSED IN BRAIN, SIGNAL = 1.2; EXPRESSED IN BONE MARROW, SIGNAL = 1.1; NT HIT: gi11431427, EVALUE 1.00e-103; EST_HUMAN HIT: AA581086.1, EVALUE 1.00e-103; SWISSPROT HIT: P49014, EVALUE 1.00e-28
gtaaaaccttgttagccaaagcagtagcaaaccaaacctcagccactttcttgagagtggttggctctgaacttattcagaagtacctaggtgatgggcccaaactcgtacgggaattgttccgagttgctgaagaacatgcaccgtccatcgtgtttattgatgaaattgacgccattgggacaaaaag

SEQ ID NO: 29021 - DNA, 144 bp, Homo sapiens
  MAP TO AC021356.5; EXPRESSED IN ADULT LIVER, SIGNAL = 0.62; EXPRESSED IN BRAIN, SIGNAL = 0.65; EXPRESSED IN PLACENTA, SIGNAL = 0.61; EXPRESSED IN FETAL LIVER, SIGNAL = 0.48; EXPRESSED IN BONE MARROW, SIGNAL = 0.45; NT HIT: AF041829.1, EVALUE 3.20e-01
agctctatcgcatctatgtatagtatcatcactgaaaaactcagtggagctgagacttactcttttttgagaatctcagactttgacatcaggaggatggatcctatttttggaggtcataaaaatctgagtgaaatcaccaaa

SEQ ID NO: 29022 - DNA, 187 bp, Homo sapiens
  MAP TO AL121828.6; EXPRESSED IN LUNG, SIGNAL = 0.87; EXPRESSED IN PLACENTA, SIGNAL = 0.78; EXPRESSED IN ADULT LIVER, SIGNAL = 0.78; EXPRESSED IN FETAL LIVER, SIGNAL = 0.76; EXPRESSED IN BRAIN, SIGNAL = 0.7; EXPRESSED IN BONE MARROW, SIGNAL = 0.72; EST_HUMAN HIT: AA631671.1, EVALUE 6.50e-01; NT HIT: AF112540.1, EVALUE 4.40e-01; SWISSPROT HIT: P81316, EVALUE 3.90e+00
cttcaatgtaaagattttcctcctctaaattctccatgagcatggttcctaatccgaggataggatttccccaatggctgagatggtggaaatcaaaacattcgaaaatataaggaaccagatataggtcccactcactgtttagttttctttgcctttcatgcccacagaatacagcattgcccat

SEQ ID NO: 29023 - DNA, 195 bp, Homo sapiens
  MAP TO AC027279.1; EXPRESSED IN BONE MARROW, SIGNAL = 0.65; EXPRESSED IN ADULT LIVER, SIGNAL = 0.8; EXPRESSED IN BRAIN, SIGNAL = 0.76; EXPRESSED IN PLACENTA, SIGNAL = 0.75; EXPRESSED IN FETAL LIVER, SIGNAL = 0.63; NT HIT: Z79119.1, EVALUE 7.00e-03; EST_HUMAN HIT: R78254.1, EVALUE 2.00e-99; SWISSPROT HIT: P27061, EVALUE 1.30e+00
ttctttctgattttcagtatctagggcctcaaatgggatgacttccaatggatggaggttggccatttcccgctccacaaggcctctccacatggctagctgggcttccttcaacatggcagtctcagggtagtcaggcattttacacggccactcagccacattccattggtcaagcaaacgaataagtgcagc

SEQ ID NO: 29024 - DNA, 198 bp, Homo sapiens
  MAP TO AL158176.5; EXPRESSED IN PLACENTA, SIGNAL = 0.58; EXPRESSED IN ADULT LIVER, SIGNAL = 0.71; EXPRESSED IN FETAL LIVER, SIGNAL = 0.97; EXPRESSED IN BRAIN, SIGNAL = 0.71; EXPRESSED IN BONE MARROW, SIGNAL = 0.55; SWISSPROT HIT: P32386, EVALUE 8.60e+00; EST_HUMAN HIT: BF212834.1, EVALUE 7.00e-38; NT HIT: gi11422250, EVALUE 1.00e-38
ttaatcaaagggcagtgtaattttcacagtattgaacaaaactttcatctgaaggagacagaggtggaatgccaggctgaactcttcagagagactggctcctttggcaacacttacctcatccagcagctgttcaatcacagagactcttccttcccccgtgggtccgacttccttcagcaggagtctgttttcagg

SEQ ID NO: 29025 - DNA, 185 bp, Homo sapiens
  MAP TO AC027350.1; EXPRESSED IN PLACENTA, SIGNAL = 0.87; EXPRESSED IN ADULT LIVER, SIGNAL = 0.96; EXPRESSED IN FETAL LIVER, SIGNAL = 0.85; EXPRESSED IN BRAIN, SIGNAL = 0.81; EXPRESSED IN BONE MARROW, SIGNAL = 0.83; EXPRESSED IN LUNG, SIGNAL =   1; SWISSPROT HIT: Q14139, EVALUE 2.90e+00; EST_HUMAN HIT: AA372398.1, EVALUE 4.10e-02
tgttctgatcaccatcatcactatcatcctgggcatcatttccagctctatcacctgcaggaaaatgtaggaacctcataatgttggcaacatctacactctctcttactcttgaagtatatatttgcattttaactttagagcaagcaatacctggattggaaggtcgctttgagggcccagaa

SEQ ID NO: 29026 - DNA, 102 bp, Homo sapiens
  MAP TO AC027305.1; EXPRESSED IN LUNG, SIGNAL = 1.5; EXPRESSED IN ADULT LIVER, SIGNAL = 1.1; EXPRESSED IN BRAIN, SIGNAL = 0.84; EXPRESSED IN PLACENTA, SIGNAL = 1.4; EXPRESSED IN FETAL LIVER, SIGNAL = 0.99; EXPRESSED IN BONE MARROW, SIGNAL = 0.9; NT HIT: AJ272265.1, EVALUE 1.40e-02
ggaatgagcaccttctatgccccgggctccaagccaaaagccagtgacacacagaaggacaaactggtccaagtccctgccttcaaagagcttgtggcctaa

SEQ ID NO: 29027 - DNA, 210 bp, Homo sapiens
  MAP TO AC022997.3; EXPRESSED IN LUNG, SIGNAL = 1.4; EXPRESSED IN BONE MARROW, SIGNAL = 1.1; EXPRESSED IN PLACENTA, SIGNAL = 1.2; EXPRESSED IN ADULT LIVER, SIGNAL = 1.3; EXPRESSED IN FETAL LIVER, SIGNAL = 1.2; EXPRESSED IN BRAIN, SIGNAL = 1.1; NT HIT: AF251125.1, EVALUE 2.00e+00; EST_HUMAN HIT: AA187986.1, EVALUE 7.40e-01; SWISSPROT HIT: P11657, EVALUE 3.80e+00
ataataaaggacaaattttccccgaagttccccgcgtcactggccaaagtggtctaacgcttaccctgaaaccagtcattggcaaaggagaagaggggcccatgattgttttgcccaagctattttccggagctgtaggaggggctcacctacctgagcatccatgctccatgtctgaacacaatcagaattctgttagcaaggaggaaa

SEQ ID NO: 29028 - DNA, 473 bp, Homo sapiens
  MAP TO AL121883.13; EXPRESSED IN LUNG, SIGNAL = 1.5; EXPRESSED IN PLACENTA, SIGNAL = 1.3; EXPRESSED IN FETAL LIVER, SIGNAL = 1.7; EXPRESSED IN BONE MARROW, SIGNAL = 1.3; EXPRESSED IN ADULT LIVER, SIGNAL = 1.6; EXPRESSED IN BRAIN, SIGNAL = 1.8; NT HIT: AF208859.1, EVALUE 0.00e+00; SWISSPROT HIT: Q10302, EVALUE 2.20e+00; EST_HUMAN HIT: BF002024.1, EVALUE 0.00e+00
ctgtgcagcttgctggactgagattgcttacaaatatgactgttactaatgagtatcagcacatgcttgctaattccatttctgacttttttcgtttattttcagcgggaaatgaagaaaccaaacttcaggttctgaaactccttttgaatttggctgaaaatccagccatgactagggaactgctcagggcccaagtaccatcttcactgggctccctctttaataagaaggagaacaaagaagttattcttaaacttctggtcatatttgagaacataaatgataatttcaaatgggaagaaaatgaacctactcagaatcaattcggtgaaggttcactttttttctttttaaaagaatttcaagtgtgtgctgataaggttctgggaatagaaagtcaccatgattttttggtgaaagtaaaagttggaaaattcatggccaaacttgctgaacatatgttcccaaag

SEQ ID NO: 29029 - DNA, 152 bp, Homo sapiens
  MAP TO AL133227.7; EXPRESSED IN ADULT LIVER, SIGNAL =   1; EXPRESSED IN PLACENTA, SIGNAL = 1.2; EXPRESSED IN HELA, SIGNAL = 2.2; EXPRESSED IN FETAL LIVER, SIGNAL = 1.2; EXPRESSED IN BONE MARROW, SIGNAL = 1.2; EXPRESSED IN LUNG, SIGNAL = 0.93; EXPRESSED IN BRAIN, SIGNAL = 1.4; SWISSPROT HIT: P23206, EVALUE 7.90e-01; NT HIT: AP001507.1, EVALUE 3.50e-01; EST_HUMAN HIT: AW964270.1, EVALUE 2.00e-80
acctggaggtgtgagatgagctgtcccacggtgatttcctcggctatcttctggtacagactctggctgttcaagaccatgctctccaggatggccagggacctctgaaggattgacacgtccaccatgggctggctcacataccctgcaat

SEQ ID NO: 29030 - DNA, 120 bp, Homo sapiens
  MAP TO AC016326.4; EXPRESSED IN BONE MARROW, SIGNAL = 0.61; EXPRESSED IN PLACENTA, SIGNAL = 0.71; EXPRESSED IN ADULT LIVER, SIGNAL = 0.71; EXPRESSED IN BRAIN, SIGNAL = 0.86; EXPRESSED IN FETAL LIVER, SIGNAL = 0.8; SWISSPROT HIT: Q9XQN8, EVALUE 3.10e+00; NT HIT: Y18276.1, EVALUE 4.00e-40; EST_HUMAN HIT: AW015507.1, EVALUE 5.00e-56
atcatttgtgttaacatgccaagccatatcaccataagataccagttgtccattaacataacaccgaatttcactgttcctccatcgattgtaaatgtggacaatgctgatcatgtacca

SEQ ID NO: 29031 - DNA, 226 bp, Homo sapiens
  MAP TO AC009466.2; EXPRESSED IN ADULT LIVER, SIGNAL = 0.57; EXPRESSED IN PLACENTA, SIGNAL = 0.68; EXPRESSED IN FETAL LIVER, SIGNAL = 1.4; EXPRESSED IN BONE MARROW, SIGNAL = 0.62; EXPRESSED IN BRAIN, SIGNAL = 0.61; EST_HUMAN HIT: AI799864.1, EVALUE 1.00e-124; SWISSPROT HIT: P31695, EVALUE 8.70e+00; NT HIT: gi11438643, EVALUE 1.00e-124
agttgagcgttatgatgaagctgctcagctcggaggatgaggttctggtgggcaacgctgccctctgccttggtaactgcatggaggtgcccaacgttgcgtcttccctgctaaagacggaccttttgcaggtcttgttaaagcttgcaggcagtgacacacagaagacggccgtgcaggtgaacgcaggcattgctctggggaagctgtgcacagctgagcccag

SEQ ID NO: 29032 - DNA, 95 bp, Homo sapiens
  MAP TO AL121908.7; EXPRESSED IN BONE MARROW, SIGNAL =   1; EXPRESSED IN LUNG, SIGNAL = 1.2; EXPRESSED IN PLACENTA, SIGNAL = 1.1; EXPRESSED IN ADULT LIVER, SIGNAL = 1.1; EXPRESSED IN FETAL LIVER, SIGNAL = 0.92; EXPRESSED IN BRAIN, SIGNAL = 1.1; NT HIT: D17760.1, EVALUE 7.90e-01; EST_HUMAN HIT: AW629605.1, EVALUE 7.40e-02
ggagatttgagagaaagactccagaagcccgcggggagagcaggggttctggggaagataaagcccttcatccaggatccctctgtgaccataag

SEQ ID NO: 29033 - DNA, 192 bp, Homo sapiens
  MAP TO AC019342.4; EXPRESSED IN PLACENTA, SIGNAL = 0.53; EXPRESSED IN FETAL LIVER, SIGNAL = 0.46; EXPRESSED IN BRAIN, SIGNAL = 0.48; EXPRESSED IN BONE MARROW, SIGNAL = 0.43; EST_HUMAN HIT: BE253142.1, EVALUE 1.70e-01; NT HIT: AF109905.1, EVALUE 7.00e+00
agcaattcttcttgtgtttctctgtgagaacctctcgccagcatctcccctgatgacactgtgaggggctagagggctctggcagccagcattgccattcttgcagcagcagcagcagcaatagctatttcccagggctacgtccacacccagcctctctgctgtcttaaacttgccacccatggtctcctc

SEQ ID NO: 29034 - DNA, 135 bp, Homo sapiens
  MAP TO AC008643.2; EXPRESSED IN LUNG, SIGNAL = 1.3; EXPRESSED IN ADULT LIVER, SIGNAL = 1.3; EXPRESSED IN BRAIN, SIGNAL = 0.95; EXPRESSED IN BONE MARROW, SIGNAL = 0.95; EXPRESSED IN PLACENTA, SIGNAL = 1.1; EXPRESSED IN FETAL LIVER, SIGNAL = 0.97; SWISSPROT HIT: O13345, EVALUE 9.10e+00; NT HIT: gi11526355, EVALUE 2.00e-70; EST_HUMAN HIT: AV655876.1, EVALUE 3.00e-70
atggcgtccttgctgcagtcggaccgggttctctatctagtccagggagaaaagaaggttcgggccccgctctcgcaactctacttctgccgctattgtagcgaactgcggtcgctggaatgtgtgtctcacgag

SEQ ID NO: 29035 - DNA, 85 bp, Homo sapiens
  MAP TO AC012433.5; EXPRESSED IN FETAL LIVER, SIGNAL = 0.83; EXPRESSED IN PLACENTA, SIGNAL = 0.66; EXPRESSED IN ADULT LIVER, SIGNAL = 0.72; EXPRESSED IN BRAIN, SIGNAL = 0.79; EXPRESSED IN BONE MARROW, SIGNAL = 0.73; SWISSPROT HIT: P11137, EVALUE 3.30e+00; EST_HUMAN HIT: BE828469.1, EVALUE 1.00e+00; NT HIT: AF118046.1, EVALUE 6.90e-01
ctaattcactctctggggtacctggaagatgaggactatctggaaatgaaagacatccttgatgactggcacttgctccaggaca

SEQ ID NO: 29036 - DNA, 499 bp, Homo sapiens
  MAP TO AC011815.2; EXPRESSED IN PLACENTA, SIGNAL = 0.47; EXPRESSED IN ADULT LIVER, SIGNAL = 0.58; EXPRESSED IN FETAL LIVER, SIGNAL = 0.52; EXPRESSED IN BRAIN, SIGNAL = 0.99; NT HIT: gi11429516, EVALUE 2.00e-18; SWISSPROT HIT: Q15776, EVALUE 1.00e-66; EST_HUMAN HIT: BE810292.1, EVALUE 0.00e+00
atgtgtcagaaagttcctccagaagagagaccttatagatgtgatgtatgtgggcacagcttcaagcagcattcctctctaacacaacatcagagaatccatactggagaaaagccctataaatgtaaccagtgtgggaaggcctttagtttgaggtcctatcttattattcatcagagaattcatagtggtgagaaagcatatgaatgtagtgaatgtgggaaagctttcaatcagagctcagccctcattagacatcggaaaatccatactggtgagaaagcttgtaaatgtaatgagtgtggcaaagcattcagtcaaagttcatatctcattatacatcaaagaattcacactggtgagaaaccttatgagtgtaatgaatgtgggaaaacctttagccagagctcaaaactcattagacatcagcgaattcacacaggagagagaccctatgaatgtaatgaatgtggaaaagctttcaggcagagctcagagc

SEQ ID NO: 29037 - DNA, 109 bp, Homo sapiens
  MAP TO AC013389.3; EXPRESSED IN PLACENTA, SIGNAL =   1; EXPRESSED IN ADULT LIVER, SIGNAL = 0.68; EXPRESSED IN FETAL LIVER, SIGNAL = 0.68; EXPRESSED IN BONE MARROW, SIGNAL = 0.92; EXPRESSED IN BRAIN, SIGNAL = 0.7; EST_HUMAN HIT: H14948.1, EVALUE 5.40e+00; SWISSPROT HIT: Q03412, EVALUE 9.40e+00; NT HIT: U43541.1, EVALUE 3.70e+00
ctctgcctcagtgaacagattgcagatcactctgtaatagacaccttcgtccaaaactccctgcctgtgttcggcctgccagaattgctaataagtttaaatatagtag

SEQ ID NO: 29038 - DNA, 237 bp, Homo sapiens
  MAP TO AL161627.2; EXPRESSED IN ADULT LIVER, SIGNAL = 0.71; EXPRESSED IN PLACENTA, SIGNAL = 0.97; EXPRESSED IN FETAL LIVER, SIGNAL = 1.2; EXPRESSED IN BONE MARROW, SIGNAL =   1; EXPRESSED IN BRAIN, SIGNAL = 2.9; SWISSPROT HIT: P34501, EVALUE 7.60e+00; NT HIT: AJ245620.1, EVALUE 0.00e+00; EST_HUMAN HIT: AU136229.1, EVALUE 0.00e+00
catcagcactttatccatatagaattctctgccagggctcccatcattgtattttgtatcaatggcaaaacacaagaataatacatccactaccatttcataaatagacaggaagcaatgagcgactaggaaagcaaagaggcagacgatgatcagaggcagcacccatactgtgtagtcctgctggtagttgagcagcataatcccagctaaacctgtgctgcagactatcagcac

SEQ ID NO: 29039 - DNA, 209 bp, Homo sapiens
  MAP TO AL161732.1; EXPRESSED IN LUNG, SIGNAL = 1.8; EXPRESSED IN PLACENTA, SIGNAL = 0.87; EXPRESSED IN BONE MARROW, SIGNAL = 0.61; EXPRESSED IN FETAL LIVER, SIGNAL = 0.92; EXPRESSED IN BRAIN, SIGNAL = 0.49; EST_HUMAN HIT: BF109832.1, EVALUE 1.00e-114; NT HIT: gi11429367, EVALUE 1.00e-114; SWISSPROT HIT: P22505, EVALUE 2.90e+00
gtctatgtacagacatggagcactcagaatctttctatgaccattacacgagatgagtatccgtccaaccctatggtgctccgaggtattaatcagaaggctgcctttccacagtaccagcctgtcgtcatgctggagaagggttataccatccactggaatgggccggcaccacggactacatttctatacctcgtcaacttcaacaa

SEQ ID NO: 29040 - DNA, 132 bp, Homo sapiens
  MAP TO AC009311.2; EXPRESSED IN PLACENTA, SIGNAL = 0.62; EXPRESSED IN ADULT LIVER, SIGNAL = 0.58; EXPRESSED IN FETAL LIVER, SIGNAL = 0.56; EXPRESSED IN BRAIN, SIGNAL = 0.57; EXPRESSED IN BONE MARROW, SIGNAL = 0.56; EST_HUMAN HIT: AW612578.1, EVALUE 4.40e-01
cattttgccaaccacttcagagggaaatgtctgcttagatatcacccaaagtgctctagtacgtacatttttgtctgaattcttaatggtatcattcaattttgaaagcaattctagagcatttgcctctga

SEQ ID NO: 29041 - DNA, 146 bp, Homo sapiens
  MAP TO AC015570.5; EXPRESSED IN LUNG, SIGNAL = 1.1; EXPRESSED IN ADULT LIVER, SIGNAL = 1.2; EXPRESSED IN BRAIN, SIGNAL = 0.99; EXPRESSED IN FETAL LIVER, SIGNAL = 0.96; EXPRESSED IN PLACENTA, SIGNAL = 0.96; EXPRESSED IN BONE MARROW, SIGNAL = 0.99; NT HIT: Z25461.1, EVALUE 1.30e+00; EST_HUMAN HIT: AW339905.1, EVALUE 4.90e-01
caagattcctcatgctcacaaagagggaattgagttctgcgccctttggtaatttgattttttttgcgtttggatttgagggcaggggaatacatgggaatgtacttagtttcaatcaatatctactgcttattcaacatgataag

SEQ ID NO: 29042 - DNA, 132 bp, Homo sapiens
  MAP TO AC018909.3; EXPRESSED IN BONE MARROW, SIGNAL = 0.7; EXPRESSED IN LUNG, SIGNAL = 0.9; EXPRESSED IN ADULT LIVER, SIGNAL = 1.1; EXPRESSED IN BRAIN, SIGNAL = 0.75; EXPRESSED IN PLACENTA, SIGNAL = 0.77; EXPRESSED IN FETAL LIVER, SIGNAL = 0.61; EST_HUMAN HIT: AI248211.1, EVALUE 1.10e-01; NT HIT: AF078779.1, EVALUE 1.00e-52; SWISSPROT HIT: Q01815, EVALUE 6.00e-03
attgctgagtatgtgtttgtgatattcatgagcattgagcttaatctgaagattatggcagatggcttatttttcactccaactgctgtcatcagggacttcggtggagtaatggacatatttatatatctt

SEQ ID NO: 29043 - DNA, 190 bp, Homo sapiens
  MAP TO AL031726.11; EXPRESSED IN FETAL LIVER, SIGNAL = 1.3; EXPRESSED IN BRAIN, SIGNAL =   5; EXPRESSED IN BONE MARROW, SIGNAL = 0.48; EXPRESSED IN ADULT LIVER, SIGNAL = 3.3; SWISSPROT HIT: P05026, EVALUE 2.00e-24; NT HIT: gi11423137, EVALUE 1.00e-103; EST_HUMAN HIT: AA774980.1, EVALUE 1.00e-103
cgtacgccttacactctatgcgaatttcagtgtccatggtaagattggtgaactgtacggccagcaggggctgcaggtatttgggctgcaggagtttgccatagtacggataatactgcagaggaaaaccaggggagttgcccagtccaaaatactccacatttccaactttatccttatcttcatctcg

SEQ ID NO: 29044 - DNA, 128 bp, Homo sapiens
  MAP TO AC019284.4; EXPRESSED IN PLACENTA, SIGNAL = 0.63; EXPRESSED IN ADULT LIVER, SIGNAL = 0.73; EXPRESSED IN FETAL LIVER, SIGNAL = 0.67; EXPRESSED IN BRAIN, SIGNAL = 0.6; EXPRESSED IN BONE MARROW, SIGNAL = 0.62; NT HIT: L47285.1, EVALUE 2.80e-01; EST_HUMAN HIT: BE893260.1, EVALUE 1.10e-01
atgttctctatgaggtattcctcctccttctgctcttccttttcccctccacttcccaattccttgtcctcctttcccatcttagctaatttgaggaaagcaattctcaagatttgttcaaaacacat

SEQ ID NO: 29045 - DNA, 168 bp, Homo sapiens
  MAP TO AC019222.3; EXPRESSED IN LUNG, SIGNAL = 1.2; EXPRESSED IN ADULT LIVER, SIGNAL = 1.6; EXPRESSED IN FETAL LIVER, SIGNAL = 1.1; EXPRESSED IN BRAIN, SIGNAL =   1; EXPRESSED IN PLACENTA, SIGNAL = 1.3; EXPRESSED IN BONE MARROW, SIGNAL =   1; SWISSPROT HIT: P23561, EVALUE 5.10e+00; NT HIT: AL161492.2, EVALUE 3.90e-01; EST_HUMAN HIT: BF585465.1, EVALUE 1.50e-01
ctggaaagctaaaaactgctcgtgcccaggccccactccagacatgttattcagttggcctagatagagttgttcctgtgttgatattcttaaaagctctccaggagactttaatgtaccatcagggttgaggaccacagtcttacgttgttcaaatcctaggcccat

SEQ ID NO: 29046 - DNA, 143 bp, Homo sapiens
  MAP TO AL135844.8; EXPRESSED IN ADULT LIVER, SIGNAL = 0.53; EXPRESSED IN BONE MARROW, SIGNAL = 0.89; EXPRESSED IN PLACENTA, SIGNAL = 0.47; EXPRESSED IN FETAL LIVER, SIGNAL = 0.8; EXPRESSED IN BRAIN, SIGNAL = 0.78; SWISSPROT HIT: P43059, EVALUE 5.30e+00; NT HIT: gi9790044, EVALUE 2.00e-42; EST_HUMAN HIT: BE561655.1, EVALUE 5.00e-75
gggcttctgaggagaatggcctgcctcacacgtcagccagaacccagctgccccagtcaatgaagattatgcatgagatcatgtacaaactggaagtgctctatgtcctctgcgtgctgctgatggggcgtcagcgaaaccag

SEQ ID NO: 29047 - DNA, 324 bp, Homo sapiens
  MAP TO AL137786.2; EXPRESSED IN PLACENTA, SIGNAL = 1.1; EXPRESSED IN ADULT LIVER, SIGNAL =   1; EXPRESSED IN BRAIN, SIGNAL = 1.2; EXPRESSED IN BONE MARROW, SIGNAL = 1.1; EXPRESSED IN LUNG, SIGNAL = 1.2; EXPRESSED IN FETAL LIVER, SIGNAL = 1.1; EST_HUMAN HIT: BE646437.1, EVALUE 4.60e+00
cactgcgctgatgctaccactgctaccacaatcgctgctactaccattacgattgctactgctgccagtactgctgctatcaatacagctgctgctgctactgccaccactgctactactgctagtgccaccggcattgccaccactgctgagaccgcttccactgctcgctgctgctaccaccactcctgctactactgttattattacctctactgtgatcactgctgctattgccaattgaggaagaacgaagaacaggtataaaatcacactgtacaatagtaagtgtacaaattgtacacttttgtgtactctttgaag

SEQ ID NO: 29048 - DNA, 168 bp, Homo sapiens
  MAP TO AC016790.3; EXPRESSED IN BRAIN, SIGNAL = 0.56; NT HIT: gi4826670, EVALUE 5.00e-90; SWISSPROT HIT: Q13634, EVALUE 2.00e-26; EST_HUMAN HIT: BF037458.1, EVALUE 2.00e-31
gagttattagaacggccttacataacatggacagagaagccagagaacattactccgtagtcattcaagccaaagacatggctgggcaagttggagggctttcaggatctacaacagtcaacatcaccttaaccgatgtcaatgacaacccaccacgctttcctcaaa

SEQ ID NO: 29049 - DNA, 256 bp, Homo sapiens
  MAP TO AL162390.2; EXPRESSED IN PLACENTA, SIGNAL = 0.57; EXPRESSED IN FETAL LIVER, SIGNAL = 0.79; EXPRESSED IN ADULT LIVER, SIGNAL = 0.75; EXPRESSED IN BONE MARROW, SIGNAL = 0.77; EXPRESSED IN BRAIN, SIGNAL = 0.62; EXPRESSED IN LUNG, SIGNAL = 0.92; EST_HUMAN HIT: BE542318.1, EVALUE 1.00e-126; SWISSPROT HIT: Q14525, EVALUE 1.00e-03; NT HIT: AB011166.1, EVALUE 0.00e+00
attgaggaacttcagcaggctttaatagtaaagcaaaatgaagagcttgaccgacagaggagaataggtaatacccgcaaaatgatagaggatttgcaaaatgaactaaagaccacggaaaactgcgagaatcttcagccccagattgatgccattacaaatgatctgagacggattcaggatgaaaaggcattatgtgaaggcgaaataattgataagcgaagagagagggaaactctagagaaggagaaaaaga

SEQ ID NO: 29050 - DNA, 194 bp, Homo sapiens
  MAP TO AC019221.3; EXPRESSED IN BONE MARROW, SIGNAL = 0.91; EXPRESSED IN PLACENTA, SIGNAL = 0.83; EXPRESSED IN ADULT LIVER, SIGNAL = 1.1; EXPRESSED IN BRAIN, SIGNAL = 0.9; EXPRESSED IN LUNG, SIGNAL = 0.9; EXPRESSED IN FETAL LIVER, SIGNAL = 0.87; SWISSPROT HIT: O83814, EVALUE 4.40e-01; EST_HUMAN HIT: AW882372.1, EVALUE 1.00e-105
ttatcctgggtgctctgtgatcagaaggtccttggatcccgaggactgcagctgctgccgtccacagcgcctcagcctctcttcctgtgtggaagcggggcaggcagggctgtggcagacaggcctggcatagcccaggttccaggtgtcctgggcagcctgaccggtttcctgagtagcctcaatgaaaacac

SEQ ID NO: 29051 - DNA, 237 bp, Homo sapiens
  MAP TO AL139824.7; EXPRESSED IN BONE MARROW, SIGNAL = 0.46; EXPRESSED IN PLACENTA, SIGNAL = 0.56; EXPRESSED IN BRAIN, SIGNAL = 0.45; SWISSPROT HIT: P09593, EVALUE 1.00e-08
ctagtccacctcgtctccgtgttccctggtccatcttgtctccatggtcttgtgctccctgctccgtttcatctcagtggccttgtgctccctgctctgtctcatctcaatggccctgtgctccctggtccatctcgtctccgtggtcccgtgctccttggtccgtcttgtctccatgatcccgtgctccctgccccgtctcatctcaatggtcctgtgctccctggtccacctcat

SEQ ID NO: 29052 - DNA, 188 bp, Homo sapiens
  MAP TO AC013332.4; EXPRESSED IN PLACENTA, SIGNAL = 0.85; EXPRESSED IN FETAL LIVER, SIGNAL = 0.75; EXPRESSED IN BONE MARROW, SIGNAL = 0.68; EXPRESSED IN ADULT LIVER, SIGNAL = 0.75; EXPRESSED IN BRAIN, SIGNAL = 0.78; SWISSPROT HIT: P27977, EVALUE 2.90e+00; NT HIT: gi11545788, EVALUE 5.00e-07; EST_HUMAN HIT: BE072572.1, EVALUE 1.00e-08
agtctcatgtgccttgctcttctgccatggtccctgaaccttcagtgggtgtgcttcattttgtatagctttaccagtagtgccttggcaatggaaaataaatcgggcacagtggaattccaaatgagggagattctcaggctttgttgaatcatttgtagtcctcagaataccatgattctggtttt

SEQ ID NO: 29053 - DNA, 187 bp, Homo sapiens
  MAP TO AC022268.3; EXPRESSED IN PLACENTA, SIGNAL = 1.4; EXPRESSED IN ADULT LIVER, SIGNAL = 1.2; EXPRESSED IN BRAIN, SIGNAL =   1; EXPRESSED IN BONE MARROW, SIGNAL =   1; EXPRESSED IN LUNG, SIGNAL =   1; EXPRESSED IN FETAL LIVER, SIGNAL = 0.91; SWISSPROT HIT: Q14449, EVALUE 2.20e+00; NT HIT: AF187872.1, EVALUE 2.80e-02; EST_HUMAN HIT: AW392815.1, EVALUE 1.60e-01
ttaagttgtgctttaccaaagagatgggagcagagactttcatgctttctttcagaaggaagggcttaccaataatctggatgatttctgccaggagtactccatctgcaatgtcttgttgcaagtccttgatcagccgcttgtggcctgattttgctaggtagtggttggcccagtcagtgtaaat

SEQ ID NO: 29054 - DNA, 130 bp, Homo sapiens
  MAP TO AC022313.2; EXPRESSED IN LUNG, SIGNAL = 1.9; EXPRESSED IN ADULT LIVER, SIGNAL = 1.3; EXPRESSED IN FETAL LIVER, SIGNAL = 1.4; EXPRESSED IN BRAIN, SIGNAL = 1.1; EXPRESSED IN PLACENTA, SIGNAL = 1.2; EXPRESSED IN BONE MARROW, SIGNAL = 1.4; NT HIT: AB011090.1, EVALUE 7.30e-02; EST_HUMAN HIT: BF340098.1, EVALUE 1.10e-01; SWISSPROT HIT: P07399, EVALUE 1.10e+00
agtgattttcactatttacaaccacatcaacaataagaatgttttgcacactctcattagcgctaataccaagcattttaatattggcaacatgaagataaaaactatatcttgtgatttttctcaggac

SEQ ID NO: 29055 - DNA, 98 bp, Homo sapiens
  MAP TO AC009334.3; EXPRESSED IN BONE MARROW, SIGNAL = 1.2; EXPRESSED IN LUNG, SIGNAL = 1.1; EXPRESSED IN ADULT LIVER, SIGNAL =   1; EXPRESSED IN BRAIN, SIGNAL = 0.84; EXPRESSED IN PLACENTA, SIGNAL = 0.99; EXPRESSED IN FETAL LIVER, SIGNAL = 0.84; EST_HUMAN HIT: BE813335.1, EVALUE 3.00e-47; NT HIT: gi4502838, EVALUE 1.00e-48; SWISSPROT HIT: Q99698, EVALUE 4.00e-12
gttatgctatgtacaaagtctggcgggacacaaaagccctgtcacagctgtctctgccagtgaaacctcaggtgatattgctactgtgtgtgattcag

SEQ ID NO: 29056 - DNA, 195 bp, Homo sapiens
  MAP TO AC019184.2; EXPRESSED IN PLACENTA, SIGNAL = 0.9; EXPRESSED IN FETAL LIVER, SIGNAL = 0.91; EXPRESSED IN LUNG, SIGNAL =   1; EXPRESSED IN ADULT LIVER, SIGNAL = 1.1; EXPRESSED IN BRAIN, SIGNAL = 0.82; EXPRESSED IN BONE MARROW, SIGNAL = 0.87; SWISSPROT HIT: P34574, EVALUE 2.90e+00; NT HIT: AF003529.1, EVALUE 2.00e-06; EST_HUMAN HIT: AA130687.1, EVALUE 5.00e-05
ctgagctggggcatccgtcctcttgccctcaaacaggactcccagttcttggaccttcggactcagaccaggacttacagacttgcactgctggccacctggttcttggtccctagggcctggactggaactatatgaccagcttttctgggcctccagcttgcagacaatcgattgtgccttctctgcctgcat

SEQ ID NO: 29057 - DNA, 231 bp, Homo sapiens
  MAP TO AC026273.2; EXPRESSED IN PLACENTA, SIGNAL = 0.62; EXPRESSED IN ADULT LIVER, SIGNAL = 0.63; EXPRESSED IN FETAL LIVER, SIGNAL = 0.92; EXPRESSED IN BONE MARROW, SIGNAL = 0.82; EXPRESSED IN BRAIN, SIGNAL = 1.3; SWISSPROT HIT: P04279, EVALUE 1.10e+00; NT HIT: gi11431978, EVALUE 4.00e-88; EST_HUMAN HIT: BE439625.1, EVALUE 4.00e-95
catacaggtttctcccccctccccccaccccgtcatgtacagctgaatcacgtagaatttgaagatcaagatgatgaagccagagttcagtatgatggttttcgacctgggatgtacgtccgcgttgagattgaaaatgttccctgtgaatttgtgcagaactttgacccccattaccccattatcctgggtggcttgggcaacagcgagggaaatgttggacacgtgcag

SEQ ID NO: 29058 - DNA, 136 bp, Homo sapiens
  MAP TO AC016212.3; EXPRESSED IN PLACENTA, SIGNAL = 1.1; EXPRESSED IN ADULT LIVER, SIGNAL = 1.1; EXPRESSED IN BRAIN, SIGNAL = 0.81; EXPRESSED IN BONE MARROW, SIGNAL = 0.95; EXPRESSED IN LUNG, SIGNAL = 0.94; EXPRESSED IN FETAL LIVER, SIGNAL = 0.98; NT HIT: AF220507.1, EVALUE 3.00e-01; SWISSPROT HIT: P75613, EVALUE 3.60e-01
tcagtgcatgtaaagattcttcatggtgtccaggcaccattgcttcctattcaggttcagaaaccacttctctgtgttctttgttgtcaaatacaccatttctggctaacttcaaatctcccaccatgggaaaaag

SEQ ID NO: 29059 - DNA, 224 bp, Homo sapiens
  MAP TO AL133344.19; EXPRESSED IN ADULT LIVER, SIGNAL = 0.78; EXPRESSED IN FETAL LIVER, SIGNAL = 1.6; EXPRESSED IN BRAIN, SIGNAL = 0.61; EXPRESSED IN PLACENTA, SIGNAL = 0.69; EXPRESSED IN BONE MARROW, SIGNAL = 0.65; NT HIT: gi11068003, EVALUE 1.30e-01; SWISSPROT HIT: P00530, EVALUE 7.60e-01; EST_HUMAN HIT: R32583.1, EVALUE 3.10e+00
ggacttctatccggcgtcatcggattactcttccgcctcctgatgaggatcagttttatactgtgtatcattttaatgtcggcacagaggttgtcttctatggccggacattcaagatttatgactgtgatgcattcacaagaaactttttgaggaaaataggggtcaaagtgaatcccccagtgcaatgtccagaagatccttacatgaagattcggagagag

SEQ ID NO: 29060 - DNA, 182 bp, Homo sapiens
  MAP TO AL133319.21; EXPRESSED IN ADULT LIVER, SIGNAL = 0.67; EXPRESSED IN PLACENTA, SIGNAL = 0.65; EXPRESSED IN FETAL LIVER, SIGNAL = 1.1; EXPRESSED IN BRAIN, SIGNAL = 0.8; EXPRESSED IN BONE MARROW, SIGNAL = 0.74; EST_HUMAN HIT: BF216984.1, EVALUE 6.30e-01; SWISSPROT HIT: P29616, EVALUE 2.30e+00
cagacttcaagatgaagaaattagtggcaagaagggaagaagctgatagtgagactgaaggtagaaaaaaatcaatagaagatgtccaaaaaatgagctctgaagaaaaatccttcatcaccttgttgcatttttcaaaaaatgttttggattcagaagtccaggagagatgcaagtactaa

SEQ ID NO: 29061 - DNA, 150 bp, Homo sapiens
  MAP TO AL109964.20; EXPRESSED IN ADULT LIVER, SIGNAL = 1.3; EXPRESSED IN LUNG, SIGNAL = 1.1; EXPRESSED IN PLACENTA, SIGNAL = 1.2; EXPRESSED IN FETAL LIVER, SIGNAL = 1.1; EXPRESSED IN BONE MARROW, SIGNAL =   1; EXPRESSED IN BRAIN, SIGNAL = 1.2; SWISSPROT HIT: Q42919, EVALUE 3.50e-01; NT HIT: M30128.1, EVALUE 3.40e-01; EST_HUMAN HIT: AI278971.1, EVALUE 3.20e-02
ctgtcatgggggaagatccaaagatacacggaccgaacttccccaggctggcctctgggccccacctgctgcctgacctcctccgggctgggcacgtggacccgtgtggtgagtgagcacaggacgtggacgctggagccaggctgcctg

SEQ ID NO: 29062 - DNA, 137 bp, Homo sapiens
  MAP TO AL121747.19; EXPRESSED IN BONE MARROW, SIGNAL = 0.83; EXPRESSED IN ADULT LIVER, SIGNAL = 0.91; EXPRESSED IN BRAIN, SIGNAL = 0.78; EXPRESSED IN PLACENTA, SIGNAL = 0.68; EXPRESSED IN FETAL LIVER, SIGNAL = 0.97; NT HIT: S72393.1, EVALUE 1.00e-71; EST_HUMAN HIT: AW814746.1, EVALUE 2.00e-71; SWISSPROT HIT: Q60737, EVALUE 7.00e-15
aaatcaagatgactaccagctggttcgaaaattaggccgaggtaaatacagtgaagtatttgaagccatcaacatcacaaataatgaaaaagttgttgttaaaattctcaaggtgagtacaagagataatttcagag

SEQ ID NO: 29063 - DNA, 105 bp, Homo sapiens
  MAP TO AC006457.3; EXPRESSED IN PLACENTA, SIGNAL = 0.76; EXPRESSED IN FETAL LIVER, SIGNAL = 0.51; EXPRESSED IN BRAIN, SIGNAL = 0.56; EXPRESSED IN BONE MARROW, SIGNAL = 0.61; EXPRESSED IN ADULT LIVER, SIGNAL = 0.9; EST_HUMAN HIT: AA348480.1, EVALUE 8.00e-36
ctagcagtcatggtggcagcattccagcaaagggtagctaagggctgcaggatagaaaattccgaaagcaatgatttcttccagttgtgcagtggaagccttctc

SEQ ID NO: 29064 - DNA, 125 bp, Homo sapiens
  MAP TO AC021468.2; EXPRESSED IN LUNG, SIGNAL = 1.5; EXPRESSED IN PLACENTA, SIGNAL = 1.1; EXPRESSED IN FETAL LIVER, SIGNAL = 1.1; EXPRESSED IN BONE MARROW, SIGNAL = 0.96; EXPRESSED IN ADULT LIVER, SIGNAL = 1.3; EXPRESSED IN BRAIN, SIGNAL = 0.97; NT HIT: gi11321570, EVALUE 2.00e-64; EST_HUMAN HIT: AU132570.1, EVALUE 2.00e-64; SWISSPROT HIT: P24014, EVALUE 8.00e-05
cttgtagctgtaggggcaggcacagcggtacagctccacagggtcctgggtgcatgtcccgttattcttgcacgggctggagaggcaggcattgcatttggccacaatgttgatgtccactggcc

SEQ ID NO: 29065 - DNA, 152 bp, Homo sapiens
  MAP TO AC016206.3; EXPRESSED IN ADULT LIVER, SIGNAL = 0.7; EXPRESSED IN FETAL LIVER, SIGNAL = 0.58; EXPRESSED IN BRAIN, SIGNAL = 0.51; EXPRESSED IN PLACENTA, SIGNAL = 0.65; EXPRESSED IN BONE MARROW, SIGNAL = 0.45; NT HIT: AF134844.1, EVALUE 1.40e+00; EST_HUMAN HIT: AL120517.1, EVALUE 8.00e+00
aagcccaacagaataagacactccattcagaaacagtcgcttctaatgaaaaaaaagattatgagcgcctcctattggcaggcatttattgtgcattacggcagtgatttttcagctgaagaaacacgagccttgggcttcgaaatctccag

SEQ ID NO: 29066 - DNA, 155 bp, Homo sapiens
  MAP TO AC025115.2; EXPRESSED IN BRAIN, SIGNAL = 0.46; EXPRESSED IN BONE MARROW, SIGNAL = 0.48; EXPRESSED IN PLACENTA, SIGNAL = 0.46; EXPRESSED IN ADULT LIVER, SIGNAL = 0.6; SWISSPROT HIT: Q57872, EVALUE 4.60e-01; EST_HUMAN HIT: AI473450.1, EVALUE 2.00e-06; NT HIT: AF224669.1, EVALUE 3.50e-01
tgtctttgaactcattgattctttcttctgcttgattgagtttgatgctgaagttcttgatggaatttttcagttcagacattatgttctttatctccaacattttttttatgatttccatctcgttgtcaaatttctcatcttttattgttttc

SEQ ID NO: 29067 - DNA, 99 bp, Homo sapiens
  MAP TO AC025129.2; EXPRESSED IN PLACENTA, SIGNAL = 0.51; EXPRESSED IN ADULT LIVER, SIGNAL = 0.56; EXPRESSED IN BRAIN, SIGNAL = 0.5; EXPRESSED IN BONE MARROW, SIGNAL = 0.47; EST_HUMAN HIT: H48599.1, EVALUE 1.20e+00
attccataatctctatagtcattctgaattccaaacatgcttctgcatctccatgtcttctgagcttcgtggctcttatctctgaagtgcactgctggt

SEQ ID NO: 29068 - DNA, 190 bp, Homo sapiens
  MAP TO AL138811.1; EXPRESSED IN PLACENTA, SIGNAL = 1.1; EXPRESSED IN ADULT LIVER, SIGNAL = 0.9; EXPRESSED IN FETAL LIVER, SIGNAL = 0.85; EXPRESSED IN BRAIN, SIGNAL = 0.64; EXPRESSED IN BONE MARROW, SIGNAL = 0.66; EXPRESSED IN LUNG, SIGNAL = 0.93; SWISSPROT HIT: P38770, EVALUE 2.00e-01; EST_HUMAN HIT: BF666647.1, EVALUE 1.10e-02; NT HIT: AF224669.1, EVALUE 2.00e-03
catctataattatttcctctataaatgagccttcttttttttcttctttttctctgtattcagtatctgaacaaaaattctccatattttcttcccttatttcttgctcagtattatatttctgtataatggtgttttctgatttttcagttgacatttcactgttttcattatttacttctggaacatt

SEQ ID NO: 29069 - DNA, 110 bp, Homo sapiens
  MAP TO AC012480.3; EXPRESSED IN ADULT LIVER, SIGNAL = 0.71; EXPRESSED IN PLACENTA, SIGNAL = 0.67; EXPRESSED IN BRAIN, SIGNAL = 0.72; EXPRESSED IN BONE MARROW, SIGNAL = 0.78; EXPRESSED IN FETAL LIVER, SIGNAL = 0.7; NT HIT: AJ271736.1, EVALUE 5.00e-27; EST_HUMAN HIT: BE007959.1, EVALUE 2.00e-55; SWISSPROT HIT: P03344, EVALUE 8.20e-01
cctcttgtttgcaatgaggacagggtcctggaagtggcttgtaacctggcggtttggaacattctctactccagtgtcctggatttctgcagcaatgacaggcccccatt

SEQ ID NO: 29070 - DNA, 136 bp, Homo sapiens
  MAP TO AL121946.11; EXPRESSED IN FETAL LIVER, SIGNAL = 0.8; EXPRESSED IN PLACENTA, SIGNAL = 0.82; EXPRESSED IN ADULT LIVER, SIGNAL = 1.1; EXPRESSED IN BRAIN, SIGNAL = 0.76; EXPRESSED IN BONE MARROW, SIGNAL = 0.64; EST_HUMAN HIT: AW880004.1, EVALUE 1.80e+00
cttgtccttgggaacagtctgaacaggttctaatggccacacagttgatgagatcaaaattaacaaaggttgtgttagacaccatcagttcccatcttttaggagttttaatcccagatgacatacacagacttcc

SEQ ID NO: 29071 - DNA, 190 bp, Homo sapiens
  MAP TO AC010458.2; EXPRESSED IN BRAIN, SIGNAL = 0.56; NT HIT: gi11425283, EVALUE 1.00e-103; SWISSPROT HIT: P37255, EVALUE 7.60e-01; EST_HUMAN HIT: BE935842.1, EVALUE 1.00e-103
ggcaatatcttctctctacaccaatgatggtgacatggaagctctcgaggctgacctgaaacatcgatttacccgacaggagtgggacttggctaagagcctacagaaaaccatccaagcagcgaggtctgagaattactctctgaccgacttctgggcctacatggttatctctaagcaaaccagagaa

SEQ ID NO: 29072 - DNA, 204 bp, Homo sapiens
  MAP TO AL139421.2; EXPRESSED IN BRAIN, SIGNAL = 0.5; EXPRESSED IN PLACENTA, SIGNAL = 0.46; EXPRESSED IN FETAL LIVER, SIGNAL = 0.6; EXPRESSED IN BONE MARROW, SIGNAL = 0.63; SWISSPROT HIT: P22793, EVALUE 1.30e-02; EST_HUMAN HIT: AA682308.1, EVALUE 1.00e-104
gttatgaaagagcaagaacagtacattgccactcagtacaaggaggccatagatttggggcaagaattgaggctgacccgggagcaggtgcagaactctcatacagaattggcagaggctcgtcatcagcaagtccaagcacagagagaaatagaaaggctctctagtgaactggaggatatgaagcaactctctaaagagaaa

SEQ ID NO: 29073 - DNA, 309 bp, Homo sapiens
  MAP TO AC011599.8; EXPRESSED IN ADULT LIVER, SIGNAL = 0.89; EXPRESSED IN BRAIN, SIGNAL = 1.1; EXPRESSED IN BONE MARROW, SIGNAL =   1; EXPRESSED IN LUNG, SIGNAL = 1.1; EXPRESSED IN PLACENTA, SIGNAL = 0.96; EXPRESSED IN FETAL LIVER, SIGNAL = 0.85; EST_HUMAN HIT: AW673469.1, EVALUE 0.00e+00; SWISSPROT HIT: P31629, EVALUE 2.00e+00; NT HIT: gi11433585, EVALUE 2.00e-50
ctgtgctctcctacctgcttgtcctgcaggtccgaggagagctcatagctctcggagagtgagcgtgagcgcttgatggcctcctcctcagcctgcttgcgcaggatggaggtcgagtgctgcagcttgggcctccgcgtgcgctgctgttgccccggcggccccgagtacagcccataggctcccactgacgtgtgctcgtagtgatccgggctcaggctggaaccgggcaccaaggggccctgggggtaggctgaggggctgtccagggatgtgccagtctcactgctgggggcctcgccctcgacg

SEQ ID NO: 29074 - DNA, 147 bp, Homo sapiens
  MAP TO AL157396.2; EXPRESSED IN PLACENTA, SIGNAL = 0.83; EXPRESSED IN BONE MARROW, SIGNAL = 0.65; EXPRESSED IN FETAL LIVER, SIGNAL = 1.3; EXPRESSED IN BRAIN, SIGNAL = 0.62; SWISSPROT HIT: P51160, EVALUE 1.00e-23; EST_HUMAN HIT: BF676601.1, EVALUE 3.20e-02; NT HIT: X94354.1, EVALUE 1.00e-77
ctctacaggtactttgaatttctccaccacatttatttcaaaaaacagtcgtattccacatttaatcaatccgtgctctgtaagggggaagtcactgaagcggaattcgtacagttctgctgagcgtgggtctggcaagtcctcttt

SEQ ID NO: 29075 - DNA, 144 bp, Homo sapiens
  MAP TO AC009507.3; EXPRESSED IN LUNG, SIGNAL = 1.2; EXPRESSED IN ADULT LIVER, SIGNAL = 1.2; EXPRESSED IN BRAIN, SIGNAL = 0.94; EXPRESSED IN BONE MARROW, SIGNAL = 0.92; EXPRESSED IN PLACENTA, SIGNAL =   1; EXPRESSED IN FETAL LIVER, SIGNAL = 1.6; SWISSPROT HIT: O51157, EVALUE 6.90e+00; NT HIT: AL163285.2, EVALUE 4.00e-22; EST_HUMAN HIT: BE408611.1, EVALUE 7.00e-31
ccaccacatcttcagttacttcctccactgaaattttgaaaccctcaaagtcatccatgagtgttggaatcaatttcttccaacctactgttaatgttgatattttgatctcctcccatgattcacaaatgttcttcatggcat

SEQ ID NO: 29076 - DNA, 339 bp, Homo sapiens
  MAP TO AC013800.3; EXPRESSED IN PLACENTA, SIGNAL = 0.56; EXPRESSED IN FETAL LIVER, SIGNAL = 0.49; EXPRESSED IN ADULT LIVER, SIGNAL = 0.52; EXPRESSED IN BRAIN, SIGNAL = 0.58; EXPRESSED IN BONE MARROW, SIGNAL = 0.57; SWISSPROT HIT: P49457, EVALUE 2.00e-05; EST_HUMAN HIT: BF701338.1, EVALUE 3.10e-01; NT HIT: gi6981243, EVALUE 3.30e+00
aaccatgatgcctgttaacaagaggattcagtccaagttgatggcccccaggccctggagcatggggtctaactggaatgagaccaggactagagcttggtattatgggagacccaagggttccctgcagaggaagagccctcctaccgacacaggtgggcagaggccggtcccaggtccggcgctctccactcagacacagcagctcctcactaccccgcaggctgtatccagggtcacagctgaaggacacggagctccctgcaaaatgaccttcatcatgaaccttgtagccaaacttgggggttcctgggtcctcacatttgatgagttcaaagc

SEQ ID NO: 29077 - DNA, 125 bp, Homo sapiens
  MAP TO AC025516.2; EXPRESSED IN LUNG, SIGNAL = 1.3; EXPRESSED IN PLACENTA, SIGNAL =   1; EXPRESSED IN FETAL LIVER, SIGNAL =   1; EXPRESSED IN ADULT LIVER, SIGNAL = 1.1; EXPRESSED IN BRAIN, SIGNAL = 0.97; EXPRESSED IN BONE MARROW, SIGNAL = 0.96; SWISSPROT HIT: P57110, EVALUE 1.00e-07; EST_HUMAN HIT: AA469910.1, EVALUE 4.10e-01; NT HIT: X13597.1, EVALUE 2.80e-01
ctagtgataagaacagcagtgtcatggtgggaagggtgaacatcatcaaggtcattctgagtttgttgccatgaacaaaagttctttaatgtggtagcaccatcaaaattaatgactggtccttc

SEQ ID NO: 29078 - DNA, 182 bp, Homo sapiens
  MAP TO AC019221.3; EXPRESSED IN PLACENTA, SIGNAL = 0.64; EXPRESSED IN ADULT LIVER, SIGNAL = 0.94; EXPRESSED IN FETAL LIVER, SIGNAL = 0.64; EXPRESSED IN BONE MARROW, SIGNAL = 0.78; EXPRESSED IN BRAIN, SIGNAL = 0.69; SWISSPROT HIT: P45481, EVALUE 3.00e+00; EST_HUMAN HIT: W85795.1, EVALUE 1.00e-70; NT HIT: gi10181139, EVALUE 1.10e-01
agctgatgtggccaggacaccaggcaggggggctccaggcggagccctggacctccatcccgcagcctctcctcatctgggtggtgcctcacaccagggccagtgggccggaggcagggaagcaactggcactcaccacgagctctcccaagctcactcagtacaagcggtgtctggcacat

SEQ ID NO: 29079 - DNA, 198 bp, Homo sapiens
  MAP TO AL133344.19; EXPRESSED IN BONE MARROW, SIGNAL = 0.89; EXPRESSED IN PLACENTA, SIGNAL = 0.84; EXPRESSED IN ADULT LIVER, SIGNAL = 0.93; EXPRESSED IN FETAL LIVER, SIGNAL = 0.76; EXPRESSED IN BRAIN, SIGNAL = 0.81; EST_HUMAN HIT: AV755842.1, EVALUE 1.00e-102; NT HIT: D86934.1, EVALUE 1.80e+00; SWISSPROT HIT: Q74121, EVALUE 7.50e-01
agacatattgatgtctttgactgttggaaaccttgcagagcaagaatttgtaaccattgcacgtcactaccgtgtgcctgagggcacatgttcagatatggatttcttaatcgcactggcccacgaaaagttcaagaaaaatatgtttgagaatttcgacactttcatttattcctgtgtgtatgaagatcgagaaaa

SEQ ID NO: 29080 - DNA, 274 bp, Homo sapiens
  MAP TO AC011841.3; EXPRESSED IN LUNG, SIGNAL = 1.3; EXPRESSED IN ADULT LIVER, SIGNAL = 1.2; EXPRESSED IN FETAL LIVER, SIGNAL = 1.6; EXPRESSED IN BRAIN, SIGNAL = 1.3; EXPRESSED IN PLACENTA, SIGNAL =   1; EXPRESSED IN BONE MARROW, SIGNAL = 1.2; EST_HUMAN HIT: T74219.1, EVALUE 1.00e-104; NT HIT: gi4557498, EVALUE 2.00e-87; SWISSPROT HIT: P56546, EVALUE 5.00e-36
atgcaggagatccacgagaaagttctaaacgaagtcgtgggcgccatgatgtaccacaccttctccctcaccagggaagacctggaaaatttcaaggccctgagagtgatcgtgcaggtgggcagtggctacgacaacgtggccatcaaggctgctggcgagctcgaaattgctgtgtgcagcatcccgtccgcagccgtggaagagacagccgactccaccaccggccacatcctcaatctgtactgggggaacaggtcgctgtaccaggcac

SEQ ID NO: 29081 - DNA, 170 bp, Homo sapiens
  MAP TO AL162390.2; EXPRESSED IN PLACENTA, SIGNAL = 0.73; EXPRESSED IN BONE MARROW, SIGNAL = 0.8; EXPRESSED IN ADULT LIVER, SIGNAL = 0.94; EXPRESSED IN FETAL LIVER, SIGNAL = 0.8; EXPRESSED IN BRAIN, SIGNAL = 2.8; SWISSPROT HIT: Q9PIW2, EVALUE 5.10e+00; NT HIT: AB011166.1, EVALUE 3.00e-91; EST_HUMAN HIT: BE770581.1, EVALUE 4.00e-36
gaaattcatagaaaattgcaagcagtggattcagggttgattgccttacgtgaaacaagcaaacatctggagcacaaagacaatgaacttagacaaaagaagaaggagcttcttgagagaaaaaccaagaaaagacaactggaacaaaaaatcagttccaaactaggaag

SEQ ID NO: 29082 - DNA, 114 bp, Homo sapiens
  MAP TO AC011941.4; EXPRESSED IN PLACENTA, SIGNAL = 0.99; EXPRESSED IN ADULT LIVER, SIGNAL = 1.1; EXPRESSED IN BRAIN, SIGNAL =   1; EXPRESSED IN BONE MARROW, SIGNAL =   1; EXPRESSED IN LUNG, SIGNAL =   1; EXPRESSED IN FETAL LIVER, SIGNAL = 0.96; EST_HUMAN HIT: BE067147.1, EVALUE 3.70e-01; SWISSPROT HIT: P49217, EVALUE 4.10e+00; NT HIT: AJ243916.1, EVALUE 6.30e-02
atgtatttatgttatgcaaatgcaaatgacatgtggagaagtaatgagatgggaaggcagcattctgacaccatggtggtcatgctggagtcattgtcgctggacagcgtcctg

SEQ ID NO: 29083 - DNA, 199 bp, Homo sapiens
  MAP TO AC009079.4; EXPRESSED IN PLACENTA, SIGNAL = 0.54; EXPRESSED IN FETAL LIVER, SIGNAL = 0.77; EXPRESSED IN BONE MARROW, SIGNAL = 0.65; EXPRESSED IN ADULT LIVER, SIGNAL = 0.74; EXPRESSED IN BRAIN, SIGNAL = 0.48; SWISSPROT HIT: P56315, EVALUE 2.20e+00; NT HIT: gi8922096, EVALUE 3.00e-98; EST_HUMAN HIT: BE265526.1, EVALUE 4.00e-98
tgccaaagagatggatgagactgttgctgagttcatcaagaggaccatcttgaaaatccccatgaatgaactgacaacaatcctgaaggcctgggattttttgtctgaaaatcaactgcagactgtaaatttccgacagagaaaggaatctgtagttcagcacttgatccatctgtgtgaggtaacagtgttaaaaatg

SEQ ID NO: 29084 - DNA, 159 bp, Homo sapiens
  MAP TO AL158111.2; EXPRESSED IN PLACENTA, SIGNAL = 1.1; EXPRESSED IN ADULT LIVER, SIGNAL = 1.2; EXPRESSED IN FETAL LIVER, SIGNAL = 0.85; EXPRESSED IN LUNG, SIGNAL = 0.97; EXPRESSED IN BRAIN, SIGNAL = 0.99; EXPRESSED IN BONE MARROW, SIGNAL = 0.85; SWISSPROT HIT: O18405, EVALUE 1.60e-01; NT HIT: AJ289880.1, EVALUE 4.00e-10; EST_HUMAN HIT: BF434565.1, EVALUE 2.00e-10
ttggtagtagctatcttcatgggttggaagtggtagctcatagctttgatttgtgttttcctattagtgatattgaccatctttccatgtgctttttggacatttgtgtattttctttagagaaatgtctattccaagttttttgcctgttgtttaata

SEQ ID NO: 29085 - DNA, 533 bp, Homo sapiens
  MAP TO AC007923.2; EXPRESSED IN LUNG, SIGNAL = 0.83; EXPRESSED IN PLACENTA, SIGNAL = 0.76; EXPRESSED IN ADULT LIVER, SIGNAL = 1.1; EXPRESSED IN FETAL LIVER, SIGNAL = 0.9; EXPRESSED IN BONE MARROW, SIGNAL = 1.1; EXPRESSED IN BRAIN, SIGNAL = 0.6; SWISSPROT HIT: P10266, EVALUE 8.00e-51; EST_HUMAN HIT: AA190368.1, EVALUE 1.00e-88
tggagatcctaatctcgctagcccttggcaattaacaaaagaagctgaggcagagctgcagctaatcaaaaagcaagtctataaagctcaaataaatagaatagatccagagaagactctagatttgctatttttttcaactcagcattcacctactggtgttattgttcaagagcaagatcttgtagagtggctttttcttctacgtactaattcttggactttgattctttatttggatcaaatcactactataataggaaatgggggaactcggattgttaaattacatggatatgatcctggaaaaattattgtccctctcacgaaggcacaaatacagcaagcttttataaatagtcttacttggcaaacacatttagctgactttgtgggtattctcaataatcattttcctaaaacaaaatttttatttcaatttttgaaattaactaattggattctccctaaaataactaaatttaaacaaattgaaggtgctgagaatatttttacagatgggtctagtaatg

SEQ ID NO: 29086 - DNA, 87 bp, Homo sapiens
  MAP TO AC016205.4; EXPRESSED IN PLACENTA, SIGNAL = 1.3; EXPRESSED IN ADULT LIVER, SIGNAL = 1.6; EXPRESSED IN HELA, SIGNAL = 2.4; EXPRESSED IN BRAIN, SIGNAL = 1.6; EXPRESSED IN BONE MARROW, SIGNAL = 1.7; EXPRESSED IN LUNG, SIGNAL = 1.4; EXPRESSED IN FETAL LIVER, SIGNAL =   2; EST_HUMAN HIT: AI204358.1, EVALUE 7.00e-42; NT HIT: Z94826.1, EVALUE 2.80e+00
ctcattaagaaccatgtttgctgtgctgctgatttcaccattcaaatagtggttactgcttgcagggatattttccatgatagaaat

SEQ ID NO: 29087 - DNA, 143 bp, Homo sapiens
  MAP TO AL133316.2; EXPRESSED IN ADULT LIVER, SIGNAL =   1; EXPRESSED IN BRAIN, SIGNAL = 0.92; EXPRESSED IN BONE MARROW, SIGNAL = 0.97; EXPRESSED IN LUNG, SIGNAL =   1; EXPRESSED IN PLACENTA, SIGNAL = 1.1; EXPRESSED IN FETAL LIVER, SIGNAL = 1.1; EST_HUMAN HIT: BE155148.1, EVALUE 4.80e-01; SWISSPROT HIT: P77242, EVALUE 5.30e+00
tcagccacttatttggcatcttcacttggatgactgataggcattttaagcttaaaatggataaaatagaaattcttccatcttcatctttcaccccttttccaccatctacttcaatgaacacagccctatttttatcttcg

SEQ ID NO: 29088 - DNA, 131 bp, Homo sapiens
  MAP TO AC022174.2; EXPRESSED IN LUNG, SIGNAL = 1.3; EXPRESSED IN PLACENTA, SIGNAL = 0.96; EXPRESSED IN ADULT LIVER, SIGNAL = 0.89; EXPRESSED IN FETAL LIVER, SIGNAL = 0.77; EXPRESSED IN BRAIN, SIGNAL = 0.76; EXPRESSED IN BONE MARROW, SIGNAL = 0.76; EST_HUMAN HIT: AA291404.1, EVALUE 1.70e+00; NT HIT: AJ248287.1, EVALUE 2.90e-01; SWISSPROT HIT: Q10071, EVALUE 5.30e+00
atgttctatggcgactatgttttcctggaccagagatcctgctttaatattgaattatcaggtctcagtgtgaatgaagaaatcatagagctataccaatcaggtggtaacaattcaccttcagagacaag

SEQ ID NO: 29089 - DNA, 271 bp, Homo sapiens
  MAP TO AC016576.4; EXPRESSED IN ADULT LIVER, SIGNAL =   1; EXPRESSED IN BRAIN, SIGNAL = 0.87; EXPRESSED IN LUNG, SIGNAL = 0.99; EXPRESSED IN PLACENTA, SIGNAL = 0.99; EXPRESSED IN FETAL LIVER, SIGNAL = 0.87; EXPRESSED IN BONE MARROW, SIGNAL = 0.79; NT HIT: gi11437370, EVALUE 1.70e-01; SWISSPROT HIT: Q39575, EVALUE 1.00e-15
atgtcgaaagcttccccgggccttgaaggactggcaggcttttttggacctgaagaagatcattgatgatttcagcgagtgttgcccgctgctggaatacatggccagtaaagccatgatggagcggcactgggaaaggataaccaccctcaccgggcacagtctggatgtggggaatgaaagctttaagttaagaaatatcatggaggcacctcttctgaaatataaagaggaaatagaggtagagtatgatgtgatggaagattgcaag

SEQ ID NO: 29090 - DNA, 165 bp, Homo sapiens
  MAP TO AL161661.1; EXPRESSED IN LUNG, SIGNAL = 0.85; EXPRESSED IN PLACENTA, SIGNAL = 0.69; EXPRESSED IN FETAL LIVER, SIGNAL = 0.63; EXPRESSED IN BRAIN, SIGNAL =   1; EXPRESSED IN BONE MARROW, SIGNAL = 0.7; EXPRESSED IN ADULT LIVER, SIGNAL = 0.81; NT HIT: gi11545798, EVALUE 3.00e-57; SWISSPROT HIT: Q92556, EVALUE 1.00e-10; EST_HUMAN HIT: AU130706.1, EVALUE 5.00e-57
agctccactgtccccatgaccttccgctcactccagtgtgtgtccaccccagggagctgagggagaagatccagcccgagatccttgagctgatcaagcagcagcgcctgaaccggctctgtgagggcagcagcttccgaaagattgggaaccgccgaaggcaag

SEQ ID NO: 29091 - DNA, 189 bp, Homo sapiens
  MAP TO AC018731.3; EXPRESSED IN ADULT LIVER, SIGNAL = 0.66; EXPRESSED IN BRAIN, SIGNAL = 0.52; EXPRESSED IN FETAL LIVER, SIGNAL = 0.57; EXPRESSED IN BONE MARROW, SIGNAL = 0.56; SWISSPROT HIT: Q63210, EVALUE 5.00e+00; EST_HUMAN HIT: AI762859.1, EVALUE 1.00e-102; NT HIT: D78270.1, EVALUE 1.70e+00
atatgcaactcccttggttcttgtcggatatatcacatcttcaacatctccgccctcattcttaatgtcttggaagtggctcttcactaatacggccaataattgatcactaaaaaggtcaactggaagaccagcaactacaaccgttctttcaggagctttggattccttgacattcaaaactgatgc

SEQ ID NO: 29092 - DNA, 197 bp, Homo sapiens
  MAP TO AC019275.3; EXPRESSED IN PLACENTA, SIGNAL = 0.72; EXPRESSED IN FETAL LIVER, SIGNAL = 0.69; EXPRESSED IN BONE MARROW, SIGNAL = 0.67; EXPRESSED IN ADULT LIVER, SIGNAL = 0.77; EXPRESSED IN BRAIN, SIGNAL = 0.6; NT HIT: AB037754.1, EVALUE 2.00e-89; EST_HUMAN HIT: BE891806.1, EVALUE 3.00e-89; SWISSPROT HIT: P28744, EVALUE 2.90e+00
ttccaaaattatcattttcaataacatatgctacttcaattgcatatgaaggattaaagtttcgatttctgaatgcatctaaggcactattccagatattggctttgttgatatacaatcttttagttttttttttaatttggaatcctaactctattaatagtgttgatacatttcttctaaatttgctgccttgc

SEQ ID NO: 29093 - DNA, 168 bp, Homo sapiens
  MAP TO AC018395.4; EXPRESSED IN ADULT LIVER, SIGNAL = 1.1; EXPRESSED IN FETAL LIVER, SIGNAL = 1.1; EXPRESSED IN BRAIN, SIGNAL = 1.2; EXPRESSED IN LUNG, SIGNAL = 1.1; EXPRESSED IN PLACENTA, SIGNAL = 1.2; EXPRESSED IN BONE MARROW, SIGNAL = 1.2; SWISSPROT HIT: P53246, EVALUE 7.80e-01; NT HIT: M61943.1, EVALUE 9.80e-02; EST_HUMAN HIT: BE242166.1, EVALUE 2.30e+00
tcagaggaagtaaagttcattgatgggcagaataaaaatggggagcttcacgaaggagatggagtttgaggtgaactcaaaggattcacagggtatatgcttgagaaaagcctgtaaagatgttacagaaatgacagtatggtctgtttttgagacaatcagagttac

SEQ ID NO: 29094 - DNA, 185 bp, Homo sapiens
  MAP TO AC013799.3; EXPRESSED IN PLACENTA, SIGNAL =   1; EXPRESSED IN BONE MARROW, SIGNAL =   1; EXPRESSED IN LUNG, SIGNAL =   1; EXPRESSED IN ADULT LIVER, SIGNAL = 1.2; EXPRESSED IN FETAL LIVER, SIGNAL = 0.7; EXPRESSED IN BRAIN, SIGNAL = 0.96; NT HIT: Y14604.1, EVALUE 4.30e-01
tgacaaatatattgaggaaacctcttctacaaatcaagtaatgagacttctttttactccctcccctcttttttcccttctctttctgcttctcctcttcccccttttcctctttctcctcctcctctttttcatcttcctcctcctcctcatattgatgtttgttattaagagaatatttaatg

SEQ ID NO: 29095 - DNA, 193 bp, Homo sapiens
  MAP TO AL080312.14; EXPRESSED IN ADULT LIVER, SIGNAL = 0.55; EXPRESSED IN BRAIN, SIGNAL = 0.45; EXPRESSED IN PLACENTA, SIGNAL = 0.53; EXPRESSED IN FETAL LIVER, SIGNAL = 0.54; EXPRESSED IN BONE MARROW, SIGNAL = 0.57; NT HIT: AE004389.1, EVALUE 1.10e-01; EST_HUMAN HIT: BF680206.1, EVALUE 5.00e-88; SWISSPROT HIT: P18892, EVALUE 7.60e-01
ggagacactccatcacagtcactactctcacctcagctgggaacattggggaggatggaatcctgagctgcacttttgaacttgacatcaaactttctgatatcatgatacaatggctgaaggaaggggttataggcttggtccatgagttcaaagaaggcaaagatgagctgtcagagcaggatgaaatgtt

SEQ ID NO: 29096 - DNA, 187 bp, Homo sapiens
  MAP TO AC022216.3; EXPRESSED IN PLACENTA, SIGNAL = 0.76; EXPRESSED IN ADULT LIVER, SIGNAL = 0.65; EXPRESSED IN FETAL LIVER, SIGNAL = 0.64; EXPRESSED IN BRAIN, SIGNAL = 0.69; EXPRESSED IN BONE MARROW, SIGNAL = 0.71; SWISSPROT HIT: Q07326, EVALUE 2.00e-01; NT HIT: AE001092.1, EVALUE 2.80e-02; EST_HUMAN HIT: BE832247.1, EVALUE 6.50e-01
atcatggacactaaaaagactatgtctacctattctaagaaattccagtctacacaatattacaaatacaacctcaaaggctttgagcaaaaatacacaacagcatttgaagaaaattccattacttcttcctgtaactttatgtagaagttcactatcagaaactgttcatacaaaagaacaacga

SEQ ID NO: 29097 - DNA, 226 bp, Homo sapiens
  MAP TO AC026442.1; EXPRESSED IN PLACENTA, SIGNAL = 0.5; EXPRESSED IN ADULT LIVER, SIGNAL = 0.61; EXPRESSED IN BRAIN, SIGNAL = 0.52; EXPRESSED IN BONE MARROW, SIGNAL = 0.42; SWISSPROT HIT: P28745, EVALUE 3.40e-01; NT HIT: U39484.1, EVALUE 9.00e-03; EST_HUMAN HIT: BE063509.1, EVALUE 6.00e-11
ctaatatccagaagtggagaggttgatgttagtctcagtatcgcagtgggtgtatacccatcctgtgatattgttcctaatacccggggtggagaggatgatgttattcccaatatcgcaggaagtgtacatttcccctgtgatattgttcctaatatccagtgaagagaggataatattactcccaaaatcgcagggggtgtacaccccctctgtgatattgtta

SEQ ID NO: 29098 - DNA, 86 bp, Homo sapiens
  MAP TO AL136300.5; EXPRESSED IN PLACENTA, SIGNAL = 0.58; EXPRESSED IN FETAL LIVER, SIGNAL = 0.61; EXPRESSED IN BONE MARROW, SIGNAL = 0.52; EXPRESSED IN BRAIN, SIGNAL = 0.57; NT HIT: U53868.1, EVALUE 7.00e-01
ctatgggcaatattgatgattttgatacttgcaagtgcccagaattcgctgcttatcgtgctgggaatatgacgtcaggactcatg

SEQ ID NO: 29099 - DNA, 204 bp, Homo sapiens
  MAP TO AC022939.2; EXPRESSED IN ADULT LIVER, SIGNAL = 0.69; EXPRESSED IN FETAL LIVER, SIGNAL = 0.58; EXPRESSED IN BRAIN, SIGNAL = 0.49; EXPRESSED IN BONE MARROW, SIGNAL = 0.46; EXPRESSED IN PLACENTA, SIGNAL = 0.54; NT HIT: gi8923248, EVALUE 1.00e-111; SWISSPROT HIT: Q25452, EVALUE 5.70e-01; EST_HUMAN HIT: BF333210.1, EVALUE 1.00e-111
ctttggcttctttccaaagagccacaatttgcccttggcctttcctactgtggttttggcatccatcttcccactctcctgtttggatgcactgatagtcccatcagaaatggttctatatatatgttgactgtaatcttcaaatggaaagtctcctggaggttcaaaaccagatttgaaggagtctaccaccatttgagagtc

SEQ ID NO: 29100 - DNA, 257 bp, Homo sapiens
  MAP TO AC016790.3; EXPRESSED IN PLACENTA, SIGNAL = 0.91; EXPRESSED IN ADULT LIVER, SIGNAL = 1.7; EXPRESSED IN FETAL LIVER, SIGNAL = 1.9; EXPRESSED IN BONE MARROW, SIGNAL = 1.9; EXPRESSED IN LUNG, SIGNAL = 1.5; EXPRESSED IN BRAIN, SIGNAL = 1.7; SWISSPROT HIT: P10266, EVALUE 2.10e-01; EST_HUMAN HIT: BE064386.1, EVALUE 5.00e-55; NT HIT: AB014607.1, EVALUE 6.00e-35
ttactcattgtgactggttgtcctgctttcctcaggttttcttccaccatctgcgacagcttcttgatctgtccccaggtaggtggctgtgttcaacgggtgttgctcgtgacagttggggtcctcctcagcatgaacttgagcaatgctgccaatgatgggtctttgggatcctcccaaaacctcttcctgggtagctggctcatagtacggctttagatgtctcgatggtgcccaaattggctgttgattcagtc

SEQ ID NO: 29101 - DNA, 154 bp, Homo sapiens
  MAP TO AC023296.2; EXPRESSED IN PLACENTA, SIGNAL = 0.74; EXPRESSED IN ADULT LIVER, SIGNAL = 0.84; EXPRESSED IN FETAL LIVER, SIGNAL = 0.73; EXPRESSED IN BONE MARROW, SIGNAL = 0.71; EXPRESSED IN LUNG, SIGNAL = 0.91; EXPRESSED IN BRAIN, SIGNAL = 0.74; NT HIT: M10367.1, EVALUE 8.90e-02; SWISSPROT HIT: P34092, EVALUE 9.00e+00; EST_HUMAN HIT: BF115621.1, EVALUE 3.30e-02
catctcatagacaggagtggtcctggatccagaactccagaactgagaccaccatcagctcccctgcctctgggctgatcattcttaccctgactccctcccactgtggtgagcaggtggctgttgagtctcctagagatatccctcgagctgc

SEQ ID NO: 29102 - DNA, 223 bp, Homo sapiens
  MAP TO AC013396.4; EXPRESSED IN ADULT LIVER, SIGNAL = 1.1; EXPRESSED IN BRAIN, SIGNAL = 1.2; EXPRESSED IN LUNG, SIGNAL = 0.83; EXPRESSED IN FETAL LIVER, SIGNAL = 0.9; EXPRESSED IN PLACENTA, SIGNAL = 0.96; EXPRESSED IN BONE MARROW, SIGNAL = 0.78; EST_HUMAN HIT: AI359618.1, EVALUE 1.00e-122; NT HIT: AB033092.1, EVALUE 1.00e-122; SWISSPROT HIT: Q13330, EVALUE 4.00e-15
attctgccctaatggcagcataattaatagcaacaaacggccgtcttgctgcctgccgcagccggagggtatttttgcagacctgacgagcaaattttgtgaaatatgtagtatgaaggaagaaagcttggcgggtcttcactgcagactttggactcccagtgtttcggactggcattccctgcatggcctggcgggacacgtgacttctaacacgagggtc

SEQ ID NO: 29103 - DNA, 285 bp, Homo sapiens
  MAP TO AC025115.2; EXPRESSED IN ADULT LIVER, SIGNAL = 0.59; EXPRESSED IN BRAIN, SIGNAL = 0.45; EXPRESSED IN PLACENTA, SIGNAL = 0.64; EXPRESSED IN BONE MARROW, SIGNAL = 0.46; SWISSPROT HIT: P23266, EVALUE 1.00e-34; EST_HUMAN HIT: AW874308.1, EVALUE 6.60e-02; NT HIT: AF101759.1, EVALUE 4.40e-02
atgtaaggggtggcaaatcgccacatatctatcatacgccatcacacacagaaggaggctgtccatattcacaaaagaaacgaagaagaagagctgggtgaggcagcctgcaaaagagatagtcttggtgccagtcaagatattcactaccatttgggggactgtagtcgacgtaaagcagatgtcaacaaaggccaagttactaaggaagaagtacataggggaatggaggtgagagtcaaagccaatcgtcgcaatgatgagcatgttccccaaggtggtggc

SEQ ID NO: 29104 - DNA, 237 bp, Homo sapiens
  MAP TO AL121673.27; EXPRESSED IN BONE MARROW, SIGNAL = 0.54; EXPRESSED IN ADULT LIVER, SIGNAL = 0.66; EXPRESSED IN BRAIN, SIGNAL = 0.56; EXPRESSED IN PLACENTA, SIGNAL = 0.55; EXPRESSED IN FETAL LIVER, SIGNAL = 0.6; SWISSPROT HIT: P18127, EVALUE 5.00e-03; NT HIT: AB042297.1, EVALUE 1.00e-05; EST_HUMAN HIT: AA827075.1, EVALUE 6.00e-08
ctagatatctgatgcaagtagaatcatacaacatttgtccttttgtttctggcttatgtcactcagcacaatgcttccgaggtcgctcagcagggggcttccgaggtcgctcagcacggggcttccggggtcgctcagcacggggcttccggggtcgctcagcacggggcttccggggtcgctcagcacggcacttccgaggtcgctcagcacggggcttccgaggtcactcagcat

SEQ ID NO: 29105 - DNA, 82 bp, Homo sapiens
  MAP TO AL118525.17; EXPRESSED IN PLACENTA, SIGNAL = 0.46; EXPRESSED IN ADULT LIVER, SIGNAL = 0.61; EXPRESSED IN FETAL LIVER, SIGNAL = 0.82; EXPRESSED IN BRAIN, SIGNAL = 0.56; EXPRESSED IN BONE MARROW, SIGNAL = 0.61; SWISSPROT HIT: Q16647, EVALUE 1.00e-10; NT HIT: D84116.1, EVALUE 4.00e-39
gctggcagcatcttttccaaagtccaaggcataccccaaccaggggatgctgcccaggtccaggggaggctcaccaggtcgc

SEQ ID NO: 29106 - DNA, 187 bp, Homo sapiens
  MAP TO AC013357.9; EXPRESSED IN LUNG, SIGNAL =   1; EXPRESSED IN PLACENTA, SIGNAL = 0.99; EXPRESSED IN FETAL LIVER, SIGNAL = 0.8; EXPRESSED IN BRAIN, SIGNAL = 0.83; EXPRESSED IN BONE MARROW, SIGNAL = 0.82; EXPRESSED IN ADULT LIVER, SIGNAL = 0.89; EST_HUMAN HIT: BE160256.1, EVALUE 5.00e-97; NT HIT: AB037772.1, EVALUE 1.00e-101; SWISSPROT HIT: Q03164, EVALUE 2.60e-01
ctaggtttctcttgagtgattaaaatttttactttatttagagctttcttggcacctgtggctgtggccagcttgttatgagctgggctagagtgtgggctggatatgtaaacttttttcccagggcctgagggaggcttggatggggagaagtctgagatgaaaacaataccctcgctggtaagca

SEQ ID NO: 29107 - DNA, 94 bp, Homo sapiens
  MAP TO AC021115.3; EXPRESSED IN ADULT LIVER, SIGNAL = 0.53; EXPRESSED IN BRAIN, SIGNAL = 0.51; EXPRESSED IN PLACENTA, SIGNAL = 0.56; EXPRESSED IN FETAL LIVER, SIGNAL = 0.53; EXPRESSED IN BONE MARROW, SIGNAL = 0.52; NT HIT: gi4826873, EVALUE 7.80e-01
tgagggcaagactgaggattatgattgtgccaagcacgagatattcaaagatgagtacgatcagcgccctggcaagtctttccccaccatctaa

SEQ ID NO: 29108 - DNA, 173 bp, Homo sapiens
  MAP TO AC009476.3; EXPRESSED IN BONE MARROW, SIGNAL = 0.51; EXPRESSED IN PLACENTA, SIGNAL = 0.58; EXPRESSED IN FETAL LIVER, SIGNAL = 0.47; EXPRESSED IN BRAIN, SIGNAL = 0.49; EST_HUMAN HIT: AA725700.1, EVALUE 2.00e-04; NT HIT: M95828.1, EVALUE 4.00e-04; SWISSPROT HIT: P52360, EVALUE 1.70e+00
gccagggccaagtgcattcatcaaatgacaatttatcattttcttcatagatccaagaagggtcaggggtcactgtccacaggccagtttccacactttgtaagacttgtggagatttaaaaacaacaacaacaacagcaaccttatgaggcagtaggtggtccaaagtttgg

SEQ ID NO: 29109 - DNA, 202 bp, Homo sapiens
  MAP TO AL136089.8; EXPRESSED IN PLACENTA, SIGNAL = 1.1; EXPRESSED IN FETAL LIVER, SIGNAL = 0.54; EXPRESSED IN BRAIN, SIGNAL = 7.9; EXPRESSED IN ADULT LIVER, SIGNAL = 0.79; EXPRESSED IN BONE MARROW, SIGNAL = 0.79; SWISSPROT HIT: P39978, EVALUE 5.00e+00; NT HIT: AB002379.1, EVALUE 1.00e-110; EST_HUMAN HIT: BE302594.1, EVALUE 1.00e-110
ctgaaggagcagagggaacgtgagcggtggcagcggcagcggaaggtcctggctgcaggcagctcgctggaggagggaggagagttcgatgacctggtgtcggccctgcgctctggggaggtcttcgacaaggacttatgcaagctcaagcgcagccgcaagcgatcagggagccaggccctggaagttacccgggagcggg

SEQ ID NO: 29110 - DNA, 137 bp, Homo sapiens
  MAP TO U82670.2; EXPRESSED IN LUNG, SIGNAL = 0.91; EXPRESSED IN PLACENTA, SIGNAL = 0.88; EXPRESSED IN ADULT LIVER, SIGNAL = 1.2; EXPRESSED IN FETAL LIVER, SIGNAL =   1; EXPRESSED IN BRAIN, SIGNAL = 0.93; EXPRESSED IN BONE MARROW, SIGNAL = 0.92; SWISSPROT HIT: P12227, EVALUE 3.10e+00; EST_HUMAN HIT: BE074720.1, EVALUE 8.00e-12; NT HIT: AL163280.2, EVALUE 1.00e-03
tactgtcatttcaactactactacgttcacagcatcttctccaggaatggattccattccatttcaagaaatcactttctttgttcttccgtaagaagcaactccttgtcccttccagtttgatcatgagattgcag

SEQ ID NO: 29111 - DNA, 181 bp, Homo sapiens
  MAP TO AC008597.3; EXPRESSED IN ADULT LIVER, SIGNAL = 1.2; EXPRESSED IN BRAIN, SIGNAL = 0.96; EXPRESSED IN BONE MARROW, SIGNAL = 0.83; EXPRESSED IN LUNG, SIGNAL = 1.1; EXPRESSED IN PLACENTA, SIGNAL = 0.81; EXPRESSED IN FETAL LIVER, SIGNAL = 1.2; SWISSPROT HIT: P51659, EVALUE 7.00e-29; NT HIT: AF057726.1, EVALUE 9.00e-98; EST_HUMAN HIT: AU136446.1, EVALUE 1.00e-97
atgacttcatcagcttcaggaatatatggcaactttggccaggccaattatagtgctgcaaagttgggtcttctgggccttgcaaattctcttgcaattgaaggcaggaaaagcaacattcattgtaacaccattgctcctaatgcgggatcacggatgactcagacagttatgcctgaag

SEQ ID NO: 29112 - DNA, 114 bp, Homo sapiens
  MAP TO AL133458.11; EXPRESSED IN FETAL LIVER, SIGNAL = 0.72; EXPRESSED IN BONE MARROW, SIGNAL = 1.3; EXPRESSED IN BRAIN, SIGNAL = 0.68; NT HIT: gi5231227, EVALUE 5.00e-58; SWISSPROT HIT: P80022, EVALUE 6.00e-05; EST_HUMAN HIT: AI903908.1, EVALUE 7.00e-58
ctgttgaggtccagctccctgtagagttccaggcttctgccaaagtacttcttctgggagttgagcgcatccacctgggcggcgcaggtcccatgcttttcccactcatgcttc

SEQ ID NO: 29113 - DNA, 130 bp, Homo sapiens
  MAP TO AL158051.1; EXPRESSED IN ADULT LIVER, SIGNAL = 0.66; EXPRESSED IN BONE MARROW, SIGNAL = 0.73; EXPRESSED IN PLACENTA, SIGNAL = 0.78; EXPRESSED IN FETAL LIVER, SIGNAL = 0.86; EXPRESSED IN BRAIN, SIGNAL = 0.58; NT HIT: AF020503.1, EVALUE 3.00e-10; EST_HUMAN HIT: BE350127.1, EVALUE 8.00e-09; SWISSPROT HIT: P10619, EVALUE 5.40e+00
ttgtggagatacccagaagaggatattgtataggagatgccagctgtaagcgtgttattgtccttaaagaccttctagtgagacaagctgtggaggtggaaggcagtaatactgacgatcccgaccctgg

SEQ ID NO: 29114 - DNA, 81 bp, Homo sapiens
  MAP TO AL161940.3; EXPRESSED IN PLACENTA, SIGNAL = 0.47; EXPRESSED IN FETAL LIVER, SIGNAL = 0.5; EXPRESSED IN BONE MARROW, SIGNAL = 0.53; EXPRESSED IN ADULT LIVER, SIGNAL = 0.54; EXPRESSED IN BRAIN, SIGNAL = 0.52; NT HIT: AB028954.1, EVALUE 1.60e-01; EST_HUMAN HIT: AA778450.1, EVALUE 6.20e-02
ctgtgtctgaaagcacaggaggcagagcagcagccagaccttgagtgtcaggaggcactggagagtctcatcagagtggag

SEQ ID NO: 29115 - DNA, 178 bp, Homo sapiens
  MAP TO AL160060.3; EXPRESSED IN BONE MARROW, SIGNAL = 0.99; EXPRESSED IN LUNG, SIGNAL = 1.2; EXPRESSED IN PLACENTA, SIGNAL = 1.2; EXPRESSED IN FETAL LIVER, SIGNAL = 0.89; EXPRESSED IN ADULT LIVER, SIGNAL =   1; EXPRESSED IN BRAIN, SIGNAL = 0.81; EST_HUMAN HIT: AU120280.1, EVALUE 2.00e-84; SWISSPROT HIT: P98159, EVALUE 5.90e-01; NT HIT: AL163303.2, EVALUE 4.00e-04
agatggggagattatcctggactatccaggtgggacttttgtaatcgcaaaggtcctcggaagtgaagaaggaagtcaggagagtcagtgtcagagtgatgccgtgggacacagtcttcagggctgttgctgccttgaagatgcaggaaggggccgtgagccaaggaatgcaggtggc

SEQ ID NO: 29116 - DNA, 228 bp, Homo sapiens
  MAP TO AC021846.3; EXPRESSED IN PLACENTA, SIGNAL = 0.54; EXPRESSED IN ADULT LIVER, SIGNAL = 0.51; EXPRESSED IN BRAIN, SIGNAL = 0.46; EXPRESSED IN BONE MARROW, SIGNAL = 0.43; EST_HUMAN HIT: BE538158.1, EVALUE 2.00e-01; SWISSPROT HIT: Q95003, EVALUE 8.30e+00; NT HIT: X73293.1, EVALUE 1.40e-01
aaatcaccaaaaggtcagaccatcaaatcagaaggagcagcaccagaaatcaagtgcatactcaaatataatcaaaatcaatctttatcatgctaccaatggacagtaacccagaacacaggacaagaaatcacgcacaccattggttaccagatcaccagtcaggaacagtgcacaaagctcactgaggggcccaattatggggatggaattaacagggatctgaag

SEQ ID NO: 29117 - DNA, 89 bp, Homo sapiens
  MAP TO AL161445.2; EXPRESSED IN BRAIN, SIGNAL = 0.47; EST_HUMAN HIT: AA044450.1, EVALUE 5.00e-43
tttcctgttcttcccaacctgcgctatggacttcatcagatttcagcatcagagagaatatggaaggacatcgaccctaacttcatcca

SEQ ID NO: 29118 - DNA, 106 bp, Homo sapiens
  MAP TO AL133354.8; EXPRESSED IN BONE MARROW, SIGNAL = 0.55; EXPRESSED IN PLACENTA, SIGNAL = 0.68; EXPRESSED IN ADULT LIVER, SIGNAL = 0.52; EXPRESSED IN FETAL LIVER, SIGNAL = 0.54; EXPRESSED IN BRAIN, SIGNAL = 0.49; SWISSPROT HIT: Q15303, EVALUE 9.40e+00; NT HIT: AF086761.1, EVALUE 9.00e-01; EST_HUMAN HIT: BE901894.1, EVALUE 5.30e+00
acgcctgcagcgtgtgcagttcaaggtctgggtgctccaggctccttcggatctctgcactctgatcttcactcggccttcgctgatgcaccctctgggtctccat

SEQ ID NO: 29119 - DNA, 201 bp, Homo sapiens
  MAP TO AL158049.2; EXPRESSED IN BONE MARROW, SIGNAL = 0.65; EXPRESSED IN LUNG, SIGNAL = 1.4; EXPRESSED IN PLACENTA, SIGNAL = 0.64; EXPRESSED IN ADULT LIVER, SIGNAL = 0.8; EXPRESSED IN FETAL LIVER, SIGNAL = 0.54; EXPRESSED IN BRAIN, SIGNAL = 0.63; EST_HUMAN HIT: BE397068.1, EVALUE 1.00e-109; NT HIT: gi4504794, EVALUE 1.00e-109; SWISSPROT HIT: P29994, EVALUE 1.00e-26
aacttcctgcgctgtcagaacaacaaaaccaactacaacttggtatgcgagacgctgcagttcctggacatcatgtgcggcagcaccacgggcggcctggggctgctggggctctacatcaatgaggacaacgtgggcctcgtcatccagaccttggagaccctcactgagtactgccagggcccctgccatgagaaccag

SEQ ID NO: 29120 - DNA, 108 bp, Homo sapiens
  MAP TO AL157392.2; EXPRESSED IN LUNG, SIGNAL = 0.94; EXPRESSED IN ADULT LIVER, SIGNAL = 1.3; EXPRESSED IN BRAIN, SIGNAL = 0.82; EXPRESSED IN BONE MARROW, SIGNAL = 1.1; EXPRESSED IN PLACENTA, SIGNAL = 1.2; EXPRESSED IN FETAL LIVER, SIGNAL =   1; NT HIT: U82511.1, EVALUE 2.00e-01; EST_HUMAN HIT: AF074618.1, EVALUE 3.70e+00
cgtactcagggtagttttgatgttcagatgataccatcggttccttaccccagataacatcttcatctttatttccgtaaaactgtgcttgttgtgtggtagataagt

SEQ ID NO: 29121 - DNA, 102 bp, Homo sapiens
  MAP TO AC009476.3; EXPRESSED IN PLACENTA, SIGNAL = 0.76; EXPRESSED IN ADULT LIVER, SIGNAL = 0.81; EXPRESSED IN BRAIN, SIGNAL = 0.69; EXPRESSED IN BONE MARROW, SIGNAL = 0.66; EXPRESSED IN FETAL LIVER, SIGNAL = 0.74; EST_HUMAN HIT: AI906744.1, EVALUE 3.20e-01; NT HIT: AJ009839.1, EVALUE 2.20e-01; SWISSPROT HIT: P14100, EVALUE 7.20e+00
caagaattacaagtataattacttgtggaaggccatgggtgtgcagcatgaacctcagaaacacaagaagaatcagatcataaatcaacttgagtgagataa

SEQ ID NO: 29122 - DNA, 220 bp, Homo sapiens
  MAP TO AC011599.8; EXPRESSED IN BONE MARROW, SIGNAL = 1.7; EXPRESSED IN PLACENTA, SIGNAL = 1.6; EXPRESSED IN ADULT LIVER, SIGNAL = 1.6; EXPRESSED IN FETAL LIVER, SIGNAL = 1.7; EXPRESSED IN BRAIN, SIGNAL = 1.9; EXPRESSED IN LUNG, SIGNAL = 1.6; SWISSPROT HIT: P43138, EVALUE 4.10e-01; EST_HUMAN HIT: AI906278.1, EVALUE 9.00e-90; NT HIT: gi7662289, EVALUE 3.00e-95
cggcttccgagaggtcccgcagggagctgctgagggcgctgcgcttgaggccctcaccgctggcatagctgtcgtccaggcaggcccggctcagtgttccgttgcccgactcctttttgaggctagagcactgggacatgctgggccgcacgacgcctttctgcttctcgagctccgctggaacagagagggtgagggtcctggtgagaggagcacagcc

SEQ ID NO: 29123 - DNA, 79 bp, Homo sapiens
  MAP TO AL157396.2; EXPRESSED IN PLACENTA, SIGNAL = 0.56; EXPRESSED IN ADULT LIVER, SIGNAL = 0.62; EXPRESSED IN FETAL LIVER, SIGNAL = 0.68; EXPRESSED IN BRAIN, SIGNAL = 0.74; EXPRESSED IN BONE MARROW, SIGNAL = 0.57; NT HIT: Z97342.2, EVALUE 4.00e-02; EST_HUMAN HIT: AA843806.1, EVALUE 4.00e-37
gaaactctgatgaggaagaaagtgcttcagaatctgaactttggaagggtccactaccagagacagatgaaaaatcaca

SEQ ID NO: 29124 - DNA, 120 bp, Homo sapiens
  MAP TO AC016790.3; EXPRESSED IN ADULT LIVER, SIGNAL = 0.87; EXPRESSED IN PLACENTA, SIGNAL = 0.58; EXPRESSED IN FETAL LIVER, SIGNAL = 1.1; EXPRESSED IN BRAIN, SIGNAL = 7.7; EXPRESSED IN BONE MARROW, SIGNAL = 0.99; EXPRESSED IN LUNG, SIGNAL = 0.96; NT HIT: gi11416280, EVALUE 1.00e-61; SWISSPROT HIT: Q13634, EVALUE 1.00e-16; EST_HUMAN HIT: AI740827.1, EVALUE 4.00e-10
gtacctctgttctacaggtgacagctactgatgcagatgaccctacctatggaaacagcgctcgggtggtttacagcattctccaaggacaaccctacttctccgtcgaccctaaaacag

SEQ ID NO: 29125 - DNA, 156 bp, Homo sapiens
  MAP TO AL132874.14; EXPRESSED IN PLACENTA, SIGNAL = 0.65; EXPRESSED IN FETAL LIVER, SIGNAL = 0.88; EXPRESSED IN BRAIN, SIGNAL = 0.83; EXPRESSED IN LUNG, SIGNAL = 0.87; EXPRESSED IN ADULT LIVER, SIGNAL = 0.9; EXPRESSED IN BONE MARROW, SIGNAL = 0.94; SWISSPROT HIT: P32447, EVALUE 6.00e-14; EST_HUMAN HIT: AI268517.1, EVALUE 9.00e-80; NT HIT: AF161495.1, EVALUE 6.00e-80
gctgatgcacctaatccaggactcattccagatgcagatgcagtaggcgtaactgttgtgctaattacttgtacctatcgaggacaagaatttattagagttggctattatgtaaataatgaatatactgagacagaattaagggaaaatcaccag

SEQ ID NO: 29126 - DNA, 125 bp, Homo sapiens
  MAP TO AC020919.3; EXPRESSED IN LUNG, SIGNAL = 1.2; EXPRESSED IN PLACENTA, SIGNAL = 1.1; EXPRESSED IN FETAL LIVER, SIGNAL = 1.2; EXPRESSED IN ADULT LIVER, SIGNAL = 1.3; EXPRESSED IN BRAIN, SIGNAL = 0.92; EXPRESSED IN BONE MARROW, SIGNAL = 0.91; NT HIT: U17251.1, EVALUE 2.80e-01; SWISSPROT HIT: O13377, EVALUE 2.40e+00
tcctgcaagtcaagctcctccgaggaggccttccagctctgcttcccccagggccgctccattgtccccagcacaaagctaaccatcttggctgccgacactggatgccgctgagattggttctc

SEQ ID NO: 29127 - DNA, 119 bp, Homo sapiens
  MAP TO AL050342.42; EXPRESSED IN PLACENTA, SIGNAL = 0.92; EXPRESSED IN FETAL LIVER, SIGNAL = 0.96; EXPRESSED IN BONE MARROW, SIGNAL = 0.99; EXPRESSED IN LUNG, SIGNAL = 0.97; EXPRESSED IN ADULT LIVER, SIGNAL = 1.1; EXPRESSED IN BRAIN, SIGNAL = 0.96; EST_HUMAN HIT: AI132983.1, EVALUE 6.00e+00; NT HIT: X17604.1, EVALUE 2.60e-01
aacctctgttcttctaggaactttgttccagatgattctctgaggacaatttacctcctctatgctctgtctcctcttatcagttgtggtgacttagatggctcccgttaccttgacaa

SEQ ID NO: 29128 - DNA, 108 bp, Homo sapiens
  MAP TO AC026430.1; EXPRESSED IN PLACENTA, SIGNAL = 0.58; EXPRESSED IN FETAL LIVER, SIGNAL = 0.51; EXPRESSED IN BRAIN, SIGNAL = 0.51; EXPRESSED IN ADULT LIVER, SIGNAL = 0.55; EXPRESSED IN BONE MARROW, SIGNAL = 0.58; SWISSPROT HIT: P48497, EVALUE 1.90e+00; NT HIT: AF096774.1, EVALUE 1.50e-02; EST_HUMAN HIT: BF681572.1, EVALUE 2.20e-02
ctatttattccaagtcttgctgctcccttgctgttcccacacattcggtgcgaggggctgcagggagtgtttcagttcacagttcttcttctgggccaggacctgcat

SEQ ID NO: 29129 - DNA, 156 bp, Homo sapiens
  MAP TO AC017073.3; EXPRESSED IN PLACENTA, SIGNAL = 0.58; EXPRESSED IN FETAL LIVER, SIGNAL = 0.54; EXPRESSED IN BONE MARROW, SIGNAL = 0.54; EXPRESSED IN ADULT LIVER, SIGNAL = 0.7; EXPRESSED IN BRAIN, SIGNAL = 0.57; EST_HUMAN HIT: AU148509.1, EVALUE 8.30e+00; NT HIT: X62825.1, EVALUE 3.60e-01; SWISSPROT HIT: Q00446, EVALUE 7.90e-01
agagatgacaataatgctctctagaacgatgctgtgcacagcctgttcatccatcttccacagtcctgcaaaagaacaagcaggaaagaaagcaaggagatgcagtggagatccaggaggatcttctacaaaatccaaagggttcaggattttatc

SEQ ID NO: 29130 - DNA, 363 bp, Homo sapiens
  MAP TO AC024575.1; EXPRESSED IN ADULT LIVER, SIGNAL = 0.73; EXPRESSED IN BRAIN, SIGNAL = 0.66; EXPRESSED IN BONE MARROW, SIGNAL = 0.66; EXPRESSED IN PLACENTA, SIGNAL = 0.69; EXPRESSED IN FETAL LIVER, SIGNAL = 0.81; EST_HUMAN HIT: BE885128.1, EVALUE 0.00e+00; SWISSPROT HIT: P10569, EVALUE 1.50e+00
aagatccgcttccagtacccaccctcaacccgagagcttttccggctcctgtgctctgcccatgaggccccggggccagccccctcccttctgctgctcgacggcctagaagagtacctagcggaagacccagagccccaggaagccgcctacctcattgccttacttctagacacagctgcccacttcagccaccggcttgggcctggccgggattgtgggctcatggtggccctccagacccaggaggaagcaggtagtggggacgtcctgcacctggcactgctccagcggtattttcctgcccagtgctggctgcagccagatgcaccaggtccaggagagcacggcctccgagcctgc

SEQ ID NO: 29131 - DNA, 98 bp, Homo sapiens
  MAP TO AC024972.2; EXPRESSED IN ADULT LIVER, SIGNAL = 0.87; EXPRESSED IN BRAIN, SIGNAL = 1.1; EXPRESSED IN BONE MARROW, SIGNAL = 0.82; EXPRESSED IN LUNG, SIGNAL =   1; EXPRESSED IN PLACENTA, SIGNAL = 0.94; EXPRESSED IN FETAL LIVER, SIGNAL = 0.96; NT HIT: gi7305214, EVALUE 1.00e-18; SWISSPROT HIT: P17139, EVALUE 1.10e+00; EST_HUMAN HIT: BF512794.1, EVALUE 2.00e-36
ctccacggtccgtatctcctgctgggtgaggtccttggacacagcgcacttggtgcgcagcccgcgcaggctgccaacggagatgccgatgagcttct

SEQ ID NO: 29132 - DNA, 94 bp, Homo sapiens
  MAP TO AC019141.3; EXPRESSED IN BRAIN, SIGNAL = 0.68; EXPRESSED IN LUNG, SIGNAL = 0.85; EXPRESSED IN PLACENTA, SIGNAL = 0.62; EXPRESSED IN ADULT LIVER, SIGNAL = 0.69; EXPRESSED IN BONE MARROW, SIGNAL = 0.76; EXPRESSED IN FETAL LIVER, SIGNAL = 0.65; EST_HUMAN HIT: BE218903.1, EVALUE 1.10e+00; NT HIT: U71122.1, EVALUE 2.00e-01
ctgttggaatctgactaatgtctttaatagtggaagtagcagttagggagaatagttgggagtaggcagaagcagcaattctataagcagaaat

SEQ ID NO: 29133 - DNA, 126 bp, Homo sapiens
  MAP TO AC011218.4; EXPRESSED IN PLACENTA, SIGNAL = 0.48; EXPRESSED IN BRAIN, SIGNAL = 0.6; EXPRESSED IN BONE MARROW, SIGNAL = 0.47; SWISSPROT HIT: Q46639, EVALUE 5.40e+00; NT HIT: gi11437365, EVALUE 5.00e-52; EST_HUMAN HIT: AA113339.1, EVALUE 8.00e-52
cttcactgtgtggagctcccagggtaaaaagaccattgtcgagtgcatgtatataggttccctcatccatttcaaaggctatggttcctggaatttcaccaaagtttgttaatgtccaccagattc

SEQ ID NO: 29134 - DNA, 175 bp, Homo sapiens
  MAP TO AL160413.5; EXPRESSED IN PLACENTA, SIGNAL = 0.64; EXPRESSED IN ADULT LIVER, SIGNAL = 0.76; EXPRESSED IN FETAL LIVER, SIGNAL = 0.6; EXPRESSED IN BONE MARROW, SIGNAL = 0.71; EXPRESSED IN BRAIN, SIGNAL = 0.75; EST_HUMAN HIT: AA418019.1, EVALUE 1.50e-01; SWISSPROT HIT: P33796, EVALUE 3.00e+00; NT HIT: AF111168.2, EVALUE 7.00e-03
gagtcacctgaacaagctctcaatggccaaaactaaaaaatttaagcatcaaaataaagtcgtcctgaacgagctctcaatggccaaaactaaaaaaattaagcatcaaaataaagttgtactggatcccaacctaaagtataaaaccaatatgcatgatatatactggcacaaa

SEQ ID NO: 29135 - DNA, 156 bp, Homo sapiens
  MAP TO AC022542.3; EXPRESSED IN LUNG, SIGNAL =   1; EXPRESSED IN ADULT LIVER, SIGNAL =   1; EXPRESSED IN FETAL LIVER, SIGNAL = 0.92; EXPRESSED IN BRAIN, SIGNAL =   1; EXPRESSED IN BONE MARROW, SIGNAL = 0.93; EXPRESSED IN PLACENTA, SIGNAL = 1.1; NT HIT: X17550.1, EVALUE 3.60e-01; SWISSPROT HIT: P15067, EVALUE 6.80e+00
ggaatactagagattctggtccaactgtggttcgagtggctgcaaggaaagcattttcaaccagcagcggaggctgcagtcattcacgagcatcaggaaatcaggggagcctcggagaggctgtgggtgatggatgggaacaagttgaaagaatag

SEQ ID NO: 29136 - DNA, 216 bp, Homo sapiens
  MAP TO AC013612.3; EXPRESSED IN PLACENTA, SIGNAL = 0.52; EXPRESSED IN ADULT LIVER, SIGNAL = 0.67; EXPRESSED IN FETAL LIVER, SIGNAL = 0.72; EXPRESSED IN BRAIN, SIGNAL = 0.93; EXPRESSED IN BONE MARROW, SIGNAL = 0.7; EST_HUMAN HIT: BE772967.1, EVALUE 1.00e-113
ctgcacccaagcaatcagcatcacctgcacccagtcagccagcatcacctgcacccaatcagccagcatcacccacacccaatcagccagcatcatctgcacccaatcagccagcatcacctgcacccaatcaatcagcatcacttgcacccaatcagccagcatcatctgcacccaatcagccagcatcacccgcacccaatcagccagcatcac

SEQ ID NO: 29137 - DNA, 174 bp, Homo sapiens
  MAP TO AP001432.1; EXPRESSED IN PLACENTA, SIGNAL = 0.59; EXPRESSED IN BRAIN, SIGNAL = 1.3; EXPRESSED IN BONE MARROW, SIGNAL = 0.57; EXPRESSED IN FETAL LIVER, SIGNAL = 0.71; EST_HUMAN HIT: AI350770.1, EVALUE 4.00e-79; NT HIT: gi10835036, EVALUE 3.00e-79; SWISSPROT HIT: P53804, EVALUE 2.00e-23
ggggaaatttcacggattgaaaaggagcaccaagtattacaagaccaacttcaagaagtgtatgaaaattatgagcagataaaacttaagggcttagaagagaccagggacctggaagagaagttgaaaaggcacttagaagaaaacaaggtaatcctgtctgaaacctgtctt

SEQ ID NO: 29138 - DNA, 173 bp, Homo sapiens
  MAP TO AF241729.1; EXPRESSED IN PLACENTA, SIGNAL = 0.64; EXPRESSED IN FETAL LIVER, SIGNAL = 0.94; EXPRESSED IN BRAIN, SIGNAL = 0.74; EXPRESSED IN BONE MARROW, SIGNAL = 0.87; NT HIT: gi11497503, EVALUE 6.20e+00; SWISSPROT HIT: Q63416, EVALUE 3.90e+00; EST_HUMAN HIT: AU130007.1, EVALUE 1.50e-01
ctcttggtgatttagcatgacaagacctagttgttctgctgggcctgggtatgaaatctgtccatgttcagagtttctaatatttttcattctattttcattttcattgcagggaaggacattgataatgctttctagccatgtgtgaagttttgctgcaaagaggtaaaaag

SEQ ID NO: 29139 - DNA, 79 bp, Homo sapiens
  MAP TO AP001413.1; EXPRESSED IN LUNG, SIGNAL = 0.91; EXPRESSED IN ADULT LIVER, SIGNAL = 0.85; EXPRESSED IN BONE MARROW, SIGNAL = 0.95; EXPRESSED IN PLACENTA, SIGNAL = 0.78; EXPRESSED IN FETAL LIVER, SIGNAL =   1; EXPRESSED IN BRAIN, SIGNAL = 0.83; SWISSPROT HIT: P08547, EVALUE 4.40e-02; EST_HUMAN HIT: BE065102.1, EVALUE 4.00e-03; NT HIT: D90901.1, EVALUE 3.00e-03
cagatcttgtatatctttattgattttctctccacttgttctatcaaatattgagagacggatattgaaatctcttaat

SEQ ID NO: 29140 - DNA, 112 bp, Homo sapiens
  MAP TO AL157392.2; EXPRESSED IN FETAL LIVER, SIGNAL = 0.66; EXPRESSED IN ADULT LIVER, SIGNAL = 0.69; EXPRESSED IN BRAIN, SIGNAL = 0.66; EXPRESSED IN PLACENTA, SIGNAL = 0.67; EXPRESSED IN BONE MARROW, SIGNAL = 0.62; SWISSPROT HIT: Q33568, EVALUE 7.10e+00; EST_HUMAN HIT: AI613037.1, EVALUE 4.00e-53; NT HIT: AL163278.2, EVALUE 6.20e-02
atgggtttgatcaaggggccctgcatttccattttgcactgggccctgctcattgtggacttgatcctggccttaggtcctggcatgtactggtgctggcaggctctgtggg

SEQ ID NO: 29141 - DNA, 86 bp, Homo sapiens
  MAP TO AC010397.3; EXPRESSED IN PLACENTA, SIGNAL = 0.56; EXPRESSED IN FETAL LIVER, SIGNAL = 0.74; EXPRESSED IN BONE MARROW, SIGNAL = 0.72; EXPRESSED IN ADULT LIVER, SIGNAL = 0.62; EXPRESSED IN BRAIN, SIGNAL = 0.52; EST_HUMAN HIT: BE887580.1, EVALUE 3.00e-41; NT HIT: gi11417118, EVALUE 2.00e-41
gagagaagtatatagtattcttcaagctgaaggtattttacttcctcgttatgctattttgaaccgtgacccaaataatcccaaag

SEQ ID NO: 29142 - DNA, 326 bp, Homo sapiens
  MAP TO AC018529.4; EXPRESSED IN BRAIN, SIGNAL = 0.6; EXPRESSED IN BONE MARROW, SIGNAL = 0.65; EXPRESSED IN PLACENTA, SIGNAL = 0.47; EXPRESSED IN ADULT LIVER, SIGNAL = 0.58; EXPRESSED IN FETAL LIVER, SIGNAL = 0.5; SWISSPROT HIT: P18715, EVALUE 2.00e-04
ggacattgtcggagacacatgcaaatgtctctgctggcagccaggctccagagaccctgacctggtgcaggcaggtgccgctgcagcgggtcagttcagagatgcatgcaaatgtctctgctggcagccaggctccagagaccctgacctggtgcaggcaggtgctgctgcagcgggtcagtccagagacgcatgcaaatgtctctgctggcagccaggctccagagaccctgacctggtgcagccaggtgctgctgcagcgggtcaattcggagatgcatgcaagtgtctttactggcagccgggctccagagaccctgacctga

SEQ ID NO: 29143 - DNA, 150 bp, Homo sapiens
  MAP TO AC015493.4; EXPRESSED IN PLACENTA, SIGNAL = 0.57; EXPRESSED IN FETAL LIVER, SIGNAL = 0.59; EXPRESSED IN BONE MARROW, SIGNAL = 0.49; EXPRESSED IN ADULT LIVER, SIGNAL = 0.63; EXPRESSED IN BRAIN, SIGNAL = 0.51; SWISSPROT HIT: P17643, EVALUE 3.10e+00; NT HIT: AB017510.1, EVALUE 3.40e-01
atgaatgatgaggtggaaggtatgcagatcaacatgcagccttggaagccatgtgtcaaagatggcagagccaggagatggaaccagttggaaaagcactatgtgccaatcaggaacacttgctttggactttataggagcaagttcatg

SEQ ID NO: 29144 - DNA, 133 bp, Homo sapiens
  MAP TO AC019159.3; EXPRESSED IN PLACENTA, SIGNAL = 0.99; EXPRESSED IN FETAL LIVER, SIGNAL = 1.1; EXPRESSED IN BONE MARROW, SIGNAL = 0.89; EXPRESSED IN LUNG, SIGNAL = 1.1; EXPRESSED IN ADULT LIVER, SIGNAL = 0.98; EXPRESSED IN BRAIN, SIGNAL = 0.88; NT HIT: AJ276505.1, EVALUE 3.00e-01; EST_HUMAN HIT: BE142305.1, EVALUE 1.10e-01
atgatggcatttgagcagaggctcagagacttggtgttgaggaggacttcgacaaagtgtgccgtggagaaagaatttgtgcaggtaaagatcacaaagaaaaggagatctgattttcaccgcagtcgtcttt

SEQ ID NO: 29145 - DNA, 306 bp, Homo sapiens
  MAP TO AL121944.10; EXPRESSED IN LUNG, SIGNAL = 1.2; EXPRESSED IN FETAL LIVER, SIGNAL =   1; EXPRESSED IN PLACENTA, SIGNAL = 1.2; EXPRESSED IN ADULT LIVER, SIGNAL = 1.2; EXPRESSED IN BRAIN, SIGNAL = 0.96; EXPRESSED IN BONE MARROW, SIGNAL = 1.4; NT HIT: gi11464994, EVALUE 1.90e-01; EST_HUMAN HIT: H61851.1, EVALUE 2.80e-01; SWISSPROT HIT: P34982, EVALUE 5.00e-12
atcttccacatcgtggcagcttcatagtcacaggagacataactagagaactgaggagtccaacacccccgggccacagacaccaacttccagcacagctgagggtgcataatgacagaatagtgaaggggcttgcagattgcaatgaagcggtcataggccacggctgccaagagaatacactcttgccacccaggcccaggaacatgaagagctggatggcacagcccgtgtggctgatagtcttgcctgggctgcctagattgaaaagcagctgggggatagaactggtggtgaagcagagat

SEQ ID NO: 29146 - DNA, 153 bp, Homo sapiens
  MAP TO AC015805.3; EXPRESSED IN ADULT LIVER, SIGNAL = 0.63; EXPRESSED IN BRAIN, SIGNAL = 0.66; EXPRESSED IN PLACENTA, SIGNAL = 0.57; EXPRESSED IN FETAL LIVER, SIGNAL = 0.59; EXPRESSED IN BONE MARROW, SIGNAL = 0.72; EST_HUMAN HIT: AA488202.1, EVALUE 3.30e-02; SWISSPROT HIT: Q27889, EVALUE 1.00e+00; NT HIT: M32070.1, EVALUE 1.40e+00
gtcctaccgcgagggtatccgctgcaggcagcgaggccaaaacacgcggagggtcaactactgctaacaaccgacgcagccagagctttaacaactatgataaatccaaaccagtcacctccccacccccaccgccaagcagccacgagaaag

SEQ ID NO: 29147 - DNA, 138 bp, Homo sapiens
  MAP TO AC015474.3; EXPRESSED IN LUNG, SIGNAL = 1.2; EXPRESSED IN FETAL LIVER, SIGNAL = 0.78; EXPRESSED IN BRAIN, SIGNAL = 0.49; EXPRESSED IN ADULT LIVER, SIGNAL = 0.62; EXPRESSED IN PLACENTA, SIGNAL = 0.76; EXPRESSED IN BONE MARROW, SIGNAL = 0.63; EST_HUMAN HIT: T77153.1, EVALUE 1.00e-04; SWISSPROT HIT: P08547, EVALUE 3.10e-02; NT HIT: M90543.1, EVALUE 3.10e-01
atgacggagctgaaaggagaagttgtcaaattcaccattactgttgaatacttcattcctctctcagcaattaatagaacaactaggcagaaaattagcaagaacatagaaaaactcaacatgattgctgacagaagc

SEQ ID NO: 29148 - DNA, 129 bp, Homo sapiens
  MAP TO AC009874.5; EXPRESSED IN PLACENTA, SIGNAL = 0.64; EXPRESSED IN ADULT LIVER, SIGNAL = 0.57; EXPRESSED IN FETAL LIVER, SIGNAL = 0.74; EXPRESSED IN BRAIN, SIGNAL = 0.84; EXPRESSED IN BONE MARROW, SIGNAL = 0.7; SWISSPROT HIT: P28677, EVALUE 3.60e-01; NT HIT: AF305072.1, EVALUE 4.00e-28; EST_HUMAN HIT: AA018828.1, EVALUE 1.00e-66
aaaatggacaaaaataaagatggggttgttaccatagatgagttcattgaaagctgccaaaaagtaagtaatgaaagtgtaataactatcaattcagctatcataacagctaaactgagtattagcagc

SEQ ID NO: 29149 - DNA, 146 bp, Homo sapiens
  MAP TO AC016706.2; EXPRESSED IN ADULT LIVER, SIGNAL = 1.2; EXPRESSED IN LUNG, SIGNAL = 1.1; EXPRESSED IN BRAIN, SIGNAL = 0.83; EXPRESSED IN BONE MARROW, SIGNAL = 0.95; EXPRESSED IN PLACENTA, SIGNAL =   1; EXPRESSED IN FETAL LIVER, SIGNAL = 0.9; SWISSPROT HIT: P09241, EVALUE 9.00e+00
atggctcccacttcattgacttcctgcagcttggcaaaagtgatccctgaaagcctgcttacctcttcaacttttgataaaactagaatacatccttctgagctggcatgattacttactttttgtttcttcacagcaggtttcat

SEQ ID NO: 29150 - DNA, 125 bp, Homo sapiens
  MAP TO AC007687.16; EXPRESSED IN BONE MARROW, SIGNAL = 0.57; EXPRESSED IN ADULT LIVER, SIGNAL = 0.73; EXPRESSED IN BRAIN, SIGNAL = 0.79; EXPRESSED IN PLACENTA, SIGNAL = 0.74; EXPRESSED IN FETAL LIVER, SIGNAL = 0.6; NT HIT: gi4507848, EVALUE 2.00e-36; SWISSPROT HIT: Q92995, EVALUE 2.00e-18; EST_HUMAN HIT: AW958624.1, EVALUE 3.00e-36
ggtaactgcatcaggtaatccaccctctccgtgtagcggactttccgggtctgacagcactgaatgcgttcttccaccaaaaaacgaaaaacatcgcttgggttttctgagccgatgcggttcct

SEQ ID NO: 29151 - DNA, 165 bp, Homo sapiens
  MAP TO AL133412.4; EXPRESSED IN PLACENTA, SIGNAL = 0.98; EXPRESSED IN ADULT LIVER, SIGNAL = 0.89; EXPRESSED IN BRAIN, SIGNAL = 0.99; EXPRESSED IN BONE MARROW, SIGNAL = 1.3; EXPRESSED IN LUNG, SIGNAL = 0.91; EXPRESSED IN FETAL LIVER, SIGNAL = 1.5; SWISSPROT HIT: Q13523, EVALUE 4.00e-11; NT HIT: AB011108.1, EVALUE 2.00e-61; EST_HUMAN HIT: BE796197.1, EVALUE 3.00e-61
ttaagatgacatggacatattgctatcttcagcaagatatttatatttctggacaattgcctgcctttggattcttctctgttctattagggcttcttcatcttcttcctccacatcaaaatcttcaagcttatcatcagacaaagattcctgctcaattttcat

SEQ ID NO: 29152 - DNA, 137 bp, Homo sapiens
  MAP TO AC022204.3; EXPRESSED IN PLACENTA, SIGNAL = 1.3; EXPRESSED IN ADULT LIVER, SIGNAL = 1.2; EXPRESSED IN FETAL LIVER, SIGNAL = 1.1; EXPRESSED IN BRAIN, SIGNAL = 1.1; EXPRESSED IN BONE MARROW, SIGNAL = 1.2; EXPRESSED IN LUNG, SIGNAL = 1.1; NT HIT: AJ229042.1, EVALUE 3.00e-10; EST_HUMAN HIT: AW129165.1, EVALUE 4.00e-17; SWISSPROT HIT: O83266, EVALUE 6.90e+00
gatgactggtaaagtattgtttctggatgtgtctgtgacaatgttgacagaggagattgatattttcatcagtgaattgggagaggaagacccatcctcaatgagggtgggcaccatccaatctgcagccagcatgg

SEQ ID NO: 29153 - DNA, 101 bp, Homo sapiens
  MAP TO AC022758.3; EXPRESSED IN ADULT LIVER, SIGNAL = 0.95; EXPRESSED IN BRAIN, SIGNAL = 0.81; EXPRESSED IN LUNG, SIGNAL = 0.92; EXPRESSED IN PLACENTA, SIGNAL = 1.1; EXPRESSED IN FETAL LIVER, SIGNAL = 0.71; EXPRESSED IN BONE MARROW, SIGNAL = 0.78; NT HIT: gi7657428, EVALUE 2.20e-01; SWISSPROT HIT: P53956, EVALUE 7.20e+00
atgggtacgacggcaaaatgtagatccctaatgcactctcgaaatgttcagaatgattcatttcagtactttagtttactctttatacctgaagaattcat

SEQ ID NO: 29154 - DNA, 215 bp, Homo sapiens
  MAP TO AC013771.3; EXPRESSED IN PLACENTA, SIGNAL = 0.81; EXPRESSED IN ADULT LIVER, SIGNAL = 0.77; EXPRESSED IN BRAIN, SIGNAL = 0.62; EXPRESSED IN FETAL LIVER, SIGNAL = 0.6; EXPRESSED IN BONE MARROW, SIGNAL = 0.82; NT HIT: X03810.1, EVALUE 1.30e-01; EST_HUMAN HIT: AV732190.1, EVALUE 1.00e-05; SWISSPROT HIT: P31707, EVALUE 5.40e-01
gcctagggtgggagaagagctactacagctgtggtttctccagggtaacaagacctgcagccagggccagctcggtgaactggaactcatctgggtatcattgctgggtgttccaactgactcccttgagatcgtggtgcagcagggccctctctactccatgctcaggaagatctccatgcattttcagcagctgctcacctgggtcaacagcc

SEQ ID NO: 29155 - DNA, 181 bp, Homo sapiens
  MAP TO AC013626.3; EXPRESSED IN ADULT LIVER, SIGNAL = 1.1; EXPRESSED IN BONE MARROW, SIGNAL = 1.2; EXPRESSED IN BRAIN, SIGNAL = 1.1; EXPRESSED IN LUNG, SIGNAL = 1.2; EXPRESSED IN PLACENTA, SIGNAL = 1.3; EXPRESSED IN FETAL LIVER, SIGNAL = 1.2; SWISSPROT HIT: P36607, EVALUE 1.00e-08; NT HIT: gi4507070, EVALUE 9.00e-98; EST_HUMAN HIT: H04909.1, EVALUE 1.00e-97
agcctctggatttgtgtttactcgtttggatggttccatggcccaaaagaaaagagttgaatcaattcagtgttttcaaaacactgaagcaggatctccaactataatgcttctgtccttaaaagcaggtggagttggtttgaatctgtctgcagcttctcgagtgtttttaatggatcca

SEQ ID NO: 29156 - DNA, 148 bp, Homo sapiens
  MAP TO AC023134.3; EXPRESSED IN ADULT LIVER, SIGNAL = 0.71; EXPRESSED IN BRAIN, SIGNAL = 0.6; EXPRESSED IN PLACENTA, SIGNAL = 0.61; EXPRESSED IN FETAL LIVER, SIGNAL = 0.61; EXPRESSED IN BONE MARROW, SIGNAL = 0.64; SWISSPROT HIT: P27692, EVALUE 1.80e+00; NT HIT: gi11417251, EVALUE 4.00e-78; EST_HUMAN HIT: BE748849.1, EVALUE 5.00e-78
ctgctgtaagtaaagatgattccattatttcaagtcttgatgtcactgatattgcaccaagtagaaaaaggagacagcgaatgcaaagaaatcttgggacagaacctaaaatggctcctcaggagaatcagcttcaagaaaaggaaaa

SEQ ID NO: 29157 - DNA, 148 bp, Homo sapiens
  MAP TO AC013591.3; EXPRESSED IN ADULT LIVER, SIGNAL = 0.69; EXPRESSED IN BONE MARROW, SIGNAL = 0.62; EXPRESSED IN PLACENTA, SIGNAL = 0.58; EXPRESSED IN FETAL LIVER, SIGNAL = 0.6; EXPRESSED IN BRAIN, SIGNAL = 0.68; SWISSPROT HIT: Q63186, EVALUE 4.60e-01; NT HIT: AJ010316.1, EVALUE 8.50e-02; EST_HUMAN HIT: N83765.1, EVALUE 5.00e-04
caaagaggaggaagacaaggtggaaacccaggaggccttggggcctgatgtcagaacaggctcgtggtcacctccacccatgcaatgtccaaaggaagttgcacagtcagtcgcagggtcaaaggatgtggaccaacacacagaggag

SEQ ID NO: 29158 - DNA, 234 bp, Homo sapiens
  MAP TO AC019233.3; EXPRESSED IN PLACENTA, SIGNAL = 1.1; EXPRESSED IN FETAL LIVER, SIGNAL = 1.1; EXPRESSED IN BRAIN, SIGNAL = 1.1; EXPRESSED IN LUNG, SIGNAL = 1.1; EXPRESSED IN ADULT LIVER, SIGNAL = 1.5; EXPRESSED IN BONE MARROW, SIGNAL = 1.2; SWISSPROT HIT: P21358, EVALUE 1.90e+00; NT HIT: AB038782.1, EVALUE 5.60e-01; EST_HUMAN HIT: AA248559.1, EVALUE 8.30e-01
ctccaagcccctgaaatgaaacctcatccaaagctttgtcattttcttgagagacaaagacgcagccttctgagaaatcaactgtaaacagttgatcaaattattgctaccttgtaatactacatcatgattcatgatcttagggcttatgttttgaagataacatctgaactgatgtgtcagcccaaattcataaaatccagaagaaaaaacataatgtgtaccatctacttc

SEQ ID NO: 29159 - DNA, 391 bp, Homo sapiens
  MAP TO AL121914.16; EXPRESSED IN BONE MARROW, SIGNAL = 0.86; EXPRESSED IN FETAL LIVER, SIGNAL = 0.98; EXPRESSED IN PLACENTA, SIGNAL = 0.49; EXPRESSED IN ADULT LIVER, SIGNAL = 0.72; EXPRESSED IN BRAIN, SIGNAL = 0.88; SWISSPROT HIT: Q05048, EVALUE 4.00e-74; NT HIT: gi11420997, EVALUE 0.00e+00; EST_HUMAN HIT: BF034377.1, EVALUE 0.00e+00
ccgtgtatctgaccagtgttcgtcccgttgatatttcccaaagtttagctacagagtcttttccacttgagagaatgtatttagaatttttggaaaaaatggcagaacaaacttcagcaccgtcatgtgctttctcaaaagttgtgatgcatcgatttgaaacaccatcccataatttgatgcagccgtccttgcttccagttacgtacatattggcactagaattgtaattaacggaacatatagcatcggtgtgttgatcttgaggattgcaagagacaaaacattgaaaggtgttgatatcataaaggcgaagagtaggatgctgagttccgacaagtataaagtctccagaaggatgaaaagagatggaacgtaacatttcagcttc

SEQ ID NO: 29160 - DNA, 104 bp, Homo sapiens
  MAP TO AC018389.3; EXPRESSED IN PLACENTA, SIGNAL = 1.2; EXPRESSED IN FETAL LIVER, SIGNAL = 0.99; EXPRESSED IN BONE MARROW, SIGNAL = 0.98; EXPRESSED IN LUNG, SIGNAL = 1.1; EXPRESSED IN ADULT LIVER, SIGNAL = 1.3; EXPRESSED IN BRAIN, SIGNAL = 0.81; EST_HUMAN HIT: BE828461.1, EVALUE 3.30e-01
gattttgccatgttggagagcagcctgctggaagcctacacttcttttagaagcccacactgtcatttctaccacaacattggaacagatctttatttcagcag

SEQ ID NO: 29161 - DNA, 145 bp, Homo sapiens
  MAP TO AC016576.4; EXPRESSED IN PLACENTA, SIGNAL = 0.61; EXPRESSED IN FETAL LIVER, SIGNAL = 0.5; EXPRESSED IN ADULT LIVER, SIGNAL = 0.67; EXPRESSED IN BRAIN, SIGNAL = 0.55; EXPRESSED IN BONE MARROW, SIGNAL = 0.55; SWISSPROT HIT: Q39575, EVALUE 1.00e-06; EST_HUMAN HIT: R52637.1, EVALUE 1.20e-01
gattcagcagcccatgcagcttttccagcagcacccagctgtgctaagcacggcagaagccaaacctataattcgcagttacaacaggatggccaaggtcctcctggagtttgaggtcctcttccacagggcgtggcttcggcaa

SEQ ID NO: 29162 - DNA, 149 bp, Homo sapiens
  MAP TO AP001439.1; EXPRESSED IN FETAL LIVER, SIGNAL = 0.61; EXPRESSED IN BRAIN, SIGNAL = 0.58; EXPRESSED IN PLACENTA, SIGNAL = 0.66; EXPRESSED IN BONE MARROW, SIGNAL = 0.66; EST_HUMAN HIT: BF218033.1, EVALUE 5.00e-01; NT HIT: D87675.1, EVALUE 9.00e-79
aggtcatgaagggcatcacaattcttcattgctctctgggatcactcactgtgagggaggtcatcagctgccatgttctgagacatttggtgctaaaaccaggaaagtttttggcaaaatacactggatcaccctacctgacaaaccaa

SEQ ID NO: 29163 - DNA, 228 bp, Homo sapiens
  MAP TO AC013497.4; EXPRESSED IN LUNG, SIGNAL = 1.1; EXPRESSED IN FETAL LIVER, SIGNAL = 1.1; EXPRESSED IN BRAIN, SIGNAL = 0.96; EXPRESSED IN ADULT LIVER, SIGNAL = 1.2; EXPRESSED IN PLACENTA, SIGNAL = 1.1; EXPRESSED IN BONE MARROW, SIGNAL = 0.93; NT HIT: D29810.1, EVALUE 1.00e-125; EST_HUMAN HIT: AI565996.1, EVALUE 1.00e-125; SWISSPROT HIT: P98063, EVALUE 1.00e-09
gtgatggatgtggacacactgtactaggccctgagagtggaacccttacatccataaactacccacagacctatcccaacagcactgtttgtgaatgggagatccgtgtaaagatgggagagagagttcgcatcaaatttggtgactttgacattgaagattctgattcttgtcactttaattacttgagaatttataatggaattggagtcagcagaactgaaatag

SEQ ID NO: 29164 - DNA, 499 bp, Homo sapiens
  MAP TO AC010876.2; EXPRESSED IN PLACENTA, SIGNAL = 0.58; EXPRESSED IN FETAL LIVER, SIGNAL = 0.53; EXPRESSED IN BONE MARROW, SIGNAL = 0.53; EXPRESSED IN BRAIN, SIGNAL = 0.5; EST_HUMAN HIT: AI906351.1, EVALUE 0.00e+00; SWISSPROT HIT: P35446, EVALUE 8.10e-01; NT HIT: gi11545921, EVALUE 0.00e+00
tgcaaaatctgcctaaaaggctagctccatctgaacagacacctacccggtttctgtcttcaattgtcaacagttcctcctccatgcacttatccaagacgtctctaactagaagcttgtccaccagagtgggctgaaggaggttcagcagttggagatattcatcatgagcgttctcaaacgatggagagggcaagtccgtgagctcagggttcatgtagcgggcggccagagggctgccggttctccggagggcctccacgaattcccgagtccaaccaaggtgccagactcccttctccaaggtgctcagcagcagttcaactgcctgcatgttcccggaggtggcgactgtcctctgaatctgctccttcacctctgcaggcagaaaggtcaggtagtccagcacaggctccacctggatgtacattttcaccctggccctgaagcacgagatgagatagcggaaattctcgtctgtggaatacccattcgacat

SEQ ID NO: 29165 - DNA, 391 bp, Homo sapiens
  MAP TO AC010492.4; EXPRESSED IN PLACENTA, SIGNAL = 0.77; EXPRESSED IN ADULT LIVER, SIGNAL = 0.79; EXPRESSED IN FETAL LIVER, SIGNAL = 1.5; EXPRESSED IN BONE MARROW, SIGNAL = 3.7; EXPRESSED IN BRAIN, SIGNAL = 0.81; EXPRESSED IN LUNG, SIGNAL =   1; EST_HUMAN HIT: T39575.1, EVALUE 3.00e-94; NT HIT: gi5803069, EVALUE 0.00e+00; SWISSPROT HIT: P43630, EVALUE 4.00e-13
gactgatccctgacatacccgccctctcggtgcagccgggccccaaggtggcctcaggagagaacgtgaccctgctgtgtcagtcatggcatcagatagacactttctttttgaccaaggagggggcagcccatcccccgctgtgtctaaagtcaaagtaccagtcttatagacaccaggctgaattctccatgagtcctgtgacctcagcccagggtggaacctaccgatgctacagcgcaatcaggtcctacccctacctgctgtccagccctagttacccccaggagctcgtggtctcaggtgagggccctgaccctgtcctgtccaagctcaaaggctcagctcaggccctgcccccaggagagctctgggctgggatggagtcgcg

SEQ ID NO: 29166 - DNA, 197 bp, Homo sapiens
  MAP TO AC022045.2; EXPRESSED IN ADULT LIVER, SIGNAL = 0.88; EXPRESSED IN LUNG, SIGNAL = 1.1; EXPRESSED IN BRAIN, SIGNAL = 0.95; EXPRESSED IN BONE MARROW, SIGNAL =   1; EXPRESSED IN PLACENTA, SIGNAL = 0.99; EXPRESSED IN FETAL LIVER, SIGNAL = 0.88; NT HIT: L04685.1, EVALUE 1.00e-107; EST_HUMAN HIT: AU122469.1, EVALUE 1.00e-107; SWISSPROT HIT: P49407, EVALUE 2.00e-33
ctcaaaggtgaaagggtaagcgtgctcgcccagcttcttgatgaggcgttcctgcagccgcgtcaggggcttcttgtcctcgggggccggtgggaacgactgtacgttggccacaaacaggtccttgcgaaaggtcaggcccaggacatccaggtcctcccggccatagcggaaggcgcaggtcagcgtcacataga

SEQ ID NO: 29167 - DNA, 118 bp, Homo sapiens
  MAP TO AC007957.34; EXPRESSED IN PLACENTA, SIGNAL = 0.85; EXPRESSED IN ADULT LIVER, SIGNAL = 0.63; EXPRESSED IN FETAL LIVER, SIGNAL = 0.9; EXPRESSED IN BRAIN, SIGNAL = 0.64; EXPRESSED IN BONE MARROW, SIGNAL = 0.91; EST_HUMAN HIT: R81928.1, EVALUE 1.50e+00; SWISSPROT HIT: Q61169, EVALUE 9.30e+00
ggtgatgggatgtgctgagagtcatcagtgggatgtgcataagagggagtcaaagatgtctgagcagagagaaggacctcgctggcatctacagtgaagggagggacctcgctggcat

SEQ ID NO: 29168 - DNA, 270 bp, Homo sapiens
  MAP TO AL117334.29; EXPRESSED IN BONE MARROW, SIGNAL = 1.1; EXPRESSED IN LUNG, SIGNAL = 0.95; EXPRESSED IN PLACENTA, SIGNAL = 0.84; EXPRESSED IN ADULT LIVER, SIGNAL = 0.98; EXPRESSED IN FETAL LIVER, SIGNAL = 1.7; EXPRESSED IN BRAIN, SIGNAL = 7.6; EST_HUMAN HIT: AU127720.1, EVALUE 1.00e-100; NT HIT: gi11420806, EVALUE 8.00e-90; SWISSPROT HIT: P53152, EVALUE 3.00e-17
aggtccatattctattttaaggctgtatattcggttttcataaattgttcctggaggcccaattatcatccctgtccatcttgtaagtgtcatgtcttcgtaatcttctagaccccagctaactgtgtcatctcctactcctttctggctttcttcgagttcttccaacagttggaaattgcaagggacttttactactgagcctgtggtggctgccatcttgcactgctgtcgcttgaagcggtttattaataattattgtttacaatg

SEQ ID NO: 29169 - DNA, 96 bp, Homo sapiens
  MAP TO AP000432.4; EXPRESSED IN LUNG, SIGNAL = 1.1; EXPRESSED IN ADULT LIVER, SIGNAL = 0.98; EXPRESSED IN BRAIN, SIGNAL = 0.77; EXPRESSED IN PLACENTA, SIGNAL = 1.3; EXPRESSED IN FETAL LIVER, SIGNAL = 1.3; EXPRESSED IN BONE MARROW, SIGNAL = 0.76; NT HIT: gi11526136, EVALUE 2.00e-47; EST_HUMAN HIT: BE896159.1, EVALUE 3.00e-47; SWISSPROT HIT: Q14201, EVALUE 7.00e-13
tttggcaagcccaggtcactatacaagatgcagctgttttcacaggctttcaggacatcaggatcaactctctgaaatttattgacacgaatacat

SEQ ID NO: 29170 - DNA, 204 bp, Homo sapiens
  MAP TO AL137022.6; EXPRESSED IN ADULT LIVER, SIGNAL = 0.63; EXPRESSED IN BRAIN, SIGNAL = 0.5; EXPRESSED IN BONE MARROW, SIGNAL = 0.47; EXPRESSED IN PLACENTA, SIGNAL = 0.6; EXPRESSED IN FETAL LIVER, SIGNAL = 0.55; EST_HUMAN HIT: AA493751.1, EVALUE 1.80e-01; SWISSPROT HIT: P51354, EVALUE 3.80e+00
catttgaatgtgggcttgctgctattatcttttggcatagtccttgaaaatttgcacatcggtttaacagaccagcatttagaatgtatgcacatgcaccctggaacttatggaaaagaaaaaggatgcttagagctcttgattacttccattaatgatgagtttgacaacctgcatctgcaaaatcctcagatactttaccat

SEQ ID NO: 29171 - DNA, 93 bp, Homo sapiens
  MAP TO AC010229.4; EXPRESSED IN PLACENTA, SIGNAL = 0.57; EXPRESSED IN ADULT LIVER, SIGNAL = 0.57; EXPRESSED IN FETAL LIVER, SIGNAL = 0.45; EXPRESSED IN BRAIN, SIGNAL = 0.49; EXPRESSED IN BONE MARROW, SIGNAL = 0.5; NT HIT: AF039401.1, EVALUE 4.90e-02; EST_HUMAN HIT: BF241924.1, EVALUE 1.80e-02
ctggatattacgaggattggggacaacactttgtacttcctcagagttggcttcatgtgtgagctccagtcttgcacagaaactgcttcaaat

SEQ ID NO: 29172 - DNA, 105 bp, Homo sapiens
  MAP TO AC006054.2; EXPRESSED IN BONE MARROW, SIGNAL = 0.96; EXPRESSED IN PLACENTA, SIGNAL =   1; EXPRESSED IN ADULT LIVER, SIGNAL = 1.2; EXPRESSED IN BRAIN, SIGNAL = 0.96; EXPRESSED IN LUNG, SIGNAL = 1.1; EXPRESSED IN FETAL LIVER, SIGNAL = 1.1; NT HIT: AL161553.2, EVALUE 3.50e+00; SWISSPROT HIT: P29747, EVALUE 7.20e+00
aagaacaagctccaaagcaatgaaaggatcaatgaagaaactaaaaaggaaaattaaaaatttcttgaacaaacaaaaatggaaatgcaacataccggaatcaat

SEQ ID NO: 29173 - DNA, 83 bp, Homo sapiens
  MAP TO AL138796.2; EXPRESSED IN ADULT LIVER, SIGNAL = 0.55; EXPRESSED IN FETAL LIVER, SIGNAL = 0.56; EXPRESSED IN BRAIN, SIGNAL = 0.55; EXPRESSED IN BONE MARROW, SIGNAL = 1.3; EST_HUMAN HIT: AA984531.1, EVALUE 2.00e-39; SWISSPROT HIT: Q64733, EVALUE 5.60e+00
caattgacccagcaaatgaggacacaaacgtgttggagggtaaggtggtgagaggcgtgtttgggggtggtggtgatgagcaa

SEQ ID NO: 29174 - DNA, 125 bp, Homo sapiens
  MAP TO AL161722.2; EXPRESSED IN PLACENTA, SIGNAL = 0.87; EXPRESSED IN ADULT LIVER, SIGNAL = 0.57; EXPRESSED IN FETAL LIVER, SIGNAL = 0.49; EXPRESSED IN BRAIN, SIGNAL = 0.51; EXPRESSED IN BONE MARROW, SIGNAL = 0.54; EST_HUMAN HIT: R44993.1, EVALUE 1.00e-01; NT HIT: U43594.1, EVALUE 2.80e-01; SWISSPROT HIT: O67240, EVALUE 8.10e-01
ctaaggttcctgctttttgtggtctccattccctttaccaaacactggtttgaccacaagtatggaacgtgataggtcaatgggatctatgaagagccatggggctattgggaaaggtttgccac

SEQ ID NO: 29175 - DNA, 150 bp, Homo sapiens
  MAP TO AC009699.6; EXPRESSED IN BONE MARROW, SIGNAL = 0.43; EXPRESSED IN BRAIN, SIGNAL = 0.5; SWISSPROT HIT: P38500, EVALUE 2.30e+00; EST_HUMAN HIT: AW900024.1, EVALUE 2.00e+00; NT HIT: AF193857.1, EVALUE 3.40e-01
caattacacagaagaactgtcttggtattaagagcagatggaaccaccttctggggattctcatgaaaaatacaatgagaaagtcaattagcagcatcaccaacaatttacattgtatcccattttgtgaggctgctttcatgtcaattc

SEQ ID NO: 29176 - DNA, 102 bp, Homo sapiens; identical to SEQ ID NO: 28794
  MAP TO AC024972.2; EXPRESSED IN PLACENTA, SIGNAL = 0.68; EXPRESSED IN FETAL LIVER, SIGNAL = 0.52; EXPRESSED IN BONE MARROW, SIGNAL = 0.52; EXPRESSED IN ADULT LIVER, SIGNAL = 0.6; EXPRESSED IN BRAIN, SIGNAL = 0.66; EST_HUMAN HIT: AI791154.1, EVALUE 9.00e-51; SWISSPROT HIT: Q04609, EVALUE 7.00e-09; NT HIT: AJ012370.1, EVALUE 9.00e-44

SEQ ID NO: 29177 - DNA, 358 bp, Homo sapiens
  MAP TO AC005481.3; EXPRESSED IN PLACENTA, SIGNAL = 0.47; EXPRESSED IN BONE MARROW, SIGNAL = 0.59; EXPRESSED IN BRAIN, SIGNAL = 0.45; SWISSPROT HIT: P36170, EVALUE 8.00e-06; NT HIT: AF210629.1, EVALUE 8.80e-01; EST_HUMAN HIT: AA076907.1, EVALUE 4.00e-13
acttgcacactcggcccgtgggacactgatctcaggtgggtgcaacgagtacacagcctggcttgcacgctcagcctgtgggacactgatctctggtgggtgcaatgagtacacagcctggcttgcacgctcagcctgtgggacactgatctctggtgtgtgcaatgagtacacagcctggcttgcacgctcagcctgtgggacactgatctctggtgtgtgcaatgagtacacagcctggcttgcacactcggcccgtgggacactgatctcaggtgggtgcaacgagtacacagcctggcttgcacactcggcccgtgggacactgatctcaggtgggtgcaacgagtacacagcc

SEQ ID NO: 29178 - DNA, 102 bp, Homo sapiens
  MAP TO AL139824.7; EXPRESSED IN BONE MARROW, SIGNAL = 0.51; EXPRESSED IN ADULT LIVER, SIGNAL = 0.61; EXPRESSED IN PLACENTA, SIGNAL = 0.54; EXPRESSED IN FETAL LIVER, SIGNAL = 0.56; EXPRESSED IN BRAIN, SIGNAL = 0.5; NT HIT: AB018543.1, EVALUE 2.20e-01; EST_HUMAN HIT: AA984288.1, EVALUE 2.10e-02
tgccaggcccaatatgtactcagaaattgttatgttttatttttattgttattaccagtacatcaattaccacaactactaccactacatccacatctttgg

SEQ ID NO: 29179 - DNA, 231 bp, Homo sapiens
  MAP TO AL109930.5; EXPRESSED IN PLACENTA, SIGNAL = 0.66; EXPRESSED IN FETAL LIVER, SIGNAL = 0.6; EXPRESSED IN BONE MARROW, SIGNAL = 0.59; EXPRESSED IN ADULT LIVER, SIGNAL = 0.7; EXPRESSED IN BRAIN, SIGNAL = 0.57; EST_HUMAN HIT: N42536.1, EVALUE 2.10e-01; NT HIT: U39679.1, EVALUE 8.60e+00; SWISSPROT HIT: Q02173, EVALUE 2.40e+00
ctgccattccgcttgatatgagtgaggagcgatgatgccaggttgcagccatttcttcaatttgtcaacatcggggttcagaaggacagccgagagtacatgggggtgtcctagcactcggttttgcccgatgttagcaaagcgttgaggaaaattttgtgggaattgctgggagtgagggagaaagccatgaaattctctatgataatccagaaacggattgagacccat

SEQ ID NO: 29180 - DNA, 125 bp, Homo sapiens
  MAP TO AP001427.1; EXPRESSED IN ADULT LIVER, SIGNAL = 0.77; EXPRESSED IN BRAIN, SIGNAL = 0.75; EXPRESSED IN PLACENTA, SIGNAL = 0.55; EXPRESSED IN FETAL LIVER, SIGNAL = 0.71; EXPRESSED IN BONE MARROW, SIGNAL = 0.61; SWISSPROT HIT: O15016, EVALUE 4.10e+00; EST_HUMAN HIT: W01955.1, EVALUE 1.00e-01
ctatgtgctccctcgaggtggccgcctgtgtccatgaaatgaatggatatgggggcactcaatgcagcagtgcaaagacgggctgaatctagacatgttcctttggcaccctctcaggagcataa

SEQ ID NO: 29181 - DNA, 177 bp, Homo sapiens
  MAP TO AC010829.5; EXPRESSED IN ADULT LIVER, SIGNAL = 0.84; EXPRESSED IN BONE MARROW, SIGNAL = 0.58; EXPRESSED IN PLACENTA, SIGNAL = 0.75; EXPRESSED IN FETAL LIVER, SIGNAL = 0.61; EXPRESSED IN BRAIN, SIGNAL = 0.67; SWISSPROT HIT: P29848, EVALUE 5.90e-01; EST_HUMAN HIT: AV759232.1, EVALUE 9.60e+00; NT HIT: AF160597.1, EVALUE 4.10e-01
ctggaacagccctgggtagtgacaaagtataggatgaccattggagaggtgctaagtgagcaggaggatgtcattggagatgtggggctcaaggaactgaaaggccaggccctggctggtgtcatgtcctggccacatgttaggaagccaggtcaaggaagcaggaatgaagaccca

SEQ ID NO: 29182 - DNA, 130 bp, Homo sapiens
  MAP TO AL133174.9; EXPRESSED IN PLACENTA, SIGNAL = 0.55; EXPRESSED IN BONE MARROW, SIGNAL = 1.1; EXPRESSED IN ADULT LIVER, SIGNAL = 0.69; EXPRESSED IN FETAL LIVER, SIGNAL = 1.2; EXPRESSED IN BRAIN, SIGNAL = 0.83; SWISSPROT HIT: P55060, EVALUE 2.00e-19; EST_HUMAN HIT: AV731333.1, EVALUE 2.00e-67; NT HIT: gi11422084, EVALUE 2.00e-67
ttggtaagtaatgcaattcaatttctggcttcagtttgtgagagacctcattataagaatctatttgaggaccagaacacgctgacaagtatctgtgaaaaggttattgtgcctaacatggaatttagag

SEQ ID NO: 29183 - DNA, 198 bp, Homo sapiens
  MAP TO AL121673.27; EXPRESSED IN ADULT LIVER, SIGNAL = 0.68; EXPRESSED IN PLACENTA, SIGNAL = 0.75; EXPRESSED IN FETAL LIVER, SIGNAL = 1.1; EXPRESSED IN BRAIN, SIGNAL = 0.68; EXPRESSED IN BONE MARROW, SIGNAL = 0.76; SWISSPROT HIT: Q03567, EVALUE 4.00e-06; NT HIT: AE004647.1, EVALUE 1.20e-01; EST_HUMAN HIT: BE867793.1, EVALUE 1.00e-105
gcccgagtgccaggcatggacggggacgctgctgctgggcacatgccttctgtactgcgcccgctccagcatgcccatctgcaccgtctccatgagccaggacttcggctggaacaagaaggaggccggcatcgtgctcagcagcttcttctggggctactgcctgacacaggttgtgggcggccacctcggggatcg

SEQ ID NO: 29184 - DNA, 341 bp, Homo sapiens
  MAP TO AC011599.8; EXPRESSED IN BONE MARROW, SIGNAL = 1.1; EXPRESSED IN PLACENTA, SIGNAL = 0.91; EXPRESSED IN ADULT LIVER, SIGNAL = 1.1; EXPRESSED IN FETAL LIVER, SIGNAL = 0.98; EXPRESSED IN BRAIN, SIGNAL = 0.94; EXPRESSED IN LUNG, SIGNAL = 0.91; EST_HUMAN HIT: N74635.1, EVALUE 1.00e-06; SWISSPROT HIT: Q00164, EVALUE 3.00e+00; NT HIT: gi11434451, EVALUE 2.00e-04
agctgaatacgccaaaggttggtaaactatggcctgagagccaagtccagcctgctgcctgtttttttaaaataaaggtttattggaacagagccacgctcatccacttatgtattgtcaatggcttcttccatgctatgatgatgaagttaaacagttacaacagacacatgacctgcaaaacatacaatattaatgcgcacatgcagcccttctctgaaataaatgaagctctcctgaggcagtcttacattggctccaactaccctggcaaaccccctgcgtgttcagccagacaccccatgcaagagcagaatccaaacatgggggaagacagtgac

SEQ ID NO: 29185 - DNA, 160 bp, Homo sapiens
  MAP TO AL135938.5; EXPRESSED IN ADULT LIVER, SIGNAL = 0.91; EXPRESSED IN BONE MARROW, SIGNAL =   1; EXPRESSED IN PLACENTA, SIGNAL = 0.84; EXPRESSED IN FETAL LIVER, SIGNAL = 1.3; EXPRESSED IN BRAIN, SIGNAL = 0.96; NT HIT: gi11421422, EVALUE 3.00e-85; SWISSPROT HIT: P08579, EVALUE 4.00e-25; EST_HUMAN HIT: AI358746.1, EVALUE 4.00e-85
gttccctggcttcaaggaagtacgtctggtaccagggaggcatgacattgcttttgttgaatttgaaaatgatgggcaggctggagctgccagggatgctttacagggatttaagatcacaccgtcccatgctatgaagatcacctatgccaagaaataa

SEQ ID NO: 29186 - DNA, 160 bp, Homo sapiens
  MAP TO AL121935.12; EXPRESSED IN ADULT LIVER, SIGNAL = 0.75; EXPRESSED IN PLACENTA, SIGNAL = 0.66; EXPRESSED IN FETAL LIVER, SIGNAL = 0.72; EXPRESSED IN BRAIN, SIGNAL = 0.6; EXPRESSED IN BONE MARROW, SIGNAL = 0.8; NT HIT: AF171074.1, EVALUE 5.70e+00; SWISSPROT HIT: P37398, EVALUE 1.00e+00; EST_HUMAN HIT: AW977384.1, EVALUE 3.00e-64
ttagctctttgttcccctgcctttctgctttgccttgtgcatgcagtgagttcccaacagccttaacattctcaacatcttcatcatccagatgctatgttgcatgtggtggttgaggttgtacacagcaagactccagatggagccatccgcatggtag

SEQ ID NO: 29187 - DNA, 293 bp, Homo sapiens
  MAP TO AC020760.3; EXPRESSED IN BONE MARROW, SIGNAL = 0.54; EXPRESSED IN PLACENTA, SIGNAL = 0.64; EXPRESSED IN BRAIN, SIGNAL = 1.4; EXPRESSED IN FETAL LIVER, SIGNAL = 0.65; SWISSPROT HIT: P29126, EVALUE 5.00e-04
atggaatggaatcaagtggaatggaatcgaatggaatgtaatcaaatggaatggaatggaatgcaatggaatggaatagaatggaatgcaatggaatggaacgtactggaatcgagtggaaaggaatcgaatggaatggaatcgaatggaatgtactcgaatggaatgtactcgaatggagtggactggcataaaatggaatcaatcggattggaatggaacaaaactggaatggaatggaagggaatgcaatggactcggatggaatggagtcgaaagaaatggaaccgaat

SEQ ID NO: 29188 - DNA, 138 bp, Homo sapiens
  MAP TO AC009943.4; EXPRESSED IN BONE MARROW, SIGNAL = 0.58; EXPRESSED IN LUNG, SIGNAL = 0.83; EXPRESSED IN BRAIN, SIGNAL = 0.55; EXPRESSED IN PLACENTA, SIGNAL = 0.63; EXPRESSED IN ADULT LIVER, SIGNAL = 0.65; EXPRESSED IN FETAL LIVER, SIGNAL = 0.56; SWISSPROT HIT: Q02817, EVALUE 3.10e-02; NT HIT: AF005273.1, EVALUE 3.00e-44
ataaaatacagatattcaatgcatcttcctcataccttcaagtagaaacatactttcatgtgaaactacaaatacaaattgttcctgtgatgcaattgtatgtttctatgccacccaaccaattcacagacactgtgg

SEQ ID NO: 29189 - DNA, 128 bp, Homo sapiens
  MAP TO AC013726.3; EXPRESSED IN ADULT LIVER, SIGNAL = 0.62; EXPRESSED IN BRAIN, SIGNAL = 0.62; EXPRESSED IN PLACENTA, SIGNAL = 0.59; EXPRESSED IN FETAL LIVER, SIGNAL = 0.59; EXPRESSED IN BONE MARROW, SIGNAL = 0.7; SWISSPROT HIT: Q19124, EVALUE 1.80e-02; EST_HUMAN HIT: BF036746.1, EVALUE 4.00e-66; NT HIT: AK024453.1, EVALUE 3.00e-66
ctgaatgtctgcttgatagcatttgttcggagatcaataacttttagcaagtcatcacgggagcagctcaggagctcagtcctttctgggtttaagtccagggcagtaatctttcccaacagctccat

SEQ ID NO: 29190 - DNA, 163 bp, Homo sapiens
  MAP TO AC010292.4; EXPRESSED IN BONE MARROW, SIGNAL = 0.97; EXPRESSED IN FETAL LIVER, SIGNAL = 0.99; EXPRESSED IN PLACENTA, SIGNAL = 0.71; EXPRESSED IN ADULT LIVER, SIGNAL = 0.98; EXPRESSED IN BRAIN, SIGNAL = 0.89; NT HIT: X06340.1, EVALUE 9.50e-02; SWISSPROT HIT: Q02759, EVALUE 3.00e+00; EST_HUMAN HIT: H50832.1, EVALUE 2.00e-03
ctgctctgagagaagtcagctgccatatcatgaactgccctacagtgagatccatgtggcagggaactgatgcctctggccaacagccatcgaggacctgaagcctgccaatggccacatgaatgagtctgaaagaccactgttgagcctgagatgactgcat

SEQ ID NO: 29191 - DNA, 488 bp, Homo sapiens
  MAP TO AL109752.13; EXPRESSED IN PLACENTA, SIGNAL = 0.54; EXPRESSED IN FETAL LIVER, SIGNAL = 0.68; EXPRESSED IN BRAIN, SIGNAL = 0.52; EXPRESSED IN BONE MARROW, SIGNAL = 0.55; EST_HUMAN HIT: AA909203.1, EVALUE 6.00e-16; NT HIT: AF198349.1, EVALUE 2.00e-73; SWISSPROT HIT: Q60698, EVALUE 1.00e-04
ctggcattggtgcaatcggtgaacaaagtttcgaagtctttcctggtgatgagtttgcagcggtttaccccgggctggatggcccccagcccgcggaggatccggacctgctcaacagtacacaccacgggggatatatccagtctcttcagcttggtgtacacagtgtgcaagcctcccaccaggtgcttgagaaaaagatcaaagacttgcggcaggcagatcagttcctggccgtccatcaggaacgaagccaccttcatcccgtgcatgtcgaccatgcggcactcgttggtgttggtgttgcccctgccgccgcctccggcactgttgctgtggttattaaccacgaaactattgatcatattaggagtaagacgagggggctctctgggagtcgagtacaggggttcggcccggaataagccccccgggacgccggcgccgctggaagttgcagagatcactggagatgcggagacagccat

SEQ ID NO: 29192 - DNA, 136 bp, Homo sapiens
  MAP TO AP000431.3; EXPRESSED IN PLACENTA, SIGNAL = 0.61; EXPRESSED IN ADULT LIVER, SIGNAL = 0.53; EXPRESSED IN BRAIN, SIGNAL = 0.57; EXPRESSED IN BONE MARROW, SIGNAL = 0.52; EXPRESSED IN FETAL LIVER, SIGNAL = 0.63; NT HIT: M18095.1, EVALUE 4.70e+00; SWISSPROT HIT: P11253, EVALUE 4.10e+00
gtggtatctccttggagacatggaggtaaggtctttgcttatgctcctgatgtacacagttctttgaataataaactatctggccctggtccattgagtttcattgtccactttccacggaataaccatgctttta

SEQ ID NO: 29193 - DNA, 75 bp, Homo sapiens
  MAP TO AC007164.3; EXPRESSED IN PLACENTA, SIGNAL =   1; EXPRESSED IN ADULT LIVER, SIGNAL = 0.59; EXPRESSED IN FETAL LIVER, SIGNAL = 0.93; EXPRESSED IN BRAIN, SIGNAL = 0.82; EXPRESSED IN BONE MARROW, SIGNAL = 0.89; NT HIT: AF063204.2, EVALUE 5.90e-01
cacaatacacttctctgaggaagtggcattcctgaaagttgaaggaagcggagagcctgtcaagggaggaggcag

SEQ ID NO: 29194 - DNA, 171 bp, Homo sapiens
  MAP TO AL137225.7; EXPRESSED IN BONE MARROW, SIGNAL = 0.69; EXPRESSED IN ADULT LIVER, SIGNAL = 6.7; EXPRESSED IN FETAL LIVER, SIGNAL = 0.66; EXPRESSED IN BRAIN, SIGNAL = 0.75; EXPRESSED IN PLACENTA, SIGNAL = 1.3; NT HIT: X60660.1, EVALUE 1.00e-25; EST_HUMAN HIT: BE259740.1, EVALUE 1.50e-01; SWISSPROT HIT: P36982, EVALUE 1.00e+00
gtgttccagcagtaccccgagtcctgcccacttatcatcaggatccaggtgctgaacccaccatctgtgatgctgcagaaggacaaagcgctggtgaaggtgttggccactgccgaggtcatggtctcccagcccaaagacctggagactaccatctgcctcattgacgtg

SEQ ID NO: 29195 - DNA, 208 bp, Homo sapiens
  MAP TO AC025119.2; EXPRESSED IN LUNG, SIGNAL = 1.4; EXPRESSED IN PLACENTA, SIGNAL = 1.4; EXPRESSED IN ADULT LIVER, SIGNAL = 1.2; EXPRESSED IN FETAL LIVER, SIGNAL = 6.1; EXPRESSED IN BRAIN, SIGNAL =   1; EXPRESSED IN BONE MARROW, SIGNAL = 1.2; EST_HUMAN HIT: AU133830.1, EVALUE 1.00e-113; SWISSPROT HIT: P00450, EVALUE 1.00e-37; NT HIT: M13536.1, EVALUE 1.00e-114
ggacttttaatgttgaatgccttacaactgatcattacacaggcggcatgaagcaaaaatatactgtgaaccaatgcaggcggcagtctgaggattccaccttctacctgggagagaggacatactatatcgcagcagtggaggtggaatgggattattccccacaaagggagtgggaaaaggagctgcatcatttacaagagcagaa

SEQ ID NO: 29196 - DNA, 368 bp, Homo sapiens
  MAP TO AF241728.1; EXPRESSED IN LUNG, SIGNAL = 1.1; EXPRESSED IN PLACENTA, SIGNAL = 0.95; EXPRESSED IN ADULT LIVER, SIGNAL = 1.1; EXPRESSED IN BRAIN, SIGNAL = 0.94; EXPRESSED IN FETAL LIVER, SIGNAL = 1.1; EXPRESSED IN BONE MARROW, SIGNAL = 0.95; SWISSPROT HIT: P15272, EVALUE 1.80e-01; NT HIT: AB052890.1, EVALUE 2.30e-01
ttggtctagaaaagagcagcttatttgtccaactggcggagaaggatgcatcgactttcctggagcaccagtctgcagagaacagcagcctgtgggaactggttcctcacgttgggggcttaagtccattcccagagcagccaggccatcggcataagcagcatgaagccccccagtcaagctacccaagtgccagaggattgggctttgccttctatcatgatgatcacgtcctccccttgcacatccctctgacctctcctcagcctgctgtagcctcagtgagactctgcataggggaatcccaaggatggctgctcacacaccttctctccctgctccagaatgctcacctcagagtgggatgg

SEQ ID NO: 29197 - DNA, 128 bp, Homo sapiens
  MAP TO AL161415.1; EXPRESSED IN PLACENTA, SIGNAL = 0.51; EXPRESSED IN FETAL LIVER, SIGNAL = 0.57; EXPRESSED IN BONE MARROW, SIGNAL = 0.63; EXPRESSED IN ADULT LIVER, SIGNAL = 0.67; EXPRESSED IN BRAIN, SIGNAL = 0.49; NT HIT: X16349.1, EVALUE 7.20e-02; EST_HUMAN HIT: D57811.1, EVALUE 1.10e-01
tatgtctctaaaccggggagctgtcacctataaccagacatcaaaatgattacgttaacagtaatgacaataactaaaatatattatgtatttgatatgtaccagtcactgtgccaagtactgcacca

SEQ ID NO: 29198 - DNA, 422 bp, Homo sapiens
  MAP TO AL161670.1; EXPRESSED IN PLACENTA, SIGNAL = 1.5; EXPRESSED IN FETAL LIVER, SIGNAL = 0.76; EXPRESSED IN BONE MARROW, SIGNAL = 0.61; EXPRESSED IN ADULT LIVER, SIGNAL = 1.1; EXPRESSED IN BRAIN, SIGNAL =   1; SWISSPROT HIT: P31602, EVALUE 2.20e-01; NT HIT: AJ293294.1, EVALUE 0.00e+00; EST_HUMAN HIT: AV701829.1, EVALUE 0.00e+00
gatattattgctggattcctatataccattttaatcttagctgtcttctatccatttgtggacctgattgacaacttcaaccaaactcacaaatatgctccattcatcatcatcgggcttcatttagctttggggatcttttctttcactcttgacacctggagcacatcccgaggagacacagccgagatactaggaagtggtgctggaattgcatgtggatctcatgttacttataacatgggtctagtattagatccttctctagatacattacctttagctgggccccccattactgtgactctgtttggaaaagccatattgcggatcctcatagggatggtatttgtactaataatcagagatgtaatgaaaaagatcaccattcctttagcctgcaaaatcttcaatataccgtg

SEQ ID NO: 29199 - DNA, 264 bp, Homo sapiens
  MAP TO AL121586.28; EXPRESSED IN ADULT LIVER, SIGNAL = 0.66; EXPRESSED IN FETAL LIVER, SIGNAL = 1.1; EXPRESSED IN BRAIN, SIGNAL = 0.52; EXPRESSED IN BONE MARROW, SIGNAL = 0.66; NT HIT: AF022655.1, EVALUE 1.00e-124; SWISSPROT HIT: P50468, EVALUE 6.00e-04; EST_HUMAN HIT: AW362335.1, EVALUE 1.00e-116
gtttcttttgaatttcttccttctcttcttggatgtccctgagatctgcctgcagctcagccccagcctcctcagctttctgcagctgagcctccaggtgagtgttcttttcccacagggcttccctcctcttctctgcctccgccaggtcgacctgcaaagcatttctcgcctgctctgcggcctccattctgctgcacacagactggttctcctcctctaactactggccaaaaagggaagggagtacaagcatcaaagaca

SEQ ID NO: 29200 - DNA, 108 bp, Homo sapiens
  MAP TO AC016498.4; EXPRESSED IN PLACENTA, SIGNAL = 0.5; EXPRESSED IN FETAL LIVER, SIGNAL = 0.65; EXPRESSED IN BRAIN, SIGNAL = 0.62; EXPRESSED IN ADULT LIVER, SIGNAL = 0.74; EXPRESSED IN BONE MARROW, SIGNAL = 0.63; EST_HUMAN HIT: AW505216.1, EVALUE 3.40e-01; NT HIT: gi6679318, EVALUE 2.30e-01; SWISSPROT HIT: P28940, EVALUE 5.50e+00
cctacaaagccctgcagcaggtgcgatgggaagacacagagcgctttccctgagatgggtcggctatcacctagtccacccagcagggtgctggggtcatggccagtg

SEQ ID NO: 29201 - DNA, 257 bp, Homo sapiens
  MAP TO AC012662.5; EXPRESSED IN BRAIN, SIGNAL = 0.45; EXPRESSED IN FETAL LIVER, SIGNAL = 0.45; EST_HUMAN HIT: BE169453.1, EVALUE 2.30e-01; NT HIT: AF004369.1, EVALUE 6.20e-01; SWISSPROT HIT: P33750, EVALUE 5.00e-03
  unsure 128
atggcattctgtagaacaatcgttctcctgcaccgtcattagtttgtaagtatttactatccaaggaccagtcaatatgcgtgatgaaactaagggacttgctgcattctccaattttcttatacctntgggcaacagcatagacatctactgggccatcattggatcccactgcaaggtaagaaccatctggagaaaatttcatttcatgaatgacttcttttcgatctttgatgtgaactacttctgtcatatct

SEQ ID NO: 29202 - DNA, 93 bp, Homo sapiens
  MAP TO AL158049.2; EXPRESSED IN BRAIN, SIGNAL = 0.48; EXPRESSED IN PLACENTA, SIGNAL = 0.51; NT HIT: AF079248.1, EVALUE 1.90e-01; EST_HUMAN HIT: AI636786.1, EVALUE 2.00e-45
ccaacaaattttaatcgtgccatgcatccagttatccagcttgaggtggagctgcccgaggggcttctgctggatgcagtgctgatggaatta

SEQ ID NO: 29203 - DNA, 83 bp, Homo sapiens
  MAP TO AL138934.2; EXPRESSED IN PLACENTA, SIGNAL = 0.61; EXPRESSED IN FETAL LIVER, SIGNAL = 0.61; EXPRESSED IN ADULT LIVER, SIGNAL = 0.61; EXPRESSED IN BRAIN, SIGNAL = 0.55; EXPRESSED IN BONE MARROW, SIGNAL = 0.51; SWISSPROT HIT: P39106, EVALUE 7.30e+00; EST_HUMAN HIT: BE834083.1, EVALUE 6.40e-02; NT HIT: gi11424271, EVALUE 1.70e-01
gactgccaacatcaatacctccattgtccttgaaatagaattcaatcagcatgatgctgttaatccatccatagcattgatca

SEQ ID NO: 29204 - DNA, 175 bp, Homo sapiens
  MAP TO AC025746.2; EXPRESSED IN PLACENTA, SIGNAL = 0.7; EXPRESSED IN BONE MARROW, SIGNAL = 0.48; EXPRESSED IN ADULT LIVER, SIGNAL = 0.67; EXPRESSED IN BRAIN, SIGNAL = 0.56; SWISSPROT HIT: O78687, EVALUE 2.30e+00; NT HIT: AF043466.1, EVALUE 1.60e+00
ggacagggagcttcaggctccaaaacccagtttgaccaaatggcaaacaaagacttcccactgccttttaatactttcatttgctggcacaaaagtcaactatttcccctgcaagacccagaccttctgggaggacttcctggtctctgatcccatttccaatacaatgggctag

SEQ ID NO: 29205 - DNA, 284 bp, Homo sapiens
  MAP TO AL138796.2; EXPRESSED IN LUNG, SIGNAL = 1.4; EXPRESSED IN PLACENTA, SIGNAL = 1.1; EXPRESSED IN FETAL LIVER, SIGNAL = 1.6; EXPRESSED IN BRAIN, SIGNAL = 1.5; EXPRESSED IN BONE MARROW, SIGNAL = 2.3; EXPRESSED IN ADULT LIVER, SIGNAL = 1.2; EST_HUMAN HIT: AW160820.1, EVALUE 1.00e-117; NT HIT: gi7657016, EVALUE 1.00e-118; SWISSPROT HIT: Q13568, EVALUE 2.20e-02
aaagtatggaggtctggagcctctcataagcctggggttttgggtcaacagggcctatggccaccttacctgggctgagcttttggacaaggtgctgtgccagtctacacccctcagccagctgttcttggaggtcctgcccctgggacttgtccggctcatccggagtgaggagggcctggagatgctcattcaatgagcgggaggcatctctcccttcccgcaacttctcccttaactgggtcagctctcgttcctgagcgtgaaccaggactttatattgc

SEQ ID NO: 29206 - DNA, 226 bp, Homo sapiens
  MAP TO AC006457.3; EXPRESSED IN PLACENTA, SIGNAL = 0.54; EXPRESSED IN BRAIN, SIGNAL = 0.48; EXPRESSED IN BONE MARROW, SIGNAL = 0.46; EST_HUMAN HIT: BE877259.1, EVALUE 3.20e+00; SWISSPROT HIT: Q16816, EVALUE 2.00e-25; NT HIT: gi5453881, EVALUE 2.00e-83
tgctgatctactaccagtaccaccgggtgaacccggtgacccgggagatcgtcatccgagacccacccctacaccctccagcctctgcgccggctcatcgacgcctatgctttccgaatctatggcccctgggcgaggaaggggcagcagcagaactgggcagcccttttcaagaacacacccaaggccgtgctcctctccctggccgaggaggactactgagggg

SEQ ID NO: 29207 - DNA, 137 bp, Homo sapiens
  MAP TO AP001436.1; EXPRESSED IN PLACENTA, SIGNAL = 0.68; EXPRESSED IN ADULT LIVER, SIGNAL = 0.67; EXPRESSED IN FETAL LIVER, SIGNAL = 0.87; EXPRESSED IN BRAIN, SIGNAL = 0.72; EXPRESSED IN BONE MARROW, SIGNAL = 0.85; EST_HUMAN HIT: N52378.1, EVALUE 7.00e-03; NT HIT: AB032993.1, EVALUE 3.10e-01; SWISSPROT HIT: Q9W754, EVALUE 5.30e+00
ggagaatgcaaatgcaaatacacatgcaaatgatctcatctcctcatggactgtggccacttctgcctgtccaggagaaatggatgctggctgccctgcttctccaggcgggggctgcccttgctgcatcctggcag

SEQ ID NO: 29208 - DNA, 170 bp, Homo sapiens
  MAP TO AL135938.5; EXPRESSED IN ADULT LIVER, SIGNAL = 0.64; EXPRESSED IN PLACENTA, SIGNAL = 0.79; EXPRESSED IN FETAL LIVER, SIGNAL = 0.89; EXPRESSED IN BRAIN, SIGNAL = 0.81; EXPRESSED IN BONE MARROW, SIGNAL = 0.81; SWISSPROT HIT: P03346, EVALUE 7.80e-01; EST_HUMAN HIT: BF031606.1, EVALUE 5.80e-01
accattaacgcagccctattgggctccatatcctgctctagcccacctttcatgaacagagtgagctccaggagggaaacagagaggaaaacagctccatcatgagcacccttgaaaaccagcacttggataatcacatcagcagctgatcgcagactgtttttaatcat

SEQ ID NO: 29209 - DNA, 290 bp, Homo sapiens
  MAP TO AP001424.1; EXPRESSED IN PLACENTA, SIGNAL = 0.59; EXPRESSED IN ADULT LIVER, SIGNAL = 0.64; EXPRESSED IN FETAL LIVER, SIGNAL = 0.75; EXPRESSED IN BRAIN, SIGNAL = 0.69; EXPRESSED IN BONE MARROW, SIGNAL = 0.73; EST_HUMAN HIT: AW137359.1, EVALUE 6.70e-02; SWISSPROT HIT: P46911, EVALUE 6.70e+00; NT HIT: AF100956.1, EVALUE 7.00e-01
cagggctgtgcccaagtgcctggttccattttttcccccaacaccagacagcagccaatatcccaggacagctctggggctcctacaagctgggagctgttcctgaaaacccactcagctctctgctcctgaagcctctgaatgggtacgggctattgttttatgcgggaaattatctgtcaaaagaaacgccttctgtgttcctactcagcattgagaggcatatttttgttgagaggatgctttatattggggtctatggctttgttggagcctgctcacatagacaa

SEQ ID NO: 29210 - DNA, 141 bp, Homo sapiens
  MAP TO AC013698.3; EXPRESSED IN ADULT LIVER, SIGNAL =   2; EXPRESSED IN BRAIN, SIGNAL = 0.54; EXPRESSED IN PLACENTA, SIGNAL = 0.58; EXPRESSED IN FETAL LIVER, SIGNAL = 0.82; EXPRESSED IN BONE MARROW, SIGNAL = 0.54; SWISSPROT HIT: Q52995, EVALUE 4.00e-03; NT HIT: gi11428849, EVALUE 1.00e-59; EST_HUMAN HIT: BF697398.1, EVALUE 2.00e-59
ctttagctgtggataaatctgccgaatcatattaagagtcagtgcattgaggaactttggtctgtttagtgttatgactcccgtgcaaccttttttttccaatagcacctcttctgctgcatctgtgtgcttggacattct

SEQ ID NO: 29211 - DNA, 183 bp, Homo sapiens
  MAP TO AC021287.4; EXPRESSED IN PLACENTA, SIGNAL =   1; EXPRESSED IN FETAL LIVER, SIGNAL = 1.7; EXPRESSED IN BONE MARROW, SIGNAL = 1.4; EXPRESSED IN LUNG, SIGNAL = 1.2; EXPRESSED IN ADULT LIVER, SIGNAL = 1.3; EXPRESSED IN BRAIN, SIGNAL = 1.1; SWISSPROT HIT: Q9Z6Z6, EVALUE 3.90e+00; NT HIT: AF161380.1, EVALUE 1.70e+00
aaggatgactatctatagaaggaagcatcatcatcaccaccatcatcatcaccaccatcaccattcccatcaagctgttttcttcattgtagcagctatgatttctataccacttatgatgtgtcatggactgttcttggtgtttcttgtacattgactctttcgttttcacaacactccaga

SEQ ID NO: 29212 - DNA, 165 bp, Homo sapiens
  MAP TO AC013777.3; EXPRESSED IN PLACENTA, SIGNAL = 0.84; EXPRESSED IN ADULT LIVER, SIGNAL = 0.8; EXPRESSED IN FETAL LIVER, SIGNAL = 0.72; EXPRESSED IN BRAIN, SIGNAL = 0.83; EXPRESSED IN BONE MARROW, SIGNAL = 0.68; SWISSPROT HIT: P03412, EVALUE 2.00e-01; NT HIT: M98520.1, EVALUE 9.60e-02; EST_HUMAN HIT: BF347586.1, EVALUE 3.60e-02
ctcccattgggtccataaagaatctggccagattgtctgaagggaagccattcttgccacaggggcagagttgaagtgtttccctttccgctgactgcatttcagccttgagtatgtcagccaaggttttctgctggtcaaagtcacaaaaagtctggtcgatat

SEQ ID NO: 29213 - DNA, 201 bp, Homo sapiens
  MAP TO AL139186.3; EXPRESSED IN ADULT LIVER, SIGNAL = 0.71; EXPRESSED IN BRAIN, SIGNAL = 0.54; EXPRESSED IN PLACENTA, SIGNAL = 0.6; EXPRESSED IN FETAL LIVER, SIGNAL = 0.57; EXPRESSED IN BONE MARROW, SIGNAL = 0.56; EST_HUMAN HIT: BE565182.1, EVALUE 2.80e+00; SWISSPROT HIT: P04295, EVALUE 2.90e+00
gaaggatcaataataagagactggcattgacagtgaaagagggaaggatcaataataagaaactggcattgacagtgaaagataacaacaaagataaaggcattgcttcaaaagaccagtcagtggctatacacacagacgtacacacgttcctgcacagagaaaggagttacaacactatcaccagaaagattatgacat

SEQ ID NO: 29214 - DNA, 86 bp, Homo sapiens
  MAP TO AC022664.2; EXPRESSED IN PLACENTA, SIGNAL =   1; EXPRESSED IN ADULT LIVER, SIGNAL = 0.96; EXPRESSED IN FETAL LIVER, SIGNAL = 0.95; EXPRESSED IN BRAIN, SIGNAL = 0.91; EXPRESSED IN BONE MARROW, SIGNAL = 0.81; EXPRESSED IN LUNG, SIGNAL = 0.9; EST_HUMAN HIT: N36053.1, EVALUE 2.60e-01; SWISSPROT HIT: Q00488, EVALUE 9.60e+00; NT HIT: M26019.1, EVALUE 1.80e-01
tcccagaggataagtcctgattggctcagcaattttcgcaatccttttaaaatccttgccattgatgatgggctcagccatgattc

SEQ ID NO: 29215 - DNA, 94 bp, Homo sapiens
  MAP TO AC013764.3; EXPRESSED IN FETAL LIVER, SIGNAL = 0.46; EXPRESSED IN BRAIN, SIGNAL = 0.47; NT HIT: gi7706159, EVALUE 2.00e-01; SWISSPROT HIT: P35016, EVALUE 7.30e+00; EST_HUMAN HIT: AA398381.1, EVALUE 5.00e-46
cacaagggttgccacaagctgggagcaagaggaagtgggcacaaacttctgtttctctccttctttgtcctcatctgtttcctgaatgtcctcc

SEQ ID NO: 29216 - DNA, 134 bp, Homo sapiens
  MAP TO AC022036.3; EXPRESSED IN ADULT LIVER, SIGNAL = 0.56; EXPRESSED IN BRAIN, SIGNAL = 0.45; EXPRESSED IN BONE MARROW, SIGNAL = 0.53; EXPRESSED IN PLACENTA, SIGNAL = 0.6; EXPRESSED IN FETAL LIVER, SIGNAL = 0.49; NT HIT: AF224669.1, EVALUE 3.00e-07; SWISSPROT HIT: P02748, EVALUE 7.00e+00; EST_HUMAN HIT: BE327843.1, EVALUE 1.00e-07
ttctggtggctgggaagcctaagatcaaggcaccggcagatttagtggctgatgagagcatgtacctcatagagagcacttttgagctgcatccttacatggtggagggggcaaacaagctctcttgggcttaa

SEQ ID NO: 29217 - DNA, 103 bp, Homo sapiens
  MAP TO AL136171.3; EXPRESSED IN PLACENTA, SIGNAL = 0.69; EXPRESSED IN FETAL LIVER, SIGNAL = 0.61; EXPRESSED IN BONE MARROW, SIGNAL = 0.53; EXPRESSED IN ADULT LIVER, SIGNAL = 0.65; EXPRESSED IN BRAIN, SIGNAL = 0.6; NT HIT: AB007926.1, EVALUE 2.00e-51; EST_HUMAN HIT: BE844025.1, EVALUE 8.20e-02
ctgatatggcatgcattttggcttcaagcaaggctggtagttgggtttcaatatcgttaactttcttcctcagggtgctgcagaatttctcactcatacacac

SEQ ID NO: 29218 - DNA, 110 bp, Homo sapiens
  MAP TO AC013818.3; EXPRESSED IN ADULT LIVER, SIGNAL =   1; EXPRESSED IN BRAIN, SIGNAL = 0.8; EXPRESSED IN PLACENTA, SIGNAL = 0.84; EXPRESSED IN FETAL LIVER, SIGNAL = 0.83; EXPRESSED IN BONE MARROW, SIGNAL = 0.62; EST_HUMAN HIT: AI285627.1, EVALUE 8.90e-02; SWISSPROT HIT: P34504, EVALUE 3.20e+00; NT HIT: AL163267.2, EVALUE 9.40e-01
atgtcttcacatggtgggagcagtagcaaggatgtgggaggggctacacatgttcgaacaaccagatttgcagagaattcactcactattgcaaggacagtgccaagaag

SEQ ID NO: 29219 - DNA, 233 bp, Homo sapiens
  MAP TO AC009695.4; EXPRESSED IN ADULT LIVER, SIGNAL = 0.66; EXPRESSED IN BRAIN, SIGNAL = 0.58; EXPRESSED IN PLACENTA, SIGNAL = 0.65; EXPRESSED IN FETAL LIVER, SIGNAL = 0.59; EXPRESSED IN BONE MARROW, SIGNAL = 0.5; SWISSPROT HIT: Q90980, EVALUE 2.20e-01
catttcaggaagcccctagatatgtggcagaagatgtggagaagaaatccaaaaaagaggaaaacatggatcccaggaagcagggctccagacaggagaatggaaaagctaagtcctcagatgatagaaaaggagagtcccagatggtggctttgcagcgggcccagagagcagttccagatggaactggttctatggaacatcatagaaccatagcaattggaggtctagtg

SEQ ID NO: 29220 - DNA, 146 bp, Homo sapiens
  MAP TO AC021786.2; EXPRESSED IN LUNG, SIGNAL =   1; EXPRESSED IN ADULT LIVER, SIGNAL = 1.2; EXPRESSED IN FETAL LIVER, SIGNAL = 1.1; EXPRESSED IN BRAIN, SIGNAL = 0.96; EXPRESSED IN BONE MARROW, SIGNAL =   1; EXPRESSED IN PLACENTA, SIGNAL = 1.2; EST_HUMAN HIT: AA649213.1, EVALUE 1.90e+00; NT HIT: AF059250.1, EVALUE 1.30e+00
ggaacagaacttgctggaatgaagagaaccaaggtcaggggctacatttctactgtcttcccctttatcatcaactgcatttgttgcctgagagagtaggtgagatactggaccactctggagacgtgcatggacatgagttcaag

SEQ ID NO: 29221 - DNA, 83 bp, Homo sapiens
  MAP TO AL162261.1; EXPRESSED IN ADULT LIVER, SIGNAL = 0.89; EXPRESSED IN BRAIN, SIGNAL = 0.73; EXPRESSED IN BONE MARROW, SIGNAL = 0.53; EXPRESSED IN PLACENTA, SIGNAL = 0.79; EXPRESSED IN FETAL LIVER, SIGNAL = 0.54; SWISSPROT HIT: O60942, EVALUE 7.30e+00; NT HIT: AB032367.1, EVALUE 2.60e+00; EST_HUMAN HIT: AI686660.1, EVALUE 2.00e-39
ttgctcatcaccaccacccccaaacacgcctctcaccaccttaccctccaacacgtttgtgtcctcgtttgctgggtcaattg

SEQ ID NO: 29222 - DNA, 125 bp, Homo sapiens
  MAP TO AC018529.4; EXPRESSED IN ADULT LIVER, SIGNAL = 0.7; EXPRESSED IN BRAIN, SIGNAL = 0.53; EXPRESSED IN BONE MARROW, SIGNAL = 0.95; EXPRESSED IN PLACENTA, SIGNAL = 0.51; EXPRESSED IN FETAL LIVER, SIGNAL = 0.68; NT HIT: AJ245772.1, EVALUE 1.10e+00; EST_HUMAN HIT: BE466544.1, EVALUE 6.40e+00; SWISSPROT HIT: P31252, EVALUE 2.40e+00
ttatcgactgcttgcacgttgccagactctcttttgagagcggtttgtcacctcggataacagtcgggacggccctaggatgccctcactggatgtcaccatcctattcatatcttcatttttta

SEQ ID NO: 29223 - DNA, 144 bp, Homo sapiens
  MAP TO AC011260.4; EXPRESSED IN PLACENTA, SIGNAL = 0.63; EXPRESSED IN ADULT LIVER, SIGNAL = 0.7; EXPRESSED IN BRAIN, SIGNAL = 0.59; EXPRESSED IN BONE MARROW, SIGNAL = 0.53; EXPRESSED IN FETAL LIVER, SIGNAL = 0.6; SWISSPROT HIT: Q33568, EVALUE 5.30e+00; EST_HUMAN HIT: AA669125.1, EVALUE 1.90e+00
aatgttaaggacgtgatatattttgacttccagaccgtggaatttgagaagtgcatgggagttctgcatactctcttttctcagccacctacagcaaagaactccaaggtagaagatgtaaaccatgagagggtaggagcatgg

SEQ ID NO: 29224 - DNA, 82 bp, Homo sapiens
  MAP TO AL136315.3; EXPRESSED IN PLACENTA, SIGNAL = 0.94; EXPRESSED IN ADULT LIVER, SIGNAL = 0.98; EXPRESSED IN BRAIN, SIGNAL = 0.94; EXPRESSED IN LUNG, SIGNAL = 0.86; EXPRESSED IN BONE MARROW, SIGNAL = 0.95; EXPRESSED IN FETAL LIVER, SIGNAL = 1.2; NT HIT: AF196779.1, EVALUE 3.00e-15; EST_HUMAN HIT: AA864653.1, EVALUE 1.00e-15
ttataagtgggagctgaatgacgagaacacatgaacacgtagagagcaacaacagacactggggccttcttgagggtagagg

SEQ ID NO: 29225 - DNA, 260 bp, Homo sapiens
  MAP TO AC012571.3; EXPRESSED IN PLACENTA, SIGNAL = 0.48; EXPRESSED IN ADULT LIVER, SIGNAL = 0.7; EXPRESSED IN BRAIN, SIGNAL = 0.46; EXPRESSED IN BONE MARROW, SIGNAL = 0.43; EXPRESSED IN FETAL LIVER, SIGNAL = 0.52; SWISSPROT HIT: P98073, EVALUE 6.00e-10; NT HIT: AL161516.2, EVALUE 1.60e-01
catcatctacaatggatccaaatcctgtgacgaacacacttgttttaggtggcaactttatagatgagtctgggaggcaaactctctggactatatttgaaaactcaactccagtagagagctgaaccaaagcaatgtcattttcatttgtttctctatggtaattctcatgaagaataattttcctcacatttcgtttcactgcgggtggtgttatagttgcaccaaaagtagcaatccattgagttgggtctttattt

SEQ ID NO: 29226 - DNA, 118 bp, Homo sapiens
  MAP TO AL161788.2; EXPRESSED IN LUNG, SIGNAL = 1.3; EXPRESSED IN PLACENTA, SIGNAL = 1.6; EXPRESSED IN FETAL LIVER, SIGNAL = 1.1; EXPRESSED IN ADULT LIVER, SIGNAL = 1.3; EXPRESSED IN BRAIN, SIGNAL = 1.4; EXPRESSED IN BONE MARROW, SIGNAL = 1.1; SWISSPROT HIT: P46541, EVALUE 4.10e+00; NT HIT: L36095.1, EVALUE 4.10e+00; EST_HUMAN HIT: AW375697.1, EVALUE 1.50e+00
tcaaatcctgttgtactggttacatgctctatcttgtaaccaagactcctggctgatacagggctccccaaatgctactgtgccagtgttgctttctttatctaacttatgtgtcatt

SEQ ID NO: 29227 - DNA, 282 bp, Homo sapiens
  MAP TO AC022050.2; EXPRESSED IN PLACENTA, SIGNAL = 0.56; EXPRESSED IN ADULT LIVER, SIGNAL = 0.77; EXPRESSED IN FETAL LIVER, SIGNAL = 0.67; EXPRESSED IN BRAIN, SIGNAL = 0.54; EXPRESSED IN BONE MARROW, SIGNAL = 0.62; EST_HUMAN HIT: AI820532.1, EVALUE 6.50e-02; NT HIT: U71456.1, EVALUE 4.40e-02; SWISSPROT HIT: P03355, EVALUE 3.00e-03
ttgctaaccttcctggaacagaaagggaggctattggcttacttcagcatgaatggacaactactacgccaggccatccttctggatgacccaaatataactttgcaaacaaccatggagctaaacccagccaccttgctcctggccactgatcctgaccatgaactagaacacaattgtctggaaattcttgatcatttaattctaggaagccagatctgtctgaccaaagctctagactgggagctttacaccaacagaagacacttcatgagaaatgga

SEQ ID NO: 29228 - DNA, 179 bp, Homo sapiens
  MAP TO AC015805.3; EXPRESSED IN PLACENTA, SIGNAL = 0.63; EXPRESSED IN FETAL LIVER, SIGNAL = 0.84; EXPRESSED IN LUNG, SIGNAL = 0.87; EXPRESSED IN ADULT LIVER, SIGNAL = 0.72; EXPRESSED IN BRAIN, SIGNAL = 0.78; EXPRESSED IN BONE MARROW, SIGNAL = 0.71; NT HIT: U42411.1, EVALUE 4.20e-01; SWISSPROT HIT: Q57634, EVALUE 5.90e-01; EST_HUMAN HIT: BF679376.1, EVALUE 4.00e-02
gtgtgaggtacctgtttcaaagtactcataaggcctcagcagagatgatgagggcttggaccctggctggaggtgaaaggagcacagggagtatgaaatcctttaaaggtaaagataacagaattgagaacgatggcctcagtaggaagaacaaaggagggaagaacagttggatgact

SEQ ID NO: 29229 - DNA, 294 bp, Homo sapiens
  MAP TO AL139245.2; EXPRESSED IN ADULT LIVER, SIGNAL = 0.95; EXPRESSED IN BRAIN, SIGNAL = 0.71; EXPRESSED IN BONE MARROW, SIGNAL = 0.82; EXPRESSED IN PLACENTA, SIGNAL = 1.6; EXPRESSED IN FETAL LIVER, SIGNAL = 0.87; SWISSPROT HIT: P08547, EVALUE 4.00e-08; NT HIT: AF195953.1, EVALUE 5.00e-05; EST_HUMAN HIT: AI269386.1, EVALUE 2.70e-01
ttaagtttgctttatggcccagaacatagtatcatttggagaatgtttcatgtgcactttagaaagaagtgttgtcatgtaaagtatactataaatatcaactgggtcaagttggttgataatgttgctccagtcatctatatttttgatgattttctttccatttgttctatcatttactgaaaaaggagcactgaagttttcaactgtaattgtgaaactatctatttcactttttgattctatcagcttttgcatcatgtattttgaaactctgttgttaggtacgtacat

SEQ ID NO: 29230 - DNA, 210 bp, Homo sapiens
  MAP TO AC018516.3; EXPRESSED IN FETAL LIVER, SIGNAL = 0.55; EXPRESSED IN BRAIN, SIGNAL = 0.67; EXPRESSED IN BONE MARROW, SIGNAL = 0.55; EXPRESSED IN ADULT LIVER, SIGNAL = 0.53; NT HIT: U05000.1, EVALUE 2.00e+00; SWISSPROT HIT: O97571, EVALUE 9.70e-01; EST_HUMAN HIT: BF305237.1, EVALUE 4.70e-02
ccgtgtagcaaagtacttccgtgagatataaggctgatgataaggattggggtaaagagttgattcggtcacacttgactgccttgaaatctgtcttggcatcgggtcctcttcctccatcgataggtggtcagtctcagagggttggtcatctccctcttgcttcagagacacagcctggaatccttcaaaactcccaattgttgacat

SEQ ID NO: 29231 - DNA, 191 bp, Homo sapiens
  MAP TO AL122058.19; EXPRESSED IN LUNG, SIGNAL = 1.1; EXPRESSED IN FETAL LIVER, SIGNAL = 1.3; EXPRESSED IN BONE MARROW, SIGNAL = 0.81; EXPRESSED IN ADULT LIVER, SIGNAL = 1.1; EXPRESSED IN PLACENTA, SIGNAL = 1.2; EXPRESSED IN BRAIN, SIGNAL = 0.77; NT HIT: M60316.1, EVALUE 5.00e-81; SWISSPROT HIT: P23359, EVALUE 2.00e-24; EST_HUMAN HIT: BE744273.1, EVALUE 7.00e-81
catccagcgtctccaccgagagctgcaggcccaggttgtgccgcggattgaccacccagtggttgctggtggctgtgatgtcaaacaccagccagccctcctccgaggcccagagggtacggctgtcgagcaggaagagatccgattccctgcgagagaggaggagagacacgggcttcgcgttagccagg

SEQ ID NO: 29232 - DNA, 331 bp, Homo sapiens
  MAP TO AC015897.3; EXPRESSED IN ADULT LIVER, SIGNAL = 0.94; EXPRESSED IN PLACENTA, SIGNAL = 0.82; EXPRESSED IN BRAIN, SIGNAL = 1.1; EXPRESSED IN BONE MARROW, SIGNAL = 0.94; EXPRESSED IN LUNG, SIGNAL = 1.1; EXPRESSED IN FETAL LIVER, SIGNAL = 0.84; EST_HUMAN HIT: AI914459.1, EVALUE 2.00e-85; SWISSPROT HIT: P31563, EVALUE 2.20e+00; NT HIT: AL163218.2, EVALUE 3.20e+00
gtgcattattgcaatgggccttgacaaaaaaccgtctttgccgaaatctaggaaagaaaagagcactgagaaaggagaggaactgaagaaggctgaggggaaagtgaggaaagagagagagtatgtgataccaaaaagaaatgagatcaaggagaacaaaacctctgtttcagccaaattttcagctcaagaaataaaaacagggctcaaagaagtggtaactgctgtggaggaaatgacaagtaaaggaaaaccaggacaagaagtcttggaagacgaccaggaaaatactttaaaatatggtaatcaacaacacaagtttcttttgttg

SEQ ID NO: 29233 - DNA, 252 bp, Homo sapiens
  MAP TO AL121586.28; EXPRESSED IN PLACENTA, SIGNAL = 0.52; EXPRESSED IN ADULT LIVER, SIGNAL = 0.68; EXPRESSED IN FETAL LIVER, SIGNAL = 0.72; EXPRESSED IN BRAIN, SIGNAL = 0.69; EXPRESSED IN BONE MARROW, SIGNAL = 0.76; NT HIT: AF022655.1, EVALUE 0.00e+00; SWISSPROT HIT: P51531, EVALUE 3.90e+00; EST_HUMAN HIT: BE783272.1, EVALUE 0.00e+00
cggtcctgaagttcagccttctccagatccccttgactcttcagctgtattaactcctggctcctttcatgggcttccttctccagctcctgggtcttggctagtagcagcagcagctgggccggctcccgcccatccattcttccagatccgttgggttcccgagactgtgctcccacagtcaagcgcagacaacaggtcaacagagaccctgaaagcctcacatgctcagcttttagctccatcagatct

SEQ ID NO: 29234 - DNA, 264 bp, Homo sapiens
  MAP TO AC015873.2; EXPRESSED IN PLACENTA, SIGNAL = 0.51; EXPRESSED IN FETAL LIVER, SIGNAL = 0.48; EXPRESSED IN BRAIN, SIGNAL = 0.59; EXPRESSED IN BONE MARROW, SIGNAL = 0.56; EST_HUMAN HIT: AI130738.1, EVALUE 2.00e-82; NT HIT: AB014562.1, EVALUE 1.00e-82; SWISSPROT HIT: P30569, EVALUE 5.70e-01
ccagcccccagcctgccccagcatgcaggaagccattcagggaatgctgtccatggccaacctgcaggcctccgactcctacctgcagaccacatggtgcactggccaggccaagaggagctcgctggcatcccatggtgcccagaagaatgggggtggcagcggcaagagtgcaggcaagcaactgctgaagagggctgccaagaacagcgcggacctgggccactacgaggaagagcacaagacaccagatctgggagtccc

SEQ ID NO: 29235 - DNA, 134 bp, Homo sapiens
  MAP TO AL157773.3; EXPRESSED IN ADULT LIVER, SIGNAL = 0.57; EXPRESSED IN PLACENTA, SIGNAL = 0.53; EXPRESSED IN BRAIN, SIGNAL = 0.57; EXPRESSED IN FETAL LIVER, SIGNAL = 1.3; EXPRESSED IN BONE MARROW, SIGNAL = 0.93; SWISSPROT HIT: P48506, EVALUE 8.00e-22; EST_HUMAN HIT: AV683050.1, EVALUE 8.00e-52; NT HIT: gi4557624, EVALUE 7.00e-70
tatttaaggacaagaatacaccatctccatttatagaaacatttactgaggatgatgaagcttcaagggcttctaagccggatcatatttacatggatgccatgggatttggaatgggcaattgctgtctccag

SEQ ID NO: 29236 - DNA, 108 bp, Homo sapiens
  MAP TO AC015496.3; EXPRESSED IN PLACENTA, SIGNAL = 0.98; EXPRESSED IN ADULT LIVER, SIGNAL = 0.87; EXPRESSED IN FETAL LIVER, SIGNAL = 1.3; EXPRESSED IN BRAIN, SIGNAL = 0.92; EXPRESSED IN BONE MARROW, SIGNAL = 0.77; EXPRESSED IN LUNG, SIGNAL = 0.97; NT HIT: AL161565.2, EVALUE 9.20e-01; EST_HUMAN HIT: AA564123.1, EVALUE 5.40e+00
ctatcctgtagtcagagtcactcaggacctttgtatagtttttgttgttgttgttggtagtggatttttttgatttgttgtagctttgctgttttgttttattttttc

SEQ ID NO: 29237 - DNA, 406 bp, Homo sapiens
  MAP TO AL161422.3; EXPRESSED IN FETAL LIVER, SIGNAL = 1.1; EXPRESSED IN BRAIN, SIGNAL = 0.54; EXPRESSED IN BONE MARROW, SIGNAL = 0.52; EXPRESSED IN PLACENTA, SIGNAL = 0.63; EXPRESSED IN ADULT LIVER, SIGNAL = 0.82; NT HIT: gi11525761, EVALUE 0.00e+00; EST_HUMAN HIT: W56629.1, EVALUE 0.00e+00; SWISSPROT HIT: Q09289, EVALUE 6.90e+00
aaacgcaggcccagccggggagatggtgccgactttcttcggatccctcacgcagtccatctgtggcgagttttcagatgcctggcctctgatgcagaatcccatgggtggtgacaacatctctttttgtgactcttatcctgaactcactggagaagacattcattctctcaatccagaacttgaaagctcaacgtctttggattcaaatagcagtcaagatttggttggtggggctgttccagtccagtctcattctgaaaactttacagcagctactgatttatctagatataacaacacactggtagaatcagcatcaactcaggatgcactaactatgagaagccagctagatcaggagagtggtgctgtcatccacccagccactcagacgtccctccag

SEQ ID NO: 29238 - DNA, 163 bp, Homo sapiens
  MAP TO AC022860.3; EXPRESSED IN LUNG, SIGNAL = 0.89; EXPRESSED IN FETAL LIVER, SIGNAL = 0.91; EXPRESSED IN BONE MARROW, SIGNAL = 0.86; EXPRESSED IN PLACENTA, SIGNAL = 0.79; EXPRESSED IN ADULT LIVER, SIGNAL = 1.1; EXPRESSED IN BRAIN, SIGNAL = 0.9; NT HIT: Z75555.1, EVALUE 9.50e-02; EST_HUMAN HIT: AI609753.1, EVALUE 4.00e-11; SWISSPROT HIT: P34624, EVALUE 1.00e-09
ctccagtttctgggctttatctttgtgaagaaagctaaatagaaaatacaggtcatggtcatttgccaaggcacacaggtcaaagtaatattttgcataaacactggcagacacatgaatattaaactcaagtagctccaagaaacacttctccatcttgctc

SEQ ID NO: 29239 - DNA, 75 bp, Homo sapiens
  MAP TO AC022843.3; EXPRESSED IN PLACENTA, SIGNAL = 0.61; EXPRESSED IN FETAL LIVER, SIGNAL = 0.7; EXPRESSED IN ADULT LIVER, SIGNAL = 0.79; EXPRESSED IN BRAIN, SIGNAL = 0.86; EXPRESSED IN BONE MARROW, SIGNAL = 0.68; EST_HUMAN HIT: AI738723.1, EVALUE 2.20e-01; SWISSPROT HIT: O15072, EVALUE 7.00e-09; NT HIT: AB002364.1, EVALUE 6.00e-35
actaactgtgcttatgttggtgacatcgtggacattccaggaacctctgttgccatcagcaactgtgatggtctg

SEQ ID NO: 29240 - DNA, 93 bp, Homo sapiens
  MAP TO AC013591.3; EXPRESSED IN PLACENTA, SIGNAL = 1.2; EXPRESSED IN ADULT LIVER, SIGNAL = 1.2; EXPRESSED IN FETAL LIVER, SIGNAL =   1; EXPRESSED IN BRAIN, SIGNAL = 1.4; EXPRESSED IN BONE MARROW, SIGNAL =   1; EXPRESSED IN LUNG, SIGNAL = 1.1; EST_HUMAN HIT: BE549120.1, EVALUE 2.90e-01; SWISSPROT HIT: P48982, EVALUE 2.00e-03; NT HIT: X14076.1, EVALUE 1.90e-01
cttgtggagatacggcatgtatgttttatccttattgaatgagccatactcattctccacttgcaccgcgatgacagggcctgcctggcggta

SEQ ID NO: 29241 - DNA, 305 bp, Homo sapiens
  MAP TO AC018993.3; EXPRESSED IN ADULT LIVER, SIGNAL = 1.1; EXPRESSED IN PLACENTA, SIGNAL =   1; EXPRESSED IN FETAL LIVER, SIGNAL =   1; EXPRESSED IN BRAIN, SIGNAL = 1.8; EXPRESSED IN LUNG, SIGNAL = 1.2; EXPRESSED IN BONE MARROW, SIGNAL =   1; SWISSPROT HIT: P24125, EVALUE 1.50e+00; NT HIT: AB035356.1, EVALUE 0.00e+00; EST_HUMAN HIT: AW852658.1, EVALUE 7.00e-02
ggcgtcagctcacaatcttcaatagccaagcaaccataataattggcgggaaagagcagggccagcccttccagggccagctctctgggctgtactacaatggcttgaaagttctgaatatggcagccgaaaacgatgccaacatcgccatagtgggaaatgtgagactggttggtgaagtgccttcctctatgacaactgagtcaacagccactgccatgcaatcagagatgtccacatcaattatggagactaccacgaccctggctactagcacagccagaagaggaaagcccccgacaaaa

SEQ ID NO: 29242 - DNA, 431 bp, Homo sapiens
  MAP TO AC009079.4; EXPRESSED IN PLACENTA, SIGNAL = 0.64; EXPRESSED IN FETAL LIVER, SIGNAL = 0.64; EXPRESSED IN BRAIN, SIGNAL = 0.8; EXPRESSED IN BONE MARROW, SIGNAL = 0.56; EXPRESSED IN ADULT LIVER, SIGNAL = 0.64; SWISSPROT HIT: P11388, EVALUE 8.30e-01; NT HIT: gi7662115, EVALUE 0.00e+00; EST_HUMAN HIT: AI124780.1, EVALUE 0.00e+00
attttaaggttttctttttgctctgtcattgttttcagggacccacctagtaagaaaaggaaaatggaaaactgtgcacaaaaccagaagttatccaacaagaccattgaatcattgaacaaccaaccaatccctagaccagacactcaagaactagaagcttcagaaataaagctagaaccatcttttgaagactcttgtggctctaacactgacaagcagactcttacaacaccaccgagatatcctcagaagttgcttttaccaaagcccaaagtggctttggttaaactacccgtgatgcagttttctgtcatgcctgtctttgtgcctacagccgactcctcagcccagcctgtggtgttaggtgttgatcagggctctgccacaggggctgtgcacttaatgcccttgtcagtaggaaccctgat

SEQ ID NO: 29243 - DNA, 143 bp, Homo sapiens
  MAP TO AL121884.5; EXPRESSED IN PLACENTA, SIGNAL = 0.83; EXPRESSED IN ADULT LIVER, SIGNAL = 0.62; EXPRESSED IN FETAL LIVER, SIGNAL = 0.85; EXPRESSED IN BRAIN, SIGNAL = 0.77; EXPRESSED IN BONE MARROW, SIGNAL = 0.85; SWISSPROT HIT: Q04652, EVALUE 5.40e-02; NT HIT: gi11420222, EVALUE 3.00e-75; EST_HUMAN HIT: AU125721.1, EVALUE 5.00e-75
atgaatgccaccagatctgaagagcagttccatgttataaaccacgcagagcaaactcttcgtaaaatggagaactacttgaaagagaaacaactatgtgatgtgctactgattgcaggacacctccgcatcccagcccatag

SEQ ID NO: 29244 - DNA, 131 bp, Homo sapiens
  MAP TO AC021486.3; EXPRESSED IN LUNG, SIGNAL = 0.93; EXPRESSED IN BRAIN, SIGNAL = 1.2; EXPRESSED IN BONE MARROW, SIGNAL = 0.69; EXPRESSED IN PLACENTA, SIGNAL = 0.81; EXPRESSED IN ADULT LIVER, SIGNAL = 0.83; EXPRESSED IN FETAL LIVER, SIGNAL = 0.81; SWISSPROT HIT: P26996, EVALUE 7.00e+00; NT HIT: Y12227.1, EVALUE 1.10e+00; EST_HUMAN HIT: BF205101.1, EVALUE 1.70e+00
gagtaagtgttaagtgtgccctgaccatcaagaaggatggaaatgaggagatcagcatgcactgccatcatattctgaaggaagtgaaagagagtgccagaggaagcctcagaagtagaattcctaagatt

SEQ ID NO: 29245 - DNA, 166 bp, Homo sapiens
  MAP TO AC025749.2; EXPRESSED IN BRAIN, SIGNAL = 0.6; EST_HUMAN HIT: BF689544.1, EVALUE 6.00e-81; NT HIT: AB011133.1, EVALUE 7.00e-89; SWISSPROT HIT: P22612, EVALUE 1.00e-15
gtgtgtgggacgccggagtacatagcccccgaggtgatcttccgccagggctatgggaagccagtggactggtgggccatgggcgtcgtcctctatgagtttctggtgggctgcgtgcctttctttggagatacccccgaggaactcttcggtcaggtggtcagcg

SEQ ID NO: 29246 - DNA, 102 bp, Homo sapiens
  MAP TO AC012611.4; EXPRESSED IN BONE MARROW, SIGNAL = 0.46; EXPRESSED IN PLACENTA, SIGNAL = 0.54; EXPRESSED IN BRAIN, SIGNAL = 0.46; EXPRESSED IN FETAL LIVER, SIGNAL = 0.48; SWISSPROT HIT: P70099, EVALUE 9.40e+00; NT HIT: AE000979.1, EVALUE 8.60e-01
actgtgatggccaataagtgggacccctttgacctgtacttctcccttcctaggaccaaatgcagcattactgactatatgtacaccttcctgttctcccgt

SEQ ID NO: 29247 - DNA, 186 bp, Homo sapiens
  MAP TO AC021976.3; EXPRESSED IN PLACENTA, SIGNAL = 1.2; EXPRESSED IN FETAL LIVER, SIGNAL = 1.1; EXPRESSED IN ADULT LIVER, SIGNAL = 1.2; EXPRESSED IN BONE MARROW, SIGNAL = 0.96; EXPRESSED IN LUNG, SIGNAL = 1.3; EXPRESSED IN BRAIN, SIGNAL = 0.97; SWISSPROT HIT: P18296, EVALUE 2.00e-01; NT HIT: M65125.1, EVALUE 4.30e-01; EST_HUMAN HIT: BE155664.1, EVALUE 1.60e-01
tttatctctctgagcctcagggttcttatctgaaaattgcctgagtagggttgtcacagagattaagtgagcaatacacagaaagcccccagcctctgagccctgcatgagtaagcacactggaacagtgccaatcatttccatagctaggatattattttccagaagcttcccaatgatcacagg

SEQ ID NO: 29248 - DNA, 165 bp, Homo sapiens
  MAP TO AL161756.1; EXPRESSED IN BRAIN, SIGNAL = 0.52; EXPRESSED IN PLACENTA, SIGNAL = 0.55; EXPRESSED IN BONE MARROW, SIGNAL = 0.46; NT HIT: AF124160.1, EVALUE 2.40e-02; SWISSPROT HIT: Q09529, EVALUE 4.50e-01
agaacagaagatcttcagcaggaaattcagatgcttactcagcaaatggaacagctgtatcatctttatgaacagctgtttgtgaatcattccaacttgaagaaaagtatagggaacaacaaaagatccttgaaatacctggaaggaaaaattgcttttaatgat

SEQ ID NO: 29249 - DNA, 85 bp, Homo sapiens
  MAP TO AC008164.3; EXPRESSED IN BRAIN, SIGNAL = 0.59; EXPRESSED IN BONE MARROW, SIGNAL = 0.55; EXPRESSED IN PLACENTA, SIGNAL = 0.56; EXPRESSED IN ADULT LIVER, SIGNAL = 0.61; EXPRESSED IN FETAL LIVER, SIGNAL = 0.62; NT HIT: AF206319.1, EVALUE 6.90e-01
agtcattctcccactgggtgtagtctttgttctcataagtgttgggtaggttcccagcgtcatgagtttggggtccaaagatacc

SEQ ID NO: 29250 - DNA, 149 bp, Homo sapiens
  MAP TO AC010503.3; EXPRESSED IN LUNG, SIGNAL = 0.85; EXPRESSED IN PLACENTA, SIGNAL = 0.86; EXPRESSED IN FETAL LIVER, SIGNAL = 0.86; EXPRESSED IN ADULT LIVER, SIGNAL = 0.93; EXPRESSED IN BRAIN, SIGNAL =   1; EXPRESSED IN BONE MARROW, SIGNAL = 1.1; SWISSPROT HIT: Q14028, EVALUE 1.40e+00; NT HIT: U68763.1, EVALUE 3.40e-01; EST_HUMAN HIT: H55277.1, EVALUE 5.00e-01
ggtgctgagtttgctggcggtgagcaggactcttctctcggccaggagcgccgcgaacagccccacgatgttctcgtcagtcacggccaccaccagctccgttaggttcctctgaggatcagagagtcgctctgggcgtggacgggccc

SEQ ID NO: 29251 - DNA, 189 bp, Homo sapiens
  MAP TO AC021811.2; EXPRESSED IN ADULT LIVER, SIGNAL = 0.54; EXPRESSED IN BRAIN, SIGNAL = 0.51; EXPRESSED IN PLACENTA, SIGNAL = 0.54; EXPRESSED IN FETAL LIVER, SIGNAL = 0.56; EXPRESSED IN BONE MARROW, SIGNAL = 0.47; SWISSPROT HIT: O14248, EVALUE 5.00e+00; EST_HUMAN HIT: AW977455.1, EVALUE 1.70e-01; NT HIT: AL161511.2, EVALUE 4.40e-01
cctctttgcacagttctactaaaattatcaatgtcatttttgctacagcttgtttcactttctcatccgaggtttccatatcagcattcccactacctcgccttgtctgtgtagtaagatagctgccaaagtatcctttggttttaatgaacactgagtaggaaggcaggccatggcagagctcagcat

SEQ ID NO: 29252 - DNA, 156 bp, Homo sapiens
  MAP TO AL161940.3; EXPRESSED IN BONE MARROW, SIGNAL = 0.92; EXPRESSED IN ADULT LIVER, SIGNAL = 0.82; EXPRESSED IN BRAIN, SIGNAL =   1; EXPRESSED IN PLACENTA, SIGNAL = 0.86; EXPRESSED IN FETAL LIVER, SIGNAL = 0.72; NT HIT: AL163248.2, EVALUE 2.00e-05; EST_HUMAN HIT: N30576.1, EVALUE 2.00e-06; SWISSPROT HIT: Q24735, EVALUE 8.90e+00
ggattcaccaaggagcagcaattggagttttcaataactggaatcatgaaaactccaagaggtcctgaattatcacctattttgttgtgtaaagtggtgtatgaagtgttctgtactgtttatatgttactcaagaacaaatccttttttaaaaat

SEQ ID NO: 29253 - DNA, 110 bp, Homo sapiens
  MAP TO AC025324.2; EXPRESSED IN ADULT LIVER, SIGNAL = 0.68; EXPRESSED IN BRAIN, SIGNAL = 0.88; EXPRESSED IN LUNG, SIGNAL = 0.92; EXPRESSED IN PLACENTA, SIGNAL = 0.66; EXPRESSED IN BONE MARROW, SIGNAL = 0.57; EXPRESSED IN FETAL LIVER, SIGNAL = 0.6; SWISSPROT HIT: P57389, EVALUE 9.30e+00; NT HIT: AF220067.1, EVALUE 2.40e-01; EST_HUMAN HIT: BE706582.1, EVALUE 3.50e-01
gttttgatggaggggagaagtattgtcccaaagctcatacttttatttttgcttatatcatcttcaataaacttccttcaacacccatttttaaccctccacagaaataa

SEQ ID NO: 29254 - DNA, 104 bp, Homo sapiens
  MAP TO AC010477.4; EXPRESSED IN BONE MARROW, SIGNAL = 1.1; EXPRESSED IN LUNG, SIGNAL = 1.1; EXPRESSED IN PLACENTA, SIGNAL = 1.3; EXPRESSED IN ADULT LIVER, SIGNAL = 1.1; EXPRESSED IN BRAIN, SIGNAL = 1.2; EXPRESSED IN FETAL LIVER, SIGNAL = 1.1; EST_HUMAN HIT: AA618447.1, EVALUE 3.00e-04; NT HIT: AJ272265.1, EVALUE 4.00e-06
ccatgcaagaatacaatgagaagacagcaatctgcaactcagaagagggccctcaccagaacctgtctgtgctggaaccccaatctcagaattccagcctctag

SEQ ID NO: 29255 - DNA, 130 bp, Homo sapiens
  MAP TO AL157773.3; EXPRESSED IN LUNG, SIGNAL =   1; EXPRESSED IN PLACENTA, SIGNAL = 0.99; EXPRESSED IN FETAL LIVER, SIGNAL = 1.2; EXPRESSED IN ADULT LIVER, SIGNAL = 1.1; EXPRESSED IN BRAIN, SIGNAL = 0.97; EXPRESSED IN BONE MARROW, SIGNAL =   1; SWISSPROT HIT: P48506, EVALUE 1.00e-19; NT HIT: gi11418925, EVALUE 2.00e-67; EST_HUMAN HIT: AW293624.1, EVALUE 2.00e-67
aacaataactataggatcagtaaatcccgatatgactcaatagacagctatttatctaagtgtggtgagaaatataatgacatcgacttgacgatagataaagagatctacgaacagctgttgcaggaag

SEQ ID NO: 29256 - DNA, 106 bp, Homo sapiens
  MAP TO AL138682.5; EXPRESSED IN BRAIN, SIGNAL = 0.62; NT HIT: U77974.1, EVALUE 2.30e-01; EST_HUMAN HIT: AW235242.1, EVALUE 1.30e+00
atgccttttacctatgacatcagtatatttttagcattgtcaacaaagacaatattaaagaatcagtttagaggaaataaatttctcaatttctcagctgaacaag

SEQ ID NO: 29257 - DNA, 220 bp, Homo sapiens
  MAP TO AC019214.2; EXPRESSED IN PLACENTA, SIGNAL = 0.69; EXPRESSED IN BRAIN, SIGNAL = 0.68; EXPRESSED IN BONE MARROW, SIGNAL = 0.86; EXPRESSED IN ADULT LIVER, SIGNAL = 0.64; EXPRESSED IN FETAL LIVER, SIGNAL = 0.69; NT HIT: AB042824.1, EVALUE 6.00e-47; EST_HUMAN HIT: AA047018.1, EVALUE 5.00e-42; SWISSPROT HIT: P08777, EVALUE 8.00e+00
ctgacctccgggccaaggccgtggagctggaacatgagacattccggaacgccaaggtggccaacctctacaaggccagcgtgctgaagaaggtgggcctggtgcaggcggacccagggtcgttgcaggggcccctccatactctgacgcagaagctgtctgccagctctctgggctcaggcagcccagaactcaccctccccagcccaccccagagaca

SEQ ID NO: 29258 - DNA, 135 bp, Homo sapiens
  MAP TO AC019295.3; EXPRESSED IN BRAIN, SIGNAL = 0.6; EXPRESSED IN BONE MARROW, SIGNAL = 0.43; EXPRESSED IN PLACENTA, SIGNAL = 0.67; EXPRESSED IN ADULT LIVER, SIGNAL = 0.55; EXPRESSED IN FETAL LIVER, SIGNAL = 0.66; EST_HUMAN HIT: AA485220.1, EVALUE 1.10e-01; NT HIT: L10114.1, EVALUE 1.90e-02; SWISSPROT HIT: P17072, EVALUE 1.40e+00
cttgttatctgtgacctagtttgcttagccgtttttatggagcctgattctctgatatactggagaatgttagattcagaatggatgtaagaatattttgatttctctttcagttctattcggttgatagtattt

SEQ ID NO: 29259 - DNA, 176 bp, Homo sapiens
  MAP TO AL160413.5; EXPRESSED IN PLACENTA, SIGNAL = 0.78; EXPRESSED IN FETAL LIVER, SIGNAL = 0.6; EXPRESSED IN ADULT LIVER, SIGNAL = 0.77; EXPRESSED IN BRAIN, SIGNAL = 0.75; EXPRESSED IN BONE MARROW, SIGNAL = 0.7; NT HIT: AF114952.1, EVALUE 2.60e-02; EST_HUMAN HIT: AW074710.1, EVALUE 9.50e+00; SWISSPROT HIT: P12053, EVALUE 1.30e+00
cagggtgcctttgtgttttggtgaagcttggaaattattcataatatatattttggaatttaagtcccctattcttccaaaagcaaattttttggtggtgttattaaacatcagataataccctgacaaattgttgatgaatgctgcctgcagacccagctgtgtgaacagcattg

SEQ ID NO: 29260 - DNA, 128 bp, Homo sapiens
  MAP TO AC010397.3; EXPRESSED IN BONE MARROW, SIGNAL = 0.62; EXPRESSED IN ADULT LIVER, SIGNAL = 0.73; EXPRESSED IN BRAIN, SIGNAL = 0.52; EXPRESSED IN PLACENTA, SIGNAL = 0.52; EXPRESSED IN FETAL LIVER, SIGNAL = 0.89; EST_HUMAN HIT: T05821.1, EVALUE 4.00e-66; NT HIT: gi11417118, EVALUE 3.00e-66
gaatatggtataactaaagctgaaaaactggagattgccaaaggctactgtactcctctggttagaaaaattcgctcagaccttcagaggacacaagatgatgacactgtaaataaacttcatcctgt

SEQ ID NO: 29261 - DNA, 233 bp, Homo sapiens
  MAP TO AC022204.3; EXPRESSED IN PLACENTA, SIGNAL = 0.69; EXPRESSED IN BONE MARROW, SIGNAL = 0.71; EXPRESSED IN FETAL LIVER, SIGNAL = 0.57; EXPRESSED IN BRAIN, SIGNAL = 0.59; NT HIT: Y15994.1, EVALUE 9.00e-03; EST_HUMAN HIT: AW627985.1, EVALUE 6.00e-05; SWISSPROT HIT: Q13085, EVALUE 1.10e+00
aagtcaagatgttagcaagggcgtgctccttctgaaggttctcggggagaatcctgccttgcttcttccagcttctgatggtgtcagaagttgcttggtttgtgacagaataataccagtctctaccctcttcacatggctttctctcttgtatctctgtgtgtcttctctttttccgtttcttacaggcatacgcatcataggtttcagggaccatcccaatgcaggatggt

SEQ ID NO: 29262 - DNA, 216 bp, Homo sapiens
  MAP TO AC019221.3; EXPRESSED IN PLACENTA, SIGNAL = 0.6; EXPRESSED IN ADULT LIVER, SIGNAL = 0.65; EXPRESSED IN FETAL LIVER, SIGNAL = 0.54; EXPRESSED IN BRAIN, SIGNAL = 0.53; EXPRESSED IN BONE MARROW, SIGNAL = 0.65; EST_HUMAN HIT: AI521780.1, EVALUE 1.90e-01; SWISSPROT HIT: P57405, EVALUE 1.60e+00; NT HIT: AF097732.1, EVALUE 2.00e-03
tcaatctctttgatgattccaatggtcttggatagcggcttcactgctttctgtgatggtaagatgtttcaggctcatcttatttcctgacctagatatataaccagccattattctaagatgccctggttcctgtttgtagaaaatggtatttggcagccataatctgggtgccaggggtactctgctgctaccaggttggtcactctttccaac

SEQ ID NO: 29263 - DNA, 174 bp, Homo sapiens
  MAP TO AL139187.4; EXPRESSED IN BONE MARROW, SIGNAL = 0.71; EXPRESSED IN PLACENTA, SIGNAL = 1.2; EXPRESSED IN ADULT LIVER, SIGNAL = 0.74; EXPRESSED IN BRAIN, SIGNAL = 0.79; EXPRESSED IN FETAL LIVER, SIGNAL = 0.59; NT HIT: AL049801.1, EVALUE 1.00e-93; EST_HUMAN HIT: BE786489.1, EVALUE 3.80e-02; SWISSPROT HIT: P09231, EVALUE 8.80e+00
gcgactccgatggaacagtttccagctgtcgcaccagccccggccggccccagcatcgccccacatcagcagccagacggccagccagctgagcctgctccagcgcttctcactgctccgcctcacggccatcatggagaagcactccatgtccaacaagcacggctggacatg

SEQ ID NO: 29264 - DNA, 78 bp, Homo sapiens
  MAP TO AC021880.2; EXPRESSED IN ADULT LIVER, SIGNAL = 0.61; EXPRESSED IN BRAIN, SIGNAL = 0.5; EXPRESSED IN BONE MARROW, SIGNAL = 0.78; EXPRESSED IN PLACENTA, SIGNAL = 0.53; EXPRESSED IN FETAL LIVER, SIGNAL = 0.51; NT HIT: AF245445.1, EVALUE 6.20e-01; EST_HUMAN HIT: BE277860.1, EVALUE 2.30e-01; SWISSPROT HIT: P01870, EVALUE 7.40e+00
aggaatgcaattatatgccccccacggcaaacacgaaggaagacacgtcagtgacagccgcagcctgttcacgtcgtc

SEQ ID NO: 29265 - DNA, 159 bp, Homo sapiens
  MAP TO AC023296.2; EXPRESSED IN PLACENTA, SIGNAL = 0.64; EXPRESSED IN BRAIN, SIGNAL = 0.61; EXPRESSED IN BONE MARROW, SIGNAL = 0.55; EXPRESSED IN ADULT LIVER, SIGNAL = 0.64; EXPRESSED IN FETAL LIVER, SIGNAL = 0.55; SWISSPROT HIT: P26644, EVALUE 1.00e-07; EST_HUMAN HIT: H22841.1, EVALUE 2.00e-84; NT HIT: AL049866.2, EVALUE 3.60e-01
ctttgcagacaggtttgctcggattccacctgccgtctttggtacagcgaatagtggcggatgtgactgcttccatgacatagcctgggttacactgatagctcacagtcttgttgaaggtgaagtcggtcccaaactggatgccatttgctagtgtgc

SEQ ID NO: 29266 - DNA, 110 bp, Homo sapiens
  MAP TO AC010338.3; EXPRESSED IN PLACENTA, SIGNAL = 0.63; EXPRESSED IN FETAL LIVER, SIGNAL = 0.55; EXPRESSED IN ADULT LIVER, SIGNAL = 0.64; EXPRESSED IN BRAIN, SIGNAL = 0.76; EXPRESSED IN BONE MARROW, SIGNAL = 0.67; SWISSPROT HIT: P13729, EVALUE 1.60e-01; EST_HUMAN HIT: AA339356.1, EVALUE 8.90e-02; NT HIT: D16237.1, EVALUE 9.40e-01
gaacagctgctgccctaccacatcctgcaaaacttcccccaagacaattaccaggcaaaaatcatcctcattttccaaaccaaaaatcaaggcatgtggttgaccaggga

SEQ ID NO: 29267 - DNA, 496 bp, Homo sapiens
  MAP TO AC024196.2; EXPRESSED IN BRAIN, SIGNAL = 0.45; NT HIT: gi9910293, EVALUE 6.00e-49; EST_HUMAN HIT: BE746373.1, EVALUE 1.00e-10; SWISSPROT HIT: P48669, EVALUE 4.00e-19
ctctgtcaactcaacctttcccaccatgagtcggcaactgaacatcaagtccagtggtgacaagggcaacttcagtgtgcattcggcagtggtgccaaggaaggctgtgggtagcctggcttcttactgtgcagctggcagaggggctggcgctggctttggcagtcggagcctctatagccttggagggaatcggcgtatttctttcaatgtggctggtggcggcgttcgggctggaggttacggcttcaggcctggctctgggtatggagggggccgggccagtggctttgctggcagtatgtttggcagtgtggccctggggcctgcatgtttgtctgtgtgcccacctgggggcatccaccaggtcactgtcaacaagagcctcttggcccccctcaacgtggagctggaccctgagatccagaaggtgcgcgcccaggagcgggaacagatcaaggtgctgaacgacaagttcgcctccttcattgacaag

SEQ ID NO: 29268 - DNA, 207 bp, Homo sapiens
  MAP TO AL109943.18; EXPRESSED IN PLACENTA, SIGNAL = 0.7; EXPRESSED IN ADULT LIVER, SIGNAL = 0.57; EXPRESSED IN FETAL LIVER, SIGNAL = 0.55; EXPRESSED IN BRAIN, SIGNAL = 0.57; EXPRESSED IN BONE MARROW, SIGNAL = 0.56; SWISSPROT HIT: P53939, EVALUE 5.70e-01; NT HIT: gi11431840, EVALUE 1.20e-01; EST_HUMAN HIT: AI873042.1, EVALUE 4.70e-02
acctttccagaatgaattgcaacttcccccttgggctctatcaacacttctttcgggagctctggctttctgtgggcccagatggatactgaaggatctttgacaaataatagtagaactgccaaagccaccaatagccaagccaattggaaaatcatggtggcctttatgtcacttgcatatttattaagcacctactggaaggct

SEQ ID NO: 29269 - DNA, 150 bp, Homo sapiens
  MAP TO AC023114.3; EXPRESSED IN ADULT LIVER, SIGNAL = 1.3; EXPRESSED IN FETAL LIVER, SIGNAL = 1.2; EXPRESSED IN BONE MARROW, SIGNAL =   1; EXPRESSED IN LUNG, SIGNAL = 1.1; EXPRESSED IN PLACENTA, SIGNAL = 1.2; EXPRESSED IN BRAIN, SIGNAL = 1.8; EST_HUMAN HIT: H17831.1, EVALUE 1.30e-01; NT HIT: AF111170.3, EVALUE 8.60e-02
ttacaaatcttccagccatgagatagccaatatcctcccgctctccctcccccaccccattggcatctgctacacacaaactcttacccagacacccattcacctgacttacatcgagcccatcttttttcttctgtgtctctagctgaa

SEQ ID NO: 29270 - DNA, 119 bp, Homo sapiens
  MAP TO AL133293.14; EXPRESSED IN ADULT LIVER, SIGNAL = 0.57; EXPRESSED IN BRAIN, SIGNAL = 0.62; EXPRESSED IN BONE MARROW, SIGNAL = 0.63; EXPRESSED IN LUNG, SIGNAL = 0.97; EXPRESSED IN PLACENTA, SIGNAL = 0.5; EXPRESSED IN FETAL LIVER, SIGNAL = 0.5; NT HIT: AF057121.1, EVALUE 2.60e-01; EST_HUMAN HIT: F16182.2, EVALUE 6.00e+00; SWISSPROT HIT: P03179, EVALUE 3.10e+00
cttcctaagtccccgtgtccgttaacgaagctggtgacgacatgttcctcatggagtatctcgaggattaggcaaataccgaaaagctgttgcggcagggccaggtttgcaatccgtag

SEQ ID NO: 29271 - DNA, 79 bp, Homo sapiens
  MAP TO AC026236.4; EXPRESSED IN PLACENTA, SIGNAL = 0.48; EXPRESSED IN ADULT LIVER, SIGNAL = 0.51; EXPRESSED IN FETAL LIVER, SIGNAL = 0.47; EXPRESSED IN BRAIN, SIGNAL = 0.44; EXPRESSED IN BONE MARROW, SIGNAL = 0.47; NT HIT: Y18930.1, EVALUE 9.80e+00
ctccaaattcagactgtgctgtgggctttatgtgcatcatttctaacctgtcctcagccctgcaaagtggattgtcctg

SEQ ID NO: 29272 - DNA, 193 bp, Homo sapiens
  MAP TO AC008474.4; EXPRESSED IN FETAL LIVER, SIGNAL = 0.8; EXPRESSED IN PLACENTA, SIGNAL = 0.61; EXPRESSED IN ADULT LIVER, SIGNAL = 0.68; EXPRESSED IN BONE MARROW, SIGNAL = 0.72; EXPRESSED IN BRAIN, SIGNAL = 0.7; EST_HUMAN HIT: AW880859.1, EVALUE 4.00e-27; SWISSPROT HIT: P54924, EVALUE 8.60e+00; NT HIT: AE004865.1, EVALUE 2.90e-02
ttgcctccatggtccccacgtatttaaagatcaggttgtaaatttcatgatggacgtatatctgtggaatcaacagaccccattcagggtgtgagcgggcaacagggtgtgcctcccagccactccgccccaccctcacctccactgcctgcttcatcaggttcatctgggcctcctgcttggcgagcatttt

SEQ ID NO: 29273 - DNA, 169 bp, Homo sapiens
  MAP TO AC010290.4; EXPRESSED IN PLACENTA, SIGNAL = 0.52; EXPRESSED IN BONE MARROW, SIGNAL = 0.62; EXPRESSED IN ADULT LIVER, SIGNAL = 0.53; EXPRESSED IN BRAIN, SIGNAL = 0.65; EXPRESSED IN FETAL LIVER, SIGNAL = 0.51; EST_HUMAN HIT: H26257.1, EVALUE 9.10e+00; NT HIT: gi6681208, EVALUE 6.10e+00; SWISSPROT HIT: P11420, EVALUE 2.00e-01
gtgcactttgttccggacacaggaacagtggctcagattgtctataccgatgaccaggttcgccccccacagcaggtggtgtacacggcagatggtgcctcctacacatcagtggatggtccagagcacacgctggtgtacatccacccggtggaagctgcacaggcat

SEQ ID NO: 29274 - DNA, 177 bp, Homo sapiens
  MAP TO AC025119.2; EXPRESSED IN BONE MARROW, SIGNAL = 0.69; EXPRESSED IN PLACENTA, SIGNAL = 0.86; EXPRESSED IN ADULT LIVER, SIGNAL = 0.81; EXPRESSED IN FETAL LIVER, SIGNAL = 0.87; EXPRESSED IN BRAIN, SIGNAL = 0.73; SWISSPROT HIT: P30408, EVALUE 6.00e-12; EST_HUMAN HIT: BF213446.1, EVALUE 3.00e-95; NT HIT: AB014057.1, EVALUE 4.10e-01
catgatgcctgagaaacagattccttcaaaataccacacgtagttggtgagtttattgctggatgcataggaagtttgcccattcgggaaatacaataatatgttcacgattatactccaaagtgcaagcggaatcagcaaacaacttaggcagcctccacacttccgagaccccat

SEQ ID NO: 29275 - DNA, 152 bp, Homo sapiens
  MAP TO AC011652.4; EXPRESSED IN PLACENTA, SIGNAL = 0.69; EXPRESSED IN ADULT LIVER, SIGNAL = 0.67; EXPRESSED IN BRAIN, SIGNAL = 0.46; EXPRESSED IN BONE MARROW, SIGNAL = 0.97; EST_HUMAN HIT: AA383873.1, EVALUE 1.00e-17; NT HIT: U60822.1, EVALUE 1.00e-19; SWISSPROT HIT: P22645, EVALUE 4.00e+00
tgaatggctttgaccaaaatgctgatagtgatatggacaatgaagtccaggctgagatggtctcagttcccaacaagttcctcatctcatctcacctcatcttagcccaggctcagatggagatgagaaacttgttggggactggaataaag

SEQ ID NO: 29276 - DNA, 225 bp, Homo sapiens
  MAP TO AC022939.2; EXPRESSED IN ADULT LIVER, SIGNAL = 0.73; EXPRESSED IN BRAIN, SIGNAL = 0.7; EXPRESSED IN BONE MARROW, SIGNAL = 0.66; EXPRESSED IN PLACENTA, SIGNAL = 0.67; EXPRESSED IN FETAL LIVER, SIGNAL = 0.51; SWISSPROT HIT: Q40170, EVALUE 6.60e+00; NT HIT: AF016898.1, EVALUE 3.40e-02; EST_HUMAN HIT: AI910393.1, EVALUE 2.00e-94
ggtgtttccaaaaacggagccaaaacagcagaagaaggaggaggaggagaaaggggagctaagtccagacaaggaggttctgacaaaagagaaagaggaactgaagggcgaggagaaattttggcagtctttttccgttcagaaattattttagacaattttttgtttttctcttgcaaagaaatgactttatcagagccttttttagaagcttctaagtaccat

SEQ ID NO: 29277 - DNA, 193 bp, Homo sapiens
  MAP TO AC021115.3; EXPRESSED IN LUNG, SIGNAL = 0.97; EXPRESSED IN ADULT LIVER, SIGNAL = 0.85; EXPRESSED IN FETAL LIVER, SIGNAL = 0.69; EXPRESSED IN BRAIN, SIGNAL = 0.85; EXPRESSED IN PLACENTA, SIGNAL = 0.92; EXPRESSED IN BONE MARROW, SIGNAL = 0.68; EST_HUMAN HIT: AW103848.1, EVALUE 1.00e-104; SWISSPROT HIT: Q01645, EVALUE 5.10e-02; NT HIT: AJ277441.1, EVALUE 2.00e-95
catgagaaagtctcacctggaagcggtggaagtcctgcggcttgaagtcattgggggagcagccgcaccagtccacgatgtgcttgtactggcacttgcagcccagcttgcgattccagttggtgatgcgcaggttgttgtccaccatggtgtcgcagtgggggctgttctccaggaccgtatggaagaagga

SEQ ID NO: 29278 - DNA, 114 bp, Homo sapiens
  MAP TO AC012480.3; EXPRESSED IN LUNG, SIGNAL =   1; EXPRESSED IN PLACENTA, SIGNAL = 0.94; EXPRESSED IN FETAL LIVER, SIGNAL = 0.71; EXPRESSED IN ADULT LIVER, SIGNAL = 0.9; EXPRESSED IN BRAIN, SIGNAL = 0.67; EXPRESSED IN BONE MARROW, SIGNAL = 0.71; NT HIT: AJ271735.1, EVALUE 1.00e-06; EST_HUMAN HIT: F13080.1, EVALUE 4.00e-53
gatgtgcaggttggctacataggtaaacatgtgctatgctggttgatcggcaatgttgtaagcaaaaaagtcaaaaatgattacttcagtcttctcttagttcaggccatgcat

SEQ ID NO: 29279 - DNA, 102 bp, Homo sapiens
  MAP TO AC015649.5; EXPRESSED IN PLACENTA, SIGNAL = 0.79; EXPRESSED IN FETAL LIVER, SIGNAL = 1.4; EXPRESSED IN ADULT LIVER, SIGNAL = 0.78; EXPRESSED IN BRAIN, SIGNAL = 0.67; EXPRESSED IN BONE MARROW, SIGNAL = 1.1; EST_HUMAN HIT: N40997.1, EVALUE 5.00e+00; SWISSPROT HIT: P16157, EVALUE 1.00e-13; NT HIT: U50093.1, EVALUE 6.00e-51
ctggttacaggtgttaatatctaccccattccgcaggtgatccaaagctttgtccaagttacctgatcttgctgctctcagaaagctggtagcagcatcggc

SEQ ID NO: 29280 - DNA, 195 bp, Homo sapiens
  MAP TO AL109930.5; EXPRESSED IN BONE MARROW, SIGNAL = 1.5; EXPRESSED IN PLACENTA, SIGNAL =   1; EXPRESSED IN ADULT LIVER, SIGNAL = 1.4; EXPRESSED IN BRAIN, SIGNAL = 1.6; EXPRESSED IN LUNG, SIGNAL = 1.3; EXPRESSED IN FETAL LIVER, SIGNAL = 1.2; NT HIT: AL163278.2, EVALUE 8.00e-09; SWISSPROT HIT: Q17298, EVALUE 3.80e+00; EST_HUMAN HIT: R10887.1, EVALUE 1.00e-97
aaacgcagcataagtcgaagttgcaatggacagcatacgtcgaaacttcctctgtgccagactccttgtggggactctcttctcatcgcctcctttagtcctcaccactgccctatgaggaagaatgtgctttttaacttcattttacagatgagaaaactgaggcccataaggcgaagttactctctcaagcca

SEQ ID NO: 29281 - DNA, 196 bp, Homo sapiens
  MAP TO AC008739.5; EXPRESSED IN PLACENTA, SIGNAL = 0.56; EXPRESSED IN ADULT LIVER, SIGNAL = 0.58; EXPRESSED IN FETAL LIVER, SIGNAL = 0.78; EXPRESSED IN BONE MARROW, SIGNAL = 0.69; EXPRESSED IN BRAIN, SIGNAL = 0.77
agaaaaagaaaacagaagcagaagaatccaaaaaagcagcagcagcaggagaaggagaagaggaggaggaggaggaggaggagaaaaaggaggaggaggaggagaaggaggaggaggaggagaaaaaggaggaggagaaggagaagaagaaggagaagaagaagaagaagaggaagaagaagaagaggaagaagag

SEQ ID NO: 29282 - DNA, 232 bp, Homo sapiens
  MAP TO AC019184.2; EXPRESSED IN PLACENTA, SIGNAL = 0.56; EXPRESSED IN ADULT LIVER, SIGNAL = 0.77; EXPRESSED IN BRAIN, SIGNAL = 0.7; EXPRESSED IN BONE MARROW, SIGNAL = 0.69; EXPRESSED IN FETAL LIVER, SIGNAL = 0.74; SWISSPROT HIT: Q58162, EVALUE 4.80e+00; NT HIT: U88415.1, EVALUE 5.50e-01
atgctaagggatgtccagtgtacactgcttgatgatgaagatgagggaagaggaaggaagaagaatggtaaaggaaagaagaggaggaagaaaaaaaagaaaggaggaggagaaggaaaaaagaagaaagaggaagaagagaagaaaaataaaaaggagaagaccattagcaaaatggaaaacaataataataatgcacctttgggtagaaatgttcccattcttaataaaa

SEQ ID NO: 29283 - DNA, 164 bp, Homo sapiens
  MAP TO AC007325.51; EXPRESSED IN LUNG, SIGNAL = 1.1; EXPRESSED IN FETAL LIVER, SIGNAL = 1.1; EXPRESSED IN BRAIN, SIGNAL =   1; EXPRESSED IN PLACENTA, SIGNAL = 0.99; EXPRESSED IN BONE MARROW, SIGNAL = 0.97; EXPRESSED IN ADULT LIVER, SIGNAL = 2.6; SWISSPROT HIT: P19440, EVALUE 7.00e-21; EST_HUMAN HIT: H72018.1, EVALUE 5.00e-57; NT HIT: AJ007379.1, EVALUE 2.00e-80
ctttgaggatgttgaggatgagggccagcacgggcccgctgagccgcgcactgggcatgtacagcaccgcgtctcccaggctgatgttcagcgggtgctcgatcagctcagcacagtagttgttcaggtcctcagctgtcacaatgccccctgcaatgggacag

SEQ ID NO: 29284 - DNA, 156 bp, Homo sapiens
  MAP TO AL157392.2; EXPRESSED IN LUNG, SIGNAL = 0.85; EXPRESSED IN PLACENTA, SIGNAL = 0.71; EXPRESSED IN FETAL LIVER, SIGNAL = 2.8; EXPRESSED IN BRAIN, SIGNAL = 2.3; EXPRESSED IN BONE MARROW, SIGNAL = 0.76; EXPRESSED IN ADULT LIVER, SIGNAL = 0.92; EXPRESSED IN HELA, SIGNAL = 3.1; NT HIT: gi11430647, EVALUE 6.00e-83; EST_HUMAN HIT: AI588999.1, EVALUE 9.00e-83; SWISSPROT HIT: P33411, EVALUE 9.10e-02
ctgaatatatttccgctgagtttcgtcatttaaaacatgtgcaacatgcttggaaaaaatcttttctctgccagttctggcatggataccaaccatagtgacaccgatgggccaaggcgcatttccaatggccatctgaagataagcatcatttgc

SEQ ID NO: 29285 - DNA, 163 bp, Homo sapiens
  MAP TO AC010458.2; EXPRESSED IN BRAIN, SIGNAL = 0.53; EXPRESSED IN BONE MARROW, SIGNAL = 0.62; EXPRESSED IN PLACENTA, SIGNAL = 0.6; EXPRESSED IN ADULT LIVER, SIGNAL = 0.54; EXPRESSED IN FETAL LIVER, SIGNAL = 0.58; SWISSPROT HIT: P57055, EVALUE 4.60e-01; NT HIT: AF224511.1, EVALUE 1.00e-84; EST_HUMAN HIT: W22993.1, EVALUE 3.00e-52
atgtctcgctgaggaggtcctggaagctccagaccctctccacctggtcaacatggagcaagcgcttgtggagaaccaaagcccaaaagccccagatcgccttaaagcagagagggagggcaggcgggagggagggcattggcatgcggcgctgtgcatgggg

SEQ ID NO: 29286 - DNA, 151 bp, Homo sapiens
  MAP TO AC019223.2; EXPRESSED IN FETAL LIVER, SIGNAL = 0.8; EXPRESSED IN BRAIN, SIGNAL = 0.56; EXPRESSED IN PLACENTA, SIGNAL = 0.73; EXPRESSED IN BONE MARROW, SIGNAL = 0.74; EST_HUMAN HIT: N86348.1, EVALUE 1.30e-01; SWISSPROT HIT: Q00401, EVALUE 7.90e-01; NT HIT: M21986.1, EVALUE 1.40e+00
atggcatcacctcagcccaggagctcacttctgtaagtgacaccacctcagatgacatcatcccagagcaagacttcatctttggaaattactttgcaccctgtgctggagatgtatttaccccagacattaaaacctctattccagtaat

SEQ ID NO: 29287 - DNA, 126 bp, Homo sapiens
  MAP TO AL136308.4; EXPRESSED IN PLACENTA, SIGNAL =   1; EXPRESSED IN ADULT LIVER, SIGNAL = 0.56; EXPRESSED IN FETAL LIVER, SIGNAL = 0.84; EXPRESSED IN BONE MARROW, SIGNAL = 0.95; EXPRESSED IN BRAIN, SIGNAL = 1.1; NT HIT: L76301.1, EVALUE 1.10e+00
atactatgacatcaccaccaccaccaccaccaccaccatcatcatcatcatcatcattttaatcttatggttaatgtatctttatgatcaacatttctctgttttctgcaactttatctttgagat

SEQ ID NO: 29288 - DNA, 107 bp, Homo sapiens
  MAP TO AC012428.4; EXPRESSED IN LUNG, SIGNAL =   1; EXPRESSED IN PLACENTA, SIGNAL = 1.4; EXPRESSED IN ADULT LIVER, SIGNAL = 0.67; EXPRESSED IN FETAL LIVER, SIGNAL = 1.3; EXPRESSED IN BRAIN, SIGNAL = 0.58; EXPRESSED IN BONE MARROW, SIGNAL = 1.6; NT HIT: AF163865.1, EVALUE 9.10e-01; EST_HUMAN HIT: AW662153.1, EVALUE 8.60e-02; SWISSPROT HIT: P03193, EVALUE 2.40e+00
atgaggtatgtgatgagagacatgaagaaattgaggaaatgtgtcatttggatgtctggggctaaaggcatccaaggcagaaggaacatgagtgcagaggacttgag

SEQ ID NO: 29289 - DNA, 211 bp, Homo sapiens
  MAP TO AC025221.2; EXPRESSED IN PLACENTA, SIGNAL = 0.52; EXPRESSED IN FETAL LIVER, SIGNAL = 0.58; EXPRESSED IN BONE MARROW, SIGNAL = 0.64; EXPRESSED IN ADULT LIVER, SIGNAL = 0.77; EXPRESSED IN BRAIN, SIGNAL = 0.6; NT HIT: gi11423595, EVALUE 1.00e-115; SWISSPROT HIT: P35573, EVALUE 1.00e-37; EST_HUMAN HIT: BF382029.1, EVALUE 1.00e-115
ccttgaaggaaataatactgaaatgaaccagattgttgcagattaagtttacagtatttatcagaatcatcttctctttctgttggattttcccaatccagagaacggaatttttctctattaaatgtttctccaggaaatgggtaatttgtatacacggtaactgcttttccctgtaaagttgggcctaatcggaactgtagctcatacc

SEQ ID NO: 29290 - DNA, 218 bp, Homo sapiens
  MAP TO AL139187.4; EXPRESSED IN PLACENTA, SIGNAL =   1; EXPRESSED IN ADULT LIVER, SIGNAL = 0.8; EXPRESSED IN FETAL LIVER, SIGNAL = 0.69; EXPRESSED IN LUNG, SIGNAL = 0.86; EXPRESSED IN BRAIN, SIGNAL = 0.79; EXPRESSED IN BONE MARROW, SIGNAL = 0.67; EST_HUMAN HIT: W31834.1, EVALUE 1.00e-119; SWISSPROT HIT: Q06831, EVALUE 8.20e-02; NT HIT: AL049801.1, EVALUE 1.00e-120
gtgggcgacgggaacccgctgaagctgtggaaggcttctgtggaggtggaagcacccccctcagtggtcctgaaccgcgtgctgagagagcgccacctgtgggacgaggactttgtgcagtggaaggttgtggaaactctagacaggcaaacagagatctaccagtatgtgctgaacagcatggctccccatccttccagagactttgtggttctcag

SEQ ID NO: 29291 - DNA, 155 bp, Homo sapiens
  MAP TO AL109614.27; EXPRESSED IN PLACENTA, SIGNAL = 0.66; EXPRESSED IN ADULT LIVER, SIGNAL = 0.65; EXPRESSED IN BRAIN, SIGNAL = 0.63; EXPRESSED IN BONE MARROW, SIGNAL = 0.64; EXPRESSED IN FETAL LIVER, SIGNAL = 0.53; SWISSPROT HIT: Q50697, EVALUE 4.00e+00; NT HIT: M36974.1, EVALUE 3.50e-01; EST_HUMAN HIT: AI092719.1, EVALUE 3.40e-02
ctctggcaaatcaatgatggccattaaagtgggttgtgcaataaatgagaaggtgaatttcaaagcaaataggttggggtgcagaatgatttccaagaaggattggcgcagttctagaaaaagaacagaggtcatccctctggctgccagcagaa

SEQ ID NO: 29292 - DNA, 372 bp, Homo sapiens
  MAP TO AC026412.1; EXPRESSED IN LUNG, SIGNAL = 0.93; EXPRESSED IN ADULT LIVER, SIGNAL = 0.76; EXPRESSED IN BRAIN, SIGNAL = 0.75; EXPRESSED IN BONE MARROW, SIGNAL = 0.75; EXPRESSED IN PLACENTA, SIGNAL = 0.81; EXPRESSED IN FETAL LIVER, SIGNAL = 0.62; SWISSPROT HIT: P08123, EVALUE 1.80e-01
ctaggcgctctgggctgagctgaccagccccaagatgggagcaggggtgtccaggaaggcaacaggcccctgggcccctgtgtgcagactgcacatcacctgtacccctggggagtggcagctggccacatgtgtggagaggccaggctcagccccgccgtcccacggcacccagaaagccaggttgcagaggctggctcccaggagcacggccctccctgggccctcggagttagtacactgtctccagaaacaccagccccctgtcccgtagcagagcggtctcttgcgggtctcaggccttccagcctgactgtccacctttgcagccagctcccctcccttgccgtctgctaggatgacctcccacat

SEQ ID NO: 29293 - DNA, 90 bp, Homo sapiens
  MAP TO AC010721.2; EXPRESSED IN PLACENTA, SIGNAL = 0.82; EXPRESSED IN ADULT LIVER, SIGNAL = 0.66; EXPRESSED IN FETAL LIVER, SIGNAL = 0.61; EXPRESSED IN BRAIN, SIGNAL = 0.63; EXPRESSED IN BONE MARROW, SIGNAL = 0.59; EST_HUMAN HIT: AW818245.1, EVALUE 6.00e-21; NT HIT: U91328.1, EVALUE 4.00e-21
aattcttccttgtgtgagatccaagaaccctctcttggggtctggatcgggacccctttctgataacacaaccgtgaagttatttgttaa

SEQ ID NO: 29294 - DNA, 77 bp, Homo sapiens; identical to SEQ ID NO: 28892
  MAP TO AL137225.7; EXPRESSED IN PLACENTA, SIGNAL = 0.81; EXPRESSED IN ADULT LIVER, SIGNAL = 0.94; EXPRESSED IN FETAL LIVER, SIGNAL = 0.76; EXPRESSED IN BONE MARROW, SIGNAL = 0.69; EXPRESSED IN BRAIN, SIGNAL = 0.59; EST_HUMAN HIT: AW964460.1, EVALUE 2.30e-01

SEQ ID NO: 29295 - DNA, 87 bp, Homo sapiens
  MAP TO AC010363.3; EXPRESSED IN PLACENTA, SIGNAL = 0.71; EXPRESSED IN FETAL LIVER, SIGNAL = 0.69; EXPRESSED IN ADULT LIVER, SIGNAL = 0.76; EXPRESSED IN BONE MARROW, SIGNAL = 0.84; EXPRESSED IN LUNG, SIGNAL = 0.87; EXPRESSED IN BRAIN, SIGNAL = 0.77; NT HIT: U67548.1, EVALUE 1.80e-01
gcattgtactggatcctgaagagtacaggggaagaggcagtcttcagagatcctcaagataaagacggagcctgggaagctgagcag

SEQ ID NO: 29296 - DNA, 189 bp, Homo sapiens
  MAP TO AL137225.7; EXPRESSED IN ADULT LIVER, SIGNAL = 0.81; EXPRESSED IN PLACENTA, SIGNAL = 0.83; EXPRESSED IN FETAL LIVER, SIGNAL =   1; EXPRESSED IN BRAIN, SIGNAL = 0.76; EXPRESSED IN BONE MARROW, SIGNAL = 0.78; EST_HUMAN HIT: BE962117.2, EVALUE 6.60e-01; SWISSPROT HIT: P10734, EVALUE 3.90e-02; NT HIT: X60658.1, EVALUE 2.00e-27
cctatcgtgaagagtgtagctggtgatatcattgacttccccaagtcccgtgccccagccaaggtgccccccaagaaggaccacacatcccaggtgatggtgccactgtacctcttcaacaccacgtttggactcctgcagaccaacggcgccctcgacatggacatcacccctgagctggtgagtgtg

SEQ ID NO: 29297 - DNA, 468 bp, Homo sapiens
  MAP TO AC015529.3; EXPRESSED IN BONE MARROW, SIGNAL = 0.61; EXPRESSED IN FETAL LIVER, SIGNAL = 0.91; EXPRESSED IN PLACENTA, SIGNAL = 0.66; EXPRESSED IN BRAIN, SIGNAL = 0.46; SWISSPROT HIT: Q13201, EVALUE 7.00e-84; NT HIT: gi11436432, EVALUE 0.00e+00; EST_HUMAN HIT: AW580947.1, EVALUE 1.70e+00
agtgatgctccctgctcaagcaagggttgaaggatctccatatcataagtcaaatcatttagttgctcactcattttgtccatcttattgtccattggaaagagaacttcagccaatgtttgatttaacacatgtaaattctcttctgtgtccttaagttgaaatttaaaatcatttctgcatttggataacatgtcttcacattcacctctgagagactctttctccatctccaaagagacggtgagattgttaatcttgctttcttgaatgtgcaaatcttcaaacatttgcagcatcatcaaactctgcttctttatattttcatgtaaagtagacatgtactcagtgacattattgctaactgactcagcagctggagcattcttctggtctgatacctgttcagttgataaaagctgctcatgtacttccttcaatttagaaagagttttattgagggattca

SEQ ID NO: 29298 - DNA, 303 bp, Homo sapiens
  MAP TO AC010492.4; EXPRESSED IN FETAL LIVER, SIGNAL = 0.74; EXPRESSED IN PLACENTA, SIGNAL = 0.52; EXPRESSED IN BRAIN, SIGNAL = 0.51; EXPRESSED IN BONE MARROW, SIGNAL = 1.7; EXPRESSED IN LUNG, SIGNAL = 0.97; NT HIT: gi11424387, EVALUE 0.00e+00; SWISSPROT HIT: Q64281, EVALUE 2.00e-17; EST_HUMAN HIT: AW748728.1, EVALUE 6.00e-24
gagcctacagcaaacccaccctctcagccctgcccagccctgtggtggcctcaggggggaatatgaccctccgatgtggctcacagaagggatatcaccattttgttctgatgaaggaaggagaacaccagctcccccggaccctggactcacagcagctccacagtcgggggttccaggccctgttccctgtgggccccgtgacccccagccacaggtggaggttcacatgctattactattatacaaacaccccctgggtgtggtcccaccccagtgaccccctggagattctgccctcag

SEQ ID NO: 29299 - DNA, 129 bp, Homo sapiens
  MAP TO AC008431.2; EXPRESSED IN ADULT LIVER, SIGNAL = 0.69; EXPRESSED IN BRAIN, SIGNAL = 0.62; EXPRESSED IN BONE MARROW, SIGNAL = 0.59; EXPRESSED IN PLACENTA, SIGNAL = 0.6; EXPRESSED IN FETAL LIVER, SIGNAL = 0.55; NT HIT: AJ390961.1, EVALUE 3.80e+00; EST_HUMAN HIT: AW162889.1, EVALUE 4.50e+00
atgagcgcttcttctgacattaccaatgcttcccctttaactcttgttcttctggaaatgatcatcatcatcatcatcattatcatcatcatcatcttcaccagacattctactggccacattacataa

SEQ ID NO: 29300 - DNA, 229 bp, Homo sapiens
  MAP TO AL133316.2; EXPRESSED IN PLACENTA, SIGNAL = 0.57; EXPRESSED IN ADULT LIVER, SIGNAL = 0.51; EXPRESSED IN FETAL LIVER, SIGNAL = 0.52; EXPRESSED IN BRAIN, SIGNAL = 0.87; EXPRESSED IN BONE MARROW, SIGNAL = 0.44; NT HIT: gi4505424, EVALUE 1.00e-126; SWISSPROT HIT: P51513, EVALUE 5.00e-39
aggggcttgggtgcagctttcccagaaacctgatgggatcaacttgcaagagagggttgtcactgtgagtggagaacctgaacaaaaccgaaaagctgttgaacttatcatccagaagatacaagaggatccacaaagtggcagctgtctcaatatcagttatgccaatgtgacaggtccagtggcaaattccaatccaaccggatctccttatgcaaacactgctgaa

SEQ ID NO: 29301 - DNA, 83 bp, Homo sapiens
  MAP TO AL133284.7; EXPRESSED IN PLACENTA, SIGNAL = 1.1; EXPRESSED IN ADULT LIVER, SIGNAL = 1.2; EXPRESSED IN FETAL LIVER, SIGNAL = 1.2; EXPRESSED IN BRAIN, SIGNAL = 1.2; EXPRESSED IN BONE MARROW, SIGNAL = 1.2; EXPRESSED IN LUNG, SIGNAL = 1.1; EST_HUMAN HIT: AW298575.1, EVALUE 6.80e-01; NT HIT: AL161532.2, EVALUE 5.70e-01
tcagtcctccttcctcttttcattgtccacagctgcatctggccactgctccacaccggcctcctggatataggatgaattcc

SEQ ID NO: 29302 - DNA, 120 bp, Homo sapiens
  MAP TO AL139186.3; EXPRESSED IN ADULT LIVER, SIGNAL = 0.8; EXPRESSED IN BRAIN, SIGNAL = 0.61; EXPRESSED IN PLACENTA, SIGNAL = 0.8; EXPRESSED IN FETAL LIVER, SIGNAL = 0.67; EXPRESSED IN BONE MARROW, SIGNAL = 0.64; NT HIT: D89660.1, EVALUE 2.70e-01
ctggtttccagcatctctttgatccagtttccctgagttgttagctacttctgccaagcccaaagagctataggcctctgtgagcccatcctgtccctcataggctgggcaatgattcat

SEQ ID NO: 29303 - DNA, 137 bp, Homo sapiens
  MAP TO AL161646.3; EXPRESSED IN ADULT LIVER, SIGNAL = 0.51; EXPRESSED IN FETAL LIVER, SIGNAL = 0.5; EXPRESSED IN PLACENTA, SIGNAL = 0.56; EXPRESSED IN BRAIN, SIGNAL = 0.62; EXPRESSED IN BONE MARROW, SIGNAL = 0.65; NT HIT: Z99124.1, EVALUE 7.80e-02; EST_HUMAN HIT: AA548597.1, EVALUE 7.10e+00; SWISSPROT HIT: P24719, EVALUE 6.90e+00
agcatttattgcaatgtataaaatgtatatgtcttttcttgttctttcactggcttttgccccactagcctgtaagtttgtgaggacaaagactatgtccttgttcactgctatattctcagcacattgggctatac

SEQ ID NO: 29304 - DNA, 346 bp, Homo sapiens
  MAP TO AL161747.1; EXPRESSED IN PLACENTA, SIGNAL = 0.91; EXPRESSED IN FETAL LIVER, SIGNAL = 0.83; EXPRESSED IN BONE MARROW, SIGNAL = 0.82; EXPRESSED IN ADULT LIVER, SIGNAL = 0.99; EXPRESSED IN BRAIN, SIGNAL = 0.54; EST_HUMAN HIT: BE206710.1, EVALUE 0.00e+00; SWISSPROT HIT: O04895, EVALUE 4.00e+00; NT HIT: AF169825.1, EVALUE 2.00e-72
ttgagcttgctcttgccctttgttttggaggcaccagatgttttactcttctttggcttctcctctttcagcctctccccagcactcttcttcctgcgtttcttctcgccttcctcctctggccgaacgctgggcaactcgtcctcatttaagactcgaggtatgttctgctcaccgcgggcacgggctctcgcaatggcctctgctacaatccgatttgctttctcttgcttcttctggtgttccaatctgcggttttcctccattcctgtctttccccccgaatgaggagcagagcttgctggtgatgacaaagctgccacttcactggcactcagaactttaa

SEQ ID NO: 29305 - DNA, 203 bp, Homo sapiens
  MAP TO AC019042.3; EXPRESSED IN PLACENTA, SIGNAL = 0.65; EXPRESSED IN FETAL LIVER, SIGNAL = 0.57; EXPRESSED IN BONE MARROW, SIGNAL = 0.48; EXPRESSED IN ADULT LIVER, SIGNAL = 0.65; EXPRESSED IN BRAIN, SIGNAL = 0.53; SWISSPROT HIT: P13497, EVALUE 7.00e-04; EST_HUMAN HIT: AA157147.1, EVALUE 2.80e+00; NT HIT: Y17736.2, EVALUE 3.10e-02
cttgcagtttcttgcttttgatacggaagcatcacatgatatactccgagtctgggacggtccaccagaaaatgatatgcttttaaaggaaattagtggatctcttattcctgaaggaattcatagcaccctcaatatagtaaccatccagtttgacacggatttttatattagcaaatctggatttgcaattcagttttcaa

SEQ ID NO: 29306 - DNA, 237 bp, Homo sapiens; identical to SEQ ID NO: 25334
  MAP TO AL139296.2; EXPRESSED IN PLACENTA, SIGNAL = 0.54; EXPRESSED IN ADULT LIVER, SIGNAL = 0.74; EXPRESSED IN BONE MARROW, SIGNAL = 0.55; EXPRESSED IN BRAIN, SIGNAL = 0.97; NT HIT: X66092.1, EVALUE 1.40e-01; SWISSPROT HIT: P72855, EVALUE 4.40e+00

SEQ ID NO: 29307 - DNA, 86 bp, Homo sapiens
  MAP TO AC024972.2; EXPRESSED IN PLACENTA, SIGNAL = 0.51; EXPRESSED IN BRAIN, SIGNAL = 0.7; NT HIT: AL163202.2, EVALUE 4.00e-21; EST_HUMAN HIT: AA766596.1, EVALUE 3.00e-13
cagagttgtacattccttttcatagagcagttctgaaacactctttttgaaggatctgtatgtgcaaatttggagagcttccaggc

SEQ ID NO: 29308 - DNA, 85 bp, Homo sapiens
  MAP TO AC013764.3; EXPRESSED IN LUNG, SIGNAL = 0.92; EXPRESSED IN PLACENTA, SIGNAL = 0.93; EXPRESSED IN FETAL LIVER, SIGNAL = 0.81; EXPRESSED IN BONE MARROW, SIGNAL = 0.7; EXPRESSED IN ADULT LIVER, SIGNAL = 0.92; EXPRESSED IN BRAIN, SIGNAL = 0.63; NT HIT: AJ251749.1, EVALUE 1.70e-01; EST_HUMAN HIT: BE207855.1, EVALUE 2.60e-01
atgctgatgcagggcaggagacgggaggaagatctgggctgcactggtggtgaagactggagaatggtcagcatgaaggtggagg

SEQ ID NO: 29309 - DNA, 167 bp, Homo sapiens
  MAP TO AC010458.2; EXPRESSED IN BRAIN, SIGNAL = 0.68; EXPRESSED IN FETAL LIVER, SIGNAL = 0.65; EXPRESSED IN PLACENTA, SIGNAL = 1.2; EXPRESSED IN ADULT LIVER, SIGNAL = 0.6; EXPRESSED IN BONE MARROW, SIGNAL = 1.1; NT HIT: AF170814.1, EVALUE 2.00e-89; EST_HUMAN HIT: W22993.1, EVALUE 7.00e-56; SWISSPROT HIT: P14533, EVALUE 3.00e-09
tttgacacgaatggagatggggagatcaccctggtggagctacagcaggccatgcagagactcctgggggagcggctcaccccccgggagatctctgaggttgtccgggaggctgatgttaatggagacggcacagttgactttgaaggtgacattgacggggcgtg

SEQ ID NO: 29310 - DNA, 111 bp, Homo sapiens
  MAP TO AC019221.3; EXPRESSED IN LUNG, SIGNAL = 1.1; EXPRESSED IN BRAIN, SIGNAL = 0.85; EXPRESSED IN BONE MARROW, SIGNAL = 1.1; EXPRESSED IN PLACENTA, SIGNAL = 0.9; EXPRESSED IN ADULT LIVER, SIGNAL = 0.89; EXPRESSED IN FETAL LIVER, SIGNAL = 0.86; SWISSPROT HIT: Q16760, EVALUE 3.00e-15; NT HIT: D63479.2, EVALUE 3.00e-56; EST_HUMAN HIT: AI247442.1, EVALUE 5.00e-34
accatcatcaaagaggggatgctgaccaaacagaacaattcattccagcgatcaaaaaggagatactttaagcttcgagggcgaacgctttactatgccaaaacggcaaag

SEQ ID NO: 29311 - DNA, 131 bp, Homo sapiens
  MAP TO AL139187.4; EXPRESSED IN FETAL LIVER, SIGNAL = 0.85; EXPRESSED IN PLACENTA, SIGNAL =   1; EXPRESSED IN ADULT LIVER, SIGNAL =   1; EXPRESSED IN BONE MARROW, SIGNAL = 1.1; EXPRESSED IN LUNG, SIGNAL = 0.94; EXPRESSED IN BRAIN, SIGNAL =   1; EST_HUMAN HIT: AW827325.1, EVALUE 1.10e-01; NT HIT: U62293.1, EVALUE 7.40e-02
gagggagcacgtgagcaagcaagtgcaagatccgggctggctgctccggctgctgacacaggagcaacttctgtgcagggcctgcatccagaccaggtgtgtcaccttgaggggaatgcagcaacacccag

SEQ ID NO: 29312 - DNA, 166 bp, Homo sapiens
  MAP TO AC026428.1; EXPRESSED IN BONE MARROW, SIGNAL = 0.46; EXPRESSED IN BRAIN, SIGNAL = 0.46; EXPRESSED IN PLACENTA, SIGNAL = 0.49; EXPRESSED IN FETAL LIVER, SIGNAL = 0.46; NT HIT: AP000006.1, EVALUE 6.00e+00
ttcctggaaggaacagggaaaacaattattgcctgacttaaaagagattttgaatggtggttttgcttcttcttcttcttcttcttcttcttcttgttcttcttcttcttcttcttcttcctcctcttcttcgtcttcttcgtcttcatctttatcttcttctttt

SEQ ID NO: 29313 - DNA, 252 bp, Homo sapiens
  MAP TO AL133344.19; EXPRESSED IN ADULT LIVER, SIGNAL = 0.76; EXPRESSED IN BONE MARROW, SIGNAL = 0.58; EXPRESSED IN BRAIN, SIGNAL = 0.53; EXPRESSED IN PLACENTA, SIGNAL = 0.71; EXPRESSED IN FETAL LIVER, SIGNAL = 0.48; SWISSPROT HIT: Q9UKL4, EVALUE 3.00e+00; NT HIT: M77144.1, EVALUE 1.50e-01; EST_HUMAN HIT: BE881902.1, EVALUE 3.60e+00
gttgtagaacacgtagagcccttacgtccctacgaatccctcgacaccctgaaacagttcctccagtatcatggcaagattttgtgtttcttctgcctgtgggatgactcagtctcaatgtttggagaccgtagagaactcatcctgcattacttcttgtgtgatgatactattgaaatcaaagaattgcttccacacagctcaggccgagatgctctaaaaatgttcctccggaggagtaagctacccaag

SEQ ID NO: 29314 - DNA, 215 bp, Homo sapiens
  MAP TO AL157911.2; EXPRESSED IN LUNG, SIGNAL = 0.88; EXPRESSED IN PLACENTA, SIGNAL = 0.88; EXPRESSED IN ADULT LIVER, SIGNAL = 0.98; EXPRESSED IN FETAL LIVER, SIGNAL = 0.94; EXPRESSED IN BRAIN, SIGNAL = 0.81; EXPRESSED IN BONE MARROW, SIGNAL = 0.8; SWISSPROT HIT: Q01129, EVALUE 1.00e-03
gtatttccaagatgactaaattaactcgcctcagcataaataataatcttctcactggttgggaagagcatacctttgataacatgcttcatcttcactcgctttctcttgagaacaacagaatcacttcattgagtggtttacaaaaatcttttactcttgttgagttatacataagcaataactatattgctgtcaatcaggagatgcacaat

SEQ ID NO: 29315 - DNA, 146 bp, Homo sapiens
  MAP TO AC012629.4; EXPRESSED IN PLACENTA, SIGNAL = 0.68; EXPRESSED IN ADULT LIVER, SIGNAL = 0.89; EXPRESSED IN BRAIN, SIGNAL = 0.79; EXPRESSED IN FETAL LIVER, SIGNAL = 0.83; EXPRESSED IN BONE MARROW, SIGNAL = 0.83; NT HIT: AJ223962.1, EVALUE 1.30e+00; SWISSPROT HIT: Q43097, EVALUE 4.00e+00; EST_HUMAN HIT: BF208935.1, EVALUE 1.90e+00
caaaccgggcccacaccttcctcaactctgagctctctgtactgtgcgcagggatgcaggtggtcctcttggccggttcaggcagcagactggtggaaacactaatgaagtttgttgagtgtcacaatgtgctgacacacttctaa

SEQ ID NO: 29316 - DNA, 101 bp, Homo sapiens
  MAP TO AL121935.12; EXPRESSED IN LUNG, SIGNAL =   1; EXPRESSED IN ADULT LIVER, SIGNAL = 1.1; EXPRESSED IN BRAIN, SIGNAL = 0.99; EXPRESSED IN BONE MARROW, SIGNAL = 0.96; EXPRESSED IN PLACENTA, SIGNAL =   1; EXPRESSED IN FETAL LIVER, SIGNAL = 0.96; EST_HUMAN HIT: AA977912.1, EVALUE 3.00e-26; NT HIT: gi11418514, EVALUE 3.00e-50
acagaagctcatcagtcttagggagttctgaaggcggatttctcagccgcgttcaagctgaagagttcgccagttcttccccagacagtgcagagcggcag

SEQ ID NO: 29317 - DNA, 281 bp, Homo sapiens
  MAP TO AL160281.2; EXPRESSED IN LUNG, SIGNAL = 0.95; EXPRESSED IN ADULT LIVER, SIGNAL = 0.84; EXPRESSED IN BONE MARROW, SIGNAL = 1.8; EXPRESSED IN BRAIN, SIGNAL = 0.77; EXPRESSED IN PLACENTA, SIGNAL = 0.95; EXPRESSED IN FETAL LIVER, SIGNAL = 1.4; NT HIT: AF134304.2, EVALUE 0.00e+00; SWISSPROT HIT: Q92558, EVALUE 5.00e-10; EST_HUMAN HIT: AW500936.1, EVALUE 0.00e+00
ttgcatccacgttttcaacacagccaatgctgccattctggtacaccaaggtgggtggatacccaaaaggccccagcttttctttggactccacaaattcttgccccatcttaattttctcccactcttccttacgtgtcttgattttacgtgggtttacattccctcgatttggattatctttcttttctttcctgtgctttctcttctctttcatgatatccttggtgtcctgcagcatcttcttcttccaaagatcaaagaagtatgaagggtctgtg

SEQ ID NO: 29318 - DNA, 133 bp, Homo sapiens
  MAP TO AL139195.2; EXPRESSED IN ADULT LIVER, SIGNAL = 0.63; EXPRESSED IN FETAL LIVER, SIGNAL = 0.55; EXPRESSED IN BRAIN, SIGNAL = 0.75; EXPRESSED IN PLACENTA, SIGNAL = 0.56; EXPRESSED IN BONE MARROW, SIGNAL = 0.71; NT HIT: gi5730036, EVALUE 3.00e-69; EST_HUMAN HIT: AA199925.1, EVALUE 4.00e-69
gaagatgctcatagataagtcgatgaaaacgtactccaagttccatcaaaactgtatccacattcttcccatccatggaatttttaatcttctccacttgttttcttacgtaagcacagacttttacacaggc

SEQ ID NO: 29319 - DNA, 348 bp, Homo sapiens
  MAP TO AC010290.4; EXPRESSED IN BONE MARROW, SIGNAL = 0.45; EXPRESSED IN BRAIN, SIGNAL = 0.48; SWISSPROT HIT: P39413, EVALUE 6.00e-20; EST_HUMAN HIT: BF333514.1, EVALUE 7.00e-98; NT HIT: AB033057.1, EVALUE 0.00e+00
aatgcagctcttcagcatctgtttattcggaagtccttccggccttttaaatgcttgcagtgtgggaaggccttccgggaaaaggacaaactggaccagcacttacgcttccatgggcgggaggggaactgcccactgacctgtgatctctgtaacaagggcttcatcagcagcacatccttggagagccacatgaagctccactcagaccagaagacttactcttgcattttttgcccagaatcctttgaccgccttgatttgttgaaagatcatgtggccattcatatcaatgatggctacttcacctgcccaacttgtaagaaacggttcccagattttatccag

SEQ ID NO: 29320 - DNA, 187 bp, Homo sapiens
  MAP TO AL121897.15; EXPRESSED IN LUNG, SIGNAL = 0.87; EXPRESSED IN ADULT LIVER, SIGNAL = 0.85; EXPRESSED IN BRAIN, SIGNAL = 0.8; EXPRESSED IN PLACENTA, SIGNAL = 0.86; EXPRESSED IN FETAL LIVER, SIGNAL = 1.3; EXPRESSED IN BONE MARROW, SIGNAL =   1; SWISSPROT HIT: P11959, EVALUE 2.90e+00; EST_HUMAN HIT: T78904.1, EVALUE 6.50e-01; NT HIT: D26114.1, EVALUE 1.70e+00
accacttcttcttctatctactgttactccttcctctgactctggtgaccccatcccggaagcctttcggaaagcgcttaccccttttccaccccatcgagttggggttatttctccttttctgggctctctcccattgctggggaggaaggcggatacgaagggcctgcatgaccgcagctgtcat

SEQ ID NO: 29321 - DNA, 176 bp, Homo sapiens
  MAP TO AC026405.1; EXPRESSED IN LUNG, SIGNAL = 0.87; EXPRESSED IN BRAIN, SIGNAL = 0.74; EXPRESSED IN PLACENTA, SIGNAL = 0.79; EXPRESSED IN ADULT LIVER, SIGNAL = 0.89; EXPRESSED IN FETAL LIVER, SIGNAL = 0.76; EXPRESSED IN BONE MARROW, SIGNAL = 0.79; EST_HUMAN HIT: AW510902.1, EVALUE 1.00e-05; NT HIT: gi11431453, EVALUE 7.00e-03
agggaaaccctgaaagggtgtccctcatcatcatccaacatgttttacaagaaaacatcagcatcatcattatcatcaccatcatcacttgttaccataagccaggcactgtgctaggcactgtaggtacaaggggaagtaaaagcagagttgttgccctctcagaattcccagtc

SEQ ID NO: 29322 - DNA, 128 bp, Homo sapiens
  MAP TO AC021288.3; EXPRESSED IN PLACENTA, SIGNAL =   1; EXPRESSED IN ADULT LIVER, SIGNAL = 1.2; EXPRESSED IN FETAL LIVER, SIGNAL = 0.82; EXPRESSED IN BRAIN, SIGNAL = 0.89; EXPRESSED IN BONE MARROW, SIGNAL = 0.97; EXPRESSED IN LUNG, SIGNAL = 0.98; NT HIT: L21710.1, EVALUE 5.00e-03; EST_HUMAN HIT: BF217979.1, EVALUE 7.00e-03
tgtactatatttagcataaaatccaatctcattaccacatttaacaataattttgggcttattccttgctttttcttcttctttattatttttatcctcttctataacttcagtctcctcctcctctt

SEQ ID NO: 29323 - DNA, 77 bp, Homo sapiens
  MAP TO AL158175.6; EXPRESSED IN PLACENTA, SIGNAL =   1; EXPRESSED IN ADULT LIVER, SIGNAL = 1.1; EXPRESSED IN FETAL LIVER, SIGNAL = 1.1; EXPRESSED IN BONE MARROW, SIGNAL = 0.99; EXPRESSED IN LUNG, SIGNAL = 1.1; EXPRESSED IN BRAIN, SIGNAL = 0.93; NT HIT: AE004452.1, EVALUE 6.10e-01; EST_HUMAN HIT: BE299046.1, EVALUE 9.00e-01
ctgcccgtgaagccatctccccttcaggccgtagtacattgaccttcttcaccttcaatagcacaaacattccattt

SEQ ID NO: 29324 - DNA, 93 bp, Homo sapiens
  MAP TO AC025746.2; EXPRESSED IN PLACENTA, SIGNAL = 0.68; EXPRESSED IN ADULT LIVER, SIGNAL = 0.63; EXPRESSED IN BRAIN, SIGNAL = 0.51; EXPRESSED IN BONE MARROW, SIGNAL = 0.72; EXPRESSED IN FETAL LIVER, SIGNAL = 0.82; NT HIT: AB021134.1, EVALUE 7.70e-01
atttctagctctgttgctgtgtgggcctagaagaaatgacactctggtaacaatgagaattcctaaagccaagataattgtttctattaccat

SEQ ID NO: 29325 - DNA, 265 bp, Homo sapiens
  MAP TO U82670.2; EXPRESSED IN PLACENTA, SIGNAL = 0.54; EXPRESSED IN FETAL LIVER, SIGNAL = 0.5; EXPRESSED IN BRAIN, SIGNAL = 0.47; SWISSPROT HIT: P26011, EVALUE 9.00e-03; NT HIT: U07000.1, EVALUE 2.50e+00; EST_HUMAN HIT: AI261837.1, EVALUE 9.50e-01
atgggcgttgcccctactccaggtgcactgcgcagggacaggtcacaggcaggcagggccattgcacctactccatccgcactgttcagggttgggtcacgggtgggcacaggcattgcccttcctgcaggtgccctgcaccgtgacaggtcaccggtgcgcagggccgttgctcccactccaggcaccctgcactgtgacgggtcacgaaaatgcacggccactggttctactccaggagccctgcccggcgacaggtcagggg

SEQ ID NO: 29326 - DNA, 146 bp, Homo sapiens
  MAP TO AC019040.3; EXPRESSED IN LUNG, SIGNAL = 0.85; EXPRESSED IN PLACENTA, SIGNAL = 0.94; EXPRESSED IN ADULT LIVER, SIGNAL = 0.77; EXPRESSED IN BRAIN, SIGNAL = 0.75; EXPRESSED IN FETAL LIVER, SIGNAL = 0.87; EXPRESSED IN BONE MARROW, SIGNAL = 0.93; SWISSPROT HIT: P27050, EVALUE 1.80e+00
tttctgaactcccagttggcttttgtgttctgacaagcggccgtggaacacaatacttaaaatcataactgccttaagaaatccgagcatgttattgcaaagtctgtgggaaaattctgggacgatgattccaaagattagattca

SEQ ID NO: 29327 - DNA, 105 bp, Homo sapiens
  MAP TO AL161646.3; EXPRESSED IN BRAIN, SIGNAL = 0.64; EXPRESSED IN PLACENTA, SIGNAL = 0.82; EXPRESSED IN ADULT LIVER, SIGNAL = 0.72; EXPRESSED IN FETAL LIVER, SIGNAL = 0.65; EXPRESSED IN BONE MARROW, SIGNAL = 0.65; EST_HUMAN HIT: BE147409.1, EVALUE 1.30e+00; SWISSPROT HIT: Q10003, EVALUE 5.50e+00; NT HIT: gi6681260, EVALUE 5.70e-02
ttatagtatttcctgtagccattcatttagagtaagtctgctgaaaaatcctgttagtttctcttcatctgaaaatgcctccatgtcctcttcattctgttcatt

SEQ ID NO: 29328 - DNA, 185 bp, Homo sapiens
  MAP TO AC011930.3; EXPRESSED IN PLACENTA, SIGNAL = 0.71; EXPRESSED IN FETAL LIVER, SIGNAL = 0.88; EXPRESSED IN BONE MARROW, SIGNAL = 0.73; EXPRESSED IN ADULT LIVER, SIGNAL = 0.85; EXPRESSED IN BRAIN, SIGNAL = 0.67; SWISSPROT HIT: O50628, EVALUE 6.60e+00; EST_HUMAN HIT: BE297758.1, EVALUE 2.50e+00; NT HIT: AF159334.1, EVALUE 6.70e+00
acatttactttcaaaatatctgtctggaccaacttgtcatttttctttttgaaggtagaatgtcttcactaaaaggataccttgagccacaaactggtcatgggaggcttcaggtagaagtgttgttgactgcacaagtggctgaaattcagtactccccaatgaaggtgccacttatgaatcag

SEQ ID NO: 29329 - DNA, 119 bp, Homo sapiens
  MAP TO AL161634.1; EXPRESSED IN FETAL LIVER, SIGNAL = 0.5; EXPRESSED IN BONE MARROW, SIGNAL = 0.56; EXPRESSED IN ADULT LIVER, SIGNAL = 0.51; EXPRESSED IN BRAIN, SIGNAL = 0.49; SWISSPROT HIT: P13318, EVALUE 9.30e+00; EST_HUMAN HIT: AW613338.1, EVALUE 6.00e+00; NT HIT: X15498.1, EVALUE 1.00e+00
acatttgcacttctcacaattctcttctcgagtatctttgggaaggtgataaacagttcacaaaattgcacaggattaacccaggtatacagatgcagcttgcaagagatgtcagcaag

SEQ ID NO: 29330 - DNA, 137 bp, Homo sapiens
  MAP TO AC018730.3; EXPRESSED IN BONE MARROW, SIGNAL = 0.98; EXPRESSED IN ADULT LIVER, SIGNAL = 1.2; EXPRESSED IN LUNG, SIGNAL =   1; EXPRESSED IN PLACENTA, SIGNAL = 1.1; EXPRESSED IN BRAIN, SIGNAL = 0.94; EXPRESSED IN FETAL LIVER, SIGNAL = 0.82; SWISSPROT HIT: P43359, EVALUE 1.40e+00; NT HIT: gi8394056, EVALUE 1.20e+00; EST_HUMAN HIT: AI521759.1, EVALUE 2.00e-24
cttgcaggcgtgtccccagctcccgggacgcagagcccgctgactgttcccccgggctccgcagacgtgcccgggttgtcagaggtgtggggctggaagtccagcgtctcggcctctgcccctgcgctcccacaggc

SEQ ID NO: 29331 - DNA, 114 bp, Homo sapiens
  MAP TO AL157392.2; EXPRESSED IN BONE MARROW, SIGNAL =   1; EXPRESSED IN PLACENTA, SIGNAL = 0.96; EXPRESSED IN ADULT LIVER, SIGNAL = 0.83; EXPRESSED IN FETAL LIVER, SIGNAL = 0.74; EXPRESSED IN BRAIN, SIGNAL = 0.88; EST_HUMAN HIT: AA411360.1, EVALUE 7.00e-58; NT HIT: gi11430647, EVALUE 5.00e-58; SWISSPROT HIT: P08442, EVALUE 8.20e-01
gtcatcagaagattgagagaaagaggagaaccaatcagactatttggagagactgattatgatgcttttcaacgtttaaggaaaatagagatcctcacaccagaagttaacaag

SEQ ID NO: 29332 - DNA, 226 bp, Homo sapiens
  MAP TO AC010458.2; EXPRESSED IN LUNG, SIGNAL = 1.1; EXPRESSED IN PLACENTA, SIGNAL =   1; EXPRESSED IN FETAL LIVER, SIGNAL = 0.9; EXPRESSED IN BRAIN, SIGNAL = 1.2; EXPRESSED IN BONE MARROW, SIGNAL = 0.79; EXPRESSED IN ADULT LIVER, SIGNAL = 1.2; EST_HUMAN HIT: AW583858.1, EVALUE 1.00e-121; SWISSPROT HIT: P52591, EVALUE 2.00e-01; NT HIT: gi11425283, EVALUE 1.00e-78
ggggaaaaggaaagcaggaggaccacagaagctttggcaccgaggatccccgcagtcttcacccgcggagattccggctgaaggagctgtccagcgactacaccgctaagcgcagggagcccaagcctccgcaccggattccggagcccaagcctccgcaccggattccggagcacaagctccaccgcgcatgcgcacacgccccagacccaggctcaggcaagcc

SEQ ID NO: 29333 - DNA, 224 bp, Homo sapiens
  MAP TO AL139421.2; EXPRESSED IN BRAIN, SIGNAL = 0.77; EXPRESSED IN LUNG, SIGNAL = 0.9; EXPRESSED IN PLACENTA, SIGNAL = 0.94; EXPRESSED IN ADULT LIVER, SIGNAL = 0.79; EXPRESSED IN FETAL LIVER, SIGNAL = 0.72; EXPRESSED IN BONE MARROW, SIGNAL = 0.77; SWISSPROT HIT: P50532, EVALUE 2.30e-02; NT HIT: AL032684.1, EVALUE 1.30e-01; EST_HUMAN HIT: AW612472.1, EVALUE 2.00e-01
cagaaagcgtaaaagatcaaaatcaacatactatgaacaagcaatatgaaaaagagaggcaaagacttgttactggaatagaagaactacgtactaagctgatacaaatagaagctgaaaattctgatttgaaggttaacatggctcacagaactagtcagtttcagctgattcaagaggagctgctagagaaagcttcaaactccagcaaactggaaagtgaa

SEQ ID NO: 29334 - DNA, 89 bp, Homo sapiens
  MAP TO AF241726.1; EXPRESSED IN PLACENTA, SIGNAL = 0.68; EXPRESSED IN FETAL LIVER, SIGNAL = 0.77; EXPRESSED IN BRAIN, SIGNAL = 0.56; EXPRESSED IN BONE MARROW, SIGNAL = 0.6; SWISSPROT HIT: P00480, EVALUE 3.00e-10; NT HIT: gi11420217, EVALUE 3.00e-43; EST_HUMAN HIT: AV660015.1, EVALUE 2.00e-29
tggctaaagaagcatccatcccaattatcaatgggctgtcagatttgtaccatcctatccagatcctggctgattacctcacgctccag

SEQ ID NO: 29335 - DNA, 374 bp, Homo sapiens
  MAP TO AC007325.51; EXPRESSED IN BONE MARROW, SIGNAL = 3.6; EXPRESSED IN PLACENTA, SIGNAL = 1.5; EXPRESSED IN ADULT LIVER, SIGNAL = 1.5; EXPRESSED IN FETAL LIVER, SIGNAL =   2; EXPRESSED IN LUNG, SIGNAL = 1.3; EXPRESSED IN BRAIN, SIGNAL = 1.6; NT HIT: gi11417834, EVALUE 0.00e+00; SWISSPROT HIT: P52591, EVALUE 2.00e-05; EST_HUMAN HIT: AL042278.1, EVALUE 0.00e+00
agggccctcaaggagagcggggcagggatgcctgagcaggacaaggaccctagagtccaagagaatcctggtgatcagagaagggtccccgaggtcaccggggatgcaccgtctgcatttcggcccctgcgggacaatggaggcctctctccctttgtgcccgggcccgggcctctgcagacagacctccatgcccagaggtcagaaatcagatataaccagacatcccagacctcctggacgagctcctgcaccaaccgaaatgccatctccagctcctacagctccacgggaggcttgccggggctaaagcggaggagggggccagcctcatcccactgccagctgaccctcagttcctcaaagacagtgag

SEQ ID NO: 29336 - DNA, 77 bp, Homo sapiens
  MAP TO AL050342.42; EXPRESSED IN ADULT LIVER, SIGNAL = 0.69; EXPRESSED IN BRAIN, SIGNAL = 0.56; EXPRESSED IN PLACENTA, SIGNAL = 0.63; EXPRESSED IN FETAL LIVER, SIGNAL = 0.55; EXPRESSED IN BONE MARROW, SIGNAL = 0.57; NT HIT: AF240786.1, EVALUE 2.40e+00; EST_HUMAN HIT: AW364633.1, EVALUE 2.30e-01
ggcctggcatacagcaggggctcaggaatgtggcctgagttcctgaagggcaagagccccgttttactcatccctgt

SEQ ID NO: 29337 - DNA, 198 bp, Homo sapiens
  MAP TO AL161668.1; EXPRESSED IN ADULT LIVER, SIGNAL = 1.3; EXPRESSED IN BRAIN, SIGNAL = 1.2; EXPRESSED IN BONE MARROW, SIGNAL = 1.1; EXPRESSED IN LUNG, SIGNAL = 1.2; EXPRESSED IN PLACENTA, SIGNAL = 1.1; EXPRESSED IN FETAL LIVER, SIGNAL = 0.93; SWISSPROT HIT: P87366, EVALUE 2.60e-01; EST_HUMAN HIT: BE383928.1, EVALUE 6.90e-01; NT HIT: gi6678572, EVALUE 4.60e-01
gagcctgagccagtggaggactgtgtgcagagcactctcgccgccctgtatccaccctttgaggcaacagcccccaccctgttgggccaggtgttccaggtggtggagaggacttatcgggaggacgcactgaggtacacgctggacttcctggtaccagccaagcacctgcttgccaaggtccagcaggaagcctgt

SEQ ID NO: 29338 - DNA, 85 bp, Homo sapiens
  MAP TO AL161788.2; EXPRESSED IN LUNG, SIGNAL = 2.3; EXPRESSED IN PLACENTA, SIGNAL = 2.7; EXPRESSED IN FETAL LIVER, SIGNAL = 2.5; EXPRESSED IN ADULT LIVER, SIGNAL =   2; EXPRESSED IN HELA, SIGNAL = 2.4; EXPRESSED IN BRAIN, SIGNAL = 2.8; EXPRESSED IN BONE MARROW, SIGNAL = 2.3; SWISSPROT HIT: P40600, EVALUE 1.90e+00; NT HIT: U88896.1, EVALUE 2.00e-16; EST_HUMAN HIT: BE299888.1, EVALUE 2.00e-17
cctccactgtgagagttactgaagatcggcatccatgatggtgtagggggcttccgaggcgatcggcagcatcagtcttcagcca

SEQ ID NO: 29339 - DNA, 508 bp, Homo sapiens
  MAP TO AC022470.3; EXPRESSED IN PLACENTA, SIGNAL = 0.57; EXPRESSED IN FETAL LIVER, SIGNAL = 0.71; EXPRESSED IN BONE MARROW, SIGNAL = 0.71; EXPRESSED IN BRAIN, SIGNAL = 1.5; SWISSPROT HIT: Q10010, EVALUE 3.70e-01; EST_HUMAN HIT: AL041084.2, EVALUE 0.00e+00; NT HIT: gi4505070, EVALUE 0.00e+00
ctttgtacgcctcgagggatgcccagtttcttgcccagaaggcgctcactacagcagtccaccaggcgcttgagagtatacaaacactctcggaaggtggagaagaaagggtagtggctgagcacgcacagggacgtgagagtactgttgcgggagcggctccccgccttggcccggcgtttgccccgaggagactggttcacatcaggggtagagtcagcactgagaggctgcagggatgagccactctctgagctctcagtgccaccctcttctgaggcacaggtggcatgggttccttccttcccacgggaccctgccccaccttcccccttctccttagagattcgcttttggaaggagcggtagaagttaacacagatgccatatcgcgtgactccagtgtccttgtcagtgagggtgaagacaaaagaggtatcatcccgaaggctcatgcgccgctgccgcacgctcaggcagccctcgggctggcagaagaacactacat

SEQ ID NO: 29340 - DNA, 285 bp, Homo sapiens
  MAP TO AL122008.9; EXPRESSED IN LUNG, SIGNAL = 0.93; EXPRESSED IN PLACENTA, SIGNAL = 0.86; EXPRESSED IN FETAL LIVER, SIGNAL = 0.66; EXPRESSED IN BONE MARROW, SIGNAL = 0.76; EXPRESSED IN ADULT LIVER, SIGNAL = 0.87; EXPRESSED IN BRAIN, SIGNAL =   1; EST_HUMAN HIT: AI298932.1, EVALUE 1.00e-127
atgcccccaaccctgcagctgagaaacctccatgctctgtctcccacagtgattgatcactacaccagtcagatcgtcttcaatggggtccgggtcatcgccatcatcatcatcggcctgggttttctcctcctgctcctgccagaggagtgggatgtctggttgatcaagctgctcacccgactcaaagtgaggaagaaggaggagcctgcagagggcgctgccgacctgagctcaggacctcagagcaagaacagaagagcccgcccttccttcgcccgctaa

SEQ ID NO: 29341 - DNA, 135 bp, Homo sapiens
  MAP TO AF240628.1; EXPRESSED IN PLACENTA, SIGNAL = 0.65; EXPRESSED IN FETAL LIVER, SIGNAL = 0.59; EXPRESSED IN ADULT LIVER, SIGNAL = 0.85; EXPRESSED IN BRAIN, SIGNAL = 0.75; EXPRESSED IN BONE MARROW, SIGNAL = 0.67; EST_HUMAN HIT: AW976597.1, EVALUE 2.90e-02
tttaacaaaatacaactgattaaaattctcagcaaactaaaaatagagaaaaattttctcagtttgataaagaacatctacaaaaatcttaccattaatgtcatttttattggcaaggaactagaagctttcctg

SEQ ID NO: 29342 - DNA, 211 bp, Homo sapiens
  MAP TO AC016498.4; EXPRESSED IN ADULT LIVER, SIGNAL = 0.93; EXPRESSED IN BRAIN, SIGNAL = 0.61; EXPRESSED IN BONE MARROW, SIGNAL = 0.67; EXPRESSED IN PLACENTA, SIGNAL = 0.77; EXPRESSED IN FETAL LIVER, SIGNAL = 0.72; NT HIT: AE002489.1, EVALUE 5.00e-01; EST_HUMAN HIT: AA912486.1, EVALUE 1.90e-01; SWISSPROT HIT: Q12680, EVALUE 9.70e-01
atggcaattgaccctttggaacctgctttttatggggcatttatgcaaaaccacaaagaccagaggctgcacatgtgcaggtcctgggagggaccttagcaaagtgttcccacagttacatcctggtgatgagcaaaaaagagaaattttaaccagagtcagacaagaccgcactctccttccactccgattcctccctggtccacatccc

SEQ ID NO: 29343 - DNA, 124 bp, Homo sapiens
  MAP TO AC022997.3; EXPRESSED IN PLACENTA, SIGNAL = 0.98; EXPRESSED IN FETAL LIVER, SIGNAL =   1; EXPRESSED IN BONE MARROW, SIGNAL = 0.93; EXPRESSED IN LUNG, SIGNAL =   1; EXPRESSED IN ADULT LIVER, SIGNAL = 1.4; EXPRESSED IN BRAIN, SIGNAL = 0.66; NT HIT: AF132728.1, EVALUE 2.80e-01; EST_HUMAN HIT: H68994.1, EVALUE 1.60e+00; SWISSPROT HIT: P46331, EVALUE 4.10e+00
ctggccaattgcatcaggccctctccttttccttccactgctgaaacttggcaggtgcaagtgtcagtattgccctgcggctggaatgtgccctggacaagaactcccagcccatcactgcagc

SEQ ID NO: 29344 - DNA, 537 bp, Homo sapiens
  MAP TO AC007981.43; EXPRESSED IN PLACENTA, SIGNAL = 0.55; EXPRESSED IN BONE MARROW, SIGNAL = 0.51; EXPRESSED IN ADULT LIVER, SIGNAL = 0.58; EXPRESSED IN BRAIN, SIGNAL = 0.54; SWISSPROT HIT: Q04503, EVALUE 2.00e-03; EST_HUMAN HIT: AI904151.1, EVALUE 1.00e-120; NT HIT: AF225925.1, EVALUE 1.30e+00
gtgtcttacattggcagcatcttcttttttacagatgtcttgtacagtgtcctcattagcaatgtcatatacagcgtgcttattagcgaattcgtatacagcatcctcattagcgatgccatatacagcgtcctcattagcgatgttgtatacagcgtcctcattagtgatgtcgtatagagcgtcctcattagcgatgtcatatacaatgtcctcattagcgatgtcatatacagcaacctcattcgctatgtcttgtaaagcatcctcattagcgatgtcatatacaacgtcctcattagcgatgtcgtatacagcgtcctcgctagtgatgtcttgtacggtgtccttataagcaatgtcgtctacagcgtcctcgttagcatgccttgtgggtgtcattagcgatgtcatatacagcatcctcattggtgatgtcttatatggtgtcctcattagcgatgttgtgtacagcgtcctcgttagcaatgccttgtacagtgtcctcgttagcaatgtcatatacagtgtcctcat

SEQ ID NO: 29345 - DNA, 187 bp, Homo sapiens
  MAP TO AL133279.2; EXPRESSED IN PLACENTA, SIGNAL = 0.68; EXPRESSED IN FETAL LIVER, SIGNAL = 0.65; EXPRESSED IN ADULT LIVER, SIGNAL = 0.85; EXPRESSED IN BRAIN, SIGNAL = 0.72; EXPRESSED IN BONE MARROW, SIGNAL = 0.61; SWISSPROT HIT: P78011, EVALUE 6.60e+00; EST_HUMAN HIT: AW878204.1, EVALUE 1.60e-01; NT HIT: gi10863960, EVALUE 1.00e-101
ctgccacaaaatcaccaaagcccaccgtggtcagagtgaccaccacaaagtaaatggactccaaggccgtccagccctcgatgtacttaaagatgacagcagggatcgtcacaaacacaatgcagccggccaagatgaacaggatggttgagatgacccggatcttggtctgactcacttgcttttt

SEQ ID NO: 29346 - DNA, 94 bp, Homo sapiens
  MAP TO AC016080.3; EXPRESSED IN LUNG, SIGNAL = 0.88; EXPRESSED IN ADULT LIVER, SIGNAL = 0.68; EXPRESSED IN BRAIN, SIGNAL = 0.59; EXPRESSED IN PLACENTA, SIGNAL = 0.76; EXPRESSED IN FETAL LIVER, SIGNAL = 0.75; EXPRESSED IN BONE MARROW, SIGNAL = 0.86; NT HIT: gi7524759, EVALUE 3.10e+00
gttttaagtttaagaaaaactacactcaagcagattcctccaacataaattcaatgtatatggcaatgctgacttccattttgagcatgaaaaa

SEQ ID NO: 29347 - DNA, 190 bp, Homo sapiens
  MAP TO AL157837.4; EXPRESSED IN PLACENTA, SIGNAL = 0.63; EXPRESSED IN ADULT LIVER, SIGNAL = 0.67; EXPRESSED IN FETAL LIVER, SIGNAL = 0.51; EXPRESSED IN BONE MARROW, SIGNAL = 0.57; EXPRESSED IN BRAIN, SIGNAL = 0.52; SWISSPROT HIT: P51997, EVALUE 2.60e-01; NT HIT: AF055066.1, EVALUE 3.00e-08; EST_HUMAN HIT: AI624853.1, EVALUE 5.00e-08
ggcagtttttcacaaggtggtgccaaagctgaagaaggcagctcctgcccctcccaaagctcaggccgaagcgaagcctttgaaagccgaaaaggcagtactcaaagatatccacagccacacagaaaaagatatgcacatcacctaccttccagtggcccaagacactatggcttgggaggaaccctaa

SEQ ID NO: 29348 - DNA, 171 bp, Homo sapiens
  MAP TO AC025119.2; EXPRESSED IN BRAIN, SIGNAL = 0.45; EXPRESSED IN BONE MARROW, SIGNAL = 0.54; EXPRESSED IN ADULT LIVER, SIGNAL = 0.56; EXPRESSED IN PLACENTA, SIGNAL = 0.52; EXPRESSED IN FETAL LIVER, SIGNAL = 2.3; SWISSPROT HIT: Q61147, EVALUE 7.00e-06; NT HIT: U73798.1, EVALUE 6.00e-03
attgcatgctcatgctctcctcaaaacggggatcactagtattaatcttgccagattcagtaaatgcacgaatattttcatcactataccagcttctgctttcatcagttgtagaaaacatcagaaaagaagacctgtcaatatctttttcagtgtctccattcagtgtcc

SEQ ID NO: 29349 - DNA, 139 bp, Homo sapiens
  MAP TO AL133355.12; EXPRESSED IN PLACENTA, SIGNAL = 0.68; EXPRESSED IN FETAL LIVER, SIGNAL = 0.45; EXPRESSED IN BONE MARROW, SIGNAL = 0.52; EXPRESSED IN BRAIN, SIGNAL = 0.54; EST_HUMAN HIT: AA169273.1, EVALUE 4.60e-01; SWISSPROT HIT: O19132, EVALUE 5.30e+00; NT HIT: gi6679322, EVALUE 3.10e-01
aaggccaaggaggaagtatagggagcagaaggctctgaggcctggctgcatgaactatagagtggtgcaggtgtgctgtgaggacctgcttcagggaaaagttgttgtgacccagaggagggtagagctgcacgggaga

SEQ ID NO: 29350 - DNA, 79 bp, Homo sapiens
  MAP TO AC019184.2; EXPRESSED IN PLACENTA, SIGNAL = 0.72; EXPRESSED IN FETAL LIVER, SIGNAL = 0.51; EXPRESSED IN BRAIN, SIGNAL = 0.5; EXPRESSED IN ADULT LIVER, SIGNAL = 0.64; EXPRESSED IN BONE MARROW, SIGNAL = 0.66; NT HIT: AF106656.1, EVALUE 9.80e+00; SWISSPROT HIT: P46309, EVALUE 1.10e+00; EST_HUMAN HIT: AA309797.1, EVALUE 6.00e-02
ttttccttcaggccgtaacacttatctccttcaaagacctcttccaaatggaatttttccagcatacccttcttgtgtt

SEQ ID NO: 29351 - DNA, 217 bp, Homo sapiens
  MAP TO AL138796.2; EXPRESSED IN BONE MARROW, SIGNAL = 1.1; EXPRESSED IN LUNG, SIGNAL = 0.93; EXPRESSED IN ADULT LIVER, SIGNAL = 1.2; EXPRESSED IN BRAIN, SIGNAL = 1.1; EXPRESSED IN PLACENTA, SIGNAL = 0.96; EXPRESSED IN FETAL LIVER, SIGNAL =   1; EST_HUMAN HIT: AU133274.1, EVALUE 1.00e-92; NT HIT: gi11036643, EVALUE 1.00e-119; SWISSPROT HIT: P40560, EVALUE 1.60e+00
ggcgaagtcctcctggagcagtgcagagtatctcgcatcgggtaagacggacatgtcaaccgtcccattccccgccttgatctccgcgccagagtcatcgttattcttccgatacatactggcaatgcagaacttgaggcgatccttctccagtagcagcttttgcaagcgctcaatagaaagcgcttcaatccgggcaataactgtgtcgaatcga

SEQ ID NO: 29352 - DNA, 209 bp, Homo sapiens
  MAP TO AC022882.3; EXPRESSED IN LUNG, SIGNAL = 0.87; EXPRESSED IN PLACENTA, SIGNAL = 0.64; EXPRESSED IN ADULT LIVER, SIGNAL = 0.76; EXPRESSED IN FETAL LIVER, SIGNAL = 0.81; EXPRESSED IN BRAIN, SIGNAL = 0.68; EXPRESSED IN BONE MARROW, SIGNAL = 0.66; EST_HUMAN HIT: BF678065.1, EVALUE 1.90e-01; SWISSPROT HIT: Q95155, EVALUE 2.00e-19; NT HIT: X89682.1, EVALUE 3.20e-02
atcaagggattcaacatggggataaccagggtgtaaaatatggaagccactttatcagtgtcaaaggaatgactggacttgggctgcacgtacatgaaaagcaaagtcccatagaacactatgaccactgtcaggtgggctccacaggtagaaaaagccttttgtctgccagcagaattcatcctgagaatggctacaaggatgagcag

SEQ ID NO: 29353 - DNA, 184 bp, Homo sapiens
  MAP TO AC016575.4; EXPRESSED IN PLACENTA, SIGNAL = 0.77; EXPRESSED IN ADULT LIVER, SIGNAL = 0.64; EXPRESSED IN FETAL LIVER, SIGNAL = 0.5; EXPRESSED IN BRAIN, SIGNAL = 0.5; EXPRESSED IN BONE MARROW, SIGNAL = 0.68; SWISSPROT HIT: P38355, EVALUE 5.10e+00; NT HIT: AL161543.2, EVALUE 1.10e-01; EST_HUMAN HIT: AI632246.1, EVALUE 2.50e+00
ttattcctcctggaggatcatttttatttcatcacttggtctatcagctggttgattgactggcattctcagccactgatagccacccaggagaacagaacaaaggtgctcttcaaacctcactgttggccatgtgattcgtgtcattgtgttagaggttgctgtcaccttcatgagatagaat

SEQ ID NO: 29354 - DNA, 174 bp, Homo sapiens
  MAP TO AC021774.3; EXPRESSED IN PLACENTA, SIGNAL = 0.64; EXPRESSED IN FETAL LIVER, SIGNAL = 0.68; EXPRESSED IN BRAIN, SIGNAL = 0.74; EXPRESSED IN BONE MARROW, SIGNAL = 0.66; EXPRESSED IN ADULT LIVER, SIGNAL = 0.6; NT HIT: U18997.1, EVALUE 1.60e+00; SWISSPROT HIT: P06463, EVALUE 5.90e-01; EST_HUMAN HIT: BE884145.1, EVALUE 9.40e+00
atgactgaagcaggcaaggccgcttatccagtagaccctgacaatgccacgcatgctgcggaaactgctcagacaagagcttacaaagaagcagacaaagccagcatggaaacgggtgataagcagagatctgcggccatcaagagggagagaagaggaggcagctgcaaagac

SEQ ID NO: 29355 - DNA, 91 bp, Homo sapiens
  MAP TO AL136365.3; EXPRESSED IN BONE MARROW, SIGNAL = 1.2; EXPRESSED IN LUNG, SIGNAL =   1; EXPRESSED IN PLACENTA, SIGNAL = 0.96; EXPRESSED IN ADULT LIVER, SIGNAL = 1.2; EXPRESSED IN FETAL LIVER, SIGNAL =   1; EXPRESSED IN BRAIN, SIGNAL = 0.93; EST_HUMAN HIT: BF125399.1, EVALUE 7.20e-02
ggttatgacaagtcccaagaagagaggaaggaaggccaagacagccaagaaggaagttccttttgtgtccacagagaggatgcatacctaa

SEQ ID NO: 29356 - DNA, 114 bp, Homo sapiens
  MAP TO AC011260.4; EXPRESSED IN PLACENTA, SIGNAL = 0.96; EXPRESSED IN ADULT LIVER, SIGNAL = 1.1; EXPRESSED IN BRAIN, SIGNAL = 0.81; EXPRESSED IN BONE MARROW, SIGNAL = 0.94; EXPRESSED IN LUNG, SIGNAL =   1; EXPRESSED IN FETAL LIVER, SIGNAL = 0.99; EST_HUMAN HIT: AW884269.1, EVALUE 2.00e-03; NT HIT: AL163218.2, EVALUE 1.60e-02; SWISSPROT HIT: P20902, EVALUE 7.10e+00
attcttctcatcagcccgtggacattctccactataggacacaaaacaagtctcaacaaattcagaaagatcaaaatcatatcgagcatcttttttgggcacagtgaaataaaa

SEQ ID NO: 29357 - DNA, 78 bp, Homo sapiens
  MAP TO AC018560.3; EXPRESSED IN ADULT LIVER, SIGNAL = 0.52; EXPRESSED IN PLACENTA, SIGNAL = 0.56; EXPRESSED IN FETAL LIVER, SIGNAL = 0.54; EXPRESSED IN BRAIN, SIGNAL = 0.57; EXPRESSED IN BONE MARROW, SIGNAL = 0.52; SWISSPROT HIT: P39188, EVALUE 2.90e-01; NT HIT: U82668.1, EVALUE 1.00e-05; EST_HUMAN HIT: AI978795.1, EVALUE 2.00e-14
atgaggtctctctatgttgcccaggatggtttcaaccttctgggctcaagcaacgctcccaaacagctgaaactaaag

SEQ ID NO: 29358 - DNA, 105 bp, Homo sapiens
  MAP TO AP001433.1; EXPRESSED IN BONE MARROW, SIGNAL = 1.1; EXPRESSED IN LUNG, SIGNAL = 1.1; EXPRESSED IN PLACENTA, SIGNAL =   1; EXPRESSED IN ADULT LIVER, SIGNAL = 1.4; EXPRESSED IN FETAL LIVER, SIGNAL = 2.1; EXPRESSED IN BRAIN, SIGNAL = 1.1; SWISSPROT HIT: P31368, EVALUE 4.20e+00
atgctggcggcagttgtggtggtgctgggctgggtgtgggttgatggtctcaagtgtgggatggggaaggggtgtgggatggtgggggtggagacacgcatcaca

SEQ ID NO: 29359 - DNA, 143 bp, Homo sapiens
  MAP TO AC012207.5; EXPRESSED IN PLACENTA, SIGNAL = 0.7; EXPRESSED IN FETAL LIVER, SIGNAL = 0.63; EXPRESSED IN BONE MARROW, SIGNAL = 0.61; EXPRESSED IN ADULT LIVER, SIGNAL = 0.66; EXPRESSED IN BRAIN, SIGNAL = 0.63; NT HIT: AL163280.2, EVALUE 1.30e+00; EST_HUMAN HIT: AV748969.1, EVALUE 2.00e-06; SWISSPROT HIT: P11369, EVALUE 6.10e-01
ccttcttggtctctgatatctacattgtactctcctaccttcatgagatcaactttgaaagctcccactatgaatgagtatatgcgatatttgtcttttggtgtgtggtttatttcacttaaaataaagacctctagctccat

SEQ ID NO: 29360 - DNA, 143 bp, Homo sapiens
  MAP TO AC018684.2; EXPRESSED IN ADULT LIVER, SIGNAL = 0.6; EXPRESSED IN BRAIN, SIGNAL = 0.49; EXPRESSED IN BONE MARROW, SIGNAL = 0.57; EXPRESSED IN PLACENTA, SIGNAL = 0.6; EXPRESSED IN FETAL LIVER, SIGNAL = 0.48; EST_HUMAN HIT: M78342.1, EVALUE 8.00e-03; NT HIT: AL163207.2, EVALUE 2.00e-05
atgtgacaagctgcctttatcttgctgctttcaaaattctctgtctttgactttgacaattttaatataatgtctgttgatgtgtatttctttggatacatcttatttgagactatttgagtttcctggatttgagtgttcat

SEQ ID NO: 29361 - DNA, 104 bp, Homo sapiens
  MAP TO AC021732.3; EXPRESSED IN PLACENTA, SIGNAL = 0.57; EXPRESSED IN BRAIN, SIGNAL = 0.48; EXPRESSED IN BONE MARROW, SIGNAL = 0.64; NT HIT: D30809.1, EVALUE 3.50e+00; EST_HUMAN HIT: AI559944.1, EVALUE 1.30e+00
tgatgatgatgatgatgatgatgatgatgttgatggatatatattggtgttcgcaaagtatttcttgcattaataaccctgctagtttaggcttcacttttaac

SEQ ID NO: 29362 - DNA, 88 bp, Homo sapiens
  MAP TO AC015493.4; EXPRESSED IN PLACENTA, SIGNAL = 0.63; EXPRESSED IN ADULT LIVER, SIGNAL = 0.52; EXPRESSED IN FETAL LIVER, SIGNAL = 0.78; EXPRESSED IN BRAIN, SIGNAL = 0.67; EXPRESSED IN BONE MARROW, SIGNAL = 0.57; EST_HUMAN HIT: H30664.1, EVALUE 4.00e-03; NT HIT: AF056336.1, EVALUE 4.60e-02; SWISSPROT HIT: P35794, EVALUE 3.20e+00
ctcatttggatcatatggcccatcttgttttccaagggaaagcagctctctgattggctgatcctgggtcacatgcccattcttatgt

SEQ ID NO: 29363 - DNA, 165 bp, Homo sapiens
  MAP TO AC015474.3; EXPRESSED IN LUNG, SIGNAL = 0.95; EXPRESSED IN ADULT LIVER, SIGNAL = 0.78; EXPRESSED IN FETAL LIVER, SIGNAL = 0.67; EXPRESSED IN BRAIN, SIGNAL = 0.58; EXPRESSED IN BONE MARROW, SIGNAL = 0.74; EXPRESSED IN PLACENTA, SIGNAL = 0.76; EST_HUMAN HIT: BE551991.1, EVALUE 2.00e-80; SWISSPROT HIT: O94788, EVALUE 4.00e-26; NT HIT: AB015228.1, EVALUE 3.00e-88
attgataagaaacagtacaacaagatcttggaactcatccagagtggtgtggctgagggcgccaagctggaatgtggaggcaaaggactgggccgaaaggggtttttcattgagcccacagtgttttccaacgtcactgatgatatgcggattgccaaggaggag

SEQ ID NO: 29364 - DNA, 348 bp, Homo sapiens
  MAP TO AP001426.1; EXPRESSED IN BONE MARROW, SIGNAL = 0.73; EXPRESSED IN ADULT LIVER, SIGNAL = 0.52; EXPRESSED IN BRAIN, SIGNAL = 0.45; EXPRESSED IN FETAL LIVER, SIGNAL = 0.55; SWISSPROT HIT: P11308, EVALUE 4.00e-38; NT HIT: M21535.1, EVALUE 1.00e-113; EST_HUMAN HIT: AW948986.1, EVALUE 1.00e-108
cgagggcaggaggatgctgtcgacacacctggttgaaccctctgaagctcaggtcataagaaccatagccacagccatctatccttggaggaagggggagcttactctctctgaggtagtggagatgtgagagaaggatgtcggcgttgtagctgggggtgagcctctggaagtcgtccttggtcatcttgcacagttccttcccatcgatgttctggaataacaagatgttgacgtctggaaggccatattctttcaccgcccactccagccactgccgcacatggtctgtactccatagcgtaggatctgaaaggggtgggaacacattcagtcaattcctgaagc

SEQ ID NO: 29365 - DNA, 154 bp, Homo sapiens
  MAP TO AC008958.3; EXPRESSED IN BRAIN, SIGNAL = 0.48; EXPRESSED IN BONE MARROW, SIGNAL = 0.52; EXPRESSED IN PLACENTA, SIGNAL = 0.49; EXPRESSED IN FETAL LIVER, SIGNAL = 0.64; SWISSPROT HIT: Q57984, EVALUE 1.80e+00; EST_HUMAN HIT: AA194518.1, EVALUE 5.20e-01
ctggcagccatcctatgagaatgagcagaatctgatttacgataaaacagacactttgaatggcagaataaaggaaggaaaccaaatatttaaagacaccatagagcccatagatcaactaattgtaaagcctgaccattccagttatgagtca

SEQ ID NO: 29366 - DNA, 321 bp, Homo sapiens
  MAP TO AL133377.4; EXPRESSED IN BONE MARROW, SIGNAL = 1.3; EXPRESSED IN PLACENTA, SIGNAL = 0.63; EXPRESSED IN ADULT LIVER, SIGNAL = 0.72; EXPRESSED IN FETAL LIVER, SIGNAL = 0.78; EXPRESSED IN BRAIN, SIGNAL = 1.2; SWISSPROT HIT: P52883, EVALUE 1.80e-01; NT HIT: Z98266.1, EVALUE 2.00e-01; EST_HUMAN HIT: AW103454.1, EVALUE 1.00e-130
gtacaacatcatggcaatttgtatttccaggattttcattgtcttggttatcatttccaccttcttcgttattctcaggagatacactctcctttttttctgtgggagtagtaactgttttctcaggttgagaattcatgttctcagcattactgtccttctctgtatttcttggcttggcagcttcattgctgggctctgggctgggcctgtctgtctcttccacaggctcttttggtgccacttttttgtcttcagctgttttgctatttaaatgaacagctgaggaggaatttttggagtccttggcttttttgtgca

SEQ ID NO: 29367 - DNA, 79 bp, Homo sapiens
  MAP TO AC021498.4; EXPRESSED IN ADULT LIVER, SIGNAL = 0.75; EXPRESSED IN BRAIN, SIGNAL = 0.67; EXPRESSED IN BONE MARROW, SIGNAL = 0.63; EXPRESSED IN PLACENTA, SIGNAL = 0.68; EXPRESSED IN FETAL LIVER, SIGNAL = 0.67; NT HIT: AE002329.2, EVALUE 6.30e-01
aagtatttagtaaaaggatagaacttgctgcaaaattagacatggtaggtgcagaaaaagaaaaatcaaaaattcccag

SEQ ID NO: 29368 - DNA, 123 bp, Homo sapiens
  MAP TO AP001537.1; EXPRESSED IN LUNG, SIGNAL = 0.96; EXPRESSED IN ADULT LIVER, SIGNAL = 1.3; EXPRESSED IN FETAL LIVER, SIGNAL = 0.9; EXPRESSED IN BRAIN, SIGNAL = 1.1; EXPRESSED IN BONE MARROW, SIGNAL = 0.98; EXPRESSED IN PLACENTA, SIGNAL = 1.2; NT HIT: AL163218.2, EVALUE 2.00e-63; EST_HUMAN HIT: AI807844.1, EVALUE 1.00e-01; SWISSPROT HIT: P43403, EVALUE 7.10e+00
atgacccatacattttttaaaacattctgcaagggcagacatatggtcactgggtccatgacttttagagagtctatgaaactcgggtcaatgactcagggaacagacattccagaaggtaag

SEQ ID NO: 29369 - DNA, 194 bp, Homo sapiens
  MAP TO AL132793.24; EXPRESSED IN ADULT LIVER, SIGNAL =   1; EXPRESSED IN BRAIN, SIGNAL =   1; EXPRESSED IN LUNG, SIGNAL = 0.95; EXPRESSED IN PLACENTA, SIGNAL = 0.96; EXPRESSED IN FETAL LIVER, SIGNAL =   1; EXPRESSED IN BONE MARROW, SIGNAL = 0.89; EST_HUMAN HIT: BE564388.1, EVALUE 6.80e-01; NT HIT: gi9630816, EVALUE 4.50e-01; SWISSPROT HIT: Q03496, EVALUE 2.90e+00
agaatgccttttggttagtcagaagacaactaatcataaatatatctgagcttcctcaatggtttcttaccactcaaaactctcacaacccagtgaaacataatgtttcacttaaatccagtgggaaacctaagggaattaccattaagagaaaaatgaggattacaggagtaactgtgttggagtttgctaat

SEQ ID NO: 29370 - DNA, 319 bp, Homo sapiens
  MAP TO AC013332.4; EXPRESSED IN PLACENTA, SIGNAL = 0.49; EXPRESSED IN BRAIN, SIGNAL = 0.52; EXPRESSED IN BONE MARROW, SIGNAL = 0.53; SWISSPROT HIT: P42603, EVALUE 1.60e+00; EST_HUMAN HIT: BF512678.1, EVALUE 7.40e-02
cagctcagctgccgtttgactgtggttgttggtctgaaagtggagagagaccagatcttcctgaagagctccacatcatgctcaactgtgtgctgggcctttttctctctgacttctgtgtcacttagttgccagttaaaatgctgtttagactgctgggttatgaacgagtcgtggagtggtagttctaacagaatcaggggggtgactcctagttccatgtcccaccctgccacctcagtgtccctaaagatgccgtgacagcccctgggtattctcaggctcctggatgtccatcccaggccctctcttctgcagc

SEQ ID NO: 29371 - DNA, 84 bp, Homo sapiens
  MAP TO AF241727.1; EXPRESSED IN BONE MARROW, SIGNAL = 0.65; EXPRESSED IN PLACENTA, SIGNAL = 0.57; EXPRESSED IN ADULT LIVER, SIGNAL = 0.66; EXPRESSED IN BRAIN, SIGNAL = 0.55; EXPRESSED IN FETAL LIVER, SIGNAL = 0.65; EST_HUMAN HIT: BE963200.2, EVALUE 6.50e-02; SWISSPROT HIT: P37699, EVALUE 5.60e+00
atgttcactgcagtgtgtctgctgctgatttgctgaccttgaatcgtgtgaagctcattgtaattggcttccagaagtgtgttc

SEQ ID NO: 29372 - DNA, 228 bp, Homo sapiens
  MAP TO AL161777.1; EXPRESSED IN PLACENTA, SIGNAL = 0.65; EXPRESSED IN BONE MARROW, SIGNAL = 0.43; EXPRESSED IN ADULT LIVER, SIGNAL = 0.54; EXPRESSED IN BRAIN, SIGNAL = 0.44; SWISSPROT HIT: O61309, EVALUE 4.00e+00
atggccgtgcttagcatgggatgtcagcacaaacaggaagaaatattccattatgtagagaactctttcagagtggtagacagggaagggaagaatgtcaactgtctgagccaaagtcccagagaaagcattttggaaattttggagaatatagttaatcattataataatgatgattactattatgattcttacagtgtcatatacaaccatgggttcacagggcaa

SEQ ID NO: 29373 - DNA, 171 bp, Homo sapiens
  MAP TO AC021003.4; EXPRESSED IN BRAIN, SIGNAL = 0.58; EXPRESSED IN PLACENTA, SIGNAL = 0.58; EXPRESSED IN FETAL LIVER, SIGNAL = 0.5; EXPRESSED IN BONE MARROW, SIGNAL = 0.46; NT HIT: gi11465620, EVALUE 3.90e-01; EST_HUMAN HIT: AI337794.1, EVALUE 2.30e+00
gctttcaagtctattaatctccatgagggcacaaaaatcctattataggaaatatcaactctcctttttgcctcttcttctccctgtcctcctcctcctttttcctcttcttgcacttcttcctcctcttcgtccttctccttctttaatagcaaggctattacttctgcc

SEQ ID NO: 29374 - DNA, 361 bp, Homo sapiens
  MAP TO AC018511.3; EXPRESSED IN PLACENTA, SIGNAL = 0.49; EXPRESSED IN BONE MARROW, SIGNAL = 0.62; EXPRESSED IN FETAL LIVER, SIGNAL = 0.54; EXPRESSED IN BRAIN, SIGNAL = 0.71; NT HIT: AF113514.1, EVALUE 1.00e-104; EST_HUMAN HIT: BE720017.1, EVALUE 7.00e-92
gctgagcggctaatggaacaagctagctgctgggagaaggaggaacaagaaatcctgtcaactagagctaacagtaggcaatcacctgcaaaagtacaatcgaaaaataaatatttgcattccccggagagccggccagtcacaggggagcgagggcagctgctggagctgtctaaagagagcagtgaagaagaagaggaggaggaggacgaggaggaggaagaagaggaggaagaagaggaagaggatgaagaggaggaagaagaggaagaagaagaagaagaagaagaaaatattcaaagctctcccccaagattgacgaaaccacagtcagttgccataaagagaaaggtaggtgtct

SEQ ID NO: 29375 - DNA, 126 bp, Homo sapiens
  MAP TO AL122058.19; EXPRESSED IN PLACENTA, SIGNAL = 0.7; EXPRESSED IN FETAL LIVER, SIGNAL = 0.64; EXPRESSED IN BRAIN, SIGNAL = 0.52; EXPRESSED IN ADULT LIVER, SIGNAL = 0.71; EXPRESSED IN BONE MARROW, SIGNAL = 0.6; EST_HUMAN HIT: BF692702.1, EVALUE 6.50e+00; NT HIT: AF294393.1, EVALUE 2.80e-01; SWISSPROT HIT: P30931, EVALUE 7.00e+00
cacacgggaaacagacctgtaatgttagcaagtattgggagattaacagacccggagaagcctacacagggaagaagaaccagggtcagaaacagacaggaaccgaggcaggtgcgagggcacagc

SEQ ID NO: 29376 - DNA, 85 bp, Homo sapiens
  MAP TO AC021000.3; EXPRESSED IN ADULT LIVER, SIGNAL = 0.54; EXPRESSED IN FETAL LIVER, SIGNAL = 0.58; EXPRESSED IN BRAIN, SIGNAL = 0.65; EXPRESSED IN BONE MARROW, SIGNAL = 0.52; EXPRESSED IN PLACENTA, SIGNAL = 0.54; NT HIT: AL163249.2, EVALUE 2.70e+00; EST_HUMAN HIT: AI458752.1, EVALUE 6.60e-02
ccttcttagtacatttctgtgagttttgagaaacacatggtcattgtttagcttgaggaacacatcagacagagtgagaaacaga

SEQ ID NO: 29377 - DNA, 125 bp, Homo sapiens
  MAP TO AC025324.2; EXPRESSED IN PLACENTA, SIGNAL = 0.88; EXPRESSED IN ADULT LIVER, SIGNAL = 0.89; EXPRESSED IN FETAL LIVER, SIGNAL = 0.73; EXPRESSED IN BONE MARROW, SIGNAL = 0.76; EXPRESSED IN BRAIN, SIGNAL = 0.51; EST_HUMAN HIT: H58215.1, EVALUE 1.00e-01; SWISSPROT HIT: Q14957, EVALUE 1.80e+00; NT HIT: U27266.1, EVALUE 7.00e-02
cgtgtcctcatggttgactgtgaagggaattcctcgtacacctgtgggcaagtgggggcaggtggggacaggctggaccccacccagctgcaggtgcagtacgaggacaaggtgactgcagacct

SEQ ID NO: 29378 - DNA, 191 bp, Homo sapiens
  MAP TO AC015873.2; EXPRESSED IN PLACENTA, SIGNAL = 0.69; EXPRESSED IN ADULT LIVER, SIGNAL = 0.76; EXPRESSED IN BRAIN, SIGNAL = 0.59; EXPRESSED IN FETAL LIVER, SIGNAL = 0.71; EXPRESSED IN BONE MARROW, SIGNAL = 0.61; NT HIT: AL163203.2, EVALUE 1.00e-56; EST_HUMAN HIT: AI742355.1, EVALUE 2.00e-41
ttagaaaactctttgtatcatgtatcttttataaaatttaagtgtattgcttttaagatagcaaaagcagaaatagtcctcaactgtttttccgagtgttgccacttctacagcatctacactcatctgattcacttgggttgtagatttcatttttatgcatctctgcaaccttttctcttcttcaacac

SEQ ID NO: 29379 - DNA, 97 bp, Homo sapiens
  MAP TO AC021383.3; EXPRESSED IN BRAIN, SIGNAL =  44; EST_HUMAN HIT: BE001129.1, EVALUE 3.00e-01
aatagtaatatgctttacaaatgttattgttaatgtaggtaacaataacaatgttagcatagatatgaatactctttttgactccctttcttctcat

SEQ ID NO: 29380 - DNA, 165 bp, Homo sapiens
  MAP TO AC018780.3; EXPRESSED IN PLACENTA, SIGNAL = 0.6; EXPRESSED IN BONE MARROW, SIGNAL = 0.99; EXPRESSED IN ADULT LIVER, SIGNAL = 1.3; EXPRESSED IN FETAL LIVER, SIGNAL = 0.89; EXPRESSED IN BRAIN, SIGNAL = 1.3; NT HIT: gi11439065, EVALUE 3.00e-88; SWISSPROT HIT: Q07286, EVALUE 1.80e+00; EST_HUMAN HIT: AA526882.1, EVALUE 4.00e-88
ctgattctagagcaaaggtgtgggaaggggaaatggaggaatgccctcctgtctgtgtcgttctctgtgccacagctacagatgcagaaggtttctctggatagcacacctctgaatgtaaatcatgataaaatggatatttggaaacttactcctaagctgtga

SEQ ID NO: 29381 - DNA, 118 bp, Homo sapiens
  MAP TO AC022904.3; EXPRESSED IN PLACENTA, SIGNAL = 0.61; EXPRESSED IN ADULT LIVER, SIGNAL = 0.62; EXPRESSED IN FETAL LIVER, SIGNAL = 0.76; EXPRESSED IN BRAIN, SIGNAL = 0.61; EXPRESSED IN BONE MARROW, SIGNAL = 0.73; SWISSPROT HIT: Q17684, EVALUE 1.40e+00; NT HIT: U93163.1, EVALUE 3.00e-22; EST_HUMAN HIT: BE350127.1, EVALUE 3.00e-29
ataggggcaggatcatcagtatcactgtcttccccttccacatcaggtctcactggaaggtcttcagggacaataacactcatggagctgtcatctcctaggacaacaatgccttctt

SEQ ID NO: 29382 - DNA, 153 bp, Homo sapiens
  MAP TO AC009155.3; EXPRESSED IN ADULT LIVER, SIGNAL = 0.68; EXPRESSED IN BRAIN, SIGNAL = 0.89; EXPRESSED IN PLACENTA, SIGNAL = 0.71; EXPRESSED IN FETAL LIVER, SIGNAL = 0.62; EXPRESSED IN BONE MARROW, SIGNAL = 0.56; NT HIT: AE001157.1, EVALUE 8.80e-02; SWISSPROT HIT: P27927, EVALUE 6.80e+00; EST_HUMAN HIT: AV724632.1, EVALUE 5.00e-72
tttccccatccactgagcagcagattaactgtatgtggccatccatccggtaatctccctctaccacaccggcaattgcagaagaaaaattgtccttaaagatgacctccccagttcggtcacttcgagcatcaacctacaaataaaacacaa

SEQ ID NO: 29383 - DNA, 362 bp, Homo sapiens
  MAP TO AF240628.1; EXPRESSED IN BRAIN, SIGNAL = 0.86; EXPRESSED IN LUNG, SIGNAL = 5.5; EXPRESSED IN PLACENTA, SIGNAL = 6.6; EXPRESSED IN ADULT LIVER, SIGNAL = 3.3; EXPRESSED IN HELA, SIGNAL = 9.7; EXPRESSED IN FETAL LIVER, SIGNAL = 8.2; EXPRESSED IN BONE MARROW, SIGNAL = 1.2; SWISSPROT HIT: P05783, EVALUE 8.00e-49; NT HIT: X12881.1, EVALUE 0.00e+00; EST_HUMAN HIT: BE388700.1, EVALUE 0.00e+00
agtgctcatatcttcgcaaatactgtggatagttcctgcatcgttctgcagatcgacaatgcccgtattgctgctaatgactttagagtcacgtatgagtcagagctggccatgcaccagtctgtggagagcaacatccatgggctccacaagatcgctgatgacaccaatgtcactcaactgcagctggagacagagatggaagctctcaaggaggagctgctcttcatgaagaagaaccacgaagtggaagtaaaaggcctacaagcccagattgccagctctgggttgaccgtggaagtagatgccctcaaattgcaggacctcaccaagatcatggcagacatccaggcccaatacga

SEQ ID NO: 29384 - DNA, 257 bp, Homo sapiens
  MAP TO AC022860.3; EXPRESSED IN LUNG, SIGNAL = 0.87; EXPRESSED IN PLACENTA, SIGNAL = 0.84; EXPRESSED IN ADULT LIVER, SIGNAL = 0.95; EXPRESSED IN BRAIN, SIGNAL = 1.2; EXPRESSED IN BONE MARROW, SIGNAL = 0.81; EXPRESSED IN FETAL LIVER, SIGNAL = 1.2; SWISSPROT HIT: P79110, EVALUE 1.00e-08; NT HIT: L77567.1, EVALUE 7.00e-07; EST_HUMAN HIT: AI559864.1, EVALUE 1.00e-06
agcaggaagctgaggccgcggttcaggcccaggacgccgtggctgtgactgtgccccacaggcccccatgccgggtgcccggcgggggcgagcgctcgttggtcctcacgtgctcggtgggaaacggaatacaggtgtggatgctgccgtccaggccacctgccgtgatcgccttccccgggagagtcccctcggccttccagaacgctgcgctgccatggtgggcgggaggggtgacgcccggcatcgccttggtc

SEQ ID NO: 29385 - DNA, 109 bp, Homo sapiens
  MAP TO AC016282.3; EXPRESSED IN PLACENTA, SIGNAL = 1.1; EXPRESSED IN FETAL LIVER, SIGNAL = 1.1; EXPRESSED IN LUNG, SIGNAL = 1.1; EXPRESSED IN ADULT LIVER, SIGNAL = 0.89; EXPRESSED IN BRAIN, SIGNAL = 0.96; EXPRESSED IN BONE MARROW, SIGNAL =   1; SWISSPROT HIT: Q02418, EVALUE 9.40e+00; NT HIT: Z48149.1, EVALUE 9.30e-01; EST_HUMAN HIT: BE174794.1, EVALUE 3.50e-01
ggaccattttgcactgtcatcacatcagcaattgacgagattgttcccccacatcttcacaaacagaatgtgttgctagtctttgagatttttgccaatctgatgattg

SEQ ID NO: 29386 - DNA, 97 bp, Homo sapiens
  MAP TO AC022843.3; EXPRESSED IN ADULT LIVER, SIGNAL = 0.86; EXPRESSED IN PLACENTA, SIGNAL = 0.84; EXPRESSED IN FETAL LIVER, SIGNAL = 0.84; EXPRESSED IN BRAIN, SIGNAL = 1.3; EXPRESSED IN BONE MARROW, SIGNAL = 0.73; EST_HUMAN HIT: BF574612.1, EVALUE 3.00e-01; SWISSPROT HIT: Q9QUM9, EVALUE 5.50e+00
ggtcagaaatggcttgcttatgatcaaaactcctactgatgacttgctgtcagagaaatgtatggagaccatggttctcaaacacatttcattccat

SEQ ID NO: 29387 - DNA, 127 bp, Homo sapiens
  MAP TO AC018993.3; EXPRESSED IN PLACENTA, SIGNAL = 0.81; EXPRESSED IN ADULT LIVER, SIGNAL = 0.66; EXPRESSED IN FETAL LIVER, SIGNAL = 0.81; EXPRESSED IN BRAIN, SIGNAL = 0.94; EXPRESSED IN BONE MARROW, SIGNAL = 0.72; EST_HUMAN HIT: AA705007.1, EVALUE 4.20e-01
atggcaccgttgcagatgaagttccaagagaaaaaggtatttgaaattttcatggcttatttcctacctcagcatcacactgaaatgaacacagagcagatgattaataaaacatctgatgacaatg

SEQ ID NO: 29388 - DNA, 104 bp, Homo sapiens
  MAP TO AC013785.4; EXPRESSED IN PLACENTA, SIGNAL = 0.74; EXPRESSED IN ADULT LIVER, SIGNAL = 0.61; EXPRESSED IN FETAL LIVER, SIGNAL = 0.77; EXPRESSED IN BRAIN, SIGNAL = 0.7; EXPRESSED IN BONE MARROW, SIGNAL = 0.68; NT HIT: AJ238093.1, EVALUE 3.50e+00; EST_HUMAN HIT: AW821888.1, EVALUE 5.00e-03; SWISSPROT HIT: P40992, EVALUE 9.40e+00
ttgacaggaaggcaatcattcattcattcagcaagcaagcaagcatccacaatgagcctggatgccacatggaccacgatcaccaaggagatcgataaatccca

SEQ ID NO: 29389 - DNA, 254 bp, Homo sapiens
  MAP TO AC021468.2; EXPRESSED IN LUNG, SIGNAL =   1; EXPRESSED IN PLACENTA, SIGNAL = 0.84; EXPRESSED IN ADULT LIVER, SIGNAL = 0.75; EXPRESSED IN FETAL LIVER, SIGNAL = 0.92; EXPRESSED IN BRAIN, SIGNAL = 1.1; EXPRESSED IN BONE MARROW, SIGNAL = 0.75; EST_HUMAN HIT: AA341305.1, EVALUE 0.00e+00; SWISSPROT HIT: P98160, EVALUE 3.00e-05; NT HIT: AF075240.1, EVALUE 0.00e+00
atcgcagagtgggccggtccagcctgggcggcactcgcacaccacgctgtccttctccacggagcggcacaggccgtgcttgcacacggtgcaggacttgcagcctggtgacacccccagggactgtggtgggagggccttgaagtcctgcagctcgttgttgatgcgcacctcatggatgcatccgtggaagccgcctagaggccggtccgtgccctggcgcaaggcggagaggccggtggaggtggggatgc

SEQ ID NO: 29390 - DNA, 125 bp, Homo sapiens
  MAP TO AC021782.2; EXPRESSED IN ADULT LIVER, SIGNAL = 0.55; EXPRESSED IN BRAIN, SIGNAL = 0.59; EXPRESSED IN PLACENTA, SIGNAL = 0.5; EXPRESSED IN FETAL LIVER, SIGNAL = 0.48; NT HIT: AB046764.1, EVALUE 2.00e-64; SWISSPROT HIT: P50851, EVALUE 1.00e-09; EST_HUMAN HIT: T06397.1, EVALUE 2.00e-64
catattctattgcagctttcagcaatgcttcagcatgagtggagccaaatgcattgcgaacaaatcgtctccttcgacgaagatcatcttcccagtaatccaaacgccagaaatcatgcaattgg

SEQ ID NO: 29391 - DNA, 147 bp, Homo sapiens
  MAP TO AC022050.2; EXPRESSED IN LUNG, SIGNAL = 1.4; EXPRESSED IN PLACENTA, SIGNAL = 1.2; EXPRESSED IN ADULT LIVER, SIGNAL = 1.4; EXPRESSED IN FETAL LIVER, SIGNAL = 1.2; EXPRESSED IN BRAIN, SIGNAL = 1.2; EXPRESSED IN BONE MARROW, SIGNAL = 1.1; NT HIT: L29324.1, EVALUE 2.10e-02; EST_HUMAN HIT: AV732001.1, EVALUE 7.70e+00; SWISSPROT HIT: O32155, EVALUE 9.00e+00
ctgatttttctgggatcatgaaggagcaatattgaaagactggcataaagatttggagaaaaactggggctcgaaccataagctgacacaaagtttgcaggtctttgtggttcacattaacatcgataagggagaagacagcctcta

SEQ ID NO: 29392 - DNA, 259 bp, Homo sapiens
  MAP TO AC015805.3; EXPRESSED IN PLACENTA, SIGNAL = 1.1; EXPRESSED IN ADULT LIVER, SIGNAL = 0.9; EXPRESSED IN FETAL LIVER, SIGNAL = 1.3; EXPRESSED IN BRAIN, SIGNAL = 1.2; EXPRESSED IN BONE MARROW, SIGNAL = 0.92; EXPRESSED IN LUNG, SIGNAL =   1; EST_HUMAN HIT: Z28681.1, EVALUE 6.00e-02; NT HIT: D43949.1, EVALUE 4.00e-02
agatcaggaatggaaacctcaaggccattctaggcctcttcttcagcctctcccgatacaagcagcagcagcagcagccccagaagcagcacctctcctcacctctgccgcccgccgtatcccaggtggccggggccccctcccagtgccaggctggcacccctcagcagcaggtgccagtcactccccaagccccgtgccagcctcaccagccagcgccacatcagcagtcaaaagcacaagctgaaatgcagtccag

SEQ ID NO: 29393 - DNA, 224 bp, Homo sapiens
  MAP TO AC009155.3; EXPRESSED IN ADULT LIVER, SIGNAL = 0.65; EXPRESSED IN FETAL LIVER, SIGNAL = 0.62; EXPRESSED IN BRAIN, SIGNAL = 0.98; EST_HUMAN HIT: AL138321.1, EVALUE 1.00e-118; SWISSPROT HIT: P28684, EVALUE 8.70e+00; NT HIT: AF079406.1, EVALUE 1.30e-01
tacacctaccttggcattttcctcatagttacggagttccagcaacagattctgcttcttctgactcagctctcggatcaggtcctgctctgcactggtgtccatgaggttgcccctcatctcagccgtgccaggcaggtagccccggactgaacagaaggaaaaaaccgcaagtataaccaggtatacttttaggtcatcaattacctgctcttaaaaacaaa

SEQ ID NO: 29394 - DNA, 239 bp, Homo sapiens
  MAP TO AC013644.3; EXPRESSED IN PLACENTA, SIGNAL = 0.89; EXPRESSED IN ADULT LIVER, SIGNAL = 1.1; EXPRESSED IN FETAL LIVER, SIGNAL = 1.2; EXPRESSED IN BRAIN, SIGNAL = 1.3; EXPRESSED IN LUNG, SIGNAL =   1; EXPRESSED IN BONE MARROW, SIGNAL = 1.1; NT HIT: AF023813.1, EVALUE 1.40e-01; SWISSPROT HIT: P34133, EVALUE 3.10e-01; EST_HUMAN HIT: AW275535.1, EVALUE 2.20e-01
agatgaatttgtttttgtaaaatcccagaatataattaataaaaatggtaagtgtcttctcattccccttcataagtatgatgccaggaaacgacatttgcaatctcatgctggggaaagacactgtcatgggagagggagaacactgggcaggaacagaatggggaggaggagggagggcaatggtgctagtaaaattcccctgcatgggaataatgtacttggcacagcctggcgtt

SEQ ID NO: 29395 - DNA, 119 bp, Homo sapiens
  MAP TO AC012532.3; EXPRESSED IN ADULT LIVER, SIGNAL = 0.62; EXPRESSED IN BRAIN, SIGNAL = 0.63; EXPRESSED IN BONE MARROW, SIGNAL = 0.61; EXPRESSED IN PLACENTA, SIGNAL = 0.56; EXPRESSED IN FETAL LIVER, SIGNAL = 0.56; NT HIT: gi5902153, EVALUE 4.10e+00; SWISSPROT HIT: Q10125, EVALUE 3.10e+00; EST_HUMAN HIT: BF476539.1, EVALUE 6.00e+00
tattcccaccaaccaatagcatttttgagtcaaccctcaagcatttcactgcaattttcatagtgatgacagctgccacatatctccctatgagctctctgttgattttggcagtcaga

SEQ ID NO: 29396 - DNA, 179 bp, Homo sapiens
  MAP TO AC011778.3; EXPRESSED IN BONE MARROW, SIGNAL = 2.1; EXPRESSED IN LUNG, SIGNAL =   1; EXPRESSED IN ADULT LIVER, SIGNAL = 1.4; EXPRESSED IN BRAIN, SIGNAL = 1.2; EXPRESSED IN PLACENTA, SIGNAL = 0.93; EXPRESSED IN FETAL LIVER, SIGNAL = 1.2; NT HIT: AB008681.1, EVALUE 8.00e-49; SWISSPROT HIT: P03189, EVALUE 1.30e+00; EST_HUMAN HIT: AA663213.1, EVALUE 4.00e-11
ctatcaggatcatctgaaaacttccccaggtctactttaatctgctttaaatcagagaagcagaagggttcatgtacctgggttgggccaaatccccatcccccaacagcttgaaggggacataaccaatagcctgggggtttttgccatcccttggaggtttctttgcttgtttcctt

SEQ ID NO: 29397 - DNA, 113 bp, Homo sapiens
  MAP TO AC013332.4; EXPRESSED IN FETAL LIVER, SIGNAL = 0.53; EXPRESSED IN BRAIN, SIGNAL = 0.51; EXPRESSED IN BONE MARROW, SIGNAL = 0.48; EST_HUMAN HIT: AW752901.1, EVALUE 3.60e-01; SWISSPROT HIT: P53666, EVALUE 3.20e+00; NT HIT: X13768.1, EVALUE 9.80e-01
tggaatgggtagagcttcagcatctccttccagaacttccagaagtgtctggccagctcttgtcctccccctgccaagatgttctgctgcaggctgttccctgagagttgcat

SEQ ID NO: 29398 - DNA, 160 bp, Homo sapiens
  MAP TO AC008616.2; EXPRESSED IN PLACENTA, SIGNAL = 0.47; EXPRESSED IN BONE MARROW, SIGNAL = 0.5; EXPRESSED IN ADULT LIVER, SIGNAL = 0.53; EXPRESSED IN FETAL LIVER, SIGNAL = 0.55; EXPRESSED IN BRAIN, SIGNAL = 0.47; NT HIT: gi11425894, EVALUE 2.00e-77; SWISSPROT HIT: P28320, EVALUE 3.00e-06; EST_HUMAN HIT: BF310349.1, EVALUE 2.00e-77
atgctgccccgcaggtgtaagacgtgcggagaatacatctacaaggggaagaaattcaatgctcggaaggagacggtgcagaacgaggtctacctgggcctgcccatcttccgcttttacatcaagtgcacgcgctgcctggcagagatcaccttcaagg

SEQ ID NO: 29399 - DNA, 129 bp, Homo sapiens
  MAP TO AC008506.4; EXPRESSED IN ADULT LIVER, SIGNAL = 0.61; EXPRESSED IN BRAIN, SIGNAL = 0.47; EXPRESSED IN FETAL LIVER, SIGNAL = 0.55; EXPRESSED IN BONE MARROW, SIGNAL = 0.51; EST_HUMAN HIT: AW821301.1, EVALUE 1.00e-04; SWISSPROT HIT: P11369, EVALUE 4.00e-05; NT HIT: Y08501.1, EVALUE 4.50e+00
ctcataaaatgagctggaaactgtgttctccttttttactttctggaagattttataaataatagatattcctttttcctttaacattaggtagaattcaccatggaagctgtctgggtcaatggcttg

SEQ ID NO: 29400 - DNA, 257 bp, Homo sapiens
  MAP TO AC007956.5; EXPRESSED IN LUNG, SIGNAL = 1.1; EXPRESSED IN PLACENTA, SIGNAL = 0.6; EXPRESSED IN ADULT LIVER, SIGNAL = 0.87; EXPRESSED IN BRAIN, SIGNAL = 1.2; EXPRESSED IN BONE MARROW, SIGNAL = 1.2; EXPRESSED IN FETAL LIVER, SIGNAL = 1.3; SWISSPROT HIT: P49750, EVALUE 4.70e-01; EST_HUMAN HIT: BE389234.1, EVALUE 1.00e-106; NT HIT: AB033168.1, EVALUE 3.00e-46
agcatgcaggccaacgtgatcgttatgatagagaaagagatcgtgagccttattttgatcgtcaaagtaatgtcatagcagatcatcgagattttaaaagggatcgtgagacacatagagatcgagaccgggatcgtggtgttattgactatgaccgggatcgatttgacagagaacgccgaccccgagatgataggtatgctataaaacaatctttgctaggtgtacaaattactgtatacttaacagtaaaagtt

SEQ ID NO: 29401 - DNA, 395 bp, Homo sapiens
  MAP TO AC011815.2; EXPRESSED IN PLACENTA, SIGNAL = 0.94; EXPRESSED IN ADULT LIVER, SIGNAL = 1.1; EXPRESSED IN BRAIN, SIGNAL = 0.97; EXPRESSED IN BONE MARROW, SIGNAL = 0.75; EXPRESSED IN LUNG, SIGNAL = 1.1; EXPRESSED IN FETAL LIVER, SIGNAL = 0.79; NT HIT: gi8923203, EVALUE 6.30e-02; EST_HUMAN HIT: AW964113.1, EVALUE 0.00e+00; SWISSPROT HIT: Q61967, EVALUE 3.90e-02
tcagctttgagctctggcaaaaggccttcccacagtcaaagcactcatagagcttttccctatgtcaacgctctgttgtgtaatatcatttgaattcatactgaaacttccttcactctcatgagattcaaggacactgtgttctgtggggattcttctgttgaaggttgccagactgaaatgtctgtcctgggaaggaagctgactgattttgttccctgcagcatttcccttttgcttcttagagttgtccagacctcccaaagcttcttcagctatccgttgggaatgtgtttctccaggaagttttcccggcgatatcatagctgctgaggctacacattcaacaatttcttgctttgccatcaacactttgccagccaccatcctgccat

SEQ ID NO: 29402 - DNA, 186 bp, Homo sapiens
  MAP TO AC016948.4; EXPRESSED IN FETAL LIVER, SIGNAL = 0.5; EXPRESSED IN BONE MARROW, SIGNAL = 0.46; EXPRESSED IN BRAIN, SIGNAL = 0.49; SWISSPROT HIT: O95843, EVALUE 3.00e-32; NT HIT: gi4885366, EVALUE 1.00e-100; EST_HUMAN HIT: AV732101.1, EVALUE 1.00e-100
attataaacttgatcaatatgtttattggccttctgattcagaccttgcagacccaaaagtgtcttaaattcatgtagtgtttgcaggccggatggatattccatcataaatgttctgtaccacacatgggtctcttgtgtaggaactgctttctgatcaccagctatagatttgccattccccat

SEQ ID NO: 29403 - DNA, 181 bp, Homo sapiens
  MAP TO AL161732.1; EXPRESSED IN PLACENTA, SIGNAL =   1; EXPRESSED IN FETAL LIVER, SIGNAL = 0.94; EXPRESSED IN ADULT LIVER, SIGNAL = 0.94; EXPRESSED IN BRAIN, SIGNAL = 0.88; EXPRESSED IN BONE MARROW, SIGNAL = 0.87; EXPRESSED IN LUNG, SIGNAL = 1.2; EST_HUMAN HIT: AW996538.1, EVALUE 1.00e-17; SWISSPROT HIT: O18733, EVALUE 3.00e+00; NT HIT: AJ271736.1, EVALUE 5.00e-13
gagtagaatgggaggaagctttgccctaagcagttcccagcttgacttttccctttggcttatcccaagatttattttcctttcacatatgtatatatttataaatgttataagtacaacagaaggcaagaatggagcaaacataagagtgaggaggaggaggacgatgaggagaagaatg

SEQ ID NO: 29404 - DNA, 163 bp, Homo sapiens
  MAP TO AL162471.1; EXPRESSED IN PLACENTA, SIGNAL = 0.54; EXPRESSED IN FETAL LIVER, SIGNAL = 0.47; EXPRESSED IN BRAIN, SIGNAL = 0.51; EXPRESSED IN BONE MARROW, SIGNAL = 0.43; EST_HUMAN HIT: AI344951.1, EVALUE 7.00e-19; SWISSPROT HIT: Q14142, EVALUE 6.00e-01
atcttggtggacaatggtgaagagaccttgcaagacataaacaatctaacagacaagctgcgtgaaagagatgaaaaaatgcagcatgtcagtacatggctacgagggagtcttgaagggctgcgtttgcttgtggaacaggaatcaccaatggaccttctta

SEQ ID NO: 29405 - DNA, 168 bp, Homo sapiens
  MAP TO AC009410.3; EXPRESSED IN LUNG, SIGNAL =   1; EXPRESSED IN PLACENTA, SIGNAL =   1; EXPRESSED IN ADULT LIVER, SIGNAL = 1.1; EXPRESSED IN BRAIN, SIGNAL =   1; EXPRESSED IN FETAL LIVER, SIGNAL = 0.89; EXPRESSED IN BONE MARROW, SIGNAL = 0.99; NT HIT: AL161541.2, EVALUE 9.80e-02; SWISSPROT HIT: P04931, EVALUE 3.00e+00; EST_HUMAN HIT: AA782516.1, EVALUE 3.70e-02
aggcattttggtgctttctagtgagaagtgtgaactcattcttctgtgggtgacagcactttttcctctttggaaactttttaaaattttcattcatgaagctgtgaaaattcatcatattttggtgtgcgtcatgatctttgttgttcatccttttcagcattcctt

SEQ ID NO: 29406 - DNA, 77 bp, Homo sapiens
  MAP TO AC008166.2; EXPRESSED IN LUNG, SIGNAL = 1.1; EXPRESSED IN PLACENTA, SIGNAL = 0.88; EXPRESSED IN ADULT LIVER, SIGNAL = 1.1; EXPRESSED IN BRAIN, SIGNAL = 0.94; EXPRESSED IN BONE MARROW, SIGNAL = 0.91; EXPRESSED IN FETAL LIVER, SIGNAL =   1
tcttctcctcccactttcctttctccttcctctccctgttcccctccttcttccccccatccttcttctccttctaa

SEQ ID NO: 29407 - DNA, 98 bp, Homo sapiens
  MAP TO AC011218.4; EXPRESSED IN ADULT LIVER, SIGNAL = 0.6; EXPRESSED IN BRAIN, SIGNAL = 0.65; EXPRESSED IN BONE MARROW, SIGNAL = 0.66; EXPRESSED IN PLACENTA, SIGNAL = 0.81; EXPRESSED IN FETAL LIVER, SIGNAL = 0.63; NT HIT: AB014530.1, EVALUE 8.20e-01; EST_HUMAN HIT: AW961365.1, EVALUE 1.20e+00
cagagcttcccaataagatccctgttgattgtcaccttcgtttggaccttgccggatgttgaacaggggagctggttgagcccactgcaacttcagac

SEQ ID NO: 29408 - DNA, 118 bp, Homo sapiens
  MAP TO AC008688.4; EXPRESSED IN BRAIN, SIGNAL = 0.48; SWISSPROT HIT: Q03042, EVALUE 5.40e+00; NT HIT: U67581.1, EVALUE 2.60e-01
aataaacatagccctgctgattgcagactgcaggaacagcagttggattgacatcttgatgacacacggagcccacaggggatgctggactctggggaggctctttcatgggtcccat

SEQ ID NO: 29409 - DNA, 322 bp, Homo sapiens
  MAP TO AC013634.3; EXPRESSED IN PLACENTA, SIGNAL = 0.49; EXPRESSED IN FETAL LIVER, SIGNAL = 0.5; EXPRESSED IN ADULT LIVER, SIGNAL = 0.58; EXPRESSED IN BONE MARROW, SIGNAL = 0.45; EXPRESSED IN BRAIN, SIGNAL = 0.54; NT HIT: D32046.1, EVALUE 2.00e-01; SWISSPROT HIT: Q28893, EVALUE 3.20e-01; EST_HUMAN HIT: BF221730.1, EVALUE 7.50e-02
ttaaaagaaatcctggcagagatgatgactatctcctgcaggatctccaggcccataggttgtgcagcagccttgccctggaaccctggggacttcctggcagatctgatggggcctctgtctggaggacggggtgcacaggtagccatccagctccctcccctctctgctctcctccttcctccccttgtcctttctatatccctttctcttcatcttcacctgcctctccctcccactcccagcctccaggtcccagttcttcctctccttcccttctagttccctttctctccagcacttatctgcatgctgctggagg

SEQ ID NO: 29410 - DNA, 116 bp, Homo sapiens
  MAP TO AL121747.19; EXPRESSED IN LUNG, SIGNAL = 0.87; EXPRESSED IN PLACENTA, SIGNAL =   1; EXPRESSED IN ADULT LIVER, SIGNAL = 0.75; EXPRESSED IN FETAL LIVER, SIGNAL =   1; EXPRESSED IN BRAIN, SIGNAL = 0.87; EXPRESSED IN BONE MARROW, SIGNAL = 0.84; EST_HUMAN HIT: AI090013.1, EVALUE 5.00e-59; NT HIT: X70251.1, EVALUE 3.00e-59; SWISSPROT HIT: P33674, EVALUE 5.00e-15
ggatttcttcagtgccaaccccttcaccccttggacctctggcaggctcaccagtgattgctgctgccaacccccttgggatgcctgttccagctgccgctggcgctcagcagtaa

SEQ ID NO: 29411 - DNA, 207 bp, Homo sapiens
  MAP TO AC019126.3; EXPRESSED IN PLACENTA, SIGNAL =   1; EXPRESSED IN FETAL LIVER, SIGNAL = 0.81; EXPRESSED IN BRAIN, SIGNAL = 0.81; EXPRESSED IN BONE MARROW, SIGNAL = 0.77; EXPRESSED IN ADULT LIVER, SIGNAL = 0.97; EST_HUMAN HIT: AU154589.1, EVALUE 1.00e-107; NT HIT: gi5453997, EVALUE 1.00e-113
tttgaaagatagctttaaatatctgatactcatcaacagggttatcttcatcatcaatgattgtggaatagccttccagagcagtctcttcagcatcatcttcttcccaatcttcatcatctccatcttcaccagcctgcttagccagaatctccaaatattcttgcccatcttcatcaatatcatcttcatcactccccagttcct

SEQ ID NO: 29412 - DNA, 219 bp, Homo sapiens
  MAP TO AL136968.3; EXPRESSED IN LUNG, SIGNAL = 1.2; EXPRESSED IN ADULT LIVER, SIGNAL = 1.1; EXPRESSED IN BRAIN, SIGNAL = 0.99; EXPRESSED IN BONE MARROW, SIGNAL = 0.89; EXPRESSED IN PLACENTA, SIGNAL = 1.1; EXPRESSED IN FETAL LIVER, SIGNAL = 0.8; SWISSPROT HIT: P11746, EVALUE 7.40e-01; NT HIT: gi8393940, EVALUE 1.30e-01
atgttgagaatcagtcatgagcaaagccctgatccaatgctgggcatcagtcatgagcaaagccctgatccaatgctgggcatcagtcatgagcaaagccttgatcaggagaagaaagtagctaagaggaggcccctgcttaataggcaggcatccagcccagtgaccaagacagacacacctgcagaaaaagctgctgcaagcaagtgggttaggagg

SEQ ID NO: 29413 - DNA, 500 bp, Homo sapiens
  MAP TO AL161668.1; EXPRESSED IN PLACENTA, SIGNAL = 0.64; EXPRESSED IN FETAL LIVER, SIGNAL = 0.53; EXPRESSED IN BONE MARROW, SIGNAL = 0.61; EXPRESSED IN ADULT LIVER, SIGNAL = 0.58; EXPRESSED IN BRAIN, SIGNAL = 0.68; EST_HUMAN HIT: BE772578.1, EVALUE 1.20e-01; NT HIT: U59297.1, EVALUE 1.00e-03; SWISSPROT HIT: P81649, EVALUE 2.00e-42
ctcctcactctgttccactgtctcccttaagagagatggcaccggccagagcaggatgctgccccctgctgctgctgcttctggggctgtgggtggcagaggtcctagtcagagccaagcccaaggacatgacatcatctcagtggtttaaaactcagcatgtgcagcccagccctcaagcatgcaactcagccatgagcatcatcaataagtacacagaacggtgcaaagacctcaacaccttcctgcacgagcccttctccagtgtggccatcacctgccagacccccaacatagcctgcaagaatagctgtaaaaactgccaccagagccacgggcccatgtccctgaccatgggtgagctcacctcagggaagtacccaaactgcaggtacaaagagaagcacctgaacacaccttacatagtggcctgtgaccctccacaacagggtgacccagggtacccacttgttcctgtgcacttggataaagttgtctaa

SEQ ID NO: 29414 - DNA, 102 bp, Homo sapiens
  MAP TO AL117383.18; EXPRESSED IN BONE MARROW, SIGNAL = 0.68; EXPRESSED IN ADULT LIVER, SIGNAL = 0.71; EXPRESSED IN FETAL LIVER, SIGNAL = 0.57; EXPRESSED IN BRAIN, SIGNAL = 0.69; EXPRESSED IN PLACENTA, SIGNAL = 0.75; NT HIT: AB018543.1, EVALUE 2.20e-01; EST_HUMAN HIT: AA984288.1, EVALUE 2.10e-02
ccaaagatgtggatgtagtggtagtagttgtggtaattgatgtactggtaataacaataaaaataaaacataacaatttctgagtacatattgggcctggca

SEQ ID NO: 29415 - DNA, 152 bp, Homo sapiens
  MAP TO AF240628.1; EXPRESSED IN ADULT LIVER, SIGNAL = 0.59; EXPRESSED IN BRAIN, SIGNAL = 0.52; EXPRESSED IN BONE MARROW, SIGNAL = 0.53; EXPRESSED IN PLACENTA, SIGNAL = 0.63; EXPRESSED IN FETAL LIVER, SIGNAL = 0.49; SWISSPROT HIT: P30929, EVALUE 1.00e+00; EST_HUMAN HIT: T97950.1, EVALUE 9.00e-09; NT HIT: AL163280.2, EVALUE 8.70e-02
ggatgatgcctcgatgttgatggcagctgaatggtcaggatggttgttggtgaagtttagggtggctgagacggtgtctgagaataagacaatgaagtttggaacatcgattgttcccttcatgcaagatttctctgtagcatgccacaata

SEQ ID NO: 29416 - DNA, 198 bp, Homo sapiens
  MAP TO AC022555.2; EXPRESSED IN ADULT LIVER, SIGNAL = 1.3; EXPRESSED IN BRAIN, SIGNAL = 1.1; EXPRESSED IN LUNG, SIGNAL = 1.2; EXPRESSED IN PLACENTA, SIGNAL = 1.2; EXPRESSED IN FETAL LIVER, SIGNAL = 0.84; EXPRESSED IN BONE MARROW, SIGNAL = 0.68; EST_HUMAN HIT: AA042975.1, EVALUE 1.00e-64; SWISSPROT HIT: P55136, EVALUE 7.50e-01; NT HIT: M25921.1, EVALUE 3.00e-05
ccttggaatcactgtccctcttcatgaggacagagcaccacactaaggacagcaacacatcttcagttggtttcttagggttttcctccaagtctgtgttaatttctccagattgagacagtttccactccaactcatctcttgtcaggttcatgccgccaaacaccagaggacggataaactgaggcttgatatctc

SEQ ID NO: 29417 - DNA, 159 bp, Homo sapiens
  MAP TO AL109930.5; EXPRESSED IN PLACENTA, SIGNAL = 0.51; EXPRESSED IN BRAIN, SIGNAL = 0.5; EXPRESSED IN ADULT LIVER, SIGNAL = 0.51; EXPRESSED IN FETAL LIVER, SIGNAL = 0.49; EXPRESSED IN BONE MARROW, SIGNAL = 0.47; SWISSPROT HIT: P25962, EVALUE 1.00e+00; EST_HUMAN HIT: BE561042.1, EVALUE 3.50e-02
ctgtcttcctccagcattccctcccactttgggagagactgaagtagaaggggtttggggcctgtggtcgggggacatgtctgtaacaagctgtgtgtgcttaagcaagaccttgtgcctcctctgagtgatgaagacatcgttccagtttagggtcat

SEQ ID NO: 29418 - DNA, 171 bp, Homo sapiens
  MAP TO AC018530.4; EXPRESSED IN PLACENTA, SIGNAL = 0.63; EXPRESSED IN FETAL LIVER, SIGNAL = 0.6; EXPRESSED IN ADULT LIVER, SIGNAL = 0.78; EXPRESSED IN BRAIN, SIGNAL = 0.55; EXPRESSED IN BONE MARROW, SIGNAL = 0.55; SWISSPROT HIT: Q11113, EVALUE 3.00e+00; EST_HUMAN HIT: BE669567.1, EVALUE 5.90e-01; NT HIT: X71303.1, EVALUE 2.50e-02
atgaaaaattccagttttcaacacgaagctgtgaaacacactaagaaacaggaaggtatggcccaaacacataattataaactaaataatatcgtacatggattaaaagggtttcctatgttaaagaaatataataaaaacacaaagattcttcattgggagtatattcag

SEQ ID NO: 29419 - DNA, 173 bp, Homo sapiens
  MAP TO AC021976.3; EXPRESSED IN LUNG, SIGNAL = 1.8; EXPRESSED IN PLACENTA, SIGNAL = 1.8; EXPRESSED IN ADULT LIVER, SIGNAL = 1.3; EXPRESSED IN FETAL LIVER, SIGNAL = 1.6; EXPRESSED IN BRAIN, SIGNAL = 1.9; EXPRESSED IN BONE MARROW, SIGNAL = 1.6; SWISSPROT HIT: P42841, EVALUE 4.00e-08; NT HIT: AF069313.2, EVALUE 5.00e-93; EST_HUMAN HIT: H56093.1, EVALUE 8.00e-93
gttttcctttggaatatggataaatacaccatgatacggaaactagaaggacatcaccatgatgtggtagcttgtgacttttctcctgatggagcattactggctactgcatcttatgatactcgagtatatatctgggatccacataatggagacattctgatggaatttgg

SEQ ID NO: 29420 - DNA, 128 bp, Homo sapiens
  MAP TO AC008688.4; EXPRESSED IN LUNG, SIGNAL = 0.95; EXPRESSED IN BRAIN, SIGNAL = 0.8; EXPRESSED IN BONE MARROW, SIGNAL = 0.69; EXPRESSED IN ADULT LIVER, SIGNAL = 0.8; EXPRESSED IN PLACENTA, SIGNAL = 0.86; EXPRESSED IN FETAL LIVER, SIGNAL = 0.8; NT HIT: gi7019480, EVALUE 3.00e-66; EST_HUMAN HIT: BF674005.1, EVALUE 6.60e+00
acatgtataatgaagatcactatgacagagaggagaaagagaaaggaaaggatgaccagagaaatgaccaaatatttagtggatggatttacctttctagaatgcttggttggatcctggaactgcag

SEQ ID NO: 29421 - DNA, 277 bp, Homo sapiens
  MAP TO AC013698.3; EXPRESSED IN PLACENTA, SIGNAL = 0.73; EXPRESSED IN ADULT LIVER, SIGNAL = 0.98; EXPRESSED IN FETAL LIVER, SIGNAL = 0.92; EXPRESSED IN BRAIN, SIGNAL =   1; EXPRESSED IN LUNG, SIGNAL = 0.9; EXPRESSED IN BONE MARROW, SIGNAL = 0.75; SWISSPROT HIT: P49441, EVALUE 6.00e-24; NT HIT: AF141325.2, EVALUE 0.00e+00; EST_HUMAN HIT: AV695712.1, EVALUE 0.00e+00
agggtgggtgccaattccaccagcagctgcaactgaaaagcaaggttcagaaatgtcagatatcctccgggagctgctctgtgtctctgagaaggctgctaacattgcccgggcgtgcagacagcaggaagccctcttccagctgctgatcgaagaaaagaaagagggagaaaagaacaagaagtttgcagttgacttcaagacgctggctgatgtactggtacaggaagttataaaacagaatatggagaacaaggtaagaaaggtcatagccaag

SEQ ID NO: 29422 - DNA, 234 bp, Homo sapiens
  MAP TO AC022045.2; EXPRESSED IN ADULT LIVER, SIGNAL = 0.96; EXPRESSED IN FETAL LIVER, SIGNAL = 1.2; EXPRESSED IN BONE MARROW, SIGNAL = 0.79; EXPRESSED IN LUNG, SIGNAL = 1.3; EXPRESSED IN PLACENTA, SIGNAL =   1; EXPRESSED IN BRAIN, SIGNAL = 0.97; NT HIT: gi11437282, EVALUE 1.00e-129; EST_HUMAN HIT: AI668650.1, EVALUE 3.00e-93; SWISSPROT HIT: O94956, EVALUE 1.00e-40
aggatatgccacaggacttcaaggcttccctgtgcctgcccacaacctcggccccagcctcggccccctccaatggcaactgctcaagctacacagaaacccagcatctgagtgtggtggggatcatgttcgtggcacagaccctgctgggcgtgggcggggtgcccattcagccctttggcatctcctacatcgatgactttgcccacaacagcaactcgcccctctacctcg

SEQ ID NO: 29423 - DNA, 264 bp, Homo sapiens; identical to SEQ ID NO: 24460
  MAP TO AL139117.3; EXPRESSED IN FETAL LIVER, SIGNAL = 0.57; EXPRESSED IN BONE MARROW, SIGNAL = 0.76; EXPRESSED IN PLACENTA, SIGNAL = 0.72; EXPRESSED IN ADULT LIVER, SIGNAL = 0.72; EXPRESSED IN BRAIN, SIGNAL = 0.74; SWISSPROT HIT: P43630, EVALUE 1.00e-35; NT HIT: AF072408.1, EVALUE 0.00e+00; EST_HUMAN HIT: AW951147.1, EVALUE 2.00e-60

SEQ ID NO: 29424 - DNA, 166 bp, Homo sapiens
  MAP TO AC016648.3; EXPRESSED IN ADULT LIVER, SIGNAL = 0.73; EXPRESSED IN BRAIN, SIGNAL = 0.56; EXPRESSED IN BONE MARROW, SIGNAL = 0.57; EXPRESSED IN PLACENTA, SIGNAL = 0.81; EXPRESSED IN FETAL LIVER, SIGNAL = 0.51; EST_HUMAN HIT: AW021908.1, EVALUE 1.40e-01; SWISSPROT HIT: P23161, EVALUE 3.90e+00
gattcttcacttctcctctggtaccaaagccccaaggggaggatgggcaaaggagagtggtttaaattggaaagaaaaagagctttcaatccaatttcatcccctttcccaccttatcctgaccttagacgtgttggaagggatggcattttcctatattacaaaa

SEQ ID NO: 29425 - DNA, 211 bp, Homo sapiens
  MAP TO AC005297.1; EXPRESSED IN PLACENTA, SIGNAL =   1; EXPRESSED IN FETAL LIVER, SIGNAL = 0.9; EXPRESSED IN LUNG, SIGNAL = 1.2; EXPRESSED IN ADULT LIVER, SIGNAL = 0.93; EXPRESSED IN BRAIN, SIGNAL = 0.79; EXPRESSED IN BONE MARROW, SIGNAL = 0.82; SWISSPROT HIT: O15481, EVALUE 1.00e-13; NT HIT: gi11420771, EVALUE 5.00e-01; EST_HUMAN HIT: AW183902.1, EVALUE 7.40e-01
agtgacaagttgggttgacttccttcaagtcaactgcaaagacaacctcaatgtgctcagaagctcttctgtgaatctcagcaaactggttttggtatcttgggttgacaatcttcagcatatcttccttcaaaatacgctgtttcattttgaacttgtagagcaggaactgctccaacaaacccaccttaatatttatgaaattgctgca

SEQ ID NO: 29426 - DNA, 222 bp, Homo sapiens
  MAP TO AC007321.2; EXPRESSED IN LUNG, SIGNAL = 1.1; EXPRESSED IN BONE MARROW, SIGNAL = 0.82; EXPRESSED IN PLACENTA, SIGNAL = 1.2; EXPRESSED IN ADULT LIVER, SIGNAL = 0.9; EXPRESSED IN FETAL LIVER, SIGNAL = 0.75; EXPRESSED IN BRAIN, SIGNAL = 0.91; NT HIT: X94768.1, EVALUE 8.20e+00; SWISSPROT HIT: P49163, EVALUE 1.70e+00; EST_HUMAN HIT: AV700860.1, EVALUE 7.90e-01
ctataaattttcagccaccatcaacagaatattcactaattagtacaagatttactcctactcccgctactatcaaaaagttactgagcacaactaacaacatctcccgctcatcactgaaattaattacagcccaaatggataattcagtaaagcctatttcccatcagatatcagatattgaacatgtggatcgtagtctcagtacaaatctcagtctgg

SEQ ID NO: 29427 - DNA, 86 bp, Homo sapiens
  MAP TO AL161445.2; EXPRESSED IN BONE MARROW, SIGNAL = 0.43; EXPRESSED IN PLACENTA, SIGNAL = 0.47; EXPRESSED IN BRAIN, SIGNAL = 0.48; EST_HUMAN HIT: BE071470.1, EVALUE 6.70e-02; SWISSPROT HIT: Q9Z0S3, EVALUE 9.60e+00; NT HIT: X95508.1, EVALUE 4.50e-02
ctggctttgcattcctcacctgcggatgaacgctcatctgcctttgcattccccactggaggatgaacgctcacctggctttgcat

SEQ ID NO: 29428 - DNA, 154 bp, Homo sapiens
  MAP TO AC016498.4; EXPRESSED IN LUNG, SIGNAL = 0.95; EXPRESSED IN PLACENTA, SIGNAL = 0.81; EXPRESSED IN ADULT LIVER, SIGNAL = 1.2; EXPRESSED IN BONE MARROW, SIGNAL = 1.1; EXPRESSED IN BRAIN, SIGNAL = 1.6; EXPRESSED IN HELA, SIGNAL = 2.9; EXPRESSED IN FETAL LIVER, SIGNAL = 1.2; EST_HUMAN HIT: AA630784.1, EVALUE 1.00e-81; NT HIT: gi11321606, EVALUE 1.00e-81; SWISSPROT HIT: P38126, EVALUE 4.00e-06
cttcatcagttcttccaaacaagagaggtagattttgaagatggctgctgcagagggtggcccaatgtactgcttgatgtcagccctgtccacgaaggccacgtcgatcttctcggtgatgttagaagtggtcagaatcacaacattggaatgc

SEQ ID NO: 29429 - DNA, 225 bp, Homo sapiens
  MAP TO AC016549.4; EXPRESSED IN PLACENTA, SIGNAL = 0.61; EXPRESSED IN ADULT LIVER, SIGNAL = 0.53; EXPRESSED IN BRAIN, SIGNAL = 0.55; SWISSPROT HIT: O75962, EVALUE 2.00e-25; EST_HUMAN HIT: AI149796.1, EVALUE 1.00e-119; NT HIT: AF091395.1, EVALUE 1.00e-100
aacgtgtatgtaaatataaaccgcatcatgtcggtggccaatcgtctggtggagtctggccactatgcctcgcagcagatcaggcagatcgcgagtcagctggagcaggagtggaaggcgtttgcggcagccctggatgagcgggagcaccttgctggacatgtcctccattttccaccagaaggccgaaaaggtcagtgccttgaacccccagcccacgaggtg

SEQ ID NO: 29430 - DNA, 135 bp, Homo sapiens
  MAP TO AC013698.3; EXPRESSED IN ADULT LIVER, SIGNAL = 0.67; EXPRESSED IN BRAIN, SIGNAL = 0.58; EXPRESSED IN BONE MARROW, SIGNAL = 0.55; EXPRESSED IN PLACENTA, SIGNAL = 0.62; SWISSPROT HIT: O07899, EVALUE 9.10e+00; EST_HUMAN HIT: BE502973.1, EVALUE 3.00e-70
attgttctgtacagaacaatcatgcttccaaagacagccaccactagcaagaccaggaagaaagaaattcttatcacccctaatcaagcagataaattgtgtatgctccaaagcattcttattgaggaggaaaac

SEQ ID NO: 29431 - DNA, 118 bp, Homo sapiens
  MAP TO AC011255.3; EXPRESSED IN PLACENTA, SIGNAL = 0.82; EXPRESSED IN ADULT LIVER, SIGNAL = 0.83; EXPRESSED IN FETAL LIVER, SIGNAL = 0.62; EXPRESSED IN BRAIN, SIGNAL = 0.71; EXPRESSED IN BONE MARROW, SIGNAL = 0.72; EST_HUMAN HIT: BF697265.1, EVALUE 1.50e+00; SWISSPROT HIT: P24820, EVALUE 5.40e+00; NT HIT: gi5174562, EVALUE 1.00e+00
aacgtggtttgttaacattcatgtgggcagggtatactgccgctgccctttgctgagatgatcctctttttctagcctctgcaaagttgttgtacctgtagaacttgcatctctgagg

SEQ ID NO: 29432 - DNA, 378 bp, Homo sapiens
  MAP TO AC018386.3; EXPRESSED IN ADULT LIVER, SIGNAL =   1; EXPRESSED IN FETAL LIVER, SIGNAL = 0.73; EXPRESSED IN BRAIN, SIGNAL = 0.86; EXPRESSED IN BONE MARROW, SIGNAL = 0.82; EXPRESSED IN LUNG, SIGNAL = 0.97; EXPRESSED IN PLACENTA, SIGNAL = 1.1; EST_HUMAN HIT: AW856922.1, EVALUE 7.00e-21; NT HIT: AJ289880.1, EVALUE 1.00e-03; SWISSPROT HIT: Q58516, EVALUE 2.10e+00
gaataaccgaaatccccctgccaaattgtctactgtcagtttgttttctggcattacttcttctacatcttcttcctcatcacctggtactggtttggaaccacttacctccatcaaatctccttccattaattcctcctgtgtgctgtctattaactccaagattctccaagattcatatcttgaacccccctccaacacatcatttttgccatatccgctatctctttcatgatttgtttgattgtctctgttgtaagtccttaaggtcatgcacaacatctggacacagtttttccagtaggaatttattgttttaggcttgatggctttcacagctttttctgtagcaacagtggcatcttcaatggtgtaatt

SEQ ID NO: 29433 - DNA, 128 bp, Homo sapiens
  MAP TO AC011023.3; EXPRESSED IN BONE MARROW, SIGNAL = 0.45; EXPRESSED IN BRAIN, SIGNAL = 0.45; EST_HUMAN HIT: BE315509.1, EVALUE 1.10e-01
aaaatctgaacacatacaacataaaaataaaattcatctgcaagcctgttatctacgtaaatgatagtaaattggtatattgctttctgtatacaggtacagatatagacgcagatgtagatataaat

SEQ ID NO: 29434 - DNA, 117 bp, Homo sapiens
  MAP TO AC019159.3; EXPRESSED IN ADULT LIVER, SIGNAL = 0.64; EXPRESSED IN BRAIN, SIGNAL = 0.5; EXPRESSED IN BONE MARROW, SIGNAL = 0.44; EXPRESSED IN PLACENTA, SIGNAL = 0.62; SWISSPROT HIT: Q9Z1Z2, EVALUE 7.10e+00; NT HIT: AB023064.1, EVALUE 1.00e+00; EST_HUMAN HIT: BF677270.1, EVALUE 9.60e-02
cagcttcccattctgtcagagctgtccccttcagacatacttggccaagagttccagtaaattctgatcaagaagaagttgtaaggaatgtctccttgtgtatctgtgttctgactg

SEQ ID NO: 29435 - DNA, 108 bp, Homo sapiens
  MAP TO AC011111.3; EXPRESSED IN LUNG, SIGNAL = 0.84; EXPRESSED IN ADULT LIVER, SIGNAL = 0.99; EXPRESSED IN BONE MARROW, SIGNAL = 0.88; EXPRESSED IN BRAIN, SIGNAL =   1; EXPRESSED IN PLACENTA, SIGNAL = 0.76; EXPRESSED IN FETAL LIVER, SIGNAL = 0.88; SWISSPROT HIT: P52465, EVALUE 1.90e+00; NT HIT: gi11416762, EVALUE 2.00e-54; EST_HUMAN HIT: BE092276.1, EVALUE 3.00e-54
ctgatcttcccgggaagttcccttctttgactgttgcttcctcaaagcttcatacttttgcttttctcttctgtattcggcaacagcaccatctggaggggcttcttc

SEQ ID NO: 29436 - DNA, 119 bp, Homo sapiens
  MAP TO AC018583.3; EXPRESSED IN FETAL LIVER, SIGNAL = 0.53; EXPRESSED IN BONE MARROW, SIGNAL = 0.6; EXPRESSED IN PLACENTA, SIGNAL = 0.65; EXPRESSED IN ADULT LIVER, SIGNAL = 0.81; EXPRESSED IN BRAIN, SIGNAL = 0.63; EST_HUMAN HIT: AW578416.1, EVALUE 9.80e-02; NT HIT: gi11430559, EVALUE 6.60e-02
gtattgagtcgggatcaacagtggaaggcagtcaggctattaaagttgtgaatgacatcatcatcatcatcttcatcttcatcaacatcacttatcatcattcttcttatttgcttaat

SEQ ID NO: 29437 - DNA, 165 bp, Homo sapiens
  MAP TO AC022038.2; EXPRESSED IN LUNG, SIGNAL = 1.5; EXPRESSED IN ADULT LIVER, SIGNAL = 1.2; EXPRESSED IN BRAIN, SIGNAL = 0.97; EXPRESSED IN PLACENTA, SIGNAL = 1.3; EXPRESSED IN FETAL LIVER, SIGNAL = 0.78; EXPRESSED IN BONE MARROW, SIGNAL =   1; SWISSPROT HIT: Q25452, EVALUE 7.80e-01; EST_HUMAN HIT: AV734509.1, EVALUE 2.20e+00
ttaccatttgaagctatgaggtttccctatgaatattgtactgcctatgtgctcgttgccttcttcattgtcagggtcatcgttagcgtccttaaggatggttttaaattttcttttatggacattggtatatttgaactttccattttttctgtaagatatcat

SEQ ID NO: 29438 - DNA, 127 bp, Homo sapiens
  MAP TO AC008474.4; EXPRESSED IN PLACENTA, SIGNAL = 0.58; EXPRESSED IN FETAL LIVER, SIGNAL = 0.54; EXPRESSED IN BONE MARROW, SIGNAL = 0.64; EXPRESSED IN ADULT LIVER, SIGNAL = 0.56; EXPRESSED IN BRAIN, SIGNAL = 0.7; EST_HUMAN HIT: R40656.1, EVALUE 1.70e+00; SWISSPROT HIT: P06425, EVALUE 8.10e-01
cattgctctggcactgggagtccaacctcatgttcccagcatcccggggaaacgcagcctggggaagcccccggttcttcagctggaaggtgcaaattccatccaccaccagggtagggagcagacc

SEQ ID NO: 29439 - DNA, 111 bp, Homo sapiens
  MAP TO AL161634.1; EXPRESSED IN PLACENTA, SIGNAL = 0.53; EXPRESSED IN BRAIN, SIGNAL = 0.47; EXPRESSED IN BONE MARROW, SIGNAL = 0.46; NT HIT: L12469.1, EVALUE 3.80e+00; EST_HUMAN HIT: BE901975.1, EVALUE 4.00e-07
ctttctatttttcaactcctcaatcatgaggaatccacctggcaatcttttagctgcttcatgctgaggaggggtgttgtgggcagctccatgccatggctgtccacgtgg

SEQ ID NO: 29440 - DNA, 156 bp, Homo sapiens
  MAP TO AC018578.3; EXPRESSED IN LUNG, SIGNAL = 0.93; EXPRESSED IN ADULT LIVER, SIGNAL = 1.2; EXPRESSED IN FETAL LIVER, SIGNAL = 0.83; EXPRESSED IN BRAIN, SIGNAL = 0.85; EXPRESSED IN PLACENTA, SIGNAL = 0.95; EXPRESSED IN BONE MARROW, SIGNAL = 0.86; NT HIT: AJ131110.1, EVALUE 3.60e-01; EST_HUMAN HIT: AW851599.1, EVALUE 1.30e-01; SWISSPROT HIT: P06165, EVALUE 6.80e+00
gtatttgaaaagctggaagggaaagatgacaatgagaaacttgatttcgaatcacctggagagatggtctgccacattaataaagatgaaaattgacagaggggccaggatcctctggctcaatccccatctgagaacccaagggcaaatgtacat

SEQ ID NO: 29441 - DNA, 98 bp, Homo sapiens
  MAP TO AC013597.3; EXPRESSED IN PLACENTA, SIGNAL = 0.84; EXPRESSED IN ADULT LIVER, SIGNAL = 1.1; EXPRESSED IN FETAL LIVER, SIGNAL = 0.75; EXPRESSED IN BRAIN, SIGNAL = 0.85; EXPRESSED IN LUNG, SIGNAL = 0.83; EXPRESSED IN BONE MARROW, SIGNAL = 0.76; EST_HUMAN HIT: AI318662.1, EVALUE 7.70e-02; NT HIT: X99914.1, EVALUE 2.10e-01
tgaaactctggcacaagccagcatcagctttcaccaggaatgctacatctcctggttgttctccttgcttcagtttctgctgccttctatcctcaaca

SEQ ID NO: 29442 - DNA, 336 bp, Homo sapiens
  MAP TO AL158849.5; EXPRESSED IN ADULT LIVER, SIGNAL = 0.67; EXPRESSED IN FETAL LIVER, SIGNAL = 0.54; EXPRESSED IN BRAIN, SIGNAL = 0.62; EXPRESSED IN BONE MARROW, SIGNAL = 0.61; NT HIT: AB022605.1, EVALUE 5.30e-02; EST_HUMAN HIT: AA351761.1, EVALUE 7.80e-02; SWISSPROT HIT: O14286, EVALUE 3.80e+00
atgttcttcagcttctgtgagaagaatgtggattatgaaacgtttaaagccctcaatgatgcatgtcttgtgtatgacagtcgacttgtgattgataccaacttccacaccaacgacatagccatcagagctgctggctccctcaccaaattctccaatagatactactcaaatgagtggactcacagcaacttcagttccaaagaaattggctttcagctggcagcagctatgctacatctctttgatccaacccttgagcctgtgaccgagccaccagctaatcttgaccggctcatccccatgtacaagggagccaagattcaaggtatacga

SEQ ID NO: 29443 - DNA, 87 bp, Homo sapiens
  MAP TO AC025644.2; EXPRESSED IN BONE MARROW, SIGNAL = 0.67; EXPRESSED IN ADULT LIVER, SIGNAL = 0.84; EXPRESSED IN FETAL LIVER, SIGNAL = 0.64; EXPRESSED IN BRAIN, SIGNAL = 0.78; EXPRESSED IN LUNG, SIGNAL = 0.86; EXPRESSED IN PLACENTA, SIGNAL = 0.67; NT HIT: AF200252.1, EVALUE 1.80e-01; EST_HUMAN HIT: AI739667.1, EVALUE 1.10e+00
ctagccgatttctgccaacatgattacttcatcctcggtgcatcccttatttactggtattaatctgagagcggcttcctgcacctt

SEQ ID NO: 29444 - DNA, 222 bp, Homo sapiens
  MAP TO AL161777.1; EXPRESSED IN PLACENTA, SIGNAL = 0.64; EXPRESSED IN ADULT LIVER, SIGNAL = 0.87; EXPRESSED IN FETAL LIVER, SIGNAL = 0.71; EXPRESSED IN BRAIN, SIGNAL = 1.1; EXPRESSED IN BONE MARROW, SIGNAL = 0.77; SWISSPROT HIT: P10911, EVALUE 8.00e-41; NT HIT: AL117234.1, EVALUE 1.00e-122; EST_HUMAN HIT: AV752834.1, EVALUE 1.00e-121
tttccaacagtgtttaaaactgtatgacgggtatctgtcagagccttctccactttcaacacgccttttgcaaaaaacaatggctttttcatacaagaaaaggtgtcgctgcattggtttgaatctagccaaatccttcatttttgtagcacctttcttgtgccctatccaaacgctgaatccaccttgcattatcatcttgcccagttcatttaagtttcc

SEQ ID NO: 29445 - DNA, 84 bp, Homo sapiens
  MAP TO AL135940.11; EXPRESSED IN LUNG, SIGNAL =   1; EXPRESSED IN ADULT LIVER, SIGNAL = 0.92; EXPRESSED IN BRAIN, SIGNAL = 0.87; EXPRESSED IN BONE MARROW, SIGNAL = 0.87; EXPRESSED IN PLACENTA, SIGNAL = 0.94; EXPRESSED IN FETAL LIVER, SIGNAL = 0.74; EST_HUMAN HIT: BF055939.1, EVALUE 2.00e-05; NT HIT: AL163247.2, EVALUE 5.00e-05
ttcctgttttcaattacattgatttctgctctattttttccttctgcttgctttaggtctgaattcctcttcttttcttgtttc

SEQ ID NO: 29446 - DNA, 333 bp, Homo sapiens
  MAP TO AC015908.4; EXPRESSED IN BONE MARROW, SIGNAL = 0.95; EXPRESSED IN PLACENTA, SIGNAL =   1; EXPRESSED IN ADULT LIVER, SIGNAL = 1.2; EXPRESSED IN FETAL LIVER, SIGNAL = 0.94; EXPRESSED IN BRAIN, SIGNAL = 1.1; EXPRESSED IN LUNG, SIGNAL = 1.1; NT HIT: gi9628002, EVALUE 3.20e+00; EST_HUMAN HIT: BE870004.1, EVALUE 1.00e-114; SWISSPROT HIT: P50241, EVALUE 6.50e+00
caggcagagaaggcagcagcaggcaggaccgccaccctcccatgcaaatcacccccgggagtgcagctgggctcctcccgctcctcctgggcaatgctcctggggagtctgtggggaagatgccatccagggcgctgtgcgctcttcctcatcctcgccctcctgctggacgcggtcggcctggtccttttgctgctggggatcttggcccccctgagttcctgggacttcttcatctacacaggtgccctgatcctggctctcagcctactgctctggatcatctggtattccctcaacattgaggtgtctcctgaaaaactggacctgtaa

SEQ ID NO: 29447 - DNA, 134 bp, Homo sapiens
  MAP TO AC009635.4; EXPRESSED IN PLACENTA, SIGNAL = 0.45; EXPRESSED IN BRAIN, SIGNAL = 0.49; EXPRESSED IN BONE MARROW, SIGNAL = 0.47; NT HIT: AF152598.3, EVALUE 3.00e-01; EST_HUMAN HIT: BE814668.1, EVALUE 4.50e-01
acattagcataattcaaggagagtttattttcatctgaattaatcacaaaggtgtgtgcagggtacacggaattcctcaacgtatggttgaggaaccgagggctaacagtaggtgggctgttattgcccgtagt

SEQ ID NO: 29448 - DNA, 171 bp, Homo sapiens
  MAP TO AC022664.2; EXPRESSED IN ADULT LIVER, SIGNAL = 1.2; EXPRESSED IN BRAIN, SIGNAL = 0.97; EXPRESSED IN LUNG, SIGNAL = 0.9; EXPRESSED IN PLACENTA, SIGNAL = 1.1; EXPRESSED IN FETAL LIVER, SIGNAL = 2.1; EXPRESSED IN BONE MARROW, SIGNAL = 0.95; NT HIT: gi7662143, EVALUE 1.30e+00; EST_HUMAN HIT: AW957425.1, EVALUE 1.00e-01
gctgattgtaaaacttttcctctttttgaacaaaatatatttgtcatgctaaatggcaaatattggctcaagacactattcggagctgcagtttataatgatgtacatcaggatgtaatagaagtcatgatagcagttatgaaacttaagaaaataagttttggaatgaaa

SEQ ID NO: 29449 - DNA, 276 bp, Homo sapiens
  MAP TO AC013764.3; EXPRESSED IN LUNG, SIGNAL = 0.94; EXPRESSED IN PLACENTA, SIGNAL =   1; EXPRESSED IN ADULT LIVER, SIGNAL = 0.89; EXPRESSED IN BRAIN, SIGNAL = 0.68; EXPRESSED IN BONE MARROW, SIGNAL = 0.82; EXPRESSED IN FETAL LIVER, SIGNAL = 0.87; NT HIT: M34046.1, EVALUE 6.70e-01; SWISSPROT HIT: Q01668, EVALUE 1.20e+00
atgagagaaaagccagctggaagcagggagggtcattaccaagccactgccacaatctgggcaaaaggtgatggaggcttctaccaagggatggaaagaagaggagcatttgagggagatccagaaggtggagcaaaccctagagggatgaggaagaatgaagactcaaggaaggctcctgagggttctgccctggcaccagcagataaaggacatgatgtcttggagcatgtcctctctggatcgggcctggagctgggggatgctggggctcag

SEQ ID NO: 29450 - DNA, 174 bp, Homo sapiens
  MAP TO AC011938.3; EXPRESSED IN ADULT LIVER, SIGNAL = 0.67; EXPRESSED IN BONE MARROW, SIGNAL = 0.53; EXPRESSED IN BRAIN, SIGNAL = 0.62; EXPRESSED IN PLACENTA, SIGNAL = 0.59; EXPRESSED IN FETAL LIVER, SIGNAL = 0.51; NT HIT: gi11433646, EVALUE 1.00e-93; SWISSPROT HIT: P11716, EVALUE 4.00e-19
ctttctttttagaggtcccaggcgggaagttttggcgtcttgtgctttgtaggtcacccacagaccactggctatatgctgcacaaagcagacagaatctccatacttgatttctggaactcccatgccttctatgtctcgcttgtgactggagtctaatttctccttgagttc

SEQ ID NO: 29451 - DNA, 171 bp, Homo sapiens
  MAP TO AC011159.3; EXPRESSED IN FETAL LIVER, SIGNAL = 0.52; EXPRESSED IN BONE MARROW, SIGNAL = 0.48; EXPRESSED IN ADULT LIVER, SIGNAL = 0.64; EXPRESSED IN BRAIN, SIGNAL = 0.5; NT HIT: AF121361.1, EVALUE 1.60e+00; SWISSPROT HIT: Q01955, EVALUE 2.30e+00; EST_HUMAN HIT: N58147.1, EVALUE 2.30e+00
ctgaatacttacacctgcccttcctggaaaattgtcttggcccttgtaggtgtttgactttgggatgccctgctcagtctgtgagttctgaatgccaatcaattccttgcaaatcccatcttttactaatgtggaaatctgacctctactcaaacctatgtgaaaggtcat

SEQ ID NO: 29452 - DNA, 122 bp, Homo sapiens
  MAP TO AC019253.3; EXPRESSED IN BONE MARROW, SIGNAL = 0.55; EXPRESSED IN ADULT LIVER, SIGNAL = 0.56; EXPRESSED IN BRAIN, SIGNAL = 0.51; EXPRESSED IN FETAL LIVER, SIGNAL = 0.61; EXPRESSED IN PLACENTA, SIGNAL = 0.62; SWISSPROT HIT: P23921, EVALUE 9.20e+00; EST_HUMAN HIT: T51952.1, EVALUE 1.00e-01
atcaagtttccagaattcagctcacaagccttcttcagatcccaagtaaaagggccaaacacaaagctgcttagagccaagttagagatctggcagttggattttaggtgtctgatgatgag

SEQ ID NO: 29453 - DNA, 111 bp, Homo sapiens
  MAP TO AC011255.3; EXPRESSED IN PLACENTA, SIGNAL = 0.47; EXPRESSED IN BONE MARROW, SIGNAL = 0.53; EXPRESSED IN BRAIN, SIGNAL = 0.46; SWISSPROT HIT: P40886, EVALUE 4.20e+00; EST_HUMAN HIT: AI868881.1, EVALUE 5.60e+00
atggatatgatccctattcttggagaagatgaatatgaaccaaaagtcacacacacacagagtattgaggaagaaaagttgcatcctgctgacttctggcttctctgtgaa

SEQ ID NO: 29454 - DNA, 141 bp, Homo sapiens
  MAP TO AC019194.2; EXPRESSED IN BONE MARROW, SIGNAL = 0.45; EXPRESSED IN BRAIN, SIGNAL = 0.46; EXPRESSED IN PLACENTA, SIGNAL = 0.5; NT HIT: AF061251.1, EVALUE 1.30e+00
ctggctccttccaagttccttatccttcaggactgtagagttgaatccaggttgcctccttaaatcaaagagagacacttccttaaagaaagccccttgtatctccacgatgcctggggcagtgtcttccgcttggaccat

SEQ ID NO: 29455 - DNA, 150 bp, Homo sapiens
  MAP TO AC009699.6; EXPRESSED IN LUNG, SIGNAL = 0.89; EXPRESSED IN ADULT LIVER, SIGNAL = 0.71; EXPRESSED IN FETAL LIVER, SIGNAL = 0.74; EXPRESSED IN BRAIN, SIGNAL = 0.81; EXPRESSED IN PLACENTA, SIGNAL = 1.1; EXPRESSED IN BONE MARROW, SIGNAL = 0.97; NT HIT: AF026504.1, EVALUE 8.60e-02; SWISSPROT HIT: P49228, EVALUE 4.00e+00; EST_HUMAN HIT: R83141.1, EVALUE 7.90e+00
ctctttcctcactcttgcctctgtccttgttgccatggccctttcctaagtcatcacactctcttgaacacaaccatagccttctaggttgacccttgcttccaatcttgctgctctccagatttttccttcttgtcctttctgccttca

SEQ ID NO: 29456 - DNA, 102 bp, Homo sapiens
  MAP TO AC018378.3; EXPRESSED IN PLACENTA, SIGNAL = 1.2; EXPRESSED IN ADULT LIVER, SIGNAL = 1.5; EXPRESSED IN FETAL LIVER, SIGNAL = 0.98; EXPRESSED IN BRAIN, SIGNAL = 1.2; EXPRESSED IN BONE MARROW, SIGNAL = 1.2; EXPRESSED IN LUNG, SIGNAL = 1.2; SWISSPROT HIT: Q05903, EVALUE 5.50e+00; EST_HUMAN HIT: AA324960.1, EVALUE 9.00e-11; NT HIT: gi9506824, EVALUE 2.20e-01
atgtgtgaagatctctggcttacacacaagtatgggaatttgcatgtgccaaaagctgactctatcaatacatttgttgatgagaatttaaagaggaaaaag

SEQ ID NO: 29457 - DNA, 98 bp, Homo sapiens
  MAP TO AC015670.4; EXPRESSED IN BRAIN, SIGNAL = 0.45; EXPRESSED IN BONE MARROW, SIGNAL = 0.44; EXPRESSED IN PLACENTA, SIGNAL = 0.56; EXPRESSED IN FETAL LIVER, SIGNAL = 0.49; SWISSPROT HIT: Q25092, EVALUE 7.20e+00; NT HIT: AB008681.1, EVALUE 2.10e-01; EST_HUMAN HIT: AA533143.1, EVALUE 5.00e-03
ctgtcacctttaagacagggtttctcaaccttggaggtatcaatgttttggaccaggaaatccttgtcatgagaactgttctgtgcattgcaggatat

SEQ ID NO: 29458 - DNA, 140 bp, Homo sapiens
  MAP TO AL121935.12; EXPRESSED IN PLACENTA, SIGNAL = 0.49; EXPRESSED IN ADULT LIVER, SIGNAL = 0.51; EXPRESSED IN FETAL LIVER, SIGNAL = 0.57; EXPRESSED IN BONE MARROW, SIGNAL = 0.6; EXPRESSED IN BRAIN, SIGNAL = 0.55; SWISSPROT HIT: P87137, EVALUE 5.30e+00; NT HIT: AL163209.2, EVALUE 8.00e-02; EST_HUMAN HIT: AA368837.1, EVALUE 4.70e-01
agtttttgagaaagagcatgatgtagtagatgaaattgtaaaaatctgggtttgtttctttcttgctattgtgaccaaagtcactgctttgaacctttgtctcctcatctgttacattgacttgactgctgctgcccttg

SEQ ID NO: 29459 - DNA, 215 bp, Homo sapiens
  MAP TO AL135923.11; EXPRESSED IN LUNG, SIGNAL = 1.1; EXPRESSED IN PLACENTA, SIGNAL = 0.99; EXPRESSED IN ADULT LIVER, SIGNAL =   1; EXPRESSED IN BRAIN, SIGNAL = 0.89; EXPRESSED IN FETAL LIVER, SIGNAL = 0.95; EXPRESSED IN BONE MARROW, SIGNAL = 0.89; SWISSPROT HIT: O09046, EVALUE 5.60e-01; NT HIT: M94579.1, EVALUE 5.10e-01
caagctttgaagggcgaggaccgggcgaaggcaaaacctgggaaggctctggctgccgccagaggaccgggcggagcaaccacagtcactgtggttatcatgtccagcctcctgggacctccacttagcttggctgtcaccctgacccccgcccgcacctccccagctgctgatctcggggaggcagccctccctgaggtgctgagggcaggacc

SEQ ID NO: 29460 - DNA, 166 bp, Homo sapiens
  MAP TO AC018787.3; EXPRESSED IN ADULT LIVER, SIGNAL = 1.1; EXPRESSED IN BRAIN, SIGNAL = 0.86; EXPRESSED IN LUNG, SIGNAL =   1; EXPRESSED IN PLACENTA, SIGNAL = 0.75; EXPRESSED IN FETAL LIVER, SIGNAL = 0.73; EXPRESSED IN BONE MARROW, SIGNAL = 0.87; SWISSPROT HIT: P36352, EVALUE 1.80e+00; EST_HUMAN HIT: BF371998.1, EVALUE 5.70e-01; NT HIT: AJ011849.1, EVALUE 6.00e-03
cttcactgccagtttaacatttagatcatcttccaagtcaccttctgacatcacagtgctcaaaaggctttcttttctgctgcatgaattgttttccttccagcctctctcagcttggttactgacacttccttctagttgctttaactccacttcgtattgcaac

SEQ ID NO: 29461 - DNA, 107 bp, Homo sapiens
  MAP TO AC013490.3; EXPRESSED IN ADULT LIVER, SIGNAL = 0.64; EXPRESSED IN BRAIN, SIGNAL = 0.65; EXPRESSED IN BONE MARROW, SIGNAL = 1.5; EXPRESSED IN PLACENTA, SIGNAL = 9.4; EXPRESSED IN FETAL LIVER, SIGNAL = 0.57; SWISSPROT HIT: P19028, EVALUE 3.70e-01; NT HIT: AF003529.1, EVALUE 1.00e-03
cctcctcatgcctatgagtcaattggccaagaagggaattaaggtgttggctgtactgattgatctgaacgttcaaggggaaattggacttctactccacaatgaac

SEQ ID NO: 29462 - DNA, 117 bp, Homo sapiens
  MAP TO AC013626.3; EXPRESSED IN FETAL LIVER, SIGNAL = 0.6; EXPRESSED IN PLACENTA, SIGNAL = 0.6; EXPRESSED IN ADULT LIVER, SIGNAL = 0.67; EXPRESSED IN BRAIN, SIGNAL = 0.63; EXPRESSED IN BONE MARROW, SIGNAL = 0.6; SWISSPROT HIT: O77746, EVALUE 5.40e+00; NT HIT: AE002132.1, EVALUE 4.00e+00
atttactgaggccacatgagggcttggcgcagttgggagcttttcatttactctctcagttggctgatgaggaaactgctggtacttttgtcctagcacacaaagaatataaccatc

SEQ ID NO: 29463 - DNA, 168 bp, Homo sapiens
  MAP TO AC008688.4; EXPRESSED IN BONE MARROW, SIGNAL = 0.62; EXPRESSED IN BRAIN, SIGNAL = 0.77; EXPRESSED IN PLACENTA, SIGNAL = 0.92; EXPRESSED IN ADULT LIVER, SIGNAL = 0.7; EXPRESSED IN FETAL LIVER, SIGNAL = 0.69; SWISSPROT HIT: Q02386, EVALUE 1.30e+00; NT HIT: D86722.1, EVALUE 3.90e-01; EST_HUMAN HIT: AW517322.1, EVALUE 5.80e-01
gatctgcacatcttgatgctcaactccagaaagctccagacacatttagaactcaaactcttcaagaatctcaaaaaccagggacatcaaagcacacaggttccattgtccatgcagatggataccaagagagggctgaggaatacgtctttgggcagctgtgggaaa

SEQ ID NO: 29464 - DNA, 95 bp, Homo sapiens
  MAP TO AC019253.3; EXPRESSED IN PLACENTA, SIGNAL = 0.67; EXPRESSED IN FETAL LIVER, SIGNAL = 0.53; EXPRESSED IN BONE MARROW, SIGNAL = 0.64; EXPRESSED IN ADULT LIVER, SIGNAL = 0.8; EXPRESSED IN BRAIN, SIGNAL = 0.68; NT HIT: AF157814.1, EVALUE 2.00e-01; SWISSPROT HIT: Q40406, EVALUE 9.50e+00
ctagtaagcgagaagccaggatgctggcccagttccaggggatgccaaggcctgagcagggtatccacacagtagtatctgccttccaaaggcat

SEQ ID NO: 29465 - DNA, 129 bp, Homo sapiens
  MAP TO AC024193.2; EXPRESSED IN BONE MARROW, SIGNAL = 0.79; EXPRESSED IN ADULT LIVER, SIGNAL = 0.79; EXPRESSED IN BRAIN, SIGNAL = 0.75; EXPRESSED IN FETAL LIVER, SIGNAL = 0.75; EXPRESSED IN PLACENTA, SIGNAL = 0.75; NT HIT: AF097485.1, EVALUE 1.00e-03; EST_HUMAN HIT: AI284118.1, EVALUE 1.10e-01; SWISSPROT HIT: Q05916, EVALUE 4.70e-01
ggctgctctgacaaggcctccaaccagaaggttccactcgcctctctgaaggaaatggacattggagtccctgggccacaccagggccacagcagagccatggacaaggaggtattggctcagatgctg

SEQ ID NO: 29466 - DNA, 160 bp, Homo sapiens
  MAP TO AL158849.5; EXPRESSED IN FETAL LIVER, SIGNAL = 0.46; EXPRESSED IN PLACENTA, SIGNAL = 0.5; EXPRESSED IN ADULT LIVER, SIGNAL = 0.55; EXPRESSED IN BONE MARROW, SIGNAL = 0.52; EXPRESSED IN BRAIN, SIGNAL = 0.6; NT HIT: K00691.1, EVALUE 3.70e-01; EST_HUMAN HIT: AA194401.1, EVALUE 8.50e+00; SWISSPROT HIT: P42781, EVALUE 1.00e+00
gagatgtgctcacccgagtatgaggaagggggatagtaaggataacaagaggggttacagtagagaacttgaaggttggagaaaggcccagaacagcaacaatgaagaatgtaaaaagatttcaacttgggctaaagaaaaagagtggaaacctgttttt

SEQ ID NO: 29467 - DNA, 153 bp, Homo sapiens
  MAP TO AC018780.3; EXPRESSED IN PLACENTA, SIGNAL = 0.65; EXPRESSED IN BONE MARROW, SIGNAL = 0.67; EXPRESSED IN ADULT LIVER, SIGNAL = 0.77; EXPRESSED IN FETAL LIVER, SIGNAL = 0.57; EXPRESSED IN BRAIN, SIGNAL = 0.71; SWISSPROT HIT: P46703, EVALUE 1.00e-02; EST_HUMAN HIT: AA348131.1, EVALUE 1.00e-78; NT HIT: gi11439065, EVALUE 4.00e-81
tacttgcaattcacactggctgatatggcaacaaggctggtggccgcgcggctgatggtccgcaatgcagcagtggctctgcaggaggagaggaaggatgcagtggccttgtgctccatggccaagctctttgctacagatgaatgctttgcc

SEQ ID NO: 29468 - DNA, 132 bp, Homo sapiens
  MAP TO AC011280.3; EXPRESSED IN PLACENTA, SIGNAL = 0.54; EXPRESSED IN ADULT LIVER, SIGNAL = 0.63; EXPRESSED IN BRAIN, SIGNAL = 0.48; EXPRESSED IN BONE MARROW, SIGNAL = 0.5; EST_HUMAN HIT: AW953681.1, EVALUE 1.70e+00; SWISSPROT HIT: P29492, EVALUE 9.20e+00
agcgtctatgattgatgataataatatcaatgatggtgatgtaaaagttattaaatacccaaaaaattatacgagtcgtgcggtacatgttgcattgaaagacaatgtctttcccatcagggatttttacct

SEQ ID NO: 29469 - DNA, 104 bp, Homo sapiens
  MAP TO AC015772.5; EXPRESSED IN PLACENTA, SIGNAL = 1.5; EXPRESSED IN ADULT LIVER, SIGNAL = 0.97; EXPRESSED IN FETAL LIVER, SIGNAL = 0.8; EXPRESSED IN BRAIN, SIGNAL = 1.1; EXPRESSED IN BONE MARROW, SIGNAL = 0.93; SWISSPROT HIT: P10266, EVALUE 9.50e-02; NT HIT: U34725.1, EVALUE 4.00e-09; EST_HUMAN HIT: AW003063.1, EVALUE 3.00e-35
gtgatgatcagatgtttgtgtgggtgcccaccaaacatctgaagatctatcatgagccacggcatctagtgggcccacctgtacagtgcaaattgaaggtttga

SEQ ID NO: 29470 - DNA, 257 bp, Homo sapiens
  MAP TO AL121901.10; EXPRESSED IN PLACENTA, SIGNAL = 0.6; EXPRESSED IN ADULT LIVER, SIGNAL = 0.71; EXPRESSED IN BRAIN, SIGNAL = 0.45; EXPRESSED IN BONE MARROW, SIGNAL = 0.45; NT HIT: D49493.1, EVALUE 9.70e+00; SWISSPROT HIT: P38432, EVALUE 9.10e-01
gaccgcctttgtgaacaacctgagggccctgcaggctgcggggagagtcacgtggagcctgagggtggcacaaggaaggcagagaagaagcaagtggagctggccttcagggttcctgagtctccacaggcccagggcacctgttcttggtccagcaataaatgctcagatggatggcgaggacttgggtcaccacaggatccactatgggaggctcctgggaaatatcaccatcacgacattcattctttcaggca

SEQ ID NO: 29471 - DNA, 103 bp, Homo sapiens
  MAP TO AC018390.3; EXPRESSED IN BONE MARROW, SIGNAL =   1; EXPRESSED IN ADULT LIVER, SIGNAL = 1.2; EXPRESSED IN FETAL LIVER, SIGNAL = 0.87; EXPRESSED IN BRAIN, SIGNAL = 0.95; EXPRESSED IN LUNG, SIGNAL = 0.98; EXPRESSED IN PLACENTA, SIGNAL = 1.1; NT HIT: gi9625671, EVALUE 2.20e-01; EST_HUMAN HIT: BF700339.1, EVALUE 1.30e+00
aagaaactttcttccattgggtactgggatttccaaacctatcaattccaagttcatagggataggaactctgttgataaaatccagacggatcagcctccag

SEQ ID NO: 29472 - DNA, 109 bp, Homo sapiens
  MAP TO AC016326.4; EXPRESSED IN BRAIN, SIGNAL = 0.47; SWISSPROT HIT: P29114, EVALUE 7.20e+00; NT HIT: Y18276.1, EVALUE 3.00e-50; EST_HUMAN HIT: BF673617.1, EVALUE 2.00e-08
cttttcaagtaagtagccaatgactaaaaagccttttccacccagcatctgttcttgcatggctactgaacttttaagtagttcaaccaggaatgccaacagagtagca

SEQ ID NO: 29473 - DNA, 89 bp, Homo sapiens
  MAP TO AL133226.16; EXPRESSED IN PLACENTA, SIGNAL = 0.46; EXPRESSED IN ADULT LIVER, SIGNAL = 0.76; EXPRESSED IN FETAL LIVER, SIGNAL = 0.5; EXPRESSED IN BRAIN, SIGNAL = 0.65; EXPRESSED IN BONE MARROW, SIGNAL = 0.56; EST_HUMAN HIT: AI992139.1, EVALUE 3.00e-04; NT HIT: AL163301.2, EVALUE 1.80e-01
tagtgccatgacagttccaggaataccaatatttggtgtaaacatgcgtggcaccacagttctgggaaatcttccccttttccagaaat

SEQ ID NO: 29474 - DNA, 438 bp, Homo sapiens
  MAP TO AL137228.2; EXPRESSED IN LUNG, SIGNAL = 1.4; EXPRESSED IN ADULT LIVER, SIGNAL = 1.4; EXPRESSED IN FETAL LIVER, SIGNAL = 1.5; EXPRESSED IN PLACENTA, SIGNAL =   1; EXPRESSED IN BRAIN, SIGNAL = 2.4; EXPRESSED IN BONE MARROW, SIGNAL = 1.7; SWISSPROT HIT: P10272, EVALUE 8.00e-25; NT HIT: D10083.1, EVALUE 1.00e-111; EST_HUMAN HIT: BE150340.1, EVALUE 5.00e-90
tcattgaggtaaccgctctgcccccctccactacctctcagcaagccaaactagttgccttaactcaagccctcactcttgcaaaaggactatgtatcaatatttatagtgactctaaatatgcctttcatattctgcaccaccatgctgttatacaggctgaaagaggtttcctcactacgcaagggtcctccatcattaatgcctctttaataaaagctctgctcaaggctactttacttccaaaggaagctggagtcattcactgcaaaggccatcaaaaggcgtcagatcacattgctataggcatcgaatacggtcataaggcggctagccaaacaggtagctttgccccctatgtacgtgccagccagtttatatcgttcacttcagtcacttccacctacccccccgcccccccgctgaaacttataccta

SEQ ID NO: 29475 - DNA, 182 bp, Homo sapiens
  MAP TO AC018537.3; EXPRESSED IN ADULT LIVER, SIGNAL = 0.55; EXPRESSED IN FETAL LIVER, SIGNAL = 0.5; EXPRESSED IN BRAIN, SIGNAL = 0.45; EXPRESSED IN BONE MARROW, SIGNAL = 0.43; EST_HUMAN HIT: BE883681.1, EVALUE 6.30e-01; NT HIT: AF181854.1, EVALUE 4.20e-01; SWISSPROT HIT: P45016, EVALUE 1.30e+00
tcagtttccaaccatgatgtaattctcatagtactgccacagaagcaaaccctcctgattctgacagaagctctgtctggcttccaaatgtggttgcatcactgcttcaatgtgccagctgccatgttgcaccatgtggtatccctggctgtctgaatcagatttggacttgctgtgccttt

SEQ ID NO: 29476 - DNA, 115 bp, Homo sapiens
  MAP TO AC011207.3; EXPRESSED IN BRAIN, SIGNAL = 1.2; EXPRESSED IN BONE MARROW, SIGNAL = 0.58; EXPRESSED IN PLACENTA, SIGNAL = 0.65; EXPRESSED IN ADULT LIVER, SIGNAL = 0.69; EXPRESSED IN FETAL LIVER, SIGNAL = 0.55; NT HIT: gi11432994, EVALUE 1.00e-58; SWISSPROT HIT: Q15700, EVALUE 2.00e-10; EST_HUMAN HIT: AW162932.1, EVALUE 4.00e-44
ctgacgtagagggagcgtttctgattggttcgcagggatccggacccggagctcatgctgtggttcatcatctgctctcgtaggtcatggattttggcctcaaatcgagcgtaat

SEQ ID NO: 29477 - DNA, 172 bp, Homo sapiens
  MAP TO AL162261.1; EXPRESSED IN HELA, SIGNAL = 2.2; EXPRESSED IN LUNG, SIGNAL = 1.2; EXPRESSED IN FETAL LIVER, SIGNAL = 1.2; EXPRESSED IN BONE MARROW, SIGNAL = 1.2; EXPRESSED IN PLACENTA, SIGNAL = 1.3; EXPRESSED IN ADULT LIVER, SIGNAL = 1.6; EXPRESSED IN BRAIN, SIGNAL = 1.1; SWISSPROT HIT: P55284, EVALUE 5.90e-01
cacaattgagcaggaaaaattcccgtaggtgaagatgccgcctctcaagggccctttgtctgtagcttccactgatgaaataatgcggttatagtcttttctggtagagaaaacggctgtatcagtggaattttttaaaaacacaaaacgagaacgagtttttaatgagctg

SEQ ID NO: 29478 - DNA, 157 bp, Homo sapiens
  MAP TO AC025740.1; EXPRESSED IN PLACENTA, SIGNAL = 0.78; EXPRESSED IN FETAL LIVER, SIGNAL = 0.78; EXPRESSED IN BRAIN, SIGNAL = 0.77; EXPRESSED IN BONE MARROW, SIGNAL = 0.74; EXPRESSED IN LUNG, SIGNAL = 1.2; EXPRESSED IN ADULT LIVER, SIGNAL = 1.1; NT HIT: X95575.1, EVALUE 3.60e-01; EST_HUMAN HIT: AW505600.1, EVALUE 2.00e-83; SWISSPROT HIT: P37483, EVALUE 4.00e+00
gaggagagggcagtgagagataggaatctcctccaggttcatgaccataatcagcccatcccgtggaaagtgcagtttaacttgggcaatagcagtcgtccgagcaatcagtgccgcaactccattcaagggaagcacctcatcacggatgaactcg

SEQ ID NO: 29479 - DNA, 92 bp, Homo sapiens
  MAP TO AC012433.5; EXPRESSED IN LUNG, SIGNAL = 0.83; EXPRESSED IN PLACENTA, SIGNAL = 0.8; EXPRESSED IN BONE MARROW, SIGNAL = 0.54; EXPRESSED IN ADULT LIVER, SIGNAL = 0.62; EXPRESSED IN BRAIN, SIGNAL = 0.62; NT HIT: AB021490.2, EVALUE 1.90e-01; EST_HUMAN HIT: AA768204.1, EVALUE 7.20e-02
gaaaatgacctttccaacacagaatcaaatgatggacaagaaacatttatacaggaaccaaacaaagccatttccttcagttatgcaaggct

SEQ ID NO: 29480 - DNA, 205 bp, Homo sapiens
  MAP TO AC011159.3; EXPRESSED IN PLACENTA, SIGNAL = 1.6; EXPRESSED IN ADULT LIVER, SIGNAL = 1.3; EXPRESSED IN FETAL LIVER, SIGNAL = 0.77; EXPRESSED IN BONE MARROW, SIGNAL = 0.97; EXPRESSED IN LUNG, SIGNAL = 1.5; EXPRESSED IN BRAIN, SIGNAL = 1.6; NT HIT: D11078.1, EVALUE 1.00e-50; SWISSPROT HIT: P06667, EVALUE 6.50e+00; EST_HUMAN HIT: AA307710.1, EVALUE 1.00e-48
aggggtacttgcccctgccccaggaaagcaggacttgccgctaagggtgaaggagaaaagggttgaggggtacttgcccctgccccaggaaagcagagaaggggtagagaaaaggagagaaggggttggggtacttgccccttccccagaaaagcgggacttgctgctgagggtgaaggaccaaggtaggcatcactgcatggtc

SEQ ID NO: 29481 - DNA, 101 bp, Homo sapiens
  MAP TO AC010910.6; EXPRESSED IN PLACENTA, SIGNAL = 0.7; EXPRESSED IN FETAL LIVER, SIGNAL = 0.69; EXPRESSED IN BRAIN, SIGNAL = 0.59; EXPRESSED IN BONE MARROW, SIGNAL = 0.65; EXPRESSED IN ADULT LIVER, SIGNAL = 0.81; EST_HUMAN HIT: BF308561.1, EVALUE 5.00e+00
tggttgcttgtccataatgttcactgctgatggtccagtgcctcccaaaagccttacacataacaggaatgacaatgatgatgatgatgatgatgatgata

SEQ ID NO: 29482 - DNA, 119 bp, Homo sapiens
  MAP TO AC025826.1; EXPRESSED IN PLACENTA, SIGNAL = 0.71; EXPRESSED IN FETAL LIVER, SIGNAL = 0.62; EXPRESSED IN BONE MARROW, SIGNAL = 0.53; EXPRESSED IN BRAIN, SIGNAL = 0.49; SWISSPROT HIT: O03889, EVALUE 3.10e+00; NT HIT: AF096268.1, EVALUE 1.00e-06; EST_HUMAN HIT: AW293243.1, EVALUE 4.00e-10
cctgctctttggatgtgaattcccacttgcccatgctgtgtttggagttaagcacactctctctcgcccactgcaaaatcccattagagtggttcttatatctgctgaggtggtcctga

SEQ ID NO: 29483 - DNA, 249 bp, Homo sapiens
  MAP TO AL162171.1; EXPRESSED IN PLACENTA, SIGNAL = 0.58; EXPRESSED IN ADULT LIVER, SIGNAL = 0.7; EXPRESSED IN BRAIN, SIGNAL = 0.72; EXPRESSED IN BONE MARROW, SIGNAL = 0.46; SWISSPROT HIT: Q15542, EVALUE 2.00e-05; NT HIT: AJ000673.1, EVALUE 9.30e+00; EST_HUMAN HIT: AW935487.1, EVALUE 3.00e-13
atgaagaagaaaagcagctgttgtattacattcactgtattggtcctgcttgtgtttcagggcaagatccttgttgggacaaggaatgctgaaataatcgaagttggagagaaaaatgcagcttgtaatattttagttaacggtcatgtggatgggccaatctggggactagcaacacatccttccagggattttttcctttctgctgcagaagatgggacagttagactttgggatattgctgataaa

SEQ ID NO: 29484 - DNA, 101 bp, Homo sapiens
  MAP TO AC009415.2; EXPRESSED IN BONE MARROW, SIGNAL = 0.5; EXPRESSED IN PLACENTA, SIGNAL = 0.62; EXPRESSED IN ADULT LIVER, SIGNAL = 0.68; EXPRESSED IN FETAL LIVER, SIGNAL = 0.51; EXPRESSED IN BRAIN, SIGNAL = 0.45; NT HIT: AJ275307.1, EVALUE 8.50e-01; EST_HUMAN HIT: BE326230.1, EVALUE 3.20e-01
aggaaagtaattctttcatcagctttaaaataaataagcactttcttttcctcaatctctttatcctcattgttcagaaaccctttcttgtcataatcatc

SEQ ID NO: 29485 - DNA, 291 bp, Homo sapiens
  MAP TO AC021804.3; EXPRESSED IN LUNG, SIGNAL = 0.89; EXPRESSED IN PLACENTA, SIGNAL = 0.99; EXPRESSED IN ADULT LIVER, SIGNAL = 0.9; EXPRESSED IN BRAIN, SIGNAL = 0.92; EXPRESSED IN BONE MARROW, SIGNAL = 0.88; EXPRESSED IN FETAL LIVER, SIGNAL = 0.75; NT HIT: X79677.1, EVALUE 1.80e-01; SWISSPROT HIT: Q61501, EVALUE 5.00e-06; EST_HUMAN HIT: BE880658.1, EVALUE 0.00e+00
aagagggacagtcgggttcagagaaatccagtaactgttgttcctgggaatctggatcaccatcttttttacgttctccaaatttataatctatcaggtccagctctttctgttggaggtaggccatttgctcttcatatttctgctcctctcctagtctctggaggttcctcagggtttttggcaggctgtgccgtccatgccagccatactgattcttagccacccggctgaccagatgcagcgactccagcacatttacaatgtcatagatgcgtctcctttccacac

SEQ ID NO: 29486 - DNA, 83 bp, Homo sapiens
  MAP TO AC023134.3; EXPRESSED IN PLACENTA, SIGNAL = 0.69; EXPRESSED IN ADULT LIVER, SIGNAL = 1.1; EXPRESSED IN FETAL LIVER, SIGNAL = 0.75; EXPRESSED IN BRAIN, SIGNAL = 0.81; EXPRESSED IN BONE MARROW, SIGNAL = 0.68; EST_HUMAN HIT: AI077920.1, EVALUE 1.00e+00
agactccagaaagaggtgcaaagagaagcgaattaatgacgacagtgacagcaattactttcaaggtatacaggagcagcatt

SEQ ID NO: 29487 - DNA, 149 bp, Homo sapiens
  MAP TO AC020719.3; EXPRESSED IN LUNG, SIGNAL = 1.3; EXPRESSED IN PLACENTA, SIGNAL = 1.2; EXPRESSED IN ADULT LIVER, SIGNAL = 1.2; EXPRESSED IN FETAL LIVER, SIGNAL = 0.86; EXPRESSED IN BRAIN, SIGNAL = 0.89; EXPRESSED IN BONE MARROW, SIGNAL = 0.91; NT HIT: gi6678140, EVALUE 2.20e-02; SWISSPROT HIT: Q48252, EVALUE 5.20e+00
aaaaaggaattgatgaacaaggaattttaggtgatggtcatctcatgtcagagatgcagggtgatgacaagatggagtggatcctggaacctggggttcagatgaagatcattgcaggtttccaggttgtgtttcatgaagtggattta

SEQ ID NO: 29488 - DNA, 111 bp, Homo sapiens
  MAP TO AC022050.2; EXPRESSED IN PLACENTA, SIGNAL = 0.88; EXPRESSED IN FETAL LIVER, SIGNAL = 0.77; EXPRESSED IN BONE MARROW, SIGNAL = 0.89; EXPRESSED IN ADULT LIVER, SIGNAL = 1.1; EXPRESSED IN BRAIN, SIGNAL = 0.79; EXPRESSED IN LUNG, SIGNAL = 1.1; EST_HUMAN HIT: BF575545.1, EVALUE 1.40e+00
tttctctagatctacttcaaatatttctaagctatcttcagtggaatactcattcttgtatttcacaaaagaaggatcaatatccaaataaattttgtatatcatatctcc

SEQ ID NO: 29489 - DNA, 156 bp, Homo sapiens
  MAP TO AC021385.3; EXPRESSED IN PLACENTA, SIGNAL = 0.65; EXPRESSED IN FETAL LIVER, SIGNAL = 0.48; EXPRESSED IN BONE MARROW, SIGNAL = 0.74; EXPRESSED IN ADULT LIVER, SIGNAL = 0.8; EXPRESSED IN BRAIN, SIGNAL = 0.62; EST_HUMAN HIT: AI954210.1, EVALUE 5.30e-01; SWISSPROT HIT: Q9QYS1, EVALUE 1.80e+00; NT HIT: AF196779.1, EVALUE 1.40e+00
aatccctttaaattctttcttctcatctgtcatcctgtgaccatttccagggctccattctgcaatgcctattcttcagctaacaagcacagcatatttcacagacgctgccagctgcacagcttctatttctcttccgtatccagctccatgcag

SEQ ID NO: 29490 - DNA, 96 bp, Homo sapiens
  MAP TO AC021288.3; EXPRESSED IN PLACENTA, SIGNAL = 0.8; EXPRESSED IN ADULT LIVER, SIGNAL = 0.85; EXPRESSED IN FETAL LIVER, SIGNAL = 0.72; EXPRESSED IN BONE MARROW, SIGNAL = 0.78; EXPRESSED IN BRAIN, SIGNAL = 0.69; NT HIT: X78388.1, EVALUE 2.00e-01
cctccagatgttttaaaacatatgaaatgggatcgcagccacttttttggtgaggtctgtgaccaggatgacactaatgacatctaccgacactaa

SEQ ID NO: 29491 - DNA, 213 bp, Homo sapiens
  MAP TO AC023032.2; EXPRESSED IN ADULT LIVER, SIGNAL =   1; EXPRESSED IN BRAIN, SIGNAL =   1; EXPRESSED IN LUNG, SIGNAL = 0.94; EXPRESSED IN PLACENTA, SIGNAL = 1.1; EXPRESSED IN FETAL LIVER, SIGNAL = 0.83; EXPRESSED IN BONE MARROW, SIGNAL = 0.91; NT HIT: AB016077.1, EVALUE 1.30e-01; EST_HUMAN HIT: AA093915.1, EVALUE 7.50e-01; SWISSPROT HIT: P08548, EVALUE 1.00e-04
aatctctattttgatgcagaaccaacttttgattttattgatttttgtatatatttttttactgttctctattctatttatttctcctttaatcttcattttctgtcttcacattgctttggatttcgttttatcttacttttcctgtgtcttaaagttgacgtttatgttactgattttaaacttttctcatttaagtatggatatttacag

SEQ ID NO: 29492 - DNA, 87 bp, Homo sapiens
  MAP TO AC016706.2; EXPRESSED IN PLACENTA, SIGNAL = 0.79; EXPRESSED IN ADULT LIVER, SIGNAL = 0.95; EXPRESSED IN FETAL LIVER, SIGNAL = 0.77; EXPRESSED IN BRAIN, SIGNAL = 0.85; EXPRESSED IN BONE MARROW, SIGNAL = 0.81; EXPRESSED IN LUNG, SIGNAL = 0.92; EST_HUMAN HIT: AI088136.1, EVALUE 1.10e+00; NT HIT: AB000470.1, EVALUE 4.50e-02
atgattgcagctgagtacaaaacaggcactgggccaaacactgctaaaacgcaaaacatgttggacaagcctgaccctaataaaaag

SEQ ID NO: 29493 - DNA, 293 bp, Homo sapiens
  MAP TO AC009486.3; EXPRESSED IN LUNG, SIGNAL = 1.2; EXPRESSED IN PLACENTA, SIGNAL = 0.8; EXPRESSED IN ADULT LIVER, SIGNAL = 0.95; EXPRESSED IN FETAL LIVER, SIGNAL =   1; EXPRESSED IN BRAIN, SIGNAL = 0.97; EXPRESSED IN BONE MARROW, SIGNAL = 0.62; NT HIT: gi11056053, EVALUE 0.00e+00; SWISSPROT HIT: P57058, EVALUE 1.00e-06; EST_HUMAN HIT: AU127403.1, EVALUE 0.00e+00
ctctcttcgtccttaaagatgaatttccgcagcttgaggtcccgcagcaccagccccccgtcatggcagtgggccactgccgaggcaatctggtagaacagtctggctgcctcctcctctctcagcttcttgcaggtgcggacgaaggaatgcatgtccccatagcttcgctcaaagaacacataggctttggtctcacccaggataatttcagtgatttggttgatgttactatgagcagacaggcaaaagcacggtgccagggattcctggtagcagctgatatcaaacac

SEQ ID NO: 29494 - DNA, 97 bp, Homo sapiens
  MAP TO AC013611.3; EXPRESSED IN ADULT LIVER, SIGNAL = 0.58; EXPRESSED IN FETAL LIVER, SIGNAL = 0.52; EXPRESSED IN BRAIN, SIGNAL = 0.49; EXPRESSED IN BONE MARROW, SIGNAL = 0.47; EXPRESSED IN PLACENTA, SIGNAL = 0.5; NT HIT: AB018420.1, EVALUE 2.10e-01; EST_HUMAN HIT: BE708002.1, EVALUE 7.60e-02; SWISSPROT HIT: P23658, EVALUE 5.50e+00
atgttccacctctccctgcaaagtcactccctcctctgtgctgtccgggaattctgtagagccctccaccattgtagggcactggcactgccactgt

SEQ ID NO: 29495 - DNA, 78 bp, Homo sapiens
  MAP TO AC025539.2; EXPRESSED IN PLACENTA, SIGNAL = 0.63; EXPRESSED IN ADULT LIVER, SIGNAL = 0.6; EXPRESSED IN BRAIN, SIGNAL = 0.5; NT HIT: gi11420793, EVALUE 6.20e-01
ctaaggtcaaacactctttatgtgaatcatattccagatctccagccttgtcctctttgccctggaccagcacatccc

SEQ ID NO: 29496 - DNA, 98 bp, Homo sapiens
  MAP TO AC016851.3; EXPRESSED IN PLACENTA, SIGNAL = 0.54; EXPRESSED IN FETAL LIVER, SIGNAL = 0.59; EXPRESSED IN BONE MARROW, SIGNAL = 0.59; EXPRESSED IN ADULT LIVER, SIGNAL = 0.56; EXPRESSED IN BRAIN, SIGNAL = 0.59; NT HIT: AF223888.1, EVALUE 8.20e-01; EST_HUMAN HIT: AV728374.1, EVALUE 1.20e+00
aacttacctggaggacaaccttgagaacagtaaacacattccaccatttagaatcacccttctctccaatgctgacagaatgaacatgaatcaaattt

SEQ ID NO: 29497 - DNA, 77 bp, Homo sapiens
  MAP TO AL161445.2; EXPRESSED IN BONE MARROW, SIGNAL = 0.6; EXPRESSED IN PLACENTA, SIGNAL = 0.63; EXPRESSED IN FETAL LIVER, SIGNAL = 0.54; EXPRESSED IN BRAIN, SIGNAL = 0.51; NT HIT: AF239803.1, EVALUE 2.00e-03; EST_HUMAN HIT: C16927.1, EVALUE 6.00e-36; SWISSPROT HIT: P42918, EVALUE 4.30e+00
cctgctttttccttaaattctttatcatcagcatcttcccatgttatttcatagtcttcatcatcatcactttccat

SEQ ID NO: 29498 - DNA, 345 bp, Homo sapiens
  MAP TO AC025863.2; EXPRESSED IN ADULT LIVER, SIGNAL = 1.1; EXPRESSED IN FETAL LIVER, SIGNAL = 0.99; EXPRESSED IN BRAIN, SIGNAL = 0.87; EXPRESSED IN BONE MARROW, SIGNAL = 0.86; EXPRESSED IN LUNG, SIGNAL =   1; EXPRESSED IN PLACENTA, SIGNAL = 0.89; SWISSPROT HIT: Q50028, EVALUE 1.00e+00; NT HIT: L19299.1, EVALUE 8.50e-01; EST_HUMAN HIT: BE958511.1, EVALUE 0.00e+00
ttgtcacggatgatggtctgtagctcccgtatctgatcattcataggcagcagcttaagctgcgccccgatctgccgggagagttcgcagtcctctaggaaggagttgccagctggtgcgtcatagctgctactgtcaccactaccactgttgccctttgagttgaggctggagccgccgcaggccccagagtccagctcggccggcaggctagaatgggcgtaccccgtgaggagaatcaccttggccctggaggctctgtttccccctgcgtggtccaggatcagatcgccaggtcgcagctgctcgggacttggggttgaggcagagtttacttgctggttg

SEQ ID NO: 29499 - DNA, 104 bp, Homo sapiens
  MAP TO AL121723.35; EXPRESSED IN ADULT LIVER, SIGNAL = 0.67; EXPRESSED IN BRAIN, SIGNAL = 0.83; EXPRESSED IN PLACENTA, SIGNAL = 1.1; NT HIT: gi7656978, EVALUE 8.80e-01; SWISSPROT HIT: P09506, EVALUE 4.20e+00; EST_HUMAN HIT: AV647367.1, EVALUE 1.30e+00
atggccgaccaggagctgctagctaaagcagagcacaggagaacagcaaagaagcagcagaaatcccatagaccacagcaacccaggatgaccacaaacaaaag

SEQ ID NO: 29500 - DNA, 139 bp, Homo sapiens
  MAP TO AL133465.28; EXPRESSED IN LUNG, SIGNAL = 0.89; EXPRESSED IN ADULT LIVER, SIGNAL = 0.78; EXPRESSED IN FETAL LIVER, SIGNAL = 0.71; EXPRESSED IN BRAIN, SIGNAL = 0.71; EXPRESSED IN PLACENTA, SIGNAL = 0.76; EXPRESSED IN BONE MARROW, SIGNAL = 0.63; NT HIT: U91328.1, EVALUE 4.90e+00
tcaaccacccttgcagctgatttctacctctccagcagcccctaccacatcttgcctagtgatctgtcgacttgtatctgcagatccaggctccgcagttgctaacgctgtacttctctcagcctcattttccacattt

SEQ ID NO: 29501 - DNA, 176 bp, Homo sapiens
  MAP TO AL133417.9; EXPRESSED IN LUNG, SIGNAL = 0.88; EXPRESSED IN PLACENTA, SIGNAL = 0.81; EXPRESSED IN ADULT LIVER, SIGNAL = 0.75; EXPRESSED IN BRAIN, SIGNAL = 0.8; EXPRESSED IN BONE MARROW, SIGNAL = 0.8; EXPRESSED IN FETAL LIVER, SIGNAL = 0.75; NT HIT: gi9845523, EVALUE 8.00e-95; EST_HUMAN HIT: AU142101.1, EVALUE 1.00e-94; SWISSPROT HIT: P11161, EVALUE 8.00e-30
aatattgattatgccttctgggtagcagctggcaccagggtactgagggtcaatggagaacttgcccatgtaagtgaaggtctggtttctaggtgcagagacgggagcaaagctgctgggatatgggagatccaacgacctcttctctccagtcatgtcaatgttgatcatgccat

SEQ ID NO: 29502 - DNA, 151 bp, Homo sapiens
  MAP TO AC009430.2; EXPRESSED IN FETAL LIVER, SIGNAL = 0.67; EXPRESSED IN PLACENTA, SIGNAL = 0.5; EXPRESSED IN BONE MARROW, SIGNAL = 0.68; EXPRESSED IN BRAIN, SIGNAL = 0.51; SWISSPROT HIT: P38931, EVALUE 3.10e+00; NT HIT: U93163.1, EVALUE 1.00e-31; EST_HUMAN HIT: AW971754.1, EVALUE 1.00e-26
ggcgggcccttcaggaggtattccagaagaaggtgttattatcacaggagatgacagctccatgcatgttattgcccctgaggaccttccagtgggacaagatgtcggggtgaaagacagtgatcctgatgatcctgaccctgtgaaaacc

SEQ ID NO: 29503 - DNA, 142 bp, Homo sapiens
  MAP TO AC007458.13; EXPRESSED IN PLACENTA, SIGNAL = 0.65; EXPRESSED IN BONE MARROW, SIGNAL = 0.55; EXPRESSED IN ADULT LIVER, SIGNAL = 0.62; EXPRESSED IN BRAIN, SIGNAL = 0.55; NT HIT: AJ251550.1, EVALUE 1.00e-74; SWISSPROT HIT: Q29442, EVALUE 9.10e+00; EST_HUMAN HIT: AW182416.1, EVALUE 1.90e+00
tacttacacagtggctcaatttctgcctaaggctatgaaagtcctccacaaagcgtattttcttgcagccttgcaattgcagttgaccaaaaacgtcttccatgaagaaggacagaagctgttcttgaaattgacagttttt

SEQ ID NO: 29504 - DNA, 209 bp, Homo sapiens
  MAP TO AL162171.1; EXPRESSED IN PLACENTA, SIGNAL = 0.81; EXPRESSED IN ADULT LIVER, SIGNAL = 0.91; EXPRESSED IN BRAIN, SIGNAL = 0.85; EXPRESSED IN BONE MARROW, SIGNAL = 0.72; EXPRESSED IN FETAL LIVER, SIGNAL = 0.71; SWISSPROT HIT: P46531, EVALUE 9.70e-01; EST_HUMAN HIT: BE830353.1, EVALUE 1.90e-01
gtgccaaaattgccagcagagctggtcacaatcaacgtatttttgtggcagaattccgaccagattcagatacccagtttgtctcagtgggagtaaaacatgtgaagttctggaccctggcaggaagagctcttcttagcaaaaaagggctactgagcacactggaagatgcccggatgcagaccatgctcgctattgcatttggtgca

SEQ ID NO: 29505 - DNA, 452 bp, Homo sapiens
  MAP TO AC009487.3; EXPRESSED IN PLACENTA, SIGNAL = 0.48; EXPRESSED IN ADULT LIVER, SIGNAL = 0.66; EXPRESSED IN FETAL LIVER, SIGNAL = 0.79; EXPRESSED IN BRAIN, SIGNAL = 0.68; EXPRESSED IN BONE MARROW, SIGNAL = 0.98; SWISSPROT HIT: P27864, EVALUE 8.10e-02; EST_HUMAN HIT: BE897487.1, EVALUE 0.00e+00
acagatgaaaccttaacttcttttttagtagtttcttcaactgctggttccaacagctgagatgattttaatctttttgattccctacctgtagtgatctgtaattcttgttccacagaactggtgttttctagtatgtcctgattaacttctttctttctccttcctctcctaggcgtaacagaattttgaggtatttgctggttctgagatagtcctctgacatcagaatagatgttttcagaagcttcagaaatttcttttgccttcctagttttcttcttgactgactgccctggcatcttaggagtagcaacatctgctgatgcttcctgttgtgctgatttgacattcacgttttggatacgttgacctctcgtacgagttttggaggaaaccacgtcatcaacctggctgacattcatagtcattgtgcttgtttcctgagcagt

SEQ ID NO: 29506 - DNA, 76 bp, Homo sapiens
  MAP TO AC025539.2; EXPRESSED IN LUNG, SIGNAL = 0.91; EXPRESSED IN BONE MARROW, SIGNAL = 0.85; EXPRESSED IN ADULT LIVER, SIGNAL = 0.92; EXPRESSED IN BRAIN, SIGNAL = 0.8; EXPRESSED IN PLACENTA, SIGNAL = 0.82; EXPRESSED IN FETAL LIVER, SIGNAL = 0.76; SWISSPROT HIT: P01286, EVALUE 9.70e+00; NT HIT: AJ229042.1, EVALUE 3.80e-02; EST_HUMAN HIT: AW264679.1, EVALUE 5.00e-33
cctcagtgtgatggtatttggaggtgggggctttagatgatcggatttccataaggttgtaagggtggggctccat

SEQ ID NO: 29507 - DNA, 123 bp, Homo sapiens
  MAP TO AC007989.2; EXPRESSED IN LUNG, SIGNAL = 1.9; EXPRESSED IN PLACENTA, SIGNAL = 1.1; EXPRESSED IN FETAL LIVER, SIGNAL = 0.69; EXPRESSED IN BRAIN, SIGNAL = 0.57; EXPRESSED IN ADULT LIVER, SIGNAL = 1.1; EXPRESSED IN BONE MARROW, SIGNAL = 1.1; NT HIT: AF156539.1, EVALUE 2.70e-01; EST_HUMAN HIT: BE883864.1, EVALUE 4.00e-01; SWISSPROT HIT: P78067, EVALUE 5.40e+00
ctctttcatgtcctggggttgacttcctgcttgtccccacctctctccaggaagggtcccttttaccccaactctagaaattctagcctcagaagaggccaatgtgctatcctcattgggctc

SEQ ID NO: 29508 - DNA, 108 bp, Homo sapiens
  MAP TO AL121883.13; EXPRESSED IN ADULT LIVER, SIGNAL = 0.91; EXPRESSED IN LUNG, SIGNAL = 0.89; EXPRESSED IN PLACENTA, SIGNAL = 0.88; EXPRESSED IN FETAL LIVER, SIGNAL = 0.67; EXPRESSED IN BRAIN, SIGNAL = 0.61; EXPRESSED IN BONE MARROW, SIGNAL = 0.69; EST_HUMAN HIT: BE145374.1, EVALUE 1.40e+00; SWISSPROT HIT: P40798, EVALUE 9.40e+00; NT HIT: AL163281.2, EVALUE 3.70e+00
ttattttaatttaatcatgcagtccacagatatttcttgagcaccattgtgtgccattgaaatttggtagtgagcagggcagaggtagcctttattaagcttgttttc

SEQ ID NO: 29509 - DNA, 133 bp, Homo sapiens
  MAP TO AL158049.2; EXPRESSED IN PLACENTA, SIGNAL = 0.67; EXPRESSED IN FETAL LIVER, SIGNAL = 0.56; EXPRESSED IN BRAIN, SIGNAL = 0.54; EXPRESSED IN BONE MARROW, SIGNAL = 0.5; EXPRESSED IN ADULT LIVER, SIGNAL = 0.64; SWISSPROT HIT: P08563, EVALUE 1.10e+00; NT HIT: D64001.1, EVALUE 1.90e-02
ctgtaggaagatgtcacccccattgccgcagccatggtcatcttgccaagggtcagtgtgagagcaagcccagaccagcccaccaaatgcagactcccggggccctgccaggctctgagtgaggacctcaggt

SEQ ID NO: 29510 - DNA, 216 bp, Homo sapiens
  MAP TO AL121777.16; EXPRESSED IN PLACENTA, SIGNAL = 0.52; EXPRESSED IN FETAL LIVER, SIGNAL = 0.56; EXPRESSED IN BONE MARROW, SIGNAL = 0.51; EXPRESSED IN BRAIN, SIGNAL = 0.52; EST_HUMAN HIT: AA412409.1, EVALUE 1.00e-54; NT HIT: gi9790172, EVALUE 6.00e-13; SWISSPROT HIT: P98159, EVALUE 1.60e+00
gaaccttcaccgtggaaacccttgtgctcatgggcgtggtctcaacacacagtcagctgttggggatcagaggccgcactcaccggagcagtgaggcagaactaactgggagagggtccttctgtgacacctactgcatcaccgggctgtgtgaagtgactcagctgccagaactcacacaatatcattctacaccaaaacctcatgggaaaaatg

SEQ ID NO: 29511 - DNA, 240 bp, Homo sapiens
  MAP TO AC008521.5; EXPRESSED IN ADULT LIVER, SIGNAL = 0.64; EXPRESSED IN PLACENTA, SIGNAL = 0.91; EXPRESSED IN FETAL LIVER, SIGNAL = 0.78; EXPRESSED IN BRAIN, SIGNAL = 0.67; EXPRESSED IN BONE MARROW, SIGNAL = 0.68; NT HIT: U50715.1, EVALUE 1.50e-01; SWISSPROT HIT: P80858, EVALUE 2.80e+00; EST_HUMAN HIT: AA311624.1, EVALUE 0.00e+00
ggtgaagatgatgactacttgcctgataatgtgacctttgcacccaaagatgtcacacctgtggatttcacacctaaagataatgtgcatggtctagcttacaagggcctggatccccaccaggcactgtttggaacttcgggagaacattttaatcttttcagtggtggttctgagagagctggcgatcttggagaaattggactgaataaaggaagaaaattgggaatttcaggccag

SEQ ID NO: 29512 - DNA, 382 bp, Homo sapiens; identical to SEQ ID NO: 19705
  MAP TO AC011440.5; EXPRESSED IN ADULT LIVER, SIGNAL = 0.6; EXPRESSED IN BRAIN, SIGNAL =   1; EXPRESSED IN PLACENTA, SIGNAL = 0.55; EXPRESSED IN FETAL LIVER, SIGNAL = 0.57; EXPRESSED IN BONE MARROW, SIGNAL = 0.56; NT HIT: gi4758827, EVALUE 0.00e+00; SWISSPROT HIT: P25304, EVALUE 2.80e-02; EST_HUMAN HIT: AA332346.1, EVALUE 1.00e-100

SEQ ID NO: 29513 - DNA, 99 bp, Homo sapiens
  MAP TO AL122006.5; EXPRESSED IN ADULT LIVER, SIGNAL = 0.68; EXPRESSED IN BRAIN, SIGNAL = 0.63; EXPRESSED IN BONE MARROW, SIGNAL = 0.6; EXPRESSED IN PLACENTA, SIGNAL = 0.61; EXPRESSED IN FETAL LIVER, SIGNAL = 0.62; NT HIT: Y07907.1, EVALUE 5.30e-02
atggctctagcagctagacatgttgttgcttttgccaaagaatacagcaacaaaattaaacaaaacaaagagcttctcctttcttttgcagatggcagt

SEQ ID NO: 29514 - DNA, 159 bp, Homo sapiens
  MAP TO AL109976.21; EXPRESSED IN PLACENTA, SIGNAL = 0.76; EXPRESSED IN FETAL LIVER, SIGNAL = 0.72; EXPRESSED IN BRAIN, SIGNAL = 0.81; EXPRESSED IN ADULT LIVER, SIGNAL = 0.7; EXPRESSED IN BONE MARROW, SIGNAL = 0.67; EST_HUMAN HIT: BF375285.1, EVALUE 1.40e-01; NT HIT: AF079360.1, EVALUE 1.40e+00; SWISSPROT HIT: O51066, EVALUE 8.90e+00
ccttgtaacaccaccagcagtctggtcttcttgcggatgtaggctgactggcgcgcagagcggttctgctgggcctctagggcactggaaaggtatctctggaagtgtgcagcatgaaaacattcagagctgtccatgatttggcgatacaccatccat

SEQ ID NO: 29515 - DNA, 181 bp, Homo sapiens
  MAP TO AC013698.3; EXPRESSED IN ADULT LIVER, SIGNAL = 0.64; EXPRESSED IN BRAIN, SIGNAL = 0.45; EXPRESSED IN BONE MARROW, SIGNAL = 0.5; EXPRESSED IN PLACENTA, SIGNAL = 0.67; EXPRESSED IN FETAL LIVER, SIGNAL = 0.54; SWISSPROT HIT: P18162, EVALUE 4.50e-01; NT HIT: AF141325.2, EVALUE 9.00e-98; EST_HUMAN HIT: BE180318.1, EVALUE 8.00e-62
tcgtgtaaccatcactcatatccagaacattaccagagctgccatcagtaaccccaccttcttctccaaggacaccaccattgtgacttccaacgttgctataggttggttttgcctgtttttgaactttaaattgattaaatggcacagcatatatcttttgtgcctgacctctttcact

SEQ ID NO: 29516 - DNA, 402 bp, Homo sapiens
  MAP TO AC026156.2; EXPRESSED IN PLACENTA, SIGNAL = 0.45; EXPRESSED IN ADULT LIVER, SIGNAL = 0.68; EXPRESSED IN BONE MARROW, SIGNAL = 0.59; EXPRESSED IN FETAL LIVER, SIGNAL = 0.68; EXPRESSED IN BRAIN, SIGNAL = 0.59; SWISSPROT HIT: P81176, EVALUE 7.80e-01; EST_HUMAN HIT: AA442470.1, EVALUE 9.40e-02; NT HIT: AF087150.1, EVALUE 6.40e-02
cttcatcagccccgctctgccccttgacttctattcctttcctctcactcctctgaatcatcttggaaatccagcctttggtgcagtcctctggctgagcacagggtacatggcgctcactcagccccaggcgatgctccgcatggtggagactggtcttccagctaacaccgccattttgggagcacttatggctgacgggcaggagtctgaaggggttggaaagctgaggtttgatatgaaccttctgccaaggcagctgccggaataagggctggggaatatccagatggggaggtgagcatggcaggccccaagctccagaccgcttccagcagccgctgcagcagtgagtaccggagtgatcagcagggcaggtgtcaggggctggatgtggcctgg

SEQ ID NO: 29517 - DNA, 324 bp, Homo sapiens
  MAP TO AC009079.4; EXPRESSED IN ADULT LIVER, SIGNAL = 1.1; EXPRESSED IN LUNG, SIGNAL = 1.2; EXPRESSED IN PLACENTA, SIGNAL = 0.94; EXPRESSED IN BRAIN, SIGNAL = 1.3; EXPRESSED IN BONE MARROW, SIGNAL = 1.3; EXPRESSED IN FETAL LIVER, SIGNAL = 1.4; SWISSPROT HIT: O04386, EVALUE 2.50e-01; NT HIT: AF015787.1, EVALUE 1.30e-02; EST_HUMAN HIT: AI886384.1, EVALUE 2.00e-85
aggtcttgggaaaactttggtctccagcatttggggcctgttttcctgcttggcctttgggagaacatgctttcgggtgatcacaggagatcttggctccttggctttgaatttggatttgtagctttgcactccccgtttctgcagaagctgcaaggcagcaaggtagcgaacgttgctggggtctggagggcacgccaggtttttctcagacaggagggaccaatgcaggcagcgctgctccggatcggtcagcagggatatctgggccgctggggaaggggaggatggcgtgtcgttgaccatagggtgtttggccagctc

SEQ ID NO: 29518 - DNA, 392 bp, Homo sapiens
  MAP TO AL136984.7; EXPRESSED IN PLACENTA, SIGNAL = 0.64; EXPRESSED IN ADULT LIVER, SIGNAL = 0.72; EXPRESSED IN BRAIN, SIGNAL = 0.67; EXPRESSED IN BONE MARROW, SIGNAL = 0.78; EXPRESSED IN FETAL LIVER, SIGNAL = 0.81; NT HIT: gi11425512, EVALUE 0.00e+00; EST_HUMAN HIT: BE891113.1, EVALUE 0.00e+00; SWISSPROT HIT: P78325, EVALUE 1.50e-01
ggatgacctccacctcagacgtgaatgagatgagaaagcgccttacccagccgcaaactgtgagggtgccatcaggcttgggtttagtcctgcagcagctgccatggcagcaagactggcatttgctggcaactgtgcagctccttgaagggcagcagctgctgctgtttgcaaacctgatgctgtcaccatcacctggctggtcccaagaggggaggacaaaggagtggaggtggtctgtgttgtgctggtctcactggcactggatgcctcggaggtggaggctgaggcagaaggggagggactcagagagggggacgtgactgctgaggaagctggaggcgctgtggaaatcacggttgctgtgttgttggaggtggtgtctgaagtgc

SEQ ID NO: 29519 - DNA, 257 bp, Homo sapiens
  MAP TO AC015452.4; EXPRESSED IN LUNG, SIGNAL = 1.1; EXPRESSED IN ADULT LIVER, SIGNAL = 1.3; EXPRESSED IN BONE MARROW, SIGNAL = 1.5; EXPRESSED IN FETAL LIVER, SIGNAL = 1.4; EXPRESSED IN BRAIN, SIGNAL = 1.4; NT HIT: AB014607.1, EVALUE 1.00e-69; EST_HUMAN HIT: AI500342.1, EVALUE 5.00e-67; SWISSPROT HIT: P03365, EVALUE 4.20e-02
gccaaaatcaacagccaatttggataccatcaagacatctgaaaccttttcatgagccagatgctgaggaagagattccgggaggatcccgaggaacccccggttgcagtaatgttgagactgaagctgaggaggaccccaactgtcacaagcaacacccgtccaacacagccacccacctggggacagatcaagaagctgtcacagatggcagaagaaaatctgaggaaagcaggacaaccagtcacaacaagtaa

SEQ ID NO: 29520 - DNA, 212 bp, Homo sapiens
  MAP TO AC021115.3; EXPRESSED IN LUNG, SIGNAL = 1.2; EXPRESSED IN FETAL LIVER, SIGNAL = 0.67; EXPRESSED IN BONE MARROW, SIGNAL = 0.71; EXPRESSED IN PLACENTA, SIGNAL = 0.8; EXPRESSED IN ADULT LIVER, SIGNAL = 0.93; EXPRESSED IN BRAIN, SIGNAL = 0.74; EST_HUMAN HIT: AI394723.1, EVALUE 2.00e-20; SWISSPROT HIT: P15086, EVALUE 8.90e-01; NT HIT: AJ277441.1, EVALUE 1.00e-116
ctcagcaggaagcagggtgtaggagtagaactgtttcatcttggtcaccagatcgtctgtggagaaggtcacatattctacaaacctccggttcagcaggaaccagtccgaaccgccatccacggcaatgccctctgggatccgccgatctcccaggcgccacatgtgagcgtcgcactccaggaagagccgatccaggccctgcttccgaa

SEQ ID NO: 29521 - DNA, 82 bp, Homo sapiens
  MAP TO AC021973.2; EXPRESSED IN PLACENTA, SIGNAL = 1.3; EXPRESSED IN ADULT LIVER, SIGNAL = 1.1; EXPRESSED IN BRAIN, SIGNAL = 0.85; EXPRESSED IN LUNG, SIGNAL = 1.1; EXPRESSED IN FETAL LIVER, SIGNAL = 0.87; EXPRESSED IN BONE MARROW, SIGNAL = 0.81; EST_HUMAN HIT: AV698070.1, EVALUE 6.30e-02; NT HIT: gi4758583, EVALUE 1.70e-01
aaactgaagttctcatccatcgtcatcttgaatgtatttaagaggttcctccagaagatctctagcaggtggggccttcggg

SEQ ID NO: 29522 - DNA, 156 bp, Homo sapiens
  MAP TO AC023340.2; EXPRESSED IN PLACENTA, SIGNAL = 0.72; EXPRESSED IN FETAL LIVER, SIGNAL = 0.78; EXPRESSED IN ADULT LIVER, SIGNAL = 0.74; EXPRESSED IN BRAIN, SIGNAL = 0.53; EXPRESSED IN BONE MARROW, SIGNAL = 0.62; EXPRESSED IN LUNG, SIGNAL = 1.1; SWISSPROT HIT: O14817, EVALUE 5.20e+00; NT HIT: AF206661.1, EVALUE 3.00e-17; EST_HUMAN HIT: BE253347.1, EVALUE 9.00e-83
atggtggaccccaccggcttccgggagatcgtggctgccaatcctctgctcctcacgggcgcctacatcctcctggccatggggggcctgctctttctgctcggcttcctgggctgctgcggggccgtccgtgagaacaagtgtctgctgctattt

SEQ ID NO: 29523 - DNA, 210 bp, Homo sapiens
  MAP TO AC019159.3; EXPRESSED IN PLACENTA, SIGNAL = 0.6; EXPRESSED IN ADULT LIVER, SIGNAL = 0.63; EXPRESSED IN BRAIN, SIGNAL = 0.48; EXPRESSED IN BONE MARROW, SIGNAL = 0.47; NT HIT: U50871.1, EVALUE 5.00e-04; EST_HUMAN HIT: AI124813.1, EVALUE 1.20e-02; SWISSPROT HIT: Q9PQ82, EVALUE 2.80e+00
atgccaattgggaataagaagttgactaaaactgttaaaggaaaaattggggaatggtatgacaataagggttttgataagcttcagcatatttctggtaaacctgaagggctatgcacatgtgcagggctgtgcacatgctcagaaaataaccaaaaaaaccttagtttcttacatcccactaatcttaaggacttgcagaagcaggat

SEQ ID NO: 29524 - DNA, 98 bp, Homo sapiens
  MAP TO AC025221.2; EXPRESSED IN ADULT LIVER, SIGNAL = 0.84; EXPRESSED IN PLACENTA, SIGNAL = 0.95; EXPRESSED IN FETAL LIVER, SIGNAL = 0.77; EXPRESSED IN BRAIN, SIGNAL = 0.68; EXPRESSED IN LUNG, SIGNAL =   1; EXPRESSED IN BONE MARROW, SIGNAL = 0.63; NT HIT: AE001304.1, EVALUE 1.30e-02; EST_HUMAN HIT: BE735330.1, EVALUE 1.20e+00
ctcactcttggttacctgaaccaatggactacctagaaccaggaattattcttcaactggttgaagaagctgtgcttaaactcaacttccaagaaaac

SEQ ID NO: 29525 - DNA, 492 bp, Homo sapiens
  MAP TO AC010290.4; EXPRESSED IN PLACENTA, SIGNAL = 0.5; EXPRESSED IN FETAL LIVER, SIGNAL = 0.53; EXPRESSED IN BRAIN, SIGNAL = 0.46; EXPRESSED IN BONE MARROW, SIGNAL = 0.6; NT HIT: gi11435883, EVALUE 0.00e+00; SWISSPROT HIT: P18171, EVALUE 2.00e-01; EST_HUMAN HIT: BE304522.1, EVALUE 0.00e+00
accaagatggtccagcacattcgaaagaagcatccagagttcgcccagctctccaacaccatacacacaccactgacgacagctgtgatcagtgccaccccagcggttttgactacagacagcgccactggagagactgtggtgacgacggacctgctcacccaagcaatgacagaactgtcccagaccttaacgacagactaccgaacgccacaaggggattaccagagaattcagtacatccctgtgtcgcagtcggcgtctggcctccagcagcctcagcacatacagctgcaagtggttcaagtggcctcggtactgcgtgccttggtttccctttgccttatgaatgccgtgttgccactagcacctcattctcagagctggggctgggatctatgtaatgtccttctgcgtggaagttctgagccttgggcattttacaactgccccttcccctttcaggctgatgaggcctctggccttagcaat

SEQ ID NO: 29526 - DNA, 168 bp, Homo sapiens
  MAP TO AC013627.3; EXPRESSED IN BONE MARROW, SIGNAL = 0.74; EXPRESSED IN ADULT LIVER, SIGNAL = 0.92; EXPRESSED IN BRAIN, SIGNAL = 0.56; EXPRESSED IN PLACENTA, SIGNAL = 0.71; EXPRESSED IN FETAL LIVER, SIGNAL = 0.71; NT HIT: AF123303.1, EVALUE 5.00e-90; SWISSPROT HIT: P04710, EVALUE 8.00e-07; EST_HUMAN HIT: AA001086.1, EVALUE 1.00e-60
ctcatacacagcaagatctatgcctgcataaggtatgatacctaataaattgggaacatagcctttgtaaaaagctcccaagccttcatgtttcaaaatcttcttggcacaatcatatattccagagtactgcccagttttgcctacagccagcctggttttcataac

SEQ ID NO: 29527 - DNA, 201 bp, Homo sapiens
  MAP TO AL137225.7; EXPRESSED IN PLACENTA, SIGNAL = 0.9; EXPRESSED IN ADULT LIVER, SIGNAL = 0.6; EXPRESSED IN FETAL LIVER, SIGNAL = 0.82; EXPRESSED IN BONE MARROW, SIGNAL = 0.71; EXPRESSED IN BRAIN, SIGNAL = 0.79; NT HIT: X60660.1, EVALUE 4.00e-17; EST_HUMAN HIT: H65167.1, EVALUE 3.00e-77; SWISSPROT HIT: O32953, EVALUE 1.50e-01
acgctggttggggaggctggaggaggactcatcgactacccattggggtggccagctgtgtctcccaagccgatgccagagctgcctcccatgggtgacaacaccaagtcccagctggccatgtctgccaacttcctgggctcagtgctgactctactgcagaagcagcatgctctagacctggatatcaccaatggcatg

SEQ ID NO: 29528 - DNA, 90 bp, Homo sapiens
  MAP TO AC018535.3; EXPRESSED IN BONE MARROW, SIGNAL = 0.62; EXPRESSED IN ADULT LIVER, SIGNAL = 0.65; EXPRESSED IN BRAIN, SIGNAL = 0.66; EXPRESSED IN PLACENTA, SIGNAL = 0.66; EXPRESSED IN FETAL LIVER, SIGNAL = 0.65; NT HIT: gi4505024, EVALUE 7.40e-01; SWISSPROT HIT: P96786, EVALUE 9.50e+00; EST_HUMAN HIT: AW953229.1, EVALUE 1.00e-43
cattgtcttcaacagagaaatagaagatgtcctttgatgcgttgctgccctcattcaagacataggatatcttcatctcatcaatgtcag

SEQ ID NO: 29529 - DNA, 277 bp, Homo sapiens
  MAP TO AC008750.4; EXPRESSED IN PLACENTA, SIGNAL = 0.54; EXPRESSED IN FETAL LIVER, SIGNAL = 0.52; EXPRESSED IN BRAIN, SIGNAL = 0.46; EXPRESSED IN BONE MARROW, SIGNAL = 0.54; SWISSPROT HIT: P20138, EVALUE 6.00e-17
ctgttacttttagaaagaacccatcgttcatgaaattatatctcacatagcttcctctctccacccgaaagaagtactgtgactcatcctgcatctgcgcgtctctgatcaccaaggagcagttccccttggcgggatccccagtgagctggaatcggccccgggtgctcatttccacctctcgactctggtggtttgtggccacaggagcacccttggttgtctcagtcactgctttgaaccagtagccataagctggggtagaccctgtccagtc

SEQ ID NO: 29530 - DNA, 221 bp, Homo sapiens
  MAP TO AC021641.4; EXPRESSED IN BONE MARROW, SIGNAL = 0.53; EXPRESSED IN ADULT LIVER, SIGNAL = 0.58; EXPRESSED IN BRAIN, SIGNAL = 0.48; EXPRESSED IN PLACENTA, SIGNAL = 0.54; EXPRESSED IN FETAL LIVER, SIGNAL = 0.54; SWISSPROT HIT: P19532, EVALUE 4.90e-02; NT HIT: AJ270304.1, EVALUE 8.20e+00; EST_HUMAN HIT: BF313613.1, EVALUE 2.00e-01
acagcgctgccggatgaggtgcaagttagtttctgtgtctggctgacaagtcggacatggcctgcggctgcctccacaagcaagaaaacctttacagctaattttcgtggaccgagaactggaaaaccccaagcttcaccacggaatgaacagacgtcggctgcaacatactctgtggtaaaagtgttaacatcacggcatcctccctggttttgcaccat

SEQ ID NO: 29531 - DNA, 160 bp, Homo sapiens
  MAP TO AC025746.2; EXPRESSED IN PLACENTA, SIGNAL = 0.56; EXPRESSED IN ADULT LIVER, SIGNAL = 0.66; EXPRESSED IN BRAIN, SIGNAL = 0.62; EXPRESSED IN FETAL LIVER, SIGNAL = 0.53; EXPRESSED IN BONE MARROW, SIGNAL = 0.54; SWISSPROT HIT: Q58605, EVALUE 3.00e+00
ctcaacggcaccgctctgagcagtgagcttactgtggtgaatgaacaggaggaaatacctgcattaatgatgctaaagggagttagagagggtaaacaaataaaaaccactatcagaacatatgtggtgaggaatgctgaacacaggaaggaagaagcag

SEQ ID NO: 29532 - DNA, 415 bp, Homo sapiens
  MAP TO AC008103.27; EXPRESSED IN ADULT LIVER, SIGNAL = 1.4; EXPRESSED IN FETAL LIVER, SIGNAL = 1.2; EXPRESSED IN BRAIN, SIGNAL = 1.1; EXPRESSED IN BONE MARROW, SIGNAL = 1.3; EXPRESSED IN LUNG, SIGNAL = 1.1; EXPRESSED IN PLACENTA, SIGNAL = 0.77; EST_HUMAN HIT: AA704457.1, EVALUE 0.00e+00; SWISSPROT HIT: P10263, EVALUE 2.00e-56; NT HIT: Y08032.1, EVALUE 0.00e+00
gcgtggtcattgaggacaagtcgacgagagatcccgagtacgtctacagtcagccttacggtaagcttgtgcgctcggaagaagctagggtgataatggggcaaactaaaagtaaaattaaaagtaaatatgcctcttatctcagctttattaaaattcttttaaaaagagggggagttaaagtatctacaaaaaatctaatcaagctatttcaaataatagaacaattttgcccatggtttccagaacaaggaactttagatctaaaagattggaaaagaattggtaaggaactaaaacaagcaggtaggaagggtaatatcattccacttacagtatggaatgattgggccattattaaagcagctttagaaccatttcaaacagaagaagatagcgtttcagtttctgatgc

SEQ ID NO: 29533 - DNA, 162 bp, Homo sapiens
  MAP TO AC016487.4; EXPRESSED IN PLACENTA, SIGNAL = 0.91; EXPRESSED IN BONE MARROW, SIGNAL =   1; EXPRESSED IN LUNG, SIGNAL = 0.98; EXPRESSED IN ADULT LIVER, SIGNAL = 0.88; EXPRESSED IN FETAL LIVER, SIGNAL = 0.91; EXPRESSED IN BRAIN, SIGNAL = 1.1; SWISSPROT HIT: P33810, EVALUE 1.00e+00; NT HIT: AF084555.1, EVALUE 6.00e-03; EST_HUMAN HIT: BE892764.1, EVALUE 9.00e-03
atgaaatcttacaccgtcgtgttccatcccacctgggatgtaaatcacccctttgtctaccgtatcctcacagtatatgttctctgtccatcagtcattaacatcctctactccggacattcaaccattgtcaacatcatggatcaaagatccagggtctcc

SEQ ID NO: 29534 - DNA, 251 bp, Homo sapiens
  MAP TO AL161445.2; EXPRESSED IN PLACENTA, SIGNAL = 1.1; EXPRESSED IN ADULT LIVER, SIGNAL = 0.86; EXPRESSED IN FETAL LIVER, SIGNAL = 1.3; EXPRESSED IN BRAIN, SIGNAL = 0.74; EXPRESSED IN BONE MARROW, SIGNAL = 1.2; EXPRESSED IN LUNG, SIGNAL = 1.4; NT HIT: M22921.1, EVALUE 0.00e+00; EST_HUMAN HIT: AI192425.1, EVALUE 3.00e-84; SWISSPROT HIT: P15291, EVALUE 5.00e-41
cttcccaggcctcacctggttgataacatagatgccatagtccagctgctggcgctgcaggactgggtgcaaataatatagccagtacttgaggtgctcctgccggttgcggaatggaatgatgatggccaccttgtgaggagagacgcagtccctgggggcatagcggccgcccatcttcacatttgggttctgctttgccacgagctccaggtccacaggcatgttaaactcaatcagcatggggccca

SEQ ID NO: 29535 - DNA, 134 bp, Homo sapiens
  MAP TO AC013818.3; EXPRESSED IN BONE MARROW, SIGNAL = 0.6; EXPRESSED IN ADULT LIVER, SIGNAL = 0.92; EXPRESSED IN BRAIN, SIGNAL = 0.62; EXPRESSED IN LUNG, SIGNAL = 0.91; EXPRESSED IN PLACENTA, SIGNAL = 0.85; EXPRESSED IN FETAL LIVER, SIGNAL = 0.61; EST_HUMAN HIT: AA354508.1, EVALUE 3.00e-14; SWISSPROT HIT: P52849, EVALUE 9.00e-19; NT HIT: AB036429.1, EVALUE 7.00e-70
gggtctacccggttcacattcagctgtatgcagcttggaagaaggtctggggtattcaagtcaccagcactgaagaatatccacatctgaaacctgcccggtacagaaagggcttcattcacaatagcatcatg

SEQ ID NO: 29536 - DNA, 239 bp, Homo sapiens
  MAP TO AC007325.51; EXPRESSED IN PLACENTA, SIGNAL = 0.65; EXPRESSED IN ADULT LIVER, SIGNAL = 0.71; EXPRESSED IN BRAIN, SIGNAL = 0.68; EXPRESSED IN BONE MARROW, SIGNAL = 0.67; EXPRESSED IN FETAL LIVER, SIGNAL = 0.74; SWISSPROT HIT: Q10410, EVALUE 1.40e-01; EST_HUMAN HIT: AI904151.1, EVALUE 7.00e-91; NT HIT: gi6754253, EVALUE 5.70e-01
attggcagcatcttcttttttacagatgtcttgtacagtgtcctcattagcaatgtcatatacagcatccttattagcgaattcgtatacagcatcctcattagcgatgccatatacagcgtcctcattagcgatgttgtatacagcgtcctcattagtgatgtcgtatagagcgtcctcattagtgatgtcatatacaatgtcctcattagcgatgtcatatacagcaacctcattcg

SEQ ID NO: 29537 - DNA, 181 bp, Homo sapiens
  MAP TO AC018896.2; EXPRESSED IN PLACENTA, SIGNAL = 0.6; EXPRESSED IN ADULT LIVER, SIGNAL = 0.57; EXPRESSED IN FETAL LIVER, SIGNAL = 0.52; EXPRESSED IN BRAIN, SIGNAL = 0.53; EXPRESSED IN BONE MARROW, SIGNAL = 0.49; SWISSPROT HIT: P70289, EVALUE 8.00e-11; EST_HUMAN HIT: BF525695.1, EVALUE 9.80e+00; NT HIT: AF300701.1, EVALUE 1.00e-13
agcagtgtgcccggcttcttgctgttgccccgagagcagcactggcccacagcagccaggaagggcagcagggtggtggcgggcagctcatgcccaggctccaggtatggaaactgcagtctctgcacctccctttccttcctactctccccctcgggcaaagacatgatcggcattggtg

SEQ ID NO: 29538 - DNA, 127 bp, Homo sapiens
  MAP TO AC013751.3; EXPRESSED IN PLACENTA, SIGNAL = 0.65; EXPRESSED IN BONE MARROW, SIGNAL = 0.64; EXPRESSED IN ADULT LIVER, SIGNAL = 0.72; EXPRESSED IN BRAIN, SIGNAL = 0.6; EXPRESSED IN FETAL LIVER, SIGNAL = 0.65; SWISSPROT HIT: P46590, EVALUE 7.00e+00; NT HIT: AF272900.1, EVALUE 1.00e-65; EST_HUMAN HIT: AA069559.1, EVALUE 1.00e-65
acaaactctccaagaaaaattcctctggagatctgaccacaaaccctgaccctcaaaatgcagcagaaccaactggaacagtgccagagcagaaggaaatggaccccgggaaagaaggtccaaacag

SEQ ID NO: 29539 - DNA, 98 bp, Homo sapiens
  MAP TO AC015785.3; EXPRESSED IN FETAL LIVER, SIGNAL = 0.54; EXPRESSED IN PLACENTA, SIGNAL = 0.98; EXPRESSED IN ADULT LIVER, SIGNAL = 0.54; EXPRESSED IN BRAIN, SIGNAL = 0.63; EXPRESSED IN BONE MARROW, SIGNAL = 0.56; SWISSPROT HIT: P25059, EVALUE 4.20e+00; NT HIT: AF037445.1, EVALUE 8.20e-01; EST_HUMAN HIT: T55325.1, EVALUE 3.10e-01
aggaatgggtggaaggagaagttgaggccatgcggtcgcttcagctgttctacagagagctcaggggcccggatgatcctgcagaattgttccccctt

SEQ ID NO: 29540 - DNA, 75 bp, Homo sapiens
  MAP TO AC010634.2; EXPRESSED IN LUNG, SIGNAL = 0.95; EXPRESSED IN PLACENTA, SIGNAL = 1.1; EXPRESSED IN ADULT LIVER, SIGNAL = 0.59; EXPRESSED IN FETAL LIVER, SIGNAL = 0.56; EXPRESSED IN BRAIN, SIGNAL = 0.61; NT HIT: Z68272.1, EVALUE 2.30e+00; EST_HUMAN HIT: BF570169.1, EVALUE 8.70e-01
caaaagtgggaagttcaaaccagcaatctcaaaccagaagcaggagccgtcgaactaccccaacgctaaccacag

SEQ ID NO: 29541 - DNA, 127 bp, Homo sapiens
  MAP TO AC013552.3; EXPRESSED IN PLACENTA, SIGNAL = 0.52; EXPRESSED IN ADULT LIVER, SIGNAL = 0.55; EXPRESSED IN FETAL LIVER, SIGNAL = 0.49; EXPRESSED IN BONE MARROW, SIGNAL = 0.47; EXPRESSED IN BRAIN, SIGNAL = 0.49; EST_HUMAN HIT: BE866001.1, EVALUE 6.50e+00; SWISSPROT HIT: P49696, EVALUE 9.20e+00
gtgtccaaattgtacaagaaaattaataggaagtggaatttcaccaacttcttcaaccctggctgaagaacaaggttccgttgtcaaaactcattcacaccaaggtggtgctcgatgctcaaaagag

SEQ ID NO: 29542 - DNA, 129 bp, Homo sapiens
  MAP TO AL132981.5; EXPRESSED IN PLACENTA, SIGNAL = 0.52; EXPRESSED IN ADULT LIVER, SIGNAL = 0.54; EXPRESSED IN FETAL LIVER, SIGNAL = 0.5; EXPRESSED IN BRAIN, SIGNAL = 0.48; EXPRESSED IN BONE MARROW, SIGNAL = 0.45; SWISSPROT HIT: P46414, EVALUE 4.10e+00
attgggaggtctgttggagcatccttatgcactgtctcagcagcacgaccctctttcaggttctcagcaacatgcccctcttgtaggttctcaatcttggcatctttgcattgtgtctttagcaatgga

SEQ ID NO: 29543 - DNA, 78 bp, Homo sapiens
  MAP TO AC019295.3; EXPRESSED IN FETAL LIVER, SIGNAL = 0.57; EXPRESSED IN BONE MARROW, SIGNAL = 0.68; EXPRESSED IN BRAIN, SIGNAL = 1.7; EST_HUMAN HIT: AW503531.1, EVALUE 1.00e-09; NT HIT: L08895.1, EVALUE 7.00e-10
agctgtgcaagtgctgaagaaggagatttgtttggaggaaacaggaaagagaaagaaaaggaaggaaaaaatacataa

SEQ ID NO: 29544 - DNA, 126 bp, Homo sapiens
  MAP TO AC018528.3; EXPRESSED IN ADULT LIVER, SIGNAL = 1.2; EXPRESSED IN BRAIN, SIGNAL = 1.5; EXPRESSED IN LUNG, SIGNAL = 0.94; EXPRESSED IN PLACENTA, SIGNAL = 1.1; EXPRESSED IN FETAL LIVER, SIGNAL = 0.81; EXPRESSED IN BONE MARROW, SIGNAL = 0.94; SWISSPROT HIT: P38631, EVALUE 7.00e+00; NT HIT: gi9626154, EVALUE 2.80e-01
atggttgagcaggtcatttctaaataccttctggtggatggccatataatctggggctcagaactgctttacctggcacctagtgaggaggaggaggcaaactcaaaatacctgctctgctggggc

SEQ ID NO: 29545 - DNA, 110 bp, Homo sapiens
  MAP TO AC021846.3; EXPRESSED IN LUNG, SIGNAL = 1.5; EXPRESSED IN PLACENTA, SIGNAL =   1; EXPRESSED IN ADULT LIVER, SIGNAL = 1.5; EXPRESSED IN FETAL LIVER, SIGNAL = 1.3; EXPRESSED IN BRAIN, SIGNAL = 1.2; EXPRESSED IN BONE MARROW, SIGNAL = 1.4; NT HIT: gi6005967, EVALUE 4.00e-43; EST_HUMAN HIT: AW937783.1, EVALUE 6.00e-12
agtcaccggcagagctgtggtgctggcactgctactggggttggtgcccgaggaagatgtagtgactgttgacaagatgcctgcaatggtcgagaccacgaagtcggctg

SEQ ID NO: 29546 - DNA, 81 bp, Homo sapiens
  MAP TO AL161670.1; EXPRESSED IN PLACENTA, SIGNAL = 1.1; EXPRESSED IN ADULT LIVER, SIGNAL =   1; EXPRESSED IN BRAIN, SIGNAL = 1.7; EXPRESSED IN LUNG, SIGNAL = 0.95; EXPRESSED IN FETAL LIVER, SIGNAL = 1.3; EXPRESSED IN BONE MARROW, SIGNAL = 1.1; NT HIT: AL161572.2, EVALUE 1.60e-01; EST_HUMAN HIT: AI024350.1, EVALUE 1.00e-03
aagcaggtcataaagccgaaaaggacatttctgcctttctctgaagcaggtcataagtccctcattagagaagtattctcc

SEQ ID NO: 29547 - DNA, 122 bp, Homo sapiens
  MAP TO AC011778.3; EXPRESSED IN PLACENTA, SIGNAL = 1.4; EXPRESSED IN ADULT LIVER, SIGNAL = 2.7; EXPRESSED IN FETAL LIVER, SIGNAL = 1.2; EXPRESSED IN BONE MARROW, SIGNAL = 1.3; EXPRESSED IN HELA, SIGNAL = 2.6; EXPRESSED IN BRAIN, SIGNAL = 1.2; EXPRESSED IN LUNG, SIGNAL = 1.7; NT HIT: AF000573.1, EVALUE 8.00e-14; EST_HUMAN HIT: AW897927.1, EVALUE 3.00e-23; SWISSPROT HIT: P11369, EVALUE 5.00e-05
aatgtgagaacattgattttctgttcctgcattaattcacttaggattatggcttgcaggtccatccatgttgctgcaaagggcatgatttctttcctttttattgctatgcaatattccat

SEQ ID NO: 29548 - DNA, 207 bp, Homo sapiens
  MAP TO AC013705.3; EXPRESSED IN PLACENTA, SIGNAL = 1.1; EXPRESSED IN ADULT LIVER, SIGNAL = 1.1; EXPRESSED IN FETAL LIVER, SIGNAL = 0.74; EXPRESSED IN BRAIN, SIGNAL = 0.84; EXPRESSED IN BONE MARROW, SIGNAL = 0.86; EXPRESSED IN LUNG, SIGNAL = 0.96; SWISSPROT HIT: Q08682, EVALUE 2.20e+00; NT HIT: AF053980.1, EVALUE 4.90e-01
atgaagtgctgtagtttagtggcagcagccatcagatgcgcagccccaggggatggggggactgtatccggagcatacgctgtggtggtctgcctgccgccaactacaatggccacagcaggaacaagtcaaaatcctaagatatgtggctttttcttgaccccagaggaagctaggaaagtgaagaggcaggaggaagtgcaggag

SEQ ID NO: 29549 - DNA, 123 bp, Homo sapiens
  MAP TO AC009467.3; EXPRESSED IN PLACENTA, SIGNAL = 0.47; EXPRESSED IN FETAL LIVER, SIGNAL = 0.82; EXPRESSED IN ADULT LIVER, SIGNAL =   1; EXPRESSED IN BONE MARROW, SIGNAL = 0.68; EXPRESSED IN BRAIN, SIGNAL = 0.63; EST_HUMAN HIT: BF185264.1, EVALUE 3.00e-20
tgatgagctatcagatgactcattgtttttttcatatttctgtttcttgctcttttttttcttttctttctttgctttttttgaatgcttgtcttttttcttctttttcttcacagagtgttc

SEQ ID NO: 29550 - DNA, 417 bp, Homo sapiens
  MAP TO AC009486.3; EXPRESSED IN FETAL LIVER, SIGNAL = 0.93; EXPRESSED IN BONE MARROW, SIGNAL = 5.2; EXPRESSED IN PLACENTA, SIGNAL = 0.59; EXPRESSED IN ADULT LIVER, SIGNAL = 0.9; EXPRESSED IN BRAIN, SIGNAL = 0.93; EXPRESSED IN LUNG, SIGNAL = 0.96; NT HIT: gi11056053, EVALUE 0.00e+00; SWISSPROT HIT: O74536, EVALUE 2.00e-18; EST_HUMAN HIT: BE897149.1, EVALUE 0.00e+00
tggtcagacacttccttagcaccatatgctgaattcgagacgctaaaatctgtagaaaaccaaggatggtccagaatttcctgcgaggtcagccgctctgagggctcccgacgcagaatgcttcggatgaggcacttggccttgggcgacagagtctctggaatgttgaactggccacgccggatcttgctgaagagggagctgggttcaatgtcatggaaagggtaccgccccaccaacatggtgtacagcatcacccccaggctccacacgtcggctgctttgcccgagtagctgccactggtgttcaagatctctgggcttacgtaagccgggcagccatgcttgtcggagagggaatcatcatctccccgcagaatgtaggcgtcttccaggctttccagcttgacccgagtc

SEQ ID NO: 29551 - DNA, 150 bp, Homo sapiens
  MAP TO AC018425.3; EXPRESSED IN ADULT LIVER, SIGNAL = 0.65; EXPRESSED IN FETAL LIVER, SIGNAL = 0.5; EXPRESSED IN BRAIN, SIGNAL = 0.49; EXPRESSED IN PLACENTA, SIGNAL = 0.56; EXPRESSED IN BONE MARROW, SIGNAL = 0.47; SWISSPROT HIT: P36719, EVALUE 1.20e-01; NT HIT: AL163218.2, EVALUE 4.00e-07; EST_HUMAN HIT: AA634356.1, EVALUE 2.00e-06
ctatggaggctgagaagtccaagatcaaggtgttggcatctgatgagggctttcttgctgtgtcctcacatgaaggaaggcagaagggccaaaaaagggacaaactctttgtcctcatatggcagaagagaagagagaacccactcctga

SEQ ID NO: 29552 - DNA, 133 bp, Homo sapiens
  MAP TO AC022918.2; EXPRESSED IN LUNG, SIGNAL = 0.86; EXPRESSED IN ADULT LIVER, SIGNAL = 0.86; EXPRESSED IN BRAIN, SIGNAL = 0.73; EXPRESSED IN BONE MARROW, SIGNAL = 0.73; EXPRESSED IN PLACENTA, SIGNAL = 0.82; EXPRESSED IN FETAL LIVER, SIGNAL = 0.67; SWISSPROT HIT: P38967, EVALUE 3.10e+00; NT HIT: AB009666.1, EVALUE 1.20e+00
catcacatccactgaccccagcagcaccagtaccaacctggtttgctttcacatttcttattataggtgcattgtccacactcctacccaagaccagtcctttacttgtgtaggcgataacaatccttttcat

SEQ ID NO: 29553 - DNA, 78 bp, Homo sapiens
  MAP TO AC019278.3; EXPRESSED IN BONE MARROW, SIGNAL = 0.65; EXPRESSED IN PLACENTA, SIGNAL = 0.64; EXPRESSED IN ADULT LIVER, SIGNAL = 1.3; EXPRESSED IN FETAL LIVER, SIGNAL = 0.71; EXPRESSED IN BRAIN, SIGNAL = 0.56; EST_HUMAN HIT: AW855868.1, EVALUE 1.00e-36; NT HIT: AF170829.1, EVALUE 6.20e-01
aggtaaaggacatcagggacctcagtttctgttttagctgacagcatattgattttgagccagttgggtaatgtatag

SEQ ID NO: 29554 - DNA, 168 bp, Homo sapiens
  MAP TO AC015737.4; EXPRESSED IN PLACENTA, SIGNAL = 0.85; EXPRESSED IN ADULT LIVER, SIGNAL = 1.5; EXPRESSED IN FETAL LIVER, SIGNAL = 0.71; EXPRESSED IN BRAIN, SIGNAL = 0.68; EXPRESSED IN BONE MARROW, SIGNAL = 0.65; SWISSPROT HIT: P48000, EVALUE 1.70e+00; NT HIT: AL163303.2, EVALUE 2.00e-03; EST_HUMAN HIT: AI016342.1, EVALUE 4.00e-08
tcaaatcatgagaaaaacatcagataattccaacagagagacatcctgcaatatatctggcaagaattcctcaagactgtgcacatcatctaaaacaaggaaagtctgaaagactgtcacagtcaagataagccttaaagagatgacgactaaatggaatgtgtcatc

SEQ ID NO: 29555 - DNA, 99 bp, Homo sapiens
  MAP TO AC013691.3; EXPRESSED IN PLACENTA, SIGNAL = 0.79; EXPRESSED IN FETAL LIVER, SIGNAL = 0.65; EXPRESSED IN ADULT LIVER, SIGNAL = 1.3; EXPRESSED IN BRAIN, SIGNAL = 0.7; EXPRESSED IN BONE MARROW, SIGNAL = 0.69; SWISSPROT HIT: P00674, EVALUE 4.20e+00; NT HIT: X68432.1, EVALUE 5.30e-02
cccaaactagtaaaatgcagggcaggaatgggacccaggcctggtgtactccaattactatattcatatgcgttgcctccagcaggactggcagagtag

SEQ ID NO: 29556 - DNA, 140 bp, Homo sapiens
  MAP TO AC016057.3; EXPRESSED IN PLACENTA, SIGNAL = 0.47; EXPRESSED IN FETAL LIVER, SIGNAL = 0.92; EXPRESSED IN ADULT LIVER, SIGNAL = 0.64; EXPRESSED IN BONE MARROW, SIGNAL = 0.47; EXPRESSED IN BRAIN, SIGNAL = 0.51; NT HIT: gi7662557, EVALUE 5.00e-03; EST_HUMAN HIT: AI597685.1, EVALUE 3.00e-02
taggaggatggcaattagttttccacaaaggctatgtaattctcttatgactactactgttaactatagtagtcatcctttttctgagatttcactttctgcagtttcaattactgtggtcaactgcagcccaagcatag

SEQ ID NO: 29557 - DNA, 75 bp, Homo sapiens
  MAP TO AL138956.3; EXPRESSED IN BONE MARROW, SIGNAL = 0.52; EXPRESSED IN PLACENTA, SIGNAL = 0.65; EXPRESSED IN BRAIN, SIGNAL = 0.5; SWISSPROT HIT: P31209, EVALUE 7.40e+00; EST_HUMAN HIT: T59472.1, EVALUE 2.20e-01; NT HIT: Z37557.1, EVALUE 5.90e-01
cagctgaagaccactgggagaccctgcagagccatgtggagcagaagaatcacgcactgagccctgctcacatct

SEQ ID NO: 29558 - DNA, 179 bp, Homo sapiens
  MAP TO AC011292.2; EXPRESSED IN LUNG, SIGNAL = 1.4; EXPRESSED IN PLACENTA, SIGNAL = 1.3; EXPRESSED IN ADULT LIVER, SIGNAL = 1.1; EXPRESSED IN BRAIN, SIGNAL = 1.3; EXPRESSED IN FETAL LIVER, SIGNAL = 0.86; EXPRESSED IN BONE MARROW, SIGNAL = 1.1; NT HIT: U60529.1, EVALUE 1.10e-01
gcttttgtttttggttcttgttatgaccaggatcttttttgagatatgtaaatctttagcttttggatatattacactcttctgaactctccaaaactcatgctgtttacccgttcttaactttatcccttgactctctacttctgaaccctgaatatctactgctttctcagtaccta

SEQ ID NO: 29559 - DNA, 90 bp, Homo sapiens
  MAP TO AL157405.2; EXPRESSED IN BONE MARROW, SIGNAL = 0.47; EXPRESSED IN PLACENTA, SIGNAL = 0.5; EXPRESSED IN BRAIN, SIGNAL = 0.47; EST_HUMAN HIT: AI206728.1, EVALUE 1.00e-43; NT HIT: gi11423497, EVALUE 8.00e-44
ctcgttccacagctccacctgcatcttctcatcaaagccatccagggatacacagggagcttctttccccttagcctgtgatctgcccat

SEQ ID NO: 29560 - DNA, 238 bp, Homo sapiens
  MAP TO AC018535.3; EXPRESSED IN BONE MARROW, SIGNAL = 0.65; EXPRESSED IN PLACENTA, SIGNAL = 0.84; EXPRESSED IN ADULT LIVER, SIGNAL = 0.65; EXPRESSED IN FETAL LIVER, SIGNAL = 0.64; EXPRESSED IN BRAIN, SIGNAL = 0.71; SWISSPROT HIT: P46064, EVALUE 1.10e+00; EST_HUMAN HIT: AI739290.1, EVALUE 5.40e-02; NT HIT: AF287478.1, EVALUE 6.00e-04
ctgttatggctagccactgggaccagagtattcatggatttcactgtcaccatgaaggcaaaggggtctgaggcggcgccgtctccgtccaccacctccagctccagctgaaagaggcgctccccatgggagttctctgcagggggctgataggcaatcttcagctccctcagctcctgctgggtgaagaaggagactggaagccctagagggtcgtcggtgctgaccacgtagccct

SEQ ID NO: 29561 - DNA, 145 bp, Homo sapiens
  MAP TO AC021782.2; EXPRESSED IN PLACENTA, SIGNAL = 0.72; EXPRESSED IN ADULT LIVER, SIGNAL = 1.2; EXPRESSED IN FETAL LIVER, SIGNAL = 0.56; EXPRESSED IN BRAIN, SIGNAL = 0.49; EXPRESSED IN BONE MARROW, SIGNAL = 0.5; EST_HUMAN HIT: BE150887.1, EVALUE 7.60e+00; NT HIT: AF020409.1, EVALUE 8.30e-02; SWISSPROT HIT: Q95840, EVALUE 9.00e+00
atgaattatgatgatggaaaagggatagagcaattccattgcaacacgttcaatcaggccatttctgagtatttcattgtacggggtgcattcaaaattaaagaatacccagaagaggcttatctacatggtagccatggagatg

SEQ ID NO: 29562 - DNA, 174 bp, Homo sapiens
  MAP TO AC011778.3; EXPRESSED IN PLACENTA, SIGNAL = 0.52; EXPRESSED IN BRAIN, SIGNAL = 0.47; EXPRESSED IN BONE MARROW, SIGNAL = 0.78; EXPRESSED IN FETAL LIVER, SIGNAL = 0.49; NT HIT: AF037352.1, EVALUE 1.60e+00; SWISSPROT HIT: P45479, EVALUE 6.70e+00
atggttttatttggaaaatacaaaataatagcatcatatattttaatagaaaaacgtccaatgggcatctttttctttgttattatgcttatattgattaaagtgttaatattgattaaagtggcccaggaaataggagcagttaataaagataagtggcatgtaacttcacta

SEQ ID NO: 29563 - DNA, 192 bp, Homo sapiens
  MAP TO AL138914.5; EXPRESSED IN ADULT LIVER, SIGNAL = 1.2; EXPRESSED IN FETAL LIVER, SIGNAL = 0.94; EXPRESSED IN BRAIN, SIGNAL = 1.3; EXPRESSED IN BONE MARROW, SIGNAL = 1.1; EXPRESSED IN LUNG, SIGNAL = 1.1; EXPRESSED IN PLACENTA, SIGNAL = 1.2; SWISSPROT HIT: P21401, EVALUE 1.30e+00; EST_HUMAN HIT: AW834795.1, EVALUE 4.30e-02; NT HIT: AP000064.1, EVALUE 2.90e-02
ggtcttcgacaatccttgatcaaagaccttgcggttctaagcacagagttggccttcctcctcctctcccgtttccaccctctcctgcaagcagccgagtgtcctcacagtgcggccatagaagctgggtgggaggaggaggcctcatgctgggaaggcccttcccttctcctcctcaatgtcctgctccag

SEQ ID NO: 29564 - DNA, 118 bp, Homo sapiens
  MAP TO AC012405.4; EXPRESSED IN PLACENTA, SIGNAL = 0.76; EXPRESSED IN ADULT LIVER, SIGNAL = 1.7; EXPRESSED IN FETAL LIVER, SIGNAL = 0.63; EXPRESSED IN BRAIN, SIGNAL = 0.5; EXPRESSED IN BONE MARROW, SIGNAL = 0.59; NT HIT: AJ006345.1, EVALUE 7.00e-05; EST_HUMAN HIT: AA058626.1, EVALUE 7.00e-09; SWISSPROT HIT: P08547, EVALUE 6.00e-04
atgaaaaaattcaacaaattcagtatagaaataatgtttcacaatggaataaaagccatatatgacaagcctatagctaacatcatactcaacagtgaagagttgaaggctttttcct

SEQ ID NO: 29565 - DNA, 150 bp, Homo sapiens
  MAP TO AC015638.4; EXPRESSED IN PLACENTA, SIGNAL = 0.62; EXPRESSED IN FETAL LIVER, SIGNAL = 0.62; EXPRESSED IN ADULT LIVER, SIGNAL = 0.71; EXPRESSED IN BONE MARROW, SIGNAL = 0.64; EXPRESSED IN BRAIN, SIGNAL = 1.2; SWISSPROT HIT: P26372, EVALUE 4.00e+00; EST_HUMAN HIT: AV698115.1, EVALUE 3.00e-79; NT HIT: AF078779.1, EVALUE 3.00e-29
aaacagcagcagtcgtgcagtatcatccacagcctgagagagagtcagcagcaagagctgagccggtttctgaacccgcccagcatcgagaccacccagcccagtgaggacacgaatgccaacagtcaggacaacagcatgcaacctgag

SEQ ID NO: 29566 - DNA, 213 bp, Homo sapiens
  MAP TO AC009467.3; EXPRESSED IN ADULT LIVER, SIGNAL = 0.92; EXPRESSED IN PLACENTA, SIGNAL = 0.79; EXPRESSED IN BRAIN, SIGNAL = 0.78; EXPRESSED IN BONE MARROW, SIGNAL = 0.91; EXPRESSED IN LUNG, SIGNAL = 0.88; EXPRESSED IN FETAL LIVER, SIGNAL = 0.82; EST_HUMAN HIT: BE158913.1, EVALUE 1.00e-116; SWISSPROT HIT: Q10945, EVALUE 3.50e-02; NT HIT: U16306.1, EVALUE 2.00e+00
tttatgggaaaaacagatggagactattacaccctggatgacatgtttgtctccaaagcagctgagagagaacgtcttggtgaagaggaagagaaccaaaggaaaaaagctattgctgagcatcggagtcttgctgcacaaatggaaaaatgtctgtattgttttgacagctctcaatttcccaagcatcttattgttgcaataggtgttaag

SEQ ID NO: 29567 - DNA, 97 bp, Homo sapiens
  MAP TO AC026273.2; EXPRESSED IN BONE MARROW, SIGNAL = 0.56; EXPRESSED IN ADULT LIVER, SIGNAL = 0.6; EXPRESSED IN FETAL LIVER, SIGNAL = 0.49; EXPRESSED IN BRAIN, SIGNAL = 0.75; EXPRESSED IN PLACENTA, SIGNAL =   1; EST_HUMAN HIT: BE959638.2, EVALUE 7.60e-02; SWISSPROT HIT: P14728, EVALUE 2.50e+00
cctgggtgggacatgctcccgaagtggtccaggtccaggagggcacgttgcagcagcagctggtccatgggggtggggcacaatgtcagttccttct

SEQ ID NO: 29568 - DNA, 90 bp, Homo sapiens
  MAP TO AC018560.3; EXPRESSED IN PLACENTA, SIGNAL = 0.5; EXPRESSED IN BONE MARROW, SIGNAL = 0.44; EXPRESSED IN FETAL LIVER, SIGNAL = 0.47; EXPRESSED IN BRAIN, SIGNAL = 0.6; EST_HUMAN HIT: BE959727.2, EVALUE 2.80e-01
ataacctgatgtgcgtgaaagaacaaaggatgtgtagtcatagtacttgtgttaaggtcctggctcaacaagtttctagtgtgtgtgaag

SEQ ID NO: 29569 - DNA, 274 bp, Homo sapiens
  MAP TO AC010162.6; EXPRESSED IN BRAIN, SIGNAL = 0.55; EXPRESSED IN FETAL LIVER, SIGNAL = 0.53; EXPRESSED IN BONE MARROW, SIGNAL = 0.48; EST_HUMAN HIT: AV716271.1, EVALUE 0.00e+00; SWISSPROT HIT: Q60513, EVALUE 7.70e+00; NT HIT: AJ252060.1, EVALUE 1.00e-121
tcattcatcttcatcatcctcatcttcctctccatcagacagggatgtacacggccggatctgtcggtagcggtcaagccatttttctaccatctgagtgaccagggggtgatttcgccgccgagaactcttctgcatggcaaccagaactcccccctccgtcacacagcagtccagccactccctgagcagtttttcttgctgttcctcattacctagcttttggaggaatatgaagacaaagggaaaatcatacaacagatcagagacttgg

SEQ ID NO: 29570 - DNA, 183 bp, Homo sapiens
  MAP TO AC007923.2; EXPRESSED IN ADULT LIVER, SIGNAL = 1.9; EXPRESSED IN BRAIN, SIGNAL = 1.4; EXPRESSED IN LUNG, SIGNAL = 1.3; EXPRESSED IN PLACENTA, SIGNAL = 1.1; EXPRESSED IN FETAL LIVER, SIGNAL = 1.8; EXPRESSED IN BONE MARROW, SIGNAL = 2.1; EST_HUMAN HIT: BE064386.1, EVALUE 9.00e-62; NT HIT: AB014607.1, EVALUE 2.00e-31; SWISSPROT HIT: P97481, EVALUE 8.80e-02
aggaagagattccgggggggatcccccagttgcagtcatgtcaagactgatgctgaggaggaccccaactgtcacgagcaacacctgtcaaacacagccacctacctggggacaaatcaagaagctgtcacagacggtggaagaaaacctgaggaaagcaggacaaccagtcacaataagtaa

SEQ ID NO: 29571 - DNA, 213 bp, Homo sapiens
  MAP TO AC013691.3; EXPRESSED IN LUNG, SIGNAL = 1.2; EXPRESSED IN ADULT LIVER, SIGNAL = 1.1; EXPRESSED IN BRAIN, SIGNAL = 0.95; EXPRESSED IN PLACENTA, SIGNAL = 1.1; EXPRESSED IN FETAL LIVER, SIGNAL = 0.95; EXPRESSED IN BONE MARROW, SIGNAL = 0.98; SWISSPROT HIT: Q28615, EVALUE 4.50e+00; NT HIT: U96762.1, EVALUE 3.20e-02; EST_HUMAN HIT: AU135759.1, EVALUE 1.90e-01
tcagcactcagaaagtgtggccttgatgacaacaatgatgatggtgaagatgggaatgagtggggaaaggatggcgacaaccgttgcgttgaacagtatgagacgctgctcagccttctccgacatactgggtacttccatgcttccaggcttcacacttgccatttcttctcccttgccatcccccaagacttcttccagcacaaatgcatc

SEQ ID NO: 29572 - DNA, 132 bp, Homo sapiens
  MAP TO AC021782.2; EXPRESSED IN BONE MARROW, SIGNAL = 0.95; EXPRESSED IN LUNG, SIGNAL = 0.97; EXPRESSED IN ADULT LIVER, SIGNAL =   1; EXPRESSED IN BRAIN, SIGNAL = 0.94; EXPRESSED IN PLACENTA, SIGNAL =   1; EXPRESSED IN FETAL LIVER, SIGNAL = 0.81; SWISSPROT HIT: P53882, EVALUE 1.40e+00; EST_HUMAN HIT: BE081469.1, EVALUE 9.00e-55; NT HIT: Z70045.1, EVALUE 1.20e+00
atgatggtggcttgcaaggatggaagctgtaaagttggtgagagatgggcagagtctggaggatttgttgacactctggatattgggtacacaagcaagcgaggagtcaaagatgacagccatgttgttggc

SEQ ID NO: 29573 - DNA, 149 bp, Homo sapiens
  MAP TO AC016212.3; EXPRESSED IN ADULT LIVER, SIGNAL = 0.57; EXPRESSED IN BRAIN, SIGNAL = 0.54; EXPRESSED IN BONE MARROW, SIGNAL = 0.56; EXPRESSED IN PLACENTA, SIGNAL = 0.64; SWISSPROT HIT: P55203, EVALUE 4.00e+00; NT HIT: X76731.1, EVALUE 8.50e-02; EST_HUMAN HIT: AV647765.1, EVALUE 5.00e-01
atgaaacataatcctctggatggagtcactgaagcccctacaccaaagtgtgggggggacaatgacactatctgttcatacggattaagactgtttgctttttttggtatccatactgccctggtggcttctattgaatttgtggtcaa

SEQ ID NO: 29574 - DNA, 135 bp, Homo sapiens
  MAP TO AC022317.4; EXPRESSED IN PLACENTA, SIGNAL = 0.69; EXPRESSED IN ADULT LIVER, SIGNAL = 0.76; EXPRESSED IN FETAL LIVER, SIGNAL = 0.67; EXPRESSED IN BONE MARROW, SIGNAL = 0.81; EXPRESSED IN BRAIN, SIGNAL = 0.76; NT HIT: AL163302.2, EVALUE 5.00e-12; SWISSPROT HIT: Q58884, EVALUE 7.00e+00; EST_HUMAN HIT: H65016.1, EVALUE 2.00e-03
atgttccattcagtggaaggtaataaaccaacagaaattgtccttgagaaagtcctgatagtagatctactagaaaatgactttaaaacaactgtcttcaagatgctcaaagaactgaaggaaggcacaggggaa

SEQ ID NO: 29575 - DNA, 149 bp, Homo sapiens
  MAP TO AC009466.2; EXPRESSED IN PLACENTA, SIGNAL = 0.82; EXPRESSED IN ADULT LIVER, SIGNAL = 0.73; EXPRESSED IN FETAL LIVER, SIGNAL = 0.59; EXPRESSED IN BRAIN, SIGNAL = 0.82; EXPRESSED IN BONE MARROW, SIGNAL = 0.65; SWISSPROT HIT: Q13487, EVALUE 1.00e+00; EST_HUMAN HIT: BE261724.1, EVALUE 1.00e-78; NT HIT: gi11438643, EVALUE 9.00e-79
ctggtcaggtcaaggtggttgatgatcaggctccgtccgctctcagtctgggcgagatgcagcagcagggcaaagctctgctgccggatggccaggaccttggaggacaagagggcggccaacagcctggccctgtcatggtgtatcac

SEQ ID NO: 29576 - DNA, 238 bp, Homo sapiens
  MAP TO AL138914.5; EXPRESSED IN ADULT LIVER, SIGNAL = 0.84; EXPRESSED IN BONE MARROW, SIGNAL = 0.93; EXPRESSED IN BRAIN, SIGNAL = 0.97; EXPRESSED IN PLACENTA, SIGNAL = 0.72; EXPRESSED IN FETAL LIVER, SIGNAL = 0.67; NT HIT: AE003919.1, EVALUE 5.70e-01; SWISSPROT HIT: Q57987, EVALUE 5.80e+00; EST_HUMAN HIT: BF574254.1, EVALUE 2.10e-01
ttactgcttgttattgctggtagtgttttttgtggttttggttttgagattttgagagttgccatcaaagatgaggagaggatgaggacacctaaagacctctgaagtcttcgtgatctcctcaataccacggtcaggatgaagtgcggaggatggatttagagagaatgccgttccctcctcatctgccccacacccagcatcaatatgcttgcacacaagctctagacgaagtctt

SEQ ID NO: 29577 - DNA, 139 bp, Homo sapiens
  MAP TO AC013657.3; EXPRESSED IN BONE MARROW, SIGNAL = 0.44; EXPRESSED IN PLACENTA, SIGNAL = 0.6; EXPRESSED IN ADULT LIVER, SIGNAL = 0.54; EXPRESSED IN BRAIN, SIGNAL = 0.47; EST_HUMAN HIT: T63936.1, EVALUE 7.30e+00; SWISSPROT HIT: P34226, EVALUE 6.90e+00
acttgacggtggaatcatcaaatgctttagcgatgccatcggccaaaatggggaaatcgaggcaatcagagacgtacgtgacttgttcaacatctccaggctccccattcatccagcggcttgagaagccagcctttgg

SEQ ID NO: 29578 - DNA, 103 bp, Homo sapiens
  MAP TO AC021385.3; EXPRESSED IN ADULT LIVER, SIGNAL = 0.54; EXPRESSED IN PLACENTA, SIGNAL = 0.6; EXPRESSED IN BONE MARROW, SIGNAL = 0.51; EXPRESSED IN BRAIN, SIGNAL = 0.58; NT HIT: AF068264.1, EVALUE 2.20e-01
atgtggacatctgctgagaagcatgatgtcttcgaaattgatggccaagtggttaaagaggaattggtggaattatcacctggctcccaccagtgggctcctg

SEQ ID NO: 29579 - DNA, 132 bp, Homo sapiens
  MAP TO AC018425.3; EXPRESSED IN LUNG, SIGNAL = 0.88; EXPRESSED IN PLACENTA, SIGNAL = 0.93; EXPRESSED IN ADULT LIVER, SIGNAL = 0.93; EXPRESSED IN BRAIN, SIGNAL = 0.92; EXPRESSED IN FETAL LIVER, SIGNAL = 0.75; EXPRESSED IN BONE MARROW, SIGNAL = 0.9; NT HIT: U21725.1, EVALUE 8.00e-05; EST_HUMAN HIT: AV748749.1, EVALUE 1.00e-66; SWISSPROT HIT: Q12798, EVALUE 1.00e-07
atcgatggttccagacccatcaatatcaaataaattaaaggcgtctttaatttcttgcttttgggattcattcagttcaatttttgctgctcttttcttccattggtctgaacttgtatggtagttagatgc

SEQ ID NO: 29580 - DNA, 146 bp, Homo sapiens
  MAP TO AC016105.3; EXPRESSED IN LUNG, SIGNAL =   1; EXPRESSED IN BRAIN, SIGNAL = 0.95; EXPRESSED IN PLACENTA, SIGNAL = 0.96; EXPRESSED IN ADULT LIVER, SIGNAL = 0.89; EXPRESSED IN FETAL LIVER, SIGNAL = 0.78; EXPRESSED IN BONE MARROW, SIGNAL = 0.78; SWISSPROT HIT: P16233, EVALUE 5.30e+00; NT HIT: AF248070.1, EVALUE 5.20e+00
ccataatcacttctggggtaccttggaagcatttcatagtcttatcaacaatcctatctactacatcaactgtgccatctctactgaactcctctgcaagctcagcttccactgatgtaatgatcagtgtgattgagctgctctgc

SEQ ID NO: 29581 - DNA, 164 bp, Homo sapiens
  MAP TO AL137141.7; EXPRESSED IN PLACENTA, SIGNAL = 0.88; EXPRESSED IN ADULT LIVER, SIGNAL = 0.73; EXPRESSED IN FETAL LIVER, SIGNAL = 0.89; EXPRESSED IN BONE MARROW, SIGNAL = 3.1; EXPRESSED IN LUNG, SIGNAL = 1.3; EXPRESSED IN BRAIN, SIGNAL = 0.67; NT HIT: M34426.1, EVALUE 1.00e-87; SWISSPROT HIT: P13796, EVALUE 1.00e-26; EST_HUMAN HIT: AW505359.1, EVALUE 2.00e-87
atactgatggcaatggatacatcagcttcaatgagttgaatgacttgttcaaggctgcttgcttgcctttgcctgggtatagagtacgagaaattacagaaaacctgatggctacaggtgatctggaccaagatggaaggatcagctttgatgagtttatcaag

SEQ ID NO: 29582 - DNA, 114 bp, Homo sapiens
  MAP TO AC011229.2; EXPRESSED IN ADULT LIVER, SIGNAL = 0.84; EXPRESSED IN BONE MARROW, SIGNAL = 0.79; EXPRESSED IN BRAIN, SIGNAL = 1.3; EXPRESSED IN PLACENTA, SIGNAL = 1.4; EXPRESSED IN FETAL LIVER, SIGNAL = 0.7; EST_HUMAN HIT: AW276895.1, EVALUE 5.70e+00; NT HIT: AL161555.2, EVALUE 4.00e-03
tcagaataaagttactactaaatcttttacttctgtagatgatttgctcattttggaagagcaaaatgataataaaaacagagtccaagattttgccttcacacatcccagtaa

SEQ ID NO: 29583 - DNA, 160 bp, Homo sapiens
  MAP TO AC018909.3; EXPRESSED IN BONE MARROW, SIGNAL = 0.87; EXPRESSED IN PLACENTA, SIGNAL = 0.83; EXPRESSED IN ADULT LIVER, SIGNAL = 1.1; EXPRESSED IN BRAIN, SIGNAL = 0.96; EXPRESSED IN LUNG, SIGNAL = 0.89; EXPRESSED IN FETAL LIVER, SIGNAL = 0.84; EST_HUMAN HIT: T05047.1, EVALUE 5.50e-01; SWISSPROT HIT: O78518, EVALUE 1.30e+00
agcctttacaatatggaatcatctatattatccagcacaagcaagtctgccgatttcagatgagttatattactggcaaagatgaaagaggagtaatgacaagttacatcagattttctattagaaacaaaatcacaaaaagcatttggctcttgataaa

SEQ ID NO: 29584 - DNA, 144 bp, Homo sapiens
  MAP TO AL139352.8; EXPRESSED IN FETAL LIVER, SIGNAL = 1.3; EXPRESSED IN PLACENTA, SIGNAL = 1.3; EXPRESSED IN BONE MARROW, SIGNAL = 1.4; EXPRESSED IN LUNG, SIGNAL = 1.3; EXPRESSED IN ADULT LIVER, SIGNAL = 1.1; EXPRESSED IN BRAIN, SIGNAL = 1.3; EST_HUMAN HIT: BE877635.1, EVALUE 1.00e-75; SWISSPROT HIT: P00813, EVALUE 4.00e-22; NT HIT: M13792.1, EVALUE 8.00e-76
tcagcctggttccaggggattggctccactttggagttggccagcaggtgcggactgtaccgcacctccacatacaccacgccctctttggccttcatctctacaaactcataggcgatccttttgatagcctcccggcagccc

SEQ ID NO: 29585 - DNA, 344 bp, Homo sapiens
  MAP TO AC013800.3; EXPRESSED IN BONE MARROW, SIGNAL = 0.66; EXPRESSED IN PLACENTA, SIGNAL = 0.97; EXPRESSED IN ADULT LIVER, SIGNAL = 0.84; EXPRESSED IN FETAL LIVER, SIGNAL = 0.58; EXPRESSED IN BRAIN, SIGNAL = 0.73; SWISSPROT HIT: P98063, EVALUE 2.00e-17; EST_HUMAN HIT: BF360644.1, EVALUE 3.20e-01; NT HIT: AF113002.1, EVALUE 2.10e-01
acagagggaggactcactggtaaaagtgatgttgaagcccctcttccctgtggagtggtcagtctggaactcgagacgggccacgtggccactgcttgtgatggaggagggaagctggtttcctgagaaggtgcccaggacgggcgcctcggcggtggccccatccttgatgaccaggaaatcaaactgaggctccacgtcaatgtcgttgaaggccaggtggatgcggctctcaggcctggccaggatgagccagacacagtggaggtggttgccatagtcctctgggtagttgggagacaggacaaccccagacgggctggtgaagttgaagaagcaggaga

SEQ ID NO: 29586 - DNA, 390 bp, Homo sapiens
  MAP TO AC015805.3; EXPRESSED IN BONE MARROW, SIGNAL = 0.73; EXPRESSED IN PLACENTA, SIGNAL = 0.72; EXPRESSED IN ADULT LIVER, SIGNAL = 0.71; EXPRESSED IN BRAIN, SIGNAL = 0.64; EXPRESSED IN FETAL LIVER, SIGNAL = 0.65; EST_HUMAN HIT: BF327012.1, EVALUE 3.00e-17; SWISSPROT HIT: P32538, EVALUE 9.70e-01; NT HIT: X14061.1, EVALUE 2.40e-01
cacattggaaaccacgtttgacaccaatgtcaccacggagatgagtggccgtagcatactcagcttgacagggaggcccacacctctgtcctggagactgggccagtccagccctcggctccaagcaggagacgccccctcaatgggcaatgggtatccccctcgagccaacgccagcaggttcatcaacactgagtcaggtcgctatgtgtactccgcccctctgagaaggcagctggcctcccggggcagtagtgtctgccatgtggacgtctcagacaaggcaggagatgagatggacctggaaggcatcagcatggatgcccccggctacatgagcgacggggatgttctgagcaagaacatccggaccgatgacattacaagcgg

SEQ ID NO: 29587 - DNA, 177 bp, Homo sapiens
  MAP TO AL160492.1; EXPRESSED IN ADULT LIVER, SIGNAL = 0.55; EXPRESSED IN PLACENTA, SIGNAL = 0.56; EXPRESSED IN FETAL LIVER, SIGNAL = 0.49; EXPRESSED IN BONE MARROW, SIGNAL = 0.54; EXPRESSED IN BRAIN, SIGNAL = 0.84; EST_HUMAN HIT: AU146216.1, EVALUE 3.00e-95; NT HIT: gi11434330, EVALUE 2.00e-95; SWISSPROT HIT: P04706, EVALUE 2.00e-01
cagagacagacacgggcttggtggtggagactgcgccccacgcgtcagaagctcttttcccagcactggaggcaggctgctgtgaagctgcccaggggtccgagttcttggggacagattgtgcggtggctccagtgggcaccccccatgggtcaatggaggcagctggcttggtac

SEQ ID NO: 29588 - DNA, 192 bp, Homo sapiens
  MAP TO AC015999.3; EXPRESSED IN BONE MARROW, SIGNAL = 0.71; EXPRESSED IN PLACENTA, SIGNAL = 0.64; EXPRESSED IN ADULT LIVER, SIGNAL = 0.63; EXPRESSED IN FETAL LIVER, SIGNAL = 0.54; EXPRESSED IN BRAIN, SIGNAL = 0.69; NT HIT: AF153715.1, EVALUE 1.00e-102; EST_HUMAN HIT: AW856900.1, EVALUE 1.00e-30
atgtcatcaaatgtgtctgcactgagagcatcattcatagtggctaactgcattgctaaagctaagaagccctttactattggtgaagaattgatcctgcctgctgctaaggacatttgttgggaacttttaggagaggctgcagttcaaaaaatagcacatattcctcttctggctagcaccataactaga

SEQ ID NO: 29589 - DNA, 336 bp, Homo sapiens
  MAP TO AC019250.3; EXPRESSED IN LUNG, SIGNAL =   1; EXPRESSED IN PLACENTA, SIGNAL = 1.1; EXPRESSED IN ADULT LIVER, SIGNAL = 0.73; EXPRESSED IN BRAIN, SIGNAL = 2.4; EXPRESSED IN FETAL LIVER, SIGNAL = 0.77; EXPRESSED IN BONE MARROW, SIGNAL = 1.1; EST_HUMAN HIT: AI631818.1, EVALUE 0.00e+00; SWISSPROT HIT: Q61982, EVALUE 3.00e-36; NT HIT: AF308601.1, EVALUE 0.00e+00
gtaaggagtgccaatggacggatgcctgcctgtctcatccctgtgcaaatggaagtacctgtaccactgtggccaaccagttctcctgcaaatgcctcacaggcttcacagggcagaaatgtgagactgatgtcaatgagtgtgacattccaggacactgccagcatggtggcacctgcctcaacctgcctggttcctaccagtgccagtgccctcagggcttcacaggccagtactgtgacagcctgtatgtgccctgtgcaccctcaccttgtgtcaatggaggcacctgtcggcagactggtgacttcacttttgagtgcaactgccttccag

SEQ ID NO: 29590 - DNA, 133 bp, Homo sapiens
  MAP TO AC009549.3; EXPRESSED IN PLACENTA, SIGNAL = 0.63; EXPRESSED IN FETAL LIVER, SIGNAL = 0.77; EXPRESSED IN ADULT LIVER, SIGNAL = 0.73; EXPRESSED IN BRAIN, SIGNAL = 0.61; EXPRESSED IN BONE MARROW, SIGNAL = 0.6; SWISSPROT HIT: P79995, EVALUE 7.00e+00; NT HIT: AF240786.1, EVALUE 4.60e+00
tcagacctgcagttccactgctggattctctctgtctcctaaatcatccgctttgacttcttcctctccacctgggctctctggatgtgccaaggcgctgtacatggagtcaacagctttgattaagcagctt

SEQ ID NO: 29591 - DNA, 357 bp, Homo sapiens
  MAP TO AC021880.2; EXPRESSED IN BRAIN, SIGNAL = 0.49; SWISSPROT HIT: Q04652, EVALUE 1.00e-18; EST_HUMAN HIT: H64412.1, EVALUE 3.30e-01; NT HIT: gi11545730, EVALUE 0.00e+00
aggtacctttcttatttctgtatcatgtgctatccatcgaattactgcttcaaagacatatctttcattgccaacgtttaacttctcaagagaaatcacttctttaagcttttgaggactcagctctaagaattcttccgtgctgctgacgtctcggaaatgagtctccaggtattctgtggcaaggtaatgaacgtgatggaggcagtaatgtagtgcaaagtcacggataccaatacagttctcagcagcaatgcagccttccaaaaactcacagcacagggttttaaggtccgtcagtagcagcaggtcagctgcctgaacaacatcttggattgtatcttcatttagcctgat

SEQ ID NO: 29592 - DNA, 190 bp, Homo sapiens
  MAP TO AC025226.2; EXPRESSED IN PLACENTA, SIGNAL = 0.47; EXPRESSED IN BRAIN, SIGNAL = 0.63; SWISSPROT HIT: P32528, EVALUE 2.90e+00; NT HIT: X65994.1, EVALUE 3.00e-17; EST_HUMAN HIT: AA174078.1, EVALUE 9.00e-28
ataaccctggtgatccgtgtagaatgatgtcacaacgccctctgtaggcagagactggaaaagttacttcacctgggtgatcagtgcagagatatgtcacaatgccgtttgtaggcagagcatagagaagagttgcatcacctgggtgatcagtgcagagatatgtcacaatgtcccctgtaggcaaagc

SEQ ID NO: 29593 - DNA, 138 bp, Homo sapiens
  MAP TO AC009467.3; EXPRESSED IN BONE MARROW, SIGNAL = 0.49; EXPRESSED IN PLACENTA, SIGNAL = 0.54; EXPRESSED IN BRAIN, SIGNAL = 0.48; NT HIT: AF109181.1, EVALUE 7.80e-02; SWISSPROT HIT: P06847, EVALUE 9.10e+00; EST_HUMAN HIT: AW836230.1, EVALUE 4.00e-72
cttagatgccattctcataaagagcttgttttgattttctgctgttcccatcttttcatttttgactaaatcatttaggcttagattatcatcatcatgaaagtatctgaccctttctctttcctcatgggttgaaac

SEQ ID NO: 29594 - DNA, 97 bp, Homo sapiens
  MAP TO AC021774.3; EXPRESSED IN PLACENTA, SIGNAL = 0.6; EXPRESSED IN FETAL LIVER, SIGNAL = 0.56; EXPRESSED IN BRAIN, SIGNAL = 0.84; EXPRESSED IN BONE MARROW, SIGNAL = 0.85; EST_HUMAN HIT: AW118111.1, EVALUE 3.00e-01
atgtattcaattcccaaaaaatcccagccaggctttggtggtggtggtagtggtggtagtggtggcggtggcagtggtggtggcagtggaggtggtg

SEQ ID NO: 29595 - DNA, 114 bp, Homo sapiens
  MAP TO AL138807.7; EXPRESSED IN PLACENTA, SIGNAL = 0.65; EXPRESSED IN FETAL LIVER, SIGNAL = 0.59; EXPRESSED IN BONE MARROW, SIGNAL = 0.51; EXPRESSED IN ADULT LIVER, SIGNAL = 0.64; EXPRESSED IN BRAIN, SIGNAL = 0.83; NT HIT: AB014511.1, EVALUE 5.00e-58; EST_HUMAN HIT: BF364681.1, EVALUE 7.00e-58; SWISSPROT HIT: O70228, EVALUE 7.00e-07
caggggaacccagtaggtatagagtgcaccaagtctcatttcgggaacaaactgagagcaggcaagaagtaagaaatagaggttgaaaaagtatttgaactggttgaacagcac

SEQ ID NO: 29596 - DNA, 154 bp, Homo sapiens
  MAP TO AC016471.4; EXPRESSED IN BRAIN, SIGNAL = 0.58; NT HIT: AF101440.1, EVALUE 8.90e-02; EST_HUMAN HIT: R18512.1, EVALUE 1.00e-38; SWISSPROT HIT: P22170, EVALUE 9.00e+00
gcagaaggagcagaagtatactggtgattactggtgtccatgtgtgaagaagggtacagagaagcaggctgagtggatagaaaagtgactggttgagaaactgaaacaacaggagggtgaggggctgaagtggacggggaagttctacgtataa

SEQ ID NO: 29597 - DNA, 90 bp, Homo sapiens
  MAP TO AC011229.2; EXPRESSED IN PLACENTA, SIGNAL = 0.7; EXPRESSED IN BRAIN, SIGNAL = 0.76; EXPRESSED IN BONE MARROW, SIGNAL = 0.74; EXPRESSED IN LUNG, SIGNAL = 0.84; EXPRESSED IN ADULT LIVER, SIGNAL = 0.62; EXPRESSED IN FETAL LIVER, SIGNAL = 0.59; EST_HUMAN HIT: AI992162.1, EVALUE 1.10e+00; NT HIT: gi11424933, EVALUE 7.40e-01
atatcctcagagaccaaaacttcaactgagtaattgatcattaaaccgtgaaagagggatgtgcctactttgtcaggagccaccatgttt

SEQ ID NO: 29598 - DNA, 320 bp, Homo sapiens
  MAP TO AC013691.3; EXPRESSED IN ADULT LIVER, SIGNAL =   1; EXPRESSED IN BONE MARROW, SIGNAL = 0.97; EXPRESSED IN PLACENTA, SIGNAL = 0.88; EXPRESSED IN FETAL LIVER, SIGNAL = 0.88; EXPRESSED IN LUNG, SIGNAL = 0.91; EXPRESSED IN BRAIN, SIGNAL = 2.8; NT HIT: X97121.1, EVALUE 2.00e-01; SWISSPROT HIT: P21817, EVALUE 2.70e+00
ggttaactcagagcttagacctaagaaaacccaaaaggccttgtattccagcccctccattcaccacataatgctgactcgccagagcattccaaacaaagctggccccttcacacgcccttcctttcctagaagtctttctccctctttgcacgtatctttagaaagctcttcctggaatctgtcatgcactgagagggggaggtgctttttcatgtctatgcctttgctttgtaagtctgctatgcccttccccatcttgtgcatcagggcaaactcttattacttcttcaaatcccagccccaggtcacttcctcca

SEQ ID NO: 29599 - DNA, 117 bp, Homo sapiens
  MAP TO AC018780.3; EXPRESSED IN ADULT LIVER, SIGNAL = 0.63; EXPRESSED IN PLACENTA, SIGNAL = 0.54; EXPRESSED IN FETAL LIVER, SIGNAL = 0.73; EXPRESSED IN BRAIN, SIGNAL = 0.59; EXPRESSED IN BONE MARROW, SIGNAL = 0.66; SWISSPROT HIT: P23780, EVALUE 4.00e-05; NT HIT: gi11440387, EVALUE 4.00e+00; EST_HUMAN HIT: AV746943.1, EVALUE 3.80e-01
aactggaattatggattcgtgttcatcaatggacgtaaccttgggcgatattggaatattgggcctcagaaaacactgtaccttcctggagtttggcttcatccagaagacaatgag

SEQ ID NO: 29600 - DNA, 94 bp, Homo sapiens
  MAP TO AC009416.2; EXPRESSED IN BONE MARROW, SIGNAL = 0.57; EXPRESSED IN LUNG, SIGNAL = 0.85; EXPRESSED IN PLACENTA, SIGNAL = 0.93; EXPRESSED IN ADULT LIVER, SIGNAL = 0.73; EXPRESSED IN FETAL LIVER, SIGNAL = 0.63; EXPRESSED IN BRAIN, SIGNAL = 0.49; NT HIT: Y10196.1, EVALUE 2.00e-07; EST_HUMAN HIT: AI798902.1, EVALUE 2.00e-17
aaaaccaaaaccaaatatacagtgccaagattttcaccagcaacaacccagaagtcaaatatgaggatgagatgcatcctggggccacagagag

SEQ ID NO: 29601 - DNA, 87 bp, Homo sapiens
  MAP TO AC027331.1; EXPRESSED IN LUNG, SIGNAL = 1.1; EXPRESSED IN ADULT LIVER, SIGNAL = 1.3; EXPRESSED IN FETAL LIVER, SIGNAL = 1.1; EXPRESSED IN BRAIN, SIGNAL = 1.2; EXPRESSED IN PLACENTA, SIGNAL = 1.1; EXPRESSED IN BONE MARROW, SIGNAL = 1.1; NT HIT: M12961.1, EVALUE 7.10e-01; EST_HUMAN HIT: BF243046.1, EVALUE 1.10e+00
acagtggagccagagttccataagtaccagttttctggtttagtggccctgggaggtagcacagatccaataccccttaagcctctg

SEQ ID NO: 29602 - DNA, 125 bp, Homo sapiens
  MAP TO AL078591.18; EXPRESSED IN LUNG, SIGNAL = 1.2; EXPRESSED IN PLACENTA, SIGNAL = 1.1; EXPRESSED IN ADULT LIVER, SIGNAL = 1.1; EXPRESSED IN BRAIN, SIGNAL = 0.91; EXPRESSED IN BONE MARROW, SIGNAL = 1.1; EXPRESSED IN FETAL LIVER, SIGNAL = 0.79; NT HIT: AE000594.1, EVALUE 4.30e+00; EST_HUMAN HIT: AV649579.1, EVALUE 4.10e-01; SWISSPROT HIT: P32926, EVALUE 5.40e+00
tgggcatcattattcagactatcagtattttgggctttgaaccaatttgtttcatggatgctaacttggaagtagaaactggagctgttgtcaccatagtttatggaagcagtaccgtttttcct

SEQ ID NO: 29603 - DNA, 227 bp, Homo sapiens
  MAP TO AC022268.3; EXPRESSED IN BONE MARROW, SIGNAL = 0.42; EXPRESSED IN ADULT LIVER, SIGNAL = 0.55; EXPRESSED IN PLACENTA, SIGNAL = 0.52; EXPRESSED IN BRAIN, SIGNAL = 0.5; SWISSPROT HIT: O74623, EVALUE 4.00e+00; NT HIT: AF049236.1, EVALUE 2.10e+00; EST_HUMAN HIT: N84541.1, EVALUE 8.10e-01
aaatctctctaggttatgttcataattgtcatgctggggtggggggtggtgacaacaacactatcttgttagtcaattggcaaaagatctgggcaagtgctgggcaaagttccaacatcaacaaaccaaagtccatctgctgtagtttctggaagtcaggaggtaaggaggaagctgaagttctggaattcagtagatcaaactatgcatttgaaagaggaaaccag

SEQ ID NO: 29604 - DNA, 168 bp, Homo sapiens
  MAP TO AC010397.3; EXPRESSED IN BRAIN, SIGNAL = 0.5; EXPRESSED IN FETAL LIVER, SIGNAL = 0.53; EXPRESSED IN BONE MARROW, SIGNAL = 0.53; NT HIT: gi11417118, EVALUE 5.00e-90; SWISSPROT HIT: Q26228, EVALUE 1.30e+00; EST_HUMAN HIT: BE892786.1, EVALUE 7.00e-90
aatgaaggcaggagaccttttaaaattgataatgatgatgaaccacatacttctaaaagagatgaagttgatcgagctgtgatattgtttaaaccaatggtatcagagccaattcatatacacaggaagtctccacttccaagatctaggaagacggctacaaatgat

SEQ ID NO: 29605 - DNA, 150 bp, Homo sapiens
  MAP TO AC024252.3; EXPRESSED IN PLACENTA, SIGNAL = 0.9; EXPRESSED IN FETAL LIVER, SIGNAL = 0.47; EXPRESSED IN BONE MARROW, SIGNAL = 0.53; EXPRESSED IN ADULT LIVER, SIGNAL = 0.62; EXPRESSED IN BRAIN, SIGNAL = 0.57; SWISSPROT HIT: Q02551, EVALUE 4.60e-01; NT HIT: AL161493.2, EVALUE 8.60e-02; EST_HUMAN HIT: BF528429.1, EVALUE 1.00e-69
agcatatcaaccggatgctgtccatgtattccataagttatgtccgtttggctagtgacatggccagggttcctgagtacaaaattgtgacacagacaaaaatagttatacttctacagctaaatagtgaagacactctgcctggaaaaa

SEQ ID NO: 29606 - DNA, 96 bp, Homo sapiens
  MAP TO AC010162.6; EXPRESSED IN BONE MARROW, SIGNAL = 0.82; EXPRESSED IN PLACENTA, SIGNAL = 0.76; EXPRESSED IN FETAL LIVER, SIGNAL = 0.73; EXPRESSED IN BRAIN, SIGNAL = 0.73; EST_HUMAN HIT: BF683841.1, EVALUE 3.00e-01; NT HIT: AB034243.1, EVALUE 8.00e-01
atgttggcagcctgtgtcactgatgataaggcagatgagacaggagaatatgtgattcactactgctacctgtcaaccgtcttgaatgaaaaataa

SEQ ID NO: 29607 - DNA, 83 bp, Homo sapiens
  MAP TO AL132874.14; EXPRESSED IN PLACENTA, SIGNAL = 0.51; EXPRESSED IN ADULT LIVER, SIGNAL = 0.61; EXPRESSED IN BRAIN, SIGNAL = 0.53; EXPRESSED IN BONE MARROW, SIGNAL = 0.53; NT HIT: gi9626460, EVALUE 2.60e+00; EST_HUMAN HIT: AV741648.1, EVALUE 2.00e-14
ctcatgctggcctgatgtttcgtgatatggtaactctggaagacgctattacggtggtgtcagtcatggagtcgtcaatgcag

SEQ ID NO: 29608 - DNA, 138 bp, Homo sapiens
  MAP TO AL135998.2; EXPRESSED IN LUNG, SIGNAL = 0.84; EXPRESSED IN PLACENTA, SIGNAL =   1; EXPRESSED IN ADULT LIVER, SIGNAL = 0.99; EXPRESSED IN FETAL LIVER, SIGNAL = 0.98; EXPRESSED IN BONE MARROW, SIGNAL = 1.2; EXPRESSED IN BRAIN, SIGNAL = 0.92; NT HIT: gi8922449, EVALUE 6.00e-58; SWISSPROT HIT: Q04047, EVALUE 2.00e-03; EST_HUMAN HIT: AI248796.1, EVALUE 4.00e-72
atggccaacaacctgcaaaagggcaatggtggaccaatgcgcctctatgtgggttccctgcacttcaatatcactgaagacatgctccggggcatctttgagccctttggtaaagtgagtagaagtgagagaaacctc

SEQ ID NO: 29609 - DNA, 467 bp, Homo sapiens
  MAP TO AL121988.10; EXPRESSED IN ADULT LIVER, SIGNAL = 0.82; EXPRESSED IN BONE MARROW, SIGNAL = 0.67; EXPRESSED IN LUNG, SIGNAL = 1.1; EXPRESSED IN PLACENTA, SIGNAL = 0.67; EXPRESSED IN FETAL LIVER, SIGNAL = 0.83; EXPRESSED IN BRAIN, SIGNAL = 0.64; NT HIT: AF139105.1, EVALUE 0.00e+00; SWISSPROT HIT: P35212, EVALUE 3.00e-74; EST_HUMAN HIT: AU122429.1, EVALUE 0.00e+00
agggtctgaggaggtgccctgggtcgggggtgcgtcttggccttgccgtgccctcatcccccggctgaggcagcgacacagcaggtgcaccaactccagcaggttaagcaccagggagatgagtccaaccaccaacatgaagatgatgaagatggtcttctccgtggggcgagagacaaagcagtccacgaggtaggggcagggtgctcgctggcacacaaacacgggctccatggtccagccgtacaggcgccactggccatagaggaagcctgcctctagcacactcttgcagagcacactggcgacataggtgcccatcagtgctccgcggatgcgcaggcgaccatcttctgccaccgagatcttggccatctgacgctctacggccgccagcgcccgctccacctgtgggtccttggccggcagtgcccgcagctccccctccttctgccgcagccgctctt

SEQ ID NO: 29610 - DNA, 180 bp, Homo sapiens
  MAP TO AC021769.3; EXPRESSED IN ADULT LIVER, SIGNAL = 0.76; EXPRESSED IN BONE MARROW, SIGNAL = 0.78; EXPRESSED IN LUNG, SIGNAL = 0.88; EXPRESSED IN PLACENTA, SIGNAL = 1.2; EXPRESSED IN FETAL LIVER, SIGNAL = 0.66; EXPRESSED IN BRAIN, SIGNAL =   1; SWISSPROT HIT: P51689, EVALUE 1.70e+00; EST_HUMAN HIT: AA309269.1, EVALUE 3.00e-12; NT HIT: AJ297699.1, EVALUE 5.00e-19
ggtagccctgctctgcaggagcagtcacagagctataacactgctgcctcaataaagctgttttcttctactaccagcttgctcctgaattatttcgtgagcaaagccaagaaccttcccaggctaagccccaatgtggagattcgcctgccctgtaccattaatacccctgtgtctgat

SEQ ID NO: 29611 - DNA, 79 bp, Homo sapiens
  MAP TO AC013799.3; EXPRESSED IN PLACENTA, SIGNAL = 1.6; EXPRESSED IN ADULT LIVER, SIGNAL = 1.5; EXPRESSED IN FETAL LIVER, SIGNAL = 1.5; EXPRESSED IN BONE MARROW, SIGNAL = 1.6; EXPRESSED IN LUNG, SIGNAL = 1.5; EXPRESSED IN BRAIN, SIGNAL = 1.5; NT HIT: Z73003.1, EVALUE 6.30e-01; SWISSPROT HIT: P14688, EVALUE 3.30e+00
cctctaattttgtcagaagcatcagaccaaagcacaatttctccttcatcaccactgtcaccatactaagttgccaaag

SEQ ID NO: 29612 - DNA, 118 bp, Homo sapiens
  MAP TO AC021361.4; EXPRESSED IN BONE MARROW, SIGNAL = 0.6; EXPRESSED IN PLACENTA, SIGNAL = 0.74; EXPRESSED IN ADULT LIVER, SIGNAL = 0.57; EXPRESSED IN FETAL LIVER, SIGNAL = 0.65; EXPRESSED IN BRAIN, SIGNAL = 0.62
ataaaagcagctctccttcttcttctcttcctccttttcctcctagtcctcttccttctcctcctcctcctcctcctcctcctcttcttcttcttcctcctcctcctccttcttcttt

SEQ ID NO: 29613 - DNA, 244 bp, Homo sapiens
  MAP TO AC016549.4; EXPRESSED IN PLACENTA, SIGNAL = 0.48; EXPRESSED IN BONE MARROW, SIGNAL = 0.43; EXPRESSED IN BRAIN, SIGNAL = 0.46; SWISSPROT HIT: O75962, EVALUE 2.00e-44; NT HIT: gi6005921, EVALUE 0.00e+00; EST_HUMAN HIT: AW245407.1, EVALUE 1.00e-111
ctctctggtggctgtgagctgacagtggtgatccatgacttcaccgcttgcaacagcaacgagctgaccatccgacggggccagaccgtggaagttctggagcggccgcatgacaagcctgactggtgtctggtgcggacaactgaccgctccccagcggcagaaggcctggtcccctgtggttcactgtgcatcgcccactccagaagtagcatggaaatggagggcatcttcaaccacaaag

SEQ ID NO: 29614 - DNA, 151 bp, Homo sapiens
  MAP TO AC018421.3; EXPRESSED IN PLACENTA, SIGNAL = 0.74; EXPRESSED IN ADULT LIVER, SIGNAL = 0.98; EXPRESSED IN FETAL LIVER, SIGNAL = 1.7; EXPRESSED IN BRAIN, SIGNAL = 1.7; EXPRESSED IN LUNG, SIGNAL =   1; EXPRESSED IN BONE MARROW, SIGNAL = 2.2; EST_HUMAN HIT: BE350127.1, EVALUE 3.00e-30; NT HIT: AL163246.2, EVALUE 2.00e-15; SWISSPROT HIT: P37355, EVALUE 5.20e+00
cctcaggcagacccttcaggaggtatctagaagaaggcattgtgatcataggagatgacagctccatgtgtggcattgcccctgaagaccttccagtgggacaagatgcgggagagcttgaagacagtgatgcggatgatcctgaccctga

SEQ ID NO: 29615 - DNA, 273 bp, Homo sapiens
  MAP TO AC027279.1; EXPRESSED IN ADULT LIVER, SIGNAL = 0.71; EXPRESSED IN BRAIN, SIGNAL = 1.1; EXPRESSED IN PLACENTA, SIGNAL =   1; EXPRESSED IN FETAL LIVER, SIGNAL = 0.56; EXPRESSED IN BONE MARROW, SIGNAL = 0.53; NT HIT: U82668.1, EVALUE 2.60e+00; EST_HUMAN HIT: AA825565.1, EVALUE 9.80e-01; SWISSPROT HIT: P43929, EVALUE 2.00e+00
agtgcaaagaacatccaggtcaggtacctgacctgcttgattcatgtcttggaaacactcctttgtctttcagagaaagtaaagagtgatggagacagagagagaaagtgtgacctactttttattatcagcaccatttcatctgcaaaacacgacttttctcttcttattacgctgagcatgaaaataaaatgttttccaaaagacctggctttggctgttgtgaggaaggccagggacttgttcaaaactctgatgagctcgatgagcaaa

SEQ ID NO: 29616 - DNA, 159 bp, Homo sapiens
  MAP TO AC010971.3; EXPRESSED IN LUNG, SIGNAL =   1; EXPRESSED IN PLACENTA, SIGNAL = 0.87; EXPRESSED IN ADULT LIVER, SIGNAL = 0.97; EXPRESSED IN FETAL LIVER, SIGNAL = 1.2; EXPRESSED IN BRAIN, SIGNAL =   1; EXPRESSED IN BONE MARROW, SIGNAL =   1; EST_HUMAN HIT: AA861510.1, EVALUE 3.00e-33; SWISSPROT HIT: P44197, EVALUE 4.00e+00; NT HIT: X84291.1, EVALUE 2.00e-27
gcatctcatccatttgctgagcatacttctctgatgtaatggtttcgctggggttcagaaagctgtagtggatcagactggcagcaggccaccaaacagtgaccatgacctttttttggtgcaagtttagctttgggacttcttctaggtccatctact

SEQ ID NO: 29617 - DNA, 108 bp, Homo sapiens
  MAP TO AC010721.2; EXPRESSED IN LUNG, SIGNAL = 0.98; EXPRESSED IN ADULT LIVER, SIGNAL = 0.95; EXPRESSED IN BRAIN, SIGNAL = 0.84; EXPRESSED IN PLACENTA, SIGNAL = 0.94; EXPRESSED IN FETAL LIVER, SIGNAL = 0.94; EXPRESSED IN BONE MARROW, SIGNAL = 0.8; NT HIT: AF201929.1, EVALUE 2.30e-01; SWISSPROT HIT: P27186, EVALUE 4.20e+00; EST_HUMAN HIT: AA700025.1, EVALUE 3.40e-01
catccaaaatagaagacaatgaattttcctttacatagtatattgttgtggaataggaataagaacatgcttggcagatgtctgagtgatggctatcagccatgggaa

SEQ ID NO: 29618 - DNA, 102 bp, Homo sapiens
  MAP TO AC015599.3; EXPRESSED IN PLACENTA, SIGNAL = 0.79; EXPRESSED IN FETAL LIVER, SIGNAL = 0.61; EXPRESSED IN BONE MARROW, SIGNAL = 0.68; EXPRESSED IN ADULT LIVER, SIGNAL = 0.7; EXPRESSED IN BRAIN, SIGNAL = 0.61; NT HIT: AF071001.1, EVALUE 2.20e-01; EST_HUMAN HIT: AW303853.1, EVALUE 5.00e+00; SWISSPROT HIT: P29375, EVALUE 4.20e+00
acttgtaaccctggcagaccagaggcctgccttcatcctgaaatcctctgcccctgtcatggtgcctgacacagaagtgcctggtattcagaaaaaaaaaat

SEQ ID NO: 29619 - DNA, 105 bp, Homo sapiens
  MAP TO AC015570.5; EXPRESSED IN ADULT LIVER, SIGNAL = 0.95; EXPRESSED IN BRAIN, SIGNAL = 0.89; EXPRESSED IN LUNG, SIGNAL = 0.84; EXPRESSED IN PLACENTA, SIGNAL = 1.1; EXPRESSED IN FETAL LIVER, SIGNAL =   1; EXPRESSED IN BONE MARROW, SIGNAL = 0.87; SWISSPROT HIT: Q44695, EVALUE 5.50e+00; EST_HUMAN HIT: AI267342.1, EVALUE 4.00e-10; NT HIT: AJ010770.1, EVALUE 1.40e-02
atggtccccaatcatagtgctgaagtgctatctagtattcctaagcacaagacggctgtgatattccttatgcagaaaaatgtgttagataagctttattccaat

SEQ ID NO: 29620 - DNA, 346 bp, Homo sapiens
  MAP TO AL096800.20; EXPRESSED IN PLACENTA, SIGNAL = 0.72; EXPRESSED IN BRAIN, SIGNAL = 0.53; EXPRESSED IN FETAL LIVER, SIGNAL = 0.53; EXPRESSED IN BONE MARROW, SIGNAL = 0.65; SWISSPROT HIT: P38994, EVALUE 4.00e-07; NT HIT: gi4505814, EVALUE 1.00e-125; EST_HUMAN HIT: BE794576.1, EVALUE 1.00e-125
agcagcgacactcttcaagtgtcaatcgacactcaaagactggctccccaaaaggctctgtattccacagccatggaattcatccagggagaggctcggctgggcgacaccatggaggccgatgaccatatgggtggcatccctgctcagaatagtaaaggggaaaggcttctgctttatattggcatcattgacattctacagtcttacacgtttcttaagaagttggagcactcttggaaagccgtggtacatgatggggacgctgtctcagtgcatcgcccaggcttctacgctgaacggttccagcacttcatgtgcaacgcagtatttaagaagatcccct

SEQ ID NO: 29621 - DNA, 168 bp, Homo sapiens
  MAP TO AC010503.3; EXPRESSED IN LUNG, SIGNAL = 0.91; EXPRESSED IN PLACENTA, SIGNAL = 0.62; EXPRESSED IN FETAL LIVER, SIGNAL = 0.69; EXPRESSED IN ADULT LIVER, SIGNAL = 0.68; EXPRESSED IN BRAIN, SIGNAL = 1.2; EXPRESSED IN BONE MARROW, SIGNAL = 0.58; SWISSPROT HIT: P55851, EVALUE 3.00e-06; NT HIT: AF119361.1, EVALUE 6.00e+00; EST_HUMAN HIT: BF526089.1, EVALUE 7.00e-90
ctcgtagacggccaggtcgatgcccgcataggggatgatgcccagcacgttggggaggtagccgcggtagaaggcacggggcccctccctctccaggatacgcctggcgcagtccagcagccccttatactggcccgtccggcgcaaggtcagccgcgtcttcagcac

SEQ ID NO: 29622 - DNA, 157 bp, Homo sapiens
  MAP TO AC021239.3; EXPRESSED IN PLACENTA, SIGNAL =   1; EXPRESSED IN LUNG, SIGNAL =   1; EXPRESSED IN FETAL LIVER, SIGNAL = 1.5; EXPRESSED IN ADULT LIVER, SIGNAL = 0.93; EXPRESSED IN BRAIN, SIGNAL = 1.2; EXPRESSED IN BONE MARROW, SIGNAL = 1.2; SWISSPROT HIT: P33846, EVALUE 5.20e+00; NT HIT: S74059.1, EVALUE 9.10e-02; EST_HUMAN HIT: AA725387.1, EVALUE 8.30e+00
tgatcgggtgaagctacttacttctatgcttcaaataactcaaatgctgactcctaaacctcctgaagttcctcagactttttatctgagcttcagaattgtacatctaaatattaagtgcatggtcacatttaaatgtctcaaaaataccaaatac

SEQ ID NO: 29623 - DNA, 229 bp, Homo sapiens
  MAP TO AC013657.3; EXPRESSED IN PLACENTA, SIGNAL = 0.65; EXPRESSED IN FETAL LIVER, SIGNAL = 0.45; EXPRESSED IN ADULT LIVER, SIGNAL = 0.84; EXPRESSED IN BRAIN, SIGNAL = 0.53; EXPRESSED IN BONE MARROW, SIGNAL = 0.49; EST_HUMAN HIT: AL039886.1, EVALUE 1.00e-106; NT HIT: AE000049.2, EVALUE 1.40e-01; SWISSPROT HIT: P24386, EVALUE 3.00e+00
atctattgcttttgcttattgaacttgggagcatattttctgttgcttcgagtaactccagtaattgtctggcttataataatgcactggctaaaacctaaactgacaggaagaaagaaaggtgaaacacttgtcaatcaacaaacattcaacatggtgctcgattccacaatgaacacaagaaatatacaaatgattcttgacttcatgaagctcatcgtctgcatgg

SEQ ID NO: 29624 - DNA, 163 bp, Homo sapiens
  MAP TO AC015805.3; EXPRESSED IN PLACENTA, SIGNAL = 0.51; EXPRESSED IN BONE MARROW, SIGNAL = 0.56; EXPRESSED IN FETAL LIVER, SIGNAL = 0.73; EXPRESSED IN BRAIN, SIGNAL = 0.57; NT HIT: X02720.1, EVALUE 1.50e+00; EST_HUMAN HIT: T84293.1, EVALUE 1.40e-01
ctgcatctcatttatgtgtcttgtgctttgtgttgttgttgttgttgttgttgttaaaattactaatgtgggtttggttttcccttgagttataaagacttgagcatgaatccatattgggcagaggagacaaaacagcaaggcagctatgtctcgtctttgt

SEQ ID NO: 29625 - DNA, 99 bp, Homo sapiens
  MAP TO AC015999.3; EXPRESSED IN BONE MARROW, SIGNAL = 0.9; EXPRESSED IN PLACENTA, SIGNAL =   1; EXPRESSED IN ADULT LIVER, SIGNAL = 1.4; EXPRESSED IN BRAIN, SIGNAL = 0.9; EXPRESSED IN LUNG, SIGNAL = 1.2; EXPRESSED IN FETAL LIVER, SIGNAL = 0.87; NT HIT: AP001511.1, EVALUE 3.30e+00; SWISSPROT HIT: P15265, EVALUE 4.20e+00
atgctgcgttttctctccttgctgcaacaagaaaagcctttgttttccaacctggcaacctttgaagaagtgactcagacatcttcatggcctctaaag

SEQ ID NO: 29626 - DNA, 84 bp, Homo sapiens
  MAP TO AC012241.4; EXPRESSED IN PLACENTA, SIGNAL = 0.81; EXPRESSED IN FETAL LIVER, SIGNAL = 0.59; EXPRESSED IN ADULT LIVER, SIGNAL = 0.61; EXPRESSED IN BRAIN, SIGNAL = 0.48; EXPRESSED IN BONE MARROW, SIGNAL = 0.53; EST_HUMAN HIT: BF106300.1, EVALUE 6.50e-02
atgcattttaattgtcaaaatgtcacagacaacaatattgaaaatcatttccttggaaatgattcaaagcagaatgccattttc

SEQ ID NO: 29627 - DNA, 167 bp, Homo sapiens
  MAP TO AC021774.3; EXPRESSED IN BONE MARROW, SIGNAL = 1.3; EXPRESSED IN LUNG, SIGNAL = 1.2; EXPRESSED IN PLACENTA, SIGNAL = 1.4; EXPRESSED IN ADULT LIVER, SIGNAL = 1.2; EXPRESSED IN BRAIN, SIGNAL =   1; EXPRESSED IN FETAL LIVER, SIGNAL = 0.99; EST_HUMAN HIT: AU121943.1, EVALUE 4.00e-36; NT HIT: AF009668.1, EVALUE 5.00e-65; SWISSPROT HIT: P10272, EVALUE 2.00e-07
gtataccacgggttgcaagctcatccctcagacctgcgtaaggactcctagagctattcctgtttcttctgtgacatataaagaaaagtcttgccccgttggcaagcttacaactggggtttgggttagggccttctttagggcctggaaagccacttctgtttcag

SEQ ID NO: 29628 - DNA, 219 bp, Homo sapiens
  MAP TO AC015756.4; EXPRESSED IN ADULT LIVER, SIGNAL = 1.1; EXPRESSED IN BRAIN, SIGNAL = 0.46; SWISSPROT HIT: O75936, EVALUE 7.00e-39; NT HIT: gi4502368, EVALUE 1.00e-118; EST_HUMAN HIT: AW271289.1, EVALUE 1.00e-118
atggcttgtaccatccaaaaggcagaagcacttgacggggctcatttgatgcagatcctctggtatgatgaggaagagtctctctacccagctgtatggttgagagacaactgtccgtgctctgattgctacctggattccgcaaaagcacggaaacttctagtggaagctcttgatgtgaacattggaattaaaggcttgatatttgacagaaaaaag

SEQ ID NO: 29629 - DNA, 186 bp, Homo sapiens
  MAP TO AC015662.4; EXPRESSED IN BONE MARROW, SIGNAL = 1.9; EXPRESSED IN PLACENTA, SIGNAL = 0.64; EXPRESSED IN ADULT LIVER, SIGNAL = 0.7; EXPRESSED IN BRAIN, SIGNAL = 1.5; EXPRESSED IN LUNG, SIGNAL =   1; EXPRESSED IN FETAL LIVER, SIGNAL = 1.5; SWISSPROT HIT: P55822, EVALUE 5.00e-21; NT HIT: gi4506924, EVALUE 1.00e-100; EST_HUMAN HIT: BF347519.1, EVALUE 1.00e-100
attaagaagaaacaacaagatgtgcttggtttcctagaagccaacaaaataggatttgaagaaaaagatattgcagccaatgaagagaatcggaagtggatgagagaaaatgtacctgaaaatagtcgaccagccacaggttaccccctgccacctcagattttcaatgaaagccagtatcgcggg

SEQ ID NO: 29630 - DNA, 103 bp, Homo sapiens
  MAP TO AC008998.2; EXPRESSED IN PLACENTA, SIGNAL = 1.1; EXPRESSED IN BONE MARROW, SIGNAL = 1.1; EXPRESSED IN ADULT LIVER, SIGNAL = 1.1; EXPRESSED IN BRAIN, SIGNAL = 2.7; EXPRESSED IN LUNG, SIGNAL = 1.2; EXPRESSED IN FETAL LIVER, SIGNAL =   1; NT HIT: gi11526011, EVALUE 2.00e-51; SWISSPROT HIT: P04258, EVALUE 7.30e-02; EST_HUMAN HIT: AA378559.1, EVALUE 2.00e-51
ccacgtgcacctccagggcttcagggtgggagcctcgccaggtcacctccacgcgctgcagacggcccccctggaagccgaggctctccactatgggctgagt

SEQ ID NO: 29631 - DNA, 186 bp, Homo sapiens
  MAP TO AL133227.7; EXPRESSED IN LUNG, SIGNAL = 0.89; EXPRESSED IN FETAL LIVER, SIGNAL = 0.86; EXPRESSED IN PLACENTA, SIGNAL = 0.89; EXPRESSED IN ADULT LIVER, SIGNAL = 0.84; EXPRESSED IN BRAIN, SIGNAL = 0.96; EXPRESSED IN BONE MARROW, SIGNAL = 0.89; SWISSPROT HIT: P15944, EVALUE 5.10e+00; EST_HUMAN HIT: BE900454.1, EVALUE 3.00e-98
tcactgggacaagagcttggttccactttccacgagccttgtcagcacaatgatgccatccatgttgatgaactcagtagcgaaagtcacgtcggcagagagcttggccagctccttcatggcatccagccgggtctccatgttggatgactgggtcctctccatcagctggcgtgcagcccggga

SEQ ID NO: 29632 - DNA, 294 bp, Homo sapiens
  MAP TO AC026273.2; EXPRESSED IN BRAIN, SIGNAL = 0.6; NT HIT: X01750.1, EVALUE 2.00e-59; EST_HUMAN HIT: AA429538.1, EVALUE 1.00e-68; SWISSPROT HIT: P04294, EVALUE 6.00e-01
gttttatatgaagatattcccgtttccaaggaactcgtcaaagctttccaaatatccacatgcagattctacaaaaagagtgtttcaaaactgctctatgaaaagaaaggttcagctctgttagctgagcacacacatcacaaactagtttatgagaatgcttctgccaagtttttattcgaggatattccctttctcaccattggcctgaatgcgatccaaatgttcacttccagattccacaaaaagagtgtttcaaacctgctccatgaaacggaatgttcaactctgtga

SEQ ID NO: 29633 - DNA, 148 bp, Homo sapiens
  MAP TO AC022050.2; EXPRESSED IN ADULT LIVER, SIGNAL = 0.74; EXPRESSED IN BONE MARROW, SIGNAL = 0.68; EXPRESSED IN BRAIN, SIGNAL = 0.62; EXPRESSED IN PLACENTA, SIGNAL = 0.73; EXPRESSED IN FETAL LIVER, SIGNAL = 0.54; SWISSPROT HIT: P22807, EVALUE 7.90e-01; NT HIT: AE004096.1, EVALUE 3.40e-01; EST_HUMAN HIT: BE780035.1, EVALUE 2.00e+00
tgacattaggaacaacaagcacaactgattataagcattattttgaggaaatgttcaaagatatcatgaacattgtcacccagaccctcatagacatgatcactcagaaccttgcctcttatatgtgtctgattagcagtatccagtg

SEQ ID NO: 29634 - DNA, 95 bp, Homo sapiens
  MAP TO AC018420.3; EXPRESSED IN ADULT LIVER, SIGNAL = 0.58; EXPRESSED IN BRAIN, SIGNAL = 0.48; EXPRESSED IN BONE MARROW, SIGNAL = 0.51; EXPRESSED IN PLACENTA, SIGNAL = 0.47; NT HIT: AJ271885.2, EVALUE 7.90e-01; EST_HUMAN HIT: AA653261.1, EVALUE 5.00e-03
agagagaaagagcgagagagaaccaggaagccagtggtgtgattcaacttgagtttgaaggtttggtggttggggatggtggggagggtgatggt

SEQ ID NO: 29635 - DNA, 160 bp, Homo sapiens
  MAP TO AC015999.3; EXPRESSED IN PLACENTA, SIGNAL = 0.72; EXPRESSED IN FETAL LIVER, SIGNAL = 0.81; EXPRESSED IN BRAIN, SIGNAL = 0.56; EXPRESSED IN ADULT LIVER, SIGNAL = 0.71; EXPRESSED IN BONE MARROW, SIGNAL = 1.2; EST_HUMAN HIT: AV712173.1, EVALUE 4.00e-85; NT HIT: AF098642.1, EVALUE 3.00e-85
gtcagctacccacccccaccagccggccattcaggtcctggcccagctggctttcctgtcccaaatcagccagtgtataatcagccagtatataatcagccagttggagctgcaggggtaccatggatgccagcgccacagcctccattaaactgtccac

SEQ ID NO: 29636 - DNA, 148 bp, Homo sapiens
  MAP TO AC011778.3; EXPRESSED IN ADULT LIVER, SIGNAL = 0.89; EXPRESSED IN LUNG, SIGNAL = 0.84; EXPRESSED IN BRAIN, SIGNAL = 0.87; EXPRESSED IN BONE MARROW, SIGNAL =   1; EXPRESSED IN PLACENTA, SIGNAL = 0.82; EXPRESSED IN FETAL LIVER, SIGNAL = 0.92; SWISSPROT HIT: P20806, EVALUE 2.30e+00; EST_HUMAN HIT: BE550763.1, EVALUE 1.30e-01; NT HIT: gi11418108, EVALUE 8.50e-02
tcgtgaaaacagccatgagaaggttatggctggtcacagacaacaggggaatgatgaggctaaatactgtgtccccattggagacaacaaagagcttcatgaggctaatgcaacagtcagagctgggagtgggaatcagcagcagtag

SEQ ID NO: 29637 - DNA, 157 bp, Homo sapiens
  MAP TO AC012588.5; EXPRESSED IN ADULT LIVER, SIGNAL = 0.88; EXPRESSED IN BRAIN, SIGNAL = 1.2; EXPRESSED IN PLACENTA, SIGNAL = 0.8; EXPRESSED IN FETAL LIVER, SIGNAL = 0.73; EXPRESSED IN BONE MARROW, SIGNAL = 0.8; SWISSPROT HIT: P17847, EVALUE 3.50e-01; NT HIT: Y11187.1, EVALUE 9.10e-02
attttctggtatcaaaacgttttcagtgactgtgcttcggggttcggctgggcggaagccaactaagttagcaaagtcgcaaatggggccgttggctttgtacgtggagaatggcacaccagaactgtccaggatcccagtggcactggcttcttcg

SEQ ID NO: 29638 - DNA, 124 bp, Homo sapiens
  MAP TO AL136308.4; EXPRESSED IN BONE MARROW, SIGNAL = 0.95; EXPRESSED IN LUNG, SIGNAL =   1; EXPRESSED IN ADULT LIVER, SIGNAL = 0.97; EXPRESSED IN FETAL LIVER, SIGNAL = 0.93; EXPRESSED IN BRAIN, SIGNAL = 0.77; EXPRESSED IN PLACENTA, SIGNAL = 0.82; NT HIT: AF049236.1, EVALUE 7.00e-02; EST_HUMAN HIT: AI799734.1, EVALUE 7.00e-03; SWISSPROT HIT: P10299, EVALUE 7.10e+00
tcacaaaatcctcaggtaaaagtaaagaggcatatgatgaacaactgctctttgcaggtaaacaagttcatctacttttaactcctccacatcttgtttctgtttggatttgtagaagtagtaa

SEQ ID NO: 29639 - DNA, 183 bp, Homo sapiens
  MAP TO AC013800.3; EXPRESSED IN ADULT LIVER, SIGNAL = 1.1; EXPRESSED IN BONE MARROW, SIGNAL = 0.92; EXPRESSED IN LUNG, SIGNAL = 0.92; EXPRESSED IN PLACENTA, SIGNAL =   1; EXPRESSED IN FETAL LIVER, SIGNAL = 0.75; EXPRESSED IN BRAIN, SIGNAL = 0.9; SWISSPROT HIT: P00751, EVALUE 2.00e-07; EST_HUMAN HIT: BE744530.1, EVALUE 2.50e+00; NT HIT: AE000958.1, EVALUE 1.70e+00
acacgcagcctggcttcttagccgaccattggttattcttttggcatgtgattgccttctgtcccaccagctcaaaggcgggctggcactcaaacttgagtgtgtcaccgtggcgaaaccgggagccttccctccggccatatgcaggtatgccagggtcaccgcaactgccctgctcgatct

SEQ ID NO: 29640 - DNA, 102 bp, Homo sapiens
  MAP TO AC015737.4; EXPRESSED IN ADULT LIVER, SIGNAL = 0.59; EXPRESSED IN BONE MARROW, SIGNAL = 0.67; EXPRESSED IN BRAIN, SIGNAL = 0.6; EXPRESSED IN PLACENTA, SIGNAL = 0.57; EXPRESSED IN FETAL LIVER, SIGNAL = 0.72; NT HIT: AE001562.1, EVALUE 2.20e-01
gaatctcctatgcagcaatgcatgcacaatggcgacacgtcctttgaagatctgcatatgcttacacagcctgatattctcacagggcaagccatcagtaag

SEQ ID NO: 29641 - DNA, 281 bp, Homo sapiens
  MAP TO AC021049.12; EXPRESSED IN ADULT LIVER, SIGNAL = 0.7; EXPRESSED IN BRAIN, SIGNAL = 0.75; EXPRESSED IN PLACENTA, SIGNAL = 0.82; EXPRESSED IN FETAL LIVER, SIGNAL = 0.55; EXPRESSED IN BONE MARROW, SIGNAL = 0.64; EST_HUMAN HIT: AV751386.1, EVALUE 9.00e-32; NT HIT: gi11436005, EVALUE 0.00e+00; SWISSPROT HIT: Q01484, EVALUE 2.50e-01
gcattgcccctgttcctccacctagggacctaagctgggaagcaggacatggaggaaatgtggctttgccacttaaggagacatccgtggaaaactttctgggagctaccacacctgccctggctaagctgcaggtgccgcgggagcaactctctgaagttctggagcagatttgcagtggtagctgtgggcccatctttcgagccaatatgaacactggggacccttctaagcccaagagtgttattctcaaggctttaaaaggtaaaacaagaagtgtt

SEQ ID NO: 29642 - DNA, 96 bp, Homo sapiens
  MAP TO AL121828.6; EXPRESSED IN ADULT LIVER, SIGNAL = 0.87; EXPRESSED IN PLACENTA, SIGNAL = 0.73; EXPRESSED IN FETAL LIVER, SIGNAL = 0.9; EXPRESSED IN BRAIN, SIGNAL = 0.7; EXPRESSED IN BONE MARROW, SIGNAL = 0.9; EST_HUMAN HIT: BF206809.1, EVALUE 7.50e-02; SWISSPROT HIT: P78746, EVALUE 4.20e+00
cccccactgccccttttttcctcggttcttccccagccctcatatgcaccctgcacatttgggagaactgcaagcatagctcctgccttttgaaaa

SEQ ID NO: 29643 - DNA, 232 bp, Homo sapiens
  MAP TO AC022423.2; EXPRESSED IN ADULT LIVER, SIGNAL = 0.85; EXPRESSED IN BRAIN, SIGNAL = 1.1; EXPRESSED IN PLACENTA, SIGNAL = 1.1; EXPRESSED IN FETAL LIVER, SIGNAL = 0.73; EXPRESSED IN BONE MARROW, SIGNAL = 0.74; NT HIT: AB002298.1, EVALUE 1.00e-125; SWISSPROT HIT: P26442, EVALUE 1.80e+00; EST_HUMAN HIT: BF369844.1, EVALUE 6.00e-48
atgaaccgaggggatttccttctgtcagtcaacggcgcctcactggctggcttagcccacgggaatgtcctgaaggttctgcaccaggcacagctgcacaaagatgccctcgtggtcatcaagaaagggatggatcagcccaggccctctgcccggcaggagcctcccacagccaatgggaagggtttgctgtccagaaagaccatccccctggagcctggcattggtaaga

SEQ ID NO: 29644 - DNA, 136 bp, Homo sapiens
  MAP TO AC008616.2; EXPRESSED IN BONE MARROW, SIGNAL = 1.1; EXPRESSED IN ADULT LIVER, SIGNAL = 1.2; EXPRESSED IN LUNG, SIGNAL = 1.1; EXPRESSED IN PLACENTA, SIGNAL = 1.2; EXPRESSED IN FETAL LIVER, SIGNAL =   1; EXPRESSED IN BRAIN, SIGNAL = 1.1; SWISSPROT HIT: P73769, EVALUE 1.10e+00
gcacccagccatctcaccctgcagctggaccctgtgagcctcaaccacagcggggcgtacgtgtgctgggcggccgtagagattcctgagttggaggaggctgagggcaacataacaaggctctttgtggacccag

SEQ ID NO: 29645 - DNA, 166 bp, Homo sapiens
  MAP TO AL078591.18; EXPRESSED IN ADULT LIVER, SIGNAL = 1.1; EXPRESSED IN LUNG, SIGNAL = 1.4; EXPRESSED IN BRAIN, SIGNAL = 1.2; EXPRESSED IN PLACENTA, SIGNAL = 1.3; EXPRESSED IN FETAL LIVER, SIGNAL = 0.85; EXPRESSED IN BONE MARROW, SIGNAL = 1.6; SWISSPROT HIT: P52343, EVALUE 8.90e+00; NT HIT: AB037832.1, EVALUE 2.00e-86; EST_HUMAN HIT: AW962767.1, EVALUE 6.00e-84
cttccttcaggcaaaagaagaactgaagctactaaaacttcctgggttcatgtacagtgaagttcctctgctggcatcctcagtaccttattttagtgtagaagaagaggatggttctgaagatggagtacatctgattgtctgtgtgcacggtttagatggtatg

SEQ ID NO: 29646 - DNA, 168 bp, Homo sapiens
  MAP TO AC007956.5; EXPRESSED IN BONE MARROW, SIGNAL = 0.67; EXPRESSED IN PLACENTA, SIGNAL = 0.53; EXPRESSED IN ADULT LIVER, SIGNAL = 0.59; EXPRESSED IN FETAL LIVER, SIGNAL = 0.51; EXPRESSED IN BRAIN, SIGNAL = 0.54; SWISSPROT HIT: P11996, EVALUE 3.00e+00; EST_HUMAN HIT: BF349487.1, EVALUE 3.70e-02; NT HIT: gi7662051, EVALUE 5.00e-90
ctttgcaagaccggggatccaggtaatttccccgcacgtagtcataaatagtccggtcccctcggcgctcgcggtcctcattctggaggaagctgactacacgtgcggcaagctcaaagaggaacttaattgtgaagaagaatgcaaccacagacactgtgattccac

SEQ ID NO: 29647 - DNA, 216 bp, Homo sapiens
  MAP TO AL121827.9; EXPRESSED IN BRAIN, SIGNAL = 0.61; EXPRESSED IN PLACENTA, SIGNAL = 0.68; EXPRESSED IN ADULT LIVER, SIGNAL = 0.58; EXPRESSED IN FETAL LIVER, SIGNAL = 0.51; EXPRESSED IN BONE MARROW, SIGNAL = 0.51; EST_HUMAN HIT: AI459970.1, EVALUE 3.00e+00; SWISSPROT HIT: P18584, EVALUE 4.10e-01
gccctcgggacactggctgctgctggcctggggttctgggagctgcagaagggatgtgggacacagagggtttctgggtgctgtaaccatgggctgtgccaacgcagtaccagccagggtggtcctgagaccttggaggttctgcaggaacacagcagcccaggctgtcaggagctgctcctgtgtcagaccagctgctggcaaaggggtcccgcc

SEQ ID NO: 29648 - DNA, 117 bp, Homo sapiens
  MAP TO AC018672.2; EXPRESSED IN FETAL LIVER, SIGNAL = 0.91; EXPRESSED IN PLACENTA, SIGNAL = 1.1; EXPRESSED IN BONE MARROW, SIGNAL = 0.91; EXPRESSED IN ADULT LIVER, SIGNAL = 1.2; EXPRESSED IN BRAIN, SIGNAL = 0.9; NT HIT: Y10196.1, EVALUE 2.60e-01; EST_HUMAN HIT: BE798806.1, EVALUE 3.80e-01
atgtttgtgtctaatctcatccacctcattcacttgcatatgtcgataatggtcctcaacacagataccaaacataagttagatcttgtcattcttgtgctcaaaattctgcagtaa

SEQ ID NO: 29649 - DNA, 120 bp, Homo sapiens
  MAP TO AC016948.4; EXPRESSED IN BONE MARROW, SIGNAL = 1.2; EXPRESSED IN ADULT LIVER, SIGNAL = 1.1; EXPRESSED IN LUNG, SIGNAL = 1.3; EXPRESSED IN PLACENTA, SIGNAL = 1.2; EXPRESSED IN BRAIN, SIGNAL = 1.1; EXPRESSED IN FETAL LIVER, SIGNAL = 0.93; NT HIT: L11910.1, EVALUE 1.00e+00
tgggcatagctttgattcagggcatggaggggaaggaacacgcagtagtgtcgtaagacgctgaggtcagttcttcgagcccactctaggtcacagagttttctattattgattaggggt

SEQ ID NO: 29650 - DNA, 95 bp, Homo sapiens
  MAP TO AC009316.3; EXPRESSED IN PLACENTA, SIGNAL = 0.78; EXPRESSED IN ADULT LIVER, SIGNAL = 0.97; EXPRESSED IN FETAL LIVER, SIGNAL = 0.71; EXPRESSED IN BONE MARROW, SIGNAL = 0.82; EXPRESSED IN LUNG, SIGNAL = 0.93; EXPRESSED IN BRAIN, SIGNAL = 1.9; NT HIT: AB000631.1, EVALUE 7.90e-01
attaccatcagtgggctgaattcattttcatgataaatgataataacccctttgaaagtcatcactttaatgcttccaaacatctatttgttatg

SEQ ID NO: 29651 - DNA, 130 bp, Homo sapiens
  MAP TO AC009507.3; EXPRESSED IN BRAIN, SIGNAL = 0.5; EXPRESSED IN ADULT LIVER, SIGNAL = 0.59; EXPRESSED IN BONE MARROW, SIGNAL = 0.48; NT HIT: AF043541.1, EVALUE 1.10e+00; EST_HUMAN HIT: H65292.1, EVALUE 4.30e-01; SWISSPROT HIT: P04008, EVALUE 5.40e+00
atacggcaaggcggtccactggagctatcacttactacaccacctgcaagctgctgtcccagtggagcaaaggaaaggcctgataaagcaacagctggggcacctgcttgcaaatgatgccctggaaaga

SEQ ID NO: 29652 - DNA, 174 bp, Homo sapiens
  MAP TO AC023296.2; EXPRESSED IN PLACENTA, SIGNAL = 0.51; EXPRESSED IN ADULT LIVER, SIGNAL = 0.66; EXPRESSED IN FETAL LIVER, SIGNAL = 0.54; EXPRESSED IN BRAIN, SIGNAL = 0.45; EST_HUMAN HIT: BE391683.1, EVALUE 1.50e-01; NT HIT: AE004114.1, EVALUE 6.30e+00; SWISSPROT HIT: P06681, EVALUE 5.00e-06
ctatatcgtgtggacacccaggggtccctgccaacgccgtcctcactggagagctgtttacctatggcgccgtcgtgcactactcctgcagagggagcgagagcctcataggcaacgacacgagagtgtgccaggaagacagtcactggagcggggcactgccccactgcacag

SEQ ID NO: 29653 - DNA, 168 bp, Homo sapiens
  MAP TO AC011941.4; EXPRESSED IN PLACENTA, SIGNAL = 0.82; EXPRESSED IN BONE MARROW, SIGNAL = 0.63; EXPRESSED IN ADULT LIVER, SIGNAL = 0.65; EXPRESSED IN FETAL LIVER, SIGNAL = 0.6; EXPRESSED IN BRAIN, SIGNAL = 0.67; SWISSPROT HIT: P39896, EVALUE 8.80e+00; NT HIT: AE001862.1, EVALUE 6.00e+00; EST_HUMAN HIT: AA456727.1, EVALUE 9.00e+00
atgaatgcaggcatggaagagcagggtgtcttccaggtcctgtgagaagttcagaatggctggaaagatagggtcttgggcagtgagtgagaaggaatgagcctttaggggtggatggacaccgcttgtatgtccttgtatgtctccctgaggagtttgtacttgata

SEQ ID NO: 29654 - DNA, 117 bp, Homo sapiens
  MAP TO AL158111.2; EXPRESSED IN FETAL LIVER, SIGNAL = 0.69; EXPRESSED IN PLACENTA, SIGNAL = 0.76; EXPRESSED IN ADULT LIVER, SIGNAL = 0.86; EXPRESSED IN BONE MARROW, SIGNAL = 0.8; EXPRESSED IN BRAIN, SIGNAL = 0.87; SWISSPROT HIT: O28017, EVALUE 4.10e+00; NT HIT: AJ271735.1, EVALUE 5.00e-12; EST_HUMAN HIT: AI334130.1, EVALUE 2.00e-12
aaattgccacagtcactccaaccttcggcaaccaccttcctgatcaatcagcacccatcaatattgaggcaagacctttcaccagaaaaagaaaccatgacttatggaagtctatgg

SEQ ID NO: 29655 - DNA, 105 bp, Homo sapiens
  MAP TO AC011226.3; EXPRESSED IN PLACENTA, SIGNAL = 1.1; EXPRESSED IN ADULT LIVER, SIGNAL = 0.96; EXPRESSED IN FETAL LIVER, SIGNAL = 0.79; EXPRESSED IN BONE MARROW, SIGNAL = 0.85; EXPRESSED IN LUNG, SIGNAL = 1.1; EXPRESSED IN BRAIN, SIGNAL = 1.1; NT HIT: AL163208.2, EVALUE 3.00e-10; EST_HUMAN HIT: AW885874.1, EVALUE 2.00e-11
gaaagacagcattcaaggaaccaccttgtacgcagacactgaaacctcgcgagacaacaaaactgctgacaccttgatcttggacttcccagcctccagaactat

SEQ ID NO: 29656 - DNA, 101 bp, Homo sapiens
  MAP TO AC022562.3; EXPRESSED IN PLACENTA, SIGNAL =   1; EXPRESSED IN FETAL LIVER, SIGNAL = 0.67; EXPRESSED IN LUNG, SIGNAL =   1; EXPRESSED IN ADULT LIVER, SIGNAL = 0.77; EXPRESSED IN BRAIN, SIGNAL =   1; EXPRESSED IN BONE MARROW, SIGNAL = 0.74; EST_HUMAN HIT: BE700244.1, EVALUE 6.00e-46; NT HIT: AB002297.1, EVALUE 3.00e-50
ttatctagaatcttcttccttttggctgaggtgataatttctagctgaaggcttggctgatttatgaatagaactgccaggctaaagtaagaattccacac

SEQ ID NO: 29657 - DNA, 90 bp, Homo sapiens
  MAP TO AC010474.2; EXPRESSED IN ADULT LIVER, SIGNAL = 0.91; EXPRESSED IN BONE MARROW, SIGNAL = 0.8; EXPRESSED IN PLACENTA, SIGNAL = 0.83; EXPRESSED IN FETAL LIVER, SIGNAL = 0.78; EXPRESSED IN BRAIN, SIGNAL = 0.79; EST_HUMAN HIT: N78097.1, EVALUE 2.00e-08; NT HIT: U66060.1, EVALUE 3.00e-06
cccagtctctgcacctgtccgtctgcatgcgccccctaggggtttgagctgcagggtgaccaaacagaggagccacacctgttgcacgtc

SEQ ID NO: 29658 - DNA, 105 bp, Homo sapiens
  MAP TO AC022995.2; EXPRESSED IN PLACENTA, SIGNAL = 0.58; EXPRESSED IN ADULT LIVER, SIGNAL = 0.55; EXPRESSED IN BRAIN, SIGNAL = 0.46; EST_HUMAN HIT: AV732800.1, EVALUE 5.20e+00; NT HIT: AJ133723.1, EVALUE 3.50e+00
ctcttttgctatgcacttgtaatcattgaatgtcattctacaacatcgatacttctttaaggagactttgtgatgagaataggttttggtgcataaggataaatc

SEQ ID NO: 29659 - DNA, 516 bp, Homo sapiens
  MAP TO AC008269.3; EXPRESSED IN ADULT LIVER, SIGNAL = 1.1; EXPRESSED IN LUNG, SIGNAL =   1; EXPRESSED IN PLACENTA, SIGNAL = 1.1; EXPRESSED IN FETAL LIVER, SIGNAL = 1.1; EXPRESSED IN BRAIN, SIGNAL =   1; EXPRESSED IN BONE MARROW, SIGNAL =   1; SWISSPROT HIT: Q04820, EVALUE 2.00e-10; EST_HUMAN HIT: AI221878.1, EVALUE 1.00e-115
ggctttgcatttttatcagtgcctctgctcctgcctgctacaacctaattcccatattgacgagtggcgaagtgtttgggatgcatacagaaattagcataactctatttgacaacaagcaggcggaagaacatctcaaaagccttgtggtggagacccaagacctggcatctcccgtcctgcgcagtgtctccatctgcacgaaggtggaggaggccttccgccaggcccacgtcattgtggtgctggatgacagcaccaacaaggaggtgttcactctggaggactgcctccgaagcagggtgcctctctgcaggctctatgggtacctgatagagaaaaatgctcatgagtctgtcagagtcatcgtgggagggagaacctttgtaaacctgaagacagttttactcatgagatatgccccacgcattgcacacaacattattgctgtggcgctgggggtggaaggtgaagcgaaagccatactggccagaaaactgaagacagctccttcat

SEQ ID NO: 29660 - DNA, 207 bp, Homo sapiens
  MAP TO AL109809.18; EXPRESSED IN ADULT LIVER, SIGNAL = 0.53; EXPRESSED IN BONE MARROW, SIGNAL = 0.57; EXPRESSED IN BRAIN, SIGNAL = 0.77; NT HIT: X90000.1, EVALUE 4.90e-01; EST_HUMAN HIT: AI434865.1, EVALUE 7.30e-01; SWISSPROT HIT: Q00163, EVALUE 9.80e-01
aggttactgtgacctggcttaaaaacaaacacgagctcccaaacccccagaccagcgtccagtacagtggacacacctacaatgtgaccagcagtgtgcttgtcccgctgatggatgatgatgtgttctcccacgtcgtttgccatgtggagcacaagttgacgtggtttttccagaaaaccactggcctggaccagtacctccagg

SEQ ID NO: 29661 - DNA, 128 bp, Homo sapiens
  MAP TO AC008773.3; EXPRESSED IN LUNG, SIGNAL = 1.1; EXPRESSED IN PLACENTA, SIGNAL = 0.95; EXPRESSED IN FETAL LIVER, SIGNAL = 0.92; EXPRESSED IN BRAIN, SIGNAL = 0.97; EXPRESSED IN ADULT LIVER, SIGNAL = 1.3; EXPRESSED IN BONE MARROW, SIGNAL = 0.97; SWISSPROT HIT: O23066, EVALUE 5.40e+00; NT HIT: AF155659.1, EVALUE 3.00e-66; EST_HUMAN HIT: AA315504.1, EVALUE 4.00e-66
ctacaaatagggatattgcaccacagagcggagaaatcaccaactgtgagacttcatctactgaaagtttctcggcagtaaagtttataacatctttagatttctcttcaacttcatccatatctttc

SEQ ID NO: 29662 - DNA, 106 bp, Homo sapiens
  MAP TO AC021049.12; EXPRESSED IN BRAIN, SIGNAL = 0.53; NT HIT: X54612.1, EVALUE 2.30e-01; EST_HUMAN HIT: AU149356.1, EVALUE 1.00e-28; SWISSPROT HIT: P70453, EVALUE 9.40e+00
aaatgtttctgttccagttgtagaccttgatgattgtgcagtatgaaatcgtattgtaattttcttgcatttagatgtcaacctcagaaacaggaacaatcgtctt

SEQ ID NO: 29663 - DNA, 156 bp, Homo sapiens
  MAP TO AC021401.4; EXPRESSED IN PLACENTA, SIGNAL = 0.65; EXPRESSED IN FETAL LIVER, SIGNAL = 0.82; EXPRESSED IN BRAIN, SIGNAL = 0.64; EXPRESSED IN BONE MARROW, SIGNAL = 0.66; SWISSPROT HIT: Q10948, EVALUE 2.30e+00; EST_HUMAN HIT: AU121237.1, EVALUE 1.30e-01; NT HIT: AF065630.1, EVALUE 1.40e+00
ctagatgggtacgccgagcaagttggaggagttggagatgtaggtataaagtttggagtcatcaaggtgaagatggtatttaaaatcatgagactgggtgataccacacagggagtagtgaagaaagaagaaaaagtctgatgagccattggagca

SEQ ID NO: 29664 - DNA, 153 bp, Homo sapiens
  MAP TO AC009298.2; EXPRESSED IN PLACENTA, SIGNAL = 0.96; EXPRESSED IN ADULT LIVER, SIGNAL = 0.81; EXPRESSED IN FETAL LIVER, SIGNAL = 1.1; EXPRESSED IN LUNG, SIGNAL = 0.93; EXPRESSED IN BRAIN, SIGNAL = 1.1; EXPRESSED IN BONE MARROW, SIGNAL = 0.92; SWISSPROT HIT: Q09327, EVALUE 6.80e+00; EST_HUMAN HIT: BE674257.1, EVALUE 2.00e+00; NT HIT: D63441.1, EVALUE 1.40e+00
cacttccttcacctctttaagcttgtgctttgaacattcacaccatccagagttgcgagcaggtctccaaatctggttaggacagcaaggaggatggataaaaattccatcatttgggtcagcaccaaccctgggtaaaggtccttgatccat

SEQ ID NO: 29665 - DNA, 210 bp, Homo sapiens
  MAP TO AL136968.3; EXPRESSED IN PLACENTA, SIGNAL = 0.5; EXPRESSED IN ADULT LIVER, SIGNAL = 0.76; EXPRESSED IN FETAL LIVER, SIGNAL = 0.68; EXPRESSED IN BRAIN, SIGNAL = 0.82; EXPRESSED IN BONE MARROW, SIGNAL = 0.7; SWISSPROT HIT: P08425, EVALUE 1.50e-01; EST_HUMAN HIT: AI524687.1, EVALUE 1.00e-115; NT HIT: gi5729819, EVALUE 1.00e-101
ctgtgttctcttcctctctgtaggacgcacaagaccagccactgctaccgcatcacgtaccgccacatggaacggactctgtcccagagagaggtcaggcacatccaccaggccttgcaggaggctgcagtccagctgttgggtgtggagggcaggttctgatgtcaccacttcactcaggctgcagccctcttggggctccaggatttg

SEQ ID NO: 29666 - DNA, 213 bp, Homo sapiens
  MAP TO AL158150.2; EXPRESSED IN PLACENTA, SIGNAL = 0.93; EXPRESSED IN ADULT LIVER, SIGNAL = 0.78; EXPRESSED IN FETAL LIVER, SIGNAL = 0.64; EXPRESSED IN BRAIN, SIGNAL = 0.75; EXPRESSED IN BONE MARROW, SIGNAL = 0.64; SWISSPROT HIT: P34083, EVALUE 8.00e-06; NT HIT: AE000897.1, EVALUE 1.30e-01; EST_HUMAN HIT: AI936002.1, EVALUE 3.00e+00
gctgccccatcaaaggtcaccctgtccctaatatcacctggtttcatggtggtcagccaattgtcactgccacaggactgacgcatcacatcttggcagctggacagatccttcaagttgcaaaccttagcggtgggtctcaaggggaattcagctgccttgctcagaatgaggcaggggtgctcatgcagaaggcatctttagtgatccaag

SEQ ID NO: 29667 - DNA, 215 bp, Homo sapiens
  MAP TO AL136124.3; EXPRESSED IN BONE MARROW, SIGNAL = 0.54; EXPRESSED IN PLACENTA, SIGNAL = 0.59; EXPRESSED IN ADULT LIVER, SIGNAL = 0.6; EXPRESSED IN FETAL LIVER, SIGNAL = 0.52; EXPRESSED IN BRAIN, SIGNAL = 0.65; NT HIT: gi11427692, EVALUE 1.00e-118; SWISSPROT HIT: P47972, EVALUE 1.80e-01; EST_HUMAN HIT: AW296351.1, EVALUE 1.00e-118
ctgctgcactccaaggggtgagcataactgctctgctcctctgcgtggggcttctgcagcgtctgattgagctgaagagaggaaaggaagctttccaggggcccagcatggagagagtccagctgcagctcaggcttctggtctatggcctcacacaccatggccaaggcagccatgctcactactctctgaatctgacttccaactgttggctc

SEQ ID NO: 29668 - DNA, 85 bp, Homo sapiens
  MAP TO AC024972.2; EXPRESSED IN PLACENTA, SIGNAL = 0.62; EXPRESSED IN FETAL LIVER, SIGNAL = 0.48; EXPRESSED IN BRAIN, SIGNAL = 0.68; NT HIT: AL163202.2, EVALUE 6.00e-26; EST_HUMAN HIT: AW803232.1, EVALUE 1.00e-18
agagttgaacattccttttcatagagcagttttgaaacacaccgtttgtagaatctgcaactggatatttggagctctttgaggc

SEQ ID NO: 29669 - DNA, 77 bp, Homo sapiens
  MAP TO AC007321.2; EXPRESSED IN ADULT LIVER, SIGNAL = 0.9; EXPRESSED IN BRAIN, SIGNAL = 0.98; EXPRESSED IN BONE MARROW, SIGNAL = 0.89; EXPRESSED IN LUNG, SIGNAL = 0.97; EXPRESSED IN PLACENTA, SIGNAL = 0.92; EXPRESSED IN FETAL LIVER, SIGNAL = 0.85; EST_HUMAN HIT: AI500668.1, EVALUE 2.30e-01; NT HIT: AF217796.1, EVALUE 6.10e-01; SWISSPROT HIT: Q62918, EVALUE 3.00e-05
tcaacatggtggcacatgcttggctgggaatctctgcacttgtccttatggttttgtaggaccaaggtgtgaaacaa

SEQ ID NO: 29670 - DNA, 137 bp, Homo sapiens
  MAP TO AC023602.5; EXPRESSED IN LUNG, SIGNAL = 1.3; EXPRESSED IN PLACENTA, SIGNAL = 0.97; EXPRESSED IN ADULT LIVER, SIGNAL = 1.2; EXPRESSED IN BRAIN, SIGNAL = 1.4; EXPRESSED IN FETAL LIVER, SIGNAL = 1.6; EXPRESSED IN BONE MARROW, SIGNAL = 1.5; EST_HUMAN HIT: BE763255.1, EVALUE 6.00e-16; NT HIT: gi11433142, EVALUE 1.00e-71; SWISSPROT HIT: Q13740, EVALUE 9.00e-21
agatggtccataatatgtcaccgagcaggtgaatggcatttgtatgtcagccttggttgtcttgtactccagggtggaagtcatggtatagagctgagtcactgggtccatttcctttttaaaaattatgaccaccg

SEQ ID NO: 29671 - DNA, 129 bp, Homo sapiens
  MAP TO AL161668.1; EXPRESSED IN PLACENTA, SIGNAL = 0.76; EXPRESSED IN FETAL LIVER, SIGNAL = 0.72; EXPRESSED IN BONE MARROW, SIGNAL = 0.74; EXPRESSED IN BRAIN, SIGNAL = 0.48; EST_HUMAN HIT: AW087631.1, EVALUE 1.00e-29; SWISSPROT HIT: O34851, EVALUE 7.00e+00; NT HIT: AF177227.1, EVALUE 6.00e-30
ttaagcaacttgccctagtttctgtattggggattttaacatcattggttggatcttttgttttgtcatcttgctatttttcagaatcttgaaatagcacgtttccatgatgtctgttctcttcagtgc

SEQ ID NO: 29672 - DNA, 216 bp, Homo sapiens
  MAP TO AC007981.43; EXPRESSED IN LUNG, SIGNAL = 0.94; EXPRESSED IN PLACENTA, SIGNAL = 1.2; EXPRESSED IN ADULT LIVER, SIGNAL = 0.97; EXPRESSED IN FETAL LIVER, SIGNAL = 0.71; EXPRESSED IN BRAIN, SIGNAL = 0.7; EXPRESSED IN BONE MARROW, SIGNAL = 0.87; NT HIT: gi11421595, EVALUE 1.00e-109; SWISSPROT HIT: Q62786, EVALUE 2.00e-07; EST_HUMAN HIT: BE171984.1, EVALUE 1.00e-114
ctgccttcgtcgccagagcgagaggtgcagatcgtcagcaccatggactcttccttcccctatgccatctacacccagcgcgtccgcggagggaagatcttcatagaaagagtccaggggaacccaaccctattgcacatcacagatcttcaggcccgggatgccggggaatatgaatgccacacacccagcaccgagaagcaatactttgggagt

SEQ ID NO: 29673 - DNA, 143 bp, Homo sapiens
  MAP TO AC015529.3; EXPRESSED IN BONE MARROW, SIGNAL = 4.2; EXPRESSED IN FETAL LIVER, SIGNAL = 3.8; EXPRESSED IN BRAIN, SIGNAL = 2.3; NT HIT: gi11436430, EVALUE 3.00e-75; EST_HUMAN HIT: AW793306.1, EVALUE 5.00e-75; SWISSPROT HIT: P37840, EVALUE 1.00e-09
cttgcccaactggtcctttttgacaaagccagtggctgctgcaatgctccctgctccctccactgtcttctgggctactgctgtcacacccgtcaccactgctcctccaacatttgtcacttgctctttggtcttctcagcca

SEQ ID NO: 29674 - DNA, 419 bp, Homo sapiens
  MAP TO AC008103.27; EXPRESSED IN PLACENTA, SIGNAL = 0.57; EXPRESSED IN ADULT LIVER, SIGNAL = 0.64; EXPRESSED IN BRAIN, SIGNAL = 0.66; EXPRESSED IN FETAL LIVER, SIGNAL = 0.6; EXPRESSED IN BONE MARROW, SIGNAL = 0.56; EST_HUMAN HIT: AA218808.1, EVALUE 1.00e-90; SWISSPROT HIT: P10264, EVALUE 3.00e-38; NT HIT: Y08032.1, EVALUE 0.00e+00
gcctatcaatactggcctccggctgaacttcagtatcggccacccccagaaagtcagtatggatatccaggaatgcccccagcaccacagggcagggcgccataccctcagccgcccactaggagacttaatcctacggcaccacctagtagacagggtagtgaattacatgaaattattgataaatcaagaaaggaaggagatactgaggcatggcaattcccagtaacgttagaaccgatgccacctggagaaggagcccaagagggagagcctcccacagttgaggccagatacaagtctttttcgataaaaatgctaaaagatatgaaagagggagtaaaacagtatggacccaactccccttatatgaggacattattagattccattgcttatggacatagactcattcctta

SEQ ID NO: 29675 - DNA, 235 bp, Homo sapiens
  MAP TO AC008521.5; EXPRESSED IN ADULT LIVER, SIGNAL = 0.9; EXPRESSED IN BRAIN, SIGNAL = 0.71; EXPRESSED IN PLACENTA, SIGNAL = 0.77; EXPRESSED IN FETAL LIVER, SIGNAL = 0.66; EXPRESSED IN BONE MARROW, SIGNAL = 0.73; SWISSPROT HIT: P12577, EVALUE 1.60e+00; EST_HUMAN HIT: BE563336.1, EVALUE 3.00e-19; NT HIT: gi11425837, EVALUE 1.00e-119
accgtcaacaaagatgtggacgcacaggctgaaggagaagggagccgcccatccatggacttattcagggccatctttgccagttcctcagatgaaaagtcctcatcctccgaggatgagcaaggtgacagtgaagatgatcaggcaggctctggggaggccaacttccaaagctcccaagacactgacttgggggaaacatcatctgtggctcacggtatgtcagtatttcaga

SEQ ID NO: 29676 - DNA, 141 bp, Homo sapiens
  MAP TO AC022268.3; EXPRESSED IN PLACENTA, SIGNAL = 0.47; EXPRESSED IN ADULT LIVER, SIGNAL = 0.53; EXPRESSED IN FETAL LIVER, SIGNAL = 0.46; EXPRESSED IN BRAIN, SIGNAL = 0.49; SWISSPROT HIT: P25123, EVALUE 3.10e+00; EST_HUMAN HIT: Z21211.1, EVALUE 3.00e-02; NT HIT: AB024996.1, EVALUE 8.00e-02
gctgggaaacatgtcacagattgacatgagtgagaaagcaagcagtgacctggacatgtcttctgaggtcgatgtgggtggatatatgagtgatggtgatatccttgggaaaagtctcaggactgatgacatcaacagtgg

SEQ ID NO: 29677 - DNA, 229 bp, Homo sapiens
  MAP TO AC018501.5; EXPRESSED IN PLACENTA, SIGNAL = 0.83; EXPRESSED IN FETAL LIVER, SIGNAL = 0.85; EXPRESSED IN BONE MARROW, SIGNAL = 0.64; EXPRESSED IN ADULT LIVER, SIGNAL = 0.86; EXPRESSED IN BRAIN, SIGNAL = 0.94; NT HIT: gi11431994, EVALUE 2.00e-83; SWISSPROT HIT: P20943, EVALUE 1.00e-23; EST_HUMAN HIT: BE973648.1, EVALUE 1.00e-101
  unsure 34
cacagataaagcacgtggtcttcaagatctcttncttcttctgcttctcactcctcaggtcagcataagtggcaatgataaccccaaaaatcaggttaagaacaatgatgatgaccatgaagaagaacaagaggtcataaataactctagcagcaaacaggggttcctggaaaagtatgtaggtgtctggatcagtctgggtcccttgcgaccctttggtctgcggagc

SEQ ID NO: 29678 - DNA, 319 bp, Homo sapiens
  MAP TO AL133544.5; EXPRESSED IN PLACENTA, SIGNAL = 0.77; EXPRESSED IN FETAL LIVER, SIGNAL = 0.66; EXPRESSED IN ADULT LIVER, SIGNAL = 0.76; EXPRESSED IN BRAIN, SIGNAL = 0.86; EXPRESSED IN BONE MARROW, SIGNAL = 0.7; SWISSPROT HIT: Q10239, EVALUE 1.40e-01; NT HIT: M81753.1, EVALUE 3.10e+00; EST_HUMAN HIT: AI656890.1, EVALUE 0.00e+00
ttttctgatgatcaacgcctggctgtggctttgtatgtgttttctggtgtgtagaatcaaccttattctcaggagtttccggtttcaggtcttgtgtagtcaactggggcaccgtctttatcacctttttatttggctttccttgtttgtcttcctctacactagcatcaccattaggattttcagttgctaactgtgtgttcctcaatttgtttttagtgactctcgtgctcttcttcaggttgttagtgttagcagcacttacatcatcacttgtagtttctttaatatggggaagattgcttctaatagtgtcggg

SEQ ID NO: 29679 - DNA, 129 bp, Homo sapiens
  MAP TO AC018731.3; EXPRESSED IN BONE MARROW, SIGNAL = 0.8; EXPRESSED IN PLACENTA, SIGNAL =   1; EXPRESSED IN ADULT LIVER, SIGNAL = 1.1; EXPRESSED IN FETAL LIVER, SIGNAL = 0.84; EXPRESSED IN BRAIN, SIGNAL = 0.79; NT HIT: AF020503.1, EVALUE 9.00e-20; EST_HUMAN HIT: AI365435.1, EVALUE 1.00e-22
agtgtcctagttataaaaaaaaattaactgtaaacagcctcagttccatgcgtgttattgacccgaagaccttccagtgggacaagatgtgtcagtggaagacagtgatattgatgatcctgaccctgg

SEQ ID NO: 29680 - DNA, 143 bp, Homo sapiens
  MAP TO AC022313.2; EXPRESSED IN BONE MARROW, SIGNAL = 0.75; EXPRESSED IN PLACENTA, SIGNAL = 0.75; EXPRESSED IN ADULT LIVER, SIGNAL = 0.92; EXPRESSED IN FETAL LIVER, SIGNAL = 0.85; EXPRESSED IN BRAIN, SIGNAL = 0.63; EXPRESSED IN LUNG, SIGNAL = 0.84; SWISSPROT HIT: P44325, EVALUE 1.80e+00; NT HIT: D86417.1, EVALUE 5.00e+00; EST_HUMAN HIT: BF672032.1, EVALUE 1.90e+00
aattatagtgatatgtggcattacaggaattggcaacatgacagaaagtcgtaagatggattatgaggtaaaacatctgatggaaggaaagagtgtaatggtgggttatatgaatgtagtaaatggtactccagaagagatat

SEQ ID NO: 29681 - DNA, 172 bp, Homo sapiens
  MAP TO AC022204.3; EXPRESSED IN PLACENTA, SIGNAL = 0.87; EXPRESSED IN BONE MARROW, SIGNAL = 0.67; EXPRESSED IN ADULT LIVER, SIGNAL = 0.65; EXPRESSED IN FETAL LIVER, SIGNAL = 0.64; EXPRESSED IN BRAIN, SIGNAL = 0.77; NT HIT: AL163303.2, EVALUE 2.50e-02; EST_HUMAN HIT: BF247408.1, EVALUE 1.50e-01; SWISSPROT HIT: P98063, EVALUE 1.00e-08
aaagccctggttttccatatggatatccaaatggtgcaaactgcacatgggtaataatagcagaagaacgaaatagaatacaaattgtttttcagtcatttgctctagaagaagaatacgactacttatcattatatgatggacatcctcatcctacaaactttaggacaag

SEQ ID NO: 29682 - DNA, 101 bp, Homo sapiens
  MAP TO AL133283.9; EXPRESSED IN PLACENTA, SIGNAL = 0.89; EXPRESSED IN ADULT LIVER, SIGNAL = 0.77; EXPRESSED IN FETAL LIVER, SIGNAL = 0.81; EXPRESSED IN BRAIN, SIGNAL = 0.76; EXPRESSED IN BONE MARROW, SIGNAL = 0.58; EXPRESSED IN LUNG, SIGNAL = 0.83; NT HIT: AL163218.2, EVALUE 1.40e-02; EST_HUMAN HIT: Z44279.1, EVALUE 3.20e-01
agattaaaggcaataatgtctgtgaagatcttactatgtgtaaggcacgtagtaacatgttagctatttgtttagctgttattattaactttaagcaggaa

SEQ ID NO: 29683 - DNA, 182 bp, Homo sapiens
  MAP TO AC019083.5; EXPRESSED IN PLACENTA, SIGNAL = 0.48; EXPRESSED IN BRAIN, SIGNAL = 0.45; SWISSPROT HIT: Q10188, EVALUE 1.30e+00; NT HIT: M26434.1, EVALUE 1.70e+00; EST_HUMAN HIT: AW795395.1, EVALUE 6.30e-01
atgaacgggcaagtgtgccaccacacagtgcttgacatctggatgatcttgcatcatctgagctgccttttctttctttctgacacattgctttacgtgcctgatcaccattcttttgttgacattgctgtttggatcagccagctgatgacacagccagatagaaactggctgaggcaggg

SEQ ID NO: 29684 - DNA, 131 bp, Homo sapiens
  MAP TO AC021003.4; EXPRESSED IN BRAIN, SIGNAL = 0.54; SWISSPROT HIT: P43439, EVALUE 7.00e+00; NT HIT: AJ131024.1, EVALUE 2.00e-05; EST_HUMAN HIT: W90074.1, EVALUE 7.00e-03
gttctggggattacggcatggacgtctttggagaccattattctgccaactgcatctgtggaagaaagaacaagaaaaggaaggatcctactcagaacctcacagggagcgcggccctgctgaaaccttga

SEQ ID NO: 29685 - DNA, 453 bp, Homo sapiens
  MAP TO AC013698.3; EXPRESSED IN BONE MARROW, SIGNAL = 0.97; EXPRESSED IN ADULT LIVER, SIGNAL = 0.88; EXPRESSED IN BRAIN, SIGNAL = 2.5; EXPRESSED IN LUNG, SIGNAL = 1.2; EXPRESSED IN PLACENTA, SIGNAL = 0.63; EXPRESSED IN FETAL LIVER, SIGNAL = 1.8; EST_HUMAN HIT: BE617655.1, EVALUE 0.00e+00; SWISSPROT HIT: P49441, EVALUE 2.00e-85; NT HIT: gi11428851, EVALUE 0.00e+00
cgatccaccccagcagcaccctcattttccacgtggtacaccaactgtggcaaatcaagccctgtttctggatttctttctaagcattctttcaagtctactattcccccacccatggccctcagtatggcatgagcagcacaagagtcccatttgaatgtggtatcttctgaaaagatgtaaatgtcaacgaggccttggacaacacataggctcttataaccagccccagctgccccaaatatgcgatctccacacacacgtgacaatgcagctttgatagtctccttttcacttgtactaattacggctgaaaaactgggggagaatgctgcctcagagccggtgtttccagtgtgtgtttcactgccgtttcttctagagatggtgagctgtagtgaatgcatgttggtccccatgtaagaaaggccccaatagcactgtcctttccac

SEQ ID NO: 29686 - DNA, 171 bp, Homo sapiens
  MAP TO AC021037.4; EXPRESSED IN PLACENTA, SIGNAL = 0.7; EXPRESSED IN FETAL LIVER, SIGNAL = 0.53; EXPRESSED IN BONE MARROW, SIGNAL = 0.55; EXPRESSED IN BRAIN, SIGNAL = 0.5; NT HIT: gi6754621, EVALUE 6.20e+00; EST_HUMAN HIT: BE539797.1, EVALUE 9.20e+00
ctctaccactgccgctgttccttctccccctcctcctctgtctcctcctcctccgcttcttcttcctcctcctcctccgcttcttcctcctcctcctcctcctcttcctccacctccttctcctcttctgtcttctcctctttccccactgtcttcagccagatcttgggt

SEQ ID NO: 29687 - DNA, 138 bp, Homo sapiens
  MAP TO AC013332.4; EXPRESSED IN PLACENTA, SIGNAL = 0.48; EXPRESSED IN BRAIN, SIGNAL = 0.47; EXPRESSED IN BONE MARROW, SIGNAL = 0.46; EST_HUMAN HIT: AV727199.1, EVALUE 2.00e-03; SWISSPROT HIT: Q03254, EVALUE 4.00e+00; NT HIT: AF111167.2, EVALUE 8.00e-08
aacatgctccaggctcatcttgtgcattcactggccagccctaaaatcagctatttctccaaggaccctggttccttttattggaggacggtgctagaaatcaagaactgggtgctggatgtggttgttgttctgatg

SEQ ID NO: 29688 - DNA, 206 bp, Homo sapiens
  MAP TO AC018530.4; EXPRESSED IN ADULT LIVER, SIGNAL = 0.64; EXPRESSED IN BRAIN, SIGNAL = 0.62; EXPRESSED IN PLACENTA, SIGNAL = 0.67; EXPRESSED IN FETAL LIVER, SIGNAL = 0.52; EXPRESSED IN BONE MARROW, SIGNAL = 0.63; SWISSPROT HIT: O73770, EVALUE 2.90e+00; NT HIT: AF248269.1, EVALUE 1.90e+00
ttccttctctctagtggtgtggtagctcatcctagcaagacagtcagttggcaattgttttctgaactcctgcagggttctcagcagcccattaagtgatggatggctagaaagctgatgactgagaatttgaggaggtgtgtctacagttagtctagtcaccattttattgaagctggcagaataattattgcgtttcttgaact

SEQ ID NO: 29689 - DNA, 235 bp, Homo sapiens
  MAP TO AC026206.1; EXPRESSED IN BRAIN, SIGNAL = 0.51; EST_HUMAN HIT: AA902395.1, EVALUE 8.40e-01; NT HIT: gi11432889, EVALUE 1.00e-130; SWISSPROT HIT: P28685, EVALUE 3.00e-15
tcaattccagaagaactgcagaatggggagggatttggatatatcatcatgttccggccagtgggctcgacaacctggtccaaggagaaagtgtcatctgtggaatcatcaaggtttgtctacagaaatgaaagcatcatcccactgtctccctttgaagtcaaagtgggtgtgtataataatgaaggagaaggatccctgagtactgtgaccattgtctactctggggaagatg

SEQ ID NO: 29690 - DNA, 286 bp, Homo sapiens
  MAP TO AC007981.43; EXPRESSED IN ADULT LIVER, SIGNAL = 0.77; EXPRESSED IN BONE MARROW, SIGNAL = 0.82; EXPRESSED IN LUNG, SIGNAL = 0.87; EXPRESSED IN PLACENTA, SIGNAL = 0.74; EXPRESSED IN FETAL LIVER, SIGNAL =   1; EXPRESSED IN BRAIN, SIGNAL = 0.92; SWISSPROT HIT: P02565, EVALUE 3.80e+00; NT HIT: gi11427757, EVALUE 1.00e-104; EST_HUMAN HIT: BE531263.1, EVALUE 8.00e-94
aagggcggtgggggttgctggctttgtgctgccctccttctcctgcgtggtcgtgaccttggacctgaggcttctgggctgcacgtttgtctttgctaaccgggggaggtctgcagaaggcgaactccttctggacgcccatcaggccctgccggtgcaccacctttgtagccggctcttggtgggatttcgagagtgacttcgccgaattttcatgtgtgtctggtttcttctccactgacccatcacatttttgggtctcatgctgtcttttctcattcagaaa

SEQ ID NO: 29691 - DNA, 187 bp, Homo sapiens
  MAP TO AC021366.3; EXPRESSED IN BRAIN, SIGNAL = 0.53; EXPRESSED IN FETAL LIVER, SIGNAL = 0.53; EXPRESSED IN BONE MARROW, SIGNAL = 0.52; NT HIT: AB032969.1, EVALUE 3.00e-30; SWISSPROT HIT: P78036, EVALUE 1.70e+00; EST_HUMAN HIT: W31367.1, EVALUE 4.00e-30
tggcacaatctccaaagttatcagaaacctgcattcaagaatccttttcatgaaatcctccaaagaagcaagccctggaccatagctgattacaagtcactttttgagaaggatcaaagcaaaacaaggattgtagatgacaaaaggcttaagtcagccatagataaagacacagttgaccaggacg

SEQ ID NO: 29692 - DNA, 114 bp, Homo sapiens
  MAP TO AL162311.1; EXPRESSED IN ADULT LIVER, SIGNAL = 0.58; EXPRESSED IN BRAIN, SIGNAL = 0.45; SWISSPROT HIT: P38343, EVALUE 1.10e+00; NT HIT: AL163281.2, EVALUE 4.00e-03; EST_HUMAN HIT: AA056128.1, EVALUE 6.00e-03
atgctatgtatcaaaatcaatgataaaaagaaaatcttaaaggtagccagagaagaaaaaaacatgtatgaatttcctatcactgccatagagattatctcaaacatagaagct

SEQ ID NO: 29693 - DNA, 119 bp, Homo sapiens
  MAP TO AC009493.3; EXPRESSED IN BRAIN, SIGNAL = 0.45; EST_HUMAN HIT: AV697587.1, EVALUE 3.90e-01; SWISSPROT HIT: P19736, EVALUE 7.10e+00; NT HIT: AB015355.1, EVALUE 2.60e-01
tctcaactgcggcaatgaaaataaaacttgcaaccgtgtggcgcaggctttagaatctgctacaatagatgccatttctgtcacttctgtaggtaccactgcagtaaatgaaatagtaa

SEQ ID NO: 29694 - DNA, 130 bp, Homo sapiens
  MAP TO AC011155.4; EXPRESSED IN PLACENTA, SIGNAL = 0.6; EXPRESSED IN FETAL LIVER, SIGNAL = 2.1; EXPRESSED IN BRAIN, SIGNAL = 0.44; NT HIT: gi6978754, EVALUE 5.00e-12; EST_HUMAN HIT: AI817088.1, EVALUE 3.00e-05
tggacaaggaaaaaggcttcgaaggcagcagaggcgcaggggaggtggagaaagaggtggaggaagaggacgaggaggaggaggaagccgaaggggctcggcgcgtgtgtgtgcatgtgtgcatgcgtgt

SEQ ID NO: 29695 - DNA, 226 bp, Homo sapiens
  MAP TO AL121884.5; EXPRESSED IN ADULT LIVER, SIGNAL = 0.83; EXPRESSED IN BONE MARROW, SIGNAL =   2; EXPRESSED IN PLACENTA, SIGNAL = 0.78; EXPRESSED IN FETAL LIVER, SIGNAL =   2; EXPRESSED IN LUNG, SIGNAL =   1; EXPRESSED IN BRAIN, SIGNAL = 1.1; SWISSPROT HIT: Q04652, EVALUE 8.00e-09; NT HIT: gi11420222, EVALUE 1.00e-117; EST_HUMAN HIT: AU130089.1, EVALUE 1.00e-116
gaacacttcattgaggtaataaaaaaccaagaattcctcctgcttccagctaatgaaatttcaaaacttctgtgcagtgatgacattaatgtgcctgatgaagagaccatttttcatgctctaatgcagtgggtggggcatgatgtgcagaataggcaaggagaactggggatgctgctttcttacatcagactgccattactcccaccacaggtatggaaaatta

SEQ ID NO: 29696 - DNA, 127 bp, Homo sapiens
  MAP TO AL078591.18; EXPRESSED IN LUNG, SIGNAL = 1.1; EXPRESSED IN PLACENTA, SIGNAL = 1.2; EXPRESSED IN FETAL LIVER, SIGNAL = 1.1; EXPRESSED IN BRAIN, SIGNAL =   1; EXPRESSED IN ADULT LIVER, SIGNAL = 1.1; EXPRESSED IN BONE MARROW, SIGNAL =   1; NT HIT: AB037832.1, EVALUE 1.00e-65; EST_HUMAN HIT: BE548612.1, EVALUE 4.20e-01; SWISSPROT HIT: P41684, EVALUE 5.40e+00
ctttcctcgccctgtgaagacaacttggttaaatagaaatgcaccagcacaaaacaaagattccgtgattcctactcttgaaagtgtggtctttggtattaactacacaaaacagttatcaccagat

SEQ ID NO: 29697 - DNA, 152 bp, Homo sapiens
  MAP TO AC008270.3; EXPRESSED IN BONE MARROW, SIGNAL = 0.45; EXPRESSED IN PLACENTA, SIGNAL = 0.45; EXPRESSED IN BRAIN, SIGNAL = 0.52; SWISSPROT HIT: P43610, EVALUE 6.80e+00; EST_HUMAN HIT: AW247836.1, EVALUE 1.30e-01
cgtgctattgtttaggtccaccacaaattacttatataagcatgctaatggtaaggggcggtgcaaacctctcattcccactacacaggttattcaagcatgtcctccagtctcttttgccacctctgatctccaaaggacaaaaaacagtg

SEQ ID NO: 29698 - DNA, 117 bp, Homo sapiens
  MAP TO AC019126.3; EXPRESSED IN ADULT LIVER, SIGNAL = 0.76; EXPRESSED IN BRAIN, SIGNAL = 0.59; EXPRESSED IN BONE MARROW, SIGNAL = 0.66; EXPRESSED IN PLACENTA, SIGNAL = 0.62; EXPRESSED IN FETAL LIVER, SIGNAL = 0.68; EST_HUMAN HIT: AI879633.1, EVALUE 1.00e-59; SWISSPROT HIT: P57309, EVALUE 9.30e+00; NT HIT: gi5453997, EVALUE 8.00e-60
atgcagcattttctgccagttctaaaggatcgttttatccagcttctttctgaccagtctgatcagtctgtcctcatccagaaacagatattcaagatcttctatgctcttgttcag

SEQ ID NO: 29699 - DNA, 162 bp, Homo sapiens
  MAP TO AL158012.2; EXPRESSED IN BRAIN, SIGNAL = 0.44; EXPRESSED IN PLACENTA, SIGNAL = 0.54; EXPRESSED IN FETAL LIVER, SIGNAL = 0.79; EXPRESSED IN BONE MARROW, SIGNAL = 0.43; EST_HUMAN HIT: BF528662.1, EVALUE 2.20e+00; SWISSPROT HIT: Q91690, EVALUE 5.00e-21; NT HIT: AF072567.1, EVALUE 1.50e+00
ggtgtccagatgcgtccgctggtgtttggcgcggtcactggagttactgaaggccttctgacaacccggatgctggcacaaatacggcttctcgcctgtgtggctccgcaagtggatcttgagattttcaagccttgaaaaggccttctcgcaaccttcaaa

SEQ ID NO: 29700 - DNA, 165 bp, Homo sapiens
  MAP TO AC009503.3; EXPRESSED IN PLACENTA, SIGNAL = 0.91; EXPRESSED IN FETAL LIVER, SIGNAL = 0.86; EXPRESSED IN BRAIN, SIGNAL = 0.72; EXPRESSED IN LUNG, SIGNAL = 1.1; EXPRESSED IN ADULT LIVER, SIGNAL = 1.1; EXPRESSED IN BONE MARROW, SIGNAL = 0.75; EST_HUMAN HIT: BF540962.1, EVALUE 5.70e-01
ttagtgttaaagggaaacatcatttctggctttgagtgggtgtcctactttgtttctggtgattcgctgggagataggccaccaagaagcattactttgtcctctcagctagatggtaaagatcagccaggtgtggaaagatccattcatctattcaggaaacag

SEQ ID NO: 29701 - DNA, 276 bp, Homo sapiens
  MAP TO AC013593.3; EXPRESSED IN LUNG, SIGNAL = 0.87; EXPRESSED IN ADULT LIVER, SIGNAL = 0.89; EXPRESSED IN BONE MARROW, SIGNAL = 1.2; EXPRESSED IN PLACENTA, SIGNAL = 0.68; EXPRESSED IN FETAL LIVER, SIGNAL = 1.1; EXPRESSED IN BRAIN, SIGNAL =   1; SWISSPROT HIT: P75310, EVALUE 2.00e+00; NT HIT: AF000573.1, EVALUE 1.70e-01; EST_HUMAN HIT: AW020370.1, EVALUE 1.00e-52
gtaatctccaaggacctcctccctgaccttagcagtgcctgcagttttcataagatcattcagtatatccccatctcctttctttttactcacattcacctcggtgtcatctacttcattttcttcagaaagattgggtatttcaatcaatcccttatgcttcacgtcagattctttaatgatacctttccagcccagtttgatgtttcactcacacaagaaaatcacctttcctttgtggatgctgcaagaagccttaccttccacctgctttag

SEQ ID NO: 29702 - DNA, 161 bp, Homo sapiens
  MAP TO AC013591.3; EXPRESSED IN BRAIN, SIGNAL = 0.7; EXPRESSED IN PLACENTA, SIGNAL = 0.72; EXPRESSED IN FETAL LIVER, SIGNAL = 0.57; EXPRESSED IN BONE MARROW, SIGNAL = 0.63; EXPRESSED IN ADULT LIVER, SIGNAL = 0.83; EST_HUMAN HIT: BF589594.1, EVALUE 1.00e-35; SWISSPROT HIT: Q09879, EVALUE 6.80e+00; NT HIT: AB008373.1, EVALUE 3.70e-01
ctggatcagggggacagcaatcttcgttgtcttgtagtccaagaatcctatggatactgtgttcacaaacacctgccaaagggaacaggcaggaacatccatgaccaacaggaggagggtaagcgggacctcctccaggccaagaagggcagcacgcgtgc

SEQ ID NO: 29703 - DNA, 306 bp, Homo sapiens
  MAP TO AL049870.3; EXPRESSED IN BRAIN, SIGNAL = 0.57; EXPRESSED IN PLACENTA, SIGNAL = 0.51; EXPRESSED IN FETAL LIVER, SIGNAL = 0.68; EXPRESSED IN ADULT LIVER, SIGNAL = 0.54; EXPRESSED IN BONE MARROW, SIGNAL = 0.55; SWISSPROT HIT: Q10103, EVALUE 2.60e-02; EST_HUMAN HIT: H39805.1, EVALUE 0.00e+00; NT HIT: AB007883.1, EVALUE 0.00e+00
tgtatgctagcctcaattttggcagtaagacacagcaaacatttggtagtcaaacagagtgtacttcctcaaatggtcaaaatccaagtccaggagcttacatccttccatcctatcctgtctcatcacctcgaactagtccaaagcatacatctcctcttattatatctccaaagaagtctcaagataattctgttaatttctcaaattcctggcctcttaaaagcttcgaaggactatcaaagccaagtccacagaagaagcttgtcagccaaaaatcgtctgatcctacgggtagaaatcatg

SEQ ID NO: 29704 - DNA, 121 bp, Homo sapiens
  MAP TO AC007744.2; EXPRESSED IN BONE MARROW, SIGNAL = 0.67; EXPRESSED IN ADULT LIVER, SIGNAL = 0.66; EXPRESSED IN BRAIN, SIGNAL = 0.65; EXPRESSED IN PLACENTA, SIGNAL = 0.65; EXPRESSED IN FETAL LIVER, SIGNAL = 0.73; EST_HUMAN HIT: AI147615.1, EVALUE 2.50e-02; SWISSPROT HIT: P45277, EVALUE 7.10e+00; NT HIT: AF248054.1, EVALUE 2.70e-01
gaagattcaacagcagcaggaaataaacaacatggtagaatagcattcctccaacctgtgcccatgacattaccaactgagccacactcgtgtgctcatgctgagagtcaggaaacagttt

SEQ ID NO: 29705 - DNA, 145 bp, Homo sapiens
  MAP TO AC021308.3; EXPRESSED IN LUNG, SIGNAL =   1; EXPRESSED IN PLACENTA, SIGNAL = 0.99; EXPRESSED IN BRAIN, SIGNAL = 0.82; EXPRESSED IN FETAL LIVER, SIGNAL = 0.65; EXPRESSED IN ADULT LIVER, SIGNAL =   1; EXPRESSED IN BONE MARROW, SIGNAL = 0.85; EST_HUMAN HIT: R53668.1, EVALUE 7.60e+00; NT HIT: AL163302.2, EVALUE 1.30e+00; SWISSPROT HIT: P39639, EVALUE 6.90e+00
caattctgccagctctgtggttaagcaaggtgcttgatattgtaatagccatagtcagagtcagcctgacaaaaatgttgactgtcagtgcaggcactgagaatacttttataactgtctccactgcagattcctctgacggcat

SEQ ID NO: 29706 - DNA, 135 bp, Homo sapiens
  MAP TO AC022918.2; EXPRESSED IN ADULT LIVER, SIGNAL = 0.98; EXPRESSED IN BONE MARROW, SIGNAL = 0.67; EXPRESSED IN LUNG, SIGNAL = 0.87; EXPRESSED IN PLACENTA, SIGNAL = 0.97; EXPRESSED IN FETAL LIVER, SIGNAL = 0.72; EXPRESSED IN BRAIN, SIGNAL = 0.71; NT HIT: X92656.1, EVALUE 7.60e-02; EST_HUMAN HIT: AW845674.1, EVALUE 1.80e+00; SWISSPROT HIT: P37020, EVALUE 1.80e+00
gtacaaaaacaccttattcttcaatgctgctgcatccaaattctccttacatgtgttttgcctcagaaaagaagacaactgggtccgatacagtaaaaggtgtgtcagtcataatttggttagaactctcagttt

SEQ ID NO: 29707 - DNA, 133 bp, Homo sapiens
  MAP TO AC013634.3; EXPRESSED IN ADULT LIVER, SIGNAL = 0.93; EXPRESSED IN BONE MARROW, SIGNAL = 0.66; EXPRESSED IN LUNG, SIGNAL = 0.91; EXPRESSED IN PLACENTA, SIGNAL = 0.82; EXPRESSED IN FETAL LIVER, SIGNAL = 0.71; EXPRESSED IN BRAIN, SIGNAL = 0.72; NT HIT: X79460.1, EVALUE 7.50e-02; SWISSPROT HIT: Q01279, EVALUE 7.00e+00
atgatacccagtacagaagggccacctgcttaaatgtgtctgctgtgaaaacctcagccactgaagtaaatgttggtctctctgtgaagttgatgtatctgaaaatcgcagcattgtatggaacggacagcaa

SEQ ID NO: 29708 - DNA, 101 bp, Homo sapiens
  MAP TO AC011272.3; EXPRESSED IN ADULT LIVER, SIGNAL = 1.4; EXPRESSED IN BONE MARROW, SIGNAL = 1.1; EXPRESSED IN LUNG, SIGNAL = 0.96; EXPRESSED IN PLACENTA, SIGNAL = 1.1; EXPRESSED IN FETAL LIVER, SIGNAL = 1.3; EXPRESSED IN BRAIN, SIGNAL = 0.87; SWISSPROT HIT: Q51481, EVALUE 2.40e+00; EST_HUMAN HIT: BF331646.1, EVALUE 5.00e+00
ggaaagaagagggtcattgtgtcacatggaccatttcctccccgattcctctgacctcaccgttgctgtttctgagcacgctattgcagatgactactttg

SEQ ID NO: 29709 - DNA, 176 bp, Homo sapiens
  MAP TO AC016202.4; EXPRESSED IN BRAIN, SIGNAL = 0.45; NT HIT: AF162084.1, EVALUE 1.60e+00; SWISSPROT HIT: P33937, EVALUE 8.80e+00
agatggctttctgcctttggaattgatacgtgatatttgactctatcatggccatgttagaaccaagtggcaacaagatgaataaaggtgacagagtagaagggaaaacatcattccttgctgacatcattaacttgccattaaaccaattctgaaactgagtattggcagagttc

SEQ ID NO: 29710 - DNA, 93 bp, Homo sapiens
  MAP TO AC018578.3; EXPRESSED IN BRAIN, SIGNAL = 0.46; EST_HUMAN HIT: AA069318.1, EVALUE 2.90e-01; SWISSPROT HIT: O51680, EVALUE 3.20e+00; NT HIT: AL163218.2, EVALUE 4.90e-02
atgcacattgtcttggtgctgcttctctgcagaacctgactctatggaatcctggctctggcccttctcctctctgaggcccatgtttgccat

SEQ ID NO: 29711 - DNA, 258 bp, Homo sapiens
  MAP TO AC019284.4; EXPRESSED IN BRAIN, SIGNAL = 0.54; NT HIT: U61844.1, EVALUE 9.70e+00; EST_HUMAN HIT: AW968605.1, EVALUE 9.30e-01; SWISSPROT HIT: P13816, EVALUE 3.00e-04
atgataagctgaacaactcgccttgtttatcctcttccagttcactctcagagcatccatcattctcatctttcacattgtcatgggcatctggtgccttctgtgatgaggtttcactctctttttcagggtctaaattatcttttttatcatccaaaggtgactgcggtattccattcatttgaacatcagcctgtccttcttcattagatttttcaccttgtttctcctcatctacttcaaagtcttcttcatact

SEQ ID NO: 29712 - DNA, 159 bp, Homo sapiens
  MAP TO AC016517.4; EXPRESSED IN BRAIN, SIGNAL = 1.1; EST_HUMAN HIT: R93859.1, EVALUE 2.00e-84; SWISSPROT HIT: P19493, EVALUE 9.00e-25; NT HIT: gi11437356, EVALUE 1.00e-84
aggcgtttgttacagcaaaactgttggctgtctcaatgttgtccacatgaggtaccaaattaaaaggagcttccgacgcattggggctggtgttatgaagaaaaattgctaatcgaaaagcagtgtattcctgatctgtgtttcggatgaagagaccac

SEQ ID NO: 29713 - DNA, 199 bp, Homo sapiens
  MAP TO AC021041.3; EXPRESSED IN BONE MARROW, SIGNAL = 0.71; EXPRESSED IN PLACENTA, SIGNAL = 0.65; EXPRESSED IN FETAL LIVER, SIGNAL = 0.52; EXPRESSED IN BRAIN, SIGNAL = 0.57; EST_HUMAN HIT: AA320332.1, EVALUE 6.00e-97; SWISSPROT HIT: P78956, EVALUE 3.80e+00
cttcagtttcggatgatcgagcaaggcttgggactcggcggaagggagcttgtgatgcaggctagaaaagaggagtctcttcccctcattatcccaagcaagtcttcccagggaaaatttgaaatagctgagacttgtgtgtgtcatccttcccggatcctttccctgctccacgttgttctcatgcttgccaagggcc

SEQ ID NO: 29714 - DNA, 77 bp, Homo sapiens
  MAP TO AL161739.1; EXPRESSED IN BRAIN, SIGNAL = 0.54; EXPRESSED IN PLACENTA, SIGNAL = 0.65; EXPRESSED IN FETAL LIVER, SIGNAL = 0.64; EXPRESSED IN BONE MARROW, SIGNAL = 0.52; EST_HUMAN HIT: AA421242.1, EVALUE 3.00e-31; NT HIT: U77978.1, EVALUE 6.10e-01
cttcttcccttggaaggcttataatccaagcaataggtatctacagctttgcgtttagtggtggaagcctcaggcca

SEQ ID NO: 29715 - DNA, 234 bp, Homo sapiens
  MAP TO AL137853.3; EXPRESSED IN PLACENTA, SIGNAL = 0.7; EXPRESSED IN FETAL LIVER, SIGNAL = 0.7; EXPRESSED IN BRAIN, SIGNAL = 0.62; EXPRESSED IN BONE MARROW, SIGNAL = 0.71; NT HIT: Z99117.1, EVALUE 1.40e-01; SWISSPROT HIT: P42567, EVALUE 3.80e-01
gatttgaaacagcccatggctgaaaggaaagctcagctggatgctcttgcttttgatattcagttctttatctcagaacatgcccaggacttgtcccctcagcagaatcgacagatgctgaggcttctgaatgaactgcagaggtccttccaggacattttggaacagactgcagctcaggtggatgccttgcagggccatcttcaacaaatggagcaggaagccctggtgaag

SEQ ID NO: 29716 - DNA, 135 bp, Homo sapiens
  MAP TO AL121575.24; EXPRESSED IN FETAL LIVER, SIGNAL = 0.6; EXPRESSED IN BONE MARROW, SIGNAL = 0.49; EXPRESSED IN BRAIN, SIGNAL = 0.47; NT HIT: AB033042.1, EVALUE 2.00e-70; EST_HUMAN HIT: AA325467.1, EVALUE 6.00e-65
accatgtcattaagaatttcaatgcatttattgagttgctgaccccctgctgatgtagaaaactcatataccaggaaatctgcaaatgtcctcacatgggctaccaaggccctggctccaattctctctaatact

SEQ ID NO: 29717 - DNA, 83 bp, Homo sapiens
  MAP TO AC021401.4; EXPRESSED IN BONE MARROW, SIGNAL = 0.42; EXPRESSED IN BRAIN, SIGNAL = 0.45; NT HIT: AL161542.2, EVALUE 1.70e-01
ttggcaggcagagatggaagtttggtttgaagaaaaccttttgtgctgatgttacagctgctgcagtcactagccacattcat

SEQ ID NO: 29718 - DNA, 241 bp, Homo sapiens
  MAP TO AC022562.3; EXPRESSED IN BRAIN, SIGNAL = 0.48; EST_HUMAN HIT: BF346257.1, EVALUE 2.20e-01; NT HIT: AB002297.1, EVALUE 3.00e-89; SWISSPROT HIT: P33479, EVALUE 2.30e-01
ggtgagttcccaaggaagttgagcttgcccctggacttgctgtgtgtactgcccgttttcctagatttgttcaccttgaattcattctccttgtccttggggcctttgtgaaaaggcctgtcataccggaacttcctcacattgttgacgcgatagaagctcttgactcgatctggtaccctatccatctgcagaacatccacataatctggaatgggcgtcactgcatagatctgcaagt

SEQ ID NO: 29719 - DNA, 94 bp, Homo sapiens
  MAP TO AC021000.3; EXPRESSED IN PLACENTA, SIGNAL = 0.53; EXPRESSED IN BRAIN, SIGNAL = 0.46; SWISSPROT HIT: O59906, EVALUE 1.40e+00; EST_HUMAN HIT: AA706202.1, EVALUE 1.00e-03; NT HIT: AE004412.1, EVALUE 2.00e-01
tggccagtgtgatggcagatggctcactgctgccatcagtattggtacatctggacattctgctgtcgcagaagtttgtccttgctgtcatgac

SEQ ID NO: 29720 - DNA, 87 bp, Homo sapiens
  MAP TO AC018421.3; EXPRESSED IN PLACENTA, SIGNAL = 0.56; EXPRESSED IN BRAIN, SIGNAL = 0.73; NT HIT: AF111103.1, EVALUE 2.80e+00; EST_HUMAN HIT: AI878921.1, EVALUE 1.10e+00
gaatatggagagctggggaagaggagggtgaaccgggtcactgtagagaagaggaaaatgccagcggctcatgaccagctctgcaag

SEQ ID NO: 29721 - DNA, 132 bp, Homo sapiens
  MAP TO AC009155.3; EXPRESSED IN FETAL LIVER, SIGNAL = 0.46; EXPRESSED IN BRAIN, SIGNAL = 0.75; EST_HUMAN HIT: N78483.1, EVALUE 2.00e-68; NT HIT: D14574.1, EVALUE 2.90e-01; SWISSPROT HIT: P25386, EVALUE 4.10e+00
ctttgaattgcttgatttactgctttgaggtttcccaacagctctgtgtgattgttacagcgaattttatatccatttagcaagtctctattaaggtcatagagttccatataacgactcttcattgttttc

SEQ ID NO: 29722 - DNA, 169 bp, Homo sapiens
  MAP TO AC008164.3; EXPRESSED IN BRAIN, SIGNAL = 0.45; EXPRESSED IN BONE MARROW, SIGNAL = 0.43; NT HIT: gi9961348, EVALUE 2.00e-03; EST_HUMAN HIT: AW361176.1, EVALUE 2.00e-03
tctatgtcctccattctgaacaaacatcacatatgtgtgcacaggagagtgcttgcacacacacacacacacattgtcatcatcatcattgtcatcatctccacacctcccacccctttgaccctgttactttcctcctcaaatatcaaggaaagcacccaacaggtga

SEQ ID NO: 29723 - DNA, 139 bp, Homo sapiens
  MAP TO AC007557.3; EXPRESSED IN PLACENTA, SIGNAL = 0.47; EXPRESSED IN BRAIN, SIGNAL = 0.45; SWISSPROT HIT: P09430, EVALUE 3.00e-10; EST_HUMAN HIT: AW002616.1, EVALUE 1.00e-72; NT HIT: gi4507628, EVALUE 8.00e-73
atgtcgaccagccgcaaattaaagagtcatggcatgaggaggagcaagagccgatctcctcacaagggagtcaagagaggtggcagcaaaagaaaataccgtaagggcaacctgaaaagtaggaaacggggcgatgacg

SEQ ID NO: 29724 - DNA, 385 bp, Homo sapiens
  MAP TO AP001441.1; EXPRESSED IN ADULT LIVER, SIGNAL = 2.2; EXPRESSED IN BONE MARROW, SIGNAL = 1.2; EXPRESSED IN PLACENTA, SIGNAL = 0.54; EXPRESSED IN FETAL LIVER, SIGNAL = 1.1; EXPRESSED IN BRAIN, SIGNAL =   1; NT HIT: D87675.1, EVALUE 0.00e+00; SWISSPROT HIT: P23004, EVALUE 1.20e+00; EST_HUMAN HIT: BE165330.1, EVALUE 8.00e-98
tctaatagtaaaagcctatcgtataccacctagcaggactagaggaatagatgtccttgatcagatcacaaaaccaatacaggagaaagacctagatgtggcagggggtttcaacctttctggggcaactaccacaggtctattcgagaagtaccatagtaatagaattaaaagctgctatgctgacattataatgtacccagaaggaaaaaaaaaagcgagagggagaaagcagaagggaattattaccacagagctgattctggccaacaaggagaagctcatcattgggaaaagtgataggaacccgggatttgtagccacaggaagccttggactcgtagtgagagcacagcattatgtaggaaatcagattccaaacacg

SEQ ID NO: 29725 - DNA, 91 bp, Homo sapiens
  MAP TO AC011284.3; EXPRESSED IN PLACENTA, SIGNAL = 0.55; EXPRESSED IN BRAIN, SIGNAL = 0.48; NT HIT: AF037220.1, EVALUE 7.50e-01; EST_HUMAN HIT: AA706897.1, EVALUE 7.20e-02
tgggcttacccattgtggatgtggagcataaaggccggctgggtatgtgtgttcagctttatgctgggcttctccaacactatcatggcaa

SEQ ID NO: 29726 - DNA, 240 bp, Homo sapiens
  MAP TO AL133412.4; EXPRESSED IN BONE MARROW, SIGNAL = 0.48; EXPRESSED IN BRAIN, SIGNAL = 0.45; EST_HUMAN HIT: BF082784.1, EVALUE 1.00e-130; SWISSPROT HIT: P32971, EVALUE 5.00e-42; NT HIT: AF081364.1, EVALUE 0.00e+00
tggcaaagcatctaaacaaaaccaagttgtcttggaacaaagatggcattctccatggagtcagatatcaggatgggaatctggtgatccaattccctggtttgtacttcatcatttgccaactgcagtttcttgtacaatgcccaaataattctgtcgatctgaagttggagcttctcatcaacaagcatatcaaaaaacaggccctggtgacagtgtgtgagtctggaatgcaaacga

SEQ ID NO: 29727 - DNA, 105 bp, Homo sapiens
  MAP TO AL117341.26; EXPRESSED IN BRAIN, SIGNAL = 0.45; EXPRESSED IN PLACENTA, SIGNAL = 0.47; EXPRESSED IN BONE MARROW, SIGNAL = 0.49; EST_HUMAN HIT: AI990846.1, EVALUE 1.30e+00
atggaaaggaaagaggacagcagagacataaggcagggcactttaacacatccacacaggaggcccaagagctggccctcaatcaagttatttcaaaaagccaag

SEQ ID NO: 29728 - DNA, 114 bp, Homo sapiens
  MAP TO AC011207.3; EXPRESSED IN PLACENTA, SIGNAL = 0.5; EXPRESSED IN BONE MARROW, SIGNAL = 1.4; EXPRESSED IN BRAIN, SIGNAL = 0.46; NT HIT: AB025017.1, EVALUE 9.90e-01; SWISSPROT HIT: Q54443, EVALUE 9.30e+00; EST_HUMAN HIT: BE387111.1, EVALUE 2.40e-02
ttaatgacatagccgtgtatccaaccacccaagccagaaacctcaggctcatcattgacttctccctttccttcaaatctaacattgctatcactattgaatataatttagaat

SEQ ID NO: 29729 - DNA, 166 bp, Homo sapiens; identical to SEQ ID NO: 21753
  MAP TO AL109809.18; EXPRESSED IN FETAL LIVER, SIGNAL = 0.65; EXPRESSED IN BRAIN, SIGNAL = 1.5; EXPRESSED IN BONE MARROW, SIGNAL = 0.9; SWISSPROT HIT: O70361, EVALUE 1.00e+00; NT HIT: gi11421332, EVALUE 2.00e-33; EST_HUMAN HIT: BE514786.1, EVALUE 2.00e-22

SEQ ID NO: 29730 - DNA, 207 bp, Homo sapiens
  MAP TO AL137853.3; EXPRESSED IN LUNG, SIGNAL = 0.87; EXPRESSED IN BRAIN, SIGNAL = 0.61; EXPRESSED IN PLACENTA, SIGNAL = 0.47; NT HIT: AB007934.1, EVALUE 1.00e-113; SWISSPROT HIT: P02549, EVALUE 2.90e-02; EST_HUMAN HIT: AW500517.1, EVALUE 1.00e-113
gtttttgctaatgaagtaaatgctcatcgagaccagatcattgagctggatcaaactgggaatcaattaaagttccttagccaaaagcaggatgttgttctgatcaagaatttgttggtgagcgtgcagtctcgatgggagaaggttgtccagcgatctattgaaagagggcgatcactagatgatgccaggaagcgggcaaaacaa

SEQ ID NO: 29731 - DNA, 207 bp, Homo sapiens
  MAP TO AL162471.1; EXPRESSED IN BRAIN, SIGNAL = 0.55; NT HIT: AF212245.1, EVALUE 1.00e-113; EST_HUMAN HIT: BF691687.1, EVALUE 1.00e-113; SWISSPROT HIT: Q95135, EVALUE 6.50e+00
agtgggtagacggcttcatgagtacagtgtactgtggtaacgtaatctggacttgggttgtaaagcatcgtgtaccagtcagaaagcatcaatactcgacatgaacgaatataaagaacaccaactggatcactcacaagtaaggtgataatagctgccatgctgcattcaaataatgcagtgatgtgttggaaaagtgcgctggaa

SEQ ID NO: 29732 - DNA, 227 bp, Homo sapiens
  MAP TO AL161627.2; EXPRESSED IN PLACENTA, SIGNAL = 0.61; EXPRESSED IN BRAIN, SIGNAL = 0.52; EST_HUMAN HIT: BF369667.1, EVALUE 3.20e+00; SWISSPROT HIT: P15305, EVALUE 7.90e-01; NT HIT: U48430.1, EVALUE 2.10e+00
tccccaaagctccagagatagatccagtagagtgtttggtggcagataactctgtaacagtggcttggagaatgccagaagaagataataagattgaccattttatactggaacataggaagactaattttgatggacttccacgtgtaaaggatgagcgatgctgggagataattgataatattaagggtactgaatatacactatcaggtaacatgactgcattt

SEQ ID NO: 29733 - DNA, 217 bp, Homo sapiens
  MAP TO AL139819.2; EXPRESSED IN HELA, SIGNAL = 5.2; EXPRESSED IN FETAL LIVER, SIGNAL =   4; EXPRESSED IN BRAIN, SIGNAL = 4.2; EXPRESSED IN PLACENTA, SIGNAL = 0.73; EXPRESSED IN BONE MARROW, SIGNAL = 0.79; NT HIT: AB032261.1, EVALUE 1.00e-119; EST_HUMAN HIT: BF507554.1, EVALUE 1.00e-117; SWISSPROT HIT: O00767, EVALUE 1.00e-29
gcagagacataaggatgatgtttctccagacatattcaaccttggggcttgggccttccttatccttgtaggtggggtcatatatatcatcttttatatcagggcgaatgtcgtcttccaagtagaggggcatcgtctccaacttatctcctccattctgcaggaccctggagggaggcgctgtaatggtggtggtggtggtataggagctagagat

SEQ ID NO: 29734 - DNA, 189 bp, Homo sapiens
  MAP TO AL137225.7; EXPRESSED IN PLACENTA, SIGNAL = 2.8; EXPRESSED IN FETAL LIVER, SIGNAL = 0.76; EXPRESSED IN BRAIN, SIGNAL = 0.85; EXPRESSED IN BONE MARROW, SIGNAL = 0.59; NT HIT: X60658.1, EVALUE 1.00e-29; EST_HUMAN HIT: BE962117.2, EVALUE 6.60e-01; SWISSPROT HIT: P10734, EVALUE 3.90e-02
cacactcaccagctcaggggtgatgtccatgtcgagggcgccgttggtctgcaggagtccaaacatggtgttgaagaggtacagtggcaccatcacctgggatgtgtggtccttcttggggggcaccttggctggggcacgggacttggggaagtcaatgatatcaccagctacactcttcacgatagg

SEQ ID NO: 29735 - DNA, 525 bp, Homo sapiens
  MAP TO AP001422.1; EXPRESSED IN ADULT LIVER, SIGNAL = 0.58; EXPRESSED IN BRAIN, SIGNAL =   1; NT HIT: U73191.1, EVALUE 0.00e+00; EST_HUMAN HIT: BE172254.1, EVALUE 0.00e+00; SWISSPROT HIT: Q99712, EVALUE 1.00e-77
atgaggaagagcctcttgattcagtgccagctctctggcaagctcctgcagacccacgtcaccaaggagggggagcggattctcctcaaccaagccactgtcaaattccacgtggactcctcctctgagagccccttcctcattctgcccatgacattctaccatgtgctggatgagacgagccccctgagagacctcacaccccaaaacctaaaggagaaggagtttgagcttgtggtcctcctcaatgccactgtggaatccaccagcgctgtctgccagagccgaacatcttatatcccagaggaaatctactggggttttgagtttgtgcctgtggtatctctctccaaaaatggaaaatatgtggctgatttcagtcagtttgaacagattcggaaaagcccagattgcacattttactgtgcagattctgagaaacagcaactcgaggagaagtacaggcaggaggatcagagggaaagagaactgaggacacttttattacaacagagcaatgtctga

SEQ ID NO: 29736 - DNA, 103 bp, Homo sapiens
  MAP TO AC012433.5; EXPRESSED IN PLACENTA, SIGNAL = 0.48; EXPRESSED IN BRAIN, SIGNAL = 0.48; NT HIT: AF049720.1, EVALUE 2.20e-01
atggcaccagatactgacactcggtacacgcagctctctggagcatgctgttttctcggtggcactgatctgctgccttcacagagagttctgatacaatcat

SEQ ID NO: 29737 - DNA, 221 bp, Homo sapiens
  MAP TO AC019342.4; EXPRESSED IN BRAIN, SIGNAL = 0.45; EXPRESSED IN PLACENTA, SIGNAL = 0.55; EST_HUMAN HIT: BF213260.1, EVALUE 5.00e-02; SWISSPROT HIT: P28048, EVALUE 6.80e-01
atgttagagaagtccaagaagctacgggagccagagcaaaagcaaaagcctttcaacagcatgtacaatgccccaaggcacaagagcaaagtctatgtgaggaaattcactaccactacagtggcagagggggtcaagtgcaaggaggagaaaggccagatactggacaggcagctcttctctgctcctcctcctgggtttggggatcctcaagccccagg

SEQ ID NO: 29738 - DNA, 144 bp, Homo sapiens
  MAP TO AC013685.3; EXPRESSED IN PLACENTA, SIGNAL = 0.49; EXPRESSED IN BRAIN, SIGNAL = 0.45; SWISSPROT HIT: Q09161, EVALUE 9.00e+00; NT HIT: AP001519.1, EVALUE 2.10e-02
ctgccattggctgaagggttgcttctgaattctttcccagaggcagtgacaaaaatcaaacatccgatgtgttctttacctttcagtaagctcagcctccctgcttgtgtcacatctctaaacatacgtacatgcgtgatgaaa

SEQ ID NO: 29739 - DNA, 454 bp, Homo sapiens
  MAP TO AC019284.4; EXPRESSED IN BRAIN, SIGNAL = 0.57; EST_HUMAN HIT: AA682200.1, EVALUE 1.00e-129; SWISSPROT HIT: P21817, EVALUE 7.10e-01; NT HIT: AF039021.1, EVALUE 2.90e-01
ttaccaccttcctccaacccagggagacctgcctttttgtccttcacctgagcagtgctttcttcccaaagcttactcttatccttttccttttcttctgcagaaacatgtttcccggacttctcagataaaccctctgcaatctcttgggttcctttctccgttccttctttaagaacattctcaaagctttcgtctattggcatcggcttggtctccacatctgcttttgttatttcttggtcttcaatttcaatttctaaggattcctcaattggaaggtgagactttcttggcttatcattttcactcagttcctgagaagatgaccttctggcactttcatctgtgctgctgtcagtgtgggcttccctgtcccccactgcagattcatcctcactgtcactagaataagggtgacttctggatgaggttgatgaagcagttttcatat

SEQ ID NO: 29740 - DNA, 159 bp, Homo sapiens
  MAP TO AC015897.3; EXPRESSED IN BRAIN, SIGNAL = 0.46; SWISSPROT HIT: P07527, EVALUE 1.00e+00; NT HIT: AF282894.1, EVALUE 2.30e-02; EST_HUMAN HIT: BF203634.1, EVALUE 5.40e-01
acagcccctcgaccatatactgctccaggaaatatgcagcctccaattcgattacagcctcttcccagtaatcctgcagtagaaactgttccaaaggtaacttcaaggtccagatcaaaaacctcattgctggaaaatgaagctctgtttcccattggg

SEQ ID NO: 29741 - DNA, 113 bp, Homo sapiens
  MAP TO AL160492.1; EXPRESSED IN BRAIN, SIGNAL = 0.49; EST_HUMAN HIT: AU129351.1, EVALUE 2.00e-21; NT HIT: gi11434330, EVALUE 2.00e-57; SWISSPROT HIT: P33485, EVALUE 5.40e+00
ctgctcagccacttctctgctcatggcaagtgccagctgcagctgaagctcctcttctccactagtctggggccgggcttgctccagctcggaggacactcgcggggaggtgg

SEQ ID NO: 29742 - DNA, 86 bp, Homo sapiens
  MAP TO AC015600.4; EXPRESSED IN BRAIN, SIGNAL = 0.49; NT HIT: U34662.1, EVALUE 7.00e-01; EST_HUMAN HIT: T03288.1, EVALUE 4.10e+00
tgaggcaatttgttgctgcctcacagatagtgtcttccaaagagcattcagtataagtctcgtcaagcttgggaaatatattcctc

SEQ ID NO: 29743 - DNA, 439 bp, Homo sapiens
  MAP TO AC009396.5; EXPRESSED IN FETAL LIVER, SIGNAL = 2.1; EXPRESSED IN LUNG, SIGNAL = 1.9; EXPRESSED IN PLACENTA, SIGNAL = 1.9; EXPRESSED IN BRAIN, SIGNAL = 2.2; EXPRESSED IN ADULT LIVER, SIGNAL = 1.5; EXPRESSED IN BONE MARROW, SIGNAL = 2.1; NT HIT: gi4758827, EVALUE 0.00e+00; SWISSPROT HIT: Q21313, EVALUE 2.00e-04; EST_HUMAN HIT: AA815329.1, EVALUE 4.00e-29
gttgtttataagaataatgacatccgtctggagctgtctcgcctggcccggattgcggacaccaagatgaaaatctatggcgaagttgtgtttaagtgtgagaatgtggccacactggaccccatcaactttgagaccccagaggcttacatcagcttgcccaagtggaacactaaacgtatgggctccatctcctttgacttccgcaccacagagcccaatggcctgatcctcttcactcatggaaagccccaagagaggaaggatgctcggagccagaagaatacaaaagtagacttctttgccgtggaactcctcgatggcaacctgtacttgctgcttgacatgggctctggcaccatcaaagtgaaagccactcagaagaaagccaatgatggggaatggtaccatgtggacattcagcgagatggcagatcag

SEQ ID NO: 29744 - DNA, 394 bp, Homo sapiens
  MAP TO AL138761.3; EXPRESSED IN ADULT LIVER, SIGNAL = 1.9; EXPRESSED IN BONE MARROW, SIGNAL =   2; EXPRESSED IN BRAIN, SIGNAL = 1.8; EXPRESSED IN PLACENTA, SIGNAL = 3.1; EXPRESSED IN HELA, SIGNAL = 1.6; EXPRESSED IN LUNG, SIGNAL = 2.4; NT HIT: U76602.1, EVALUE 0.00e+00; SWISSPROT HIT: P15269, EVALUE 9.90e-01; EST_HUMAN HIT: BE615666.1, EVALUE 0.00e+00
gtcctgatgtgcgcagcttcattgttggccccccaggccctcctgggccgcagggaccccctggggacagccgcctcctgtccacggatgcctcccacagtcggggtagcagctcctcctcacacagctcatctgtcaggcggggcagctcctacagctcttccatgagcacaggaggaggtggtgcaggctccctgggtgcaggcggtgcctttggtgaagctgcaggagacaggggtccctatggcactgacatcggcccaggcggaggctatggggcagcagcagaaggcggcatgtatgctggcaatggcggactattgggagctgactttgctggagatctggattacaatgagctggctgtgagggtgtcagagagcatgcagcgtaa

SEQ ID NO: 29745 - DNA, 393 bp, Homo sapiens
  MAP TO AC007342.2; EXPRESSED IN PLACENTA, SIGNAL = 1.6; EXPRESSED IN BRAIN, SIGNAL = 1.6; EXPRESSED IN ADULT LIVER, SIGNAL = 1.6; EXPRESSED IN BONE MARROW, SIGNAL = 2.1; EXPRESSED IN FETAL LIVER, SIGNAL = 1.7; EXPRESSED IN LUNG, SIGNAL =   2; EST_HUMAN HIT: AV757420.1, EVALUE 0.00e+00; NT HIT: X98494.1, EVALUE 1.00e-119; SWISSPROT HIT: O00566, EVALUE 2.00e-30
atgggtggtgacaatcctgaagtgggcaagaaagctagaaactcaagcaaatttgagctgaggaaaagcccagttttcagtgatgaggattctgaccttgactttgatatcagcaaattggaacagcagagcaaggtgcaaaacacaggacatggaaaaccaagagaaaagtccataatagacgagaaattcttccaactctctgaaatggaggcttatttagaaaacagagaaaaagaagaggaacgaaaagatgataatgatgatgaggtggaagatactgatttttttttgaagatattgattctgatgaagataaaaggggactgtttggaagtaaaaaacttaaggttaagtttgagaaaggagagagcactttcctcctcctcaaat

SEQ ID NO: 29746 - DNA, 80 bp, Homo sapiens
  MAP TO AC019055.2; EXPRESSED IN BONE MARROW, SIGNAL = 1.5; EXPRESSED IN FETAL LIVER, SIGNAL = 1.6; EXPRESSED IN BRAIN, SIGNAL = 2.4; EXPRESSED IN PLACENTA, SIGNAL = 1.6; EXPRESSED IN HELA, SIGNAL = 1.6; EXPRESSED IN ADULT LIVER, SIGNAL = 1.6; EST_HUMAN HIT: AW293799.1, EVALUE 9.50e-01
gaattgaccaagggtcagtggacacagctgacactggcaagagttgggaaaatgagagggaggctcttgggaagaagtag

SEQ ID NO: 29747 - DNA, 183 bp, Homo sapiens
  MAP TO AC017079.2; EXPRESSED IN BRAIN, SIGNAL =   2; EXPRESSED IN PLACENTA, SIGNAL =   2; EXPRESSED IN ADULT LIVER, SIGNAL = 1.6; EXPRESSED IN LUNG, SIGNAL = 1.9; EXPRESSED IN BONE MARROW, SIGNAL =   2; NT HIT: gi9910279, EVALUE 6.00e-99; SWISSPROT HIT: Q09332, EVALUE 4.00e-18; EST_HUMAN HIT: AA852449.1, EVALUE 5.00e-97
ctgatcagcatccacaaacaggaacttgtcaacaactagtgggaaaagtacatccaggaagaggatcttgtaaccccagatgatacgctgtttttcagtttgttgatgaagccaccggggccatttgtactgaacaagctcatactggaaattgtattcatttgccatgtaaggtataaactc

SEQ ID NO: 29748 - DNA, 218 bp, Homo sapiens
  MAP TO AC018764.3; EXPRESSED IN ADULT LIVER, SIGNAL = 1.7; EXPRESSED IN BRAIN, SIGNAL = 1.5; EXPRESSED IN PLACENTA, SIGNAL = 1.3; EXPRESSED IN BONE MARROW, SIGNAL = 1.6; EXPRESSED IN FETAL LIVER, SIGNAL = 1.7; EXPRESSED IN HELA, SIGNAL = 2.1; SWISSPROT HIT: Q01818, EVALUE 1.20e+00; EST_HUMAN HIT: T10045.1, EVALUE 1.00e-55; NT HIT: AJ131634.1, EVALUE 1.30e-01
tctggcagttgtagaaccatccatgatgctcttggaaaatgtgaagaggcatctgaagcgtcctgtatggattaatgccgatattcttcctggtccaaatggaaatagcaaagtaatagatgcaaaaccatttttagacaccgtgatatccttctttccagacgtgacgttttccctgggttggacaacaggatggcatcctgagaaagtcaatgaag

SEQ ID NO: 29749 - DNA, 211 bp, Homo sapiens
  MAP TO AC004460.1; EXPRESSED IN BRAIN, SIGNAL = 2.3; EXPRESSED IN LUNG, SIGNAL = 2.4; EST_HUMAN HIT: BF038255.1, EVALUE 2.90e+00; NT HIT: gi5729867, EVALUE 2.00e-89; SWISSPROT HIT: Q92834, EVALUE 4.00e-03
ttggggtgacaatgaccacggccagcagggcaatggcacgaccacggttaacaggaagcccatgctcgtgcaaggcttagaaggccagaagatcatgtgtgtggcttgcgggtcgtcccacagtgtggcgtggacaactatggatgtggccacgccctctgtccacgagcccgtcctcttccagactgcaagggaccctttaggtgcttcc

SEQ ID NO: 29750 - DNA, 118 bp, Homo sapiens
  MAP TO AL159191.1; EXPRESSED IN BRAIN, SIGNAL = 1.5; EXPRESSED IN PLACENTA, SIGNAL = 1.7; EXPRESSED IN LUNG, SIGNAL = 1.7; EST_HUMAN HIT: R11235.1, EVALUE 2.00e-55; NT HIT: gi11434729, EVALUE 2.00e-60
tggaactgctgcgcgtctcggtactggtgctagtctttttcatttttcttctcttagccaaaggggccttatcaacattctgaaggcaaaacccctctctcttgtatttgttaaaggc

SEQ ID NO: 29751 - DNA, 96 bp, Homo sapiens
  MAP TO AC011510.3; EXPRESSED IN BONE MARROW, SIGNAL = 2.3; EXPRESSED IN LUNG, SIGNAL = 2.4; EXPRESSED IN BRAIN, SIGNAL = 1.3; SWISSPROT HIT: P30530, EVALUE 5.00e-11; NT HIT: M76125.1, EVALUE 2.00e-47; EST_HUMAN HIT: AA256792.1, EVALUE 3.00e-47
cctctcccagagtcttccccagggccaccttgtgccggtccaccatcacatcccgcagcttctccttcagctcttcactgatgcccaggctgttca

SEQ ID NO: 29752 - DNA, 102 bp, Homo sapiens
  MAP TO AL138876.3; EXPRESSED IN BRAIN, SIGNAL = 1.9; EXPRESSED IN PLACENTA, SIGNAL =   2; EXPRESSED IN ADULT LIVER, SIGNAL = 2.9; EXPRESSED IN BONE MARROW, SIGNAL = 1.5; EXPRESSED IN LUNG, SIGNAL = 1.6; EST_HUMAN HIT: H89078.1, EVALUE 9.00e-51; NT HIT: AF122909.1, EVALUE 8.60e-01
ttaggacagacggaaagttgcctcctggtaagaaaatttcttaatctcaaaaaggctttcagggagcatggtgatggataagaagacaaacttggatccgaa

SEQ ID NO: 29753 - DNA, 136 bp, Homo sapiens
  MAP TO AC021876.2; EXPRESSED IN FETAL LIVER, SIGNAL = 1.6; EXPRESSED IN PLACENTA, SIGNAL = 1.5; EXPRESSED IN BRAIN, SIGNAL = 1.5; SWISSPROT HIT: P02391, EVALUE 7.00e+00; EST_HUMAN HIT: AA427803.1, EVALUE 7.00e-71; NT HIT: gi5729900, EVALUE 5.00e-71
attgcaggaattgacgctgtataatccagaacgcactattacagttaaaggcaatgttgagacatgtgccaaagctgaggaggagatcatgaagaaaatcagggagtcttatgaaaatgatattgcttctatgaat

SEQ ID NO: 29754 - DNA, 105 bp, Homo sapiens
  MAP TO AC018801.2; EXPRESSED IN BRAIN, SIGNAL = 1.3; EXPRESSED IN PLACENTA, SIGNAL = 1.6; EXPRESSED IN FETAL LIVER, SIGNAL = 2.8; EXPRESSED IN HELA, SIGNAL = 2.4; SWISSPROT HIT: P56157, EVALUE 4.20e+00; NT HIT: AL163284.2, EVALUE 4.00e-18; EST_HUMAN HIT: AW303317.1, EVALUE 7.00e-24
atttttctcccgtgctgaatgcttcctgacctctatattggactccaagttcttcagttttgagactcggactgcctctccttgctcctcaagcttgcagacagc

SEQ ID NO: 29755 - DNA, 235 bp, Homo sapiens
  MAP TO AC020752.3; EXPRESSED IN BRAIN, SIGNAL = 1.6; EXPRESSED IN ADULT LIVER, SIGNAL = 1.8; NT HIT: gi7662567, EVALUE 5.60e-01; SWISSPROT HIT: Q18775, EVALUE 4.30e+00; EST_HUMAN HIT: AU120889.1, EVALUE 5.40e-02
aatttactcctctggatttcatttttcttaactgaaaaatcaggataatgatactcctcagaattgtgcagattaaatgagataatcaatgcaagcagccaacagcacccaataggatgttgtaagtgcttaataaacttcttaagcatctccatgcgcccaatactcaacttagtatatttacagtttttcttctgggtctcttggtccatttctgtccacgtcttctttattt

SEQ ID NO: 29756 - DNA, 256 bp, Homo sapiens
  MAP TO AC008392.3; EXPRESSED IN PLACENTA, SIGNAL = 1.8; EXPRESSED IN FETAL LIVER, SIGNAL = 1.8; EXPRESSED IN HELA, SIGNAL = 1.7; EXPRESSED IN ADULT LIVER, SIGNAL = 1.9; EXPRESSED IN BRAIN, SIGNAL = 1.6; SWISSPROT HIT: O86422, EVALUE 2.30e+00; NT HIT: X54278.1, EVALUE 2.40e+00; EST_HUMAN HIT: BE563811.1, EVALUE 9.20e-01
tcagacaactgcccattcgccaattccaaccacctcggcccactgcccaaatccaacgtttctggtctccgggcggcgctgccttagcaggatccgccgccaggtggcgcgctccccccgcccggagtgggttttgttccatcccggacttagatcttccaagacggcgatttccttctggtcgggtctcttcccgaggatccgctttactcgtactagaaactctgacctcgaatgcagttccagaagcagaacc

SEQ ID NO: 29757 - DNA, 153 bp, Homo sapiens
  MAP TO AL121694.3; EXPRESSED IN BRAIN, SIGNAL = 1.6; EXPRESSED IN HELA, SIGNAL = 1.7; EXPRESSED IN ADULT LIVER, SIGNAL = 1.4; EXPRESSED IN FETAL LIVER, SIGNAL = 1.6; EXPRESSED IN BONE MARROW, SIGNAL = 1.7; SWISSPROT HIT: Q16181, EVALUE 3.00e+00; NT HIT: X95275.1, EVALUE 5.40e+00; EST_HUMAN HIT: AF202351.1, EVALUE 8.10e+00
gaagatgtaaaacaagaattacaacaattacgagatcaagaaagcaaaaaaaacaaagatcattttgaaactctaaagaacttagaaaatggattctatataaatgaccaaaaagcagatcttctgctcctggaaaataaaaaattaaaagaa

SEQ ID NO: 29758 - DNA, 381 bp, Homo sapiens
  MAP TO AL158801.1; EXPRESSED IN BRAIN, SIGNAL = 1.5; EXPRESSED IN BONE MARROW, SIGNAL = 2.1; EXPRESSED IN LUNG, SIGNAL = 3.3; EST_HUMAN HIT: R25686.1, EVALUE 1.00e-90; SWISSPROT HIT: P27487, EVALUE 1.20e+00; NT HIT: AF030364.1, EVALUE 9.40e-01
gagaacaacgatcagctcttgaagggccacaatccacagatacagaccccacaggattcacctgagtgtcaggtgcctccaagacgcctttctttgttttgccttcatcagcctgagtgctatttgcaagcaatactctgcccacatttcgacggaagctgttattccttgagaggctcccaggctcacgctggccctgccgcttcaggcactcagactccaacttggctaccatgtcaaggacacggactggttcgctctgtggttcaccaacctcaagatttcccctttctgtgggttcttcacaagctcctggggcagaataggactcagacactgcaggcacacctctggattggccagaaaacctcacaattgcag

SEQ ID NO: 29759 - DNA, 193 bp, Homo sapiens
  MAP TO AC004554.1; EXPRESSED IN ADULT LIVER, SIGNAL = 1.6; EXPRESSED IN FETAL LIVER, SIGNAL = 1.6; EXPRESSED IN BRAIN, SIGNAL = 1.3; NT HIT: U53930.1, EVALUE 7.00e-03; EST_HUMAN HIT: AW814035.1, EVALUE 4.30e-02; SWISSPROT HIT: P08547, EVALUE 5.00e-07
ctgatttttaaaaaatgggcaaaggtcttgaacagacccttcaccaaagaggatataaggatggccaataagtacatgaaaatatggtcagcatcatcaactgttagggaaattccaagcagaaccatgacaagataccactcattaaagataccacctattaaagtgaaaaaaatagaaactactaataata

SEQ ID NO: 29760 - DNA, 138 bp, Homo sapiens
  MAP TO AC005323.1; EXPRESSED IN PLACENTA, SIGNAL = 2.2; EXPRESSED IN BRAIN, SIGNAL = 4.6; EXPRESSED IN ADULT LIVER, SIGNAL = 1.9; EXPRESSED IN FETAL LIVER, SIGNAL = 1.7; EXPRESSED IN HELA, SIGNAL =   2; EXPRESSED IN LUNG, SIGNAL = 1.2e+02; NT HIT: U32323.1, EVALUE 7.80e-02
tccaaagtactagtcctgtgcagaagctgctacttggcatgtctcaagaagcacttcaaaaggaatgcggccaaaggccaagcttcaggaagccaaatgctggagacccagttgttcttctggtctatttggaaaaca

SEQ ID NO: 29761 - DNA, 150 bp, Homo sapiens
  MAP TO AC008567.3; EXPRESSED IN BRAIN, SIGNAL = 2.1; EXPRESSED IN ADULT LIVER, SIGNAL = 1.6; EXPRESSED IN PLACENTA, SIGNAL = 2.2; EST_HUMAN HIT: BE409643.1, EVALUE 1.00e-23; NT HIT: L78810.1, EVALUE 3.00e-23; SWISSPROT HIT: P71944, EVALUE 3.10e+00
ctccctgcaagcagagggagccggctccagccttggccagcccagagaggggctcccacagtgcagtggtgggtggaagttctcctcaagtgtggccaggtggacaccaaggctgaggaggtgctgagagtgagtgagggccgccagcat

SEQ ID NO: 29762 - DNA, 119 bp, Homo sapiens
  MAP TO AP001251.1; EXPRESSED IN BRAIN, SIGNAL = 1.5; EXPRESSED IN ADULT LIVER, SIGNAL = 3.3; EXPRESSED IN BONE MARROW, SIGNAL = 3.6; EXPRESSED IN FETAL LIVER, SIGNAL = 2.8; EXPRESSED IN HELA, SIGNAL = 3.1; EXPRESSED IN LUNG, SIGNAL = 5.1; EXPRESSED IN PLACENTA, SIGNAL =   2; SWISSPROT HIT: P30929, EVALUE 4.10e+00; EST_HUMAN HIT: T97950.1, EVALUE 7.00e-09; NT HIT: AF003528.1, EVALUE 6.60e-02
ttgtcttattctcagacactgtctcagccaccctaaacttcaccaacaaccatcctgaccattcagctgccatcaacatcgaggcatcatcctccataagcatacagattgtgactggc

SEQ ID NO: 29763 - DNA, 321 bp, Homo sapiens
  MAP TO AC018506.3; EXPRESSED IN BRAIN, SIGNAL = 1.5; EXPRESSED IN PLACENTA, SIGNAL = 1.5; EXPRESSED IN BONE MARROW, SIGNAL = 2.1; EXPRESSED IN LUNG, SIGNAL = 4.5; EST_HUMAN HIT: BF306642.1, EVALUE 0.00e+00; NT HIT: gi11434825, EVALUE 0.00e+00; SWISSPROT HIT: P54674, EVALUE 7.10e-01
ctttttggttttggggtatttagatgcagcacggttgacatgggatccagtaattgacaccacagttgggtcagaccctgttaatggcctgttttctcctgaactgtctagacttccagcttcagtaggagttactaaactgttacttcctccctcttccaaggcagcttgtgacaattctgcctgctgtgcattggcctgcttctgacgctttagtctttgggctgaactggtcctgtaccgagaaattcgactcttcggccggggcctagaaggctttgctggaggtggcttggggactagtttttctgcagcaatatc

SEQ ID NO: 29764 - DNA, 75 bp, Homo sapiens
  MAP TO AC012614.3; EXPRESSED IN BRAIN, SIGNAL = 1.7; EXPRESSED IN PLACENTA, SIGNAL = 1.7; EXPRESSED IN BONE MARROW, SIGNAL =  50; EXPRESSED IN ADULT LIVER, SIGNAL = 1.7; EXPRESSED IN FETAL LIVER, SIGNAL = 1.7; EXPRESSED IN HELA, SIGNAL = 1.8; NT HIT: AF197944.1, EVALUE 5.90e-01; EST_HUMAN HIT: BE708454.1, EVALUE 3.50e+00
gactattataaggatggagagatagccgccaaaaagaaaaaaaaagcacagggagttgatgatgctacggaccag

SEQ ID NO: 29765 - DNA, 146 bp, Homo sapiens
  MAP TO AL109758.1; EXPRESSED IN BRAIN, SIGNAL = 1.4; EXPRESSED IN ADULT LIVER, SIGNAL = 1.7; EXPRESSED IN HELA, SIGNAL =   2; EXPRESSED IN FETAL LIVER, SIGNAL = 1.7; NT HIT: X80760.1, EVALUE 3.30e-01; EST_HUMAN HIT: R91638.1, EVALUE 9.00e-52; SWISSPROT HIT: P37339, EVALUE 1.10e-02
atgaagaatgcgatttccaatatccccaactcctgcatcaaatacaaaatcttctaccagatttccatctctatccagggcctgggctcttactccagctgggcccctgcaaaagtaaaagatgggagtcagctgactcaaagaca

SEQ ID NO: 29766 - DNA, 177 bp, Homo sapiens
  MAP TO AL135798.5; EXPRESSED IN BRAIN, SIGNAL = 1.6; EXPRESSED IN PLACENTA, SIGNAL = 1.7; EXPRESSED IN LUNG, SIGNAL = 1.6; EXPRESSED IN ADULT LIVER, SIGNAL = 1.8; EST_HUMAN HIT: BE088492.1, EVALUE 1.50e-01; NT HIT: AJ222581.1, EVALUE 1.60e+00; SWISSPROT HIT: Q9ZB73, EVALUE 1.00e+00
tgctgattggttcaatgttgggctttgttaatagaatgtgtttgatatagtacaaaggtttgaaaatggggaccgagtgaaaaagtttatatttaaaggtgacatccagtctccttcctttctcaattcgcagaacattcgcttccagaattatatctcccaggcagaaggattcct

SEQ ID NO: 29767 - DNA, 180 bp, Homo sapiens
  MAP TO AC008132.34; EXPRESSED IN FETAL LIVER, SIGNAL = 1.6; EXPRESSED IN BRAIN, SIGNAL = 1.5; EXPRESSED IN PLACENTA, SIGNAL = 1.4; EXPRESSED IN ADULT LIVER, SIGNAL = 1.6; EXPRESSED IN LUNG, SIGNAL = 1.7; EST_HUMAN HIT: AI222095.1, EVALUE 8.00e-90; SWISSPROT HIT: P19440, EVALUE 5.00e-09; NT HIT: J05235.1, EVALUE 3.00e-85
ctcccaatctccaagcactgcttggcatccgcggccacggcagccctggtgtacacatggttgtcaggttccttggaggccgagggcagccagagacagaggccgacaatgaccagcaccaggaccacggccagcaggcccagcaccactaacttcttcttcatggctctgctgcaccca

SEQ ID NO: 29768 - DNA, 143 bp, Homo sapiens
  MAP TO AC006946.20; EXPRESSED IN LUNG, SIGNAL = 2.3; EXPRESSED IN BRAIN, SIGNAL = 1.4; SWISSPROT HIT: P42759, EVALUE 8.00e-01; EST_HUMAN HIT: BF314481.1, EVALUE 1.20e-01
gctgaggagcagacgctctgcctctttcctaccctggagcagcctggaggcctcatagtgccctgggccctgactgctccactcccagacggcgtggttccccacagtccaggagtgtggtccgggcccccaggcaagacagc

SEQ ID NO: 29769 - DNA, 247 bp, Homo sapiens
  MAP TO AL133375.3; EXPRESSED IN BRAIN, SIGNAL = 1.4; EXPRESSED IN ADULT LIVER, SIGNAL = 1.7; EST_HUMAN HIT: AI525165.1, EVALUE 1.00e-83; SWISSPROT HIT: Q14999, EVALUE 5.00e-11; NT HIT: AB014608.1, EVALUE 0.00e+00
cactagagacccccatcatccagggtcaggatgggtcccctgagctactgattcgatccctggttgggggcccatctgcagaactactcctggacttggagcgtgtgctgtgccgtgagggcagccccggaggtgccgtgaggcccctcctcaagcgcctccagcaggagacccagcctttcctcctgttgctgcggactctggatgctccggggcccaacaagactctgctgctgtctgtgctgag

SEQ ID NO: 29770 - DNA, 104 bp, Homo sapiens
  MAP TO AC020912.3; EXPRESSED IN PLACENTA, SIGNAL = 1.7; EXPRESSED IN BRAIN, SIGNAL = 1.4; EXPRESSED IN ADULT LIVER, SIGNAL = 1.4; EXPRESSED IN FETAL LIVER, SIGNAL = 1.7; NT HIT: U93163.1, EVALUE 4.00e-06; EST_HUMAN HIT: BF108755.1, EVALUE 6.00e-09; SWISSPROT HIT: P20824, EVALUE 7.20e+00
ctaccccactggaagatcttcaggggcaataacatgcatagagctgtcacctcttgcaatacctgtggtagcaatgtcttcttctggaatccttccggaaggac

SEQ ID NO: 29771 - DNA, 360 bp, Homo sapiens
  MAP TO AC018552.2; EXPRESSED IN BRAIN, SIGNAL = 1.8; EXPRESSED IN PLACENTA, SIGNAL = 2.4; EXPRESSED IN LUNG, SIGNAL = 1.8; SWISSPROT HIT: P27797, EVALUE 3.80e-01; NT HIT: gi11431268, EVALUE 0.00e+00; EST_HUMAN HIT: BE729706.1, EVALUE 0.00e+00
tggataatcctgaaaacaaacatgacaaccacagcccaggaaatgctgcccgtgctggccacacgctgagccctcctgcctttgcccgcaggtgctggatccgggactccctggtcagctacatcaccaacctgggcctcttcagcctggtgtttctgttcaacatggccatgctagccaccatggtggtgcagatcctgcggctgcgcccccacacccaaaagtggtcacatgtgctgacactgctgggcctcagcctggtccttggcctgccctgggccttgatcttcttctcctttgcttctggcaccttccagcttgtcgtcctctaccttttcagcatcatcacctccttccaag

SEQ ID NO: 29772 - DNA, 242 bp, Homo sapiens
  MAP TO AC018836.2; EXPRESSED IN BRAIN, SIGNAL =   2; EXPRESSED IN FETAL LIVER, SIGNAL = 1.6; EXPRESSED IN ADULT LIVER, SIGNAL = 2.3; EXPRESSED IN BONE MARROW, SIGNAL = 1.7; EXPRESSED IN LUNG, SIGNAL = 2.5; EXPRESSED IN PLACENTA, SIGNAL = 1.8; EST_HUMAN HIT: T92574.1, EVALUE 3.40e+00; SWISSPROT HIT: P54817, EVALUE 1.60e+00
ccaatgctattgcctcccgtagctgccctatttctttccccaatgtttagaatccctagagtttgcattactttctggaagtcaactgcctctgcattgctaacttgctcctgtccagctcctgtgccacagtggagctcaagagcaggggcctcgccttggtcatgggcacccaacacagtgtctggtgcatagtgggcgttcagataatatgcatggaatgaaaatgaatagctgcagtc

SEQ ID NO: 29773 - DNA, 154 bp, Homo sapiens
  MAP TO AC007347.3; EXPRESSED IN BRAIN, SIGNAL = 1.3; EXPRESSED IN PLACENTA, SIGNAL = 1.5; EXPRESSED IN ADULT LIVER, SIGNAL = 1.5; EXPRESSED IN FETAL LIVER, SIGNAL = 1.5; EXPRESSED IN HELA, SIGNAL = 1.8; NT HIT: AF175425.1, EVALUE 5.50e+00; SWISSPROT HIT: O35343, EVALUE 9.00e+00
caggaaaaaaataactcaccccctggtcccccaccatgacactacctctgtgaacattttggtagatattctttgggctctgacacgtacacacatgttgacttttatcatcatcatcatcatcatcattattctagtactctctttttcactt

SEQ ID NO: 29774 - DNA, 136 bp, Homo sapiens
  MAP TO AC013528.3; EXPRESSED IN PLACENTA, SIGNAL = 1.9; EXPRESSED IN BRAIN, SIGNAL = 1.4; NT HIT: AF008938.1, EVALUE 1.90e-02; SWISSPROT HIT: Q9ZD10, EVALUE 3.10e+00; EST_HUMAN HIT: BF341457.1, EVALUE 1.80e+00
atgctaattagtgaatacctccagaaccacgaatttaaacacaaagaaaacaagaaaatagatgctcagcactgtggatacttcattatgaaagactctattgcacccatgctatctgagaggaaggatttgacag

SEQ ID NO: 29775 - DNA, 235 bp, Homo sapiens
  MAP TO AL157885.2; EXPRESSED IN BRAIN, SIGNAL = 1.3; EXPRESSED IN FETAL LIVER, SIGNAL = 1.7; EXPRESSED IN ADULT LIVER, SIGNAL = 1.4; EXPRESSED IN LUNG, SIGNAL = 1.7; SWISSPROT HIT: P22897, EVALUE 4.00e-18; EST_HUMAN HIT: AI681749.1, EVALUE 6.00e-82; NT HIT: M93196.1, EVALUE 1.00e-126
ctggtaaccagttcaaatatcggaaaggactgcggtcactccactgccaaccgctgttgaagctcagactgttaagtccaatccagagtcctgaggtcaaggaactggttaatcctatatttttaaagaaagcaaaacaaacaaacaagaacttggcattcagaaaacagttgaaattaaattcagaactaagtgcttgaatcaaaatgtcactgagggaagtaacaataatcat

SEQ ID NO: 29776 - DNA, 116 bp, Homo sapiens
  MAP TO AL136324.2; EXPRESSED IN ADULT LIVER, SIGNAL = 1.7; EXPRESSED IN BRAIN, SIGNAL = 1.7; EXPRESSED IN PLACENTA, SIGNAL = 1.4; EST_HUMAN HIT: AV755814.1, EVALUE 3.80e-01
ctttccaacagagttcccaaaacatgagagtgcctctcttcaccctcataccaccagctttctgctgccctaattgccttgttttcacccttgcgttctgtttctccttcactcat

SEQ ID NO: 29777 - DNA, 150 bp, Homo sapiens
  MAP TO AC011836.3; EXPRESSED IN BRAIN, SIGNAL =  12; SWISSPROT HIT: Q12860, EVALUE 3.00e-23; NT HIT: U07819.1, EVALUE 2.00e-79; EST_HUMAN HIT: T05541.1, EVALUE 3.00e-79
cagcaccgtctgttttaattctgttagatggtatactgggctctcctctacccagtgtattggttgctaccacgcggaattcatactccatccatgggattaagtccactgctcttgctgcctccatatttccttcaataattgggggat

SEQ ID NO: 29778 - DNA, 233 bp, Homo sapiens
  MAP TO AC013533.3; EXPRESSED IN BRAIN, SIGNAL = 1.4; EXPRESSED IN BONE MARROW, SIGNAL = 1.5; EXPRESSED IN LUNG, SIGNAL = 2.2; EST_HUMAN HIT: BF527371.1, EVALUE 1.00e-112; NT HIT: AJ252060.1, EVALUE 1.00e-128; SWISSPROT HIT: P49791, EVALUE 1.90e-02
cttcctgcctgacacagctcacttcaagaagtgcacaatgtcagaacgtggaattaagtgggcttgtgaatattgtacgtatgaaaactggccatctgcaatcaagtgtactatgtgtcgtgcccaaagacctagtggaacaattattacagaagatccatttaaaagtggttcaagtgatgttggtagagattgggatccttccagcaccgaaggaggaagtagtcctttga

SEQ ID NO: 29779 - DNA, 175 bp, Homo sapiens
  MAP TO AC023490.4; EXPRESSED IN ADULT LIVER, SIGNAL = 1.5; EXPRESSED IN LUNG, SIGNAL = 2.6; EXPRESSED IN BRAIN, SIGNAL = 2.3; EXPRESSED IN PLACENTA, SIGNAL = 2.3; EXPRESSED IN BONE MARROW, SIGNAL = 1.8; EXPRESSED IN FETAL LIVER, SIGNAL = 2.2; EST_HUMAN HIT: N57357.1, EVALUE 3.00e-89; SWISSPROT HIT: P42356, EVALUE 4.00e-24; NT HIT: AF012872.1, EVALUE 4.00e-81
cgcacagccaggtagcctggacacacatctccatgaaccacttgaagggtgtggcctccatcttgccccccatgatcatcaccatctcatccgtcagcttgatgtcgggttcccagccgagattgccgcccggcgagctttcaaacatgaagccaaagtctgcaaaaccccaaag

SEQ ID NO: 29780 - DNA, 182 bp, Homo sapiens
  MAP TO AC011478.2; EXPRESSED IN BRAIN, SIGNAL = 3.8; EXPRESSED IN HELA, SIGNAL = 1.7; EXPRESSED IN ADULT LIVER, SIGNAL = 3.4; EXPRESSED IN BONE MARROW, SIGNAL = 7.8; EXPRESSED IN FETAL LIVER, SIGNAL =   2; EXPRESSED IN LUNG, SIGNAL = 4.4; EXPRESSED IN PLACENTA, SIGNAL = 2.7; SWISSPROT HIT: Q07076, EVALUE 2.30e+00; EST_HUMAN HIT: AA225957.1, EVALUE 9.90e+00
gctggacaccgaggctgagtccccggggaagctgaccacggccaggcaccgcctaaagggagtgtgtgagggatgggggccgcccctcccgcaggcacaggactcagccatcacaaatgccagtggtccttggaacacgtctgcccggctgagcctgccagatgcccagtttagggaagcgc

SEQ ID NO: 29781 - DNA, 348 bp, Homo sapiens
  MAP TO AC009425.2; EXPRESSED IN BRAIN, SIGNAL = 1.3; EST_HUMAN HIT: BE838764.1, EVALUE 2.00e-05; NT HIT: gi4758281, EVALUE 0.00e+00; SWISSPROT HIT: Q61772, EVALUE 1.00e-66
ctcagtgttaagcttcatctttctttcaccaaggtcaccttgggtaaaactttcatctgcagcaatggtgtctatttttacatagaggttttctcttatattcctgccagtgtcatagtctgtttcataatagtacaaattaaatgtttccttgcaagttcccagtactccaggaagactgttacaatccctcagggtgaatttcaattctacaaaaatcctttgtgcattgcctttggaaatccagttagtccgcagccagttgttttggttgggctccatgacttggcacacctggtatgttcgtatcggggtatagttctcatccaaaccactaatttcttccca

SEQ ID NO: 29782 - DNA, 124 bp, Homo sapiens
  MAP TO AL158801.1; EXPRESSED IN BRAIN, SIGNAL = 1.3; EXPRESSED IN ADULT LIVER, SIGNAL = 1.5; EST_HUMAN HIT: AA216387.1, EVALUE 1.60e+00
ttcgtatgatgaacagtaaagttattatggattgctttatggagaataagatgagaagaatcagaggaatggatttaacacctttgctctcatgtagaatgatgaatttgtggcatctgcttct

SEQ ID NO: 29783 - DNA, 384 bp, Homo sapiens
  MAP TO AC008494.5; EXPRESSED IN BRAIN, SIGNAL = 1.9; SWISSPROT HIT: Q9VMT5, EVALUE 4.80e+00; EST_HUMAN HIT: BE150392.1, EVALUE 3.00e-85
tctttcttgaaatctggaaatttcatcagcagcatttttccttttttctgccttttctgccttttcccttatctccttttcaagcctcaaaaattcttcctgttctttcttctgctgggtataactttctagtagtaattttaacttaaactggcgctggcgttctttctgatgttttttctctttctcttcttcttcttttaactgggaagcacatttcattgacatttctatacttttctgtttcttccaagcttcaactgccaatttctgtttctttctttgttcctctttttgcttttgattatcctcttgtttattatgaaaaagcacaggtgtgttgtctgccttttcctttaacttgaaaatttcctcccttttttg

SEQ ID NO: 29784 - DNA, 211 bp, Homo sapiens
  MAP TO AC011510.3; EXPRESSED IN BRAIN, SIGNAL =   2; EXPRESSED IN ADULT LIVER, SIGNAL = 1.8; EXPRESSED IN BONE MARROW, SIGNAL =   2; EXPRESSED IN FETAL LIVER, SIGNAL = 2.2; EXPRESSED IN HELA, SIGNAL = 1.7; EXPRESSED IN LUNG, SIGNAL = 4.4; EXPRESSED IN PLACENTA, SIGNAL = 2.4; NT HIT: gi11424061, EVALUE 1.00e-103; EST_HUMAN HIT: BE904124.1, EVALUE 3.00e-37; SWISSPROT HIT: P30530, EVALUE 1.00e-37
ctccctccggcgtctccacaggaagccagtgggtccaggatgaggggccctggctgctggtgcatgccacgcggatgtgataaggggtgtgaggatggaggctgcctagccgaagctgatgggggggcacggatgcttgcgaggtgaggggctcctctggggggtctggttctcccgcctggatgcccatcccatcgtttgacagcacagc

SEQ ID NO: 29785 - DNA, 141 bp, Homo sapiens
  MAP TO AC011609.9; EXPRESSED IN BRAIN, SIGNAL = 2.7; EXPRESSED IN LUNG, SIGNAL = 2.4; EXPRESSED IN PLACENTA, SIGNAL = 1.4; NT HIT: gi5729766, EVALUE 5.00e-74; SWISSPROT HIT: P32004, EVALUE 1.00e-05; EST_HUMAN HIT: AI474737.1, EVALUE 7.00e-74
ggataattccatcgaacaattcaggaacattcaggatcccaaacgaggggcacatatctcactttcaagggaaataccgctgctttgcttcaaataaactgggaatcgctatgtcagaagaaatagaatttatagttccaa

SEQ ID NO: 29786 - DNA, 228 bp, Homo sapiens
  MAP TO AC011469.3; EXPRESSED IN BRAIN, SIGNAL = 1.6; EXPRESSED IN PLACENTA, SIGNAL = 1.3; EXPRESSED IN LUNG, SIGNAL = 1.7; EST_HUMAN HIT: AA352468.1, EVALUE 5.20e-02; NT HIT: gi11425570, EVALUE 1.00e-125; SWISSPROT HIT: P21817, EVALUE 4.00e-27
gacagtgatgaagtcaggccctgagatcgtgaaggctggcctccgctccttcttcgagagtgcctcggaggacatcgagaagatggtggagaacctgcggctgggcaaggtgtcgcaggcgcgcacccaggtgaaaggcgtgggccagaacctcacctacaccactgtggcactgctgccggtcctcaccaccctcttccagcacatcgcccagcaccagttcggaga

SEQ ID NO: 29787 - DNA, 292 bp, Homo sapiens
  MAP TO AL157882.1; EXPRESSED IN BRAIN, SIGNAL = 1.7; NT HIT: gi11428530, EVALUE 0.00e+00; EST_HUMAN HIT: AU124106.1, EVALUE 0.00e+00; SWISSPROT HIT: P19692, EVALUE 4.50e-01
ggcctttacaatatcattgtttaaaccatggactgatgaaatagttctattttgatcacctggctgctgttgtaatgttctatcattatctttaatatcttcttttgctagatccataaaggtagacttcttttcaccttcatctcctttagaagatatgttctccttcattacaacttttcttaaattgccagaattcccagatgtttcctcgcctgccgtaggaacaacaataggaccacgtacttttccctcaaatacaaaaggctttggttctttggagattaaatca

SEQ ID NO: 29788 - DNA, 213 bp, Homo sapiens
  MAP TO AL138849.5; EXPRESSED IN BRAIN, SIGNAL = 1.8; EXPRESSED IN PLACENTA, SIGNAL = 2.1; EXPRESSED IN BONE MARROW, SIGNAL = 2.2; EXPRESSED IN LUNG, SIGNAL = 3.2; EXPRESSED IN ADULT LIVER, SIGNAL = 2.5; EXPRESSED IN HELA, SIGNAL = 1.7; EXPRESSED IN FETAL LIVER, SIGNAL = 1.9; NT HIT: D83776.1, EVALUE 1.00e-117; EST_HUMAN HIT: AW075724.1, EVALUE 1.00e-107; SWISSPROT HIT: P75445, EVALUE 1.40e-01
tttgccatgtttttccttcatggcattactttggttgtctgtttctgtcttcttggtatcatcttttggttggtctgccttagctttgttttcctcagcaattgagtttttctcagttgcactacttgaattacattcccacttcacaaacttctcttctactatgcccttcagctgaaagtcatccattctttttgggtcaaagccttcaat

SEQ ID NO: 29789 - DNA, 213 bp, Homo sapiens; identical to SEQ ID NO: 28574
  MAP TO AL138828.4; EXPRESSED IN BRAIN, SIGNAL = 1.5; EXPRESSED IN ADULT LIVER, SIGNAL = 1.9; EXPRESSED IN FETAL LIVER, SIGNAL =   2; EXPRESSED IN HELA, SIGNAL = 1.9; EXPRESSED IN LUNG, SIGNAL = 5.1; NT HIT: AF249273.1, EVALUE 3.00e-79; SWISSPROT HIT: Q9Z9L3, EVALUE 5.90e+00; EST_HUMAN HIT: AA505715.1, EVALUE 5.00e-79

SEQ ID NO: 29790 - DNA, 523 bp, Homo sapiens
  MAP TO AL121716.16; EXPRESSED IN BRAIN, SIGNAL = 1.4; SWISSPROT HIT: Q9Y3R5, EVALUE 1.00e-34; NT HIT: AB029040.1, EVALUE 0.00e+00; EST_HUMAN HIT: AL121540.1, EVALUE 3.00e-67
ctgccattttttcactatgccatttctgagcactaaagatagatgacagcaaacaatgaagaatcactttctgaactttgcacttagataacatatcagaaataaaactagggaaacccttcgctgagctttctattacttttgccagctcagtgaagagtagtgtcagaatttctatgctcatcatttgcatgtttcgattgcctattaaatcttgtgcagtaaccttgacatgagttgggtaatggctacgcatgtaatataagcagagagaaataagaatttctatgtacatagaactccggaagttatgatttgagtccactggaatgtgactataaaaatctttgcccataacagaaatccggtgtctggccaatagattctgaaggagagacaactgaggagtatatgcattatttacactagtagttgaaatggcatttacaaaagctatagggttagttttcaagatggctttgatggcagagaaagcatacaaagtcctggatgaatcatacaa

SEQ ID NO: 29791 - DNA, 155 bp, Homo sapiens
  MAP TO AC004460.1; EXPRESSED IN ADULT LIVER, SIGNAL = 1.5; EXPRESSED IN BRAIN, SIGNAL = 1.6; EXPRESSED IN HELA, SIGNAL = 1.6; EST_HUMAN HIT: H01883.1, EVALUE 1.30e-01; SWISSPROT HIT: P10242, EVALUE 5.20e+00; NT HIT: AJ004862.1, EVALUE 5.50e+00
gaaggagttgttgctggtgtcattcttaggcttttggtttacagtggaagtgtgagtgtgaagagcaaggctcaccgactcgcagtggcatgcgtgggcacaccagctgttgccttctggtgggtggggctgggtggagccacccttgtttgttg

SEQ ID NO: 29792 - DNA, 306 bp, Homo sapiens
  MAP TO AL158017.2; EXPRESSED IN BRAIN, SIGNAL = 1.3; EXPRESSED IN LUNG, SIGNAL = 2.3; EXPRESSED IN PLACENTA, SIGNAL = 1.5; NT HIT: AB007932.1, EVALUE 0.00e+00; SWISSPROT HIT: P51805, EVALUE 2.00e-28; EST_HUMAN HIT: BE269288.1, EVALUE 0.00e+00
gtacaaggaaacgggcagcagcacgtggagaaggccctgaagctctttgcccagctcatcaacaacaaggtgttcctgctgaccttcatccgcaccctggagctgcagcgcagtttctccatgcgcgaccggggcaacgtggcttcgctcatcatgaccggcctgcagggccgcctggaatatgccactgatgtcctcaagcagctgctctctgacctcatcgataagaacctggagaacaagaaccaccccaagctgctactccggaggtctggcccgcagcagtgggtggagagggtggcagga

SEQ ID NO: 29793 - DNA, 102 bp, Homo sapiens
  MAP TO AC008417.3; EXPRESSED IN BRAIN, SIGNAL = 2.1; SWISSPROT HIT: P21969, EVALUE 5.50e+00; NT HIT: AL163209.2, EVALUE 4.00e-09; EST_HUMAN HIT: BE061177.1, EVALUE 1.00e-06
tccaatcagcataatgttgtcaatgtagtggaccagtgtgatatttgatggtatgtcaagacaatcaatatctctgtggactatattaaggtgaattgacat

SEQ ID NO: 29794 - DNA, 208 bp, Homo sapiens
  MAP TO AF223391.1; EXPRESSED IN BRAIN, SIGNAL = 1.7; SWISSPROT HIT: Q02343, EVALUE 3.00e-27; EST_HUMAN HIT: BE935840.1, EVALUE 1.00e-85; NT HIT: AF223391.1, EVALUE 1.00e-114
agggcgtgcatcgacttcgccatcagcgccaaacctctcacccgctacatgccgcagaacagacacaccttccagtaccgcgtgtggcactttgtggtgtctccgtcctttgagtacaccattatggccatgatcgccttgaatactgttgtgctgatgatgaaggtgagaggagagaggcacaagagccgactgagccccagcgatg

SEQ ID NO: 29795 - DNA, 145 bp, Homo sapiens
  MAP TO AC008850.4; EXPRESSED IN ADULT LIVER, SIGNAL = 1.5; EXPRESSED IN BRAIN, SIGNAL = 1.4; EST_HUMAN HIT: N52239.1, EVALUE 8.00e-74; SWISSPROT HIT: P48209, EVALUE 2.30e+00; NT HIT: gi11433391, EVALUE 2.10e-02
gtgacttgtaatcataccctcctctttattctcactgctactgacatagttaagaactttatcttgactgttattgccattatagtgacagtctaactcactgcttctcacattatctgagctgaagaaccagggtttattgttt

SEQ ID NO: 29796 - DNA, 185 bp, Homo sapiens
  MAP TO AC010368.2; EXPRESSED IN BRAIN, SIGNAL = 1.5; EXPRESSED IN LUNG, SIGNAL = 1.7; EXPRESSED IN ADULT LIVER, SIGNAL = 1.8; EXPRESSED IN HELA, SIGNAL = 1.9; EXPRESSED IN FETAL LIVER, SIGNAL = 2.2; EST_HUMAN HIT: R83190.1, EVALUE 3.00e-95; SWISSPROT HIT: Q64565, EVALUE 2.00e-28; NT HIT: AB002584.1, EVALUE 2.00e-28
gggtggcaatggccaacactgacagtaacaatcccggaaaagaaatccaggtatctgcttccttcagcatcaaagagccactccatgtgcccctggtggagcagcaggggtttctggaaatatgccgtcaccacaggagaaagatgttccttgtggatttccaggacacggttgtagccaaggga

SEQ ID NO: 29797 - DNA, 212 bp, Homo sapiens
  MAP TO AL158017.2; EXPRESSED IN BRAIN, SIGNAL = 1.3; EXPRESSED IN LUNG, SIGNAL = 2.5; SWISSPROT HIT: P51805, EVALUE 1.00e-19; EST_HUMAN HIT: AA629363.1, EVALUE 2.00e-10; NT HIT: X87831.2, EVALUE 1.00e-103
tccatctctacaagtgtgcagcccagcgggagagctgcggcctctgcctcaaggccgaccggaagtttgagtgtggctggtgcagcggcgagcgcaggtgcaccctccaccagcactgtaccagcccttccagcccctggctcgactggtccagccacaatgtcaagtgctccaaccctcaaatcaccgaggtaagtcctgcaagtctctag

SEQ ID NO: 29798 - DNA, 384 bp, Homo sapiens
  MAP TO AH009158.1; EXPRESSED IN BRAIN, SIGNAL = 4.4; EST_HUMAN HIT: BF349057.1, EVALUE 3.60e-01; NT HIT: AF223391.1, EVALUE 0.00e+00; SWISSPROT HIT: Q15878, EVALUE 4.00e-46
ggcacaggttccctaagtgagagctccatcccctctgtctctgacaccagcaccccaagaagaagtcgtcggcagctcccacccgtcccgccaaagccccggcccctcctttcctacagctccctgattcgacacgcgggcagcatctctccacctgctgatggaagcgaggagggctccccgctgacctcccaagctctggagagcaacaatgcttgcctgaccgagtcttccaactctccgcacccccagcagagccaacatgcctccccacagcgctacatctccgagccctacttggccctgcacgaagactcccacgcctcagactgtggtgaggaggagacgctcactttcgaagcagccgtggctactagcctgggc

SEQ ID NO: 29799 - DNA, 170 bp, Homo sapiens
  MAP TO AC013568.3; EXPRESSED IN BRAIN, SIGNAL = 1.4; EXPRESSED IN BONE MARROW, SIGNAL = 2.5; EXPRESSED IN ADULT LIVER, SIGNAL = 1.6; SWISSPROT HIT: P28191, EVALUE 9.00e-08; NT HIT: AB032179.2, EVALUE 3.00e-91; EST_HUMAN HIT: BF335108.1, EVALUE 5.00e-91
ctgaatctgaagcgagagcccagcctgataaagtcggatctattggatttgctgtttcctggcgtccgcagtcggaagaatgcgtggtgctcaactgcacacttccaaaggtgtttgcaggtcctggcactgtctaaccggaacacaaacgtgtgctcttgctcacgtcc

SEQ ID NO: 29800 - DNA, 225 bp, Homo sapiens
  MAP TO AL138923.2; EXPRESSED IN BRAIN, SIGNAL = 1.4; EST_HUMAN HIT: H12939.1, EVALUE 1.00e-122; NT HIT: gi11432087, EVALUE 1.00e-124; SWISSPROT HIT: P06786, EVALUE 5.80e-01
gcacatccactgtagtatgcaagcctatagtcattgaaactcagctctatgttattgtggcccagctgtttggtggctctcacatctataagcgagacagttttgcaaataaattcataaaaatccaggatattgaaattctcaaaatccgaaaacccaatgacattgaaacattcaagattgaaaacaactggtactttgttgttgctgacagttcaaaagctg

SEQ ID NO: 29801 - DNA, 111 bp, Homo sapiens
  MAP TO AL109938.8; EXPRESSED IN BRAIN, SIGNAL = 1.4; EXPRESSED IN ADULT LIVER, SIGNAL = 1.4; EXPRESSED IN HELA, SIGNAL = 1.6; NT HIT: AL163207.2, EVALUE 2.40e-01; EST_HUMAN HIT: AW237482.1, EVALUE 1.00e-03; SWISSPROT HIT: Q04690, EVALUE 4.20e+00
ttcaagctggcctgtggagaagcccactggagaggaacagagggaggcctctggccaacagcttctgaggaactgaggtctgtcaacaactacatgagtgagtttggaagt

SEQ ID NO: 29802 - DNA, 424 bp, Homo sapiens
  MAP TO AC018505.3; EXPRESSED IN BRAIN, SIGNAL =   2; EXPRESSED IN BONE MARROW, SIGNAL = 1.5; EXPRESSED IN LUNG, SIGNAL = 2.2; EST_HUMAN HIT: BE677277.1, EVALUE 2.50e-02; NT HIT: gi7662289, EVALUE 9.00e-63; SWISSPROT HIT: P08121, EVALUE 2.00e-03
aacagccagaatcctagcagtcgcaatcataacctctttcaacttcagtttcctcatcttcacaattaaaataatcggtacagtcttctccacccccaccacctcacaatggctgaaaggagcccgacacagtgcctggaacgtaggaggagccagtacgatcacccccaaagcaacattcagggacacctggccctgtctagggatggtggggatgcagtctttggtccatcctcgggccctgaagctgggggacaccattcttccctgatgcagcagccccagccagcccgggccccacctgaacgcctctatgagccgctccactttctgagcctccccttggacacggatgtgcgcctggaatttcctgagggcctcatccagctccatggtagagaagtccatctcgtccacgacgcag

SEQ ID NO: 29803 - DNA, 195 bp, Homo sapiens
  MAP TO AC000134.14; EXPRESSED IN BRAIN, SIGNAL = 1.7; EXPRESSED IN PLACENTA, SIGNAL = 1.5; EXPRESSED IN ADULT LIVER, SIGNAL = 1.6; EXPRESSED IN BONE MARROW, SIGNAL = 1.5; EXPRESSED IN FETAL LIVER, SIGNAL = 1.6; EXPRESSED IN LUNG, SIGNAL = 4.9; NT HIT: AJ004862.1, EVALUE 7.00e-03; SWISSPROT HIT: P36720, EVALUE 1.30e+00
gtcagaggccatgcggggcaggcagcgggcagagagggcagggggtgacgggaaggaagacagtgtgaaacacagtgttagtcagagcagcggagcagttgggggaactggacgctatccctggtcaggggaaaagaccattcatgccatgcaaaatgtgggggacatggaaccaggaaccctcaaggctgagaa

SEQ ID NO: 29804 - DNA, 447 bp, Homo sapiens
  MAP TO AL121716.16; EXPRESSED IN BRAIN, SIGNAL = 2.4; EXPRESSED IN BONE MARROW, SIGNAL = 1.7; EXPRESSED IN ADULT LIVER, SIGNAL = 1.8; EXPRESSED IN PLACENTA, SIGNAL = 2.2; SWISSPROT HIT: P32214, EVALUE 6.00e+00; NT HIT: AB029040.1, EVALUE 0.00e+00; EST_HUMAN HIT: AA603882.1, EVALUE 1.00e-90
tctggatctatatcactgcactttgggggcatagcttcaatttctaattgagatgtaactgatgcagattccacttcgaggccacttacaactttacatatcaggtcaaatactacctgttgaacatcatcatctggggagctttccttgggcatttgagaatcctcttgggcattcacggtttcaggatcaacttcgtaactcaagttgtccccagcagaggactgtgaacatcccgagtcagaactctgaagtatttctatctgttggtctggaagatcaaaatcagacacaaccattggaattgtctcactgctggtacttaggagggaaagtctgtcacttaatggattcacagtgagactaaagttctctatttcatccatggtaagtggcttttcaccatttccttttgatgtgatgagttgtacttggctcactgatata

SEQ ID NO: 29805 - DNA, 240 bp, Homo sapiens
  MAP TO AL158017.2; EXPRESSED IN BRAIN, SIGNAL = 1.7; EXPRESSED IN PLACENTA, SIGNAL = 1.5; EXPRESSED IN LUNG, SIGNAL = 3.7; SWISSPROT HIT: P51805, EVALUE 3.00e-15; EST_HUMAN HIT: BE312887.1, EVALUE 1.00e-123; NT HIT: AB007932.1, EVALUE 0.00e+00
gtgtgtaaagttgtgaacacaaccaccctcacctgcctggcaccctctctgaccacggactaccgccctggcctggacactgtggaacgcccagatgagtttggatttgtctttaacaatgtccaatccttgctaatttacaacgacaccaagtttatctactaccccaacccgacctttgaactgcttagccctactggagtcttggatcaaaagccaggatcgcccatcattctgaag

SEQ ID NO: 29806 - DNA, 310 bp, Homo sapiens
  MAP TO AL138498.2; EXPRESSED IN BRAIN, SIGNAL = 1.5; EST_HUMAN HIT: W21826.1, EVALUE 0.00e+00; NT HIT: X82164.1, EVALUE 7.60e-01; SWISSPROT HIT: Q26600, EVALUE 7.70e-02
cttggtgaccttgtgttgcccattattgttgcaaaccttataccggatcatcagaataatgatgaataccagcacagatgctacaatgattccaccaataataataatcatggtgcctcccaaaaactgagactgcatgaaatggcaacgcacataatcctgttccgtagtaaactggatgcaacccacgactcttgtggcagtgagggaagtgatgccatcatcatatatggccaagacacacaagtcatacatagttccagcagccagattattgaccagaaaagttttgctcgtaggaggtatcatt

SEQ ID NO: 29807 - DNA, 193 bp, Homo sapiens
  MAP TO AC018388.4; EXPRESSED IN ADULT LIVER, SIGNAL = 1.5; EXPRESSED IN BONE MARROW, SIGNAL = 1.8; EXPRESSED IN BRAIN, SIGNAL = 1.6; EXPRESSED IN PLACENTA, SIGNAL =   2; SWISSPROT HIT: P24449, EVALUE 9.90e-01; NT HIT: U82695.2, EVALUE 7.00e-03; EST_HUMAN HIT: BF218650.1, EVALUE 3.00e-18
ctctcttctcacgatgtatttcatccagaagctgctcctgcctttctatctgttgaaagagacactgcaactcagattccttgttttcagtcaaattcctgagttgttgtctgcagagcatcagctggtgtcgcagatttttctctctgttttctctctctttcagttcctcacagagccactgaagtttagt

SEQ ID NO: 29808 - DNA, 120 bp, Homo sapiens
  MAP TO AL034423.18; EXPRESSED IN BRAIN, SIGNAL = 1.5; EXPRESSED IN PLACENTA, SIGNAL = 1.7; EXPRESSED IN LUNG, SIGNAL = 1.8; NT HIT: AB044550.1, EVALUE 1.00e-61; EST_HUMAN HIT: BE735661.1, EVALUE 2.00e-61
gcaagcgcctccaggagtggtgctctgtgatcctgtgcttcagcctcatcgcccacaacctggtccatctcctgctgctggcccgctgggaggacacacccctcgtcatactcggtgttg

SEQ ID NO: 29809 - DNA, 284 bp, Homo sapiens
  MAP TO AC007686.5; EXPRESSED IN BRAIN, SIGNAL = 2.1; EXPRESSED IN BONE MARROW, SIGNAL =  39; EXPRESSED IN LUNG, SIGNAL = 3.3; SWISSPROT HIT: Q02224, EVALUE 2.90e+00; NT HIT: U52111.2, EVALUE 2.70e+00; EST_HUMAN HIT: AW466922.1, EVALUE 0.00e+00
tttcagagcagcggcagagcaaacataggcgctttcagaataccctagtagtcctacataaatctggtttgctggagatcactttgaaaaccaaggagttgattcgtcagaatcaggcaactcaggtagaactagaccagctaaaggagcaaacccagctgtttatagaagccaccaagagcagggcccctcaggcttgggccaagctgcaggcatctttaacacctgggtccagtaatacaggcagtgacctagaagcattctctgatcacccagccatatag

SEQ ID NO: 29810 - DNA, 154 bp, Homo sapiens
  MAP TO AC010931.5; EXPRESSED IN BRAIN, SIGNAL = 2.9; EXPRESSED IN PLACENTA, SIGNAL =   2; EXPRESSED IN ADULT LIVER, SIGNAL = 1.9; EXPRESSED IN HELA, SIGNAL = 2.1; EXPRESSED IN LUNG, SIGNAL = 3.3; NT HIT: gi8923698, EVALUE 1.00e-81; EST_HUMAN HIT: AI073403.1, EVALUE 2.00e-74; SWISSPROT HIT: Q08379, EVALUE 4.00e-10
gtgaagctgctggagctgcaagagttggtgttgccccttgtgggcaaccatgaggggcatggcaaattcctcatcgctgcccagaaccctgctgatgagcccactccaggggccccagccccccaggaacttggggctgccggtgagcaggatg

SEQ ID NO: 29811 - DNA, 240 bp, Homo sapiens
  MAP TO AC017079.2; EXPRESSED IN BRAIN, SIGNAL = 1.3; NT HIT: gi9910279, EVALUE 1.00e-115; SWISSPROT HIT: P07397, EVALUE 4.00e-01; EST_HUMAN HIT: AU139468.1, EVALUE 1.00e-101
cccaacagagaactccgcaatgtcagctcctgcagccagggcctctgcagccccctccttggccattttggtgatgaagttcttagcagcgttggaagtctgagtttggagagctgcccagattgctctggagatctgagtgttctcatagcttatctctttggcaggattattgatcatgcttattctaacattgttactggatttctgttcacaaaatgggaaacgggagtcatattg

SEQ ID NO: 29812 - DNA, 276 bp, Homo sapiens
  MAP TO AC010636.3; EXPRESSED IN BRAIN, SIGNAL =   2; EXPRESSED IN BONE MARROW, SIGNAL =   3; EXPRESSED IN LUNG, SIGNAL = 2.4; EXPRESSED IN FETAL LIVER, SIGNAL = 1.9; EST_HUMAN HIT: AV738764.1, EVALUE 4.00e-65; NT HIT: gi11425396, EVALUE 5.00e-20; SWISSPROT HIT: O35681, EVALUE 3.50e+00
ctcagcgtctgatcacatctactgtcactcagggcctcagggggcggggccttaagcattatccaatcagggatggtgggctggaaaccatccaatcaggaacgcagctggagcgaagaggacggtttccgggtttggtgcggcctttgtctctcgctgcagtcagagctccaggtctggttcttctcctaaaggcccaggctgtgtggccccgtgtcctgcaggtattgggagatccacagctaagacaccgggacctcctggaagccaaaaatg

SEQ ID NO: 29813 - DNA, 495 bp, Homo sapiens
  MAP TO AC005137.1; EXPRESSED IN PLACENTA, SIGNAL = 1.4; EXPRESSED IN BRAIN, SIGNAL = 2.8; EXPRESSED IN ADULT LIVER, SIGNAL = 1.5; EXPRESSED IN LUNG, SIGNAL =   2; EXPRESSED IN BONE MARROW, SIGNAL = 1.6; NT HIT: gi7305360, EVALUE 1.20e+00; SWISSPROT HIT: Q92793, EVALUE 8.00e-01
gtgtggagccagcagtttgggttcccacagaggcccttggcaatgagaccctccctcccagtcaagggttgcccactcccagtgatgaggagccacagctgtcacaggaaagccccaggacccccacccacaggccagccctcaccccagctgccccactcaccacagccctgaacccaccagtgacagccactgaggagccagtggtgtctccaggccccacccagaccaccctgcagcagccactggagctcactgcatctcaactccccgccggccccacggagtccccagccagcaagggagtgactgccagcctcctggccatcccccatacaccagagtcctcatccctccctgttgcactgcagacacccacacctggcatggtgtcaggtgccatggagacaacaagggtgactgtgatctttgcaggaagccctaacatcacagtctcctcccggtcgccccctgcccctcgcttcccgctcatga

SEQ ID NO: 29814 - DNA, 277 bp, Homo sapiens
  MAP TO AC018711.2; EXPRESSED IN BRAIN, SIGNAL = 1.3; EXPRESSED IN LUNG, SIGNAL = 1.8; EST_HUMAN HIT: BF025947.1, EVALUE 2.00e-29; NT HIT: AJ005807.1, EVALUE 4.30e-02; SWISSPROT HIT: P34547, EVALUE 1.20e-02
gtgttacagactcgcctggtggatgcagccaaggccctgaacctggtgcactgccactgccttgacatctttattaaccaggcatttgacatgcagcgggacctgcagatcactcccaaacgtctggaatatactcgaaaaaaggagaatgagttgtatgaatcattgatgaatattgccaaccgaaagcaggaggaaatgaaggatatgattgttgagacacttaataccatgaaggaggaacttctggatgatgctactaacatggagtttaaag

SEQ ID NO: 29815 - DNA, 120 bp, Homo sapiens
  MAP TO AL049555.6; EXPRESSED IN BRAIN, SIGNAL = 4.6; EXPRESSED IN PLACENTA, SIGNAL = 1.4; EXPRESSED IN FETAL LIVER, SIGNAL = 1.9; EXPRESSED IN HELA, SIGNAL = 1.9; SWISSPROT HIT: P38958, EVALUE 1.80e+00; NT HIT: S90825.1, EVALUE 1.00e+00
aaaatgattaaaattggactcatcaagcagaatgtaaacagatactcctcgagttgatgcctcaacgatttctttgaaaatgtccacatctgtaaatatatccatcactaaagcaatgac

SEQ ID NO: 29816 - DNA, 262 bp, Homo sapiens
  MAP TO AC018507.2; EXPRESSED IN FETAL LIVER, SIGNAL = 1.6; EXPRESSED IN PLACENTA, SIGNAL = 2.1; EXPRESSED IN BRAIN, SIGNAL = 2.2; EXPRESSED IN LUNG, SIGNAL =   2; EXPRESSED IN ADULT LIVER, SIGNAL = 1.5; EST_HUMAN HIT: AW955834.1, EVALUE 1.00e-122; SWISSPROT HIT: Q08619, EVALUE 4.80e-01; NT HIT: gi11432863, EVALUE 1.00e-122
gaacctggataccccgcacagagggaatcttacgtgcatacctatatttcatgccagtctgctttgcggtggactctttgagagaaatgtgatgctgaggcgtgaacgtccccaggctgcgcgcgatgatagcgaccgtgcggaatttggcccgggctgcgttcaccacattgggggcggtggagctctgcttgctcagaagtcggtcctcaccattccgactcttcaaattgtgctctgtgcaggctatggagacttgcat

SEQ ID NO: 29817 - DNA, 131 bp, Homo sapiens
  MAP TO AC008481.4; EXPRESSED IN BRAIN, SIGNAL = 1.3; EXPRESSED IN BONE MARROW, SIGNAL = 2.8; EXPRESSED IN FETAL LIVER, SIGNAL = 2.8; EXPRESSED IN LUNG, SIGNAL = 3.1; EST_HUMAN HIT: BE888016.1, EVALUE 3.00e-14; NT HIT: AB025285.1, EVALUE 5.00e-12
gtggaagtggatcatcataaaggtcttcattctcatcgtcttcacattgagtaagctgaggaggaggaggaagaggaggggttggtcctgctgtcttaggggtggcagaggcagaagaggtggtggaggag

SEQ ID NO: 29818 - DNA, 181 bp, Homo sapiens
  MAP TO AC007500.2; EXPRESSED IN BONE MARROW, SIGNAL = 1.5; EXPRESSED IN PLACENTA, SIGNAL = 1.6; EXPRESSED IN BRAIN, SIGNAL = 1.6; EXPRESSED IN ADULT LIVER, SIGNAL = 1.5; EXPRESSED IN FETAL LIVER, SIGNAL = 1.5; EXPRESSED IN LUNG, SIGNAL =   2; EST_HUMAN HIT: BE259649.1, EVALUE 1.60e-01; SWISSPROT HIT: P24971, EVALUE 3.00e+00; NT HIT: AJ005195.1, EVALUE 4.20e-01
ttttaaccccaagattttggtggtctgtactgttttccctccatttactaactcaactgattttatttctattagtcttcatactgttctttactctgatacaatagattctccatggatcaatactgtcaacccaacacttttcatcaaagacagtaaaagttttcttaacaaatccaca

SEQ ID NO: 29819 - DNA, 343 bp, Homo sapiens
  MAP TO AC009330.5; EXPRESSED IN PLACENTA, SIGNAL = 1.8; EXPRESSED IN BRAIN, SIGNAL = 1.6; EXPRESSED IN ADULT LIVER, SIGNAL =   2; EXPRESSED IN FETAL LIVER, SIGNAL = 2.1; EXPRESSED IN HELA, SIGNAL =   2; EXPRESSED IN LUNG, SIGNAL = 2.2; NT HIT: AB040899.1, EVALUE 0.00e+00; EST_HUMAN HIT: AV693656.1, EVALUE 0.00e+00; SWISSPROT HIT: P10272, EVALUE 4.00e-24
aaccagactgttgctaaaagacattattcctaggtttggactgcctctaactttaggatcagataatggcccagcattcatggctgaagtagttcagcagctgtcgcagctgctaaagataaagtggaaactgcacatagtctaccacccacagagctcaggaaaggtacaatggatgaaccagacactaaaacatctgctgaagttttgtcaagaacctcatcttaggtgggatcaggtcttgcccatggcctttctccaagtcaggtgtacccttaccaaattgactgggctttcaccctgtgaaattgtgttcggccgaccacccccgattataaatcag

SEQ ID NO: 29820 - DNA, 131 bp, Homo sapiens
  MAP TO AL135905.2; EXPRESSED IN BRAIN, SIGNAL = 1.7; EXPRESSED IN PLACENTA, SIGNAL = 1.6; EXPRESSED IN ADULT LIVER, SIGNAL = 2.3; EXPRESSED IN FETAL LIVER, SIGNAL = 5.1; EXPRESSED IN HELA, SIGNAL = 7.1; EXPRESSED IN BONE MARROW, SIGNAL = 1.5; EXPRESSED IN LUNG, SIGNAL = 2.3; SWISSPROT HIT: Q00684, EVALUE 1.10e+00; EST_HUMAN HIT: BE835265.1, EVALUE 6.00e-68; NT HIT: gi4506282, EVALUE 4.00e-68
gattggccttttgatgatggtgcaccaccatccaaccagattgttgatgactggttaagtcttgtgaaaattaagtttcgtgaagaacctggttgttgtattgctgttcattgcgttgcaggccttgggag

SEQ ID NO: 29821 - DNA, 172 bp, Homo sapiens
  MAP TO AL138688.11; EXPRESSED IN ADULT LIVER, SIGNAL = 1.5; EXPRESSED IN BRAIN, SIGNAL = 1.5; EXPRESSED IN PLACENTA, SIGNAL = 3.2; NT HIT: gi11434759, EVALUE 2.00e-92; EST_HUMAN HIT: AL045342.1, EVALUE 3.00e-92; SWISSPROT HIT: Q14202, EVALUE 5.00e-08
tgttgatgttggttgtctctgttttcccctcgtcttcactcatcatatccgtcattgtaagcaactctgtatcaagagcatctgaagaaaccttgctttttagctcctcaattgctgcaggaatcttctcactgctgtccaatggagcaggcagaaaaacaggaactggcac

SEQ ID NO: 29822 - DNA, 162 bp, Homo sapiens
  MAP TO AC018505.3; EXPRESSED IN BRAIN, SIGNAL = 1.6; EXPRESSED IN ADULT LIVER, SIGNAL = 1.8; EXPRESSED IN FETAL LIVER, SIGNAL = 1.7; EXPRESSED IN HELA, SIGNAL = 1.8; SWISSPROT HIT: P38570, EVALUE 3.00e+00; NT HIT: Y14344.1, EVALUE 3.70e-01; EST_HUMAN HIT: BE395380.1, EVALUE 9.00e-03
aactactgtatccccacacgcatctcacaggcggggaaacaggggctcagggaggctgcctgttatacaaacagccaatgcctcagcagcacctactgcagctgggggaagcttacaggcattgtctcatggaagcttcagaacgtctctaagagtcacgtc

SEQ ID NO: 29823 - DNA, 108 bp, Homo sapiens
  MAP TO AC007221.2; EXPRESSED IN FETAL LIVER, SIGNAL = 1.8; EXPRESSED IN ADULT LIVER, SIGNAL = 1.7; EXPRESSED IN BONE MARROW, SIGNAL = 1.5; EXPRESSED IN BRAIN, SIGNAL = 1.5; NT HIT: AF004833.1, EVALUE 2.30e-01
aaggagtatgaaatcatcaggacttggaaaccgcatttcttgatgagtcagtttctcatggaggccttcagaccagatgatgtcaatagtttcactgatatgtaggac

SEQ ID NO: 29824 - DNA, 318 bp, Homo sapiens
  MAP TO AC009263.6; EXPRESSED IN PLACENTA, SIGNAL = 1.5; EXPRESSED IN BRAIN, SIGNAL = 1.3; SWISSPROT HIT: Q92935, EVALUE 2.10e+00; EST_HUMAN HIT: AA059167.1, EVALUE 7.40e-02
ttctgttagctggagataaacagcagtgaataaaagaaagtctctgctttcacggtgtttccattttgttagacgagaaaacagacaagcacacttatcagggcttcccaacaggtatgccggggagtgccccagctccatgggactgggaaggagggcaagttggcagcagaggctggagcgactgcacccctgagatggattccacccactatgattaggctcatccattactttgacacaaagcaccatgcagatatcatcattttccatgactgccatgacagcagggctcggggatactaaagaaatcatttg

SEQ ID NO: 29825 - DNA, 135 bp, Homo sapiens
  MAP TO AC007955.4; EXPRESSED IN BRAIN, SIGNAL = 1.3; EXPRESSED IN PLACENTA, SIGNAL = 1.6; SWISSPROT HIT: O28931, EVALUE 3.10e+00; NT HIT: U09018.1, EVALUE 1.90e-02; EST_HUMAN HIT: AI218001.1, EVALUE 3.00e-08
gtacagggaggactctgctggaatgagtggctcatagctgggttttatggcctcttctggggtgtagggatgagaagaattctttctagtttcgatggcctgcttctgctgtgtcctgaaatgccaaggtgccat

SEQ ID NO: 29826 - DNA, 153 bp, Homo sapiens
  MAP TO AL132987.2; EXPRESSED IN PLACENTA, SIGNAL = 1.8; EXPRESSED IN BRAIN, SIGNAL = 1.6; EXPRESSED IN ADULT LIVER, SIGNAL = 1.6; EXPRESSED IN LUNG, SIGNAL =   4; EXPRESSED IN BONE MARROW, SIGNAL = 4.8; NT HIT: gi11434806, EVALUE 3.00e-54; EST_HUMAN HIT: BE090167.1, EVALUE 4.00e-54
ctaaactgatcaattgaactagcagctttgcgaacttttccgtacattcctgccagattagtttctgtgtcattaaaaagaacaggaacatttcgcagacgagtgcctgtttaaataagaaaataaattagtgtactgacataaaaattaact

SEQ ID NO: 29827 - DNA, 81 bp, Homo sapiens
  MAP TO AC007514.5; EXPRESSED IN PLACENTA, SIGNAL = 2.2; EXPRESSED IN ADULT LIVER, SIGNAL = 1.5; EXPRESSED IN FETAL LIVER, SIGNAL = 1.7; EXPRESSED IN HELA, SIGNAL = 1.7; EXPRESSED IN BRAIN, SIGNAL = 1.3; NT HIT: AF143675.1, EVALUE 2.60e+00; EST_HUMAN HIT: AV732534.1, EVALUE 3.80e+00
aaaaacaacaacagcaacaacaacaacaacaactactactactactactattgctacttttccttctatcaggaatactag

SEQ ID NO: 29828 - DNA, 161 bp, Homo sapiens
  MAP TO AC007608.2; EXPRESSED IN BRAIN, SIGNAL = 1.3; EXPRESSED IN PLACENTA, SIGNAL = 1.7; EXPRESSED IN ADULT LIVER, SIGNAL = 1.5; SWISSPROT HIT: Q01443, EVALUE 6.80e+00; EST_HUMAN HIT: AW104982.1, EVALUE 1.40e-01
atgttctgcatcttccccaaaactcctgaaaatccacctatgcgggacttcctccatccaaggaaccccatcactcctaaccagagggttccacttaataagttcttggacctcctacagacaagacaccatgctaaaaagctcacaagatacaacaagga

SEQ ID NO: 29829 - DNA, 459 bp, Homo sapiens
  MAP TO AC011377.3; EXPRESSED IN PLACENTA, SIGNAL = 1.5; EXPRESSED IN BRAIN, SIGNAL = 1.4; EXPRESSED IN FETAL LIVER, SIGNAL = 1.8; EXPRESSED IN BONE MARROW, SIGNAL = 1.5; EXPRESSED IN HELA, SIGNAL = 1.7; EXPRESSED IN LUNG, SIGNAL = 2.5; NT HIT: gi4758063, EVALUE 0.00e+00; EST_HUMAN HIT: AV701152.1, EVALUE 0.00e+00; SWISSPROT HIT: Q12446, EVALUE 5.50e-01
atgggtgaaccacagcaagtgagtgcacttccaccacctccaatgcaatatatcaaggaatatacggatgaaaatattcaagaaggcttagctcccaagcctccccctccaataaaagacagttacatgatgtttggcaatcagttccaatgtgatgatcttatcatccgccctttggaaagtcagggcatcgaacggcttcatcctatgcagtttgatcacaagaaagaactgagaaaacttaatatgtctatccttattaatttcttggaccttttagatattttaataaggagccctgggagtataaaacgagaagagaaactagaagatcttaagctgctttttgtacacgtgcatcatcttataaatgaataccgaccccaccaagcaagagagaccttgagagtcatgatggaggtccagaaacgtcaacggcttgaaacagctgagagattt

SEQ ID NO: 29830 - DNA, 180 bp, Homo sapiens; identical to SEQ ID NO: 21254
  MAP TO AL034380.25; EXPRESSED IN BRAIN, SIGNAL = 1.3; EXPRESSED IN BONE MARROW, SIGNAL = 1.7; NT HIT: AF060568.1, EVALUE 1.70e+00; EST_HUMAN HIT: AA705222.1, EVALUE 8.00e-90; SWISSPROT HIT: P29974, EVALUE 2.30e-02

SEQ ID NO: 29831 - DNA, 213 bp, Homo sapiens
  MAP TO AC008752.3; EXPRESSED IN BRAIN, SIGNAL = 2.7; EXPRESSED IN PLACENTA, SIGNAL = 1.4; EXPRESSED IN BONE MARROW, SIGNAL =   2; EXPRESSED IN FETAL LIVER, SIGNAL = 1.6; EXPRESSED IN LUNG, SIGNAL = 3.4; NT HIT: gi11424835, EVALUE 1.00e-117; SWISSPROT HIT: Q13526, EVALUE 2.00e-29; EST_HUMAN HIT: BE392505.1, EVALUE 1.00e-116
cgttgatcagctccagggcctcctccttggtccgggtgatcttctcctgccgccaggacgagggccgccgtgactggctgtgcttcaccagcaggtgcgagcagcggaccctggcaggctccccctgcccgtttttgccaccactgctgctgttgccgctgggccgctcccactggctggcgttagtgatgtggttgaagtagtacactcggc

SEQ ID NO: 29832 - DNA, 164 bp, Homo sapiens
  MAP TO AC008430.3; EXPRESSED IN BRAIN, SIGNAL = 1.7; EXPRESSED IN HELA, SIGNAL = 1.9; EXPRESSED IN LUNG, SIGNAL = 2.1; NT HIT: gi5031660, EVALUE 1.00e-87; EST_HUMAN HIT: AA112613.1, EVALUE 4.00e-79; SWISSPROT HIT: Q08431, EVALUE 1.00e-11
gtcattttctgcagctgtccacgcatttataagccccttcttattaagacgtgcatagtagggataccatttttggagtccaaaaagagctcggtgagtagaggaagctgtgatttgctggtttgatataattccaccttcaattcccagtgggcctgagcatt

SEQ ID NO: 29833 - DNA, 169 bp, Homo sapiens
  MAP TO AC011462.3; EXPRESSED IN BRAIN, SIGNAL = 1.8; EXPRESSED IN ADULT LIVER, SIGNAL = 1.5; EXPRESSED IN LUNG, SIGNAL =   2; EST_HUMAN HIT: BF663459.1, EVALUE 2.00e-90; NT HIT: J04474.1, EVALUE 1.00e-90; SWISSPROT HIT: P12694, EVALUE 1.00e-27
gcagcagcagcagttttcatctctggatgacaagccccagttcccaggggcctcggcggagtttatagataagttggaattcatccagcccaacgtcatctctggaatccccatctaccgcgtcatggaccggcaaggccagatcatcaaccccagcgaggacccccac

SEQ ID NO: 29834 - DNA, 134 bp, Homo sapiens
  MAP TO AC009263.6; EXPRESSED IN BRAIN, SIGNAL = 1.5; EXPRESSED IN BONE MARROW, SIGNAL = 1.5; EXPRESSED IN LUNG, SIGNAL = 3.3; EXPRESSED IN PLACENTA, SIGNAL = 4.2; EST_HUMAN HIT: BF340825.1, EVALUE 6.00e-65; SWISSPROT HIT: P33665, EVALUE 9.10e+00; NT HIT: Z70724.1, EVALUE 3.00e-04
cgtgtggtacatgagggcctcgccgtccccgggctctgacagctcgctcagcttgcggtcccactgcagcacgccctgctccccgctctccagcacctccatggcggtgcgggccgcgctgggccgaggatgct

SEQ ID NO: 29835 - DNA, 189 bp, Homo sapiens
  MAP TO AL135745.2; EXPRESSED IN BRAIN, SIGNAL = 2.8; EXPRESSED IN BONE MARROW, SIGNAL = 1.6; EXPRESSED IN FETAL LIVER, SIGNAL = 3.1; EXPRESSED IN LUNG, SIGNAL = 5.6; EXPRESSED IN PLACENTA, SIGNAL = 1.5; EST_HUMAN HIT: AA976118.1, EVALUE 4.20e-02; SWISSPROT HIT: P03873, EVALUE 2.90e+00
agtaaagacatcatcatgatgaacaaacaacttttagtgtatattatgtgtaagacgctggccaggcaccaggagaacacacagagagaatacataatttatactcggatgatttactatcttgaggagattagatatatgcatttaaatacatacatacattttaacaaacaaataaaaactaccaga

SEQ ID NO: 29836 - DNA, 130 bp, Homo sapiens
  MAP TO AC011455.3; EXPRESSED IN BRAIN, SIGNAL = 3.7; EXPRESSED IN BONE MARROW, SIGNAL = 1.6; EXPRESSED IN LUNG, SIGNAL = 2.8; NT HIT: gi6912655, EVALUE 2.00e-67; SWISSPROT HIT: P53686, EVALUE 1.00e-04; EST_HUMAN HIT: BF034485.1, EVALUE 2.00e-67
aacatagataccctggagcgaatagccgggctggaacaggaggacttggtggaggcgcacggcaccttctacacatcacactgcgtcagcgccagctgccggcacgaatacccgctaagctggatgaaag

SEQ ID NO: 29837 - DNA, 172 bp, Homo sapiens
  MAP TO AC004554.1; EXPRESSED IN LUNG, SIGNAL = 3.6; EXPRESSED IN ADULT LIVER, SIGNAL = 1.5; EXPRESSED IN BRAIN, SIGNAL = 2.5; EXPRESSED IN FETAL LIVER, SIGNAL = 1.9; EXPRESSED IN BONE MARROW, SIGNAL = 4.5; EST_HUMAN HIT: AW408354.1, EVALUE 3.00e-92; NT HIT: gi5803103, EVALUE 2.00e-92; SWISSPROT HIT: Q23356, EVALUE 1.30e+00
acccccaaaaggcgcaaagctgagccagaagcattgcagtctctgaggcggtccacgcgccacagtgccaactgtgacaggctttctgagagcagcgcttcacctcagcccaagcgccggcagcaggacacatccgccagcatgcccaagctcttcctgcacctggaaaaga

SEQ ID NO: 29838 - DNA, 257 bp, Homo sapiens
  MAP TO AL138827.2; EXPRESSED IN PLACENTA, SIGNAL = 1.3; EXPRESSED IN BRAIN, SIGNAL = 1.4; EXPRESSED IN HELA, SIGNAL = 1.9; EXPRESSED IN ADULT LIVER, SIGNAL = 1.5; EXPRESSED IN FETAL LIVER, SIGNAL = 2.3; NT HIT: L38826.1, EVALUE 2.00e-47; SWISSPROT HIT: P46778, EVALUE 7.00e-13; EST_HUMAN HIT: AV751477.1, EVALUE 1.00e-49
tcagttcttagagtgcttaatgtgctcaatatgcacattaattctcttggcaagaatcttgcccttaacttgtgtgtttacagcaatgctaacagcatgctggggaacactgtagactcttccagctttgggaacacttgtggggcatttctcccaacctatctttccaggcttttcactgacttctcccaggtcttgctttattccaatcttcctgcatatccattccatgcccttgtacataccattccacttgt

SEQ ID NO: 29839 - DNA, 177 bp, Homo sapiens
  MAP TO AL138498.2; EXPRESSED IN BRAIN, SIGNAL = 1.3; EXPRESSED IN FETAL LIVER, SIGNAL = 1.7; EST_HUMAN HIT: AA324716.1, EVALUE 2.40e+00; NT HIT: AJ242804.1, EVALUE 7.00e-03
atgcctgaaaataggatcaagatgcagttttattcactcattgtaaatacaaactgtttaacaaaattcttggcccaggacagattctccataagcagcagctgcagcagccgtcattactgcaacagtgtagtaagcaagaacaataacaaagtggaaacagcctattaccaattt

SEQ ID NO: 29840 - DNA, 189 bp, Homo sapiens
  MAP TO AL158153.2; EXPRESSED IN ADULT LIVER, SIGNAL = 1.8; EXPRESSED IN FETAL LIVER, SIGNAL = 1.9; EXPRESSED IN BRAIN, SIGNAL = 1.4; EXPRESSED IN BONE MARROW, SIGNAL = 1.5; EXPRESSED IN HELA, SIGNAL = 1.7; SWISSPROT HIT: P41111, EVALUE 3.40e-01; NT HIT: gi6981351, EVALUE 1.10e-01; EST_HUMAN HIT: BF357098.1, EVALUE 1.70e-01
ctcagccacgtccttctcacccttagccgaagacatcactgccctgctctgcgctgaaaatgtaggccccccagaaagaatgctcacagcttctccgacatccacatctacacccttatcttcacttgcacccattttcacttttcccccttgttttgagagcaaagtgtgtctgattgcaaagttcat

SEQ ID NO: 29841 - DNA, 217 bp, Homo sapiens
  MAP TO AC020904.3; EXPRESSED IN LUNG, SIGNAL = 3.4; EXPRESSED IN PLACENTA, SIGNAL = 1.6; EXPRESSED IN BRAIN, SIGNAL = 2.4; EXPRESSED IN ADULT LIVER, SIGNAL = 1.6; EXPRESSED IN BONE MARROW, SIGNAL = 1.9; SWISSPROT HIT: P42701, EVALUE 4.00e-33; EST_HUMAN HIT: BE243764.1, EVALUE 1.00e-85; NT HIT: AJ297701.1, EVALUE 1.00e-119
cgtctggcccactgggccccaggaccttggccttgcacctgtctccatcctccaaggacaactctgtatccagggccagctcaggggcaccctcaggtagctctgtcttctcgagaggctcagtcctctcgcctttgtcccaggacatctctaccaccagggcctcctgcagggatgcctcttcctggaagtccactgggttgatccactgccaagt

SEQ ID NO: 29842 - DNA, 211 bp, Homo sapiens
  MAP TO AL121955.4; EXPRESSED IN BRAIN, SIGNAL = 1.3; NT HIT: AF186812.1, EVALUE 5.00e-01; SWISSPROT HIT: Q13438, EVALUE 3.20e-01; EST_HUMAN HIT: AA912480.1, EVALUE 1.90e-01
ctttcatatccatcctcatccttcccgggccaatcaactggacctttcccaatctcctccacctccttaagtgacagtggtttgcacccagctgcttaagccccaaacctagaagctgcccttgatcctgccttttcccacctgtcacatccaagccatcagcaatccttccagatccttctctactgcccatatcatccaattccccacc

SEQ ID NO: 29843 - DNA, 273 bp, Homo sapiens
  MAP TO AP001205.1; EXPRESSED IN BRAIN, SIGNAL = 2.4; EXPRESSED IN ADULT LIVER, SIGNAL = 1.7; EXPRESSED IN BONE MARROW, SIGNAL = 7.1; EXPRESSED IN FETAL LIVER, SIGNAL = 6.2; EXPRESSED IN HELA, SIGNAL = 3.7; EXPRESSED IN LUNG, SIGNAL = 9.9; EXPRESSED IN PLACENTA, SIGNAL = 2.5; EST_HUMAN HIT: BE018293.1, EVALUE 0.00e+00; NT HIT: gi4505574, EVALUE 0.00e+00; SWISSPROT HIT: P11940, EVALUE 3.00e-48
gttatgatggagggtggtcgcagcaaagggtttggttttgtatgtttctcctccccagaagaagccactaaagcagttacagaaatgaacggtagaattgtggccacaaagccattgtatgtagctttagctcagcgcaaagaagagcgccaggctcacctcactaaccagtatatgcagagaatggcaagtgtacgagctgttcccaaccctgtaatcaacccctaccagccagcacctccttcaggttacttcatggcagctatcccacag

SEQ ID NO: 29844 - DNA, 314 bp, Homo sapiens
  MAP TO AP000957.2; EXPRESSED IN FETAL LIVER, SIGNAL = 2.5; EXPRESSED IN BRAIN, SIGNAL = 1.3; EXPRESSED IN HELA, SIGNAL = 2.8; SWISSPROT HIT: P04374, EVALUE 2.00e-41; EST_HUMAN HIT: AA374596.1, EVALUE 3.00e-84; NT HIT: Y00052.1, EVALUE 1.00e-85
ggacgaagttctcatcatcaaatttcttcccgtagatggacttgccaccagtgccattatgctgtgtgaagtcaccaccctgacacataaacccaggaacaattctgtgaaagtaggaacctttataaccaaatcctttctctccaatgattagagcacaaaaattttctgctgtctttggaatcttgtctgcaaacagctcaaaggagacacgtcccaagagctcaccatccacgatgatgtctaagaacctggtggggttgaccatggctgatagaacggggctcctggcagcggtggcatctgcaaagcca

SEQ ID NO: 29845 - DNA, 198 bp, Homo sapiens
  MAP TO AH009158.1; EXPRESSED IN BRAIN, SIGNAL = 1.4; EXPRESSED IN ADULT LIVER, SIGNAL =   2; EXPRESSED IN HELA, SIGNAL = 1.6; EXPRESSED IN PLACENTA, SIGNAL = 1.4; EST_HUMAN HIT: AF126045.1, EVALUE 8.00e-16; NT HIT: AF223391.1, EVALUE 1.00e-108; SWISSPROT HIT: P27585, EVALUE 7.50e-01
ggccccccaaaatcatcacctcctccctgcttaacaaacagtccaggttttctaatggcaaacataccccctgcatgaccattcacccctggaccccaccctccagcagcgcccccaccactagtgaatgccttcttgccactcagtttgctcccaacacccctttccagccactcactgaagctaccttggcaagta

SEQ ID NO: 29846 - DNA, 181 bp, Homo sapiens
  MAP TO AL121964.16; EXPRESSED IN BRAIN, SIGNAL = 1.4; EXPRESSED IN BONE MARROW, SIGNAL = 1.7; EXPRESSED IN LUNG, SIGNAL =   2; SWISSPROT HIT: Q62073, EVALUE 6.00e-28; NT HIT: gi11418982, EVALUE 9.00e-98; EST_HUMAN HIT: BF247246.1, EVALUE 1.00e-97
gcaagaactagttgcagaactggaccaggatgaaaaggaccagcaaaatacatctcgcctggtacaggaacataaaaagcttttagatgaaaacaaaagcctttctacttactaccagcaatgcaaaaaacaactagaggtcatcagaagtcagcagcagaaacgacaaggcacttcatga

SEQ ID NO: 29847 - DNA, 120 bp, Homo sapiens
  MAP TO AF233390.1; EXPRESSED IN ADULT LIVER, SIGNAL = 1.7; EXPRESSED IN BRAIN, SIGNAL = 1.5; EXPRESSED IN PLACENTA, SIGNAL = 1.4; EXPRESSED IN LUNG, SIGNAL = 3.3; NT HIT: AB007830.1, EVALUE 1.00e-61; EST_HUMAN HIT: BE261743.1, EVALUE 9.90e-02
ccagagaggccaacacagccacggccaccaggagcagggccaggaagaggtaaagaatccgcaccgatgtgtgcaaagataggttcttctggcagcggctgcagcggggccctggccggc

SEQ ID NO: 29848 - DNA, 171 bp, Homo sapiens
  MAP TO AL159141.1; EXPRESSED IN BONE MARROW, SIGNAL = 1.5; EXPRESSED IN PLACENTA, SIGNAL = 5.2; EXPRESSED IN BRAIN, SIGNAL = 1.7; EXPRESSED IN ADULT LIVER, SIGNAL = 1.7; EST_HUMAN HIT: AA393627.1, EVALUE 4.00e-08; SWISSPROT HIT: O95239, EVALUE 4.50e-01; NT HIT: gi11421885, EVALUE 4.00e-07
aggccagaggggacaaggtcaagtgggtgttcacctggcccctcatcttcctcctgtgcgtcaccattcccaactgcagcaagccccgctgggagaagttcttcatggtcaccttcatcaccgccacgctgtggatcgctgtgttctcctacatcatggtgtggctggtga

SEQ ID NO: 29849 - DNA, 134 bp, Homo sapiens
  MAP TO AJ246003.1; EXPRESSED IN FETAL LIVER, SIGNAL = 1.6; EXPRESSED IN LUNG, SIGNAL = 2.1; EXPRESSED IN BRAIN, SIGNAL = 1.5; EXPRESSED IN PLACENTA, SIGNAL = 1.8; EXPRESSED IN ADULT LIVER, SIGNAL = 1.6; SWISSPROT HIT: P32833, EVALUE 2.40e+00; NT HIT: gi11429685, EVALUE 7.00e-70
ggtactccgaaaacaaataggacaaataaaccttctacccctacaactgctactcgtaagaaaaaagacttgaagaattttaggaatgtggacagcaaccttgctaaccttataatgaatgaaattgtggacaa

SEQ ID NO: 29850 - DNA, 78 bp, Homo sapiens
  MAP TO AL136226.2; EXPRESSED IN BRAIN, SIGNAL = 1.5; EXPRESSED IN PLACENTA, SIGNAL = 9.5; EXPRESSED IN ADULT LIVER, SIGNAL = 1.6; EXPRESSED IN HELA, SIGNAL = 3.6; EST_HUMAN HIT: AI886401.1, EVALUE 4.00e-09; NT HIT: M18818.1, EVALUE 1.60e-01
ctatcacatgccagggatcctcaagaaaattatcagcagatttctcatcagaaatcttggaattcagaatgtagtgag

SEQ ID NO: 29851 - DNA, 174 bp, Homo sapiens
  MAP TO AC024168.1; EXPRESSED IN PLACENTA, SIGNAL = 1.4; EXPRESSED IN LUNG, SIGNAL =   2; EXPRESSED IN BRAIN, SIGNAL = 1.3; EST_HUMAN HIT: AV721846.1, EVALUE 2.00e-93; SWISSPROT HIT: O00874, EVALUE 1.70e+00
ctctgtcaaatagccagttgagttcacaaacttctcaaattcagtattactgacttcataggcatccatgtaaaaggcatcaatagtaactctcctcgcaggtgcttccccatcctgctttatctgaggatcatctgtgcccattgtaaatactccagcagggatggggaccat

SEQ ID NO: 29852 - DNA, 447 bp, Homo sapiens
  MAP TO AC000134.14; EXPRESSED IN BRAIN, SIGNAL = 1.8; SWISSPROT HIT: Q21313, EVALUE 3.00e-03; EST_HUMAN HIT: BF528907.1, EVALUE 0.00e+00; NT HIT: AB023138.1, EVALUE 0.00e+00
cttttcgcccatccctctggaagtccacgtgacaccactcgccatcattgaccttgcggctggatgcccgcagcttgatgcccccagatcccatgtccagcagaagatagaggtggccgtccaatagctccatggcaaagtagtcggcccgctgagcagagctgtggctgccagctccacccccagcccgccggccctggctgaagagcagcagcccattgggctcggtggtgcggaagtctagggagatggagccagtgcgcttagcgctccagcggggcagcgccacaaaggcctcgggactctcaaaggtcacagggtccagggcagccacatcctcacagcggaatgacaagtccccctgcagcttcatcttggggtccccttcctttgccaggcgggatagttccaatttgaagtcattgttcttatagaccacctgcaggg

SEQ ID NO: 29853 - DNA, 127 bp, Homo sapiens
  MAP TO AL121654.1; EXPRESSED IN BRAIN, SIGNAL = 1.3; EXPRESSED IN ADULT LIVER, SIGNAL = 1.7; NT HIT: gi11439596, EVALUE 1.10e+00
cctatgtggaggggcaccacctctcatgtggccaagactgatggcaaaggtagggaagtagaataatcttatcacacagaggcagcagatactgggggcaaaacttaatctaacacagcaagaaagt

SEQ ID NO: 29854 - DNA, 83 bp, Homo sapiens
  MAP TO AC013568.3; EXPRESSED IN PLACENTA, SIGNAL = 1.5; EXPRESSED IN BRAIN, SIGNAL = 1.5; EXPRESSED IN ADULT LIVER, SIGNAL = 1.6; EST_HUMAN HIT: AA701494.1, EVALUE 1.00e+00; SWISSPROT HIT: P34675, EVALUE 5.60e+00
tatttcctggatttgttcctggcaacctcgctgggtctgaactgctggcctgcccagtggcagaagactgcttgcaacctttg

SEQ ID NO: 29855 - DNA, 127 bp, Homo sapiens
  MAP TO AL121603.2; EXPRESSED IN LUNG, SIGNAL =   6; EXPRESSED IN PLACENTA, SIGNAL = 3.7; EXPRESSED IN BRAIN, SIGNAL = 1.6; NT HIT: L16877.1, EVALUE 1.10e+00; EST_HUMAN HIT: H64035.1, EVALUE 1.70e+00
attttaatcatttttcttgctacccaaagccttggcctaaatagtttaatcaagttgaatttagtgatctcaattatgatggtgacccaccattttattaccaacaagtgtagacctgtgtttagtt

SEQ ID NO: 29856 - DNA, 157 bp, Homo sapiens
  MAP TO AC012404.4; EXPRESSED IN PLACENTA, SIGNAL = 2.8; EXPRESSED IN BRAIN, SIGNAL = 1.8; EXPRESSED IN ADULT LIVER, SIGNAL = 1.4; EXPRESSED IN LUNG, SIGNAL = 3.2
ttccacacgaagaagaagaagaagaagaagaacaagaagaagaagaagaagaagaagaagaggaagaggaagaggaagaggaagaagaagaagaagaagaagaagaagaagaagaagaagaagaagaagaagaagaagaagaagaagaaagcctttc

SEQ ID NO: 29857 - DNA, 316 bp, Homo sapiens
  MAP TO AC009425.2; EXPRESSED IN BRAIN, SIGNAL = 1.5; SWISSPROT HIT: Q61772, EVALUE 2.00e-58; NT HIT: gi4758281, EVALUE 0.00e+00
ctgcttgaccagtggtgatactgacagcagcaaagagcctctgggatcggcttaagtcagaaactccatttacagcttcaacttcaaaagtataattagcgtgggctagcaggtccatgacagtgacatagttatcctctaatccagtctgctggggcatgtatccaatgttactcccacagggaacacattcgccctgctcccaactgcaccgcttacacaatattctgtaggtcacatcgtttcttcccccattgtctgcaggaggactccattccaaacttactgtggtttggttgatgttgaaaatgaggtt

SEQ ID NO: 29858 - DNA, 158 bp, Homo sapiens
  MAP TO AC022013.2; EXPRESSED IN BRAIN, SIGNAL = 1.3; EXPRESSED IN ADULT LIVER, SIGNAL = 1.5; EXPRESSED IN PLACENTA, SIGNAL = 1.6; NT HIT: M84797.1, EVALUE 1.40e+00; EST_HUMAN HIT: T96102.1, EVALUE 1.40e-01; SWISSPROT HIT: O31314, EVALUE 2.30e+00
aaatcaacaccggttggaaatcacagccccagcttcctgttttggccttcttctcacaacttagtcctttcacccactcttctggtatctgggaccctggcctctatacccgtcagaactcactgtggaatcatgtggactttaatgtgaaccactaa

SEQ ID NO: 29859 - DNA, 202 bp, Homo sapiens
  MAP TO AC013528.3; EXPRESSED IN BRAIN, SIGNAL = 2.4; EXPRESSED IN BONE MARROW, SIGNAL = 2.5; EXPRESSED IN FETAL LIVER, SIGNAL = 1.6; EXPRESSED IN ADULT LIVER, SIGNAL = 1.5; EXPRESSED IN LUNG, SIGNAL = 2.3; EXPRESSED IN PLACENTA, SIGNAL = 2.4; SWISSPROT HIT: P08648, EVALUE 1.40e-01
ggggcgcactctggcccacaccgacagcggcctggaggcacttctaggaaatcaaggtgcccttggagacagaatcccagcaggagccccacgccgagtgggagagacctccgccctgcttctgaagccgcaggcgctggcctcaataatcccccagccgcgggccgatttggcatcctccgacccctgcggccactgccag

SEQ ID NO: 29860 - DNA, 404 bp, Homo sapiens
  MAP TO AC006548.20; EXPRESSED IN ADULT LIVER, SIGNAL = 1.9; EXPRESSED IN PLACENTA, SIGNAL = 1.5; EXPRESSED IN BRAIN, SIGNAL = 1.6; EXPRESSED IN BONE MARROW, SIGNAL =   2; EXPRESSED IN FETAL LIVER, SIGNAL = 1.8; EXPRESSED IN HELA, SIGNAL = 1.8; EST_HUMAN HIT: AU140898.1, EVALUE 3.00e-48; NT HIT: gi11436955, EVALUE 3.00e-50; SWISSPROT HIT: P13238, EVALUE 3.50e-01
gaggttcttgtctaacgtgactgtcctaggaatctggtgcactgagagtggggtggccggaacaccactattgttcaccaggtggcccccaaactcctggaacagggtgcttctgggtgccttgaaggggtacacaccctcattatccgcctcagagcctgtgaggctgcctctggtgtggccatgggaggccaggctccaggggattctgtgggtgctgcctctgaattctgcattgtgctggctgggcttggaaaggctatggaagccatggatgtgaccgctgaccccatcaacactgtatccactgtgctgggcaagattttgcatggctgtgtttctcctcatgatgaatggggcctcagaaccctgggagaagctggcactcctaagagagagaaaga

SEQ ID NO: 29861 - DNA, 280 bp, Homo sapiens
  MAP TO AL133271.11; EXPRESSED IN BRAIN, SIGNAL = 1.3; EXPRESSED IN FETAL LIVER, SIGNAL = 1.8; SWISSPROT HIT: P41997, EVALUE 1.00e-14; NT HIT: U66061.1, EVALUE 4.00e-33; EST_HUMAN HIT: AA453647.1, EVALUE 2.00e-33
tcaacacattttttgacaatgagaaataagtttgtttattcctgtcatgtagaaatccatgctttggtatttgatgaactcatggaaagcatttcctgcatgctgctgcttgtggaagtcttttccctgaaaaatattgttgctttgcttgaagaagtggtagtcagttggtgagaggtcaaacgaatatggcagatgaggcaaaactccatagcccaattcgtacaacttttgaagcgttgattgtgcgatgtgcggttgggcgttgtcatggagaatt

SEQ ID NO: 29862 - DNA, 107 bp, Homo sapiens
  MAP TO AC010931.5; EXPRESSED IN PLACENTA, SIGNAL = 1.4; EXPRESSED IN BRAIN, SIGNAL = 1.7; EXPRESSED IN HELA, SIGNAL =   2; EXPRESSED IN LUNG, SIGNAL = 3.1; EST_HUMAN HIT: AL044559.1, EVALUE 1.00e-06; SWISSPROT HIT: Q62839, EVALUE 1.00e-05; NT HIT: gi8923698, EVALUE 7.00e-54
aagagtccaaggatctggctggccgcctgcaatactccttacagcgtattcaagaattggagcgggctctctgtgctgtgtctacacagcagcaggaagaggacagg

SEQ ID NO: 29863 - DNA, 371 bp, Homo sapiens
  MAP TO AC008132.34; EXPRESSED IN BONE MARROW, SIGNAL = 4.8; EXPRESSED IN LUNG, SIGNAL = 5.1; EXPRESSED IN PLACENTA, SIGNAL = 1.9; EXPRESSED IN BRAIN, SIGNAL = 2.8; EXPRESSED IN FETAL LIVER, SIGNAL = 1.8; SWISSPROT HIT: P52591, EVALUE 1.00e-04; NT HIT: gi11417834, EVALUE 0.00e+00; EST_HUMAN HIT: AL042278.1, EVALUE 0.00e+00
gccctcaaggagagcggggcagggatgcctgagcaggacaaggaccctagagtccaagagaatcctggtgatcagagaagggtccccgaggtcaccggggatgcaccgtctgcatttcggcccctgcgggacaatagaggcctctctccctttgtgcccgggcccgggcctctgcagacagacctccatgcccagaggtcagaaatcagatataaccagacatcccagacctcctggacgagctcctgcaccaaccgaaatgccatctccagctcctacagctccacgggaggcttgccggggctaaagcggaggagggggccagcctcatcccactgccagctgaccctcagttcctcaaagacagtgag

SEQ ID NO: 29864 - DNA, 133 bp, Homo sapiens
  MAP TO AC009499.2; EXPRESSED IN BRAIN, SIGNAL = 2.3; NT HIT: D63999.1, EVALUE 4.60e+00; SWISSPROT HIT: O78439, EVALUE 7.00e+00
agcaaagtctttgattttatggaggtcattggggaaatgaaactcacacatgttatacaggatgtttaaagtgatgctgagatcctgggctgtgatggcaacagtaaggctcaaatggaaggcacccatgtcg

SEQ ID NO: 29865 - DNA, 176 bp, Homo sapiens
  MAP TO AC023490.4; EXPRESSED IN BONE MARROW, SIGNAL = 3.9; EXPRESSED IN LUNG, SIGNAL = 2.3; EXPRESSED IN BRAIN, SIGNAL = 1.9; EST_HUMAN HIT: AA425488.1, EVALUE 1.50e-01; SWISSPROT HIT: Q14693, EVALUE 3.40e-01
cagatcctggataaacctcaaaggtgaaggtgatgggatgtgctgagagtcatcagtgggatgtgcataagagggagtcaaagatgtctgagcagagagaaggacctcgctggcatctacagtgaagggagggacctcgctggcatctacagtgaatggagggacctcgctggcat

SEQ ID NO: 29866 - DNA, 267 bp, Homo sapiens
  MAP TO AC011467.3; EXPRESSED IN PLACENTA, SIGNAL = 1.4; EXPRESSED IN BRAIN, SIGNAL = 1.5; EXPRESSED IN ADULT LIVER, SIGNAL = 1.6; EXPRESSED IN FETAL LIVER, SIGNAL = 1.7; NT HIT: AJ223042.1, EVALUE 6.40e-01; SWISSPROT HIT: P17599, EVALUE 5.20e-01; EST_HUMAN HIT: AA195142.1, EVALUE 4.00e-09
gctgagctcatggccctgctcctagtggccagaggtggcttccaggatgagccagctaagctccagggtctttccgggaaaagagttccttggaaagcatgtgaacttttcaccgcttccgacaaccatgaaagctctgagccaggtttagatgccgtaggattcaagggggcagcaaggggtccagagctgcagacagctgagggtgaccattggggtctgctcaggcaagatcctggagtaggtgaccacgtccaaggcaaactg

SEQ ID NO: 29867 - DNA, 348 bp, Homo sapiens
  MAP TO AC008545.3; EXPRESSED IN BRAIN, SIGNAL = 1.6; EXPRESSED IN PLACENTA, SIGNAL = 1.7; EXPRESSED IN FETAL LIVER, SIGNAL = 1.6; EST_HUMAN HIT: BF242864.1, EVALUE 3.20e-01; NT HIT: AF257772.1, EVALUE 2.20e-01; SWISSPROT HIT: P49743, EVALUE 4.80e-01
ctcacacctcggtcaaggcccaggccccccaaagacagtcaggcctcccctggtcgcccgtcctcggtggaggaggtaaggatcgcagcttcacccaagagcaccgggcccagaccaagcctgcgcccactgcggctggaggtgaaaagggaggtccgccggcctgccagactgcagcagcaggaggaggaagacgaggaagaagaggaggaggaagaggaagaagaaaaagaggaggaggaggagtggggcaggaaaaggccaggccgaggcctgccatggacgaagctggggaggaagctggagagctctgtgtgccccgtgcggcgttctcggagactgaaccct

SEQ ID NO: 29868 - DNA, 207 bp, Homo sapiens
  MAP TO AC010618.4; EXPRESSED IN BRAIN, SIGNAL = 2.8; EXPRESSED IN PLACENTA, SIGNAL = 5.4; EXPRESSED IN BONE MARROW, SIGNAL =   3; EXPRESSED IN HELA, SIGNAL =   3; EXPRESSED IN ADULT LIVER, SIGNAL = 1.6; EXPRESSED IN FETAL LIVER, SIGNAL = 2.1; EXPRESSED IN LUNG, SIGNAL = 7.9; EST_HUMAN HIT: AW630291.1, EVALUE 1.00e-113; NT HIT: AB011156.1, EVALUE 1.00e-10; SWISSPROT HIT: Q03018, EVALUE 5.70e-01
ctatgtgggccggaagcggatgcaggtggagcaccccgagaaggctgtgcctcgcgtgaggaacctggtggaggccgactattcctactggaccctggcctacgtgatctccctgcaaggcgcccgcaaactgctggctgctgagccgctctccaagatgctgcctgtggacgagttcctgcccgtcatgttcgacaaacacccagt

SEQ ID NO: 29869 - DNA, 399 bp, Homo sapiens
  MAP TO AL117667.2; EXPRESSED IN BRAIN, SIGNAL = 1.6; SWISSPROT HIT: Q03555, EVALUE 2.00e-23; EST_HUMAN HIT: AL040938.1, EVALUE 6.00e-03; NT HIT: gi10880982, EVALUE 0.00e+00
gaatgctttcaattcatactgccagctctacctcatgccattgaccttttacgtgatgccattgtaaaagtaaaggaggtgcatgatgaacttgaagatttgccttccccacctccccctctttcccctcctcctactaccagcccccataaacagacagaagacaaaggagttcaatgtgaggaagaggaagaagagaagaaagacagtggtgttgcttcaacagaagatagttcctcatcacatataactgcagcagccattgctgccaaggtaagcctgatgagagttactcagaggcctaaaggacccacaggtaaatgtactggtttcatctgttttgcatcgcatccctccctacatttaatacttcttcagagaaccctaaaaaaataagtg

SEQ ID NO: 29870 - DNA, 184 bp, Homo sapiens
  MAP TO AC018720.2; EXPRESSED IN BRAIN, SIGNAL =   2; EXPRESSED IN PLACENTA, SIGNAL = 2.6; EXPRESSED IN BONE MARROW, SIGNAL = 1.9; EXPRESSED IN LUNG, SIGNAL = 4.3; EXPRESSED IN ADULT LIVER, SIGNAL = 1.4; EST_HUMAN HIT: BF369855.1, EVALUE 5.00e-85; NT HIT: gi7427514, EVALUE 1.00e-99; SWISSPROT HIT: P19691, EVALUE 1.50e-01
ggcacacccctggggctgagtctccagggccccccaactgtggtagctccagcgatggtgctgcccaggcctctcggtgctccatctccgcctccacactgaccaagtgctggcccacccagtccatgctccagggtcaggcggagctgctgagtgacagctttcctcaaaaagcagaaggaga

SEQ ID NO: 29871 - DNA, 161 bp, Homo sapiens
  MAP TO AL138750.5; EXPRESSED IN BRAIN, SIGNAL = 1.6; EXPRESSED IN PLACENTA, SIGNAL = 1.6; EXPRESSED IN ADULT LIVER, SIGNAL = 1.6; EXPRESSED IN LUNG, SIGNAL = 2.3; SWISSPROT HIT: P37660, EVALUE 3.00e+00; EST_HUMAN HIT: BF129507.1, EVALUE 5.50e-01
cttgttattgtgtcatgacattgtgttatcataacccagattcccttcaaattcttcattacgttcacagccatgataccggtccttattgcagggcctaaatacctgctgctagttagtgggatgcacatttggcgacagatctcctcgttctcgttcat

SEQ ID NO: 29872 - DNA, 230 bp, Homo sapiens
  MAP TO AC018558.2; EXPRESSED IN BRAIN, SIGNAL = 1.6; EXPRESSED IN HELA, SIGNAL = 1.8; EXPRESSED IN ADULT LIVER, SIGNAL = 1.8; EXPRESSED IN FETAL LIVER, SIGNAL = 1.7; EST_HUMAN HIT: AI798672.1, EVALUE 4.00e-89; SWISSPROT HIT: Q15973, EVALUE 4.00e-15; NT HIT: gi5032238, EVALUE 8.60e+00
gcacctcatatctcaccctggaaacaagccatatgaatgtgaagaaaatagacagaagccagataaaccttaacaatgtcagaaagccatcattttgttcacacatcttcaaggacacatggcattgcacactagaaatggaccttataaaagtactgtatgtgaaaaagcctttgattttcccaatgtaccttatatacgtcagagaaatcacaccaaacagaaagcct

SEQ ID NO: 29873 - DNA, 87 bp, Homo sapiens
  MAP TO AC025286.1; EXPRESSED IN ADULT LIVER, SIGNAL = 1.8; EXPRESSED IN BRAIN, SIGNAL = 1.6; EXPRESSED IN PLACENTA, SIGNAL = 1.4; EXPRESSED IN BONE MARROW, SIGNAL = 2.1; EXPRESSED IN HELA, SIGNAL = 2.2; EXPRESSED IN LUNG, SIGNAL = 2.8; SWISSPROT HIT: P50070, EVALUE 7.30e+00; NT HIT: U43393.1, EVALUE 1.80e-01; EST_HUMAN HIT: AA261956.1, EVALUE 2.00e-11
ggtccccaaagtgcttggggcagagtacagctcccctttgagaaagtcggtgctctggactgatgaaaaggacaaaagagaagccag

SEQ ID NO: 29874 - DNA, 112 bp, Homo sapiens
  MAP TO AL157885.2; EXPRESSED IN BRAIN, SIGNAL = 1.6; EXPRESSED IN PLACENTA, SIGNAL = 1.4; EXPRESSED IN FETAL LIVER, SIGNAL = 1.7; NT HIT: AF217490.1, EVALUE 6.20e-02
tgtatggaaaccaaaacgctgcagaaaaaatctggaatagtgagcagtgaaggtgctaatgaaagtacgcttcctcagttggcagccatgatcattactttgtccctccagg

SEQ ID NO: 29875 - DNA, 88 bp, Homo sapiens
  MAP TO AC011455.3; EXPRESSED IN BRAIN, SIGNAL = 1.3; EXPRESSED IN HELA, SIGNAL = 1.7; SWISSPROT HIT: Q49163, EVALUE 8.40e-01; NT HIT: S76838.1, EVALUE 7.20e-01
ctgacccgctgtctggcagaggtggtcacagaggtgctgaccgtgggccaggtccagagaggaccctgcactgctcttctccacaagg

SEQ ID NO: 29876 - DNA, 381 bp, Homo sapiens
  MAP TO AC005678.1; EXPRESSED IN BRAIN, SIGNAL = 1.9; EXPRESSED IN PLACENTA, SIGNAL = 2.4; NT HIT: gi11526409, EVALUE 0.00e+00; SWISSPROT HIT: O43309, EVALUE 6.00e-72; EST_HUMAN HIT: BF676393.1, EVALUE 2.00e-43
ctgctctcctggttcatccagttctctctctaaatcctccagcacagtcaccacctcctccccactctctggatgctgctcctgcacccaggcctggagctcctcaggtaggatggtcaggaactgctccagcaccagcagctccagaatctgttctttggtgtgggtctctggcctcagccactgatggcaaagttctcggagtcggctcaaagcctcacggggaccagatgtctcctggtagcagaactgtctgaagtactgacggaagacctctctgctatgggtgttgtttttacgcaggtcccaatcctgtctggtggtatatttctcttcctctatctttacttccaaaggttcatcctggtccatgtgggcctg

SEQ ID NO: 29877 - DNA, 121 bp, Homo sapiens
  MAP TO AC011497.3; EXPRESSED IN BRAIN, SIGNAL = 1.7; EXPRESSED IN BONE MARROW, SIGNAL = 1.6; EXPRESSED IN FETAL LIVER, SIGNAL = 2.4; SWISSPROT HIT: P10269, EVALUE 3.10e+00; NT HIT: gi9635487, EVALUE 1.00e-34; EST_HUMAN HIT: AW847812.1, EVALUE 1.00e-41
ttgtcggtttaggactttctgcctccgctattgcgctcagaactggaatagcaggcatttcagcctctgtcacgaccttccagagcctctctaatgacttctctgctagcatcacagacat

SEQ ID NO: 29878 - DNA, 495 bp, Homo sapiens
  MAP TO AC011625.2; EXPRESSED IN PLACENTA, SIGNAL = 8.5; EXPRESSED IN BRAIN, SIGNAL = 1.3; EXPRESSED IN ADULT LIVER, SIGNAL = 1.5; EXPRESSED IN BONE MARROW, SIGNAL = 1.6; NT HIT: AB007932.1, EVALUE 1.00e-22; EST_HUMAN HIT: BE279518.1, EVALUE 7.20e+00; SWISSPROT HIT: P51805, EVALUE 2.00e-34
acagatagtgctccttcttatgataaggctcccccagcttgaagaggtcctccagcctcagcagcttgcagatgccttggtacaggctcccacaggcaatcagcctgttctccttgtagtctatgaggagcatcttgttgacattgttggtggtggtcaggggctcattgcaggtctggacgatgcggggtgggtaacacttggggttgtcctcgtccggccctgtctcatgcgtcaccaagaccttcaggtcgctggagagcttgtaaatccgattgacggcccccaagtaaatgtgtcctgtcctctcatccaccaccaggtgattgaaaccctcggcgggctctcctcggaatgtgacaaatgaccgctgcttctgggacagcggggctggctgccgggtgagcaaagtggaggagcccatgcccaccatgaggaggtgggagagaaggcaggtccagttccagggcatggctttcatggcagaggcgggtc

SEQ ID NO: 29879 - DNA, 131 bp, Homo sapiens
  MAP TO AC002036.1; EXPRESSED IN BRAIN, SIGNAL = 1.3; EXPRESSED IN PLACENTA, SIGNAL = 1.7; EXPRESSED IN ADULT LIVER, SIGNAL = 1.4; NT HIT: AB040948.1, EVALUE 4.00e-68; EST_HUMAN HIT: BF307115.1, EVALUE 2.00e-58; SWISSPROT HIT: P57080, EVALUE 2.00e-11
atgagaccttcggccagtatcctcttcaggtaaacggttatcgcaacttagacgagtgtttggaaggggccatggtggagggtgatgttgagcttcttccctccgatcactcggtgaagtatggacaagag

SEQ ID NO: 29880 - DNA, 87 bp, Homo sapiens
  MAP TO AC008967.3; EXPRESSED IN BRAIN, SIGNAL = 1.3; EXPRESSED IN BONE MARROW, SIGNAL = 3.5; EXPRESSED IN ADULT LIVER, SIGNAL = 1.4; EXPRESSED IN LUNG, SIGNAL = 2.9; EXPRESSED IN FETAL LIVER, SIGNAL = 1.6; NT HIT: X83471.1, EVALUE 1.80e-01; EST_HUMAN HIT: AA569592.1, EVALUE 7.00e-42
ccacttatcttcttcaatgctatggtactggatgagagtgtttttaagtttagttgcaaaagaagcaacatcagacaggccttccat

SEQ ID NO: 29881 - DNA, 237 bp, Homo sapiens
  MAP TO AC023753.5; EXPRESSED IN PLACENTA, SIGNAL = 1.4; EXPRESSED IN BRAIN, SIGNAL = 1.3; EXPRESSED IN FETAL LIVER, SIGNAL = 1.6; SWISSPROT HIT: P51360, EVALUE 5.10e-01; EST_HUMAN HIT: BF371289.1, EVALUE 5.40e-02; NT HIT: Y10809.1, EVALUE 1.40e-01
tcagtaggcatatattagaaaggcataacagtccttgatctcaaggagtctgtactctagtaggagagacatatgtatgaacaagtggccacaatataatgcattgagttttatgactaatgcatgtccaagaggatatggaagcacatgaaggaggaatccttgataaactggtgtgagatttaaaggcaggtcaggcaagattctcttgaagaagtgataaccaaattctccaga

SEQ ID NO: 29882 - DNA, 210 bp, Homo sapiens
  MAP TO AC023078.2; EXPRESSED IN BRAIN, SIGNAL = 1.9; EXPRESSED IN PLACENTA, SIGNAL =   2; EXPRESSED IN BONE MARROW, SIGNAL = 1.5; EXPRESSED IN HELA, SIGNAL = 2.1; EXPRESSED IN LUNG, SIGNAL = 1.8; EXPRESSED IN ADULT LIVER, SIGNAL = 2.1; EXPRESSED IN FETAL LIVER, SIGNAL = 1.7; EST_HUMAN HIT: BE544822.1, EVALUE 4.00e-24; NT HIT: AF082097.1, EVALUE 1.30e-01; SWISSPROT HIT: P27653, EVALUE 6.00e-15
atgggtgatgttagcaaaagggcccacgtgcatgaatacaggtgtccattccagggtctgcatcagatggccaccaccatccttcccagccatgtcttcatgtctgagaggctgttcataagggccagcaccaccatgatctcgctggccaccacgatatcaaacagcgtttgccaagaggagcctttctctgtgtttgcctgcctgatg

SEQ ID NO: 29883 - DNA, 165 bp, Homo sapiens
  MAP TO AL136143.6; EXPRESSED IN BRAIN, SIGNAL = 1.4; EXPRESSED IN PLACENTA, SIGNAL = 1.5; EXPRESSED IN ADULT LIVER, SIGNAL = 1.6; SWISSPROT HIT: Q80930, EVALUE 1.00e+00; NT HIT: gi11437423, EVALUE 9.60e-02; EST_HUMAN HIT: BF131609.1, EVALUE 3.60e-02
ctgcaatccgaacacgaaactcgtcatgagaatgtggaaggaggttgccggacgctgctggctgccttccagcgtccacttccctttctctctctcctgacacagctccgtcgtgtgtttggtccccaggcctgaggtctctgtgctgccggggaagctgaccat

SEQ ID NO: 29884 - DNA, 96 bp, Homo sapiens
  MAP TO AC010636.3; EXPRESSED IN LUNG, SIGNAL = 3.2; EXPRESSED IN PLACENTA, SIGNAL = 1.5; EXPRESSED IN BRAIN, SIGNAL = 1.4; EXPRESSED IN ADULT LIVER, SIGNAL = 1.6; EXPRESSED IN BONE MARROW, SIGNAL = 1.7; SWISSPROT HIT: P35789, EVALUE 1.00e-09; NT HIT: M61873.1, EVALUE 2.00e-20; EST_HUMAN HIT: BE781790.1, EVALUE 1.00e-34
gtattgttgtctctaagccagacctcatcacctgtctggagcaaggaaaaaaacctttgaccatgaagaaacatgagatggtagccaacccctcag

SEQ ID NO: 29885 - DNA, 184 bp, Homo sapiens
  MAP TO AC019224.2; EXPRESSED IN BRAIN, SIGNAL = 1.8; EXPRESSED IN PLACENTA, SIGNAL = 1.7; EXPRESSED IN FETAL LIVER, SIGNAL = 1.8; EXPRESSED IN HELA, SIGNAL = 1.8; EXPRESSED IN ADULT LIVER, SIGNAL = 1.6; SWISSPROT HIT: O75031, EVALUE 5.00e-27; NT HIT: gi5901979, EVALUE 1.00e-99; EST_HUMAN HIT: AA403061.1, EVALUE 7.00e-13
acattatgctccagagtgcggagatcttccaggagctcctgggctgcggtttgcaggcgggggttgcggctcttggacattgccaggatgcgttgcaggggcagggagctccggaactcagaggccgacttggagaagacttcaggttccagaaccacagactggacaagcctcagtacatgaa

SEQ ID NO: 29886 - DNA, 271 bp, Homo sapiens
  MAP TO AC018552.2; EXPRESSED IN ADULT LIVER, SIGNAL = 2.2; EXPRESSED IN BRAIN, SIGNAL = 1.6; SWISSPROT HIT: P09593, EVALUE 3.90e-01; NT HIT: Y08391.1, EVALUE 1.70e-01; EST_HUMAN HIT: AA436991.1, EVALUE 3.90e+00
tcattgatggacaaatgaaattccgacacgtatctttgttgtttccttttttttcttgttaatgtaaatgaaaatatcaatataggtatccaaacaacacttagagagcctgttgtcaatatttagcagcccaccactaatgtggggcggaggaggccagctctggcccgcccaggactgaggggcccaaggctgcagggcctgcacgggtgggtggaccgactgcctgcgtttcagctgctctgggtggaccagttccagtgtctcctcc

SEQ ID NO: 29887 - DNA, 132 bp, Homo sapiens
  MAP TO AC023890.3; EXPRESSED IN LUNG, SIGNAL = 2.3; EXPRESSED IN BRAIN, SIGNAL = 1.7; EXPRESSED IN PLACENTA, SIGNAL = 1.7; EXPRESSED IN ADULT LIVER, SIGNAL =   2; EXPRESSED IN FETAL LIVER, SIGNAL = 1.7; EXPRESSED IN HELA, SIGNAL = 2.4; NT HIT: gi11433277, EVALUE 1.00e-68; EST_HUMAN HIT: BE545503.1, EVALUE 2.00e-68; SWISSPROT HIT: P34092, EVALUE 5.00e-03
ggggcagacccaagccccagcccaagcccaagcctcaggtgccacagtgcaaggctttgtatgcctatgacgctcaggacacagacgaactcagctttaatgccaatgacattattgatattatcaaagaag

SEQ ID NO: 29888 - DNA, 159 bp, Homo sapiens
  MAP TO AC013827.4; EXPRESSED IN BRAIN, SIGNAL =   2; EXPRESSED IN PLACENTA, SIGNAL = 1.9; EXPRESSED IN BONE MARROW, SIGNAL = 1.5; EXPRESSED IN FETAL LIVER, SIGNAL = 2.1; EXPRESSED IN HELA, SIGNAL = 2.1; EXPRESSED IN ADULT LIVER, SIGNAL = 2.1; NT HIT: Y00354.1, EVALUE 5.70e+00; SWISSPROT HIT: Q10136, EVALUE 5.20e+00
atgcagcatgagttgaatgaacacaaaggagcaatcactgaagtgtgcaaggtcgtgaacaagggtgagattcctgaaacgctttcattgttgctggttttttacctgatggtgcagaaacttgcttcagggatcgacataaggctggagagctccaga

SEQ ID NO: 29889 - DNA, 166 bp, Homo sapiens
  MAP TO AC003692.1; EXPRESSED IN BRAIN, SIGNAL = 1.8; EXPRESSED IN BONE MARROW, SIGNAL = 3.2; EXPRESSED IN FETAL LIVER, SIGNAL = 1.9; EXPRESSED IN LUNG, SIGNAL = 1.7; EXPRESSED IN PLACENTA, SIGNAL = 2.9; NT HIT: gi11439599, EVALUE 1.00e-34; SWISSPROT HIT: P80303, EVALUE 5.00e-13; EST_HUMAN HIT: BF032109.1, EVALUE 2.00e-34
gattttcatgctttttcttcatttcttcaaatttagactcttcttcttttctcttttcttcattcaatgtttttaaatattctctcctttcatgttccttcatcatttcatattttttaaattcttcatgacgagtcttgtcatagtgttccagatcacttgttgc

SEQ ID NO: 29890 - DNA, 296 bp, Homo sapiens
  MAP TO AC022377.1; EXPRESSED IN PLACENTA, SIGNAL = 1.7; EXPRESSED IN BRAIN, SIGNAL =   2; EXPRESSED IN ADULT LIVER, SIGNAL = 1.6; EXPRESSED IN BONE MARROW, SIGNAL = 1.5; EXPRESSED IN LUNG, SIGNAL = 2.6; NT HIT: gi11433585, EVALUE 8.00e-50; SWISSPROT HIT: P31629, EVALUE 1.80e+00; EST_HUMAN HIT: AW673469.1, EVALUE 0.00e+00
cgtcgagggcgaggcccccagcagtgagactggcacatccctggacagcccctcagcctacccccagggccccttggtgcccggttccagcctgagcccggatcactacgagcacacgtcagtgggagcctatgggctgtactcggggccgccggggcaacagcagcgcacgcggaggcccaagctgcagcactcgacctccatcctgcgcaagcaggctgaggaggaggccatcaagcgctcacgctcactctccgagagctatgagctctcctcggacctgcaggacaagcagg

SEQ ID NO: 29891 - DNA, 186 bp, Homo sapiens
  MAP TO AC008962.4; EXPRESSED IN BRAIN, SIGNAL = 1.4; EXPRESSED IN ADULT LIVER, SIGNAL = 4.8; EXPRESSED IN FETAL LIVER, SIGNAL = 1.6; EXPRESSED IN LUNG, SIGNAL = 2.2; SWISSPROT HIT: Q16696, EVALUE 7.00e-19; EST_HUMAN HIT: AV650322.1, EVALUE 3.00e-80; NT HIT: U22028.1, EVALUE 2.00e-98
atgctggcctcagggctgcttctggtgaccttgctggcctgcctgactgtgatggtcttgatgtcagtctggcggcagaggaagagcagggggaagctgcctccgggacccaccccattgcccttcattggaaactacctgcagctgaacacagagcagatgtacaactccctcatgaaggtgtcc

SEQ ID NO: 29892 - DNA, 188 bp, Homo sapiens
  MAP TO AC002400.1; EXPRESSED IN PLACENTA, SIGNAL = 1.5; EXPRESSED IN BRAIN, SIGNAL = 1.7; EXPRESSED IN BONE MARROW, SIGNAL = 2.3; EXPRESSED IN LUNG, SIGNAL =   4; NT HIT: AB029003.1, EVALUE 3.00e-91; SWISSPROT HIT: O43747, EVALUE 2.30e-02; EST_HUMAN HIT: BE561259.1, EVALUE 5.00e-91
gcagcctgccgcctctcattgtgtatgaccggaatggattcagaattctgctccacttctcccagacgggagcccctgggcacccagaggtacaggtgctgctcttgaccatgatgagcacggctccccagcctgtctgggatatcatgtttcaagtggctgtgccaaaggtgagtcatctgttgggg

SEQ ID NO: 29893 - DNA, 194 bp, Homo sapiens
  MAP TO AL133523.2; EXPRESSED IN BRAIN, SIGNAL =   2; EXPRESSED IN LUNG, SIGNAL =   3; SWISSPROT HIT: P50552, EVALUE 4.00e-14; EST_HUMAN HIT: AW403328.1, EVALUE 1.00e-91; NT HIT: gi7706686, EVALUE 9.00e-92
tgaacagagtatctgccaagcccgggcttccgtgatggtctacgatgacaccagtaagaaatgggtaccaatcaaacctggccagcagggattcagccggatcaacatctaccacaacactgccagcaacaccttcagagtcgttggagtcaagttgcaggatcagcaggtcagtgctggaattacagattata

SEQ ID NO: 29894 - DNA, 135 bp, Homo sapiens
  MAP TO AC011458.2; EXPRESSED IN BRAIN, SIGNAL = 1.3; EXPRESSED IN LUNG, SIGNAL = 2.2; NT HIT: gi11427120, EVALUE 3.00e-60; SWISSPROT HIT: P90747, EVALUE 2.00e-03; EST_HUMAN HIT: BE793372.1, EVALUE 4.00e-60
agagcttggccagggcgatgagggaggtgttgacgccagggacagctcgatgggcagctcaggaggcacgaccgaggtgaggacagggtgcactccagaaacagcttgtagcggttccggctggggtccttgtac

SEQ ID NO: 29895 - DNA, 106 bp, Homo sapiens
  MAP TO AC022063.3; EXPRESSED IN BONE MARROW, SIGNAL = 2.5; EXPRESSED IN ADULT LIVER, SIGNAL = 1.7; EXPRESSED IN BRAIN, SIGNAL = 2.1; NT HIT: AL111238.1, EVALUE 1.50e-02
gtacagggcatgtagcagtggtaaaagaggtgaaggctgaaaaagaaagtgaatttgtacaacacttgatttctgtcttgggcaaatcaacattcaatggccacac

SEQ ID NO: 29896 - DNA, 104 bp, Homo sapiens
  MAP TO AC023074.2; EXPRESSED IN BRAIN, SIGNAL = 1.5; EXPRESSED IN ADULT LIVER, SIGNAL = 1.5; SWISSPROT HIT: P75409, EVALUE 9.40e+00; EST_HUMAN HIT: R52995.1, EVALUE 3.30e-01; NT HIT: AB021083.1, EVALUE 2.20e-01
atgcatcttctcctatttgtcttccgagcagaaatcagtccaaagcaggccaagtccatgcctgtgggctgctttatgtggctgtgcagctctctgttgtctgc

SEQ ID NO: 29897 - DNA, 107 bp, Homo sapiens
  MAP TO AC008636.4; EXPRESSED IN ADULT LIVER, SIGNAL = 1.7; EXPRESSED IN LUNG, SIGNAL = 2.7; EXPRESSED IN BRAIN, SIGNAL = 1.7; EXPRESSED IN BONE MARROW, SIGNAL = 1.8; EXPRESSED IN HELA, SIGNAL = 1.7; EST_HUMAN HIT: BE797601.1, EVALUE 2.20e-02; NT HIT: AB035086.1, EVALUE 2.30e-01; SWISSPROT HIT: P45458, EVALUE 7.20e+00
atggctggggtgtcctcaaacatggcagctggctcctccaaagccagcggtcccacagagaaaggtggaagccacggcatctttatgaccgtcatttctgcagtatc

SEQ ID NO: 29898 - DNA, 91 bp, Homo sapiens
  MAP TO AL157882.1; EXPRESSED IN HELA, SIGNAL = 1.7; EXPRESSED IN LUNG, SIGNAL = 5.6; EXPRESSED IN BRAIN, SIGNAL = 1.5; EST_HUMAN HIT: N39603.1, EVALUE 1.10e+00; NT HIT: AB047819.1, EVALUE 7.50e-01
ctatctggcccaaagctgcaactgccagcatctgagaaagttgcatgggggcccaagaactggcccatttagacccactaacaccagtcat

SEQ ID NO: 29899 - DNA, 130 bp, Homo sapiens
  MAP TO AC011483.2; EXPRESSED IN BRAIN, SIGNAL = 2.2; EXPRESSED IN PLACENTA, SIGNAL = 1.7; EXPRESSED IN HELA, SIGNAL = 2.1; EXPRESSED IN BONE MARROW, SIGNAL = 1.5; EXPRESSED IN ADULT LIVER, SIGNAL = 1.9; EXPRESSED IN FETAL LIVER, SIGNAL = 1.9; SWISSPROT HIT: Q9Y5K2, EVALUE 9.00e-06; EST_HUMAN HIT: AI686689.1, EVALUE 3.00e-54; NT HIT: AF228497.1, EVALUE 9.00e-57
gttgaggagtccttctggtcttgccctccgccggcgcagaacatgctggggtgtacagcgggtcatagagcttactgcagacctcctcagacaccaccgacagttcacgcactgcagcacggtaggcatt

SEQ ID NO: 29900 - DNA, 364 bp, Homo sapiens
  MAP TO AC013379.4; EXPRESSED IN FETAL LIVER, SIGNAL = 1.6; EXPRESSED IN BRAIN, SIGNAL = 1.8; EXPRESSED IN PLACENTA, SIGNAL = 2.1; EXPRESSED IN ADULT LIVER, SIGNAL = 1.5; EXPRESSED IN BONE MARROW, SIGNAL = 1.8; NT HIT: AF224263.1, EVALUE 2.30e-01; EST_HUMAN HIT: BF576138.1, EVALUE 0.00e+00; SWISSPROT HIT: Q06178, EVALUE 3.00e-17
gtactgcccttggtgtagaggccatggtccttgatgtacgtgatgacagcatcgggaatcaggtactttacgctctgcccttggcccaaggctcgcctgatgtatgtggcactgatctcattctgcacaggctccttggccaggtgaatgttgtgctggtgcatccgtaggatgggagattctgcgatgtaaccttttgggtcgtgacctactcggcccacgcacaccaagccaaacttctccactatttcctggatgtgcgcatccttccagaggttgggggtctggaaggtcttcaagacgtctgccccacagagaagcttcagctcaggcacagctgcaaaaacaaggatggacccagtaa

SEQ ID NO: 29901 - DNA, 470 bp, Homo sapiens
  MAP TO AC025289.1; EXPRESSED IN BRAIN, SIGNAL = 1.7; EXPRESSED IN LUNG, SIGNAL = 2.1; NT HIT: U32581.2, EVALUE 0.00e+00; EST_HUMAN HIT: BF086811.1, EVALUE 0.00e+00; SWISSPROT HIT: Q21122, EVALUE 1.30e+00
ctgaaacatggcaatatgcagctgaacccgctgcaggcttgtcttacaagaagaaatactggtttctagccttcgcaccaagtcatgcttcttccaggcagtgtcgtaagaacttgctaacacagttgccctgttcataaccagctgagagaacttccctatctggatgttatgttccaccgctttcttacagagatcatcaacagaaactttgctttcggcaccaaagtcctttgcctctacttgagcaatgatgtctacacccagagcactgataaaactgcacagtgtgagtccgagggcttggttgggtagccctatcaagagctgcctcacaaagtcagctgtgaatgccttgataggtttggccatttggtcttcactgaaacaagagtttctaaaaagggttttcacattgacaatctgtacaggcccattcacagtattctgatcttcaagtgaacttgatc

SEQ ID NO: 29902 - DNA, 175 bp, Homo sapiens
  MAP TO AC021097.3; EXPRESSED IN BRAIN, SIGNAL = 1.7; EST_HUMAN HIT: BE299524.1, EVALUE 2.40e+00; NT HIT: gi4506466, EVALUE 2.60e-02; SWISSPROT HIT: Q06947, EVALUE 2.30e+00
aggtgaggaggtaaatggtgggatccatggagttctggggagcccagtggagctggcccaagcctctgctggaggcagtgttggcagccagcatggggcagaagcagtggtggtggcggtggagggggagcagaccgtggggccaggcccgggactagctgggaagctggcatac

SEQ ID NO: 29903 - DNA, 125 bp, Homo sapiens
  MAP TO AC011449.3; EXPRESSED IN FETAL LIVER, SIGNAL = 1.8; EXPRESSED IN LUNG, SIGNAL = 2.2; EXPRESSED IN PLACENTA, SIGNAL = 1.5; EXPRESSED IN BRAIN, SIGNAL = 1.8; EXPRESSED IN ADULT LIVER, SIGNAL = 1.7; EXPRESSED IN HELA, SIGNAL = 2.1; EST_HUMAN HIT: AW864773.1, EVALUE 2.00e-64; SWISSPROT HIT: Q61085, EVALUE 1.00e-08; NT HIT: X61084.1, EVALUE 1.10e+00
gcttgtcggacgcctagccgggatgaggccggggtggaactgctgatgacatacttcatccagctgggctttgtcgagagtcgattcttcccgcccacacggcagatgggactcctgttcacctg

SEQ ID NO: 29904 - DNA, 242 bp, Homo sapiens
  MAP TO AC018633.2; EXPRESSED IN BONE MARROW, SIGNAL = 2.9; EXPRESSED IN HELA, SIGNAL = 1.9; EXPRESSED IN LUNG, SIGNAL = 3.2; EXPRESSED IN BRAIN, SIGNAL = 1.9; EXPRESSED IN PLACENTA, SIGNAL = 1.6; EXPRESSED IN FETAL LIVER, SIGNAL = 1.9; SWISSPROT HIT: Q06814, EVALUE 1.20e+00; NT HIT: D87682.1, EVALUE 0.00e+00; EST_HUMAN HIT: BF677485.1, EVALUE 1.00e-122
attcttcagaaagtgactgggaaactttggatcctagtgtcttagaggaccccaacttgaaagaaagggaacagctgggatcagaccagacaaatttgtttccaaaggactctgtcccctcagagagtcttccaattactgtacaacctcaagctaatacgggacaggtagtcctgataccagggctcatttcgggtttggaagaggatcagtatggcatgcccctggccatcttcacaaag

SEQ ID NO: 29905 - DNA, 81 bp, Homo sapiens
  MAP TO AL135787.3; EXPRESSED IN BRAIN, SIGNAL = 1.4; EXPRESSED IN ADULT LIVER, SIGNAL = 4.6; EXPRESSED IN FETAL LIVER, SIGNAL = 3.4; EXPRESSED IN HELA, SIGNAL = 2.2; NT HIT: D49387.1, EVALUE 2.00e-38; SWISSPROT HIT: Q14914, EVALUE 6.00e-10; EST_HUMAN HIT: AA595480.1, EVALUE 2.00e-38
ctctaagacccatttcagcaagtccttcagagctttttggcgggcatctccttgccagcggtagacgacaaaagcttccat

SEQ ID NO: 29906 - DNA, 166 bp, Homo sapiens
  MAP TO AC009275.5; EXPRESSED IN LUNG, SIGNAL = 3.3; EXPRESSED IN PLACENTA, SIGNAL = 2.7; EXPRESSED IN BRAIN, SIGNAL = 1.4; EXPRESSED IN HELA, SIGNAL = 2.9; EST_HUMAN HIT: BF031043.1, EVALUE 4.00e-88; SWISSPROT HIT: P15121, EVALUE 5.00e-26; NT HIT: M59783.1, EVALUE 7.00e-89
ccttgctgacgatgaagagctcctcacgcttcaccacctgctccctgagcttctcctgaatggccacccccacctcattctcattctggtacacatgggcacagtcgatgtggcggtacccgacgtcaatggccaccttcacggcctcagtcacctgccctggagg

SEQ ID NO: 29907 - DNA, 215 bp, Homo sapiens
  MAP TO AC010352.4; EXPRESSED IN BRAIN, SIGNAL = 1.6; EXPRESSED IN LUNG, SIGNAL = 3.2; EST_HUMAN HIT: BF685214.1, EVALUE 1.00e-118; NT HIT: gi6005921, EVALUE 1.00e-118; SWISSPROT HIT: O75962, EVALUE 2.00e-36
ttgagagtcccgtccgggttctccacgatgactgcactggtgtggcccaggacaaagcctggaatccagccctcagctgcggggcactggtcagtggcggctcggaacaccagaaacatgttctgctggttgctggccagaatttgaacgacctctccttggtagacgttgatctcatcctccttcactgccgtgtaatcgtgtgtcaccaacat

SEQ ID NO: 29908 - DNA, 80 bp, Homo sapiens
  MAP TO AL138829.2; EXPRESSED IN FETAL LIVER, SIGNAL = 1.7; EXPRESSED IN BRAIN, SIGNAL = 1.7; EXPRESSED IN PLACENTA, SIGNAL = 1.6; EXPRESSED IN ADULT LIVER, SIGNAL = 1.9; EXPRESSED IN BONE MARROW, SIGNAL = 1.5; EXPRESSED IN HELA, SIGNAL = 1.8; EXPRESSED IN LUNG, SIGNAL = 2.2; NT HIT: J03653.1, EVALUE 2.50e+00; EST_HUMAN HIT: BF218771.1, EVALUE 9.50e-01
cttgcagaggttgagatctaatgccataccagtaataccaatggtggggtcttgggcccagaacaggacgaaggcagatc

SEQ ID NO: 29909 - DNA, 187 bp, Homo sapiens
  MAP TO AF236875.1; EXPRESSED IN BRAIN, SIGNAL = 1.7; EXPRESSED IN PLACENTA, SIGNAL = 1.5; EXPRESSED IN ADULT LIVER, SIGNAL = 1.5; SWISSPROT HIT: Q50644, EVALUE 5.10e+00; EST_HUMAN HIT: BF330594.1, EVALUE 2.00e-68; NT HIT: gi11418493, EVALUE 6.80e+00
agcctctccgtcaatgtcaagtttgttacctccatcgctgcaggtcctaaaatctgaggccaggctgtccgtggagccggtggtgaaactgacgtggacacccctgaaggatgggctgaggctttctgcagagccctggctcactttttccaaatcagagctgctcttgttcatttttagaaggtgc

SEQ ID NO: 29910 - DNA, 134 bp, Homo sapiens
  MAP TO AL133238.2; EXPRESSED IN ADULT LIVER, SIGNAL = 1.4; EXPRESSED IN HELA, SIGNAL = 1.8; EXPRESSED IN BRAIN, SIGNAL = 1.5; EXPRESSED IN PLACENTA, SIGNAL = 1.3; EXPRESSED IN FETAL LIVER, SIGNAL = 1.9; SWISSPROT HIT: Q09969, EVALUE 4.10e+00; EST_HUMAN HIT: AV719382.1, EVALUE 4.50e-01
tgaaccagaaatatcatagtggtgccgcccatgcaccaacaaaggcttcatcggccagggagactttgatgccaggcatgattaagtcctggactggctcagcttaatggaaatgcacagagattgaaacaagc

SEQ ID NO: 29911 - DNA, 211 bp, Homo sapiens
  MAP TO AL138831.2; EXPRESSED IN BRAIN, SIGNAL = 1.5; EXPRESSED IN PLACENTA, SIGNAL = 1.4; EXPRESSED IN FETAL LIVER, SIGNAL = 1.9; EXPRESSED IN ADULT LIVER, SIGNAL = 1.5; EXPRESSED IN BONE MARROW, SIGNAL = 2.1; EXPRESSED IN LUNG, SIGNAL = 2.3; NT HIT: AB011108.1, EVALUE 1.00e-115; EST_HUMAN HIT: BE045890.1, EVALUE 1.00e-115; SWISSPROT HIT: Q13523, EVALUE 3.00e-21
aaatataaataccttgctgaagatagcaacatgtctgtgccatctgaaccaagcagcccccagagcagtacgagaacacgatcaccatctccagatgacattctggagcgagtagctgctgatgttaaagagtatgaacgggaaaatgttgatacatttgaggcctcagtgaaagccaagcataatctaatgacagttgaacagaataatg

SEQ ID NO: 29912 - DNA, 136 bp, Homo sapiens
  MAP TO AC008860.5; EXPRESSED IN BRAIN, SIGNAL = 1.6; EXPRESSED IN LUNG, SIGNAL = 2.2; NT HIT: AF043129.1, EVALUE 1.00e-68; SWISSPROT HIT: P16871, EVALUE 2.00e-06; EST_HUMAN HIT: BF672285.1, EVALUE 4.00e-26
ctcagaataagtgggaagactcagtgtgcctgtgccctctgccattcacttcatctatcaatgttctctgatttcaggattaagcctatcgtatggcccagtctccccgatcataagaagactctggaacatcttt

SEQ ID NO: 29913 - DNA, 299 bp, Homo sapiens
  MAP TO AL138688.11; EXPRESSED IN BRAIN, SIGNAL = 1.8; EXPRESSED IN BONE MARROW, SIGNAL = 2.7; EXPRESSED IN LUNG, SIGNAL = 1.9; NT HIT: Y13472.1, EVALUE 0.00e+00; EST_HUMAN HIT: AA772837.1, EVALUE 0.00e+00; SWISSPROT HIT: Q09793, EVALUE 4.20e-02
caggattatgatgagttgcagattctccattctgaaaaacgtctcctgccacattcattctaccaggattaaaaggtcctactccagtcttggtctgtgaagttaaagatggggtgtatgtttgtatattaacaccaaaattacttgactgcagtccgttagagacatctcccaagttggtattctgcagtgatgttacatgtgtaatcattaagttcatatctcgcccgtcagtattttctaattggccatcattcacagagcttacacctgtttctaaagttgtaacattagcaatc

SEQ ID NO: 29914 - DNA, 237 bp, Homo sapiens
  MAP TO AC008764.4; EXPRESSED IN ADULT LIVER, SIGNAL = 1.4; EXPRESSED IN BRAIN, SIGNAL = 1.8; EXPRESSED IN LUNG, SIGNAL = 1.7; SWISSPROT HIT: Q28640, EVALUE 2.00e-03; EST_HUMAN HIT: BE900512.1, EVALUE 1.00e-116; NT HIT: gi11055968, EVALUE 1.00e-118
atggggccccctcaccaccaccctggccaccgcatgcctcatcctggcatcaacgagcacccgccttgggctggaccccagcaccctgacttcggccctcccccccatggcttcaacgggcagcccccacacatgcggcgacagggcccaccccacatcaaccacgatgaccccagcctggtccccaatgtgccctacttcgatctccctgctgggctgatggcccccctcgtgaag

SEQ ID NO: 29915 - DNA, 155 bp, Homo sapiens
  MAP TO AC008850.4; EXPRESSED IN ADULT LIVER, SIGNAL = 2.5; EXPRESSED IN BONE MARROW, SIGNAL =   4; EXPRESSED IN LUNG, SIGNAL =  10; EXPRESSED IN PLACENTA, SIGNAL = 1.7; EXPRESSED IN BRAIN, SIGNAL = 1.3; EXPRESSED IN FETAL LIVER, SIGNAL = 1.9; SWISSPROT HIT: P97449, EVALUE 4.00e-14; NT HIT: gi11417191, EVALUE 2.00e-82; EST_HUMAN HIT: H08895.1, EVALUE 3.00e-15
atttggtggctattcctgactttgaagcaggagcaatggaaaattggggtttgctcaccttccgagaggagacacttctgtatgacagtaacacttcttcaatggcggatagaaagctggtgactaaaatcattgctcatgagctggcccaccag

SEQ ID NO: 29916 - DNA, 335 bp, Homo sapiens
  MAP TO AF223391.1; EXPRESSED IN BRAIN, SIGNAL = 1.6; NT HIT: AF223391.1, EVALUE 0.00e+00; SWISSPROT HIT: Q15878, EVALUE 1.00e-36; EST_HUMAN HIT: BF349057.1, EVALUE 3.10e-01
ggcacaggttccctaagtgagagctccatcccctctgtctctgacaccagcaccccaagaagaagtcgtcggcagctcccacccgtcccgccaaagccccggcccctcctttcctacagctccctgattcgacacgcgggcagcatctctccacctgctgatggaagcgaggagggctccccgctgacctcccaagctctggagagcaacaatgcttgcctgaccgagtcttccaactctccgcacccccagcagagccaacatgcctccccacagcgctacatctccgagccctacttggccctgcacgaagactcccacgcctcagactgtgg

SEQ ID NO: 29917 - DNA, 257 bp, Homo sapiens
  MAP TO AC008397.4; EXPRESSED IN BRAIN, SIGNAL = 1.7; EXPRESSED IN LUNG, SIGNAL = 2.4; EXPRESSED IN ADULT LIVER, SIGNAL = 1.8; NT HIT: gi8923197, EVALUE 1.00e-130; SWISSPROT HIT: Q48251, EVALUE 3.10e+00; EST_HUMAN HIT: AW001242.1, EVALUE 5.00e-67
agtcctgcccctgtctgtgtgcagctggtggtgcatgtgggggtgtcaggcatggcgaccacagtcacactggagaaatgtggacacaacaagggctacaaggggctggacaactgccgcttttgccccggctcccagtgctgcgtggaggacgggcctgaaagcattgactccatcatcgacatggatgctgtgtgcaagcgagtcaccacgttgggcctggatgtgtcggtgaccatctcgcaggatgccggcag

SEQ ID NO: 29918 - DNA, 141 bp, Homo sapiens
  MAP TO AL117344.12; EXPRESSED IN BRAIN, SIGNAL = 1.6; EXPRESSED IN BONE MARROW, SIGNAL = 1.7; EXPRESSED IN ADULT LIVER, SIGNAL = 1.4; EXPRESSED IN FETAL LIVER, SIGNAL =  12; EXPRESSED IN LUNG, SIGNAL = 3.7; NT HIT: U52111.2, EVALUE 1.30e+00; EST_HUMAN HIT: BF529658.1, EVALUE 4.70e-01; SWISSPROT HIT: Q09019, EVALUE 1.40e+00
ctctggcatgcccacggcgaactccctttgcctccctgggctttgctttcttcatctctgaaagatgccgatggcctctaagcttccgcccatcccccagtgatctcaggttctagaaaagtaggctagctggcacccttg

SEQ ID NO: 29919 - DNA, 138 bp, Homo sapiens
  MAP TO AC008764.4; EXPRESSED IN PLACENTA, SIGNAL = 1.6; EXPRESSED IN BRAIN, SIGNAL = 1.6; EXPRESSED IN BONE MARROW, SIGNAL = 1.5; EXPRESSED IN ADULT LIVER, SIGNAL = 1.5; NT HIT: M81255.1, EVALUE 3.10e-01; SWISSPROT HIT: P52177, EVALUE 8.00e-07; EST_HUMAN HIT: AA465388.1, EVALUE 4.00e-72
gtatacttgtcactcatccccatcatcagcggtgtcctgctggccaccgtcaccgagttgtcttttgacatgtggggactcgtcagcgccctcgccgccacgctgtgcttctcgcttcagaacattttctccaaaaag

SEQ ID NO: 29920 - DNA, 129 bp, Homo sapiens
  MAP TO AL109847.3; EXPRESSED IN PLACENTA, SIGNAL = 2.4; EXPRESSED IN BRAIN, SIGNAL = 1.6; SWISSPROT HIT: P38041, EVALUE 1.80e+00; EST_HUMAN HIT: BE165113.1, EVALUE 1.00e-66; NT HIT: gi11434579, EVALUE 7.00e-67
atgaaattcccatggaacctggagatatcattggtgtggctggaaatcattgggatggctattctaaaggtgtcaacaggaaattgggaaggacgggcctatatccctcctacaaagttcgagagaaga

SEQ ID NO: 29921 - DNA, 181 bp, Homo sapiens
  MAP TO AC022212.2; EXPRESSED IN BRAIN, SIGNAL = 1.5; EXPRESSED IN PLACENTA, SIGNAL = 1.7; EXPRESSED IN ADULT LIVER, SIGNAL = 1.4; NT HIT: Z74105.1, EVALUE 1.10e-01; SWISSPROT HIT: P15424, EVALUE 5.10e+00; EST_HUMAN HIT: AI417961.1, EVALUE 1.00e-02
gcccccaaagacagtatttgacaaggattgctaccttctgccttaataccttcatagtctccaacatttcatatggtgctttacttgaaacaaatgagcaaaaattgaaaaatgaaataacaaacaggaaaactgaagtagtatgtaatttaactgacaaaaataatttgaacatgaaaat

SEQ ID NO: 29922 - DNA, 184 bp, Homo sapiens
  MAP TO AC018500.2; EXPRESSED IN BRAIN, SIGNAL = 1.3; EXPRESSED IN BONE MARROW, SIGNAL = 1.7; EXPRESSED IN LUNG, SIGNAL = 1.8; EST_HUMAN HIT: AV690710.1, EVALUE 5.00e-60; NT HIT: gi11433597, EVALUE 4.00e-60; SWISSPROT HIT: P11345, EVALUE 3.00e-18
cgtgccatttacccttataaacagttccaaaagagcctgacccaatccgagtggacagcatcacttcactggcttctatttcccaataatagcttgaatctctctgtccacgaggcctctgaaacaagtagagatcattattatactccatgcaatggtaataatcttttgataatgagggcat

SEQ ID NO: 29923 - DNA, 152 bp, Homo sapiens
  MAP TO AC008481.4; EXPRESSED IN BRAIN, SIGNAL = 1.3; EXPRESSED IN FETAL LIVER, SIGNAL = 2.2; EXPRESSED IN ADULT LIVER, SIGNAL = 1.7; EXPRESSED IN BONE MARROW, SIGNAL = 2.1; EXPRESSED IN HELA, SIGNAL = 2.7; EXPRESSED IN LUNG, SIGNAL = 5.5; EXPRESSED IN PLACENTA, SIGNAL = 2.8; EST_HUMAN HIT: T11774.1, EVALUE 7.00e-25; SWISSPROT HIT: P14314, EVALUE 5.00e-07; NT HIT: U50319.1, EVALUE 1.00e-68
agaaaagcagaagagagagtgggcccgattcactgggtggagccaggcaaagtcttggggtggggtgatgggaggggtactgtcacccacgtacttgcaggtgttctcacagatgacgccgctgttgtactcgtctgttccatcgcagcagt

SEQ ID NO: 29924 - DNA, 240 bp, Homo sapiens
  MAP TO AC023078.2; EXPRESSED IN BRAIN, SIGNAL = 1.7; NT HIT: AL163252.2, EVALUE 2.00e-06; EST_HUMAN HIT: AW468478.1, EVALUE 1.00e-12
gcctcttcagatcccttcaggtctcttcaggtctctttgtccctgatattccttgttagtgtgccacttgtggctgactgccacaactactacttgagacggtcactacagcagttactactgttatggcttgagaccatcattcagcaattactcttactgcttgagaccgtcattatgactgaacgaagggacaaatgcagaaatgataaccaaaaaaaaaaaaagaaactgttttaa

SEQ ID NO: 29925 - DNA, 143 bp, Homo sapiens
  MAP TO AC002038.1; EXPRESSED IN BRAIN, SIGNAL = 1.6; EXPRESSED IN PLACENTA, SIGNAL = 1.7; EXPRESSED IN ADULT LIVER, SIGNAL = 1.8; EXPRESSED IN FETAL LIVER, SIGNAL = 1.6; EST_HUMAN HIT: R40249.1, EVALUE 1.20e-01; NT HIT: AF083247.1, EVALUE 3.20e-01
ggatgttactggctggttttacaattaggaatgttccattcatcaatgaacatgtccatgttcctaacgcatggtcttcaattttaagaagcattgcccttaacattattctaatacgagctgggcttggactcgatccacag

SEQ ID NO: 29926 - DNA, 96 bp, Homo sapiens
  MAP TO AC023078.2; EXPRESSED IN BRAIN, SIGNAL = 1.3; EXPRESSED IN LUNG, SIGNAL = 1.7; EST_HUMAN HIT: AI493285.1, EVALUE 2.00e-05; SWISSPROT HIT: P08131, EVALUE 1.10e+00; NT HIT: AB048302.1, EVALUE 3.20e+00
gaaatggtaaccatcatcagaacctttatcaagccaaacgctttgctgctggagggtcttgcttgatattgatggctgctgaagtggctgctgaag

SEQ ID NO: 29927 - DNA, 189 bp, Homo sapiens
  MAP TO AC024049.2; EXPRESSED IN BRAIN, SIGNAL = 1.6; EXPRESSED IN PLACENTA, SIGNAL = 1.5; EXPRESSED IN ADULT LIVER, SIGNAL = 1.5; EXPRESSED IN FETAL LIVER, SIGNAL = 1.5; SWISSPROT HIT: Q61001, EVALUE 1.70e+00; NT HIT: U83191.1, EVALUE 1.70e+00; EST_HUMAN HIT: AA868675.1, EVALUE 1.00e-102
ttaactggcaaggacaccaaacagcggaggaggagggacctcagctgagcgagatgagcgacagtgaacaaggccaggcaggagacagaatggatgggcgtcaagggaggagccacccagcacctggagagcagctgtggtcacaggcacgaattcatcacagccacagtcatcagcacgggctgcagt

SEQ ID NO: 29928 - DNA, 256 bp, Homo sapiens
  MAP TO AC002059.3; EXPRESSED IN PLACENTA, SIGNAL = 2.3; EXPRESSED IN BRAIN, SIGNAL = 2.3; EXPRESSED IN BONE MARROW, SIGNAL = 2.4; EXPRESSED IN FETAL LIVER, SIGNAL =   2; EXPRESSED IN LUNG, SIGNAL = 2.7; SWISSPROT HIT: Q10567, EVALUE 4.00e-22; NT HIT: U36264.1, EVALUE 0.00e+00; EST_HUMAN HIT: BE144787.1, EVALUE 9.20e-01
aaggagcccacatgccagtctccataacttctctctgctcccgccaagacagaagacaagtgacttactgctttgggggccacatatgatcctgacagggtgcccacgccactggtcaggtcaaagaggtcactcaggccactgccgatgggtgctccaagattggctggtactgctgctgttggaggtgccacgaagttggtgcccccaatctggaaagggagggaaagagtcagaggtgggcgtcaagaggcaa

SEQ ID NO: 29929 - DNA, 214 bp, Homo sapiens
  MAP TO AC000159.6; EXPRESSED IN ADULT LIVER, SIGNAL = 1.5; EXPRESSED IN FETAL LIVER, SIGNAL = 1.8; EXPRESSED IN LUNG, SIGNAL = 2.4; EXPRESSED IN BRAIN, SIGNAL = 2.2; EXPRESSED IN PLACENTA, SIGNAL = 1.7; EXPRESSED IN BONE MARROW, SIGNAL = 1.8; SWISSPROT HIT: Q15173, EVALUE 1.00e-32; NT HIT: gi11441348, EVALUE 1.00e-108; EST_HUMAN HIT: AV708790.1, EVALUE 1.00e-108
catgcggatgatgtctgggtagacgggctcgatgaggacaccccgggtgctccccacacactccaccagctcgttgagggctgcccgcttcacctccttccccttgaggtcggccacacagtccaagaagtcaaacatcaccccacactgggccagcttccggctcagcagctcgtgcagctcggaagccggcacatctggggaggagagggca

SEQ ID NO: 29930 - DNA, 300 bp, Homo sapiens
  MAP TO AL121963.10; EXPRESSED IN PLACENTA, SIGNAL = 2.4; EXPRESSED IN BRAIN, SIGNAL = 1.7; EXPRESSED IN ADULT LIVER, SIGNAL = 1.9; EXPRESSED IN FETAL LIVER, SIGNAL = 1.6; EXPRESSED IN LUNG, SIGNAL = 1.8; NT HIT: gi4503786, EVALUE 0.00e+00; SWISSPROT HIT: P42685, EVALUE 2.00e-55
ctcccctgtttgtccacggaggcagacaagtcaaccgtgattgaaaatccaggggccctttgctctccccagtcacagaggcatggccactactttgtggctttgtttgattaccaggctcggactgctgaggacttgagcttccgagcaggtgacaaacttcaagttctggacactttgcatgagggctggtggtttgccagacacttggagaaaagacgagatggctccagtcagcaactacaaggctatattccttctaactacgtggctgaggacagaagcctacaggcagagccg

SEQ ID NO: 29931 - DNA, 174 bp, Homo sapiens
  MAP TO AF236875.1; EXPRESSED IN BRAIN, SIGNAL = 1.4; EXPRESSED IN PLACENTA, SIGNAL = 1.3; SWISSPROT HIT: P39188, EVALUE 8.90e-02; EST_HUMAN HIT: AI862153.1, EVALUE 2.00e-10; NT HIT: AF240786.1, EVALUE 2.00e-06
atgattgatccactgcactctagcctgagtgacagagtgaggccctgtttcaaaagagaagaagatgaagaaaaagaagaagaagaagataaagaagtagtagtagtagtagtggtagtagtagaagaggaagaggaagaccacccattgcacaagggaggaaataataaagat

SEQ ID NO: 29932 - DNA, 155 bp, Homo sapiens
  MAP TO AC012535.3; EXPRESSED IN ADULT LIVER, SIGNAL = 1.5; EXPRESSED IN BRAIN, SIGNAL = 1.4; EXPRESSED IN PLACENTA, SIGNAL = 2.4; NT HIT: AF113219.1, EVALUE 3.50e-01; SWISSPROT HIT: P06439, EVALUE 1.40e+00; EST_HUMAN HIT: BF677328.1, EVALUE 1.30e-01
ctgagtggtgaagtgtccagctctccaagctgtgactggtagcagttactcatcagacagagatgtctaaggtcctcagtttccctccttctaccacaagttctgcataactgctcctttcttgttggacatttggcaaagaggattgtctgaat

SEQ ID NO: 29933 - DNA, 79 bp, Homo sapiens
  MAP TO AC012087.10; EXPRESSED IN BRAIN, SIGNAL = 1.7; EXPRESSED IN PLACENTA, SIGNAL = 1.4; EXPRESSED IN ADULT LIVER, SIGNAL = 1.8; EXPRESSED IN FETAL LIVER, SIGNAL = 2.1; EXPRESSED IN HELA, SIGNAL =   2; NT HIT: Y08826.1, EVALUE 9.80e+00; EST_HUMAN HIT: AA128386.1, EVALUE 6.00e-02
cttgggtcaccaccttgttaaaggcaaaatagctcttcttctcaccattattgtttgtgggagtcattcttctaggact

SEQ ID NO: 29934 - DNA, 270 bp, Homo sapiens
  MAP TO AC011375.3; EXPRESSED IN BRAIN, SIGNAL = 2.8; EXPRESSED IN BONE MARROW, SIGNAL = 4.2; EXPRESSED IN LUNG, SIGNAL = 2.5; SWISSPROT HIT: Q14687, EVALUE 3.00e-04; NT HIT: gi5729753, EVALUE 1.00e-100; EST_HUMAN HIT: AU119320.1, EVALUE 1.00e-121
aatttagactcagaaaaagaaaaggagcttgaaaggcaagcccgcattgaggcaagccttcgagaacgagaaagggaggttcaaaaggcccgttcagaacaaacaaaagaaatagatcgagagagagagcagcacaaacgagaagaagctatccagaatttcaaagctcttctgtctgacatggtatacgttaatcttttactttttttctctaaagtactggatattggaaatttattatgttactgttatgaatattttaatgttctt

SEQ ID NO: 29935 - DNA, 187 bp, Homo sapiens
  MAP TO AC016728.2; EXPRESSED IN BRAIN, SIGNAL = 1.3; SWISSPROT HIT: P10272, EVALUE 9.00e-08; NT HIT: X57147.1, EVALUE 9.00e-55; EST_HUMAN HIT: H61604.1, EVALUE 2.00e-59
aggatggggatccaatcaagcatgactgccaacaaattatcgtccagacttatgccgcacaagataatctcttagaagtccccttaggtaatcctgaccttagcctatatactgatggaagttcatttgtgaagaatgggatacaaagggcaggttatgccatagttagtgatgtaactatacttaa

SEQ ID NO: 29936 - DNA, 493 bp, Homo sapiens
  MAP TO AC018711.2; EXPRESSED IN LUNG, SIGNAL = 1.6; EXPRESSED IN BRAIN, SIGNAL =   2; EXPRESSED IN BONE MARROW, SIGNAL = 4.8; EXPRESSED IN FETAL LIVER, SIGNAL = 7.6; SWISSPROT HIT: O75069, EVALUE 2.00e-78; EST_HUMAN HIT: BE257744.1, EVALUE 0.00e+00; NT HIT: AB007950.2, EVALUE 0.00e+00
agaggccagagaggctgcccttgacgccctccaccacgccgcccccaaagccgctgatgcctgcgcgcacgttggcgcccacgtccttcagcccctgctgcatgtcccgcagcacgtccttgggctgccgcgagggcccgttctgctcaatctccttcaggcgccggcggtagtgctccagcttcttgtgcagctgggcgatggtctgggctgacttctggttcttcttctcgaacacttgcttgatgcgtgacacctgctgcttgtccgcgttgttggccagtttcagatactctgccacattgtcgtcgcgagcctcctgctcaatcttgatctgctcggtgatcttcaggatcttctggtgcaggtggtcaatggcggccttggtccgctgggggtccggtgccccatcgggcacgtccaggctgatggggccgtcggtgtcaccatggccggcggggaggctcagggccaccaggtctcccttatcgac

SEQ ID NO: 29937 - DNA, 305 bp, Homo sapiens
  MAP TO AC018500.2; EXPRESSED IN BRAIN, SIGNAL = 1.7; EXPRESSED IN PLACENTA, SIGNAL = 1.3; EXPRESSED IN LUNG, SIGNAL = 2.6; EST_HUMAN HIT: BE254058.1, EVALUE 0.00e+00; NT HIT: gi8850222, EVALUE 0.00e+00; SWISSPROT HIT: P47973, EVALUE 1.30e-01
atctctctggcatggctgaaaggaagacccagccgagcatggtgagtaatccaggcagctgcagcgacccccagcccagccccgagatgaagccgcattcctacctggatgccatcaggagtggccttgatgacgtggaggccagcagctcctacagcaacgagcagcagctgtgcccctacgcagctgctggggagtgccggtttggggatgcctgtgtctacctgcacggggaggtgtgtgaaatctgtaggctgcaagtcttgcacccattcgacccagagcagaggaaggctcatgaaaag

SEQ ID NO: 29938 - DNA, 245 bp, Homo sapiens
  MAP TO AC010618.4; EXPRESSED IN PLACENTA, SIGNAL = 1.8; EXPRESSED IN BRAIN, SIGNAL = 1.7; EXPRESSED IN BONE MARROW, SIGNAL = 2.4; EXPRESSED IN FETAL LIVER, SIGNAL = 1.6; EXPRESSED IN HELA, SIGNAL = 2.8; EXPRESSED IN LUNG, SIGNAL = 5.6; EST_HUMAN HIT: BE965909.2, EVALUE 0.00e+00; NT HIT: AB011156.1, EVALUE 1.50e-01; SWISSPROT HIT: Q02817, EVALUE 3.70e-02
gtccgagtacaaggcccacttctccctccgcaacctgcatgccttctctgtggagccgctgctcatctaccccacacactacacaggagacgatggctatgtgagtgacaccgagacctcagtcgtatggaacaatgagcacgtcaagaccgactgggaccgcgccaagtcccagaagatgcgggagcagcaggcactgagccgtgaggccaagaactcggacgtgctccagtccccactggaca

SEQ ID NO: 29939 - DNA, 478 bp, Homo sapiens
  MAP TO AC007497.2; EXPRESSED IN PLACENTA, SIGNAL = 1.4; EXPRESSED IN BRAIN, SIGNAL = 1.3; EXPRESSED IN LUNG, SIGNAL = 2.1; NT HIT: gi6753915, EVALUE 2.00e-76; SWISSPROT HIT: P07806, EVALUE 1.70e-02; EST_HUMAN HIT: BF513960.1, EVALUE 0.00e+00
tggcagctgaaatatcctaaactaattctccgagaagccagcagtgtatctgaggagctccataaagaggttcaagaagcctttctcacactgcacaagcatggctgcttatttcgggacctggttaggatccaaggcaaagatctgctcactccggtatctcgcatcctcattggtaatccaggctgcacctacaagtacctgaacaccaggctctttacggtcccctggccagtgaaagggtctaatataaaacacaccgaggctgaaatagccgctgcttgtgagaccttcctcaagctcaatgactacctgcagatagaaaccatccaggctttggaagaacttgctgccaaagagaaggctaatgaggatgctgtgccattgtgtatgtctgcagatttccccagggttgggatgggttcatcctacaacggacaagatgaagtggacattaagagcagagcagcatacaacg

SEQ ID NO: 29940 - DNA, 281 bp, Homo sapiens
  MAP TO AL132986.2; EXPRESSED IN PLACENTA, SIGNAL = 2.4; EXPRESSED IN BRAIN, SIGNAL = 1.5; EXPRESSED IN FETAL LIVER, SIGNAL = 1.8; EXPRESSED IN HELA, SIGNAL = 2.1; EXPRESSED IN BONE MARROW, SIGNAL = 3.4; EXPRESSED IN LUNG, SIGNAL = 5.1; SWISSPROT HIT: P12814, EVALUE 1.00e-29; EST_HUMAN HIT: AW605200.1, EVALUE 9.00e-97; NT HIT: X15804.1, EVALUE 6.00e-97
gagatcgggaggatctccattgagatgcatgggaccctggaggaccagctcagccacctgcggcagtatgagaagagcatcgtcaactacaagccaaagattgatcagctggagggcgaccaccagctcatccaggaggcgctcatcttcgacaacaagcacaccaactacaccatggaggtgggtggggctggccttgttcctcttcgggagcccgtggccccttctgctctttctcctgggtggggaagtctccaagggaacaggtcatagttggagga

SEQ ID NO: 29941 - DNA, 196 bp, Homo sapiens
  MAP TO AC007225.2; EXPRESSED IN PLACENTA, SIGNAL = 1.4; EXPRESSED IN BRAIN, SIGNAL = 1.9; EXPRESSED IN BONE MARROW, SIGNAL = 3.2; EXPRESSED IN FETAL LIVER, SIGNAL = 1.7; EXPRESSED IN HELA, SIGNAL = 2.4; EXPRESSED IN LUNG, SIGNAL =   4; SWISSPROT HIT: P34110, EVALUE 2.00e-09; NT HIT: AF175265.1, EVALUE 1.00e-106; EST_HUMAN HIT: BE257385.1, EVALUE 1.00e-106
catcagtgattccatggattttgtactgctcaactttgcagaaatgaacaagctctgggtgcgaatgcagcatcagggacatagccgagatagagaaaaaagagaacgagaaagacaagaactgagaattttagtgggaacaaatttggtgcgcctcagtcagttggaaggtgtaaatgtggaacgttacaaacag

SEQ ID NO: 29942 - DNA, 78 bp, Homo sapiens
  MAP TO AC012568.3; EXPRESSED IN BRAIN, SIGNAL = 1.4; EXPRESSED IN LUNG, SIGNAL = 1.8; SWISSPROT HIT: O05161, EVALUE 9.60e+00; NT HIT: AF178669.1, EVALUE 2.00e-16; EST_HUMAN HIT: AI905536.1, EVALUE 1.00e-36
tcagtgctcttcatcagatgaaaggccttcaatttcatctctgtctcccccgattgccatccagaatgctttggccac

SEQ ID NO: 29943 - DNA, 187 bp, Homo sapiens
  MAP TO AC010489.4; EXPRESSED IN BRAIN, SIGNAL = 2.1; EST_HUMAN HIT: AI590078.1, EVALUE 1.00e-101; SWISSPROT HIT: P05230, EVALUE 6.00e-29; NT HIT: gi11416219, EVALUE 1.00e-101
tgtgctggtcgctcctgtcccttgtcccatccactgtgccatccggaaggatcctcaggaagtggcccccgttgctacagtagaggagtttgggcttcttgtaattccctggaggcagattaaacttctcggtcagggctgtgaaggtggtgatttccccttcagccatggctcagcagctgctgct

SEQ ID NO: 29944 - DNA, 169 bp, Homo sapiens
  MAP TO AL133454.2; EXPRESSED IN FETAL LIVER, SIGNAL = 2.2; EXPRESSED IN HELA, SIGNAL =   2; EXPRESSED IN ADULT LIVER, SIGNAL = 1.8; EXPRESSED IN BRAIN, SIGNAL = 1.8; EST_HUMAN HIT: AW418937.1, EVALUE 2.30e+00; NT HIT: gi11420557, EVALUE 1.50e+00; SWISSPROT HIT: P48280, EVALUE 2.60e-01
aatgccactgtggcccattatggtaattacatccaccctagccctaatggtatcaccatctggcctatgccattccaaaatcctatcattgctatggatactagggaacatagctccatggaagcatctcctatcaactccagcctgtgtcccctcaccagtgcattct

SEQ ID NO: 29945 - DNA, 219 bp, Homo sapiens
  MAP TO AL139289.4; EXPRESSED IN BONE MARROW, SIGNAL = 2.5; EXPRESSED IN LUNG, SIGNAL = 2.5; EXPRESSED IN PLACENTA, SIGNAL = 2.1; EXPRESSED IN BRAIN, SIGNAL = 2.1; EXPRESSED IN ADULT LIVER, SIGNAL = 1.4; EXPRESSED IN FETAL LIVER, SIGNAL = 2.1; EXPRESSED IN HELA, SIGNAL = 1.7; NT HIT: gi7705798, EVALUE 1.00e-120; EST_HUMAN HIT: BE867619.1, EVALUE 1.00e-120; SWISSPROT HIT: P49191, EVALUE 4.10e-01
atccagtttgtcctggtctcactgcacatctcccagtactactttatgtccagctgtaactaccagtacccagtcattattcacctcatctggatgtatggcaccatcttcttcatgctgttctccaacttctggtatcactcttataccaagggcaagcggctgccccgtgcacttcagcaaaatggagctccaggtattgccaaggtcaaggccaac

SEQ ID NO: 29946 - DNA, 105 bp, Homo sapiens
  MAP TO AL049831.2; EXPRESSED IN BRAIN, SIGNAL = 1.6; EXPRESSED IN PLACENTA, SIGNAL = 1.7; EXPRESSED IN ADULT LIVER, SIGNAL = 1.7; EXPRESSED IN BONE MARROW, SIGNAL = 1.9; EXPRESSED IN FETAL LIVER, SIGNAL = 1.6; EST_HUMAN HIT: AA828744.1, EVALUE 5.20e+00; NT HIT: AL163303.2, EVALUE 5.70e-02
ctaagccttctaacattgttctttaaaaaaaatagaaagatatttttaaaacagatcaaaatctttgttgtcagtgcattaagtcgtgttccatcactggtggtt

SEQ ID NO: 29947 - DNA, 192 bp, Homo sapiens
  MAP TO AC018500.2; EXPRESSED IN BRAIN, SIGNAL = 1.7; EXPRESSED IN PLACENTA, SIGNAL = 1.7; EXPRESSED IN BONE MARROW, SIGNAL = 1.6; EXPRESSED IN ADULT LIVER, SIGNAL = 2.1; SWISSPROT HIT: P36042, EVALUE 1.30e+00; EST_HUMAN HIT: AA883375.1, EVALUE 1.70e-01; NT HIT: gi11421510, EVALUE 1.80e+00
cagattctgatacttggaatccatattatggacactaagcacgggaaaagaaatgtgggaaaaacgggtgaggtacaaaatggaagagccgggcacaagacgatgcgtaaacgagatctgactgagactgctgctgtcaggcacgaggagagctgtcgcccgaccctggtgtgtccctttgtttccaagcat

SEQ ID NO: 29948 - DNA, 174 bp, Homo sapiens
  MAP TO AC009399.5; EXPRESSED IN BRAIN, SIGNAL = 1.3; EXPRESSED IN PLACENTA, SIGNAL = 1.6; EXPRESSED IN BONE MARROW, SIGNAL = 1.5; EXPRESSED IN ADULT LIVER, SIGNAL = 1.5; EXPRESSED IN LUNG, SIGNAL = 2.6; SWISSPROT HIT: Q50570, EVALUE 2.30e+00; NT HIT: AB023215.1, EVALUE 4.00e-66; EST_HUMAN HIT: BE295638.1, EVALUE 8.00e-62
tgaggctgaactggaggaggtgttgactttttatacccaaaagaacaagtctgctagtgtcttcctggggactcactctaaaatttctaagaacaacaacaattattctgatagtggggcaaaaggtggtaagtatactggttaatgaacgaaaaataagaagaacaagtgaag

SEQ ID NO: 29949 - DNA, 301 bp, Homo sapiens
  MAP TO AL034380.25; EXPRESSED IN BRAIN, SIGNAL = 1.9; EXPRESSED IN PLACENTA, SIGNAL = 1.8; EXPRESSED IN LUNG, SIGNAL = 3.2; EXPRESSED IN BONE MARROW, SIGNAL = 6.1; NT HIT: AB024068.1, EVALUE 1.00e-122; EST_HUMAN HIT: AU140888.1, EVALUE 1.00e-105; SWISSPROT HIT: Q64560, EVALUE 7.10e+00
caggagagggaggctggatcttgggctgggacttcttggaatcagcagctgcaaagatgtctgggggagggtcttctccccgttcaatcttgcattcaaaggcatagagacactggatatactgctttttcaaggagctggcagcactgcttgatgtgcccacattgaggttggttgcaagttcccgccattttttgttcttgttgacctgtataaccaaaccaaaggagtcgaggtatatctcccgcctggttttcctgcccataagccccaagccccatcaggctgtaaggtattcatc

SEQ ID NO: 29950 - DNA, 229 bp, Homo sapiens
  MAP TO AL136080.6; EXPRESSED IN BRAIN, SIGNAL = 1.7; EXPRESSED IN PLACENTA, SIGNAL = 1.7; EXPRESSED IN ADULT LIVER, SIGNAL = 2.2; EXPRESSED IN FETAL LIVER, SIGNAL = 1.7; EXPRESSED IN HELA, SIGNAL = 1.7; EXPRESSED IN BONE MARROW, SIGNAL = 1.6; EST_HUMAN HIT: AU130690.1, EVALUE 3.00e-31; NT HIT: D63539.1, EVALUE 1.00e-108; SWISSPROT HIT: Q07231, EVALUE 4.00e+00
ccttagatccgggaaggccttgttgtcccggtaatccatccttgcctttatctccaggaagcccacggggtccaggaagtcctggtaacccatttcctgggaggccaggtggaccaggatggcctttttcaccaggaagtccaggtaaccccttttcacctgggaagccctgtccaccatcaccctagacaacatataaaacaaagaatgaaaattcaactcagagatt

SEQ ID NO: 29951 - DNA, 85 bp, Homo sapiens
  MAP TO AL135787.3; EXPRESSED IN BONE MARROW, SIGNAL = 2.6; EXPRESSED IN FETAL LIVER, SIGNAL =   2; EXPRESSED IN LUNG, SIGNAL = 3.3; EXPRESSED IN BRAIN, SIGNAL = 2.2; EXPRESSED IN PLACENTA, SIGNAL = 2.1; EXPRESSED IN ADULT LIVER, SIGNAL =   2; EXPRESSED IN HELA, SIGNAL = 1.7; SWISSPROT HIT: P50151, EVALUE 6.00e-10; EST_HUMAN HIT: BE891908.1, EVALUE 1.00e-40; NT HIT: gi4758445, EVALUE 7.00e-41
gtctctcaggcagctgcagagcttcaacagtactgtatgcagaatgcctgcaaggatgccctgctggtgggtgttccagctggaa

SEQ ID NO: 29952 - DNA, 279 bp, Homo sapiens
  MAP TO AL121985.13; EXPRESSED IN PLACENTA, SIGNAL = 1.7; EXPRESSED IN BRAIN, SIGNAL = 1.5; EST_HUMAN HIT: BE395061.1, EVALUE 1.00e-03; SWISSPROT HIT: P10265, EVALUE 1.00e-35; NT HIT: Y18890.1, EVALUE 0.00e+00
ggttttcagggacaacaacccccactgtcccaagtacctcagggaataagccagttaccacagtacaacaattgtcccccgccacaagtggcagtgcagcagtagatttatgtactatacaagcagtctctctgcttccaggggagcccccacaaaaaatccccacaggagtatatggcccgctgcctgaggagactgtaggactaatcttgggaagatcacgtctaaatctaaaaggagttcaaattcatactggtgtggttgattcagactataaag

SEQ ID NO: 29953 - DNA, 339 bp, Homo sapiens
  MAP TO AC008397.4; EXPRESSED IN BRAIN, SIGNAL = 1.6; EXPRESSED IN ADULT LIVER, SIGNAL = 1.5; EXPRESSED IN LUNG, SIGNAL = 1.7; SWISSPROT HIT: P47135, EVALUE 5.90e-01; NT HIT: Z77316.1, EVALUE 8.30e-01; EST_HUMAN HIT: BE559613.1, EVALUE 1.20e+00
ctctgcagagggcctgtgggtggggtttgcaccacttcgggctgaggcctgggatggttgtctttgcacatactgtaagggcctaaccctggccacagaactttctagcagttctggaacaatcctaccatgcacggatctgtaggaatttttagggcccatggcgtcccagcggctgctcggagccatgtttccagacactgttttctggagtggattggggacagcttctgtctggaagggactggacaatgcccttctagccgaggacggatatagtggcacatgtgagaccatgctggtggtccctgacctctgaagaagactaggattccccat

SEQ ID NO: 29954 - DNA, 108 bp, Homo sapiens
  MAP TO AL133163.2; EXPRESSED IN BONE MARROW, SIGNAL = 4.1; EXPRESSED IN LUNG, SIGNAL = 2.1; EXPRESSED IN BRAIN, SIGNAL =   2; EXPRESSED IN PLACENTA, SIGNAL = 1.7; EXPRESSED IN FETAL LIVER, SIGNAL =   2; EXPRESSED IN HELA, SIGNAL = 1.9; EST_HUMAN HIT: BE788291.1, EVALUE 3.00e-29; NT HIT: gi11425108, EVALUE 2.00e-29; SWISSPROT HIT: P29013, EVALUE 7.20e+00
atcaggagcaaaagaagagggtcctggatgtaatttaggcaggaaaagaatacgtggaacacactgtgaaagagagaaaaaaaaaaaacaatcaaagaaggaaggaaa

SEQ ID NO: 29955 - DNA, 204 bp, Homo sapiens
  MAP TO AL137190.2; EXPRESSED IN BRAIN, SIGNAL = 2.7; EXPRESSED IN LUNG, SIGNAL = 1.9; EST_HUMAN HIT: AI751071.1, EVALUE 1.00e-111; NT HIT: AB037106.1, EVALUE 4.80e-01; SWISSPROT HIT: O53320, EVALUE 1.50e-01
cacgcccaccaccacgatgttccccagcgtagctatgatggcaatccatagcaagacggcgtcgttggaggaccgaggaggatcttccggctggccctggccattggcagccgcgtggacattggcagaggagttaaacagggagtactcggtgctgaagtcctcgttgggcgagtccatgaaagctccccccatcatgggcag

SEQ ID NO: 29956 - DNA, 176 bp, Homo sapiens
  MAP TO AC022845.2; EXPRESSED IN BRAIN, SIGNAL = 1.9; EXPRESSED IN FETAL LIVER, SIGNAL = 2.3; EXPRESSED IN HELA, SIGNAL = 2.5; EXPRESSED IN BONE MARROW, SIGNAL = 2.2; EXPRESSED IN LUNG, SIGNAL = 4.8; EXPRESSED IN ADULT LIVER, SIGNAL = 1.4; EXPRESSED IN PLACENTA, SIGNAL = 1.7; SWISSPROT HIT: P08588, EVALUE 3.90e+00; NT HIT: gi10864024, EVALUE 8.00e-95; EST_HUMAN HIT: AA830611.1, EVALUE 1.00e-94
ctacattttaagagaagacgacgccttccgggcgcacgccgagcagaactccaccgacaccttatccttgtccacatggagacagactcctcccgccgagtcgtcctcttccagcaggtcctgcttctgctttcccactggcagagcgtagtcgtggtcaccggcgggcgagtctc

SEQ ID NO: 29957 - DNA, 119 bp, Homo sapiens
  MAP TO AC008655.3; EXPRESSED IN LUNG, SIGNAL =  40; EXPRESSED IN BRAIN, SIGNAL = 1.3; SWISSPROT HIT: O96009, EVALUE 5.00e-17; NT HIT: AF090386.1, EVALUE 6.00e-61; EST_HUMAN HIT: BF513122.1, EVALUE 8.00e-61
ggttacaccaccgatttgatcccaaagcctctagctccttccaggccaatgggaccaagtttgccattcaatatggaactgggcgggtagatggaatcctgagcgaggacaagctgact

SEQ ID NO: 29958 - DNA, 148 bp, Homo sapiens
  MAP TO AC015971.2; EXPRESSED IN PLACENTA, SIGNAL = 1.5; EXPRESSED IN BRAIN, SIGNAL = 1.4; EXPRESSED IN LUNG, SIGNAL = 1.7; EST_HUMAN HIT: AA039499.1, EVALUE 7.80e+00; SWISSPROT HIT: P10040, EVALUE 1.80e+00; NT HIT: gi6754255, EVALUE 2.10e-02
ggtcagaaaaagtcacaaagcaaaggaaatgctggcatatatgctggtgatagggccgtggagagtggtcattgtcacagggagaatgtgaatagtgaggaagagaaaagggccaaggcaaaaacccaaggaaagctgaatcttggag

SEQ ID NO: 29959 - DNA, 246 bp, Homo sapiens
  MAP TO AC013557.3; EXPRESSED IN BRAIN, SIGNAL = 1.3; EXPRESSED IN BONE MARROW, SIGNAL = 3.1; EXPRESSED IN LUNG, SIGNAL =   2; EXPRESSED IN FETAL LIVER, SIGNAL = 2.5; EXPRESSED IN HELA, SIGNAL = 3.3; SWISSPROT HIT: P39748, EVALUE 1.00e-37; EST_HUMAN HIT: AA580720.1, EVALUE 1.00e-113; NT HIT: gi6325465, EVALUE 1.00e-113
ttaatgactcttactcagcctcttgaccccactgtggattcgctcctcagagaactgcttttcaccacacacgaacttgaccagctcttcttcatttggctcgctccacttcagctccacagactctgggcccagcacctcaggttccaagaagagctggtaagcctccttgtggagccgattttctggcaaagggtacttgttggggtcaagtcgctgcacgatctcctcgatgctcttgtgctt

SEQ ID NO: 29960 - DNA, 295 bp, Homo sapiens
  MAP TO AC023078.2; EXPRESSED IN BRAIN, SIGNAL = 1.5; EXPRESSED IN FETAL LIVER, SIGNAL = 1.7; EXPRESSED IN ADULT LIVER, SIGNAL = 1.5; SWISSPROT HIT: P23749, EVALUE 8.00e-03; EST_HUMAN HIT: BE439409.1, EVALUE 3.00e-07; NT HIT: AF148990.1, EVALUE 4.60e-02
taacaaagtcactgaagaaattaatgaatgttataatctggaagcaggtgcagaggaagtcagccctggccaggttgaggatgtagagagagaaggtgttactgtgcatgcagaagcccaggagccagagcatgactgcatttcctgccagcccgaccaggtcaatgatgaggatcagcactatgaggaccaggacctccatgccacaacgatgaggatgggtctcctctgtatcactaattggtgcaatttctgtatccaaggctgggatggttggattcatgctcagaaaccc

SEQ ID NO: 29961 - DNA, 93 bp, Homo sapiens
  MAP TO AP001206.1; EXPRESSED IN ADULT LIVER, SIGNAL = 1.5; EXPRESSED IN BRAIN, SIGNAL = 1.5; EXPRESSED IN BONE MARROW, SIGNAL = 1.5; EXPRESSED IN FETAL LIVER, SIGNAL = 1.7; EXPRESSED IN LUNG, SIGNAL =   2; SWISSPROT HIT: P26927, EVALUE 7.30e+00; NT HIT: M22253.1, EVALUE 1.90e-01; EST_HUMAN HIT: AW150020.1, EVALUE 1.10e+00
gatggccttgatgagaataacatggctcagaacccacttttcaacctgaagataatttctgcaggaacaatgatgtttgaaagcttaccatga

SEQ ID NO: 29962 - DNA, 124 bp, Homo sapiens
  MAP TO AC018720.2; EXPRESSED IN BRAIN, SIGNAL = 1.5; EXPRESSED IN BONE MARROW, SIGNAL = 8.2; EXPRESSED IN LUNG, SIGNAL = 2.7; EXPRESSED IN FETAL LIVER, SIGNAL = 2.4; SWISSPROT HIT: Q92985, EVALUE 7.10e+00; EST_HUMAN HIT: AI284244.1, EVALUE 3.00e-20
ctgtctcagcctgatctctgcctcctcatctctgcctcttcagcccagcgggatctccctactgtgctcagactccagctctctgcactgcagttgggaaacgatccccaggtagaggaactag

SEQ ID NO: 29963 - DNA, 152 bp, Homo sapiens
  MAP TO AL158800.1; EXPRESSED IN ADULT LIVER, SIGNAL = 1.5; EXPRESSED IN BRAIN, SIGNAL = 1.3; EXPRESSED IN PLACENTA, SIGNAL = 1.3; SWISSPROT HIT: P05221, EVALUE 3.00e+00; NT HIT: U07000.1, EVALUE 3.50e-01
ctgtgatgggactatgagaggttttgattgtctgtataggttttctgtaattggaagcacatgggtaatttttgttgctgccaatgttttcagaaagcacttggcactggtctcctggacagaggtcccgaatggccacctggtagtcacag

SEQ ID NO: 29964 - DNA, 123 bp, Homo sapiens
  MAP TO AC023890.3; EXPRESSED IN BONE MARROW, SIGNAL = 2.2; EXPRESSED IN LUNG, SIGNAL = 2.9; EXPRESSED IN PLACENTA, SIGNAL = 2.2; EXPRESSED IN BRAIN, SIGNAL = 1.5; EXPRESSED IN HELA, SIGNAL = 1.8; EXPRESSED IN FETAL LIVER, SIGNAL =   2; NT HIT: AB020981.1, EVALUE 9.00e-57; EST_HUMAN HIT: AA477855.1, EVALUE 1.00e-56; SWISSPROT HIT: O95067, EVALUE 1.00e-15
agtagtacttacgatgaatttagttaagttttcatttactttcaccacattcttggccatgtgctgcatgacttccaatacttcattctctgtgtatcctgtgtaatactgctgctttaagtt

SEQ ID NO: 29965 - DNA, 150 bp, Homo sapiens
  MAP TO AL133211.1; EXPRESSED IN BONE MARROW, SIGNAL = 1.7; EXPRESSED IN LUNG, SIGNAL =   2; EXPRESSED IN BRAIN, SIGNAL = 1.8; EST_HUMAN HIT: AW968744.1, EVALUE 1.00e-66; NT HIT: S67069.1, EVALUE 3.40e-01
ctgcaagttttgtgttcaatatttcttcatattcttctcgaactttctcttcacgttctttcaacaaacgttcacagatcatcccaacctgccgtagagtaaataagggctgttctttttttaatggtgaggatgctgcagatgaagtcc

SEQ ID NO: 29966 - DNA, 173 bp, Homo sapiens
  MAP TO AC002060.3; EXPRESSED IN BRAIN, SIGNAL = 1.5; EXPRESSED IN PLACENTA, SIGNAL = 1.8; EXPRESSED IN LUNG, SIGNAL = 2.4; NT HIT: AP000400.1, EVALUE 1.00e-01; SWISSPROT HIT: Q60769, EVALUE 5.90e-01
tgcttgggctgcagtgaggacagatgcagcaagtgcttctgatgtctgtgtctgttcccctgtgtggacgcacatatccaggcgagtttcagtgaggtaggagacttcggcagcattggccgggctctggtttgcttctggtgctaacggaacatggaagagaggacaaggta

SEQ ID NO: 29967 - DNA, 102 bp, Homo sapiens
  MAP TO AC016289.3; EXPRESSED IN ADULT LIVER, SIGNAL = 1.4; EXPRESSED IN BRAIN, SIGNAL = 1.5; EXPRESSED IN FETAL LIVER, SIGNAL = 1.6; EXPRESSED IN HELA, SIGNAL = 1.8; EXPRESSED IN LUNG, SIGNAL = 2.4; NT HIT: gi5453949, EVALUE 6.00e-51; SWISSPROT HIT: Q15172, EVALUE 1.10e+00; EST_HUMAN HIT: AI879142.1, EVALUE 9.00e-51
ctgtatgtgaggccaagaggcctcaagcgtgggttcatcctcttctggatcaaaatctggattatcacttggaggaagtgtacggaagatgttagcactgat

SEQ ID NO: 29968 - DNA, 388 bp, Homo sapiens
  MAP TO AC002467.1; EXPRESSED IN BRAIN, SIGNAL = 1.4; EXPRESSED IN BONE MARROW, SIGNAL = 2.2; EXPRESSED IN LUNG, SIGNAL = 2.3; SWISSPROT HIT: P40421, EVALUE 2.20e+00; EST_HUMAN HIT: AI939634.1, EVALUE 0.00e+00; NT HIT: AF167441.1, EVALUE 0.00e+00
ctgtagtgatcctgtgcagcgaattgagcagtgtacacgaggttctctcttcatgtgtagcattgttcaagggtgcaagagaacatatttgtctcagagagacttacaggctcatatcaaccatcgccatatgagagctggaaaacctgttacccgtgcttcacttgaaaatgttcatcctcctattgccccaccaccaactgaaatccctgagcgttttataatgccaccagacaagcaccatatgagccatattccgccaaagcagcacatcatgatgccaccacctcctttgcaacatgtgccacatgagcactataatcagccacatgaggatattcgtgctcctccagcagaattgtccatggctccacctccacctcgatcg

SEQ ID NO: 29969 - DNA, 119 bp, Homo sapiens
  MAP TO AC010251.3; EXPRESSED IN BRAIN, SIGNAL = 1.6; EXPRESSED IN HELA, SIGNAL = 1.7; EXPRESSED IN PLACENTA, SIGNAL = 1.6; SWISSPROT HIT: P56524, EVALUE 4.10e+00; NT HIT: L47613.1, EVALUE 1.00e+00
gtgtatctctacggtacatcataaatgtgatatcctctaacaagcccaaggtaacatcaggcattaaatactcaacgttaactttaattagtaccctcacctgcaagagtgcaagtgat

SEQ ID NO: 29970 - DNA, 89 bp, Homo sapiens
  MAP TO AC023009.3; EXPRESSED IN BRAIN, SIGNAL = 1.3; EXPRESSED IN ADULT LIVER, SIGNAL =   2; EXPRESSED IN PLACENTA, SIGNAL = 1.4; SWISSPROT HIT: P40170, EVALUE 2.50e+00
atgctggtggtggcccaggactgggtattagagcccaagctaggagaggaaagtgtctttgcagtgggggaagtgggagccagtactgg

SEQ ID NO: 29971 - DNA, 195 bp, Homo sapiens
  MAP TO AL121716.16; EXPRESSED IN ADULT LIVER, SIGNAL = 1.8; EXPRESSED IN PLACENTA, SIGNAL = 1.9; EXPRESSED IN BRAIN, SIGNAL = 1.4; EXPRESSED IN FETAL LIVER, SIGNAL = 1.8; EXPRESSED IN HELA, SIGNAL = 1.8; SWISSPROT HIT: Q9Y3R5, EVALUE 9.00e-17; EST_HUMAN HIT: BE010882.1, EVALUE 1.00e-106; NT HIT: AB029040.1, EVALUE 2.00e-80
tgattaacacaagaggcatccatctgaaagaaactgggatccataaagaggtcaaaagcttcttttttccaagctctccgtgtgtactgatacccactaagactgctgagcagctggacacaagctcgataactaggggcattatgtgcactacaaggaagaaaaaccaccttaacctacgtgtcctaactttaa

SEQ ID NO: 29972 - DNA, 90 bp, Homo sapiens
  MAP TO AL157826.2; EXPRESSED IN BRAIN, SIGNAL = 1.4; EXPRESSED IN FETAL LIVER, SIGNAL = 1.7; EXPRESSED IN HELA, SIGNAL =   2; EXPRESSED IN ADULT LIVER, SIGNAL = 1.5; EXPRESSED IN PLACENTA, SIGNAL = 1.4; NT HIT: U73621.1, EVALUE 4.70e-02; EST_HUMAN HIT: AV754795.1, EVALUE 2.80e-01
ctacgtattcacatctggatggtctttcttcattttcatgaagacaacagaggtagaattgttgggcttgaaaaatgattggatgaaggg

SEQ ID NO: 29973 - DNA, 215 bp, Homo sapiens
  MAP TO AC013533.3; EXPRESSED IN BRAIN, SIGNAL = 1.7; EXPRESSED IN PLACENTA, SIGNAL = 2.9; EXPRESSED IN FETAL LIVER, SIGNAL = 1.9; EXPRESSED IN BONE MARROW, SIGNAL = 1.9; EXPRESSED IN LUNG, SIGNAL = 4.1; NT HIT: gi4557498, EVALUE 1.00e-118; SWISSPROT HIT: P56545, EVALUE 2.00e-25; EST_HUMAN HIT: BE908676.1, EVALUE 1.00e-118
gtcgcacggggcaggcggttgcagttcgagccaaggcctttggattcagcgtcatattttatgacccctacttgcaggatgggatcgagcggtccctgggcgtgcagagggtctacaccctgcaggatttgctgtatcagagcgactgcgtctccttgcactgcaatctcaacgaacataaccaccacctcatcaatgactttaccataaagcag

SEQ ID NO: 29974 - DNA, 137 bp, Homo sapiens
  MAP TO AC007845.12; EXPRESSED IN PLACENTA, SIGNAL = 1.5; EXPRESSED IN BRAIN, SIGNAL = 1.4; NT HIT: X03018.1, EVALUE 3.10e-01; EST_HUMAN HIT: BF149173.1, EVALUE 2.00e-71; SWISSPROT HIT: Q9PB06, EVALUE 3.10e+00
aagaggaacgggacgcagaagcaggagagaaagcagcagcagcacgcacacctgggcttcagagacggcatcggccaaggaggggcagggccacggggaactgtgatgggagaccagcttggaagggatgtattcac

SEQ ID NO: 29975 - DNA, 128 bp, Homo sapiens
  MAP TO AC023118.2; EXPRESSED IN BRAIN, SIGNAL = 1.4; SWISSPROT HIT: P26811, EVALUE 3.10e+00; NT HIT: gi4501960, EVALUE 3.00e-04; EST_HUMAN HIT: AW956748.1, EVALUE 4.00e-04
atgttgaagtttgatgaggatgtcccactggcagggttgttgctggagaaagcaagctgaaatatctgaagggtaactcggtggatcttgaaaaatttccattcacaaacgcctgtattcagtaacat

SEQ ID NO: 29976 - DNA, 122 bp, Homo sapiens
  MAP TO AC017093.2; EXPRESSED IN BRAIN, SIGNAL =   2; EXPRESSED IN PLACENTA, SIGNAL = 1.7; EXPRESSED IN LUNG, SIGNAL = 1.7; EXPRESSED IN ADULT LIVER, SIGNAL = 2.3; EXPRESSED IN BONE MARROW, SIGNAL =   2; EXPRESSED IN FETAL LIVER, SIGNAL = 1.7; SWISSPROT HIT: P42496, EVALUE 1.80e+00; NT HIT: gi7110698, EVALUE 4.20e+00; EST_HUMAN HIT: BF030262.1, EVALUE 4.00e-01
cagctctaaggaaagatgtggcactcttccaggacatccaagccctgcctcctgcaatccaacaacctcgttttactctctgtgtggacattactaccaaagaggtcatagaagcttcctga

SEQ ID NO: 29977 - DNA, 131 bp, Homo sapiens
  MAP TO AL133341.9; EXPRESSED IN BRAIN, SIGNAL = 1.6; EXPRESSED IN PLACENTA, SIGNAL = 1.4; EXPRESSED IN ADULT LIVER, SIGNAL = 1.5; EXPRESSED IN HELA, SIGNAL = 1.8; EST_HUMAN HIT: AW292197.1, EVALUE 1.70e+00; NT HIT: D89501.1, EVALUE 1.10e+00; SWISSPROT HIT: P12915, EVALUE 9.20e+00
atggccaaaaagtcagagagatttgaagctctggaaggattcaatgtgccttctgtttgggccatgtggaaagtgagaaggaaacgaattctactaataccagaagcttggaagaggactccgagctccag

SEQ ID NO: 29978 - DNA, 125 bp, Homo sapiens
  MAP TO AC023154.3; EXPRESSED IN BRAIN, SIGNAL =  62; EXPRESSED IN ADULT LIVER, SIGNAL = 1.5; NT HIT: gi11437004, EVALUE 3.00e-07; SWISSPROT HIT: P17980, EVALUE 2.10e-01; EST_HUMAN HIT: R86279.1, EVALUE 3.00e-08
ctgatgtcatccttcacagcttccttcttggcctgcacctccaggaagccttccaggtggtcttctttggggagccctggggcctctgctgcagctgcatcaggtagaatccccgtcccacacat

SEQ ID NO: 29979 - DNA, 136 bp, Homo sapiens
  MAP TO AC023314.3; EXPRESSED IN BRAIN, SIGNAL = 2.1; SWISSPROT HIT: P75099, EVALUE 5.30e+00; EST_HUMAN HIT: AW205336.1, EVALUE 1.00e-04; NT HIT: AF240786.1, EVALUE 5.00e-03
ttattttgcctctttatgaacatgtgagctgagcctcagtgtcctcatctgcccaatgatgccaatcctatctaccttccagagttgttgggagatttccataaaatcaagtttgaaaaagtgctcaatgtgatac

SEQ ID NO: 29980 - DNA, 139 bp, Homo sapiens
  MAP TO AC019205.2; EXPRESSED IN LUNG, SIGNAL = 2.2; EXPRESSED IN BRAIN, SIGNAL = 1.3; NT HIT: gi11418786, EVALUE 8.00e-73; SWISSPROT HIT: P24782, EVALUE 1.00e-13; EST_HUMAN HIT: AI637624.1, EVALUE 1.00e-72
cctgctcttcccgtgcgccctattcggtgtacgtattcttcaatattccgtggaaagtcaaaattatagacatgtgtaacgtcatggacatcaagtcctctagaggctagatcagttgcaattagtattctcactttgc

SEQ ID NO: 29981 - DNA, 137 bp, Homo sapiens
  MAP TO AC020714.2; EXPRESSED IN BRAIN, SIGNAL = 2.3; EXPRESSED IN PLACENTA, SIGNAL =   2; EXPRESSED IN HELA, SIGNAL = 1.6; EXPRESSED IN ADULT LIVER, SIGNAL = 2.4; EXPRESSED IN BONE MARROW, SIGNAL = 2.3; EXPRESSED IN FETAL LIVER, SIGNAL =   2; EXPRESSED IN LUNG, SIGNAL = 3.9; EST_HUMAN HIT: R55626.1, EVALUE 2.00e-71; NT HIT: AF294349.1, EVALUE 3.10e-01
cctgatagactaaagcagtttagtgtggcaccaagacactttgaagagatgataccacctgaaagacccagaatagctttccagacacctctccctcctttatctgccccatctgtcccacccatcccatcagttca

SEQ ID NO: 29982 - DNA, 155 bp, Homo sapiens
  MAP TO AC010849.3; EXPRESSED IN BRAIN, SIGNAL = 2.7; EXPRESSED IN PLACENTA, SIGNAL = 1.4; EXPRESSED IN ADULT LIVER, SIGNAL = 1.6; SWISSPROT HIT: P34194, EVALUE 3.00e+00
tgaggaaggaatacaccatgaccacatggtttctggaacactcatgagcacaaactgtgctaaccattgtaaccacagcaatgactttgtcataaacacttgttgtgataaaatagagaagtatatcaaaaattctatacaaccaaaaaaaagta

SEQ ID NO: 29983 - DNA, 338 bp, Homo sapiens
  MAP TO AL158801.1; EXPRESSED IN PLACENTA, SIGNAL = 1.8; EXPRESSED IN BRAIN, SIGNAL = 2.4; EXPRESSED IN BONE MARROW, SIGNAL = 2.4; EXPRESSED IN FETAL LIVER, SIGNAL = 2.5; EXPRESSED IN LUNG, SIGNAL = 4.2; NT HIT: gi11434323, EVALUE 0.00e+00; EST_HUMAN HIT: AW863777.1, EVALUE 0.00e+00; SWISSPROT HIT: Q09103, EVALUE 7.70e-01
aggctccaaaagctgctggattttaaacctggtctccaggaagtcatgcgacacctgcttcttccaactggatgcctcaagcactggtaatgtactttccacagaagaggctggcagtacaaatggctcagcagacccacttttttcctcagatgcactgtcacccccagcagcatcttcaagctggctggcctctgaagactcttttgttgtgctttcattcaactgggaatagtctgacaagtgctgaccaggtggcaaaaaaaacaacatccctggaactgggtcttcacaggagtttaaaatggaaggctggtctttgtctaccttggacacag

SEQ ID NO: 29984 - DNA, 110 bp, Homo sapiens
  MAP TO AC018698.3; EXPRESSED IN ADULT LIVER, SIGNAL = 1.6; EXPRESSED IN PLACENTA, SIGNAL = 1.4; EXPRESSED IN BRAIN, SIGNAL = 1.6; EXPRESSED IN BONE MARROW, SIGNAL = 1.7; EXPRESSED IN FETAL LIVER, SIGNAL = 1.9; EXPRESSED IN HELA, SIGNAL =   2; SWISSPROT HIT: O14338, EVALUE 7.10e+00; NT HIT: AJ271735.1, EVALUE 9.40e-01; EST_HUMAN HIT: N77597.1, EVALUE 3.50e-01
gatccttattcaacaaatattttagtctttgctgagtcagcaactatgctagatgcaaagatggaaaataggaaaaacgtattccctgacatcatggaatattctaaaag

SEQ ID NO: 29985 - DNA, 171 bp, Homo sapiens
  MAP TO AC005678.1; EXPRESSED IN BRAIN, SIGNAL = 1.3; EXPRESSED IN FETAL LIVER, SIGNAL = 1.9; EXPRESSED IN HELA, SIGNAL = 1.8; NT HIT: gi7662109, EVALUE 1.00e-38; EST_HUMAN HIT: BE513403.1, EVALUE 2.00e-13; SWISSPROT HIT: O43309, EVALUE 2.00e-22
ctgctctcctgggtcatccagctctctctccaaatcctccagcacagtcactgcctcctctccactcacaggacggtgctgtctgacccaggcctggagctcctcaggcaggatagtcaggaactgctccagcaccagcagctctaggatctgctccttggtgtgcatctc

SEQ ID NO: 29986 - DNA, 390 bp, Homo sapiens
  MAP TO AL034380.25; EXPRESSED IN BRAIN, SIGNAL = 1.7; NT HIT: AB024075.1, EVALUE 1.00e-104; EST_HUMAN HIT: BE731976.1, EVALUE 1.00e-104; SWISSPROT HIT: P55057, EVALUE 3.80e+00
atgcctgtatggggccgcccatcatttgtggtggcatgttttgctgggcattggtgccagggggtgcagagacacggtctcggccaaactggaatggaaattggttctgggggccgcctgctggtcggcgctcagtagcagctgtggcagtggcaggataggcattgccatactggttgtatacatcttgctgaggggaaggctgggcagcttgttgctggctggcaggctggggctgggctgggggcaactgctgctgctgaggctgcccctgcccagtgctgtatggcacgctgtacatctccccttcgtgccgcttggcaggagggccatatgtgccatccattggccgcttgtaattctaaggcagagacaagcagaggggaagtt

SEQ ID NO: 29987 - DNA, 100 bp, Homo sapiens
  MAP TO AC021881.2; EXPRESSED IN BRAIN, SIGNAL = 1.3; SWISSPROT HIT: Q05622, EVALUE 2.50e+00; NT HIT: AJ010770.1, EVALUE 2.00e-11; EST_HUMAN HIT: AW083969.1, EVALUE 2.00e-14
atgccgtcgaaaggccatgaagtttgtgggaatttgcagcctaccggtctgtggcctgttaggaaccaggccacacagcagaaggtgagcggccaggcgg

SEQ ID NO: 29988 - DNA, 114 bp, Homo sapiens
  MAP TO AC023820.2; EXPRESSED IN BRAIN, SIGNAL = 2.3; NT HIT: Y11972.1, EVALUE 9.90e-01; SWISSPROT HIT: Q10337, EVALUE 7.10e+00; EST_HUMAN HIT: H26555.1, EVALUE 5.70e+00
gttctcagaaggcagtcacatctggacagcattccttgactacgcatcaatattccatcatgtcattgccggctgtgaggaggaaagtgacctcctaaacaaatccgtgcacgt

SEQ ID NO: 29989 - DNA, 127 bp, Homo sapiens
  MAP TO AC019219.2; EXPRESSED IN BRAIN, SIGNAL =  18; NT HIT: AL139074.2, EVALUE 2.80e-01; EST_HUMAN HIT: BE018722.1, EVALUE 1.70e+00; SWISSPROT HIT: Q08779, EVALUE 4.10e+00
aaatggagttcagcagcttcgatctatttatctggtgcaagtgattgagaatgaatgggcttggagaatgaacaggttcacacgtaccaggggatggatggagaatcagttattattcaaacagcat

SEQ ID NO: 29990 - DNA, 177 bp, Homo sapiens
  MAP TO AC019205.2; EXPRESSED IN BRAIN, SIGNAL = 1.5; NT HIT: Z71446.1, EVALUE 1.00e-01; SWISSPROT HIT: P32715, EVALUE 1.50e-01; EST_HUMAN HIT: R17461.1, EVALUE 2.40e+00
gccagaaacgcgaaatgctgtcggccttccagaggctgttccgagtcttatttgtgattgaaacagtctcagaatacggagtcctgatcttcatttatggatggccctttctccagacccttgcgatgctcctgatcgggacagtgtctttccacctttggatccgcagaaatcgag

SEQ ID NO: 29991 - DNA, 282 bp, Homo sapiens
  MAP TO AC016026.12; EXPRESSED IN BRAIN, SIGNAL = 1.5; NT HIT: gi7662283, EVALUE 1.10e-02; EST_HUMAN HIT: AW514229.1, EVALUE 5.00e-24; SWISSPROT HIT: Q29442, EVALUE 4.20e-01
cttggtgttagtgcacgcttttccctttttgtagtctttgtgactgccccgtttgtccaattttgcccagagggctttggctttccagtagttaagcttggacttgagcttgtgatagaaggagcggtagtcctttggctttagttccaggtggtcacagagctcctggaaagccttgagggttcccttgcaggtggtggcctggacaaaccggtcaaagaggacatgagctgggttcatggtctcatgcttcctctcctccatgctgcctcactctcagca

SEQ ID NO: 29992 - DNA, 129 bp, Homo sapiens
  MAP TO AC002045.1; EXPRESSED IN PLACENTA, SIGNAL = 2.1; EXPRESSED IN BRAIN, SIGNAL = 1.6; EXPRESSED IN ADULT LIVER, SIGNAL = 1.5; EXPRESSED IN LUNG, SIGNAL =   2; NT HIT: U35025.1, EVALUE 2.90e-01; SWISSPROT HIT: P36021, EVALUE 5.40e+00; EST_HUMAN HIT: BE142832.1, EVALUE 6.60e+00
atcatcgccattcacccagttacccaaaccaagagcccgaacaacatctttgagtccttctccatcacaccctacattcaaccaattgccaccttctcttttatatacctccttaagtcacggccttaa

SEQ ID NO: 29993 - DNA, 199 bp, Homo sapiens
  MAP TO AC011462.3; EXPRESSED IN BRAIN, SIGNAL = 1.4; EXPRESSED IN LUNG, SIGNAL = 2.5; EST_HUMAN HIT: AW890299.1, EVALUE 5.00e-48; SWISSPROT HIT: Q9YB80, EVALUE 2.20e+00
acagcaagaagcggcggaggtccttggggtaggaggcgaagtcagggatctcggtggcggcggcggccccccaagcctggcagccccccgtttcagtgctgtccccactgggcagggaccccagccgccactgctgctggttccagtaagcaaagggcagcgggatagtctggcccaggcgggtggagaggttggcagg

SEQ ID NO: 29994 - DNA, 84 bp, Homo sapiens
  MAP TO AC023392.2; EXPRESSED IN PLACENTA, SIGNAL =   2; EXPRESSED IN FETAL LIVER, SIGNAL = 1.8; EXPRESSED IN BRAIN, SIGNAL = 1.4; EXPRESSED IN BONE MARROW, SIGNAL = 1.5; EXPRESSED IN ADULT LIVER, SIGNAL = 1.5; SWISSPROT HIT: O88011, EVALUE 9.60e+00; NT HIT: AF110520.1, EVALUE 6.80e-01
ttagagggagatgatgggctgttctttctctctttgtctgtcctgctgtggatgtggtcttgagctctggtgtccatcttggat

SEQ ID NO: 29995 - DNA, 94 bp, Homo sapiens
  MAP TO AL157996.1; EXPRESSED IN BRAIN, SIGNAL = 1.4; EXPRESSED IN PLACENTA, SIGNAL = 1.3; NT HIT: gi7524759, EVALUE 2.00e-01
cttaggatgtatattgaagtatttattggtttcaaagctctttttttcgctctcagagtagtaaagcagaaagctctctttgatgatgaaaaac

SEQ ID NO: 29996 - DNA, 140 bp, Homo sapiens
  MAP TO AC009396.5; EXPRESSED IN FETAL LIVER, SIGNAL = 1.6; EXPRESSED IN BRAIN, SIGNAL = 1.5; EXPRESSED IN PLACENTA, SIGNAL = 1.8; EXPRESSED IN ADULT LIVER, SIGNAL = 1.6; EXPRESSED IN LUNG, SIGNAL = 1.7; EST_HUMAN HIT: AI004040.1, EVALUE 3.00e-73; NT HIT: M13792.1, EVALUE 4.90e+00
cccatattccttggcttgtggcccttaatctctatctccatattcacatcatctctctgtctgtatgtgtgatcttcctttgccttcatcttataaggattcaagtgcttgcatttagggtccacctggagaatacagga

SEQ ID NO: 29997 - DNA, 153 bp, Homo sapiens
  MAP TO AC012535.3; EXPRESSED IN ADULT LIVER, SIGNAL = 1.7; EXPRESSED IN BONE MARROW, SIGNAL = 1.8; EXPRESSED IN LUNG, SIGNAL = 3.4; EXPRESSED IN BRAIN, SIGNAL = 1.7; NT HIT: M82885.1, EVALUE 3.50e-01; SWISSPROT HIT: Q19954, EVALUE 9.00e+00
gcaagccactgaatctctctggacttctgctgtcacctgttcagttggccaccaaaggatctcattctccactgctgctgctgccagttgttaccttaaagctgaacactcagagaaatctggaacaaatgtcaatgcaaagccacgacaact

SEQ ID NO: 29998 - DNA, 95 bp, Homo sapiens
  MAP TO AC020559.2; EXPRESSED IN BRAIN, SIGNAL = 1.3; NT HIT: AL139076.2, EVALUE 5.10e-02; EST_HUMAN HIT: BE898756.1, EVALUE 1.20e+00
atggagctggtagaagacaaatcaggcaacaagatgatattgattttagtgggagagaataagactactggaagaccaacagagatgggagatgg

SEQ ID NO: 29999 - DNA, 172 bp, Homo sapiens
  MAP TO AL121875.9; EXPRESSED IN BRAIN, SIGNAL = 1.6; EXPRESSED IN PLACENTA, SIGNAL = 1.3; EXPRESSED IN ADULT LIVER, SIGNAL = 1.6; SWISSPROT HIT: P96994, EVALUE 6.70e+00; EST_HUMAN HIT: AI193704.1, EVALUE 1.50e-01
caaaacatattaagaagaaagaggaggaggaggaggaggacaataacagcaatgacagcaagaacaaggacaagacattgacaactgggagttcaggctctgccaagatcttcttgatgcgaggtggtaggagacagctacttcttcccactctttccttatgtcttctgtc

SEQ ID NO: 30000 - DNA, 118 bp, Homo sapiens
  MAP TO AL121981.8; EXPRESSED IN BRAIN, SIGNAL = 2.1; EXPRESSED IN PLACENTA, SIGNAL = 1.4; EXPRESSED IN ADULT LIVER, SIGNAL = 1.4; SWISSPROT HIT: P47403, EVALUE 9.30e+00; EST_HUMAN HIT: AI400798.1, EVALUE 1.50e+00
cggccggctgggaccccgctcccggtctgagccacccaggttatagaaggggaatctcgggaagctttccaagtcactgcccacgtcttcgaacttcctcggggtgacgaggacctcc

SEQ ID NO: 30001 - DNA, 85 bp, Homo sapiens
  MAP TO AF223391.1; EXPRESSED IN BRAIN, SIGNAL = 1.7; EXPRESSED IN PLACENTA, SIGNAL = 1.4; EXPRESSED IN ADULT LIVER, SIGNAL = 1.7; EST_HUMAN HIT: BF086579.1, EVALUE 1.00e+00; NT HIT: AF223391.1, EVALUE 7.00e-41
tgcagttttcagtgtatggacatggtttactggagaaagattctgagaccatgtccaaacccatctatgaaaagtacctggaatt

SEQ ID NO: 30002 - DNA, 185 bp, Homo sapiens
  MAP TO AL133551.4; EXPRESSED IN BRAIN, SIGNAL = 1.6; EXPRESSED IN ADULT LIVER, SIGNAL = 1.6; SWISSPROT HIT: P52016, EVALUE 3.90e-02; NT HIT: gi11141870, EVALUE 1.00e-100; EST_HUMAN HIT: AW875464.1, EVALUE 1.00e-100
aggtaaaaaagacctgatgctggaagaatctgacaagactcataccaccaagatggaaaatgaggaatgtaatgagcaaagagaaagaaagaaagaggagctggcttcaaccgcagagaaaacggagcagaaagaacccaagcccctagagaagtcagtctccccgcaaaattcagattcttcag

SEQ ID NO: 30003 - DNA, 159 bp, Homo sapiens
  MAP TO AC006530.4; EXPRESSED IN LUNG, SIGNAL = 1.9; EXPRESSED IN BRAIN, SIGNAL = 1.8; EXPRESSED IN PLACENTA, SIGNAL = 2.2; SWISSPROT HIT: P49770, EVALUE 2.00e-20; NT HIT: gi7657057, EVALUE 4.00e-72; EST_HUMAN HIT: BE280791.1, EVALUE 5.00e-72
gtgatcattggcacgaagaccatcctggccaatggggccctgagagctgtgacaggaactcacactctggcactggcagcaaaacaccattccaccccactcatcgtctgtgcacctatgttcaaactttctccacaggtaagtgtgtctgtctctagc

SEQ ID NO: 30004 - DNA, 248 bp, Homo sapiens
  MAP TO AC008045.5; EXPRESSED IN BRAIN, SIGNAL = 1.6; EXPRESSED IN PLACENTA, SIGNAL = 1.4; EXPRESSED IN ADULT LIVER, SIGNAL = 2.3; EXPRESSED IN LUNG, SIGNAL = 2.4; SWISSPROT HIT: Q21313, EVALUE 2.00e-09; NT HIT: gi4758827, EVALUE 0.00e+00; EST_HUMAN HIT: BE348399.1, EVALUE 1.00e-21
tgtctcagaacccgatccagagcagcagtgatgaaatcaccctctcctttaagacctggcagcgtaacggcctcatcctgcacacgggcaagtcggctgactatgtcaacctggctctgaaggatggtgcggtctccttggtcattaacctggggtccggggcctttgaggccattgtggagccagtgaatggaaaattcaacgacaacgcctggcatgatgtcaaagtgacacgcaacctccggcag

SEQ ID NO: 30005 - DNA, 142 bp, Homo sapiens
  MAP TO AC011449.3; EXPRESSED IN PLACENTA, SIGNAL = 1.5; EXPRESSED IN BRAIN, SIGNAL = 1.6; EXPRESSED IN ADULT LIVER, SIGNAL = 1.8; EXPRESSED IN FETAL LIVER, SIGNAL = 1.6; EST_HUMAN HIT: BE208545.1, EVALUE 5.00e-72; SWISSPROT HIT: P10253, EVALUE 2.10e-01; NT HIT: X54709.1, EVALUE 5.00e+00
gaaatctcaaaagaaaattgaggtcctcaaaaagcaggtggaaaaagccatggggaacgaaatgtctgctcatcagtacctggcaaaccttgttggcctggcagaaaacataacccaggaacgtgacagtcttatgtgtttg

SEQ ID NO: 30006 - DNA, 386 bp, Homo sapiens
  MAP TO AC007954.6; EXPRESSED IN BRAIN, SIGNAL = 1.6; EXPRESSED IN PLACENTA, SIGNAL = 1.7; EXPRESSED IN LUNG, SIGNAL = 1.6; EXPRESSED IN ADULT LIVER, SIGNAL = 1.8; NT HIT: AF053543.1, EVALUE 0.00e+00; SWISSPROT HIT: O43708, EVALUE 1.00e-03; EST_HUMAN HIT: AA281401.1, EVALUE 1.00e-105
ctggatggcccaacttcagcttcactgcctactccagctgggaaaccaaggccagcacagcgccagccatcagagtgagagctgtcaccgtggccagtggcagggcttgtccactcgagtggggaaatggtgattgtctgtgcggagcctcaggaaacagcagctcatccctaacagctctctcgagacctggctgccacattctcaccagcagccatgcccagtctgtcactcagttgggcgcccatttcataactatggaggccaaggcccagaaagctttgtgtcccctccctgcgcccagaataagatgtttatgtggcctccccacagccctggagcagatcctacagagcacagcgggcatatactgtgtaggagacgag

SEQ ID NO: 30007 - DNA, 325 bp, Homo sapiens
  MAP TO AL050303.2; EXPRESSED IN BRAIN, SIGNAL = 1.6; SWISSPROT HIT: P54274, EVALUE 2.00e-47; NT HIT: AL163204.2, EVALUE 0.00e+00; EST_HUMAN HIT: AA463246.1, EVALUE 1.00e-130
ctacaatcacatgatggagaaaattaagagttatgtgaattatgtgctaagtgaaaaatcatcaacctttctaatgaaggcagcagcaaaagtagtagaaagtaaaagaacaagaacaataacttctcaagataaagctaatgaaaattatgttgaaacggaaactgaagctaatttggatacaagaaaaaggtctcacaagaatcttttcttatctaagttacaacatgggacccagcaacaagaccttaataagaaagaaagaagagtaggaactcttcaaagtacaaaaaagaaaaaagaaagcagaagagccactgaaagc

SEQ ID NO: 30008 - DNA, 115 bp, Homo sapiens
  MAP TO AC010450.3; EXPRESSED IN BRAIN, SIGNAL = 1.6; EXPRESSED IN ADULT LIVER, SIGNAL = 1.6; NT HIT: AF027153.1, EVALUE 2.50e-01; EST_HUMAN HIT: AW965549.1, EVALUE 1.50e+00
gtcaccattcatcatcatcatcaccatcatcatcttaaatctaatggtcattacctgccatgacctatcagcagatttcacaggactgatcctcactttttcctccaaagacttt

SEQ ID NO: 30009 - DNA, 229 bp, Homo sapiens
  MAP TO AC012614.3; EXPRESSED IN ADULT LIVER, SIGNAL = 1.5; EXPRESSED IN FETAL LIVER, SIGNAL = 1.6; EXPRESSED IN BRAIN, SIGNAL = 1.6; EXPRESSED IN PLACENTA, SIGNAL = 1.3; EST_HUMAN HIT: AL042344.1, EVALUE 3.20e+00; NT HIT: L11144.1, EVALUE 9.00e-03; SWISSPROT HIT: P03186, EVALUE 2.80e+00
ttagataaggtggtcagggagggcttcttggaggaggcagcctttcagcatggagtgagggaacaagctgaagaggatcagagtccagaccgagtgccaagtccctcgggtgggagtgaatttgatgttttcaaggaagagcaagaaggatgattgggatgaaggagagaagaaggacgtgggcaaagatggggttagaggcgagttggggacagagcagcagggctgg

SEQ ID NO: 30010 - DNA, 183 bp, Homo sapiens
  MAP TO AL136418.1; EXPRESSED IN PLACENTA, SIGNAL =   2; EXPRESSED IN BRAIN, SIGNAL = 1.8; EXPRESSED IN BONE MARROW, SIGNAL = 2.3; EXPRESSED IN FETAL LIVER, SIGNAL = 1.9; EXPRESSED IN LUNG, SIGNAL = 2.8; SWISSPROT HIT: P50476, EVALUE 2.30e+00; EST_HUMAN HIT: BE439750.1, EVALUE 7.00e-84; NT HIT: AB032957.1, EVALUE 5.00e-84
gaagaagaagagtacgaaactaaaggaggacgccggagaacatgggatgatgattatgtgctaaagagacagttttctgcattggttcctgcttttgatcctagacctggtcgtactaatgtccagcagacaactgatctagaaataccacccccaggtacagaatgttttggttttgtgatt

SEQ ID NO: 30011 - DNA, 471 bp, Homo sapiens
  MAP TO AL135787.3; EXPRESSED IN BRAIN, SIGNAL = 1.5; EXPRESSED IN PLACENTA, SIGNAL = 2.2; EXPRESSED IN HELA, SIGNAL = 1.7; EXPRESSED IN FETAL LIVER, SIGNAL = 1.9; EXPRESSED IN ADULT LIVER, SIGNAL = 1.5; EXPRESSED IN LUNG, SIGNAL = 1.8; EST_HUMAN HIT: BE148650.1, EVALUE 0.00e+00; SWISSPROT HIT: P28934, EVALUE 8.50e+00; NT HIT: Z48165.1, EVALUE 3.00e-01
ctcataattctccttgatccagagctctcgtttaagaaaagtttctttctgatgatcttctagactatcaaattgagactttgacatcttcatagatttacgtataatgtataatctctcttcctctccatattctttgcctttgatgttaaaattatagatccaccgacaataccaaactatatatgagcataggtgaaaaggagctaagataatttgaaacaggagaagatcacagatttggggtttctgatagcccccctttatatctattttactttttataatgttctttatgatgttctcctcctcgtcacgaatttcttctttggactttttgtttttgcctttttctttggcttttttgagcagtccctgctgcttggcaatctctgtagcttggatacggtacttgggcactgtggctaggtagctgattgccttattgtagctattccaccagctgaaaaa

SEQ ID NO: 30012 - DNA, 193 bp, Homo sapiens
  MAP TO AC002400.1; EXPRESSED IN PLACENTA, SIGNAL = 2.5; EXPRESSED IN BRAIN, SIGNAL = 1.7; EXPRESSED IN BONE MARROW, SIGNAL = 1.6; SWISSPROT HIT: P54256, EVALUE 1.30e+00; EST_HUMAN HIT: AA342521.1, EVALUE 6.70e-01
gacgctccacagagcccgtcttccccacgaggccctcagccactgggcctggaagagcggcatcgttattacagaaaagaggctgtctggtgccctcaccaacaccaaggctaagggcaagttttgttttataagcaagataaaacttataatgaaaatccacaagccattcctcctctttatatttattttc

SEQ ID NO: 30013 - DNA, 259 bp, Homo sapiens
  MAP TO AL138688.11; EXPRESSED IN ADULT LIVER, SIGNAL = 1.6; EXPRESSED IN BONE MARROW, SIGNAL = 1.5; EXPRESSED IN PLACENTA, SIGNAL = 1.4; EXPRESSED IN BRAIN, SIGNAL = 1.8; EXPRESSED IN HELA, SIGNAL = 2.8; EXPRESSED IN FETAL LIVER, SIGNAL = 2.1; EST_HUMAN HIT: AA372476.1, EVALUE 3.00e-50; SWISSPROT HIT: P04374, EVALUE 1.00e-30; NT HIT: AF023861.1, EVALUE 2.00e-50
atggtcaattctgccatgttttatgacattgctgagcccttaagccacatctcttctgagctagctgcagacaaagttccaaacatagcaggaaacattcatgctgtgaggtctggagagaatggatttggccataagggctcctgctttcacagaattattccagggcttatgtgccagggtggtgacttcacacgccatcatgacactggcagcaagtccatctatgggcagaaatttgatggtgagaacttcatcc

SEQ ID NO: 30014 - DNA, 425 bp, Homo sapiens
  MAP TO AC006531.1; EXPRESSED IN BRAIN, SIGNAL = 1.9; NT HIT: gi6006002, EVALUE 0.00e+00; SWISSPROT HIT: P35436, EVALUE 3.00e-78; EST_HUMAN HIT: F08339.1, EVALUE 5.00e-93
ggctgggttacctgtctcctgaagcatctggtcttcatcgatgtcatagaggttccccatccgcaggcaggcatcgcacttgaagggggacctcatggtgaagtggcctgaataggtgggcatgttggaaaggcagcttctgcagtgcgtggagttctgccggtatcgctcgctggtctcactgtgcggggaacccttgtctttcaaggtgaagtgcttggagtagagtttatactggtcgttgttggaaagcccctcttcattatgcaaggggttccggttcattggcagcgtggagtcccccttgcggaagttttcactgggatcctggtaggggtccgggaagtccacgttctcgggcagggtcacattttcaacaaactggggtggatctaagtggaaaccaggctccttctcaccatcta

SEQ ID NO: 30015 - DNA, 90 bp, Homo sapiens
  MAP TO AL138761.3; EXPRESSED IN BRAIN, SIGNAL = 1.7; EXPRESSED IN HELA, SIGNAL = 1.6; EXPRESSED IN ADULT LIVER, SIGNAL = 1.4; EXPRESSED IN FETAL LIVER, SIGNAL = 1.7; NT HIT: AB021490.2, EVALUE 7.40e-01; EST_HUMAN HIT: BE612820.1, EVALUE 1.10e+00
ctatactttaacttcacccctgagttgttctcttcgtccagtggagagagagacagagggaagaggagagcaagatagcgagagaggaaa

SEQ ID NO: 30016 - DNA, 132 bp, Homo sapiens
  MAP TO AL138717.2; EXPRESSED IN BRAIN, SIGNAL = 1.5; EXPRESSED IN PLACENTA, SIGNAL = 1.8; EXPRESSED IN FETAL LIVER, SIGNAL = 2.1; EXPRESSED IN HELA, SIGNAL = 1.9; EXPRESSED IN ADULT LIVER, SIGNAL = 1.5; EXPRESSED IN BONE MARROW, SIGNAL = 1.7; EXPRESSED IN LUNG, SIGNAL =   3; EST_HUMAN HIT: AV656017.1, EVALUE 2.00e-68; NT HIT: gi11418431, EVALUE 1.00e-68; SWISSPROT HIT: P33296, EVALUE 3.00e-10
gataacctttttgaatggcacttcacggttagagggcccccagactccgattttgatggaggagtttatcacgggcggatagtactgccaccagagtatcccatgaaaccaccaagcattattctcctaacg

SEQ ID NO: 30017 - DNA, 398 bp, Homo sapiens
  MAP TO AL121809.1; EXPRESSED IN PLACENTA, SIGNAL = 1.8; EXPRESSED IN BRAIN, SIGNAL = 1.7; EXPRESSED IN BONE MARROW, SIGNAL = 1.6; EXPRESSED IN FETAL LIVER, SIGNAL =   2; EXPRESSED IN HELA, SIGNAL = 2.1; EXPRESSED IN ADULT LIVER, SIGNAL =   2; SWISSPROT HIT: P40577, EVALUE 3.40e-01; NT HIT: AB046816.1, EVALUE 0.00e+00; EST_HUMAN HIT: AU132940.1, EVALUE 0.00e+00
agactcacatcgtcgaactctgtattaacatcttcaaataacagcaaactttcatcttgatcagtggacaatactgggaggtcactgttatcaacatcatgattgttctctccaactaaattctgtgcagggcttctgtgtatttgaacacgattgttaggtactaaattttcattttgattatgtttatgtacatcacagtcacagagacttggctcatcagaaatattatcattaggtatatcataaaggcaacttttttcagatggataatttatacatttaagtgaattcaattctaaattctgttgagaattcacagctgaatgtgacagcaaacaggtgcatttatcacttcgtaaatgctctgcacagggtaagaaaagcaaattctcaag

SEQ ID NO: 30018 - DNA, 111 bp, Homo sapiens
  MAP TO AC011025.4; EXPRESSED IN BRAIN, SIGNAL = 1.7; EXPRESSED IN BONE MARROW, SIGNAL = 7.1; EXPRESSED IN LUNG, SIGNAL = 4.4; EST_HUMAN HIT: BE894630.1, EVALUE 1.00e-40; NT HIT: U46900.1, EVALUE 3.00e-56; SWISSPROT HIT: P37840, EVALUE 8.00e-12
ttagaaagattcagcttggactcctacctcagaaggcatttcataagcctcattgtcaggatccacaggcatatcttccagaattccttcctgtggggctccttcttcatt

SEQ ID NO: 30019 - DNA, 182 bp, Homo sapiens
  MAP TO AC002523.1; EXPRESSED IN ADULT LIVER, SIGNAL = 1.5; EXPRESSED IN BRAIN, SIGNAL = 1.6; EXPRESSED IN PLACENTA, SIGNAL = 1.3; NT HIT: AL161511.2, EVALUE 1.10e-01; SWISSPROT HIT: P14126, EVALUE 1.30e+00
aggtcatgccatatatggtggagaattatataacttttataaaacaatctctggcatactaccaggcactgataaagatgaggtgtctgatcatgagtcattaaatgaccatggagccagagctgctctacatgagctggatgattttagacccaccaagtcataaggttaggtgtactcag

SEQ ID NO: 30020 - DNA, 194 bp, Homo sapiens
  MAP TO AL159141.1; EXPRESSED IN LUNG, SIGNAL = 3.5; EXPRESSED IN BRAIN, SIGNAL = 1.4; EXPRESSED IN PLACENTA, SIGNAL = 1.5; EXPRESSED IN BONE MARROW, SIGNAL = 2.6; EXPRESSED IN FETAL LIVER, SIGNAL = 1.6; EST_HUMAN HIT: BF430921.1, EVALUE 1.00e-105; SWISSPROT HIT: P05793, EVALUE 9.90e-01; NT HIT: X56007.1, EVALUE 1.00e-04
ttgttggcaaaggagaggaagaggaagaggaagatggcatgcggctttgtctgccagccaacccgaaaaactgccttcctcaccgccggggcatcagcatcctggagaagctcatcaaaacatgcccggtgtggctgcagctgagtctgggccaggcagaggtggccaggatcctgcaccgggtggtggctggg

SEQ ID NO: 30021 - DNA, 115 bp, Homo sapiens
  MAP TO AC016372.2; EXPRESSED IN BRAIN, SIGNAL = 1.4; EXPRESSED IN ADULT LIVER, SIGNAL = 2.9; NT HIT: U00008.1, EVALUE 3.90e+00; SWISSPROT HIT: Q03125, EVALUE 9.30e+00; EST_HUMAN HIT: D79348.1, EVALUE 3.70e-01
gccatctgctgtttattcacctccatactgaacctagacgtcagagtcagctctttgaatcgtgttctcaacgctgctttagaatctctaactgccttaaccatctcccggcttg

SEQ ID NO: 30022 - DNA, 129 bp, Homo sapiens
  MAP TO AC009936.4; EXPRESSED IN BRAIN, SIGNAL = 6.4; EXPRESSED IN PLACENTA, SIGNAL =   2; EXPRESSED IN HELA, SIGNAL = 2.1; EXPRESSED IN ADULT LIVER, SIGNAL = 5.1; EXPRESSED IN BONE MARROW, SIGNAL = 2.4; EXPRESSED IN FETAL LIVER, SIGNAL = 2.9; EXPRESSED IN LUNG, SIGNAL =   6; NT HIT: U82486.1, EVALUE 7.00e-67; EST_HUMAN HIT: H78844.1, EVALUE 7.00e-37; SWISSPROT HIT: P12074, EVALUE 1.00e-13
ggaaacggcttggtcctgatgctaagatgggggtaggggatgaactcgtgtccctagtgctctccgtggtgcgacttcaggaacacattcagcatgctgtatgctactccggggagcacgacgaagtag

SEQ ID NO: 30023 - DNA, 155 bp, Homo sapiens
  MAP TO AL117375.12; EXPRESSED IN PLACENTA, SIGNAL = 1.5; EXPRESSED IN BRAIN, SIGNAL = 1.5; EXPRESSED IN BONE MARROW, SIGNAL = 1.6; EXPRESSED IN HELA, SIGNAL = 1.7; EXPRESSED IN ADULT LIVER, SIGNAL = 1.6; EXPRESSED IN FETAL LIVER, SIGNAL = 1.7; EST_HUMAN HIT: BE386647.1, EVALUE 8.20e+00; SWISSPROT HIT: P53904, EVALUE 1.40e+00; NT HIT: L05145.1, EVALUE 3.50e-01
tacaaacttctattgcataagactggtctgaactaatcatggtgcctttctctactttgtcagcagaatttttcctagcataaccatggtgcatcaaattctggctaatcgcatgtaagagaatgtaatgagacagaattgtaggaaaggaaagc

SEQ ID NO: 30024 - DNA, 204 bp, Homo sapiens
  MAP TO AL121948.7; EXPRESSED IN BRAIN, SIGNAL = 1.5; EXPRESSED IN PLACENTA, SIGNAL = 1.3; EXPRESSED IN ADULT LIVER, SIGNAL = 1.5; EST_HUMAN HIT: AW879919.1, EVALUE 1.00e-11; NT HIT: gi11418618, EVALUE 1.00e-109; SWISSPROT HIT: Q61045, EVALUE 3.00e-34
ccacctggagtccagaaagatgagcttcatgtccaggctggcgcggaacataaacatattgctgtgtagcttgatctccgtgacggcgctgggaggcagcgagtggcccacggccaccaggcccacgttttggtagcagccgtcgaagggggacatgtccaggctgtactggcggatcttcaagtagccgctgcagtggatgac

SEQ ID NO: 30025 - DNA, 115 bp, Homo sapiens
  MAP TO AL133163.2; EXPRESSED IN BONE MARROW, SIGNAL = 2.1; EXPRESSED IN BRAIN, SIGNAL = 1.3; EXPRESSED IN PLACENTA, SIGNAL = 1.4; EXPRESSED IN FETAL LIVER, SIGNAL = 1.6; EXPRESSED IN HELA, SIGNAL =   2; EST_HUMAN HIT: AV733825.1, EVALUE 1.00e-50; NT HIT: AF161449.1, EVALUE 7.00e-51
gattgtagaggaggatgatcctgagctgttcaaacaagctgtatataaacagaaaatgaaactctttgctcagctggaaattaaaaggaaagagagagaagccaaagagatgcat

SEQ ID NO: 30026 - DNA, 136 bp, Homo sapiens
  MAP TO AL122127.3; EXPRESSED IN PLACENTA, SIGNAL = 1.9; EXPRESSED IN BRAIN, SIGNAL =   2; EXPRESSED IN BONE MARROW, SIGNAL = 1.5; EXPRESSED IN HELA, SIGNAL =   2; EXPRESSED IN ADULT LIVER, SIGNAL =   2; EXPRESSED IN FETAL LIVER, SIGNAL = 2.1; EST_HUMAN HIT: AW269061.1, EVALUE 1.00e-04; SWISSPROT HIT: Q99684, EVALUE 1.10e+00; NT HIT: gi6677868, EVALUE 3.00e-01
acagcccaaggagcctctgttcctgcagatctcggagcggctctctctcctcctccagtgtgtggggaggtgcttgctcttgtaggggaagaaacatttttcccccttctacccatcttaggttcattagctgggg

SEQ ID NO: 30027 - DNA, 85 bp, Homo sapiens
  MAP TO AC009399.5; EXPRESSED IN BRAIN, SIGNAL = 1.9; EXPRESSED IN PLACENTA, SIGNAL = 1.5; SWISSPROT HIT: P27460, EVALUE 7.30e+00; NT HIT: AB023215.1, EVALUE 2.00e-38; EST_HUMAN HIT: AA614255.1, EVALUE 1.00e-40
cgaatgcagcatacacatggattcaaggcttttcacatcctcccccagaccttcctcctgccagctgagtacgcggaattttgta

SEQ ID NO: 30028 - DNA, 159 bp, Homo sapiens
  MAP TO AL157789.1; EXPRESSED IN BRAIN, SIGNAL = 1.3; EXPRESSED IN BONE MARROW, SIGNAL = 1.7; EXPRESSED IN LUNG, SIGNAL = 1.8; SWISSPROT HIT: P92127, EVALUE 1.30e+00; EST_HUMAN HIT: BE267755.1, EVALUE 2.10e+00; NT HIT: AF026552.3, EVALUE 9.20e-02
gccagcgattctgtttgaagaagtaaaggtagatcttggtgtaggactcttgatgctggttaatagcaatgagatcaatgtaaacatccacccaactgaatggcaaatgctctgcagcagtgagagcatgtttgatctgaaggtcgacatgatagtttc

SEQ ID NO: 30029 - DNA, 220 bp, Homo sapiens
  MAP TO AC007376.8; EXPRESSED IN PLACENTA, SIGNAL = 1.5; EXPRESSED IN BRAIN, SIGNAL = 1.5; SWISSPROT HIT: Q9ZFU6, EVALUE 6.10e+00; NT HIT: AL163300.2, EVALUE 9.00e-12; EST_HUMAN HIT: AI244341.1, EVALUE 9.00e-16
agcctggtactggatgtagctgtcatcatcatcacagccatcgtcatcatcattctcatcatcattacaccatcctcatcaccatcatcatcaccaccaccactgatatagtttggaatatgtatctgtgtctcttcccaaatctcatgttgaattgtaacccctcgtattgcaggtggggcctggtgggaggtgactggactttggaggtgaatttctc

SEQ ID NO: 30030 - DNA, 197 bp, Homo sapiens
  MAP TO AC008962.4; EXPRESSED IN BRAIN, SIGNAL = 1.6; EXPRESSED IN BONE MARROW, SIGNAL = 1.6; EXPRESSED IN LUNG, SIGNAL = 1.7; EXPRESSED IN ADULT LIVER, SIGNAL = 1.7; EXPRESSED IN FETAL LIVER, SIGNAL = 1.6; EST_HUMAN HIT: BE818421.1, EVALUE 8.00e-84; NT HIT: gi4503224, EVALUE 8.00e-86; SWISSPROT HIT: P24903, EVALUE 8.00e-26
gcgagccctttgaccccacgtttgtgctgagtcgctcagtgtccaacattatctgttccgtgctcttcggcagccgcttcgactatgatgatgagcgtctgctcaccattatccgccttatcaatgacaacttccaaatcatgagcagcccctggggcgaggtcagccaactgagtccagcaggggcagggtgtggg

SEQ ID NO: 30031 - DNA, 267 bp, Homo sapiens
  MAP TO AC011467.3; EXPRESSED IN BRAIN, SIGNAL = 1.3; EXPRESSED IN PLACENTA, SIGNAL = 1.4; EXPRESSED IN BONE MARROW, SIGNAL = 1.5; EXPRESSED IN HELA, SIGNAL = 1.8; EXPRESSED IN ADULT LIVER, SIGNAL = 1.9; EXPRESSED IN FETAL LIVER, SIGNAL = 1.6; NT HIT: gi7706707, EVALUE 9.00e-25; SWISSPROT HIT: P51617, EVALUE 2.90e-01; EST_HUMAN HIT: BE727907.1, EVALUE 1.00e-24
catgcagggttgtcctagtggacagcgatggagcagagtttgggggagatgctgcagctctggtgagaagccacccagtctcaccatagggctccacatggaacttgtagggatggggggtgagccggcactcactgccaccccagccaactgccctgagtacccggcaaagcccagcagcatcagcagcagtaacagagtcaggtccagtagtaacagtaacaggtccgacatggctctggacccctgcaccgcaccccaaggcag

SEQ ID NO: 30032 - DNA, 177 bp, Homo sapiens
  MAP TO AC018505.3; EXPRESSED IN PLACENTA, SIGNAL = 1.7; EXPRESSED IN BRAIN, SIGNAL =   3; EXPRESSED IN ADULT LIVER, SIGNAL = 1.6; EXPRESSED IN BONE MARROW, SIGNAL = 2.4; EXPRESSED IN FETAL LIVER, SIGNAL = 1.7; EXPRESSED IN LUNG, SIGNAL = 4.4; NT HIT: gi7662289, EVALUE 2.00e-95; SWISSPROT HIT: P12752, EVALUE 2.30e+00; EST_HUMAN HIT: AI906278.1, EVALUE 7.00e-90
cggcttccgagaggtcccgcagggagctgctgagggcgctgcgcttgaggccctcaccgctggcatagctgtcgtccaggcaggcccggctcagtgttccgttgcccgactcctttttgaggctagagcactgggacatgctgggccgcacgacgcctttctgcttctcgagctccg

SEQ ID NO: 30033 - DNA, 151 bp, Homo sapiens
  MAP TO AL121933.9; EXPRESSED IN BRAIN, SIGNAL = 1.6; EXPRESSED IN ADULT LIVER, SIGNAL = 1.4; NT HIT: U76560.1, EVALUE 6.00e-80; EST_HUMAN HIT: AV687657.1, EVALUE 9.00e-80; SWISSPROT HIT: O00628, EVALUE 5.00e-26
ctcctgagcgtgttctttatagacttgcagtggccctgcagctttggcagtgtcccagagctgcagcgagccatcgccactacaggtgatgaggacatgttcgttgttctcactccaagtcacatcaaacaaaccatcattccagtcaaag

SEQ ID NO: 30034 - DNA, 236 bp, Homo sapiens
  MAP TO AC022014.2; EXPRESSED IN BRAIN, SIGNAL = 2.7; EXPRESSED IN BONE MARROW, SIGNAL = 1.7; EXPRESSED IN ADULT LIVER, SIGNAL = 1.7; EXPRESSED IN LUNG, SIGNAL = 2.9; NT HIT: gi4504142, EVALUE 1.00e-130; EST_HUMAN HIT: AA758567.1, EVALUE 1.00e-123; SWISSPROT HIT: P41594, EVALUE 2.00e-46
tgatggctgggctgacaggtatgatgtgacagatggatatcagcgagaagctgttggtggcatcacaatcaagctccaatctcccgatgtcaagtggtttgatgattattatctgaagctccggccagaaacaaaccaccgaaacccttggtttcaagaattttggcagcatcgttttcagtgccgactggaagggtttccacaggagaacagcaaatacaacaagacttgcaata

SEQ ID NO: 30035 - DNA, 182 bp, Homo sapiens
  MAP TO AC011380.2; EXPRESSED IN BRAIN, SIGNAL = 1.3; EXPRESSED IN ADULT LIVER, SIGNAL = 1.6; SWISSPROT HIT: Q99104, EVALUE 5.10e+00; EST_HUMAN HIT: BF527237.1, EVALUE 1.60e-01
aatgttctacataaagtacctgaccaaaacagatttctctatccccaagaagatggaaaaatccaagggcatctttgagtctacgtcccttagtgtcatgaccacactgtcatcacatgacactcagatccacgctggtgcagtcattagggagaccatcattgaagtgctggacctgactg

SEQ ID NO: 30036 - DNA, 242 bp, Homo sapiens
  MAP TO AC010358.5; EXPRESSED IN BRAIN, SIGNAL = 1.6; SWISSPROT HIT: P29539, EVALUE 2.10e+00; NT HIT: gi11037056, EVALUE 3.00e-86; EST_HUMAN HIT: BE166508.1, EVALUE 4.00e-86
tactgtacctttcttcttcctcccgtttcttcttttcttcctcttcctgtttcttcttttcttcttgctcccttttctctgccagcaattgtctgtaaactctccgagcaatctgacctctgagttgcttctggaaaactatggctgcctttttcaggtgcaaaaatctcctcctcagaaggaatgctctgtaattcttctgtattatcaccacacaataaaggacctttctgtattgtttt

SEQ ID NO: 30037 - DNA, 180 bp, Homo sapiens
  MAP TO AC011375.3; EXPRESSED IN BRAIN, SIGNAL = 1.4; EST_HUMAN HIT: AU123985.1, EVALUE 1.00e-82; NT HIT: gi5729753, EVALUE 7.00e-83; SWISSPROT HIT: P00454, EVALUE 7.70e-01
gtacgttcttcagatgtgtcatggtctgatactcgtaggaccctccgaaaagatcaccgctgggaatctggatccttattggaaagagaggagaaagagaagctttttaatgaacacattgaagcacttaccaaaaaaaagagagagcactttaggcaacttctggatgaaacttctgca

SEQ ID NO: 30038 - DNA, 153 bp, Homo sapiens
  MAP TO AC011991.2; EXPRESSED IN BRAIN, SIGNAL = 1.9; EXPRESSED IN PLACENTA, SIGNAL = 1.7; EXPRESSED IN ADULT LIVER, SIGNAL = 1.5; EST_HUMAN HIT: BE619364.1, EVALUE 1.30e-01; SWISSPROT HIT: P53729, EVALUE 1.40e+00
ctgcatacagtttttcaagaaaggagaacgggaaccttccttgtctaatcttgggtaagaatgttcattagtataatctggattaatatttacaacacaacatgctagaaggtggttgcatcgtgattgccttgcttccatttcctgctcatc

SEQ ID NO: 30039 - DNA, 256 bp, Homo sapiens
  MAP TO AC018497.4; EXPRESSED IN BRAIN, SIGNAL = 1.4; SWISSPROT HIT: P15037, EVALUE 6.80e+00; NT HIT: Z97339.2, EVALUE 1.00e-02; EST_HUMAN HIT: AA164914.1, EVALUE 1.00e-06
tctggcgagggttggtctgggggtgacagtccatgactttggagatggtgatgccttctcgactcaggtatgatgggtccacccccttctcagcagtccagactggccgctcaattggtaggaagcacaaataagggcccttacaagtaggttcaagtttccctttcttaaatttctgataaggatgtgatctctggattggtgttgctgaattgggaatttgaagggtggagtttgtgctagaaggccttgggtc

SEQ ID NO: 30040 - DNA, 190 bp, Homo sapiens
  MAP TO AC017116.2; EXPRESSED IN ADULT LIVER, SIGNAL =   2; EXPRESSED IN FETAL LIVER, SIGNAL = 1.9; EXPRESSED IN PLACENTA, SIGNAL = 1.6; EXPRESSED IN BRAIN, SIGNAL =   2; EXPRESSED IN BONE MARROW, SIGNAL = 1.8; EXPRESSED IN HELA, SIGNAL = 1.7; EXPRESSED IN LUNG, SIGNAL = 3.4; SWISSPROT HIT: Q03696, EVALUE 1.00e-04; EST_HUMAN HIT: R13126.1, EVALUE 2.60e+00; NT HIT: AB040947.1, EVALUE 5.00e-04
atcctgttccgggccaaagacctggatcccgagcccaggagccacatcgtgcgagggaaccacacgcagtcggccctgctggcaggcctgcgcaagttcgtgctctacgagctccaggtgctggcgttcacccgcatcgggaacggggtccccagcacgcccctcatcctggagcgcaccaaagacgatg

SEQ ID NO: 30041 - DNA, 127 bp, Homo sapiens
  MAP TO AC012614.3; EXPRESSED IN BRAIN, SIGNAL = 1.4; NT HIT: AL163248.2, EVALUE 4.00e-25; SWISSPROT HIT: P19419, EVALUE 3.10e+00; EST_HUMAN HIT: AW303317.1, EVALUE 4.00e-35
gttctgtttgcagctctcacaaggtcccacaatagactgtctgcaagctgaggagcaaggagagccagtccgagtcccagaactgaagaacttggagtctgatgctcgagggcaggaagcaaccagc

SEQ ID NO: 30042 - DNA, 119 bp, Homo sapiens
  MAP TO AC018765.4; EXPRESSED IN HELA, SIGNAL = 1.8; EXPRESSED IN FETAL LIVER, SIGNAL = 1.8; EXPRESSED IN ADULT LIVER, SIGNAL = 1.5; EXPRESSED IN BRAIN, SIGNAL = 1.3; SWISSPROT HIT: P11369, EVALUE 1.00e-05; NT HIT: AJ229041.1, EVALUE 3.00e-41; EST_HUMAN HIT: AW562328.1, EVALUE 8.00e-27
catgaaatgcctttttccacccctttactttaagtttatgtgagtcattatgtgttaggtgagtctcctgaaggcagtagatggttggtgagttcttatccattccgctgttctgtatc

SEQ ID NO: 30043 - DNA, 168 bp, Homo sapiens
  MAP TO AC018764.3; EXPRESSED IN BRAIN, SIGNAL = 2.4; NT HIT: gi7662047, EVALUE 5.00e-90; SWISSPROT HIT: Q05071, EVALUE 8.80e+00; EST_HUMAN HIT: BE883109.1, EVALUE 7.00e-90
gtgttctactttctaaaggaccaggatttatctattttatcaacttcttatcagtttgcaaaagaaatagccatggcttgtagtgctgcgctgtgccctcacctgaaaactctaaaaagtaatgggatgaataaaattggactcagagtttccattgacactgatatg

SEQ ID NO: 30044 - DNA, 146 bp, Homo sapiens
  MAP TO AC008638.4; EXPRESSED IN BRAIN, SIGNAL = 2.5; SWISSPROT HIT: Q9RTR6, EVALUE 6.10e-01; NT HIT: gi5730038, EVALUE 2.00e-14; EST_HUMAN HIT: AA453647.1, EVALUE 1.00e-17
gattcagaaagctacagtggatcagactggcagcagaccaccaaacggtgaccatgaccctttttttggtaaaaatatggctttgggaagtgctttggaggtgctacttggtccaaccactgagctggtcatcgccagttgtcata

SEQ ID NO: 30045 - DNA, 99 bp, Homo sapiens
  MAP TO AC011447.2; EXPRESSED IN BRAIN, SIGNAL = 1.3; NT HIT: AF087913.1, EVALUE 9.00e-07; SWISSPROT HIT: O05097, EVALUE 2.50e+00
ctcttttatgtctttaccagatataagaagatcatccacatactgaagcagacatatttgtttagggactgtgactttttctagtacttgttctgggac

SEQ ID NO: 30046 - DNA, 93 bp, Homo sapiens
  MAP TO AC021888.2; EXPRESSED IN BRAIN, SIGNAL = 1.3; EST_HUMAN HIT: H86921.1, EVALUE 1.10e+00; NT HIT: gi7019570, EVALUE 1.00e-45
accccagaggaactggaggatgtttctgaccttgaagaggaacacgaggtccgcagtcacaccagcattcagaccgaagggaaaactgatagg

SEQ ID NO: 30047 - DNA, 253 bp, Homo sapiens
  MAP TO AC011375.3; EXPRESSED IN BRAIN, SIGNAL = 2.6; EXPRESSED IN PLACENTA, SIGNAL = 1.8; EXPRESSED IN HELA, SIGNAL = 2.3; EXPRESSED IN ADULT LIVER, SIGNAL = 2.2; EXPRESSED IN BONE MARROW, SIGNAL = 1.6; EXPRESSED IN FETAL LIVER, SIGNAL = 2.2; EXPRESSED IN LUNG, SIGNAL =   2; EST_HUMAN HIT: AW946165.1, EVALUE 9.10e-01; SWISSPROT HIT: P75796, EVALUE 1.70e+00; NT HIT: S83182.1, EVALUE 6.10e-01
ctatttaacaccttcccctgtctcttgatcttcatgttcccaggggatagggtcattgtcctgtacagaagggactgtgtccctctcatgccaaaactgctctacgtcaggaaggatgggaatctctgccttctcagttttccctttgccagaggagggagagctgggtttctctttttctggtatggatgctggggattctggagatggaaccttgtcaggaagaccctctgagttgccagctggtgtttcc

SEQ ID NO: 30048 - DNA, 149 bp, Homo sapiens
  MAP TO AC017024.3; EXPRESSED IN BRAIN, SIGNAL = 1.4; EXPRESSED IN PLACENTA, SIGNAL = 1.5; EXPRESSED IN FETAL LIVER, SIGNAL = 1.5; EXPRESSED IN BONE MARROW, SIGNAL = 1.5; EXPRESSED IN HELA, SIGNAL =   2; NT HIT: AL163246.2, EVALUE 2.00e-42; EST_HUMAN HIT: BE064410.1, EVALUE 2.00e-34; SWISSPROT HIT: P25059, EVALUE 3.50e-01
ggaatgccttatccaccatgatggtattcaacacagcattgtcactgaccaagatactcaatttatggctaaagaagtgtggcagtgggctcatgcttatgaaattcactggtcttaccatgttcctcatcatcctgaaacagcgggat

SEQ ID NO: 30049 - DNA, 229 bp, Homo sapiens
  MAP TO AL121694.3; EXPRESSED IN BRAIN, SIGNAL = 1.8; EXPRESSED IN ADULT LIVER, SIGNAL = 1.5; EXPRESSED IN PLACENTA, SIGNAL =  10; NT HIT: AF146793.2, EVALUE 1.40e-01; SWISSPROT HIT: P06198, EVALUE 5.20e+00
ggagaagcaggaagagctagcaaggaagcatgcaaggtttgtcctgtcactcaaccaaactatggagaaaaaagccaccaccactgtttacataaatgagacttataccaaaataaacttgaagagagaagacatagcattgcaaaaaaaatgtattcaagaggcagaggagctaatggaaaaagaaagggcagaatatctaataagaaaacaagagttgactgcacag

SEQ ID NO: 30050 - DNA, 130 bp, Homo sapiens
  MAP TO AC012177.2; EXPRESSED IN BRAIN, SIGNAL = 1.8; EXPRESSED IN FETAL LIVER, SIGNAL = 1.5; EXPRESSED IN ADULT LIVER, SIGNAL = 1.5; EST_HUMAN HIT: AI874332.1, EVALUE 4.30e-01
ctcactggatagccaagagtttttggcaataggagttgggcttattctgaaagtgtactggaactgcaagggattcaagggttctgaattgcaacaacatcattccacagatgatgagactgaggcttaa

SEQ ID NO: 30051 - DNA, 435 bp, Homo sapiens
  MAP TO AC006111.2; EXPRESSED IN ADULT LIVER, SIGNAL = 1.5; EXPRESSED IN PLACENTA, SIGNAL = 1.7; EXPRESSED IN BRAIN, SIGNAL = 1.6; SWISSPROT HIT: P55899, EVALUE 1.70e-01; NT HIT: gi10732860, EVALUE 2.70e-01
ggggccatttccatctacatggaatatggggacctgctgcccaggggtgacatgcacgaatcctgtgtgttgcctccctggggaatggtacgcagagagaactgggaggctcaccccggcacccagcagtcacacatgctccctaaggagctgactgcagacctttcttcccaagcccaggccagctgcatccaccagacccagagaccacacggggggcccttccgcccccaggtgtgtgaaacccagttacttatgggagggaaaagaccactgtgggcaacaagctttgaagaccgccaacctatccagttccttcttcagcaccggcgtctccataatggaatactgtggcatcggcgttatgggcactttggggggcaagttcttcttccgattagcaccttctgggtaaaacaaaagaagcacacgttt

SEQ ID NO: 30052 - DNA, 103 bp, Homo sapiens
  MAP TO AC018801.2; EXPRESSED IN BRAIN, SIGNAL = 1.5; NT HIT: AJ229043.1, EVALUE 5.60e-02; EST_HUMAN HIT: AW023178.1, EVALUE 1.00e-46; SWISSPROT HIT: P87129, EVALUE 7.20e+00
gaaaaaaatctggatgacaaagcatatcgtaatatcaaggaactggaaaattatgctgaaaacacacagagctctcttctttacttaacactagaaatattgg

SEQ ID NO: 30053 - DNA, 207 bp, Homo sapiens
  MAP TO AL049776.3; EXPRESSED IN BRAIN, SIGNAL = 1.6; EXPRESSED IN LUNG, SIGNAL =   2; EXPRESSED IN ADULT LIVER, SIGNAL = 1.8; EST_HUMAN HIT: AA115605.1, EVALUE 1.00e-100; NT HIT: AF289666.1, EVALUE 4.90e-01; SWISSPROT HIT: O59651, EVALUE 8.50e+00
gaagaagaagaagaagaagaaaacaggatgtctgaagaagcagaaaaacaatatcaacagaataaattgcagactgattccattgttcagacagatcaaccagagacagtgatatccagctcatttgtgaatgtcaattttgaaatggagggagacagtgaagtaattatggaaagcaagcaaaatccagtctctgtcccaccataa

SEQ ID NO: 30054 - DNA, 155 bp, Homo sapiens
  MAP TO AC008430.3; EXPRESSED IN BRAIN, SIGNAL = 1.9; EXPRESSED IN LUNG, SIGNAL = 2.3; SWISSPROT HIT: Q08431, EVALUE 6.00e-10; NT HIT: gi5031660, EVALUE 2.00e-82; EST_HUMAN HIT: AA455377.1, EVALUE 2.00e-77
gtcattgtggccagaggtccaggcattcactttgccttgcttgtccagccgagctttccttggttcccaagtgaacatgtccatgttgagcgttctgaagatgctggaggcagtgatctgatagtcttgtatatgtcctgatttcatacccagag

SEQ ID NO: 30055 - DNA, 246 bp, Homo sapiens
  MAP TO AC008764.4; EXPRESSED IN BRAIN, SIGNAL = 1.3; EXPRESSED IN PLACENTA, SIGNAL = 1.4; EXPRESSED IN BONE MARROW, SIGNAL = 1.8; EXPRESSED IN LUNG, SIGNAL = 3.6; NT HIT: AF110798.1, EVALUE 2.30e+00; SWISSPROT HIT: P52178, EVALUE 5.00e-09; EST_HUMAN HIT: BE744311.1, EVALUE 0.00e+00
acctacgtctaccagtggccctggacgctcctgctcctggctgtcagcggcttctgtaactttgcccagaatgttatcgccttcagcatcctcaacctcgttagccccctgagctactcggtcgccaatgccaccaaaagaatcatggtcatcacggtgtccctgatcatgctgcgcaacccagtcaccagcaccaacgtcctgggcatgatgaccgccatcctgggggtcttcctctataacaag

SEQ ID NO: 30056 - DNA, 91 bp, Homo sapiens
  MAP TO AC023068.3; EXPRESSED IN ADULT LIVER, SIGNAL = 1.6; EXPRESSED IN BRAIN, SIGNAL = 1.6; EXPRESSED IN PLACENTA, SIGNAL = 1.5; EXPRESSED IN BONE MARROW, SIGNAL = 1.5; NT HIT: L07344.1, EVALUE 1.90e-01
ctgttccaagatcctttgggggctcatgtctgaggttcttcgatttgaaccagccctttttcaaagcagctacttcttccacagagtacat

SEQ ID NO: 30057 - DNA, 119 bp, Homo sapiens
  MAP TO AC011463.3; EXPRESSED IN PLACENTA, SIGNAL = 1.9; EXPRESSED IN BRAIN, SIGNAL = 1.5; EXPRESSED IN ADULT LIVER, SIGNAL = 1.6; EST_HUMAN HIT: AV702623.1, EVALUE 3.90e-01; SWISSPROT HIT: Q46393, EVALUE 3.10e+00
gaagccagcaggttggaggaggaaacacattcaaatcccgagcacaaggagctgggagaagaccggttatgggagcggcattcctggaagctctgaagtcacagccccactgatgaaag

SEQ ID NO: 30058 - DNA, 214 bp, Homo sapiens
  MAP TO AC010395.3; EXPRESSED IN BRAIN, SIGNAL = 1.7; EXPRESSED IN PLACENTA, SIGNAL = 1.3; EXPRESSED IN FETAL LIVER, SIGNAL = 2.3; EXPRESSED IN BONE MARROW, SIGNAL = 3.4; EXPRESSED IN LUNG, SIGNAL =   2; SWISSPROT HIT: P36337, EVALUE 1.70e+00; NT HIT: gi11418871, EVALUE 1.00e-94; EST_HUMAN HIT: BE179143.1, EVALUE 2.00e-94
cttcagcatgacattgatcaccgtagaaaagaaataagtaaagaacggggaaattccaagggccccagggaatccagtggatcaagaaagcaggaaaaaactccaaaagattacaaggaatacaaatcttacaaagatgacagtaaacataaaaatagagagcaagatcattctcgatcttcatcctcttcaccatcaccttcttctcccagtt

SEQ ID NO: 30059 - DNA, 150 bp, Homo sapiens
  MAP TO AL132796.2; EXPRESSED IN BRAIN, SIGNAL = 1.4; EXPRESSED IN PLACENTA, SIGNAL = 1.5; EST_HUMAN HIT: BF683555.1, EVALUE 1.30e-01
cctcatagagaagacagataaaaataagttagctgactttagggcacatatcaagatgttaaatgctttgaaagagaacaaaacaaggagcagggtagggaatgctagaagggctgcgaatttaaatacagcaatcagggaaacgctgtt

SEQ ID NO: 30060 - DNA, 151 bp, Homo sapiens
  MAP TO AL121716.16; EXPRESSED IN HELA, SIGNAL = 2.2; EXPRESSED IN PLACENTA, SIGNAL = 1.5; EXPRESSED IN BRAIN, SIGNAL = 1.5; EXPRESSED IN ADULT LIVER, SIGNAL = 1.5; EXPRESSED IN BONE MARROW, SIGNAL = 1.6; EXPRESSED IN FETAL LIVER, SIGNAL = 1.9; SWISSPROT HIT: Q09687, EVALUE 1.00e-04; EST_HUMAN HIT: AU127032.1, EVALUE 7.00e-62; NT HIT: AF102265.1, EVALUE 6.00e-80
gcaaatggcataggggccctgaagctaagggaaatggaacactacttctcacagggcctgtcagttcagctgtttaatgatgggtccaagggcaaactcaatcatttatgtggagctgactttgtgaaaagtcatcagaaacctccacagg

SEQ ID NO: 30061 - DNA, 453 bp, Homo sapiens
  MAP TO AC010473.3; EXPRESSED IN LUNG, SIGNAL = 3.6; EXPRESSED IN BRAIN, SIGNAL = 1.4; EXPRESSED IN PLACENTA, SIGNAL =   2; NT HIT: AF247457.2, EVALUE 0.00e+00; SWISSPROT HIT: Q13402, EVALUE 8.10e-02; EST_HUMAN HIT: BE257612.1, EVALUE 0.00e+00
gcccacgaagcggttatccatggccaccatccagccccggaagaaaacctccaggttcttgctgccctgcgactccagtatctgcagggggattatactctgcacgctgccatcccacctctcgaagaggtttattccctgcagagactcaaggcccgcatcagccagtcaaccaaaaccttcaccccttgtgaacggctggagaagaggcggacgagcttcctagaggggaccctgaggcggagcttccggacaggatccgtggtccggcagaaggtcgaggaggagcagatgctggacatgtggattaaggaagaagtctcctctgctcgagccagtatcattgacaagtggaggaaatttcagggaatgaaccaggaacaggccatggccaagtacatggccttgatcaaggagtggcctggctatggctcgacgctgtttgatgtggag

SEQ ID NO: 30062 - DNA, 76 bp, Homo sapiens
  MAP TO AL158848.1; EXPRESSED IN BRAIN, SIGNAL = 1.5; EXPRESSED IN PLACENTA, SIGNAL = 1.5; EXPRESSED IN ADULT LIVER, SIGNAL = 1.6; EXPRESSED IN LUNG, SIGNAL = 2.3; EXPRESSED IN BONE MARROW, SIGNAL = 1.7; EST_HUMAN HIT: BF132291.1, EVALUE 2.00e-35; SWISSPROT HIT: P70398, EVALUE 7.40e+00; NT HIT: AB028980.1, EVALUE 1.00e-35
cttcttctgtagccactgcacagcccagctccagtggtgggaattctccttgaagtactccttagctgcaggacac

SEQ ID NO: 30063 - DNA, 262 bp, Homo sapiens
  MAP TO AC007845.12; EXPRESSED IN BRAIN, SIGNAL = 1.7; EXPRESSED IN BONE MARROW, SIGNAL = 1.8; NT HIT: AB020626.1, EVALUE 2.00e-75; EST_HUMAN HIT: AA663747.1, EVALUE 7.00e-82; SWISSPROT HIT: Q61670, EVALUE 5.60e-02
caccatggctctgctctgaagcgcctggcccctgagccactcttgtgtgcatatggccctcgtaggaattctgaaagttgtttctcccatcaaagacaggctcacctctctcttggtgcttcggtgaggcgggcagcttctcctcatcttccgacaccctcagctccagctctgcttccccctcagctgggcacggcaaacgcagctctctgtcagcatccgacgggctgtcagaccagtgctgatctggcagagggaaggg

SEQ ID NO: 30064 - DNA, 152 bp, Homo sapiens
  MAP TO AC007340.3; EXPRESSED IN BRAIN, SIGNAL = 1.5; EXPRESSED IN FETAL LIVER, SIGNAL = 1.6; EXPRESSED IN HELA, SIGNAL = 1.9; EXPRESSED IN ADULT LIVER, SIGNAL = 1.4; SWISSPROT HIT: Q64392, EVALUE 7.90e-01; EST_HUMAN HIT: W69369.1, EVALUE 2.00e-15; NT HIT: U93163.1, EVALUE 1.00e-19
ctacacaacgtcagggtcatcaatttcaccatctttcacctccacgtcttctcccactagaaggtcttctgggacaacaacacgcatggagctgtcatctctgacagcaatgccttctggaacacctcctgaaggacctgcttgaggctctt

SEQ ID NO: 30065 - DNA, 94 bp, Homo sapiens
  MAP TO AC012535.3; EXPRESSED IN BRAIN, SIGNAL = 1.8; EXPRESSED IN PLACENTA, SIGNAL = 1.5; EXPRESSED IN ADULT LIVER, SIGNAL = 1.9; EXPRESSED IN BONE MARROW, SIGNAL = 1.7; EXPRESSED IN FETAL LIVER, SIGNAL = 1.7; EXPRESSED IN HELA, SIGNAL = 1.7; EXPRESSED IN LUNG, SIGNAL = 4.8; EST_HUMAN HIT: BF668841.1, EVALUE 4.50e+00
ctcagggccagacctccccgagttatttgctccaaaacttgatacagtcctctccttagccatcactcctccccacccaccagctgcaggcagc

SEQ ID NO: 30066 - DNA, 195 bp, Homo sapiens
  MAP TO AC011449.3; EXPRESSED IN BRAIN, SIGNAL = 1.3; EXPRESSED IN PLACENTA, SIGNAL = 1.9; EXPRESSED IN ADULT LIVER, SIGNAL = 1.4; EST_HUMAN HIT: AI908168.1, EVALUE 1.00e-101; SWISSPROT HIT: Q61085, EVALUE 3.00e-08; NT HIT: AF036301.1, EVALUE 4.60e-01
ggaagtcccacttgcgcagagccatggctcatcacgaggagtcggtgcgggaggccagcctctgcaagaagctgcggagcattgaggtgctacagaaggtgctgtgtgccgcacaggaacgctcccggctcacgtacgcccagcaccaggaggaggatgacctgctgaacctgatcgacgcccccagtgttgttg

SEQ ID NO: 30067 - DNA, 271 bp, Homo sapiens
  MAP TO AC000056.1; EXPRESSED IN BRAIN, SIGNAL = 1.6; EXPRESSED IN FETAL LIVER, SIGNAL = 1.8; SWISSPROT HIT: P40602, EVALUE 2.60e+00; EST_HUMAN HIT: AI680876.1, EVALUE 9.80e-01
tgagcttcagcagtcccagaattccaagataacaagtactgtcctgactgagaagctgcacatttccatgctgtcggttccatggaaacagcatttggatgtgttccatcaaaactgctttgaaaaatggtccaaagcagaatttacttttgtgagaaaaaaatacaaaaaacataagaggcaccacatgctaatggaagtagcacaagatttggagtcagaagatctgtttgagagccagccttatccttgctacctgtgtgatgctggg

SEQ ID NO: 30068 - DNA, 205 bp, Homo sapiens
  MAP TO AC007954.6; EXPRESSED IN BRAIN, SIGNAL = 1.8; NT HIT: gi6754241, EVALUE 3.10e-02; SWISSPROT HIT: Q26605, EVALUE 9.80e-01; EST_HUMAN HIT: AV727044.1, EVALUE 1.80e-01
ggacgaggatctgattaacaagtgtggggacgacgcgcgcatctacatcgtgttccagtaccacctcatcatctttgtgctcatcatctgtatcccctccctgggcatcattttgcccatcaactatactggatctgttctgggtaggcaaagctcagctggccctggggcagcagctggacctgagaggcagccaggcaagcca

SEQ ID NO: 30069 - DNA, 232 bp, Homo sapiens
  MAP TO AL132668.2; EXPRESSED IN BRAIN, SIGNAL = 1.3; EXPRESSED IN PLACENTA, SIGNAL =   2; EST_HUMAN HIT: AA403053.1, EVALUE 6.00e-85; SWISSPROT HIT: P27401, EVALUE 4.00e-09; NT HIT: AL163246.2, EVALUE 1.00e-63
aaaccacatctggtacagcagctgcaattggagtcaccacttggttaagcctacgataacccactgtcattctccaagatccatctgtcttctgcacaggccaaatgggagagttgaacagggatgtggtgaaaatcaccacccctgcatctttcaagtccttgatggtggcactaatctccacagtccctccagggatacaatatggtttttgatttactatttttctagg

SEQ ID NO: 30070 - DNA, 194 bp, Homo sapiens; identical to SEQ ID NO: 25498
  MAP TO AC018836.2; EXPRESSED IN BRAIN, SIGNAL = 1.8; EXPRESSED IN LUNG, SIGNAL = 3.3; EXPRESSED IN PLACENTA, SIGNAL = 1.3; SWISSPROT HIT: P12752, EVALUE 2.20e+00; EST_HUMAN HIT: AW206990.1, EVALUE 2.00e-93; NT HIT: gi7662289, EVALUE 6.00e-96

SEQ ID NO: 30071 - DNA, 161 bp, Homo sapiens
  MAP TO AC004549.1; EXPRESSED IN BRAIN, SIGNAL = 2.4; EXPRESSED IN PLACENTA, SIGNAL = 3.3; EXPRESSED IN BONE MARROW, SIGNAL = 2.4; EXPRESSED IN ADULT LIVER, SIGNAL = 1.5; EXPRESSED IN FETAL LIVER, SIGNAL = 2.2; EST_HUMAN HIT: AI198420.1, EVALUE 1.00e-85; SWISSPROT HIT: P32432, EVALUE 2.30e-02
ctgataatctcagccgacaccgggggatggaaattgattgtgtggtgccgcaggccctgagctgtcttgtaactcttcccacagcgacacttgaatggtttgcggacacgaatctgtgttctgtgaccattcttagcgtgatactttatgccattcacatt

SEQ ID NO: 30072 - DNA, 140 bp, Homo sapiens
  MAP TO AC019239.3; EXPRESSED IN BRAIN, SIGNAL = 1.5; EXPRESSED IN PLACENTA, SIGNAL = 1.4; NT HIT: AJ276505.1, EVALUE 5.00e-03; EST_HUMAN HIT: AI873918.1, EVALUE 1.90e+00
tgcctgcagaaagtctccctgtgatttctcactgcctactctttcaaactcaagttgaaaggaatgttttgcattcaaagtttcagaaatgccagtacagatctgagcaccttctgatgctggggaacctgcattttcac

SEQ ID NO: 30073 - DNA, 211 bp, Homo sapiens
  MAP TO AL158052.2; EXPRESSED IN BRAIN, SIGNAL = 2.5; SWISSPROT HIT: P50458, EVALUE 1.00e-15; EST_HUMAN HIT: BE255549.1, EVALUE 1.00e-115; NT HIT: gi4758673, EVALUE 1.00e-115
agacggacgtcacagttggcagggtggggctagtcaagtctgtcagggtggtgggcgtgctggaggggctgagcgaggcgttggagagctccgaggccgggcccgatggcgtccctgtctgcagcgccgcgtctgtcgacttgtccacgcccgtgttttcctgccgtaagaggttgcgcctgaacttggctcgggcgttctggaaccagac

SEQ ID NO: 30074 - DNA, 110 bp, Homo sapiens
  MAP TO AC013329.3; EXPRESSED IN BRAIN, SIGNAL = 1.4; EST_HUMAN HIT: AI064773.1, EVALUE 3.50e-01; SWISSPROT HIT: P52339, EVALUE 1.80e+00
ataagaaacatgctctcctgatgtacatatatatcaaagagatcacattcacctggttctacaccagcagtttcctaaatcagattttagctaacaaccagttctaccca

SEQ ID NO: 30075 - DNA, 102 bp, Homo sapiens
  MAP TO AC011025.4; EXPRESSED IN PLACENTA, SIGNAL = 1.6; EXPRESSED IN BRAIN, SIGNAL = 1.8; EXPRESSED IN ADULT LIVER, SIGNAL = 1.4; EXPRESSED IN FETAL LIVER, SIGNAL = 1.6; EXPRESSED IN HELA, SIGNAL = 2.1; SWISSPROT HIT: P20706, EVALUE 9.40e+00; NT HIT: AE002102.1, EVALUE 4.00e-03
atgacattaatagaaaatggcgataatcatttgaattggaccctgaaggacagccaggatttgaacatgaataacagtggcatggaagaagatgaaacctaa

SEQ ID NO: 30076 - DNA, 239 bp, Homo sapiens
  MAP TO AC008469.4; EXPRESSED IN PLACENTA, SIGNAL = 1.5; EXPRESSED IN BRAIN, SIGNAL = 1.5; EXPRESSED IN HELA, SIGNAL = 1.6; NT HIT: J04469.1, EVALUE 5.70e-01; EST_HUMAN HIT: AW294812.1, EVALUE 3.00e-03; SWISSPROT HIT: Q39639, EVALUE 3.50e+00
tgtcagtgctggtgttcctagttcactcagaagcccctttgctctgatcccgacaatttccagtgccatttctactgtcagtaatgaacccacaattgtctgcagactgcacagcctcatctgcagctgaggcagagtcagccctttctccttgtcctgcttttcagcagggttggaaatgcacagtctgggatgcttcttacgggggatagcctgagatgctggaggagtcagtggtt

SEQ ID NO: 30077 - DNA, 269 bp, Homo sapiens
  MAP TO AC000029.17; EXPRESSED IN BRAIN, SIGNAL = 1.7; NT HIT: D90150.1, EVALUE 0.00e+00; EST_HUMAN HIT: BE257698.1, EVALUE 0.00e+00; SWISSPROT HIT: P19086, EVALUE 3.00e-42
tggcagagaagatccgccgcatcccgctcaccatctgctttcccgagtacaagggccagaacacgtacgaggaggccgctgtctacatccagcggcagtttgaagacctgaaccgcaacaaggagaccaaggagatctactcccacttcacctgcgccaccgacaccagtaacatccagtttgtcttcgacgcggtgacagacgtcatcatacagaacaatctcaagtacattggcctttgctgaggagctgggcccggggcccgcctg

SEQ ID NO: 30078 - DNA, 107 bp, Homo sapiens
  MAP TO AC021881.2; EXPRESSED IN HELA, SIGNAL = 1.8; EXPRESSED IN BRAIN, SIGNAL = 1.7; EXPRESSED IN PLACENTA, SIGNAL = 1.6; EXPRESSED IN ADULT LIVER, SIGNAL = 1.8; EXPRESSED IN FETAL LIVER, SIGNAL = 1.8; NT HIT: U39684.1, EVALUE 3.60e+00; EST_HUMAN HIT: BF061948.1, EVALUE 3.40e-01
tactgtaagaactcactgttggtgttaaaacacagattagctaactttgaagcttataagtatactcttataaaaagattccaagttccaaatcaagattctcctat

SEQ ID NO: 30079 - DNA, 270 bp, Homo sapiens
  MAP TO AL122021.3; EXPRESSED IN FETAL LIVER, SIGNAL = 1.6; EXPRESSED IN PLACENTA, SIGNAL = 1.6; EXPRESSED IN BRAIN, SIGNAL = 1.5; EXPRESSED IN ADULT LIVER, SIGNAL = 3.8; NT HIT: gi10863960, EVALUE 2.00e-99; SWISSPROT HIT: P15919, EVALUE 1.50e+00; EST_HUMAN HIT: AW878204.1, EVALUE 2.50e-01
aaaaagcaagtgagtaagaccaagatccgggtcatctcaaccatcctgttcatcttggccggctgcattgtgtttgtgacgatccctgctgtcatctttaagtacatcgagggctggacggccttggagtccatttactttgtggtggtcactctgaccacggtgggctttggtgattttgtggcaggtaagcaccctgggcaggccaggcactggggctctggcgggaaaaataatctgttggctgtgcttttcgcaatcgataaaaga

SEQ ID NO: 30080 - DNA, 315 bp, Homo sapiens
  MAP TO AC007221.2; EXPRESSED IN BRAIN, SIGNAL = 1.7; NT HIT: AF091395.1, EVALUE 3.00e+00; SWISSPROT HIT: Q05793, EVALUE 5.30e-01
ctcttcatcaaagtggccacctttccaagagcctgcactacaagactgctgaaggatctctcccaagatacctggctcccaacatttgccattggccccactataagaacaaatgttgctctgagtcctgttgatttgggagctaaagaaccaagccccttgattttcagcataagttgccaagccttggaaagagcccatatggctcctgaggatgggagcacatcccccatcccttctcaattcccagtcacttctcactcggacagctgcggtggaatgatttacagccacttggtgttttccagcaggaag

SEQ ID NO: 30081 - DNA, 402 bp, Homo sapiens
  MAP TO AC007064.27; EXPRESSED IN BRAIN, SIGNAL = 1.7; EXPRESSED IN LUNG, SIGNAL = 1.9; EST_HUMAN HIT: AW749184.1, EVALUE 0.00e+00; SWISSPROT HIT: Q10135, EVALUE 3.90e+00; NT HIT: AB046849.1, EVALUE 0.00e+00
gcatcatgacagcttgctcctgtatagcattggcagctttaatgatgatgctgctggcactctggacagaggcagcaggtatgaccgtggctttcaccgtggtgttgttagcaagcttcaaattaatgacttgggatcctgctgtcttcacagcagacactgggaggaaagcagtagccacaggcttgattgtgacctgtttaggggtgggctctgcagggaaaactgcattggtcaccactgcagactggagaggcaccctggggggagaggaaagggcagcggctgatgctggagatgacagaagggatgtcacagaggccatcacagacaccatctgctcggaaggtttcttcccagagtcaagatccacttctggaaataccctggtctctgttctct

SEQ ID NO: 30082 - DNA, 192 bp, Homo sapiens
  MAP TO AL159191.1; EXPRESSED IN PLACENTA, SIGNAL =  46; EXPRESSED IN BRAIN, SIGNAL = 1.4; SWISSPROT HIT: P18652, EVALUE 2.00e-15; NT HIT: gi11434729, EVALUE 1.00e-104; EST_HUMAN HIT: BE407864.1, EVALUE 1.00e-100
caaaatgacgcccaagctccacaggtcacaggactcatcgtagccgttctgattcaagagctctggggcggcataatgaagggtgaagcatggagtcttcaggggctgattatccggtggctttagccgtgcaaatccaaaatcaattattttaatttccaaattgtcattttcatcggtgaacaataaatt

SEQ ID NO: 30083 - DNA, 441 bp, Homo sapiens
  MAP TO AC007064.27; EXPRESSED IN BRAIN, SIGNAL = 2.2; EXPRESSED IN LUNG, SIGNAL = 1.8; SWISSPROT HIT: P08045, EVALUE 5.00e-04; NT HIT: gi8922593, EVALUE 0.00e+00; EST_HUMAN HIT: AW367811.1, EVALUE 0.00e+00
actgcagcaggttttcggtggtgaagcaacacaaggcacacttgtgaaccttaaaaacattgattttcagctttttcagtggttgagttattgctcctctgggaggcctgtactccagaaccggttctttcaacttccacttgggactgcggaccttggcgtctacttttatttctgtttcctcctcattggtggtgtctgtcatttctttcaggtcaaggtctttgatgccatgcatcagctggacatgcttctccagcatcaaccctttggtaaaagtacctctggagtctgggcagtgtgagcaggcatacactttcctgatgcctttgtgcttgatccggttgtgccagcacagtctgtgggatgagctgaaaggcttgtcacactggcggcaggggtgtttcttcatttgcttcccatgctccttcctcaggtggg

SEQ ID NO: 30084 - DNA, 178 bp, Homo sapiens
  MAP TO AL158148.1; EXPRESSED IN BRAIN, SIGNAL = 1.4; EXPRESSED IN PLACENTA, SIGNAL = 1.3; EXPRESSED IN FETAL LIVER, SIGNAL = 1.7; EXPRESSED IN BONE MARROW, SIGNAL = 1.5; NT HIT: gi7661973, EVALUE 5.00e-96; EST_HUMAN HIT: AI870210.1, EVALUE 8.00e-96; SWISSPROT HIT: Q05512, EVALUE 3.00e-02
ttatacactgaagtgtcaaacacagtcagattttgggaaagtgacaatgcaatttgaattagaagtgtgccagcttcaaaaacccgatgtggtgggtatcaggaggcagcggcttaagggcgatgcctgggtttacaaaagattagtggaagacatcctatctagctgcaaggtataa

SEQ ID NO: 30085 - DNA, 146 bp, Homo sapiens
  MAP TO AC011298.2; EXPRESSED IN BRAIN, SIGNAL = 3.1; SWISSPROT HIT: P33173, EVALUE 4.00e-22; NT HIT: U37194.1, EVALUE 5.00e-77; EST_HUMAN HIT: AL133766.1, EVALUE 8.00e-77
ctcctgcaggaggctcagcttctccagctcccactggtggtccagaatgagactgtcactccggggcctccagcctgccaggttctcctcgccccggacataggccacagatgtgtccaggactcgtcggcgccggcgctgcatcc

SEQ ID NO: 30086 - DNA, 265 bp, Homo sapiens
  MAP TO AL133387.8; EXPRESSED IN ADULT LIVER, SIGNAL = 2.3; EXPRESSED IN BRAIN, SIGNAL = 1.5; EST_HUMAN HIT: T67204.1, EVALUE 9.50e-01; SWISSPROT HIT: P24403, EVALUE 1.40e+00
gagctggtggagatgctgcagggcctaatttcattattatggtgatggtggaagttgttgttgtagtgagattgatagtgacagagattgcagtaattatggtaatagcaggaatggggtgatgagtggtcatagtgttgccatggttaatggttgttgccaaggggataaaaggagtaaggatgataactattgttatggggaaggacatggtgatattgaagctagagtaacagaaacaatcattttaggggtgatggcagta

SEQ ID NO: 30087 - DNA, 223 bp, Homo sapiens
  MAP TO AL158052.2; EXPRESSED IN BRAIN, SIGNAL = 1.7; SWISSPROT HIT: P36198, EVALUE 8.00e-36; EST_HUMAN HIT: AI200248.1, EVALUE 1.00e-113; NT HIT: gi4758673, EVALUE 1.00e-114
ccctggccctggctgacctggaggacccgcttggtgaggcccgtcttttgcgcgagctgcttcaagtccttggcgtcggggttgtggttaatggcaaagtaagacttcatggtccgaagctggtggtgcttgaaggacgtgcgcatgcgcttggtcttctggctgctcgggtatggctggtcacggtccaggtgctctgcgtcgttttcgttgcagcttagcg

SEQ ID NO: 30088 - DNA, 377 bp, Homo sapiens
  MAP TO AC018506.3; EXPRESSED IN BRAIN, SIGNAL = 2.5; EXPRESSED IN PLACENTA, SIGNAL = 1.5; EXPRESSED IN BONE MARROW, SIGNAL = 3.2; EXPRESSED IN LUNG, SIGNAL = 5.3; SWISSPROT HIT: P02831, EVALUE 1.60e+00; EST_HUMAN HIT: AU117974.1, EVALUE 0.00e+00; NT HIT: gi11434825, EVALUE 0.00e+00
ttttttcctctgtggtgggttctggggggcagatgggactccttcacaggccctttcaccaccaggtgacaaggatccacgagagaggtctttcattaagccatgttcatatctgctggaaaatccttctgcaggggaacaatatcccccatccaaatgtaaaggcttcctatcccccactagaggagatcctcgatacagtccatctgctcgaggcatagcattcaaaggggagtaggcatacatcaagttgaactctgtccgaaatgcctggtctgagtttctcacgagggtctgatgtccatctccacttctgcttgggaaaccagtctcagaagtgggtccgagggagggatgaggagccaggtcagaatgac

SEQ ID NO: 30089 - DNA, 103 bp, Homo sapiens
  MAP TO AC012576.3; EXPRESSED IN ADULT LIVER, SIGNAL = 1.5; EXPRESSED IN PLACENTA, SIGNAL = 1.4; EXPRESSED IN BRAIN, SIGNAL = 1.4; EST_HUMAN HIT: C01803.1, EVALUE 6.00e-09; NT HIT: AJ277546.2, EVALUE 2.00e-04; SWISSPROT HIT: Q99089, EVALUE 1.90e+00
ctgatttttggttgctatgatggtacttttttgtgtgtacatagttcttaaattttggtgttcctgcagggggaattattggttgaggcttctgtttggccat

SEQ ID NO: 30090 - DNA, 109 bp, Homo sapiens; identical to SEQ ID NO: 24615
  MAP TO AC022011.2; EXPRESSED IN BRAIN, SIGNAL = 1.7; EXPRESSED IN HELA, SIGNAL = 1.7; EXPRESSED IN BONE MARROW, SIGNAL = 1.5; EXPRESSED IN ADULT LIVER, SIGNAL = 1.9; NT HIT: AL163283.2, EVALUE 1.00e-09; EST_HUMAN HIT: AI392964.1, EVALUE 6.00e-06

SEQ ID NO: 30091 - DNA, 153 bp, Homo sapiens
  MAP TO AC011449.3; EXPRESSED IN BRAIN, SIGNAL = 1.6; EST_HUMAN HIT: BE396092.1, EVALUE 6.00e-81; SWISSPROT HIT: P17841, EVALUE 4.00e+00; NT HIT: M90466.1, EVALUE 8.80e-02
caactggatgacgaggcaggatgcttccatctggctggccactggaagcagcaccattccaaggtccagcacagtaaacttctgtagggctgggaagtattgttcactcatccgggttttttcaacgactacaattcctttaagattattgga

SEQ ID NO: 30092 - DNA, 123 bp, Homo sapiens
  MAP TO AC011505.2; EXPRESSED IN BRAIN, SIGNAL = 1.4; EXPRESSED IN PLACENTA, SIGNAL = 1.7; EXPRESSED IN BONE MARROW, SIGNAL = 1.6; EXPRESSED IN ADULT LIVER, SIGNAL = 1.7; SWISSPROT HIT: O08808, EVALUE 8.10e-01; NT HIT: gi5902007, EVALUE 1.70e-02; EST_HUMAN HIT: BF686721.1, EVALUE 2.60e-02
tcatcggagaatcaggaacctgagggtcttgcccaagacaagcagagctgccaggaggagggagacaggatcctccagccagtggagctgcatacagctctggctgctcacagctttcattac

SEQ ID NO: 30093 - DNA, 151 bp, Homo sapiens
  MAP TO AC007868.2; EXPRESSED IN BRAIN, SIGNAL = 2.3; EXPRESSED IN LUNG, SIGNAL = 6.7; SWISSPROT HIT: P17589, EVALUE 7.90e-01; NT HIT: AB018260.1, EVALUE 6.00e-80; EST_HUMAN HIT: BE703698.1, EVALUE 3.00e-58
gtggtgtttccctacacaagcaagagctgcatgcgggccgtgctggaatacctctacaccggcatgttcacctccagccccgacctggatgacatgaagctcatcattctagccaaccgcctctgcctgccacacctggttgccctcacag

SEQ ID NO: 30094 - DNA, 114 bp, Homo sapiens
  MAP TO AC009178.4; EXPRESSED IN BRAIN, SIGNAL = 1.3; EST_HUMAN HIT: H46130.1, EVALUE 3.70e-01; NT HIT: U45315.1, EVALUE 2.50e-01
tttgaagggcatgggcaatacttcgtttctgaaccaagtcaagttgactgctggcatttaactcaccaccttgtgtttgctgttgcctgatgccagtaagaaatacatcgaaag

SEQ ID NO: 30095 - DNA, 122 bp, Homo sapiens
  MAP TO AC018719.2; EXPRESSED IN BRAIN, SIGNAL = 1.6; EXPRESSED IN PLACENTA, SIGNAL = 1.6; EXPRESSED IN ADULT LIVER, SIGNAL = 1.4; EXPRESSED IN FETAL LIVER, SIGNAL = 2.3; SWISSPROT HIT: P31523, EVALUE 9.20e+00; EST_HUMAN HIT: BE350127.1, EVALUE 3.00e-26; NT HIT: U93163.1, EVALUE 6.00e-27
ctacacagggtcaggctcatccatgtcactgtcttccacctccaattcttgtcccactggaagatcttcagggtcaataacacgcatggagctgtcgactcttgtgataacaataccttctt

SEQ ID NO: 30096 - DNA, 189 bp, Homo sapiens
  MAP TO AC024019.2; EXPRESSED IN BRAIN, SIGNAL = 1.5; NT HIT: Z22813.1, EVALUE 4.40e-01; EST_HUMAN HIT: BF055555.1, EVALUE 2.60e+00; SWISSPROT HIT: P97803, EVALUE 8.80e-02
ctgagtgatcaatttccccctgaagtaccatgcgggattactctgcacatttacttcatttctaaggctttcttctgacactctcaaatcctctactgtaggcactggaattccttgtactacactggggtgatggcaccatgtttcaaagttattcagaacctgattggccgtgttcctgcaatacat

SEQ ID NO: 30097 - DNA, 128 bp, Homo sapiens
  MAP TO AH009158.1; EXPRESSED IN BRAIN, SIGNAL = 1.6; SWISSPROT HIT: Q15878, EVALUE 4.00e-19; EST_HUMAN HIT: AW138217.1, EVALUE 5.00e-47; NT HIT: AF223391.1, EVALUE 3.00e-66
atgctcaacctgtttgtggccgtcatcatggacaactttgagtacctgactcgggactcctccatcctggggcctcaccacttggacgagtttgtccgcgtctgggcagaatatgaccgagcagcatg

SEQ ID NO: 30098 - DNA, 545 bp, Homo sapiens
  MAP TO AL138831.2; EXPRESSED IN PLACENTA, SIGNAL = 2.9; EXPRESSED IN BRAIN, SIGNAL = 1.3; EXPRESSED IN LUNG, SIGNAL =   2; EST_HUMAN HIT: Z21378.1, EVALUE 7.00e-65; SWISSPROT HIT: P87207, EVALUE 3.10e-01; NT HIT: AJ243947.1, EVALUE 3.40e-01
ttttggtgtagctttggaggaagagggtcgttcagtaactgctggagtacagaaagtcgtttgtagtcttggcctctctttttgaatagtcatatgttgtaatcgttctagttccagtaaacgagttatcaagtgttcaacagaggtttctgcagggtccactgtcactttccaattgtcagatttggagagggctaaattgtgcaagtctagagcactgaaaggaggagggagaaaatcaggatatggaaatacttcatttggctcctcggtgaaaggttcctcaacattttttattgtttctggcttcaagttcaggtccacctttttaaaatagctgagtaaagtatcatttgtcttctcattttctgataaatcactttcatctgtgaaattttcttccacactgctgtttccatgtttcaaattccaatttggagcaggtaatgtttcaccatcattgttttctatagttgaacatgaactaacatgaatctcatttctgttcttaaaaaagtctccatcagcatagggccagcagagac

SEQ ID NO: 30099 - DNA, 205 bp, Homo sapiens
  MAP TO AL049829.3; EXPRESSED IN BRAIN, SIGNAL = 1.8; NT HIT: U74297.1, EVALUE 1.90e+00; EST_HUMAN HIT: BF530674.1, EVALUE 2.00e-60; SWISSPROT HIT: P13092, EVALUE 2.90e+00
atgctcagtgctcgagatcgccgggaccggcaccctgaggagggggtagttgcagagctccagggcttcgcggtggacaaggccttcctcacctcccacaagggcatcctgctggaaaccgagctggtaacagctgcctcccaacctggtgcctccatctccctgacccccggctcctggccagccttatgccagcccccagctc

SEQ ID NO: 30100 - DNA, 206 bp, Homo sapiens
  MAP TO AC007342.2; EXPRESSED IN BRAIN, SIGNAL = 1.9; EXPRESSED IN PLACENTA, SIGNAL = 1.7; SWISSPROT HIT: P41245, EVALUE 5.70e-01; NT HIT: gi11968026, EVALUE 1.00e-112; EST_HUMAN HIT: AI792603.1, EVALUE 1.00e-112
cgatctgaaggtgaagagaagacattaacaggggacgtgaaaaccagtcctccacgaactgcaccaaagaaacagctgccttctattcccaaaaatgctttgcccataactaagcctacatctcctgccccagcagcacagtcaacaaatggcacgcatgcgtcctatggacccttctacctggaatactctcttcttgcagaatt

SEQ ID NO: 30101 - DNA, 107 bp, Homo sapiens
  MAP TO AC009363.4; EXPRESSED IN BRAIN, SIGNAL = 1.5; EXPRESSED IN ADULT LIVER, SIGNAL = 1.4; EST_HUMAN HIT: BE219313.1, EVALUE 1.00e-53; NT HIT: AF111167.2, EVALUE 7.00e-54; SWISSPROT HIT: P06945, EVALUE 4.20e+00
tccttctactgtgcccaaaaggcacaaggcaacctggcctgaggttggagcatggagatctagaggaactcatggatggattcaggcgggatgtgaaagtgctggga

SEQ ID NO: 30102 - DNA, 191 bp, Homo sapiens
  MAP TO AL137160.2; EXPRESSED IN BRAIN, SIGNAL = 1.4; EST_HUMAN HIT: BF362188.1, EVALUE 1.00e-57; SWISSPROT HIT: P49813, EVALUE 9.00e-17; NT HIT: gi11433550, EVALUE 5.00e-84
ctctgttccaagatgctctgcctgtggtccttacctttcttttctccagtgaagggcacaaagtcctctctgtctttctgttccaaagcctccttctccaggtacatgaggaggtgctcgcggtcaaaggggccggtggctgccttctgtgtctggtctttctgtcgaaatccagctggcagcatggcact

SEQ ID NO: 30103 - DNA, 141 bp, Homo sapiens
  MAP TO AC021863.3; EXPRESSED IN BRAIN, SIGNAL =  23; NT HIT: U39703.1, EVALUE 3.20e-01; EST_HUMAN HIT: AA016180.1, EVALUE 8.00e-03
atggaaataagaaccttcaaactactattaactgaagctttgagtgctaatgactttttcatcacaggaggtgaccaagcaagagttgaacagatacttgtcctggatgttaaagtggaaattcaagcaacacaacagaag

SEQ ID NO: 30104 - DNA, 77 bp, Homo sapiens
  MAP TO AC012404.4; EXPRESSED IN BRAIN, SIGNAL = 1.8; EXPRESSED IN FETAL LIVER, SIGNAL = 1.6; EXPRESSED IN ADULT LIVER, SIGNAL = 1.6; EXPRESSED IN PLACENTA, SIGNAL = 1.4; NT HIT: gi9790032, EVALUE 9.50e+00; EST_HUMAN HIT: AV709736.1, EVALUE 2.30e-01
gggaacctacagagagaagcaggatgccttcttctcagtaggagctttggagggtgtgatggagccacaggagaggg

SEQ ID NO: 30105 - DNA, 115 bp, Homo sapiens
  MAP TO AC008557.3; EXPRESSED IN BRAIN, SIGNAL = 1.6; EXPRESSED IN PLACENTA, SIGNAL = 2.6; EXPRESSED IN LUNG, SIGNAL =  44; NT HIT: D61405.1, EVALUE 1.00e-58; SWISSPROT HIT: P20585, EVALUE 3.00e-14; EST_HUMAN HIT: BF104775.1, EVALUE 2.00e-58
gttctcaaattatttctggcattgttaacttagagaagcctgtgatttgctctttggctgccatcataaaatacctcaaagaattcaacttggaaaagatgctctccaaacctga

SEQ ID NO: 30106 - DNA, 114 bp, Homo sapiens
  MAP TO AC020596.2; EXPRESSED IN BRAIN, SIGNAL = 2.7; SWISSPROT HIT: P52757, EVALUE 2.00e-09; EST_HUMAN HIT: AW950919.1, EVALUE 2.00e-55; NT HIT: gi11431079, EVALUE 5.00e-58
cttaaagccaaagtgtaggtccctggctgccgctggctctcccggatgaggtagctcccctcagccacaatcaagagctggtcggctgcttctctggagatcatgccatgaaac

SEQ ID NO: 30107 - DNA, 161 bp, Homo sapiens
  MAP TO AL049873.2; EXPRESSED IN BRAIN, SIGNAL = 1.5; EXPRESSED IN BONE MARROW, SIGNAL = 1.5; NT HIT: gi9506698, EVALUE 1.50e+00; SWISSPROT HIT: O14181, EVALUE 2.70e-01
tctttcctcatgaaactcacagctttggttcgtcacagatcttgcagatcttggcggtgctctcctactccccagttttgtctcagcaccatatggcttttgacaaagtcaggccacagcttcaacctaaacagcttaacattatcgaaagcccagcccac

SEQ ID NO: 30108 - DNA, 293 bp, Homo sapiens
  MAP TO AC010386.5; EXPRESSED IN BRAIN, SIGNAL = 5.5; SWISSPROT HIT: P43003, EVALUE 3.00e-49; NT HIT: Z31706.1, EVALUE 0.00e+00; EST_HUMAN HIT: W23121.1, EVALUE 2.00e-57
tttaaaaccaactatgagaagagaagctttaaagtgcccatccaggccaacgaaacgcttgtgggtgctgtgataaacaatgtgtctgaggccatggagactcttacccgaatcacagaggagctggtcccagttccaggatctgtgaatggagtcaatgccctgggtctagttgtcttctccatgtgcttcggttttgtgattggaaacatgaaggaacaggggcaggccctgagagagttctttgattctcttaacgaagccatcatgagactggtagcagtaataatgtg

SEQ ID NO: 30109 - DNA, 160 bp, Homo sapiens
  MAP TO AC023066.2; EXPRESSED IN BRAIN, SIGNAL = 1.8; NT HIT: AB029030.1, EVALUE 3.00e-85; SWISSPROT HIT: P29539, EVALUE 8.90e+00; EST_HUMAN HIT: AV713430.1, EVALUE 1.40e-01
atgaaacagaagatgaaagatctgaagctgaaaacgttgcagaaaatttctctatatctaacccagctcctcagcagtttcagggaataattaatttagcttttgaagatgcaactgaaaatgaatgtcgtgaattttctgcaaataaaaagtttaaaag

SEQ ID NO: 30110 - DNA, 125 bp, Homo sapiens
  MAP TO AC010227.5; EXPRESSED IN BRAIN, SIGNAL = 1.3; NT HIT: AF001269.1, EVALUE 1.10e+00; EST_HUMAN HIT: AW868552.1, EVALUE 2.00e-24
ctcattccagggaccccagccaccgtttttctgcaaacaactctgccctcttccaagatgttgttactgatggagatctgatgttggaagttgtagcctttgtactgctgacattggttgaaact

SEQ ID NO: 30111 - DNA, 119 bp, Homo sapiens
  MAP TO AL049776.3; EXPRESSED IN BRAIN, SIGNAL = 2.8; SWISSPROT HIT: Q07283, EVALUE 5.40e+00; NT HIT: gi8923599, EVALUE 3.00e-53; EST_HUMAN HIT: BF672160.1, EVALUE 5.00e-53
ctgtaattcttcattatctaacagttctctgctttttctttgtagaaagacagctcttgattcctctcttaatttctgtagtaagacttcatcttcagcaggcagctgaaaatacaagg

SEQ ID NO: 30112 - DNA, 163 bp, Homo sapiens
  MAP TO AC020897.3; EXPRESSED IN BRAIN, SIGNAL = 1.3; SWISSPROT HIT: O32869, EVALUE 7.80e-01; EST_HUMAN HIT: AW664572.1, EVALUE 1.40e-01; NT HIT: D43756.1, EVALUE 1.50e+00
ctggagggttcagcactgggcctggcagcagatacaccgagcactgtttgctgagtacgttggttcctttctttctgcccatgctccgcacagaggcccacgcagaagggccactggctgcaagctccttccacagcgtcgcagtcatcctggttgtaactgc

SEQ ID NO: 30113 - DNA, 131 bp, Homo sapiens
  MAP TO AL132655.5; EXPRESSED IN BRAIN, SIGNAL = 1.4; SWISSPROT HIT: P48525, EVALUE 1.40e+00; NT HIT: AJ251760.1, EVALUE 4.00e-68; EST_HUMAN HIT: AW801491.1, EVALUE 9.00e-55
actagctgatgatgcagcaaagaatttcaggggaggagaggccattccagaaaagatgaacagcaccatgggaaagcaactaagagagaggcaaaagtgggggttggaggggaaagagggaatctcggaag

SEQ ID NO: 30114 - DNA, 213 bp, Homo sapiens
  MAP TO AL135959.1; EXPRESSED IN HELA, SIGNAL = 1.9; EXPRESSED IN BRAIN, SIGNAL = 1.3; NT HIT: AE002137.1, EVALUE 3.20e-02; EST_HUMAN HIT: BF330867.1, EVALUE 2.00e-19; SWISSPROT HIT: Q60301, EVALUE 2.20e+00
gtggaatatattgagtatctgagtcggaaagtgagtactgagatgggtcttcgggagcaacttgatattattaagatcattgatccttctgctcaaatctcccctacagacagtgagtttattattgaacttaactgtctcacagatgaaaaactgaagcaggtatgtaaagaaaatacagattatttacctattaaaaataccaccatctta

SEQ ID NO: 30115 - DNA, 159 bp, Homo sapiens
  MAP TO AC009680.5; EXPRESSED IN BONE MARROW, SIGNAL = 1.5; EXPRESSED IN BRAIN, SIGNAL = 1.5; SWISSPROT HIT: P36094, EVALUE 1.80e+00; NT HIT: U66061.1, EVALUE 1.00e-31; EST_HUMAN HIT: AW813862.1, EVALUE 9.00e-09
aaattcttgtagtgagttctccaattccagaagttcaatttggtactttcttaaaatggctatttcatttttcagctcttggatcattttactggattccttggattccttggattgggtttcaactttttcttggatctcaatgagcttccttgccat

SEQ ID NO: 30116 - DNA, 194 bp, Homo sapiens
  MAP TO AC012568.3; EXPRESSED IN BRAIN, SIGNAL = 1.7; EXPRESSED IN BONE MARROW, SIGNAL = 1.5; EXPRESSED IN LUNG, SIGNAL = 3.1; EST_HUMAN HIT: BE543805.1, EVALUE 1.00e-103; NT HIT: AB004924.1, EVALUE 1.00e-105; SWISSPROT HIT: P42003, EVALUE 9.00e-29
ctggtgtctctactctctggtagtggtagggattcacgcagacctcgtccttcttcatattgaaggcgaactcacacagctccatggcccgtagctcgtggtggctgtgcaggtctggccatcgccacaggcggcagtagatgacatgagggagccccttccgatgggacacctgcaaccggccatccagggac

SEQ ID NO: 30117 - DNA, 121 bp, Homo sapiens
  MAP TO AL138894.2; EXPRESSED IN LUNG, SIGNAL =   3; EXPRESSED IN BRAIN, SIGNAL = 1.9; EST_HUMAN HIT: AV649035.1, EVALUE 1.00e-01; SWISSPROT HIT: P39125, EVALUE 3.10e+00; NT HIT: AF174486.1, EVALUE 4.20e+00
ctctccagcgtgttccccaaaggtccaaatgtttctccatccttcacacacattacagcgtgattgctctcggagtaatgagaagccgaatttgggaagttgacttcctgggaaatggttc

SEQ ID NO: 30118 - DNA, 196 bp, Homo sapiens
  MAP TO AC010322.4; EXPRESSED IN BRAIN, SIGNAL = 1.4; EXPRESSED IN BONE MARROW, SIGNAL = 3.1; EXPRESSED IN LUNG, SIGNAL = 4.1; NT HIT: X98411.1, EVALUE 1.00e-53; EST_HUMAN HIT: AI565031.1, EVALUE 1.70e-01; SWISSPROT HIT: P18835, EVALUE 8.00e-03
gcatggatcgcaatggggtgcccccctctgccagagggggccccctgcccctggagatcatgtctggagggggcacccacaggcctccccggggccctccgtccacatccctgggagccagcagacgaccccgggcacgtccgccctcagagcacaacacagaattcctcaacgtgcctgaccagggcatggccgg

SEQ ID NO: 30119 - DNA, 209 bp, Homo sapiens
  MAP TO AC000085.5; EXPRESSED IN BRAIN, SIGNAL = 1.3; EST_HUMAN HIT: BE296968.1, EVALUE 7.40e-01; SWISSPROT HIT: P53675, EVALUE 3.00e-33; NT HIT: gi11526317, EVALUE 1.00e-114
ctttcagagctatcaccttagaggctggattcatgatggcactctctgcagagataggccgtcggatcggagccattgggtcactcatgtcaatgatcgtgacctgtgcctgctcaccaactttctctcggatacatatgaacttgtcagattccatggtcagtgtgctgaatccaatgttagctggattaattccaaggttttggagc

SEQ ID NO: 30120 - DNA, 254 bp, Homo sapiens
  MAP TO AC008723.3; EXPRESSED IN BRAIN, SIGNAL = 2.3; EST_HUMAN HIT: AI656185.1, EVALUE 0.00e+00; SWISSPROT HIT: P51959, EVALUE 5.00e-35; NT HIT: L49504.1, EVALUE 0.00e+00
gtacagcccaagcaccttgggtgtgttggactgagctgcttttatttggctgtaaaatcaatagaagaggaaaggaatgtcccattggcaactgacttgatccgaataagtcaatataggtttacggtttcagacttgatgagaatggaaaagattgtattggagaaggtgtgttggaaagtcaaagctactactgcctttcaatttctgcaactgtattattcactccttcaagagaacttgccacttgaaag

SEQ ID NO: 30121 - DNA, 157 bp, Homo sapiens
  MAP TO AC010251.3; EXPRESSED IN BRAIN, SIGNAL = 1.3; EXPRESSED IN PLACENTA, SIGNAL = 1.5; SWISSPROT HIT: P09282, EVALUE 5.20e+00; NT HIT: X15723.1, EVALUE 1.40e+00; EST_HUMAN HIT: BE063509.1, EVALUE 6.00e-07
atatcatcctctccctccctggatattaagaacaataccacagagttggtgtacacccactgcaatattgagagtcatgtcatcctctaccccctggatattaaaaacaacatcacagagggagtgcacaacccccgcgatatggccagtaatatca

SEQ ID NO: 30122 - DNA, 314 bp, Homo sapiens
  MAP TO AC010358.5; EXPRESSED IN BRAIN, SIGNAL = 2.3; EXPRESSED IN LUNG, SIGNAL = 3.4; EXPRESSED IN PLACENTA, SIGNAL =   2; EST_HUMAN HIT: AU132394.1, EVALUE 0.00e+00; SWISSPROT HIT: P47808, EVALUE 4.00e-05; NT HIT: gi11037056, EVALUE 0.00e+00
cttttcagatggaacttgagatacttgagaatccctcgactcggcaggaaggtgcagctcaggcatgtcaggatctgccagctgtacaggttgcccacactgccggggtggggcactttgttggtctgtttgataagctggcagtacagctcgtcccgcagaggtcgcaggtcatgccctgtctgtaggatgccctggattattggaattgggtcagacatggactccagttgctgcagggaattgaatatcttgatggcctcatcctgaagggtggtatagcctttgtctttgagcactaggacaagcaaaac

SEQ ID NO: 30123 - DNA, 141 bp, Homo sapiens
  MAP TO AC018716.2; EXPRESSED IN BRAIN, SIGNAL =  12; SWISSPROT HIT: Q60019, EVALUE 1.00e+00; EST_HUMAN HIT: AW945251.1, EVALUE 7.40e+00
ctccgctgctgctacctggtccaagccagtatctcccatctgggttgctgcagttgcctcctcactggtctccataaggcagctaacattctctgttacatcaacctctctgctcaaaaccatccctccaatggctttcat

SEQ ID NO: 30124 - DNA, 205 bp, Homo sapiens
  MAP TO AC005663.2; EXPRESSED IN BRAIN, SIGNAL = 1.3; EST_HUMAN HIT: BE869016.1, EVALUE 8.00e-81; SWISSPROT HIT: P30999, EVALUE 8.00e-09; NT HIT: gi11526341, EVALUE 5.00e-81
cagttcggtgcccaggcgtgggctttgcaggcgtcctcaccgatgaggtctttgttgcgccggtccagcgagaggttgcgcagagcgatggcgacggcgcgcaccaccttgtcggtctcagactgcagcagttccacaagcaccggcagcccgcgctctttgcgcactgtggcgcggatgtacgtggcccactgcggaggcgggg

SEQ ID NO: 30125 - DNA, 265 bp, Homo sapiens
  MAP TO AC013533.3; EXPRESSED IN BRAIN, SIGNAL = 1.3; SWISSPROT HIT: P27792, EVALUE 1.10e+00; EST_HUMAN HIT: BE617538.1, EVALUE 2.40e-01; NT HIT: AB017602.1, EVALUE 2.50e+00
gatctacctgccctctggtgccaagcaacaacggatgaatacccactacctccagacagtcagatgggcctcaactcagccccaacaagcagccagaaagcaaagcgaggaagatgacagccaatttcaccatgcggcccaggcccacagactccagaggattttgggaagcttcacagctgcaccagagttctgccccacgaccatcctgatctgcgaaggacacgtccattctgaccacagatgttcactgagcctctgctag

SEQ ID NO: 30126 - DNA, 153 bp, Homo sapiens
  MAP TO AF236876.1; EXPRESSED IN BRAIN, SIGNAL = 1.5; EXPRESSED IN LUNG, SIGNAL = 2.7; SWISSPROT HIT: P14622, EVALUE 3.00e+00; NT HIT: gi11423632, EVALUE 2.20e-02; EST_HUMAN HIT: BE162181.1, EVALUE 3.30e-02
ttgtcccacgtgcagctggggctccttcgggttcgggccgtgcacctggccagtcagaagtggattccgtcttcccggtccagtgagctcagttttgcgtttccagttaaccaaatcaggacttggcagtgctggtctcttgagtgtgtggag

SEQ ID NO: 30127 - DNA, 210 bp, Homo sapiens
  MAP TO AC010618.4; EXPRESSED IN BRAIN, SIGNAL = 1.6; EST_HUMAN HIT: AW884375.1, EVALUE 1.00e-115; NT HIT: U15976.1, EVALUE 6.00e-59; SWISSPROT HIT: P97849, EVALUE 1.00e-34
gtggttcagtacatcggggagatctgccgctacctgctgaagcagccggtgcgcgaggcggagaggcgacaccgcgtgcgcctggcggtggggaacgggctgcgtcctgccatctgggaggagttcacggagcgcttcggcgtacgccaaatcggggagttctacggcgccaccgagtgcaactgcagcattgccaacatggacggcaag

SEQ ID NO: 30128 - DNA, 197 bp, Homo sapiens
  MAP TO AL157789.1; EXPRESSED IN BRAIN, SIGNAL = 1.4; EXPRESSED IN ADULT LIVER, SIGNAL = 3.4; EST_HUMAN HIT: T67695.1, EVALUE 1.00e-76; NT HIT: gi4506970, EVALUE 1.00e-107; SWISSPROT HIT: Q14973, EVALUE 2.00e-34
ccttgggagtcttgaatttctcatagcaccaaaatatggcaatgaggagaagcccttctccaagctggaaaatcatgtagaggaggggaaagaagaaaagtggtccaatgacttcaggtggaaaggccacattgaggatggtggaacagagttggacattttggcatccagtctccatgctgacagtgcgtctgcac

SEQ ID NO: 30129 - DNA, 130 bp, Homo sapiens
  MAP TO AL158052.2; EXPRESSED IN BRAIN, SIGNAL = 5.1; NT HIT: gi11560138, EVALUE 7.30e-02; SWISSPROT HIT: Q96418, EVALUE 8.10e-01
atggactccttccgatctctcatgctggtcagtttcctgcatccctcgcttcttctgcagcttcatgatcctaatgcacgtcctcatcactcctttcctggacaactgcagtggccgacgctggttcttc

SEQ ID NO: 30130 - DNA, 277 bp, Homo sapiens
  MAP TO AC008860.5; EXPRESSED IN BRAIN, SIGNAL = 8.6; SWISSPROT HIT: P36512, EVALUE 1.00e-10; EST_HUMAN HIT: AI654867.1, EVALUE 1.00e-67
tcatgtcttcttcaccttcctggccccacgcagccacctggccaccacacccagcagcttcccacaaagccacatagtgcccagagtgagccccagcagaaacacaaagacatcaatgaggtactgctcatgccaaggctgctggaaggcatagggcttgaggtgcgtcgctcccccagtctggaggatgtggtcgatccagcccaccagccgctgtgcggggctcaggggctgagagtgcaggatgacactggctgccaccactgccgacttgtac

SEQ ID NO: 30131 - DNA, 127 bp, Homo sapiens
  MAP TO AC008567.3; EXPRESSED IN BRAIN, SIGNAL = 4.3; SWISSPROT HIT: Q13360, EVALUE 2.00e-12; EST_HUMAN HIT: AA362834.1, EVALUE 4.00e-63; NT HIT: gi11427207, EVALUE 3.00e-07
gattcagtgacttttgatgatctggctgtggacttcaccccagaagaatggactttactggacccaactcagagaaacctctacagagatgtgatgctggagaactacaagaatttggccacagtag

SEQ ID NO: 30132 - DNA, 91 bp, Homo sapiens
  MAP TO AL132819.1; EXPRESSED IN BRAIN, SIGNAL = 1.3; EST_HUMAN HIT: BE568651.1, EVALUE 2.80e-01; NT HIT: AF287263.1, EVALUE 1.90e-01
cgtgaagaattccgctttcagaattccttccagggcggtgtgcttgctgtgtctactgaagatgaaactgctcacctctctttcctgttac

SEQ ID NO: 30133 - DNA, 201 bp, Homo sapiens
  MAP TO AC011298.2; EXPRESSED IN BRAIN, SIGNAL = 1.3; EXPRESSED IN BONE MARROW, SIGNAL =   2; SWISSPROT HIT: Q12756, EVALUE 2.00e-19; NT HIT: U37194.1, EVALUE 1.00e-109; EST_HUMAN HIT: BF339540.1, EVALUE 1.00e-109
cttgacggccagctcccgctgcctctcgttgggagcctccaggggtgatgggcggccctcagccgagagcggggaggaggcgctggaggagccatgggactcagagtcctcgctgaaggccggggacagtgcctccgggacaggccgctgggcggtctccagcttctcccgcaggagcaggtagtgcctagtcttctccac

SEQ ID NO: 30134 - DNA, 127 bp, Homo sapiens
  MAP TO AC004548.1; EXPRESSED IN BRAIN, SIGNAL = 1.3; EST_HUMAN HIT: AI708851.1, EVALUE 1.10e-01; NT HIT: AY009090.1, EVALUE 7.20e-02
tccgacatcatgaagatatcaattttctcgtattcaatatgaacatttaacacaaactcaataaaaatagcaccagtggttgttgtttcttttctgaaattagacatcttaagtacagcaaatgtaa

SEQ ID NO: 30135 - DNA, 181 bp, Homo sapiens
  MAP TO AC011497.3; EXPRESSED IN BRAIN, SIGNAL = 1.4; EST_HUMAN HIT: BE840226.1, EVALUE 1.00e-97; NT HIT: AB011541.1, EVALUE 9.00e-98; SWISSPROT HIT: P32017, EVALUE 7.70e-01
ctgtggggggtgtcccactctgggctcctgacacccaggtgccggttgccagctggtactccagcagctgctggttgaagccattttccggggagtaaccgcccaccaggagcagagacaggcctcggcgggcagtaagggtgtgaccagcaacggctggcagctccacggtctggggggc

SEQ ID NO: 30136 - DNA, 238 bp, Homo sapiens
  MAP TO AC012614.3; EXPRESSED IN BRAIN, SIGNAL = 1.4; NT HIT: AB014539.1, EVALUE 2.20e+00; SWISSPROT HIT: Q62632, EVALUE 4.00e-16
ctttgaggaaacagtccttgctgtggatgacggtgatcctctttcccaggaggcaagcagcacggtggagcttacagtggttttcataaaacctcccatcagagccgcacacaggcacgtagctgggcctgcatgcctccaggcactggcattcgggctcccctgtcttcctgctgagcacgcaccggctccctcggctgcagaacttcttcccgcaggaggccagcagctcgttgtg

SEQ ID NO: 30137 - DNA, 163 bp, Homo sapiens
  MAP TO AC011507.2; EXPRESSED IN BRAIN, SIGNAL = 1.5; EST_HUMAN HIT: AI280966.1, EVALUE 3.60e-02; NT HIT: gi11425848, EVALUE 3.70e-01; SWISSPROT HIT: Q59750, EVALUE 6.80e+00
ctattgcaaagatgaaataatatgcggaagtaaaaggcctggtacagagcttcatccccagcagctaagcagaggcttaaacgatggagtctatcatcattggtgatatcataaatgaactccttggcagcaccttgttctagagccacagctttgaaacctg

SEQ ID NO: 30138 - DNA, 141 bp, Homo sapiens
  MAP TO AC023314.3; EXPRESSED IN BRAIN, SIGNAL = 1.4; EST_HUMAN HIT: BF342436.1, EVALUE 8.00e-03
tttgctgaatctgaagcgtgaaattctttcccttcagggcataaatacaaatgagactcatccattcccttccaaaaacacaaaacaacaacagcaacaagttgtcgtcatcgttgtcatcgtcgtcatcatcatcatcat

SEQ ID NO: 30139 - DNA, 282 bp, Homo sapiens
  MAP TO AC007608.2; EXPRESSED IN BRAIN, SIGNAL = 1.4; EST_HUMAN HIT: AW976918.1, EVALUE 1.00e-03; SWISSPROT HIT: Q56408, EVALUE 2.50e-01; NT HIT: AF111167.2, EVALUE 1.00e-05
ttagccacgtgacttagtttggccaataggatgggagtagataggatgagcttggccatgtgacttgctttggccaatgggatggaagttaatatgatgagcctgggccatgtgacttgctttgaccaatgggatggcagcagataccatgggcttggccacatgacttcctttggccaatggaacaggagtgggtatgatgtccaccatagccccttcttcttgggtgatcaggagatgtgcagagaagaggggtggagagagagaaagagagagagcagg

SEQ ID NO: 30140 - DNA, 107 bp, Homo sapiens
  MAP TO AL117340.3; EXPRESSED IN BRAIN, SIGNAL = 1.3; EST_HUMAN HIT: BE906107.1, EVALUE 3.40e-01; NT HIT: gi6006010, EVALUE 2.30e-01
gtcaagctcttgaggtggacatttccctccaagggcctgggattgtaccaggaagaagtgaggtttccctgagtctccaggggcctagaggtggaggctgcttcccc

SEQ ID NO: 30141 - DNA, 110 bp, Homo sapiens
  MAP TO AC004547.1; EXPRESSED IN BRAIN, SIGNAL = 1.4; NT HIT: AL161492.2, EVALUE 1.50e-02; EST_HUMAN HIT: T99689.1, EVALUE 3.50e-01
gtccaggtctccctaaaaatcattctcagtttttgttagcaaagtcatatagttcttttcagccaaattatacacctacacacctaacacatatgtacaatcatggaaag

SEQ ID NO: 30142 - DNA, 79 bp, Homo sapiens
  MAP TO AL159141.1; EXPRESSED IN BRAIN, SIGNAL = 2.8; EST_HUMAN HIT: AI821304.1, EVALUE 2.00e-04; SWISSPROT HIT: P35572, EVALUE 5.60e+00; NT HIT: AF131944.1, EVALUE 1.00e-02
ctggagcaggaagagagcacatccaggtggggtgatctgggcagacttcctggaggaggcagacaccaagctgggccat

SEQ ID NO: 30143 - DNA, 156 bp, Homo sapiens
  MAP TO AC005137.1; EXPRESSED IN BRAIN, SIGNAL = 1.4; EXPRESSED IN ADULT LIVER, SIGNAL = 1.6; NT HIT: AF228925.1, EVALUE 3.00e-26
gctgcttttccttctccagcatttcctctttctctttgtaaagcttttgctcaaactccagttctttcttattctttctcaagtcctgcaggctgccatacttggctttcttcttatcttttcctttctgagtagatgtggcattgtttatatgac

SEQ ID NO: 30144 - DNA, 211 bp, Homo sapiens
  MAP TO AP001347.1; EXPRESSED IN BRAIN, SIGNAL =   3; NT HIT: AL163207.2, EVALUE 3.20e-02; EST_HUMAN HIT: T18862.1, EVALUE 2.00e-32
cactctggtcatgctgcagtctctgttaccaccaccaccagccacagtgaggcaagccactgggccgcaggctctagcctccagcagctgggcagggagcagctcttgctgatggcggcctgctaccactccaaccacgctgctgtctccatggccatcttctttgactacaaaagaataaaactaggtatcaataagaagagtaattttg

SEQ ID NO: 30145 - DNA, 144 bp, Homo sapiens
  MAP TO AF236875.1; EXPRESSED IN BRAIN, SIGNAL = 1.4; EST_HUMAN HIT: AA417112.1, EVALUE 1.00e-75; NT HIT: AJ010358.1, EVALUE 3.20e-01; SWISSPROT HIT: Q14112, EVALUE 6.90e+00
cttgtactaatcctgatcttggatcaagttgaaacagacacagttaagggagaggactataaggtactcctggacacagagctgagcttacctttgtgttccctaaacagaacagaggatgtggtgagaatccaggtcctataa

SEQ ID NO: 30146 - DNA, 148 bp, Homo sapiens
  MAP TO AL133413.5; EXPRESSED IN BRAIN, SIGNAL = 1.6; EST_HUMAN HIT: H64380.1, EVALUE 5.00e-01; SWISSPROT HIT: P26810, EVALUE 3.50e-01; NT HIT: U07000.1, EVALUE 3.40e-01
tggctgagcagattctgttctctgtttctttattctttggctgactgcctatgttctgcagaatcagtattctgctctgctgtgtgatggacagggggttatcccacttctttttggcaggaagagggacttcaagtttggctctgag

SEQ ID NO: 30147 - DNA, 110 bp, Homo sapiens
  MAP TO AC018388.4; EXPRESSED IN BRAIN, SIGNAL = 1.3; EXPRESSED IN PLACENTA, SIGNAL = 1.7; EST_HUMAN HIT: BE791639.1, EVALUE 3.50e-01; SWISSPROT HIT: Q03177, EVALUE 7.10e+00; NT HIT: AB025333.1, EVALUE 6.10e-02
ttgtgaatatttgggagtggtgtcttgttgatcagattcacatgttgatcttttttctcttccccattttcctctcctttactcacactggtattaagggaactttgatc

SEQ ID NO: 30148 - DNA, 205 bp, Homo sapiens
  MAP TO AC008481.4; EXPRESSED IN BRAIN, SIGNAL = 1.6; NT HIT: L26405.1, EVALUE 3.00e-98; SWISSPROT HIT: Q60900, EVALUE 2.00e-19; EST_HUMAN HIT: BF514533.1, EVALUE 4.00e-98
atggagtctcaggtgggggggggcccggccggcccggccctgcccaacgggccactccttggtacaaatggagccactgacgacagcaagaccaacctcatcgtcaactacctgccccagaacatgacccaggatgagttcaagagtctcttcggcagcattggcgacatcgagtcctgcaagttggttcgggacaagatcacag

SEQ ID NO: 30149 - DNA, 131 bp, Homo sapiens
  MAP TO AL133368.1; EXPRESSED IN BRAIN, SIGNAL =  12; SWISSPROT HIT: P98084, EVALUE 5.30e+00; NT HIT: gi4758267, EVALUE 4.00e-68; EST_HUMAN HIT: AU137893.1, EVALUE 6.00e-68
cctgaactgcgagcaggggtatgagaagaggtgcactttgccaaagtcgtcgcctgttgacaggagtttcttctcatgggcccgacagacggcattgatgtcggttccgtccgagccttctggccacactc

SEQ ID NO: 30150 - DNA, 112 bp, Homo sapiens
  MAP TO AL135961.1; EXPRESSED IN BRAIN, SIGNAL = 1.7; NT HIT: AF200359.1, EVALUE 6.20e-02
cgggtgatacatcttgttcttggaaaaggggttgtagagttcctggctcatcttcaaactggggaagcaaaagataacactgatgaagttcaggggttccaacaactcagaa

SEQ ID NO: 30151 - DNA, 155 bp, Homo sapiens
  MAP TO AC011462.3; EXPRESSED IN BRAIN, SIGNAL = 1.5; EXPRESSED IN ADULT LIVER, SIGNAL = 1.4; EST_HUMAN HIT: AV762024.1, EVALUE 2.00e-62; SWISSPROT HIT: P38767, EVALUE 2.00e-01; NT HIT: gi11424055, EVALUE 1.00e-62
ttcctggaggaggaggcctggcagaaaggatacagagccggcatcgctgacaacctgcagcaccacggtgatggaggtgcgggggtgcaacgtgcccagcaccaccgcctcgcacgtgttcctgatcagccgctcccggctcttctctgcaacac

SEQ ID NO: 30152 - DNA, 118 bp, Homo sapiens; identical to SEQ ID NO: 23369
  MAP TO AC018716.2; EXPRESSED IN BRAIN, SIGNAL = 1.5; NT HIT: AF052572.1, EVALUE 6.60e-02; EST_HUMAN HIT: AI791398.1, EVALUE 3.80e-01; SWISSPROT HIT: O31151, EVALUE 4.10e+00

SEQ ID NO: 30153 - DNA, 117 bp, Homo sapiens
  MAP TO AL136369.7; EXPRESSED IN BRAIN, SIGNAL = 1.4; EST_HUMAN HIT: AV717114.1, EVALUE 1.50e+00; NT HIT: gi9626187, EVALUE 1.00e+00
gtcttccctccctacatcatcagcactacaacgaaggcacaacaggatgatcacatgatagatggaaagatgtgaagggagggtcgagatgtttttaatggcaaagaatgtgaaacc

SEQ ID NO: 30154 - DNA, 210 bp, Homo sapiens
  MAP TO AP000350.1; EXPRESSED IN FETAL LIVER, SIGNAL = 1.5; EXPRESSED IN ADULT LIVER, SIGNAL = 1.6; EXPRESSED IN HELA, SIGNAL = 1.8; EXPRESSED IN BRAIN, SIGNAL = 2.2; EXPRESSED IN PLACENTA, SIGNAL = 4.6; EXPRESSED IN LUNG, SIGNAL = 1.5; EXPRESSED IN BONE MARROW, SIGNAL = 1.5; EST_HUMAN HIT: AA662274.1, EVALUE 1.00e-109; SWISSPROT HIT: P30712, EVALUE 1.00e-33; NT HIT: AF240786.1, EVALUE 1.00e-115
cctggcgattcgaagcagcatagcctgataggcctctggtgagggtgttgggagggttttcttggccgcctgttccaggatgctcaagatgatgctgtgggcctcctggcatagctcagcacccaggaaagcctccactcgtccacgccatgctgccagtcgtggccgtccctcaaacagttcatagccgagagccaccggctgtaggga

SEQ ID NO: 30155 - DNA, 89 bp, Homo sapiens
  MAP TO AC007463.3; EXPRESSED IN BRAIN, SIGNAL = 1.5; EXPRESSED IN PLACENTA, SIGNAL =   2; EXPRESSED IN LUNG, SIGNAL = 1.5; EXPRESSED IN BONE MARROW, SIGNAL = 1.5; EXPRESSED IN FETAL LIVER, SIGNAL = 1.8; EXPRESSED IN ADULT LIVER, SIGNAL = 2.7; NT HIT: AF065599.2, EVALUE 1.80e-01; EST_HUMAN HIT: AA609768.1, EVALUE 3.00e-41
gcagatctttatggaatgatgaaatgatttcctagtcactgtggtttgattatccttcagcagcaggtcattagggttacaaatatcta

SEQ ID NO: 30156 - DNA, 174 bp, Homo sapiens
  MAP TO Z83840.7; EXPRESSED IN HELA, SIGNAL = 1.3; EXPRESSED IN BRAIN, SIGNAL = 2.4; EXPRESSED IN PLACENTA, SIGNAL = 1.7; EXPRESSED IN LUNG, SIGNAL = 1.4; EXPRESSED IN BONE MARROW, SIGNAL = 1.7; EXPRESSED IN FETAL LIVER, SIGNAL = 1.9; EXPRESSED IN ADULT LIVER, SIGNAL = 9.3; EST_HUMAN HIT: AI084325.1, EVALUE 2.00e-03; NT HIT: AF061177.2, EVALUE 4.00e-01; SWISSPROT HIT: O31453, EVALUE 3.00e+00
gatgtgtgcctgtcacacagagagagacacagtaagccagaaaacttaaacttttgagaaaaagcaaacaccataatgcaatgagagtaatttctgcccaaggataggactgtggggaccagtcttataaaaccaacaaaccaaaggtatgaatatgataaataccacagatca

SEQ ID NO: 30157 - DNA, 111 bp, Homo sapiens
  MAP TO AC006427.13; EXPRESSED IN FETAL LIVER, SIGNAL = 2.4; EXPRESSED IN HELA, SIGNAL = 1.6; EXPRESSED IN BRAIN, SIGNAL = 1.9; EXPRESSED IN PLACENTA, SIGNAL = 1.3; EXPRESSED IN LUNG, SIGNAL = 2.2; EXPRESSED IN BONE MARROW, SIGNAL = 2.2; EXPRESSED IN ADULT LIVER, SIGNAL = 2.7; NT HIT: gi11421722, EVALUE 9.60e-01; EST_HUMAN HIT: AV756398.1, EVALUE 1.40e+00; SWISSPROT HIT: Q10739, EVALUE 4.20e+00
tactccagtgaacacgagaggggtctggggtctatggcctcctgcatgtcctgtgctgtggtggtagtgacgaaggaaggaagcaagcgggagcttccatggatctccatt

SEQ ID NO: 30158 - DNA, 111 bp, Homo sapiens
  MAP TO AL035682.16; EXPRESSED IN PLACENTA, SIGNAL = 1.5; EXPRESSED IN BRAIN, SIGNAL = 2.3; EXPRESSED IN LUNG, SIGNAL = 1.2; EXPRESSED IN ADULT LIVER, SIGNAL = 2.3; EXPRESSED IN HELA, SIGNAL = 1.5; NT HIT: AB033574.1, EVALUE 9.60e-01; EST_HUMAN HIT: AW245422.1, EVALUE 1.00e-53; SWISSPROT HIT: Q14684, EVALUE 9.30e+00
agttcgggaaaggttagcccagcttgtcaagaacgtcacaactccatccatgcctcttgtaaacttgaaatgaaaacattctttcaattctgagcaatagaaagcacttgg

SEQ ID NO: 30159 - DNA, 89 bp, Homo sapiens
  MAP TO AL022329.9; EXPRESSED IN FETAL LIVER, SIGNAL =   2; EXPRESSED IN ADULT LIVER, SIGNAL = 2.1; EXPRESSED IN PLACENTA, SIGNAL = 1.8; EXPRESSED IN HELA, SIGNAL = 1.2; EXPRESSED IN BRAIN, SIGNAL = 1.6; EXPRESSED IN LUNG, SIGNAL = 1.6; EXPRESSED IN BONE MARROW, SIGNAL = 1.3; NT HIT: gi10086561, EVALUE 1.80e-01; EST_HUMAN HIT: BF570080.1, EVALUE 2.80e-01; SWISSPROT HIT: P05877, EVALUE 7.30e+00
aaagttaaacagtagaaaggtgtttaaaattgaaaaatgcacgcccgggatggatcctatttcttctgctttgttgtttcctggtaata

SEQ ID NO: 30160 - DNA, 571 bp, Homo sapiens; identical to SEQ ID NO: 13626
  MAP TO AP000356.1; EXPRESSED IN BRAIN, SIGNAL = 1.4; EXPRESSED IN BONE MARROW, SIGNAL = 1.4; EST_HUMAN HIT: BF206773.1, EVALUE 5.40e-01; SWISSPROT HIT: P44252, EVALUE 4.90e+00; NT HIT: D90901.1, EVALUE 3.60e-01

SEQ ID NO: 30161 - DNA, 83 bp, Homo sapiens
  MAP TO AP000346.1; EXPRESSED IN LUNG, SIGNAL = 1.6; EXPRESSED IN FETAL LIVER, SIGNAL = 1.5; EXPRESSED IN ADULT LIVER, SIGNAL = 1.7; EXPRESSED IN HELA, SIGNAL = 1.8; EXPRESSED IN BRAIN, SIGNAL = 2.8; EXPRESSED IN PLACENTA, SIGNAL = 1.3; EXPRESSED IN BONE MARROW, SIGNAL = 5.4; NT HIT: U66059.1, EVALUE 6.70e-01; EST_HUMAN HIT: AA393574.1, EVALUE 5.00e-21
atcatcatcatcatcacagtcatcatcttcacttcgtggtaggcatactaaactcaggttgtcctcagaagaacctggaagca

SEQ ID NO: 30162 - DNA, 128 bp, Homo sapiens
  MAP TO AL035682.16; EXPRESSED IN ADULT LIVER, SIGNAL = 1.6; EXPRESSED IN BRAIN, SIGNAL = 1.4; EXPRESSED IN BONE MARROW, SIGNAL =   2; EXPRESSED IN LUNG, SIGNAL = 1.3; NT HIT: AL161582.2, EVALUE 2.80e-01; EST_HUMAN HIT: AA192153.1, EVALUE 1.10e-01
caggtctattgtttcagagaacatcacgccgggtacaaccaaacccagggagagaaacaggtgggaagagcaggtgtctgctctaagatggttccgattgttccagggcacaaattcacggaaaaata

SEQ ID NO: 30163 - DNA, 168 bp, Homo sapiens
  MAP TO AC004032.7; EXPRESSED IN HELA, SIGNAL = 1.3; EXPRESSED IN BONE MARROW, SIGNAL = 1.8; EXPRESSED IN LUNG, SIGNAL = 1.6; EXPRESSED IN FETAL LIVER, SIGNAL = 1.5; EXPRESSED IN ADULT LIVER, SIGNAL = 1.7; EXPRESSED IN PLACENTA, SIGNAL = 1.3; EXPRESSED IN BRAIN, SIGNAL = 1.8; EST_HUMAN HIT: AI798893.1, EVALUE 5.80e-01; SWISSPROT HIT: O85692, EVALUE 1.70e+00; NT HIT: gi8393751, EVALUE 9.80e-02
tacctgggcctgcaagttctgcagcccttctgagagctgaaggcaaaacccttgccccgagagccttgtcttcttctcgatgaccgtccctgtgccctcattgtccccacttggagacttggtctcaattctccctatcacagaccaagaaggagacatggccagaga

SEQ ID NO: 30164 - DNA, 105 bp, Homo sapiens
  MAP TO AC009313.2; EXPRESSED IN PLACENTA, SIGNAL = 1.7; EXPRESSED IN LUNG, SIGNAL = 1.4; EXPRESSED IN BONE MARROW, SIGNAL = 1.5; EXPRESSED IN FETAL LIVER, SIGNAL = 1.9; EXPRESSED IN BRAIN, SIGNAL = 1.7; EXPRESSED IN HELA, SIGNAL = 1.5; EST_HUMAN HIT: R79408.1, EVALUE 8.40e-02; NT HIT: Z99116.1, EVALUE 8.90e-01
aaggcagccagaacttccaacaggaatatgccattcaaccggcaaatgcagcagagctcttacatcatctcgaattttcccaagaagctgacattttcaaatatg

SEQ ID NO: 30165 - DNA, 164 bp, Homo sapiens
  MAP TO AL022319.2; EXPRESSED IN PLACENTA, SIGNAL = 1.6; EXPRESSED IN HELA, SIGNAL = 1.7; EXPRESSED IN LUNG, SIGNAL = 3.2; EXPRESSED IN BONE MARROW, SIGNAL = 1.5; EXPRESSED IN ADULT LIVER, SIGNAL = 1.7; EXPRESSED IN BRAIN, SIGNAL = 1.8; SWISSPROT HIT: P11260, EVALUE 1.50e-01; NT HIT: L77570.1, EVALUE 3.00e-05; EST_HUMAN HIT: AA757291.1, EVALUE 6.00e-04
ctgttatcatcatagtcaaattgctgataatcaaacataaaaatgaaaatcttgaaagtacccagagaaagatgacccattctatataagggaagaatgagatgaatgatgactgacttctcatcagaaacaacagaggctagaggatagcagaatgacaccat

SEQ ID NO: 30166 - DNA, 140 bp, Homo sapiens
  MAP TO AC008022.1; EXPRESSED IN FETAL LIVER, SIGNAL = 1.9; EXPRESSED IN ADULT LIVER, SIGNAL = 2.1; EXPRESSED IN PLACENTA, SIGNAL = 1.8; EXPRESSED IN BRAIN, SIGNAL = 1.5; EXPRESSED IN BONE MARROW, SIGNAL = 1.5; NT HIT: AF054629.1, EVALUE 1.20e+00; EST_HUMAN HIT: BE887763.1, EVALUE 4.70e-01; SWISSPROT HIT: Q61470, EVALUE 1.00e+00
  unsure 116
ccagtccatgatggttctgagtgtataaagagcttccatcttcaatgtagtagtcaggattctttccctgatggtaacccagctgaaacaaatgaaatgacagaaccttttgttcnatgtaattgcaagagcaaggctag

SEQ ID NO: 30167 - DNA, 95 bp, Homo sapiens
  MAP TO AL022329.9; EXPRESSED IN BRAIN, SIGNAL = 1.4; EST_HUMAN HIT: AV731520.1, EVALUE 1.00e-03; NT HIT: gi11119715, EVALUE 2.00e-01
gccttttgaagaggatataattaggatagagacatgattgaatccaagcaagaaaggaccttcaaggtcatctgctccaattattaatgttgtgt

SEQ ID NO: 30168 - DNA, 262 bp, Homo sapiens
  MAP TO AC009290.1; EXPRESSED IN BRAIN, SIGNAL = 1.5; EXPRESSED IN PLACENTA, SIGNAL = 1.5; EXPRESSED IN LUNG, SIGNAL = 1.2; EXPRESSED IN BONE MARROW, SIGNAL = 2.5; EXPRESSED IN ADULT LIVER, SIGNAL = 1.7; EXPRESSED IN FETAL LIVER, SIGNAL = 1.6; SWISSPROT HIT: P37482, EVALUE 7.20e+00; EST_HUMAN HIT: AI738592.1, EVALUE 1.00e-12; NT HIT: AL163252.2, EVALUE 1.00e-05
  unsure 2
anatttacatatttttattttaccccttaaaaattattttagctattattattttaatagttttgtctttcaaccgttatactaaagatacaagtgattcacacagtattattacattattagagtattctgaatttgattgtttacttacttttaccagtgggttttatattttcagggtttttgtgtgactcattagtatcctttcagctccctttagcatttcttggaaaagtctggtgatgatgaactccctcaggtt

SEQ ID NO: 30169 - DNA, 157 bp, Homo sapiens
  MAP TO AL022319.2; EXPRESSED IN BRAIN, SIGNAL = 2.1; EXPRESSED IN PLACENTA, SIGNAL = 1.3; EXPRESSED IN LUNG, SIGNAL = 1.6; EXPRESSED IN BONE MARROW, SIGNAL = 1.8; EXPRESSED IN ADULT LIVER, SIGNAL = 2.3; EXPRESSED IN FETAL LIVER, SIGNAL = 2.2; EXPRESSED IN HELA, SIGNAL = 1.5; NT HIT: AF052695.1, EVALUE 9.10e-02; EST_HUMAN HIT: AL119813.1, EVALUE 1.40e-01
gggacaagggggttgtgaaaagacagctagactttgtgtcaagacacctggtttaaatctagaccctgctgcttctgagctgtgtgacctacggcaagcagtttcagttctttgagtctccagttgccttctctataaaatagaaataagagtacca

SEQ ID NO: 30170 - DNA, 373 bp, Homo sapiens
  MAP TO AL034406.1; EXPRESSED IN BRAIN, SIGNAL = 1.5; EXPRESSED IN PLACENTA, SIGNAL = 1.8; EXPRESSED IN BONE MARROW, SIGNAL = 1.9; EXPRESSED IN FETAL LIVER, SIGNAL = 1.7; NT HIT: AL163284.2, EVALUE 2.00e-08; EST_HUMAN HIT: AW183968.1, EVALUE 4.00e-07; SWISSPROT HIT: P26613, EVALUE 4.60e+00
tatcttcaccctgagaatctggtatggctcctagaaataaaactcatgaaagtgtaggggccccataagacagggcccccatgagtttttgtctctcgagctagatctacagtgagtctcctgcaattactcaattatcttttaaatgcttctaccaggatctagctgtggcttcttctccttatgagctgtgctgcctttctctctagtttccagcatggtggagctctgtgacctcaaactctgatggctttaataagttagattttcagtttgtttatcttttttctagttgcaaggatgggagtaatgacttccaagctctttacatgtcagactagaggccaaagtcttctaaattaccctctttata

SEQ ID NO: 30171 - DNA, 161 bp, Homo sapiens
  MAP TO AC006548.19; EXPRESSED IN PLACENTA, SIGNAL = 1.4; EXPRESSED IN BONE MARROW, SIGNAL = 1.6; EXPRESSED IN ADULT LIVER, SIGNAL = 1.9; EXPRESSED IN FETAL LIVER, SIGNAL = 1.4; EXPRESSED IN HELA, SIGNAL = 1.3; EXPRESSED IN BRAIN, SIGNAL = 1.7; EST_HUMAN HIT: BE562569.1, EVALUE 3.50e-02; SWISSPROT HIT: P40477, EVALUE 4.00e+00; NT HIT: U78167.1, EVALUE 2.40e-02
gcagccagaaggggttgtccagccagcacctgggctttggtgctcctcaagaaggtggaggaagtttcaggcacctggctcctcaggtgtctgccatccagctgctcttcaggcctgcccagcagagctctcttgatccagctagaactggccagaactga

SEQ ID NO: 30172 - DNA, 127 bp, Homo sapiens
  MAP TO AP000356.1; EXPRESSED IN FETAL LIVER, SIGNAL = 1.7; EXPRESSED IN ADULT LIVER, SIGNAL = 1.6; EXPRESSED IN BRAIN, SIGNAL = 1.9; EXPRESSED IN HELA, SIGNAL = 1.3; EXPRESSED IN LUNG, SIGNAL = 1.5; NT HIT: AJ230125.1, EVALUE 4.00e-31; EST_HUMAN HIT: AW903997.1, EVALUE 5.00e-07
ctgccctgctccgtgcaaaaccctctttgagctgtgcctgggagacatgctgagagaattcatggaaacaaatgtgttactgacagcctctttgcctccagagttcaactggagacagagaaaccag

SEQ ID NO: 30173 - DNA, 155 bp, Homo sapiens
  MAP TO AC007841.1; EXPRESSED IN FETAL LIVER, SIGNAL =   2; EXPRESSED IN ADULT LIVER, SIGNAL = 1.9; EXPRESSED IN HELA, SIGNAL = 1.6; EXPRESSED IN BRAIN, SIGNAL = 2.3; EXPRESSED IN PLACENTA, SIGNAL = 2.9; EXPRESSED IN BONE MARROW, SIGNAL = 2.6; EST_HUMAN HIT: BE871775.1, EVALUE 5.30e-01; SWISSPROT HIT: P52538, EVALUE 6.00e-01; NT HIT: AE001774.1, EVALUE 3.50e-01
tgcatgtacattgctagcaaataagctgtgtacgctgttggagatttttgttttctctgttctgcttctgaacagatttgtaatacaccgaaatattcttcaagcagtgcagtaggtgaacccatgaactttcaagacagctccacatttcacca

SEQ ID NO: 30174 - DNA, 75 bp, Homo sapiens
  MAP TO AC009290.1; EXPRESSED IN LUNG, SIGNAL = 1.2; EXPRESSED IN FETAL LIVER, SIGNAL = 1.8; EXPRESSED IN BRAIN, SIGNAL = 1.6; EXPRESSED IN PLACENTA, SIGNAL = 1.5; EXPRESSED IN BONE MARROW, SIGNAL = 1.7; NT HIT: AF001003.1, EVALUE 5.90e-01; EST_HUMAN HIT: AW661922.1, EVALUE 2.20e-01
ctgcactctgtcctagccttctgttgttgacttcctctggttcctcagatctagttttctttttagggctccaaa

SEQ ID NO: 30175 - DNA, 298 bp, Homo sapiens
  MAP TO AC006427.13; EXPRESSED IN PLACENTA, SIGNAL =   2; EXPRESSED IN BRAIN, SIGNAL = 2.3; EXPRESSED IN BONE MARROW, SIGNAL = 2.1; EXPRESSED IN LUNG, SIGNAL = 2.2; EXPRESSED IN FETAL LIVER, SIGNAL = 2.7; EXPRESSED IN ADULT LIVER, SIGNAL = 3.2; EXPRESSED IN HELA, SIGNAL = 2.3; EST_HUMAN HIT: AW504273.1, EVALUE 4.00e-03; SWISSPROT HIT: O51567, EVALUE 1.40e+00; NT HIT: gi11432853, EVALUE 2.90e+00
tactgcatccttgttggtggggtcaccagatatcagcgagagagagcatcttaccatcttctgattaaaactcagacttttcttgtgcctgggtcttgggatcatgaccttcacaagtatttcttccatgatataaatttctgccatgccccttggcatccctctctggcctcagcattccaactctatttccttgaagccctgtcctctgatgactatgagttttcttctcctcaggagggacaggaaagccaatgggatctggagtggggaggaatttcctcattccagctagaat

SEQ ID NO: 30176 - DNA, 220 bp, Homo sapiens
  MAP TO AC007841.1; EXPRESSED IN PLACENTA, SIGNAL = 1.6; EXPRESSED IN HELA, SIGNAL = 1.3; EXPRESSED IN BRAIN, SIGNAL = 1.5; EXPRESSED IN BONE MARROW, SIGNAL = 1.7; EXPRESSED IN LUNG, SIGNAL = 1.8; EXPRESSED IN ADULT LIVER, SIGNAL = 1.7; NT HIT: AF289665.1, EVALUE 3.30e-02; EST_HUMAN HIT: AI285994.1, EVALUE 5.00e-02; SWISSPROT HIT: Q9VRM7, EVALUE 6.10e+00
agctgtttcttttatcttaatatttcatatatcatctatcggtgtgatatttattgaaaatatattatctttgtcttcagcttgtcttttaactttgcttgtgatgttttataccatattaaaaattttaattacagtgttggcaaatcaatctgtatgtataagtattttatctgaatgtgtgtgtgcatatgcacatatacacataatatatacagaa

SEQ ID NO: 30177 - DNA, 217 bp, Homo sapiens
  MAP TO AP000233.1; EXPRESSED IN BRAIN, SIGNAL = 1.5; SWISSPROT HIT: Q21037, EVALUE 2.10e+00; NT HIT: Z13994.1, EVALUE 1.30e-01; EST_HUMAN HIT: AI479377.1, EVALUE 7.70e-01
agtggtttattcacgtaaggctgaacttgatagattttctgtttttaataaaagtgttctggaacattctgaatggcatttggggcactgggatggccatgactatggttttctaattaattttcctgccagcagacataaaccaacggagagtaatttagccttggtcaacacaaatcaaagacataatattggaaattatccaaatattctgaat

SEQ ID NO: 30178 - DNA, 554 bp, Homo sapiens; identical to SEQ ID NO: 13651
  MAP TO AP000346.1; EXPRESSED IN BRAIN, SIGNAL = 1.6; EXPRESSED IN PLACENTA, SIGNAL =   2; EXPRESSED IN BONE MARROW, SIGNAL = 1.5; NT HIT: U29895.1, EVALUE 8.90e-02; EST_HUMAN HIT: BF345671.1, EVALUE 5.20e-01; SWISSPROT HIT: Q00613, EVALUE 4.20e-01

SEQ ID NO: 30179 - DNA, 262 bp, Homo sapiens
  MAP TO AP000111.1; EXPRESSED IN LUNG, SIGNAL = 1.4; EXPRESSED IN ADULT LIVER, SIGNAL = 1.6; EXPRESSED IN FETAL LIVER, SIGNAL = 1.5; EXPRESSED IN PLACENTA, SIGNAL =   2; EXPRESSED IN BRAIN, SIGNAL = 1.7; NT HIT: L14933.1, EVALUE 1.60e-01; EST_HUMAN HIT: BF697654.1, EVALUE 3.70e+00; SWISSPROT HIT: Q63377, EVALUE 8.30e-01
tttggttgtcacaacagcagcgtggatgctgtgttactagtgttcagtggatggcggcagagggaccaaacagaaggcagtatcaccaaagaactgtccatcctcgcatgccaatacccacactccatagagaaacactgcaatggcatccactcccacagattcggttaccatttgccagccaaggcctgcccagccagacctctcgtctgagcactggtattccccttagacatctaacaggcacatcagagtcaacgtg

SEQ ID NO: 30180 - DNA, 88 bp, Homo sapiens
  MAP TO AC007092.4; EXPRESSED IN BONE MARROW, SIGNAL =   3; EXPRESSED IN LUNG, SIGNAL =   2; EXPRESSED IN FETAL LIVER, SIGNAL = 2.1; EXPRESSED IN ADULT LIVER, SIGNAL = 3.2; EXPRESSED IN HELA, SIGNAL = 1.6; EXPRESSED IN PLACENTA, SIGNAL = 2.4; EXPRESSED IN BRAIN, SIGNAL = 2.5; NT HIT: AJ224935.1, EVALUE 2.00e-07; EST_HUMAN HIT: AI688118.1, EVALUE 8.00e-14
tggaagtttattcaaaagctttagagcaggtacaagaggaaggaaagtacatttggaagatgaccaagcggacatcttggaggacaag

SEQ ID NO: 30181 - DNA, 304 bp, Homo sapiens
  MAP TO AC008166.1; EXPRESSED IN LUNG, SIGNAL = 1.3; EXPRESSED IN BONE MARROW, SIGNAL = 1.9; EXPRESSED IN FETAL LIVER, SIGNAL = 1.7; EXPRESSED IN ADULT LIVER, SIGNAL = 1.7; EXPRESSED IN BRAIN, SIGNAL = 1.8; EXPRESSED IN PLACENTA, SIGNAL = 1.7; NT HIT: AJ271735.1, EVALUE 1.00e-21; EST_HUMAN HIT: AW854244.1, EVALUE 4.00e-28
ttttaaaaactctttctacttctatctctctctctactttctctttaatgccaataactgttagatttgcccttctgaggctattttctagatcctgtaggtgtgcttcaatcttttctattcttcttttctttcgtctgctgtgattgtgtattttcaaatagcctgccttcaagctaattgtttctgctgtttgatcaattctattaagagacgctgatgaattcttcagcatgtcaattacattattcaactccagattttatacttgattctttttaattatttcaatctccttgttaaa

SEQ ID NO: 30182 - DNA, 75 bp, Homo sapiens
  MAP TO AC006427.13; EXPRESSED IN HELA, SIGNAL = 1.5; EXPRESSED IN BRAIN, SIGNAL = 1.4; EXPRESSED IN PLACENTA, SIGNAL = 1.6; EXPRESSED IN BONE MARROW, SIGNAL = 1.6; EXPRESSED IN LUNG, SIGNAL = 1.7; EXPRESSED IN ADULT LIVER, SIGNAL = 2.5; EXPRESSED IN FETAL LIVER, SIGNAL = 1.4; NT HIT: AF030358.2, EVALUE 1.50e-01; EST_HUMAN HIT: AW885655.1, EVALUE 2.20e-01
tttacaacaacccctgcctcaggctctacttcctgggaacgcttcctgacacagttggattcagtagctttttcc

SEQ ID NO: 30183 - DNA, 186 bp, Homo sapiens
  MAP TO Z83844.5; EXPRESSED IN PLACENTA, SIGNAL = 1.4; EXPRESSED IN BRAIN, SIGNAL = 1.5; EXPRESSED IN BONE MARROW, SIGNAL = 1.6; EXPRESSED IN LUNG, SIGNAL = 1.4; EXPRESSED IN FETAL LIVER, SIGNAL = 1.7; EXPRESSED IN ADULT LIVER, SIGNAL =   2; EST_HUMAN HIT: AW839711.1, EVALUE 1.60e-01; SWISSPROT HIT: P03729, EVALUE 2.90e+00; NT HIT: gi6680779, EVALUE 4.30e-01
cttattattctcagtagagtaacggtttgagactggataacctcgaagtttggtagctctggtctttgccagtttaataactcacccctgggtccctgaggctgtgctgtctctgacctgccaggatgagttgtggtttcttcattggtgcattcattcattcgagccgtgcttacggaggatgtg

SEQ ID NO: 30184 - DNA, 163 bp, Homo sapiens
  MAP TO AC008009.4; EXPRESSED IN BONE MARROW, SIGNAL = 2.1; EXPRESSED IN FETAL LIVER, SIGNAL = 1.7; EXPRESSED IN ADULT LIVER, SIGNAL = 2.4; EXPRESSED IN HELA, SIGNAL = 1.4; EXPRESSED IN PLACENTA, SIGNAL = 1.7; EXPRESSED IN BRAIN, SIGNAL = 2.2; NT HIT: AF041427.1, EVALUE 6.00e-03; EST_HUMAN HIT: H06376.1, EVALUE 2.00e-28; SWISSPROT HIT: P14423, EVALUE 7.80e-01
gttttctgtttcgccaattctattatttagcataacctttataagagaatttaaagtctgttgtgtaaccacagcctttacagtaaaatctgctatagagcctatcatgaggggtacatttctaattattgcctcttttattctgaaccatgaaaaaaggacc

SEQ ID NO: 30185 - DNA, 247 bp, Homo sapiens
  MAP TO AC008009.4; EXPRESSED IN HELA, SIGNAL = 1.2; EXPRESSED IN PLACENTA, SIGNAL = 1.2; EXPRESSED IN BRAIN, SIGNAL = 1.8; EXPRESSED IN BONE MARROW, SIGNAL = 1.8; NT HIT: AJ238332.1, EVALUE 1.50e-01; EST_HUMAN HIT: BE162592.1, EVALUE 8.80e-01
gtggagacagatgacacagaaaatcagcttcttcctggtgagtaatggagctttccccgacaacctccccccacccctttctcttcctattctctctagttctaattatcaccagctggagccacttaatcctaacagtttacatgttactaaagcatctgtgagaatgcagtgcaggcttcagctagcaccaaaacaatttttttttctgatttcgcttgctatacctttacctcttagaatttat

SEQ ID NO: 30186 - DNA, 205 bp, Homo sapiens
  MAP TO Z82201.1; EXPRESSED IN BRAIN, SIGNAL = 1.9; NT HIT: AL163280.2, EVALUE 1.20e-01; EST_HUMAN HIT: AV712871.1, EVALUE 4.60e-02; SWISSPROT HIT: O65729, EVALUE 6.60e-02
atgttgattatgccatccctgtcagcatctgttttaaagaaggcagagtaggggtcctaaaaacaaaacacacacgtcaaagcccttccccaagagccccggacggccacacatgcacacccccacgtgtagagcctcatctccacgcgaggaggggcagcttggctgggccccaactattgcttttagagacttggctgttcca

SEQ ID NO: 30187 - DNA, 207 bp, Homo sapiens
  MAP TO AP000354.1; EXPRESSED IN BRAIN, SIGNAL = 1.3; EXPRESSED IN LUNG, SIGNAL = 1.4; NT HIT: U07000.1, EVALUE 1.00e-103; EST_HUMAN HIT: AI127761.1, EVALUE 1.00e-110; SWISSPROT HIT: P57647, EVALUE 9.80e-01
cttcgcctgcactgcagaaggagagccgggtccccctcctggagaacgctgcgttccccagccccacaccggctttgccaccacacaggctgttgaggcaggaggcgggtaagacgtagctgtagacccaaagcaaccaccagccctgggaccctgcgggagaggagcacttttagaacatggaaaaatgtggtcatcccatcatta

SEQ ID NO: 30188 - DNA, 83 bp, Homo sapiens
  MAP TO AP000354.1; EXPRESSED IN HELA, SIGNAL = 1.3; EXPRESSED IN BRAIN, SIGNAL = 1.3; EXPRESSED IN LUNG, SIGNAL = 1.6; EXPRESSED IN FETAL LIVER, SIGNAL = 4.3; EST_HUMAN HIT: BF528404.1, EVALUE 2.00e-39; NT HIT: U07000.1, EVALUE 1.00e-39
ctaggcctggccccttcctaaccctccacgtatcctgttctccagagacttcagaacccactcctgagaacagcggagccagg

SEQ ID NO: 30189 - DNA, 114 bp, Homo sapiens
  MAP TO Z82201.1; EXPRESSED IN BRAIN, SIGNAL = 1.4; NT HIT: AP000003.1, EVALUE 2.50e-01; EST_HUMAN HIT: AW161802.1, EVALUE 5.70e+00
tcctcaaattcctgatagattgtacagctcaattaatctaatgactcaatttaactaatcttagcccatgtgtcgttgggtattttgtcatgttatgttccccgtgggtcactg

SEQ ID NO: 30190 - DNA, 241 bp, Homo sapiens
  MAP TO AP000356.1; EXPRESSED IN BRAIN, SIGNAL = 5.3; EXPRESSED IN LUNG, SIGNAL = 1.2; EXPRESSED IN ADULT LIVER, SIGNAL = 1.7; NT HIT: AB026898.1, EVALUE 1.50e-01; EST_HUMAN HIT: BF676537.1, EVALUE 3.40e+00; SWISSPROT HIT: P55648, EVALUE 5.90e+00
tcactgcttacaagagtctccaagctgtggcacagggaaggggactgaagctgacctaccagcctgcctgcattgagaaacgagagctaagagttcagagaagccaccaaggcagctaggactataggacagaatgtcaagagaagaaagccacacagagaacccaagagatctgcagcgggttgcttttgaacattcagcagaatactgatgagcacaccgatgtgaggaagttaacagg

SEQ ID NO: 30191 - DNA, 370 bp, Homo sapiens
  MAP TO AP000352.2; EXPRESSED IN HELA, SIGNAL = 1.3; EXPRESSED IN PLACENTA, SIGNAL = 1.2; EXPRESSED IN LUNG, SIGNAL = 1.5; EXPRESSED IN BONE MARROW, SIGNAL = 2.1; EXPRESSED IN FETAL LIVER, SIGNAL = 1.4; EXPRESSED IN BRAIN, SIGNAL = 1.8; NT HIT: U49645.1, EVALUE 2.30e-01; EST_HUMAN HIT: BF033735.1, EVALUE 1.40e+00; SWISSPROT HIT: Q63627, EVALUE 7.70e+00
gcaacggggagagcaacatctgtctcatagggttgtcatgataatgacaaaacatgtagggctagcacagaggcagcacatagcacccactcaggaagggctggctctgatccgtattattatgactggctgtgagtttcagcatgtagaatttcccagaaatatttccatacccgagcaccgagatggccaggaagaaagggctgttcttcaggctgctctaggactcctgtctggtgccctttcttgtattttgtcagctggattagagtccttctcccatctgagtgtgtgctccccaactacagagggttggggttttggaagggccctggggtgcctccctgttacagtgaaggaggaaaaggcc

SEQ ID NO: 30192 - DNA, 155 bp, Homo sapiens
  MAP TO AC009313.2; EXPRESSED IN BRAIN, SIGNAL = 1.4; EXPRESSED IN PLACENTA, SIGNAL = 1.5; EXPRESSED IN LUNG, SIGNAL =   3; EXPRESSED IN FETAL LIVER, SIGNAL = 2.2; NT HIT: AE001691.1, EVALUE 3.50e-01; EST_HUMAN HIT: BE043917.1, EVALUE 5.30e-01
taatcatgatcccgttgcaggaatttctctttctgttccatggagtagttgcagactttgcagtccagcagacctaggttcaagccaagctctgcttcatattgattatgtgactttgggggagttactttaccttgatgagcctcaatttccat

SEQ ID NO: 30193 - DNA, 199 bp, Homo sapiens
  MAP TO AC006548.19; EXPRESSED IN LUNG, SIGNAL = 1.9; EXPRESSED IN FETAL LIVER, SIGNAL = 1.9; EXPRESSED IN ADULT LIVER, SIGNAL = 1.8; EXPRESSED IN PLACENTA, SIGNAL = 1.7; EXPRESSED IN BRAIN, SIGNAL = 3.2; EXPRESSED IN HELA, SIGNAL = 1.8; SWISSPROT HIT: P49907, EVALUE 2.00e-01; NT HIT: AF188892.1, EVALUE 1.20e-01; EST_HUMAN HIT: AW992472.1, EVALUE 7.00e-01
aagagcagaggcagcccacctcgccctcatgacggtgatacaggtggtgccctgccctggaagaggcagagttggaggtgtctgcttcgccatggggagacacacatgtacatgcttcaccctggtgagggctgtgagagacgtggagatgcaggtggaacacaggatgccccttagattggcactgaagagggcatca

SEQ ID NO: 30194 - DNA, 387 bp, Homo sapiens
  MAP TO AC004909.2; EXPRESSED IN LUNG, SIGNAL = 1.4; EXPRESSED IN FETAL LIVER, SIGNAL = 2.2; EXPRESSED IN ADULT LIVER, SIGNAL = 1.8; EXPRESSED IN PLACENTA, SIGNAL = 4.7; EXPRESSED IN HELA, SIGNAL = 1.5; EXPRESSED IN BRAIN, SIGNAL = 1.5; EST_HUMAN HIT: AV708482.1, EVALUE 1.00e-111; SWISSPROT HIT: P34109, EVALUE 2.50e-01; NT HIT: gi11419444, EVALUE 3.00e-96
tcccaagatggtggcaggccacttccaaaatggcagcgggctgcttccaatacggtggcaagccttgtgttctctgacctggggttcttggcctcacggattccaaggaatggaatcttgggccatgtggtgagtgttatagccctgttagaagccgtgggtcacggaagagaaccgtggaacccagtgactaggattcagcttgatgaggacgaacctgagcacttagccttgcaggaacaatggcaagcctttagccccatcgggaggggcaatgggcccctggctggaataggagcgcagcagacaccctgccagatctggagggatggaagtcagaggcgggtctacgatggcggcaaacagcagtggtgggcggagtgaaag

SEQ ID NO: 30195 - DNA, 225 bp, Homo sapiens
  MAP TO AL022238.1; EXPRESSED IN FETAL LIVER, SIGNAL = 1.3; EXPRESSED IN PLACENTA, SIGNAL =   2; EXPRESSED IN BRAIN, SIGNAL = 1.6; EXPRESSED IN HELA, SIGNAL = 1.7; EXPRESSED IN BONE MARROW, SIGNAL = 1.4; EXPRESSED IN LUNG, SIGNAL = 1.4; NT HIT: AB029016.1, EVALUE 1.00e-124; EST_HUMAN HIT: AW962085.1, EVALUE 1.00e-124; SWISSPROT HIT: Q28640, EVALUE 3.40e-01
caaagttccctgattacaaatcaacatggtccccagatcccataggacacaaccccactcatctctccaacaagatgtggaaaaaccatatttcctccaggaacactacaccgctgccccgcccacctcctggtctgaccaaccccaaaccatcatctccctggagcagcacagcaccccgatcagtcagggggtgggggacacaggactcacggctcgcctcgg

SEQ ID NO: 30196 - DNA, 175 bp, Homo sapiens
  MAP TO AC009313.2; EXPRESSED IN LUNG, SIGNAL = 1.4; EXPRESSED IN FETAL LIVER, SIGNAL =   2; EXPRESSED IN PLACENTA, SIGNAL = 1.5; EXPRESSED IN HELA, SIGNAL = 1.6; EXPRESSED IN BRAIN, SIGNAL = 2.6; EXPRESSED IN BONE MARROW, SIGNAL = 2.8; NT HIT: gi9625955, EVALUE 1.60e+00; EST_HUMAN HIT: AA706087.1, EVALUE 6.00e-01; SWISSPROT HIT: P11257, EVALUE 6.70e+00
gctatatatcttagaatcctaataaaactattgtatagcagtttccacacattctgcattgtcattaacctgtggtttttgtctccctccctgataagtcccttttggaaacaaataattctaagacgagcatcttttattgtctctttcctgttatgtttgtcaatagtagtgt

SEQ ID NO: 30197 - DNA, 86 bp, Homo sapiens
  MAP TO AL008582.11; EXPRESSED IN PLACENTA, SIGNAL = 1.4; EXPRESSED IN HELA, SIGNAL = 1.9; EXPRESSED IN BRAIN, SIGNAL = 1.5; SWISSPROT HIT: Q9UH06, EVALUE 5.00e-11; NT HIT: AF191014.1, EVALUE 1.80e-01; EST_HUMAN HIT: BF125922.1, EVALUE 3.00e-41
ctcttcttgaagccgtattttttgcgttcatagaagaggtctgtcttagagctccccagattgacaatctttgggcagccatctct

SEQ ID NO: 30198 - DNA, 564 bp, Homo sapiens; identical to SEQ ID NO: 13686
  MAP TO AL049649.4; EXPRESSED IN PLACENTA, SIGNAL = 1.8; EXPRESSED IN BRAIN, SIGNAL =   2; EXPRESSED IN BONE MARROW, SIGNAL =   2; EXPRESSED IN LUNG, SIGNAL = 1.5; EXPRESSED IN ADULT LIVER, SIGNAL = 1.7; EXPRESSED IN FETAL LIVER, SIGNAL = 2.4; EXPRESSED IN HELA, SIGNAL = 1.3; NT HIT: AF022236.1, EVALUE 9.00e-02; EST_HUMAN HIT: C03299.1, EVALUE 5.30e-01

SEQ ID NO: 30199 - DNA, 174 bp, Homo sapiens
  MAP TO AP000356.1; EXPRESSED IN PLACENTA, SIGNAL = 1.6; EXPRESSED IN BRAIN, SIGNAL = 1.8; EXPRESSED IN BONE MARROW, SIGNAL = 2.1; EXPRESSED IN LUNG, SIGNAL = 1.5; EXPRESSED IN FETAL LIVER, SIGNAL = 2.1; EXPRESSED IN ADULT LIVER, SIGNAL = 2.3; EXPRESSED IN HELA, SIGNAL = 1.3; EST_HUMAN HIT: AU077341.1, EVALUE 4.00e-88; NT HIT: AJ230125.1, EVALUE 1.00e-93; SWISSPROT HIT: P28304, EVALUE 1.00e+00
aaggctgcctgatcagagagtccctgaagaagattctgtggctacaggcttcagcagagtgtgagggagaccccggttatttcctcagctatttccaccaaatcctcctgtctttcgtggccaacaccccaggcaaggcttggggcccccgtctgctgctggacggtaagtcct

SEQ ID NO: 30200 - DNA, 143 bp, Homo sapiens
  MAP TO AP000053.1; EXPRESSED IN HELA, SIGNAL = 1.4; EXPRESSED IN PLACENTA, SIGNAL = 1.5; EXPRESSED IN BRAIN, SIGNAL = 2.1; EXPRESSED IN BONE MARROW, SIGNAL = 1.7; EXPRESSED IN LUNG, SIGNAL = 1.2; EXPRESSED IN ADULT LIVER, SIGNAL = 1.8; EXPRESSED IN FETAL LIVER, SIGNAL = 2.1; NT HIT: AF187035.1, EVALUE 1.30e+00; EST_HUMAN HIT: AI819008.1, EVALUE 1.90e+00; SWISSPROT HIT: P53128, EVALUE 4.00e+00
ttctggaagaacaaattccaatatcctgcagtccccttgacatcaaagacccaactctcccagagggcaatggcttttttgtccactgagaagccagtcagcttcgaagaaaggtgtctaaattgggagcaaaggtggcaatg

SEQ ID NO: 30201 - DNA, 159 bp, Homo sapiens
  MAP TO Z97055.1; EXPRESSED IN FETAL LIVER, SIGNAL = 2.2; EXPRESSED IN ADULT LIVER, SIGNAL = 1.8; EXPRESSED IN HELA, SIGNAL = 1.5; EXPRESSED IN BRAIN, SIGNAL = 2.1; EXPRESSED IN PLACENTA, SIGNAL =   2; EXPRESSED IN BONE MARROW, SIGNAL =   2; EXPRESSED IN LUNG, SIGNAL = 1.7; NT HIT: gi11432598, EVALUE 3.60e-01; EST_HUMAN HIT: AW904532.1, EVALUE 5.40e-01; SWISSPROT HIT: Q24592, EVALUE 5.20e+00
agacaaggagggctgagcacatcctatttatagtcaagccaaatccaagcaagtcctcagctcctgcaaagttgcatgttttcccagcttcagggttcaggaactagaagtcttgctgctgctgccacctattgcaggaaatgtgaatctaggttcaag

SEQ ID NO: 30202 - DNA, 562 bp, Homo sapiens; identical to SEQ ID NO: 13690
  MAP TO Z98884.11; EXPRESSED IN PLACENTA, SIGNAL = 2.1; EXPRESSED IN BONE MARROW, SIGNAL = 1.4; EXPRESSED IN LUNG, SIGNAL = 1.9; EXPRESSED IN FETAL LIVER, SIGNAL = 1.6; EXPRESSED IN ADULT LIVER, SIGNAL =   3; EXPRESSED IN HELA, SIGNAL = 1.4; EXPRESSED IN BRAIN, SIGNAL = 1.5; NT HIT: gi9257252, EVALUE 3.00e-32; EST_HUMAN HIT: AW664999.1, EVALUE 0.00e+00; SWISSPROT HIT: Q15836, EVALUE 1.00e-06

SEQ ID NO: 30203 - DNA, 299 bp, Homo sapiens
  MAP TO AL031588.1; EXPRESSED IN BRAIN, SIGNAL = 1.4; EXPRESSED IN BONE MARROW, SIGNAL = 1.6; NT HIT: gi6981583, EVALUE 1.80e-01; EST_HUMAN HIT: T93176.1, EVALUE 1.00e-09; SWISSPROT HIT: P26377, EVALUE 6.30e-01
ctctcctccacggtgacagctggtgtcacagccaatgagcaacaccaccagtgctctcagccaaaaagtgcacaccaccacgtgcctcccagagctgtgtgttcccaacagcgtggctgctcccctggggcctctcttccggccagtgctgagtttgtgggaccagttttgaccctgatgaatgaccaaaggcgtgcaagagacagtcctgttcccagcattgtggagagaggaggaaccgcctgccgaaggtgaaatgcacatctgagaggtgcgtaaggagaccgcagggacacgct

SEQ ID NO: 30204 - DNA, 214 bp, Homo sapiens
  MAP TO AC004032.7; EXPRESSED IN BONE MARROW, SIGNAL = 1.5; EXPRESSED IN LUNG, SIGNAL = 1.3; EXPRESSED IN FETAL LIVER, SIGNAL = 1.9; EXPRESSED IN ADULT LIVER, SIGNAL = 2.1; EXPRESSED IN PLACENTA, SIGNAL = 1.5; EXPRESSED IN HELA, SIGNAL = 1.4; EXPRESSED IN BRAIN, SIGNAL = 1.9; SWISSPROT HIT: P50866, EVALUE 1.50e+00; NT HIT: AL163280.2, EVALUE 3.00e-05; EST_HUMAN HIT: F26259.1, EVALUE 7.00e-72
tttgcagctgtaatcaagatgaggtcagactggttacagcaggtccttatgtagtgatttgtgactttctaggagaaaaaggagagagatttggatacagtgacacagactctcaaggagaaggccctatgaccacagagacagagactggagtgacgcatctagaagccaaggaccaccaaggatcgcagaaaccatgagaagctgaaataga

SEQ ID NO: 30205 - DNA, 137 bp, Homo sapiens
  MAP TO AP000356.1; EXPRESSED IN FETAL LIVER, SIGNAL = 2.3; EXPRESSED IN ADULT LIVER, SIGNAL = 1.4; EXPRESSED IN BRAIN, SIGNAL =   2; EXPRESSED IN BONE MARROW, SIGNAL = 1.7; EST_HUMAN HIT: BE938458.1, EVALUE 3.00e-67; SWISSPROT HIT: P19440, EVALUE 9.00e-19; NT HIT: gi11417877, EVALUE 2.00e-67
tctcccgggagagcgtggagagccccgagcagaagggcctgacgtaccaccgcatcgtagaggctttccggtttgcctacgccaagaggaccctgcttggggaccccaagtttgtggatgtgactgaggtaaggggc

SEQ ID NO: 30206 - DNA, 89 bp, Homo sapiens
  MAP TO AC007567.1; EXPRESSED IN BONE MARROW, SIGNAL = 1.4; EXPRESSED IN FETAL LIVER, SIGNAL = 1.2; EXPRESSED IN PLACENTA, SIGNAL = 1.3; EXPRESSED IN HELA, SIGNAL = 1.2; EXPRESSED IN BRAIN, SIGNAL = 1.8; NT HIT: AL139075.2, EVALUE 7.30e-01; EST_HUMAN HIT: BE900116.1, EVALUE 2.80e-01
ggttctgaaaaggctttagaatctgctgattgtcatcaactcgctactgtagcctcaaagctctgcagcactgctggaccatggcaaat

SEQ ID NO: 30207 - DNA, 87 bp, Homo sapiens
  MAP TO AL049649.4; EXPRESSED IN FETAL LIVER, SIGNAL = 1.4; EXPRESSED IN HELA, SIGNAL = 2.5; EXPRESSED IN PLACENTA, SIGNAL = 1.3; EXPRESSED IN BRAIN, SIGNAL = 1.7; EXPRESSED IN BONE MARROW, SIGNAL = 1.7; NT HIT: gi11435835, EVALUE 7.10e-01; EST_HUMAN HIT: AW975839.1, EVALUE 6.80e-02
cttggccttctagttttctgcctccatcacagcacagtccgccaacaagtcagattaaaggaagcctcctcagaaaatatttgtacc

SEQ ID NO: 30208 - DNA, 182 bp, Homo sapiens
  MAP TO AC004624.6; EXPRESSED IN HELA, SIGNAL = 1.6; EXPRESSED IN BRAIN, SIGNAL = 1.8; EXPRESSED IN PLACENTA, SIGNAL = 1.8; EXPRESSED IN LUNG, SIGNAL = 1.6; EXPRESSED IN BONE MARROW, SIGNAL =   2; EXPRESSED IN FETAL LIVER, SIGNAL = 1.9; EXPRESSED IN ADULT LIVER, SIGNAL =   2; NT HIT: Y17455.1, EVALUE 7.00e-03; EST_HUMAN HIT: AW808466.1, EVALUE 6.30e-01; SWISSPROT HIT: O70423, EVALUE 5.10e+00
tcaatagcagcatccacagtgccaatctggtttgcttagagctaagatcaggagcagggtggtctgggcacagtccaagggcttgggggtcatacaggacccaaaggggtttgattctggctttgctgatccctgtatgacttggcaagtgacttgtctgctccaagtttcagtttcaacat

SEQ ID NO: 30209 - DNA, 169 bp, Homo sapiens
  MAP TO AC004032.7; EXPRESSED IN BONE MARROW, SIGNAL = 1.5; EXPRESSED IN FETAL LIVER, SIGNAL = 1.4; EXPRESSED IN ADULT LIVER, SIGNAL = 1.6; EXPRESSED IN HELA, SIGNAL = 1.3; EXPRESSED IN BRAIN, SIGNAL = 1.4; EXPRESSED IN PLACENTA, SIGNAL = 1.7; EXPRESSED IN LUNG, SIGNAL = 1.3; NT HIT: gi11433335, EVALUE 3.90e-01; EST_HUMAN HIT: AU150802.1, EVALUE 5.80e-01; SWISSPROT HIT: O50565, EVALUE 2.30e+00
aataacagaccaaccaagaggcaaccccagtgttgcagagatttccacgcatcactgtggccaggcctgtcgcacagccacattctgtgttggtataatgacctcgagttccaccagcaggacactgaggctcagggggactgcgaccacttgggggcctgttgcttgg

SEQ ID NO: 30210 - DNA, 118 bp, Homo sapiens
  MAP TO AP000127.1; EXPRESSED IN FETAL LIVER, SIGNAL = 1.3; EXPRESSED IN ADULT LIVER, SIGNAL = 1.8; EXPRESSED IN HELA, SIGNAL = 1.4; EXPRESSED IN PLACENTA, SIGNAL =   2; EXPRESSED IN BRAIN, SIGNAL = 1.6; EXPRESSED IN LUNG, SIGNAL = 1.7; EXPRESSED IN BONE MARROW, SIGNAL =   2; NT HIT: D88425.1, EVALUE 2.60e-01; EST_HUMAN HIT: BE963813.2, EVALUE 1.50e+00
ttctctctgttgatgcctgttttcagattcatgtggtttttcatgtgtgtcttcaatggagatcaaaatcagggtgctgtcaagaaaggtgagtagaatcccaagtgtttttcagcac

SEQ ID NO: 30211 - DNA, 174 bp, Homo sapiens
  MAP TO AC004832.3; EXPRESSED IN PLACENTA, SIGNAL = 1.6; EXPRESSED IN LUNG, SIGNAL = 1.7; EXPRESSED IN BONE MARROW, SIGNAL = 2.3; EXPRESSED IN FETAL LIVER, SIGNAL = 1.8; EXPRESSED IN HELA, SIGNAL = 1.2; EXPRESSED IN BRAIN, SIGNAL = 1.7; EST_HUMAN HIT: AI193566.1, EVALUE 5.00e-91; SWISSPROT HIT: P36021, EVALUE 6.00e-03; NT HIT: gi11496981, EVALUE 4.00e-01
aggaatcatgatggtcatcagcatatagaacagcacacagccagggagcaggcggcctgggaacgggatctcgagctccacctgcagggaggagctgtggcccacggacacagtatgctcgtactgcgtcctcgcctagttgcggttgcacaggtagctcttgggcctctccat

SEQ ID NO: 30212 - DNA, 131 bp, Homo sapiens
  MAP TO AP000123.1; EXPRESSED IN PLACENTA, SIGNAL = 1.2; EXPRESSED IN BRAIN, SIGNAL = 1.5; SWISSPROT HIT: P34804, EVALUE 2.40e+00; NT HIT: gi9634626, EVALUE 1.10e+00; EST_HUMAN HIT: AJ003649.1, EVALUE 3.00e-57
acacaaagctgaagatgctcagaatctcaggcacagccccgaaggcagccagctgggtccacttcattccaagccacaaatgcaacacagaatgctctgtgctgcctctgcataaccacccctttcactaa

SEQ ID NO: 30213 - DNA, 229 bp, Homo sapiens
  MAP TO AC002472.3; EXPRESSED IN BRAIN, SIGNAL = 1.7; EXPRESSED IN BONE MARROW, SIGNAL =   2; NT HIT: U82668.1, EVALUE 2.00e-09; EST_HUMAN HIT: BF592200.1, EVALUE 4.00e-09; SWISSPROT HIT: P50761, EVALUE 7.90e-01
gcagggactacaggtgcccaccaccatgcccggctatgctgtatttccagatctgggggctggttacatagacacctatgctgtttgtgaaaattctccaagctctatgcttaatctttgtgcatttttcagcatagatgttgttcctcaattaaaaacaaaaaaccaaggggttgtgaagaacagaactggcactgatggagtccttctctgtgcaaggcctttccct

SEQ ID NO: 30214 - DNA, 865 bp, Homo sapiens
  MAP TO AP000111.1; EXPRESSED IN ADULT LIVER, SIGNAL =   2; EXPRESSED IN PLACENTA, SIGNAL = 1.4; EXPRESSED IN BRAIN, SIGNAL = 1.4; EXPRESSED IN BONE MARROW, SIGNAL =   2; EXPRESSED IN FETAL LIVER, SIGNAL = 1.7; EST_HUMAN HIT: BE622149.1, EVALUE 2.10e-01; NT HIT: AL163210.2, EVALUE 5.60e-01; SWISSPROT HIT: Q00495, EVALUE 3.70e+00
aagcgaatctatgtactcctgcattccaccttatcccttcaaatcctctgatgattggccaaatatgaaaagagatcataacagcactgacctttatgtaggccatcaatcttatttcacatccattgtctattttgatgacgtctttacactgtgtcattcgggtcacaggttaatgatctactttgtattcactggaggtgatcacagtggagtctcaggtgggccacaagttgagacacaaggacatcatctcctgtgtggtggagatgcccaagtttctcagcctctcactctcccacccacttgccttgtcctcaagcattggaacagagtcacttgccatgttgatctagatcaatgaaactttagagcatgagttttaaattttaacttatttctgaaattgttgatgcagaatcaatgcacacaactgtgcaaaccagggttgagtggcccagttctcccctacagctccctgcgtgcggtaacttatagacgtccctaacactgaatggatggagtctggaaaccaccatcagaggtggtctggctacaggtccacatgcatcgttagcccctctccatttctcacatggcttcaatcaagcagagatttcatctccgtctgcttctgccagactatcaatccaaaaagctaatgggacacttgtttgttgctcccctctggtaaaaagaaatgcctgttgcttttgtgcttccatgacaggaaggcagccagttggttttgcccattcataaccaaggttaagttccctgactagctggagggcaccacgtctgtgtctcaggtcagctagcacttttcactgcactgctggcattaatttggcatcttctcctg

SEQ ID NO: 30215 - DNA, 161 bp, Homo sapiens
  MAP TO AP000346.1; EXPRESSED IN LUNG, SIGNAL = 1.3; EXPRESSED IN BONE MARROW, SIGNAL = 1.4; EXPRESSED IN FETAL LIVER, SIGNAL = 1.9; EXPRESSED IN HELA, SIGNAL = 1.4; EXPRESSED IN BRAIN, SIGNAL = 1.4; EXPRESSED IN PLACENTA, SIGNAL =   2; NT HIT: gi11418603, EVALUE 1.50e+00; EST_HUMAN HIT: BE410354.1, EVALUE 9.00e-77; SWISSPROT HIT: Q01844, EVALUE 2.30e+00
tcagagggctgtggtttcagggcctggaggtgacacctcccaatcacacagacattgcaggctcagagggaggagcccctttgaaagaggtgagcagagtctggggcatttgtgcaaatgttgatgaagtccccagacaactcgcaggctcccaggaaacc

SEQ ID NO: 30216 - DNA, 99 bp, Homo sapiens
  MAP TO AB016897.1; EXPRESSED IN FETAL LIVER, SIGNAL = 1.4; EXPRESSED IN BRAIN, SIGNAL = 1.4; EXPRESSED IN LUNG, SIGNAL = 1.4; EXPRESSED IN BONE MARROW, SIGNAL = 1.4; EXPRESSED IN ADULT LIVER, SIGNAL = 2.1; NT HIT: X57624.1, EVALUE 2.10e-01; EST_HUMAN HIT: BE812713.1, EVALUE 3.10e-01
tcagtcggtgatggctgccgttggtgattggtatcccccagggataccatccatacttgttctgttgacaggggcttctgaagaccaggatctgtgact

SEQ ID NO: 30217 - DNA, 184 bp, Homo sapiens
  MAP TO AC007719.1; EXPRESSED IN BONE MARROW, SIGNAL = 2.9; EXPRESSED IN LUNG, SIGNAL =   2; EXPRESSED IN ADULT LIVER, SIGNAL = 1.9; EXPRESSED IN FETAL LIVER, SIGNAL = 2.6; EXPRESSED IN PLACENTA, SIGNAL =   3; EXPRESSED IN HELA, SIGNAL = 1.7; EXPRESSED IN BRAIN, SIGNAL = 2.4; SWISSPROT HIT: Q84294, EVALUE 8.70e+00; NT HIT: AL163279.2, EVALUE 2.00e-06; EST_HUMAN HIT: BE153717.1, EVALUE 2.00e-07
ctgcagctggatgagggcagtgaggagtgacaacttaataagtacagtttccctttggcatttttggggttccaaaatattttggaaatatacagtagtgatggttgcatggcactctgaatgtactaaatgccactgaatcgtagtctttaaaatggttaaaatgataaggtttatatcatat

SEQ ID NO: 30218 - DNA, 166 bp, Homo sapiens
  MAP TO AC008009.4; EXPRESSED IN BRAIN, SIGNAL =   3; EXPRESSED IN PLACENTA, SIGNAL = 1.3; EXPRESSED IN LUNG, SIGNAL = 1.2; NT HIT: gi9964314, EVALUE 1.50e+00; EST_HUMAN HIT: BE959722.2, EVALUE 5.70e-01
atcttactgtttacaaaattaaagagcagctgttatattattatttagccccacaaacttgttattaagattagaataactacacaaattaagatgatcatatataaactatatatttgcataaatgataaaataataatggaaatctcttaatgggaaagaacca

SEQ ID NO: 30219 - DNA, 207 bp, Homo sapiens
  MAP TO AC006427.13; EXPRESSED IN PLACENTA, SIGNAL = 1.5; EXPRESSED IN HELA, SIGNAL = 1.5; EXPRESSED IN LUNG, SIGNAL = 1.7; EXPRESSED IN BONE MARROW, SIGNAL = 1.8; EXPRESSED IN ADULT LIVER, SIGNAL = 1.6; EXPRESSED IN BRAIN, SIGNAL = 1.4; NT HIT: AE004428.1, EVALUE 1.20e-01; EST_HUMAN HIT: BE139379.1, EVALUE 1.80e-01; SWISSPROT HIT: O13966, EVALUE 1.70e+00
gaggggagacttgtgccaggaatgggcaagtggctgcaacactcgatgcagagggcatcataggcagccttgcacacatctgtgatccaagcaagggaacttggagggaaacagagaaagacccactggatttgaaaaagctatgcagtcaggaacctgtggagtcccacccattccttgcaaaggacaagatcaggaactggtaga

SEQ ID NO: 30220 - DNA, 588 bp, Homo sapiens; identical to SEQ ID NO: 13718
  MAP TO AC007281.3; EXPRESSED IN BRAIN, SIGNAL = 1.9; EST_HUMAN HIT: BF514496.1, EVALUE 2.20e+00; NT HIT: AF198036.1, EVALUE 9.40e-02

SEQ ID NO: 30221 - DNA, 225 bp, Homo sapiens
  MAP TO Z86090.10; EXPRESSED IN BONE MARROW, SIGNAL = 1.6; EXPRESSED IN BRAIN, SIGNAL = 1.4; NT HIT: gi11431720, EVALUE 5.40e-01; EST_HUMAN HIT: AA534104.1, EVALUE 5.10e-02; SWISSPROT HIT: P56726, EVALUE 1.00e+00
ctgctgcctcgggctcaggtcattgcttggctggtcactacctctccaagctgctctacctctctgcaggtgcttccccccaaggcagccagtgctagtgcaagcccgaggctggggctggggattgtcaaagcagggaaggtggggggcgggtgacagtccagaatcggatagcactggagttggctggcagtcctcacaatccctgcagtctgcctgttgcat

SEQ ID NO: 30222 - DNA, 77 bp, Homo sapiens
  MAP TO AL021707.2; EXPRESSED IN LUNG, SIGNAL = 1.6; EXPRESSED IN FETAL LIVER, SIGNAL = 1.9; EXPRESSED IN PLACENTA, SIGNAL = 1.2; EXPRESSED IN HELA, SIGNAL = 1.4; EXPRESSED IN BRAIN, SIGNAL = 1.6; NT HIT: X95287.1, EVALUE 6.10e-01; EST_HUMAN HIT: BE747739.1, EVALUE 9.00e-01
cctttttataacagaagatctggcatgtctgagttcggagcctttgcaggaatactgagatttcctttgtctcttga

SEQ ID NO: 30223 - DNA, 196 bp, Homo sapiens
  MAP TO AC007564.9; EXPRESSED IN BRAIN, SIGNAL = 2.4; EXPRESSED IN PLACENTA, SIGNAL = 2.9; EXPRESSED IN ADULT LIVER, SIGNAL = 1.8; EXPRESSED IN FETAL LIVER, SIGNAL = 1.8; NT HIT: AL163247.2, EVALUE 9.00e-15; EST_HUMAN HIT: AI868295.1, EVALUE 2.00e-10; SWISSPROT HIT: P40018, EVALUE 2.60e-01
tcctccatgctgttctcctgatagcgagggagttctcaagagatctgattgctcgataagtgtctggcatttcccctgcttgctctctctcttgcctgctgccatgctctctctcttgcttgattcccctttgccttgcaccatgattgtaagtttcctgccatgcagaactgtgagtcaattaaacctcctttct

SEQ ID NO: 30224 - DNA, 164 bp, Homo sapiens
  MAP TO AP000352.2; EXPRESSED IN PLACENTA, SIGNAL = 1.5; EXPRESSED IN BRAIN, SIGNAL = 1.5; EXPRESSED IN FETAL LIVER, SIGNAL = 2.2; NT HIT: U78031.1, EVALUE 3.80e-01; SWISSPROT HIT: P52954, EVALUE 5.20e+00; EST_HUMAN HIT: D60420.1, EVALUE 5.60e-01
acctgatggactcatgctgattcttgtgcttctgagacatgctcagggtcaccacctgccagcttgcccacatgggagccaggggagggctcagctcaccccatctctgagtccgctgcctagctgggcactgtgcgaaattcagctgacccctgcctgactgg

SEQ ID NO: 30225 - DNA, 105 bp, Homo sapiens
  MAP TO AC007539.8; EXPRESSED IN HELA, SIGNAL = 1.6; EXPRESSED IN ADULT LIVER, SIGNAL = 1.6; EXPRESSED IN FETAL LIVER, SIGNAL = 2.2; EXPRESSED IN BRAIN, SIGNAL = 2.5; NT HIT: Y19216.1, EVALUE 8.00e-26; EST_HUMAN HIT: AW073434.1, EVALUE 3.00e-26; SWISSPROT HIT: P23703, EVALUE 9.40e+00
ctgtgtcgacgatctttcctctagagctggggtgtccaatcttctggcttccctgggccacattggaagaagaagaagtgtcttgggccacacataaaatatagt

SEQ ID NO: 30226 - DNA, 588 bp, Homo sapiens; identical to SEQ ID NO: 13732
  MAP TO AC008166.1; EXPRESSED IN BRAIN, SIGNAL = 2.2; EXPRESSED IN HELA, SIGNAL = 1.3; EXPRESSED IN PLACENTA, SIGNAL =   2; EXPRESSED IN LUNG, SIGNAL = 1.2; EXPRESSED IN BONE MARROW, SIGNAL = 3.1; EXPRESSED IN ADULT LIVER, SIGNAL = 2.5; EXPRESSED IN FETAL LIVER, SIGNAL = 3.7; NT HIT: AL163303.2, EVALUE 1.50e+00; EST_HUMAN HIT: AW877112.1, EVALUE 5.60e-01; SWISSPROT HIT: P47285, EVALUE 2.60e-01

SEQ ID NO: 30227 - DNA, 116 bp, Homo sapiens
  MAP TO AC008009.4; EXPRESSED IN FETAL LIVER, SIGNAL = 4.6; EXPRESSED IN HELA, SIGNAL = 1.4; EXPRESSED IN BRAIN, SIGNAL = 1.7; EXPRESSED IN PLACENTA, SIGNAL = 1.6; EXPRESSED IN LUNG, SIGNAL = 2.1; NT HIT: AF287263.1, EVALUE 1.00e+00; EST_HUMAN HIT: BE887118.1, EVALUE 4.00e-41
gagaagaactccttcctgctagactttcttcgatatttcagttgtgataagcagatttaactagcgtttggaaagttgctcactatcatcaatgcatgttatgccttcacttctct

SEQ ID NO: 30228 - DNA, 271 bp, Homo sapiens
  MAP TO AP000352.2; EXPRESSED IN HELA, SIGNAL = 1.4; EXPRESSED IN PLACENTA, SIGNAL = 1.2; EXPRESSED IN BRAIN, SIGNAL = 1.5; EXPRESSED IN FETAL LIVER, SIGNAL = 1.6; NT HIT: gi11417862, EVALUE 0.00e+00; EST_HUMAN HIT: BF528264.1, EVALUE 2.00e-14; SWISSPROT HIT: Q9Y6J0, EVALUE 4.00e-47
gtttgattcctgggcaggcatggctctggcccgggccagccgcattcaggacaagctgaactccaatgagctgaagagtgatgggcccatttggaagcatgccacgcccgtcttgaactgcttccgtcgggccctggagattgacagctccaacttgtccctatggattgagtatggcaccatgtcctatgccttgcactcattcgcctcacgtcaattgaagcagtggagaggcgagctgccccctgagctcgtgcagcaggtgaggagg

SEQ ID NO: 30229 - DNA, 226 bp, Homo sapiens
  MAP TO AC008166.1; EXPRESSED IN FETAL LIVER, SIGNAL = 1.3; EXPRESSED IN HELA, SIGNAL = 1.8; EXPRESSED IN BRAIN, SIGNAL = 1.5; EXPRESSED IN PLACENTA, SIGNAL =   3; EXPRESSED IN LUNG, SIGNAL = 1.6; EXPRESSED IN BONE MARROW, SIGNAL = 1.3; SWISSPROT HIT: P03360, EVALUE 4.00e-04; NT HIT: AL163246.2, EVALUE 3.00e-73; EST_HUMAN HIT: BE064410.1, EVALUE 1.00e-70
gatgcttactccagatatgggtttgcctatcctgcatgcaatgcttctgccaaggctaccatccctggacacatggaatgccttatccaccatcatggtattccacacagcaatgcctctgaccaaggcactcactttatgcctaaaaaattgtggcagtgggctcatgctcaaggaattcactggtcttaccatgtttcccatcatcctgaagcacctggattta

SEQ ID NO: 30230 - DNA, 146 bp, Homo sapiens; identical to SEQ ID NO: 18652
  MAP TO AP000347.1; EXPRESSED IN LUNG, SIGNAL = 1.8; EXPRESSED IN BONE MARROW, SIGNAL =   2; EXPRESSED IN FETAL LIVER, SIGNAL = 1.7; EXPRESSED IN ADULT LIVER, SIGNAL = 2.1; EXPRESSED IN HELA, SIGNAL = 1.4; EXPRESSED IN BRAIN, SIGNAL = 1.5; EXPRESSED IN PLACENTA, SIGNAL =   2; EST_HUMAN HIT: AW898081.1, EVALUE 3.00e-73; NT HIT: S82637.1, EVALUE 3.00e-72; SWISSPROT HIT: P08236, EVALUE 6.00e-20

SEQ ID NO: 30231 - DNA, 138 bp, Homo sapiens
  MAP TO AC008166.1; EXPRESSED IN BRAIN, SIGNAL = 3.9; EXPRESSED IN HELA, SIGNAL = 3.8; NT HIT: AF096349.1, EVALUE 7.80e-02; EST_HUMAN HIT: BF105714.1, EVALUE 4.60e-01; SWISSPROT HIT: P41972, EVALUE 4.00e+00
ccactccagatgggtgcagccaagaacaatagggctccctatccgtccattcctagtcaagagaggtggtatcttctcttcaagggcagagcaccagtgtttctcagcccccattcccaaatctctgtttcagaatct

SEQ ID NO: 30232 - DNA, 98 bp, Homo sapiens
  MAP TO Z97055.1; EXPRESSED IN PLACENTA, SIGNAL = 1.5; EXPRESSED IN BRAIN, SIGNAL = 1.4; EXPRESSED IN HELA, SIGNAL = 1.4; EXPRESSED IN LUNG, SIGNAL = 1.7; NT HIT: AF276815.1, EVALUE 5.30e-02; EST_HUMAN HIT: BF677166.1, EVALUE 7.70e-02; SWISSPROT HIT: P25730, EVALUE 2.50e+00
acctgtggttgtgtgtttttctccagccatgttcagcagcacaggtaggcaaaaagttgggtttaatttgggccagggtcttgacaggcaagtgtgat

SEQ ID NO: 30233 - DNA, 77 bp, Homo sapiens
  MAP TO AC007363.3; EXPRESSED IN BRAIN, SIGNAL = 1.4; EXPRESSED IN BONE MARROW, SIGNAL = 1.3; EXPRESSED IN FETAL LIVER, SIGNAL = 1.5; NT HIT: gi9838361, EVALUE 2.40e+00; EST_HUMAN HIT: AI763127.1, EVALUE 1.50e-02
actgtgaattcctcaaaggcattacttgcataaatgtctgttttcaaggtaattgaattcgtgctttcaagcatatt

SEQ ID NO: 30234 - DNA, 559 bp, Homo sapiens; identical to SEQ ID NO: 13747
  MAP TO AC008283.3; EXPRESSED IN PLACENTA, SIGNAL = 1.2; EXPRESSED IN HELA, SIGNAL = 1.3; EXPRESSED IN BRAIN, SIGNAL = 1.7; EXPRESSED IN BONE MARROW, SIGNAL = 2.3; EXPRESSED IN LUNG, SIGNAL = 1.3; EST_HUMAN HIT: AA417756.1, EVALUE 4.00e-05; SWISSPROT HIT: Q60688, EVALUE 1.20e+00; NT HIT: U53930.1, EVALUE 4.00e-04

SEQ ID NO: 30235 - DNA, 262 bp, Homo sapiens
  MAP TO AP000356.1; EXPRESSED IN HELA, SIGNAL = 2.2; EXPRESSED IN BRAIN, SIGNAL = 1.8; EXPRESSED IN LUNG, SIGNAL = 1.5; NT HIT: U07000.1, EVALUE 1.00e-130; EST_HUMAN HIT: AW025032.1, EVALUE 0.00e+00; SWISSPROT HIT: P57647, EVALUE 1.90e+00
ggtcccagggctggtggttgctttgggtctacagctacgtcttacccgcctcctgcctcaacagcctgtgtggtggcaaagccggtgtggggctggggaacgcagcgttctccaggaggggacccggctctccttctgcagtgcaggcgaaggcctagatgccagtgtgacctcccacaaggcgtggcttccagactccccggccggaagtgatgcttttttgccgcgggccctgggtttgaagcagcctggctttctcttg

SEQ ID NO: 30236 - DNA, 178 bp, Homo sapiens
  MAP TO AP000352.2; EXPRESSED IN PLACENTA, SIGNAL = 1.3; EXPRESSED IN BRAIN, SIGNAL = 1.5; EXPRESSED IN LUNG, SIGNAL = 1.3; NT HIT: AL163210.2, EVALUE 4.10e-01; EST_HUMAN HIT: BF672698.1, EVALUE 1.60e-01
ccccagagtgttaagcagagatgggaagaactgacccacctgctcctccaatcttcagttctgcagactttccctgttaagatcctctctccccttcttagttaagttaatcaccctgttcccaaacttttactcttgagaatattgagaaaacatactagcagcaaaccccttctca

SEQ ID NO: 30237 - DNA, 77 bp, Homo sapiens
  MAP TO AL022327.17; EXPRESSED IN HELA, SIGNAL = 1.4; EXPRESSED IN BRAIN, SIGNAL = 1.4; EXPRESSED IN LUNG, SIGNAL =  16; NT HIT: D25217.2, EVALUE 4.00e-36; EST_HUMAN HIT: AI393526.1, EVALUE 6.00e-36; SWISSPROT HIT: Q15049, EVALUE 2.00e-08
ggtcactgggccatttgcaccacgacggctctccaggctttctccttgtcgaactccttcagggggctcctggccac

SEQ ID NO: 30238 - DNA, 81 bp, Homo sapiens
  MAP TO AL031587.3; EXPRESSED IN HELA, SIGNAL = 1.3; EXPRESSED IN BRAIN, SIGNAL = 1.8; EXPRESSED IN LUNG, SIGNAL = 1.2; EXPRESSED IN BONE MARROW, SIGNAL = 1.7; NT HIT: AB039887.1, EVALUE 1.00e-02; EST_HUMAN HIT: AU131669.1, EVALUE 1.60e-02
gtcattttagatttagaatcgagctgaaggaggggtcagggtcagggtcaggcctcaggcttagggtggggtcaaggcctc

SEQ ID NO: 30239 - DNA, 151 bp, Homo sapiens
  MAP TO AP000350.1; EXPRESSED IN BRAIN, SIGNAL = 1.4; NT HIT: AF240786.1, EVALUE 6.00e-80; EST_HUMAN HIT: BE973694.1, EVALUE 2.00e-03; SWISSPROT HIT: Q64471, EVALUE 6.00e-10
cctttactacctgtgccgcaagtacagcgcaccatcgcactggtgcccgccagacccgcacgcacgtgcccgtgtggatgagttcgtggcttggcaacacacggcctttcagctgcccatgaagaagatagtctggctcaaggtgagcagg

SEQ ID NO: 30240 - DNA, 292 bp, Homo sapiens
  MAP TO AB016897.1; EXPRESSED IN BRAIN, SIGNAL = 1.9; NT HIT: gi7304956, EVALUE 7.10e-01; SWISSPROT HIT: Q15569, EVALUE 5.90e-01; EST_HUMAN HIT: AV742419.1, EVALUE 2.70e-01
atggcttcatgtcagttgtgccggcagctgcagttggcagcagcttcctctcctctcatgagcacttgtggtccccatcatagtccccactgcccaacaagtgccccgctcctcgcaggatctgcctttgggttccagactccagcaggacatttccttcagctccttctcaccatcatgcatctccatcccaacactgatcctcagccgtgcccatgctgtttcaagtctcctacagttttacgttttccctctttatttgtcatctaccattggcatatatttagagcag

SEQ ID NO: 30241 - DNA, 199 bp, Homo sapiens
  MAP TO AC007092.4; EXPRESSED IN FETAL LIVER, SIGNAL = 1.4; EXPRESSED IN BRAIN, SIGNAL = 1.6; SWISSPROT HIT: P45982, EVALUE 6.50e+00; NT HIT: AP000007.1, EVALUE 4.70e-01; EST_HUMAN HIT: AW991924.1, EVALUE 7.00e-01
tattttgggtctgttctagaagtaaagtacttgttcttaggacaagtgtcataatcattccgtaagtcttcaccaagtttgactgtacctgcatgcaaagcgatttgcttcccttcacggcaaatttgtgtggcatatgcctcacctgtgtaagtgtgagtggcatgacggtttagggagatacaagaagatgattttc

SEQ ID NO: 30242 - DNA, 564 bp, Homo sapiens; identical to SEQ ID NO: 13764
  MAP TO AC005300.10; EXPRESSED IN BRAIN, SIGNAL = 1.3; NT HIT: AL163210.2, EVALUE 6.00e-12; EST_HUMAN HIT: AW877214.1, EVALUE 3.00e-15; SWISSPROT HIT: P29364, EVALUE 9.50e-01

SEQ ID NO: 30243 - DNA, 114 bp, Homo sapiens
  MAP TO AC006427.13; EXPRESSED IN BRAIN, SIGNAL = 1.4; EST_HUMAN HIT: BF037713.1, EVALUE 3.00e-20; SWISSPROT HIT: Q9Y6R4, EVALUE 5.40e+00; NT HIT: gi11437152, EVALUE 2.00e-20
ctattgtctgctttactccatttttcccctccaccaggagcacctgagaagccagtaggagaaaggagaacagggtgaggctatgggtattcatggctacatctgggtggcacc

SEQ ID NO: 30244 - DNA, 602 bp, Homo sapiens
  MAP TO AL031587.3; EXPRESSED IN FETAL LIVER, SIGNAL = 1.6; EXPRESSED IN BRAIN, SIGNAL = 1.3; EXPRESSED IN PLACENTA, SIGNAL =  14; SWISSPROT HIT: Q9Z0Y8, EVALUE 3.10e+00; NT HIT: gi6978754, EVALUE 2.40e-02; EST_HUMAN HIT: AI817088.1, EVALUE 6.00e-04
accctggcctctgcccgtggaactgagaagtcaccatctctgtacccccagaggcctctccagctcccggagggtccacagctgtcagctgggctgtcttagccagtgcccctcaggtcacagatgggaaaatagacttagtgtggggaggtgcctctgcccctgccctcagccccttacccctcaccccagcactctcgcggcccacctcctgcctcctttgtccaggaggtggtgctgctgcccttgcctctgcaggtcctcccttcgtggtggctgcgcaggcgaggggggaggcgtgtacatgcacatttacacacgcatgcacacatgcgcacacactttccctccctggggtggccagcgaaacactcagtccccctcctaccgtcgccagtccgagtttaaaaatagcagcagctctgcagtgtgcctgtggggtagatataaatacttctagaaattgtaggctcagctgggcacactgggctttattggctaaggaagtgggggtggggactgagcttgttccaaatggtgtacaaaagtggcggctgctattttcagcctcctggtgccgtgcctataaatccctgttactg

SEQ ID NO: 30245 - DNA, 86 bp, Homo sapiens
  MAP TO AC009266.1; EXPRESSED IN BRAIN, SIGNAL = 1.7; NT HIT: AB037763.1, EVALUE 3.00e-31; EST_HUMAN HIT: AW953983.1, EVALUE 4.00e-31
  unsure 29
  unsure 64
  unsure 86
atttgtttgttggttaagtaacacttttntatctggcaatgtaaaaaatcttcacagtcttttncaagtagcatcttaatcttttn

SEQ ID NO: 30246 - DNA, 120 bp, Homo sapiens
  MAP TO AC009266.1; EXPRESSED IN BRAIN, SIGNAL = 2.1; NT HIT: AB037763.1, EVALUE 8.00e-57; EST_HUMAN HIT: AA907386.1, EVALUE 1.00e-56; SWISSPROT HIT: P00541, EVALUE 7.10e+00
  unsure 109
gaatacttagaattggccccttacaacttttcagaggtccaacatatattctgttccacggcccatgataccaaatgcacatacataaaatggccatttgacttccccnaaactacacac

SEQ ID NO: 30247 - DNA, 123 bp, Homo sapiens
  MAP TO AC005587.1; EXPRESSED IN PLACENTA, SIGNAL = 0.95; EXPRESSED IN BRAIN, SIGNAL = 1.3; EXPRESSED IN BONE MARROW, SIGNAL = 0.57; EXPRESSED IN ADULT LIVER, SIGNAL = 3.8; EXPRESSED IN LUNG, SIGNAL =   1; EXPRESSED IN HELA, SIGNAL = 1.9; EXPRESSED IN FETAL LIVER, SIGNAL = 1.9; EST_HUMAN HIT: AA101870.1, EVALUE 1.60e+00; SWISSPROT HIT: P06802, EVALUE 8.00e-10; NT HIT: gi11419429, EVALUE 2.00e-63
agccagccactgttgatccacaaagagatgaactttgtcgattctgacgttcttggcatagtgcagtcgctttggcaaatcaggagtcaaatagggcttgaaatgctgatcaggttttcggca

SEQ ID NO: 30248 - DNA, 515 bp, Homo sapiens
  MAP TO AC005552.1; EXPRESSED IN PLACENTA, SIGNAL = 1.9; EXPRESSED IN BRAIN, SIGNAL = 1.8; EXPRESSED IN BONE MARROW, SIGNAL = 2.1; EXPRESSED IN HELA, SIGNAL = 2.1; EXPRESSED IN LUNG, SIGNAL = 2.1; SWISSPROT HIT: P18480, EVALUE 6.50e-01
gcctctccaggtggctggagctctgtgggcctgggccgggctggaagctgacccagccctgggctgaggccatggctgtgatctcccccaggaccgttccatcttcgctctcttcgtcttcagctccttctgcttcttgccaccagatgaacttcctgctgagtaattggagctggagaaatggtgcatccatccagctgctgcgcttggagactttgattaagggtcagcaggttaacttgttgccattcagcatgcaggcggggtgggggcacctcctgatccctcccctccaccagccagtagctttgccaggagagcagcaaatgagaagcctggaggctctgggagggcagggaagggagaaggcagggtccagagctcttccattagtcacgaactctctcctggctcaactttgcctatgcccatcagggtaccccgcccaaggcactcagcccctcccagagatccctggaaacttagggtccaagagactgcagaggtaccagatc

SEQ ID NO: 30249 - DNA, 231 bp, Homo sapiens
  MAP TO AC006463.3; EXPRESSED IN PLACENTA, SIGNAL = 0.94; EXPRESSED IN LUNG, SIGNAL = 0.6; EXPRESSED IN BRAIN, SIGNAL = 0.83; EXPRESSED IN FETAL LIVER, SIGNAL = 0.72; EXPRESSED IN BONE MARROW, SIGNAL = 0.54; EXPRESSED IN ADULT LIVER, SIGNAL = 0.7; SWISSPROT HIT: Q00975, EVALUE 3.20e-02; NT HIT: gi4503354, EVALUE 3.00e-95; EST_HUMAN HIT: BF447281.1, EVALUE 4.00e-86
agtgagttcggaatcttgtcccatggaaatgatggtttggttcacagtctggagaagtttctccatgataatctggatctgcctctgagttggccccatgtccttcctgtacagcacctccaggatgtggctgagcagctgacagcaggcctccaggttctcctgtctctccagatggtacttgagctgatcagtcatcatgggaagcaggatctctctgtagtcatgctg

SEQ ID NO: 30250 - DNA, 206 bp, Homo sapiens
  MAP TO AC006324.2; EXPRESSED IN ADULT LIVER, SIGNAL = 0.42; EXPRESSED IN LUNG, SIGNAL = 0.45; EXPRESSED IN BRAIN, SIGNAL = 0.59; EXPRESSED IN BONE MARROW, SIGNAL = 0.52; EST_HUMAN HIT: AW270638.1, EVALUE 7.20e-01; NT HIT: AJ391284.1, EVALUE 3.10e-02; SWISSPROT HIT: P55487, EVALUE 1.50e-01
tgtctgcagcagctggtttttgtcttggattcttttagcctcaacctcttgtctgcctcgctgctgagtggttctgtagaaaatgtcccttgctgatgggatgcagaataatttgggataggagagtctgaaagacaatctggaaaatggtgttttatgttaagacctgcaagtagatccttcttcattttccagtaatgttgttt

SEQ ID NO: 30251 - DNA, 133 bp, Homo sapiens
  MAP TO AC003103.1; EXPRESSED IN BONE MARROW, SIGNAL = 1.4; EXPRESSED IN ADULT LIVER, SIGNAL = 1.6; EXPRESSED IN PLACENTA, SIGNAL = 1.5; EXPRESSED IN LUNG, SIGNAL = 1.7; EXPRESSED IN FETAL LIVER, SIGNAL = 1.6; EXPRESSED IN BRAIN, SIGNAL = 1.4; EST_HUMAN HIT: BE561063.1, EVALUE 4.00e-69; NT HIT: gi4826636, EVALUE 2.00e-64; SWISSPROT HIT: Q28559, EVALUE 1.00e-20
acatggcttgaatctggccatcagtcagctcagggttggcattgtggattttcttcttgaccaggtcctccagcagaagacgcctcagccgccagtagaagaaggtacgggatgttttccaatccaggatatc

SEQ ID NO: 30252 - DNA, 111 bp, Homo sapiens
  MAP TO AC005773.1; EXPRESSED IN BONE MARROW, SIGNAL =   1; EXPRESSED IN PLACENTA, SIGNAL = 0.97; EXPRESSED IN LUNG, SIGNAL = 1.2; EXPRESSED IN FETAL LIVER, SIGNAL =   1; EXPRESSED IN BRAIN, SIGNAL = 0.99; EXPRESSED IN ADULT LIVER, SIGNAL = 0.98; NT HIT: AJ133836.2, EVALUE 2.40e-01
acagctaagatgatacaagggggaagagtaccaacagcgttaacagcaactactacagcgtaccaggaaatcattgccatcttcctggccatcatgatctatgttcaaaac

SEQ ID NO: 30253 - DNA, 209 bp, Homo sapiens
  MAP TO AC004500.1; EXPRESSED IN BRAIN, SIGNAL = 0.64; EXPRESSED IN ADULT LIVER, SIGNAL =   1; EXPRESSED IN BONE MARROW, SIGNAL = 0.83; EXPRESSED IN PLACENTA, SIGNAL = 1.2; EXPRESSED IN LUNG, SIGNAL =   1; EXPRESSED IN FETAL LIVER, SIGNAL =   1; NT HIT: gi7656878, EVALUE 3.00e-64; EST_HUMAN HIT: BF379688.1, EVALUE 1.00e-109; SWISSPROT HIT: P10258, EVALUE 1.10e-01
gaaagccttacaaagaaacagagccgcccaagggggaaaagaaaaatgtgccagaaaagcacacgagagaggctcagaaacaagcctcagaaaaagtttccaacaaaggcaagaggaagcataaggtttgtgaagggtttttgttgtttgttttgaaacatcagaatctgaaatgcggtggaaatctcagtaagccacaaagtaacaag

SEQ ID NO: 30254 - DNA, 125 bp, Homo sapiens
  MAP TO AC004629.1; EXPRESSED IN LUNG, SIGNAL = 0.48; EXPRESSED IN BONE MARROW, SIGNAL = 0.64; EXPRESSED IN BRAIN, SIGNAL = 0.56; EXPRESSED IN ADULT LIVER, SIGNAL = 0.55; SWISSPROT HIT: O09185, EVALUE 4.10e+00
cagtaatggtattctcatccaatatgtggattatttattgcaaaactctgaagataacgcaagctctaaaagctaccttctccccaaaaaggaacataacgtgtcaagaaaaaaaaacctgtttc

SEQ ID NO: 30255 - DNA, 154 bp, Homo sapiens
  MAP TO AC005145.1; EXPRESSED IN BONE MARROW, SIGNAL = 0.9; EXPRESSED IN PLACENTA, SIGNAL = 0.68; EXPRESSED IN LUNG, SIGNAL = 0.88; EXPRESSED IN FETAL LIVER, SIGNAL = 0.72; EXPRESSED IN BRAIN, SIGNAL = 0.67; EXPRESSED IN ADULT LIVER, SIGNAL = 0.64; EST_HUMAN HIT: AA773505.1, EVALUE 2.10e+00; NT HIT: gi9627521, EVALUE 6.00e-03; SWISSPROT HIT: Q03003, EVALUE 2.30e+00
caagtgagcagcctttatgacctaaaggccagcgcagggcttcaagcactgctattgctcacgcatatcgttgcctatctgctggctcactttgttggttccagcatccaccaggtcttaacttgttcagcttccaccaggtcgtgcccttcag

SEQ ID NO: 30256 - DNA, 99 bp, Homo sapiens
  MAP TO AC004457.1; EXPRESSED IN ADULT LIVER, SIGNAL = 0.53; EXPRESSED IN LUNG, SIGNAL = 0.57; EXPRESSED IN BRAIN, SIGNAL = 0.59; EXPRESSED IN BONE MARROW, SIGNAL = 0.61; NT HIT: gi6912231, EVALUE 8.30e-01; SWISSPROT HIT: O35245, EVALUE 5.50e+00; EST_HUMAN HIT: R94322.1, EVALUE 3.10e-01
cttggatattcgaaataactctcccaataccatgggagagcagggtgatggttcttatcagaatctgaaagaagtaatccacttgaactgggacttctg

SEQ ID NO: 30257 - DNA, 165 bp, Homo sapiens
  MAP TO AC005164.1; EXPRESSED IN BRAIN, SIGNAL = 1.2; EXPRESSED IN ADULT LIVER, SIGNAL = 0.82; EXPRESSED IN PLACENTA, SIGNAL = 0.84; EXPRESSED IN LUNG, SIGNAL = 0.83; EXPRESSED IN FETAL LIVER, SIGNAL = 0.99; EXPRESSED IN BONE MARROW, SIGNAL = 0.77; SWISSPROT HIT: P36115, EVALUE 2.30e+00; EST_HUMAN HIT: BE884320.1, EVALUE 4.00e-88; NT HIT: gi11419210, EVALUE 3.00e-88
aaatgaacttccatcatggctgggatgaggtgaagtggtttctgcagtatatgcagattctggacttggtacaggagaaattcgacccaaggtttgtgcaaatttagcttccttcttatttgaaataagataactgatatctttgctgagaaattcttcaactcg

SEQ ID NO: 30258 - DNA, 196 bp, Homo sapiens
  MAP TO AC006238.1; EXPRESSED IN ADULT LIVER, SIGNAL = 0.69; EXPRESSED IN BONE MARROW, SIGNAL = 0.9; EXPRESSED IN PLACENTA, SIGNAL = 0.73; EXPRESSED IN LUNG, SIGNAL = 0.77; EXPRESSED IN BRAIN, SIGNAL = 0.81; EST_HUMAN HIT: AW448968.1, EVALUE 2.00e-07; NT HIT: gi6753481, EVALUE 1.80e+00; SWISSPROT HIT: Q10205, EVALUE 6.70e-02
acacttccgggcccctgtgggctgcgggcagaaccccaggagccaaagcaccaccccggagaagctggaacttggcctcaaaatcagctggcttctgcctgctgtggtcattttcttcccggagcggctggagcgctgtctcagtggatacagcagccatccggccttcctgggccattttctcacggaagaagat

SEQ ID NO: 30259 - DNA, 191 bp, Homo sapiens
  MAP TO AC005038.1; EXPRESSED IN PLACENTA, SIGNAL = 1.2; EXPRESSED IN LUNG, SIGNAL =   1; EXPRESSED IN FETAL LIVER, SIGNAL = 1.2; EXPRESSED IN BRAIN, SIGNAL = 1.5; EXPRESSED IN BONE MARROW, SIGNAL = 1.3; EXPRESSED IN ADULT LIVER, SIGNAL = 1.3; SWISSPROT HIT: Q99437, EVALUE 1.00e-29; NT HIT: gi11422653, EVALUE 1.00e-103; EST_HUMAN HIT: AA781442.1, EVALUE 1.00e-103
ctgaagaattgcgacgatgaccccaaagaggccaatggcgctgccaaagatctccacgatgagaatctttacaaagaggctggggttctgagcatcggccagggcagccccactgcccacgatgcccacgcagactccacagaagaggttagacaggcctacggtgaggccagccccaaacatggagtagc

SEQ ID NO: 30260 - DNA, 140 bp, Homo sapiens
  MAP TO AC005630.1; EXPRESSED IN LUNG, SIGNAL = 1.4; EXPRESSED IN BONE MARROW, SIGNAL = 1.3; EXPRESSED IN ADULT LIVER, SIGNAL = 1.2; EXPRESSED IN PLACENTA, SIGNAL = 1.3; EXPRESSED IN FETAL LIVER, SIGNAL = 1.3; EXPRESSED IN BRAIN, SIGNAL = 1.2; EST_HUMAN HIT: AV751818.1, EVALUE 1.00e-72; NT HIT: gi5453777, EVALUE 3.00e-38; SWISSPROT HIT: P02547, EVALUE 2.40e+00
atagaagacttagatcactgtgagatgaaagaagagcctactagtgagaagaagttggaggatgaaggaactgaaaaagaaaactgggcaatattagagaaaattaggaagactgaaaggcaaggccatttaaatgtgta

SEQ ID NO: 30261 - DNA, 109 bp, Homo sapiens
  MAP TO AC005021.1; EXPRESSED IN LUNG, SIGNAL = 0.59; EXPRESSED IN PLACENTA, SIGNAL = 1.1; EXPRESSED IN FETAL LIVER, SIGNAL = 2.2; EXPRESSED IN BRAIN, SIGNAL = 1.3; EXPRESSED IN ADULT LIVER, SIGNAL = 1.9; SWISSPROT HIT: Q15165, EVALUE 2.00e-14; EST_HUMAN HIT: R21364.1, EVALUE 7.00e-55; NT HIT: gi4505952, EVALUE 5.00e-55
ctgatgccatgtggattgaatgaggccaaatcaaacccacgactgattcttaattcccgtgcccttggtttttcttcttttagatccatcattagtattcctccaggct

SEQ ID NO: 30262 - DNA, 162 bp, Homo sapiens
  MAP TO AC005587.1; EXPRESSED IN LUNG, SIGNAL = 1.1; EXPRESSED IN BRAIN, SIGNAL = 0.69; EXPRESSED IN BONE MARROW, SIGNAL = 0.81; EXPRESSED IN PLACENTA, SIGNAL = 0.78; EXPRESSED IN FETAL LIVER, SIGNAL = 0.86; EXPRESSED IN ADULT LIVER, SIGNAL = 0.83; SWISSPROT HIT: P22413, EVALUE 2.00e-10; NT HIT: gi11419429, EVALUE 2.00e-86; EST_HUMAN HIT: BE895699.1, EVALUE 5.50e-01
agaaacagtcaagagactctgtgggcaatggattagcaaagccacaaacagaaaactttgacacctcctctgcatgggatggctcataaaaaggcaccttcagaagatggtttaaactaccatgggttccattgtttggtgctggttgaatgcgtagaagat

SEQ ID NO: 30263 - DNA, 187 bp, Homo sapiens
  MAP TO AC006265.1; EXPRESSED IN BONE MARROW, SIGNAL = 0.51; EXPRESSED IN ADULT LIVER, SIGNAL = 0.56; EXPRESSED IN LUNG, SIGNAL = 0.67; EXPRESSED IN BRAIN, SIGNAL = 0.62; SWISSPROT HIT: P42377, EVALUE 5.10e+00; NT HIT: AL163248.2, EVALUE 3.00e-14; EST_HUMAN HIT: N42344.1, EVALUE 4.00e-05
gtaaataccaccagaagcaatttcctttcagctgcaaggccaacaatacacctgtccagtcctacttcaaagatatagcaactttcaagtcttatgtcataatttagttcacagagatcttgattacctttcccttccacaagatatcacactgattccttataatgatattctgctggttcggacc

SEQ ID NO: 30264 - DNA, 176 bp, Homo sapiens
  MAP TO AC005858.1; EXPRESSED IN ADULT LIVER, SIGNAL = 0.71; EXPRESSED IN LUNG, SIGNAL = 0.76; EXPRESSED IN PLACENTA, SIGNAL = 0.8; EXPRESSED IN BRAIN, SIGNAL = 0.79; EXPRESSED IN BONE MARROW, SIGNAL = 0.71; SWISSPROT HIT: P26436, EVALUE 6.70e+00; EST_HUMAN HIT: AA811545.1, EVALUE 1.50e-01; NT HIT: AB007979.1, EVALUE 1.60e+00
tatggccacaaggtggcagtagcgcacaatgaatttgttcaggcttcgctttgacagatttgccagcagggcaagtccctcatggcacgagaccatccagaggccatggttcaggagccctacctagaagatgaagaggtcaagggaaattctagggaagatggggcttatgtttc

SEQ ID NO: 30265 - DNA, 299 bp, Homo sapiens
  MAP TO AC005692.1; EXPRESSED IN BONE MARROW, SIGNAL = 0.92; EXPRESSED IN PLACENTA, SIGNAL = 0.93; EXPRESSED IN LUNG, SIGNAL = 0.94; EXPRESSED IN FETAL LIVER, SIGNAL = 0.82; EXPRESSED IN BRAIN, SIGNAL = 0.67; EXPRESSED IN ADULT LIVER, SIGNAL = 0.9; SWISSPROT HIT: Q24849, EVALUE 4.20e+00; NT HIT: AJ011418.1, EVALUE 7.30e-01; EST_HUMAN HIT: BF105635.1, EVALUE 1.10e+00
tgttctttttaccttcaaaagactggacacattcaagggaaactcctctttttttttttttcctcagtgaatcagtggcaagctctgtcacttgaggtcctgatgacgtgcagttgggtttcttgaggattttgcttttgtgttgagaatgattccacagagtttggtaaggggtttttcccctaacaatcacagccgtgccctctgcaccttccatgaaaccctgaaaagactggaaagaatgcgtcacctccgtgacagcttcttcacccccgcctgttgctggtcttggtgcttgt

SEQ ID NO: 30266 - DNA, 184 bp, Homo sapiens
  MAP TO AC004259.1; EXPRESSED IN LUNG, SIGNAL = 0.76; EXPRESSED IN FETAL LIVER, SIGNAL = 0.8; EXPRESSED IN PLACENTA, SIGNAL = 0.81; EXPRESSED IN BRAIN, SIGNAL = 0.76; EXPRESSED IN BONE MARROW, SIGNAL = 0.61; EXPRESSED IN ADULT LIVER, SIGNAL = 0.83; EST_HUMAN HIT: R85213.1, EVALUE 2.00e-99; NT HIT: X98022.1, EVALUE 1.00e-99; SWISSPROT HIT: O08759, EVALUE 6.00e-32
ctttcgagttctcaaggtaagctgagcttgctcctttcttggagggatgaggatcacagagttttgcattaatcttataaagctcgagggctttaatagctgctgcattattatccatacgaagaaaagttggacaggaagcacaaaactcattcgtgcaggcttcatttccacagccctcagt

SEQ ID NO: 30267 - DNA, 195 bp, Homo sapiens
  MAP TO AC004142.1; EXPRESSED IN LUNG, SIGNAL = 0.71; EXPRESSED IN BONE MARROW, SIGNAL = 0.53; EXPRESSED IN PLACENTA, SIGNAL = 0.66; EXPRESSED IN BRAIN, SIGNAL = 0.57; EXPRESSED IN ADULT LIVER, SIGNAL = 0.63; EST_HUMAN HIT: BE262226.1, EVALUE 6.80e-01; SWISSPROT HIT: O15255, EVALUE 2.90e+00; NT HIT: L07320.1, EVALUE 4.60e-01
aaccataaggttgctctgtgccagtgcgacttctgtttgctctcattacctttcgccagattctgcctgataaccacagatttccatgtggctccctcctactcctgctcctgcttgtcaacaagctctctcacctgcgtctactacatagttcctggctgtagaaatggaaccaagtagctttcttttgtagaa

SEQ ID NO: 30268 - DNA, 183 bp, Homo sapiens
  MAP TO AC004844.1; EXPRESSED IN BRAIN, SIGNAL = 0.84; EXPRESSED IN ADULT LIVER, SIGNAL = 0.98; EXPRESSED IN PLACENTA, SIGNAL = 0.98; EXPRESSED IN FETAL LIVER, SIGNAL = 0.92; EXPRESSED IN BONE MARROW, SIGNAL = 1.6; EXPRESSED IN LUNG, SIGNAL = 1.1; SWISSPROT HIT: P72828, EVALUE 2.30e+00; EST_HUMAN HIT: BF573948.1, EVALUE 6.30e-01; NT HIT: AP000006.1, EVALUE 1.10e-01
ctgggcctggctctgcggtatagaggcttgggatctgcatttgccagaccatccagaaagccggcttcctcgctttccctttgtttttctgctcttgtagcttataacccgtcttgcatttgcctaaagggctcagagctttctcaaggtcattaactcgagtcatagccgagctcacaggga

SEQ ID NO: 30269 - DNA, 155 bp, Homo sapiens
  MAP TO AC005962.1; EXPRESSED IN LUNG, SIGNAL =   1; EXPRESSED IN BRAIN, SIGNAL = 0.99; EXPRESSED IN BONE MARROW, SIGNAL = 1.1; EXPRESSED IN PLACENTA, SIGNAL = 0.99; EXPRESSED IN FETAL LIVER, SIGNAL = 0.98; EXPRESSED IN ADULT LIVER, SIGNAL =   1; NT HIT: gi11424427, EVALUE 9.00e-79; SWISSPROT HIT: O66647, EVALUE 1.00e+00; EST_HUMAN HIT: BE019291.1, EVALUE 9.00e-77
gtgtatctatcagagtcagtgtaggtaaagattcgtcggtttttcttgccacccgaattctccagcttcaggatctcctgacggtactgataatccaaaggactctgacaggctgtttcattttggtacagatctacttcaaactgaggttacca

SEQ ID NO: 30270 - DNA, 117 bp, Homo sapiens
  MAP TO AC006204.1; EXPRESSED IN LUNG, SIGNAL = 1.6; EXPRESSED IN FETAL LIVER, SIGNAL = 0.96; EXPRESSED IN BONE MARROW, SIGNAL = 0.73; EXPRESSED IN PLACENTA, SIGNAL = 0.96; EXPRESSED IN BRAIN, SIGNAL = 0.79; EXPRESSED IN ADULT LIVER, SIGNAL = 1.7; NT HIT: AL139077.2, EVALUE 2.60e-01; SWISSPROT HIT: P26314, EVALUE 9.30e+00
tgttgctggtccagagaccacctgtgagaggcattaacatggagtatgtctggttaaaagtagcagcatttgagtataaaaggtcatcagaacaataaaagcaataatactaacagt

SEQ ID NO: 30271 - DNA, 97 bp, Homo sapiens
  MAP TO AC006241.1; EXPRESSED IN LUNG, SIGNAL = 0.82; EXPRESSED IN BRAIN, SIGNAL = 0.58; EXPRESSED IN ADULT LIVER, SIGNAL = 0.6; EXPRESSED IN BONE MARROW, SIGNAL = 0.56; EXPRESSED IN PLACENTA, SIGNAL = 0.78; EST_HUMAN HIT: BF057227.1, EVALUE 9.00e-48; NT HIT: AB046844.1, EVALUE 6.00e-48; SWISSPROT HIT: Q38929, EVALUE 7.20e+00
tgatggaaagtatgaagaaagtcaagaaggtgaccaacggctccgtggagccccagggcgagtgggaaggcgccgtgtgacagagccgaccctgagg

SEQ ID NO: 30272 - DNA, 254 bp, Homo sapiens
  MAP TO AC005015.2; EXPRESSED IN ADULT LIVER, SIGNAL = 0.68; EXPRESSED IN PLACENTA, SIGNAL = 0.64; EXPRESSED IN LUNG, SIGNAL = 0.53; EXPRESSED IN BRAIN, SIGNAL = 0.71; EXPRESSED IN BONE MARROW, SIGNAL = 0.71; EXPRESSED IN FETAL LIVER, SIGNAL = 0.73; SWISSPROT HIT: Q01955, EVALUE 1.70e-01
aaccaaatggaactccaaaccccacttctgtgccccctcctcccaaaccaggagaacagagtctctgctcagcagaggcggccggggaacccagggcaagagcggcccggatggcttaccctggaaagaacagagccagctccccatggagaagcccgtggccaggccaccaggcaggcagacaggtgctggcagccggacccccgccccgtcagatcgatcctggaccacgtcagggacattaggaggcagcc

SEQ ID NO: 30273 - DNA, 137 bp, Homo sapiens
  MAP TO AC005077.1; EXPRESSED IN FETAL LIVER, SIGNAL = 0.67; EXPRESSED IN PLACENTA, SIGNAL = 0.85; EXPRESSED IN LUNG, SIGNAL =   1; EXPRESSED IN BRAIN, SIGNAL = 0.76; EXPRESSED IN BONE MARROW, SIGNAL = 0.69; EXPRESSED IN ADULT LIVER, SIGNAL = 0.75; SWISSPROT HIT: P21580, EVALUE 2.70e-01; NT HIT: gi7657495, EVALUE 2.00e-55; EST_HUMAN HIT: AW501988.1, EVALUE 2.00e-55
ctgaatctccttctgcctggctttgtggtactcttccctccagcacttggagcagaaaccctgccaggcagggttgccgtagtaaccacatccttccttgcacaggaggtctgactgatgcacatgaattcctcagt

SEQ ID NO: 30274 - DNA, 78 bp, Homo sapiens
  MAP TO AC006226.4; EXPRESSED IN PLACENTA, SIGNAL = 1.2; EXPRESSED IN LUNG, SIGNAL = 1.3; EXPRESSED IN BRAIN, SIGNAL = 1.3; EXPRESSED IN BONE MARROW, SIGNAL = 1.1; EXPRESSED IN ADULT LIVER, SIGNAL = 1.2; EXPRESSED IN FETAL LIVER, SIGNAL = 1.1; NT HIT: AL021127.2, EVALUE 6.20e-01
ggaggccattgatgacgtgaataatagcagtttgggtaaaatactgagggcaaaagtctgctggaactggaagagaaa

SEQ ID NO: 30275 - DNA, 129 bp, Homo sapiens
  MAP TO AC005939.1; EXPRESSED IN FETAL LIVER, SIGNAL = 0.99; EXPRESSED IN ADULT LIVER, SIGNAL = 0.94; EXPRESSED IN PLACENTA, SIGNAL =   1; EXPRESSED IN BRAIN, SIGNAL = 0.8; EXPRESSED IN BONE MARROW, SIGNAL = 0.94; EXPRESSED IN LUNG, SIGNAL = 0.94; NT HIT: gi11967960, EVALUE 1.10e+00
cttagtctcgagcagcatcagccacagatgaatgggctggatgaaagaggcacagaggtttgctttcgtagtcaacatataatgctgtgtacacagatattcaacaagcttctgtgtatctggaataaa

SEQ ID NO: 30276 - DNA, 255 bp, Homo sapiens
  MAP TO AC002528.1; EXPRESSED IN PLACENTA, SIGNAL = 0.95; EXPRESSED IN LUNG, SIGNAL = 1.3; EXPRESSED IN FETAL LIVER, SIGNAL = 1.1; EXPRESSED IN BRAIN, SIGNAL = 0.97; EXPRESSED IN ADULT LIVER, SIGNAL = 0.86; EXPRESSED IN BONE MARROW, SIGNAL = 0.97; EST_HUMAN HIT: AW069274.1, EVALUE 0.00e+00; SWISSPROT HIT: P08123, EVALUE 1.00e-41; NT HIT: AF004877.1, EVALUE 0.00e+00
tttgaatataatgtagaaggagtgacttccaaggaaatggctacccaacttgccttcatgcgcctgctggccaactatgcctctcagaacatcacctaccactgcaagaacagcattgcatacatggatgaggagactggcaacctgaaaaaggctgtcattctacagggctctaatgatgttgaacttgttgctgagggcaacagcaggttcacttacactgttcttgtagatggctgctctgtaagtaatagt

SEQ ID NO: 30277 - DNA, 151 bp, Homo sapiens
  MAP TO AC002045.1; EXPRESSED IN LUNG, SIGNAL = 0.75; EXPRESSED IN BRAIN, SIGNAL = 0.93; EXPRESSED IN PLACENTA, SIGNAL = 0.75; EXPRESSED IN BONE MARROW, SIGNAL = 0.71; EXPRESSED IN ADULT LIVER, SIGNAL = 0.57; EST_HUMAN HIT: AI684571.1, EVALUE 4.00e-17; NT HIT: AF200719.1, EVALUE 1.00e-19
tggaagtggatcatcataaacgtcttcatcctcattgtcttcacattgaggagactgaggaagaggaggaagaggaggaattggttttgccgtctcagaggtggcaaaaacagaaaaaaatccatgtataagtggacccatgtggttcaaa

SEQ ID NO: 30278 - DNA, 190 bp, Homo sapiens
  MAP TO AC004025.1; EXPRESSED IN LUNG, SIGNAL = 0.62; EXPRESSED IN BRAIN, SIGNAL = 0.6; EXPRESSED IN ADULT LIVER, SIGNAL = 0.64; NT HIT: AE001188.1, EVALUE 4.40e-01; SWISSPROT HIT: P51172, EVALUE 5.00e+00
actgggctcccaaccagcccttcccctgcccaccatccttagcttagcccttctacccgtggctcttagtcttaaaaatgaaactgaggcttatgtagtccctatttcttttatagccttggatgtctctctgaggcaaaccgaagttcatcgtcttggttctccgacagtagatctcagcaataaccaa

SEQ ID NO: 30279 - DNA, 338 bp, Homo sapiens
  MAP TO AC000385.1; EXPRESSED IN BRAIN, SIGNAL = 0.56; NT HIT: U82695.2, EVALUE 8.30e-01; SWISSPROT HIT: P08392, EVALUE 7.40e-02; EST_HUMAN HIT: BF213358.1, EVALUE 1.00e-112
tcctctgccttcgccacctgtctgggtgccggtctcctccctgcctggccgcggcgcgtcctccccgtcctcgcagtcctcgggttctgcgcttcccccctccagctacagccgcagcctcttctcttcgggagggacgtcgtcctcctccctcctgggccggccatccctgcctcggggcttgccagtggcttcggagctgccggaagggctggccacggctggggggctctgcctgcacctggagaagaggaaggatacggcgcgagcggcctctcggcggagctggggcgtctgagcgcgggctcggtgggtccgcccggcgaggggctgggcat

SEQ ID NO: 30280 - DNA, 78 bp, Homo sapiens
  MAP TO AC011824.4; EXPRESSED IN BONE MARROW, SIGNAL = 0.84; EXPRESSED IN PLACENTA, SIGNAL = 0.87; EXPRESSED IN ADULT LIVER, SIGNAL = 0.82; EXPRESSED IN FETAL LIVER, SIGNAL = 1.2; EXPRESSED IN BRAIN, SIGNAL = 0.75; NT HIT: X02218.1, EVALUE 5.20e-01; EST_HUMAN HIT: BE010844.1, EVALUE 2.50e+00
attctcatttctgaaatgagaatctcccttttcgtcataacgatgctcccttttctctgtaacactgcattcattacc

SEQ ID NO: 30281 - DNA, 213 bp, Homo sapiens
  MAP TO AC011957.2; EXPRESSED IN ADULT LIVER, SIGNAL = 0.71; EXPRESSED IN PLACENTA, SIGNAL = 0.74; EXPRESSED IN FETAL LIVER, SIGNAL = 0.63; EXPRESSED IN BRAIN, SIGNAL = 2.9; EXPRESSED IN BONE MARROW, SIGNAL = 0.64; SWISSPROT HIT: P19836, EVALUE 4.50e+00; NT HIT: AF099033.1, EVALUE 1.00e-117; EST_HUMAN HIT: AI341249.1, EVALUE 1.00e-114
catccagcgtcggctgtccctccagctccccatcctccaccacgcctacctcccatccatcggaggcgtggacgccagctgtgtcagcccctgcgtcagccccaccgccagcccccgccacagacatgtgccaccctccttccgagtcatggtctcgggcctgtaagggtgggaggcctgggcccggggcctcccccgtgacagaaccacact

SEQ ID NO: 30282 - DNA, 211 bp, Homo sapiens
  MAP TO AC012241.4; EXPRESSED IN BONE MARROW, SIGNAL = 1.1; EXPRESSED IN LUNG, SIGNAL = 1.3; EXPRESSED IN PLACENTA, SIGNAL = 1.1; EXPRESSED IN ADULT LIVER, SIGNAL = 1.1; EXPRESSED IN BRAIN, SIGNAL = 1.1; EXPRESSED IN FETAL LIVER, SIGNAL = 0.9; NT HIT: AL163246.2, EVALUE 1.30e-01; SWISSPROT HIT: P13685, EVALUE 1.90e-01
tatgtgctcgggggctgcacaccaaccgagggagtgaaaagaaaaatcagatcaatcttgcatgaagcacttggtgaggagtggaggccagacgagctgggcagaaagaatgaagtacaggaagagtcaccgggacaggagccttctaggaagaagaggctgcagaaacgcaggggtgaggcgccgctccggcagggcaccaatgatccaa

SEQ ID NO: 30283 - DNA, 163 bp, Homo sapiens
  MAP TO AC019278.3; EXPRESSED IN BONE MARROW, SIGNAL = 0.48; EXPRESSED IN ADULT LIVER, SIGNAL = 0.57; EXPRESSED IN BRAIN, SIGNAL = 0.51; EXPRESSED IN PLACENTA, SIGNAL = 0.53; EST_HUMAN HIT: AI081565.1, EVALUE 7.00e-87; NT HIT: AE004338.1, EVALUE 9.50e-02; SWISSPROT HIT: P40609, EVALUE 8.90e+00
atgaggggacttagtaacagctgtagccttaacaccagtgtccatcctgactcacggatgccaactcccaccaattatttcaagtatgagatgttttacctttcatcacgtactaatgagagtcagtgtagccacagaaaaaggcttaagaaagttaacatcc

SEQ ID NO: 30284 - DNA, 248 bp, Homo sapiens; identical to SEQ ID NO: 18181
  MAP TO AL109847.3; EXPRESSED IN PLACENTA, SIGNAL = 1.4; EXPRESSED IN BRAIN, SIGNAL = 1.3; SWISSPROT HIT: Q9VLZ7, EVALUE 6.50e+00; EST_HUMAN HIT: AW387766.1, EVALUE 0.00e+00; NT HIT: AF038280.1, EVALUE 0.00e+00

SEQ ID NO: 30285 - DNA, 306 bp, Homo sapiens
  MAP TO AC007954.6; EXPRESSED IN BRAIN, SIGNAL = 1.9; EXPRESSED IN PLACENTA, SIGNAL = 1.8; EXPRESSED IN BONE MARROW, SIGNAL = 1.6; EXPRESSED IN FETAL LIVER, SIGNAL = 1.6; EXPRESSED IN LUNG, SIGNAL = 2.4; EXPRESSED IN ADULT LIVER, SIGNAL = 1.7; EXPRESSED IN HELA, SIGNAL = 1.7; NT HIT: AF022770.2, EVALUE 3.00e-03; SWISSPROT HIT: P49193, EVALUE 1.30e-01; EST_HUMAN HIT: AW292776.1, EVALUE 0.00e+00
cttcaatctcttcctcctcttcctcttcttcatcctcatcgtcactggaatcactgacctgcacagttatgtcagtgctagttacaggggtccagtcaaaataaactccaaagccaatgtcatagtcatcggtcgcaaactcccagcagacacgcttcccctctggatgagtaggtacccggatggtcaccacctcaccacgcttcaccaccagacggctgttcttctctttgcccagcttgcttttgaattccttcaccttggcaaaggtccagatgcatggaggagccatcagaggtggggaga

SEQ ID NO: 30286 - DNA, 228 bp, Homo sapiens
  MAP TO AC006427.13; EXPRESSED IN BRAIN, SIGNAL = 1.4; EXPRESSED IN PLACENTA, SIGNAL = 1.6; EXPRESSED IN LUNG, SIGNAL = 1.4; EXPRESSED IN BONE MARROW, SIGNAL = 1.3; EXPRESSED IN ADULT LIVER, SIGNAL = 2.6; EXPRESSED IN FETAL LIVER, SIGNAL = 2.8; NT HIT: AJ400878.1, EVALUE 5.40e-01; EST_HUMAN HIT: AW975297.1, EVALUE 2.00e-01; SWISSPROT HIT: O60503, EVALUE 1.10e+00
actgtggataccagaaggagtcctgggagagaggaaaagacaagaatgagaaacccatcctcacttctggtcccaaggggatatagtggaagtgcgagtagaccagcagccaaagagacagcctgtccttgtttcccctctctgggctctggctgggaaatagggaagggtgcatccctaaaaatccctaaaaatgggaaaggggagggtgcatccaagaaggtatag

SEQ ID NO: 30287 - DNA, 102 bp, Homo sapiens
  MAP TO AC007286.18; EXPRESSED IN PLACENTA, SIGNAL = 2.1; EXPRESSED IN BRAIN, SIGNAL = 1.4; EXPRESSED IN HELA, SIGNAL = 1.6; EXPRESSED IN LUNG, SIGNAL = 1.2; EXPRESSED IN BONE MARROW, SIGNAL = 1.4; EXPRESSED IN FETAL LIVER, SIGNAL = 1.7; NT HIT: AL112162.1, EVALUE 8.60e-01; EST_HUMAN HIT: AA579691.1, EVALUE 1.30e+00
tggcagatctgcaggaagtgttgcttataaaagcatggttgaagattgtacctgggctgatgatgcatagtgaagatttttgaggttttcccttcatccatt

SEQ ID NO: 30288 - DNA, 134 bp, Homo sapiens
  MAP TO AC007567.1; EXPRESSED IN FETAL LIVER, SIGNAL = 1.3; EXPRESSED IN PLACENTA, SIGNAL = 1.5; EXPRESSED IN BRAIN, SIGNAL = 1.4; NT HIT: L11068.1, EVALUE 1.90e-02
tttggtctgaccaattttaacataattgcatacaaaatctttcaaaagtttcatgtgtaaaattcttctttcaaacaaacttttatatgcccaattaacttggccgttggtatcaaaactgtagctcatattct

SEQ ID NO: 30289 - DNA, 132 bp, Homo sapiens
  MAP TO AC008166.1; EXPRESSED IN BRAIN, SIGNAL = 1.4; NT HIT: U16992.1, EVALUE 1.20e+00; EST_HUMAN HIT: AW363338.1, EVALUE 4.40e-01
atcactctttgaaacatgtgggccatgtagcactagtccagaaggatttagcatagcatctttaaaatcctgaataacatgagcataaatttctttggctatccgcatcaaaataatgctattctctacgct

SEQ ID NO: 30290 - DNA, 316 bp, Homo sapiens
  MAP TO AC009290.1; EXPRESSED IN PLACENTA, SIGNAL = 2.9; EXPRESSED IN BRAIN, SIGNAL = 1.6; EXPRESSED IN BONE MARROW, SIGNAL = 1.6; EXPRESSED IN ADULT LIVER, SIGNAL = 2.2; EXPRESSED IN FETAL LIVER, SIGNAL = 2.6; EXPRESSED IN HELA, SIGNAL = 1.2; NT HIT: AL163227.2, EVALUE 3.00e-34; EST_HUMAN HIT: AW088062.1, EVALUE 8.00e-42; SWISSPROT HIT: O14174, EVALUE 7.80e+00
attgactcacagtttcacatcactaggcaggcctcaggaaacttacaatcatggcagaaggcaaaggagaaacaggcaccttcttcacagggcagcaggacacactgaatgcatgcaggggaaatgtcagatgcttattaaaccatcagatctcgtgagactcactattaagagaacagcatggggaaaaccacccccactattcaattatctccacctgatccaccctcaaaatgtggggattatggggtttataattcgggatgagatttgggtagggacacagtctagtcatatcaaacccccaactaacatg

SEQ ID NO: 30291 - DNA, 77 bp, Homo sapiens
  MAP TO AL021707.2; EXPRESSED IN BRAIN, SIGNAL = 2.3; EXPRESSED IN HELA, SIGNAL = 1.4; EXPRESSED IN LUNG, SIGNAL = 1.9; EXPRESSED IN BONE MARROW, SIGNAL = 2.8; NT HIT: AB041350.1, EVALUE 6.10e-01; EST_HUMAN HIT: BF203624.1, EVALUE 9.00e-01
gaagcccaggtgggcctggatgcatcattaaagaaacacttttctttgctgaatgtaggctttgtaaagccaggtaa

SEQ ID NO: 30292 - DNA, 80 bp, Homo sapiens
  MAP TO AL022238.1; EXPRESSED IN FETAL LIVER, SIGNAL = 1.7; EXPRESSED IN BRAIN, SIGNAL = 1.7; EXPRESSED IN PLACENTA, SIGNAL = 1.8; EXPRESSED IN HELA, SIGNAL = 1.2; EXPRESSED IN LUNG, SIGNAL = 1.4; EXPRESSED IN BONE MARROW, SIGNAL = 1.7; EST_HUMAN HIT: BF697898.1, EVALUE 1.00e-37; NT HIT: gi11418164, EVALUE 6.00e-38; SWISSPROT HIT: P30566, EVALUE 3.00e-08
cttgccagagtgatctctcggcttgccgactttgctaaggaacgagccagtctacccacattaggtttcacacatttcca

SEQ ID NO: 30293 - DNA, 521 bp, Homo sapiens
  MAP TO AL022312.7; EXPRESSED IN PLACENTA, SIGNAL = 1.2; EXPRESSED IN BRAIN, SIGNAL = 1.9; EXPRESSED IN BONE MARROW, SIGNAL = 1.4; EXPRESSED IN LUNG, SIGNAL = 1.2; EXPRESSED IN FETAL LIVER, SIGNAL = 1.3; NT HIT: L34170.1, EVALUE 2.10e-02; EST_HUMAN HIT: BF359919.1, EVALUE 4.90e-01; SWISSPROT HIT: Q00839, EVALUE 1.90e+00
aggaaaacaaaattttagagactgtcagaaatgtgatggagctgtcaggagaacatgaaacagccacgtaccctgggaaacggaagtcacagctctgtttgttctgtgacagtgtgaaaactcacaaccttttcatcgagatgggtaacgaaaacatgagaaaactggaagtgctttggtttggctcagctgaggacattactccaagcccgcccaggctctcccctccggcctggattcgtttctgtgtcaacactcgcccagccttgcacagccgggcacacgggcgtctccctctgcagtggttccccgacttgtcggccatcttcgctggtggtgttttccttggtcactgtggttatttgaaagcgatgtcaaagcaaacactgctctctctccctgaaaacccctggcaggagctgcctttctcaccgtccctgtccttcgtctcctcctgtcccttccttcctgccgcagcctcttccctcaatcctactgaactccttcctgggagaggttag

SEQ ID NO: 30294 - DNA, 184 bp, Homo sapiens
  MAP TO AL022327.17; EXPRESSED IN FETAL LIVER, SIGNAL = 1.6; EXPRESSED IN ADULT LIVER, SIGNAL = 1.8; EXPRESSED IN PLACENTA, SIGNAL =   2; EXPRESSED IN BRAIN, SIGNAL = 1.4; EXPRESSED IN LUNG, SIGNAL = 1.4; SWISSPROT HIT: P34525, EVALUE 1.00e+00; NT HIT: AF029308.1, EVALUE 1.00e-32; EST_HUMAN HIT: AV683284.1, EVALUE 7.00e-47
aaggcattctaagtcacaggatgagataggaggtcggcacaagacacaggtcataaagaccgtgttgataaaacaggttgctgtaaagctggccacgacccaccaaaaccaagatgatgatgagagtgacctccggtcgtcctcactgctacactcccaccagcgccgtctcaaagaacataaa

SEQ ID NO: 30295 - DNA, 172 bp, Homo sapiens
  MAP TO AL022329.9; EXPRESSED IN BRAIN, SIGNAL = 1.5; EXPRESSED IN BONE MARROW, SIGNAL = 1.3; NT HIT: M24359.1, EVALUE 1.00e-01; EST_HUMAN HIT: BE795132.1, EVALUE 2.30e+00; SWISSPROT HIT: P30143, EVALUE 8.90e-02
tcgcttgaagccctaaaggtgtagcaggtgttaaccaggtcaagcctgcaggaaaagaggtttgtgagaaaggggctagacaagtggatggcagagaattgccaggggattggtgaagagagggtggctgccgagatggaaggagtccatgtgcagatacagaggcaggatt

SEQ ID NO: 30296 - DNA, 89 bp, Homo sapiens
  MAP TO AL031587.3; EXPRESSED IN BRAIN, SIGNAL = 1.4; NT HIT: AF045605.1, EVALUE 1.20e-02; SWISSPROT HIT: P14893, EVALUE 5.60e+00; EST_HUMAN HIT: AW847341.1, EVALUE 1.00e-03
tggcttctctgctgggctttcagccttgagagcaagacttggctcaaagtgagcctgacatggtggctggcacacagtgggtgctcaag

SEQ ID NO: 30297 - DNA, 123 bp, Homo sapiens
  MAP TO AL031588.1; EXPRESSED IN FETAL LIVER, SIGNAL = 1.7; EXPRESSED IN PLACENTA, SIGNAL = 1.5; EXPRESSED IN BRAIN, SIGNAL = 1.5; EXPRESSED IN BONE MARROW, SIGNAL = 1.5; EXPRESSED IN LUNG, SIGNAL = 1.3; NT HIT: AB008782.1, EVALUE 2.70e-01; SWISSPROT HIT: P41653, EVALUE 3.10e+00; EST_HUMAN HIT: W74091.1, EVALUE 1.60e+00
ttagactcatacttgcaggccttgatcagcataaaccaaggcacaaaagaagagtatagaccccaagtcttaggctgaggggctgcacaatccaccctgcacccaaacatagagatcccaggg

SEQ ID NO: 30298 - DNA, 125 bp, Homo sapiens
  MAP TO AL049649.4; EXPRESSED IN BRAIN, SIGNAL = 1.4; NT HIT: gi8393196, EVALUE 1.10e+00; EST_HUMAN HIT: BF666363.1, EVALUE 1.60e+00
ctgcatacacaagtgtgctactgtcgcccagggtaatctgagccctgattgctgggaaagaggcaaaatagattctggaagccttcactgtgatcctacttggaaggtatctgcactttggatct

SEQ ID NO: 30299 - DNA, 259 bp, Homo sapiens
  MAP TO AL049758.11; EXPRESSED IN BRAIN, SIGNAL = 2.1; NT HIT: AF200923.2, EVALUE 2.50e+00; EST_HUMAN HIT: BF184542.1, EVALUE 2.40e-01; SWISSPROT HIT: P44536, EVALUE 9.20e+00
atgttcaagttctaatgggctaatgaataatttgaaagcaataagagctcttcatcgaactaatatatttgctttcagagtccatgtttattttacctcagttgccaaagtacctaatagtatcctcattctactagtggtggtcaccatgccaaggaggactagagaaggcatttatgttcctattagacaatctgcaggtcgtgataaacaatacaccaaggtctctctggaaagagtccaggaggtgtggtctata

SEQ ID NO: 30300 - DNA, 156 bp, Homo sapiens
  MAP TO AL079295.1; EXPRESSED IN BRAIN, SIGNAL = 2.5; EXPRESSED IN HELA, SIGNAL = 1.5; EXPRESSED IN LUNG, SIGNAL = 2.1; EXPRESSED IN BONE MARROW, SIGNAL = 2.4; EXPRESSED IN FETAL LIVER, SIGNAL =   2; NT HIT: U07561.1, EVALUE 2.30e-02; SWISSPROT HIT: Q57761, EVALUE 3.00e+00; EST_HUMAN HIT: BE676399.1, EVALUE 1.00e-04
ctacttaatagtaacaacaaaactaatatatttgagtgccagatgcataaaactgaatattatggtttgtccattaattgttcttacaagaaaaaaatggtgctccatgaaaaaagcagctagttcagcttgcaactcaatcacacagtacttttc

SEQ ID NO: 30301 - DNA, 175 bp, Homo sapiens
  MAP TO AP000041.1; EXPRESSED IN HELA, SIGNAL = 1.3; EXPRESSED IN PLACENTA, SIGNAL = 1.8; EXPRESSED IN BRAIN, SIGNAL = 1.5; EXPRESSED IN BONE MARROW, SIGNAL = 1.9; EXPRESSED IN LUNG, SIGNAL = 1.5; EXPRESSED IN FETAL LIVER, SIGNAL = 2.6; EST_HUMAN HIT: BF696115.1, EVALUE 1.50e-01; SWISSPROT HIT: P19524, EVALUE 8.90e-02; NT HIT: AJ243213.1, EVALUE 4.10e-01
aaacacttatgaggtgtgtgttggagcctctcaaccagttttctaagtcgcttaactgttcttgcatattttttattctctttatctttctgagatgcattctgggtgaattcttgagcatcgttaactaattcccttctcagctgcatcaagtatggagcttgattttatgtct

SEQ ID NO: 30302 - DNA, 323 bp, Homo sapiens
  MAP TO AP000111.1; EXPRESSED IN PLACENTA, SIGNAL = 1.6; EXPRESSED IN BRAIN, SIGNAL = 1.4; EXPRESSED IN BONE MARROW, SIGNAL = 1.7; EXPRESSED IN LUNG, SIGNAL = 1.4; EXPRESSED IN FETAL LIVER, SIGNAL =   2; EXPRESSED IN ADULT LIVER, SIGNAL = 1.9; SWISSPROT HIT: Q09868, EVALUE 8.20e+00; NT HIT: AF302773.1, EVALUE 2.00e-01; EST_HUMAN HIT: T19756.1, EVALUE 3.00e-01
atgagtctcccttagctctgaaagaaagaggataaaaaccaaatacaagaataataaaaaccacctgtccaagatgaactggagaaagggtgctaatctccctgcgacaactcctacaactgtatttgatcaggatgataagaaaagttttaactcatgcctcaagcagagccacaagacctgccttttttgatgaccttgaattctacaacacaggctccaaacctcacatcttgtcaactctcaccatgagaaaagtaggaaacactctctcacgttcccaagtactcaccataccccccaaaataagtaaaagcttactt

SEQ ID NO: 30303 - DNA, 202 bp, Homo sapiens
  MAP TO AP000347.1; EXPRESSED IN FETAL LIVER, SIGNAL = 3.4; EXPRESSED IN BRAIN, SIGNAL = 1.7; EXPRESSED IN BONE MARROW, SIGNAL = 1.5; NT HIT: AJ132984.1, EVALUE 4.80e-01; EST_HUMAN HIT: BF039001.1, EVALUE 7.10e-01; SWISSPROT HIT: O08575, EVALUE 2.90e+00
atggaccaatacttcccaacacccttccagcaagcagctgtgccccgcccctccccacatgagtcactcaacttcagtcctgcacatggatgcctttgaccatggggtcatggctttggtctcctgccataggggcagtgagaggaacaatggtggtctgggaaggaggatcctagactgggtgtcccacaagaccaggctg

SEQ ID NO: 30304 - DNA, 164 bp, Homo sapiens; identical to SEQ ID NO: 26605
  MAP TO Z97055.1; EXPRESSED IN BRAIN, SIGNAL = 3.9; NT HIT: gi7657632, EVALUE 1.00e-87; EST_HUMAN HIT: AI075933.1, EVALUE 2.00e-87; SWISSPROT HIT: Q46904, EVALUE 3.90e+00

SEQ ID NO: 30305 - DNA, 149 bp, Homo sapiens
  MAP TO Z98884.11; EXPRESSED IN HELA, SIGNAL = 1.7; EXPRESSED IN BRAIN, SIGNAL = 1.5; NT HIT: Z14314.1, EVALUE 1.30e+00; EST_HUMAN HIT: AI650919.1, EVALUE 1.00e-78; SWISSPROT HIT: P34317, EVALUE 6.90e+00
taaagcaaggagcgggagttctgggaagcgggagattgccgttgtattcagggtgatccaggaactcttaggaagtctaattggaaacagcgaccagaaggagggcagggggtgagccacaccggtatctgaggggtggcaagtgtctg

SEQ ID NO: 30306 - DNA, 586 bp, Homo sapiens; identical to SEQ ID NO: 13720
  MAP TO AC007462.2; EXPRESSED IN BRAIN, SIGNAL = 1.4; NT HIT: D16583.1, EVALUE 2.00e-05; EST_HUMAN HIT: AA938388.1, EVALUE 2.00e-03

SEQ ID NO: 30307 - DNA, 581 bp, Homo sapiens; identical to SEQ ID NO: 13768
  MAP TO AC008283.3; EXPRESSED IN BRAIN, SIGNAL = 1.4; SWISSPROT HIT: P13806, EVALUE 1.00e-08; NT HIT: AF083824.1, EVALUE 0.00e+00; EST_HUMAN HIT: AW051755.1, EVALUE 8.00e-34

SEQ ID NO: 30308 - DNA, 581 bp, Homo sapiens; identical to SEQ ID NO: 13717
  MAP TO Z83844.5; EXPRESSED IN BRAIN, SIGNAL = 1.5; EXPRESSED IN BONE MARROW, SIGNAL = 1.4; NT HIT: AF118569.1, EVALUE 9.30e-02; EST_HUMAN HIT: BE382519.1, EVALUE 3.00e-98; SWISSPROT HIT: P20631, EVALUE 5.10e-02

SEQ ID NO: 30309 - DNA, 163 bp, Homo sapiens
  MAP TO AP000352.2; EXPRESSED IN LUNG, SIGNAL = 1.4; EXPRESSED IN BONE MARROW, SIGNAL = 1.5; EXPRESSED IN ADULT LIVER, SIGNAL = 1.8; EXPRESSED IN FETAL LIVER, SIGNAL = 1.8; EXPRESSED IN BRAIN, SIGNAL = 1.5; EXPRESSED IN PLACENTA, SIGNAL = 1.3; EXPRESSED IN HELA, SIGNAL = 1.5; NT HIT: gi11417862, EVALUE 4.00e-87; EST_HUMAN HIT: AW816275.1, EVALUE 7.00e-87; SWISSPROT HIT: Q9Y6J0, EVALUE 5.00e-26
gtgcgagtactccagaaggaactggctgcatccacctctgaagacacgcacccttacaaggaggagctggagacagccttggagcagtgcttctactgcctgtacagcttccccagcaagaagagtaaggccaggtacctggaggaacactcggcccagcagg

SEQ ID NO: 30310 - DNA, 185 bp, Homo sapiens
  MAP TO AP000350.1; EXPRESSED IN HELA, SIGNAL = 1.3; EXPRESSED IN PLACENTA, SIGNAL = 1.8; EXPRESSED IN BRAIN, SIGNAL = 1.5; EXPRESSED IN LUNG, SIGNAL = 1.4; EXPRESSED IN BONE MARROW, SIGNAL = 2.3; NT HIT: AF132289.1, EVALUE 4.00e-04; EST_HUMAN HIT: BF446549.1, EVALUE 1.00e-100; SWISSPROT HIT: P02463, EVALUE 1.20e-01
ccagcaggtccacgaggatggagttgcccagcagcagcgagaagcccatgagcgcccaaggcaggaacggtgcctggaaagtgagcaggccgaagaagttgaccctcacccgagggctgcggcggctccacacgtacaccagcatggccatgagggcctggcccaggaagaacaggctgcccagg

SEQ ID NO: 30311 - DNA, 576 bp, Homo sapiens
  MAP TO AC008151.1; EXPRESSED IN LUNG, SIGNAL = 1.5; EXPRESSED IN BONE MARROW, SIGNAL = 1.7; EXPRESSED IN ADULT LIVER, SIGNAL = 2.9; EXPRESSED IN FETAL LIVER, SIGNAL = 1.6; EXPRESSED IN BRAIN, SIGNAL = 1.7; EXPRESSED IN HELA, SIGNAL = 1.5; EXPRESSED IN PLACENTA, SIGNAL = 1.9; NT HIT: AL163285.2, EVALUE 3.00e-14; EST_HUMAN HIT: BE064410.1, EVALUE 6.00e-13; SWISSPROT HIT: P14350, EVALUE 3.30e-01
tcatggaaggggcagcgttttgttcttggtggaatagacatttactctggttatgggtttgccttccttgcacacaacacttttgctgaaactaccacccatggaattacagaatgcttatccactgtcatggtattctacatagcatttgcttctgtccaaggaactcacttcacagcaaaagaagtacagcactgggcctgcgttcatggaatttactgaagttaccatattccccaccatcctaaagcaggtggcatatgtagaacagtgtgatggccttttgcagactaatttacagcatcagctacgttgcaataccttatagggtgggggcaaggttctccagaagcctgtatagctctgagtctgcatccagcatatggtgctctttctcccatagctaggattcaaggatccagaaaccaagaggtggaaatgggggtggcaccactcactattacccttagcaatccactagcaaaggttttacttcctgtacctgtgactttatactctactctcctagaagttttagtttcagagggagaatgcttccaccaggaatcacaacaa

SEQ ID NO: 30312 - DNA, 119 bp, Homo sapiens
  MAP TO AB016897.1; EXPRESSED IN LUNG, SIGNAL = 1.4; EXPRESSED IN BONE MARROW, SIGNAL = 1.7; EXPRESSED IN ADULT LIVER, SIGNAL = 2.3; EXPRESSED IN FETAL LIVER, SIGNAL = 3.3; EXPRESSED IN BRAIN, SIGNAL = 2.3; EXPRESSED IN PLACENTA, SIGNAL = 2.5; EST_HUMAN HIT: AV703260.1, EVALUE 4.00e-13; SWISSPROT HIT: P56699, EVALUE 3.10e+00; NT HIT: AF008191.1, EVALUE 2.00e-14
tgcatattcctaagggaaataagccaatccccaaagactacaaactgcatgattccaattgtatgacattctggaaaaggcaaaactatgaagacagtcaaaagtggttgccagggctt

SEQ ID NO: 30313 - DNA, 373 bp, Homo sapiens
  MAP TO AC004624.6; EXPRESSED IN FETAL LIVER, SIGNAL = 1.7; EXPRESSED IN HELA, SIGNAL = 1.5; EXPRESSED IN BRAIN, SIGNAL = 2.1; EXPRESSED IN PLACENTA, SIGNAL = 1.5; EXPRESSED IN LUNG, SIGNAL = 1.7; EXPRESSED IN BONE MARROW, SIGNAL = 1.5; EST_HUMAN HIT: AA485286.1, EVALUE 3.00e-60; SWISSPROT HIT: P35942, EVALUE 1.50e+00; NT HIT: AL163300.2, EVALUE 3.00e-59
gattgtgcggtctggctccagccaatggagacaggacacagtagcagggacaaactgcataaggaataaaaattgcttccctcctttgttcggatgtgctctcgccattattacatctgcgatgagcaccctttctgcagaaagtaaagattgccttgctgagagaattaaatttatgttcaagtgctatttctttgtggcactacagaagatacatttacatataacaacgtgggaggtgataacacacatggtgctcttggccagtgcccttggagagaccaccatttcaataaagatgacagccagggaaggtcacaggcttggcctgcaccccatcagaattcccaccgactcactcatggaacctatt

SEQ ID NO: 30314 - DNA, 199 bp, Homo sapiens
  MAP TO AC004624.6; EXPRESSED IN BRAIN, SIGNAL = 1.4; EST_HUMAN HIT: BF348662.1, EVALUE 7.00e-01; NT HIT: gi6679502, EVALUE 4.70e-01; SWISSPROT HIT: Q05900, EVALUE 3.80e+00
tcaatcggtctagcgcgtttccttctttgaaacgggatgaagctgagcaagagagggaagaagacttgcctggggccacagagagaaaattagtgacagaagcagaccagctaggatctgtgcctctccaactgtgagaacaggcaccaagtcaggctgtaggtacagaaggccaaggcagagaaggacaggcccatcc

SEQ ID NO: 30315 - DNA, 511 bp, Homo sapiens
  MAP TO AC006427.13; EXPRESSED IN HELA, SIGNAL = 1.6; EXPRESSED IN BRAIN, SIGNAL = 2.9; EXPRESSED IN PLACENTA, SIGNAL = 1.9; EXPRESSED IN BONE MARROW, SIGNAL = 2.5; EXPRESSED IN LUNG, SIGNAL = 1.8; EXPRESSED IN FETAL LIVER, SIGNAL = 2.7; EXPRESSED IN ADULT LIVER, SIGNAL = 2.6; NT HIT: AL163268.2, EVALUE 1.00e-12; EST_HUMAN HIT: AI073378.1, EVALUE 1.00e-10; SWISSPROT HIT: Q91836, EVALUE 1.90e+00
gaaaagtttgcaacagccactgtgaagaactggaaactaagttcaccaccaaagagccgtactgacactgcccagtgccaggttgatcagaagccttcagtttctgatggcaccagtcagtctccaggcaaaattgtctcttctgagagtcttgggactgttctttttttcacaagcaggcatttgagcattttgaaaatgcagaagtatatatatatatatcactacacatctctgggtagtgagactatggaggtgttactttgtattactattaggttggtcaaaagtaattgtggttttcatcgttactttcaatggcgaaaactgcaattatttttgcaccaacctaatataaatgtccctaagtcttctcctttccagcttaacatctcaacctacaatcattcctcaaaaagcaatcattttgccatcttggcagttttctcttggaaaaagataaattacaacaaaaagttaataattcttcacattactttatgtgatggtt

SEQ ID NO: 30316 - DNA, 170 bp, Homo sapiens
  MAP TO AC007253.2; EXPRESSED IN PLACENTA, SIGNAL = 6.3; EXPRESSED IN LUNG, SIGNAL =   2; EXPRESSED IN BONE MARROW, SIGNAL = 1.7; EXPRESSED IN FETAL LIVER, SIGNAL = 1.3; EXPRESSED IN ADULT LIVER, SIGNAL = 1.9; EXPRESSED IN HELA, SIGNAL = 2.3; EXPRESSED IN BRAIN, SIGNAL = 1.4; NT HIT: gi11418274, EVALUE 1.00e-35; EST_HUMAN HIT: BE463763.1, EVALUE 1.00e-35; SWISSPROT HIT: P33408, EVALUE 8.80e+00
ctgaacgtttgattatgggtcaagtcacaaggggaccagaactgcctatcatgaactgggtgctttctgacccattagccataaagtgggtcatgaacagcaatattccatcatcaagtggaaatggtatatatgtggtcaggcaccagcaggtcctgagggcacaagta

SEQ ID NO: 30317 - DNA, 235 bp, Homo sapiens
  MAP TO AC007282.2; EXPRESSED IN HELA, SIGNAL = 1.5; EXPRESSED IN PLACENTA, SIGNAL =  66; EXPRESSED IN BRAIN, SIGNAL = 1.8; EXPRESSED IN LUNG, SIGNAL = 1.6; EXPRESSED IN FETAL LIVER, SIGNAL = 1.4; EXPRESSED IN ADULT LIVER, SIGNAL = 1.8; NT HIT: AJ271735.1, EVALUE 3.00e-15; EST_HUMAN HIT: AV729795.1, EVALUE 4.00e-12; SWISSPROT HIT: P08163, EVALUE 1.10e+00
tcactgccctgaagagaaggacacagcctggctggattcaacacctggtgactgaagagcccttggtatccttgagtgaacatccagctgggcagtggtggctgcaggcctggggcaagacccagtgctgtgctgagcttcaggtctgacccagtgcagtcctagtggtggtggcaacaggggtaattgtgtcacccctcgcccagctccaggcagctcagcatggaaagagaaa

SEQ ID NO: 30318 - DNA, 286 bp, Homo sapiens
  MAP TO AC007564.9; EXPRESSED IN BRAIN, SIGNAL = 1.6; SWISSPROT HIT: P24219, EVALUE 2.20e+00; EST_HUMAN HIT: BE379202.1, EVALUE 1.00e+00; NT HIT: X16635.1, EVALUE 1.80e-01
aaaactggcaaaaccagcatctgtcacaaacacacaccctcttttcatagcacttttgaccatagatactagcatcttcctccctactaaaattggaagttctggaagagagcttagcactctgccttttcctgtggtggcaacactccatgctataactgccaggaagcctggcatcaagaccattctggaatattctagcacacaagacactaaatcagtgaaggtcagggctggaggaatttgccttgaaaatggaggcccctctctatcctcctacactaat

SEQ ID NO: 30319 - DNA, 168 bp, Homo sapiens
  MAP TO AC007567.1; EXPRESSED IN PLACENTA, SIGNAL = 1.6; EXPRESSED IN BRAIN, SIGNAL = 1.4; EXPRESSED IN BONE MARROW, SIGNAL = 1.5; EXPRESSED IN LUNG, SIGNAL = 1.5; EXPRESSED IN FETAL LIVER, SIGNAL = 1.6; EXPRESSED IN HELA, SIGNAL = 1.2; NT HIT: D63480.1, EVALUE 1.50e+00; EST_HUMAN HIT: BF243461.1, EVALUE 2.30e+00; SWISSPROT HIT: P21472, EVALUE 6.70e+00
gcctaaggacagcattaagtccccagcactcaatcaaactgaaaatcaaatagagctacagaagactgagatttctctcgatgagagtaatgtactctgcacactgcacaaagaaaaaccaccgctttgcactcttgatattgacgtcaattctttgactcagtagga

SEQ ID NO: 30320 - DNA, 114 bp, Homo sapiens
  MAP TO AC007900.1; EXPRESSED IN FETAL LIVER, SIGNAL = 1.8; EXPRESSED IN PLACENTA, SIGNAL = 1.5; EXPRESSED IN BRAIN, SIGNAL = 1.5; EXPRESSED IN BONE MARROW, SIGNAL = 1.5; NT HIT: gi11426423, EVALUE 5.00e-58; EST_HUMAN HIT: AI984454.1, EVALUE 5.70e+00; SWISSPROT HIT: P11029, EVALUE 2.00e-16
ctgcaggttctcaatgcaaaattgatgtccatacatgtcaatagctgataggaagatagactctacttggttatggcgaagctcatatgatggcaaatgggaggcaataagaac

SEQ ID NO: 30321 - DNA, 223 bp, Homo sapiens
  MAP TO AC008174.2; EXPRESSED IN LUNG, SIGNAL = 1.6; EXPRESSED IN FETAL LIVER, SIGNAL = 1.8; EXPRESSED IN BRAIN, SIGNAL = 1.8; EXPRESSED IN PLACENTA, SIGNAL = 1.4; EXPRESSED IN HELA, SIGNAL = 1.4; NT HIT: gi11497621, EVALUE 5.30e-01; EST_HUMAN HIT: AI460115.1, EVALUE 1.00e-79; SWISSPROT HIT: P25931, EVALUE 1.30e+00
tactgaattttcctctcaattttataaatcttttgtaacattaaacaaatgatcaggaacaagaagactaagcaataagtgagaaaagaaatgatggaatagatgtgaggcttccacagcaaactcctgtaaaacctgcagttaaacctgagcaagaggaatgtgacatatgtgtctttgctctttatttggatctgtgtgtatgctcttggagcagtggcga

SEQ ID NO: 30322 - DNA, 204 bp, Homo sapiens
  MAP TO AC009313.2; EXPRESSED IN BRAIN, SIGNAL =   2; NT HIT: U82828.1, EVALUE 2.00e-15; EST_HUMAN HIT: AW750522.1, EVALUE 1.00e-14; SWISSPROT HIT: P14530, EVALUE 7.50e-01
tcctgttcatcattaattatgcatggttgagaagatgtaagaaaaacaaaatagtatgatttagcacaagcttgtccaacccgcagccttgatcccacgtgcagcccaggacggctttgaatgtggcccaacacaaattcatactttcttaaaacataatgtgattttgggggatttttgttgttgttgttctcagctatcatt

SEQ ID NO: 30323 - DNA, 76 bp, Homo sapiens
  MAP TO AL021392.5; EXPRESSED IN BRAIN, SIGNAL = 2.5; NT HIT: U32721.1, EVALUE 2.40e+00; EST_HUMAN HIT: AI150836.1, EVALUE 8.90e-01; SWISSPROT HIT: Q12986, EVALUE 7.40e+00
gttggttaatgtgagggttagggccaatccagattctgtgtgggaggggactaaacaagggtggaaacaccaggag

SEQ ID NO: 30324 - DNA, 138 bp, Homo sapiens
  MAP TO AL022238.1; EXPRESSED IN PLACENTA, SIGNAL = 1.2; EXPRESSED IN HELA, SIGNAL = 1.5; EXPRESSED IN LUNG, SIGNAL = 1.2; EXPRESSED IN ADULT LIVER, SIGNAL = 1.5; EXPRESSED IN FETAL LIVER, SIGNAL = 1.6; EXPRESSED IN BRAIN, SIGNAL = 1.3; NT HIT: gi10946623, EVALUE 3.10e-01; EST_HUMAN HIT: AI990870.1, EVALUE 4.60e-01
aacccacagcaggtcttgatgaaacatcttataagactattttgaagtacagaacttggtattcattttccttgtgaatcctatgattgcctgtggaggaaggtcagagtcatgtgtatgttgaattacaagaaatat

SEQ ID NO: 30325 - DNA, 101 bp, Homo sapiens
  MAP TO AL022318.2; EXPRESSED IN BRAIN, SIGNAL = 1.5; EXPRESSED IN LUNG, SIGNAL = 1.3; EXPRESSED IN BONE MARROW, SIGNAL =   2; EXPRESSED IN ADULT LIVER, SIGNAL = 1.6; NT HIT: gi11421332, EVALUE 5.50e-02; EST_HUMAN HIT: AI968642.1, EVALUE 8.00e-02; SWISSPROT HIT: Q9Z136, EVALUE 9.40e+00
acacctgtcttctcacctgccccctggtctcctgccttccagattcctgtggcccacagggagcaaagtgtggccagctctacatccccattgtcactcca

SEQ ID NO: 30326 - DNA, 120 bp, Homo sapiens
  MAP TO AL022318.2; EXPRESSED IN LUNG, SIGNAL = 1.8; EXPRESSED IN BONE MARROW, SIGNAL = 1.4; EXPRESSED IN ADULT LIVER, SIGNAL = 2.5; EXPRESSED IN FETAL LIVER, SIGNAL = 3.1; EXPRESSED IN BRAIN, SIGNAL = 1.6; EXPRESSED IN HELA, SIGNAL = 2.3; EXPRESSED IN PLACENTA, SIGNAL = 2.4; NT HIT: AB026898.1, EVALUE 4.00e-31; EST_HUMAN HIT: AA807097.1, EVALUE 1.00e-34; SWISSPROT HIT: O15055, EVALUE 5.40e+00
gtaaaaagtaaagacacaagacaaagagataaagcgaaaacagctgggcccgggggaccactaccatcaagacacggagatgggtagtggccccaaatggttgcgtgcactgttatttat

SEQ ID NO: 30327 - DNA, 127 bp, Homo sapiens
  MAP TO AL023553.5; EXPRESSED IN BONE MARROW, SIGNAL = 1.5; EXPRESSED IN BRAIN, SIGNAL = 3.6; NT HIT: AF020439.1, EVALUE 7.20e-02; EST_HUMAN HIT: BE388638.1, EVALUE 1.70e+00; SWISSPROT HIT: P51136, EVALUE 7.00e+00
acagtaggtcaatagcaatacagagcctggacacaggactcctgccttcccactggaaggctccagatcatactgattcaaattctggctcagactttgattggtgtgtgtccttgagtgagtgatt

SEQ ID NO: 30328 - DNA, 205 bp, Homo sapiens
  MAP TO AL034406.1; EXPRESSED IN BRAIN, SIGNAL = 1.4; NT HIT: gi9845282, EVALUE 1.20e-01; EST_HUMAN HIT: BF677973.1, EVALUE 1.80e-01; SWISSPROT HIT: Q59170, EVALUE 7.50e-01
gttgctccatcatcactactgcattcagtcacaccacaccagcagtccaggggccctgggaacctgcccaaatgcatggcccaccactgccactaccagcatccgaacaagctacctggaggcccacgaactggcccttcaggactcatcaacactggtgcctatgtaagctgctctggggactaagaacaggcagacacagcct

SEQ ID NO: 30329 - DNA, 101 bp, Homo sapiens
  MAP TO AL035682.16; EXPRESSED IN LUNG, SIGNAL = 1.3; EXPRESSED IN BONE MARROW, SIGNAL = 1.4; EXPRESSED IN BRAIN, SIGNAL = 1.4; NT HIT: AL161531.2, EVALUE 8.50e-01; EST_HUMAN HIT: BE886846.1, EVALUE 3.20e-01; SWISSPROT HIT: P35456, EVALUE 4.20e+00
caggtaatgaatataacaggatgaaggtgtagaagaaatcagattggccatgcattgataacagctgaagcctcgtggtgggtatgtaggggtaccttgta

SEQ ID NO: 30330 - DNA, 331 bp, Homo sapiens
  MAP TO AL035701.13; EXPRESSED IN BRAIN, SIGNAL = 7.5; SWISSPROT HIT: P08548, EVALUE 2.00e-03; EST_HUMAN HIT: AA016177.1, EVALUE 3.00e-29; NT HIT: AJ010770.1, EVALUE 1.00e-05
caatatataatatcaaaatataagatttgaatcgaaagcagtactgagagggaagtttatagcactaacggcttacataaaatgaggaaaggtcttaaatcaacaaccttagttcatacctcaagggactagaaaagaagagcaagttaaaggaagcaaaaggaagaaaataataaacataacaatagaaaccaatgaaattgaaattagaaaaacagtagagaaaattaataaaacaaaaatctactactttaaaaaattagtaatattgataaacctatatagcaagactgacaaaaaaacagccacaatcacaatatcagaaatgaaa

SEQ ID NO: 30331 - DNA, 182 bp, Homo sapiens
  MAP TO AP000350.1; EXPRESSED IN FETAL LIVER, SIGNAL = 2.2; EXPRESSED IN ADULT LIVER, SIGNAL = 2.2; EXPRESSED IN PLACENTA, SIGNAL = 1.4; EXPRESSED IN BRAIN, SIGNAL = 1.5; EXPRESSED IN HELA, SIGNAL = 1.5; EXPRESSED IN LUNG, SIGNAL = 2.1; EST_HUMAN HIT: AW193880.1, EVALUE 8.00e-22; NT HIT: AF240786.1, EVALUE 1.00e-93; SWISSPROT HIT: P23960, EVALUE 7.00e-10
ttagtatatttctaacaagctcccaggcaaggctgctactgctgctgatctaatgaccacagtttgaggctggacagagtggctcacacctgtaatcccaacactttgggaggacaaggcaggagggtctcttgagggtagaactttgagaccagcctgggcaacacagcaggacctcgtct

SEQ ID NO: 30332 - DNA, 196 bp, Homo sapiens
  MAP TO Z95114.19; EXPRESSED IN LUNG, SIGNAL = 1.7; EXPRESSED IN FETAL LIVER, SIGNAL = 1.4; EXPRESSED IN ADULT LIVER, SIGNAL = 2.1; EXPRESSED IN HELA, SIGNAL = 1.4; EXPRESSED IN PLACENTA, SIGNAL = 1.7; EXPRESSED IN BRAIN, SIGNAL = 1.7; NT HIT: AL163300.2, EVALUE 7.00e-03; EST_HUMAN HIT: BF365110.1, EVALUE 1.10e-02; SWISSPROT HIT: P44680, EVALUE 2.90e+00
accagtgaccccccgtccctcccctcttgtggccgtgctttcccatcctgcttttctcaacattgtgggtttatgtctctttttaaaaaagtattcctcttccagaagtttcagtgaggtttcaggagggagcaaaattagacgcatatgtgcaatctgtcgttgtaacctgaactctaccctgcaattctgaaat

SEQ ID NO: 30333 - DNA, 89 bp, Homo sapiens
  MAP TO Z95114.19; EXPRESSED IN BRAIN, SIGNAL = 1.5; EXPRESSED IN LUNG, SIGNAL = 1.5; EXPRESSED IN BONE MARROW, SIGNAL = 1.8; NT HIT: gi11434968, EVALUE 7.30e-01; EST_HUMAN HIT: AW025400.1, EVALUE 2.80e-01
caataaatattcactgagctttaaagaaatcaatctctcatttcccatagcatacatccctgctgctgccatgttcttttttgccatct

SEQ ID NO: 30334 - DNA, 576 bp, Homo sapiens; identical to SEQ ID NO: 13736
  MAP TO AC008272.1; EXPRESSED IN BRAIN, SIGNAL = 1.4; EXPRESSED IN PLACENTA, SIGNAL = 1.2; EXPRESSED IN LUNG, SIGNAL = 2.4; EXPRESSED IN BONE MARROW, SIGNAL = 1.3; EXPRESSED IN ADULT LIVER, SIGNAL = 1.6; EST_HUMAN HIT: BE010985.1, EVALUE 1.40e-01; NT HIT: gi11466872, EVALUE 9.20e-02; SWISSPROT HIT: O51878, EVALUE 2.50e-01

SEQ ID NO: 30335 - DNA, 124 bp, Homo sapiens
  MAP TO AC004896.1; EXPRESSED IN ADULT LIVER, SIGNAL = 0.83; EXPRESSED IN PLACENTA, SIGNAL = 0.67; EXPRESSED IN LUNG, SIGNAL = 0.83; EXPRESSED IN BRAIN, SIGNAL = 0.65; EXPRESSED IN FETAL LIVER, SIGNAL = 0.75; EXPRESSED IN BONE MARROW, SIGNAL = 0.78; NT HIT: M36668.1, EVALUE 2.80e-01; SWISSPROT HIT: P26914, EVALUE 4.10e+00
tctttgacattcaagaatgcttggaggcagtgcatattcactgcgtgcatagtctgtgctgggcgagcctcagatttaaactggtggatgaaatgtggcaccacctcctgccagagatgcagag

SEQ ID NO: 30336 - DNA, 117 bp, Homo sapiens
  MAP TO AC004055.1; EXPRESSED IN PLACENTA, SIGNAL = 0.63; EXPRESSED IN BONE MARROW, SIGNAL = 0.63; EXPRESSED IN ADULT LIVER, SIGNAL = 0.67; EXPRESSED IN FETAL LIVER, SIGNAL = 0.74; EXPRESSED IN LUNG, SIGNAL = 0.57; EXPRESSED IN BRAIN, SIGNAL = 0.83; NT HIT: AL163202.2, EVALUE 3.00e-13; EST_HUMAN HIT: AA595527.1, EVALUE 1.00e-19; SWISSPROT HIT: P11369, EVALUE 2.00e-04
ctccagttccatccgttttgtcacaaatgacagaatttccttctttttaaggttgaatagtattccattgtgtttatacaccacattttctttatccattaatatgttgatggatac

SEQ ID NO: 30337 - DNA, 214 bp, Homo sapiens
  MAP TO AC004616.1; EXPRESSED IN PLACENTA, SIGNAL = 0.63; EXPRESSED IN BRAIN, SIGNAL = 0.95; EXPRESSED IN ADULT LIVER, SIGNAL = 0.86; EXPRESSED IN LUNG, SIGNAL = 0.88; EXPRESSED IN FETAL LIVER, SIGNAL = 0.88; EXPRESSED IN BONE MARROW, SIGNAL = 1.1; EST_HUMAN HIT: BE295758.1, EVALUE 9.00e-50; NT HIT: AF245505.1, EVALUE 2.00e-31; SWISSPROT HIT: P28159, EVALUE 5.20e-01
ccactcgcggatggccccaaagcaggatcagcaccacggagagggccccccagtgcgcgcgcttgggcatcttgtcggggtgcctgattctcggatacctgaggtagaacaacgaagagatgagcttattcacaggtagcaccgacgaactgtgggcaatttttaaatttgaattgtgcatcagggtttcaagcttcccaggacttcacacgat

SEQ ID NO: 30338 - DNA, 75 bp, Homo sapiens
  MAP TO AC005274.1; EXPRESSED IN PLACENTA, SIGNAL = 0.95; EXPRESSED IN LUNG, SIGNAL = 0.96; EXPRESSED IN FETAL LIVER, SIGNAL = 0.73; EXPRESSED IN BRAIN, SIGNAL = 0.83; EXPRESSED IN BONE MARROW, SIGNAL = 0.79; EXPRESSED IN ADULT LIVER, SIGNAL = 0.86; NT HIT: AP000063.1, EVALUE 3.70e-02
tttttctccatcttcaggtcctcgttgcatctcactgaaattgttcccatctctgtgtaactggcctctcacttc

SEQ ID NO: 30339 - DNA, 127 bp, Homo sapiens
  MAP TO AC004048.1; EXPRESSED IN LUNG, SIGNAL = 0.71; EXPRESSED IN BRAIN, SIGNAL = 0.89; EXPRESSED IN BONE MARROW, SIGNAL = 0.94; EXPRESSED IN PLACENTA, SIGNAL =   1; EXPRESSED IN FETAL LIVER, SIGNAL = 0.97; EXPRESSED IN ADULT LIVER, SIGNAL = 0.89; EST_HUMAN HIT: BF382758.1, EVALUE 1.10e-01; SWISSPROT HIT: O97703, EVALUE 7.00e+00; NT HIT: gi10946795, EVALUE 1.10e+00
tggacaacaccatgacatattctagtaaaactactgaccttgaaaaaaacaacctttggccagtgggcaaaaacatcatgtcacttacaaagaacatttcaacagacacgttttatatcagaagaca

SEQ ID NO: 30340 - DNA, 82 bp, Homo sapiens
  MAP TO AC004083.1; EXPRESSED IN LUNG, SIGNAL = 0.75; EXPRESSED IN BRAIN, SIGNAL = 0.82; EXPRESSED IN BONE MARROW, SIGNAL = 0.7; EXPRESSED IN ADULT LIVER, SIGNAL = 0.79; EXPRESSED IN PLACENTA, SIGNAL = 1.2; NT HIT: AJ224639.1, EVALUE 2.60e+00; SWISSPROT HIT: O60779, EVALUE 3.30e+00
cattgcttggtatttctgccttccagaggcagccctttggattcatcatatagataagttctgtcatatcgatgtctttctc

SEQ ID NO: 30341 - DNA, 247 bp, Homo sapiens
  MAP TO AC004805.1; EXPRESSED IN LUNG, SIGNAL = 1.2; EXPRESSED IN FETAL LIVER, SIGNAL =   1; EXPRESSED IN BRAIN, SIGNAL = 0.91; EXPRESSED IN BONE MARROW, SIGNAL = 0.88; EXPRESSED IN PLACENTA, SIGNAL = 1.2; EXPRESSED IN ADULT LIVER, SIGNAL = 0.96; SWISSPROT HIT: O08556, EVALUE 1.20e+00; NT HIT: AE000589.1, EVALUE 5.90e-01; EST_HUMAN HIT: AI476428.1, EVALUE 2.00e-82
aatgatgcatgtttttatgatcttaattacatttaaggatttaaaaaatgccactgatctcacagtttacaatatccaaatcttcaaacctgctggaagaagtccacagcacagcctggaaattgcatccgttgcattctctcgtgcagttacctgtaaaccaaaaatcgcagtcacgactttctctaggtttaacaggtatgtcaatcaaaaaataagcttcaattctggagaagttgataggggt

SEQ ID NO: 30342 - DNA, 103 bp, Homo sapiens
  MAP TO AC005178.1; EXPRESSED IN BONE MARROW, SIGNAL = 0.56; EXPRESSED IN PLACENTA, SIGNAL = 0.73; EXPRESSED IN LUNG, SIGNAL = 0.63; EXPRESSED IN BRAIN, SIGNAL = 0.63; EXPRESSED IN ADULT LIVER, SIGNAL = 0.52; EST_HUMAN HIT: BE185330.1, EVALUE 1.00e-06; NT HIT: AJ400877.1, EVALUE 4.00e-06; SWISSPROT HIT: P11369, EVALUE 3.00e-03
gagttgacttttgtgcatggcatgaagtaaaagttgaggttcattattttccttatgagcattcaggcattccagcaccatttgttgaaaagactaacctttc

SEQ ID NO: 30343 - DNA, 112 bp, Homo sapiens
  MAP TO AC021846.3; EXPRESSED IN PLACENTA, SIGNAL = 0.92; EXPRESSED IN ADULT LIVER, SIGNAL = 0.86; EXPRESSED IN BRAIN, SIGNAL = 0.6; EXPRESSED IN FETAL LIVER, SIGNAL = 0.61; EXPRESSED IN BONE MARROW, SIGNAL = 0.63; EST_HUMAN HIT: BE379332.1, EVALUE 1.40e+00; NT HIT: M61101.1, EVALUE 6.20e-02
cattaagcaatgccaattgacttttctgacccaagatccaaaggatcttagaggacttctgacagaagatattcagcaaaagttggtgctctgtcatgctgacttgcagcat

SEQ ID NO: 30344 - DNA, 467 bp, Homo sapiens
  MAP TO AC013497.4; EXPRESSED IN PLACENTA, SIGNAL = 0.61; EXPRESSED IN FETAL LIVER, SIGNAL = 0.6; EXPRESSED IN BRAIN, SIGNAL = 0.47; EXPRESSED IN BONE MARROW, SIGNAL = 0.46; EST_HUMAN HIT: AW583777.1, EVALUE 3.00e-51; NT HIT: Z70177.1, EVALUE 2.90e-01; SWISSPROT HIT: Q9Y0I1, EVALUE 7.40e-01
agtatgctcagccactggtaggaggaattgttggtacacttcatcaaagatctacctttaaaccagaagaaggaaaagaagcaggctatgcagacctagatccttacaactcaccagggcaggaagtttatcatgcctatgctgaaccactcccaattacggggcctgagtatgcaaccccaatcatcatggacatgtcagggcaccccacaacttcagttggtcagccctccacatccactttcaaggctacggggaaccaacctcccccactagtgggaacttacaatacacttctctccaggactgacagctgctcctcagcccaggcccagtatgataccccgaaagctgggaagccaggtctacctgccccagacgaattggtgtaccaggtgccacagagcacacaagaagtatcaggagcaggaagggatggggaatgtgatgtttttaaagaaatcctt

SEQ ID NO: 30345 - DNA, 296 bp, Homo sapiens
  MAP TO AC011790.4; EXPRESSED IN LUNG, SIGNAL = 1.4; EXPRESSED IN PLACENTA, SIGNAL = 1.4; EXPRESSED IN ADULT LIVER, SIGNAL =   1; EXPRESSED IN BRAIN, SIGNAL = 0.84; EXPRESSED IN FETAL LIVER, SIGNAL = 0.62; EXPRESSED IN BONE MARROW, SIGNAL = 0.73; SWISSPROT HIT: P94545, EVALUE 2.40e+00; EST_HUMAN HIT: AW867182.1, EVALUE 2.00e-29; NT HIT: U60822.1, EVALUE 1.00e-33
agatctgtggaactttgaacttgagagagataattcagggtatctgacagaagaaatttctaagcagcaaagagttcaagaggaagcagagcataaacatttggaaaattcacagcctgacaatgtagtagaaaagaaaaatcctttttctggggagaaattcaagtctgctgcagaaatttgcgtaagtaacaaggagctgaatgttaatcaccaagacaatggggaaaatttccccaggtcaggccagagaccttcatggcagcccctcccatcacagaccctgaggcctatga

SEQ ID NO: 30346 - DNA, 181 bp, Homo sapiens
  MAP TO AB000882.1; EXPRESSED IN BONE MARROW, SIGNAL = 2.2; EXPRESSED IN HBL100, SIGNAL = 4.3; EXPRESSED IN ADULT LIVER, SIGNAL = 0.77; EXPRESSED IN FETAL LIVER, SIGNAL = 0.82; EXPRESSED IN LUNG, SIGNAL = 1.3; EXPRESSED IN HELA, SIGNAL = 1.5; SWISSPROT HIT: P16188, EVALUE 3.30e-01; EST_HUMAN HIT: BE910286.1, EVALUE 1.00e-97; NT HIT: AJ251158.1, EVALUE 8.00e-98
ccattctctgtcaagtcctcggtctctgtgtcccaggtctcagctcccaggacatcttctgcccactgtccctggggctttgccctgcgtttctgcctgtcatagcgcaggaagggctgaccatccagatgtccctcagcgagaaaccctgactgcacagatccatcctgggacagcacca

SEQ ID NO: 30347 - DNA, 281 bp, Homo sapiens
  MAP TO AC002470.5; EXPRESSED IN ADULT LIVER, SIGNAL = 4.2; EXPRESSED IN FETAL LIVER, SIGNAL = 7.8; SWISSPROT HIT: P05546, EVALUE 1.00e-48; EST_HUMAN HIT: AV655617.1, EVALUE 1.00e-121; NT HIT: M58600.1, EVALUE 0.00e+00
gatcctgggtgaataaattcccagtggaaatgacacacaaccacaacttccggctgaatgagagagaggtagttaaggtttccatgatgcagaccaaggggaacttcctcgcagcaaatgaccaggagctggactgcgacatcctccagctggaatacgtggggggcatcagcatgctaattgtggtcccacacaagatgtctgggatgaagaccctcgaagcgcaactgacaccccgggtggtggagagatggcaaaaaagcatgacaaacaggtatttc

SEQ ID NO: 30348 - DNA, 460 bp, Homo sapiens
  MAP TO AC005921.3; EXPRESSED IN BT474, SIGNAL = 3.9; EXPRESSED IN HBL100, SIGNAL = 0.76; EXPRESSED IN FETAL LIVER, SIGNAL = 1.2; EXPRESSED IN HELA, SIGNAL = 1.2; EXPRESSED IN PLACENTA, SIGNAL = 0.75; EXPRESSED IN BONE MARROW, SIGNAL = 0.65; EXPRESSED IN LUNG, SIGNAL =   1; EXPRESSED IN ADULT LIVER, SIGNAL = 6.2; SWISSPROT HIT: O15438, EVALUE 1.00e-55; EST_HUMAN HIT: BF094938.1, EVALUE 8.00e-18; NT HIT: AF009670.1, EVALUE 1.00e-114
ctcagatggggagggacagggtcggcctgtaccccggaggcacctgggtccatcagagaaggtgcaggtgacagaggcgaaggcagatggggcactgacccaggaggagaaagcagccattggcactgtgagtcggtggggcaagaggggctggaggggatggacaggcaggccccagcagccccagggtttatggagtcccctgtccctgactgccatggctgctccctacaggtggagctcagtgtgttctgggattatgccaaggccgtggggctctgtaccacgctggccatctgtctcctgtatgtgggtcaaagtgcggctgccattggagccaatgtgtggctcagtgcctggacaaatgatgccatggcagacagtagacagaacaacacttccctgaggctgggcgtctatgctgctttaggaattctgcaaggtgagcttgtgggggtgt

SEQ ID NO: 30349 - DNA, 126 bp, Homo sapiens
  MAP TO AC007032.2; EXPRESSED IN LUNG, SIGNAL = 2.7; EXPRESSED IN ADULT LIVER, SIGNAL = 2.8; EXPRESSED IN PLACENTA, SIGNAL = 0.65; EXPRESSED IN HELA, SIGNAL = 1.3; EXPRESSED IN FETAL LIVER, SIGNAL = 2.5; EXPRESSED IN HBL100, SIGNAL = 1.8; EXPRESSED IN BONE MARROW, SIGNAL = 3.2; EXPRESSED IN BT474, SIGNAL = 1.9; NT HIT: gi11420721, EVALUE 4.00e-65; EST_HUMAN HIT: AV646634.1, EVALUE 4.00e-63; SWISSPROT HIT: P43490, EVALUE 3.00e-21
aatccaatttgtaagccagtaacactctggatctgtgttttccaccgtgaagagaacatttcctctgggaatgacaaagccctcaggaacagcttttatttctattggaagatgcccatcatactt

SEQ ID NO: 30350 - DNA, 177 bp, Homo sapiens
  MAP TO AC007463.3; EXPRESSED IN FETAL LIVER, SIGNAL = 1.3; EXPRESSED IN ADULT LIVER, SIGNAL = 1.5; EXPRESSED IN BT474, SIGNAL = 0.93; EXPRESSED IN HBL100, SIGNAL = 0.85; EXPRESSED IN PLACENTA, SIGNAL = 0.6; EXPRESSED IN HELA, SIGNAL = 0.79; EXPRESSED IN LUNG, SIGNAL =   2; EXPRESSED IN BONE MARROW, SIGNAL = 1.4; NT HIT: U67269.1, EVALUE 4.10e-01; SWISSPROT HIT: P38435, EVALUE 3.80e+00
cagatggagaagtgtctgaatgtgataaagaccatgtctaggtttctcctggacaccaggatctggaaggagaaccccactgtgagaagcagaggtagggagcactgcattcaggcacatgagatgacattcccaaagggcttttgcaaaccagaaagcatggtggatgtgattttt

SEQ ID NO: 30351 - DNA, 75 bp, Homo sapiens
  MAP TO AC008172.1; EXPRESSED IN PLACENTA, SIGNAL = 0.61; EXPRESSED IN HELA, SIGNAL =  71; EXPRESSED IN FETAL LIVER, SIGNAL =  38; EXPRESSED IN ADULT LIVER, SIGNAL =  39; SWISSPROT HIT: P31327, EVALUE 1.00e-07; NT HIT: Y15793.1, EVALUE 6.00e-35; EST_HUMAN HIT: AI174790.1, EVALUE 8.00e-35
ctgcctgtagtggaaaagactcttggagtccaccttgcgagatttctgcacagcttcagcaaaaagtttggtcac

SEQ ID NO: 30352 - DNA, 172 bp, Homo sapiens
  MAP TO AC008172.1; EXPRESSED IN FETAL LIVER, SIGNAL =  30; EXPRESSED IN HELA, SIGNAL =  13; EXPRESSED IN ADULT LIVER, SIGNAL =  25; SWISSPROT HIT: P31327, EVALUE 1.00e-27; NT HIT: Y15793.1, EVALUE 2.00e-92; EST_HUMAN HIT: AV659801.1, EVALUE 3.00e-92
cttaattgcaacatagtcagcaggaattatgggatggtccaatgttggaagatgtttctcatcaacattctctccaatcatcaccttggtggccacatcaatgaagtcaaccccaagagtcttggaaacaaaggggaaggatcgagaagctctcaagttacactcaatcacc

SEQ ID NO: 30353 - DNA, 166 bp, Homo sapiens
  MAP TO AC008172.1; EXPRESSED IN HELA, SIGNAL = 7.3; EXPRESSED IN FETAL LIVER, SIGNAL =   9; EXPRESSED IN ADULT LIVER, SIGNAL = 9.2; EST_HUMAN HIT: BE543853.1, EVALUE 1.00e-63; NT HIT: AF154830.1, EVALUE 8.00e-76; SWISSPROT HIT: P31327, EVALUE 6.00e-22
ctgtttaacccaagggtggatgtttttctttaacctcagctcccttgtctgggcctcagtgagcccaaggcattttgaaatctgcttatctgagaacccaatctcctttgcccttttcagggtttcttctgtcatggactcactaggatttaatagaaaagagaga

SEQ ID NO: 30354 - DNA, 199 bp, Homo sapiens
  MAP TO AC008172.1; EXPRESSED IN ADULT LIVER, SIGNAL =  12; EXPRESSED IN PLACENTA, SIGNAL = 2.9; EXPRESSED IN FETAL LIVER, SIGNAL =  10; EXPRESSED IN HELA, SIGNAL = 8.9; SWISSPROT HIT: P31327, EVALUE 7.00e-29; EST_HUMAN HIT: BE544915.1, EVALUE 3.00e-52; NT HIT: AF154830.1, EVALUE 8.00e-95
accaattcggctagatgttccatgaaaacggtcaagatcccagcggggaatcttggtgaccatgtaatccaggctaggttcaaaacaggctgatgtcttcccggatacgacgttcttaatttctggaagtgggattcctagggcaatctttgcagcaatgaatgccaatgggtagctataaaaagaagacaaatttatt

SEQ ID NO: 30355 - DNA, 150 bp, Homo sapiens
  MAP TO AC008172.1; EXPRESSED IN HELA, SIGNAL = 2.6; EXPRESSED IN FETAL LIVER, SIGNAL = 3.8; EXPRESSED IN ADULT LIVER, SIGNAL = 3.6; NT HIT: Y15793.1, EVALUE 6.00e-77; EST_HUMAN HIT: BE143072.1, EVALUE 8.80e-02; SWISSPROT HIT: P31327, EVALUE 2.00e-22
cttgattccattagactccaaatatttgctaagtcccagttcatccagagcagtagtatcaggagctccaccattcccaataatagggttggccattgtgagaatctgtcctttgtaggcagggtcagtaatagcttctgggtacctggg

SEQ ID NO: 30356 - DNA, 465 bp, Homo sapiens; identical to SEQ ID NO: 13786
  MAP TO AL031121.5; EXPRESSED IN HELA, SIGNAL = 1.4; EXPRESSED IN ADULT LIVER, SIGNAL = 2.1; EXPRESSED IN FETAL LIVER, SIGNAL = 1.3; NT HIT: gi9964314, EVALUE 1.20e+00; EST_HUMAN HIT: AA341934.1, EVALUE 1.00e-108

SEQ ID NO: 30357 - DNA, 1766 bp, Homo sapiens
  MAP TO AL034553.12; EXPRESSED IN ADULT LIVER, SIGNAL = 1.4; EXPRESSED IN BONE MARROW, SIGNAL = 3.1; EXPRESSED IN PLACENTA, SIGNAL = 1.7; EXPRESSED IN BT474, SIGNAL = 6.2; EXPRESSED IN HBL100, SIGNAL = 3.8; EXPRESSED IN FETAL LIVER, SIGNAL = 1.7; EXPRESSED IN LUNG, SIGNAL = 2.5; EXPRESSED IN HELA, SIGNAL = 1.3; SWISSPROT HIT: Q17237, EVALUE 1.10e-01; NT HIT: AB018327.1, EVALUE 0.00e+00; EST_HUMAN HIT: AW978442.1, EVALUE 0.00e+00
atgcatgggctcagctactccatcagtcatgttgtcaaactgttccccatcctcactgtcaattgtgctattctgccactcaatctgggggttagataagcgctcatcattctcagatgcattcttccactgtgactggtccttagaccaaaacccttcaacttttccataggaactattcttccatttcaactgctctctgtcaccttgcatggtagccttttttttggcagctggcttactgctccttgcatcttcgctttgggaagactcgtcagaccaggttcctggtttcatttcgcaggtattgtcctcaaagtctgacacttgttgggatccaggcccactctcagatggagaagcaccgtctttccactcaacaacatcgtcttggtcaacctcactatcagatgcattgtgcattagtttggttggttcctcagtcaaatgaatagtttcgtattttgaaccatcctctttttggtctagcttctcctcagattctgaagcatcctcaggaattaccttcagtacatgttcctctgggttatcgttagagattttaggttcaacttcaaaaacagggtcaaaagggctaccactttcattggattcttcttccaaattttcaaaactgtctgaggaactgtcatcttccttcccaaggttgagctttttgtcagcagtcttactagcattgactctggaatccttctcatcatgattttcaaatagccactcagcatcaaaatccatctcatgcttgactttatttaattctttcatgttaaaccccagcaacacgccaggcttgtacttttcacaatcacggacacacttcttccttttgttactaaaatgggaagcgatgtcactcttccataaccataaactggctgctagcttctcaatttctctcctggtgggatagggctgtttgttgaaatactttgttagaaagcttttcctggcttcataggaatcatcttcatgacccttggggtctaaagctaaaacaacaggctcttcaggcttctcttcaaagaagctgggtgaatcactatcatcatctaactttcgttttttcagtaagggaaattccatttgctcgtaagtgcgcttcacaggtgccagacttggagactgattaagccgagagggtgcatttgtcttatcctggccattttgggtctttccaacgcccctgcagtgaactagatgcagagtgatagttgaggcggtcatgttgctggtatacacaccaaggcaatggatacatttgtaggtgagctttttctcaactggatgaaccgtctgaataacttggtgcctctctcgtaagtgatgtgcaagtgcatcagatatgggtccttttaggattgaaaagcaaagaggacaaagggttttcccaacatcttttttatagggcactgcagcttgaggtgaactttttacagggatatctgccttttcctgaacctttggctgtggctttggaggaactggaggattattttgggcatggtaagcaacagattcagctggggcatccctcagattgtatgtagttaccaggagatggatgttagtgtgactaccctgctgcaatgtcaaatcaaaactcaaagtagaatctgttttaggtcccatctcttcatcaatgtgaaccatccgcatgtgtgcggccatcttttccacatcattgaaagttgaacggcaatatggacaagacagaccatgaattaacatatggttgagcagagtat

SEQ ID NO: 30358 - DNA, 177 bp, Homo sapiens
  MAP TO AL049741.7; EXPRESSED IN LUNG, SIGNAL = 0.82; EXPRESSED IN PLACENTA, SIGNAL = 0.82; EXPRESSED IN FETAL LIVER, SIGNAL = 6.5; EXPRESSED IN ADULT LIVER, SIGNAL =  16; SWISSPROT HIT: Q02985, EVALUE 1.00e-29; NT HIT: gi10440561, EVALUE 2.00e-80; EST_HUMAN HIT: AV648361.1, EVALUE 3.00e-95
tgacacggatgcatctgggagtaggagaccagcctttctccgtacatgtaactgtggtctgcgcttttggaagaccgtagccaggatggcaggcaacttctgtagagttaccctgtacaaactttcttccataattttgattatatccattttccaaataaggaaaataacattttc

SEQ ID NO: 30359 - DNA, 150 bp, Homo sapiens
  MAP TO AL049842.5; EXPRESSED IN ADULT LIVER, SIGNAL = 4.9; EXPRESSED IN FETAL LIVER, SIGNAL = 5.2; NT HIT: X87344.1, EVALUE 5.00e-03; EST_HUMAN HIT: AW469103.1, EVALUE 6.00e-03; SWISSPROT HIT: O75949, EVALUE 6.70e+00
ggaccaaagtgttcctggactgcttataataacactccaataagtggtgccagccaaagtgctttgctgggcagtagcagtaggatccatgcttgttcacatgtgccagcaggagcagcagcacagtggggtgcatactcgttggctgag

SEQ ID NO: 30360 - DNA, 119 bp, Homo sapiens
  MAP TO AL050310.5; EXPRESSED IN PLACENTA, SIGNAL = 2.5; EXPRESSED IN BONE MARROW, SIGNAL = 1.1; EXPRESSED IN FETAL LIVER, SIGNAL = 2.1; EXPRESSED IN ADULT LIVER, SIGNAL = 1.1; EST_HUMAN HIT: BE018538.1, EVALUE 6.00e-61; SWISSPROT HIT: P34722, EVALUE 9.00e+00; NT HIT: gi8922990, EVALUE 5.00e-61
gcgaacatggctgcggcagtcttctgttgaatcagattgttccgcccattaatctccagctgcgtttttaagtgtggaggagggtgaaggtacttgcagttctctcgggtacaccgacc

SEQ ID NO: 30361 - DNA, 555 bp, Homo sapiens
  MAP TO AC007842.1; EXPRESSED IN FETAL LIVER, SIGNAL = 0.95; EXPRESSED IN LUNG, SIGNAL = 1.4; EXPRESSED IN PLACENTA, SIGNAL =   2; EXPRESSED IN ADULT LIVER, SIGNAL = 0.71; EXPRESSED IN BT474, SIGNAL = 2.4; EXPRESSED IN HELA, SIGNAL = 0.59; NT HIT: gi4503680, EVALUE 0.00e+00; EST_HUMAN HIT: AL133966.1, EVALUE 2.10e+00; SWISSPROT HIT: Q28983, EVALUE 2.00e-19
gtaggcatggatgttgctgcagagaatgctcaggttcccaccacccaggcagagatcaaagatgcaatctttcaagggaccctggggatccaccagcttgtggcaggaggacagtggccctgtggggctggagaggagcccacagaactcctccttctgatacttcttctccagctcgggaggacacttgtggctggggatacagtcctcgctccccggcgggcaaggggtgggcggcaggcagggagagtcgggcaccacctcctcccaggagttgccgaactcattggcgttgcctgcctgtgagccattgggcttctggaagtcatccttggggtcgccgttgtagttcccacacaggccacacatctgctggtagtagtttccggggacggtgacccgcacatagtacacaaggtcgtaggccacacgcaggccgaagtcggtctcaatcacaacatctgaaccatgctgggaggcacggatctggccgttggccagcaccacgggcagcttcatgtccacaccgttcacctgggaggtgagagaggcagg

SEQ ID NO: 30362 - DNA, 189 bp, Homo sapiens
  MAP TO AL031320.6; EXPRESSED IN BT474, SIGNAL = 9.8; EXPRESSED IN BONE MARROW, SIGNAL = 0.8; EXPRESSED IN FETAL LIVER, SIGNAL = 3.1; EXPRESSED IN PLACENTA, SIGNAL = 6.1; EXPRESSED IN HBL100, SIGNAL = 3.9; EXPRESSED IN LUNG, SIGNAL = 2.4; EXPRESSED IN HELA, SIGNAL = 6.6; EXPRESSED IN ADULT LIVER, SIGNAL = 4.9; NT HIT: AB029291.1, EVALUE 3.80e-01; SWISSPROT HIT: O00469, EVALUE 3.70e+00
gatgtaaaatgtgtaagacatgttcattacacctggggaactgaagatacaaattcaattggtgggctgcagcgtatttttgtatcagatcaagtagcagaacatagagctgaaggtcagggcaagattataaagagctttatatgccaagataacgagtctgaactccaatttgtagacaaagaaagg

SEQ ID NO: 30363 - DNA, 122 bp, Homo sapiens
  MAP TO AC007847.1; EXPRESSED IN ADULT LIVER, SIGNAL = 0.66; EXPRESSED IN PLACENTA, SIGNAL = 1.4; EXPRESSED IN BONE MARROW, SIGNAL = 0.75; EXPRESSED IN HBL100, SIGNAL =  14; EXPRESSED IN LUNG, SIGNAL = 0.75; EXPRESSED IN HELA, SIGNAL = 0.67; EXPRESSED IN FETAL LIVER, SIGNAL = 0.86; EST_HUMAN HIT: AI026718.1, EVALUE 1.00e-55
  unsure 93
tattgcacaatcccataattattgctattcagctaaaaacatgcctcgaggcattgcagaagatgagaataataattttaaaaactggagtcnagcaacacgaactcttgaaagcactagta

SEQ ID NO: 30364 - DNA, 730 bp, Homo sapiens
  MAP TO AC007566.1; EXPRESSED IN PLACENTA, SIGNAL = 0.93; EXPRESSED IN ADULT LIVER, SIGNAL = 0.72; EXPRESSED IN BONE MARROW, SIGNAL = 1.5; EXPRESSED IN HBL100, SIGNAL = 2.4; EXPRESSED IN FETAL LIVER, SIGNAL = 0.89; EXPRESSED IN LUNG, SIGNAL = 0.81; EXPRESSED IN HELA, SIGNAL = 0.93; EXPRESSED IN BT474, SIGNAL = 2.3; EST_HUMAN HIT: BF237578.1, EVALUE 0.00e+00; SWISSPROT HIT: P54786, EVALUE 3.30e-01; NT HIT: AB037807.1, EVALUE 0.00e+00
gctctgagttccttggatgaagacgatcccaatatacttcttgcaatacagttatcactgcaagagtctgggctggccctcgatgaagaaactagagacttcctcagtaatgaagcatccttaggtgcgataggcacttctttaccttccaggctggactctgtccccagaaatacagatagccctcgggctgcattgagcagctctgagcttttggaacttggtgacagcctcatgagactaggagcagagaatgacccattttcaactgacaccctgagctcacaccctctcagtgaggcaagaagtgatttctgtccctcatctagtgatcctgactcagctggccaggaccccaacatcaatgacaatcttctcggcaacatcatggcttggtttcatgacatgaaccctcagagtattgccctgattcctccagcaactacagaaatcagtgcagattcccagctcccctgtatcaaagatgggtcagaaggtgtgaaggatgtggaactggtgctgccagaagattcaatgtttgaagatgccagtgtcagtgaaggtagaggaacccagatagaagaaaatcctttggaagaaaatattctggcgggggaagcagcatctcaagctggtgacagtggtaacgaggcagccaacagaggagatggttcagatgtttcaagtcaaacacctcaaacctcaagtgactggcttgaacaagtacatt

SEQ ID NO: 30365 - DNA, 182 bp, Homo sapiens
  MAP TO AC005520.2; EXPRESSED IN BT474, SIGNAL = 1.4; EXPRESSED IN BONE MARROW, SIGNAL = 0.94; EXPRESSED IN HBL100, SIGNAL = 2.4; EXPRESSED IN FETAL LIVER, SIGNAL = 0.81; EXPRESSED IN HELA, SIGNAL = 0.75; EXPRESSED IN PLACENTA, SIGNAL = 0.67; EXPRESSED IN LUNG, SIGNAL = 0.78; EXPRESSED IN ADULT LIVER, SIGNAL = 0.73; EST_HUMAN HIT: AA136633.1, EVALUE 3.00e-98; NT HIT: gi6677624, EVALUE 2.00e-05; SWISSPROT HIT: P52747, EVALUE 4.00e-16
ctgtgtggatgcgccggtggttcttcaggtttccagctgtagtaaactgcttaccacagccagactcatggcacataaagggcttctctccattgtgggtcctcatgtgcaccttcagcctctgcagcacatagaagcttttcccacaaccttctgcaggacagatgaaggagcggtcattt

SEQ ID NO: 30366 - DNA, 93 bp, Homo sapiens
  MAP TO Z95325.2; EXPRESSED IN PLACENTA, SIGNAL = 1.7; EXPRESSED IN BONE MARROW, SIGNAL = 1.9; EXPRESSED IN HBL100, SIGNAL = 1.2; EXPRESSED IN ADULT LIVER, SIGNAL =   1; EXPRESSED IN BT474, SIGNAL = 1.4; EXPRESSED IN FETAL LIVER, SIGNAL = 0.84; EXPRESSED IN LUNG, SIGNAL =   1; EXPRESSED IN HELA, SIGNAL = 1.2; NT HIT: AL163209.2, EVALUE 1.00e-11; EST_HUMAN HIT: AW998611.1, EVALUE 1.00e-11
tcagtcagcataatgccatcaatataatggaccagtgtgatattttgcagaaggaaaaagcaatagaagtctttttgaagagttgatataacc

SEQ ID NO: 30367 - DNA, 287 bp, Homo sapiens
  MAP TO AP000154.1; EXPRESSED IN ADULT LIVER, SIGNAL = 0.85; EXPRESSED IN BONE MARROW, SIGNAL = 1.3; EXPRESSED IN HELA, SIGNAL = 0.85; EXPRESSED IN PLACENTA, SIGNAL = 1.4; EXPRESSED IN BT474, SIGNAL = 0.94; EXPRESSED IN LUNG, SIGNAL = 0.85; EXPRESSED IN HBL100, SIGNAL =   1; EXPRESSED IN FETAL LIVER, SIGNAL = 0.95; NT HIT: AF108830.1, EVALUE 0.00e+00; SWISSPROT HIT: Q63470, EVALUE 7.00e-42; EST_HUMAN HIT: AW368167.1, EVALUE 1.00e-105
ttttgaaatgctgtcctacaacctctatgacttgctgagaaacaccaatttccgaggggtctctttgaacctaacacgaaagtttgcgcaacagatgtgcactgcactgcttttccttgcgactccagaacttagtatcattcactgtgatctaaaacctgaaaatatccttctttgtaaccccaaacgcagtgcaatcaagatagttgactttggcagttcttgtcagttggggcagagggtaagtattatttcagaacttgtgaattaaatagaaattaaataga

SEQ ID NO: 30368 - DNA, 271 bp, Homo sapiens
  MAP TO AL049839.2; EXPRESSED IN FETAL LIVER, SIGNAL = 6.2; EXPRESSED IN ADULT LIVER, SIGNAL = 3.2; NT HIT: S69574.1, EVALUE 0.00e+00; SWISSPROT HIT: P05154, EVALUE 3.00e-48; EST_HUMAN HIT: BE937835.1, EVALUE 0.00e+00
ctaagtgggagacaagcttcaaccacaaaggcacccaagagcaagacttctacgtgacctcggagactgtggtgcgggtacccatgatgagccgcgaggatcagtatcactacctcctggaccggaacctctcctgcagggtggtgggggtcccctaccaaggcaatgccacggctttgttcattctccccagtgagggaaagatgcagcaggtggagaatggactgagtgagaaaacgctgaggaagtggcttaagatgttcaaaaagag

SEQ ID NO: 30369 - DNA, 164 bp, Homo sapiens
  MAP TO AL049839.2; EXPRESSED IN HBL100, SIGNAL = 0.7; EXPRESSED IN FETAL LIVER, SIGNAL = 5.2; EXPRESSED IN ADULT LIVER, SIGNAL = 2.3; NT HIT: L28101.1, EVALUE 1.00e-87; SWISSPROT HIT: P29622, EVALUE 6.00e-28; EST_HUMAN HIT: BE870736.1, EVALUE 2.00e-87
tggtatcttcatgacagatacttgccctgctcggtgctacggatggattacaaaggagacgcaaccgtgtttttcattctccctaaccaaggcaaaatgagggagattgaagaggttctgactccagagatgctaatgaggtggaacaacttgttgcggaagag

SEQ ID NO: 30370 - DNA, 149 bp, Homo sapiens
  MAP TO AL031965.7; EXPRESSED IN FETAL LIVER, SIGNAL =   9; EXPRESSED IN LUNG, SIGNAL =   1; EXPRESSED IN ADULT LIVER, SIGNAL =  22; EXPRESSED IN PLACENTA, SIGNAL = 2.1; NT HIT: Z26861.1, EVALUE 1.30e+00; EST_HUMAN HIT: N66552.1, EVALUE 7.90e+00; SWISSPROT HIT: P39400, EVALUE 3.90e+00
gtgtctaagatcgtggatgctatttacaggcaactgtgtgataacaattgtatgaaggatgttatgttgcaggttatcactttgttgacatgcacttcacccaagaaggtcatctttcaacttatggactacccagttccagcagacga

SEQ ID NO: 30371 - DNA, 89 bp, Homo sapiens
  MAP TO AC008269.1; EXPRESSED IN ADULT LIVER, SIGNAL = 2.3; EXPRESSED IN BONE MARROW, SIGNAL = 0.7; NT HIT: D14547.1, EVALUE 1.00e-11; EST_HUMAN HIT: AW082714.1, EVALUE 9.00e-13
tattcattaagtggaaatggatcatcataaggttctttatcctcattttctttatgttgactaggctggggaggagcaggaggaagagg

SEQ ID NO: 30372 - DNA, 98 bp, Homo sapiens
  MAP TO AC008039.1; EXPRESSED IN BONE MARROW, SIGNAL = 1.8; EXPRESSED IN HBL100, SIGNAL = 3.2; EXPRESSED IN HELA, SIGNAL = 2.6; EXPRESSED IN PLACENTA, SIGNAL = 1.5; EXPRESSED IN BT474, SIGNAL = 2.5; EXPRESSED IN FETAL LIVER, SIGNAL = 2.6; EXPRESSED IN LUNG, SIGNAL = 1.3; EXPRESSED IN ADULT LIVER, SIGNAL = 2.4; NT HIT: gi11422113, EVALUE 1.00e-48; EST_HUMAN HIT: BF525334.1, EVALUE 2.00e-48
ccacccgcctgggtaccctatcacctgccttcagcactcgggtgctgccagctcaagccacggagtatgccttcgccttcatccaggtgccccaagat

SEQ ID NO: 30373 - DNA, 112 bp, Homo sapiens
  MAP TO AC006559.6; EXPRESSED IN FETAL LIVER, SIGNAL = 1.2; EXPRESSED IN LUNG, SIGNAL = 0.84; EXPRESSED IN ADULT LIVER, SIGNAL = 1.8; EXPRESSED IN PLACENTA, SIGNAL = 0.88; EST_HUMAN HIT: T78495.1, EVALUE 1.00e-56; SWISSPROT HIT: P54840, EVALUE 1.00e-15; NT HIT: gi11496236, EVALUE 8.00e-57
ctctggataatcctttggcggcgtgactgtttgcaaaatccatagagaaacttagtcagctgattgcaagaatcatctggagaacggaaccgcctgtcaacgatgtaaatac

SEQ ID NO: 30374 - DNA, 213 bp, Homo sapiens
  MAP TO AC006474.3; EXPRESSED IN BT474, SIGNAL = 1.2; EXPRESSED IN ADULT LIVER, SIGNAL =   1; EXPRESSED IN PLACENTA, SIGNAL = 1.2; EXPRESSED IN BONE MARROW, SIGNAL = 2.2; EXPRESSED IN FETAL LIVER, SIGNAL = 0.81; EXPRESSED IN LUNG, SIGNAL = 0.63; NT HIT: gi10864040, EVALUE 1.00e-117; EST_HUMAN HIT: AV703537.1, EVALUE 1.00e-116
ctcgactatcatccatttcaccatcccttgaatgctctgattggatgtctggaggggtctgaaggacggccacgctattctgatttataatcttcaatttcaattttggttttgaccgttttcttcttggaactgtaactgtgaggctctgtaactgagtcatccctgattcagtcaaacacacaccatcctgggtataagtcttgggtgggt

SEQ ID NO: 30375 - DNA, 135 bp, Homo sapiens
  MAP TO AC011145.1; EXPRESSED IN FETAL LIVER, SIGNAL = 2.5; EXPRESSED IN ADULT LIVER, SIGNAL = 1.5; NT HIT: AB002584.1, EVALUE 3.00e-19; EST_HUMAN HIT: AA010242.1, EVALUE 2.00e-33; SWISSPROT HIT: Q64565, EVALUE 4.00e-11
tttcgtggcccttggggaggaagccactgtcgagattctccagtgcaaacaatcaggaagtgcagctgtgcaccaggtccgactgggcaaggggggtgccagtggagtgttggaagttggaagggacacgaataa

SEQ ID NO: 30376 - DNA, 132 bp, Homo sapiens
  MAP TO AL034582.10; EXPRESSED IN BT474, SIGNAL = 0.98; EXPRESSED IN ADULT LIVER, SIGNAL = 0.93; EXPRESSED IN HELA, SIGNAL = 2.2; NT HIT: AB025343.1, EVALUE 2.50e-01; EST_HUMAN HIT: AI040213.1, EVALUE 3.00e-01; SWISSPROT HIT: P38335, EVALUE 3.00e+00
tacccccaggcagaaatggaggccttgcctttgatattagtggacctgcaggctctggacactggagaaatggaattttctagatcagatttacagaaagacgtagaatataaatctcttgccttaggatgc

SEQ ID NO: 30377 - DNA, 85 bp, Homo sapiens
  MAP TO AL035689.17; EXPRESSED IN LUNG, SIGNAL = 1.4; EXPRESSED IN ADULT LIVER, SIGNAL = 1.2; EXPRESSED IN BT474, SIGNAL = 1.1; EXPRESSED IN FETAL LIVER, SIGNAL = 1.1; NT HIT: gi6680232, EVALUE 5.90e-01; EST_HUMAN HIT: BE009880.1, EVALUE 7.00e-01
ggtcccaccaactccgaaaagccttcctcactgaccttttctttcattctcctacaatcaaaatcactgtggcctgccaggcaca

SEQ ID NO: 30378 - DNA, 117 bp, Homo sapiens
  MAP TO AL049697.8; EXPRESSED IN BT474, SIGNAL = 1.2; EXPRESSED IN FETAL LIVER, SIGNAL = 0.88; EXPRESSED IN ADULT LIVER, SIGNAL = 1.3; EST_HUMAN HIT: AI478904.1, EVALUE 2.00e-57
ctgatcatacattgttttcagtaggagtcctttactctccagcaactttaagacctcttgagatttttcacgataaaatgattctcctgaatattcatcaaaatatactcccagacg

SEQ ID NO: 30379 - DNA, 114 bp, Homo sapiens
  MAP TO AL109983.1; EXPRESSED IN PLACENTA, SIGNAL = 4.3; EXPRESSED IN BONE MARROW, SIGNAL =   1; EXPRESSED IN FETAL LIVER, SIGNAL = 3.4; EXPRESSED IN ADULT LIVER, SIGNAL = 1.3; NT HIT: Z50200.1, EVALUE 2.50e-01; SWISSPROT HIT: Q61115, EVALUE 6.90e+00
gagtggtcacagtgttggctgttgttgacgagctcttgttttttggcagtgacttttgtcagtgttgttttcctaaataacccaagagaaacccagagaaccccaagctgtctc

SEQ ID NO: 30380 - DNA, 166 bp, Homo sapiens
  MAP TO AL109983.1; EXPRESSED IN ADULT LIVER, SIGNAL = 0.99; EXPRESSED IN PLACENTA, SIGNAL = 3.7; NT HIT: AJ277546.2, EVALUE 1.00e-04; EST_HUMAN HIT: AI242822.1, EVALUE 2.00e-03; SWISSPROT HIT: Q09735, EVALUE 2.20e+00
aggaatggttaaaacagctgattcagaaatgctttgttgcagttctaacaagccccaggtaacattgctgctggtggtccagggaccactctttgagaaccactgctgtatgatgaccttgtaatcactctctcccttctgtctggcactcccatcatcatgaaat

SEQ ID NO: 30381 - DNA, 112 bp, Homo sapiens
  MAP TO AL117354.2; EXPRESSED IN BONE MARROW, SIGNAL = 0.91; EXPRESSED IN FETAL LIVER, SIGNAL =  18; EXPRESSED IN ADULT LIVER, SIGNAL = 0.92; EXPRESSED IN BT474, SIGNAL =   1; EXPRESSED IN PLACENTA, SIGNAL = 0.94; EXPRESSED IN HBL100, SIGNAL = 1.2; EXPRESSED IN HELA, SIGNAL = 1.1; SWISSPROT HIT: P53337, EVALUE 9.10e+00; NT HIT: AF072814.1, EVALUE 7.00e-51; EST_HUMAN HIT: AA173075.1, EVALUE 1.00e-50
agtaacttgcctttttgatagtgccaagataaaacaagccatctgaccatctagctaggacatcctgaccctcttcaaatttacatgctggctttttggctttatgtccatc

SEQ ID NO: 30382 - DNA, 257 bp, Homo sapiens
  MAP TO AC011004.1; EXPRESSED IN ADULT LIVER, SIGNAL = 1.3; EST_HUMAN HIT: BE173102.1, EVALUE 1.00e-57; NT HIT: AF115542.2, EVALUE 1.30e-01; SWISSPROT HIT: P20240, EVALUE 2.70e-01
atgctctgttggagacactctggatggtgagctgcaggttggcctgggacgttttctagttgttctctgaaatgtctctttttatcctttgctttgataaacaactgattgcccagggaccagtgaagaatcttgatgataaaactcctacttgtagtgaaagaatcatgggatcttttgcattttcttacatcaaaaacgaccttgaactgaaagctctctttaaaaaacaaacaaacaaacaacaacaacaaaaa

SEQ ID NO: 30383 - DNA, 166 bp, Homo sapiens
  MAP TO AF162757.1; EXPRESSED IN BONE MARROW, SIGNAL = 0.9; EXPRESSED IN ADULT LIVER, SIGNAL = 0.98; EXPRESSED IN PLACENTA, SIGNAL =   1; SWISSPROT HIT: Q08296, EVALUE 3.80e+00; NT HIT: AF102575.1, EVALUE 1.50e+00
gatgtctaaaaaagttgtagatgtgggtcgtaaggataatttttgcccagatgaagtagttggggaggttcttccagaagatagcaatagctttgttgcaaaagagaggatggactttccttgtctgcatggagaactcagggggagccaggggatcttcgcactc

SEQ ID NO: 30384 - DNA, 501 bp, Homo sapiens
  MAP TO AL121653.1; EXPRESSED IN PLACENTA, SIGNAL = 1.7; EXPRESSED IN HBL100, SIGNAL = 4.2; EXPRESSED IN BONE MARROW, SIGNAL =   1; EXPRESSED IN LUNG, SIGNAL = 0.92; EXPRESSED IN FETAL LIVER, SIGNAL = 0.9; EXPRESSED IN ADULT LIVER, SIGNAL = 1.1; EXPRESSED IN BT474, SIGNAL = 1.6; EXPRESSED IN HELA, SIGNAL = 1.3; EST_HUMAN HIT: AW444637.1, EVALUE 0.00e+00; NT HIT: gi8923690, EVALUE 1.00e-124; SWISSPROT HIT: Q9ZHB3, EVALUE 3.10e+00
gctggatcagtgcatgtaagaattcgacgagatgccaatgaacaaatggttcttgctcatgtgaccaacaggctgtacactctagtgtctactctaactgttcaaattttcaaggatgactggattaggcctgccttattgtctgggcctgttgcagccaatgtcctaaacttttcagatcatcacgtaatcccaatgcctcttttaaagggtactgatgatttgaacccagttacatcaactccagctaaacctagtagtccacctccagaattttcatttaacactcctgggaaaaatgtgaacccagttattcttctaaacacacaaacaaggccttatggttttggtctcaatcatggacacacaccttacagcagcatgcttaatcaaggacttggagttccaggaattggagcaactcaaggattgaggactggttttacaaatataccaagtagatatggaactaataatagaattggacaaccaagaccatga

SEQ ID NO: 30385 - DNA, 249 bp, Homo sapiens
  MAP TO AL034343.17; EXPRESSED IN BONE MARROW, SIGNAL = 1.8; EXPRESSED IN FETAL LIVER, SIGNAL = 1.3; EXPRESSED IN ADULT LIVER, SIGNAL = 1.2; EXPRESSED IN BT474, SIGNAL = 3.6; EXPRESSED IN HBL100, SIGNAL = 5.2; EXPRESSED IN PLACENTA, SIGNAL = 1.9; EXPRESSED IN HELA, SIGNAL = 4.9; EST_HUMAN HIT: AU124791.1, EVALUE 1.00e-114; SWISSPROT HIT: P25206, EVALUE 8.00e-34; NT HIT: gi11417475, EVALUE 1.00e-114
gagagcgccgtctggaagcaggggccatggtcctggctgaccgaggcgtggtttgcattgatgaatttgacaaaatgtctgacatggatcgcacagccatccatgaagtgatggagcagggtcgagtgaccattgccaaggctggcatccatgctcggctgaatgcccgctgcagtgttttggcagctgccaaccctgtctacggcagggtaagtggaatcaggccccaaccattgtcctcaccttcat

SEQ ID NO: 30386 - DNA, 257 bp, Homo sapiens
  MAP TO AL035415.20; EXPRESSED IN HBL100, SIGNAL = 0.9; EXPRESSED IN BONE MARROW, SIGNAL = 1.2; EXPRESSED IN ADULT LIVER, SIGNAL = 1.3; NT HIT: AF153829.1, EVALUE 1.30e-01; EST_HUMAN HIT: AI675392.1, EVALUE 4.00e-02; SWISSPROT HIT: Q27979, EVALUE 2.30e+00
agccaatgctagcctggaatgtggctgcctccaccaggcctgccaggacgactcctatgggaagacatccctcttctgttttttccccaggaactaactctgtaactctcctagtcgtttgttaccagctgcctggaaggagagttatttcagttaaggttgtgtctcttccttcccctttctggaatgaaagctccttgaggggaggaactttacttgccctttctgccaccccattcctggggcctattgcaggt

SEQ ID NO: 30387 - DNA, 212 bp, Homo sapiens
  MAP TO AL121756.2; EXPRESSED IN BT474, SIGNAL = 1.1; EXPRESSED IN ADULT LIVER, SIGNAL = 1.1; EXPRESSED IN HBL100, SIGNAL = 2.5; EXPRESSED IN PLACENTA, SIGNAL = 0.97; EXPRESSED IN FETAL LIVER, SIGNAL =   1; EST_HUMAN HIT: AI911291.1, EVALUE 1.30e-01; SWISSPROT HIT: Q61768, EVALUE 5.80e-02; NT HIT: X90980.1, EVALUE 1.30e-01
gtggctgtagcttatcccaagtcaaagcccttgacgacccagatcaagataaagaagcctcccaaggtcactatgaagacaggcaagagcctgctgcacctccacagcaccctggagatgttcgcagctcggtggcggagcaaggctccaatgtccctctttctcctagaagtggtgagggaaatcgttcccttccccatttattcccaatc

SEQ ID NO: 30388 - DNA, 241 bp, Homo sapiens
  MAP TO AC009473.2; EXPRESSED IN BONE MARROW, SIGNAL = 2.3; EXPRESSED IN BT474, SIGNAL = 2.6; EXPRESSED IN FETAL LIVER, SIGNAL = 1.8; EXPRESSED IN ADULT LIVER, SIGNAL = 2.1; EXPRESSED IN HBL100, SIGNAL = 5.5; EXPRESSED IN HELA, SIGNAL = 3.2; SWISSPROT HIT: O95067, EVALUE 4.00e-37; EST_HUMAN HIT: AU160185.1, EVALUE 1.00e-105; NT HIT: AB020981.1, EVALUE 1.00e-105
ggcaaggtctttgatggcttttgagttcagctgagggatcatgctgatcttcaggaatttgttgcttgcatacttattcttgatggcgatgaatttagttaagttttcgtttactttcagcacatttttggccacgtgctgcatgacttccaatacttcattctgtgtgtatcctgtataacactgctgctttaagttccattttccttggcccagaaccttctgagacaagcaggaagca

SEQ ID NO: 30389 - DNA, 303 bp, Homo sapiens
  MAP TO AC009973.2; EXPRESSED IN PLACENTA, SIGNAL = 0.97; EXPRESSED IN BONE MARROW, SIGNAL = 0.94; EXPRESSED IN ADULT LIVER, SIGNAL = 1.2; EST_HUMAN HIT: AI149880.1, EVALUE 0.00e+00; SWISSPROT HIT: P91758, EVALUE 8.10e-01; NT HIT: AF056034.1, EVALUE 7.40e-01
gtatcttttcttcttcctgactcaaatgcaatggacacaatgacttcaagccttgacagccattcagtaaccgtgagaaccacttgctgcttagaatggcagagcagaaacacacagagcctggcccttgctggaaccactgtgcaaacgaaccatgtcgtgcaaggaaaaacaaaccccaatctgtttaaggccttgttggtcaagttttctatttacttgcaggtgaaaatgttcctatcagaaaaaggaattattatggataggatgaccaagtaaggccatctgagctaaaaccttacg

SEQ ID NO: 30390 - DNA, 102 bp, Homo sapiens
  MAP TO AB026899.1; EXPRESSED IN ADULT LIVER, SIGNAL = 1.4; EXPRESSED IN BT474, SIGNAL = 0.97; EXPRESSED IN BONE MARROW, SIGNAL = 0.95; NT HIT: gi4827059, EVALUE 1.00e-27; SWISSPROT HIT: Q12947, EVALUE 3.10e+00; EST_HUMAN HIT: AA360549.1, EVALUE 3.00e-16
atgaggaaagtgtgcattttgacagagatcttccagaatttgggcatgtacttgatgtgcatgtgtgtgtgatgggggtgttggttttggggtcctcccgca

SEQ ID NO: 30391 - DNA, 333 bp, Homo sapiens
  MAP TO AB020866.1; EXPRESSED IN BT474, SIGNAL = 1.8; EXPRESSED IN ADULT LIVER, SIGNAL =   3; EXPRESSED IN HBL100, SIGNAL = 1.8; EXPRESSED IN HELA, SIGNAL =   1; EXPRESSED IN PLACENTA, SIGNAL = 1.6; EXPRESSED IN BONE MARROW, SIGNAL =   1; EXPRESSED IN LUNG, SIGNAL = 0.91; EST_HUMAN HIT: BE926641.1, EVALUE 1.00e-103; SWISSPROT HIT: P52890, EVALUE 7.90e-01; NT HIT: gi11427197, EVALUE 0.00e+00
agaagcattggaagtgattcccaaggtagagcaacagctgctaacaacaaacgtcagcttagtgaaaaccgaaagcccttcaactttttgcctatgcagattaatactaacaagagcaaagatgcatctacaagtcccccaaacagagaaacgattggatcagcacagtgtaaagagttgtttgcttctgctttaagtaatgacctcttgcaaaactgtcaggtgtctgaagaagatgggaggggagaacctgcaatggagagcagccaggtgataacgtttgtttcttttgctcattctttacacaaacctcaaaataccaacagtaaggtt

SEQ ID NO: 30392 - DNA, 189 bp, Homo sapiens
  MAP TO AC009954.1; EXPRESSED IN ADULT LIVER, SIGNAL = 1.9; EXPRESSED IN BONE MARROW, SIGNAL = 0.92; NT HIT: gi10946959, EVALUE 1.70e+00; EST_HUMAN HIT: BE311420.1, EVALUE 4.50e-01; SWISSPROT HIT: Q58040, EVALUE 3.70e+00
ctggagcgtacaagagtcaccactacgaatagcttgactctgaagtttctaaaagggaacctggaccacctgagcctccccagaagacgcctcagtcacatttaccctgctgctgccattagtatcaggcagagccatctgtacacgcgggaacatgaagggcactttgcaagacttcagctggtgggt

SEQ ID NO: 30393 - DNA, 201 bp, Homo sapiens
  MAP TO AF165147.1; EXPRESSED IN ADULT LIVER, SIGNAL = 1.2; EXPRESSED IN HBL100, SIGNAL =   1; EST_HUMAN HIT: AW025402.1, EVALUE 2.80e+00; NT HIT: AL163247.2, EVALUE 1.00e-105; SWISSPROT HIT: P19703, EVALUE 1.30e+00
tgcggtgtctgcactcattcctcaaggagtagcaggccacaaactggttattgagtttggaaggggaaactgaacaaatgtttcccagcctcttcctagttccttcatctaagaagcgtaaggcttgcaagtagcatgaattttcatatgcgccattttgctccatgttgtaaaggatcttgtctctattgaggaaacttg

SEQ ID NO: 30394 - DNA, 195 bp, Homo sapiens
  MAP TO AL035425.10; EXPRESSED IN PLACENTA, SIGNAL = 1.3; EXPRESSED IN HBL100, SIGNAL = 2.8; EXPRESSED IN BONE MARROW, SIGNAL =   1; EXPRESSED IN ADULT LIVER, SIGNAL = 2.3; EXPRESSED IN FETAL LIVER, SIGNAL = 0.89; EXPRESSED IN HELA, SIGNAL = 1.7; NT HIT: U04510.1, EVALUE 1.00e-106; SWISSPROT HIT: P48163, EVALUE 9.60e-01; EST_HUMAN HIT: AA359964.1, EVALUE 6.00e-96
gccaaaagggtgatggaggattacctgggattccaggaaatcctggccttccaggtccaaagggcgaaccaggctttcacggtttccctggtgtgcagggtcccccaggccctcctggttctccgggtccagctctggaaggacctaaaggcaaccctgggccccaaggtcctcctgggagaccaggtatgtccg

SEQ ID NO: 30395 - DNA, 1521 bp, Homo sapiens
  MAP TO AC011406.1; EXPRESSED IN PLACENTA, SIGNAL = 5.3; EXPRESSED IN BONE MARROW, SIGNAL = 0.97; EXPRESSED IN LUNG, SIGNAL = 1.2; EXPRESSED IN FETAL LIVER, SIGNAL = 1.1; EXPRESSED IN ADULT LIVER, SIGNAL = 0.93; EXPRESSED IN HBL100, SIGNAL = 1.8; EXPRESSED IN HELA, SIGNAL = 1.5; NT HIT: gi11416769, EVALUE 0.00e+00; EST_HUMAN HIT: AI557282.1, EVALUE 0.00e+00; SWISSPROT HIT: P50443, EVALUE 0.00e+00
gtagcgatgggcttctttcaagtgggttttgtttctgtctacctctcagatgccttgctgagtggatttgtcactggtgcctccttcactattcttacatctcaggccaagtatcttcttgggctcaaccttcctcggactaatggtgtgggctcactcatcactacctggatacatgtcttcagaaacatccataagaccaatctctgtgatcttatcaccagccttttgtgccttttggttcttttgccaaccaaagaactcaatgaacacttcaaatccaagcttaaggcaccgattcctattgaacttgttgttgttgtagcagccacattagcctctcattttggaaaactacatgaaaattataattctagtattgctggacatattcccactgggtttatgccacccaaagtaccagaatggaacctaattcctagtgtggctgtagatgcaatagctatttccatcattggttttgctatcactgtatcactttctgagatgtttgccaagaaacatggttacacagtcaaagcaaaccaggaaatgtatgccattggcttttgtaatatcatcccttccttcttccactgttttactactagtgcagctcttgcaaagacattggttaaagaatcaacaggctgccatactcagctttctggtgtggtaacagccctggttcttttgttggtcctcctagtaatagctcctttgttctattcccttcaaaaaagtgtccttggtgtgatcacaattgtaaatctacggggagcccttcgtaaatttagggatcttcccaaaatgtggagtattagtagaatggatacagttatctggtttgttactatgctgtcctctgcactgctaagtactgaaataggcctacttgttggggtttgtttttctatattttgtgtcatcctccgcactcagaagccaaagagttcactgcttggcttggtggaagagtctgaggtctttgaatctgtgtctgcttacaagaaccttcagactaagccaggcatcaagattttccgctttgtagcccctctctactacataaacaaagaatgctttaaatctgctttatacaaacaaactgtcaacccaatcttaataaaggtggcttggaagaaggcagcaaagagaaagatcaaagaaaaagtagtgactcttggtggaatccaggatgaaatgtcagtgcaactttcccatgatcccttggagctgcatactatagtgattgactgcagtgcaattcaatttttagatacagcagggatccacacactgaaagaagttcgcagagattatgaagccattggaatccaggttctgctggctcagtgcaatcccactgtgagggattccctaaccaacggagaatattgcaaaaaggaagaagaaaaccttctcttctatagtgtgtatgaagcgatggcttttgcagaagtatctaaaaatcagaaaggagtatgtgttcccaatggtctgagtcttagtagtgattaa

SEQ ID NO: 30396 - DNA, 83 bp, Homo sapiens
  MAP TO AP000550.1; EXPRESSED IN ADULT LIVER, SIGNAL =   1; EXPRESSED IN PLACENTA, SIGNAL = 1.1; NT HIT: AE004237.1, EVALUE 6.70e-01; EST_HUMAN HIT: H55224.1, EVALUE 1.00e-39
cttagccattttccagtggcacctcttccaccatgagttcctgaggcagtccgatggggctactttattccagaacaatcaca

SEQ ID NO: 30397 - DNA, 210 bp, Homo sapiens
  MAP TO AC011342.1; EXPRESSED IN PLACENTA, SIGNAL = 1.9; EXPRESSED IN LUNG, SIGNAL = 1.1; EXPRESSED IN BONE MARROW, SIGNAL = 1.2; EXPRESSED IN ADULT LIVER, SIGNAL = 0.95; SWISSPROT HIT: P19712, EVALUE 5.50e-01; EST_HUMAN HIT: AU140307.1, EVALUE 4.00e-61; NT HIT: AF054821.1, EVALUE 2.00e-03
gattatgggagccccagccagttctgggagcaggagctggagagcttacactttgtcatcgagatgaagaatgagcgtattcatgagctggacaggcggctgatcctcatggaaacagtggtctgtgactgggagtggctgggggatgcagcctcaggctcccgctttctgggtgtttcctttgtaaagcatgcagaggggaggtggttt

SEQ ID NO: 30398 - DNA, 111 bp, Homo sapiens
  MAP TO AL117332.2; EXPRESSED IN PLACENTA, SIGNAL = 1.8; EXPRESSED IN FETAL LIVER, SIGNAL = 4.3; EXPRESSED IN HELA, SIGNAL = 1.4; EXPRESSED IN HBL100, SIGNAL = 3.2; EXPRESSED IN LUNG, SIGNAL = 1.1; EXPRESSED IN BONE MARROW, SIGNAL = 0.99; EXPRESSED IN ADULT LIVER, SIGNAL = 1.2; EXPRESSED IN BT474, SIGNAL = 4.3; SWISSPROT HIT: Q02792, EVALUE 6.00e-12; NT HIT: gi6912743, EVALUE 3.00e-56; EST_HUMAN HIT: AW276567.1, EVALUE 3.00e-56
agggaggaagtcatttcccacaaagaagcacatgaaaacccagtcatcaatgctcctctcaacatcaaatgtgaatggtaggctggccattgtgagttctctttccaaata

SEQ ID NO: 30399 - DNA, 94 bp, Homo sapiens
  MAP TO AC002472.3; EXPRESSED IN PLACENTA, SIGNAL = 2.4; EXPRESSED IN HELA, SIGNAL = 1.3; EXPRESSED IN FETAL LIVER, SIGNAL = 0.95; EXPRESSED IN ADULT LIVER, SIGNAL = 0.92; EXPRESSED IN HBL100, SIGNAL = 1.6; EST_HUMAN HIT: N46095.1, EVALUE 2.00e-01; SWISSPROT HIT: P52455, EVALUE 5.40e+00; NT HIT: U56088.1, EVALUE 2.00e-01
cttcagaatctcctctagccaggaagacagtgtgcctcatagtaactacagctgtgattttgcatgcatttatttccttacccatcacaacagc

SEQ ID NO: 30400 - DNA, 206 bp, Homo sapiens
  MAP TO AC008073.1; EXPRESSED IN ADULT LIVER, SIGNAL = 4.8; EXPRESSED IN FETAL LIVER, SIGNAL = 1.6; EXPRESSED IN PLACENTA, SIGNAL = 1.1; EXPRESSED IN LUNG, SIGNAL =   1; NT HIT: AF182198.1, EVALUE 1.00e-112; SWISSPROT HIT: Q15811, EVALUE 3.00e-23; EST_HUMAN HIT: AW505025.1, EVALUE 1.00e-112
ggacaagtggtagaaaacttaaaagcacaggccctttgttcctggactgcaaagaaagataaccacttgaacttctcaaaacatgacattattactgtcttggagcagcaagaaaattggtggtttggggaggtgcatggaggaagaggatggtttcccaaatcttatgtcaagatcattcctgggagtgaagtaaaacgggaaga

SEQ ID NO: 30401 - DNA, 207 bp, Homo sapiens
  MAP TO AL121572.4; EXPRESSED IN ADULT LIVER, SIGNAL = 1.1; EXPRESSED IN PLACENTA, SIGNAL = 3.3; EST_HUMAN HIT: AA368311.1, EVALUE 4.00e-63; SWISSPROT HIT: P31792, EVALUE 7.00e-03; NT HIT: AB026898.1, EVALUE 1.00e-65
acataagagaaggaacacaagtttgttgtcctctgcttgaggaaggaattaatcctgaagtctgggcaacagaaggacaatatggacgagcgaagaatgcccatcccattcaagttaaactacaggattctgcctcctttccctaccaaaggcagtactcccttagacccgaggccgatcaaggactccaaaagattgttaaggacc

SEQ ID NO: 30402 - DNA, 323 bp, Homo sapiens
  MAP TO AL078463.11; EXPRESSED IN HELA, SIGNAL = 1.1; EXPRESSED IN PLACENTA, SIGNAL = 1.1; EXPRESSED IN BONE MARROW, SIGNAL = 1.1; EXPRESSED IN FETAL LIVER, SIGNAL = 0.97; EXPRESSED IN ADULT LIVER, SIGNAL = 1.2; NT HIT: M12132.1, EVALUE 6.70e-01; EST_HUMAN HIT: AI657064.1, EVALUE 8.00e-01; SWISSPROT HIT: Q37600, EVALUE 4.70e+00
agcctggggtcctggatttagctctttgttctcctctttctcttccctgaattcatatactttcatctctcccacaatcacttttactccgaagattctgctagctatccccagtcataacctcttacctcagcagtatgccatctccacctggatacctgatggcctcgtactgctctacacccaaaatgttcaaagtaggatcaccattcaaaacagatcttccctcaacacccccacttctatcgtgaatgccacaattcttctaggtcaccagggtagagacactgggtcacctctgaccattatggttctatgcttta

SEQ ID NO: 30403 - DNA, 278 bp, Homo sapiens
  MAP TO AC007878.2; EXPRESSED IN PLACENTA, SIGNAL = 1.6; EXPRESSED IN HELA, SIGNAL = 1.4; EXPRESSED IN BONE MARROW, SIGNAL = 0.93; EXPRESSED IN LUNG, SIGNAL = 1.1; EXPRESSED IN ADULT LIVER, SIGNAL = 1.4; EXPRESSED IN BT474, SIGNAL = 1.9; EXPRESSED IN HBL100, SIGNAL = 1.8; NT HIT: gi11430914, EVALUE 0.00e+00; EST_HUMAN HIT: AI267694.1, EVALUE 0.00e+00; SWISSPROT HIT: Q14123, EVALUE 1.40e-01
atagaaaaaaagcattagaagatgtagtacaacgatctgggcatgggacagaatttaataaacagaagcatcttgaagctgctgataagggacattcaccagcacaaaagcctaaaactagcagtggaacaaaaccatcagttaaacctacaagcgctacaaagagtgattcaaatctaggaggacattctattcgttgtaaatcaaagaatcttgaagatgacactttgtcagaatgtaaacaggtgtctgataaagctgtttctctccagcgaaag

SEQ ID NO: 30404 - DNA, 172 bp, Homo sapiens
  MAP TO AF107885.2; EXPRESSED IN PLACENTA, SIGNAL =   1; EXPRESSED IN BT474, SIGNAL =   2; EXPRESSED IN ADULT LIVER, SIGNAL = 0.95; NT HIT: X14889.1, EVALUE 2.00e-92; EST_HUMAN HIT: BE157967.1, EVALUE 1.00e-28; SWISSPROT HIT: P10600, EVALUE 2.00e-30
cggaagcagtaattggtgtccaaagcccgcttcttcctctgacccccctggcccgggttgtcgagccggtgtgggggaatcatcatgaggattagatgagggttgtggtgatccttctgcttcttgaggcgccccagatctccacggccatggtcatcctcattgtccacgc

SEQ ID NO: 30405 - DNA, 76 bp, Homo sapiens
  MAP TO AF152365.1; EXPRESSED IN HELA, SIGNAL = 0.95; EXPRESSED IN ADULT LIVER, SIGNAL = 1.3; EXPRESSED IN FETAL LIVER, SIGNAL = 0.97; NT HIT: AL163213.2, EVALUE 1.00e-07; EST_HUMAN HIT: AA398435.1, EVALUE 1.40e-02
ggataaaaccccaatacagaagatgtcctctttataccagaaggaaagtcacatttttatcatcaaggatgaaaag

SEQ ID NO: 30406 - DNA, 423 bp, Homo sapiens
  MAP TO AL035542.7; EXPRESSED IN FETAL LIVER, SIGNAL = 1.7; EXPRESSED IN ADULT LIVER, SIGNAL = 0.94; EST_HUMAN HIT: AV741093.1, EVALUE 1.00e-01; SWISSPROT HIT: Q63531, EVALUE 4.80e-01
caggatgtctctatgcccagtgctggggccacaccagatgccgaggcctctccaccccaggagggctgcctcctcctcctaggtgacaatgaagaatgtactgctcagtcactgggctcagtggtcgtctctgggcatgagctgggtttcaatgagctcaggaatgggaagcatgactctgcccctgaggccacatgccacctccatagcggatcttttcttctggctggaggggaagtcacttcttcccatgaaactattttatctataaatctcctctccttgttggagaccaaagcccagctgctcctgcttggtgccctggtggcctggggtgggccatggagtcctgtttgcagtttctcttctgtcaccatcacgagttctgacaccctggcctgggcacagaaccgcacatcagcc

SEQ ID NO: 30407 - DNA, 167 bp, Homo sapiens
  MAP TO AC009682.2; EXPRESSED IN ADULT LIVER, SIGNAL = 1.2; EXPRESSED IN PLACENTA, SIGNAL = 1.2; EXPRESSED IN HBL100, SIGNAL =   1; EXPRESSED IN BONE MARROW, SIGNAL = 1.4; EST_HUMAN HIT: AI701954.1, EVALUE 8.90e+00; NT HIT: AB033075.1, EVALUE 2.00e-52
  unsure 44
tacaaaaattgagaaagagaaaagagagcacgcaaaacaacatngggatgatccgcacagagataacaggagctgagattgcggaagaaatggagaaggaaaggcgcctctttcagctccaaatgtgtgaagtaagaatggacttttccaccatttgcctagaatta

SEQ ID NO: 30408 - DNA, 157 bp, Homo sapiens
  MAP TO AC009753.3; EXPRESSED IN PLACENTA, SIGNAL = 1.2; EXPRESSED IN FETAL LIVER, SIGNAL = 1.1; EXPRESSED IN ADULT LIVER, SIGNAL = 1.5; EXPRESSED IN HELA, SIGNAL = 1.8; NT HIT: gi11525772, EVALUE 2.00e-83; EST_HUMAN HIT: AA417177.1, EVALUE 2.00e-83; SWISSPROT HIT: O14975, EVALUE 3.00e-26
gggaaatggcttacgaggagatgtgtggagacaatttgtcaagagatttggggacatatgcatctatgagttctatgctgccactgaaggcaatattggatttatgaattatgcgagaaaagttggtgctgttggaagagtaaactacctacagaaa

SEQ ID NO: 30409 - DNA, 173 bp, Homo sapiens
  MAP TO AC010686.1; EXPRESSED IN ADULT LIVER, SIGNAL =   2; EST_HUMAN HIT: BE205792.1, EVALUE 3.00e-91; SWISSPROT HIT: O34717, EVALUE 2.00e-08; NT HIT: AF119841.1, EVALUE 8.00e-89
tacttgcctgctttgcacatgtagaaggtacccgtcaggttggtctcaagcacagcgtgccatcccttagaactgatgtgttcagcaggggaaagaaactggcctcctccattgttcaccaagaaattgatcttaccaaaagtatctaaggtagatttgaccaaattattcac

SEQ ID NO: 30410 - DNA, 210 bp, Homo sapiens
  MAP TO AL078634.17; EXPRESSED IN LUNG, SIGNAL = 1.2; EXPRESSED IN ADULT LIVER, SIGNAL =   1; EXPRESSED IN BT474, SIGNAL = 0.97; EXPRESSED IN PLACENTA, SIGNAL = 1.6; NT HIT: AB033098.1, EVALUE 2.00e-83; EST_HUMAN HIT: AW850810.1, EVALUE 2.00e-83; SWISSPROT HIT: P11638, EVALUE 9.50e-01
aactctggcatggatcttgggtgactggatgttattcacatctccgaggatccccaagacccttcgccataacacagcagcagagtctgggtgccaaccagtgaggctccccccggcgattatactacagtcatctgtgaggcactcgctgctatctatgcagaaaaacatgtctgttaaccctgtaaacaatcttgatttcatcatacc

SEQ ID NO: 30411 - DNA, 219 bp, Homo sapiens
  MAP TO AP000462.1; EXPRESSED IN PLACENTA, SIGNAL = 1.7; EXPRESSED IN ADULT LIVER, SIGNAL = 0.99; SWISSPROT HIT: P13063, EVALUE 4.20e-01; EST_HUMAN HIT: AI678689.1, EVALUE 2.00e-01; NT HIT: AJ006701.1, EVALUE 1.10e-01
ccagtcaatggcagtggctccctggagtacactactataggaaggattttgtaaagttttgtctggcctcagtggagggtgaggtaggggaggagttctatgaacagttagtggtgtctgccatggttgaaacaatggagaagggggacaccttttctgtgcagatgttgcttctggtagatataatccacaatgtaatgggagaagtactaagaatca

SEQ ID NO: 30412 - DNA, 540 bp, Homo sapiens
  MAP TO AC011481.1; EXPRESSED IN LUNG, SIGNAL =   1; EXPRESSED IN ADULT LIVER, SIGNAL =  12; EXPRESSED IN FETAL LIVER, SIGNAL = 4.8; EST_HUMAN HIT: AI885116.1, EVALUE 1.00e-35; NT HIT: M20903.1, EVALUE 0.00e+00; SWISSPROT HIT: Q04749, EVALUE 8.00e-02
ccactcgaccacaatggggcaaccacgaccaagaaggggccccagagctctcagaggtcctctaagccgggaccccaggcctgtagccaccttcactcttccaaatctccaactccgcaattctcccatcccacttttaccttccaagacgatcgacagaaccaccaccaggaccgggagcgacaggaagagcctcatggcgaggccggaggggcaccctggaggcggaggcaggggttcaggggatcagtggcaccctcctccctccctcccacgatcccctcatctccctttatgagttcttgcagagtggaggcgggtgtccctcccaagcactcaacaacctgaatccttgctggagggcttggttgggaggtcctgtcctgcccgcaggacctttatcaggctggggagggggcggggcaggttgatgttgatctccctcctcctgagccttcccctggaagattgcctccttctgcccacccaggtttttctcctctgcccctggcccgtgggcgttggggtcaggtggggtcc

SEQ ID NO: 30413 - DNA, 128 bp, Homo sapiens
  MAP TO AC010136.1; EXPRESSED IN BONE MARROW, SIGNAL = 2.3; EXPRESSED IN ADULT LIVER, SIGNAL =   1; EXPRESSED IN LUNG, SIGNAL = 0.96; NT HIT: X65859.1, EVALUE 2.00e-66; EST_HUMAN HIT: BE140372.1, EVALUE 3.00e-38; SWISSPROT HIT: Q28422, EVALUE 3.00e-13
cccagtctgctatgaggacatgggcaacaatacagcaaactggtggatgctgttacggatcctgccccagtcctttggcttcatcgtgccgctgcgatcatgctgttctgctacagattcaccctgca

SEQ ID NO: 30414 - DNA, 97 bp, Homo sapiens
  MAP TO AP000500.1; EXPRESSED IN FETAL LIVER, SIGNAL = 1.4; EXPRESSED IN ADULT LIVER, SIGNAL = 1.1; EST_HUMAN HIT: AU123748.1, EVALUE 9.00e-48; NT HIT: gi11432052, EVALUE 6.00e-48
gttgcagcattccctggggatgtggaggttcgagcactaattgaaggacaattcatggccaagaggattcacgcagaaggcctgggctatcgagtca

SEQ ID NO: 30415 - DNA, 213 bp, Homo sapiens
  MAP TO AP000354.1; EXPRESSED IN PLACENTA, SIGNAL = 0.99; EXPRESSED IN HBL100, SIGNAL = 1.3; EXPRESSED IN HELA, SIGNAL = 1.3; EXPRESSED IN ADULT LIVER, SIGNAL = 1.1; EXPRESSED IN BT474, SIGNAL = 1.2; EST_HUMAN HIT: AW504383.1, EVALUE 1.00e-114; SWISSPROT HIT: P57077, EVALUE 8.00e-03; NT HIT: AB002374.1, EVALUE 1.00e-114
gtagaggatgaataccgagccttccaagaagaagctaagaaacaaattgaagatttgaatatgacgttagaaaaattaagatcagacctggatgaaaaagaaacagaaaggagtgacatgaaagaaaccatctttgaacttgaagatgaagtagaacaacatcgtgctgtgaaacttcatgacaacctcattatttctgatctagagagtaag

SEQ ID NO: 30416 - DNA, 97 bp, Homo sapiens; identical to SEQ ID NO: 30414
  MAP TO AB026899.1; EXPRESSED IN ADULT LIVER, SIGNAL = 0.91; EXPRESSED IN FETAL LIVER, SIGNAL = 1.1; NT HIT: gi11432052, EVALUE 6.00e-48; EST_HUMAN HIT: AU123748.1, EVALUE 9.00e-48

SEQ ID NO: 30417 - DNA, 191 bp, Homo sapiens
  MAP TO AL034343.17; EXPRESSED IN BT474, SIGNAL = 3.3; EXPRESSED IN FETAL LIVER, SIGNAL = 2.9; EXPRESSED IN HBL100, SIGNAL = 4.8; EXPRESSED IN HELA, SIGNAL = 6.8; EXPRESSED IN PLACENTA, SIGNAL = 1.1; EXPRESSED IN BONE MARROW, SIGNAL = 1.2; EXPRESSED IN ADULT LIVER, SIGNAL = 1.8; EST_HUMAN HIT: BF127713.1, EVALUE 1.00e-79; NT HIT: gi11417475, EVALUE 8.00e-80; SWISSPROT HIT: P25205, EVALUE 4.00e-22
ggagaagatggtgagtgcagcattcatgaagaagtacatccatgtggccaaaatcatcaagcctgtcctgacacaggagtcggccacctacattgcagaagagtattcacgcctgcgcagccaggatagcatgagctcagacaccgccagggtgagtgcctgggggagcctaggcttggggtcccttaggt

SEQ ID NO: 30418 - DNA, 247 bp, Homo sapiens
  MAP TO AC011086.1; EXPRESSED IN BT474, SIGNAL = 3.8; EXPRESSED IN ADULT LIVER, SIGNAL =   1; EXPRESSED IN HELA, SIGNAL = 2.2; EXPRESSED IN LUNG, SIGNAL = 5.1; EXPRESSED IN BONE MARROW, SIGNAL = 1.3; NT HIT: gi11417907, EVALUE 0.00e+00; SWISSPROT HIT: P28067, EVALUE 2.00e-45; EST_HUMAN HIT: BF344756.1, EVALUE 0.00e+00
ctctggacaccgggattttcccatcaagttttggccctatttgctggatcatccactcgcagaactctttgtcaaataaaatggcaggagcatctccctgttcctgagcccagtcagcaaattcgggcaggcgaggcacccgagtgttctgggaaaagtcgaagaagaaaagctggtcctcgtcgtaggcctcagagagtcccacactgggactcccatcctggcagtacactgtgtgcaggaatgt

SEQ ID NO: 30419 - DNA, 148 bp, Homo sapiens
  MAP TO AL022156.1; EXPRESSED IN HBL100, SIGNAL = 1.1; EXPRESSED IN HELA, SIGNAL = 2.1; EXPRESSED IN ADULT LIVER, SIGNAL =   1; EXPRESSED IN BT474, SIGNAL = 1.8; NT HIT: U32974.1, EVALUE 4.00e-78; SWISSPROT HIT: P98170, EVALUE 7.00e-17; EST_HUMAN HIT: AI628066.1, EVALUE 5.00e-68
atgggacacttgtcaactgcttcagcacattgtttacaagtgactagatgtccacaaggaacaaaaacgatagcaatatttctatccatacagattttgcaaagcttctcctcttgcaggcgccttagctgctcttcagtactaatct

SEQ ID NO: 30420 - DNA, 292 bp, Homo sapiens
  MAP TO AC008014.5; EXPRESSED IN FETAL LIVER, SIGNAL =   2; EXPRESSED IN ADULT LIVER, SIGNAL = 5.3; EXPRESSED IN HELA, SIGNAL = 2.6; SWISSPROT HIT: P73274, EVALUE 1.70e-02; EST_HUMAN HIT: AA680367.1, EVALUE 0.00e+00
ccgggagttgaatacaaagtatttgggttcacacttgtcatcactatgagcttcatattctactccactgtcatgaagagagcccttggcctggttctcatccagccctgcaggattgcggtgggtgtaatccatcatgaagttcacatcagaactctcagagttgttgggtaacattaccacatgcattggaagcgtgttgttgaatgacagatttccaacactgtgatccaaaacaggtagagggcagggtatttggaatttcttgtaaatcacctagactcagtcatta

SEQ ID NO: 30421 - DNA, 241 bp, Homo sapiens
  MAP TO AL049698.2; EXPRESSED IN HBL100, SIGNAL = 1.1; EXPRESSED IN HELA, SIGNAL =   2; EXPRESSED IN PLACENTA, SIGNAL = 1.5; EXPRESSED IN LUNG, SIGNAL = 1.6; EXPRESSED IN ADULT LIVER, SIGNAL = 1.4; EXPRESSED IN BT474, SIGNAL = 1.9; NT HIT: AB011399.1, EVALUE 0.00e+00; SWISSPROT HIT: P55196, EVALUE 8.00e-33; EST_HUMAN HIT: BE936476.1, EVALUE 1.00e-102
atcgtcgtggctcaggtaaaccccgaccaaagagtgaaggctttgagctctataataattcaactcaaaatgggtctcctgagagtcctcagctgccttgggcagaatatagtgaaccaaagaaattgcctggtgatgacagactgatgaaaaatagagctgatcaccgttccagccccaacgtagcaagtaagagtgacacttttttgcttcctaagtacacttgtgatcacagtctgaa

SEQ ID NO: 30422 - DNA, 366 bp, Homo sapiens
  MAP TO AL031427.15; EXPRESSED IN FETAL LIVER, SIGNAL = 1.1; EXPRESSED IN LUNG, SIGNAL = 3.9; EXPRESSED IN ADULT LIVER, SIGNAL = 1.7; NT HIT: gi11423412, EVALUE 0.00e+00; EST_HUMAN HIT: N59495.1, EVALUE 4.00e-74; SWISSPROT HIT: P49895, EVALUE 1.00e-33
acccggggttggctgctcctaccctgcaccttcattcagctccgcccagtgttgcctggctgcagcctctctgcccatagaactcagagcttactctggctttgccgagatggggctgccccagccagggctgtggctgaagaggctctgggtgctcttggaggtggctgtgcatgtggtcgtgggtaaagtgcttctgatattgtttccagacagagtcaagcggaacatcctggccatgggcgagaagacgggtatgaccaggaacccccatttcagccacgacaactggataccaacctttttcagcacccagtatttctggttcgtcttgaaggtccgttggcagcgactagaggacacgac

SEQ ID NO: 30423 - DNA, 189 bp, Homo sapiens
  MAP TO AC007690.11; EXPRESSED IN BONE MARROW, SIGNAL = 0.94; EXPRESSED IN ADULT LIVER, SIGNAL =   2; SWISSPROT HIT: P98136, EVALUE 7.40e-01; EST_HUMAN HIT: AW504026.1, EVALUE 2.00e-03; NT HIT: U67847.1, EVALUE 3.00e-29
gatagagtgtaggtggttaggagttgtttcctggctaaaaataggaacagcatactgtgagacaggagcttcttctctcacaagcctctgtgcaaatagcggagggttacgcatttgctgcaggtggtacttaagctccaagaacttacggcacacctgcttgagtggatcatgggtgagctggagaac

SEQ ID NO: 30424 - DNA, 162 bp, Homo sapiens
  MAP TO AC010149.1; EXPRESSED IN ADULT LIVER, SIGNAL = 0.99; EXPRESSED IN BT474, SIGNAL = 0.98; EXPRESSED IN FETAL LIVER, SIGNAL = 1.5; NT HIT: gi4557528, EVALUE 1.50e+00; SWISSPROT HIT: O43281, EVALUE 3.80e+00
tcatggctagcggggtcaagggtgccagagggctgagctgggagccagcaggggaataatgaagaagcacgattcccatggtctggtgcagaccttgtggatgggagctgtactgggtgtttttaagagatactctcactgagggaacagcagtgggttgtg

SEQ ID NO: 30425 - DNA, 96 bp, Homo sapiens
  MAP TO AC009813.2; EXPRESSED IN ADULT LIVER, SIGNAL = 1.4; EXPRESSED IN BT474, SIGNAL = 2.2; EXPRESSED IN FETAL LIVER, SIGNAL = 4.9; EXPRESSED IN LUNG, SIGNAL =   1; NT HIT: gi11321594, EVALUE 4.00e-27; SWISSPROT HIT: Q13797, EVALUE 4.10e-02; EST_HUMAN HIT: BE243399.1, EVALUE 5.00e-27
  unsure 43
gtgcctacaatgcgcactttggagagagcattgccagcctggnacgatctggacaatgatgggttcccaggtgagtgagtgctcctggtgcacgga

SEQ ID NO: 30426 - DNA, 330 bp, Homo sapiens
  MAP TO AL080249.11; EXPRESSED IN LUNG, SIGNAL = 1.6; EXPRESSED IN ADULT LIVER, SIGNAL = 0.99; EXPRESSED IN FETAL LIVER, SIGNAL = 1.1; NT HIT: AF240786.1, EVALUE 3.00e-03; EST_HUMAN HIT: AI732842.1, EVALUE 3.00e-03; SWISSPROT HIT: P08121, EVALUE 2.80e+00
ctccaagcacaatccgtggtcagcagcatcaccctcaccagggagcttgttaaaatgcagaggctcagccccaagaggaacatgatggatcaagatttgcatctaaacaagatccctgggggacttgcctgcacgtctttgtttctgaaaagctgtcctagtccccagccctcatctgcatttgggggaaacatgaggaacagagaggggtggagtttgttccaggtcccccagcccattaggagcagggccttgacaaaaaacctgtacagactttggaaaaggattcaaagctctctgcgagaggcaggcgtttgcacaaaagatgaa

SEQ ID NO: 30427 - DNA, 107 bp, Homo sapiens
  MAP TO AB020873.1; EXPRESSED IN ADULT LIVER, SIGNAL = 1.1; EXPRESSED IN PLACENTA, SIGNAL = 0.98; NT HIT: AE002445.1, EVALUE 1.30e-02; SWISSPROT HIT: P36440, EVALUE 9.10e+00
cagaggaaattatccacatcactgcagatagtctcgatagcagcgccaatgaagttactgagagttgtattattaaaaacacctatcatttgctgagcacttacatt

SEQ ID NO: 30428 - DNA, 105 bp, Homo sapiens
  MAP TO AC011297.1; EXPRESSED IN ADULT LIVER, SIGNAL = 1.5; EXPRESSED IN BT474, SIGNAL = 1.3; EXPRESSED IN HELA, SIGNAL = 1.3; SWISSPROT HIT: P34099, EVALUE 5.30e+00; EST_HUMAN HIT: BF105737.1, EVALUE 3.30e-01; NT HIT: AL163218.2, EVALUE 1.20e-02
cgcggttcagatgcctgtgacattacaacctcaaatgccaatccagacacagtatccacaatatcagctggtggaaaataaaacccaaccaccggcagcttatca

SEQ ID NO: 30429 - DNA, 113 bp, Homo sapiens
  MAP TO AL096700.6; EXPRESSED IN HBL100, SIGNAL = 1.1; EXPRESSED IN HELA, SIGNAL = 3.1; EXPRESSED IN BONE MARROW, SIGNAL = 1.1; EXPRESSED IN BT474, SIGNAL = 1.4; EXPRESSED IN ADULT LIVER, SIGNAL = 1.1; NT HIT: AF092207.1, EVALUE 2.00e-23; EST_HUMAN HIT: AA287577.1, EVALUE 4.00e-50; SWISSPROT HIT: Q28661, EVALUE 9.00e+00
actggtattcacttgctttctgcttcaagtcctctattaccaggtagacatccctgttctggaccctgttgcgttctgaaaggtgatgtaaaatctctgtggtccgtgggttc

SEQ ID NO: 30430 - DNA, 309 bp, Homo sapiens
  MAP TO AL078461.8; EXPRESSED IN ADULT LIVER, SIGNAL = 1.1; EXPRESSED IN BT474, SIGNAL = 1.3; EXPRESSED IN HBL100, SIGNAL = 1.3; EXPRESSED IN HELA, SIGNAL = 2.6; EXPRESSED IN LUNG, SIGNAL = 2.9; EXPRESSED IN BONE MARROW, SIGNAL = 1.1; NT HIT: gi11420482, EVALUE 1.00e-114; EST_HUMAN HIT: AF114027.1, EVALUE 0.00e+00; SWISSPROT HIT: P36044, EVALUE 9.00e-05
cagtaggagctatggaagggggtctgcctcgttttcttttgggttccctcaagttttcttgtggactcttcacaatgtcattttcaggtttcttatccacttgggcatctccagaatactctctgtcattttcggaaatgttttccttgtcttccttctcgttcttgggaagacttttctctgacactttccccttttcagaacagattaactttccttctttatcaggctgcttgggtcgcttttctgtctttaagggtttatcttctttgtctttcttcacattcactgttgcttttctctgttctt

SEQ ID NO: 30431 - DNA, 165 bp, Homo sapiens
  MAP TO AC006020.2; EXPRESSED IN LUNG, SIGNAL = 4.6; EXPRESSED IN ADULT LIVER, SIGNAL = 1.5; SWISSPROT HIT: P38999, EVALUE 2.00e-05; EST_HUMAN HIT: AV651356.1, EVALUE 1.00e-66; NT HIT: gi11421179, EVALUE 1.00e-75
atatctcagtgtcccccgcaacaaagtgtgagcagaagaaatgccataaatctcagcatatttcgtactgtctctgttaggatagccttccaaatttaatcctggaaaaaaatccatggacgtaacggcatcaagaaaggagatgcctcctgcaacattcacaac

SEQ ID NO: 30432 - DNA, 91 bp, Homo sapiens
  MAP TO AC007919.18; EXPRESSED IN LUNG, SIGNAL = 9.2; EXPRESSED IN ADULT LIVER, SIGNAL = 1.8; EXPRESSED IN PLACENTA, SIGNAL = 1.3; SWISSPROT HIT: P50591, EVALUE 1.00e-07
ggagcactgtgaagatcacgatcagcacgcaggtctgtcccaggctgggtcccccctggacctccatcatagccatgatcctgtcagagtc

SEQ ID NO: 30433 - DNA, 131 bp, Homo sapiens
  MAP TO AL109658.1; EXPRESSED IN HELA, SIGNAL = 1.4; EXPRESSED IN PLACENTA, SIGNAL = 3.1; EXPRESSED IN LUNG, SIGNAL = 8.7; EXPRESSED IN ADULT LIVER, SIGNAL =   1; SWISSPROT HIT: P10266, EVALUE 8.00e-03; NT HIT: AF111103.1, EVALUE 1.10e+00
aaaccccagaggtcattattgtttgagtatgtttaggtccataaatagctgcatgacctttggaagagccatcagtaaaataagtctggccacctggaataagcttgtgatgagtaatcacaggaagaatg

SEQ ID NO: 30434 - DNA, 117 bp, Homo sapiens
  MAP TO AP000122.1; EXPRESSED IN ADULT LIVER, SIGNAL = 0.95; EXPRESSED IN PLACENTA, SIGNAL = 0.95; EST_HUMAN HIT: AA204973.1, EVALUE 1.50e+00; NT HIT: X77260.1, EVALUE 4.00e+00
gtcacctatcctatcccgtgccctcaaatgggggctactgctccactgacacgctggttgggaaggtgagggcgctgcagctgaaacagctgtattacacaggagtacagccataac

SEQ ID NO: 30435 - DNA, 118 bp, Homo sapiens
  MAP TO AC006946.18; EXPRESSED IN BONE MARROW, SIGNAL = 1.4; EXPRESSED IN ADULT LIVER, SIGNAL = 0.91; EXPRESSED IN HBL100, SIGNAL =   1; EXPRESSED IN LUNG, SIGNAL =  14; EST_HUMAN HIT: AA634809.1, EVALUE 2.00e-60; SWISSPROT HIT: P41326, EVALUE 5.30e+00; NT HIT: gi11526289, EVALUE 2.00e-60
gccacggggaacaggtctccttgttgggtgtgggcaaagtgcagctggatctgcaggtcctttggggaggagggggtcaggtttcgagggtgaatccagctgtcatccaggcaggtac

SEQ ID NO: 30436 - DNA, 81 bp, Homo sapiens
  MAP TO AB020866.1; EXPRESSED IN HELA, SIGNAL = 1.1; EXPRESSED IN FETAL LIVER, SIGNAL =  14; EXPRESSED IN ADULT LIVER, SIGNAL =  18; EST_HUMAN HIT: AV662188.1, EVALUE 2.00e-38; SWISSPROT HIT: P12799, EVALUE 6.00e-03; NT HIT: gi11427199, EVALUE 2.00e-38
gtgtaccagacaatcccattgtctgttttagccgtgtaggggccgctgtagtatacaccattcaggtttgcagagtgacac

SEQ ID NO: 30437 - DNA, 273 bp, Homo sapiens
  MAP TO AC007098.2; EXPRESSED IN LUNG, SIGNAL = 1.4; EXPRESSED IN ADULT LIVER, SIGNAL = 1.3; EXPRESSED IN BT474, SIGNAL = 1.2; EXPRESSED IN HELA, SIGNAL = 0.91; EXPRESSED IN HBL100, SIGNAL = 1.1; NT HIT: AB020710.1, EVALUE 0.00e+00; EST_HUMAN HIT: AW969958.1, EVALUE 1.00e-103; SWISSPROT HIT: Q9Z714, EVALUE 6.20e-01
gagacagatgaacaaaagcttcaaactctagacatcggtagtaacttggagaaagaaaaattagagaattccagatccttagaatgcagatcagatccagaatctcctatcaaaaaaacaagtttatctcctacttctaaacttggatactcatatagtagagatctagaccttgctaagaaaaaacatgcttccctgaggcagacggagtctgatccagatgctgatagaaccactttaaatcatgcagatcattcatcaaaaatagtccag

SEQ ID NO: 30438 - DNA, 98 bp, Homo sapiens
  MAP TO AC009973.2; EXPRESSED IN ADULT LIVER, SIGNAL = 1.1; EXPRESSED IN BT474, SIGNAL = 1.9; EXPRESSED IN PLACENTA, SIGNAL = 1.1; EXPRESSED IN HBL100, SIGNAL = 1.9; EXPRESSED IN HELA, SIGNAL = 1.2; EXPRESSED IN BONE MARROW, SIGNAL =   1; EST_HUMAN HIT: BF057312.1, EVALUE 3.00e-35; NT HIT: gi10863902, EVALUE 3.00e-34; SWISSPROT HIT: Q14669, EVALUE 2.00e-08
ccaggggggtcactgcgacgttcacagaggaacactgccggggcccaaccacaagacgactcaataggaggaaggtatgtatttcatggtaatttgaa

SEQ ID NO: 30439 - DNA, 109 bp, Homo sapiens
  MAP TO AC010966.1; EXPRESSED IN ADULT LIVER, SIGNAL = 1.5; EST_HUMAN HIT: AA159168.1, EVALUE 6.10e-02
  unsure 84
  unsure 90
tgagttggactattatgactgctgctttaactctgctgttcattttggtaatcatgtctgccttgcctttggtgactgagtgcncaccantttggctcctgccaccctg

SEQ ID NO: 30440 - DNA, 169 bp, Homo sapiens
  MAP TO AF186194.1; EXPRESSED IN PLACENTA, SIGNAL = 0.97; EXPRESSED IN HELA, SIGNAL = 1.7; EXPRESSED IN BONE MARROW, SIGNAL =   1; EXPRESSED IN LUNG, SIGNAL = 1.2; EXPRESSED IN ADULT LIVER, SIGNAL = 0.96; EXPRESSED IN FETAL LIVER, SIGNAL = 0.93; EST_HUMAN HIT: BF341380.1, EVALUE 6.00e-04; NT HIT: U86214.1, EVALUE 9.90e-02; SWISSPROT HIT: O55145, EVALUE 1.30e+00
taactaaggggctgaaatgggctggacagctgccctctttgtgctcagcttctatggtgtgtgtgtggcctgagaactccatgaaaagcaacctgaaggagtgctgggggcagatggccatagaggggtgctgagtgctgatgaagctgtcatgccctgtgccctacca

SEQ ID NO: 30441 - DNA, 261 bp, Homo sapiens
  MAP TO AC011356.1; EXPRESSED IN PLACENTA, SIGNAL =   1; EXPRESSED IN HBL100, SIGNAL = 1.2; EXPRESSED IN HELA, SIGNAL = 1.3; EXPRESSED IN BONE MARROW, SIGNAL = 0.92; EXPRESSED IN LUNG, SIGNAL = 5.2; EXPRESSED IN ADULT LIVER, SIGNAL = 0.92; EXPRESSED IN BT474, SIGNAL = 1.2; NT HIT: AB037732.1, EVALUE 0.00e+00; EST_HUMAN HIT: AW503898.1, EVALUE 0.00e+00; SWISSPROT HIT: Q12872, EVALUE 7.00e+00
agcacagggaaagatcgaagtttaagagtgaaaggaatgacctggagagttcctatgtgcctgtgtctgcaccacctccaaactcttctgagcagtattcctctggggcacagtctattcccagcactgttactgtgatcgcacctgctcaccactctgaaaacacaactgagagttggtctaattactataacaatcatagctcttccaattcttttggtcgaaacctaccaccaaagaggcgatgcagagattatgatg

SEQ ID NO: 30442 - DNA, 429 bp, Homo sapiens
  MAP TO AL049870.1; EXPRESSED IN ADULT LIVER, SIGNAL = 0.92; EXPRESSED IN PLACENTA, SIGNAL = 1.1; EXPRESSED IN LUNG, SIGNAL = 6.6; EST_HUMAN HIT: N44974.1, EVALUE 0.00e+00; SWISSPROT HIT: Q04652, EVALUE 1.00e-21; NT HIT: U50547.1, EVALUE 4.20e+00
ggaccatacccaccaatggcatatatcattccatccaataccgctgcagcaaaacaacttcttgttgtcgtcattggtgccacaggttgccattttcttattttgggaatgtacttctctacagattgtaaataagattgtccatcataaccacctaaggcataaagttctcctgcaagtactactactccaagagtacttcggctttcattcattctctctagagaagtccaagtatttgtatcaggattccagcattccactgaattttcatgttttctgatagtgacgccaggacgcacattagttgcaataccacctataacatatactttttggtctaaaacgcatattccaaattcatagcgaggaatgtttaggggtgccaaaccaatccaagagtcattctgaggaaagtacatctccaca

SEQ ID NO: 30443 - DNA, 373 bp, Homo sapiens
  MAP TO AB023055.1; EXPRESSED IN PLACENTA, SIGNAL = 1.4; EXPRESSED IN ADULT LIVER, SIGNAL = 0.89; SWISSPROT HIT: Q02084, EVALUE 3.00e-12; NT HIT: Y07829.2, EVALUE 0.00e+00
agggcattttcaatggtcagttcatgatgagacatgtgttcaggggacaccaggcattccacacatagaagaagtctgctctcctcacagaacctgcacaccctcttctggtggttggggcagatatagcctgtccctagcacctcctcagaacagggcttccggcagagggggcagcagaagaccccagaggctgaggccttctccacatgctgtgtcaggcacactcgacagaagagatgtccgcagttggtgctcacggcctccttcaggctctcctggcagatggggcagacaccctcctcctggttgtccttctgcaaagggatcatggcctcgttcctaccctgtcagcctcctgtttgcagggcct

SEQ ID NO: 30444 - DNA, 170 bp, Homo sapiens
  MAP TO AC010968.1; EXPRESSED IN ADULT LIVER, SIGNAL = 1.3; EXPRESSED IN BT474, SIGNAL = 1.4; EXPRESSED IN HBL100, SIGNAL = 1.4; EXPRESSED IN PLACENTA, SIGNAL = 1.1; EST_HUMAN HIT: H63227.1, EVALUE 3.00e-91; SWISSPROT HIT: O30272, EVALUE 1.70e+00; NT HIT: gi10442821, EVALUE 3.00e-91
actccgagttctggacgtgcactaggtaagaggtaagacaatctgtccatcactgaggacgccacaggtaaggcagcaacattttgatttattttcttgagttcatttacaatggcactggcaatggacttcaacacatgatgaggaagatgaaatgtaactgtggccca

SEQ ID NO: 30445 - DNA, 172 bp, Homo sapiens
  MAP TO AC008071.1; EXPRESSED IN FETAL LIVER, SIGNAL = 4.6; EXPRESSED IN BONE MARROW, SIGNAL = 0.65; EXPRESSED IN ADULT LIVER, SIGNAL = 3.8; EXPRESSED IN HELA, SIGNAL = 3.5; SWISSPROT HIT: P41004, EVALUE 3.80e+00; NT HIT: X94335.1, EVALUE 6.20e+00
aactcctgctcagaaggattgttctgataacattataaatgctgggaatgcacaaaatgtcatggaaatgcagaagcaggactatctctgggctattctgggacagatgaggaagatcccgaagatgaagtcaaatttaatctgggattttgaggatgtagagtttattaag

SEQ ID NO: 30446 - DNA, 105 bp, Homo sapiens
  MAP TO AC005674.9; EXPRESSED IN PLACENTA, SIGNAL = 0.71; EXPRESSED IN BT474, SIGNAL = 0.74; EXPRESSED IN LUNG, SIGNAL = 0.77; EXPRESSED IN HELA, SIGNAL = 0.77; EXPRESSED IN ADULT LIVER, SIGNAL = 0.76; EXPRESSED IN HBL100, SIGNAL = 0.89; NT HIT: AB029324.1, EVALUE 2.30e-01; EST_HUMAN HIT: AA601209.1, EVALUE 5.20e+00; SWISSPROT HIT: Q06947, EVALUE 7.00e+00
acttggtcccctccatccccactgtcatcctcctggtccaagcccttgtcttctccagcaggctggacatcagcctgctgactggtctcaccatggcccatctcc

SEQ ID NO: 30447 - DNA, 518 bp, Homo sapiens
  MAP TO AC007556.2; EXPRESSED IN ADULT LIVER, SIGNAL = 0.8; EXPRESSED IN BONE MARROW, SIGNAL = 0.63; EXPRESSED IN HELA, SIGNAL = 1.4; EXPRESSED IN PLACENTA, SIGNAL = 0.77; EXPRESSED IN BT474, SIGNAL = 0.82; EXPRESSED IN HBL100, SIGNAL = 0.85; EXPRESSED IN LUNG, SIGNAL = 0.63; EXPRESSED IN FETAL LIVER, SIGNAL = 0.71; EST_HUMAN HIT: BE466598.1, EVALUE 1.90e+00; SWISSPROT HIT: P98164, EVALUE 1.00e-103; NT HIT: gi11430460, EVALUE 0.00e+00
gcattaatgaatgccatgacccttcaatcagtggctgcgatcacaactgcacagacaccttaaccagtttctattgttcctgtcgtcctggttacaagctcatgtctgacaagcggacttgtgttgatattgatgaatgcacagagatgccttttgtctgtagccagaagtgtgagaatgtaataggctcctacatctgtaagtgtgccccaggctacctccgagaaccagatggaaagacctgccggcaaaacagtaacatcgaaccctatctcatttttagcaaccgttactatttgagaaatttaactatagatggctatttttactccctcatcttggaaggactggacaatgttgtggcattagattttgaccgagtagagaagagattgtattggattgatacacagaggcaagtcattgagagaatgtttctgaataagacaaacaaggagacaatcataaaccacagactaccagctgcagaaagtctggctgtagactgggtttccagg

SEQ ID NO: 30448 - DNA, 190 bp, Homo sapiens
  MAP TO AC007721.7; EXPRESSED IN HBL100, SIGNAL = 0.91; EXPRESSED IN ADULT LIVER, SIGNAL = 0.92; NT HIT: AF129756.1, EVALUE 2.00e-06; EST_HUMAN HIT: AI816933.1, EVALUE 3.00e-11; SWISSPROT HIT: O89091, EVALUE 3.80e+00
ataaaaaattgtttttattttatttctagaatatcttcttgaacctcaaactgtcctcaatgggttagcaggaattacacgccgggttctgggcagaaatggagtcataactaagcatgaatcaggctgcactttggcccacttccttgtaactggaagtcttgtagccctggatactgatcatttgcac

SEQ ID NO: 30449 - DNA, 164 bp, Homo sapiens
  MAP TO AP000315.1; EXPRESSED IN HELA, SIGNAL = 1.1; EXPRESSED IN ADULT LIVER, SIGNAL = 0.96; EXPRESSED IN BT474, SIGNAL = 0.68; EXPRESSED IN BONE MARROW, SIGNAL = 0.79; EXPRESSED IN FETAL LIVER, SIGNAL = 1.1; EXPRESSED IN LUNG, SIGNAL = 0.97; EXPRESSED IN HBL100, SIGNAL = 1.2; EST_HUMAN HIT: BF327920.1, EVALUE 2.00e-87; SWISSPROT HIT: P14733, EVALUE 1.70e+00; NT HIT: Z71367.1, EVALUE 1.50e+00
aagactcctagaggagtattgttgctggggagagggctgctggaccccaaccaacactcggcaccactttctcttcttccctttcctcaattgccacacggagtggagctgccacttctctttcatcctcttcctcaaaagttgtctgaaagctgtgaaagtac

SEQ ID NO: 30450 - DNA, 199 bp, Homo sapiens
  MAP TO AL050309.4; EXPRESSED IN PLACENTA, SIGNAL = 0.64; EXPRESSED IN BT474, SIGNAL = 1.3; EXPRESSED IN ADULT LIVER, SIGNAL = 0.74; NT HIT: gi11419679, EVALUE 1.00e-108; SWISSPROT HIT: P14046, EVALUE 4.30e-01; EST_HUMAN HIT: BE541391.1, EVALUE 1.00e-108
aatggctgcagggcccccatctgcaggcaaagtagtatacaccatgggcagagactgcactaccactgggatggtcttcaggccacccatcttatttggcagactgactgaggggatagtgtgaatgacatgtaagatctgctggctaccagtgctctgagaggaggtcaggacagagcctggggtcagaacagtagga

SEQ ID NO: 30451 - DNA, 155 bp, Homo sapiens
  MAP TO AL078471.2; EXPRESSED IN BT474, SIGNAL = 0.7; EXPRESSED IN ADULT LIVER, SIGNAL = 0.68; EXPRESSED IN BONE MARROW, SIGNAL = 0.76; EXPRESSED IN LUNG, SIGNAL = 0.71; EXPRESSED IN HELA, SIGNAL = 0.79; NT HIT: AL163201.2, EVALUE 2.00e-82; EST_HUMAN HIT: AA837753.1, EVALUE 8.00e-24; SWISSPROT HIT: O77681, EVALUE 6.60e+00
agtggtctggataaaggatcaaaccggccacagcattcccttaagccaaagcgtaatccaggacaaggccctcactctctttgattcagtgaagcctgggagaggtaaggaagctacagaagaaaagcttgacgctaaaaggtttgttcatgagg

SEQ ID NO: 30452 - DNA, 833 bp, Homo sapiens
  MAP TO AC004614.1; EXPRESSED IN ADULT LIVER, SIGNAL =   1; EXPRESSED IN PLACENTA, SIGNAL = 1.9; SWISSPROT HIT: P35446, EVALUE 3.00e-12; NT HIT: AB030073.1, EVALUE 1.10e-01; EST_HUMAN HIT: AW612526.1, EVALUE 0.00e+00
gtccatggggccgatgtatgggagatgaatgtggtcccggaggcatccaaacgagggctgtgtggtgtgctcatgtggagggatggactacactgcatactaactgtaagcaggccgagagacccaataaccagcagaattgtttcaaagtttgcgattggcacaaagagttgtacgactggagactgggaccttggaatcagtgtcagcccgtgatttcaaaaagcctagagaaacctcttgagtgcattaagggggaagaaggtattcaggtgagggagatagcgtgcatccagaaagacaaagacattcctgcggaggatatcatctgtgagtactttgagcccaagcctctcctggagcaggcttgcctcattccttgccagcaagattgcatcgtgtctgaattttctgcctggtccgaatgctccaagacctgcggcagcgggctccagcaccggacgcgtcatgtggtggcgcccccgcagttcggaggctctggctgtccaaacctgacggagttccaggtgtgccaatccagtccatgcgaggccgaggagctcaggtacagcctgcatgtggggccctggagcacctgctcaatgccccactcccgacaagtaagacaagcaaggagacgcgggaagaataaagaacgggaaaaggaccgcagcaaaggagtaaaggatccagaagcccgcgagcttattaagaaaaagagaaacagaaacaggcagaacagacaagagaacaaatattgggacatccagattggatatcagaccagagaggttatgtgcattaacaagacggggaaagctgctgatttaagg

SEQ ID NO: 30453 - DNA, 297 bp, Homo sapiens
  MAP TO AP000117.1; EXPRESSED IN LUNG, SIGNAL = 0.7; EXPRESSED IN HELA, SIGNAL = 2.4; EXPRESSED IN PLACENTA, SIGNAL = 1.2; EXPRESSED IN BT474, SIGNAL = 0.76; EXPRESSED IN HBL100, SIGNAL = 1.3; EXPRESSED IN FETAL LIVER, SIGNAL = 1.5; EXPRESSED IN ADULT LIVER, SIGNAL =   1; EXPRESSED IN BONE MARROW, SIGNAL = 0.95; NT HIT: AF114487.1, EVALUE 0.00e+00; EST_HUMAN HIT: AA773263.1, EVALUE 1.00e-112; SWISSPROT HIT: Q15811, EVALUE 2.00e-45
gtggatgaaagccaaactggagaacccggctggcttggaggagaattaaaaggaaagacagggtggttccctgcaaactatgcagagaaaatcccagaaaatgaggttcccgctccagtgaaaccagtgactgattcaacatctgcccctgcccccaaactggccttgcgtgagacccccgcccctttggcagtaacctcttcagagccctccacgacccctaataactgggccgacttcagctccacgtacgtgttggtgggctctttctgatgatttttgaaatcccaatttgat

SEQ ID NO: 30454 - DNA, 106 bp, Homo sapiens
  MAP TO AF165424.1; EXPRESSED IN ADULT LIVER, SIGNAL =  12; EST_HUMAN HIT: AA557846.1, EVALUE 5.30e+00; NT HIT: AE001072.1, EVALUE 9.00e-01; SWISSPROT HIT: O51067, EVALUE 9.10e+00
ctcccaggacaaacctgatatactggagaaaaaaaaattgaagaactatccgatacaacttgaggagtatgagaaggtagtggttaagttcatagatctcagagcc
